United States Patent Application Publication US 2007/0042381 A1 - sequence listing, part 93

SEQ ID NO: 4168338 - RNA, 94 nt, Human
ugguucacuggguccugaauuggccugucaguuuucccuugugauugauugauaggggcugacuggaaagugccaugacagauuagugaugcca

SEQ ID NO: 4168339 - RNA, 84 nt, Human
ugguucagggccuucagggccuggagucagggaaagcaaggcuggacccuggcugugccucuuuccaggccagggccuugucca

SEQ ID NO: 4168340 - RNA, 88 nt, Human
ugguuccaaagucagcugccagucccaauuccacauggugccuauacacuuggccccuaguguugggcuggguugacuucuccuucca

SEQ ID NO: 4168341 - RNA, 86 nt, Human
ugguuccugaagagaugguagacuauggaacguaggcguuaugauuucugaccuauguaacaugguccacuaacucucaguaucca

SEQ ID NO: 4168342 - RNA, 91 nt, Human
ugguugaaugaaaaauggcuuuucacagaggguucugagcaaaugaauagaacagaauuucccagaauuggccguuuaaaaaauacgauua

SEQ ID NO: 4168343 - RNA, 101 nt, Human
ugguugauguggucggcaccuggcuggcuaguugaaaaaggaacaccugcaucuuuuaucaaacaaauuauccagccuaccugcagcugcuggcccaacca

SEQ ID NO: 4168344 - RNA, 79 nt, Human
ugguugcaggagaaugcuggaagguaaggagccaaggaaucccugggagucagucguucucagaggucccugcaugcca

SEQ ID NO: 4168345 - RNA, 57 nt, Human
ugguugccucucagagauuccgaggcugggccaggcggagccucuggcagggggcca

SEQ ID NO: 4168346 - RNA, 59 nt, Human
ugguuggagccaaaauucaaagccaggcagucuggcuccagagcucaugcucucaacca

SEQ ID NO: 4168347 - RNA, 78 nt, Human
ugguugguagaugucagagaugaaauucaaauacagauuuguaugaccacaaucugacgucuauuacaugauagacua

SEQ ID NO: 4168348 - RNA, 81 nt, Human
ugguuguauauuacuaccaucugcuacuauuaguaacaguaccaguacuagcaguagugauaguaguaguaagaauaauca

SEQ ID NO: 4168349 - RNA, 77 nt, Human
ugguugucagugguuaauguugugaggcagaucuguguuagggcacugagagaugugucacagcaggacgucagcca

SEQ ID NO: 4168350 - RNA, 69 nt, Human
ugguuguuguugccacugaaccagucuugcacaagccuguguaccuuuuucugugcaugcucucaacca

SEQ ID NO: 4168351 - RNA, 59 nt, Human
ugguuguuucuguuucugaccaauuagacauuuagaggcaacagcagcugaagcagcca

SEQ ID NO: 4168352 - RNA, 86 nt, Human
ugguuuaguaaggugaacugguaaugacagaaguuguuuuauacuguaguuuuuugugauugcuucaguuuuuucuugucagacca

SEQ ID NO: 4168353 - RNA, 57 nt, Human
ugguuuaugcuguugcagcucucugggaucaggccugugagcugaacugcaugacca

SEQ ID NO: 4168354 - RNA, 63 nt, Human
ugguuuccaaacagcauuccaagacagcuucaucacaugucuggcauuuuggcugggaaacua

SEQ ID NO: 4168355 - RNA, 69 nt, Human
ugguuuccuaagauagauacuucaguuuaucaguguuccucucacugguguugccugaacucuaaacca

SEQ ID NO: 4168356 - RNA, 76 nt, Human
ugguuugacuuugggcucuaacucaaacuugccuucaaauucugguuuugucaugagugggcacauugugaaauca

SEQ ID NO: 4168357 - RNA, 104 nt, Human
ugguuugaugagucuuguggguuguuuacagucugucuugggcuuuaaggaagucaccuguuugcuggagugaagucuggcagcuugagggcuuguuauggcca

SEQ ID NO: 4168358 - RNA, 80 nt, Human
ugguuugcaagcccagcuauuacuuuuuuuggacuuuaccacagucaguuagggccacaguaaugcugaguaacaaacca

SEQ ID NO: 4168359 - RNA, 55 nt, Human
ugguuugccaauuaucuauaaauacauugguagguauuuaaggauaagcagacua

SEQ ID NO: 4168360 - RNA, 67 nt, Human
ugguuuggaggugcaaaucaagaguuccauauuuagacaugcuacauuugagaugccuuuuagguca

SEQ ID NO: 4168361 - RNA, 59 nt, Human
ugguuuguauauguuugugagaucuagcuucugaggaaucucauacauaguaggaacca

SEQ ID NO: 4168362 - RNA, 59 nt, Human
ugguuuuaagacauggcuuugcuguauuacuguacugcuuugugauaguguuaagacca

SEQ ID NO: 4168363 - RNA, 58 nt, Human
ugguuuucacaguaaauguguaggguguauguuacuuacaguaggaguuggaaaacca

SEQ ID NO: 4168364 - RNA, 64 nt, Human
ugguuuuccaguucagaugcaacagggauacauuuguucucuguuguaugagaaacugacacca

SEQ ID NO: 4168365 - RNA, 60 nt, Human
ugguuuuguuccagacuugagacccgggagaacggaugguuuaguucaaguacagaacca

SEQ ID NO: 4168366 - RNA, 102 nt, Human
uguaaaagacacuuacauuuggguauucugugauugacauguggcuuuauaaugguuuucugguucuucagucacaucacagaaauucccaugucuucaaca

SEQ ID NO: 4168367 - RNA, 73 nt, Human
uguaaaauccgagaaaccagaaguugccuuugcuacucacucaguggcugcuugcuguuucuuggauuagaua

SEQ ID NO: 4168368 - RNA, 93 nt, Human
uguaaacaacauugaagcauggagaugaggcaaggaauaguacucacugaaguugaaaugacugcccacuucaaaaucuucauuguguuuaca

SEQ ID NO: 4168369 - RNA, 69 nt, Human
uguaaacagugccagugcacagaaccuuuauauauuuuuugaagccaguacugugcucugcauauaaca

SEQ ID NO: 4168370 - RNA, 83 nt, Human
uguaaacauuagaagagaagagguauugaggaaauuuucuucuauuuuuuccacauuauguuucuccuuucuuguucuuugca

SEQ ID NO: 4168371 - RNA, 100 nt, Human
uguaaacauuuuccaaaacaagugguuugcauuuauuagucuucugaaggaguauuuuagaagucaugaaacuauuuguuccuugaaguaaauuuuuaua

SEQ ID NO: 4168372 - RNA, 62 nt, Human
uguaaagaaauagcauuuguaggaaaaucaccuuggguguguauagauccugguucuuugca

SEQ ID NO: 4168373 - RNA, 95 nt, Human
uguaaagauagcuacuguguuaagaaauuaaucaaggcugcaagacagugaugauucaacuuucauaacaaaagguaaagcugaauaucuuucca

SEQ ID NO: 4168374 - RNA, 58 nt, Human
uguaaagguaggugcaaaaugaugccuuuuauaagagaaauugccacuuaccuauaca

SEQ ID NO: 4168375 - RNA, 58 nt, Human
uguaaaguauacguuucccagcaccugccaccagcagguaaggaacaaauacuaugca

SEQ ID NO: 4168376 - RNA, 71 nt, Human
uguaaaucagggagaaauauagaguuagaguuaaauucaacaaaauauauuuuuccagugauccauuuaca

SEQ ID NO: 4168377 - RNA, 70 nt, Human
uguaaauucagugagugaaugaaugaauguuggcauuuuugcacauucaguuagaucauccuaauuuaua

SEQ ID NO: 4168378 - RNA, 64 nt, Human
uguaaauuguccucccccugguauuuaugaccuacaguuucccaauaccagaguacaguuuaug

SEQ ID NO: 4168379 - RNA, 124 nt, Human
uguaacaguaguuuuacuccaacauauaguguuaaaaagauguccaaguaaaguuaaauauacaauuauuuaaaauugggacuuuuuuccguagcguaguggguuuuguggaacacauguacca

SEQ ID NO: 4168380 - RNA, 80 nt, Human
uguaagaaagaacagucuagugcauuaaugugaauauucuaagauagauguuuaucuuaauggacucagagguacuuaca

SEQ ID NO: 4168381 - RNA, 73 nt, Human
uguaagaaauagagacaauguuuggucuacacuugccauauaguagguguuuaggacauguuaucuucuuaua

SEQ ID NO: 4168382 - RNA, 97 nt, Human
uguaagaacuaccagagaaccaucugcuugaggaauccuuuaaaaauugccaugggucguuuagcaguucaugguuccaucuugcucuguucuugca

SEQ ID NO: 4168383 - RNA, 69 nt, Human
uguaagaggacauucuggacaaggcaagcuccuggcauuugacagaugcuaaugcugcuucuuuuugca

SEQ ID NO: 4168384 - RNA, 67 nt, Human
uguaaggaggauauuugagcucagugggugaugaaugauuugagcuggaaaauccaagaccuuggca

SEQ ID NO: 4168385 - RNA, 63 nt, Human
uguaaggcuguggauggcaaaugaauuccaaaaugaaaucagccagccagcuacaggcuuaca

SEQ ID NO: 4168386 - RNA, 79 nt, Human
uguaauaacguaccuuuucuggaagcaucuugaggcguucagcuaaaaggaaggucucagaaauacuauguugucagca

SEQ ID NO: 4168387 - RNA, 106 nt, Human
uguaauaauuuguaaaaaugcguguauuuuuaggaaugcgcuauuuccaguaagggaaguauugacauuuuuaaggaacugugcugcauuaaaauccacaguugca

SEQ ID NO: 4168388 - RNA, 68 nt, Human
uguaauaguuucauauaccaagcacuugaguugagacuucaauuuggggccauuaugaagcugguaua

SEQ ID NO: 4168389 - RNA, 130 nt, Human
uguaaucccagcacuuugggaggcugaggcgggcagaucaccugaggucaggaguucgagaccagccuggccaacauggugaaaugcugucucuacuaaaaacacaaaaaauuagcuggacaugguggcg

SEQ ID NO: 4168390 - RNA, 66 nt, Human
uguaaucccagcuacucgggagagugaggcaggagaaucgcuggaacccgggaggcggagguugca

SEQ ID NO: 4168391 - RNA, 66 nt, Human
uguaaucccagcuacucgggaggcugaggcagaagaaucgcuagaaccugggaggcggagguugca

SEQ ID NO: 4168392 - RNA, 111 nt, Human
uguaaugauauugauuuacagaccagagaaaccaagcccauuacuuuacuuuagacauaacuccgaaacaaggaaauguuugguugcaugguuauagcucuaauuauuaca

SEQ ID NO: 4168393 - RNA, 78 nt, Human
uguaaugcacuguguuuuucugaguugguccauuugagauugaagaguggauauuuacauuaagcacauugcauucca

SEQ ID NO: 4168394 - RNA, 70 nt, Human
uguaauuaauguaaggaucuccuggauuaucuggguaggacccaaauccaguggguccucaugagagaca

SEQ ID NO: 4168395 - RNA, 63 nt, Human
uguaauuggaauuuagggaauauucaugauuauuauggagacuucccugauuucccuuugaca

SEQ ID NO: 4168396 - RNA, 73 nt, Human
uguacaaaauuaucugguucccucgccuucuagauucugguugaauuuggccacuugggaguccagguugaca

SEQ ID NO: 4168397 - RNA, 91 nt, Human
uguacaaucucuggaaggaaagguagcagagaagucauauuugacccauucauuuauuuccuuuccuccucuagauuuucguaguugugca

SEQ ID NO: 4168398 - RNA, 80 nt, Human
uguacacauuuuauauacaugcuacauuuguguaaguguuuuauguguauaugaaaauguacauguguauaagugguaua

SEQ ID NO: 4168399 - RNA, 66 nt, Human
uguacacccauuaaacaauuagaggcuaauacaaaguaguaaucaguugcuaaaugguguagugca

SEQ ID NO: 4168400 - RNA, 83 nt, Human
uguacagauguuugccucccuugagaguuggccaauugcucuugcaaggcaggccaguuucaaggccauucagaccucgggca

SEQ ID NO: 4168401 - RNA, 55 nt, Human
uguacagucugcagcuugcuguggcccacauggagaaguaagcaaagacuuuaua

SEQ ID NO: 4168402 - RNA, 88 nt, Human
uguacaugaugugccauccugcaggaccuccauauauagcuuguauuuuguacagugugguggucucaggauagucacauuucuuaca

SEQ ID NO: 4168403 - RNA, 64 nt, Human
uguaccagaugucuaaagccaucucagcuaagcaugugaaaaacugagcuucagauaucgugca

SEQ ID NO: 4168404 - RNA, 65 nt, Human
uguacccaaagacugucuggaauacaggacuauuuggccccuaggguucagacagacuagguaua

SEQ ID NO: 4168405 - RNA, 72 nt, Human
uguacccuaacacccuucagcuuucuuagcucagaggcauuuugagguauggauaucuggagaggaaguaca

SEQ ID NO: 4168406 - RNA, 85 nt, Human
uguacccuuggcagccuucucugagaaggugacacagaugacacuguggccccuccaggaggugucaagacaaauuugggugaca

SEQ ID NO: 4168407 - RNA, 58 nt, Human
uguaccugguuucuuaaacccaaaugccuccaauucuggaguuugaagaucagguuua

SEQ ID NO: 4168408 - RNA, 129 nt, Human
uguacuccauguucagugugacacuggggcaguauagugccauucaagagguaguucuuacaugguugagagguaucuaggcagauggaccugaguuugcaccccaguucccuguggccuuggugugga

SEQ ID NO: 4168409 - RNA, 77 nt, Human
uuggauuccgcucuucaggaggucauugguaaccauggaggaggaaauuucaguggugucgugggaguggaagccag

SEQ ID NO: 4168410 - RNA, 58 nt, Human
uuggauuucaacagagcuuuccugcauauuugccaaaaggccacugaagaaaucacaa

SEQ ID NO: 4168411 - RNA, 60 nt, Human
uuggcaauuaguuauaucugcaaaugcguaauugcaggugcaacccagcugguuagccaa

SEQ ID NO: 4168412 - RNA, 57 nt, Human
uuggcaccagcacuugggauggcuuaugcucagagucaaaccuacugugcgguccaa

SEQ ID NO: 4168413 - RNA, 85 nt, Human
uuggcacuugugaagcaccaugcaucuuuuuacauuuaaaauagaauguaacugaaggaaaugcauguuugaguuuauaagccaa

SEQ ID NO: 4168414 - RNA, 62 nt, Human
uuggcagaaugggcagcuugagauauuaaaugacuauauuucaagcagucugauuuuaacag

SEQ ID NO: 4168415 - RNA, 64 nt, Human
uuggcagaugagccgcgcuccaagaaccagcuguugaacguuugugagugcaggcuggugccag

SEQ ID NO: 4168416 - RNA, 76 nt, Human
uuggcagcaaauauugucagcuguuuccuugaagugacagacucacuuauuucauauuugagaaaauuucugccaa

SEQ ID NO: 4168417 - RNA, 63 nt, Human
uuggcagcugcacagacuccaugagcacugaaaugcuuagguauuauccaugugagcugccaa

SEQ ID NO: 4168418 - RNA, 95 nt, Human
uuggcaggaucaguugcccacuggcuguuggucagaggccucuucugguuccuggccuugugacccucuccgaugggcagcucacagccuggcag

SEQ ID NO: 4168419 - RNA, 79 nt, Human
uuggcagggucaguuuaucaaugauuuuuggauguuuuaaaccacaugacacaaaugcagcauaaagugaacuuguuaa

SEQ ID NO: 4168420 - RNA, 78 nt, Human
uuggcauguguaacagugagggcagggacugugucuauuuuacauaucuuugucacucuacugucuauaccauguugg

SEQ ID NO: 4168421 - RNA, 67 nt, Human
uuggccaagugguuaaucuccaucuuccaaucccucccggagguuggaccaauaucacauggcucaa

SEQ ID NO: 4168422 - RNA, 99 nt, Human
uuggccaggcuggucucggacuccugaucucaggugaucugccugccuuggccucccaaagcgcugggauuacaggugugagccacugugccuggccaa

SEQ ID NO: 4168423 - RNA, 65 nt, Human
uucuaaauuugaagaucacucuggcugcuaugagucagcaaggccagaggggcacaaaaguagaa

SEQ ID NO: 4168424 - RNA, 84 nt, Human
uucuaacauccuuugguaucuuacuaguauuuagcauaggaaacuaacaaggaauacauggcagggagucaucugauguuggaa

SEQ ID NO: 4168425 - RNA, 72 nt, Human
uucuaaccuugagaccaagacuauaaugagagggcagcuuucugucaccccuguuucuggcuaaggcaagga

SEQ ID NO: 4168426 - RNA, 109 nt, Human
uucuaacggccgaaagagugucauaucucacgguuaugaugucuucaaaaggugauauuucuggcugugucaucauagcugugaaaagcauuuucucagcaucuaagaa

SEQ ID NO: 4168427 - RNA, 55 nt, Human
uucuaagagucauuaauggccuugacuucaaggaauuaauaaugcauuguuggaa

SEQ ID NO: 4168428 - RNA, 59 nt, Human
uucuaauacuuccuagucugggcaguauucucccagaucuaaguccaaaguacuuagaa

SEQ ID NO: 4168429 - RNA, 100 nt, Human
uucuacacaccauaccacagaacguuuggcccuuugucugugggcaauaauagagaaucugggaagauguuaaguugggugaguguuuaaguguguggag

SEQ ID NO: 4168430 - RNA, 55 nt, Human
uucuaccaacauugaaagccggaugucaccaagacaucaugcuuguguuggagaa

SEQ ID NO: 4168431 - RNA, 80 nt, Human
uucuacccucucugcccaaguuccuuagaggcauacaacaggcacucaaaggaagcuccuugauggcguaagagacagaa

SEQ ID NO: 4168432 - RNA, 62 nt, Human
uucuaccuauuucuucuauuggugaaauuagaagcaaaguuaucagugaagagugggaagga

SEQ ID NO: 4168433 - RNA, 81 nt, Human
uucuaccugugcuucucacaucacuguugucuccauugcccacgggagcaacaucuuuguguaugugagacccaaucagaa

SEQ ID NO: 4168434 - RNA, 57 nt, Human
uucuacuauaauggaguuagucauaggugagccaaguguuacucugcugaaguagaa

SEQ ID NO: 4168435 - RNA, 69 nt, Human
uucuacuauggcucaauucuagugguuuuuagacucauacuugaccugauagaaugagucaugaaugaa

SEQ ID NO: 4168436 - RNA, 88 nt, Human
uucuacucugauggccuggggauuccugagcaucaaacgaaaauuuguaucacaaugugaguguccuagcuagguuaauagacuagaa

SEQ ID NO: 4168437 - RNA, 109 nt, Human
uucuacuuauagucaaacaaaaagagcugagaaguuuuuuuuaaccauuuccccacaauauuuggcuuaagaauaccucucagcucuuuuuguuagacuauaacuagaa

SEQ ID NO: 4168438 - RNA, 68 nt, Human
uucuacuuggcaaagagaugcauaaggacucuuuucauuaugagucuguucaugucuuuuuaagugag

SEQ ID NO: 4168439 - RNA, 60 nt, Human
uucuagaacauucauacuccuuaggguagucuggccugagguuuuuggauaguuguagga

SEQ ID NO: 4168440 - RNA, 55 nt, Human
uucuagaggcugggaaguccuaggucaagggacugcaucugcuuggccucugggg

SEQ ID NO: 4168441 - RNA, 122 nt, Human
uucuagagggcugggccuaugggucuuggcuucaaucucaggccugcgggaagucguggggagcuggaugauugaggcaauaguacugauggucucugccaaagccacagccaauucuagaa

SEQ ID NO: 4168442 - RNA, 60 nt, Human
uucuaggcaggugggagugauuccuuuaacuuaaugaagaagacuuccauuugcuaagag

SEQ ID NO: 4168443 - RNA, 62 nt, Human
uucuaguaggggucagaugcauaugaaauagaauagaaaaaugcuuucagacucuuacagaa

SEQ ID NO: 4168444 - RNA, 67 nt, Human
uucuaguugcucuccuuuaaaccuggagacugagaagucaaggugguauuuuggaaagcagcuggag

SEQ ID NO: 4168445 - RNA, 66 nt, Human
uucuauaagguuuucuuuuguucccuuagaauucauuggagggaugcaguaaaaacuguaguagaa

SEQ ID NO: 4168446 - RNA, 99 nt, Human
uucuaucacguuuugcaaaucuuacauauaaagcugacucaugaaacuuuaauauugaaguuugaguuaggcauuauagcuagguuggguaugaaagag

SEQ ID NO: 4168447 - RNA, 61 nt, Human
uucuaucucaagauuauuggguuucuauaaggaaauguauuucagugauuuugaagaggaa

SEQ ID NO: 4168448 - RNA, 76 nt, Human
uucuaugaaugacacagauaauagaacgaaaaccauguucuuuucuuggaauauugcuuugugucauaagcaagaa

SEQ ID NO: 4168449 - RNA, 56 nt, Human
uucuaugcuucugaucuugguugauuguacugaggcagcuaggagaaagcauggag

SEQ ID NO: 4168450 - RNA, 61 nt, Human
uucuauuagaaucuuuagagucucacuggaaaugacagugauaauaagaguucuaacagaa

SEQ ID NO: 4168451 - RNA, 74 nt, Human
uucuauuagauuauucucaaggacugauaaauacuuuggauucuagguauccuuggugcaaaugauuuaaugaa

SEQ ID NO: 4168452 - RNA, 86 nt, Human
uucuauuuauucucauuagucuguauucccuauuucuauuauccguucgaaccgagagggaauucaguacagugugauauauagaa

SEQ ID NO: 4168453 - RNA, 62 nt, Human
uucuauuuuccaucugaccuggauggugcaaauuccagucgcuacuaacagggaaaauagaa

SEQ ID NO: 4168454 - RNA, 65 nt, Human
uucuauuuuucuuuguuaguucaguugcugccuaaaagcaagacuaggcucucauagagguagaa

SEQ ID NO: 4168455 - RNA, 92 nt, Human
uucuauuuuuggaaguuaucaaguauuuguuugaggcauugcaaagguuucucaaguucagauauuugaaagagccaccagacuucauagaa

SEQ ID NO: 4168456 - RNA, 76 nt, Human
uucucaaacaggggugacuuugucccccaggagacauuugggaaugucuggagacuugggucaucaaaacugagaa

SEQ ID NO: 4168457 - RNA, 74 nt, Human
uucucaaauugucuucugugcauuccuagggguucauuggaggcacuucuggggcuaauacagaggucagagaa

SEQ ID NO: 4168458 - RNA, 86 nt, Human
uucucaagacuccuaaauaaagcauuuccccugugugggcgaccccugggucccauguggggucaguguuugggucucucugagag

SEQ ID NO: 4168459 - RNA, 57 nt, Human
uucucaaggacaaaaugacaugacuucaugcuucaugauuuucauugucuucgagaa

SEQ ID NO: 4168460 - RNA, 67 nt, Human
uucucaaugggagcaccaaguaggaagaaaaaugaaauuggcuucuuggacuacucacuagagagaa

SEQ ID NO: 4168461 - RNA, 86 nt, Human
uucucacaauguguagcaucauuuauucaguguaauuaaacaaacccacuuugcacuaagugauucuaagcaucuugcugugggaa

SEQ ID NO: 4168462 - RNA, 55 nt, Human
uucucacaguaccuaacauguaaucgcgaauagcacuuaaauguuugcuggagaa

SEQ ID NO: 4168463 - RNA, 72 nt, Human
uucucacuguauaccagggccugugcugaguagacgaucucuuugagaccaccacaguccuacgggugagga

SEQ ID NO: 4168464 - RNA, 71 nt, Human
uucucagacuuccagcaccagccugguccuccuuuuucaaccauuucagguugaacaugugagucucagga

SEQ ID NO: 4168465 - RNA, 62 nt, Human
uucucagagcacugcugacaaagacaacagccuccaggcauugcagacagccgcucggggaa

SEQ ID NO: 4168466 - RNA, 66 nt, Human
uucucagagugaaaaaguaauucaacuuagcaauguugcuaaacaagaaacauuuucuguugagaa

SEQ ID NO: 4168467 - RNA, 72 nt, Human
uucucagaugccacauucuguugaggcugggucacuccgaguggcuccagggauagggugagggucugggaa

SEQ ID NO: 4168468 - RNA, 55 nt, Human
uucucagccccaauuugcccucuuggcucugccaggagguacagggugcugggaa

SEQ ID NO: 4168469 - RNA, 87 nt, Human
uucucaggcaggguuuucuuaacucuucauagaacagaaacguucucucuugaagauugaagacaaagguaaacacuugccugggaa

SEQ ID NO: 4168470 - RNA, 57 nt, Human
uucucagggucuggauggccugacugagaaaguuccaggccuuaaggacucggagaa

SEQ ID NO: 4168471 - RNA, 61 nt, Human
uucucagucucuugcuucauuaguuggcccucaggcuagugcuagaagcaaagacaaagag

SEQ ID NO: 4168472 - RNA, 62 nt, Human
uucucagugcaagugacugaucaagggauauggaugcugugggagaagcuagcacaggaggg

SEQ ID NO: 4168473 - RNA, 74 nt, Human
uucucauuaugcaaauguuucuuaucuauuguucaacuuucauaugaccacuggauaucagagauguaugagaa

SEQ ID NO: 4168474 - RNA, 69 nt, Human
uucucauugcaaucuggugaaaacaguuugagaguugccucugcuggucuucaccagaugcaaaaagaa

SEQ ID NO: 4168475 - RNA, 84 nt, Human
uucucauuucaugauucuggggcaaaagcugggcuuuaagauggggccgacuucaauagccccagagcacugagcaccugagaa

SEQ ID NO: 4168476 - RNA, 98 nt, Human
uucuccaagaagaggaucagauuacuuaaaauuguuggagaauucugguuguuugugcaauaaucauagugauuuacauugcuuuucuucuuucagag

SEQ ID NO: 4168477 - RNA, 62 nt, Human
uucuccagcacauuuucuuugauucagagcuaauaaaaaucaacaacaauguguuuggggga

SEQ ID NO: 4168478 - RNA, 60 nt, Human
uucuccaggccgcgcagggggcugcagagcuuuccggcgcuggcugccuggccuggagaa

SEQ ID NO: 4168479 - RNA, 59 nt, Human
uucuccaucuguaagauaggggaaauugucauuuucacugucuuuuaaggugguuagaa

SEQ ID NO: 4168480 - RNA, 69 nt, Human
uucucccacuccgugcuucaguuuccuuaucaguaaaaauggcuuugaaacacgcccaaguggaaagga

SEQ ID NO: 4168481 - RNA, 63 nt, Human
uucucccuccgucgucguucaccucugagcagauguucagggugaaccaggcaggaaugagag

SEQ ID NO: 4168482 - RNA, 117 nt, Human
uucuccgcauucuguuuuguuaaugugcaagucgaauggcauuaauuugggguuaaggaaguuacaaaauuccugucauuugcacuuucauucuuauuaaaaucagucaacacugaa

SEQ ID NO: 4168483 - RNA, 67 nt, Human
uucuccuaguuguugaauuaguugacugugucgcagugaaagauauuagucagaguucaccagagaa

SEQ ID NO: 4168484 - RNA, 57 nt, Human
uucuccucacugcagccuuucaugagcacuccacagaaaggaacuugugagugggag

SEQ ID NO: 4168485 - RNA, 84 nt, Human
uucucuagccauuaaagugcauguuuugcacugaauuggguugucagaagcaguaugacauguucuuucauggcuaauagagaa

SEQ ID NO: 4168486 - RNA, 84 nt, Human
uucucuauaauacaaugcuaugcaauggcacaugacaugauugcagugccaugaugcagagcaaugucuugcggucucagagaa

SEQ ID NO: 4168487 - RNA, 70 nt, Human
uucucucuaccccgcuaggauuaggauuaauccuagaaacuaggauuaggccugugcuggcaagagagga

SEQ ID NO: 4168488 - RNA, 115 nt, Human
uucucucuccucaguccucacccagggcuucugaugcugccagucaaucccaagucaugcuugguguuuggggaccacggcagugcaaaaccucugagggccuggggagaaggaa

SEQ ID NO: 4168489 - RNA, 55 nt, Human
uucucucuggaccugggaugcgcuuagcaagucccuucuuggaguccagagagaa

SEQ ID NO: 4168490 - RNA, 77 nt, Human
uucucugcacaaacuggcuggcuuguucacugacugggcaaccuuccccagcuucagaagaagccgugaggcaggaa

SEQ ID NO: 4168491 - RNA, 59 nt, Human
uucucuggccugaggcgaggccccucagcaggaaggggcccuugguuggggccauagga

SEQ ID NO: 4168492 - RNA, 101 nt, Human
uucucugucauucucugagacacucugucuaucaugcaugagacuaauuguuucugcaagcgucacaugauucugcagagcuuagaaugagcugcagugaa

SEQ ID NO: 4168493 - RNA, 68 nt, Human
uucucugucauuucuuuagcaaugggaacauuaaaacaauggcuacccaaagaagaagaugaagggaa

SEQ ID NO: 4168494 - RNA, 92 nt, Human
uucucuucagacccuccucagggauuaaggucaaaggugggaggaagaaggcuuccauuggccuuuuauccuagagguucuaauggagggga

SEQ ID NO: 4168495 - RNA, 70 nt, Human
uucucuucaggacauccccucuuuaggaggacaaauuuuuucuccagggaaaggggcguccgccucagaa

SEQ ID NO: 4168496 - RNA, 64 nt, Human
uucucuucuugauuuucacuggauagcuccuuucaggccguuuauaaaagaaucaggaaaagag

SEQ ID NO: 4168497 - RNA, 59 nt, Human
uucucuugacugcuaaaauuagaaagugucaauuuugaccucuguggcuguggggagga

SEQ ID NO: 4168498 - RNA, 63 nt, Human
uucucuugagcuggucauguuucucucagaauaauguuguagugugugccuaguuuuagagaa

SEQ ID NO: 4168499 - RNA, 72 nt, Human
uucucuuuacucuguguuauuguuuagaagcuaaaggagaaauagcugucagcauaacaagguaccagggag

SEQ ID NO: 4168500 - RNA, 60 nt, Human
uucucuuuuacugaguacuacagcugugaacaaagccaaguacuuucuuccgagagagaa

SEQ ID NO: 4168501 - RNA, 62 nt, Human
uucucuuuucaccaguugcuaaguuucuuggugucagaauaauagcaugggugaggguagag

SEQ ID NO: 4168502 - RNA, 58 nt, Human
uucucuuuugguaaauugaguaaaggaaagaauguauucagguguggccagaggagaa

SEQ ID NO: 4168503 - RNA, 96 nt, Human
uucugaagaccccugcucuaaaucucauggaacuugcauuaaucagcuuggcuaccauaacaagaucccauagagcagguggcuuaaacaacagaa

SEQ ID NO: 4168504 - RNA, 73 nt, Human
uucugaaggucagcagcuugguacugugccguaucuaauuuucucagccugucaugcugcugaaccuucagga

SEQ ID NO: 4168505 - RNA, 65 nt, Human
uucugaagugcauaaaggaaaaacugaaggccccaguguuuuuuggccuuugugcauguuuggaa

SEQ ID NO: 4168506 - RNA, 69 nt, Human
uucugaauucucuggcagacaccucccugaguacaggaucucgaggcagcuaucuuuagagacacagaa

SEQ ID NO: 4168507 - RNA, 66 nt, Human
uucugagaaggcuguggacacagacacaaugggcaugcugcacuuuguuccagcagcuucucugaa

SEQ ID NO: 4168508 - RNA, 67 nt, Human
uucugagaccuuggggagcccuguuggcuucuuucucggccaaacggagucagcaucaagggaagaa

SEQ ID NO: 4168509 - RNA, 55 nt, Human
uucugagaugcguuagaaauuuuuggaaacuagaacauucuaugugcauucagaa

SEQ ID NO: 4168510 - RNA, 59 nt, Human
uucugagccacaguaaggaucuaguccagcccuaaaugaguccuugacuguauucagag

SEQ ID NO: 4168511 - RNA, 78 nt, Human
uucugauccaaaugcuuuuaugguuguuggcuccuugaaccugccguuagauaauaacaagcauauaauggauuggaa

SEQ ID NO: 4168512 - RNA, 71 nt, Human
uucugaucucagggagccagcuccaccauccuccucacguggaguugggguagagccgcgcccugggggaa

SEQ ID NO: 4168513 - RNA, 117 nt, Human
uucugcaaaacaagaauuauuuuucugacuguaaaguuacuuuugaaaggacccuguuucccucuagaauuccuaucauauggcuuucauuuugagaagauggcucuuuauguagaa

SEQ ID NO: 4168514 - RNA, 78 nt, Human
uucugcaaacaauauggcuuaugcugaacaccugcucuuuuucugggagucuggaauuuuuguauaugcuaagcagaa

SEQ ID NO: 4168515 - RNA, 92 nt, Human
uucugcaaaccccaucucuuucgucucuggguucccuguuaaauuuccccacaaggggacacuagauggagaagggaaggugggaggcagga

SEQ ID NO: 4168516 - RNA, 67 nt, Human
uucugcaaauagugaaacagaugggggaugaauugagcugucccucacuuccuccuaauuccuagaa

SEQ ID NO: 4168517 - RNA, 99 nt, Human
uucugcacaugaguaauugggggcagaggcugacccugcuguuguauaaaaguaauugacggcaguaaauucagcccuuuguguugcucagguauagaa

SEQ ID NO: 4168518 - RNA, 73 nt, Human
uucugcacuaaauaucaaauaucugaaaugaaaggauuuaugggagguuuuauguuugcuauuuaggcaugga

SEQ ID NO: 4168519 - RNA, 76 nt, Human
uucugccugcaugcccgcccccuucuaguacuggaaguaaacaucuuacuugauagggggaugggguuagggagaa

SEQ ID NO: 4168520 - RNA, 56 nt, Human
uucugccuggcaggaggacuguggcccgguuguccaaucgauaaugcccagcagag

SEQ ID NO: 4168521 - RNA, 69 nt, Human
uucugccuugcucuccuacagggccuugcucuucucuggcaguuccuacaguggaaagcgcaggcugaa

SEQ ID NO: 4168522 - RNA, 60 nt, Human
uucugcucaucagccgagcagggcgauuuaucaagaguccugacggcugauuggccugga

SEQ ID NO: 4168523 - RNA, 55 nt, Human
uucugcugacagcccugcuucagguuggcaaagccucuauguggcugucagagaa

SEQ ID NO: 4168524 - RNA, 65 nt, Human
uucugcugcaguuggauaaagauacuucagcucauaccacugaaguugguagccaggugccagaa

SEQ ID NO: 4168525 - RNA, 78 nt, Human
uucugcuuauucuguagccuuuauuuuuaacauguuaaaagaaugauuaggcuggcagaaccugauaaaugaacagaa

SEQ ID NO: 4168526 - RNA, 60 nt, Human
uucugcuucugcaggagcuccugaugccgggcgagcaucuccacucgggcaggggcagga

SEQ ID NO: 4168527 - RNA, 56 nt, Human
uucuggaaaugaaugcuaggaacagaagguuuuccguggccagccauuuccuggaa

SEQ ID NO: 4168528 - RNA, 108 nt, Human
uucuggagcuagguaaauugggaucauuccuggcuugucacaucuacgugggacauuuagacuauccacgggcuggauaccuuaggaaaguuccuucuggcucuggga

SEQ ID NO: 4168529 - RNA, 84 nt, Human
uucuggaguuuguggaaauacagauauguaugcacuuuuugucccucccaaauugugcuguuguguuguacccaguagccggaa

SEQ ID NO: 4168530 - RNA, 56 nt, Human
uucuggaucagcaucaugagauaauuugcuuaggguauccaggauguugauuugaa

SEQ ID NO: 4168531 - RNA, 97 nt, Human
uucuggccccaacaauauauaagcugaugagccacagugauauauaaaaccugucaaccaaguauuugugaaucagcuguauagauuguuggcagga

SEQ ID NO: 4168532 - RNA, 74 nt, Human
uucuggcccuuugcauuauccuugauugagccugugagcuucaaggacaggagauaauauaaagauaaacagga

SEQ ID NO: 4168533 - RNA, 91 nt, Human
uucuggcuacucacagugugucuuggaucaguagcaucagcgucucccuggagcugucuagaaaugcugagucucaggccccacuccagaa

SEQ ID NO: 4168534 - RNA, 60 nt, Human
uucugggagagaaagggccuugaauguaggaucaagggacauaggcuuuuucuugcagga

SEQ ID NO: 4168535 - RNA, 58 nt, Human
uucugggauguacaguuuugccuuauccuuucaguuuggcagcugugcauucuuagga

SEQ ID NO: 4168536 - RNA, 108 nt, Human
uucugggccccaaggcagagcauuucaugcagagcuggggacuggauuggcucccucugagcuacaccagcuugccugggcucucaagcagcucugccuggcccugaa

SEQ ID NO: 4168537 - RNA, 102 nt, Human
uucugggguaaugaguuccauaaguuuaucuuugcuggguacuguaaauuccuguuuaccaagggacccacagaaauaaacagaauacucggaugaccagaa

SEQ ID NO: 4168538 - RNA, 59 nt, Human
uucuggguggccuuguucuaaauuaggcagaaaggauaaguugaagaaggaaucuagaa

SEQ ID NO: 4168539 - RNA, 86 nt, Human
uucuggguuauucuuagggaaaguuagaaugauaucaacgauauuuucugucuuugaauucaaacuguucaaaagaauguucagaa

SEQ ID NO: 4168540 - RNA, 56 nt, Human
uucuguaacacauuuuuguaccuuaaagggcagaggaccauuaugugguuauagaa

SEQ ID NO: 4168541 - RNA, 63 nt, Human
uucuguagacugcugaaugagacuugagugguuuauaucauugaaaacucagcaucuacagga

SEQ ID NO: 4168542 - RNA, 58 nt, Human
uucuguaggucacaaaguucuuaggaaaaauucuaaagaaacauugagaccuggggga

SEQ ID NO: 4168543 - RNA, 77 nt, Human
uucuguauccucaacauucauauauagccacauccaguagaaauaaguguggcuagugaugaauauuguagauugaa

SEQ ID NO: 4168544 - RNA, 71 nt, Human
uucuguaugcucuggguccagaaaagcuuguccucuucagagcagucacugugucucagagcaggacagaa

SEQ ID NO: 4168545 - RNA, 110 nt, Human
uucuguauuaauaaaggcauagaggcauaaaaguguuuaacauguucaagaaacauaauaugguuuguguuagauguguuggcauaugugcuuguuguguacuugcaggg

SEQ ID NO: 4168546 - RNA, 87 nt, Human
uucugucaaagcucuggaagcccugguaguuacuguucuuaauugguaugucagucucaacaccaaugcccuuccuggcugauggag

SEQ ID NO: 4168547 - RNA, 69 nt, Human
uucugucagauacuguggcuuaugggcuagacauagucugugcccuuggauaauacaguaccugaagag

SEQ ID NO: 4168548 - RNA, 57 nt, Human
uucugucaucagauuguuccaggagcagugaugcucuuaauuaagcugagaucugag

SEQ ID NO: 4168549 - RNA, 66 nt, Human
uucugucauguuuccauuacaugucuuuacauaguuuuggauuacauguaggaaacauagauggaa

SEQ ID NO: 4168550 - RNA, 82 nt, Human
uucugucccacuguuucccugaggcucucuggcucacacauuccaaagagaguugaagaaccucuggauacaguuuaaagag

SEQ ID NO: 4168551 - RNA, 87 nt, Human
uucuguccuuaagcuguccaugucuggccucagucuucuuaucuguaaaaugggacugggccacauagaccugcuguacuggcagag

SEQ ID NO: 4168552 - RNA, 55 nt, Human
uucugucuucucuaacuuccccuuuggggcaggagucacacagagaagauaagaa

SEQ ID NO: 4168553 - RNA, 66 nt, Human
uucugugaaucauggauaaauagcuuaacuuugguugcuauuguuucccaugauuuaacuuuagaa

SEQ ID NO: 4168554 - RNA, 58 nt, Human
uucugugacccaguuccuggcacccagcaggcgcucgguggacggauggguggcggaa

SEQ ID NO: 4168555 - RNA, 68 nt, Human
uguggcucuggagaccugcauuuauauuuauuccuuuagaugccaguccagcaggucacuaggcugca

SEQ ID NO: 4168556 - RNA, 55 nt, Human
uguggcugauugguaccaucuucagagaccccaucugagugcuccauucugccca

SEQ ID NO: 4168557 - RNA, 55 nt, Human
uguggcugcagacacuggagccugggagauaagucagaccaagucuggagccaca

SEQ ID NO: 4168558 - RNA, 56 nt, Human
uguggcugccacccugaagccgugaggggacccagccuucagaagaagcagcuaca

SEQ ID NO: 4168559 - RNA, 65 nt, Human
uguggcugggcuaauaggcaaagccagggacuauuucaaacuggaguuucugcagcccagcagca

SEQ ID NO: 4168560 - RNA, 57 nt, Human
uguggcuugaaaggcacgcucaugaggucauuuccuuugaguggccacugggucgca

SEQ ID NO: 4168561 - RNA, 123 nt, Human
uuggcuacacauuggaaucauuugagguagguugaaagauagauucugauuuaauugucuaggaugcauccugagcaucaggauuuuuuuaaaucuuuccguaugaagcuuacaaauagucag

SEQ ID NO: 4168562 - RNA, 56 nt, Human
uuggcuagcaggaaaacgccucauagccuuggaugugagugccaccugcuggccaa

SEQ ID NO: 4168563 - RNA, 72 nt, Human
uuggcuauuaugaauaaugcugcuauaaauguuuguguacaggccauucauauuuuagcauuaauuagucaa

SEQ ID NO: 4168564 - RNA, 81 nt, Human
uuggcucaugauacccaaguaccuagaaauauuuuugaagcuaugugucuguaugugugucuggguauguguuaggguuaa

SEQ ID NO: 4168565 - RNA, 61 nt, Human
uuggcucaugcuguuuugugcagugcacaaauugcacaacuguauacagcaacugagccag

SEQ ID NO: 4168566 - RNA, 93 nt, Human
uuggcugagucaaugccgaauaguauauauggugguugaugggguguugacauucuuucuaacagcaaauguuuaucugguguugcuggcuga

SEQ ID NO: 4168567 - RNA, 87 nt, Human
uuggcugugcuucaugggguggaguccgggcagcgcucugagaagugcgugcagccuagggccuuucucaccgagagcucagaccga

SEQ ID NO: 4168568 - RNA, 121 nt, Human
uuggcuucacuucaggacuggcagcuuuuccaggaacaaacucaccuuauucucugaacuggauaaucuacauaaaggcugaggugguuuguaucacuggguguguuaguuuuaaggccaa

SEQ ID NO: 4168569 - RNA, 60 nt, Human
uuggcuucucuuaacccuaaagucuacaguacuuagauuggggauuaaauuggaagugaa

SEQ ID NO: 4168570 - RNA, 63 nt, Human
uuggcuucuuuucuagacagaaguuccccaguggaaaaugugucuaugagaaguucaggcuag

SEQ ID NO: 4168571 - RNA, 97 nt, Human
uuggcuuuggaguuguaaagaccugaauuugaauacugauucugcuacugaauaugguagaaucuugggcaaauucaucuaucucuccaucagucaa

SEQ ID NO: 4168572 - RNA, 129 nt, Human
uuggcuuuuagaauuugauuauauuuaggauuaggguacauuuuguugucaaauguuucuaaggccacaacagggacaauggcuugcaaauggguccauauucuuacauauucucucuucccgaaccaa

SEQ ID NO: 4168573 - RNA, 94 nt, Human
uugggaacgcagcagccaccagaccaccaagagcaacuguagguugggcuugguggugcugguuuaguguuguggcugaugagguguaacccag

SEQ ID NO: 4168574 - RNA, 73 nt, Human
uugggaacucuccaggguauuaaugauuuauuagucuuauuaauauagcucacuauaccauggagguuucuaa

SEQ ID NO: 4168575 - RNA, 79 nt, Human
uugggaacugcuguucuggagacacugaugaagcugguggcaauagacaguucaugaggucuaagccagaauuugccaa

SEQ ID NO: 4168576 - RNA, 130 nt, Human
uugggaaugagggccuauucccaggccacacacagaaccgcucgccacuugaacccuaacuucuaaucuuccaguggcucaaguggugggcaguucuguguguggccugggaauaggcccucauccccaa

SEQ ID NO: 4168577 - RNA, 80 nt, Human
uugggaauuccuuggguauuuuucacaguucacugcuuuguagcaugacacagauuagagacauaccaaagaacucucag

SEQ ID NO: 4168578 - RNA, 76 nt, Human
uugggacuuugggggucacugguccgcugcccccucugcuuuagagguggggaaaccagcgaucccagaggcccgg

SEQ ID NO: 4168579 - RNA, 65 nt, Human
uugggagcaccuugagggcagaaaccaggucugacucaucuuuauuccccucaaggaguuccugg

SEQ ID NO: 4168580 - RNA, 98 nt, Human
uugggaggauugccugagccugggaggcagagguuguagugagccgagauugugccacugcacuucagccugggugacagagcaaggcccgcucucaa

SEQ ID NO: 4168581 - RNA, 58 nt, Human
uugggagguaauggagccaagugaaugacacuuuuguagcuauucaucugcuuuccaa

SEQ ID NO: 4168582 - RNA, 60 nt, Human
uugggaggucugggugggaggauugcuugaagccagaaguucucaaaaccagcuugacaa

SEQ ID NO: 4168583 - RNA, 112 nt, Human
uugggagguuaaaaaaaucuccgugccuuggucccaacccccauccccgagacugugauguaauuggucugggguggggccuaggcauggggauauuuacaagcucucccag

SEQ ID NO: 4168584 - RNA, 85 nt, Human
uugggaguggugaggaagggcagcugguuaaguuugcauuguaaucaguguggcugucccgcugacuuccagcucucccuccuaa

SEQ ID NO: 4168585 - RNA, 60 nt, Human
uugggauaagucauuuggagccacuggaggguuuugagugcgaaaaaugacuugaucuga

SEQ ID NO: 4168586 - RNA, 74 nt, Human
uugggcacaugacacaggccuggccaaucagaggagucucauaccucugguugaagggaugugcaugugaucaa

SEQ ID NO: 4168587 - RNA, 68 nt, Human
uugggcuucucugaucaauauuucacagaacucuacaauaaaauaugugagucacagaagaagcugaa

SEQ ID NO: 4168588 - RNA, 100 nt, Human
uuggggagggauacuuaaagacuccaggaugcagagguuuuuaauacauuuguaguauuucacagacugcaaagugccuuugcaucugugacuucuccaa

SEQ ID NO: 4168589 - RNA, 76 nt, Human
uuggggauacccuuaaacagaaugcguaagaaguggcuauaaucaggugcuuccaauucaaaucugugguccucaa

SEQ ID NO: 4168590 - RNA, 93 nt, Human
uuggggccacuguguuguacaaugccagggaacaccauuuacaucaucuuugagaaugggucccucuggaguaguacaguugcacugcuugga

SEQ ID NO: 4168591 - RNA, 62 nt, Human
uuggggcuaacuuucugaggguaguuguuuuaggacgauuggcagcagggaguuggccgcaa

SEQ ID NO: 4168592 - RNA, 73 nt, Human
uuggggcugacauagugugauuugaggagucuaaggaaggucaguucccaaagucaagcugugucuuucccag

SEQ ID NO: 4168593 - RNA, 77 nt, Human
uuggggcugcuggaagcaugcgaugaaggauguguaugaacgugcuuuauaaacuaugaugcauccagcaggucuaa

SEQ ID NO: 4168594 - RNA, 72 nt, Human
uugggguauuuggaugcacuaaauaaaauaugauauaucgcagauuuuggcaaugcauauaaguuaccuuaa

SEQ ID NO: 4168595 - RNA, 68 nt, Human
uugggguuccuggcuguaagcguguuuccuaggaaaccuccugggauugagugcagcaggcucucuga

SEQ ID NO: 4168596 - RNA, 92 nt, Human
uugggucacugcuuuggaugacuggugcagguucaaccuagcaaaacaauuaggaaaccaguuuagucaugcuguaagcgguaucacaccaa

SEQ ID NO: 4168597 - RNA, 74 nt, Human
uugggugugaaggagcccucuauagccaaaaucucaaaagggguuucauguuaguugguucuuggaauauucaa

SEQ ID NO: 4168598 - RNA, 72 nt, Human
uuggguuuccaagagaguuguaguucaagcaagcaggcaggcaguagaauuacauaguuucuagguucuuaa

SEQ ID NO: 4168599 - RNA, 88 nt, Human
uugguaucuuagcuguuaaguuguuuggaaagucagauaaaugucucuuacccagagcuuuuuaaaauucuuagcagcaaagucccga

SEQ ID NO: 4168600 - RNA, 79 nt, Human
uuggucagacaaaggagaauguuccaugaagcccuuguucccgggacccaccuugagcaaucuucaauuugucagccaa

SEQ ID NO: 4168601 - RNA, 108 nt, Human
uuggucagggguuuauccagacacagcagaucuggcuacagguuaaagguacaaggcaaucuagagugcuaggucuguguaaaagugacugaugaaaauucugaccaa

SEQ ID NO: 4168602 - RNA, 61 nt, Human
uuggucaguccaaugauuguaggacauuaccuaauaauuucuuuuaucuuggcugauacaa

SEQ ID NO: 4168603 - RNA, 61 nt, Human
uugguccugcccccuccagguccuugaaggcuccagcuggaagcugcuggggcagggccga

SEQ ID NO: 4168604 - RNA, 73 nt, Human
uuggucuaguaaauguuugcugaugauucugauauuuaauucuuucagaauuuauuuuguuuccuaugaccaa

SEQ ID NO: 4168605 - RNA, 68 nt, Human
uuggucucugcauguagcuaguaauaaaaugcguaaacuacagggcuuuggggugugcagagaugcaa

SEQ ID NO: 4168606 - RNA, 72 nt, Human
uuggucuugaauauucuuggaaaugauugaaugcugcagcuuucaauacaaagaaaggaauuuugauaccag

SEQ ID NO: 4168607 - RNA, 56 nt, Human
uuggugaaaguaaagcaacugguaguacuauuucuacuaaccuuaaccaucaccag

SEQ ID NO: 4168608 - RNA, 92 nt, Human
uuggugaaugucuugugagucuguaugucuuccaugcacaggcauuuuaaccugugcaugaaagacauacagauucagggcuauguuuucaa

SEQ ID NO: 4168609 - RNA, 64 nt, Human
uuggugacuccccaccaugaugucaggagcagguucuagcccaucagugagggggaaucacuaa

SEQ ID NO: 4168610 - RNA, 59 nt, Human
uuggugaggacaugugcaacuucuuuggacaaugauugucccaugugaugucucauuaa

SEQ ID NO: 4168611 - RNA, 74 nt, Human
uuggugcaaaaguacuugcggauuugccaucaccuuuaccuuuaauggcaaaacugcaguuacuuuugcaccaa

SEQ ID NO: 4168612 - RNA, 68 nt, Human
uuggugcacuucccuuuuggcauaaaugaacuucagaaguuccaugacaccgagggaagucucuccaa

SEQ ID NO: 4168613 - RNA, 70 nt, Human
uugguggggaagauuguaggagguuaaggaucaaggaaccugagauaucaccuucugaauuaccuaccaa

SEQ ID NO: 4168614 - RNA, 85 nt, Human
uuggugucaugagucaggugucuaucuaaccuggucaaucagcuauggcugugggccaggcuggaaagaacagacauggcagcag

SEQ ID NO: 4168615 - RNA, 66 nt, Human
uugguguugaaguugggccacuguggggaaagaaaugagugguccagaagauauucaaccagccaa

SEQ ID NO: 4168616 - RNA, 78 nt, Human
uugguuaccaugccuaaguaaugaagcugugaauuccuugacaagaaucguugccuuggagugagcagugggugccaa

SEQ ID NO: 4168617 - RNA, 59 nt, Human
uugguuaggaauaagaccauccuaauaauuagccauuagaaaauggucucacugagcaa

SEQ ID NO: 4168618 - RNA, 76 nt, Human
uugcuucuuucauuuauucaacacguguuuaucgauggucucauaugggccagcacuguucuaaggaaacaggcaa

SEQ ID NO: 4168619 - RNA, 76 nt, Human
uugcuugaacccagaaggcggagauugcagugagccaagauugcgccauugcacuccagccugggcacuagagcaa

SEQ ID NO: 4168620 - RNA, 76 nt, Human
uugcuugaacccaggagauggagguuguggugagccaagaucacgcuacugcacuccagccugggugaagaagcaa

SEQ ID NO: 4168621 - RNA, 76 nt, Human
uugcuugaacccaggaggcagaaguugcagugagccgagauuaugccacugcacuccagccugggugacaaagcaa

SEQ ID NO: 4168622 - RNA, 76 nt, Human
uugcuugaacucuggagguggagguugcagugagccaagauugugccacugcacuccaaccugggugacagagcaa

SEQ ID NO: 4168623 - RNA, 76 nt, Human
uugcuugaauucgggaggcggagcuugcagugagcugagaucgcgccacuguacuccagccuuggcgacagagcga

SEQ ID NO: 4168624 - RNA, 77 nt, Human
uugcuugacaacgucaggcuacacucuuuucauggaucucaucuccaagguguucuuuagccugauguggucagugg

SEQ ID NO: 4168625 - RNA, 76 nt, Human
uugcuugagcccaggagguugaggcugcagugagccaugaucaugccacugcacuccagcccgggcaacagagcaa

SEQ ID NO: 4168626 - RNA, 72 nt, Human
uugcuugagcccaggggacaauguggugagcugagaucacgccacugcacuucagccugggugacagagcga

SEQ ID NO: 4168627 - RNA, 69 nt, Human
uugcuugaggcugaggaggucgagguugcagugagccaagauugcaccacugcauuccagccugagcaa

SEQ ID NO: 4168628 - RNA, 88 nt, Human
uugcuugucacaacgcaagaguuucuuacuggcaucuauuggguagagaccauggaugcugcuaaaauucuaacggcucacaggacaa

SEQ ID NO: 4168629 - RNA, 129 nt, Human
uugcuuuagguacuuugaggauuuuucuggugcauacauguuuaaguuuguuauaugcacauauauauuauauuuauauugagauuugagcauuguguccuuaugaaaugucuuuuuuaucucugguaa

SEQ ID NO: 4168630 - RNA, 79 nt, Human
uugcuuucuuucaugaacagacaaggaacuucugauuuucugcccauagaccguucgcuuggcuuucuuggaaaagcaa

SEQ ID NO: 4168631 - RNA, 60 nt, Human
uugcuuugaugcuggagaacuaaucacccagagagagcuggucuccaggcaggugagcga

SEQ ID NO: 4168632 - RNA, 64 nt, Human
uugcuuuguuacugcaguuuccacucuuucagcuccagcugggcugacugcagcugcagggcag

SEQ ID NO: 4168633 - RNA, 66 nt, Human
uuacacauaccaauuagaguuuguugcagggaauagccacucaaacuagccugacugguauuguaa

SEQ ID NO: 4168634 - RNA, 64 nt, Human
uuacacauuaaaauccuaacuuccaauguaauacuauuaggaagugggaccuuuugagagguga

SEQ ID NO: 4168635 - RNA, 129 nt, Human
uuacacauuagacauauuucucagaaaccuuaacauaacuuuuccuugacccucaaaacagauaaaugguuaagggggaugauggaaaagucuguuaucaaaguuuuuacauuauauggauguccguga

SEQ ID NO: 4168636 - RNA, 83 nt, Human
uuacacauucgugugggcaugccugcgcagugcauguauguuuacauguaguguauauggggugcaaaagcaauuaugugugg

SEQ ID NO: 4168637 - RNA, 57 nt, Human
uugucucacguccuccuccccacccuucucagggcucagaggagcuaucggagacag

SEQ ID NO: 4168638 - RNA, 57 nt, Human
uugucuccuccauuugaccauagauguugaaguuaucagggucaggggcggagagaa

SEQ ID NO: 4168639 - RNA, 70 nt, Human
uugucucucauguuucugguacuccuuggauagcucguccagggcuguaaaauggauauaugagcgauga

SEQ ID NO: 4168640 - RNA, 81 nt, Human
uugucugccucaugcuguggucuggcagacagcaacucguuuaagucuucuuccagccaauagcguccuugaguaagacaa

SEQ ID NO: 4168641 - RNA, 72 nt, Human
uugucuguugauuguggauuuuuauauauacauuauauaauuauguauaaguacacagucggaauugaacaa

SEQ ID NO: 4168642 - RNA, 63 nt, Human
uugucuguuuguauacuggucuaauccacaucggauguaccaggaggaggacaaauuagacaa

SEQ ID NO: 4168643 - RNA, 58 nt, Human
uugucuuaugcugcauagacuauucaccuccuaacuugaaggucuaaucauaagacaa

SEQ ID NO: 4168644 - RNA, 62 nt, Human
uugugaauagugcugcaauaaacauacgugugcaugugucuuuguagcagcaugauuuauaa

SEQ ID NO: 4168645 - RNA, 56 nt, Human
uugugacuuuuucuuguuuuuggccaaaggcuuuugcaaaagcaaugaaguuauga

SEQ ID NO: 4168646 - RNA, 60 nt, Human
uugugagaguuuaccuugaccaagcacccucaugucaaugugcucauuugggccucacaa

SEQ ID NO: 4168647 - RNA, 76 nt, Human
uugugagaucgaucuguccuggcaguuaacacgaugugcaacaguguguuagcauggaacagaacgcuuuucacaa

SEQ ID NO: 4168648 - RNA, 129 nt, Human
uugugaugaggugaauucggaucugauccaggccaguagcuccugcaaaacugggauaguuccaugcccacaguuaaugggggcucuucugggauggauauaacaugguuccuggguuccuguaucaaa

SEQ ID NO: 4168649 - RNA, 81 nt, Human
uugugauuugaauuagguuucauggaguaugggucauaggaguuugacucaauacccagggacucuagacucuaaugacag

SEQ ID NO: 4168650 - RNA, 58 nt, Human
uugugauuuucccugauucuguagaaaaaugcuuuuccagggcuagagagaaugacaa

SEQ ID NO: 4168651 - RNA, 60 nt, Human
uugugcaaggucuggacuauaguuuuuuagcaucuacuguuuaucaggcacuugacauaa

SEQ ID NO: 4168652 - RNA, 60 nt, Human
uugugcaauccccucauuuuauagaucagaaaacaagucuagagagguuaaguugcacaa

SEQ ID NO: 4168653 - RNA, 92 nt, Human
uugugcacacacauuuuucuggauugauugcucugugaacuucaaacuuugacuuacaucagaaucacccaggaagguuuguuuaaacacag

SEQ ID NO: 4168654 - RNA, 69 nt, Human
uugugccuuucugggccucaguuuccccaucucuacaaagacagggugggcccagcccagagaagccaa

SEQ ID NO: 4168655 - RNA, 65 nt, Human
uugugcuaaauaaguggaauagacaccuugcauuuacaauggacugucuauuuuauuuggcgugg

SEQ ID NO: 4168656 - RNA, 64 nt, Human
uugugcucaggauucucgacacucacagagagcuugaggaguccgaggaucccgagaaacacga

SEQ ID NO: 4168657 - RNA, 124 nt, Human
uuguggauguuacugcacauuuuuauuauuaacacuaguuuaucugcauaaauguuuauaugcauguuuuuugacaguuuauguaaaauuaguaaugaaugauggcaauggcuuuaaccuauaa

SEQ ID NO: 4168658 - RNA, 81 nt, Human
uuguggauuuaauagucauaguuuugcuaauuguaaaccacucuuugguacauauuuaaauugugagcuauagaucuagag

SEQ ID NO: 4168659 - RNA, 64 nt, Human
uuguggcugccaucuguguaauacggaauuaaaugucuuucuggcucuacagaaggcaccacaa

SEQ ID NO: 4168660 - RNA, 57 nt, Human
uuguggcuuauucuaauuuaaagcugucuggcuuagugaauuucgguauggcuauaa

SEQ ID NO: 4168661 - RNA, 62 nt, Human
uuguggcuugagggaaauaacugaugcuuuccuugaaaggcauggcauuccucaagcaauaa

SEQ ID NO: 4168662 - RNA, 63 nt, Human
uuguggggaguggugaugguauucgugguuaaagauccauagagcauuaugacaaccccauga

SEQ ID NO: 4168663 - RNA, 91 nt, Human
uugugggggcuguccuaugcauuguugaauauuucauagcauccguggucucuacccacuagagauaucagcagcaugcucagccccccag

SEQ ID NO: 4168664 - RNA, 70 nt, Human
uuguggugggacuucugcuucccucagccuuuucagaguggguggggaagaaccgggauucccauuuuag

SEQ ID NO: 4168665 - RNA, 63 nt, Human
uugugguugcuccaugacaaccuguaucaccaaguggaugcugucaugaugugcacaccacag

SEQ ID NO: 4168666 - RNA, 56 nt, Human
uugugguuucuuuauuuggaucuuuaauaaggaggauggauuuaaacaggccacaa

SEQ ID NO: 4168667 - RNA, 76 nt, Human
uuguguaaugaacacagaauuucacuuugggauaaugaaaaaguuuugaagucagaggaugauguugguugcacaa

SEQ ID NO: 4168668 - RNA, 60 nt, Human
uuguguacuguugguugauauuuucuaaguagaugaagauguaagucaaaaguugcauaa

SEQ ID NO: 4168669 - RNA, 90 nt, Human
uuguguaggagcuuguuggaaauguagauucucagaucacaucccugaccuacuguaucagaaucugcauuuaacaaaaucuuuggauaa

SEQ ID NO: 4168670 - RNA, 64 nt, Human
uugugucauguuccauugaaaaguuucuggauaucagaaagaaagucaaccugauaugaugcaa

SEQ ID NO: 4168671 - RNA, 68 nt, Human
uugugucuuuggcgucccuggggcuugccugcaaggaggcagguguugggagacaccauggggcagag

SEQ ID NO: 4168672 - RNA, 83 nt, Human
uugugugauuaauuggauguucucuggaagcaugaaauaugaacugauuucuaguuuuuguaaggacgcuaguuaauuuauaa

SEQ ID NO: 4168673 - RNA, 56 nt, Human
uuguguggcugacaaccacuggaggaggcuucuugcuuccugguucagccauggaa

SEQ ID NO: 4168674 - RNA, 83 nt, Human
uugugugguuuaugcuucuuguauauaaaaaucauuugcccuuguggccaaaugaaguuaugcaaaaacaaaguauuaugcaa

SEQ ID NO: 4168675 - RNA, 69 nt, Human
uuguguguguguauaauguauguguguguauauauauauacacauauauuugcauauacacacauacaa

SEQ ID NO: 4168676 - RNA, 70 nt, Human
uuguguguuuguucgugacuccaaagacuaaaugcagucuugaauguccuguggcaaaguuuacacauaa

SEQ ID NO: 4168677 - RNA, 75 nt, Human
uuguguuaaggugcaucuagugcaguuagugaagcagcuuagaaucuacugcccuaaaugccccuucuggcacag

SEQ ID NO: 4168678 - RNA, 55 nt, Human
uuguguucagugcggcggaaaucugagccucccuccaccagcugcgcugaaccga

SEQ ID NO: 4168679 - RNA, 70 nt, Human
uuguguucauucugagcccuugucuucaugguaagaacuguguccacggcugagaaugauuaaagcacaa

SEQ ID NO: 4168680 - RNA, 90 nt, Human
uuguguuuccugacauuccaagaaguccugcaaaacugaaaaauacaaucaucgcugcaaggugcuuuuuggugucacagauaugcacaa

SEQ ID NO: 4168681 - RNA, 59 nt, Human
uuguguuucuaugcuaagaaagugccacgcugcuaacucuuuagagcucagaaauacag

SEQ ID NO: 4168682 - RNA, 87 nt, Human
uuguuaaaaauacagauucuuggacccacauuagaccuaaagaauuaggaucucucugaaagggcuaaauaauuuggauuuuaacaa

SEQ ID NO: 4168683 - RNA, 66 nt, Human
uuguuaagugcuacugaaauugcuuuuuaucauccaaauaagaagcaguucacaaguaaaaugcaa

SEQ ID NO: 4168684 - RNA, 82 nt, Human
uuguuaaucaugaaaauuuccuggccuuaacuugauggcaauuaagucuaugguagagccugggaauuugcauguuuaauga

SEQ ID NO: 4168685 - RNA, 130 nt, Human
uuguuacaucugccugagaagucuuugggcuaaucacaaauuuagacagagcugaauucuucaaucugucuucuuuugugguuuugugauccuagaaggcucucggggguaaagauccagaaguauccca

SEQ ID NO: 4168686 - RNA, 61 nt, Human
uuguuagguauucagucaguccuaauuagcaguucugaaaucaauuuugauuaucugacaa

SEQ ID NO: 4168687 - RNA, 58 nt, Human
uuguuauggagcauaucugcaucauuuuuaugguugaugauguuugcuugaguaauaa

SEQ ID NO: 4168688 - RNA, 123 nt, Human
uuguuauugacuugucucuaccucacacugugcuagucacuagaguugcaaucauggacaauaagaaauaugccugucauuaugaggauuacaauacaguggggcaggggacauaaauaauag

SEQ ID NO: 4168689 - RNA, 83 nt, Human
uuguucaaaggauuaagaugagauuagcauuugguaaacccuuuaagguuuacacagugcuuuuauaucauuaauccuaacaa

SEQ ID NO: 4168690 - RNA, 77 nt, Human
uuguucacaguucugcaggcuguacaagcagcaugaugccaacauuugcuucuggugaggccucaggaaguuuacaa

SEQ ID NO: 4168691 - RNA, 59 nt, Human
uuguucacuguuucaucccuagcacuuaggagagugccuggcacauggaagguguucaa

SEQ ID NO: 4168692 - RNA, 63 nt, Human
uuguuccacaucacacuacuugauuuguucaaaccaagaucuaaagucauguuugugggagga

SEQ ID NO: 4168693 - RNA, 89 nt, Human
uuguucugguuugccuugaacugagcaguuuccugggacguggggcugccagugcugaaaccgugacaguuccaugcaaacugggacag

SEQ ID NO: 4168694 - RNA, 62 nt, Human
uuguucuuggcuuggaacuaagugggagcauucuuuauucuacuuugucaugcuaagaguga

SEQ ID NO: 4168695 - RNA, 63 nt, Human
uuguucuugucuuugccuucaccuaagaaaauaaugaagggugguaaacaaggauaagaagga

SEQ ID NO: 4168696 - RNA, 61 nt, Human
uuguugcagagaugaaugacauagguguaaauagggcugaacucauucaaucucugaacag

SEQ ID NO: 4168697 - RNA, 89 nt, Human
uuguugcccaggcuggucuggaacuccuggcuucaagugauccuucugagucaccaggauuucaggcauaagccaauauggcucagcaa

SEQ ID NO: 4168698 - RNA, 65 nt, Human
uuguuggugugaaaauaaugcuaauuuuuacuaacacgaaacugauguauaacuuacaccagcaa

SEQ ID NO: 4168699 - RNA, 68 nt, Human
uuguuguaaauggaaauccaagucaccguaguuuuagcagaugguggguuauuuuccuuacauagcaa

SEQ ID NO: 4168700 - RNA, 67 nt, Human
uuguugucaauccaaaaaccuggggaaggcuaaagugaacuccuucuauuuguuuauguggcagcaa

SEQ ID NO: 4168701 - RNA, 55 nt, Human
uuguugugguuuaucaaagugguaucacauacaucacauuugaaccucacagcaa

SEQ ID NO: 4168702 - RNA, 83 nt, Human
uuguuguguuuaaccucccccaccugaggacagucuuauuuuaaaauaaggcuuuuguucagcguggguguauuuuauaauaa

SEQ ID NO: 4168703 - RNA, 59 nt, Human
uuguuuaagucacuugaucugugguguuuuguuacggcagacagagcagacuaagacaa

SEQ ID NO: 4168704 - RNA, 110 nt, Human
uuguuuacaaacagguuggcagacuuucucuguacaguaccagauaguaaauauuuaacuuuauggguuauggucacuguugcaucugucuuguuuuuguuuuuaaacaa

SEQ ID NO: 4168705 - RNA, 62 nt, Human
uuguuuauugcuuccuuugcugcacagaagcacuguuuuuugcaaagugugggcauaaacag

SEQ ID NO: 4168706 - RNA, 60 nt, Human
uuguuucagcccagaucuuuacuaaauuuugugagaucagcauuguugggcuugaauuaa

SEQ ID NO: 4168707 - RNA, 68 nt, Human
uuguuucauuaguacugacaauaaaaauaccuaagguagaagguuguugugaguauuaaaugagauaa

SEQ ID NO: 4168708 - RNA, 84 nt, Human
uuacacauuuggauuacauagcuucuaccacccgaaugcuaauaaaggguuuugacaguauauauagucuaaaagcuugcguga

SEQ ID NO: 4168709 - RNA, 68 nt, Human
uuguuuugagauggagucuugcucugucauccacgcuggaguaguggcgagaucuccacucacugcaa

SEQ ID NO: 4168710 - RNA, 60 nt, Human
uuguuuuggaaauacagcaguuacuuucuuguggagaggaugccuuauguuuccacacaa

SEQ ID NO: 4168711 - RNA, 65 nt, Human
uuguuuuuaagcaugcucuuggggggucucauucuuuacucucaaaguauaucccuucgaaacaa

SEQ ID NO: 4168712 - RNA, 65 nt, Human
uuguuuuugagauggauuuagcucuuguugccccggcuggauggcgcaaucucaucucacugcaa

SEQ ID NO: 4168713 - RNA, 64 nt, Human
uuguuuuugagugccuacaaucaccaagguuuuucucugggcuuugggauucagcaugagacaa

SEQ ID NO: 4168714 - RNA, 66 nt, Human
uuguuuuuuccagccauguauagcuacaaaggugguggcacaaaguggguggaaaacuaaagacaa

SEQ ID NO: 4168715 - RNA, 88 nt, Human
uuuaaaaauuuuauguagacuuugaugacgccaguggaagcuguccgaggagauauauucaaaaguuucacauagagauauuuuuaaa

SEQ ID NO: 4168716 - RNA, 81 nt, Human
uuuaaaacuacagaugucaggacccuacugcauugacuaaguaaguuuugagguuagaaccuggaaauguguguuuuuaaa

SEQ ID NO: 4168717 - RNA, 65 nt, Human
uuuaaaacugugaggaugugcaaauucugccuacgaauagauuggauuugcccuccaggauuaga

SEQ ID NO: 4168718 - RNA, 59 nt, Human
uuuaaaagaucacuggcugcuuuacugggguaagaguggaagccaaagaucuguuugga

SEQ ID NO: 4168719 - RNA, 81 nt, Human
uuuaaaaucuuuuaacacauuuuccucauacggauguuacuguuacagucccuugugagaacauguguugguuauguuaga

SEQ ID NO: 4168720 - RNA, 84 nt, Human
uuuaaagauuagaagucucugucguagaucagcguuuuauagaugaggauacgcuaucaaucuagacaaagaagcuuauuuaaa

SEQ ID NO: 4168721 - RNA, 75 nt, Human
uuuaaagcacacuacaguuaaaggacugguugcuauguuuuggagcagcaugcuauauugauuguagucuuuaaa

SEQ ID NO: 4168722 - RNA, 78 nt, Human
uuuaaaggagugagguuuaggcaugcagaggcagggaacuuuuagcaccugcacaguuugauuucuugcuccuucaaa

SEQ ID NO: 4168723 - RNA, 64 nt, Human
uuuaaagucuccugcuguuggaacauaccuacauuuguucuuugaaguuuagagagacucuaaa

SEQ ID NO: 4168724 - RNA, 95 nt, Human
uuuaaagugcaagguugacaaauggauuuuaauguuacagaguaugaaaacauacugaugugauuucaaauuccacauugcaacuaaucuuuaag

SEQ ID NO: 4168725 - RNA, 59 nt, Human
uuuaaagugggcaaacucucauggucuuguaauuuaaguccauuuugacccuuuuugaa

SEQ ID NO: 4168726 - RNA, 129 nt, Human
uuuaaauucuaaagagcaaaaugcaucugcuaacuucugaauagcaauaguaccaaauuuggugccugcugauugaauucagaugugguugcagcuggaaaucauuguggccucuuaguuacuagauga

SEQ ID NO: 4168727 - RNA, 74 nt, Human
uuuaaauuugcaugggggucagagcagugaaagauguuguuuauagucuccugagccuugacugcaauuuuaga

SEQ ID NO: 4168728 - RNA, 89 nt, Human
uuuaacaagagcuucagugaaucuuucaucugcgaagcuuacagagcuucccaaacuuguggauagaaucaccuggggaucuugcuaaa

SEQ ID NO: 4168729 - RNA, 88 nt, Human
uuuaacacauaacuagguuuuucagggcucuuaaaagguaccuugcuuaaacuaagaguuacugguuuagaaccucugaauguuuaaa

SEQ ID NO: 4168730 - RNA, 83 nt, Human
uuuaacuguuuccugacacuagggaccaauuaagauguauaaauuaugcauuuaauagaugcucccugccuaaaagaguuaaa

SEQ ID NO: 4168731 - RNA, 71 nt, Human
uuuaacuuuggcuugaaaaauuaauucaauacacuuaaccuuuuuguucuugguuugcggccaaaguuaaa

SEQ ID NO: 4168732 - RNA, 79 nt, Human
uuuaagagcuaugugccaagaaauggggaaagaagaccaaaauauauauuucuuaucauaucauacauggcuauuuaaa

SEQ ID NO: 4168733 - RNA, 79 nt, Human
uuuaaggacuuuaaagucaagguacuguuucacagaugauuauuugcagacaguuaauucuugaguuauugucuuggga

SEQ ID NO: 4168734 - RNA, 96 nt, Human
uuuaaguugggaaacgugguuguuuaggucguggauccagugggagaaaguccacauuagagcaugucagaauagccauuaauccuuauucuuaaa

SEQ ID NO: 4168735 - RNA, 60 nt, Human
uuuaauacuauggggaugaacauguaagcaaaugcaacucuaucuccccauaauguugga

SEQ ID NO: 4168736 - RNA, 56 nt, Human
uuuaauaguccuauauguguaucaaugcaccaugcauugauucaagggcugaugga

SEQ ID NO: 4168737 - RNA, 67 nt, Human
uuuaaucgacaaaugggcugccauggaaaugacuuucaaaugcaccucucauuuguucaagguuaaa

SEQ ID NO: 4168738 - RNA, 62 nt, Human
uuuaaucuucaaaauagucuuauguuguagcuucuuuugcuguuccuauuuuggagauuaaa

SEQ ID NO: 4168739 - RNA, 83 nt, Human
uuuaaucuugagagauacuacaugaaugggaauuaugcuuaauaucauaguaguuuaccauuguguaguacuucacaguugaa

SEQ ID NO: 4168740 - RNA, 65 nt, Human
uuuaaugauagucuuacgaaaaugaaaucacccaguaguccuuuucaagugaggcugucuuuaga

SEQ ID NO: 4168741 - RNA, 68 nt, Human
uuuaaugauugucauuccaaaaaguucucucuggugggaagauguuucacuggaaugacaguaauaaa

SEQ ID NO: 4168742 - RNA, 58 nt, Human
uuuaauuaggaaaugggcagggccucauucugugccccuaaauguuucgcuaauuaga

SEQ ID NO: 4168743 - RNA, 70 nt, Human
uuuaauuauuucaggaacauuuaaccacagggccagcaggcuggaucuugauauguguuucuuaguugga

SEQ ID NO: 4168744 - RNA, 62 nt, Human
uuuaauucaacauuguucacagugguagaaaacuagaaagccauagugaguagugaauuaga

SEQ ID NO: 4168745 - RNA, 60 nt, Human
uuuacaaccucauauucugauguuuguauacauagacgggcuuuagggugaaggugugag

SEQ ID NO: 4168746 - RNA, 72 nt, Human
uuuacacagaccuagcacucuagauugccuuguaccuuuaaccuguagccagaucugcugugucuggauaaa

SEQ ID NO: 4168747 - RNA, 76 nt, Human
uuuacaccugugucuguggaauagcgaaugaauauucccaucauuguccgacuccacagacaucuccuuguguaaa

SEQ ID NO: 4168748 - RNA, 65 nt, Human
uuuacagaguggugagaucuuuugaaugagugucuagaguacaaagguuaugaaccacuuguaaa

SEQ ID NO: 4168749 - RNA, 57 nt, Human
uuuacagaugaggaaacugagaugcaaacaagucaaguaaccugccacaucuguaaa

SEQ ID NO: 4168750 - RNA, 55 nt, Human
uuuacaggaagcugaaaaacauugcuauucuaaguagcuuucuucuuccuguaga

SEQ ID NO: 4168751 - RNA, 91 nt, Human
uuuacaggcuuccacuuuugggaacagugaguaggugugccuuuucuuacuccucucgcugagacuauaaagcugggacauugcauguaaa

SEQ ID NO: 4168752 - RNA, 60 nt, Human
uuuacaggugguaaaaauauuguugguugacauaccaauaaguuaaaccuaacuuguaaa

SEQ ID NO: 4168753 - RNA, 60 nt, Human
uuuacaguuaagaaauguuaccggaaaggccuacagcauguggcaucucucaauuguagg

SEQ ID NO: 4168754 - RNA, 71 nt, Human
uuuacauuucauuauggacguuaauuuuggaaugcuuguggcuuucagucuugauuuuuauuguguguaaa

SEQ ID NO: 4168755 - RNA, 78 nt, Human
uuuaccuccuaauucucagcaugaacuggucauuucuucuuuuaaaaccaucaacuguaugggaauuuuggaggugaa

SEQ ID NO: 4168756 - RNA, 60 nt, Human
uuuaccuuugugggucucccuccagaacugaaggcuugggaggaguuuccaauggguaaa

SEQ ID NO: 4168757 - RNA, 75 nt, Human
uuuacggacucagcucuuuuucacacaacaugcugccaacccaagucuuguaugugugcagcagaguuuuguaaa

SEQ ID NO: 4168758 - RNA, 69 nt, Human
uuuacgugaaaggcaguuuaaaaugugcuaaaguguaaaacaaaugcauacagcuuucuuucacaugag

SEQ ID NO: 4168759 - RNA, 73 nt, Human
uuuacucauuuuuuaacuaccagugccuguagaaaacuaagcauaugaaauaugaguugaacaaaugagugga

SEQ ID NO: 4168760 - RNA, 81 nt, Human
uuuacucuucaacauucagcagggcauacugagccuaggaaucgcucuuuaggcccagcuccuguuggguugacuggugaa

SEQ ID NO: 4168761 - RNA, 59 nt, Human
uuuacugauuggucuuuuaguuagcacaguuuacugcugacugaaauggcgacagugaa

SEQ ID NO: 4168762 - RNA, 86 nt, Human
uuuacugucuauuuuaguuuaggaacaaguaguggaaaacagaacugcuagagcucccuacauguuuuuaggcugagacugguaaa

SEQ ID NO: 4168763 - RNA, 80 nt, Human
uuuacuguguuuguacagaugaccuuuuguuuagauugaauugucuccccagaaguaagauuacugugagacauggugaa

SEQ ID NO: 4168764 - RNA, 63 nt, Human
uuuacuguuugaaaaaugaauguuaguucagaaguaccaauauggcauuuucaagucagugga

SEQ ID NO: 4168765 - RNA, 76 nt, Human
uuuacuugucacuguuuuacauguuauuuaauaauuuacaguuauuuaaaagugguaagauuccaaggcaaguagg

SEQ ID NO: 4168766 - RNA, 77 nt, Human
uuuagaaaauaagucugagagaaacucucucaggucaagucaaacguggagaaaaacuuucagacauguucucuuug

SEQ ID NO: 4168767 - RNA, 62 nt, Human
uuuagaaauguugaauacaucaggaauauuuucauauuucugcauggucaaggcuuucugaa

SEQ ID NO: 4168768 - RNA, 93 nt, Human
uuuagaagaugguuuggguuauuuugguugucuaaggcugagaaagccuuccagaucuugacuuacagguuaacaaaaaguauccauucuaga

SEQ ID NO: 4168769 - RNA, 59 nt, Human
uuagagaaaggguuugauuccguuauuugaaaggaugucucuccaagcccuuucuauaa

SEQ ID NO: 4168770 - RNA, 64 nt, Human
uuagagaagaugaaccaucguuuacagguuaggaauucuagaaguguuggcguauuuucuuuaa

SEQ ID NO: 4168771 - RNA, 88 nt, Human
uuagagaaggcagauacaaaaagggagaagauuuaaauugacuuuaacauuuaccuaauuuguauuuaguugccuaaacaagcucuga

SEQ ID NO: 4168772 - RNA, 101 nt, Human
uuagagacaucgcuuggaaaaggcugucuuuuccucuucccacaccuuccacccgcucuugcuugugggcagaggaugaggcagcuugcccaacccucugg

SEQ ID NO: 4168773 - RNA, 67 nt, Human
uuagagccuggauagccuuguuccagaagcgacuuuuccaauggagcaaauguccaugaggcucugg

SEQ ID NO: 4168774 - RNA, 71 nt, Human
uuagaggaagauguugacucaagggaagacggggccaagccucaagucugauggguuagguuagccuccga

SEQ ID NO: 4168775 - RNA, 74 nt, Human
uuagaggacuuuccuuggagugcuauuggauguuuuuugcacuucaaacucacacuagggagacgggccuuuga

SEQ ID NO: 4168776 - RNA, 69 nt, Human
uuagaggcaugauucaguaaagaugugagauuucaccuauucaagcacaugaucugaauuugcaucuga

SEQ ID NO: 4168777 - RNA, 64 nt, Human
uuagagggaggaagggaauauauguauuuauacaaagauacauugaguuuccuccugauuuuaa

SEQ ID NO: 4168778 - RNA, 62 nt, Human
uuagaggugugaccuugggcaaaucacuuaauuugucauugccuuaguuagcacauuucuaa

SEQ ID NO: 4168779 - RNA, 72 nt, Human
uuagagguuauuagcucaagcucuauaguuaaaacagaccuaggcuugacugcugauuuugccaguuucuaa

SEQ ID NO: 4168780 - RNA, 58 nt, Human
uuagauaaagugauguaggcuauauuuugcuuaugaguuuuuauauuacuguaucuga

SEQ ID NO: 4168781 - RNA, 107 nt, Human
uuagauacuuuuuggaaagccaacaagguacaaaacagagcacaaaguuuagauucagaaaucaugugcucuaaugugcuuuguucccuaagcuaaauaguauguaa

SEQ ID NO: 4168782 - RNA, 57 nt, Human
uuagauagcaaugcaauucugggaaauacaacuccauuauuugcuuggcucaucuaa

SEQ ID NO: 4168783 - RNA, 57 nt, Human
uuagaugugcaggaauaggcauucugccugcuuuuaaaugucuagcugcacagcuga

SEQ ID NO: 4168784 - RNA, 69 nt, Human
uuagauguuaauucugaaaugagauauaagguagcauagcuguuuuauuuacauuucagauauuucuaa

SEQ ID NO: 4168785 - RNA, 63 nt, Human
uuuaggucaucugauguaacauuacagaccagaccuuggauaauacugcuucagaggcuuaga

SEQ ID NO: 4168786 - RNA, 58 nt, Human
uuuaggugucugcucauugaagccgucccagggaaagcccucagaggagauaccuaaa

SEQ ID NO: 4168787 - RNA, 71 nt, Human
uuuaguagaaauauuugggccuauggauugagagugaguaagucuccaccuuuccagauguuucugccaga

SEQ ID NO: 4168788 - RNA, 68 nt, Human
uuuaguagaauaguauaucaaauggaauuuguauaagcucuuuuaagugugauuacuauuuugcugag

SEQ ID NO: 4168789 - RNA, 63 nt, Human
uuuagucagguaagaugcaggguguagagguguuaaccuuuccuuaaaauuuuaauggcuaga

SEQ ID NO: 4168790 - RNA, 72 nt, Human
uuuagucucugguuuauaaaucuguggccaguuacuaguggcauuuuuguuagccugaaaaaagagacugaa

SEQ ID NO: 4168791 - RNA, 65 nt, Human
uuuaguggcugauuugcugcugacuugcgcaggaaacugaaucagcuugugggucagccucugag

SEQ ID NO: 4168792 - RNA, 80 nt, Human
uuuagugugggcccuugaugauuuuuucugagugccugccucacucagucacucagagucaauguuaauggcagacuaaa

SEQ ID NO: 4168793 - RNA, 63 nt, Human
uuuaguguuauauugggaaauguuuucuaaaagaauaggguagcugcccuuuaugaugcugaa

SEQ ID NO: 4168794 - RNA, 100 nt, Human
uuuaguguucauuguuccugcugguuauucucuuggccuaauuaugugaggaaaacagaaugaaggcaaagggaugggaagcaagggcaauguggcuaaa

SEQ ID NO: 4168795 - RNA, 82 nt, Human
uuuaguguuuuggagggauuucugugaaaugaacgagcaucucuuuagauugaaguuuauaacauagccuccuugcagugag

SEQ ID NO: 4168796 - RNA, 56 nt, Human
uuuaguugaaggcaguccucaaaugaugacuugucaguucauuguuuucaauuaga

SEQ ID NO: 4168797 - RNA, 58 nt, Human
uuuaguuuaggugggguagacagagaaggccucucugaaaagaucauuuuaagcugag

SEQ ID NO: 4168798 - RNA, 58 nt, Human
uuuaguuuuguuuugacacagaugagucuggagagucaugaguggcugcggggcugag

SEQ ID NO: 4168799 - RNA, 75 nt, Human
uuuauaacaguauagccuaacauuuccugcacuuugggauuuuagggagaugucuaugucuauacuugggguaag

SEQ ID NO: 4168800 - RNA, 70 nt, Human
uuuauacuuguuuaaauaagauagcaguagccaugcuuccaguuacuguauguuguugaagcaaaaugag

SEQ ID NO: 4168801 - RNA, 67 nt, Human
uuuauagcugugagaccuugggcaaauuacuuaaccuguuugugccucagauuucaagucauauaaa

SEQ ID NO: 4168802 - RNA, 85 nt, Human
uuuauaggaacaguacucuacagaaugaauaccuguugggaaacagguauucauucuguagaugggaaacacuggaccauauaaa

SEQ ID NO: 4168803 - RNA, 78 nt, Human
uuuauaguuaaagauucuguuaagagcuaagugauuuaaguacaucugggauaaaguggccuuggcuuuaacuaugaa

SEQ ID NO: 4168804 - RNA, 59 nt, Human
uuuauauuguaaaaaugguucugaugucuccuggcagcaaugcagaacuacaauguaaa

SEQ ID NO: 4168805 - RNA, 56 nt, Human
uuuauauuucccaggauuggcccauagccaagggcuaacugauaugggaauaugaa

SEQ ID NO: 4168806 - RNA, 96 nt, Human
uuuauccaaaucuacucuuugcagauuacuggacugauuccauuggauguagguaaaugggauggaguuggggucugcagaguuaauuaagauaga

SEQ ID NO: 4168807 - RNA, 127 nt, Human
uuuauccauugaucuguuguuggauauuuaguucauuucuacaucuuggcuauuguguauagugcugcaaugaacaugggaguacuaauaucucuucaagauccucauuucaauucuuuuggauaaa

SEQ ID NO: 4168808 - RNA, 106 nt, Human
uuuaucuaauaaagcaaauuccauuuaauuacaaaacacauagguuggccaaacugaagucaacaaauguguuuuguaauuaaagauaauuguguuauuagauaaa

SEQ ID NO: 4168809 - RNA, 70 nt, Human
uuuaucucaugcuauuuauacauaagucuuugcaccccacacagcuuauggugaaguaguagaggguaga

SEQ ID NO: 4168810 - RNA, 95 nt, Human
uuuaucuuguuugagcuacacugauucauuuguucauuuucugucucuuauuuucaguugaacuuuaucggaacagguacucauaacaagaugag

SEQ ID NO: 4168811 - RNA, 79 nt, Human
uuuaucuuuuaugcucuccucccagucccagcuaggaaugcaguugagggagauaggaaggagggcacagggagaugaa

SEQ ID NO: 4168812 - RNA, 123 nt, Human
uuuaugaggggauuuuguuucugcauugaccucuuguggugcuccuuucagaguaugaaaaauggcaucaucugauuccagaaggggcauacaggacaguguucucaucaaaaccauuauagg

SEQ ID NO: 4168813 - RNA, 129 nt, Human
uuuauggaaaggagcuagaaacagugcugggcacaaaggagggcugacaaauggcagugaccgcuaauuaaucccggccaguguucuucacccccucugccuugccuguugucuuuccucuuccaagag

SEQ ID NO: 4168814 - RNA, 116 nt, Human
uuuaugguaggucaugccaguuuaaagguauuggucuggucuuccugcuuaaaauaaugaauggcagaagagagaaccauauaucuugggaucugaacuggugaccuaaacauaag

SEQ ID NO: 4168815 - RNA, 130 nt, Human
uuuaugucauacauuacaucaugcgaauuuuuguguuugugccacuuaguaauauaucuguuagagaacagauggaaggcauagagguuuuaaacagcaggagcggugauuuaaucagauuuguacauua

SEQ ID NO: 4168816 - RNA, 87 nt, Human
uuuaugucccaagggugccagagugccaucagugccaucuaguggcagucauggugaacugaggguaccuggccccuaugauguaaa

SEQ ID NO: 4168817 - RNA, 70 nt, Human
uuuauguggacuguuguuguuugguuuauuucaauugaaaggaaaagaucaauagauaaagcuacauaaa

SEQ ID NO: 4168818 - RNA, 129 nt, Human
uuuaugugugcucuucaagaugauacagauauggagaacucaaaaagugaccagauuuaaacccagaugugaauaauuauuuucacuuauuugaguuuucagcuuugguuuucuuguugauuacaugaa

SEQ ID NO: 4168819 - RNA, 66 nt, Human
uuuauguuuguuuuugaaauaaaggauuuaguuuaagauucuaaauuuuagagaaacaaacguagg

SEQ ID NO: 4168820 - RNA, 55 nt, Human
uuuauuaauguagcauccauggugcucuuaagacguggcugcuuuuauuaguaaa

SEQ ID NO: 4168821 - RNA, 70 nt, Human
uuuauuagaggaaagcaaucuaguuccaauucugguucuccggaguuacuggauugugucugaggauaaa

SEQ ID NO: 4168822 - RNA, 65 nt, Human
uuuauuauauauacaguagaguuuguaaguacuaaauucguaucacagaacuguauagugauaaa

SEQ ID NO: 4168823 - RNA, 58 nt, Human
uuuauucacuggggucugcccguggguuccagucuaaggguuugcacuucugaaugag

SEQ ID NO: 4168824 - RNA, 64 nt, Human
uuuauucacuucagugccaaagagcaaauuccugugcuacuuuaggaagacuugaaugaguaga

SEQ ID NO: 4168825 - RNA, 59 nt, Human
uuuauucagcagcagcaguggucuuugguuaagacugacauucugacugacugaauagg

SEQ ID NO: 4168826 - RNA, 123 nt, Human
uuuauucauucuacauuucagaacucuuguaguuuauguagaugugucuguauauuauuauacuuuuauuuuacuuuaaagcgagagaaaagacugauaugugaaagguuucuauugaauaag

SEQ ID NO: 4168827 - RNA, 113 nt, Human
uuuauucccaacugguuuucauuuaacccucccagacuuauugcaacuccuaaauagagaacauuucuauguuaguaugggucuccgagaagcagaugccaagaugggauaaa

SEQ ID NO: 4168828 - RNA, 97 nt, Human
uuuauucuaguucccaagccaaauuaaucuagagguuguauuaacauaguaucauguuuauggcuuuuaauuaguugcuuccauuagacuagauaaa

SEQ ID NO: 4168829 - RNA, 77 nt, Human
uuuauucucggauguauuccaagugccuagaagaguugguacucaauaaacacuuguggaaugaaugaaugaaugaa

SEQ ID NO: 4168830 - RNA, 73 nt, Human
uuuauugauugcuuauuuuaugccaggcacuguucuagguucuggggacauaacaguaagcaagacagauaaa

SEQ ID NO: 4168831 - RNA, 82 nt, Human
uuuagagugaauaaacaaauaugugugauaauaccuugaaaaguugcaauuuauuaucagagcuauuuggaauuaaucugag

SEQ ID NO: 4168832 - RNA, 72 nt, Human
uuuagaucacagcagccuccucacuggcaucuuucaaggcuccaagcugacugugcuguugugcuguuuaaa

SEQ ID NO: 4168833 - RNA, 72 nt, Human
uuuagaugauggagguuggauucaggugcauccccuggaaugggguuuggcauuagcuucacguggucuaga

SEQ ID NO: 4168834 - RNA, 58 nt, Human
uuuagauuagaccacuguacuaaaccuuugaggguuuuaguacaauguaugauucaga

SEQ ID NO: 4168835 - RNA, 61 nt, Human
uuuagcacauuucucaaagaauugucaccagugagguaggcuacccuuagaaagugcugga

SEQ ID NO: 4168836 - RNA, 61 nt, Human
uuuagcagcuaagucaugcugcaaguucauucugaccuugcagucaacucuaacugcuaag

SEQ ID NO: 4168837 - RNA, 69 nt, Human
uuuagcaggucuguugauuacagucauauuugggucauaaucaugacauggaaaucaauggaugcuaaa

SEQ ID NO: 4168838 - RNA, 73 nt, Human
uuuagcgggcuuucagccaaaggacaaccuggagcauguuucggcccugaagcugaggguguuaacugcugaa

SEQ ID NO: 4168839 - RNA, 75 nt, Human
uuuagcucuugagaacaggguuagguaacuugggcucccucuggugucggccucguuccuuuuucaguagcuaaa

SEQ ID NO: 4168840 - RNA, 87 nt, Human
uuuagcuuagucuuggucauuuagcauuucucugccuaggugcuuuuucacaaggacuucagaaaauguugaauguuucuaguuaaa

SEQ ID NO: 4168841 - RNA, 67 nt, Human
uuuaggaaagucugaaagaugcuaacaucaggagaugaggugggguuuuuucagacucuauccuaga

SEQ ID NO: 4168842 - RNA, 62 nt, Human
uuuaggauguuaugaugucauuuucuucucuuuguagaagagaauaaaucaaauguccugag

SEQ ID NO: 4168843 - RNA, 70 nt, Human
uuuaggcacagggaguugguuuauauuuaucuaauccagguaauagaguauuuaauuuccugucacuaaa

SEQ ID NO: 4168844 - RNA, 65 nt, Human
uuuaggccagauuuauuugacaucuccacuuugauauuccacggagaguucaaacucugucugaa

SEQ ID NO: 4168845 - RNA, 61 nt, Human
uuuagggaaauugaggguuaagcaacaaugagaacaaggcuugccccugaguuuuucugag

SEQ ID NO: 4168846 - RNA, 80 nt, Human
uuuagggugugucauguaugucuaucuaccugcucagugacauugagcagagugccccaucacaaggauacaccucugga

SEQ ID NO: 4168847 - RNA, 100 nt, Human
uuuagguaauuuauaacgugcagccaggguugaaagccagugcuccaauuuccuggucuuuauuauuaaaacccaugguuuaugaauacauuacgcuaaa

SEQ ID NO: 4168848 - RNA, 66 nt, Human
uuuaguagacuggaacugucuucaggaugauauauuucuuaaaggcuuuauuuuccagucauugga

SEQ ID NO: 4168849 - RNA, 76 nt, Human
uuuaguucucuaucaugcaugguacucuugugcaucuacuauguagaaggaaauguguaugguauuggaagcuaaa

SEQ ID NO: 4168850 - RNA, 64 nt, Human
uuuaguuugccaguauuuuauugaugauuuuugcauugauguucaucaggaauauuggccugaa

SEQ ID NO: 4168851 - RNA, 127 nt, Human
uuuauaaaauuccuuauacuaagacauuucuuuccaaaucauaacuagagugaaauguugaaauuuuaauuguuacaucaaguuauaaggaaggguauucuauagacuuucagagggauuguaucaa

SEQ ID NO: 4168852 - RNA, 86 nt, Human
uuuauaacaugcacuacuagaugcaaaaguuuacaucaaaguuuacuuuaaauaucauuugguagggacuaaaugugugugauaga

SEQ ID NO: 4168853 - RNA, 75 nt, Human
uuuauaucuugauuagccuccuugucucaugcgcugguacuuucagucacauggguuuuuaggagaguguauaaa

SEQ ID NO: 4168854 - RNA, 94 nt, Human
uuuauauguacuaauuuguuuaaucuucaggacagucuuuugaagcagguaucuguagauugucaugaggauuaaauaaauugauaccuguaaa

SEQ ID NO: 4168855 - RNA, 74 nt, Human
uuuauauucacaaaaucaaaugccuuugauggucucgugggauauguaaaugugagugaugcggugaauaggaa

SEQ ID NO: 4168856 - RNA, 78 nt, Human
uuuaucaucauuuucagguacacaaucaagccaaaagauacgcuuuggugaaugauaauguucgagaaugaagaagaa

SEQ ID NO: 4168857 - RNA, 55 nt, Human
uucagaaugacuuauguaaggcgaagggcacuugcaaacgugagugauuuuugga

SEQ ID NO: 4168858 - RNA, 81 nt, Human
uucagagagaaaaccuccccagcauucugacuuccugacccagauuucaagaagucccaugcuggugagaaagucccugaa

SEQ ID NO: 4168859 - RNA, 61 nt, Human
uucagagcccaaauggagauuaucucucaauuuugacauuuauuuguauuuuggcuuuggg

SEQ ID NO: 4168860 - RNA, 56 nt, Human
uucagagcucagaaaagugucucuuuaaggagaugacauuuaaguugaagccugag

SEQ ID NO: 4168861 - RNA, 55 nt, Human
uucagagggcuugcuauguacaguguaaugcuucagcauagcugaccuuccugag

SEQ ID NO: 4168862 - RNA, 69 nt, Human
uucagagucuaaggaaaaauagaguauuaugguucaaugguguucuuauguagucuuaugauucuugaa

SEQ ID NO: 4168863 - RNA, 67 nt, Human
uucagaguuuacagaaauaagcuguaugguucauuuucaugccugcuugccaauaaacauaucugag

SEQ ID NO: 4168864 - RNA, 86 nt, Human
uucagauagcacacaucacacuaauuuuucaagaguuuuucauuguauuuauuguauggaaaauauugguaggaugcuuguuugaa

SEQ ID NO: 4168865 - RNA, 111 nt, Human
uucagauuuagcagcaggcaguuuucaauuuauuagcauuucauuucaagaggaaggauaaaaccuccaugagauauacuaauaaucaaacugugcaugcagguugaugaa

SEQ ID NO: 4168866 - RNA, 90 nt, Human
uucagcaaucauguuauuuguccccuuuuuuugguaucaaaagggccuuuucuuuaugaaaugauggggaaaauagaugguaguuuugga

SEQ ID NO: 4168867 - RNA, 82 nt, Human
uucagcaauuaccaauuugguuuauguguucagaccuuauauggaucauuguauuguaugaaucaaaaggugaaucguugaa

SEQ ID NO: 4168868 - RNA, 56 nt, Human
uucagcaccuggaauagcaccuaguaaaugguuggugcuccauaaagguguaugaa

SEQ ID NO: 4168869 - RNA, 84 nt, Human
uucagcagucaagcucagugugucuaugagguaaugaauaaacuuuuauauacauguggagauaacugaagcacguacucugaa

SEQ ID NO: 4168870 - RNA, 76 nt, Human
uucagcauuaauuacaguagcaaaagaccggaagcaacuuuaaugcuuauugggggcuuaacugaauaaauuugga

SEQ ID NO: 4168871 - RNA, 117 nt, Human
uucagccugugggccaguuuuccaaucucugauuuacagcaucucugagauuucuuacugaacagggaguguuauagauaggaaugauugauggcuaaaagcuccauaaaggcagag

SEQ ID NO: 4168872 - RNA, 55 nt, Human
uucagcuaaaaaugcccacuuguuuagacuuccgcagcuugggcaugaagcugga

SEQ ID NO: 4168873 - RNA, 56 nt, Human
uucagcuagcaucucacuuggucaugguucuuuaucuggugggauuaauugcugag

SEQ ID NO: 4168874 - RNA, 61 nt, Human
uucagcucccugagccugugcuauggggaguaauagcaucugccaaggcucagaggcugga

SEQ ID NO: 4168875 - RNA, 65 nt, Human
uucagcugaaaaagcuacauaauauugggcuggugcaaaaguaauugugguuuuugccaguugaa

SEQ ID NO: 4168876 - RNA, 88 nt, Human
uucagcuuccaaagaucucagaugcccuugcaucaccucccugaagagggugggugaagcuuuggugucugaagagaauuuggcugga

SEQ ID NO: 4168877 - RNA, 59 nt, Human
uucagcuuuugugugacuaacaguugggaagggacaauccuagaagcagggaagcugag

SEQ ID NO: 4168878 - RNA, 71 nt, Human
uucaggaaaguucuguguugugacauucuagagacagcuugccucuagaauacugugacaugccaccugga

SEQ ID NO: 4168879 - RNA, 74 nt, Human
uucaggaguuccuauacucacccuucuacuuuuaagaaagugguuuucaaagugugauuuguagaaugccugag

SEQ ID NO: 4168880 - RNA, 90 nt, Human
uucaggauagugagguaaugaggggagaaggcacuaaccagguguuuagccuucauccagugcucuucccccaucacacuauuucuugag

SEQ ID NO: 4168881 - RNA, 90 nt, Human
uucaggcccagagacacaauuuccccauccuaccauuugaagcacaggaugccuacugggauuaggggaauugauuuuugugcuacugaa

SEQ ID NO: 4168882 - RNA, 57 nt, Human
uucaggcucuacacuugacacaccugcugacaagugugucauaaaggagacuaugga

SEQ ID NO: 4168883 - RNA, 76 nt, Human
uucagggaaauuaaugacugguuggaguuaauggacuaaggagcaagcccuuccaggcagucauuaaucucuagaa

SEQ ID NO: 4168884 - RNA, 64 nt, Human
uucagggagaaaugagggaauggagaauaucagagaagcagcucccucagaaauucucucugaa

SEQ ID NO: 4168885 - RNA, 66 nt, Human
uucagggauauuuagcauauugcagaggaaguguuauuucacgucaauacacuaaacuucucugaa

SEQ ID NO: 4168886 - RNA, 96 nt, Human
uucagguguuggaaguucucuuuucuuucuggauaaaauaaauguuaacuguguguuuuggcuucuuggagggcaggaaggcuucaguuaucugaa

SEQ ID NO: 4168887 - RNA, 62 nt, Human
uucaguaaauuaucucaucucuguagcugagucauuaacucacaaggaagauaguuacugag

SEQ ID NO: 4168888 - RNA, 85 nt, Human
uucaguaggcuacuuuguguauaguuucuuaguuacugagaauaacuacuuaggcgaguaagagauuauaaauauuaucauugaa

SEQ ID NO: 4168889 - RNA, 56 nt, Human
uucaguagggcccucacacagucacucaugcugugaaguuauuuuggggcacugga

SEQ ID NO: 4168890 - RNA, 61 nt, Human
uucaguauacauuaucuaauugugcauaccagaugcagaaaaggauaaagugcaugcugaa

SEQ ID NO: 4168891 - RNA, 57 nt, Human
uucaguccagcggccccaggcagggacagguggcuucccugccaguccuggucugaa

SEQ ID NO: 4168892 - RNA, 62 nt, Human
uucagucccauccacauucucugagugccuaauaugugccaggcgcugugcuuggggcugga

SEQ ID NO: 4168893 - RNA, 64 nt, Human
uucaguccugcugucaggcuucagcugagaucacauccucuuugauucuccaguaugggcugag

SEQ ID NO: 4168894 - RNA, 76 nt, Human
uucagucuaaguuagggcccgaggcaggaugugggaucugcugccugggucuggcucaguccuagcuguagaggaa

SEQ ID NO: 4168895 - RNA, 80 nt, Human
uucaguggcacaauugcagcaauaaacaaagacagaugacaauucagcuuagauguuucugcugcagucuugguccugaa

SEQ ID NO: 4168896 - RNA, 76 nt, Human
uucaguguuacuaguauuuaauauguggauugauauugguguccuguuauauguuggguagucaugguacauggaa

SEQ ID NO: 4168897 - RNA, 94 nt, Human
uucaguuacuucaggccaucugggcauauacgugcaagucacaggggaugcgauggcuuggcuugugcucagaggccugacaguuuccacuggg

SEQ ID NO: 4168898 - RNA, 86 nt, Human
uucaguuccccauuagagauuaugaauuccuaggucuguaucucuggacuccacuggcugggucauuuucuuucauaggugcugag

SEQ ID NO: 4168899 - RNA, 65 nt, Human
uucaguuggccauaccccuagaagagauuuggaaugcugauucacuagaggguggguuugcugaa

SEQ ID NO: 4168900 - RNA, 62 nt, Human
uucaguuugaauucuguagaacagacugcuaagaauuguuuuuucacagaucucuaacugag

SEQ ID NO: 4168901 - RNA, 64 nt, Human
uucaguuugccaguauuuuauugaugauuuuugcaucaauguucaucagggauauuggccugaa

SEQ ID NO: 4168902 - RNA, 59 nt, Human
uucaguuuucuuuagaauguagagaaugaaagaacuucugcauucuugaggaaauagaa

SEQ ID NO: 4168903 - RNA, 82 nt, Human
uucaguuuuuccaggacuuuaagcuucagagggaugccacaaaaucaucuucagagaaguuuauggugcuuguaaggcugag

SEQ ID NO: 4168904 - RNA, 74 nt, Human
uucauaaguacacacaguagaauagagugaggcucucauuuggaccuuaaacugcugcuggugucacugcugga

SEQ ID NO: 4168905 - RNA, 57 nt, Human
uucauacucacuccaauaacuggauaacacaggccuuggggggauuuugaguuugaa

SEQ ID NO: 4168906 - RNA, 130 nt, Human
uucauagacucaauucuuguguguuaggaaaaucuuuaguauaggggacccacuuauggagaggaaaauaauucuuucuagucuucccuaccucccguuuuucuuucaaacaaggguuuguaaaaaugaa

SEQ ID NO: 4168907 - RNA, 115 nt, Human
uucauagagcaggguuaucugcauuuuggugucuucuggcauggauuugagugucuuuaccuuuuggucaggcacgucuaugcuuaggucucugccugccuuucugcuggaugaa

SEQ ID NO: 4168908 - RNA, 67 nt, Human
uucauagcaaugaugaucgcuuuggcagauuccagcaucuaaaagccugucuggucauagcuaugga

SEQ ID NO: 4168909 - RNA, 116 nt, Human
uucauauccuauccuccgcugggcuaacauuuuacaauccuuccacaggcuguuaucagcuaacaccuugcagggauuaugacagcuggcucaggggaggaacacguggaaaugga

SEQ ID NO: 4168910 - RNA, 65 nt, Human
uucauaucuacccuuaagauggucuuccuuaucuggaaaaaggcuggagcaagggggcauaugga

SEQ ID NO: 4168911 - RNA, 110 nt, Human
uucauauggaugcagagcuuuuuaaccauaucaaagagaaggauaggagcuuaaaauaugaaacuccugcuuuugauaugcuuaaauucugggucugauaucuuuuugaa

SEQ ID NO: 4168912 - RNA, 58 nt, Human
uucauauuucagauagcccuuugguccuugugccuggcuacccacugaaauaucagag

SEQ ID NO: 4168913 - RNA, 68 nt, Human
uucaucagaauacuaucaacagugauaaauucugcugcuagucuauaucauugauagaaugugaugag

SEQ ID NO: 4168914 - RNA, 62 nt, Human
uucauccagauacaugaggcacaguucuacaugcuggugcuggccaaaguguaccuggagag

SEQ ID NO: 4168915 - RNA, 84 nt, Human
uucaucuauggcaaacuacauuuuugaaauauuaauuguguucagucccaaaugagcuguugcagaauuaguuugccugaugga

SEQ ID NO: 4168916 - RNA, 57 nt, Human
uucaugagguaccugugaucaucagcuaugccugagagacacaggcaguccucagag

SEQ ID NO: 4168917 - RNA, 61 nt, Human
uucaugauguuuuuuguuagucucugauggagaagagacuaguacaguuuuggcacaugga

SEQ ID NO: 4168918 - RNA, 75 nt, Human
uucauggacucugucacuccaaccucuacggcaggaguucuuaaucuggggaagaaguuggaggauguccaugaa

SEQ ID NO: 4168919 - RNA, 77 nt, Human
uucauggcuucaugggagucugcaaaugacugacaagccuuaagguugcaggcuggcagauaucucaugcuacugag

SEQ ID NO: 4168920 - RNA, 59 nt, Human
uucauguguugucucauuuaauccuugcaguaaugugaugggugugagcugacugugaa

SEQ ID NO: 4168921 - RNA, 83 nt, Human
uucauguuugcacugaaaucaagcuagaagucauuuguauguauuucugcaaacugcauucuauagcuugaugcauuugugag

SEQ ID NO: 4168922 - RNA, 76 nt, Human
uugcucuauugcccaggcuggagugcaguagcacaaucuuggcugacuacaaccuccaccucccggguucaagcaa

SEQ ID NO: 4168923 - RNA, 78 nt, Human
uugcucucaguucuguccuccuaccaggcauuuauuuaagagagcuaaguuucuggaggcagaauaaugagaaggcaa

SEQ ID NO: 4168924 - RNA, 62 nt, Human
uugcucucuuuccucagccacagucuagaggaacucuaaggcccugaggagggaggugucaa

SEQ ID NO: 4168925 - RNA, 62 nt, Human
uugcucugaucugugccuuaggccugugaaagagacagcgccuauuugugaagacagcguaa

SEQ ID NO: 4168926 - RNA, 76 nt, Human
uugcucugucacccaggcuggagugcaguggcgcgaucucggcucacugcaaccuccgccucccggguucaagcaa

SEQ ID NO: 4168927 - RNA, 56 nt, Human
uugcucuugugcuuuuuucauugcuaguuuagaagcuugagggacauugggagcag

SEQ ID NO: 4168928 - RNA, 71 nt, Human
uugcugaaaguggcaagaaguaaccaggaucugucaacauaaauuauaucuacuuuuuccccugacagcaa

SEQ ID NO: 4168929 - RNA, 70 nt, Human
uugcugacucugccuuaguccuggggcuggcuauucagugggcuccucacuucuggcaguguaauagcaa

SEQ ID NO: 4168930 - RNA, 58 nt, Human
uugcugagggcagaugaauuagaggucucugacugagcucuuauuuuucccuuaacaa

SEQ ID NO: 4168931 - RNA, 83 nt, Human
uugcugcagaauuugaggggaaguuuuccugauuccuuaaaggagguucucaggaagaaauucuguaucuuuccucuguacaa

SEQ ID NO: 4168932 - RNA, 75 nt, Human
uugcugcucuuaaauuauuuugaauuguggcuugauugacaagcuucauagaacagaaauuuaauagcugaguaa

SEQ ID NO: 4168933 - RNA, 62 nt, Human
uuccaaggaaguuugcacuauuggccguuuggaauugcuuguuuaugacaacuuucuuggaa

SEQ ID NO: 4168934 - RNA, 67 nt, Human
uuccaaggcccagcagagaggauuguggggucuuagucccuccugcauauucauguuggcuuaggga

SEQ ID NO: 4168935 - RNA, 68 nt, Human
uuccaaggcuagguuguaaaggugacacaacuucugccuaccucauuuuagaacacuugcucuuggaa

SEQ ID NO: 4168936 - RNA, 89 nt, Human
uuccaagggaaggcacaugaccuaggccuggccaaucagcauauuccauauuuauggccaaagccagguugauguguaucaacugggaa

SEQ ID NO: 4168937 - RNA, 102 nt, Human
uuccaaguuaucucugaauuuaguuauagcagugucuuuauuuauuuuacuuaacuucauagaugauuuuaguugacuaaacuuaagaagaagaacuuggaa

SEQ ID NO: 4168938 - RNA, 75 nt, Human
uuccaauggcuccagguacucauuggcuguuagauuacaccuaauggccaaugaguaccugaacccaaaugugaa

SEQ ID NO: 4168939 - RNA, 130 nt, Human
uuccaauuauucaugucccuuuguuauugugcuauuaucuuuauguuuauuuuguuugacuguuuugguaaagacagaacaggcugagaaaaacaugaauuugaaaugguacagcguggguacccuggaa

SEQ ID NO: 4168940 - RNA, 89 nt, Human
uuccaauugcuucauuuccucaggcuuuacuauguugcugcuacagaaagaaauacuuggggacagugggguaaaaaaacacuuuggga

SEQ ID NO: 4168941 - RNA, 71 nt, Human
uuccacaaugcauaucacagucuccaugugcuuaggaacauuagagcacacuucagcaguaugcuugggag

SEQ ID NO: 4168942 - RNA, 74 nt, Human
uuccacacagucaaaccugcaacagugaacaccccauccaccucuaacugugccaaucugcugacugucuggaa

SEQ ID NO: 4168943 - RNA, 66 nt, Human
uuccacaguuucagaauuuaugcagacaauucaaggagauugcugcaguuauugaaacuaugugaa

SEQ ID NO: 4168944 - RNA, 61 nt, Human
uuccacauuuuugauacucucacucugccacagcgagugggcuuacugagggaguguggga

SEQ ID NO: 4168945 - RNA, 82 nt, Human
uuccaccagaaagcaucauugugauuucucucauuaucuaaaaugaauaagaauuauuauaaugauaaauuaguggcaggag

SEQ ID NO: 4168946 - RNA, 58 nt, Human
uuccacuccaccccugcaaauccugagcugcaugcagauggggcagggguggguggag

SEQ ID NO: 4168947 - RNA, 76 nt, Human
uuccacuccuccuggugggguggagggaccacaucagcacgaugucugaguugccgcucuacaacaggggagggaa

SEQ ID NO: 4168948 - RNA, 69 nt, Human
uuccacuguaauaaugguccccaaacacugacccacaaacugggccaaguuggaccauauuucaaggaa

SEQ ID NO: 4168949 - RNA, 130 nt, Human
uuccagaaacuucgguuccaguucuucuguuccaugagcugcagggcuuggguuuccccggaggaguuggaggaggugaguggggccuggggagguggaggagguggggaggaaucaggugggcuggagg

SEQ ID NO: 4168950 - RNA, 119 nt, Human
uuccagaaagaaccuuuguuuauagucuaaugcugugguucccagaguggaucagagcacccugagcacuguggggaacucacagaguuaccacuggauaguccaaauuuuuuauggaa

SEQ ID NO: 4168951 - RNA, 63 nt, Human
uuccagaaaucuuucagcucaaaccuugcaaaauacuaucuugagcugaauauguucuagggg

SEQ ID NO: 4168952 - RNA, 57 nt, Human
uuccagagcaugucaacuagcuuuaugcuuugcauuaaaguuaaccauucucuggga

SEQ ID NO: 4168953 - RNA, 69 nt, Human
uuccagaggcaacaggaaaccacaugaucaggcggucauuugggaaauuuccuuuggaagacuuuggaa

SEQ ID NO: 4168954 - RNA, 98 nt, Human
uuccagaggucaucccugugucuucuaacugcauuugucugucucaauugaucaguaaaaugagcaauuacagucggagcagcacugggauucuggag

SEQ ID NO: 4168955 - RNA, 76 nt, Human
uuccagauauaucuaaguuaggaacacugucucuugaaagauagagaucaguuagauagcuugaugugaccuggaa

SEQ ID NO: 4168956 - RNA, 66 nt, Human
uuccagauggacagagcugagcuccaccuucaguuugggguguggugcuccuguccaggcagggaa

SEQ ID NO: 4168957 - RNA, 71 nt, Human
uuccaggacucguucuggcucaucugcagccauggaugaauaaaaacucgaucaggacgcuggucuuugaa

SEQ ID NO: 4168958 - RNA, 62 nt, Human
uuccaggacuggguguuugaaggaggagaaaauaacuuacccuucugcucuagagucuagaa

SEQ ID NO: 4168959 - RNA, 62 nt, Human
uuccaggcuagaaacugaggcacaguugggaacugaugcaauuagauuguaauuuccuggaa

SEQ ID NO: 4168960 - RNA, 69 nt, Human
uuccagggcagcuguaucugagcuuauuugccccaaguacagacucagaagcaaguaaugccacaggaa

SEQ ID NO: 4168961 - RNA, 61 nt, Human
uuccaguaaaacccauaagauuuaggcaguucaucccugaaguaugugugggaugcuggga

SEQ ID NO: 4168962 - RNA, 109 nt, Human
uuccaguaccaauuaucacacuuaagcaguuuuugaaaaaggguauaauucucugcuacagaaggcaugaccuuuuuucagaacucuaaaggagauacuccuacuggga

SEQ ID NO: 4168963 - RNA, 62 nt, Human
uuccagucuggccugugcuuagagaaaaauucacaggauaagcacaacacauuuuucuggag

SEQ ID NO: 4168964 - RNA, 58 nt, Human
uuccagucuguuucugagaaacagaaccuguuccucagguucuguugaaauacuggaa

SEQ ID NO: 4168965 - RNA, 77 nt, Human
uuccaguguugauauuguguaaauguguaagucagaauguggcuuagaaagcuuuccauagucaauuggcauuggga

SEQ ID NO: 4168966 - RNA, 114 nt, Human
uuccaguucuaacauuacaaaacucuggggcuccugggagaaguuuuauuacaaagcagauauuuugaguaccuagugagucauagacacucuuuguaaggugggcaacuugaa

SEQ ID NO: 4168967 - RNA, 59 nt, Human
uuccaguugguagaauguaagggggaaaucugucucucucucucucucauaagcuggag

SEQ ID NO: 4168968 - RNA, 60 nt, Human
uuccaguuugcaguugacacuaacguuuuguugguagugaauaacaagcuuauaagggaa

SEQ ID NO: 4168969 - RNA, 60 nt, Human
uuccaguuuuguucucucuuacucagaaaugaggaaaaguccugagaccagaaaauggaa

SEQ ID NO: 4168970 - RNA, 74 nt, Human
uuccaugaaauaugcuaccugucuucccucugcugcagugcuucagugaggaaagggcauuugugcucauggaa

SEQ ID NO: 4168971 - RNA, 83 nt, Human
uuccaugagcuucaguuucauuaucguaaaaggggauaaaaugccuauguuaggaaguuauaguggaaaugaagucaaaggaa

SEQ ID NO: 4168972 - RNA, 116 nt, Human
uuccauuaauagaguaaaucacauugauuggguuucuaaugcuuaaccaagcuugcauuccugagauaaacccaacuuaaugaagauguauuacccuuucucuaauauuaauggaa

SEQ ID NO: 4168973 - RNA, 71 nt, Human
uuccauuaauccacagauauaaacuauaguaguguuucugcauuaccauaauuauuucugcagagcaggag

SEQ ID NO: 4168974 - RNA, 58 nt, Human
uuccauuaucuauuuuugucgccucaccuagguaaugacaauaaagugauacauggga

SEQ ID NO: 4168975 - RNA, 55 nt, Human
uuccauucaccuaucucaucuuauaaaauagaauaggugaacaaggagaauggga

SEQ ID NO: 4168976 - RNA, 80 nt, Human
uuccauucuugauuuucuucugguggccgaagggcuggacacagacuucucccaaccaucagagggcacagaguguggag

SEQ ID NO: 4168977 - RNA, 100 nt, Human
uuccauuuccagggcauauugauuuugaauauuaaagaagagcugcauccauucauucaucaaauguguucugagucagugcccuguucuggguauggga

SEQ ID NO: 4168978 - RNA, 130 nt, Human
uuccauuuguuuguauccucuuuuauuucauugagcagugguuuguaguucuccuugaagagguccuucacgucccuuuuaaguuggauugcuaaguauuuuauucucuuugaagcaauugugaauggga

SEQ ID NO: 4168979 - RNA, 75 nt, Human
uucccaacuauugauggaugugacaugcccacucuaaaauaugaaagaguacaaaaugcagcaucaucaugggaa

SEQ ID NO: 4168980 - RNA, 65 nt, Human
uuggauuggccagguguaggucacaccucucaucagagguaccagaggagcacauggccaaccag

SEQ ID NO: 4168981 - RNA, 71 nt, Human
uuggauuucuccuagagcaaaccgcaaaccaaggacuugggugcaaguaacuuguuugggagguaauccaa

SEQ ID NO: 4168982 - RNA, 67 nt, Human
uuggauuuggaaguugcucagcaaaauaguuaauugcuaaaugucagaguagcuugcauguaucuga

SEQ ID NO: 4168983 - RNA, 81 nt, Human
uuggcaacauuugucaucacugaggagagagguaacuagaggaugauuuauugcaaccuuuucuggugugauaagagccag

SEQ ID NO: 4168984 - RNA, 78 nt, Human
uuggcaagucuguuugucguucugaauaaccugaguccuccaacauuggccuuauucagauuggcuacaggaugccaa

SEQ ID NO: 4168985 - RNA, 73 nt, Human
uuggcaaucagaaaucacuuaaugaacguagguuaaaucacguaaaugaaagaaugauugacugaaugaccaa

SEQ ID NO: 4168986 - RNA, 56 nt, Human
uuggcaaugucuaaacacauuuuugguugucacaacauguggagagugguugcuaa

SEQ ID NO: 4168987 - RNA, 87 nt, Human
uuggcaauuaugaauaaagcugcuuuaaacaucuaugugcagauuuuguaugugcauaaguuuucagcaccuuuggguaaaugcuaa

SEQ ID NO: 4168988 - RNA, 85 nt, Human
uuggcagaggaaacuguugaucucaguuagcuagaaacagcugcuuuucuauuuuuauuuguaguuaauguuuuccaagugucaa

SEQ ID NO: 4168989 - RNA, 61 nt, Human
uuggcagcccagcuuacuagcagcucuucugucuucagagugcagugaggggagcugucag

SEQ ID NO: 4168990 - RNA, 62 nt, Human
uuggcaggaugauagcuuugugauaauguucccaauuucuuccauuguuauuguucuguuag

SEQ ID NO: 4168991 - RNA, 71 nt, Human
uuggcauaaguguauuuuauuauuuaacugguagaguggauucugcuauuugaaaccaagaaugccgccaa

SEQ ID NO: 4168992 - RNA, 97 nt, Human
uuggccaggauggucucgaucucuugaccuugugaucugccugccuuggccucccaaagugcugggauuacaagcgugagacaccgcgccuggccga

SEQ ID NO: 4168993 - RNA, 58 nt, Human
uuggccagguugggcuuugcagccauggaaacaagcuguaggggaaagcguuggcuga

SEQ ID NO: 4168994 - RNA, 62 nt, Human
uuggccagugucggaggccaggagggcuggaaggaagaguucuggaagaggacauuggccag

SEQ ID NO: 4168995 - RNA, 60 nt, Human
uuggccaucuaagcccagccacccacuaaacauggcaggaauucugggguuagaggccaa

SEQ ID NO: 4168996 - RNA, 86 nt, Human
uuggccauucccccaaggaagaggcagugccaaagucucccauuuggcagcaucaauccaugcuucuccuagggagggaucguugg

SEQ ID NO: 4168997 - RNA, 77 nt, Human
uuggccugacagcagagagagguaaggauuggguauuuaauuccaaggucuguggccaccucugggacugcagccaa

SEQ ID NO: 4168998 - RNA, 92 nt, Human
uuggccugccguggaagcuuuuauuaaaaucuugccauuuaccaagaauguguaauuuuuaaaugaaaguggagaaagucaugcaaugucaa

SEQ ID NO: 4168999 - RNA, 79 nt, Human
uuggcgagaaccagugggcaucuccuuggaagccaguccccaagguggcucuagauggcuuacuccugcaucuugccaa

SEQ ID NO: 4169000 - RNA, 70 nt, Human
uuggcgugccuggaagggaaauucagaucuucaguuugugcuguucaucuguuucuuuccucaacgcuag

SEQ ID NO: 4169001 - RNA, 92 nt, Human
uuggcuacaggccauuacuguugcuaauaugcaacucuguugaauauaaauuggaauugcacuuuagcaauggugauggauuguuaagccaa

SEQ ID NO: 4169002 - RNA, 74 nt, Human
uuggcuaccaauguguagggugccuguuuuugucuugaaccagauauacccuauccugcacacuugauugcuga

SEQ ID NO: 4169003 - RNA, 57 nt, Human
uuggcucacaugauuauggaggcugagaagccucaaggucuauagucagugagcugg

SEQ ID NO: 4169004 - RNA, 62 nt, Human
uuggcugaagguuaagugcuggaaauaaugacugaacgugcagacuuagaucuuuagaccaa

SEQ ID NO: 4169005 - RNA, 67 nt, Human
uuggcugaaugaggucaccuuucuuuaauucucuuagaugaagccuaagaaaacuauauuuggccag

SEQ ID NO: 4169006 - RNA, 58 nt, Human
uuggcugcuaauggcugacagcugccccuuucuccugaacauugcccuuggcggccag

SEQ ID NO: 4169007 - RNA, 90 nt, Human
uuccuaguaagccugagaguacuuauaugaacauuugucacauacaauauuuaacagaugucucauuucaguguuucuauuacuagagag

SEQ ID NO: 4169008 - RNA, 78 nt, Human
uuccuaucuuucuaacuugagauuguugagugauuuaaaaucauguuaaucauuucaacauucucaguuguaggggaa

SEQ ID NO: 4169009 - RNA, 81 nt, Human
uuccucaaaacuugaaagguacuguugguuucauuuuauuuacccugaaugggauuaacuguacuuucuaauuuuggagaa

SEQ ID NO: 4169010 - RNA, 56 nt, Human
uuccucaaagaauucagcuccauacgauaaguguuaaugcuuuauuucuuggggaa

SEQ ID NO: 4169011 - RNA, 91 nt, Human
uuccucaaagcugagaugcuauacauuguaagacacauucugauuucacagguauugauuuauaaaaugugugcaucuuagaauugaugaa

SEQ ID NO: 4169012 - RNA, 57 nt, Human
uuccucagcuguuugggcucauuaggagacucugacuuagacaugacggcaggggaa

SEQ ID NO: 4169013 - RNA, 91 nt, Human
uuccucagguguagccaugagauuauaugcccugaauggcugucauagcauugaaagcaaggaaauguaguccucaucuccaucuguugaa

SEQ ID NO: 4169014 - RNA, 68 nt, Human
uuccucaguucagaaggcagcaaaugaaaaccacgcuugugauuccucauucuagucuucaaggggaa

SEQ ID NO: 4169015 - RNA, 56 nt, Human
uuccucaucugugcaccucacuggcagacuucuaaggagauggacagaugaagggg

SEQ ID NO: 4169016 - RNA, 64 nt, Human
uuccucaugcuuguucucagcucaaauuucaucuagauguuucagaguuaguagagcaugugaa

SEQ ID NO: 4169017 - RNA, 77 nt, Human
uuccucccugcaggcagaggaagucugggucugaggggugggcugguauuuacccaaagaggcuuccuugggaggag

SEQ ID NO: 4169018 - RNA, 62 nt, Human
uuccucguuagguauauuacuuggaaauauauugcauucaaaguaccguacuuaauggagaa

SEQ ID NO: 4169019 - RNA, 83 nt, Human
uuccucuacagcauaaugugugucauacagacuuuggcuuuaauccuuagcuuuguauuugagcauacgaggccuguuaggag

SEQ ID NO: 4169020 - RNA, 55 nt, Human
uuccucuauucuaacaaaaguaucacacuggugcaggauguugauagugggggga

SEQ ID NO: 4169021 - RNA, 60 nt, Human
uuccucucugaacugugcucaccaguguuugaauccauuuaagucaguucugaggaggaa

SEQ ID NO: 4169022 - RNA, 128 nt, Human
uuccucuuccuuuuucuuggugguccacagugacugcuugagaaggaacaaauugcuuucacuucugucauuuccacuuucucaagucuucuucuguuaccacuauaacuuccugaaaaugaguagaa

SEQ ID NO: 4169023 - RNA, 59 nt, Human
uuccucuucuggacuccuauaacuuggauaguuauaggaaaaguucuagaaaaguggaa

SEQ ID NO: 4169024 - RNA, 71 nt, Human
uuccucuugcuguaggcacaacaaggaagugagcaaaaacccuucuaguuacagugcauagcaagauugaa

SEQ ID NO: 4169025 - RNA, 77 nt, Human
uuccugaagcgccugcggugugagccugcugugaacagccucauccaguguaggcugaccccagagcggcccgggga

SEQ ID NO: 4169026 - RNA, 60 nt, Human
uuccugaccucgugaucugccagccuuggccucccaaagugcugggauuacaggcaugag

SEQ ID NO: 4169027 - RNA, 82 nt, Human
uuccugacuuccugguuuuauguuauagauggauugauuaauuuuaucucccucuaaacuguaagauucuugaagacaggga

SEQ ID NO: 4169028 - RNA, 55 nt, Human
uuccugagcuccaccucaaauucugauuuacgaggucuggggugaagcccaggaa

SEQ ID NO: 4169029 - RNA, 74 nt, Human
uuccugaguacaaucuuuaguuuccugaaauagaguacuggguauuucaugcuuuggguuagaaaccuuuggaa

SEQ ID NO: 4169030 - RNA, 96 nt, Human
uuccugauucuucuugugauuccuuuucucuagaggaacauagaucaacuucucuauggaaauucuguaagggauuuauucugaagaacucagggg

SEQ ID NO: 4169031 - RNA, 56 nt, Human
uuccugcaggccauagagccugccacaaaccagguagauuccauuggcccagagaa

SEQ ID NO: 4169032 - RNA, 56 nt, Human
uuccugccggaucacugggcucugccaacuucaguccccagagguugcggcaggag

SEQ ID NO: 4169033 - RNA, 59 nt, Human
uuccugccugaggcuccuggugggagugaugcuaccuugggggagucucaggagaggaa

SEQ ID NO: 4169034 - RNA, 80 nt, Human
uuccuggaaggugaggcuggcuugccuucuugauuuauguggccaaaggguagcagccaccucugcaaagguccagugaa

SEQ ID NO: 4169035 - RNA, 65 nt, Human
uuccuggauccuaggagguggguauuugcauugucuuuaauugccaugcucauagggucgaggga

SEQ ID NO: 4169036 - RNA, 65 nt, Human
uuccuggccucaaguccuccuaccuccucagcuuucuagagguauuuggacuacaggcacaggga

SEQ ID NO: 4169037 - RNA, 64 nt, Human
uuccuggcuaaucuuaaggcuuuugcuaaauuuaauuagcacauacugcaaagauuacuaggaa

SEQ ID NO: 4169038 - RNA, 58 nt, Human
uuccuggcucacagcaguggggucaccuccccaggguucccacuuaguagcugaggaa

SEQ ID NO: 4169039 - RNA, 62 nt, Human
uuccugggagcuagccacaucugacugcuacaauaccauagauccuggacagauuccaggga

SEQ ID NO: 4169040 - RNA, 73 nt, Human
uuccugggcugcagagagcaccuugcucgucagaauuugcugcugucccauggcuuuuuguauggcccaggaa

SEQ ID NO: 4169041 - RNA, 56 nt, Human
uuugaugugcaauagucugauguucaaucucaauucaggaucaguagcauaucaga

SEQ ID NO: 4169042 - RNA, 64 nt, Human
uuugauguggacaaguucaaguaaugcagcuaaguauuaaaaauuacaaauuguccucaucaag

SEQ ID NO: 4169043 - RNA, 59 nt, Human
uuugauuaccuggggcccucugcuuccucacaggugucagcccugccccaggaaucaaa

SEQ ID NO: 4169044 - RNA, 59 nt, Human
uuugauuccuggggcagggcugacaccugugaggaagcagagggccccagguaaucaaa

SEQ ID NO: 4169045 - RNA, 59 nt, Human
uuugauuucauagauuguaaaucccugcaguacugcaagaagccauuuaugaaauugag

SEQ ID NO: 4169046 - RNA, 87 nt, Human
uuugauuuuaaugagaaugcuuguuuggagaugaaauuggugagacacaagaaagcugaauaaccacaggcuucuuuugaaaucaga

SEQ ID NO: 4169047 - RNA, 83 nt, Human
uuugcaaaacauggcaugaauaauguguacauuacuugcauaauugguuuugugcguacauauggcacaugcuauuuuggaaa

SEQ ID NO: 4169048 - RNA, 69 nt, Human
uuugcaaauaccaugaaacuugagugcugugugugcaucauuaugggcaguuucccuguuauuuguaga

SEQ ID NO: 4169049 - RNA, 64 nt, Human
uuugcaaauuagccacccuguuuugaggaagccaaagggcuucauggggaggcccauuuggaga

SEQ ID NO: 4169050 - RNA, 67 nt, Human
uuugcaagagaaaagccccuuuguuccaacuucaagccucuguugguccacgaguucucuuagcaaa

SEQ ID NO: 4169051 - RNA, 60 nt, Human
uuugcaauauggggauggaggggagcaguguuuaaaagaugcugaagauucccaugcaag

SEQ ID NO: 4169052 - RNA, 63 nt, Human
uuugcaauugaugagucugagauucauggauguuuaaugaguccaaggccauacaguugugag

SEQ ID NO: 4169053 - RNA, 81 nt, Human
uuugcaauuuagauuuuuccccauuuuagugucuuaaagccuaaagagugacagcagaaugugaagauuuugaauuaugaa

SEQ ID NO: 4169054 - RNA, 58 nt, Human
uuugcacaagaaaucauggacugaauuuccaagaguucaggucucaauucuuugcaga

SEQ ID NO: 4169055 - RNA, 59 nt, Human
uuugcacacugugaauuugcauauguacauauaaauuuauguaauuucauaggugugaa

SEQ ID NO: 4169056 - RNA, 88 nt, Human
uuugcacagcugcuugauggaggggccaggcuuugaacccucgcauuuugacuguagagucugugcuuucaucaggaggaucugcaga

SEQ ID NO: 4169057 - RNA, 63 nt, Human
uuugcaccagggaagagaugccccagcaccugcuucaggccacagcucuuucuuuggcacaaa

SEQ ID NO: 4169058 - RNA, 60 nt, Human
uuugcacuggaaguacaugcauucaaaauggauaccuaaguguauauuuucugguguaaa

SEQ ID NO: 4169059 - RNA, 63 nt, Human
uuugcacuguaccauagguaagcucagagaagaggguucuugcuuaagauggcauaguacgaa

SEQ ID NO: 4169060 - RNA, 75 nt, Human
uuugcagagcaaagugugguggaggaggaggcuggcagggccugucuccacagucccaccucgcuuuccugcaga

SEQ ID NO: 4169061 - RNA, 106 nt, Human
uuugcagauggaauuaagguuacaaauuagcucacuuuaagauaggaaaaauacucucaauuauaaaguuggggcugaaguaaucacaugaacccuuaaaagcaga

SEQ ID NO: 4169062 - RNA, 60 nt, Human
uuugcagcaaggagagagcauucgcacuucauucuuggguuaugcacaccuagcugcaaa

SEQ ID NO: 4169063 - RNA, 58 nt, Human
uuugcaggcacggaggcagcuggacauccuucgcuucaccagccucugggccugcaag

SEQ ID NO: 4169064 - RNA, 75 nt, Human
uuugcaguucccauaggagauaaaacaagucucuuuucaaacaugaagagauuuccuaugguaauuauaggcaaa

SEQ ID NO: 4169065 - RNA, 55 nt, Human
uuugcaguuucauugcugaaaugauucuucuuauuucagcacuuuaggcagcagg

SEQ ID NO: 4169066 - RNA, 127 nt, Human
uuugcauauugaauaccaaguacugaaggauggaagagauguggcacagcacaguaagaggagacuucugucauucuuacauuagucugugcuuucaacuagcuuuguaaccaugggaaagugcaaa

SEQ ID NO: 4169067 - RNA, 61 nt, Human
uuugcauuuucuagcuaguuuacuugggaagagagcugaguaaaggcuuuagaauggcaaa

SEQ ID NO: 4169068 - RNA, 101 nt, Human
uuugcauuuuggaaauaagaaacuaaagcucagagagauagugaaguuuguggcuaauugucauccuucagcucucuauuuagaugucauuuccuugcaaa

SEQ ID NO: 4169069 - RNA, 69 nt, Human
uuugccagcuggcuuucuauuuggugcuaucucuccauaggaagucccggagaaggaucggaaggcagg

SEQ ID NO: 4169070 - RNA, 130 nt, Human
uuugccgcuuaguggggcuccggcggugggaugggucucugccgugagcuuucgcgagccgcucuuggcagccuggaaugcgaggcuagcucacgcuucucuuacaccucucuugcccuucuggugguaa

SEQ ID NO: 4169071 - RNA, 70 nt, Human
uuugccucugguuaucugguaccuggccguggggcaauuagggcaggugcacaguggccuggagugugag

SEQ ID NO: 4169072 - RNA, 90 nt, Human
uuugccucuuuuccucccuuucugccuucuaaaauaagcaggcacaagcuccuuugauaagguagaaaugguuuggaaggaacaggugga

SEQ ID NO: 4169073 - RNA, 55 nt, Human
uuugccuggacccccagcaucaugguuucccauuucauggggucucucagguaag

SEQ ID NO: 4169074 - RNA, 109 nt, Human
uuugccuuguuuaccaacuuugaguuuagcaacaggaacuauuuguauuccauuauguuuauaaaagauggaaauauauuuucuguuuuuucuugguggaaggggcaaa

SEQ ID NO: 4169075 - RNA, 74 nt, Human
uuugcgcgacccuccaggcgguucccgagcagcucaccgaacaggcucugcagggccgcuggaggucauggaaa

SEQ ID NO: 4169076 - RNA, 62 nt, Human
uuugcggauguccacgucacacuucaugauggaguugaagguggucuuguggaugccgcagg

SEQ ID NO: 4169077 - RNA, 76 nt, Human
uuugcucauuguuaaaaagguggaaaugcuucccaucuuucauuguauucucaaaauuuuugacaacuugaucaag

SEQ ID NO: 4169078 - RNA, 106 nt, Human
uuugcucuauucugcuguucuauuccccuuaucugugacucaaagaggugccaagaaaagagucugagaugacuuugggaagaaagagagggcagaagagagggaa

SEQ ID NO: 4169079 - RNA, 56 nt, Human
uuugcugugcccuucuuguggcagcacuuucugcuacaagagcaagcauggacaag

SEQ ID NO: 4169080 - RNA, 56 nt, Human
uuugcugugggauauccaugugcacccugccuaaagcacguuuuuccacuagcaaa

SEQ ID NO: 4169081 - RNA, 130 nt, Human
uuugcuucacaaagaccaaacagcauguuaaaccgcuucaugauauagaguuuguuuuucagauauuacacauaaacaaagcuuuaugacuuggagacaguuauagaaaguaguuugcugguaaagcaga

SEQ ID NO: 4169082 - RNA, 85 nt, Human
uuugcuucccaguuuuacccuagguccagauuguagaauccuggagucaccauguucugcaggagcccuaguguaugggagcaga

SEQ ID NO: 4169083 - RNA, 55 nt, Human
uucauuccuuguugucugaaaugucaaaucauuuuaccagaauagcaggggagag

SEQ ID NO: 4169084 - RNA, 66 nt, Human
uucauucuuggcccguccucacgcaaaggcaagagagccaggugcugggauggagccagauuagag

SEQ ID NO: 4169085 - RNA, 83 nt, Human
uucauugaugugguuuaauguauauuccuguaaucuuucccuguuuuauaaacuuacaaucauaauugagccacauuagagag

SEQ ID NO: 4169086 - RNA, 76 nt, Human
uucauugcagacuaacaaucucaaaagaauagauuggugcucgacugaacuguguccugagauguuucuaaaugaa

SEQ ID NO: 4169087 - RNA, 55 nt, Human
uucauugugauucuuggcuagcuuuugacuuggagauagucaugaucacagugga

SEQ ID NO: 4169088 - RNA, 83 nt, Human
uucauuuaacaaaucaggaaauugcaacagucugagcucaaacauauaacuggugcuuacauugucuuaguuuucaaaaugaa

SEQ ID NO: 4169089 - RNA, 117 nt, Human
uucauuuaacauccauucaaagucugacuguauguuuuccaguucuuuaguucacaucaagccuccaaccaaaggagaaaacauacaggacuucgaaaaaagggaugaagaaaugga

SEQ ID NO: 4169090 - RNA, 101 nt, Human
uucauuuagaauucaugguaacagaauucuaaauguaauuuagaauuuauaguaacagaauucuaaauguaauuuagaauuuauacauggagagagaugaa

SEQ ID NO: 4169091 - RNA, 91 nt, Human
uucauuuauucucucacucauuuguuaaauauuuauugagugccuucauuguuguaggcauuuuguuaagcauugaggaugcaaaaaugaa

SEQ ID NO: 4169092 - RNA, 72 nt, Human
uucauuuccuuuaggaaugagaaagaauuagaugaguuucagcuggauccauuuuauuucuaaaggagagaa

SEQ ID NO: 4169093 - RNA, 96 nt, Human
uucauuucuugaugcaaccuuccuuaguguuagauucugugcuguaguuggauuggaaagucaugauccacuaggggagauaagcauuuaugugaa

SEQ ID NO: 4169094 - RNA, 67 nt, Human
uucauuugccccuggucagaggaggcugggaggaccccaaucccugaucagaggagccuacaaugaa

SEQ ID NO: 4169095 - RNA, 82 nt, Human
uucauuuguaaaaagggucacaaaggguguuucuauaauuuauauuccuagcauacacccuaaacugcuuaaagcaaaugaa

SEQ ID NO: 4169096 - RNA, 91 nt, Human
uucauuuuuugguaauguuucauugcagauauguagacacuuuguucagucuuaacuugcccuuuguaaugauaauguuaaauuagaugaa

SEQ ID NO: 4169097 - RNA, 67 nt, Human
uuccaaaaguuguugcuaagauuaugcuauuucuggagaaauagcaucuucccugguaaccauggaa

SEQ ID NO: 4169098 - RNA, 130 nt, Human
uuccaaaauuucucacaguaaaagagaagcguauguggguucaguugaaacagacaaaugaaauucucauccgagaacuugguauuccuuuuaacaagccaccacccaucuugucacugaugaaguugaa

SEQ ID NO: 4169099 - RNA, 62 nt, Human
uuccaaagcugcuuuauuuaguugagcaacgguacauaccauuggaagaagcagcuugggaa

SEQ ID NO: 4169100 - RNA, 69 nt, Human
uuccaaccuuucauuucacuugguagcuguuuccuuuuagcugcaguaugaggcugguggggaccggaa

SEQ ID NO: 4169101 - RNA, 72 nt, Human
uuccaaggucccaguaaauauaggaacguggaaugacagcauuuuggaauauguaugcagggcaccagggag

SEQ ID NO: 4169102 - RNA, 77 nt, Human
uuccaauaccaccucauucuggaggcugccggaggagcugaagcaauuuugucccaugggugaggugguggaaggaa

SEQ ID NO: 4169103 - RNA, 82 nt, Human
uuccaaugacagagcuucuuugcacacuggaucuuguggacuggauuucuggaagauucccagagaaguuccacauugagag

SEQ ID NO: 4169104 - RNA, 85 nt, Human
uuccaauuucaguuuuuuguuggcugagagcaacccauuuuauuugggacuuucagucuuuacaagguugcuucuacuuugagaa

SEQ ID NO: 4169105 - RNA, 64 nt, Human
uuccccuaagauacaaaugucaauauuggauuuagucuaguugaauggaugugucagaggggag

SEQ ID NO: 4169106 - RNA, 66 nt, Human
uuccccucagcauugcucauaaacguauaacaguuguuuucagguuuacagcaauguuagcaggaa

SEQ ID NO: 4169107 - RNA, 60 nt, Human
uuccccugucacagugguucucaacguucacugcauauuagaaucaccuguggagcagaa

SEQ ID NO: 4169108 - RNA, 102 nt, Human
uuccccugugaagucauaaucccccauuugugacaucacagucuuuccacugcaaucaacagugauguuucaagcuggggauuaaaugcuucagaagaggaa

SEQ ID NO: 4169109 - RNA, 95 nt, Human
uuccccuugcuagucucccuugcagucuguguagaagccuuugaccuaggcuccaccagucaggugcauccaugggagauuucaguuugggagaa

SEQ ID NO: 4169110 - RNA, 55 nt, Human
uuccccuuuuugugugcagcugaguguaucucucguuugccagaagggaggggaa

SEQ ID NO: 4169111 - RNA, 61 nt, Human
uucccggguguguauguguguaugugaugagcucauaugcauaaagaaagcuaucugggaa

SEQ ID NO: 4169112 - RNA, 89 nt, Human
uucccuaagggaaaucaggaugauguuccagaauaccauuuuuaacaacccccgcuguucuuugauacucccugauuugcuugggggaa

SEQ ID NO: 4169113 - RNA, 93 nt, Human
uucccuaggacucaucuuuguuaucucagaucuuguugguuuaagaaaaaugguacaacuagagcagauugcagaguaggugcuucuggggga

SEQ ID NO: 4169114 - RNA, 64 nt, Human
uucccucgugcagaugcggccaggaauaucuuaauuuauuggugugcuggcaugcaagagggaa

SEQ ID NO: 4169115 - RNA, 61 nt, Human
uucccucucagagucgccaggcuggggcaucuaucccaggaaauuggcuauuugggaugaa

SEQ ID NO: 4169116 - RNA, 129 nt, Human
uucccucucugauaagguccccucaggaguccuggcugccuagucccucagccucaccaagggcacuuugcuaaggcacguggguggaguggacggccagguuccuaugaagccauaucagaguuugag

SEQ ID NO: 4169117 - RNA, 64 nt, Human
uucccugcccuccacgcuucaccacuuggaggaucaucaaaggcagagcgcagagggcagggga

SEQ ID NO: 4169118 - RNA, 109 nt, Human
uucccuggagauggcagugggggacggcggagcccgggccacacuuuccucccguaacuuaucccagggaaagauguugcugcuccgcccuccucccuucucccgggag

SEQ ID NO: 4169119 - RNA, 77 nt, Human
uucccuucaaagcaauguuuuuccuuccauauugguuccuuugauaaacaguguugagagaguauugcuaaagggaa

SEQ ID NO: 4169120 - RNA, 126 nt, Human
uucccuucaauuacugcucccugcccgucuuggcacagcuugucauaaacucauuuauacuaaugugugaguggcuaagugugccuucgaacuuggccggcagaggggugaaucugauggagggaa

SEQ ID NO: 4169121 - RNA, 55 nt, Human
uucccuuucugaggcugccauacugccacuguccagguggagcuaagaaaaggaa

SEQ ID NO: 4169122 - RNA, 130 nt, Human
uuccgaugcacugcaauucuuuacagugggugcaacaaaggucuggaaacagcagggagaaucagggauaucucaccugccuccaggcucuagaugugaagacggcaggagagaaaagaaaaggaaggaa

SEQ ID NO: 4169123 - RNA, 85 nt, Human
uuccgccucagccucccaaauagcugggacuacaggcgcccgccaccaugcccggcuaauuuugguauuuuuaguagagacgggg

SEQ ID NO: 4169124 - RNA, 101 nt, Human
uuccgccucccuugugcguguucugugcaucuagccaguaugggcacuguccuagccugugcaggcugccuucacagagccccacagacuggcuggcugaa

SEQ ID NO: 4169125 - RNA, 81 nt, Human
uuccgcugccucccucugauuguuggauggacccucaaccagaggccuggugggccccagcacgucuggggaggggcugag

SEQ ID NO: 4169126 - RNA, 73 nt, Human
uuccgugccaagccaagaguuaacuauuugugagaagaaaaacagaaauacauucucugguguguguuuggaa

SEQ ID NO: 4169127 - RNA, 117 nt, Human
uuccguuccuuuccccugccggacuccgcgcucugauauauacaggagaggcccuggaggggagaaggcguccucacugcagugcuccgagcagcggccgcaggaagaggcguggaa

SEQ ID NO: 4169128 - RNA, 86 nt, Human
uuccuaaaggaaaagugggaacucucugggaggcaucaugcuagcaaagccagagaucucuuggaaguuuuaacuuucuuugggag

SEQ ID NO: 4169129 - RNA, 67 nt, Human
uuccuaacaagggguauucauccacugacucuccauuggucauugucugagugucgcuucuugggag

SEQ ID NO: 4169130 - RNA, 55 nt, Human
uuccuacaggugcaaacccuccuaguaucacccgcaggcuccuguaccugaggaa

SEQ ID NO: 4169131 - RNA, 74 nt, Human
uuccuacuuugucuucauuaucugguuacuuuucucuauuguagcuaaguuuccaaaaggagacagggaaggaa

SEQ ID NO: 4169132 - RNA, 76 nt, Human
uuccuaggacuggaccagaaaggacauggcuuuguaagagcuuuccuagcaaugucuuuuuggccaucugugggaa

SEQ ID NO: 4169133 - RNA, 57 nt, Human
uuccuagguguuuacauucaacauuuuguauugugaaguaugugagcaucuauagaa

SEQ ID NO: 4169134 - RNA, 76 nt, Human
uuccuaguacucaguccuuggaggauucucuugcugacugaaaaguaaguuggaaucuggaacugaucaaaaggaa

SEQ ID NO: 4169135 - RNA, 67 nt, Human
uuccuaguccuuauucuuucaauuugacuacugguaaugcccacauaguaugcaagaagauuaggaa

SEQ ID NO: 4169136 - RNA, 117 nt, Human
uuccuauaaaacauggucaaagaaacgaaguuaaaguagauaggcaagguaaacacagauuuaacaguaguuuaguguuacauauaccugagcuuauaugcuuuuuaccaauaggga

SEQ ID NO: 4169137 - RNA, 59 nt, Human
uuccuaugauagaaauguuggagcauucuuuaguucuaagaucuacuauacauguggaa

SEQ ID NO: 4169138 - RNA, 93 nt, Human
uuccuauugcuccuuuuguugcuauuuagcaccugugcacaccaggcauuagucggugcauugggagucagugcugaacaaaggggguaggag

SEQ ID NO: 4169139 - RNA, 64 nt, Human
uuccuauugggauuuggguugguuucucauuaauuuaauuagccaggcuugacccuagugggaa

SEQ ID NO: 4169140 - RNA, 105 nt, Human
uuccuauuuuaaaugguuccuacuuugauugcaagcauuuauuauaauuaucaagagauuagucugcugugauagaauccuuguaauggaaccauuuaaaaggaa

SEQ ID NO: 4169141 - RNA, 87 nt, Human
uuccuauuuuugcuggaggagcauggacuggagucagaucuacuuggcauugaauccuaguucuguuucuucaucaacaaauaugag

SEQ ID NO: 4169142 - RNA, 64 nt, Human
uuccucagaaagcuuuuacuuaaacaggacaucuuccugucuugugagauuauuucaauaggaa

SEQ ID NO: 4169143 - RNA, 71 nt, Human
uuccucagaccugagauuuugaggcucaugacccugguaagugcagaaaggauaucuuguggucugaggag

SEQ ID NO: 4169144 - RNA, 58 nt, Human
uuccucagagggcgcuggggaaagagaggggaccugauuucuucgacccucggaggaa

SEQ ID NO: 4169145 - RNA, 58 nt, Human
uuccucaggcugcuuucacauaaccugucuuuaggcugugugaguaaggcugagagag

SEQ ID NO: 4169146 - RNA, 74 nt, Human
uuccuccucucgggaagagcuccucauugccuuugcuuuuugucaguuggcagggguucauuuugucuuaggaa

SEQ ID NO: 4169147 - RNA, 86 nt, Human
uuccucuacuacccgcccaucaguggcaaauaaacaccuuaccaugacauucacugugaguauugcuagcgggagaaguggaggag

SEQ ID NO: 4169148 - RNA, 80 nt, Human
uuccucuagguccacagauuugguuucugcuggauuguugccauuuucccagggguaaagccagagguggauuuggggaa

SEQ ID NO: 4169149 - RNA, 71 nt, Human
uuccucuccucccaccaggugaacaauucuauauccugcuucuccauggaaauuccugagugggagaggaa

SEQ ID NO: 4169150 - RNA, 58 nt, Human
uuccucucgcucuccggggccccugugcaaagagggucuuccccccgagcagcaggaa

SEQ ID NO: 4169151 - RNA, 101 nt, Human
uuccucuugaucuacaauugaacuucacggaauaguaguuuugcaauacauuaucagcuauuaugugaagaaagugcuucauggauaaagaaauauaggaa

SEQ ID NO: 4169152 - RNA, 130 nt, Human
uuccugaaauacuuuaugucuccuccacaccauggagaacaguucuguguuggugagaagcaagccaaggcagaagauggcucuuguguggugcaguuuacaaaagagagacaaaauuugauagcagcca

SEQ ID NO: 4169153 - RNA, 65 nt, Human
uucccuggauauauguagauccaggcacauauuccagguuucuuuuaaaauauguagacagggaa

SEQ ID NO: 4169154 - RNA, 123 nt, Human
uucccuggccuuugaagggaagauguugcaauguacaggcaguuggaguguuuugccuaauucaucaaaacauucacauuugcuaguaauacaaugcaucuaugaugagaaggacuuagggga

SEQ ID NO: 4169155 - RNA, 129 nt, Human
uucccuggugaauuuguagaauuuaaccacuuuaaauaacaguauccccauuugcaagaugaagauaauauuucugcuuuaugacuguuuggggaggauuaaaugagacaauauagauuaaauauugaa

SEQ ID NO: 4169156 - RNA, 85 nt, Human
uucccuguugcuguccuuccuggauaacuggggcaauuuuauucuuaaaguuuuccuguguccaagauggcagccaagcagggaa

SEQ ID NO: 4169157 - RNA, 72 nt, Human
uucccuuaauucaugaguagaaucuauauacauauauuauucugguuuucuauugaugaaguacauggggaa

SEQ ID NO: 4169158 - RNA, 99 nt, Human
uucccuuucagcugcguuccugaauugcuagcgcaccaauucugcuuuacugaccacaauuggugcagcugggauggcgaaggagcaacugaaaaggaa

SEQ ID NO: 4169159 - RNA, 110 nt, Human
uucccuuuccuauuugucuuuucuuuaagacucugcucuuggugcuccagcuugugucagcaccagacuucccagaguuauaaacagcagaagaaaaggaaggaacggaa

SEQ ID NO: 4169160 - RNA, 72 nt, Human
uuccugugaaggccaguggauaaaaccucuuauguuauucaugagggguauucaucugcccuaaagcaggga

SEQ ID NO: 4169161 - RNA, 65 nt, Human
uuccugugucuucuguuuugaaguuauuuuauugugaaaaacuaaauacacagaagcacagagaa

SEQ ID NO: 4169162 - RNA, 58 nt, Human
uuccugugugucagaugcacaguauuuacuuuguacuaugauuuggauaugcagagaa

SEQ ID NO: 4169163 - RNA, 61 nt, Human
uuccuuagggaaagggauaaggcauagccagauaugggagugagaucccuucucugaugag

SEQ ID NO: 4169164 - RNA, 62 nt, Human
uuccuuaggggacagggggauaccagaaagagucucugcccuucuguuaaccaucugggggg

SEQ ID NO: 4169165 - RNA, 77 nt, Human
uuccuuagugugagugccccaugggguacauuuaggggcuaugugagccucucuuccaggaggcacugacagaggag

SEQ ID NO: 4169166 - RNA, 64 nt, Human
uuccuuauaugaguugauuuuuagaauacucaaugugucugacuuuauuaauucacauuuggga

SEQ ID NO: 4169167 - RNA, 82 nt, Human
uuccuuccauucccucuuuuccaacaguuguguugauuuucaggauagcugcugcagagaagagaauucaaagauggaggaa

SEQ ID NO: 4169168 - RNA, 57 nt, Human
uuccuuccucuuucacaacagccaguucuguuuuccccccugugauagaguaaggag

SEQ ID NO: 4169169 - RNA, 70 nt, Human
uuccuuccuuaucccuacuucaccugauuggcuagguuucuuaucaggugggaccaugauagggcaggga

SEQ ID NO: 4169170 - RNA, 71 nt, Human
uuccuuccuugagaagcaauuccucacaccacggagaaugcucagaggaauuugcucuuucacuucaggaa

SEQ ID NO: 4169171 - RNA, 85 nt, Human
uuccuucugcuggacauguuccaagggccaaaaccucaaauaaugugacuuuguagauuggagagugugugaccacagaaaggaa

SEQ ID NO: 4169172 - RNA, 66 nt, Human
uuccuugacuuuaaagccugacauuuuaagcuuuguaugaaauacuguugccuugagggaaaggaa

SEQ ID NO: 4169173 - RNA, 75 nt, Human
uuccuugcucugguagcaugucuuuuuagccuuugcaacauaugcagggcucagaaaugucuacggguagaggag

SEQ ID NO: 4169174 - RNA, 79 nt, Human
uuccuugguuuuaaacucuuaacugccuuaucuguguuaugucaacaucagaacaaaucgguuaagaacuugcaaggaa

SEQ ID NO: 4169175 - RNA, 63 nt, Human
uuccuuguuauuugaaggauuaauuagcuacaaaaugcuacauugauauuucaaauacaggaa

SEQ ID NO: 4169176 - RNA, 77 nt, Human
uuccuuucacagcuguccagugugucgugcuggagacuucccacagcuugccugccacuacagcugaagaauaggaa

SEQ ID NO: 4169177 - RNA, 73 nt, Human
uuccuuucacuuuuuacuugacauaaaugaguuuauguauugugugccaauuuguucagguaaguacugggaa

SEQ ID NO: 4169178 - RNA, 61 nt, Human
uuccuuucccuugcuucugugcaguuacaucaucuucuguccacuugccagggaaauggga

SEQ ID NO: 4169179 - RNA, 63 nt, Human
uuccuuuccucuuauuuucccagugaugucuucugagauaugacaggcccaggagaaaaggga

SEQ ID NO: 4169180 - RNA, 73 nt, Human
uuccuuucuagcucuaauuuuagguuuaacuccuuucucagagaauugaggagagaaucagaguggaaaggaa

SEQ ID NO: 4169181 - RNA, 65 nt, Human
uuccuuucucugucccuaaucacccucuucucuuggugaugugugggcaugcagacaggcaggga

SEQ ID NO: 4169182 - RNA, 55 nt, Human
uuccuuucuugagaccucucuacccauguuggaugaggucagccauaagacggaa

SEQ ID NO: 4169183 - RNA, 67 nt, Human
uuccuuuuucuaaacagugguguugguacuugaacaaaaucggcauuuguuaagaaggaaaaaggaa

SEQ ID NO: 4169184 - RNA, 60 nt, Human
uucgacaggagcuggagaagcucaggaaaugaaucacagaugucuccacuucugugagaa

SEQ ID NO: 4169185 - RNA, 79 nt, Human
uucgagaauguaaaccgugcacucccaggaaaaugcagacacagcacgccucuuugggaccgcgguuuauacuuucgaa

SEQ ID NO: 4169186 - RNA, 55 nt, Human
uucgagucuagugcacuuaaguguucagaauuuuacagaggcaaggagacuugga

SEQ ID NO: 4169187 - RNA, 84 nt, Human
uucgcccuucuucuugguaaugucacauuuccuguacccucaggcuaucgaggaagccuggcauuaaaaagcaaaaagagugaa

SEQ ID NO: 4169188 - RNA, 61 nt, Human
uucgcuugguguuuacauggcuuaaacugucuaauuuauagacucugaaagcaccggugaa

SEQ ID NO: 4169189 - RNA, 126 nt, Human
uucggaagugaggcugcagccagggauugagcauuggguuucugcaugcaucugcacauuuccucaaaugcaguccacaggccacagugcaauuaaacacccaaacugccaaguugaguuucugaa

SEQ ID NO: 4169190 - RNA, 74 nt, Human
uucggagagaccaagauuuggcaacuuugucauucugcagaggaaagagucugccagaucccuuuauuccagaa

SEQ ID NO: 4169191 - RNA, 76 nt, Human
uucggcugacuuuuucucuuuuuccuauugcuggucuuccaggacuucaaagcgugauaaagauaaggcagaugag

SEQ ID NO: 4169192 - RNA, 57 nt, Human
uucggcuuggguauuucucaggcacaugaccucucugagugugaacccaagccagaa

SEQ ID NO: 4169193 - RNA, 97 nt, Human
uucgggggauuggcuucuagucuagacucuugcuggguuaguguuuccaucauucugucaaggauccagcucuaaggcugauagccacuucccugaa

SEQ ID NO: 4169194 - RNA, 129 nt, Human
uucggguaaagggggaguauuugugugggcauggcuccauagcuucguuuaguaucagcccuaaacuuuuguggggaggagucuuucaaugagcccggggccauagucacgcacucuucccaacccgga

SEQ ID NO: 4169195 - RNA, 57 nt, Human
uucgucuggcaguugcacuguuuauguguguugauugagauggugaaggccagggag

SEQ ID NO: 4169196 - RNA, 74 nt, Human
uucguuuuaaugaacaugcaucguguguacgugugugcgcgugcauguguguguguguguguuuauauaaugag

SEQ ID NO: 4169197 - RNA, 71 nt, Human
uucuaaaccucaggcucucuggacaaugcagcucagccuucagcuccaccagagaggcugcagugugugaa

SEQ ID NO: 4169198 - RNA, 68 nt, Human
uucuaaagcagagauccuccacuucagcacaauugguguccugggcuggauaauucuuugcuguggag

SEQ ID NO: 4169199 - RNA, 81 nt, Human
uucuaaaggcuugccaaaaauucugauauuugaacaugugccauuguauuagucaggaccuuuugguuucaaguaacagaa

SEQ ID NO: 4169200 - RNA, 88 nt, Human
uucuaaaugauaaucugauuuacauauacaaaagauuugccuaugcuaucuggguugugauguaaaauauuuaguuguacaucuagaa

SEQ ID NO: 4169201 - RNA, 56 nt, Human
uucuaaaugggucagcucacaaaauaaaguggaaugugugcugauacauuggagaa

SEQ ID NO: 4169202 - RNA, 61 nt, Human
uucuaacucaaagcuucuuucaggagcuacucaacuccugagauuggcuuugcaguuaggg

SEQ ID NO: 4169203 - RNA, 58 nt, Human
uucuaacuccugggcucaagugaucuuccugucacaugagucucccaaguaguuggaa

SEQ ID NO: 4169204 - RNA, 58 nt, Human
uucuaacuuuugaggcaaugugacucccacuggaaacauuguucaaugaaaguuagga

SEQ ID NO: 4169205 - RNA, 69 nt, Human
uucuaagcuaaguagacuguugaacuugguuccucagggggaaucuccuccaaaccucugcuuuuagag

SEQ ID NO: 4169206 - RNA, 106 nt, Human
uucuaauaaacauaacaugaaugaaccucaaaaacauguugaguugaaaguagcuagauacaaaggacuauauauacuauauguuuuuauucauauguuuuuagaa

SEQ ID NO: 4169207 - RNA, 71 nt, Human
uucuaaugaagacaucauggagaggauagaugggcaagccuuuucuacaucuuuuccaauguugucuggaa

SEQ ID NO: 4169208 - RNA, 86 nt, Human
uucuaauguauccccaaggcuagcaagcaguagucauucaacuaacaauuguuugacuagagcugcagccuaagcaguauguugaa

SEQ ID NO: 4169209 - RNA, 71 nt, Human
uucuacaacauacauauuucaguguccauaaacuccagccauguggauauguuuauauguugucuauggga

SEQ ID NO: 4169210 - RNA, 114 nt, Human
uucuacuccuacauguuacgcuuuuagaucugucuuggagguacaaagacuucuggaauuagagaaguuugguccuucuaagaagagaaaaaugaauaaguagagaagucagaa

SEQ ID NO: 4169211 - RNA, 64 nt, Human
uucuacuguauucauugccuaaaguguguuagaaucuuuaaugcaugcagggaagacaguagaa

SEQ ID NO: 4169212 - RNA, 93 nt, Human
uucuacuuuucuuccaugaagcuccuguugucugauguacauaugcugaacacauauuauaaaauuacuggcagggaucugggggugguggga

SEQ ID NO: 4169213 - RNA, 81 nt, Human
uucuagaauauuauauaaauggaauuaugcaacaugcauacuuuguauaaggcaucucucaguuagcagaguguucuggaa

SEQ ID NO: 4169214 - RNA, 65 nt, Human
uucuagacacagacaguuagagguaauucacaaagaguuguaaaauugcucuguugugucuagaa

SEQ ID NO: 4169215 - RNA, 66 nt, Human
uucuagacauuauuucuacccacaauuuacuuuugugcuuugugugugcauguguaugcuuuggaa

SEQ ID NO: 4169216 - RNA, 80 nt, Human
uucuagacauuccuuaauuauuugguuauucuugaguaacuaucaaauuuaagaguaagugauuaagaagaugauuagaa

SEQ ID NO: 4169217 - RNA, 60 nt, Human
uucuagacuguguacagauucagaauuaagaaacuuaugaacucuuacugcagucuggaa

SEQ ID NO: 4169218 - RNA, 57 nt, Human
uucuagcuguucauguggcuuuaugcugauagugucagucaaaugaacaagcuugaa

SEQ ID NO: 4169219 - RNA, 75 nt, Human
uucuaggcagaaauuggcagagaagaccuagcguucaaggguucuagacuucucuuggcuauauuauuguuugaa

SEQ ID NO: 4169220 - RNA, 77 nt, Human
uucuagggcugccauaaugaaguacuacaaaugagguggcuuagacaaaagaauuuuauugucucccaguucuggaa

SEQ ID NO: 4169221 - RNA, 64 nt, Human
uucuaguuuccauuuuaagacagcugugaagcuacagucaauguguagaaugugguacguagaa

SEQ ID NO: 4169222 - RNA, 118 nt, Human
uucuaugacuguaacagaaauaggaaacucucagcuggucaucacuucuauuugguauaagaguggcaucauauguacuuagcuggcauuuccugauugacuguugguuuuuauagaa

SEQ ID NO: 4169223 - RNA, 79 nt, Human
uucuaugcaguauaagccaauggauugguugcuuuugcuuuucucaguagcaucauuauuuuggccauacuuuauugaa

SEQ ID NO: 4169224 - RNA, 79 nt, Human
uucuaugcuguuagaacauuuuuagaccaauaagaaggacaauuucauauggucucucaaaugugcuucuugcaaugaa

SEQ ID NO: 4169225 - RNA, 87 nt, Human
uucuaugguuaaagcuuugcaaugcuucauuauuauccuucuuuauuauccuugguauauaaugcagcuuuucaauggcccauagga

SEQ ID NO: 4169226 - RNA, 57 nt, Human
uucuauguaaacuguuggauuugacaaggaggaguugucaaaggcagauuacuggga

SEQ ID NO: 4169227 - RNA, 116 nt, Human
ugagcucuuugccuguaggccaagagguuuguugaaacccauccuguccgcagucuuggggaagugggaagcugugguguuuucaagcccuggcuuacugagcgccaagaaacuca

SEQ ID NO: 4169228 - RNA, 84 nt, Human
ugagcuggcucauuaauuacuaagcacaaugcaaugugauauuugcagaucguuugugugcuuguuaauuuauucagucauuca

SEQ ID NO: 4169229 - RNA, 55 nt, Human
ugagcuguaaggcugucacugaacauaaguggacaugaccagucuggcagaguca

SEQ ID NO: 4169230 - RNA, 62 nt, Human
ugagcuucagcugccaugacugucacacgcaggaagccgaucagucuugguagcugugccca

SEQ ID NO: 4169231 - RNA, 83 nt, Human
ugagcuuugcaauuagaaagaccuagaugugaauucuagcuacuccauuaacuagcugugugcauuugggucucagaggcuca

SEQ ID NO: 4169232 - RNA, 61 nt, Human
ugaggaaagaaaggcaugcaugaaggcuccauuccuuuucaaacauaauuuucuuucuuua

SEQ ID NO: 4169233 - RNA, 65 nt, Human
ugaggaaauggcacucauauaggcaaaauuacaggcuuuuuguuugaaugggucuauuuuucuua

SEQ ID NO: 4169234 - RNA, 78 nt, Human
ugaggaagagugugagucugggaaaauuuuggaucaccgaggugcagccauaccuuccacagccaucacuguugcuua

SEQ ID NO: 4169235 - RNA, 84 nt, Human
ugaggaaggggcucaaauucauucuuuucuauguggauauucaguuguccuagaaccauuguugaaaagaauagucuuuccuca

SEQ ID NO: 4169236 - RNA, 85 nt, Human
ugaggaagguguccaggaagcagagucagguccaaggacuggggugccuccuuucaccuggccagacucugacccaccuaccuca

SEQ ID NO: 4169237 - RNA, 100 nt, Human
ugaggaaugccacuugagagaugcugagugugaaguauaguggucuccaggccacuugacauuuucauuaagaaaccucuugccagugguaauuaccuua

SEQ ID NO: 4169238 - RNA, 97 nt, Human
ugaggacaaguauuggcccauucaauaccuuagagaaaagaaaacuaugggaaaauuuuuuucugagaguauaugccugagccaaauucuucacuca

SEQ ID NO: 4169239 - RNA, 63 nt, Human
ugaggacaccaagcccugagagguaaagugauuuucuuaaggucccagggccaggugccauca

SEQ ID NO: 4169240 - RNA, 76 nt, Human
ugaggacaugagauuugggaggggccaggggaagaaugauauaguuuagcucuguccccacccaaaucucaucuua

SEQ ID NO: 4169241 - RNA, 68 nt, Human
ugaggacugucuacuaacaagaagcccagaccuuuaaugggccuuggaaagcuggagcaguuugcuua

SEQ ID NO: 4169242 - RNA, 65 nt, Human
ugaggaggcagucugucccuuagcacagcuagagcacugugcugagagaucugcugcucucuuca

SEQ ID NO: 4169243 - RNA, 85 nt, Human
ugaggagguagcaugugagguaaaaucgguaagauguagaaauccauacuuugcugauuuacuauuacuuagauuuuucuccuua

SEQ ID NO: 4169244 - RNA, 66 nt, Human
ugaggauaguaugaauuaaaucaugagagaaaaaaugucuauucaugguauuuuuuauuaugcuua

SEQ ID NO: 4169245 - RNA, 71 nt, Human
ugaggaugacuccgauaugcccagagccugggguuaccaggauaugccugcugauuggaguugaauuguca

SEQ ID NO: 4169246 - RNA, 57 nt, Human
ugaggaugauggaaaaagaucagucaaggauaaugccuagacuuuucaucaaccuua

SEQ ID NO: 4169247 - RNA, 56 nt, Human
ugaggauggucccgaggacacuuguaauaaaccaagauuccuccaagcacuccuca

SEQ ID NO: 4169248 - RNA, 101 nt, Human
ugaggcaaaagaauugcuugaacccaggagguggagguuguggugagcugagaucgcaccacugcacuccagcccgggcaacagagcaacacuuuuucuca

SEQ ID NO: 4169249 - RNA, 102 nt, Human
ugaggcaaaguuuugcccuuguugcccaggcuggagugcaguggcacaaucuuggcucacugcaaccuccgccucuuggguucaagcgauucuccugccuca

SEQ ID NO: 4169250 - RNA, 97 nt, Human
ugaggcagaagaaucacuugaacccaggaggcagaggcaugagccaagaccaugccacugcacuucagccugggugacagagugagacucugucuca

SEQ ID NO: 4169251 - RNA, 101 nt, Human
ugaggcagaagaaucacuugaaccugggaggcagagguugcagugagccgagaucgcaccacugcacuucagccugggcgacacagugagacucugucuca

SEQ ID NO: 4169252 - RNA, 100 nt, Human
ugaggcagaagaaucccuugaacccaggaggugaaggcugcagugagccaagacggugccacugcacuccagccugggcacagggcgagacucugucuca

SEQ ID NO: 4169253 - RNA, 96 nt, Human
ugaggcagaggaaaugcuaauuucucagaccagagaggugugcuucucuacagcacgcuuuuacuauuuugagcucucuguauagcuuuuuuuuua

SEQ ID NO: 4169254 - RNA, 101 nt, Human
ugaggcagcaggauugcuugagccaggaagguugaaacugaagugagccaugaucgugccacugcacuccagccuuggcaauggagcaagacccugucuca

SEQ ID NO: 4169255 - RNA, 60 nt, Human
ugaggcagccugguuugaauggaaggaaagagccuggaccacagcagauaggcuguguua

SEQ ID NO: 4169256 - RNA, 101 nt, Human
ugaggcaggagaaucacuugaacucaggaggcggagguugcagugagcugagauggugccgcugcacuccagccugugcaacagagugagacucugucuca

SEQ ID NO: 4169257 - RNA, 102 nt, Human
ugaggcaggagaaucgcuggaacccaugagguggagguugcagugagcugagaucacgccacuguacuccagccuggguaacaagagugaaacuccaucuca

SEQ ID NO: 4169258 - RNA, 100 nt, Human
ugaggcaggagaaucgcuugaacccaggagguggagguugugguaagccaagauugugccauugcacuccagccugggcaacaagagugagucugucuca

SEQ ID NO: 4169259 - RNA, 102 nt, Human
ugaggcaggagaaucgcuugaacccgggaggcggagguugcagugagccaagaucgugccacugcgcuccagccugggugacaagagcgaggcuucaucuca

SEQ ID NO: 4169260 - RNA, 101 nt, Human
ugaggcaggagaaucgcuugaaccuggcaggcggagguugcagugagccgagaucaugccacugcacuccagccugggcaacagagcgagacucugccuca

SEQ ID NO: 4169261 - RNA, 101 nt, Human
ugaggcaggagaaucgcuugaaccugggaggcggagguugcagugagcugagaucgcgccacugcucuccagccucggugacagagcgagauuccgucuca

SEQ ID NO: 4169262 - RNA, 98 nt, Human
ugaggcaggagaaucgcuugaacucaaggcggagguugcagugagcugagaucgcgccacugcacuccagcugggugacagagugagauucugucuca

SEQ ID NO: 4169263 - RNA, 95 nt, Human
ugaggcaggagaaucgcuugaauccgggagguggagguuggcugagaccaugccacugcgcuccagccugggcaacagagugagacuucgucuca

SEQ ID NO: 4169264 - RNA, 100 nt, Human
ugaggcaggagaauggcaugaacccgggaggcggagcuugcagugagcagagaucgcgccacugcacuccagccugggcacagagcgagauucugucuca

SEQ ID NO: 4169265 - RNA, 101 nt, Human
ugaggcaggagaauggcgugaacccaggaggcagagcuugcagugagccgagauugugccacugcacuccagccugggugacagagcaagacucugccuca

SEQ ID NO: 4169266 - RNA, 101 nt, Human
ugaggcaggagaauggcgugaacccgggagguggagcuugcagugggcuaagauugcgccacugcacaucggccugggcaacagagccagacuccgucuca

SEQ ID NO: 4169267 - RNA, 100 nt, Human
ugaggcaggagaauugcgugaacccaggaggcagagguugcagugaaccaagaucgcaccauugcauccugggcgggcaacagugugagauucugucuca

SEQ ID NO: 4169268 - RNA, 101 nt, Human
ugaggcaggagaauugcuugaacccaggagauggagguuguggugagccaagaucacgcuacugcacuccagccugggugaagaagcaagacuccaucuca

SEQ ID NO: 4169269 - RNA, 101 nt, Human
ugaggcaggagaauugcuugaauccgcgagguggagguugcagugagccaagauuuugucacugcacuccagccugggcaacagaguaagacucugccuca

SEQ ID NO: 4169270 - RNA, 101 nt, Human
ugaggcaggagaguggcaugaacccaggagguggagauugcagugagccgagaucgugccacugcacaccagccugggugacagagcuagacucugucuca

SEQ ID NO: 4169271 - RNA, 100 nt, Human
ugaggcaggaggaucacuugagcugggaggucaaggcugcagugagcugugaucccgccagugcauuccagccugggcaacagagcaagacccugucuca

SEQ ID NO: 4169272 - RNA, 118 nt, Human
ugaggcaguggguucugcagggugggaugugggugacuccucccugcccugcuggugcgugugcacccuggcaggguguggaguugggacacacacguguguagggcugguugcguca

SEQ ID NO: 4169273 - RNA, 74 nt, Human
ugaggccuacuccuugcugcgucucuggguagauguugccugugaaugcauuaaugagugguaaagaaaccuca

SEQ ID NO: 4169274 - RNA, 76 nt, Human
ugaggccuccaggcugcuccaggguaggaaagaggcagagcgucugcuccucagccaggauagccaggaggcccca

SEQ ID NO: 4169275 - RNA, 99 nt, Human
ugaggcgggagaauggccugaacccaggagguggagcuugcagugagccaagaucucgccacuguacuccagccugggggacagagcaagacugucuca

SEQ ID NO: 4169276 - RNA, 56 nt, Human
ugaggcucagagaagugcuguuacuggcccaaggucacacagcguaucugaccuca

SEQ ID NO: 4169277 - RNA, 62 nt, Human
ugaggcucauucugcaugccaaauaauccuugauuuuuucuugguguuguaggagagucaca

SEQ ID NO: 4169278 - RNA, 66 nt, Human
ugaggcucugugcaaguauuugacauuuucugaagaaaauuuagaauugcaugcauccacuccuca

SEQ ID NO: 4169279 - RNA, 67 nt, Human
ugaggcucuuuccaaguaauacuucccaggcugggcucugggaucuuagggcuuuggaaagguagca

SEQ ID NO: 4169280 - RNA, 61 nt, Human
ugaggcugaugaaaguugaaagacugguuaauuuucuccuccuucucuugcuucagcuuca

SEQ ID NO: 4169281 - RNA, 55 nt, Human
ugaggcuguggcaccgugaccacaugcaugagcaaaauggaugccucaugccuca

SEQ ID NO: 4169282 - RNA, 65 nt, Human
ugaggcuuuaugcacagcagaugguaaaugcauguaaaagcaugagacucgguguauaaagauca

SEQ ID NO: 4169283 - RNA, 90 nt, Human
ugagggaccagagaccucgugcuucuuugcuuggcacuggccugauggcaaguccaaggagagacagcauuucuucauucugguugauua

SEQ ID NO: 4169284 - RNA, 66 nt, Human
ugagggacccugcagagcugaaugucggugaaagugaugcucagcuggugccaggguccaagcuca

SEQ ID NO: 4169285 - RNA, 69 nt, Human
ugagggagcuuuuucaugugucuauagcauguucuggauguaaugggagugaggcagagucuauccuca

SEQ ID NO: 4169286 - RNA, 130 nt, Human
ugagggauaaaauuauuucuuaaauugaaggaaaauuuaucacuuaagguaauuguugcugaaauuguuuuauaguuuuaguugaaauugcuuguuaauaauuccuggcauuuauucaauucaucuuuca

SEQ ID NO: 4169287 - RNA, 65 nt, Human
ugagggcuggucccggguccuccggcugccgcaucagcgagugcaggagggaggggaagccucca

SEQ ID NO: 4169288 - RNA, 58 nt, Human
ugaggggagaucgugccacugcacuccagccugggagacagugugagacuccaucuca

SEQ ID NO: 4169289 - RNA, 66 nt, Human
ugaggggcggccugcagaggccacacuuaaacucucuugugggcuucucuguccagcugcacccca

SEQ ID NO: 4169290 - RNA, 55 nt, Human
ugagggucuggaaucugggcuuggcuuaacuccauccucugacucagaucucuca

SEQ ID NO: 4169291 - RNA, 76 nt, Human
ugagggugaggggccaagaguagggcacccagccaugugugcugaaagcugccuucugcuuggaacucccacccca

SEQ ID NO: 4169292 - RNA, 130 nt, Human
ugaggguugucaaggacacucaggcaggauuugacccaaaagagaugaagguccugacuguacuccaguauggcugcagcauaaucagauuuuccucucucucugucacugucucagaaagcagccuuca

SEQ ID NO: 4169293 - RNA, 68 nt, Human
ugagguacgaaauacacuguacuuaaauuuccuguccuggaugugaauauauguguuuuucugcuuca

SEQ ID NO: 4169294 - RNA, 122 nt, Human
ugaggucauuggagugccaggaaaaguacuagagacuguuuagagagaccuugagaccacucagaugugggaugcaauucuuuguagaagcucuccuuccucuggcacugcauuuaaucuua

SEQ ID NO: 4169295 - RNA, 58 nt, Human
ugaggucccagggguagugugccccacuuugggcauggaagacaucauggagaccuca

SEQ ID NO: 4169296 - RNA, 84 nt, Human
ugaggucuucuggcaggguguguauuuacaguuuuucacaguccccaucacuccuuauuuaucauaccuuguccaauuugccca

SEQ ID NO: 4169297 - RNA, 68 nt, Human
ugagguggcagaauaauugaaggucagacucaaaauagagaggccuccauaaauauuuucucaguuca

SEQ ID NO: 4169298 - RNA, 75 nt, Human
ugagguggcuuuuguaugauuauaaaguuuuaacaguuuaaauugagagaacauuugucaaaaagccaacauuca

SEQ ID NO: 4169299 - RNA, 101 nt, Human
ugaggugggaggauugcuugagcccgggagguuggggcugcagugagcugagguagcaccacugcacuccagccugggugacagagcaagacccugucuca

SEQ ID NO: 4169300 - RNA, 75 nt, Human
ugagguguuaauuuuaauuauccaacucauccguuuuaaaacgcaugagguccagggaaguuaaaucacagcuca

SEQ ID NO: 4169301 - RNA, 74 nt, Human
ugagguuaguuuauaauucauuucugucuguugugccuaaaaucuuggcuauucagaaugaugacggcuccuca

SEQ ID NO: 4169302 - RNA, 76 nt, Human
ugagguuauaaaccacuccugauucacuucauuaagaaugugucuuggaguuuaacuggggugagaugugaccuua

SEQ ID NO: 4169303 - RNA, 79 nt, Human
ugagguuguugcagacacuccacagucgacauuuaguuuaguugcuauuucugguggcacgugucuugcaugggccuca

SEQ ID NO: 4169304 - RNA, 80 nt, Human
ugaguaauuuuugccagaaauacuagugcugauguaaaauaaggguuaggauuagggaaggauuuggccugaauaauuca

SEQ ID NO: 4169305 - RNA, 71 nt, Human
ugaguaccucucucuucuuugcuucugcccuuuuuuucuggcaaagauauuagaauagaguagaaacauca

SEQ ID NO: 4169306 - RNA, 59 nt, Human
ugaguaccugcauaagggguaauagcagaaaugcuauuauccaacacccaguuacauca

SEQ ID NO: 4169307 - RNA, 69 nt, Human
ugaguacugauuuaagauacacacaugugaaucauucucucuguggcugugucucaagucagagcauca

SEQ ID NO: 4169308 - RNA, 111 nt, Human
ugaguagcugggucuauaggugcuugccaucaugcguggcuaauuuuuuaaucuuuuuguagaguuaggucuugcuguguugcccaagcuggccucaaacuccuagcuuca

SEQ ID NO: 4169309 - RNA, 70 nt, Human
ugaguaucauagcauaaagaauacauuucuagcauuucagacuuggugauucuuccugcuggcauacuua

SEQ ID NO: 4169310 - RNA, 83 nt, Human
ugagucaccuguccuccauucagcauuccauuuucacacucuucuagggagaguuugggugggacagcuuggaccagguguca

SEQ ID NO: 4169311 - RNA, 94 nt, Human
ugagucacugccuucucagccccacacgggcacuuggggcaccaucagcauccaggaaagcacugggcugggagggaacaaggguuaguggcca

SEQ ID NO: 4169312 - RNA, 62 nt, Human
ugagucagagaacacagaggugauguuugggacuguuccacauuauaaauuuguuuugacca

SEQ ID NO: 4169313 - RNA, 96 nt, Human
ugagucaggcuaacagauuauggauauauguggacuggauucaagccgaugagcaagcacuucauuaguucauugaucuaaguuagcaagaaauca

SEQ ID NO: 4169314 - RNA, 82 nt, Human
ugagucauucuguccgcuuguuuguuagagccccuuuaaugguggaaguucucugauacauguugugauacaaagacccuca

SEQ ID NO: 4169315 - RNA, 57 nt, Human
ugaguccagaugggccagcagggaggaaaaccgcagccuggugccuucugcgauuua

SEQ ID NO: 4169316 - RNA, 63 nt, Human
ugaguccauucuguuuuccuggaccugaauuucuccaacugccagaagacaagaauguucuua

SEQ ID NO: 4169317 - RNA, 55 nt, Human
ugagucccccugggaaaaguaaaacuuugcauuucaaacauuccugggagacuca

SEQ ID NO: 4169318 - RNA, 129 nt, Human
ugaguccugucaccaucgccgucaucgugggccugcaagagcggagaagccagccagcccuccccauggcagcugugcagcuuggcuucaggccuggugcuugauggccugcgauccuucaguuacuca

SEQ ID NO: 4169319 - RNA, 72 nt, Human
ugaguccuuuacauuuuaguuaaccugugauaugucacucuaaccuagggaaaguguggagagccugauuca

SEQ ID NO: 4169320 - RNA, 70 nt, Human
ugagucuaauaugcuuuggaacuuaaauccuugguuuguugaccacagauuauuucuaaacaggagcuca

SEQ ID NO: 4169321 - RNA, 79 nt, Human
ugagucuguaccuucaccacuguguccaugguaccugacauguaguaguuguacacagagugguggaagaaauggacca

SEQ ID NO: 4169322 - RNA, 55 nt, Human
ugagugagacauccugucuuaacagcuagaauguucugggcaaauugucuucuua

SEQ ID NO: 4169323 - RNA, 78 nt, Human
ugagugccagaggcagugaggaguuguuccucugcaagaccucccaguuccccagccccccacugccaucugggacca

SEQ ID NO: 4169324 - RNA, 74 nt, Human
ugaguggcuuuaacaacagaaauuuauuuucucacaguucuagaggauagaagucugaaguuaaaguguuagca

SEQ ID NO: 4169325 - RNA, 71 nt, Human
ugaguguauaucaggagagagcuuuaguuuuugucuuuaaaugauuguucucauuccugcaguaacucuca

SEQ ID NO: 4169326 - RNA, 57 nt, Human
ugagugucaaaugugugccaagcugcugcugcagacuugcucucuuuugacagcuca

SEQ ID NO: 4169327 - RNA, 102 nt, Human
ugaguguguagagagcaaaagaauguggugggaaauaauuaggauuaucaggagacagacaagccuaaaacuuuguuauuguguuuuuguucuuuuaacuca

SEQ ID NO: 4169328 - RNA, 81 nt, Human
ugaguguguguucuuuugcuucacagaaaauauucugccaguuuucagaaccaagagagacaucaauuuauuuagcauuca

SEQ ID NO: 4169329 - RNA, 63 nt, Human
ugaguguucugugaggcagagcugaauaacccacccacgcccuguagcugacaggaucacuua

SEQ ID NO: 4169330 - RNA, 76 nt, Human
ugaguuaaaugagaacaugaaagaggcauuuacuuuucaccuuuugugccacugauuucccauuucacuuaacuua

SEQ ID NO: 4169331 - RNA, 85 nt, Human
ugaguucugugugaccagagaagacuaucacauuuuaaagacaccuguuuuugaagcacaaugucuuuuaucaguaugaaauuca

SEQ ID NO: 4169332 - RNA, 57 nt, Human
ugaguucuugggcccaggaccauguuuuaugcucuuuaauaucugccccagagcuua

SEQ ID NO: 4169333 - RNA, 87 nt, Human
ugaguugauuuacuguguuuggcuuuagauggcagggcuaaguacaauggguaaaaguuauaggaaggcagauuuuagcucaacuua

SEQ ID NO: 4169334 - RNA, 80 nt, Human
ugaguuuaaccugccagugaauacuaucuugaauguaacacaaacacagaagaguacacugaucguaaguauauaacuca

SEQ ID NO: 4169335 - RNA, 78 nt, Human
ugaguuuacuauugggcugcccaccucggagagacgaugaguuugucccaguuuugcagguuagaaauagaaagcuca

SEQ ID NO: 4169336 - RNA, 76 nt, Human
uccugaaaaucccagguguccuggaguugguacugucagcaucuucaaacauccccaccagggacuuucuauaggg

SEQ ID NO: 4169337 - RNA, 75 nt, Human
uccugaaauucugguugucacuuguggguagaaacauaugguuuacaaauggguugaugauuauuauuucaagga

SEQ ID NO: 4169338 - RNA, 59 nt, Human
uccugaaggagcaguugcugggcaguaaugcagugccaccuagcuucccuccugcggga

SEQ ID NO: 4169339 - RNA, 62 nt, Human
uccugaagguuauacauuaugagaaaugugagauuucuguauuuugucauaaccuccaaggg

SEQ ID NO: 4169340 - RNA, 130 nt, Human
uccugaccucuaacaauccuccugccuuguccucccaaagugcugaaauuacaggggugggccccugugcccugccugacuuguguauuuuacauuuaccaggaaacccuggcaucuguugaggugguga

SEQ ID NO: 4169341 - RNA, 70 nt, Human
uccugagcacaagggagcuuugagucauuccaucagcccaauggugcucaaauccuaaugugcaucagga

SEQ ID NO: 4169342 - RNA, 56 nt, Human
uccugagcaccuaugccauggcacacaagugcuggggccacaguuagggcucagga

SEQ ID NO: 4169343 - RNA, 92 nt, Human
uccugagcccauuuuccuuugagcccugaccuagccuggccuuaccucauuaagguuugguuaaagcaguggaaaggaggaggaggcagggg

SEQ ID NO: 4169344 - RNA, 68 nt, Human
uccugagcucagcuuccucuccaugcugcuagcccaccuggcagguaggaggggaggugggugaugga

SEQ ID NO: 4169345 - RNA, 58 nt, Human
uccugaggccucugugaugugaggaagcccaacguagcccauacagagaccucaagga

SEQ ID NO: 4169346 - RNA, 56 nt, Human
uccugagggcugcagucauaggggacccuacacuucuaugaguauuacuuucagga

SEQ ID NO: 4169347 - RNA, 58 nt, Human
uccugagggcuuccuugucccggggaaccauuucuuuggguuucagaagguuuccgga

SEQ ID NO: 4169348 - RNA, 128 nt, Human
uccugaguccaugugacuaaauuucaagagggcagguuagaaaaagcaaaguugauggggcauuaccugugguuugaacuucuaccugucauauuucaggaaaucaccaugaggagcuugacuuagga

SEQ ID NO: 4169349 - RNA, 55 nt, Human
uccugaguguuuggccaggccagguaugaaaggcacuuaggcuggauaccuagga

SEQ ID NO: 4169350 - RNA, 77 nt, Human
uccugauaccugggcuucaggccaauuuuguaaugcuuuuaaaucaaagguggucuuacugaugguauaggaaagga

SEQ ID NO: 4169351 - RNA, 107 nt, Human
uccugcaggagguuuaggguccaggucugggggguggccagcacaucacucacaugcauauuuugguggccagaacucagacauguggccccaucuaacuugaggga

SEQ ID NO: 4169352 - RNA, 70 nt, Human
uccugcaggccaagcccucgcagagagggccuggggugagagcaggcaucuccgugcagcuuggccagga

SEQ ID NO: 4169353 - RNA, 103 nt, Human
uccugccagcucuuugguuuccuuugugagccguggcaggcggacgcuguccccagaggccagggggcucacaaauguuauuccagggcugggcucggcagga

SEQ ID NO: 4169354 - RNA, 95 nt, Human
uccugccccaggcagaugucugucaccccaugcugggaucugacacccuugcugggcagcgucccacaugggcacccuccucugcuugagccggg

SEQ ID NO: 4169355 - RNA, 62 nt, Human
uccugccuucugaucuucucuuggcaccuuuacugaaaccauuuagaaguuggagggcaaga

SEQ ID NO: 4169356 - RNA, 77 nt, Human
uccugccuugguaaaacugucuuaaauuuggaauguaagugucugaauugggaagguuguaccagagagcagcagga

SEQ ID NO: 4169357 - RNA, 98 nt, Human
uccugcugaguaucucugcuaagcaugaacaauuaagaaacaaagccauuagucguaauugaagaauucauguuuauauguagcaguuuuucacaggg

SEQ ID NO: 4169358 - RNA, 84 nt, Human
uccugcuuaaucauuaggcauucugaaugagguccucugauaacugacaagaucgauucagugugccuaccccagaaguaguga

SEQ ID NO: 4169359 - RNA, 87 nt, Human
uccuggagaaggucgcagcagcgggacccagccucccuuccugaaucugaggguggaagagcugggaccgucuggaaguuccuggga

SEQ ID NO: 4169360 - RNA, 60 nt, Human
uccuggagccaugauuccccucuuagcaucuagccuggagaggauuuaaguuuaaaagga

SEQ ID NO: 4169361 - RNA, 55 nt, Human
uccuggauaaaugcuuuaguuggaagucacuuucccuacuuuauuugucccaggg

SEQ ID NO: 4169362 - RNA, 58 nt, Human
uccuggccacacauuaauagugcauagggaguguuuaauauaaauucuuggcucagga

SEQ ID NO: 4169363 - RNA, 64 nt, Human
uccuggcccuguggccugcaguuugaguuucccucgaccagcugugggaccgggggagccggga

SEQ ID NO: 4169364 - RNA, 122 nt, Human
uccuggcucccuggcagaucaacagcuccccucucuucgcagcuccuauucacacucuggcuuuauggggaaugaaagggaaccugcuggacuggaagcugguucugcugaggggaguagga

SEQ ID NO: 4169365 - RNA, 61 nt, Human
uccuggcugaguucccaagucgugaucaucgcuuagugucugacuugagacucuguuaggg

SEQ ID NO: 4169366 - RNA, 56 nt, Human
uccuggcuuccacaccugucauuucucauuuacugugcgggcgggccgggccagga

SEQ ID NO: 4169367 - RNA, 63 nt, Human
uccuggcuucugucuccuuauuagacccugcccaauguaauagggaagcacaggggcuuugga

SEQ ID NO: 4169368 - RNA, 56 nt, Human
uccuggcuuuucuuggcucaucauguaccaacugacuguaaucagauuggccagga

SEQ ID NO: 4169369 - RNA, 95 nt, Human
uccugggacucucuucaugcugggcucuucucacccuguuucagagaagacuugcggggagaaggggucagagaggugaguccaccugcccagga

SEQ ID NO: 4169370 - RNA, 58 nt, Human
uccugggaggcugugccuggcuucccaacugagagggcccggcacagccccgcggaga

SEQ ID NO: 4169371 - RNA, 113 nt, Human
uccugggauguuccucccccuggaauuguuuugcugaguuaggaggagaggggaauucugcuuugaaaccugcucugcagaagccaguuuuucagguuugaggguccccaggg

SEQ ID NO: 4169372 - RNA, 80 nt, Human
uccugggcucaagcgaugcuccugccucagccucccaggaggcugggaggcugaggcaggaggaucacuugagcuuggga

SEQ ID NO: 4169373 - RNA, 85 nt, Human
uccugggcuuuacagcacaugggaucuguuuacauguggucuccgcagacucgugucaagauccuaagucagugaaucccgaggg

SEQ ID NO: 4169374 - RNA, 63 nt, Human
uccuggggaaagccagcccugcuuccucucccaggugggggcucugggccuggcugcgcagga

SEQ ID NO: 4169375 - RNA, 56 nt, Human
uccuggggccccaggggcuaagucugccuuagcauacugcaucugaagucccagga

SEQ ID NO: 4169376 - RNA, 61 nt, Human
uccuggguccauggcagccgaaggaccaacaacuucaucaucgcuguuaaggacccucgga

SEQ ID NO: 4169377 - RNA, 60 nt, Human
uccuggucagcuuugagguugucuguaucagugaaggaauuccucuaagcccaccaagga

SEQ ID NO: 4169378 - RNA, 68 nt, Human
uccugguggcuuucccugccuuuuccuaggauacucagccuggucugagucaaaggaagcugccagga

SEQ ID NO: 4169379 - RNA, 55 nt, Human
uccugguggugccagcugcaggcugugugcuugggcagcuggcacuacccuugga

SEQ ID NO: 4169380 - RNA, 58 nt, Human
uccugguguuuaugucacauagcauccugaauggaaucugugggaccaagcacuggga

SEQ ID NO: 4169381 - RNA, 67 nt, Human
uccuguccccugguguuuguuguaugugucugugguauggcucagcagauggugucaugggauggga

SEQ ID NO: 4169382 - RNA, 127 nt, Human
uccugucucuuaguuccuuuuuccugaacucuuccuccagaguuguggguguuucucuuccaauaagaaaagaaaccuaucagccacauggaauucuaagggggagaguauuuaaugagagacagga

SEQ ID NO: 4169383 - RNA, 80 nt, Human
uccugucuggcuuuggcagccucagcugcagggcacaaacaacuagggcugcugggcuggagcugccagggccaggagga

SEQ ID NO: 4169384 - RNA, 81 nt, Human
uccugugcaccaggcccaccgcaugcuccugugccauccccgcucugccaggugcugugcauugggccaacaggcacgggg

SEQ ID NO: 4169385 - RNA, 64 nt, Human
uccugugccucaguuuaccccucuuguauaauagagagagcuuggagagacugaggacacagga

SEQ ID NO: 4169386 - RNA, 76 nt, Human
uccugugcuggugaaacccacagagacccucacgcugaccugcacucucucuggguucucacucagcacuucugga

SEQ ID NO: 4169387 - RNA, 70 nt, Human
uccuguggucccuuggcucacaaacagcuccucagagcugcacugugaaguucauaggggcucaacagga

SEQ ID NO: 4169388 - RNA, 67 nt, Human
uccugugguucccugagaaugcauuccuagaagaauggggcauccuccauauaggugaauagcagga

SEQ ID NO: 4169389 - RNA, 69 nt, Human
uccugugucagcaagacaucagagugacuuauuuaaaugauuaguuuguaaugugcuucuguuuuagga

SEQ ID NO: 4169390 - RNA, 56 nt, Human
uccugugucucagcgugaagcaucacgagaugcacgagaugcuccugggacaagga

SEQ ID NO: 4169391 - RNA, 76 nt, Human
uccuguguucugcucacaaaccagccugacaaccagacuuaucugccagaguuugcaagggcagaagcccgcaggg

SEQ ID NO: 4169392 - RNA, 75 nt, Human
uccuguuaacacaauguuucuuguaaccagugaguugugccaaaacucacuguaaaguaauacugucaggugggg

SEQ ID NO: 4169393 - RNA, 83 nt, Human
uccuguuccucagugcuucuagcuugaugaggucauuacugugcuuccauacaagccaggaucaccauucuuugugaacugga

SEQ ID NO: 4169394 - RNA, 104 nt, Human
uccuguuuacucugugaaaauuauuuguuuacauaugucugucugcaccuguauuaggaguugaagacuaguaaauuauguuauucaguuuacaggguauagga

SEQ ID NO: 4169395 - RNA, 65 nt, Human
uccuguuucaacccuuacacugaauacuuaauaccaccaccaucagggcuggguuaaaagcaggg

SEQ ID NO: 4169396 - RNA, 64 nt, Human
uccuguuugaauuuugcuaacgugugagguggaauuuuaauuauacugaguuugguucaaggga

SEQ ID NO: 4169397 - RNA, 65 nt, Human
uccuuacagugcagugugaugaguauucuaauggagggauguacuaggcuugcugcaguggagga

SEQ ID NO: 4169398 - RNA, 56 nt, Human
uccuuacaguuaaaaugggagugaugcuagcugucauguaucccauggugugagga

SEQ ID NO: 4169399 - RNA, 67 nt, Human
uccuuacaugcuuccuuauacauauuugcuaguguuucccuaagcuagcuauauggaagugguagga

SEQ ID NO: 4169400 - RNA, 65 nt, Human
uccuuagcaacugucauagagcaugacacauuauaaccauguuuuuaaaaaaguuuguugaguga

SEQ ID NO: 4169401 - RNA, 80 nt, Human
uccuuauggaacugucauaauuuuuuuaagucagaacaagcucuggcuuguuuugagaaacuuaagauauuuccuuugga

SEQ ID NO: 4169402 - RNA, 81 nt, Human
uccuuauuuauuuguguuuuuuaaacauacucauacuucccucuauuguuugugucauagagagcacaaaucagauuugga

SEQ ID NO: 4169403 - RNA, 94 nt, Human
uccuucaccgcucugucucuggcagcagcugguaccuuaugcugaggaaggauugggaaugaggcugccaagggcaagaaaaaugggagaaggg

SEQ ID NO: 4169404 - RNA, 95 nt, Human
uccuucacuugcaaagaauuuuacauucuaaccaaagauuccugagaaauaaaucuguaaauguagaaauguaggcuuccugacagguaagagga

SEQ ID NO: 4169405 - RNA, 81 nt, Human
ugaguuucuguucuguuuauaauuugcaguuguccagaauggauuaacgcaucuggaaacaggacagguuucuguaauuca

SEQ ID NO: 4169406 - RNA, 66 nt, Human
ugaguuucuugauagagugcuuucagaguuuugaguaaccugaaacaucuucuguaaauaggcuua

SEQ ID NO: 4169407 - RNA, 68 nt, Human
ugaguuugaggcuggauugaagaaagggcugauggaguuggcuuauugaguuuacagcuuuagaaaca

SEQ ID NO: 4169408 - RNA, 84 nt, Human
ugaguuuggaaaauuaucaucugaagauugcuguucaacuuuuggagagugauauucagaugcuuugaagacuuccaauauuca

SEQ ID NO: 4169409 - RNA, 62 nt, Human
ugaguuuugauguccuguaaugagguuguuugcagaauauauuacuagauugucaagauuua

SEQ ID NO: 4169410 - RNA, 73 nt, Human
ugauaaaacagucaaaggccuaagcuauugucaaaaacaguauaaugccacuagcuuuugaguguguauguca

SEQ ID NO: 4169411 - RNA, 109 nt, Human
ugauaaacaguuuuaaccucgaugcucauuuuggcauuguuuuguucuaaacacauguguuacaaagauaguguuagaguaaauuaguugagggaaaagcuuccuauca

SEQ ID NO: 4169412 - RNA, 102 nt, Human
ugauaaauaaagcuuuuauuuauagaaagacuaacuagaaagugcacucuuaagugcagcucaaugguuggcuuuaauagaaguagauauuuuauauuauua

SEQ ID NO: 4169413 - RNA, 68 nt, Human
ugauaacugcauucagaaagcucacucauaagaaaggaugaugaauaguuaugcugagucagugguua

SEQ ID NO: 4169414 - RNA, 98 nt, Human
ugauaagguacuauaguuuugcaagauguuaccauuguuacucaggaaauugagugaaagguguccaauauuucucuguacuacuucguauaacugca

SEQ ID NO: 4169415 - RNA, 75 nt, Human
ugauaaguauacauucugagaaaugcauugucaggcaauauuguccuugucugaacaucauagaguguacuuaca

SEQ ID NO: 4169416 - RNA, 58 nt, Human
ugauaauaucugguuuauucacccucuucugcagggaaugaagaaauagaugguguca

SEQ ID NO: 4169417 - RNA, 68 nt, Human
ugauaaugugaaugguuugugacuaccuaauggaauucauagguagucacaaaccauucauaugauca

SEQ ID NO: 4169418 - RNA, 129 nt, Human
ugauaaugugucguagcugucugggagcagagcuccgggaacgcauggggcacauacgaaagccaggcugucugugccucacccugcucuuggcggcucuggggccagggcucugaaucacauuacugg

SEQ ID NO: 4169419 - RNA, 61 nt, Human
ugauacaaguuuauccaucauuguuggaguucaccagcaauguaaacccugaaguugauca

SEQ ID NO: 4169420 - RNA, 85 nt, Human
ugauacaauaagucagaaauaucugccaucaccaauugaauaugaaagugcaugaugcauguguuucaugaaauucacuguguca

SEQ ID NO: 4169421 - RNA, 84 nt, Human
ugauacagauggaacaugcugccuuucuacgaguaguugcucaugcuuauuagcaagguauuauguaaguaucaacuguuguua

SEQ ID NO: 4169422 - RNA, 57 nt, Human
ugauacgcugucucaauguggguuacucaaaguaugcccaucuucuagcagcuguua

SEQ ID NO: 4169423 - RNA, 78 nt, Human
ugauacuugguuuuaagacucuuguaguacacacucaguugugguacucaaaguguggucuugcaacuagcaguauca

SEQ ID NO: 4169424 - RNA, 87 nt, Human
ugauagcuauggggaauauaggaccucugggaacagaaaauuaauuugucucauuauuuucuauaucucacuauucccuaagcugca

SEQ ID NO: 4169425 - RNA, 75 nt, Human
ugauaggcuuaauuuuccugucaaauguggacuucccuuguaaacaugucaauugaggaaaguucaagcuuguca

SEQ ID NO: 4169426 - RNA, 62 nt, Human
ugauaguaauuuuuacacucucaguuccauucauaauuacugagaaccaugaaaagcuguca

SEQ ID NO: 4169427 - RNA, 70 nt, Human
ugauagugacuuauuguuuagaacuuuuuaagaucaacuuuuaagaucaagauaagcaauaaggugguca

SEQ ID NO: 4169428 - RNA, 78 nt, Human
ugauaugaaagcauggccccaaaucccaugcauagccauccacuccacuguguaggguggagccaugugaacagauca

SEQ ID NO: 4169429 - RNA, 56 nt, Human
ugauaugaagauguguuggagauucuucccggcuucucagugacacucuucauaca

SEQ ID NO: 4169430 - RNA, 87 nt, Human
ugauaugagugauuuguuggcuaauauaaccagaaguuccagaggaugaauggauuauauuuggcucaguuuagcagcucaguauua

SEQ ID NO: 4169431 - RNA, 79 nt, Human
ugauauguacauauuuugugugugcucacauagauguguggcugcguggauauuuguguggguaucuauauacguauca

SEQ ID NO: 4169432 - RNA, 95 nt, Human
ugauauuuugugaauaguuuuaucacggggcauaguuuuaucaaccaggcuggaggcuagugaacuguggcccgugaacuggauacagauuguug

SEQ ID NO: 4169433 - RNA, 56 nt, Human
ugaucaaagccaaaguugagaucucagcaguaugaacaucggcucuggcuuuggca

SEQ ID NO: 4169434 - RNA, 69 nt, Human
ugaucaaagcuaugcuuuaguaauauucucagaaaauacuuaguugauguucuggagguagaaggauca

SEQ ID NO: 4169435 - RNA, 76 nt, Human
ugaucacauuguucacuagcuugcagacucaaugacagugcaaagcaaguuacauaaucugugaauuuuguuguca

SEQ ID NO: 4169436 - RNA, 65 nt, Human
ugaucaguauguugacuuauucuuggagcaauuuuggcucuuuauaagauauuaacuacugccca

SEQ ID NO: 4169437 - RNA, 83 nt, Human
ugauccaagggcaggaguuugccaaaguaaugcacucgaguauuuguccuacugcccagcaaacauccacugcccuuguaucg

SEQ ID NO: 4169438 - RNA, 68 nt, Human
ugaucccaggugcacaagagagaugaugacucagucugacaacauuuccauuuccuugguaaggauca

SEQ ID NO: 4169439 - RNA, 128 nt, Human
ugauccuaacuggagcauauuuuccuugaauuuaaagucaacuuauacgaccuucaugcuggacuacacagugaguaucacaggcuauguggguuuuguuucugauuuuucaagcucuaaguaguuca

SEQ ID NO: 4169440 - RNA, 62 nt, Human
ugaucucaagcucuugggcucaagcgacccacccgauugggccucucaaagugcugggauua

SEQ ID NO: 4169441 - RNA, 80 nt, Human
ugaucucuagaaagauauagauaaaacuaugcaagcuguuaaaaauucagccugauacagaauugauaucugagagauua

SEQ ID NO: 4169442 - RNA, 101 nt, Human
ugaggcaggagagucguuugaacccaugagguggagguugcagugagccaagauugugccacugcacuccagcuugggugacagagugagacuccgucuca

SEQ ID NO: 4169443 - RNA, 73 nt, Human
ugaggcaggaggaucacuugagcccaggaguucaagaccagccugggcaacauagugagaccuugugucuaca

SEQ ID NO: 4169444 - RNA, 101 nt, Human
ugaggcagggggaucccuugagcccagaaggucgaggcugcagugagcugugaucaugucacugcacuccugccuggguaacagauugagacccugccuca

SEQ ID NO: 4169445 - RNA, 106 nt, Human
ugaggccaagucggcugaacucuaaugggccuggccucucuguccaugccugaccccagagugcaggcaaaagggccaggccacuguuggaaaggccguggcuuca

SEQ ID NO: 4169446 - RNA, 56 nt, Human
ugaggccaggaucccaggcucucauucuuccccugagucugguguccucggguuca

SEQ ID NO: 4169447 - RNA, 71 nt, Human
ugaggccaggcaaaggcgaucucggccagaggccacuuccugccucuacucagaccuuuccuaaggcuuca

SEQ ID NO: 4169448 - RNA, 66 nt, Human
ugaggcccaucugagauuuugauaguuguagcaguuauuuugucauauucaaaaacucggcucuca

SEQ ID NO: 4169449 - RNA, 55 nt, Human
ugaggccucgucauugacugagguucuggcuuuuacaguuaaugacuaggcauca

SEQ ID NO: 4169450 - RNA, 89 nt, Human
ugaggcucaauggcaugaggugauaaagcugggauuuauauucauaacaucagucauccuauaguguccuagcccugccauugaccuca

SEQ ID NO: 4169451 - RNA, 59 nt, Human
ugaggcucagaaauguaaguuuguaacacuaaguuauuaauuaggucucugugccuaca

SEQ ID NO: 4169452 - RNA, 101 nt, Human
ugaggcuggagaauugcuugaacccgggaggcagagguugcagugagccgagaucgcgccacuguacuccagccucggugacagagcaagacuccgucucg

SEQ ID NO: 4169453 - RNA, 89 nt, Human
ugaggcuggguagaugaaguaugcuaauuaacuagcacuggggacaugugcugauuuccauggcaugaauuucagcuaccaacaauuua

SEQ ID NO: 4169454 - RNA, 68 nt, Human
ugagggacccaggcccaaggcugccagguaguaagggcagccugugcaguggggcucuggguucucca

SEQ ID NO: 4169455 - RNA, 61 nt, Human
ugagggacugguccaggaucucacagcuagcagagcugggacucagaccaguucugucuca

SEQ ID NO: 4169456 - RNA, 57 nt, Human
ugagggagcacacacugaagugcugauccacugcaccauuuguuguugcuuccuuca

SEQ ID NO: 4169457 - RNA, 86 nt, Human
ugagggaggccuccugcacagagcuggacuccgcggggccacuuccugcaaaggcaagcgcugugcagaugaggacccucuccuca

SEQ ID NO: 4169458 - RNA, 71 nt, Human
ugagggaggggccuggacuccgggcucugagccuacuggggcacaggccugugaguugaggccccuucuca

SEQ ID NO: 4169459 - RNA, 76 nt, Human
ugagggauuucuaaggaggcugaacuugacagguggaacuguggaguucugccaacuuuuagaaaagauucuauca

SEQ ID NO: 4169460 - RNA, 66 nt, Human
ugagggcaccugggauuaauggcaaaggcaauccucagagcaccucucuccagaucccaguccuua

SEQ ID NO: 4169461 - RNA, 65 nt, Human
ugaggggagguuggggcacaucuugcaccugcucguuuugauuuggccuccacacucaccccuua

SEQ ID NO: 4169462 - RNA, 60 nt, Human
ugaggggcuggguggguuccaccugaggaggcgccacgacucugcccaccccggcuccca

SEQ ID NO: 4169463 - RNA, 62 nt, Human
ugaggguauauauuguguggagugaucaaauguaaccucucaaauacuggguuaugcccuca

SEQ ID NO: 4169464 - RNA, 58 nt, Human
ugagguaaaaaagagguuaaguaacuugccuaagguuauauaacuacuauuuugcuca

SEQ ID NO: 4169465 - RNA, 85 nt, Human
ugagguaacaccacuuuauguccaccagacugcaaaaaaguaaaaaggagcuauugcggguggggauguagcaaagugucucuca

SEQ ID NO: 4169466 - RNA, 69 nt, Human
ugagguaauaguuccauugccgaaauuccuuuauguuucaauaauuuuggucauugcuauuguuucuca

SEQ ID NO: 4169467 - RNA, 61 nt, Human
ugagguaggugucgagagagguugggucugccagguucaaauuuucuuggcacuuaaauua

SEQ ID NO: 4169468 - RNA, 71 nt, Human
uccuucagcugcaaguccaaaggaauuagcuagcaaggcugaccuuccuaagaggcuggcagagaggagga

SEQ ID NO: 4169469 - RNA, 66 nt, Human
uccuucagugucccgcucaggugcagccuccucccuaaagcucaucucagcuuuugaucugaauga

SEQ ID NO: 4169470 - RNA, 58 nt, Human
uccuucauucauuaauuuagcccuggacccagggcugacuccuauuggaugaacugga

SEQ ID NO: 4169471 - RNA, 77 nt, Human
uccuuccauguuguuaugugaacugaaauuuggaaugaagaaugcaaauguguagguuuacauauucccaggaagga

SEQ ID NO: 4169472 - RNA, 81 nt, Human
uccuucccacccgcacacccgucuucauuuauagucuuucauccuuuauacaugacaccucuggcugggugccuggaaggg

SEQ ID NO: 4169473 - RNA, 119 nt, Human
uccuuccgaguugggcccugggccacuucuccuaggagccccuuccucuggguccacacugggugcuagcgagguguuucuaggacuguuuccccagcaggcucucagcucuuucggga

SEQ ID NO: 4169474 - RNA, 62 nt, Human
uccuuccuagugucuacuuuggaggcuggcugggggcucacagaaauggcacugggguagga

SEQ ID NO: 4169475 - RNA, 69 nt, Human
uccuuccucuuggccucguaugucucuuguaggcuguggagacccagagaaaagaggccaaggauggga

SEQ ID NO: 4169476 - RNA, 58 nt, Human
uccuuccugcauugugccagaguuggucaaugugaccaacaggauauaguagaaggga

SEQ ID NO: 4169477 - RNA, 59 nt, Human
uccuucuauaugacuucuaggcaggucauagaaccucuguaagccuuagucuagaugga

SEQ ID NO: 4169478 - RNA, 78 nt, Human
uccuucuauuuugagaacuuugguauuuuccuuuuugagugaaaaauacuauggauucuggauuaaaauagcacagga

SEQ ID NO: 4169479 - RNA, 130 nt, Human
uccuucucccugucucugugaaguccucugcacaauggccaccagcagcugacaaagaugaacaaugccugcaugcuucaucuagugugcucguaacggaugcaagaggaauagaggaaggggcugagga

SEQ ID NO: 4169480 - RNA, 58 nt, Human
uccuucucugguuuuuacuguaauccacaguagacagacagaacacagcccagaggga

SEQ ID NO: 4169481 - RNA, 129 nt, Human
uccuucugauagcauguuuuagauacuuauuccuagcacugcuuuuucuccucacuggucugccugucacucuuugagagcuagaagcaauaggacuaggaaguggccacagagcuuccuauggaaaaa

SEQ ID NO: 4169482 - RNA, 63 nt, Human
uccuucuuucaccucauagucaguuuggccuuaaaacucuuccuuagugaugugauagaugga

SEQ ID NO: 4169483 - RNA, 93 nt, Human
uccuugaaggacagaaaccaugccuuacuucguuuguuuguccccagagcagcugguacaggaacgaauguacauuguuuccuucucuaagga

SEQ ID NO: 4169484 - RNA, 58 nt, Human
uccuugauugaauauucccuugggccugccaguccaggcuccuguuauuuaaugagga

SEQ ID NO: 4169485 - RNA, 64 nt, Human
uccuugcugcaccuguccugugugaugcuguuacugcaugcaaagcaaucaggaguagcaugga

SEQ ID NO: 4169486 - RNA, 57 nt, Human
uccuugcugugaauucugucaguucuauggagaaagugcagagccucacugcaaggg

SEQ ID NO: 4169487 - RNA, 63 nt, Human
uccuugcuguuauccauauuaucuuuagccaggcaugguauuaggcacaugguaauauaagga

SEQ ID NO: 4169488 - RNA, 58 nt, Human
uccuugcuuaaaaagaaaugaaguacuggccaggaccucagagucucaggagcaaggg

SEQ ID NO: 4169489 - RNA, 74 nt, Human
uccuuggaauguucugagugcagcuuaauaaacuuaaaaaguaauuuuaaagcugagcccucagaagcucagga

SEQ ID NO: 4169490 - RNA, 58 nt, Human
uccuugggaaugaggccauuguccgaaaggccaacucuuggccaaguauccaacugga

SEQ ID NO: 4169491 - RNA, 71 nt, Human
uccuugggcugcuguaagcauucauuacgcaugugaaugaccauuguaaacugcugcaggagugccaagga

SEQ ID NO: 4169492 - RNA, 81 nt, Human
uccuuggugaacaguuguaaauucauagcuuauaaaauuauugcaauuauuagguauguauauacagaacaaugcuaagga

SEQ ID NO: 4169493 - RNA, 73 nt, Human
uccuuguccucaucagaaaucuaggauucagaaucuucuggguucagucuuagauauuuuguugggaugaaga

SEQ ID NO: 4169494 - RNA, 78 nt, Human
uccuugucucccuggcuucugggucugugagagcaaccugaggcucucauuuuaccaaggucggggacuggauacgga

SEQ ID NO: 4169495 - RNA, 66 nt, Human
uccuuuaacaaauugguugcuucaacauguuaugacugcgauauguuaaauagccauuuguuugga

SEQ ID NO: 4169496 - RNA, 61 nt, Human
uccuuuaucagacuaugaaaugaauauuacugccacauuucauaguuauggagauuaagga

SEQ ID NO: 4169497 - RNA, 120 nt, Human
uccuuuaugauaugugucuuugaaaggcaaggaguggcaguaagcagagugauauaaacauggggccugggcuuuaauucugucugcccucauccuuuaugaggcgcaugauuuagaggg

SEQ ID NO: 4169498 - RNA, 66 nt, Human
uccuuucaaaguucugagaagcaguuuacucuuucacacuagagauugcuuaaauagagcugggga

SEQ ID NO: 4169499 - RNA, 78 nt, Human
uccuuuccauuuuuagcaccucucaaggagaaugguuuauggaacuugggagcaggaagcaggaaguaggaaacagga

SEQ ID NO: 4169500 - RNA, 75 nt, Human
uccuuuccuucuggccaugcaaccucuucugcuccauggccaguucagaggacacaugacuccagcaggagggga

SEQ ID NO: 4169501 - RNA, 56 nt, Human
uccuuucuccagcuggcauugucauuuuugugacuuguuaucagaggaagagagga

SEQ ID NO: 4169502 - RNA, 128 nt, Human
uccuuucuccucccugggccucauuccuugacaugugcaugaugguuuagaugggguuaccugagugagucuggcuaaacaacaucaugccucaagaaguugaugcucuaucgagguggagaauagga

SEQ ID NO: 4169503 - RNA, 84 nt, Human
uccuuucuccuguguaagccgcccagcacuggaaaccacaggguaucugaccauggggcuugcagaccuccaggggaccaggga

SEQ ID NO: 4169504 - RNA, 63 nt, Human
uccuuucucugaaggcuguguugaugggugagggcacuggcacagcccauucagagaagaggg

SEQ ID NO: 4169505 - RNA, 100 nt, Human
uccuuucuguugacagugcauagaaaagcucaacucagccaugcagugcuguacacaaugaggaggggcuuuucucucuagcacugauaacagccccgga

SEQ ID NO: 4169506 - RNA, 78 nt, Human
uccuuugcuuucccuacucaccaucuugggucuccugggggauagcaggacccagaaggugcagcagagacagcagga

SEQ ID NO: 4169507 - RNA, 60 nt, Human
uccuuuggccuaauaauccuucucuuaagaguuccacacugguuuuauugaggccaagga

SEQ ID NO: 4169508 - RNA, 78 nt, Human
uccuuugguaacauuccaaccuuccugcagguuucagcgcuuccugucaucuuaagguuuggguguuggcuauguggg

SEQ ID NO: 4169509 - RNA, 108 nt, Human
uccuuuguucgguuucucuaaugcuccuuuuucugccuugggcuguguugcuagcacagcagggcucuguggaggguggcugugaguuagggaaagccugagaagggg

SEQ ID NO: 4169510 - RNA, 101 nt, Human
uccuuuguuuuauuugguccacucuguggaguaguguugagagcaccaaagucauagaggagcucuccuagguaacagggugguuugagugaaagaagcaa

SEQ ID NO: 4169511 - RNA, 56 nt, Human
uccuuuuaucuuuugcuuuguacaucgugcugaugggugaaacaaacuuaaaagga

SEQ ID NO: 4169512 - RNA, 59 nt, Human
uccuuuuccaaaugaacauuugaacuuauggcagagacaaaaguuugacaggaaaggga

SEQ ID NO: 4169513 - RNA, 70 nt, Human
ucgaaacuguggaacgucaguugucacaugugacaaccuucacaugugaaggacuuguuccauugugaga

SEQ ID NO: 4169514 - RNA, 83 nt, Human
ucgaaagccuggagccaggaccuugcccagcacaucaagugacaucacccugaggcucaaggucugguggaggugcauuucgg

SEQ ID NO: 4169515 - RNA, 62 nt, Human
ucgacgucauuuuuuaaaugcaguaauuguuugauuaguugcaguguuuaacaaugacuuga

SEQ ID NO: 4169516 - RNA, 67 nt, Human
ucgagccugggcugcggugguagguuguagauucuucaacaggggcuguugcggugcuaggagguga

SEQ ID NO: 4169517 - RNA, 73 nt, Human
ucgaggggagagcagggaggcugcucuguugcccaugggccucaggaagccaggccuuccugccgccgcugga

SEQ ID NO: 4169518 - RNA, 85 nt, Human
ucgauccucccucuaaggucuugacaguuagagaaccuaaaagucauuacaaauuuucuaaggagccaggacuauuagagauuga

SEQ ID NO: 4169519 - RNA, 93 nt, Human
ucgaugcagauuuauuuagaaagggaggcuuauauucaauuuuucauaaguacugauaugagaucccuuuuccuagagacuucucugaaugga

SEQ ID NO: 4169520 - RNA, 58 nt, Human
ucgauuccaucuguguuguuuauuuugagcuggauuuacugcacacuaugugaauuga

SEQ ID NO: 4169521 - RNA, 129 nt, Human
ucgauuugggagcugagaggagagggggaugagagcgggugugcgucucgcucggauuuauuaaacacaaugccuucaagaugccagggacgcggcgccucgccgggccucccucucagucucccucug

SEQ ID NO: 4169522 - RNA, 78 nt, Human
ucgcaccugcccggagccaggcgggucuuugcuccuucccgcgaaagggguuagccuugccugcgccccaggaagcga

SEQ ID NO: 4169523 - RNA, 56 nt, Human
ucgcagcacuagcccugcauugcuaaugcacagagcuguugggacuauugcugggg

SEQ ID NO: 4169524 - RNA, 102 nt, Human
ucgcaguucuccaugaaagaguaggaucucaccauggccauacucugauaucugacucaucugaauugcuugcugagauuaaagcuugaaauggagagucga

SEQ ID NO: 4169525 - RNA, 128 nt, Human
ucgccacagcgcgaccaggccagcgaugagggacuggcauccggaggcuucacccuccgcuccacagggucggcagcagagcggggccuccggaagcuccgccccacgcguucccggggcgcaugcga

SEQ ID NO: 4169526 - RNA, 87 nt, Human
ucgccagccgcagcugggccaaggccgagagcaugcaccaccaggucgaguaugaggugcugcaggccuuggcugggaaggcugaga

SEQ ID NO: 4169527 - RNA, 75 nt, Human
ucgccggaacucgcuuucaggugggucuacaauuaguugggaaacaacggguugcaaggcugaccuggucuggga

SEQ ID NO: 4169528 - RNA, 83 nt, Human
ucgccuaggcuguagguacccucuccccucuuuccuuuuacuuuauagaggucuauagaaggguagggacuuauccaagguga

SEQ ID NO: 4169529 - RNA, 89 nt, Human
ucgccugggaacuuguuagaaaugcagaaucccaggacaggccagcccuccugaaugacaaucugcauuuuaacaagauccccagguga

SEQ ID NO: 4169530 - RNA, 57 nt, Human
ucgccuuacucaucacagacuaaguuuggaaacaagauguuuccuuggguguaggga

SEQ ID NO: 4169531 - RNA, 64 nt, Human
ucgcgcagccagggcuguuagcugcugcucuuaugauugaggccagcugccacccgguccguga

SEQ ID NO: 4169532 - RNA, 59 nt, Human
ucgcggauaagcagugaacggucuaugaauggugagggcaauaacgagcuugucucuga

SEQ ID NO: 4169533 - RNA, 70 nt, Human
ucgcggcugggcuggccgccgagaucgccugacggcaggccgagaacggcugggcgggcccaggccggga

SEQ ID NO: 4169534 - RNA, 66 nt, Human
ucgcgggcucugaccagucuccgggcugcagcugucucccagcagccuccaggagcagagcccuga

SEQ ID NO: 4169535 - RNA, 62 nt, Human
ucgcgguggcucaugccuguaaucccagcacuuugggaggccaagacaggcagaucaccuga

SEQ ID NO: 4169536 - RNA, 60 nt, Human
ugauuagaagcgugaauccuuucaaaugugugugucacugaaauggaauguaucuaauca

SEQ ID NO: 4169537 - RNA, 83 nt, Human
ugauuagccuagguccuucgccacauauugguacauucaccccaggaguggaagucccuguguguggccuucugaacugguca

SEQ ID NO: 4169538 - RNA, 71 nt, Human
ugauuaguuaucuucuucuguggccgcuauucccuuaacaucaauggcaccuucaagaagaaaauaaauca

SEQ ID NO: 4169539 - RNA, 64 nt, Human
ugauuauaccucaguaggaaguacagacuauaaaguuuaauaacuuauucugagauuaugauca

SEQ ID NO: 4169540 - RNA, 75 nt, Human
ugauuauaguggacaguaaccucuccucugaagggagacauuaacucucucuuccaagguugcacacuaucauua

SEQ ID NO: 4169541 - RNA, 124 nt, Human
ugauuauaugauuggacugcuaacuccauuggacauucuguaacucacucagccacucaucccccauagaggugagaggaacaggcaguagguuuuauuagucauguuacagucauaguaaaca

SEQ ID NO: 4169542 - RNA, 80 nt, Human
ugauuauccauucagguuaaaucaggcaucauuucagucaccuccagguauuaauguguaugauauaaauuggaaaguca

SEQ ID NO: 4169543 - RNA, 66 nt, Human
ugauuaugugagguucagcuuuaucucuugaaaaacaagugugauaaucuccaucucauauguuca

SEQ ID NO: 4169544 - RNA, 124 nt, Human
ugauuauuauggcaucacuuagguuacuagaauaagauugagucagggacuuccaaaguguuaggauucacuuugaaguccaucuggcccagugguuaccagucaugacuacauaucagaauca

SEQ ID NO: 4169545 - RNA, 76 nt, Human
ugauucagagucguuacggugggacccaaaagucuacauccagguggcccugaggacccagugugggaaugaguca

SEQ ID NO: 4169546 - RNA, 93 nt, Human
ugauuccaaugagaugcugaaaacucaaccauugugacaauuuuuccucuguauaauggacaggauuucagcuuauuuguccuauugccuuua

SEQ ID NO: 4169547 - RNA, 68 nt, Human
ugauucucacugaaaauaauuuugucccauagaggaggguacuaaaaaaugaucaguuuggggaguca

SEQ ID NO: 4169548 - RNA, 70 nt, Human
ugauucucauccaguaccauggaaggcaccucaggaaaccuccugcccgcauggugguggugacuuauca

SEQ ID NO: 4169549 - RNA, 130 nt, Human
ugauucugaguccccuccgccuuuuugcccugaguagugccaguggcugguguguugcccuuggcacccacugggggcaccaccaccaucggcaccuccuugggagcaguuuccaagauggcagccuucg

SEQ ID NO: 4169550 - RNA, 121 nt, Human
ugauucuggagagucuaaagugggauuucaagcagagauauuucaagauacgucucuuggaaaucuugauguuuuuccuugacuucucucuuuccuucaggcucuuacauccaauaaauca

SEQ ID NO: 4169551 - RNA, 73 nt, Human
ugauucuguguuagccuuguagagcaccuucccagaaggaagaacaggggcuucuauucuggcacaagaauca

SEQ ID NO: 4169552 - RNA, 95 nt, Human
ugauugaaacagggccaacuagagucuuccugugggauuuuucaaugccauccugacaggcguuuuucucuaguaugguauugcuguaaggauca

SEQ ID NO: 4169553 - RNA, 55 nt, Human
ugauugaagaggugaggaaguuucucccuuagcuuuaauccccucugucuaguca

SEQ ID NO: 4169554 - RNA, 57 nt, Human
ugauugaggggaugugcuguggcauuucugcaggcuuuacauguuucccuuuaagca

SEQ ID NO: 4169555 - RNA, 62 nt, Human
ugauugcgucugugucaccuucaggguuccucuucccuguucuugaaggacagugcacauca

SEQ ID NO: 4169556 - RNA, 66 nt, Human
ugauugcugcaguuuuguaagggauaaauuacuauuuauauacuugauuuaacugagcauauauca

SEQ ID NO: 4169557 - RNA, 129 nt, Human
ugauugcuucaaacucugcuuaauaugggaagaagcagacaggaucugccuaaauuacauccaggcugucuccugguaggcucccagaucguuugcuguuauccuaaaaaggagaggcacagguaguca

SEQ ID NO: 4169558 - RNA, 76 nt, Human
ugauuucaauaguauguuuuucugugacauccuuauggaucacaaagucacaauggcauaguauaaaauggaauca

SEQ ID NO: 4169559 - RNA, 126 nt, Human
ugauuuccagcagccaagacagugacugauuaucaaaugcacugaacacauguuguuacauaaaggaauaauuaugcuauagagauggguuuaguuauaaggugauacaguuaagcugggaaauca

SEQ ID NO: 4169560 - RNA, 56 nt, Human
ugauuuccuggcuuuggaguucacagaccguaagaaacaaucaaaguuggaaauca

SEQ ID NO: 4169561 - RNA, 75 nt, Human
ugauuuccugggcacagcguugggcucuugcaguaggccccugcacagagggcccuggcuggcuccagcuccuca

SEQ ID NO: 4169562 - RNA, 64 nt, Human
ugauuucggacuuuagcccuucggaacuuaaauaaacuucuguaagcuaccaaguuugugguca

SEQ ID NO: 4169563 - RNA, 113 nt, Human
ugauuugaaauucccuaaauugcaggugugcugaauuacgugacugcccaaaggcacccaggcauuuauguguucagaugcacccucaccuucuauuaggacaguuucauuca

SEQ ID NO: 4169564 - RNA, 100 nt, Human
ugauuuggcuuuauauaaagacuuuuaaacaguguuucauguggggcugugcucaugcggccccaaacaucugaucuguuuggugaagucagucaaguca

SEQ ID NO: 4169565 - RNA, 55 nt, Human
ugauuugguuuccaugucuagaggccagaugccuacugggaggucuuccaaauca

SEQ ID NO: 4169566 - RNA, 72 nt, Human
ugauuuguuuuaacuuccagcuccccuuucuuaguauucagacgggaguccaugcagcuugagacagguaca

SEQ ID NO: 4169567 - RNA, 130 nt, Human
ugauuuuaacucguuuauuucagagcucuuugccucaccuuuauuuuuagauuuagucguguuugcugaaauaucaguugcuucuucugugaaugaagugugggaacuugcucucgucgcaguuaaugaa

SEQ ID NO: 4169568 - RNA, 101 nt, Human
ugauuuuauuagugaaagaugaaguuggugcucauuucuaggcuaacugaguaaguucuggucuaaauauggcucuaaaucauaaauuauuucgauaauca

SEQ ID NO: 4169569 - RNA, 129 nt, Human
ugauuuugcccaacuguaggccaauguaaauguuguaaguacaucuaagguaugucaggcuaagcuauagacguuugguagguuagauguauuaagugcauuuucaacuugugaauuauaguggguuua

SEQ ID NO: 4169570 - RNA, 61 nt, Human
ugauuuugucauguuucugauaaguccuccucucaggaauguaagaaauauuauaaaauca

SEQ ID NO: 4169571 - RNA, 74 nt, Human
ugauuuugucugaacgaaguagguccacuggcacuauuuggccuguggcccuuuguuuugauaccucuaaauua

SEQ ID NO: 4169572 - RNA, 70 nt, Human
ugcaaaaacugaggagagaucacguggugucuauuauaagaaaguuuaggugacucacuucaaacuugua

SEQ ID NO: 4169573 - RNA, 67 nt, Human
ugcaaaaaugacaagaguugugaaucugaaugaggggcauaccagaguucuuuacgaccuuucugca

SEQ ID NO: 4169574 - RNA, 64 nt, Human
ugcaaaacuucucagagccuuucauaugcuaaugugcauuacaaagcucuaagagagguaggua

SEQ ID NO: 4169575 - RNA, 62 nt, Human
ugcaaaaguaauugugguuuuugccauuacugucaaugguaaaaacugcaauuacuuuugca

SEQ ID NO: 4169576 - RNA, 62 nt, Human
ugcaaaaguaauugugguuuuugcuguuaaaagcaacaacaaaaaccgcaauuacuuuugca

SEQ ID NO: 4169577 - RNA, 73 nt, Human
ugcaaaauauguggccauucuguuugugucucuuucaaaugugaaauauauacauaaugguauaaguuaagca

SEQ ID NO: 4169578 - RNA, 77 nt, Human
ugcaaacuauacaagauuagggauuugggucucucuuguucacugccuuaucccuaacaucuguauagugacuugca

SEQ ID NO: 4169579 - RNA, 59 nt, Human
ugcaaagcacuggagaugccagaguguuggggaaauauuuuggggaaucuaggcuggca

SEQ ID NO: 4169580 - RNA, 82 nt, Human
ugcaaaguguuuugugugcaucuguguuuaauauguaggguggcauuaaguaaguacaaauguauacauaagcacacaugca

SEQ ID NO: 4169581 - RNA, 58 nt, Human
ugcaaauauuuccuuauagccagagcuugagugugcagggguaaaaggcaguguugca

SEQ ID NO: 4169582 - RNA, 97 nt, Human
ugcaaaucaagcuccccuaguagcuaaucuaauucaucaccugccaugguuaugauuuaggaaacagcuacagguggcuaaagagcauugacuugca

SEQ ID NO: 4169583 - RNA, 72 nt, Human
ugcaaauguauuuuaaagacugccagccuaccuacauuucacaauauaggauuaggucuuuaaaauaaugca

SEQ ID NO: 4169584 - RNA, 58 nt, Human
ugcaaauugcaugauguguaucauuuacaaacauaguucuauacauaugcaauuugca

SEQ ID NO: 4169585 - RNA, 69 nt, Human
ugcaacauacucccuggggcuauuaugaggcuccuggggcuauuaugaggcuuagggaugacaucugcg

SEQ ID NO: 4169586 - RNA, 79 nt, Human
ugcaacccugagaagcaggauggaucuaguguucuccugaccaggaggcaagaucuaaucuuacuucccagagguagca

SEQ ID NO: 4169587 - RNA, 124 nt, Human
ugcaacuaaguguaucaucagagccugagccugaagguacuuuuguuaaguuuuuaaacaagggcuccugcuugcuguuuugacaaagauauauucaugcuuugcucgauuguacauuucugua

SEQ ID NO: 4169588 - RNA, 77 nt, Human
ugcaacuagguuaauccuuuuuguugcuucuuucuuucuuuccggaaaagaacucagagaggauuuuacuguaggua

SEQ ID NO: 4169589 - RNA, 62 nt, Human
ugcaagagaaggugaggaagccgguggagcaggaugaauucucgacuucucauuucucugca

SEQ ID NO: 4169590 - RNA, 59 nt, Human
ugcaagcaaguuuuugaagugggcaugcaugaauucuuucauuucaguaaugguuugca

SEQ ID NO: 4169591 - RNA, 103 nt, Human
ugcaauaguuuucauucugguacaugcaaacauguuuccucuaaggugcaaugccagaaaccuagaggaaaaugugucuugguuuuaucugagaaaacuggca

SEQ ID NO: 4169592 - RNA, 76 nt, Human
ugcaauccaauaaaagguuuugaguacaaauauuuaagagaaaucuuuauauuagaugaggaacuuauugguagua

SEQ ID NO: 4169593 - RNA, 77 nt, Human
ugcaaucuccuuguuguuggagggugccaugcacagggcugggcuccuccagucugcacaucccccaaaguauugca

SEQ ID NO: 4169594 - RNA, 105 nt, Human
ugcaaucugugauuugugggaauuucuugcuuucucuccguucagacaccccaguuugacagauggggcacaaagccacagagcaauccauaacuccaguuugua

SEQ ID NO: 4169595 - RNA, 67 nt, Human
ugcaaugaugcguuuuuauuugugugagcguuccuuuugaauacauugcuagaaauguauuuuugca

SEQ ID NO: 4169596 - RNA, 65 nt, Human
ugcaaugcagagacaauucuaagguagcucacuuuauuggcuaaaagaaugcuuuuugcauugca

SEQ ID NO: 4169597 - RNA, 65 nt, Human
ugcaauucagguuuaagggccaggauggaacuacaaauuggauaucaguaaaccuaaagauugua

SEQ ID NO: 4169598 - RNA, 62 nt, Human
ugcaauuccaaacagugcugcagacuucuccaagcccggagucaguguaaguuuggaaugca

SEQ ID NO: 4169599 - RNA, 85 nt, Human
ugcaauucucacuuguugugauuuaguuuaaucuguuuucuuugguuccaaguauaagccaaaaucaggacacagagaaggggca

SEQ ID NO: 4169600 - RNA, 74 nt, Human
ugcacaaaguucuuagauuaaucacugauugggcuagaaaucagugcacaaaaauaucuaggaaugcuauggca

SEQ ID NO: 4169601 - RNA, 71 nt, Human
ugcacaacguucugccccugggauuggggcuucaggcccuuagauuucagggugcagaugaugacacugua

SEQ ID NO: 4169602 - RNA, 79 nt, Human
ugagaccaagcagccaaaugaagauuuuacuuauagauaaucuguccuaguagacacuguauuugaugcuuuagguuca

SEQ ID NO: 4169603 - RNA, 89 nt, Human
ugagaccauuugcugguuuuagggaaucaaucuauaggugggaaguuuucuuuugcagaaacuaauuuagaacuaagccuuugguguca

SEQ ID NO: 4169604 - RNA, 101 nt, Human
ugagacggagucucacucugucgcccaggcuggagugcagugacgugaccucagcucacugcgaccuccaccucccggguucuagcgauucuccugucuca

SEQ ID NO: 4169605 - RNA, 130 nt, Human
ugagacguggaggggaaggaaagagcugccucaaauguggaaggauuucuucucucccaagaggaucucuguccucacagggcaggaaggaggggccgaccagguuaggcaacuugcccgccagagcucg

SEQ ID NO: 4169606 - RNA, 77 nt, Human
ugagagacaaagcuggaaaaggaggcugggaccuggcugggaaggucugagcccagagaucugagcuauguuuguua

SEQ ID NO: 4169607 - RNA, 70 nt, Human
ugagagacucaggaggaagguuccauguagcaaaugccccuucguccaggcagcccuuccugacucuuca

SEQ ID NO: 4169608 - RNA, 71 nt, Human
ugagagagaaacuuggaguuauucuggauuccuuuccuuaucacauccaaaugauuacuaauuucugucca

SEQ ID NO: 4169609 - RNA, 80 nt, Human
ugagagagaagugggugucaccuugaaguugauuucauucacuuuaggaaucucuaauacucucaaacaacuucucucca

SEQ ID NO: 4169610 - RNA, 77 nt, Human
ugagagagcugcauauucauuaguuaaaaccuggggauuucuucuuagaauaaguugaugauauauguggcaaucca

SEQ ID NO: 4169611 - RNA, 58 nt, Human
ugagagagggaugcacccuccugucuccuguagagaguagagugccccccaucuucca

SEQ ID NO: 4169612 - RNA, 59 nt, Human
ugagagcaagagguauauagucagauagacccaaauuuuaauauaaccucuguuacuca

SEQ ID NO: 4169613 - RNA, 57 nt, Human
ugagagccuaguagguggaaaaacuuggugccaaaggucucccacacugggcuuuua

SEQ ID NO: 4169614 - RNA, 101 nt, Human
ugagagggagucucacucuguagcccaggcuggagugcaguggcgccaucucggcucacugcaagcuccgccucccggguucacgcuguucuccugccuca

SEQ ID NO: 4169615 - RNA, 64 nt, Human
ugagaguaaaggggcuucaucuaaucaguauguuuaaauaugauacucccuuuuaguucucuca

SEQ ID NO: 4169616 - RNA, 61 nt, Human
ugagagugggcugagcuugcuggguguucagccugagcacuaagucaacagccucucuuca

SEQ ID NO: 4169617 - RNA, 101 nt, Human
ugagaguggugguuuuauuuauuuugaacuugccuuuguugugacaccauccauuaaaaugcacaguaaaaagccuuagaauuucagacccguaacucuca

SEQ ID NO: 4169618 - RNA, 75 nt, Human
ugagaguuuguaucacuccaccagcugagccacccagcuuggcagaggcaucagcugagggugagcagaaucuca

SEQ ID NO: 4169619 - RNA, 83 nt, Human
ugagauaacauauguacaguccuuaacuuaaagccuggcaaauaggaguuuaaaaauguuagcugccauuauuguuaucauca

SEQ ID NO: 4169620 - RNA, 115 nt, Human
ugagauaauguucugaagaguauuaaaggugucuauuaacacaagaaaggaaaggagaguguggucccccuccuuuacuuucuggaagugucaacagacaacugucaggacauca

SEQ ID NO: 4169621 - RNA, 66 nt, Human
ugagauacauucugagaaaugcauccuuuggugacuuaauugugcaaacaucauagaguguacuua

SEQ ID NO: 4169622 - RNA, 70 nt, Human
ugagauauguuuguuaucacaacuagguagugcuaguggcauccagugaguagaagacagagauaguaca

SEQ ID NO: 4169623 - RNA, 68 nt, Human
ugagaucacuuacguggcugcaguuauuuaguggcucaacugcaguucaacgauguaaugugaccuca

SEQ ID NO: 4169624 - RNA, 56 nt, Human
ugagauccagagaccuuagaaugcuuggcaagggcaguucuguuaugcuggacuca

SEQ ID NO: 4169625 - RNA, 100 nt, Human
ugagauggagucucgcucugucacuaggcuggagugcaguggcaugaucucggcucacugcaaccuccgccucccggguucaagcgauucuccugccuca

SEQ ID NO: 4169626 - RNA, 58 nt, Human
ugagauggagucuugcucuguugcccaggcuggaguguaauggcgugaucucugcuca

SEQ ID NO: 4169627 - RNA, 102 nt, Human
ugagauggaguuuugcucuuguugcccaggcuggagugcaauggugcgaucucggcucaccgcaacguccgccucccggguucaagcgauucuccugccuca

SEQ ID NO: 4169628 - RNA, 79 nt, Human
ugagaugggugauuguugguggugauuaucauugagccuuucuugguguucuuaaaaucacagucacccaguauccuca

SEQ ID NO: 4169629 - RNA, 87 nt, Human
ugagauggucugaaaaaccauauugugcaucuguuugugcacaguucagcucacauugcagacguauauuauuuuacccuaugcuca

SEQ ID NO: 4169630 - RNA, 64 nt, Human
ugagauggugacagcauuuugaaguuguacaaagauagguacaaaauugaucuguucuauuuca

SEQ ID NO: 4169631 - RNA, 55 nt, Human
ugagauuaaaccaauccugauucaucuucuauggucagagaauggccuacucuca

SEQ ID NO: 4169632 - RNA, 58 nt, Human
ugagauugggucuugcucugucacccaggcuggagugcaguggcgugaucucgacuua

SEQ ID NO: 4169633 - RNA, 78 nt, Human
ugagauuugauggguguguaucuaggaaauggucuauuucaauucuauuaccuggaauuuauauagcuauguaucuca

SEQ ID NO: 4169634 - RNA, 105 nt, Human
ugagauuuugagaaacugagguucuaagugguuccuuuaaauagaucacacuacuugaaauguuugaagaccacugaguuacugaaauuuucuuccaaguucuca

SEQ ID NO: 4169635 - RNA, 63 nt, Human
ugagcaaaacagcaucaccccauaacauuguccuaguguugccugguauguugucaaugcuca

SEQ ID NO: 4169636 - RNA, 73 nt, Human
ugagcaacauugagucuaaguaccaaucaagggauagaaagccugguucuuagacuucaugucucagagcuca

SEQ ID NO: 4169637 - RNA, 78 nt, Human
ugagcaaugucacccauuuuuaaauauaacuuggagaauagcuaaguaguauguuuaacaagggcuugagaauguuua

SEQ ID NO: 4169638 - RNA, 79 nt, Human
ugagcaauuuauaagagugaaggccagguuacaguuaauuagcuuaacaugauuuuucuuugacucuacaaauuguuua

SEQ ID NO: 4169639 - RNA, 55 nt, Human
ugagcacacuccuggugagcgaggcagaaaagcuccuuuccaggagcuguguuca

SEQ ID NO: 4169640 - RNA, 55 nt, Human
ugagcacuggguguuuucugugguuuuccucuuuggggaaaauacucugggcuca

SEQ ID NO: 4169641 - RNA, 74 nt, Human
ugagcacuuccugccaugggcuguccugcuacaacggcucuaaagcucccuuggccacaguccaugcaugccca

SEQ ID NO: 4169642 - RNA, 89 nt, Human
ugagcagacacucggaggugucuugagauuaucauccgcugaggguggaaggggauagagcagacacuccgcaggugucuugaggcuca

SEQ ID NO: 4169643 - RNA, 60 nt, Human
ugagcagacucugcagagccacaaacaaugccgccuuaugagcucuggucagucugguca

SEQ ID NO: 4169644 - RNA, 55 nt, Human
ugagcagagucgcuccagagugagccaugggugcugaucugggcgaucucucuua

SEQ ID NO: 4169645 - RNA, 55 nt, Human
ugagcagaugugccaaacuguaaccacaaaagguugguguuuuguuuucuucuca

SEQ ID NO: 4169646 - RNA, 115 nt, Human
ugagcagcuggaagaggaugguggagcagaagguuuaauuucacauacaguuggcuucuguuugugauaacuuuuacauuuucgcagauagcuugucuuuuucccuguugacuca

SEQ ID NO: 4169647 - RNA, 55 nt, Human
ugagcaggacucacugcagccucaaauuccuggggucagcgauccuccugccuca

SEQ ID NO: 4169648 - RNA, 56 nt, Human
ugagcaggcaaacaaugguuauaauuuacuuucaaucaaagaguuugccuggcuua

SEQ ID NO: 4169649 - RNA, 81 nt, Human
ugagcagguuaggagcaguugggcucuaggaaguuuaaggauagcacugauuuccagccuaaaggcuuuguauuugaguca

SEQ ID NO: 4169650 - RNA, 68 nt, Human
ugagcaguaggucugaauagugggcuuaaaauauucaguaacccuugcuauaaacagaugugcuguca

SEQ ID NO: 4169651 - RNA, 63 nt, Human
ugagcauaaggauuuuggguucauacuauagcaugcaugaacuucauuccuuuuuaugacuca

SEQ ID NO: 4169652 - RNA, 64 nt, Human
ugagcaucauuguccacauguguacuccuguuuuuguauacucuguagauguggaaaugcguca

SEQ ID NO: 4169653 - RNA, 85 nt, Human
ugagcaugaauggaaaucccagcuuuugcacaacuggcuccguggguguggucaacuugcaagaugcugggcuucagcaucuuua

SEQ ID NO: 4169654 - RNA, 55 nt, Human
ugagcaugaggaugcugagggccugcuccuaacccugcaccacacucacugcuca

SEQ ID NO: 4169655 - RNA, 104 nt, Human
ugagcaugguggugcuugccuguaguuccagguacucagggggcugaggcaguaagaacacuugagcccaggaggccugggugacagaguaagacccugucuca

SEQ ID NO: 4169656 - RNA, 79 nt, Human
ugagccaacagcaucccugaagauaaccagagccaaauguuuacucaauggaagucauuauucagugagcugcugcuua

SEQ ID NO: 4169657 - RNA, 58 nt, Human
ugagccaagauugugucccugcacuccagccugggugacagaguaagucucuggcuca

SEQ ID NO: 4169658 - RNA, 68 nt, Human
ugagccagguuaagacaggagcauaucuguuuugcucacuagaauaaaaugucugaccugggaccuca

SEQ ID NO: 4169659 - RNA, 61 nt, Human
ugagccagguuuuccaucauucaguugauuuccccuucugaaaggauguacaucuggcuca

SEQ ID NO: 4169660 - RNA, 72 nt, Human
ugagccagucugucugggugaaauuuuuagcuccccauauacuaacuaugugaucucaggcaagacagcuua

SEQ ID NO: 4169661 - RNA, 61 nt, Human
ucuagcaagccuaccacgaaacugggaauacaguuaccuugucguggcuugcucuuaaaga

SEQ ID NO: 4169662 - RNA, 56 nt, Human
ucuagcagaguagccaaugugggaauuguucagugccugcuugggacacugccaga

SEQ ID NO: 4169663 - RNA, 65 nt, Human
ucuagcagccagacaccucucgggaggggagcuuggagccacuugaaagguagcuggcagcuaga

SEQ ID NO: 4169664 - RNA, 82 nt, Human
ucuagcccucucuucccagcucggaugggcccuuggccccaggucuccaguggcaaguccgggcgggcuccggggccauaga

SEQ ID NO: 4169665 - RNA, 86 nt, Human
ucuagcuacuaugauaagacaucauuaaacagcaauaagaggaaaaacuuaucagcauucccaaaugaugugcuuguuuggcugga

SEQ ID NO: 4169666 - RNA, 72 nt, Human
ucuagcuucggggccagugccucucuuccccugcugggaugggacagggcuggcuggucccuggauacugga

SEQ ID NO: 4169667 - RNA, 59 nt, Human
ucuaggcuggaggaagcagugccugggaauaagcucuccaggguccccuccugcuuaga

SEQ ID NO: 4169668 - RNA, 78 nt, Human
ucuagggaaauugguuucacauaauuuuaaauuguggacacucugcaccacauguuuaaguuuaaugaaaaccuuagg

SEQ ID NO: 4169669 - RNA, 66 nt, Human
ucuagggagaaauaaugccaguccaggaggagaagcuuccuggccauaggcuauuucagaccugga

SEQ ID NO: 4169670 - RNA, 62 nt, Human
ucuagggcucuggugggcucuguuuucacucacucuguugauagaauucucagagcccagga

SEQ ID NO: 4169671 - RNA, 63 nt, Human
ucuaggucauuuaucuccuuccuaaugugcccacaucuuauaagcaaggcagguugaccaaga

SEQ ID NO: 4169672 - RNA, 112 nt, Human
ucuagguuucucugggauguacaugugcacgugugacuuugugccugugccugagugucaucugagugcauauuucucuugcauccuguguugaguuuaagcgggaccuaga

SEQ ID NO: 4169673 - RNA, 55 nt, Human
ucuagucguaaauaugacuagacauauaggccaugaguaaauauuuaugacuaga

SEQ ID NO: 4169674 - RNA, 69 nt, Human
ucuagugcuucagcucaggcuugagggucccuuggcugagccaauccucagaccucagcaaagccugga

SEQ ID NO: 4169675 - RNA, 70 nt, Human
ucuaguggaaacuaacuggaauuaaaaugggcacaaauuccauucaagugcuaguuauuuauucauuaga

SEQ ID NO: 4169676 - RNA, 70 nt, Human
ucuagugggcucaggccucuguggggccugggaaucuggggcccugcaggggaccugcagccuccguaga

SEQ ID NO: 4169677 - RNA, 87 nt, Human
ucuaguuuucuuuuccucaccuaucucucucccaucagagagauagagguagagauagagagggauguggugggagagaaagagaga

SEQ ID NO: 4169678 - RNA, 65 nt, Human
ucuaguuuugguaugagaugcaggccugcaacgugauuuagccuucauuucuuucuugggcuggg

SEQ ID NO: 4169679 - RNA, 67 nt, Human
ucuauaagaaaguguuaacacuggcuacuuuugcaaagaaggccuaggaguugacaugggggguaga

SEQ ID NO: 4169680 - RNA, 75 nt, Human
ucuauaagagaauugguaagcaagauggcaauaccauuaugucuccauuuagcuugccuguuuaacucuuguaga

SEQ ID NO: 4169681 - RNA, 76 nt, Human
ucuauagaaagcaaaauccuaccaagaaauucccucuuuccuuuaugggauuugcuugguggauuugcuuggugga

SEQ ID NO: 4169682 - RNA, 91 nt, Human
ucuauaucuuuaauuuuauugcuaucucuauauccauuuaucuguauaugcagaaagaguaagggauggucagaggagaaaaaggaagaga

SEQ ID NO: 4169683 - RNA, 69 nt, Human
ucuaucagacuucguugcaggucugacuugugaaggagagagaaaaggaaggaaggaaguuugcaugga

SEQ ID NO: 4169684 - RNA, 66 nt, Human
ucuaucagguuuccauuauuuuaugggugggcuuagcauuauugggaagauaaaggaaacaauaga

SEQ ID NO: 4169685 - RNA, 57 nt, Human
ucuaucuagagcagugguucucaaccaagggugauugugcagccacuuucuaugaga

SEQ ID NO: 4169686 - RNA, 78 nt, Human
ucuaucugcgcacauuagaaguaacuaauguccacaucugcccuuaagacauguaucccuaauuguguuaaagauaga

SEQ ID NO: 4169687 - RNA, 61 nt, Human
ucuaugaagugcgaagaggcacagccagggagcucuccuagccuccagugggcuucguaga

SEQ ID NO: 4169688 - RNA, 57 nt, Human
ucuauggaguugguauuagucauguggauaagaauagcuaauauucuacucuaagga

SEQ ID NO: 4169689 - RNA, 88 nt, Human
ucuauggccuuggcaacagacaguagacaugggagcucuuaacucccuccuaaauguaacuguuauauuuuguugcuauggcaauaga

SEQ ID NO: 4169690 - RNA, 80 nt, Human
ucuauguggccaggaaaaggagauggaauuagugggcaucuagcccaucucugccacaguccauuuuacuggucaccaga

SEQ ID NO: 4169691 - RNA, 76 nt, Human
ucuaugugugugugugauauacacauguauauuucuauauguaauauguauauguguauguacauacauacauuga

SEQ ID NO: 4169692 - RNA, 75 nt, Human
ucuauguugcugaggauauuuuacugcaguucaaguuguaauaauagcucuguuuaagauccgucagucacuuga

SEQ ID NO: 4169693 - RNA, 94 nt, Human
ucuauuacgguucaaauugccaguguaaacuaauauuuaaaaucauuuuagugugguguuaaaaugcuuuauaguagauuuugccugugguaga

SEQ ID NO: 4169694 - RNA, 90 nt, Human
ucuauuauuaugaugucaauauuugaccauguuugaccugugaaagaguggaagguugaagugguucagugucauauuaacguauaaaga

SEQ ID NO: 4169695 - RNA, 75 nt, Human
ugccuuuuggugauuggaauaugcagagagcaugaauagguaacccugugauaaucugcauaccaguaaaaggua

SEQ ID NO: 4169696 - RNA, 95 nt, Human
ugcgaccauuugcuuguugugaugagguggauucaaagcagacaucaaaaagaagccuguuuccaccuucauggcuaaagaaccaaguggcagca

SEQ ID NO: 4169697 - RNA, 64 nt, Human
ugcgagucuauagcucugcagauuugcuaucucugggaguggaagagcagagcugggauuccca

SEQ ID NO: 4169698 - RNA, 55 nt, Human
ugcgaucauggcaaaggccuugaagauggcgucuguggggccugugauggucaca

SEQ ID NO: 4169699 - RNA, 71 nt, Human
ugcgcaaucaaccuugugaggaucaaaugaaacacguacaguuuucacugcagcccaugaagggaugugca

SEQ ID NO: 4169700 - RNA, 65 nt, Human
ugcgcccgcggcuccccucccuggggcugcgcugcgaccccagaggaaggggcgccgggcgugca

SEQ ID NO: 4169701 - RNA, 66 nt, Human
ugcgcucuauucuggguaccaaacuucaagaaaaauaauucauuugaagauacagaaaagagggca

SEQ ID NO: 4169702 - RNA, 72 nt, Human
ugcgcuggaaagaauuccuaugguucaaacacuuguuagugaauucugaaugaauagaauuguuccagccca

SEQ ID NO: 4169703 - RNA, 64 nt, Human
ugcgcuguaugagaaacagauguaagcucucugggaauugggcaggcauuucucuuuacagcca

SEQ ID NO: 4169704 - RNA, 95 nt, Human
ugcggauauugugauuaaacagacaguaaaugaaacaaaugggcagaggggugugugucuguagguuucugugugucuguuugugugugucugua

SEQ ID NO: 4169705 - RNA, 68 nt, Human
ugcggcuguggcauuuggaaagagcacuagaguaacugggucuggccaaagguuauucucuggccgua

SEQ ID NO: 4169706 - RNA, 58 nt, Human
ugcggggagggcaaagggagcgcaccaagaccaccaggcugcuccaggccuugccgca

SEQ ID NO: 4169707 - RNA, 111 nt, Human
ugcgguccaagauucaaagagccugcuuccucagggaacaagcagaacccuugguacaaaagccuguauuuaauugucccuggaaaguaugcucucuggucuucagcugca

SEQ ID NO: 4169708 - RNA, 68 nt, Human
ugcgguguuuccaguggggaaagaguaauuuuugaacauagccccuguuuucccacugaaagcuccca

SEQ ID NO: 4169709 - RNA, 56 nt, Human
ugcgguuuugacagcaauuauaagaaaaauuuauaagcuuccuguuagaaaccgua

SEQ ID NO: 4169710 - RNA, 63 nt, Human
ugcguguguguuuugugugugugugugugugugcacgcauguguucuugaaaggccacaugua

SEQ ID NO: 4169711 - RNA, 111 nt, Human
ugcguucaguguugaugagcuguuguacuggguucuguaugggugaugggagauaaguaagauguguuccuugcccucugggaucuugcugcagcuggcgagacagacgca

SEQ ID NO: 4169712 - RNA, 89 nt, Human
ugcguuucauagucuaccuguuugggcaagugauuuucucugugagcuugcaugagacagcuuaauugguggucacuagaauagaugca

SEQ ID NO: 4169713 - RNA, 68 nt, Human
ugcuaaaugcauuuuauuauaugugacuuguuugaaaaacugucacuuucugugagauguaguuagua

SEQ ID NO: 4169714 - RNA, 65 nt, Human
ugcuaaccccuccucuucuggcagcugggcaaugaugagcgcucccaggaagagaagggccagca

SEQ ID NO: 4169715 - RNA, 56 nt, Human
ugcuaagauauggguagucaagagguugauaaaaccuagcuucucauuucuaagca

SEQ ID NO: 4169716 - RNA, 78 nt, Human
ugcuaauucgagaaugaaagggguugaguuacagcuacugcacugggagcugcacacaauccuguuccuccaagggca

SEQ ID NO: 4169717 - RNA, 64 nt, Human
ugcuacagauaggaggaaucugaaagagccagcgggaccucuccuuucccacugucugugggca

SEQ ID NO: 4169718 - RNA, 120 nt, Human
ugcuacauaacaaccucucugaaccucgguuuucuccuguauucagaauucguccuacucucugaaguaagugcuugaaugaagggaugaccgaagggcccugagagcuuggaaagagca

SEQ ID NO: 4169719 - RNA, 66 nt, Human
ugcuacaucaaggccugaguggcuuugccacggcucuucuugugacugcaggccuuggugccagca

SEQ ID NO: 4169720 - RNA, 70 nt, Human
ugcuacccaggguagaaccucagagcaagagagaagacuaggcucugaacuuccaccuuuucagggggca

SEQ ID NO: 4169721 - RNA, 66 nt, Human
ugcuaccugccuuuggggaguuagagggcagugagggugcccaccccuggacaggugaguguagca

SEQ ID NO: 4169722 - RNA, 107 nt, Human
ugcuacgagggcuucagcugcuugaacaaggauaaauuugagaaaauaaauaaauguuguucaggucaguuucaaugaagccauuuuucuucuauuauuccauggca

SEQ ID NO: 4169723 - RNA, 71 nt, Human
ugcuacgcuuucccugcuuguggccuccauaggacacacacauggaugccaggagauggagcagaguggca

SEQ ID NO: 4169724 - RNA, 86 nt, Human
ugcuacuaguaggaauagaacuaacagcccacauuaccuuccccuagaagugauugggcuggauuaggacuguuccaguuugagca

SEQ ID NO: 4169725 - RNA, 81 nt, Human
ugcuacuuggaaaugaaaugagugccuggaggugggagaccuuuucaacaguauuacauuucagaaauaucuaauaaagca

SEQ ID NO: 4169726 - RNA, 69 nt, Human
ugcuagaauuugcagaagcauaaauaacugcuugggcugcugcuccgaagugcuuccucgcaaguugca

SEQ ID NO: 4169727 - RNA, 63 nt, Human
ugcuagcacugugcagucuacggauuagauuauaaacugaaaagacccugcauauguucagua

SEQ ID NO: 4169728 - RNA, 86 nt, Human
ugcuaggcaucugagcuuggccugaggauauucaccagcaugauugagaaaacaugcuuguccucaggaaggcccaagucuaagca

SEQ ID NO: 4169729 - RNA, 57 nt, Human
ugcuaggggucagcaccauaucuggacccuuccaugacacaguggugugccuuggca

SEQ ID NO: 4169730 - RNA, 66 nt, Human
ugcuagguuaaucauucucuguugcuauguuaacagaagugauagcagcugugguuuaccuuagua

SEQ ID NO: 4169731 - RNA, 59 nt, Human
ugcuaguagaaggcaaagaaggcucgaccuagauccaagccuguguuuuuucuauugca

SEQ ID NO: 4169732 - RNA, 69 nt, Human
ugcuagugaucuguuucuagaauugcucucugcucacuagagguucagacgcauaauaggcacucagua

SEQ ID NO: 4169733 - RNA, 108 nt, Human
ugcuaguuuguuuguccauucaucuguuggacauucaucugcagguuguuuucaggccuuggcuauuaugaaugcuguuaugaacaugaauguacaaauauucuuuca

SEQ ID NO: 4169734 - RNA, 55 nt, Human
ugcuauaagagucacuuuuccucccaguccuuaggaaaagugauuuuuucuggca

SEQ ID NO: 4169735 - RNA, 81 nt, Human
ugcuauaauuuggcuuucauaauguuaucuuccacaaguggggcucuugugaagguuaaauaauaugaugcuuguaaggua

SEQ ID NO: 4169736 - RNA, 84 nt, Human
ucuccaugaaugaauggacaggagagcauagucacccuuaaacagugagcucugcaguccuguccuucaagaaacaauaagaga

SEQ ID NO: 4169737 - RNA, 63 nt, Human
ucuccauguuugcugcauuccacacaauuacugguagugugugccagauacaagcacugggga

SEQ ID NO: 4169738 - RNA, 59 nt, Human
ucuccauuucaacaugaccacuugacacuaaguguuugucccguuagaaaugucagaga

SEQ ID NO: 4169739 - RNA, 84 nt, Human
ucucccagcuucugagggccuuugcuuccaauugacugcacuugaucauuuucuggacggcugccuucagaacacuggagugga

SEQ ID NO: 4169740 - RNA, 130 nt, Human
ucuccccguccagcugggccggccugcucucggccgcggggcuccgcggcgcgcaccggcaguuggcggcgcuguggccgccucuggagcgcugcuucccgcggcugccgccggagcuggacgugggcgg

SEQ ID NO: 4169741 - RNA, 89 nt, Human
ucuccccuuuucuguguucguagcagcuggcacaagcccagcacugggcucugcuccuggugccagugcugccuacugaugugggggga

SEQ ID NO: 4169742 - RNA, 57 nt, Human
ucucccuauuuggguguuaucuccccugccagaucaccaaugccucaaauugggaga

SEQ ID NO: 4169743 - RNA, 74 nt, Human
ucucccucagcucauauuuaugcccuuuugugccgcuuuuaacuuucacauggugcucauaugggugggggaga

SEQ ID NO: 4169744 - RNA, 71 nt, Human
ucucccuuuguuuucugcagucucucagaagccccugcuagugguaaaauucugaacuguaguuagggagg

SEQ ID NO: 4169745 - RNA, 59 nt, Human
ucuccgaaucggcugccggggcuuagggauggaggggguccagggcgggcgcacggaga

SEQ ID NO: 4169746 - RNA, 69 nt, Human
ucuccgaggcagcucugaugaugcucuggacagacagugggccgaggcaggguggagccgccucugagg

SEQ ID NO: 4169747 - RNA, 64 nt, Human
ucuccucaucacuacagggcgggucugagauggcacucaacaugcauuugugggauggaauaga

SEQ ID NO: 4169748 - RNA, 59 nt, Human
ucuccuccuguacacaauuccgaggauaagacauuaccgcaaaggauguauaggugaga

SEQ ID NO: 4169749 - RNA, 75 nt, Human
ucuccugcccaugaugcagaauccuagaguguccgucaaacuuagagggaaccaggucugaucaaggucaagaga

SEQ ID NO: 4169750 - RNA, 81 nt, Human
ucuccuggccccuguaaaauguacauguauaugcagcauauaauauuuaucuacaguucagagaugcaugggcccagauga

SEQ ID NO: 4169751 - RNA, 95 nt, Human
ucuccugggcucugugccaccuggauccugcugaacugggcuugugccaagcaggacacaugggcuuagcaggcaggggugcagggaccuagagg

SEQ ID NO: 4169752 - RNA, 56 nt, Human
ucuccugguacccuuccuagcaucaauucuguauuuguaggaguccaaucaggaga

SEQ ID NO: 4169753 - RNA, 56 nt, Human
ucuccugguacccuuccuagcaucaauucuuuauuuguaggaguccaaucaggaga

SEQ ID NO: 4169754 - RNA, 121 nt, Human
ucuccugucauuugagauucaagacuauugugagugugucuuugaagaaguagaucaauaacucucuuccuaguuacauaugcacaaagaaccugggaugaauucagagugacuuuggaga

SEQ ID NO: 4169755 - RNA, 62 nt, Human
ucuccuguugcucuugcccccugcaaguuucaagucugaaugguggcuagaaagcagugaga

SEQ ID NO: 4169756 - RNA, 61 nt, Human
ucuccuucaccccagcuuugaugcaccuauaccagguuugaucaguaagguuggaggaaga

SEQ ID NO: 4169757 - RNA, 79 nt, Human
ucuccuuccauccugaaugguguaauagguuuaagauaacuaccucuaaaauuaacuaucacuuuugugaggaagguga

SEQ ID NO: 4169758 - RNA, 99 nt, Human
ucuccuucccuugcaacaccugcucuggggaagccagaugucauguugugaggacacucaggcagccuccagagaggcccguguggcaaggaguggaga

SEQ ID NO: 4169759 - RNA, 67 nt, Human
ucuccuuccucucuugcccauaagagucuacuuaauauguuuccucuuuggaggggaggacaggagg

SEQ ID NO: 4169760 - RNA, 71 nt, Human
ugccaauuuuucugcagauggcaguguaacugcauuuuuaugcuaauguuuguggaagauacuugaaugca

SEQ ID NO: 4169761 - RNA, 59 nt, Human
ugccacacuccccugcugcagucaguccgugccucccugauugguugguugguguggca

SEQ ID NO: 4169762 - RNA, 64 nt, Human
ugccacagagacuuucauuguaaagccugguacugaaguuuggacaaagguguguuugugugca

SEQ ID NO: 4169763 - RNA, 74 nt, Human
ugccacauaagguguuguauccagagacagaguaacagcaagguggagcuggauggggcagcuuagguguggca

SEQ ID NO: 4169764 - RNA, 128 nt, Human
ugccacaugcuugaagcuuucacugccccauucagcuucucagcaugaagguuuccaguuccuggcacuugaucuggaagccguaggguuugggaaaugaggacagaugaugaagcggcugaguggua

SEQ ID NO: 4169765 - RNA, 60 nt, Human
ugccacaugucaugugcucaguagccacaugcgccaguggcugcugcaugggacaaggca

SEQ ID NO: 4169766 - RNA, 58 nt, Human
ugccaccagccagcuuggcuaucaaaaauggucuuccagcugggugggcugagugaca

SEQ ID NO: 4169767 - RNA, 55 nt, Human
ugccaccuguacaugcuaucugaaggacagccuccagggcacacagaggauggua

SEQ ID NO: 4169768 - RNA, 57 nt, Human
ugccacuggaggcacuuucuucccacucaccaaugaagaaacugacuccuagaggca

SEQ ID NO: 4169769 - RNA, 130 nt, Human
ugccagacaaggccagcuggaggagccuggaaggagguggggcggggcucugagaagcaucgacugcggcugcccucccucccugccuccaucuccacccuccaccaccaggccgguguaaucagggcua

SEQ ID NO: 4169770 - RNA, 86 nt, Human
ugccagagagagccuucagcugaccaaaugccuacaguuaucagagauagaaggacaccuauggugcaagcugagguuuguuggca

SEQ ID NO: 4169771 - RNA, 58 nt, Human
ugccagcagguagauauuggccaugauaacauggaccaguggagaggcaugcuuggca

SEQ ID NO: 4169772 - RNA, 92 nt, Human
ugccagcaguuaagugguggaauugggauuugaauccaagcucacuccguuccaaauucuauguucuuuccauaaucccaugcugcugagua

SEQ ID NO: 4169773 - RNA, 61 nt, Human
ugccagccauaaacccagaugacuuuuauaugugggaguacacuggcaaauguggugggca

SEQ ID NO: 4169774 - RNA, 78 nt, Human
ugccagcucuuucccuagugaucuuauuaguugucugcuacaugucuaaauaauaagauacuaagggaguuguaggua

SEQ ID NO: 4169775 - RNA, 55 nt, Human
ugccagcuggcacuuugggcugaauggccagcuaccaaagaacugccauuuguca

SEQ ID NO: 4169776 - RNA, 58 nt, Human
ugccagcuguaggugguggguugccuugacaauucacagaaacguacgugccguggca

SEQ ID NO: 4169777 - RNA, 58 nt, Human
ugccagcuuuugacuaucuuaguucacucagcugaaaugauggcuuuagaagcuggua

SEQ ID NO: 4169778 - RNA, 84 nt, Human
ugccaggaacauaccaaguuuuguauacagcuagacacucaagagcaaguauagcuguuuaucaaguucuugagucuucuggca

SEQ ID NO: 4169779 - RNA, 75 nt, Human
ugccaggcgugguggugcgcaccuguagucccaacuacucgggaggcuaagcaggcggaucauuugggcuuggua

SEQ ID NO: 4169780 - RNA, 83 nt, Human
ugccaggucagagagcuguucagcagccagguugugugcagaaccggagccccagcugccugaacuugcaguuggccuuugca

SEQ ID NO: 4169781 - RNA, 86 nt, Human
ugccaguauccuucugagacccauucuuaacuuuauggcuuuuuuucucuucucuugucucacaaucuuugaaggaaucucaggca

SEQ ID NO: 4169782 - RNA, 55 nt, Human
ugccagugaaacguggucucaucaguaucucaggcucugaccaaaucgcuuggca

SEQ ID NO: 4169783 - RNA, 63 nt, Human
ugccaguguggaacuaggaagaccaacugggccucuuaccucuuuaucuguuuuacauuagca

SEQ ID NO: 4169784 - RNA, 62 nt, Human
ugccagugugugccuuaagcucacuugcuucuguaagccaucucuuuagacacaccuggaca

SEQ ID NO: 4169785 - RNA, 96 nt, Human
ugccaguuucaacuuuuccuggagauggaguuguuuucaauaauggagugaacuggauuuccugaacaagccucccagugaagaggaagcacagca

SEQ ID NO: 4169786 - RNA, 57 nt, Human
ugccaguuucugauucugaaugaacagccuaacaggaggcuucagggcagaauggca

SEQ ID NO: 4169787 - RNA, 73 nt, Human
ugccaguuuucacuuauagggauguuauugaagaauuuuagaauaaugcagagauuuccuaaaagugauggca

SEQ ID NO: 4169788 - RNA, 59 nt, Human
ugccauaaagaggaggcugaacuuccugcacaauguccguuuuuccuucucuacaggca

SEQ ID NO: 4169789 - RNA, 83 nt, Human
ugccauaagaggaaaagucaggggaguguugaagacucugccuccuacaaauaugugaguuuuucuccccuggcuucauggua

SEQ ID NO: 4169790 - RNA, 64 nt, Human
ugccaucacaauagcaauguggcuuagaaguuacuucucaagcuacaaccauauucauugugca

SEQ ID NO: 4169791 - RNA, 58 nt, Human
ugccaugagugcuauaugugaagagauauuaagucucauuuguaauuaguucucagca

SEQ ID NO: 4169792 - RNA, 71 nt, Human
ugccaugcaggaaguuucauguggagguagacugguguagcuguucugaacagucuggcaugaugcaggca

SEQ ID NO: 4169793 - RNA, 69 nt, Human
ugccaugugacauuuuggaauucaucacaaaaccuggugugugacugaccagauaugucauaccuugca

SEQ ID NO: 4169794 - RNA, 58 nt, Human
ugccauuuagugcaucauuaguuuaauagagacuuaugcucuaguguaccaaauggua

SEQ ID NO: 4169795 - RNA, 71 nt, Human
ugcccacucuuuggccacagauccuuggggguagggauugugucauauucuucuguguacaaugaguagca

SEQ ID NO: 4169796 - RNA, 122 nt, Human
ugcccagauauuuucaaaguaggcaaagcuggcaagguugcaugcuucuagggucucacuaaaucgaggaugggggcauggaccagccuggcuggcccaaauauuugccguguugcugggua

SEQ ID NO: 4169797 - RNA, 69 nt, Human
ugcccagcacauaguguuuugagagacagcugacuggcugucucauacaaggcccugcucuguugggca

SEQ ID NO: 4169798 - RNA, 90 nt, Human
ugcccagcagcaccuuggggugaaugcauuaagaagggggaacugucaucucauucucccucucagauuuauucacagucuccugcggca

SEQ ID NO: 4169799 - RNA, 55 nt, Human
ugcccaggauugugaggucagggcaggaugccaagaugaacuacauuuccuggca

SEQ ID NO: 4169800 - RNA, 57 nt, Human
ugcccagugucuccaacaucagaugucgucacauucacgucuggagaccugauugca

SEQ ID NO: 4169801 - RNA, 64 nt, Human
ugcccauaaauggaagacuaggggcacuuugacuaguuaacaggcucacagucauuucauugca

SEQ ID NO: 4169802 - RNA, 58 nt, Human
ugcccauggaccaagcaaggggaaagagcaauagauccuucuuguaaaaccaagggua

SEQ ID NO: 4169803 - RNA, 112 nt, Human
ugcccaugggagucucgugcagauccaagguaggcucaggguuguucugccuuugggaaagcggggacagaguagcaaaggguuaaucucaggggcuugugcucucugggca

SEQ ID NO: 4169804 - RNA, 56 nt, Human
ugcccaugguaagucucugagcucguaaggccuuaaugaaagguugcacaugggca

SEQ ID NO: 4169805 - RNA, 78 nt, Human
ugcccauucucucuacuuguuuucaacauaguucuggaaaccuuagagcaauugagcaagagaaagaaaugaaaggca

SEQ ID NO: 4169806 - RNA, 98 nt, Human
ugccccacucaugaaauuauuguucuggcuucucucugucuuugcucaaauaggaauagagcaaagauacagacagagccaaaauaaugugaguugca

SEQ ID NO: 4169807 - RNA, 87 nt, Human
ugcccccugcucuggcuggucaaacggaaccaaguccgucuuccugagagguuugguccccuucaaccagcuacagcagggcuggca

SEQ ID NO: 4169808 - RNA, 60 nt, Human
ugccccucuaggcccuguucuaaagcugagugcuucagauguggagcugggucuggggca

SEQ ID NO: 4169809 - RNA, 81 nt, Human
ugccccuuuggcuccagccaggagcccacgcuucauuaaaaacugugagcugugccaaucugucuggggcuuuauggggua

SEQ ID NO: 4169810 - RNA, 67 nt, Human
ugcccucauuauaagaggcucacaggaauaccugauauugagaaauacucuuauuuucugaguggca

SEQ ID NO: 4169811 - RNA, 74 nt, Human
ucucuguugccuaggcuggaaugcaguggcacgaucucuguccacugcaaccucugccuucuggguucaagcga

SEQ ID NO: 4169812 - RNA, 86 nt, Human
ucucuuagcucaguaaaugaaugaauauaugcaugaaugaauacaugcgugaaugaauggguuugcuuaacaugcuaagcacuaga

SEQ ID NO: 4169813 - RNA, 56 nt, Human
ucucuuaggagaaauucauaaaaugugaaucaauuuuaugauguugaucuaagagg

SEQ ID NO: 4169814 - RNA, 58 nt, Human
ucucuuauuuugccuuugacaaguuuauauugagcauguuaucaggcaaugugggaga

SEQ ID NO: 4169815 - RNA, 119 nt, Human
ucucuucacguuuuuagccaugcagcauuuacaacucguaugguagcaaaaucaacucaaauugagguuuggguuuauaauuuacuacuugugauaacugaaugguucacaaacagaga

SEQ ID NO: 4169816 - RNA, 89 nt, Human
ucucuucauccuugcuauggcccucuccuuaggucagcucccaacacggcagcuggcuuccaucagagggugagcaaggaaguaagaga

SEQ ID NO: 4169817 - RNA, 56 nt, Human
ucucuucauuugcuaugggucauguagauauggaccaucgaaggagaugaagaaga

SEQ ID NO: 4169818 - RNA, 82 nt, Human
ucucuuccucucuggucucuucaggagcuugagcgccuuaaccaggugcuggaggccgagaagcagcaguucgaggaggugg

SEQ ID NO: 4169819 - RNA, 55 nt, Human
ucucuucuuguguuuuccugccucuucagacagccugagacuagcuaagaagaga

SEQ ID NO: 4169820 - RNA, 64 nt, Human
ucucuugcuaugauccuuaagaacccaugcccuaaaugaaugggaaagggucacaagcagcaga

SEQ ID NO: 4169821 - RNA, 86 nt, Human
ucucuuggccauuauuccauucaguucaacaaguauuuacuggaccaccuuguauguguucagacuguaguaaugggccuuggaga

SEQ ID NO: 4169822 - RNA, 62 nt, Human
ucucuuuaaaaauagugaaauaccuggcaacuaguccaauuuuuugcuguuuuagaaugaga

SEQ ID NO: 4169823 - RNA, 70 nt, Human
ucucuuuaguugucuccucaaggguacuagucacucaguagaguaccauuugguugggcagccaaagaga

SEQ ID NO: 4169824 - RNA, 102 nt, Human
ucucuuuccguccuccucccugaacucugugcccagcucccugacugcuguuuuauaggggaggggucucuggccaagaagcacgaggagggcacagagaga

SEQ ID NO: 4169825 - RNA, 120 nt, Human
ucucuuugggcacucaaccaaccgaaucucuuucuuacaaacaagaucauugaccaguuaggaucugucucaaugugugugugggaagagguucucucccccacacuuuucccaacaaga

SEQ ID NO: 4169826 - RNA, 72 nt, Human
ugagggccugggguagcuuacugcgaagcagccucagggaauagaggcuucagcagggcaucuuggccccca

SEQ ID NO: 4169827 - RNA, 72 nt, Human
ugagggcggguguuuuacccuugcagagacauuuucuugaauucuggagggcccacauccacaaugcccuca

SEQ ID NO: 4169828 - RNA, 80 nt, Human
ugagggcugcguaagacaggguggcucgggccuggggugcugggccccaggucucccugcagcccugaacgaugcucuca

SEQ ID NO: 4169829 - RNA, 62 nt, Human
ugaggggaccugggcuucaaggguugagaggggcacacccgaccccuccccgggucucuuua

SEQ ID NO: 4169830 - RNA, 92 nt, Human
ugaggggcugggaguggcagcagauuucuagauuuuccagguuugugcaaccuaaugggagauaaagcaucuguucuugauccugcuccuca

SEQ ID NO: 4169831 - RNA, 77 nt, Human
ugagggggcagaugguagcaguagcuugcuuaggucuuuugcccugagcuuuggagacugacuccauccucuccuca

SEQ ID NO: 4169832 - RNA, 55 nt, Human
ugagggguguuugaggguggggcggucagcuucuauagaucaguaaauaucucca

SEQ ID NO: 4169833 - RNA, 61 nt, Human
ugagggguuuucuucaaaagucuagaagcaaacaacuuccauuuuagaagaaaauccacca

SEQ ID NO: 4169834 - RNA, 60 nt, Human
ugaggguaacaggcaucuagaaaaaugaaaaaaccaggcgcuagcugccuguuaccucca

SEQ ID NO: 4169835 - RNA, 81 nt, Human
ugagggugagagcuggaaucagaccucaggugucccgacuucugacgcaggccugauugucucuugcagcacucacaauua

SEQ ID NO: 4169836 - RNA, 59 nt, Human
ugagguaaauguuagggcuauuauuaauaucuuuauauggcacagccugaaaugccuca

SEQ ID NO: 4169837 - RNA, 61 nt, Human
ugagguaagaguuuuccauuucugaaggacugcuaacagagaaaguaaagauucuaccuca

SEQ ID NO: 4169838 - RNA, 76 nt, Human
ugagguaaguaacgcauucauucauucauucauugcgucauguauuuagugaguauuuguugagugcuaggcuuca

SEQ ID NO: 4169839 - RNA, 57 nt, Human
ugagguagaagccuggguugaguaaggcccacuuagcccucucccagucucuaccca

SEQ ID NO: 4169840 - RNA, 101 nt, Human
ugagguaggagaaucgcuugaacuugggaggcagagguugcagugagcugagaucaugccacugcgcucuagccugggagacagagagagacuccaucuca

SEQ ID NO: 4169841 - RNA, 94 nt, Human
ugagguaggagaauugcuugaaccuggaggcagagguugcagugagcugagaucaugccacugcaccccagccugggcaacagacuccgucuca

SEQ ID NO: 4169842 - RNA, 74 nt, Human
ugagguaguucuaauauuaaagacauauauguggauaugcauucagauuaaauuaaauguucagaacugcuaca

SEQ ID NO: 4169843 - RNA, 71 nt, Human
ugagguaugugaugucuuuuagcuaaacauucaucaaaacaaauuauuagaguaaaagcacgagugccuca

SEQ ID NO: 4169844 - RNA, 55 nt, Human
ugaggucaagcccagagcagcacugacagcucaacuacaugcucuucugaccuca

SEQ ID NO: 4169845 - RNA, 122 nt, Human
ugaggucuguaauuucuuuaauaguuuuguucugguguugggucuugcuuuuagucauugugcuaugguuagguaagauguuaacagcugagauaacugggugaagaauauucagaaacuua

SEQ ID NO: 4169846 - RNA, 61 nt, Human
ugaggucuguccugucuuuggagugagacauaauauuccugcaaagaacuaagcagccuua

SEQ ID NO: 4169847 - RNA, 77 nt, Human
ugaggugaagaugaggcucuuccuguuggcuggagucucagcagaggcucuagaagcugaggggcccaagcaccuca

SEQ ID NO: 4169848 - RNA, 94 nt, Human
ugaggugagacagaguuucacuccacaugcccaugauccacaacccggggucaugcugugaaucagugcucugcucugcucucacucagccuca

SEQ ID NO: 4169849 - RNA, 59 nt, Human
ugagguggaguuuugcuguugucacccaggcuggagugcaauggcaugauuucagcuca

SEQ ID NO: 4169850 - RNA, 66 nt, Human
ugagguggugcaggccagcaggggcgagguucauuucucacuguugguccugcaaguuuuaccuua

SEQ ID NO: 4169851 - RNA, 84 nt, Human
ugagguuaagauuugcagauuaaaacacugagcuugagacaaauugcuuaauagugaaaucagguuuugacugcagugaccuca

SEQ ID NO: 4169852 - RNA, 65 nt, Human
ugagguuucaaguuguuuauauccagaguuuagggacucugguauccucuuagaaacagaacuca

SEQ ID NO: 4169853 - RNA, 87 nt, Human
ugagguuuggaguuuuuguuacagcagcauagccuaacccaaccugguuaauacacugcuuuuuguaacuauacaagcucuaacuca

SEQ ID NO: 4169854 - RNA, 69 nt, Human
ugaguacuuuggagauugcguaaguugccuugcugcaugccuguuaacuuaguucaauaucagugcucg

SEQ ID NO: 4169855 - RNA, 77 nt, Human
ugaguagaauagggguauugcuucagauucugacaaaucauacacagaaaaugaaaaugcccucuaugucucacuca

SEQ ID NO: 4169856 - RNA, 76 nt, Human
ugaguagacccucuugcaguugcgcagugcaugcucugcauagcuguacccggcagcucugagauaguccaauuca

SEQ ID NO: 4169857 - RNA, 75 nt, Human
ugaguagaggagugugugcaggcuccaguccccaaagucucuaggacuguccuagaaccugcagcucaucuguca

SEQ ID NO: 4169858 - RNA, 55 nt, Human
ugaguagaugacuggcuuaggauucaccuguaguuccugggccagaaucagcuca

SEQ ID NO: 4169859 - RNA, 58 nt, Human
ugaguagggaggaaagugugagccuugugucuugguuuucucuguuccccacuacuca

SEQ ID NO: 4169860 - RNA, 99 nt, Human
ugaguagguguagaaugaauuauuuuuuguaccagguuggggcuaggaaggagcagagguucagcuagcucuagcacuggauaauccuucuccugccca

SEQ ID NO: 4169861 - RNA, 62 nt, Human
ugaguauccaugggggauugguuccagaacccucugaggauaccaaaauccauggauacuca

SEQ ID NO: 4169862 - RNA, 64 nt, Human
ugaguaugaguucaggaaaggcuuucuaagaagguauuauuuaacuucugggcauucauauuua

SEQ ID NO: 4169863 - RNA, 79 nt, Human
ugaguauggggugaaucuuuguuguccgcugaguagggaccuaagcuguggacgauugaaagaugcucuggggugcuca

SEQ ID NO: 4169864 - RNA, 63 nt, Human
ugagucaaugaguuaaauaaugggauaugcugugggcaugucacagucugacucagugacuca

SEQ ID NO: 4169865 - RNA, 62 nt, Human
ugagucaccucucagaagccaccagcccaaaauaggacuauugcuugcggacagguggcuca

SEQ ID NO: 4169866 - RNA, 64 nt, Human
ugagucacugacccccagcucagcaccggccugguggcaguggcagcugaggggguauggcucg

SEQ ID NO: 4169867 - RNA, 69 nt, Human
ugagucaguauuuauuacuuagcuguauugaauucucugccagacugagaucaauaaauaacugacuca

SEQ ID NO: 4169868 - RNA, 79 nt, Human
ugaguccaaauucuguugaguagaugacuuggagagaucaauuuauuccagguagauuuauuccagccagguauucuca

SEQ ID NO: 4169869 - RNA, 70 nt, Human
ugagucuaggggaggcggggagcagggaagccucccacagccugaccugcccuucuuuccccagcauuca

SEQ ID NO: 4169870 - RNA, 66 nt, Human
ugagucucaggcaucuguguggcacagauacuuuuauguguuguugaaagagcuggcugagcuuca

SEQ ID NO: 4169871 - RNA, 94 nt, Human
ugagugaaaauuaggcuguuauguggguggcuguuaagggugcuucauuuccacaucggagagcugcccacacagcagauuuuaguagcacuua

SEQ ID NO: 4169872 - RNA, 81 nt, Human
ugagugaggagggauuggggagauagucacgguugcacagcagacgcugagccaggcacugcuccuggauuaacucacuca

SEQ ID NO: 4169873 - RNA, 74 nt, Human
ugagugagucagcuuugggggucucaggagacucugggugcgggguuucucggaggucaggguugaggggcuca

SEQ ID NO: 4169874 - RNA, 84 nt, Human
ugagugauggacagaagguagcaccuaugaacgucagauuuuccuguuugcagaggcauagugacuacuuuaaucuauaauuca

SEQ ID NO: 4169875 - RNA, 59 nt, Human
ugagugcucuguaugugccagacucuguacuaaaaguucggcacauguuauugcauuua

SEQ ID NO: 4169876 - RNA, 63 nt, Human
ugaguggcggggcuuguuggagccgaugcauggccuggcucccaaggagcuccugccugcuca

SEQ ID NO: 4169877 - RNA, 63 nt, Human
ugaguggcugcagcacauguaguggcuggaauuugacauaacaccugugcuguagucacuaca

SEQ ID NO: 4169878 - RNA, 122 nt, Human
ugaguggucgccaauguuucagcuccucuucugaguaccagggacguggguagaacuuugauccuaucuuauccuuacaggauauugagaggagaggagagaaguugacauggcaccaccca

SEQ ID NO: 4169879 - RNA, 90 nt, Human
ugagugguuuggcagggaugguaaauauguaaaguaagguguaaaacggaggauugugcuuuaccuaaaugccuuuccuaaaaccauuua

SEQ ID NO: 4169880 - RNA, 117 nt, Human
ugagugugauuauuuaauaguuuacugucuugcacagugcaaguagugacugagugugauuauuuaauaguuuacugucuugcacagugcacuucacugcucuaaguaacagacuca

SEQ ID NO: 4169881 - RNA, 72 nt, Human
ugaguguguagcauuuggcaggcagccuggcaugaaccaagugcccaaugcaugucagcugcugcucaucca

SEQ ID NO: 4169882 - RNA, 63 nt, Human
ugaguguguaugugucaguguagcuuaaacaguucauuguaugcugcccuggcucagcauuca

SEQ ID NO: 4169883 - RNA, 60 nt, Human
ugaguguucacauguacaugaauauucauuauugaguguucacauguacaugaauauuca

SEQ ID NO: 4169884 - RNA, 129 nt, Human
ugaguuaggcuguaaaacauaaguuaaacgcagaguguccuauauugaauuagacccuaaaaugugcuauauuuucgggucuaauucaaguaacaagugcuauaaucaccuuuccauaggcuaacagaa

SEQ ID NO: 4169885 - RNA, 75 nt, Human
ugauuagaguuuucuguguugucauuauuguaucuccuguuaauacagugucugacacguaggaagcacuaauua

SEQ ID NO: 4169886 - RNA, 58 nt, Human
ugauuauauaccuuucuaggugcugagaauucagcaguaaagaagaugaaugugauca

SEQ ID NO: 4169887 - RNA, 70 nt, Human
ugauuauccaggcagaaauuuuguuucauuguugcucuauaaugauaagaauuuguguuuauugugauua

SEQ ID NO: 4169888 - RNA, 58 nt, Human
ugauuaucuuuuacugccagaggccagggaagaacugagaggcagugaaaagagauca

SEQ ID NO: 4169889 - RNA, 108 nt, Human
ugauuauggguucguuggugaauguacucaagaauuuggauaagaaauguuuuucucuacgauguugccuguuuaguuucuuuaaagcauucucacaaucuauaauua

SEQ ID NO: 4169890 - RNA, 74 nt, Human
ugcucuccugcugagguggagauugcagugagcugagaucgcaccauugcacuccagccugggcaacaagagca

SEQ ID NO: 4169891 - RNA, 58 nt, Human
ugcucucucaggccuggcccacaucuuccagucaaugugaaaaccagguuuuagggca

SEQ ID NO: 4169892 - RNA, 66 nt, Human
ugcucugagguccucagagggaaagguucgggaucccccgugccucucccugcagggcccagggca

SEQ ID NO: 4169893 - RNA, 76 nt, Human
ugcucugcucacuaaacuaugaucuaauccuugguguccuguuuaaaaaugcaggacaauagacauaagcagagca

SEQ ID NO: 4169894 - RNA, 75 nt, Human
ugcucugugaucguuuauuuaagcuugguuuuacuaucuaaguacuacagcaguuaacgaucagacucagagaca

SEQ ID NO: 4169895 - RNA, 109 nt, Human
ugcucuucaucuaaucauugucugaauuacugaaggucaacuuaucugauaaaauaggugagcuuugugguaaugaagucagauaaugucuuauauucgugucagggua

SEQ ID NO: 4169896 - RNA, 101 nt, Human
ugcucuucucuuuuguacuuuucugcagaugaucucuuuccaguagaaucaaggcagccaucugcaggaaggagaaaagagagauaaacagaaaaagagca

SEQ ID NO: 4169897 - RNA, 60 nt, Human
ugcucuugcucugcaguccagacaguagaauuuauggaucaaagauucagagcaauugua

SEQ ID NO: 4169898 - RNA, 93 nt, Human
ugcucuugugguccuuccaauauuacaggugucaagaguaguaauuauauguuugccuguuuguacagugauguuguaugccauucaggggca

SEQ ID NO: 4169899 - RNA, 60 nt, Human
ugcucuuugaggucucuugaccgcauucauggaugauauggcagagcccagaacugagca

SEQ ID NO: 4169900 - RNA, 67 nt, Human
ugcucuuugguugguuccugaugccugaagucuuuuucuucuguguacaguuagccaccaaauugua

SEQ ID NO: 4169901 - RNA, 124 nt, Human
ugcucuuuuggacaucagucuugauaguaucacugccagguuuccagccagcugggcacacuucccuauguuugucagugaacuggaaggccugaacuagucucaaagucucauccacagagca

SEQ ID NO: 4169902 - RNA, 120 nt, Human
ugcucuuuuucccuucuacccuuucuaccuggcuucuuucauggaaggaaaaaguuuuguuuggagagcuugcuguauuuucuggaggaaaauagaaggaaggccuagaggaaaacagua

SEQ ID NO: 4169903 - RNA, 68 nt, Human
ugcugaaguggcagccuuagaaggagauuaaacugaugcccuaaucaaaggcugugagcaacccagca

SEQ ID NO: 4169904 - RNA, 64 nt, Human
ugcugaauugguaguacuguugucagggcuaagucagauagcagguaaacaugcccauucagca

SEQ ID NO: 4169905 - RNA, 64 nt, Human
ugcugaauuuccucuaaaccccugagccaggaugaggcaagugguuuaugggaguuccaaugca

SEQ ID NO: 4169906 - RNA, 65 nt, Human
ugcugagagucacugucugcauuuccuaaccuuuguuaggacucuguggccucagugacacagua

SEQ ID NO: 4169907 - RNA, 55 nt, Human
ugcugagccuggacuacauguuccuaaugcaugcuuuuaugucacauggucagca

SEQ ID NO: 4169908 - RNA, 79 nt, Human
ugcugaggguuagcuugauucauggcacaagcagauggcauccugcuucuggcaaaacaggcagaaaauuccuuuagca

SEQ ID NO: 4169909 - RNA, 76 nt, Human
ugcugagucauguaauaaugcugcuaaugaugcugacaaugagcagaaacacagagcccuuauuacaugaugagca

SEQ ID NO: 4169910 - RNA, 82 nt, Human
ugcugauacaauuuacagagguguccugcauugacaucaguccaguccaguccaauccucaauguaccuuguccaucaugua

SEQ ID NO: 4169911 - RNA, 120 nt, Human
ugcugauccugacuuaaguacaacacuuacgagacuaaaucugauuucccagguugcauccucuccagcuuuagaauuucauguuuggucuuuguaggaguugaacuuugggaaggggca

SEQ ID NO: 4169912 - RNA, 91 nt, Human
ugcugaucuccuucucagaauugugaacgcaccuggaccacagccgucagcaaugaccaaggccaggccagggcgugcacugaaggcagca

SEQ ID NO: 4169913 - RNA, 56 nt, Human
ugcugaugcuuucugugguugcccuuggguggggaugguacaggaaaaguguuaca

SEQ ID NO: 4169914 - RNA, 102 nt, Human
ugcugcagccacccagaucauuguguaguagagguggcaccauuuuacuauguguccucccugcacucagugaagucugugaagggaggggucagugcagca

SEQ ID NO: 4169915 - RNA, 71 nt, Human
ugcugcagccaggagccaggucuucacccacuucccagggagucacaagagccuggcugcuaggcucagcg

SEQ ID NO: 4169916 - RNA, 59 nt, Human
ugcugcaucacuccccgacuagaaagcaagauuucuguaugcagggcuuguaugcagua

SEQ ID NO: 4169917 - RNA, 73 nt, Human
ugcugcauuggaugcucuacaggaaacauggaucugaauggucccuguucuuucaguuagacacagugcuuca

SEQ ID NO: 4169918 - RNA, 55 nt, Human
ugcugcauuuaucuucucaaacauaucuuggucguguugagaagauugugcugca

SEQ ID NO: 4169919 - RNA, 73 nt, Human
ugcugcauuuugcauuuugcuaggaaaucuaacugccucugcaugagaucauuuggcagaagcaacgguagca

SEQ ID NO: 4169920 - RNA, 56 nt, Human
ugcugccacugguagucucauuucaaagaguaaaaugugaaaauccaauggcagca

SEQ ID NO: 4169921 - RNA, 82 nt, Human
ugcugccagcagucuagcugccagccaacuugcugugccucuuccuccagccagcaguccugcugugugccuguuugcugca

SEQ ID NO: 4169922 - RNA, 61 nt, Human
ugcugccuggagcuacuggacacugagagcgugcaucucagaccagaguucuaggccugca

SEQ ID NO: 4169923 - RNA, 65 nt, Human
ugcugccuugcuguuugccucucccuacuuagaacgccuccuaggagaugguggaagcuggugca

SEQ ID NO: 4169924 - RNA, 67 nt, Human
ugcugcucaagcugcagcaaaagaggaagcagacacugcucucaagaguguugcagcuugaucggua

SEQ ID NO: 4169925 - RNA, 65 nt, Human
ugcugcuugggcucacguaccuuggggccuucugucuguuauggccccugggagcccugucagua

SEQ ID NO: 4169926 - RNA, 75 nt, Human
ugcugcuuucagugaugucacauuggcagcuugacaucagcugugauggaaauauugacaccacagaaauuggca

SEQ ID NO: 4169927 - RNA, 63 nt, Human
ugcuggaaagagaguuucaaugagguaaacaaccuguuuauggaaaaugcucuaauuucagua

SEQ ID NO: 4169928 - RNA, 77 nt, Human
ugcuggaaagugaggugaaugagcgagugacuucccccauaaauuaacccucaccgugauucucuuacucucacaca

SEQ ID NO: 4169929 - RNA, 57 nt, Human
ugcuggaaauuccuaggagguagggaccgcaucuuacucaucuuugaauuuucagua

SEQ ID NO: 4169930 - RNA, 56 nt, Human
ugcuggaauuucaguugggcacaggcuccuaccaaugcccagcuguucuuccacca

SEQ ID NO: 4169931 - RNA, 71 nt, Human
ugcuggacuacagcuguguguuuaugugcagugcacaccugcaggggccugacaaauagcuguaguaugca

SEQ ID NO: 4169932 - RNA, 66 nt, Human
ugcuggauggaguaaaacuggagggcaaaacgagcaagagagcccuucuccuucuugauccaagca

SEQ ID NO: 4169933 - RNA, 62 nt, Human
ugcuggcaggcaccuccuggggaaaauggcuuuuggcuuuuaggagguugucuaagccagua

SEQ ID NO: 4169934 - RNA, 83 nt, Human
ugcuggcauccagccaaggcugccagagggcaagccccggcucaucagcccucugcuggccucaccucggcuaaugccaagca

SEQ ID NO: 4169935 - RNA, 73 nt, Human
ugcuggcauuaauauauguaauacucacagcaacaacucugugagauaaguacuguuauuauugccauucgca

SEQ ID NO: 4169936 - RNA, 55 nt, Human
ugcuggcuccugggugggcagguccaugaccuucacagcauccgugagcucggca

SEQ ID NO: 4169937 - RNA, 58 nt, Human
ugcuggcuuccugugcacagcaaagccuaaugaugcugacaggucauauaagcuugca

SEQ ID NO: 4169938 - RNA, 76 nt, Human
ugcugggagaagagucuauuggaacuagacaugacauguucauguuuguguuauaagaaucaucuucaaugcagca

SEQ ID NO: 4169939 - RNA, 66 nt, Human
ugcugggcaucguaggagguacugaaaacuugugaggaaaaguuccuauuuucaaugauuuuggca

SEQ ID NO: 4169940 - RNA, 59 nt, Human
ugcugggccugccccugucagccaaucuccuaggcccucgaucuuugcagguccaugua

SEQ ID NO: 4169941 - RNA, 58 nt, Human
ugcuggggauccguaccaacccaugaugguagcagguggucacuggaugccccgcgca

SEQ ID NO: 4169942 - RNA, 56 nt, Human
ugcugggggcuuucuggauaccgugaaacuuugucucagauuaugaggucucagua

SEQ ID NO: 4169943 - RNA, 58 nt, Human
ugcugggguuugaaccuacucauucuggcuccagagucccagcucagaaccacuagca

SEQ ID NO: 4169944 - RNA, 62 nt, Human
ugcugggugcuuacuuugugcuagacacuguaaagugcuaaagauaaggaaaguauccuuca

SEQ ID NO: 4169945 - RNA, 83 nt, Human
ugcugguagaagagaaucuggggcugacuggugacgauuauucacugucuuaauuguuggaaauagauuauuuucuaccugca

SEQ ID NO: 4169946 - RNA, 62 nt, Human
ugcugguugggacacauuuaggucaaucacagcuaagucagguacuuaaacuguccccagua

SEQ ID NO: 4169947 - RNA, 109 nt, Human
ugcuguacaggaguuacauguagcacagggcuccucaacccaccaccaucuggggcuggagaauucuauguugaggggugccuugugcacuggagcaugacuagcagca

SEQ ID NO: 4169948 - RNA, 61 nt, Human
ugcuguagcccugcacagugcaagagagcaagcuuguuggaaugugcuggguuacugggca

SEQ ID NO: 4169949 - RNA, 61 nt, Human
ugcuguauuuauggccacugaaaucugaaauucguaucaucuucagugucauaaaacugua

SEQ ID NO: 4169950 - RNA, 55 nt, Human
ugcugucaagaaaacaagcaauggcaagagaaucuggcuuguuuucacaauagca

SEQ ID NO: 4169951 - RNA, 81 nt, Human
ugcugucauucacauuuguuccucugcacuuagcacaauaccuugcuccuaauaaguacgcaauaaauguuuguggaagua

SEQ ID NO: 4169952 - RNA, 57 nt, Human
ugcugucccuaagucucuucaauacuaaaauccauuggcaaaaagcuuaggguggca

SEQ ID NO: 4169953 - RNA, 67 nt, Human
ugcuguccuguuuuggaguaauuaugucuggaaaacugccagucauuauguucuuaaacugauggca

SEQ ID NO: 4169954 - RNA, 76 nt, Human
ugcugucguucauggauucagucucacccugggcauagcuugggacagggacaugaggccauagugauugagagca

SEQ ID NO: 4169955 - RNA, 124 nt, Human
ugcugucuuugccugaagccaaggaguuggaauuuguauacauguuacauuugaauaggaagauuuauguuuggaaugcauacaaauucugauucacguugaaacaguaguagacacaacagca

SEQ ID NO: 4169956 - RNA, 68 nt, Human
ugcugugaagggcuaagaaauguguucaucccacagaggaugaaacaacagacuuggucaaaaaagua

SEQ ID NO: 4169957 - RNA, 68 nt, Human
ugcugugacccaaaaaagaccuaaagucuucuggucuuuccuuugcuugguuauccuuccccccagca

SEQ ID NO: 4169958 - RNA, 60 nt, Human
ugcuguggcuggaauaauaaaugugagcauuuaucaucauuaaacauccagccuauggua

SEQ ID NO: 4169959 - RNA, 68 nt, Human
ugcugugggggagagugcaagcaugaaagacugacaucggcaaauucauucauucguucacucacaca

SEQ ID NO: 4169960 - RNA, 114 nt, Human
ugcuguuuacucugaaauguuguugugagagacccuugaaacaguauauaugaaacuucuuuguuaacuuuaauauacaauuuuacgggcuuacaagguuuuaaguagauggca

SEQ ID NO: 4169961 - RNA, 77 nt, Human
ugcaggcacccagggcugugccugcccaucagccccgauagcagcaauuacacaguccgugggugugaugagcugca

SEQ ID NO: 4169962 - RNA, 56 nt, Human
ugcaggcucuuggugacguggguguccaggcugcgcgccagguuccagggcuugca

SEQ ID NO: 4169963 - RNA, 68 nt, Human
ugcaggcugggguagccccacuuggagacacuccacuccucucaaaguccgcauaaacccagccagua

SEQ ID NO: 4169964 - RNA, 56 nt, Human
ugcaggcuguagacaccaaacuauacuuuauagaacaugugaaaauauagccugua

SEQ ID NO: 4169965 - RNA, 86 nt, Human
ugcaggcuugacaacuaaggguucccuagcauaucuguagcuuaguaacuggucaaauguguagagcuuuuggggacucaccugua

SEQ ID NO: 4169966 - RNA, 57 nt, Human
ugcagggaguauugcuggccaucacaucaugugaagacuggucucugucucuuugca

SEQ ID NO: 4169967 - RNA, 55 nt, Human
ugcagggauuagaggccggggaugcggagaggggcagcgccugguuauccuugca

SEQ ID NO: 4169968 - RNA, 80 nt, Human
ugcagggcauaugaaggcagugugacauauugaaaggaaauugaacccauuuuuaggucugccucuauugccuaccugca

SEQ ID NO: 4169969 - RNA, 61 nt, Human
ugcaggguaaaggagacggggucaaaaucugcugacagugcccagugccuuugcccaugca

SEQ ID NO: 4169970 - RNA, 64 nt, Human
ugcaggguuagaguggcuuaaauaauacuuuugaaauuuuuaagccucucaaagaaacccugua

SEQ ID NO: 4169971 - RNA, 66 nt, Human
ugcaggugagggguauuguugucaggcgucguuauguuuuucaacguguaaucuuauuuaaaugca

SEQ ID NO: 4169972 - RNA, 57 nt, Human
ugcaggugcuccgggggugccccauccaagcuuggcacauucuuggugcaccuugua

SEQ ID NO: 4169973 - RNA, 61 nt, Human
ugcaggugcugugucaagagagcugucucauuguugagaucuugcuguacggcuacuugca

SEQ ID NO: 4169974 - RNA, 66 nt, Human
ugcagguggaagcagcagacucagcauaggucucacugcccugaccgucagcugucuuccauuuca

SEQ ID NO: 4169975 - RNA, 65 nt, Human
ugcagguguagaguugggcucccucugcguuguauuccuuugacguugccccaacuugcaucuca

SEQ ID NO: 4169976 - RNA, 125 nt, Human
ugcagguucuuaaacacuuauuuuaugagucuuuuaaagauuuagggccaguuuacauuccugaggauguuucugucuuugaguuugaaugagaugcucugauuuaugguuugguuuauccucca

SEQ ID NO: 4169977 - RNA, 62 nt, Human
ugcagguuuucugacauccagcagcaugcaguuccccugccccugccugucaguagaucuca

SEQ ID NO: 4169978 - RNA, 79 nt, Human
ugcaguaaaaaaggauaugugcagcuaguuuuccacuuuuaaaaccaaaccacagaugacacauuuccuuuccacugca

SEQ ID NO: 4169979 - RNA, 55 nt, Human
ugcaguaaauaauuuuguguauaugccuuugggcguaugugcaaguauuucugca

SEQ ID NO: 4169980 - RNA, 73 nt, Human
ugcaguaguuacucugaguaugugcgcuagacaggaauguguauaugugcgcacauguucagaugugugagca

SEQ ID NO: 4169981 - RNA, 62 nt, Human
ugcaguauuauaugguacauauuauaugguguuuccaccauauaaacaccagauagauugua

SEQ ID NO: 4169982 - RNA, 77 nt, Human
ugcagucaugaagggggagaauuaccaaaagcgcuuccagaaguguucuaaaauucucccccgggggugacacagca

SEQ ID NO: 4169983 - RNA, 130 nt, Human
ugcagugagucggguauuucuaguaugcagaggaaauacacuacuaagcacagauugaaauauguagggaucuuuuuauuuguuguugguuuugugucauuuugcccuaugagaaaggagaccauuugca

SEQ ID NO: 4169984 - RNA, 62 nt, Human
ugcaguggaagagguggagaucauggcaaagggaauggggugccacagagcuuccacuugca

SEQ ID NO: 4169985 - RNA, 70 nt, Human
ugcaguggaagccaugauaaccaguguggaagaacuucaucuacauuuacacaguuaggcuuaaacuuca

SEQ ID NO: 4169986 - RNA, 78 nt, Human
ugcaguggagaauguugauagcaccuauuuugaaccaaaaagagauaugucccugucuaauauuucaacuccauuuca

SEQ ID NO: 4169987 - RNA, 74 nt, Human
uggagcaugaggcagguggaggcugccauuuauagcucaggagugagcuucccuccugcacuacaaccucucca

SEQ ID NO: 4169988 - RNA, 71 nt, Human
uggagccaccuuuaaugagcaccagccgaagcaauauugucuuugcagggcaucuuugaaguguggcuuca

SEQ ID NO: 4169989 - RNA, 79 nt, Human
uggagcccagagaaggccccugacccugccgggcccccuucagccucugggccugcagggugaugggcugccugcucca

SEQ ID NO: 4169990 - RNA, 57 nt, Human
uggagcccaggagaggauaaacaguaucuguuaucauacucauuauccuuggcuuca

SEQ ID NO: 4169991 - RNA, 73 nt, Human
uggagcccaguaggcaaagcugcagaccgggacuuccgucuuugagcauguacgcucugcuuguugggcucua

SEQ ID NO: 4169992 - RNA, 73 nt, Human
uggagccuuacuagaaugugagcuacaaaacaguagagcuauucucuauucaaugcugcaucuguagggccua

SEQ ID NO: 4169993 - RNA, 61 nt, Human
uggagcuaggcgccggcagggcaacugggcaugcucagaagccgggcagguuuuggucuca

SEQ ID NO: 4169994 - RNA, 65 nt, Human
uggagcucugcgagccucaaagauguccaggcaguccuugaaauuuuaggccuugcaauguacca

SEQ ID NO: 4169995 - RNA, 61 nt, Human
uggagcuggcagcggaaaagggcacguuccacuccuuccuauuuccgucaucuuagcucua

SEQ ID NO: 4169996 - RNA, 56 nt, Human
uggagcuggcccucugaguuuguacaagugacauagaaacaccauggucaguucca

SEQ ID NO: 4169997 - RNA, 74 nt, Human
uggagcugugagaauccuccacugugagguggauucacuguccacaggaaggccuucucacaaugcaauuucca

SEQ ID NO: 4169998 - RNA, 77 nt, Human
uggagcuuuccagggagagccgcugcuccacaugugugcuguguggccauggcugucccuguacacuaaagccucca

SEQ ID NO: 4169999 - RNA, 62 nt, Human
uggaggaaggccugccaggcugcacucucaggcaaaagucugcagagggaaggcuucagcca

SEQ ID NO: 4170000 - RNA, 68 nt, Human
uggaggaccugcccuggggucuggagcagcaaaggcauuguguucaaaucccaggagcaugaacucca

SEQ ID NO: 4170001 - RNA, 71 nt, Human
uggaggagcagggcgcugucuggccagcggugccauagcaaccacuggcuccgaugcugccaccaccucca

SEQ ID NO: 4170002 - RNA, 73 nt, Human
uggaggaggggacaguacuugugccaggccagggcgggggcagcgggcggaacagcacuguuccuucucucca

SEQ ID NO: 4170003 - RNA, 78 nt, Human
uggaggcagagcucauugcagcccagagcgcaggaccccagagaagucugggcuuugcuaccuggcaguucuccucca

SEQ ID NO: 4170004 - RNA, 55 nt, Human
uggagggauacaaagaugaaaaagacugguuuucucucuuuauagaucuccucca

SEQ ID NO: 4170005 - RNA, 93 nt, Human
uggaggguuuguuaaaugcagggugcugggcuccaccccagaggcugugagucaguggcucuggcgugaagcccagaauaugcaucucuacca

SEQ ID NO: 4170006 - RNA, 62 nt, Human
uggaguaagagccaccagccaaggaaugugcacagccugcagaagcugguggcucuccucua

SEQ ID NO: 4170007 - RNA, 58 nt, Human
uggaguaauucugguuuugauguuaucuuugaaaugucaaggaaggucuguugcucca

SEQ ID NO: 4170008 - RNA, 59 nt, Human
uggaguaugcuuggcccugcagucacccccaggaugauuuccacagucaggggugccca

SEQ ID NO: 4170009 - RNA, 63 nt, Human
uggagucauuauugcccucaauucaagugucugaaagcaugacugaugaaagguaagacucca

SEQ ID NO: 4170010 - RNA, 64 nt, Human
uggagugaagcaggagcugcugcaggggcugagaaagcaggaaggagcucuuugcugcauucca

SEQ ID NO: 4170011 - RNA, 71 nt, Human
uggagugugugcccaggggacuuggagccuuggcuugcucacaugggcuccugccuccuggcaccucucca

SEQ ID NO: 4170012 - RNA, 64 nt, Human
uggaguucauccaugacagcuucgguuuccuaauucucagaaaggucugucaugggugacugca

SEQ ID NO: 4170013 - RNA, 55 nt, Human
uggaguugguaagauccauaggugaaauccuccuaugcaucuaucuucuacucca

SEQ ID NO: 4170014 - RNA, 79 nt, Human
uggaguuguucuggguucaaggggagucugcagugugguuaacugcccugcccuguugaaacuagauauaucauuucca

SEQ ID NO: 4170015 - RNA, 80 nt, Human
uggauaaacaguauuaucaauauauuucugggcaaaauauauaaagcaggaauauguuuuguuugauacauggauggcca

SEQ ID NO: 4170016 - RNA, 67 nt, Human
uggauacuuuggggguuaguguagagauuaacucuuucaaacucagcuccuaacuugacuggugcca

SEQ ID NO: 4170017 - RNA, 69 nt, Human
uggauagcucuuaccaagaaagggcucaccaaaaucacuucuguauuugaggagugcuuuuucuaucca

SEQ ID NO: 4170018 - RNA, 56 nt, Human
uggauaggagaucaauaugcaauuuuuacuagauuguucuuuuggucuuuugacua

SEQ ID NO: 4170019 - RNA, 68 nt, Human
uggauagucuuagaucagauaaaguagcaaugucucaagaauugaacucucuggaacugagcuaacca

SEQ ID NO: 4170020 - RNA, 55 nt, Human
uggauccagcugcuccuaugaggugucuccgcaagcaggagcugccuggaaacca

SEQ ID NO: 4170021 - RNA, 65 nt, Human
uggaugaaugugagcaggugcuggcugcugagcccaaggccaaggaccccuucacuuaccaucca

SEQ ID NO: 4170022 - RNA, 85 nt, Human
uggaugcuggaaaaagauuguguuuuucagcaucugcagccugggcuguuuuccacaggaauaaauacaguuuuuuccagcucca

SEQ ID NO: 4170023 - RNA, 57 nt, Human
uggauggcauguugggcucuguucuuggcugcaugcuuaacugcccaauauccuuca

SEQ ID NO: 4170024 - RNA, 130 nt, Human
uggauuaaguuguuaaugagaacuagggcacaggcucaguucacuggauuuucacuucuugagacauggaaucauguacugaauaaaucaagugcaacuggcuucaccuuagccucaaugaccagcacca

SEQ ID NO: 4170025 - RNA, 80 nt, Human
uggauuacuaugaagaauguuggccauuuguguguuggggagauuucagcccacucugguaacuuucagcauggugacca

SEQ ID NO: 4170026 - RNA, 77 nt, Human
uggauuagucuaugcuaagugucagcagcggugagggaaguucagggcugucugagaacaugguggaagaguaucua

SEQ ID NO: 4170027 - RNA, 58 nt, Human
uggauucaacaaauauuucuuggaucccuauuaugugccaagcaauguugugaaucua

SEQ ID NO: 4170028 - RNA, 79 nt, Human
uggauuccucuccuaguuuugaauaaagaucacaugcagcaacuuccuguugauucuauggcuccgggaguggaaucua

SEQ ID NO: 4170029 - RNA, 55 nt, Human
uggauugauaaaaugggauguugaguggaaauuuuccaauucuauuaucauucca

SEQ ID NO: 4170030 - RNA, 83 nt, Human
uggauuuaaguauaauuuacauuugguauucaaaaucuuuuagcauuuauuaauagcaaugauguagguuaaacugagauuca

SEQ ID NO: 4170031 - RNA, 80 nt, Human
uggcaaaguuugcuucucuacuuccuggaagggguuuugugagaaccugugcuccucucaaaaguagguugacuuuucua

SEQ ID NO: 4170032 - RNA, 72 nt, Human
uggcaaauaagagcuggagacagaaacagcccgugaugcugugcccugaaauuuagcauuuacauauuucca

SEQ ID NO: 4170033 - RNA, 102 nt, Human
uggcaaaucuaacacacccaauaguaucugugguugcugguuccagcacagcaaggccgagaggaugcuauucugggucugaaaugugagaaagauuugcca

SEQ ID NO: 4170034 - RNA, 68 nt, Human
uggcaaauuccaaaguuaauucaaggucaaaagacugaauuuagaauuugauuuuaggaaguuuguca

SEQ ID NO: 4170035 - RNA, 56 nt, Human
uggcaagagcaaaauguacaguuagauauuaaauuauuguaugaaaacucuugcua

SEQ ID NO: 4170036 - RNA, 88 nt, Human
uggcaagugaugauuuggaugugcacacucacuagaaccagcuuccacggguuuugcucugaaccacaccaucacacuccuccugcca

SEQ ID NO: 4170037 - RNA, 62 nt, Human
uggcaauguaggcaagaacauucccucaaggcaauaccugugggugucuugguuauauucca

SEQ ID NO: 4170038 - RNA, 64 nt, Human
uggcaauguggcaucaacgaagucacuguacuucucagucauuuguguagagugauauugucca

SEQ ID NO: 4170039 - RNA, 77 nt, Human
uggaccucccaggcauugccauuuucccagucugaguccaugaaccaggaaaauggcauugccuaggggacuuucca

SEQ ID NO: 4170040 - RNA, 61 nt, Human
uggacgggcauuucacagacuucuccaccaggaagcagcagggugauagugcccaggucca

SEQ ID NO: 4170041 - RNA, 66 nt, Human
uggacuaagauacauuguuuuugguagugcauguaaaauaacugagaaauagcaagugucucucca

SEQ ID NO: 4170042 - RNA, 77 nt, Human
uggacugaugaauggaccuuaaauugcuucagguuguucaacuugaacaguuuugucagguucacuuucaucuuuca

SEQ ID NO: 4170043 - RNA, 84 nt, Human
uggacuggcugauauggcuaggaaggauuggcccuuacacauaugcagcuucuacuuccuugucuauaugcaaugccacgucca

SEQ ID NO: 4170044 - RNA, 60 nt, Human
uggacuuacagaauguucuuccaacagaaauuauuugucgggggaggaugcuguucucca

SEQ ID NO: 4170045 - RNA, 65 nt, Human
uggacuuggggagaugaaaguauauauuuuacuucuagguuauauauaguauuucucugaauuca

SEQ ID NO: 4170046 - RNA, 78 nt, Human
uggacuuuucaugcugacuuuugauuggaaagauuggggucaguaacuacagggaagagccagcuagugaagaggcua

SEQ ID NO: 4170047 - RNA, 121 nt, Human
uggagaaaguucuagauucuggccuggcagaugcugucuuauuucucaucccacucaggagcuggaaacuaagagagccuuggguuggaagcaggaggcaccaggcucuagaaccauccca

SEQ ID NO: 4170048 - RNA, 67 nt, Human
uggagaacuggggccaggacccuggggucucugccaaugccucaaaggccuggcaccagaaguccca

SEQ ID NO: 4170049 - RNA, 83 nt, Human
uggagaaggcaggcagagaauggaugggggccggcaggucagggagagugacccauccacucgcugccugccuuguaccucug

SEQ ID NO: 4170050 - RNA, 75 nt, Human
uggagaauaacaaugaaccaaauuuaccaauuagggaaccauuucaggaauuguuggauggugaauuuuucuuca

SEQ ID NO: 4170051 - RNA, 71 nt, Human
uggagaauaggggccacuggugaggcuucacuuccuuccaugcuuggccagggcccugcucaauuucucca

SEQ ID NO: 4170052 - RNA, 72 nt, Human
uggagaauauaacugggugccugguggaugugugaauccuauuuuuacauuacacugugguccuguucucca

SEQ ID NO: 4170053 - RNA, 63 nt, Human
uggagaaucuggaaacuguugacuuucucuacuucuucugagaaacaguuccaaaucucucua

SEQ ID NO: 4170054 - RNA, 59 nt, Human
uggagaaugguucuggcccagaugccaauagcaucccuguggguccugcacauucucca

SEQ ID NO: 4170055 - RNA, 92 nt, Human
ucuguggauacagaauacucacuuggacaugggagaaacagaugauaaagucucuugacuguuucuuauccaaguggucugucuccaacagg

SEQ ID NO: 4170056 - RNA, 61 nt, Human
ucuguggcaaaugauaccucccagaguggucauucuacaaugggaccuagcuuugcacagg

SEQ ID NO: 4170057 - RNA, 63 nt, Human
ucuguggcccaggcuggggugcagugacaugaucucgauucacugcaaccucugccucccagg

SEQ ID NO: 4170058 - RNA, 80 nt, Human
ucuguggcccuaauguguuggacagcuucuacugugaccuuccucagcuucucagacuagccuguaccgacaccuacaga

SEQ ID NO: 4170059 - RNA, 111 nt, Human
ucuguggcuugucuucucauucucuggagaucagugguuuuuacacuuucuucugcugaagccaaguauuguggaagaagccauggggucaccagaggauaggugcacagg

SEQ ID NO: 4170060 - RNA, 59 nt, Human
ucugugggccugaggcaucagaagcacuuauguaaaaauuacugggucuggguccugga

SEQ ID NO: 4170061 - RNA, 115 nt, Human
ucugugguuggugguggcuggggcagggcuuggaucuguggucaggacucaagggauccugagaaguuacuacaaccagcaccuuggguccaaauuaguugacagcacccaugga

SEQ ID NO: 4170062 - RNA, 62 nt, Human
ucuguguggcuuuagacaaaauucugaaucaucucugaacuuuguuuuauagcacauaagga

SEQ ID NO: 4170063 - RNA, 56 nt, Human
ucugugugugugcauaugcaugcauguguguguguguguguguccucauuugcaga

SEQ ID NO: 4170064 - RNA, 127 nt, Human
ucuguguuccuaccaccuuccugcuggcauggucuuggcagcacggggaacgucugugcccggcccagaacauccccacugcuaccucguagccaggaugccacuguuaggucagugaggaaccgga

SEQ ID NO: 4170065 - RNA, 106 nt, Human
ucuguuagacagcugguagaguacauuuucuuaaauauuugcaggacauagccauguguuaguuguucauguuaagaguagccugugccacuguuuccuagacaga

SEQ ID NO: 4170066 - RNA, 103 nt, Human
ucuguuagcaccaugaaucuuggcugagagcugcucugcagaucugagaauucugucuucuuuuccaagcacucugggcugaguuuuucaggggauuaaugga

SEQ ID NO: 4170067 - RNA, 79 nt, Human
ucuguuagucaugaggccaaccuuuucauaaaugugacuccauuggucucuauaugaaaagguggccaauguagauaga

SEQ ID NO: 4170068 - RNA, 99 nt, Human
ucuguuccaagagggaagccaggcggggcuggcagaagcccccagggcgcccagagcugcagcagccuccagccuuggguuuccagaguagagagcagg

SEQ ID NO: 4170069 - RNA, 79 nt, Human
ucuguugaucuauguccacuuggauuguuuucacguuuuggguauugugaauagugcugcuguggacaugguguacaga

SEQ ID NO: 4170070 - RNA, 129 nt, Human
ucuguugcacucuugggggacaaggggagccaugggagagggucaguguagcgcucaaaggaaagagauuuuuugauucucaauugcccucugucuucuccuuuccuacuuuugugcaugaagcauggg

SEQ ID NO: 4170071 - RNA, 58 nt, Human
ucuguugcugguggcccugguuaugcuaacaaguagauaguguagcugcagcagcaga

SEQ ID NO: 4170072 - RNA, 70 nt, Human
ucuguugguuugcucuguguuugugaggcccgccaggcacugugggggguaacacaggguuaccaucaga

SEQ ID NO: 4170073 - RNA, 93 nt, Human
ucuguugucaauaacuggauucaaguuuuagaaauaucuggaugguguaaaaaugauuuaaauguuguaaaaccagaaaguuaccauaacaga

SEQ ID NO: 4170074 - RNA, 78 nt, Human
ucuguuguucagagaagaaagugacuauaauaggguaagcuacuaaggcacaauuuucucauacuaguagacaacaga

SEQ ID NO: 4170075 - RNA, 74 nt, Human
ucuguuuaaacgaaauugcucagaagcccuauauguaaaauagguauaaauggagcagcuuugguugaagcaga

SEQ ID NO: 4170076 - RNA, 59 nt, Human
ucuguuuagaaaucucaugcauagauuauuggucagauugcagagauaucugaagcaga

SEQ ID NO: 4170077 - RNA, 62 nt, Human
ucuguuuaucauguacauuuccacacuuaaauuugacucuggaagggcuaugaauaaacaga

SEQ ID NO: 4170078 - RNA, 76 nt, Human
ucuguuucucaucaucacucuggcaagcaucaagcagcaagcaauguuugcuuucagagauggccagaaucacaga

SEQ ID NO: 4170079 - RNA, 66 nt, Human
ucuguuucuuuguagauauucuuugcagcuuaucuguaaagaagauaaauuuuacaaagcaaugga

SEQ ID NO: 4170080 - RNA, 67 nt, Human
ucuguuuguaggguaguaccaugcugccagguuaccgcuggguaguuuccccugcccugcagcauga

SEQ ID NO: 4170081 - RNA, 76 nt, Human
ucuguuugucuguuauugguguauaagaaugcuugugauuuuuguacauugauuuugggcgaaggacaugaacaga

SEQ ID NO: 4170082 - RNA, 63 nt, Human
ucuguuuuacacaccuaugaaagacuaagaaccucagucugggaaguggguggguggggugga

SEQ ID NO: 4170083 - RNA, 125 nt, Human
ucuguuuuaccaauuugcacagacuuggacacagcagagcugacaguuaaauggggaugguaauaacugccuugaaagauuguugaguugauuugugaucaguuuugugcuuauuggcacauaga

SEQ ID NO: 4170084 - RNA, 63 nt, Human
ucuguuuucuuccuccugccucaccugggcaaaugguuuaggcaguggaaggagaaagcaaga

SEQ ID NO: 4170085 - RNA, 63 nt, Human
ucuguuuuugcaugaaccaguucauucuccgccuguuaaggcaacugguucaauucaacuaga

SEQ ID NO: 4170086 - RNA, 72 nt, Human
ucuuaaaacaacccggcuuguaauccucgcacuuugggaggcugaggauuacuugaagucaggaguuugaga

SEQ ID NO: 4170087 - RNA, 65 nt, Human
ucuuaaaggcauguuaggguccuuuggguuaauuauacaagguuugcugacagcgccugauaaga

SEQ ID NO: 4170088 - RNA, 60 nt, Human
ucuuaaaugauuguguuuuuugauuuugcacagagcgaaguaccuacacauuauuucaga

SEQ ID NO: 4170089 - RNA, 59 nt, Human
ucuuaagaaagugacaaauaggggcuuuacaucaguuuuuaauugucugccuuuuaaga

SEQ ID NO: 4170090 - RNA, 86 nt, Human
ucuuaagauacugaaauaguaucaacguguugaguauuaaaaagugacacaauugagugguacuaugccacuucaguguacugagg

SEQ ID NO: 4170091 - RNA, 58 nt, Human
ucuuaauagugcuaaaccauugacuaugaaauugguuugagugguaguauuauuuuga

SEQ ID NO: 4170092 - RNA, 55 nt, Human
ucuuaaugccaacaaagugauuuuuauauaaaaauaagcagaauuggcauuagga

SEQ ID NO: 4170093 - RNA, 55 nt, Human
ucuuaauugagaacaguguaggacaauucuccuauuacaauuggucuuauuaaga

SEQ ID NO: 4170094 - RNA, 107 nt, Human
ucuuacagauggcggcuucucagcuucuucaucuuacaccacagcaggugugugucuccauggugaagcaggguacagcacaaagccgccucauucaugucugcaga

SEQ ID NO: 4170095 - RNA, 127 nt, Human
ucuuacaucaaaauagaaagcccuggcaaacaguaccuuuagccacugaagcagaggccagaacaaaauuucuuucaguuuaaguguguugaagguaauaaagacugugguuuuaguugaaggaaga

SEQ ID NO: 4170096 - RNA, 61 nt, Human
ucuuaccaggaucauguuuuuguuguuggacaggugaaaaagacaaugaguccugauggga

SEQ ID NO: 4170097 - RNA, 74 nt, Human
ucuuacggugagcugccaguaguuggagcuccaaguuugacuuggagggcaaaaccugcaguuauuauuuaaga

SEQ ID NO: 4170098 - RNA, 64 nt, Human
ucuuacucuaagugccccucuugacccaaacuaagugucaagcaaaagggaguuuuagggaagg

SEQ ID NO: 4170099 - RNA, 62 nt, Human
ucuuagaauaaaagggggcuauaggagugaaaguauuacuauauucccucuuauugcuaaga

SEQ ID NO: 4170100 - RNA, 56 nt, Human
ucuuagaauugaagucagagggucaucuacuccggucuguaagcucaguccuaaga

SEQ ID NO: 4170101 - RNA, 85 nt, Human
ucuuagagaccacuugcauacacuucaaaugagcaugguuuuguucuguuuuauguuuguuuguuuguuugcuugcuuuuuaagg

SEQ ID NO: 4170102 - RNA, 66 nt, Human
ucuuagagacugucaaaagagauuauauuaagcaacuugagugauuauuuuuugccaguuaaaaga

SEQ ID NO: 4170103 - RNA, 64 nt, Human
ucuuagauuucagcauuuaugucuuugacagccuguaugacugaagauguuuugaagucuugga

SEQ ID NO: 4170104 - RNA, 85 nt, Human
ucuuagcauuacucuuggcacucagcaaguguuaauuaaaucuuauuugcuauuauuauuguugauguuaggguuauuguuaaga

SEQ ID NO: 4170105 - RNA, 82 nt, Human
ucuuagcuucauguucugccuguggaagaagggaaugcugagcugcuucacugaaacuuccggggcugacaauggggcagga

SEQ ID NO: 4170106 - RNA, 102 nt, Human
ucuuagcuuuuuauuuccucucuaauaggguaaauaucugugucuuuugccugucucaucccuuuaagacuagcugcccuaaagugggaaaugugaguaaga

SEQ ID NO: 4170107 - RNA, 99 nt, Human
ucuuaggguuugucaucuaagaugaugguuuuuccuccuggcugcacuguagccugugcagccaggauggagaacuguugguaugagagaaccugaaga

SEQ ID NO: 4170108 - RNA, 55 nt, Human
ucuuagguucuggaggucagaagucugaaaucgguuuucuggucuggaaucaagg

SEQ ID NO: 4170109 - RNA, 65 nt, Human
ucuuauaaaguccaucugaacaaggaccuuuuuugucauuguuuuuugagacuuucuacaugagg

SEQ ID NO: 4170110 - RNA, 55 nt, Human
ucuuauauguaaguuccccugggugagaaaacccagccaggacucccauuuagga

SEQ ID NO: 4170111 - RNA, 70 nt, Human
ucuuaucuacucuuuggaaaccaaccaaaguuuuaagcagaagaaugacaggaccagagaguaguuagga

SEQ ID NO: 4170112 - RNA, 60 nt, Human
uggaugcuauggaguauuuagauggaaaguuccucaaauguuaugaauuuccagcaucca

SEQ ID NO: 4170113 - RNA, 57 nt, Human
uggaugcuccuaggcccaauguaauagagcuacuccacaggccuuaggggccauuca

SEQ ID NO: 4170114 - RNA, 64 nt, Human
uggaugcugcucuugcucugugacacaucuguuucugcucaacaggcaauaaagggagucucca

SEQ ID NO: 4170115 - RNA, 92 nt, Human
uggauggcugaugaaaagcaugggaguuuucucugaugcucacacaaauagaguuggggugggguagggugggagaauuuccauuagcucca

SEQ ID NO: 4170116 - RNA, 91 nt, Human
uggauguaaaaagucauugcagaacaugaggucuucuagauuuucucuuauguuaucuucaggaguuuuaugguuuuguguuuuacauuua

SEQ ID NO: 4170117 - RNA, 69 nt, Human
uggaugugcaggcagacugcaaaaaucgcuuacuucgcaaguguacauuuuguaauuuccugacgacua

SEQ ID NO: 4170118 - RNA, 58 nt, Human
ugcagugugaccuguagcgagcucagacaggccuguggacauguggucacacucagca

SEQ ID NO: 4170119 - RNA, 67 nt, Human
ugcagugugccuaacacguaauucaccaggacgugucuucugggagucaucguguuuggauccugca

SEQ ID NO: 4170120 - RNA, 62 nt, Human
ugcaguguggauuuaguugugcuuuuuucuugcugggagagcacagccaccauuuacaagca

SEQ ID NO: 4170121 - RNA, 56 nt, Human
ugcaguguuuagaaagcuaucagcaagaucaagcuggagcagcuguuugcauugca

SEQ ID NO: 4170122 - RNA, 58 nt, Human
ugcaguuaauaaccuugcacauaaauccuuuaacaagugugugggcauaucugcugca

SEQ ID NO: 4170123 - RNA, 74 nt, Human
ugcaguucauugacuugaagaaaacaaugucuuaggaagauuagccugguuuuauuguucaaggcaaugaagca

SEQ ID NO: 4170124 - RNA, 57 nt, Human
ugcaguuguuucuaauagcaagauagauuuguuugugcagauaggagacaaucugua

SEQ ID NO: 4170125 - RNA, 68 nt, Human
ugcaguuugcauaacaagagauucuaaauucuuugaaguugaauaacuccaugauaugcuuuauugca

SEQ ID NO: 4170126 - RNA, 83 nt, Human
ugcauaaaguuacagcuuacauuuaccucguaauauauguauauauauauauuaggaguuaaauguauuaggagguaaaugua

SEQ ID NO: 4170127 - RNA, 55 nt, Human
ugcauaaaucuuggaaguuguuguuccacccucacauuuauuuccagauuaugca

SEQ ID NO: 4170128 - RNA, 56 nt, Human
ugcauacaguguauguugugucuauuuguguaaccaugacauacauucugucugca

SEQ ID NO: 4170129 - RNA, 68 nt, Human
ugcauacauaaagugcuaucaugugaucugugguuguagcagcuauuuauagcagcuuuuauugugua

SEQ ID NO: 4170130 - RNA, 57 nt, Human
ugcauagaggcaaaauggcuguacugguaaaaacguguaugccaauguuuuuaugua

SEQ ID NO: 4170131 - RNA, 129 nt, Human
ugcauagggacugagguacaguacuagcuaaaaauguagauuccugguccccacccaagaccuaauggcucuagggauggaaacuaggaaucuauguuuuuggcagucagccaaagugaaucuuaugca

SEQ ID NO: 4170132 - RNA, 63 nt, Human
ugcauauuauaaagagaauuagguugauucuuggaaacuugaaacucaucuuagugaugugua

SEQ ID NO: 4170133 - RNA, 64 nt, Human
ugcaucaaaacuggacuccuucaacucagacucagcaaucugguaaaggagcaauuuugaagua

SEQ ID NO: 4170134 - RNA, 118 nt, Human
ugcaucaaauguuugagugugaaguucgguccugacagcaucugugauucucuguggagacauccgcagugcaguuucccagaugcugucuguauucacacgagaagaguuugaucca

SEQ ID NO: 4170135 - RNA, 71 nt, Human
ugcaucacauuuacuuuuaucccuugggccaaaauaaguuuuacgaucaagccaaaagucaagguggugca

SEQ ID NO: 4170136 - RNA, 94 nt, Human
ugcaucaggaucucugguguguuuguugaaggugcagaaucccagaaggcaaaguccuuccaccugcauuuuuaacaaggcuaauucugaugca

SEQ ID NO: 4170137 - RNA, 60 nt, Human
ugcaucccuaggggcagagucccugcccagaugagcagugcuggcugucccagggaagca

SEQ ID NO: 4170138 - RNA, 130 nt, Human
ugcaucgcuuggccuggggcuggcuuucuucuagcagauagagacagagagcaauuagcguuugaaagcauaagcaagccaaucuguuuuguuuauacagagaguuucccccagaagugaggcagaagca

SEQ ID NO: 4170139 - RNA, 68 nt, Human
ugcaucucaucagugagagucagcagccuucugugucuagcuguggggcuggcuuuccuggaugugca

SEQ ID NO: 4170140 - RNA, 97 nt, Human
ugcaugaacagaucauggaggugcaaaagggcauggcaagaucaggagaccaggcaagugucuggcaugugugccaugcucccucuuucugccagca

SEQ ID NO: 4170141 - RNA, 103 nt, Human
ugcaugaaugaaaggcaagcccugacuaugaagacauaagaaucaaggucaacuuaugugucuccauagccagcuagcuuuucccagauuacuccauucugca

SEQ ID NO: 4170142 - RNA, 57 nt, Human
ugcaugaggaccugaguauggaaaaagagcauccgugcuggcauggucuuggugaca

SEQ ID NO: 4170143 - RNA, 86 nt, Human
ugcaugcgugccacuuguucagcuguaucuugcugcacuugcuaucaccagggcaagcagcaugcuaugcugguggcugcagagua

SEQ ID NO: 4170144 - RNA, 59 nt, Human
ugcauggaacggucuccuggucauggccccaucccacugccacccacaucuuuuaugca

SEQ ID NO: 4170145 - RNA, 75 nt, Human
ugcauggagggcccccuuugccaagugcaggggucugggucccccacucccugugggcagaggcugccuccagua

SEQ ID NO: 4170146 - RNA, 65 nt, Human
ugcaugguuaagcgaaaauauguggaaccugggaaagaucugcaaucuucacucuuaacugugca

SEQ ID NO: 4170147 - RNA, 55 nt, Human
ugcaugugucgggccugugcuagauccugggguugcagcacagacaagaccagca

SEQ ID NO: 4170148 - RNA, 58 nt, Human
ugcauguuagacugcagagucugguagggaaaacagacucuaaauagauaaccaugca

SEQ ID NO: 4170149 - RNA, 101 nt, Human
ugcauguuuuuaaguaaguuggaugucagagguaacaauuuggauugguuaauuucuucaacagugauggccuuuguauuuaauagcuaugacaauaugca

SEQ ID NO: 4170150 - RNA, 75 nt, Human
ugcauuauacauggaucuaaagguaaacacuaucaccugagucucauuaccagcauuggauacuguguauaugua

SEQ ID NO: 4170151 - RNA, 70 nt, Human
ugcauuaugcuacccagaagcuugacucaccagcugccaacaaagcuucauuaauguagcauguucugca

SEQ ID NO: 4170152 - RNA, 81 nt, Human
ugcauucucacugcuguauaguaguccauuguaugcauuuaccacaauuuauccauuguauaguugguggagauuagggca

SEQ ID NO: 4170153 - RNA, 80 nt, Human
ugcauugauagaaacagcaaaagacaagaacuuaagccagcuuugccuuugauuuuuuguuguauuuucccuauagugca

SEQ ID NO: 4170154 - RNA, 93 nt, Human
ugcauuuaaauuguucauauaugagggcaaagugaauagaauggcuuggccugucuccuccuuuguucuuaaaaugauaauucucuuaaugua

SEQ ID NO: 4170155 - RNA, 63 nt, Human
ugcauuucucagucuccaaauuugggcccagagcccuggagacccaggaggcugagaagagca

SEQ ID NO: 4170156 - RNA, 60 nt, Human
ugcauuuggaaacaauuauauucuuauaggacuauauaggagaagagauuuccacaugca

SEQ ID NO: 4170157 - RNA, 73 nt, Human
ugcauuuguaacauucaagaaugcucauaaccuucggggaaauaggucuuuguuccugaguauuacaaaugca

SEQ ID NO: 4170158 - RNA, 116 nt, Human
ugcauuuucuuuguuuuaauugaagcccaguaccuucagugagggagaugauggcuccaacuuauuaagaaugggccugcucaauuaccacucaauacacggacaaacugaaagca

SEQ ID NO: 4170159 - RNA, 59 nt, Human
ugcauuuuucugcugugcucggaccguuguggaugcuucuguuccaguagaaaggugca

SEQ ID NO: 4170160 - RNA, 63 nt, Human
ugccaaaaauaaaggaacuguuuucccaguugaguugauggaaaauaaaucuuauuccuggcg

SEQ ID NO: 4170161 - RNA, 65 nt, Human
ugccaaaacaggaguugaccaaguacaguccauaagccagacucugcccucugccuguuuuugua

SEQ ID NO: 4170162 - RNA, 59 nt, Human
ugccaaauaugcacguguaugcauguguuuguacgugugugcacgugugugugugugca

SEQ ID NO: 4170163 - RNA, 76 nt, Human
ugccaaccaacuagagcccucaguccagaauccagaacugggucaaaaacucucagacucuuuagugaagguggca

SEQ ID NO: 4170164 - RNA, 67 nt, Human
ugccaacgagggcucuaccaaguaacucuggcauuuucugccagggauggucagaguccucggagca

SEQ ID NO: 4170165 - RNA, 92 nt, Human
ugccaacgucagggaaaggauucugcugucggucccacuccaaaguucacagaauggguggugggcacagaaucuggacucugcuuguggca

SEQ ID NO: 4170166 - RNA, 59 nt, Human
ugccaacugucauugagcacuuugaacaugugaaguuaagugcuugaucauaguucuca

SEQ ID NO: 4170167 - RNA, 71 nt, Human
ugccaaguagccugcagugacuggaaugcaagaugcauggggaaaaaaaugguuauugcugagguuaugca

SEQ ID NO: 4170168 - RNA, 67 nt, Human
ugccaauccagcaggcagucauauccuuugccccuucagguaugaaauggcagcugcuguagaggca

SEQ ID NO: 4170169 - RNA, 57 nt, Human
ugccacauauaaccguacgugucaugcauugucaugacacccucauugugugucgca

SEQ ID NO: 4170170 - RNA, 70 nt, Human
ugccacauugcgcuaaacccacucccgguaauaagcaaccuaaguguguacauuuggugcaguuguggca

SEQ ID NO: 4170171 - RNA, 56 nt, Human
ugccacauuuugcuuugccuagguucaggucagaacuuucagauaaaaauguagca

SEQ ID NO: 4170172 - RNA, 66 nt, Human
ugccacccagcaugugauacccgccuggacacauccaggaaacacucaagccaugcuggggaggca

SEQ ID NO: 4170173 - RNA, 62 nt, Human
ugccacccagccaggagugggacccgugcucugaaauggucaucccuguuggcugaggggcg

SEQ ID NO: 4170174 - RNA, 81 nt, Human
ugccaccucugccaacaccaggggcagagaccaaaguggaagccacugucugcuggccccugguuaggugacaugguggca

SEQ ID NO: 4170175 - RNA, 64 nt, Human
ugccacucuucugcuuguccuuagaaaccugggccaucauggaugaggaugcagacagagggca

SEQ ID NO: 4170176 - RNA, 77 nt, Human
ugccagaucaaugcuucaggcuccuuauagucaaaccuguuuuccugauuauaagguagacccugaggcuuuuagca

SEQ ID NO: 4170177 - RNA, 64 nt, Human
ugccagaugcaggagguaaggcuggagguucgugaccaguuuggacauagcugcugcucuggua

SEQ ID NO: 4170178 - RNA, 60 nt, Human
ugccagauguagauagcaagguaggaaucagcaguccugccucugccucccuagucugca

SEQ ID NO: 4170179 - RNA, 65 nt, Human
ugccagccaguccagcauugguguagacagcuacuugcgauacuuaugacgagggcuggccugca

SEQ ID NO: 4170180 - RNA, 63 nt, Human
ugccagccuggccugagucuuuucugucucccagccguuaaagguuuuaggaccaggcaggca

SEQ ID NO: 4170181 - RNA, 63 nt, Human
ugccagcuacaggguugaaauccuggcuguuucuggacagcucuucuucaagccuggcuggca

SEQ ID NO: 4170182 - RNA, 60 nt, Human
ugccagcuaguacaaugggagagcaaugagacagugcuuuuccaucucuacugucaggca

SEQ ID NO: 4170183 - RNA, 77 nt, Human
ugccagcuuuggcacaggguggugccccuuuucauucuuaucuccaucacccuugauugccaagccuucccuuggca

SEQ ID NO: 4170184 - RNA, 57 nt, Human
ugccaggaaccuguucuuguucacugcuuauccccaaaccuagagcaguaccuggua

SEQ ID NO: 4170185 - RNA, 57 nt, Human
ugccaggacggugaaugggcuaccuggggugguggcccagaaacauuccugcaagca

SEQ ID NO: 4170186 - RNA, 58 nt, Human
ugccaggaugaggucaauguuugguuacugaugagaacaaacaggccucaguccugca

SEQ ID NO: 4170187 - RNA, 84 nt, Human
ugccaggcaaucuugggacaugugcucugggagccuugggccgccauaucaggagccagcugucccaaccaggaucugaaggua

SEQ ID NO: 4170188 - RNA, 118 nt, Human
ugccaguaauugcaaaauauguccuaacuacagagaauucaaauugugauaugaugugggucuuggaauugaugauuuucauaaugguuaauauauauugagcauuuacaauauggua

SEQ ID NO: 4170189 - RNA, 62 nt, Human
ucuucagcaacuccccaaucugccugcagccaagccucagaaucuguugggguugcagaaga

SEQ ID NO: 4170190 - RNA, 77 nt, Human
ucuucagcaucuuucucuucuggaguuguagcuuguucuuugugucaccacucaagcagguggggaagguuuggagg

SEQ ID NO: 4170191 - RNA, 108 nt, Human
ucuucagcauuuuuacuuuucuaacgaagacaucauggagaggauaaauagauuggcaagccuuuucuaugucuuuuccaaugcugucuggaaucaauuuguugacga

SEQ ID NO: 4170192 - RNA, 69 nt, Human
ucuucaggaggagcauuagcgucucaaagagauuaacgaguuaaaugaguguaggugcuuccuguuaga

SEQ ID NO: 4170193 - RNA, 57 nt, Human
ucuucauccuucaccuugguucugagugacagcuccaagccagaagaaggcuggaga

SEQ ID NO: 4170194 - RNA, 68 nt, Human
ucuucauccuuucagaugggcauggaccgaacauuauauuucugucucagcucuuuggaaaaagaaga

SEQ ID NO: 4170195 - RNA, 125 nt, Human
ucuucauucgucccucuugggaguaaagcaaaauguagagauugugcaagguugaagcuucucauucccaguccucagcauuuuguuuucuccuugaaacuccugagaguggagggccuggaaga

SEQ ID NO: 4170196 - RNA, 58 nt, Human
ucuucauucucgccuuugucgucagcauuuauggagcuaggcacugugugagugagga

SEQ ID NO: 4170197 - RNA, 56 nt, Human
ucuuccagcuccccacgguguccacaacccccugagggcagaugggagauggagga

SEQ ID NO: 4170198 - RNA, 90 nt, Human
ucuuccaggauauuuugagggcuuggcacugggaauauggagcaauacccaacacagucccagccuguaggauuggguucauaugggaga

SEQ ID NO: 4170199 - RNA, 90 nt, Human
ucuuccaucuacuuuucccucucauucucccauacucacccaggagccuccaacuccuccaaggcagggggagagaaggaaggaggaagg

SEQ ID NO: 4170200 - RNA, 60 nt, Human
ucuucccucuucugccaaauacaucucucuccaugggaagagacagguaaagauggaagg

SEQ ID NO: 4170201 - RNA, 72 nt, Human
ucuucccuuacuuucuuguccuuuagcugcuguuucuuguuccuccuuagucagcugcagaggugaagaaga

SEQ ID NO: 4170202 - RNA, 66 nt, Human
ucuuccgaucugggaugaaaccucaaauaaguuaauguuuccauccacauuaacagauacggaaga

SEQ ID NO: 4170203 - RNA, 55 nt, Human
ucuuccugguuucugggccaucaugccugaaagccuggucuggagccagugagga

SEQ ID NO: 4170204 - RNA, 90 nt, Human
ucuuccuucaauucuucuucaauauucaguggaaaagccauugcaugggaaugaacacaauggccauugacacaggaggaugaaggaagg

SEQ ID NO: 4170205 - RNA, 96 nt, Human
ucuuccuuccugucaucuguuccuucagcaaguccugagcaccugacaugugauagcaucuugcuaguauuuguugagcggaugaguggaugaagg

SEQ ID NO: 4170206 - RNA, 80 nt, Human
ucuuccuucuucauuuggcuugaggugucuuggacaugcugccuaaguauuggccuauagcuagaaggggcuaaggaaga

SEQ ID NO: 4170207 - RNA, 68 nt, Human
ucuuccuuuauuauucucuggagaauguaacuucaagaguuggcaaaggagaaaauaguaaaugaaga

SEQ ID NO: 4170208 - RNA, 68 nt, Human
ucuuccuuuccuuuccaaaauucugccuuccagagcaguugaggcagagugaugcugggaauauaaga

SEQ ID NO: 4170209 - RNA, 56 nt, Human
ucuucguuaagcuccagucauuccagcucucaugggaaugaucagcauagcaagga

SEQ ID NO: 4170210 - RNA, 85 nt, Human
ucuucuaacuuuaggguguuucugucuacucagccauuuaaaacucuuauguugguuagugauaggacuuuaaagccuuuauaga

SEQ ID NO: 4170211 - RNA, 87 nt, Human
ucuucuaugcagccucuuauucuccaggacuuguuuacauggugauggugguaagggucucagaagagugaggggaaguguacaaga

SEQ ID NO: 4170212 - RNA, 69 nt, Human
ucuucuauuuagguuagucuaaaaguauuuguguuuugcagucauuuuuugcaccaaccuaauagaagg

SEQ ID NO: 4170213 - RNA, 69 nt, Human
ucuucucuauaguacacuuagguacuucaagcuaauguuagcuuaacugccauguauugcuuagggaga

SEQ ID NO: 4170214 - RNA, 56 nt, Human
ucuucucuccugcuuggcagaaacugaacgaucagcagucagacagagagagagga

SEQ ID NO: 4170215 - RNA, 107 nt, Human
ucuucugaacccugcuucccgcugcugucuggaacugugauccagguggcugauaguugcucugggccucaccuucuuggcagcccuggguuucaguaacugggaga

SEQ ID NO: 4170216 - RNA, 87 nt, Human
ucuucugaguaugguuauuuuucugcauuggguuucagcaaacugugcucacaugcuugaggaaagaaaaaccauucuaucagcaga

SEQ ID NO: 4170217 - RNA, 80 nt, Human
ucuucugcaucucacagccagugcucauugucagccaauuccaugccaggcacugcaccuggcucugagaucuggaauga

SEQ ID NO: 4170218 - RNA, 84 nt, Human
ucuucuggaagcuucuuagaaaugcagaaucuuaggccucagauuuacugaauaagaaucugcauuuuaacaagauccauagga

SEQ ID NO: 4170219 - RNA, 73 nt, Human
ucuucuggaugagagcggaggcugggaagagggugggcccgguaaccagggccuccugcacucugccagaagg

SEQ ID NO: 4170220 - RNA, 77 nt, Human
ucuucuggcuccuggcuccacugcccuggcucugugcucugugcuggccgugguagccggagggaggacccaggaga

SEQ ID NO: 4170221 - RNA, 70 nt, Human
ucuucuuacaaggcuugugaauuuuuuguuggaaauggugacaugccaucacaaagcuuugauaagcaga

SEQ ID NO: 4170222 - RNA, 75 nt, Human
ucuucuucauaggcaguccuguucuuuguagcuccgggggucucauaaccaaagaaugggacuucagaaagaaga

SEQ ID NO: 4170223 - RNA, 80 nt, Human
ucuucuuccccuggguugucaccgcagcugucacugcuguucucacugcugcagguccagccccuuuguaggggagggga

SEQ ID NO: 4170224 - RNA, 70 nt, Human
ucuucuugccugcccugugucguaaaaugggggucccuuacugcauuaucaaggggaaggcaagacugga

SEQ ID NO: 4170225 - RNA, 109 nt, Human
ucuucuugguuugcaagaucaucuaucuagucaguauauuuugaauuaauucucuucugauacagagauacucuagaucaaauggauugaucugaaccaauuucaaaga

SEQ ID NO: 4170226 - RNA, 70 nt, Human
ucuucuuguagcuuuuauccacugcuuuugguuuuguaucuagaucuagguauaugaaagcauauuaaga

SEQ ID NO: 4170227 - RNA, 95 nt, Human
ucuucuuuaacuacaguaccaagaauuaagaauuuugauguggaucuuuagcuucacagagaaacuggauugauuuuggaaacuguaucaggaga

SEQ ID NO: 4170228 - RNA, 91 nt, Human
ucuucuuuucugagaaaaagauaaaauggagaaacuguuacuauuaagcaaguuucacuaaggucuguguguucuuuuuccagaaggagga

SEQ ID NO: 4170229 - RNA, 64 nt, Human
ucuucuuuucuuaguuguuggguucuucauccauugaaaguuagaaacaaguaggaauggaaga

SEQ ID NO: 4170230 - RNA, 78 nt, Human
ucuugaaaauccauuuagugucguuuuauucaaacugaagugcuucaggauggucagaugcauugucuaggaucagga

SEQ ID NO: 4170231 - RNA, 55 nt, Human
ucuugaaguccuuacauuugauccuuauagauggaucacagaugaaaguucaaga

SEQ ID NO: 4170232 - RNA, 85 nt, Human
ucuugaguauuuacaaagcacaugaguaguguaguaggagaauuguaucaguuaagauaauaaguaugucuaugugaagccaagg

SEQ ID NO: 4170233 - RNA, 90 nt, Human
ucuugaguuuccuugacagcuagaccuccuccucggggccagcccugcagugugguccugggguguguuuugcugcucaggggcucggga

SEQ ID NO: 4170234 - RNA, 78 nt, Human
ucuugaucuuguuugaaaggagcuuuauccagaauacaauuucuuuauucagaaugaaauuucuuucagauauuagga

SEQ ID NO: 4170235 - RNA, 57 nt, Human
ucuugauggugauguugugucauugcuucauuuuuggcacucagucacuacucaaga

SEQ ID NO: 4170236 - RNA, 90 nt, Human
ucuugauguauucuauaaccugcugcaagugaugcuuguuaguuuuauuaauucuaacaagucauuccauuugacaguaaaacauugaga

SEQ ID NO: 4170237 - RNA, 62 nt, Human
ucuugauuugaauugcaguuguaaauggcgaauugaaggggcaauugcaguugcaaaaaggg

SEQ ID NO: 4170238 - RNA, 58 nt, Human
ucuugcaggcaugaaaggacucggggcugaaauugccaagaaucucauccuggcagga

SEQ ID NO: 4170239 - RNA, 72 nt, Human
ucuugcaguggugagccagucucuuuauccaccaagccugacccagcaggcaggagaggcccaguaccaaga

SEQ ID NO: 4170240 - RNA, 65 nt, Human
ucuugcauccucuuagcugaagguuccuuuaacuggagucuucacuuagcugaggggacugaaga

SEQ ID NO: 4170241 - RNA, 67 nt, Human
ucuugcauucauuacauucaaaaggcauuucugcagugggaagucuccuguguguuaugaagcuaga

SEQ ID NO: 4170242 - RNA, 67 nt, Human
ucuugcauuuaaguagauguuacacacuuagugaaaugugcaucugcuaaaauuuccggaggcaaga

SEQ ID NO: 4170243 - RNA, 91 nt, Human
ucuugcauuuuugugaaguaugcauugcugcuuucaaaacaauuucgaaaauuuuuaugaaagagaauguguaucuuuuggggagaaaaga

SEQ ID NO: 4170244 - RNA, 74 nt, Human
ucuugcuaaaguuuuugcuauauggaauuggucauucuagagaugucaguuaccuagcacaagaauugcaaaga

SEQ ID NO: 4170245 - RNA, 65 nt, Human
ucuugcugacuucaguggcuggcaucaaaguaaaaauuacaccagacaaagugaagcaggcagga

SEQ ID NO: 4170246 - RNA, 79 nt, Human
ucuugcugaguaccagcugcugcugaagucaacuaauuacaacauuccacuugauaucacacuggauacacaugcaaga

SEQ ID NO: 4170247 - RNA, 58 nt, Human
ucuugcuuuccuaaacauaaaaaggcugugaugugcuuuauggagaaggaaaguaagg

SEQ ID NO: 4170248 - RNA, 58 nt, Human
ucuugcuuuucugugcuuuccucagacuguaacaacagcagccacagaacuugcagga

SEQ ID NO: 4170249 - RNA, 68 nt, Human
ucuuggaaggaccugauuuugagcaucuucauuaauugugaacucaggguucaagucccuucucuuga

SEQ ID NO: 4170250 - RNA, 61 nt, Human
ucuuggacacaaugguuuuccauaugggcaaagacucuaaaugaaggccauuuguuccaga

SEQ ID NO: 4170251 - RNA, 69 nt, Human
ucuuggaggcaguaacugagcaacauauuccccgacaaaaaaggguuguugaaguaacuguuacauaga

SEQ ID NO: 4170252 - RNA, 63 nt, Human
ucuuggcuacuuuccugucugcuaauucauuucaacucuagcacuuuuggguaguggccagga

SEQ ID NO: 4170253 - RNA, 55 nt, Human
uggcagcagcaaauggcauaucaucuuccgugaucuuggagucaucaugcugcua

SEQ ID NO: 4170254 - RNA, 72 nt, Human
uggcagccacaugagugagccaucuugaaaguggauccuucaccccagguugagccacuucaguggaugcca

SEQ ID NO: 4170255 - RNA, 72 nt, Human
uggcagcugcaggccuccugaggcccuggcucagaacaugcacugccucccucaggcugucugcugguucca

SEQ ID NO: 4170256 - RNA, 68 nt, Human
uggcagcugcuggagagcgagacuguuccugagccgcccauuaaacgugucuccugcagcaguggcua

SEQ ID NO: 4170257 - RNA, 115 nt, Human
uggcagcuggcugggauugaagugugaauguugauaugaguacagaaauaucugggcuaccccuucugauucauucacacauuaucacaugauugccuuggccuugauaauguca

SEQ ID NO: 4170258 - RNA, 78 nt, Human
uggcagcuguuaauguuuuguugauccuccuaacaauccccugauuaauaauaaccacagaaauaauaauaguugcua

SEQ ID NO: 4170259 - RNA, 64 nt, Human
uggcagcuguucagcaacucgcagagcagucucucuucuccaucugccucgcuaacagcagcca

SEQ ID NO: 4170260 - RNA, 62 nt, Human
uggcagcuuccugcucauaggaaaccucguccuuuagcuuucucuggagucaagagcuucca

SEQ ID NO: 4170261 - RNA, 95 nt, Human
uggcagcuuguaguucccagagcaguacuccaggaggugaauuccaccagccucuuaggguagucugacuuuuuauuggcagcuuauaguuccca

SEQ ID NO: 4170262 - RNA, 55 nt, Human
uggcaggaaauacccugccuagaacaaauacuccugcugcagggauuucuugcca

SEQ ID NO: 4170263 - RNA, 83 nt, Human
uggcaggcuagagucucucauuaaucuguauuuucauuuuaaaaugaguacuuugcauuaguaaguaauuuuaauuuuugcca

SEQ ID NO: 4170264 - RNA, 107 nt, Human
uggggaaaucaaauauuuagaaguucaugcgaauuauuuaaguuuuacuucaacaaauuaacagagugcuucuagcaagagcuucauaugaguuuuuuuuuuuacca

SEQ ID NO: 4170265 - RNA, 59 nt, Human
uggggaagaaggcagcugcuugacacccacaggucuguucaaggaguuucucuuuucca

SEQ ID NO: 4170266 - RNA, 89 nt, Human
uggggaagcuggggaaaagaaggaugggagaaauccuaugggauuacuucaggacuucuuagaugccuuccguuaccuaguggccacca

SEQ ID NO: 4170267 - RNA, 89 nt, Human
uggggaaggcugggcuggaggucgcgcgggugcugcaguguugugagcucacgcugcaguguucagugaucucuccacugcuuucugca

SEQ ID NO: 4170268 - RNA, 65 nt, Human
uggggaagggguuguuacuggccucuaaggaagacccaaaggaaaguacaaaaauuccuuucuca

SEQ ID NO: 4170269 - RNA, 76 nt, Human
uggggacagcagacuguaaagggccagaaaguuaaaauuuuagccuuuguggguuuuacaaucucuguugcaacca

SEQ ID NO: 4170270 - RNA, 62 nt, Human
uggggacauucaugcagguuguuggcaggaggucucaguuccugcauguaugaacgucucca

SEQ ID NO: 4170271 - RNA, 86 nt, Human
uggggagaccuaggcucuagauguggucuuugccccaauucacagugcaacagagggcaagacaucucuaugggccuguuucccca

SEQ ID NO: 4170272 - RNA, 129 nt, Human
ugaaucaaaugaaaugauuuggguaaugugucugggacagaguaauugugucuggcacacugauuauuguuaagcugccagauucagucugcuaaauccagucuccucaucaguuaccuuaugauucug

SEQ ID NO: 4170273 - RNA, 60 nt, Human
ugaaucaguauaaauucucaaauaugggagaaauuuuguucuugagaauuaucugaguca

SEQ ID NO: 4170274 - RNA, 89 nt, Human
ugaaucauucugcuuggcuggaaauagguugagaugaaucugauuuguguuugacuuaauaaaacuccauuucacuuagaaugucuuua

SEQ ID NO: 4170275 - RNA, 70 nt, Human
ugaauccgggaggcggagguugcagugagucaagauugggucacugcacuccagccugagcgagacuuca

SEQ ID NO: 4170276 - RNA, 60 nt, Human
ugaauccuaguugaagauaaggucaccaaccucccagagccuaucuuccacugggacuca

SEQ ID NO: 4170277 - RNA, 67 nt, Human
ugaaugaaguaacagaggggguguugcugguuuuaugacuagaagcauugaucuuuuuauuaauuca

SEQ ID NO: 4170278 - RNA, 122 nt, Human
ugaaugaauaaauaccuugagaaaaugcauugguuucuacuuguaagucaacgauuuaaaugcuguugaaaaggccuuaagucaaccuaaugcaugugauuuuuuucagguuuuucuauuca

SEQ ID NO: 4170279 - RNA, 67 nt, Human
ugaaugaaucauccugaccacucagcuacuuggugccuucaggagcugaauuacggugagucauuca

SEQ ID NO: 4170280 - RNA, 96 nt, Human
ugaaugaauuucugauguuugaggcuauaaauauaauuguuuuuauacaaaaggauaauuggcauuuguaggcauuugcuuuuggaaauguauuua

SEQ ID NO: 4170281 - RNA, 77 nt, Human
ugaaugacucuuuuguuuagacauuuaaggaagaaccuauugguguucauuuagcaugcuaaaccugaguguuauca

SEQ ID NO: 4170282 - RNA, 67 nt, Human
ugaauggcuuauggguccucccucuucccugggcuugcacugaagagggguggucugugaggauuua

SEQ ID NO: 4170283 - RNA, 71 nt, Human
ugaauggguauauagauacauuagguaacuuguggaaguccauauuacauuuguuuaucuacaucuauuua

SEQ ID NO: 4170284 - RNA, 86 nt, Human
ugaauggucucucacucuagguaacacaacuaauucaaaugcaauguuaggagaguuguuuuugccuagaugaaauaagaucuuua

SEQ ID NO: 4170285 - RNA, 94 nt, Human
ugaaugguuacgaugauuguucucugugcuuuugagaggaaggacuaaguccugugggugaaaguuacaggaaaacagauuucggaccaauuua

SEQ ID NO: 4170286 - RNA, 74 nt, Human
ugaaugguuugugucuucaggcaaucucauuauucuccccaaagcagaagugcugaaugaagacacaaacuuca

SEQ ID NO: 4170287 - RNA, 82 nt, Human
ugaaugucagcagugugcccagaggcuggauccauggaaugggaaccaacagcugaacugugcaugcuuacagcugacauca

SEQ ID NO: 4170288 - RNA, 57 nt, Human
ugaaugugaaaaaugccuuccgugacaucauccuuacaggaacauucuuuacauuua

SEQ ID NO: 4170289 - RNA, 72 nt, Human
ugaaugugcuauuacacauuuauuuauguagugcuaacaagauaaauguauguguaaaaagcuagauauuua

SEQ ID NO: 4170290 - RNA, 129 nt, Human
ugaauguuucuuccaugccuauaccugugcuaugcauaguggaauuagcaaaacuuaugacauaauccaaaaccugagguuuauaaucccauuuguaaagucaaggcauacaccacuggaaugacaaaa

SEQ ID NO: 4170291 - RNA, 57 nt, Human
ugaauguuuguucugcugauggguugaaucaucucuucacaguuggccaggcauuua

SEQ ID NO: 4170292 - RNA, 58 nt, Human
ugaauucugaaauaaauguguccuccaauuuguugggggagcauaaacucagauuuca

SEQ ID NO: 4170293 - RNA, 62 nt, Human
ugaauucugggucagcagcuugcaaugugccccauguaagcauguuaaugacucaaaguuua

SEQ ID NO: 4170294 - RNA, 78 nt, Human
ugaauugaaguacauucaaacgauuuauugauugaauuaucuuuaaucauucaaaugauuuggagguacugcaguuua

SEQ ID NO: 4170295 - RNA, 65 nt, Human
ugaauuggagccccagaagcaagguuaaagugaguuacuacugaguuucugguguuccuaacuua

SEQ ID NO: 4170296 - RNA, 81 nt, Human
ugaauuggcagaaauguucagcgagggaugcuagggaacuuccucucugucuccuuauucugaauugucaugccuauugca

SEQ ID NO: 4170297 - RNA, 103 nt, Human
ugaauuggcagcugcagaauguuugaaucaaagcugaaguuuucaaagagaaugacuaugggauucugcaguuuugauuuuaauauccugaaaaugcaaauca

SEQ ID NO: 4170298 - RNA, 102 nt, Human
ugaauuucagaugaauaaugaauaaugguuuaacauaugcuugagucaaauauuacaugggacaugguuauacuaaaauauucguuguucaucugaaguuca

SEQ ID NO: 4170299 - RNA, 60 nt, Human
ugaauuuuuuucagcauuuccuuuuaaagagguuauaaaguuaagcuguaaaaggauuca

SEQ ID NO: 4170300 - RNA, 68 nt, Human
ugacaaagcccagggaauggucgggagagacugguagauccagcacuccuauuccuugaggcugguca

SEQ ID NO: 4170301 - RNA, 86 nt, Human
ugacaaauugcauuguuauagcauuacacaccauagaccccauuuugaaugggaggugugaaauguucaguguuacaaaugaguca

SEQ ID NO: 4170302 - RNA, 66 nt, Human
ugacaacaucuuaagauagaaggggaagcuguguaagacaguaagucucuuuccuugagaugguca

SEQ ID NO: 4170303 - RNA, 90 nt, Human
ugacaaccauaaauacuuaguuuugugucuaauucaguuaaguguucuuguuuguucauggaccagaaaaaaaguuuucguguguuuuca

SEQ ID NO: 4170304 - RNA, 110 nt, Human
ugacaacugugaaacacaaugcuucugagggaauuacagcauauuacuuuuugcuuuauuuuauuuaaucuucuguuucucuccucaggaaguguuauuuauuauccuca

SEQ ID NO: 4170305 - RNA, 57 nt, Human
ugacaagauagauugaguuuuacaucaguaauugacacucgagugucuauuuuguua

SEQ ID NO: 4170306 - RNA, 55 nt, Human
ugacaagguuggagagguucacucacuuuagagggauuuacacaccugccuguca

SEQ ID NO: 4170307 - RNA, 86 nt, Human
ugacaaugauuuccccuacacagaagaaacagaagaaaccauuuuuuuaugaccugaagcuucuguugcaguaugaaaucauguua

SEQ ID NO: 4170308 - RNA, 58 nt, Human
ugacaauugugggcaguuugugugaugcuguguggcagaaacucuaccucaaucguca

SEQ ID NO: 4170309 - RNA, 66 nt, Human
ugacacaagagcccuguuugcugauuuccuuugaucaucuuuucaguaucaaagggcaugugguua

SEQ ID NO: 4170310 - RNA, 64 nt, Human
ugacacaagaugcugaccucuugaaaucccuuggauggaccauuucaaagagugggcauuguca

SEQ ID NO: 4170311 - RNA, 55 nt, Human
ugacacacagggggauggaguugguccuuguccauucucucacccuugcugugca

SEQ ID NO: 4170312 - RNA, 63 nt, Human
ugacacagaaauuaagcugucaacaucuugaucauucaaaagcggucauugaucuuuguguca

SEQ ID NO: 4170313 - RNA, 75 nt, Human
ugacacaggaggagagggagcacccagggaaguugugucugggaaagugugcuccccuccagaccuuuagugcca

SEQ ID NO: 4170314 - RNA, 75 nt, Human
ugacaccaagucugaucauuucuucuauaugcugcuguuucauauaugaggaaucugguacagaauauauaguca

SEQ ID NO: 4170315 - RNA, 63 nt, Human
ugacacugaauaauugagaguugauuguguuuaggaagaucaacaaucccaugguucaguuca

SEQ ID NO: 4170316 - RNA, 80 nt, Human
ugacacugugaaaguuacagaaaccauuagugagaugccuuucucaguauuaugcuaacugcagcuuuugcgaguguaca

SEQ ID NO: 4170317 - RNA, 117 nt, Human
ugacagagagagggcaaguuuagugagauccaugcaacaccugccuuguggaggggaagcagggcugacaguggcguggcguugagcuaaguuuagcugccugugugaucucugcca

SEQ ID NO: 4170318 - RNA, 58 nt, Human
ugacagagccaagaucaguacucaaauaaucuggcguuagaccuggggcucuuaguca

SEQ ID NO: 4170319 - RNA, 68 nt, Human
ugacagcccuuccaggcagaauucuagcacaugcuuauggguuaggauccuguauggagaagcuguca

SEQ ID NO: 4170320 - RNA, 58 nt, Human
ugacagcuuggacaggucccucuucccaggaaugcgaggcuccuccucucagcucuca

SEQ ID NO: 4170321 - RNA, 58 nt, Human
ugacagguucguuagucauguugcugggauaauacaagcuacaaucugaaaccuguca

SEQ ID NO: 4170322 - RNA, 78 nt, Human
ugacagucuucccugugccagaguguuuaauaagaccuaaugaccuuuacacacuuuggagggcagggagagacacca

SEQ ID NO: 4170323 - RNA, 56 nt, Human
ugacaguuugcuuucgacuggagaaaaauaagaaaucucccaggaagcaaauguca

SEQ ID NO: 4170324 - RNA, 65 nt, Human
ugacauccugaagucagucauuugagggcuuccaacuccagcagaaaauugcccuucagggguca

SEQ ID NO: 4170325 - RNA, 94 nt, Human
ugacaucuaauaaguuuucaauauaugauagugaugggaguaguaguuguugaguuuguuauuauuauguauuuaggacauuaaacagguguua

SEQ ID NO: 4170326 - RNA, 82 nt, Human
ugacaucuaugacaaaauuagcugcaaaggauguuaucuaccuugaugauuuccaguuguugcuaagauuauagauuuauca

SEQ ID NO: 4170327 - RNA, 60 nt, Human
ugacaucuuauacaagggaauaugugcacauaugcauuucuucaaaguguaugauaugca

SEQ ID NO: 4170328 - RNA, 130 nt, Human
ugacauguaaaauccagucauagcuuggguuucccggaagcagucccugagacagagauuuuagugcaacaguuuauuugggaggcgauccugggaaacaccagaagggaaguggaaaauugaaaugucg

SEQ ID NO: 4170329 - RNA, 62 nt, Human
ugacauguaagauggaaaagcgcaacuugaugugauuaguguucccuucuuagacuauguca

SEQ ID NO: 4170330 - RNA, 55 nt, Human
ugacauguauguauuuguuuauggauuaaaaaauagaugaaugacuuauauguca

SEQ ID NO: 4170331 - RNA, 87 nt, Human
ugacaugucaacguaaguucaccaguuguaauaaguguaccacucugaugggugaucuuaauaauaggugaggcuauguauguguca

SEQ ID NO: 4170332 - RNA, 64 nt, Human
ugacauucacagguaaacauuccaucaaucaggguaucugaggagaguuagaccuguguuguca

SEQ ID NO: 4170333 - RNA, 65 nt, Human
ugacauuuaagccucugauuuccauuugguacauauucuggugugagaagugagguauagaugca

SEQ ID NO: 4170334 - RNA, 64 nt, Human
ugacauuuugcauuaguuugaaucacauaugaaaucacauguguucaccaaaguguagaaagca

SEQ ID NO: 4170335 - RNA, 73 nt, Human
ugaccaaaugucucacaggaagaggugucuaucucuuuccgaaagagaauuccuccucugggacacuugguca

SEQ ID NO: 4170336 - RNA, 69 nt, Human
ugaccaccccuguccuuccagccgaaaucuaaggccucacuuggagauaggcugaggcagggcugagca

SEQ ID NO: 4170337 - RNA, 58 nt, Human
ugaccacuggacagaggaaauauggaggaccaccuccagauuccguuuauucagguca

SEQ ID NO: 4170338 - RNA, 62 nt, Human
uggggacuugagccaugcagucaucccucuagaaaagacugcagggcaaguuagagacccca

SEQ ID NO: 4170339 - RNA, 88 nt, Human
uggggagacaguaccauggaaggcuuuaugacucaaagcguacaccuugaccugugagucagaauuccuuucuaaggguuguccccca

SEQ ID NO: 4170340 - RNA, 58 nt, Human
uggggagaguuacaaggaaucuucuuaaggaugggggagauuauaaagaaccuucuua

SEQ ID NO: 4170341 - RNA, 56 nt, Human
uggggagguaugaggaacuuugaggaacccagaccuucugcuggcauacugcccca

SEQ ID NO: 4170342 - RNA, 77 nt, Human
uggggauaauauuuguacuagcucaggaggauuuaauuagaugagugcuccaaagguuggucauuguuauuuugcca

SEQ ID NO: 4170343 - RNA, 101 nt, Human
uggggaugggcaucccacuugugaauugggcaguccacagucccagagcuaaugagcuuagguuggaugaggcuggguuaggcagguaggaaccaaaacca

SEQ ID NO: 4170344 - RNA, 68 nt, Human
uggggauuucuucucauaacugagaccaaaacaguuuugugcagucucagaaaugacaggagguacca

SEQ ID NO: 4170345 - RNA, 78 nt, Human
uggggcaggugaacugcugaguuuuaucaucucugcacagugacaugauugaugcuggguuguucccuuuugacccca

SEQ ID NO: 4170346 - RNA, 110 nt, Human
uggggccaguggacuuuccagugggccuuagaagguucccucuacuguaggagagugucagaggagcugggaggcccucguuuaaugacugagaagagauuccaccccca

SEQ ID NO: 4170347 - RNA, 76 nt, Human
uggggccauuuccagcuccugcaucauggggccuccuuguccccuuucccaugaccaggcccugaaaaugcuccca

SEQ ID NO: 4170348 - RNA, 55 nt, Human
uggggcgcgcggucccucccgcaggucuccgagggagccaggaccucgcgcccca

SEQ ID NO: 4170349 - RNA, 89 nt, Human
uggggcucaggggcuagggaacaagaugcccaggggacaccugcgugggacuccuggcuccucugcucaccuagcugccccaagcccca

SEQ ID NO: 4170350 - RNA, 65 nt, Human
uggggcucuagucauugccagaacacugaaguauuuucacaccagcugguaaagacuguccccca

SEQ ID NO: 4170351 - RNA, 61 nt, Human
uggggcugaaaauauagauaaaggucagaguguggaagaccuuaucugucaaucugucuca

SEQ ID NO: 4170352 - RNA, 62 nt, Human
uggggcugaugggagcuggcucaccccgagacacuuggggagugacaccaccccucacccca

SEQ ID NO: 4170353 - RNA, 57 nt, Human
uggggcugcugugguuuacaccauugugggcacaauggaggccaugccagagcccua

SEQ ID NO: 4170354 - RNA, 59 nt, Human
uggggcuugaaaauucauagguauuugcauccagaugccuagagaagcuucaacuccca

SEQ ID NO: 4170355 - RNA, 79 nt, Human
uggggcuuuggggaggggauuaggcuaugaggguaaagccuucaagacugcgacuaaugcccuuguaaaagaggcccca

SEQ ID NO: 4170356 - RNA, 70 nt, Human
ugggggacccucaggacugcgucuccaggucucggaagggaggggaccgguggcuuccucggguccccca

SEQ ID NO: 4170357 - RNA, 73 nt, Human
ugggggcagcucccuuaggccuugccgggagauaacagguguuuccaguugcgugagggugcugaggccccca

SEQ ID NO: 4170358 - RNA, 57 nt, Human
ugggggccucaugaggucuuuucuguuuucugugaagaaccucacgagauuccuuca

SEQ ID NO: 4170359 - RNA, 58 nt, Human
ugggggcugagggguaucucaugggagaaugccaucccugcugucaucucagcucuca

SEQ ID NO: 4170360 - RNA, 59 nt, Human
ugggggcugggaugucacuuucaugguuccccuauuuauaacaagugauucagcccuca

SEQ ID NO: 4170361 - RNA, 75 nt, Human
ugggggcuguguacccacgugggcaccccgcgcacaggcagugcggcguccugcuaggugcacagcuuuauacca

SEQ ID NO: 4170362 - RNA, 56 nt, Human
uggggggaagauggauguuaaguuaauucuuagaucugaaaaugcucuucuucuca

SEQ ID NO: 4170363 - RNA, 59 nt, Human
uggggggagccagaauucacaaucugauuuuucugauuccagagucuguguucuuucca

SEQ ID NO: 4170364 - RNA, 97 nt, Human
ugggggggggcuuuccaaguaaugucucuugagaggcgaaacagcuugguaguugaaagcacaggcucaggaacagacuugcugggcucaaauccca

SEQ ID NO: 4170365 - RNA, 56 nt, Human
uggggguacccauuugucgccagugucgggaaacacaguguguucugggaccucca

SEQ ID NO: 4170366 - RNA, 114 nt, Human
ugggggugauggucguaaguggucagauuccagggcuguuuugaaaacauccucagcaacaucaaggacagauuucaaggccuucugguucaguccacuccagccucagaucua

SEQ ID NO: 4170367 - RNA, 60 nt, Human
ugggggugcuauccuuuugacauaaucugaaccuaauuacuuccaaaggacccaccucca

SEQ ID NO: 4170368 - RNA, 97 nt, Human
uggggguggggguggagggguaaccugggggcgucugggcugaagggauugacagcuccuggcucgcugaccucaggggccuccuucccacucucca

SEQ ID NO: 4170369 - RNA, 93 nt, Human
uggggucaggcaauucucugcagagcaauucucaaggaggugucuuagcuugacuugccccagaauugcugcuggggagucccagcugcccca

SEQ ID NO: 4170370 - RNA, 63 nt, Human
ugggguccauccccagggggcugcuccuuggaucuggagcuggccacuggagguggcacccca

SEQ ID NO: 4170371 - RNA, 66 nt, Human
uggggucuggucaucggaaagaucaaagcaugaugagaugguuggagcuuucagugccacccucca

SEQ ID NO: 4170372 - RNA, 90 nt, Human
ugggguggagaguucuguagaugucuauuaggucugcuuggugcagagcugaguucaauuccuggauauccuuguuaacuuucugucuca

SEQ ID NO: 4170373 - RNA, 126 nt, Human
ugggguggccugagacuucagagcacaaaucacaucucugagggcguccuuuagggugaugacuacauuaaccacagagcccccucagauggcuguguugguuugaagaagucagaguccaugcua

SEQ ID NO: 4170374 - RNA, 100 nt, Human
uggggugguguggaggguucagaaggugcagccugggccccccaugacauucccugcugggggcgccaggccugcucucuuuaccucuagcagagccuca

SEQ ID NO: 4170375 - RNA, 77 nt, Human
ugggguguccauguuuguugcaugucccaggguaugugcauguggagucugacaugugagcaagcgugcggccccug

SEQ ID NO: 4170376 - RNA, 70 nt, Human
ugggguugguggggaggaagcucucaguuccaagucuuuacuuggcacagaccuuaucuucucugcccca

SEQ ID NO: 4170377 - RNA, 69 nt, Human
ugggguuuuucuucaauugcuaacaaggaagaaugcaguaucuucuuuaucaggugaagagggacucca

SEQ ID NO: 4170378 - RNA, 81 nt, Human
uggguaagaugcuuuucuagaaacauuaucucuauaaaguuuucuguguaaggugaauuucugggagguuaaucuggcuca

SEQ ID NO: 4170379 - RNA, 93 nt, Human
uggguacaucaaaucagcuugcaaauaggggacaacucuuugcugcuuaucccucuuccucagcacagaccuauggcagcugccaugaaccua

SEQ ID NO: 4170380 - RNA, 62 nt, Human
uggguacccccuucugugucuguccacagucccugugucuuuccuacaggaagggguucucg

SEQ ID NO: 4170381 - RNA, 59 nt, Human
uggguagagugcugacaaugccugcuccuggcugggguacaugugucaguucucaccca

SEQ ID NO: 4170382 - RNA, 130 nt, Human
uggguaguggagagaaggaagaggagugaccugguuuugauuaguuaauucagauuagggaguaaauucugauuucacagcugcuguucagguucaauggcacuaccaauuuuuccauuuccaguuccca

SEQ ID NO: 4170383 - RNA, 83 nt, Human
uggguauagaguuucaguuuugcaagaucaaaauaauucuggagaaggauugcagugaugguugcauaauaugaauguacuua

SEQ ID NO: 4170384 - RNA, 75 nt, Human
uggguauauccugcucacagcgugaugaauguagcguuaucaucaguaauguaauuauuaacaccugugcuccca

SEQ ID NO: 4170385 - RNA, 112 nt, Human
uggguccaacauuguuuucuuugaagaucacauguugcucuucucuuuuugguggacgccagagucuuccgggggacagugacuucaagugacuuagagacaaucagaucca

SEQ ID NO: 4170386 - RNA, 74 nt, Human
ugggucggugcaaaaguaaucacaguuuuuagcauuauaauggcaaaaacugcgauuacuuuugcaacaaccca

SEQ ID NO: 4170387 - RNA, 71 nt, Human
ugggucuaaauuuagaguguucacucugagcugauguaauaagcucaaagaauauucagaaugaagaaaca

SEQ ID NO: 4170388 - RNA, 66 nt, Human
ugggucucugugcccccauuuccguuucagagcuguugggcuuaugugugggaggucagagagcca

SEQ ID NO: 4170389 - RNA, 65 nt, Human
ugggucucuuuuauggugaguugaucuuugagugagaggacacacuugcagagaggagggacuua

SEQ ID NO: 4170390 - RNA, 86 nt, Human
ugggucugaagacugcugagaaguuacucccaagacuuugcucuucuucugguaauuuaaucuucuuagcucuucuucauaauuca

SEQ ID NO: 4170391 - RNA, 70 nt, Human
ugggucugucaaaaguuuucaauaaacuaccuuuucugaacccaguuuauuuugaaacaugauaagccca

SEQ ID NO: 4170392 - RNA, 55 nt, Human
ugggugaaaauuuugguggcacucuuaucccagaguuagccagucuucucaucua

SEQ ID NO: 4170393 - RNA, 61 nt, Human
ugggugaaucaaugaauugcacuucaacagcaaaauuggauuguauugauugguuggcuca

SEQ ID NO: 4170394 - RNA, 70 nt, Human
ugggugagaaaaaugaguaugauuuugaggaagaacugguaugcccauaauuuugcacuuuucucaucua

SEQ ID NO: 4170395 - RNA, 62 nt, Human
ugggugcaagaaggggagacuggguacaaaagcuugagcucauuucuguuucuugcaacuua

SEQ ID NO: 4170396 - RNA, 59 nt, Human
ugggugcaggaaaauuaccuggaguacuggcaggugcccagaagugauccugcaugcua

SEQ ID NO: 4170397 - RNA, 81 nt, Human
uggguggcagagggagagaaggaggaggauuugacccauuuacguuaaaucucaugagcuucuugucccaacaauuaccca

SEQ ID NO: 4170398 - RNA, 58 nt, Human
uggguggcauguuuaugucagaauagauguggucuauuuuuccuggaacagucaccca

SEQ ID NO: 4170399 - RNA, 72 nt, Human
uggguguggcaguuccgcacugaccucggugcauuccugcucuggagucuagcaugggaaaaucacagccca

SEQ ID NO: 4170400 - RNA, 66 nt, Human
uggguuaggcagugugguauagcagauaugugguuaacaucauugcugugucauuuguuuaaucug

SEQ ID NO: 4170401 - RNA, 57 nt, Human
uggguuagggccuggucucugagaagucacuucuuccuggaacuuggccuuuaccca

SEQ ID NO: 4170402 - RNA, 102 nt, Human
uggguugagggguacagcuggcaggggggcaugaauaacuuuugaacacaucuauacaaguuacuuuaagccacaagccccgcucauugcugccucaaccca

SEQ ID NO: 4170403 - RNA, 57 nt, Human
uggguuggucagcauaagauggccaggaagguggaaaucaggacugcuggcaaucua

SEQ ID NO: 4170404 - RNA, 70 nt, Human
uggguuguagcacuggaugggcugguacauggaguagaaucaguccuuggcauuuaggagcuacaagcca

SEQ ID NO: 4170405 - RNA, 62 nt, Human
uggguuucuugauuagcuguggcucagcugaguuuggcugggcuuagguucaagugggcuua

SEQ ID NO: 4170406 - RNA, 81 nt, Human
ugguaaacauuuauuuucagcugggaaaucugcuauuaauucauauagugacuuucccagcugaaauaaugagucaagcca

SEQ ID NO: 4170407 - RNA, 70 nt, Human
ugguaacaggaugauaaaggauggccaaggauaaaccuuaacuuuuggucaaaccaguuaucuguaauca

SEQ ID NO: 4170408 - RNA, 109 nt, Human
ugguaagcucagcacacauaacugaauuucucuuuuuacguuuuugcaccucagccuguccaauugugcaaagaaggggaggaggauuaaauaugcaacugaguagcca

SEQ ID NO: 4170409 - RNA, 59 nt, Human
ugguaaggcccagcuggaguccuuuaaucacaggauucaagaggggaugggccuuagca

SEQ ID NO: 4170410 - RNA, 55 nt, Human
ugguacauggguagguaucucuucuugacuagaagacaauccuacaaauguggca

SEQ ID NO: 4170411 - RNA, 58 nt, Human
ugguaccagcuucuuuggguuucuucgguagcaggguggagucagguggcuggugcca

SEQ ID NO: 4170412 - RNA, 130 nt, Human
ugguaccagggaaaaauaaaugucuuaauguguucuucauguauuuugaugugccauagguauguauagaagcuaagcauuucacaguauauucaaaauuuuugcagaaggcauuuuuucuguggugcua

SEQ ID NO: 4170413 - RNA, 130 nt, Human
uggggccaugucuagaugcucacucugaauggggcaggcccagagcucugggggagcuagaguccuugcuugucggccugcuaggcucugggguacugccucccaguguuccggagugucacaggccuca

SEQ ID NO: 4170414 - RNA, 76 nt, Human
uggggccgagugaguggagacucaucacguccagccuccuggaggcugccugggagcccuccucuuccucgcccca

SEQ ID NO: 4170415 - RNA, 99 nt, Human
uggggccugcaggggacagagccugguggacacugggcaucauggaacugcccagcugauggccuuuuucaccaggcuccaguccugccucuagcccca

SEQ ID NO: 4170416 - RNA, 57 nt, Human
uggggccugugacggguccagagucacagagcuacggaucagcuucacugggcccca

SEQ ID NO: 4170417 - RNA, 80 nt, Human
uggggccuugcaacucuaaauguggucugcagauaugcaguguccguguugaugaccacaauuuaugcugccagucccca

SEQ ID NO: 4170418 - RNA, 80 nt, Human
uggggccuuuaagagcugauuaagucaugaggguugagcccuuaugaaugggauuaguucccuuauaaaagaggccucca

SEQ ID NO: 4170419 - RNA, 63 nt, Human
uggggcucaccuaggcuggaagcaucaagaaguacacgugguugagaucugggugaugcccca

SEQ ID NO: 4170420 - RNA, 116 nt, Human
uggggcucugccacucugcuuuauuggaacggcuccgcgucugagagcacagcaggcucaacccugcuucagaguggaggccggaccaggcuggugggugaccagcaggacucacg

SEQ ID NO: 4170421 - RNA, 77 nt, Human
uggggcuggggaaagggauggcucccgccucggggcagcaugggcuggcuggggaagccucgcuuuucccggaccca

SEQ ID NO: 4170422 - RNA, 76 nt, Human
ugggggaaugcaaggguuuggcuggagaggucuagcccuuauguauacuccagacagaucuucuagcagguccuua

SEQ ID NO: 4170423 - RNA, 56 nt, Human
ugggggcuaaaacaaguuugcuuagcuauagcuacagcuugccaauuagccuuccg

SEQ ID NO: 4170424 - RNA, 71 nt, Human
ugggggcugcuaaagcuguucagugcagaaaggaaaucuuuuccucugaacagacuuuaaauaugucccca

SEQ ID NO: 4170425 - RNA, 72 nt, Human
ugggggcuucacccuccccuacaagcagcccuuaaccaaugagugacaggggcugguggauaaaugucccca

SEQ ID NO: 4170426 - RNA, 63 nt, Human
uggggggagagugcuacuggcaucuagugguuagaggccagggaugcugcugcacauccugca

SEQ ID NO: 4170427 - RNA, 56 nt, Human
uggggggauacuugcuacuggcauucaaugggcagguggcagaguugucccaccca

SEQ ID NO: 4170428 - RNA, 84 nt, Human
uggggggccuugggccugcacacuuaagcuugcugcuaucccacggagggcagcuggaagguggcuucccuggggcccagccca

SEQ ID NO: 4170429 - RNA, 75 nt, Human
ugggggucaggcuaugccaugugagcccugcugcauucuacaugccucccagccacuggcaaagccuguuccuua

SEQ ID NO: 4170430 - RNA, 75 nt, Human
uggggguuccgcuguacuucccguaucacccuccaaaccccacaugacacagggcaugcagcagaacccaaccca

SEQ ID NO: 4170431 - RNA, 65 nt, Human
uggggguugcuggcauuccuuggcuuguggcuguaucaugccagucuucaaggccagcaucuuca

SEQ ID NO: 4170432 - RNA, 70 nt, Human
ugggguaacaucuuuuacucugguucggguuuaaaagaauccaggugacagagacaggauaccugcccua

SEQ ID NO: 4170433 - RNA, 90 nt, Human
ugggguaagcacaagacuguggccugcuguaugggcucagccuguaguuggggccccaggaaggucaggccgcuccugcagcuaacccca

SEQ ID NO: 4170434 - RNA, 55 nt, Human
ugggguagggaaaagaagucgaguccugauggccaucuucuuuccucugcaccca

SEQ ID NO: 4170435 - RNA, 67 nt, Human
ugggguaugugcuguuucuuugugcccagguagcccccuguacuuccccaaugacagcacuauucca

SEQ ID NO: 4170436 - RNA, 91 nt, Human
uggggucagauuccucugugaugggcucugcagcugagugccccucccucacagcaucaucucagggcgacaucaugugggaucugcccua

SEQ ID NO: 4170437 - RNA, 58 nt, Human
uggggucaguagcaaauacagcugguugaagccaugucaugaaaugcuacuaacucca

SEQ ID NO: 4170438 - RNA, 130 nt, Human
ugggguccucagcuacugcagauucucccucgucccgggccaggaagcgccacucggugaucugcagcauggccucccgggccuggcugauggugaauggaaugcacugcggaggcgagagaggaucuca

SEQ ID NO: 4170439 - RNA, 100 nt, Human
uggggugaaugccaauggaauauuaugaucgugacucaaggauuaguuuccacaguggagucugauucauagccuacauauuccacuaacugguaccgua

SEQ ID NO: 4170440 - RNA, 76 nt, Human
ugggguggccucuggaagcugaaaaaaagcaaggaaacagauucuccuuuacagccuccagaaggaacaagcccua

SEQ ID NO: 4170441 - RNA, 67 nt, Human
uggggugggacucuuuggccugagcacuaaaucugaucuauugcuugaugucaucuggcccauccca

SEQ ID NO: 4170442 - RNA, 57 nt, Human
ugggguuugccaacucuuguccaggaaccuauugggcuagaguggaggggaacugca

SEQ ID NO: 4170443 - RNA, 94 nt, Human
ugggguuuuuuuguguguggugacaggacguacaggcaauucuuucuuucauguguuugccuucuggcaucacucgcaagagcacuuagcccca

SEQ ID NO: 4170444 - RNA, 71 nt, Human
uggguaacugcagaaugugccucagaauuguccacuugagauggagcuggggagaguacuguauuuaucca

SEQ ID NO: 4170445 - RNA, 65 nt, Human
uggguaaguaacuggcuggauuuagggggcuacagaaggccacugaacauuagagcuagugccua

SEQ ID NO: 4170446 - RNA, 56 nt, Human
uggguaccuugugagggaggagaugaaauucuaaguccagcucucauaguguucca

SEQ ID NO: 4170447 - RNA, 130 nt, Human
uggguacggauaaucuuuguucuuaaauaagguuuagacagcagagaacuuuagaggguggcuguuagcccguuagccuuacguaagacuuugcugugaaccuuuuaaaguuuuuaauucuucuggcaca

SEQ ID NO: 4170448 - RNA, 64 nt, Human
uggguagacauuuggcaugguuuucaaagccuccuuuuuagagccaguuacaaggucaagccca

SEQ ID NO: 4170449 - RNA, 63 nt, Human
uggguauacauagguaacaacaugguuaugcaauuuuuauguaugcuugaguguguauacuca

SEQ ID NO: 4170450 - RNA, 72 nt, Human
uggguauauugcaugaugcucaaguuuggaguauagauggucccaucacccagauagugagcauaguaccca

SEQ ID NO: 4170451 - RNA, 103 nt, Human
uggguaugauuuuccuggaaaugcauguaacaguguuaugaacucauucuuaaaagaguucaugccuuuugauguaauaauuuuacuucuaggaauauauuca

SEQ ID NO: 4170452 - RNA, 76 nt, Human
ugggucacacguuaacaaugguuuccauuggaguacuuuuauuugagaaauucuaguguuuccauuacaagaccua

SEQ ID NO: 4170453 - RNA, 110 nt, Human
ugggucauguaauuguagcgaggugacagaguuuuagaucucauaagcaagucauuuaaauugugugagccucagauucuucaucucuaaaacagagaaaauaauaccua

SEQ ID NO: 4170454 - RNA, 67 nt, Human
ugggucccucaggaaacagaaaucuuauuguuugguagaaaacaucuuuuuguuugcugaaauccua

SEQ ID NO: 4170455 - RNA, 59 nt, Human
uggguccucuggagcagcagcaggacuauuugucuuuugaaaaugccccagcaggccca

SEQ ID NO: 4170456 - RNA, 79 nt, Human
ugggucucgugggcuugggacagcaacgguucuguuuagucagcuggugcaggugguuggcccagccgaugagaacuca

SEQ ID NO: 4170457 - RNA, 79 nt, Human
ugggucugcagcagggccugcuucuucagggcugccucgacccuucucucugccagcugcaggcccaugcucaguccca

SEQ ID NO: 4170458 - RNA, 70 nt, Human
ugggucugguuuccauuuggagcucgcagccuggcacccagcuugacagacagaugguagcaaaggccca

SEQ ID NO: 4170459 - RNA, 100 nt, Human
ugggucuuuccauggcuaacugcugugacagcugccguguuaagaauggcaggagccucuaaacagcaagcuguccagugaaaggaggugggaaggucca

SEQ ID NO: 4170460 - RNA, 70 nt, Human
ugggugaaucuugugcuggaaaagguuccugaaaggaagccccugucaucuuguccagccaggcaacuca

SEQ ID NO: 4170461 - RNA, 60 nt, Human
ugggugacuuauauugagcccagcccugguuaaguugcaaagagucauguaagucaccca

SEQ ID NO: 4170462 - RNA, 57 nt, Human
ugggugagcggggcugggcaccaggccccucuggugcuggcuuuuaucuggucccua

SEQ ID NO: 4170463 - RNA, 62 nt, Human
ugggugaugcaugccauagaacuugaaagaacucuuccaggcaguucucgugugugucccca

SEQ ID NO: 4170464 - RNA, 58 nt, Human
ugggugcaggacgccuccgcuccacgccugggugggcuggagacaacguccugcccca

SEQ ID NO: 4170465 - RNA, 79 nt, Human
ugggugcgcucaccuuguccugcagccucucuuccccuuggugguggggaaggcggugcuguggacagugacuaacuca

SEQ ID NO: 4170466 - RNA, 78 nt, Human
uggguggcagaagaguaggaugggcacacgcauuuuuaucauaucugcuuaccugacugcccuuucuucuuccaucua

SEQ ID NO: 4170467 - RNA, 57 nt, Human
ugggugggaaugggcacacacucccugagccccauuguuuaaggccauuuccaccca

SEQ ID NO: 4170468 - RNA, 90 nt, Human
ugggugggaugaaggaaagacauauaaaugacuucuuucugcuguggagucaaaacauguacuuuccuuaaccucauuuacacccaccua

SEQ ID NO: 4170469 - RNA, 58 nt, Human
ugcuguuuucccauagcuggucauucucuguuuggcugaaugcuaaaggaaaacagua

SEQ ID NO: 4170470 - RNA, 68 nt, Human
ugcuuaaaauugagaguuauagaugguuucaucuuuagaccgugucuuccaugaccucaauuaccgca

SEQ ID NO: 4170471 - RNA, 56 nt, Human
ugcuuaaacauccagacaguaugauguuuucuaagcaucuaucugaugauugagca

SEQ ID NO: 4170472 - RNA, 77 nt, Human
ugcuuaaguguugaucucugacuuguuuuccaaauaauggucauuuuuucaugguucaaucaguuggcauuugagca

SEQ ID NO: 4170473 - RNA, 85 nt, Human
ugcuuaauauguguuauccacuguaauaucauuguggugaggguguaaauaagaucaggcguggaaaacacugaacacuuaagua

SEQ ID NO: 4170474 - RNA, 103 nt, Human
ugcuuacaauauaaagcuuauucugucagaucuuacuggauaguuuacuuuuuaacauugagaauauugugacagugugagugugcguguguuucuguaugca

SEQ ID NO: 4170475 - RNA, 60 nt, Human
ugcuuagucuauugugugcccagcuguuauccauugccucacacaguagcaauuagugca

SEQ ID NO: 4170476 - RNA, 64 nt, Human
ugcuuagugagugucuaccaugugccaggcaccguguuagguguugggaguacaaucaugagca

SEQ ID NO: 4170477 - RNA, 55 nt, Human
ugcuuauuaacauguauaucucauauaugugugggagaaacucugggaaugagca

SEQ ID NO: 4170478 - RNA, 83 nt, Human
ugcuuauucugucucauugucaggcuucacuugaugucaaagaacaugaagugaagaaauacaugagaauuuucaggaaggua

SEQ ID NO: 4170479 - RNA, 76 nt, Human
ugcuuauuugaauuuauucucauaaggggauuuuagauggcauaguuuagaaaagagagaaugaauuuaaguagca

SEQ ID NO: 4170480 - RNA, 109 nt, Human
ugcuuauuugaguaguaggaaguaaacagauaagaaaucugaauaauccauaaugcaaacuauucccugaugccaucuguguguuuacuauuuaucauuugaagcugca

SEQ ID NO: 4170481 - RNA, 62 nt, Human
ugcuuauuuggcaaauaugguuggcacugcuagauguugaaaaacauguaugcaaauaagca

SEQ ID NO: 4170482 - RNA, 61 nt, Human
ugcuucaagccgcuuucugcagauuccuauuaucuuuaccucugcucaguggcuaaaagca

SEQ ID NO: 4170483 - RNA, 59 nt, Human
ugcuucauggaacuguauaaaggcacuugcuacauaggcuaguggcagaucuggaagua

SEQ ID NO: 4170484 - RNA, 62 nt, Human
ugcuuccaauggaaucaugucuugauaacuacuguuaagcaacaagaaucccauuggcccca

SEQ ID NO: 4170485 - RNA, 73 nt, Human
ugcuuccugaucaacuuguuccucagugacaccaaacaucaaugacucaggaacauaaugugagucaggagca

SEQ ID NO: 4170486 - RNA, 97 nt, Human
ugcuuccugccuguuuuuguugcagagaggccacuuucgcuuuuuaguauuauuuagucuaagucgcacuguuuagcaauaagacaggcacguugca

SEQ ID NO: 4170487 - RNA, 56 nt, Human
ugacucauucccauccaggaggaaauaauucagccucuggaggagaggaaaaguca

SEQ ID NO: 4170488 - RNA, 86 nt, Human
ugacuccagcuuagcuguuuuugucugcugauccugguuguugagcuuguggacacugacagacagaaagggaccugcugguguca

SEQ ID NO: 4170489 - RNA, 58 nt, Human
ugacucuacacuguagaauuauaaggaccucaagccuuggcaagacaguggaggguca

SEQ ID NO: 4170490 - RNA, 66 nt, Human
ugacucuccuugcauuuccagguuaccuuuuggggaggaauguggcaaucuucaaguuauggguca

SEQ ID NO: 4170491 - RNA, 81 nt, Human
ugacucugagaggaggaggagaagguuucagagaaggguaguugaauggcuggccuggacuuucauuuccccuugggguca

SEQ ID NO: 4170492 - RNA, 67 nt, Human
ugacucuguuuccuugcuuccugccuucugaggauuugaagacagugcccaaaggaacagaaaguca

SEQ ID NO: 4170493 - RNA, 56 nt, Human
ugacugaaccugauccaauauuuacuccuggaaagagggcaaaggggcagguguca

SEQ ID NO: 4170494 - RNA, 73 nt, Human
ugacugccuccccagcauggcuugaguguuuccuggauguguccaggcggguaucacaugcuggguggcauca

SEQ ID NO: 4170495 - RNA, 67 nt, Human
ugacuggauccugugccccagaaccagcccuuuccuugaagcaugucugggcagagggucuuaguca

SEQ ID NO: 4170496 - RNA, 111 nt, Human
ugacuggccugguguauauggcaggggcuuuaugagccuugugaaggaguguggcauuucuucugaaguguuuauucugggaguuccugucuccugccugaaaggccuuca

SEQ ID NO: 4170497 - RNA, 77 nt, Human
ugacuguggccgggugcucgaggucagcaucacaacagggaaacaucauguuggcagcggggacccuggcuguggca

SEQ ID NO: 4170498 - RNA, 69 nt, Human
ugacuuagcuuguuuucaccuaagacucugagauucuauucuguuuaugugagauuugggcugaguuca

SEQ ID NO: 4170499 - RNA, 79 nt, Human
ugacuuaguuuccuguggugugaaguuauaugaauuaaaucauauagucuaugaaaaacaccuaggauaacuuuuguua

SEQ ID NO: 4170500 - RNA, 98 nt, Human
ugacuucaucugccucagaagccacaggaaagcagcuucgucauccuaaacugaaugucuuuuaaccucuggacuucaacuggcaaagacuggaguua

SEQ ID NO: 4170501 - RNA, 94 nt, Human
ugacuucucgugagggcucuugcuacugaaguccugguuucuguccuuaucacuauaguauuccagggcagccagguucaaguccuuauaguca

SEQ ID NO: 4170502 - RNA, 61 nt, Human
ugacuugaaucaggcauuucaaguuaauccaaaaguuugaguuaacuggugccuucaguca

SEQ ID NO: 4170503 - RNA, 67 nt, Human
ugacuugcgccaggcuggagccaaccaaggcuugguuuggguggcugucagcugccuggugcgagca

SEQ ID NO: 4170504 - RNA, 72 nt, Human
ugacuugcuguagagaccacccauaggccccugucccuaagggcaguguugugguucucuauguaucaguca

SEQ ID NO: 4170505 - RNA, 65 nt, Human
ugacuuggagacuggugcagauaggcuuuuccauccaucccucccucugcaccuccuuccaauca

SEQ ID NO: 4170506 - RNA, 63 nt, Human
ugacuuucuccagaaaaccaaggaacaguccagacacggcaucuaaggugguuuggaggguca

SEQ ID NO: 4170507 - RNA, 75 nt, Human
ugacuuucuucaguagcucaagaaauuuuuauuaauuuggaaaaauguucuuaagaggguuaagugaagaaagca

SEQ ID NO: 4170508 - RNA, 129 nt, Human
ugacuuuuauguugaaagggcaaauaucauugagagcuuuagcgcacaucacagggggaacuaggagaauuuggaacucuuuccaccugugcugugguugucucccuaccucuauguccauuggcugca

SEQ ID NO: 4170509 - RNA, 128 nt, Human
ugacuuuuccaaguuuugguucaaguucaauaaagacauaaaacaagugggucagguuccaggaaaaacauaaucauuuguacuugugugcuuguauuuaaaucaaugaacuaggagcggggagguga

SEQ ID NO: 4170510 - RNA, 76 nt, Human
ugagaaaaauauucaagagauaauguuaagugcaaaaauagcauaagugagcaaaucuaugaauguauauuucuca

SEQ ID NO: 4170511 - RNA, 112 nt, Human
ugagaaaacaucuaguauguuaugaucagcuauuccugagagcuugguuguuaaucuauauuucuauuucuuagugguagucaucuuugaugaauaagacuaaagauucuca

SEQ ID NO: 4170512 - RNA, 57 nt, Human
ugagaaaaguguggaggucaauaguuaagcugcaauugcuccauuaaaguuuucuca

SEQ ID NO: 4170513 - RNA, 75 nt, Human
ugagaacagugaagcuuguuuggaucaggaaaaugcacuuuacauguacaagguaaauuagcuucaaguucugca

SEQ ID NO: 4170514 - RNA, 130 nt, Human
ugagaacauacaggaggcugaaaggauucuuuagggaggcuuuuuaguggccucauucucuaauaccuauggacagcaacuggaagcuucaaagaagaaggaugaacuuucaccuuccuguucuguucca

SEQ ID NO: 4170515 - RNA, 56 nt, Human
ugagaacggauacuaagggcugggaagaaugcccaguucugaccuaaccuuucuca

SEQ ID NO: 4170516 - RNA, 75 nt, Human
ugagaagagagggguugcauggaaauuaugucacaagaaugcuuggucaauuuucauugcauucagcucuauuca

SEQ ID NO: 4170517 - RNA, 61 nt, Human
ugagaagcuaauuguauggaggugccauuugguaucuuacacgauaacuguuaguauuuca

SEQ ID NO: 4170518 - RNA, 59 nt, Human
ugagaagcucugaaacaguaucuugguuuaggaacuugcagaaucagagcaguuucuca

SEQ ID NO: 4170519 - RNA, 63 nt, Human
ugagaaggguuggagaaauaaugagaaaugcaaacuugacccagaguuucuccuuccaucuca

SEQ ID NO: 4170520 - RNA, 93 nt, Human
ugagaaucuaacuaagcccgaugaucugagguacaugaaacuguuccaccucaguucauguuaguuagauucaucaccuuaguuagauucuca

SEQ ID NO: 4170521 - RNA, 77 nt, Human
ugagaaugaugagaaugagaagggagagcauauuuauuaagcauauauuauguacuaacuuucauucuagguuuuua

SEQ ID NO: 4170522 - RNA, 103 nt, Human
ugagaauggcauauuuacauuauuuagugcugauucuagauuaaaacacugaaaaauguacauagaggguaauagcaucaagaagguaaauguguuccuauua

SEQ ID NO: 4170523 - RNA, 100 nt, Human
ugagacaaagucucguucugucaccaggcuagagugcaguggcgcaaucucgacucauugcaaccucugccuucuggguucaagcgauucuucugccuca

SEQ ID NO: 4170524 - RNA, 129 nt, Human
ugagacaaguaaaggcaggccgggcucacaguagacaucauguaaguaguggcuagcacccucauccugcccucgucauugucuugauaugauugucaucuuguugcuucucccuccuucaacaucuca

SEQ ID NO: 4170525 - RNA, 79 nt, Human
ugagacaccugagcucacuggugaacucugcuuccaaguacuccugcaaagcacauuacaagcucaguccauguucuca

SEQ ID NO: 4170526 - RNA, 101 nt, Human
ugagacagagucuugcucuaucacccaggcuggagugcaguggcgcaaccuuggcucacugcaaccucugccucccggguucaagcgauucuccugccuca

SEQ ID NO: 4170527 - RNA, 56 nt, Human
ugagacagcagucagggaaauaugacaucgaaguuuuguuaugacugcuugucuca

SEQ ID NO: 4170528 - RNA, 102 nt, Human
ugagacaggagaaucacuugaacccaggaggcggagguugcagugagccgagaucgcaucauugcacuccagccuuggcaacaagagugaaacuccgucuua

SEQ ID NO: 4170529 - RNA, 102 nt, Human
ugagacaggagaaucgcuugaaccugggagguagagguugcggugagccaagauugugccauugcacucuagccugggugacaagagcgaaacucugucuca

SEQ ID NO: 4170530 - RNA, 101 nt, Human
ugagacaggagaauuacuugaauccaggaggcggagguuguggugagccgagauuacaccacugcacuccagccugggugacagagugagacuccuucuca

SEQ ID NO: 4170531 - RNA, 118 nt, Human
ugguggagaauggguuaggaaucauguagacaugggagaccuacauuaugaaacauagaaaaauaucauauuagacacuuauguccacuggacuucuuucuuagccucacuucuacca

SEQ ID NO: 4170532 - RNA, 72 nt, Human
ugguggauuuucucucaaaccuuaaaaugcucucaauuaaaaaacauuuccagagagagaggaaaauugcca

SEQ ID NO: 4170533 - RNA, 60 nt, Human
ugguggcagagcaagagcuggagugauaucaccugucuccagcuuuugacaaaaccacua

SEQ ID NO: 4170534 - RNA, 104 nt, Human
ugguggcaguugcagcacaguggcccugguggaagccugggcucagaccucacauaccuagauuugaguucuggcuccauggucagaauuuuguaacuucauca

SEQ ID NO: 4170535 - RNA, 121 nt, Human
ugguggccaccucucucuugccuucucugccagagggcacugggcugccuggucccaggguggggcugcagagcuggugcccuggccuggccgauggguggcuggaguguuggagccacca

SEQ ID NO: 4170536 - RNA, 64 nt, Human
ugguggcccagaauaaagaauacauuucucaucuagguguggacauguguuaaaauucucacca

SEQ ID NO: 4170537 - RNA, 94 nt, Human
ugguggcuauuaacugcucuaauugugcuguaggcucguuaacaaguuuguugaaguugcacauuauaauuuuaaaggaguuaauugaauacua

SEQ ID NO: 4170538 - RNA, 94 nt, Human
uggugggaagugccggcuggguugggguuacaugacugcuauccucaaugcaguccuggccagccuccugcccaucaucagcuggccccacaca

SEQ ID NO: 4170539 - RNA, 73 nt, Human
uggugggagaucagauaagcaaguaucgagagauugaaauuuaaugauuacaauugucuuagauuucucauca

SEQ ID NO: 4170540 - RNA, 75 nt, Human
ugguggugcgggguguagggguagcgggggauuauauaguucccagcuccuuguuugcaucuccuucucauacca

SEQ ID NO: 4170541 - RNA, 85 nt, Human
uggugguggggugaaggaagauucuguuggaaucuuuauaagcucaaauaucuggcacuuauagaauuuuccuacuuggcuacca

SEQ ID NO: 4170542 - RNA, 55 nt, Human
ugguguaaucaguuucuagcucuaaaauuuguugaauagauacugaugaacucca

SEQ ID NO: 4170543 - RNA, 72 nt, Human
ugguguacaagaguuggaauaaaaguuucuggcaaacugucguuuugcuuuuauguaauaaacuguacacca

SEQ ID NO: 4170544 - RNA, 76 nt, Human
uggugucuuccauauuucugcuuaggacucuguggaccaugaguguauaaacuuaagcaggaaccuaggagagcua

SEQ ID NO: 4170545 - RNA, 68 nt, Human
uggugugggcuugcuuauuuucuccaaugucaaugcugugcuugggggaaguaacagacacacacaca

SEQ ID NO: 4170546 - RNA, 73 nt, Human
ugguguguaugaaagaacaagggcuuaaaacuagaaaucuggacguaagucuuaguuuugccauuauuugcca

SEQ ID NO: 4170547 - RNA, 65 nt, Human
ugguguuaaccagcuaaacuuugcuugaacccucaguccauugcagaggagcaagcuggacacca

SEQ ID NO: 4170548 - RNA, 64 nt, Human
ugguguuaauucagaucauauuuauagcuuucuuugguaagcugcauuugagucugaauaccca

SEQ ID NO: 4170549 - RNA, 95 nt, Human
ugguguugggcaggaagaagaaaggggcaaggcaccuccuuaugugagugcucaugcugagguuguuguccuauuuuaauguucauccaacucca

SEQ ID NO: 4170550 - RNA, 91 nt, Human
ugguguuguuauacaagcucuugaguaaacuaguuuuccagcaaacuguguuaaaacacuaguggauuucugggcuuacaggacaauauca

SEQ ID NO: 4170551 - RNA, 69 nt, Human
ugguguuuguaccaaggcugugucucccauggguagcuccuggcaaggaagagccuggugcagacacua

SEQ ID NO: 4170552 - RNA, 97 nt, Human
ugguuaaauucugugaacuagcagaucuaugcuuuagaaacaacugugauaacuuuccuuucugaugcaugggucucuguuuuccaccacggagcca

SEQ ID NO: 4170553 - RNA, 61 nt, Human
ugguuacagagggaucagaaguguaaauuauacuaauuuuauagcaagcucuuuguaacca

SEQ ID NO: 4170554 - RNA, 82 nt, Human
ugguuaggugcugacauguauaagcuuuaaguaaauggaacguccacuuguauuuuauugcuugucacaaacccucaaacca

SEQ ID NO: 4170555 - RNA, 100 nt, Human
ugguuaugauucuaguccauacauagcuuuagaagacacucuguuuuuaggaucgcuugagcccaggaguuugaggcugcagugagcuaugaucaugcca

SEQ ID NO: 4170556 - RNA, 80 nt, Human
ugguuauguaaaauuaagauguucccauuuaauuuuuaacaaucaaaacaguuaaugagcauuuuggaauguacaagcca

SEQ ID NO: 4170557 - RNA, 85 nt, Human
uauuaacuuuugaucagugugguaugucuucuuucuaaaguuauuuacauucuuugcagaaaucaagaugaaucaaagguuaaua

SEQ ID NO: 4170558 - RNA, 100 nt, Human
uauuaauuuaagaaccauuacuauguuacucguuuggauguuucauggcacugcaugaaacauucauaugagaaaccuaguaaugguucuuaaauuaaug

SEQ ID NO: 4170559 - RNA, 76 nt, Human
uauuagauuggugcagaaguaauugcgguuacuuuuuaauugcaaaaaucacaauuacuuuugcaccaacauaaua

SEQ ID NO: 4170560 - RNA, 111 nt, Human
uauuagcacguaaccuugggggagucacaaagccuuucuuauugucaaucuuuucauuuguacaaugaggauauuuguagaauuagacaaccucuaguuuaauggcuaaug

SEQ ID NO: 4170561 - RNA, 64 nt, Human
uauuagcuccaguacuguugccaugccauucacucuaggcugcaguuuucuaacagagcuaaua

SEQ ID NO: 4170562 - RNA, 84 nt, Human
uauuaggcugaacuacaugaaguugccgcuuuauagaacaaaaauggucuaaauauuggcaauuucauaugguucaagcuaaua

SEQ ID NO: 4170563 - RNA, 63 nt, Human
uauuagguaggugcaauuaaaaguaguggcaaaaacugcaauuacuuuugcaucaaucuaaua

SEQ ID NO: 4170564 - RNA, 83 nt, Human
uauuagguugaacucuguaauucuauaugcaguuaacaauucugucuuacguaaucagggaguuagagauucuguuucuagua

SEQ ID NO: 4170565 - RNA, 84 nt, Human
uauuagguuggugcaaaaguaauuguggguuuugccauuacuuaaaauggugaaaaccacaauuacuuuugcaccaaacuaaua

SEQ ID NO: 4170566 - RNA, 84 nt, Human
uauuagguuggugcaaaagucauugcagcuuuugccauuauuuucaauggcaaaagcugcaaugacuuuugcaccaaccuaaua

SEQ ID NO: 4170567 - RNA, 63 nt, Human
uauuagguuggugcaaaauuaauuguggcuuuuaauggcaauuacuuuugcaccaacauagua

SEQ ID NO: 4170568 - RNA, 59 nt, Human
uauuagguuguugcaaaaguaauugugguuuuugccauuacuuuugugacaaccuaaua

SEQ ID NO: 4170569 - RNA, 65 nt, Human
uauuaucagcaaugguucauguguuggguccagggaagccauuuccagcagccauucuaguagua

SEQ ID NO: 4170570 - RNA, 57 nt, Human
uauuaugaucccagcccuggagagaaagggcacuuuacaguuuuggugaugaugaug

SEQ ID NO: 4170571 - RNA, 65 nt, Human
uauuaugggccuagugcaguuaaauugccugacacaguagggaaucuauacuuaggcugguaaua

SEQ ID NO: 4170572 - RNA, 98 nt, Human
uauuauggugacuuuguuuuaaaugugucuuuauuuucaauauaucacugcacuagagauaacuacacuuaagacaacccacuuuaggucacugaaua

SEQ ID NO: 4170573 - RNA, 59 nt, Human
uauuauugaaucaguucuuugacaauagcacuucuguuuauaguacugauucuguagua

SEQ ID NO: 4170574 - RNA, 96 nt, Human
uauuauuguuaguguuauuaaauuagauuauguauguuaguauucacccugaugccuggcacaugguuaaucauaauuccagucacuaauagaaua

SEQ ID NO: 4170575 - RNA, 77 nt, Human
uauucacaagaguuucacugcaaacugacuuuucagggcaaauucaccacccaaaagucuguagugaaaggugaaug

SEQ ID NO: 4170576 - RNA, 61 nt, Human
uauucacaguuaacaauguguacaucucuguggggggaauaaaaauuguuuacuguagaua

SEQ ID NO: 4170577 - RNA, 75 nt, Human
uauucaccacuguaucccuagcacuuagaacaguguucagcacaaagaaagugcucagggaacauuuguugaaug

SEQ ID NO: 4170578 - RNA, 73 nt, Human
uauucagaggguugaugugaggcuuagcugcuccugauaacaauggcuaauguguccugaaagcuucugugua

SEQ ID NO: 4170579 - RNA, 78 nt, Human
uauucauaaguuguugaauggauaaauaaauuauauuuauguaugcaguggaauacuauucagcaaugaaaaugaaug

SEQ ID NO: 4170580 - RNA, 70 nt, Human
uauucauugccuguuacauuccauucuauguuuuacuugacgaaaacuucuggagucugacagaugggua

SEQ ID NO: 4170581 - RNA, 129 nt, Human
uauuccaaccaauucucccccaaccuugaaacccugacacucuguuccuggacagucuuuagccuugggaauaaugaagguguuucaggagugcugguuuuuaucuuucuagggagcaggggaagaaug

SEQ ID NO: 4170582 - RNA, 62 nt, Human
uauuccaacugucauagucauaacaaggccuuccuaaaaguuuaggcuaugcauuuggggua

SEQ ID NO: 4170583 - RNA, 88 nt, Human
uauuccaucugaagcuaucugcacuucauaugagggccaagugaaaauguggcagauagcuuccgaauuucagucuccucuugguaua

SEQ ID NO: 4170584 - RNA, 57 nt, Human
uauuccccuaucuuguagauuggaaaacagaaaacuggucugcaguaagagggaaua

SEQ ID NO: 4170585 - RNA, 60 nt, Human
uauuccuuggcugaaaaacuagaucauugauaaacuuggaacagucucagcggaggagua

SEQ ID NO: 4170586 - RNA, 56 nt, Human
uauucuaaaugugguagucauaagagccccaguucugaaucugucauuuuaggaua

SEQ ID NO: 4170587 - RNA, 77 nt, Human
uauucuacacaaaugguuguagacauuaacuagggaacacccgcuuaccugcagccaucuguauaaucucuaggaua

SEQ ID NO: 4170588 - RNA, 75 nt, Human
uauucuacuuauuguugaacugaaucaaggcuuuuauggaaauaaaugugaugguaguuuaucaaaaagagggua

SEQ ID NO: 4170589 - RNA, 94 nt, Human
uauucucuacccugucccuauuuuucuguacccuaauuuaauguuugauuguuaauucugaguugggaaggagagggacuacagguaggagaua

SEQ ID NO: 4170590 - RNA, 92 nt, Human
uauucucugccaacaucagaacuuaagagucuucaucacaaaaauuauuacauuuauuaggugauaauugaugaggcuuuggacagagcaug

SEQ ID NO: 4170591 - RNA, 66 nt, Human
uauucugacauuugucaaaaugauaagaaagacuauucaggauuauugugauaggugucagugaua

SEQ ID NO: 4170592 - RNA, 108 nt, Human
uauucuguuuaugcacuuacugcuaguggagauggcuggcagguagaugaaaccaucuucauuuagcuggcagaagccuucuaaaacugcucagaagucgauagaaua

SEQ ID NO: 4170593 - RNA, 130 nt, Human
uauucuuuuaucuaauauuauucuauuuauucauuuaccugacauuuacugaauacugauuaaugaugacgaugaugcaauagagagauagauagguagauggauagaugaauggauagauagauaaaca

SEQ ID NO: 4170594 - RNA, 72 nt, Human
uauucuuuucaguggcuugcauauguuggcuucuguaugcugcuaaauaugugaucagugaauaaaugaaua

SEQ ID NO: 4170595 - RNA, 114 nt, Human
uauugaaagugcacaggauucuuggcugggucuguggcugcuccuuagcaaguaaaauuagcuaacacugcccaaggauccauuggcuggaguuaagaauccugagaguuagug

SEQ ID NO: 4170596 - RNA, 64 nt, Human
uauugaauuucagaguagguaaaacauaguggauaugcauuauccugcauccuggaacucagua

SEQ ID NO: 4170597 - RNA, 74 nt, Human
uauugacauuucuuuauuuuuaucagaagcacuuugagcugcagugcuucaaauucgaggaguagaugucagua

SEQ ID NO: 4170598 - RNA, 70 nt, Human
uauugaucaguucugcaagcguuuaucaaaaauuuauucuauggcagucgcugugugcagacugaaaaug

SEQ ID NO: 4170599 - RNA, 73 nt, Human
uauugcauauuauucuaguggcuuuuaucucuuacgaaacauacugugguaaaaugacuagugauuugcaaua

SEQ ID NO: 4170600 - RNA, 60 nt, Human
uauugcaucaguaauuuagugugugugugugugagcacucagaccaaaugugauguugug

SEQ ID NO: 4170601 - RNA, 75 nt, Human
uauugcauguuucuauucuucccccagcucaucgagauucccuccugucaauggaagaagggagugcguguaaua

SEQ ID NO: 4170602 - RNA, 55 nt, Human
uauugccauggcuugguauccacugacuggaauagcaccaggcuuauggucagug

SEQ ID NO: 4170603 - RNA, 56 nt, Human
uauugcguggagguuuuuuccugauuaauguaucaugaaaaauuuuccaugucaug

SEQ ID NO: 4170604 - RNA, 87 nt, Human
uauugcuaacuguauaauuuuauuaggcuuuuauagggaugauaaugucucucauuggaaaagaguuuaaucaaacagaauguaaug

SEQ ID NO: 4170605 - RNA, 78 nt, Human
uauugcucuagcaaucagcuauugagaugugcgugccucauugaggcuuugcaaaaguuaauuguugacuaagcaaua

SEQ ID NO: 4170606 - RNA, 82 nt, Human
uauuggaauuuuauucuaaaugcuuuuuucaucaugcagauauuacagcaguaggaaaacugugauuagaaugccuccaaua

SEQ ID NO: 4170607 - RNA, 66 nt, Human
uauuggucagaacaagcaaauaauaggauguuuuacauuuuauuuuguugcugguuuugguuggua

SEQ ID NO: 4170608 - RNA, 61 nt, Human
uauugguggugaggacaugccagugagcuuccuguucagcuugguagaugcagcaccagua

SEQ ID NO: 4170609 - RNA, 71 nt, Human
uauuguaaaggaguuauaagugcauuuggguaaauacacuuagucaaagcuuagauaauuucuuuaagaug

SEQ ID NO: 4170610 - RNA, 93 nt, Human
uauuguacuaguucugucaugauuagcugaagaauaugcuggcagagacacgaauaacgcucagaauuuuucacucaaucuucuagugcagua

SEQ ID NO: 4170611 - RNA, 78 nt, Human
uauuguauacaagcuuaauuguuaauauucccuaaacacaauuuuaugaagggagaagacauugguuuguugacaaua

SEQ ID NO: 4170612 - RNA, 106 nt, Human
uauuguaugucacagaauuuuucuuaaguaauaaauuuauggcagcaaaauuggaauagccuuugaagcacauuucuugagaugaacauuagguugauguauuaua

SEQ ID NO: 4170613 - RNA, 70 nt, Human
uauuguccaguaguuuuugguuuugcuaucuagcucccugcggaucuuggcagauccaaaaaugacaaug

SEQ ID NO: 4170614 - RNA, 62 nt, Human
uauugucuaucgcugcuuucaugguacaacaucagagcugaaugcuugugauagagacagua

SEQ ID NO: 4170615 - RNA, 57 nt, Human
uauugugaguuguaguucuguuacaccucuccuugugaacagcacacauucgcauua

SEQ ID NO: 4170616 - RNA, 82 nt, Human
uauuguggcuuucucuuuggauauauauuucagucucccccgagagaaaagaaaugucauauuuaaguaggaacauacuuua

SEQ ID NO: 4170617 - RNA, 55 nt, Human
uauuguuggguaguuuguucagcuuauuuccagcuuuauaguucucccaacauua

SEQ ID NO: 4170618 - RNA, 64 nt, Human
uauuuacugaucucaggcugcuuaccucuuuaggguaagucauuaggcugaguucaauuaaaug

SEQ ID NO: 4170619 - RNA, 78 nt, Human
uauuuagaaacaucuuuguaguguucuccuucguucuuuuguaucuaggaugcauuuuaacaaggaguauucuaugua

SEQ ID NO: 4170620 - RNA, 129 nt, Human
uauuuagaggucuagguagauacacaggauuugugugugugugugugugugugugugugcaugugugcaugcauauauacauacacaguccugucauauuuccccuuucuauuuuauuccugagagaua

SEQ ID NO: 4170621 - RNA, 60 nt, Human
uauuuagcaccucaauuuugcaaauagggaaguuauuuuauaugcaaugaggugggagua

SEQ ID NO: 4170622 - RNA, 118 nt, Human
uauuuaucugauaaccagcucaaaucuauggaaaagggauggaucuuggcccuggaagcuccuggauuuaagcuucugcccugccauucacuggaagagagccaaccuuggaugagua

SEQ ID NO: 4170623 - RNA, 56 nt, Human
uauuuauguggaccauaagccuucucuaaucaggagguguugggccuauauaaaua

SEQ ID NO: 4170624 - RNA, 71 nt, Human
uauuucacaaguuucaggauucugcagcuuuaggacagaauguuuucccagaaaucugaaaucuagaaaug

SEQ ID NO: 4170625 - RNA, 85 nt, Human
uauuucacucucaguuuuccacaugugaggcuacgguuaucuuaacuguacaucuuaaauggaaaaauucuugagagaaaaaaug

SEQ ID NO: 4170626 - RNA, 58 nt, Human
uauuucagcucuuuggauuaucugugguggaggccaucacgucuuuggaguggaggua

SEQ ID NO: 4170627 - RNA, 59 nt, Human
uauuucauugccauaaggugggauggacacaccagacccccuuuaauggaagugcuaug

SEQ ID NO: 4170628 - RNA, 58 nt, Human
uauuuccaaaagccuauuaugaauacuuagaaaaucucauagcaggcaauuggaaaug

SEQ ID NO: 4170629 - RNA, 83 nt, Human
uauuuccuacauuaguacauugauucauuaugucauuucuaaaagagggacaauauuaugacucaugagcauggagggaaaua

SEQ ID NO: 4170630 - RNA, 75 nt, Human
guuuaucgcaauguuuagaauuuuguuauguucaaucgaggacuuuacaaaauuguguuaaacuuuaugauggau

SEQ ID NO: 4170631 - RNA, 59 nt, Human
guuuaucugguuggagagagaagaagauacaucucuacucuuaacacagcuaggaaagc

SEQ ID NO: 4170632 - RNA, 64 nt, Human
guuuaucuguuuaacaaaguaucuaacauagcaauccuguuagauucugugggaaaagguaaau

SEQ ID NO: 4170633 - RNA, 81 nt, Human
guuuaugagagcguuucacagcccagaaagccuaaggggguuaagucuccauucuuucugaggcugccaacucucacagac

SEQ ID NO: 4170634 - RNA, 119 nt, Human
guuuaugcaguuauuauaaauucaucauuaugggcagggcaguguauaagaaagccagaauccacaacuugaaaagguaaucacugaugcaacuguuuugucuacauaacugcauaaac

SEQ ID NO: 4170635 - RNA, 67 nt, Human
guuuauguuagauaauauuucccagagguaacacugcuggguagaaguauuagucuaaccuuuagac

SEQ ID NO: 4170636 - RNA, 88 nt, Human
guuuauucugaaugcauacauuuaaauaccuauguuucuauaccauucauauuuggaggagauguuuguguuuauucagaaaguagac

SEQ ID NO: 4170637 - RNA, 77 nt, Human
guuuauugaggggacuuaagccugccuguccugccaguagccaggaagggcugggucugguuaacccuugguguggc

SEQ ID NO: 4170638 - RNA, 70 nt, Human
guuuauuucuacuauuuugccugauuuuuuucuaaucagaaauaaggcaaguuuuuaguggacaugguac

SEQ ID NO: 4170639 - RNA, 56 nt, Human
guuuauuuuggucaauacaguaagcagguguggcuugaagauaggccaggaugagc

SEQ ID NO: 4170640 - RNA, 61 nt, Human
guuucaaauagguuucagcaaaguaauuuaauuagaauuugaaugaacgcuuauuugaagc

SEQ ID NO: 4170641 - RNA, 63 nt, Human
guuucaaguagcugcugauuaugacuuacaauucaucucccuagauccugcagcuaauggaau

SEQ ID NO: 4170642 - RNA, 67 nt, Human
guuucaaguguauguguguuugugugaauguguacacaucccacagaaacauacauaauauuggaau

SEQ ID NO: 4170643 - RNA, 59 nt, Human
guuucaauuugaaugcgaggcuaucacauaagugagcuccaaaguacauaaguugaaau

SEQ ID NO: 4170644 - RNA, 95 nt, Human
guuucaauuuuuaaaugaaaggauaaauggaaggauaauagcauagaaaaacaugugauuaacugucuauuaaucaugucuggaaaguaagaaac

SEQ ID NO: 4170645 - RNA, 58 nt, Human
guuucacagguuggagccagcaucuuccuacaagaugaacagcugccaccuuuggagc

SEQ ID NO: 4170646 - RNA, 129 nt, Human
guuucacuguguuggccagacuggucucgaaccccugaccucgugauccgcccgcuuuggccucccaaagugcugggauuacaggcaugagccacugugcccgacccacaauagcacguuuuaagaaac

SEQ ID NO: 4170647 - RNA, 68 nt, Human
guuucacuugacauauagcauaaggauaagagcuccauuuugaauuuagauuguauguugaguuagau

SEQ ID NO: 4170648 - RNA, 83 nt, Human
guuucagaaacacuuguagagaaguuuguuucauuuccugcuuuuacuuuguagcauugcaaacuucuuuaaguuuuugaaac

SEQ ID NO: 4170649 - RNA, 80 nt, Human
guuucagaguuugagggaacccaaauaggaaaauugauggagucauuuuccucugcugguguucaagucagauuugaaac

SEQ ID NO: 4170650 - RNA, 61 nt, Human
guuucagaucacaaggggccacauaauugccauggcugagcuucaaaguuggaucugagau

SEQ ID NO: 4170651 - RNA, 57 nt, Human
guuucagauuugguuucagaaggguuuugucagcuuucuguaaacugcgucuguaau

SEQ ID NO: 4170652 - RNA, 107 nt, Human
guuucaggucauugaugcacaguguaaucucuaauuuaaaaaguaacacacaaugguguuuuauuuucaaaguuagagcucuuuuggguucucaaugugaccagagc

SEQ ID NO: 4170653 - RNA, 69 nt, Human
guuucaguagcccuugaguucauguagaaauuccauuugcucugcaguugcucuugaggcacuuuggac

SEQ ID NO: 4170654 - RNA, 70 nt, Human
guuucauaacaucuuauuggcaaagauauuuaaaucugauaauaucaaguguuagggagaugugggaaac

SEQ ID NO: 4170655 - RNA, 100 nt, Human
guuucauaauacagcauggucugguaguuugcaaaauggugugcuuuuggggagauacacuagcaauuuuuuuaaaaacuggaacagugugauaggaagc

SEQ ID NO: 4170656 - RNA, 101 nt, Human
guuucauauuuaagcugaauugagaaacuuacaaauccagauugucuaacaaacucuggcaaacugaauucaaguauccaguuucgacugcauugugagac

SEQ ID NO: 4170657 - RNA, 80 nt, Human
guuucaugaguucauaaaucuggagcuguggccaacacugggaccucuguuggaaacuuccagcuuuauaauucaguagc

SEQ ID NO: 4170658 - RNA, 75 nt, Human
guuucauuauuuucaagaacagcagcauuccauauuuuaauguggcaucucuugauuuuugaaaaugauggcuac

SEQ ID NO: 4170659 - RNA, 130 nt, Human
guuucauuguuuucuugucaucucauucagugcaggaggaagccccauugaagccaggccauggcuugggcaggugcagguuuucaaguacugagaggggaugguuagcucaacaggucagcagugggac

SEQ ID NO: 4170660 - RNA, 57 nt, Human
guuuccaccuucucccgaagccgguucugcagcuaagcuguagacgggagaggaagc

SEQ ID NO: 4170661 - RNA, 60 nt, Human
guuuccacugaaggaucuagggaagaauguuuccuuuccuucuuaccuucuagugguugc

SEQ ID NO: 4170662 - RNA, 72 nt, Human
guuuccaugaaaauguuucugcuuguuccaaugggcaaaaauaaaguugcagaaccauaaauucagguaagc

SEQ ID NO: 4170663 - RNA, 60 nt, Human
guuuccauuucuguaaauagggaaaggucuaugugaacccgccuauggcaggauggaggc

SEQ ID NO: 4170664 - RNA, 96 nt, Human
guuucccucuuugguaguuaaagaucauaauauuuaucucauggggcuuuuaugaagaugaaauguaugucaucaaucuugcacauaggaggaaau

SEQ ID NO: 4170665 - RNA, 63 nt, Human
guuuccgcccugggccugugggauugcgugacuccuggagcacugggcccaggguguggaggc

SEQ ID NO: 4170666 - RNA, 58 nt, Human
guuuccucagcuagacuguggguaucauaacaacggcucacagaauguugaagggaau

SEQ ID NO: 4170667 - RNA, 75 nt, Human
guuuccucuccaaggcuggccuuugauuaucuuaaucugugucaaagcuauuuguuaugagagaaccaaggagau

SEQ ID NO: 4170668 - RNA, 55 nt, Human
guuuccugucugcuuuacuauagcagguguucuagguaagaaagggcaagggaac

SEQ ID NO: 4170669 - RNA, 57 nt, Human
guuuccuuucuauugccuugauuuucucuuuaaguaugucauaaggagagaggaaau

SEQ ID NO: 4170670 - RNA, 78 nt, Human
guuucggcuuuguuugauagaaguguucuagggagucaaacccuguagaaaauuggagcauucauacauugcugaaac

SEQ ID NO: 4170671 - RNA, 71 nt, Human
guuucguguuugcguuuaguuucaagacacgucgacaaaacgacugucauuaaugaauguaauaacgaaau

SEQ ID NO: 4170672 - RNA, 65 nt, Human
guuucuaagggagagcugccagcugguuaaaccugucuccgguaacuagcuuucucuguggaggc

SEQ ID NO: 4170673 - RNA, 69 nt, Human
guuucuacuuucuaagacauacaacuuugcuuuccaacaagguaucugcauucuuggaaagaaggaaac

SEQ ID NO: 4170674 - RNA, 82 nt, Human
guuucuaguaacuuaaauucaacuccuggcagccuacuucacauucugauuugggcuucugauguugagugcugagggaagc

SEQ ID NO: 4170675 - RNA, 56 nt, Human
ucacccagaaaagacagcagaugggaugccaugccuugccuguucuuccugguuga

SEQ ID NO: 4170676 - RNA, 73 nt, Human
ucacccagcagggccagcacuccuggcaggauaagaacucauggugccagaccaggcauggccagcaggguga

SEQ ID NO: 4170677 - RNA, 100 nt, Human
ucacccagcuaugggaaaugcucuggaugaccuuggauuucuaugcaguuagcuggaccucaucccaggguuacagccagggcaucccugagcuggguga

SEQ ID NO: 4170678 - RNA, 70 nt, Human
ucacccccaucugagagcaugugcccgcccucugucccugaggucacugcaggucugagaugggggagga

SEQ ID NO: 4170679 - RNA, 56 nt, Human
ucaccccuggcccagucuuggagagaggauaaccacugcugguaaacugggggugg

SEQ ID NO: 4170680 - RNA, 98 nt, Human
ucacccuaaucuugauuaauaccuuagcccucuucugacugaccaauaagcgaggaugaguuucgggaggguaaagagaggucaagauccuagcuuga

SEQ ID NO: 4170681 - RNA, 76 nt, Human
ucacccugagcagcuguuacagagugucucugauauuaaucacacacucccuccaauggcagugaccuuaggguga

SEQ ID NO: 4170682 - RNA, 69 nt, Human
ucacccugccuccaggaggggcagcucuggugcauucacacuccagaguccacccuggggucaggcuga

SEQ ID NO: 4170683 - RNA, 88 nt, Human
ucaccuauuaagcaaauauugacuucuuaaauuaaauuguaaugccucuugcaacagaagucaauaguuguuugaugacaucugguga

SEQ ID NO: 4170684 - RNA, 92 nt, Human
ucaccuccgagaaucaccaccuuccugcgugucucuucacucauguaagacuugaccagguugaaggcuacggcgaauagcuugggggcuga

SEQ ID NO: 4170685 - RNA, 60 nt, Human
ucaccucucaggucuuccucauaugcagaauguuccucaugugcaaacuggagaugguga

SEQ ID NO: 4170686 - RNA, 60 nt, Human
ucaccugcccuuaggaauccucuggucaacuguacgagaagaaggaagggggcaagguga

SEQ ID NO: 4170687 - RNA, 73 nt, Human
ucaccuggcuuuagguuggagagcugaugaauccuuccugggaucccagcuuucuaccuuaggcaguggguga

SEQ ID NO: 4170688 - RNA, 90 nt, Human
ucaccugggagcuuguucaaaugcagaauaccaguccccacuccgaccugcuggaucagaaucugcauuuuuaacaagauccccggguga

SEQ ID NO: 4170689 - RNA, 108 nt, Human
ucaccugggagcuuuuauggcucuggagguucaggcugcacaccugagcaaugaagucaggguccugaggguggggccuggaugcagguauuaaaguucugcagguga

SEQ ID NO: 4170690 - RNA, 90 nt, Human
ucaccuggggaucuugucaaaaugcagauucugauucaguaggucuuggguggggccugagauucugcauuucuaauagcucucagguga

SEQ ID NO: 4170691 - RNA, 122 nt, Human
ucaccuucuuacaccgcauauaagauuuuuugauagcaggaacaugaguguggauuaaaaucugugcugccauuggauucuaaugcacuucaaauuguugugguacaguuuuauguagcuga

SEQ ID NO: 4170692 - RNA, 76 nt, Human
ucaccuugaagugucucuuguaaaagauaacucccugcauuguagaaaugucuuugacaagagaggauuaggguga

SEQ ID NO: 4170693 - RNA, 76 nt, Human
ucacggacaaugucagucugucuucaugggggcaguuaagggaauguccucagaauccaaacugcaguacuguaga

SEQ ID NO: 4170694 - RNA, 84 nt, Human
ucacgggcuaguaaauuccuugagacgcagguuucuucuacugaggcuaauaacaaaaccucuuuuaaggaguuguuguuugga

SEQ ID NO: 4170695 - RNA, 86 nt, Human
ucacgugucagcaagggagcuaauuccauacacucagacaggcugggucugacugucuugcuaugagcucccaucacggcguguga

SEQ ID NO: 4170696 - RNA, 76 nt, Human
ucacguuagaagugguaaguagaaagaugaagacuuccagcuccuucuguuacucuucccaccacuucuguucuga

SEQ ID NO: 4170697 - RNA, 91 nt, Human
ucacuaaagacaugguguaggugaacaugagauuggauaccauaaaucuguacuggcuuccaucuguacgaccacauggugucugcagugg

SEQ ID NO: 4170698 - RNA, 117 nt, Human
ucacuaauacuuaucauauggauuuacaccaagacuuucauuuggucaguccgaugucacauguaauguuuauauuggucugcuuaaguggauuucuggaccauauuaaguauuuga

SEQ ID NO: 4170699 - RNA, 80 nt, Human
ucacuaaucuuccucuuauaaguuuucccaggauuugugacuaaccagaauccuggagaagcuguaccuggauacaguga

SEQ ID NO: 4170700 - RNA, 73 nt, Human
ucacuacagaaucaaauacgggcuuaaaauuucaaacggaaaaauauugccaauauguugauucuauguagga

SEQ ID NO: 4170701 - RNA, 84 nt, Human
ucacuagcauccugggggcaggcuggugugaugcagagccugagggggcagccauacucagaccugggcccagauugguggugg

SEQ ID NO: 4170702 - RNA, 63 nt, Human
uaugcaagguuggguaacagcagguccugaccuguaggacuggcuggcagaaacugaagcaug

SEQ ID NO: 4170703 - RNA, 56 nt, Human
uaugcacccucaucugccgcucuacuguaaacuaggccuugguaaagggaugcaug

SEQ ID NO: 4170704 - RNA, 62 nt, Human
uaugcagagcaugacuguaccagcuuuguacaggccuggugacuuucuuaugucucugcaug

SEQ ID NO: 4170705 - RNA, 55 nt, Human
uaugcaguguaugcacugagaucuacaugccucagucucaguguagaucugugua

SEQ ID NO: 4170706 - RNA, 55 nt, Human
uaugcaucugugauguacugccucaugauuucagugcagucugucacagagcaug

SEQ ID NO: 4170707 - RNA, 125 nt, Human
uaugcauuuucagacacauucacuucagugucacauuagauuggugcaaaaauaauuguggcuuuugccguuacuuuugcaccaaacuaauauaacaccgaaggcaaauuccugaguuuaucaua

SEQ ID NO: 4170708 - RNA, 81 nt, Human
uaugccccaaccauugggucaugggaucccagcauccagauccuggauccuagacuccuaugccccaaccacugggucaug

SEQ ID NO: 4170709 - RNA, 56 nt, Human
uaugccuuuugguucaagcaacauauauggcaauguuucuugagccaaaaggcaua

SEQ ID NO: 4170710 - RNA, 86 nt, Human
uaugcgaacaaauuggcuggauauugaauuguaccucuuaaugaacaggggaaauacagaaggaaguuuagcuaaauguuaacaua

SEQ ID NO: 4170711 - RNA, 63 nt, Human
uaugcgugauucuagguccauuauuugcaucucauuggugaagauuaaauaggauccugcaug

SEQ ID NO: 4170712 - RNA, 66 nt, Human
uaugcgugcuuguuagcauggaaagaucaauagggauuaauagcuuucucuggucaagcacacaua

SEQ ID NO: 4170713 - RNA, 79 nt, Human
uaugcuggcuacuggaguauuguuuaauaccagagugcuuuauugccucugguggagaauaguucaguacuaaagugua

SEQ ID NO: 4170714 - RNA, 97 nt, Human
uaugcuuacuguaugccaggugguguucuacaccguaucuugugaggauugaguucauauaaaguguuuagaaagcugccuguacucaguaaacaua

SEQ ID NO: 4170715 - RNA, 61 nt, Human
uaugcuuucuggugccuuuggaacugacagcacccucuaauuaaaggcaguggguggcgug

SEQ ID NO: 4170716 - RNA, 56 nt, Human
uaugcuuuucucuuggaaugugauuauauuuucuaaauucuacaagaauaagcaug

SEQ ID NO: 4170717 - RNA, 85 nt, Human
uauggaacauagugagagggugugaacacuggcugugcaaccucagaaagggucuaccuaguguugacuucucuucuuucacaua

SEQ ID NO: 4170718 - RNA, 107 nt, Human
uauggaacauucuuuggggucaguuuugaauaaucacugggcauuaucggauuucuaucacuauuuuuugcauguucuugugauuauucaccagggaacauuuuaua

SEQ ID NO: 4170719 - RNA, 60 nt, Human
uauggaacuauaaaccauugucaacuuuaacacacauuagguagacuuuggaguuucaua

SEQ ID NO: 4170720 - RNA, 59 nt, Human
uauggaaguuagggaugaauaaagugucaaggaugacucuuugguuucugacuugcaua

SEQ ID NO: 4170721 - RNA, 70 nt, Human
uauggagaguggauaugggagcaaagcagaagcaugauguaucuuucucccagccauccucucuaucaua

SEQ ID NO: 4170722 - RNA, 106 nt, Human
uauggagauuuuugugagauucauuaauaggacagguuggcaagguuagaacagauucuagcaucagccacaccuuguacucagaaucucucuaaguaucuccaua

SEQ ID NO: 4170723 - RNA, 95 nt, Human
uauggagggcuaacuauguuccagagaugggauuaaucauguuuuauguaauuuguccucauauuaaaaccaucagcuguaagauagccucuaug

SEQ ID NO: 4170724 - RNA, 129 nt, Human
uauggauucugugcaaaaugccugguagagugccuggcaguuauauugccuuagggacacauccuaugaauugcucccauagguagcuaugaacucuggucugaaucugcauaggcaagccagaucaua

SEQ ID NO: 4170725 - RNA, 55 nt, Human
uauggcaagagaaucaacugaagaauaaacaucuuuaguaaaucuuuugcucaug

SEQ ID NO: 4170726 - RNA, 59 nt, Human
uauggcuucaucuuuuaguccuuauggagucaggucaggggacacaaagaugaguaaua

SEQ ID NO: 4170727 - RNA, 85 nt, Human
uauggcuugcuuuaggggaggagagagcagaagggcagagggaccucccugcuuccgcuguuuucucagaugccaaguugccaua

SEQ ID NO: 4170728 - RNA, 117 nt, Human
uaugguaaaagacaggguuauugugauggaauauagaacauuuacaaauccuucugcagaaauaaacuuuguuccaauaaggaguugaaauuauccaugcggugcccuaguaccaua

SEQ ID NO: 4170729 - RNA, 118 nt, Human
uaugguagacaaugaagacugaauuuguuggaaaugaagagagaauuuucuguucaaugcagugcuugaccagaguuuuauuaguucuaagacacaguuuaccuucucaucuaugaua

SEQ ID NO: 4170730 - RNA, 95 nt, Human
uaugguggcauaaugcugugguggcaugauagugugaaugcacgauagcgugaaugcaugauggugugaugguaugauggugugauggcaugaug

SEQ ID NO: 4170731 - RNA, 69 nt, Human
uaugguggcuucagucucaucuuggaaggcugguuuucuccgcacuuaaauccacaagauugccccaua

SEQ ID NO: 4170732 - RNA, 58 nt, Human
uauggugggggcugggggaugauggcauuggagggcuuauccuagcaccuggcacaua

SEQ ID NO: 4170733 - RNA, 61 nt, Human
uaugguggguaaaacuggaaaugcaccuggagccagacuguaaaccauuuugcaucccaug

SEQ ID NO: 4170734 - RNA, 84 nt, Human
uauguaaaguagaaauguaagaaggauuauggaaguaauugaauuucucuuuuuuaguuuuuuuugacauaucuguauuauaug

SEQ ID NO: 4170735 - RNA, 69 nt, Human
uauguaaauggccagcaacaggagugaagguguugggguugcauucacucuccuaggcuaaagcucaug

SEQ ID NO: 4170736 - RNA, 74 nt, Human
uauguaaauguacuuaugacagaauuaugcuaaauuuaaaaugcaguaugcaaaugucauaagcauguuuugua

SEQ ID NO: 4170737 - RNA, 83 nt, Human
guuucuauucaacuuauaagauauuaaugguccuaauccacuggaaaagauugauucuguaagucaacaaugagugaggaagc

SEQ ID NO: 4170738 - RNA, 99 nt, Human
guuucucacgguaauucauucaacacauauuugccaagcccuugcugaguauuaaauaccgagcgagguuuugcagauacagcagugaacgaaagagac

SEQ ID NO: 4170739 - RNA, 58 nt, Human
guuucucacuuaccaacacauguguaaaauguagcagguguguuaguaaaggagaagc

SEQ ID NO: 4170740 - RNA, 61 nt, Human
guuucucaggugcuauacgcaacuguggugaauaccaaagugauuuaaguaccucaggaau

SEQ ID NO: 4170741 - RNA, 92 nt, Human
guuucuccccucugguguagcuguccagugagucccuuugaaauaaagguaugauacugugacaugcuugcaaaaaguauacauggagaagc

SEQ ID NO: 4170742 - RNA, 60 nt, Human
guuucuccugcagucagcagucucacucccugccagugggaaaagcagauagagagugac

SEQ ID NO: 4170743 - RNA, 87 nt, Human
guuucucuggaaugaagcuauguacauugauaugaaaaugagauguaaucuuuauggcuugauaaacugacuccuuuuaagagaaac

SEQ ID NO: 4170744 - RNA, 70 nt, Human
guuucucuucuugaaagaggaauucaaaugacaaugaacauuuuugggguccucuuuuauggaguuugau

SEQ ID NO: 4170745 - RNA, 117 nt, Human
guuucucuuucuuugauauuccuagaaaaauacuuuauugugaugggaucagaaccuuagaguuggaaagacccuuagaaaaaacgucuucuagugaauaaauaaagaaguugagac

SEQ ID NO: 4170746 - RNA, 66 nt, Human
guuucugcccugcuggagaucacaguggaccccagcucaguccagcuucccaccagggcagcaggc

SEQ ID NO: 4170747 - RNA, 68 nt, Human
guuucuggcacagacauuuaauagccuucaauggucucugaaggaaauuagucaguguugccaaaaau

SEQ ID NO: 4170748 - RNA, 67 nt, Human
guuucugucugcuaugcuuguugucacugcaccuuaguucaucugauagcacaaguagauagcaaac

SEQ ID NO: 4170749 - RNA, 71 nt, Human
guuucuuaacagauuagggguuucaucucaauuugcaauugggacuuaauaugcccuugauuuccggaaac

SEQ ID NO: 4170750 - RNA, 61 nt, Human
guuucuucccuuuagcauauaguaguuuaguaugacuuguauaccguaaagggagagcagc

SEQ ID NO: 4170751 - RNA, 106 nt, Human
guuucuuguuuaugagaacaagacauuuuacauucuuccauuguagguuucauaaccucagggauacacaggaaucuaaaaugucaguggcucggcuggaagagac

SEQ ID NO: 4170752 - RNA, 110 nt, Human
guuucuuuacagugacuggugguaguuccaaguucucuucuuugucucagaauauacugguugguuccauucacaaagaagggaaguacaucugcugaaguuaaaggaac

SEQ ID NO: 4170753 - RNA, 88 nt, Human
guuucuuuagccauggguagagaguggauggagcugcgaagcugccaaaacaguauucaaguuucccucuuggaacagcuagaggagc

SEQ ID NO: 4170754 - RNA, 55 nt, Human
guuucuuuagggaucauacagggcccauuucugggcccuggacuccugagcaaac

SEQ ID NO: 4170755 - RNA, 73 nt, Human
guuucuuugugggaauguuacaauggguuauaagaaaaauauuacagccuuuaaccauuucuuccaaggaaau

SEQ ID NO: 4170756 - RNA, 81 nt, Human
guuucuuuuguauuaauaguuccuacuuugcacuaauaggauauuccuauuugaaaggggacuauugcaaacaacaggaau

SEQ ID NO: 4170757 - RNA, 74 nt, Human
guuugaaccccaggaaguggaggucauggugagccaagauugcgccauugcacuccagccugggcaacaagagc

SEQ ID NO: 4170758 - RNA, 67 nt, Human
guuugaagaucugucaaccccauauuugcuuacaaaggaagcuguauaaaggcacagguuuucugac

SEQ ID NO: 4170759 - RNA, 82 nt, Human
guuugaagcagccacagcaacaagugcaauuaucauucuuacauucaaucagagauuguccuuucauguggcuauuucaugc

SEQ ID NO: 4170760 - RNA, 125 nt, Human
guuugaagcugaaguugaauggucacuccuacuucuacugugaaucuggacuugucugugaagagaucuguuucuuuagggcaguuuuagaggccacugggaaggaccacaggccugcuucuuau

SEQ ID NO: 4170761 - RNA, 58 nt, Human
guuugaaugaauucuacuuccagauguguucaaguauauuuguagcuuucauucagac

SEQ ID NO: 4170762 - RNA, 64 nt, Human
guuugaauggugagauugccauuucagaguuucaauguauugaucugacaaucucauuucaaac

SEQ ID NO: 4170763 - RNA, 103 nt, Human
guuugacagcuauuuccuuuucaaaguucuggcuucuuagguguucagagauagcucuuuauccaccagggacuaggacuaggaggcuauaguucugucuggc

SEQ ID NO: 4170764 - RNA, 83 nt, Human
guuugagagauuuaaguagaggugauaggacucuaauugcaauucacucacaguaagaguucucucucauuugagcucaagac

SEQ ID NO: 4170765 - RNA, 72 nt, Human
guuugaguuuuguuuugagucaacuccacgggcagcucugugaaggauggauuucaaagggacaagucugac

SEQ ID NO: 4170766 - RNA, 124 nt, Human
guuugauaaauuuaggaguauuuuaauuucauaggcuaauuucuaaggauuuucucagacuucaucuuaugagaugacuuaauguuggucauaucauugaagcuuuucuauuuuuccaucaaau

SEQ ID NO: 4170767 - RNA, 64 nt, Human
guuugauacaggccuucuagaugauagggauuuaaacuuauuuuuuaguuuuucuguguuuugc

SEQ ID NO: 4170768 - RNA, 87 nt, Human
guuugauacucacagagagcuugcccuuguauauuccaugucaauaaaccgaauauacaaagggcaaccucgcuuuaaguaccaaac

SEQ ID NO: 4170769 - RNA, 68 nt, Human
guuugcaaaauuuaaaaucucuguagaccaaacaaaacuggucuucaugccaaaugaguuuuguaaac

SEQ ID NO: 4170770 - RNA, 102 nt, Human
guuugcagaagacacauuucugauguggacugggaugacuuggaagaggguguggucucucccacaggacaguuaaugugcaguguugugucuuuuaaaaac

SEQ ID NO: 4170771 - RNA, 57 nt, Human
guuugcauguauuaagucaauaguaauguacuguguguuauuuauuuacauguaagc

SEQ ID NO: 4170772 - RNA, 96 nt, Human
guuugccaugcuuuugcauugguuuaauuuugcuuuggguuuuauucaauuaauaaaguaaggcagugaaugagauuacguaucuguauggcuaac

SEQ ID NO: 4170773 - RNA, 57 nt, Human
guuugccuuuuagauaggaaugcugaaaauaaugagacacuucugucuggaggaaac

SEQ ID NO: 4170774 - RNA, 65 nt, Human
uauucacagaugaggaagagucagccaaggacuauuugguuuaugucuaccugcaucucugaaug

SEQ ID NO: 4170775 - RNA, 91 nt, Human
uauucacuaugauuugggcaucuaauuuggcuucauuuguucugcuucagguaaugccaauuuaaugauccauuuauguaaccguagaaua

SEQ ID NO: 4170776 - RNA, 72 nt, Human
uauucacuaugcacacuccuagaccaaaagguggccaaggaccaacugugggagugggagugggaguggaua

SEQ ID NO: 4170777 - RNA, 67 nt, Human
uauuccauggcaacauaugcuuucaugagguacuuuuguauuuucuagaguauguguucugguagug

SEQ ID NO: 4170778 - RNA, 75 nt, Human
uauucccaggaugcuuuuaagugccccaugcaaauguauucucagcauguccacuuugucagugucauaggaaua

SEQ ID NO: 4170779 - RNA, 64 nt, Human
uauuccugcauuggucaacccauccacuuauacugaauccggauggucuccuaguucaggaaug

SEQ ID NO: 4170780 - RNA, 66 nt, Human
uauuccuuuucccaagucuccaaugugggaagaauauaauuccgggacuacugaggaggggguuug

SEQ ID NO: 4170781 - RNA, 84 nt, Human
uauucgguuggugcaaaaguaauugcgguuuuugccauuaaaaguaauugcaaaaaccacaauuacuuuuacaccaaccggaua

SEQ ID NO: 4170782 - RNA, 60 nt, Human
uauucuacucuccuacaggucuacucacaaaugaaguugauuugcagaagguguagagug

SEQ ID NO: 4170783 - RNA, 70 nt, Human
uauucucugugugugugcacauguguguaucggucugucuaucugacuguguguaauauguauaagaaua

SEQ ID NO: 4170784 - RNA, 77 nt, Human
uauucugaaguguuuauaugaacuucauacccaggaucucccuugaagaaauuauuuuauauagucacuuggggaua

SEQ ID NO: 4170785 - RNA, 78 nt, Human
uauucuucuauaucuauuaucucuuuacugcuacuacaaagaucuuuugaugguggagagacaguguauuggggaaug

SEQ ID NO: 4170786 - RNA, 70 nt, Human
uauucuugacugcuuacuaugugccuuacaauguagauuccaaggauucuaugguaaccagacaagaaug

SEQ ID NO: 4170787 - RNA, 73 nt, Human
uauucuuucggagcuuguguaguuuccacauuaauuuaccagaaacaagauacacaucucucuuugaggagug

SEQ ID NO: 4170788 - RNA, 66 nt, Human
uauugaagagauaagugacagaacuuucccugguuauuuugggggaguauuauuuaucauuuagua

SEQ ID NO: 4170789 - RNA, 71 nt, Human
uauugacacgugucuaucaggagguguggucaggguuccuuccccuuuucucugggugggcugugucuaua

SEQ ID NO: 4170790 - RNA, 87 nt, Human
uauugacuucuacuguguagcuuuccuucaucuuucccuucuuccccaugcaaagaaagaugaagaacaugagcacacuguacaaua

SEQ ID NO: 4170791 - RNA, 69 nt, Human
uauugacuugccaagcagaauuauuuauuuggcaccaguaaugugcucuguauucuauggcaguuggug

SEQ ID NO: 4170792 - RNA, 130 nt, Human
uauugagauaaaugcuacaggcuugggggaaaaccucauuuaaaguaauuuauaucaaauuauguggaaaauauuuaggugaaugauguucaagcuaugcucuugaguggaaucugaagcugguuucaaa

SEQ ID NO: 4170793 - RNA, 83 nt, Human
uauugagguagaucagaagugguuuucagugucucguaaaaagucaaaggugcccuguauaacaucuuuuguuucccuuaaua

SEQ ID NO: 4170794 - RNA, 57 nt, Human
uauugaguuaaugguguauccccaauacuaccauuggggaacacuguucauucugua

SEQ ID NO: 4170795 - RNA, 63 nt, Human
uauugaucaggauccuuuuccacaaaaaugagacuuacuggaaaggcuauuucagggucagua

SEQ ID NO: 4170796 - RNA, 60 nt, Human
uauugauuuuguugcuaccugggcugaaagauacagccacaggcagaaaucaagacggua

SEQ ID NO: 4170797 - RNA, 61 nt, Human
uauugccugugcugcuguacugauggugauaauuguccgguggcagcagcauuugguaaua

SEQ ID NO: 4170798 - RNA, 83 nt, Human
uauugccuguuuuugcccucuuuguugaugugucuucccuuucccagagggauauacagagaagggaggcaaaauaaccaaug

SEQ ID NO: 4170799 - RNA, 63 nt, Human
uauugcgaauguuuagcccaucgugauuauuacaaaaucagaacagcgagaauauucacagua

SEQ ID NO: 4170800 - RNA, 61 nt, Human
ucacauaacccagaacagaauuuuucagaggaagaaacugaggcuuggauagguuauguga

SEQ ID NO: 4170801 - RNA, 60 nt, Human
ucacaucugcaaaaucccuuuugccauauaagguaacauucacaggagauuaggaugugg

SEQ ID NO: 4170802 - RNA, 78 nt, Human
ucacaugacuuuaucuuguccuuccugcucccaagagccagagcaagggaagcaggauugggcagagggugaagguga

SEQ ID NO: 4170803 - RNA, 58 nt, Human
ucacaugcccuguauuuaccagugaccaucuaggcucuggaaauacagagguaaauga

SEQ ID NO: 4170804 - RNA, 70 nt, Human
ucacauggccaaggaugcucaaccaugaaucgcagugaaagguuuguggaugugcuucuugauaugauga

SEQ ID NO: 4170805 - RNA, 89 nt, Human
ucacauggccaucccucucugcaugacugugucuuucuccucuucuuguaagggcaccagucauguuggaguaggguccacccuaguga

SEQ ID NO: 4170806 - RNA, 80 nt, Human
ucacaugucggcauaaagcucuuaaauugaccugcuuuagauuaaagcacaauauggguuuuauaguuugccucagguga

SEQ ID NO: 4170807 - RNA, 55 nt, Human
ucacauguucucuucuuccuuuugaucuuaaaugaggaaggggcaaaguguguga

SEQ ID NO: 4170808 - RNA, 56 nt, Human
ucacauuauucuaaagagguacugggucaguucccaguagcucaaagaugguguga

SEQ ID NO: 4170809 - RNA, 70 nt, Human
ucacauuuaagcuucaaagaacauauuggaaaugagcuuuucaguaugaaaguugugguugcuuauguga

SEQ ID NO: 4170810 - RNA, 71 nt, Human
ucacauuugccaguguaauuucagggcugcuuuuggaguagacauuaaauuacacugaagagugaaugaga

SEQ ID NO: 4170811 - RNA, 91 nt, Human
ucaccacagggcacaguuugccuucucuucccugggagcucuuguucauuugucaggagaccuaaaagaaggcuacuauguacaguggugg

SEQ ID NO: 4170812 - RNA, 74 nt, Human
ucaccaccucucaugugccaguaauuucuagggccccuauagaaaucugacugcugugcacauagagggacuga

SEQ ID NO: 4170813 - RNA, 68 nt, Human
ucaccacggaagcagcagaguagacagagcccugggugaguccaggcugucccugcugcacuagguga

SEQ ID NO: 4170814 - RNA, 59 nt, Human
ucaccacugcuauguccccagcccaggcuaaaugccaggcacugggaaugcagugauga

SEQ ID NO: 4170815 - RNA, 86 nt, Human
ucaccagagacuucaaaucaugcuaaaccuaaugggucauuuuuccucugaguuuggccccaugguucccagguucccauuguuga

SEQ ID NO: 4170816 - RNA, 117 nt, Human
ucaccagcaaggcaucguguccucuuuguguccugagaugccuucucacuaagccucuuuccagaccuuugguccuggggaucugcagugagcagagaggcagcuccuugcggguga

SEQ ID NO: 4170817 - RNA, 121 nt, Human
ucaccaguggggcuccaauuaugccagggaaggggacucuuuuucccuuucuagguucucaugaucaucucccaaggcacagaaagagucccuguggccggcuuaggaucagucacuggga

SEQ ID NO: 4170818 - RNA, 55 nt, Human
ucaccaguuaaaauaacaguaaccauauuuauuggcucuguuuuugcuuugguga

SEQ ID NO: 4170819 - RNA, 58 nt, Human
ucaccauuggcaauuauaaaacuucacuauagaaagaaaauauagauggcagugguga

SEQ ID NO: 4170820 - RNA, 77 nt, Human
ucaccauuuauuaagauaauaccaugggccaggcucugugcuaagugccuugcauauauuauaucuuugauguguga

SEQ ID NO: 4170821 - RNA, 90 nt, Human
ucacccaggaacuuguuagaaagguagaauguuggguccuacacagaccugcugaugugggaucugcaguuuaacaaaaucuucagguga

SEQ ID NO: 4170822 - RNA, 57 nt, Human
ucacccaugcaagaugcauuccucagguuucugagucagcugccuccagcaggguga

SEQ ID NO: 4170823 - RNA, 120 nt, Human
ucacccccacccccugccucuccuuuugcuuuauauucaagagaggagcagucccaccuugaugcuucucaucuaaguuauaucaguacaggugacagaggucaggggugguggggguga

SEQ ID NO: 4170824 - RNA, 60 nt, Human
ucacccccucuuccccucauugcuuagacacagcuaagcagugacucucagaggcagugg

SEQ ID NO: 4170825 - RNA, 55 nt, Human
ucaccccuaccaaggagcacugaaguuuauacacugcccugggaguuggggguga

SEQ ID NO: 4170826 - RNA, 80 nt, Human
ucacccugugggccucaaauguggagcacuauucugauguccaaguggaaagugcugcgacauuugagcgucaccgguga

SEQ ID NO: 4170827 - RNA, 77 nt, Human
ucaccguauuggccaggcuggucucaaacuccugaccucaggugauccaccagccucggccucccaaagugcuggga

SEQ ID NO: 4170828 - RNA, 75 nt, Human
ucaccuagagggcuuguuaacauagagauuagugugcucauaccuacagagucuucuuuaguaggccuugggugg

SEQ ID NO: 4170829 - RNA, 56 nt, Human
ucaccuagcauuccucuuccucauguucagaugugaaugaaggggcagcuggagga

SEQ ID NO: 4170830 - RNA, 79 nt, Human
ucaccucaaggcagucauuuaaucccugcaugccuuaaauacucugcaaaacaggagaguaaugcuguugugaagucga

SEQ ID NO: 4170831 - RNA, 90 nt, Human
ucaccuccccagggaaugcucaagcccagcuuucaccccucugggaaaucggagcagcaaaagcaugggccaaugggcaaggggaguugg

SEQ ID NO: 4170832 - RNA, 63 nt, Human
ucaccugagagagugagcccugacacccuccccucugaguguccccagcuaacucuucaguga

SEQ ID NO: 4170833 - RNA, 73 nt, Human
ucaccugagcccaggcacaaauugcagugagccgagauugcuccgcugcacuucagccugggugucagaguga

SEQ ID NO: 4170834 - RNA, 68 nt, Human
ucaccugaggcuggguggcggagguugcagugaacuaagauggcaccacuacacuccagccuggguga

SEQ ID NO: 4170835 - RNA, 57 nt, Human
ucaccugcucuuagcacuucuucagagguuuacucuggagugaaugaaguaguguga

SEQ ID NO: 4170836 - RNA, 99 nt, Human
ucaccuggagccugcauuguuuccucuuuaaaugcuuuuaucuggcuccccaugaugagccauuagcagcacuguaaagugaugcaagcuaccuagugg

SEQ ID NO: 4170837 - RNA, 77 nt, Human
ucaccuggauuggggucugacacugcuuguguucagcagagggugcaguggcagugugacgcuguucuccgugguga

SEQ ID NO: 4170838 - RNA, 78 nt, Human
ucaccugggaguuucuuagacagacauuaucucugacuccacccagaccuacugaaucaaagaguguucccuagguga

SEQ ID NO: 4170839 - RNA, 92 nt, Human
ucaccugggggaucuuguuaaaaugaauauugauuagcaggucugagauuggccugccauucugcauuuauaacaagcucccacccagguga

SEQ ID NO: 4170840 - RNA, 130 nt, Human
ucaccuuuguucaaaauauuaucuucacuuucugcuuuacugacugugccaggaagaacccaguaguucuacaguugauuaacacugagauuuuccugacaccaguuuucaggcuuuugaacaccuuaga

SEQ ID NO: 4170841 - RNA, 121 nt, Human
ucacgaaugaagggcuguggcuggauuuggccaaaggguuguaguuugcugaucccugacacuggcaaaucagcaucuuuaacaauuaccccucauaucuguuacaguuccugucacguga

SEQ ID NO: 4170842 - RNA, 110 nt, Human
ucacgagaaagcugaucaagaaggcggaccagaagggagugaccaucaucggaccugccacugugagcuuccccuccggaaagccuuuuacguucgaugcuaucuuauga

SEQ ID NO: 4170843 - RNA, 88 nt, Human
ucacgagcccaauacugcaugaggaacuaguaaaugaauaucagauauaagcuaaauuucucaaggugucauguauuugggaggguga

SEQ ID NO: 4170844 - RNA, 66 nt, Human
ucacguucaccucucccugggauuuaucuuacuuuccaccaccuagacaggaaggggcgaaucugg

SEQ ID NO: 4170845 - RNA, 97 nt, Human
ucacuauaguuuugccaggcagagcucaugccugcaccucucauacacugagagcaggugccuguagcucucucaggcuggaauugaacacugguga

SEQ ID NO: 4170846 - RNA, 84 nt, Human
ucacuaugauugugguauguggugauggaauagggaauauguguuugcaguggguuuguucacuaugacugugguaugugguga

SEQ ID NO: 4170847 - RNA, 77 nt, Human
ucagaacuaaaacaguacuuccaguguaggcauaccagcaaagcauacaugugggacuccugcuguuuuuauucugg

SEQ ID NO: 4170848 - RNA, 62 nt, Human
ucagaagagucauagagacauugauuucauucauaaaaucauguacugcuguggcuuucuga

SEQ ID NO: 4170849 - RNA, 57 nt, Human
ucagaagcauguggggagccuguuaaaaauacacagauuccuagaaucuucuucugg

SEQ ID NO: 4170850 - RNA, 61 nt, Human
ucagaagcguugugggaacuugucagcccagcaugauuguuuuaguucccugauguacuga

SEQ ID NO: 4170851 - RNA, 83 nt, Human
ucagaaggccagauuuacagauuugcccuggaucuuacuacacaaacaagaaggaaggaggagaagugaauuuggcauuuugg

SEQ ID NO: 4170852 - RNA, 59 nt, Human
ucagaaggcugaggugggaugaucgcuugagcccaggaguucacauucagccuugcuga

SEQ ID NO: 4170853 - RNA, 63 nt, Human
ucagaagguuuuuagcaaaggaaaaggcuuaaccucauuuguacuuuuguaagaucuuucuga

SEQ ID NO: 4170854 - RNA, 58 nt, Human
ucagaaguacugugcuacaauauuaugcucuagugauucucaaaguauugucuucuga

SEQ ID NO: 4170855 - RNA, 56 nt, Human
ucagaagucccagaauucacaucuccaggacugaagugggucaugugacuuucuga

SEQ ID NO: 4170856 - RNA, 66 nt, Human
ucagaaguugagauauucagggacaggcaaucuugccuuaggaccaagaaugucuccuacuucuga

SEQ ID NO: 4170857 - RNA, 57 nt, Human
ucagaauaaacaugggcauggguugcuucuugcugccacuguccauguuguuccuga

SEQ ID NO: 4170858 - RNA, 57 nt, Human
ucagaauaugcuaaugacauuuaggaggggaaaaaacucauuuuuaguauauucuga

SEQ ID NO: 4170859 - RNA, 126 nt, Human
ucagaaucacuuggccaguuugucgaagcacagauuccugggucccacccccagaguuuaugauucaagaggucugggauggggccugaaaaugugcacuuccagcaaguccccaggugauacuga

SEQ ID NO: 4170860 - RNA, 58 nt, Human
ucagaaucucuggaggcuuggccaugugcauuuuaucaagcuccacaaaugauuuuga

SEQ ID NO: 4170861 - RNA, 130 nt, Human
ucagaaucucugggaggacuuguuaagacacaaauuacugggccucaaucucagaguuucuaauguaauagaaaauauggggugagcccagagaauuugcaauuucuuucaaguuuuugggugauguuga

SEQ ID NO: 4170862 - RNA, 117 nt, Human
ucagaauggaagggguggggaaaagcaaacaggagaagagcugucaccaauucuaaugaaagaauccaauacucaaguucuacugucucugucuuccucuuuauccuuucaucuuga

SEQ ID NO: 4170863 - RNA, 57 nt, Human
ucagaauguucccagucucaguacauucuccccagugaugcuggagugacauucuga

SEQ ID NO: 4170864 - RNA, 60 nt, Human
ucagaauuaagcucuuggucaguagcacugauuaauaacuugaccagagcccuguucugg

SEQ ID NO: 4170865 - RNA, 66 nt, Human
ucagaauugcuuaauucugaaaauauagugugggcaggcaccuauguccugagaguggagcauuga

SEQ ID NO: 4170866 - RNA, 64 nt, Human
ucagaauuggacaauagaagcacggugguuauguaccauagcucuguuaacaguccagcuuuga

SEQ ID NO: 4170867 - RNA, 63 nt, Human
ucagaauuguuugauggguuuguucagaugcagauaucugggugcuacaaacaguauuucuga

SEQ ID NO: 4170868 - RNA, 123 nt, Human
ucagacagagagaguagacuugacaccccucaacuggauauauuuagagauguuuucuuccauaaggagacacuggaaaguauuacaaggggucauucauuguacuccauuuuaaaagucugg

SEQ ID NO: 4170869 - RNA, 64 nt, Human
ucagacagcuugggauaacugaguuaccauaaaaccugcaauguugucucacccacugucauga

SEQ ID NO: 4170870 - RNA, 79 nt, Human
ucagacaucaugaguuccugcuuugcaaagcggagagagagcagcugugcagugcaugucggaacucauuucuguagga

SEQ ID NO: 4170871 - RNA, 88 nt, Human
ucagacauuuuccaaagaaagccaggcaugcuuggacagugggaucuggccacugucagcauccagcgccuggugcucugaagucuga

SEQ ID NO: 4170872 - RNA, 59 nt, Human
ucagacucucaucugguuccucagaucacccugaggacauuucaauacugagggucuga

SEQ ID NO: 4170873 - RNA, 65 nt, Human
ucagacucugcccgugccuuucccaguccgggacaaaggaccauugagagucgggcggggcuuga

SEQ ID NO: 4170874 - RNA, 70 nt, Human
ucagacugauaauuuaagucuugggggcugugauuuuggcaggcccucuuauauuagaguuaccaucuga

SEQ ID NO: 4170875 - RNA, 71 nt, Human
ucagacuuccugcacccgcccucagccuuaccgugcugcagagcuccggcggcggcgggggcaguguccga

SEQ ID NO: 4170876 - RNA, 62 nt, Human
ucagagaaaggccaaaauaucaucaccuuuguuuuacuugguaagaaauggccuguuucuga

SEQ ID NO: 4170877 - RNA, 62 nt, Human
ucagagaaaguaaacacuaaaaugacugcgugaccucauucagucauguuuuuacacuuuga

SEQ ID NO: 4170878 - RNA, 55 nt, Human
ucagagaaguaagguggggugcaaaucgacaggccaucugccuuuuacucuuuga

SEQ ID NO: 4170879 - RNA, 56 nt, Human
ucagagaauccguaagucacaacguuacccugcagguugugaacuucauuuucuga

SEQ ID NO: 4170880 - RNA, 56 nt, Human
ucagagagccucaggcacugccauccuacugauggagaacucugaugcucuucuga

SEQ ID NO: 4170881 - RNA, 58 nt, Human
ucagagauaacugcuacagauaggaaccucuccuucuguggcgcauaguugucucugg

SEQ ID NO: 4170882 - RNA, 56 nt, Human
ucagagauaaugaacauggcuuuggaaagcugaaaacugauguauauuaacucuga

SEQ ID NO: 4170883 - RNA, 71 nt, Human
ucagagauagacggccucuuaauuaaaacaauuggaaagaccaauuuguaaugagaagcuuuguuuccuga

SEQ ID NO: 4170884 - RNA, 130 nt, Human
ucagagcaaaaagguacaagcuuuacuugccaccagcagcugccagaguggaggccuuauguaauuacuucggcuucagccuuggcagcuuuuguuagcccaaaguggauuugcuauauuugugcuuuga

SEQ ID NO: 4170885 - RNA, 72 nt, Human
ucagagcacagaaaguauugacugaauauauauuuuaaaauaauuuguuaacuuucaugugcuauagacuga

SEQ ID NO: 4170886 - RNA, 82 nt, Human
ucagagcacuugugaugugcucagagaugauauuaaauguuuuauaucauuuuggccaugauacagacacauuugccucuga

SEQ ID NO: 4170887 - RNA, 79 nt, Human
ucagagcaucuguucccucucacuuaaagcuuggaaucaaauuagauucuguccagaaagggggcaacaaguauucuga

SEQ ID NO: 4170888 - RNA, 78 nt, Human
ucagagccugccccuccaccaggaugcugcagcgcuuuuauuuaaggcauucuguggucacaggggcagcagcgguga

SEQ ID NO: 4170889 - RNA, 91 nt, Human
ucagagccuguucacucugggggcugccgcugccugccagggagccuggugggggcugcucggcagcuccugagccagcugcacccucuga

SEQ ID NO: 4170890 - RNA, 77 nt, Human
ucagaggagaaggggaaggggcaggggugaaauggaaauucuccaauuccucaggcuucccuuuguccuucccuuga

SEQ ID NO: 4170891 - RNA, 66 nt, Human
ucagaggcagcugauguucugucuaagcuuuguacauguggugugauuugucagcagugcuacuga

SEQ ID NO: 4170892 - RNA, 66 nt, Human
ucaucuucccuccuccuccacugagcaaagcacugaaaggcucaagguugccaggaaggaagagga

SEQ ID NO: 4170893 - RNA, 64 nt, Human
ucaucuuucuuuauggaaauacaugguuuggagccccugguuuuguuucacaaagagagcguga

SEQ ID NO: 4170894 - RNA, 64 nt, Human
ucaugaaccugaggucacaucgcucaucgaagucaggggagcaagauuuaaacccaggucaugg

SEQ ID NO: 4170895 - RNA, 82 nt, Human
ucaugaaggcagcuccuauuagacacugaaugcuaagauaaacaaccagucuugucuaguuggaaccaagcagaccucguga

SEQ ID NO: 4170896 - RNA, 95 nt, Human
ucaugacaccugaggagucuaguuuauggcuucacuuggaauucaaguaacagagaagaagccacuauagauauucuaagcaggaauugucuuga

SEQ ID NO: 4170897 - RNA, 56 nt, Human
ucaugagaauuagagucauuuuuaacuaaugggaaaugacuaaauguucuuauaga

SEQ ID NO: 4170898 - RNA, 58 nt, Human
ucaugaucaaaaugucugauuaauguacacagugcauuaagcacacuuuugaauguga

SEQ ID NO: 4170899 - RNA, 55 nt, Human
ucaugaugucacagagaagcacaguugauugugcucuaccucagugucauuuuga

SEQ ID NO: 4170900 - RNA, 66 nt, Human
ucaugauuggaauggaauauguaggggcuucugggguguuggucauguucuguuucuuaaucuuga

SEQ ID NO: 4170901 - RNA, 105 nt, Human
ucaugcccucaauuuugaucuucaugauuuugucuuguguuaauaauugauaaggaauaguuaauaaagguauagaaucagggaagucaucaaaacggauuauga

SEQ ID NO: 4170902 - RNA, 56 nt, Human
ucaugcucugguuuagcuguuuuuguucuccugggaauacauagccuuagaguuga

SEQ ID NO: 4170903 - RNA, 63 nt, Human
ucaugcugaaacaauaacauacuggggaaggacauuccuuaguguuuauaguuuguagaguga

SEQ ID NO: 4170904 - RNA, 59 nt, Human
ucaugcugacauuguggcugauguacuggaggcguuuagcagcuucaaugucagcuuga

SEQ ID NO: 4170905 - RNA, 55 nt, Human
ucaugcugugaacuguauacauaugcauaccugcaauguauauuacuggcuguga

SEQ ID NO: 4170906 - RNA, 74 nt, Human
ucaugcuuggauuuccuaaggcgcagcugagucaucugcgugacugugccgugccccuaggacauaaggugcga

SEQ ID NO: 4170907 - RNA, 84 nt, Human
ucauggaaaggaacacuugccuugggagccagcaugccagucuucccugcaacagcugaccuuccccagggaccuucuccguga

SEQ ID NO: 4170908 - RNA, 87 nt, Human
ucauggagucaccuugucacagucaccgccuggggcagugugucaggaaggagguggcaacugucgacaggagacucagaagcauga

SEQ ID NO: 4170909 - RNA, 91 nt, Human
ucauggcaguuagcauuauauuaucuggugguuaugcucuuccucccuuuuuuaauaaguagcaugugcacaguaauuuucauugucauga

SEQ ID NO: 4170910 - RNA, 78 nt, Human
ucauggcuuccaguggcaccaacaugcaucaagacaagaaauuuaguucauguagugcucacuggaaaauccuaauga

SEQ ID NO: 4170911 - RNA, 57 nt, Human
ucauggcuugcuaguggcccaaguuuacaugacaaauaugugccaagaaagcuauga

SEQ ID NO: 4170912 - RNA, 99 nt, Human
ucauggcuuugagagaguagccucuuuggauggaaaauguauuccuggugucuaggccauuuucauuaauauuuaaaaaguacuuccuccccaccauga

SEQ ID NO: 4170913 - RNA, 65 nt, Human
ucaugggauugcuguguaaucuaaaugagauaaauguguaauaucucacacaugguaagcuauga

SEQ ID NO: 4170914 - RNA, 61 nt, Human
ucauggggaaagcccgcccucacacuugaccaaugagaaagggucuuugauuucccucuga

SEQ ID NO: 4170915 - RNA, 69 nt, Human
ucaugguaacuucauaaaguuacccaaauuuuacagccgauggcagugagacuuugugaggugaaguga

SEQ ID NO: 4170916 - RNA, 85 nt, Human
ucaugguguaaaugacuaauuauaacuaguuuaaugcucucuaggagauacuuacaguuuuagagcagaacuuguuaacaccaga

SEQ ID NO: 4170917 - RNA, 84 nt, Human
ucaugguuucaucaugauuuucuucauuuuuaggaguaacccuuauaugcacuccugagaaauaagcaaguaaugaaaauauga

SEQ ID NO: 4170918 - RNA, 60 nt, Human
ucauguacauguuucccaauuccucuggaauuuuccaucugagggaaaacauguaguuga

SEQ ID NO: 4170919 - RNA, 87 nt, Human
ucauguauugagugcuccaguggacugggggaggcaggccugcccgccauggccaccacccagccacugcauagcuugccaaacuga

SEQ ID NO: 4170920 - RNA, 67 nt, Human
ucauguauuuuagguaagagcagaagagacuagauugaagucuguuuauuacguaauuaauauaugg

SEQ ID NO: 4170921 - RNA, 93 nt, Human
ucaugucagaucuuuggugcuuguccugacacagcugucagccuuccagcucugugcaguucagggacacacaacaaagaggcagugacauga

SEQ ID NO: 4170922 - RNA, 59 nt, Human
ucaugucccugucccugguuucagauacaaaucacucuuaucagaggauagggaagugg

SEQ ID NO: 4170923 - RNA, 91 nt, Human
uaaagaaugaaguaauuccuccugguacuggcugauuguuuacgguuugccugaucuucaaggaaaaaauacaguuacuuuaugaucuuug

SEQ ID NO: 4170924 - RNA, 57 nt, Human
uaaagaguuucaguuaugcggcuaagaaauggcugccuuuagaacggaugcucuuua

SEQ ID NO: 4170925 - RNA, 90 nt, Human
uaaagcaggcugagugguaauacuagaaagcugagcaucucacucaguguuuauucaauguuauucauucagaaaacauaaccugcuuua

SEQ ID NO: 4170926 - RNA, 61 nt, Human
uaaagcaguguugggucggacgcaauuguggaccagaaaaauaauccaaugcacugcuuua

SEQ ID NO: 4170927 - RNA, 62 nt, Human
uaaagccaauauaccuagcauauaguuuauauaguuguugagauaugcuggguguugcuuua

SEQ ID NO: 4170928 - RNA, 68 nt, Human
uaaagcccuccugagaauuuucaguuggauauaaacacuauucaauuguauugguccaggaaucuuua

SEQ ID NO: 4170929 - RNA, 72 nt, Human
uaaagcugcuguguuggcauuggauagaaugguuaaggaauuaacugucacucuggcaacccaguaauuuua

SEQ ID NO: 4170930 - RNA, 62 nt, Human
uaaagcugcuuggcauugguaaagaaucuagauuggauuuggaaugugaugugaagccuuug

SEQ ID NO: 4170931 - RNA, 56 nt, Human
uaaaggaguaacugccggucaccacuuggaggucaucagcaggaagggcaccuuua

SEQ ID NO: 4170932 - RNA, 58 nt, Human
uaaaggagugugaugaaagggaccggauaauucuuuuccuauuucugugccucuuuug

SEQ ID NO: 4170933 - RNA, 63 nt, Human
uaaagguaugucuuaaucaaacauugcucacuuuugcguuugggacuuggggggauaucuuug

SEQ ID NO: 4170934 - RNA, 103 nt, Human
uaaaggugagcaaacccaugagcaguuuuuaaauugauguguuuuagucuacacaugaacaaauucuguuugaggguuaaagaagcuauuauuuuguccuuua

SEQ ID NO: 4170935 - RNA, 57 nt, Human
uaaagguuagaaagaaauuggaguuguaauuacuucuccagggaauuucaacuuuua

SEQ ID NO: 4170936 - RNA, 68 nt, Human
uaaagugacauuuuuguacaaagucagugcagaugcugucugccuugauaauaaaaauggucacuuua

SEQ ID NO: 4170937 - RNA, 78 nt, Human
uaaagugcagacucccggaaacaacaacuuauuuaucaauuaaaacagcagaguuggguuccagagaucugcauuuua

SEQ ID NO: 4170938 - RNA, 64 nt, Human
uaaaguguaugccaucucucaucaguaucucucauccaguuaauaggagaggauggcagcuuug

SEQ ID NO: 4170939 - RNA, 60 nt, Human
uaaaguguuacagaaacaaaugaacuccuauuaguuuucuauuguugcuguaacgaauua

SEQ ID NO: 4170940 - RNA, 63 nt, Human
uaaaguucaaagcugcaguaauggaaauuggaagaguaaguuuccuaugaguuuugaauuuua

SEQ ID NO: 4170941 - RNA, 61 nt, Human
uaaaguucuggcauuuucugucuucaaguuaugcugagagcacgguuuuuguggaacuuua

SEQ ID NO: 4170942 - RNA, 64 nt, Human
uaaaguuggaccugauuuuauugccaguuuucauucgaauccacugggaaaucggacgauuuua

SEQ ID NO: 4170943 - RNA, 72 nt, Human
uaaauaaaaguucuaagaugcuccacagagaagacaaaugacuucuacugggaacuuuuggaaugaauuuua

SEQ ID NO: 4170944 - RNA, 61 nt, Human
uaaauaaagggauucaacaugggggcaacagaagugcugagcagagcuaucccuuuauuua

SEQ ID NO: 4170945 - RNA, 66 nt, Human
uaaauaaugagauaaagcuaccauguugauuuucuuaggaaaucaagaguuauauuucauaguuug

SEQ ID NO: 4170946 - RNA, 130 nt, Human
uaaauacaaggaagcgaccugagaugaaugggaucauaucuguagcacacuggagccaacuugaagggacucccauugccauagauaggacaauuagaucauuaaaaggaauaaugccugcaaugguuga

SEQ ID NO: 4170947 - RNA, 79 nt, Human
uaaauauaucagugccuggaccccaugacauaucaauuaaaucaaaauaucuguggagggguuuaggcauucguauuua

SEQ ID NO: 4170948 - RNA, 87 nt, Human
uaaaucagaacgugcaugguguaauucuaaugcugcauugcugaaacugcuguagugcugggcuaucuacugcuacauucugauuug

SEQ ID NO: 4170949 - RNA, 78 nt, Human
uaaaucauggggaugagaucuuuaagaagaagaaaaccaaguugucuuccagaaguguuuucagaacccccuguuuug

SEQ ID NO: 4170950 - RNA, 70 nt, Human
uaaaucuccuguuuuucaucuacacagaagauguuguguuuagccaccagauggcgaaagaggauauuua

SEQ ID NO: 4170951 - RNA, 77 nt, Human
uaaaucucuugagcgauuuucauuuuuugcaaggccgcacugcugguguccuggaaaaauggagaguuagagcuuua

SEQ ID NO: 4170952 - RNA, 56 nt, Human
uaaaugauuaguaugugagguggugucuaugcuaauuaucuuacuuuagucauuug

SEQ ID NO: 4170953 - RNA, 82 nt, Human
uaaaugccaguguaaagaauuguggugucaguuauaggcaauagagaguuuccaucauuaacaccacaaggagcagcauuua

SEQ ID NO: 4170954 - RNA, 102 nt, Human
uaaaugguaguacaucuuggcaguggaauaccaggaacaguagaaaagaacugaaguucuggagucccacagccaggguuuaaauucugguucugccauuua

SEQ ID NO: 4170955 - RNA, 65 nt, Human
uaaaugucaaugugauuuauaagaugugugagaaaguaauuacaacagagguuaauugacauuua

SEQ ID NO: 4170956 - RNA, 58 nt, Human
uaaaugugucuauggacccgccugguaguaaguucccugccacccaaggacacauuug

SEQ ID NO: 4170957 - RNA, 87 nt, Human
uaaauuaauuuuuguaauucuguguuuuacuccaauuauauuuaaugguauaggcagagacauggagugggcagggagaugaauuua

SEQ ID NO: 4170958 - RNA, 72 nt, Human
ucaggcugugggaaucuguaaacauccagcauguuuacuucucugaauguuuuacccuuugcacaaaccugg

SEQ ID NO: 4170959 - RNA, 63 nt, Human
ucaggcuuaggagucagccugcuggguacuagcuguguggccucggcagguuccuuaguuuga

SEQ ID NO: 4170960 - RNA, 69 nt, Human
ucaggcuucagcauccacuuaguugccaguauaaaccauuggugacacaguucaugcaugaggucuaga

SEQ ID NO: 4170961 - RNA, 58 nt, Human
ucaggcuuccaacaaugauguugaaggauaaagaguuauaucuccagugggagccuga

SEQ ID NO: 4170962 - RNA, 81 nt, Human
ucaggcuuuuauucauggcuguguuguuccucugaagcucauuuugccuucuggagacccagcaacagggccauguucuga

SEQ ID NO: 4170963 - RNA, 87 nt, Human
ucagggaagacauaauugugucguuugauuuguucaccaaagagcaggucagauggaaagguuacuguccucuuaaaaauauucuga

SEQ ID NO: 4170964 - RNA, 73 nt, Human
ucagggaagauuucauugaguauagggguauacuuaaugaaaguauucuuauacucagugagcuauuccuaga

SEQ ID NO: 4170965 - RNA, 58 nt, Human
ucagggaauaaguagaugagugaaugaaugaauacacuugaauggcauuguuccuuga

SEQ ID NO: 4170966 - RNA, 124 nt, Human
ucagggaccacccuagccaggcccuccaggagacacccuuguguguacucaagagcaugccauuuacauaggcugucacauacauggugcuuucuuggugugccgcgcagugugucaacccuga

SEQ ID NO: 4170967 - RNA, 70 nt, Human
ucagggacccuccuggccuuuggcagccagcuuccuauugcaggagcugagggucuaggaggguucaugg

SEQ ID NO: 4170968 - RNA, 122 nt, Human
ucagggaguugggaaaggagauguaacuuccaucaugggccugagccgauucuugagagauggucagggcuggguaugaagaguugggaggagacacauuccaggcaccgagaacacccuga

SEQ ID NO: 4170969 - RNA, 77 nt, Human
ucagggauggguggggcagaggcgcuuccaaaugcuuuucuucauuugaauauagugucuguguuuucuauugcugg

SEQ ID NO: 4170970 - RNA, 56 nt, Human
ucagggcaaugucccucagaaggaaggucaccuacugaagaaugacagugcuuuga

SEQ ID NO: 4170971 - RNA, 61 nt, Human
ucagggcagcaaaguuugaccucaacuuuuaauucauaauuuugacaggcuguugccuuga

SEQ ID NO: 4170972 - RNA, 68 nt, Human
ucagggcuguuuuucagugugugauuuacucucuccccuuuaauuacccuggagauagcaagccguga

SEQ ID NO: 4170973 - RNA, 76 nt, Human
ucaggggacuuuuccaucuauuuguuucugccccuggcaaggcagcaggcagccauuuggaaggcacagccccugg

SEQ ID NO: 4170974 - RNA, 77 nt, Human
ucaggggccuggcccgggaguuuugaagagucaucuaacuugggaaugaugacugauuuggcugggucagccccugg

SEQ ID NO: 4170975 - RNA, 95 nt, Human
ucagggggaguggagguuggccuagagguccaaagcucugccccaaggcagaagcaugcuaaggauucucagagggcuccgccacacccugcuga

SEQ ID NO: 4170976 - RNA, 77 nt, Human
ucaggguggagcagggcggcuauugugggggucagccugggaaggcguccacaaaccugccagcccugcccuccuga

SEQ ID NO: 4170977 - RNA, 123 nt, Human
ucagguacauuugcauuuccgacaaacagaaucauuuuguauuguaauuaugucccgugcaauaauugggacauacuuaacauuaaagucauuuguuguucaucugaaauucaguguagcuga

SEQ ID NO: 4170978 - RNA, 90 nt, Human
ucaggucuauguacauauucucauaaggagcaagcaacccagaucccuccuuugugcuccuaugagaaucuaaugcuaccacugaucuga

SEQ ID NO: 4170979 - RNA, 81 nt, Human
ucaggucuuugucccaggccaggaauuuuugaacgacaggauccccugugaaaagagagccugugucagggugagaagugg

SEQ ID NO: 4170980 - RNA, 118 nt, Human
ucaggugauuugcccgccuuggccucccaaagugcugagauuacagguguagcugggcaugguggcgcaagccuguaaucccagcuacucaggaggcugaggcaggagaaucgcuuga

SEQ ID NO: 4170981 - RNA, 77 nt, Human
ucagguggaauaaccuuacuuauuacaugggucuucucugaguucaguuuuaaguuuagguucuucuuuuaccuuga

SEQ ID NO: 4170982 - RNA, 80 nt, Human
ucaggugggcuugagaacuguugcucuaaccaggggaucucaaagggaagucucaggacagcagcaucagccucaccuga

SEQ ID NO: 4170983 - RNA, 84 nt, Human
ucagguguauggguugugccucagaaucauuuaucaucuuauaaucaaugggauugauuuagcuucugaacacuaugcaucugg

SEQ ID NO: 4170984 - RNA, 99 nt, Human
ucagguuccagcuccuaguccuaacauugugaugauguggcuauuacuggacaugugcauaaacauauuguuggaggugcugggaauauuggaauuaga

SEQ ID NO: 4170985 - RNA, 66 nt, Human
ucagguugcagaggagagaaguggcucugcuguuuuacugggccaggaacucagcucugcacuuga

SEQ ID NO: 4170986 - RNA, 93 nt, Human
ucaguaaguuuagagagauuuuucugggauuaaugaucugccagagcaucuucagcauucuggaaagcuauucucucuggguuuguuuacuga

SEQ ID NO: 4170987 - RNA, 93 nt, Human
ucaguacauauguugauguucauuagugaaacaguuaucaaucuggccagaauugcccugaguacuguguuuuacuucagcauauguuucuga

SEQ ID NO: 4170988 - RNA, 79 nt, Human
ucaguacuucugcaucuuccagauuacucagcuguuucccagauuuauuacagucucuggaguauggagaaggaucuga

SEQ ID NO: 4170989 - RNA, 116 nt, Human
ucaguagcuuuaucucuggguaucauauugguuaggaacacaggcucuugucaggacauaccugggcuucaaucuuggcucugccauuuccuagcugcaugaccugagauaacuga

SEQ ID NO: 4170990 - RNA, 90 nt, Human
ucaguaggcucagugauggggacaucacgguaaugaauggcuggguccagcggccaucagaagugcuguccuuaucccugucaccucuga

SEQ ID NO: 4170991 - RNA, 74 nt, Human
ucaguauuugauacaugaaaugguggcaucuguccauuuuucucuuugcucaucuucauuuuguccaguacuga

SEQ ID NO: 4170992 - RNA, 63 nt, Human
ucagucagccagcuggugcggcagagcggggcucaggccgggcuccuccucaguugggacugg

SEQ ID NO: 4170993 - RNA, 77 nt, Human
ucagucaugggaaggauaccuuggaacauuuaauaauuuuuuggaguuucagcuugauucucccaaaaugugacuga

SEQ ID NO: 4170994 - RNA, 77 nt, Human
ucaguccuauauagcagugcacaguaggacaccauaaugauuugguugagccuuuuguguauguucucagguuuuga

SEQ ID NO: 4170995 - RNA, 66 nt, Human
ucagucucaucaacucuauuccuuugaaucccaaauacuaaacaguucagauaggugauggauuga

SEQ ID NO: 4170996 - RNA, 55 nt, Human
uccacuguucaguguaguugaacaagcacuugagcaauuacuaugaaccaguuga

SEQ ID NO: 4170997 - RNA, 78 nt, Human
uccacuuaagaguugagugauccugggaaagcuacuucaagugcugaagcuagaaguaccucauaggguuauuuugga

SEQ ID NO: 4170998 - RNA, 97 nt, Human
uccacuuauucauucagcaaacaguuucuggggaucuacuacgugauguauuaaaaugauuaggacccaaauuguguuguugaggaauuagucuggg

SEQ ID NO: 4170999 - RNA, 63 nt, Human
uccacuuccuugcucuaucucuguaauguucauuccagagguuaccuagagcaagaaaaugga

SEQ ID NO: 4171000 - RNA, 78 nt, Human
uccacuuuuugcugucccuauuccuugauggaaaauaaugucaacacuugauaauuccagaggaggacaguccuugga

SEQ ID NO: 4171001 - RNA, 70 nt, Human
uccagaaaccaugacugcucugggcucccaugacaucucauggguuuucucaaguagucaccuuuuugga

SEQ ID NO: 4171002 - RNA, 64 nt, Human
uccagaaauaaaguggacagaguaguuaacugggcuacuucuucucauucacuucauuuuuuga

SEQ ID NO: 4171003 - RNA, 64 nt, Human
uccagaagagcgugaaacagagguccugaccuauuuugggcuuucaacacaggcuuuccugaga

SEQ ID NO: 4171004 - RNA, 60 nt, Human
uccagaaucuucgguaacuggaagacaaguuguagucuaccaacagcugaaauucaugga

SEQ ID NO: 4171005 - RNA, 88 nt, Human
uccagacacuuucuuccuucaguucagggaacccucaauacacaguaagaaugaagagguugcaggucugagcuugaggaggacugga

SEQ ID NO: 4171006 - RNA, 69 nt, Human
uccagacugcuucuaggaugaguggccucaagcagcuacaucaucuuuauacuccuaaagcaucaagga

SEQ ID NO: 4171007 - RNA, 56 nt, Human
uccagagaauucuacgcagugcuguuacauuguucagcugcugaauuagcucugga

SEQ ID NO: 4171008 - RNA, 56 nt, Human
uccagagcuaauucagcagcugaacaauguaacagcacugcguagaauucucugga

SEQ ID NO: 4171009 - RNA, 55 nt, Human
uccagaggcuggguucaccucagauacuuacuugaaucuuauccaagccuccgga

SEQ ID NO: 4171010 - RNA, 60 nt, Human
uccagagggacguuaccaguucauguacaccucccauucuggauuuaugcuccuucugga

SEQ ID NO: 4171011 - RNA, 67 nt, Human
uccagaucaugaaguuugguucuuaaccuguagaagacagaaauaugaucagacuugcauuucagga

SEQ ID NO: 4171012 - RNA, 58 nt, Human
uccagaugauuguuagguagcuguugucuucugagagggaucugaggccucaucuggg

SEQ ID NO: 4171013 - RNA, 56 nt, Human
uccagaugcauucccuuuugcccuggagaaggcccugcaccugaaugcaucuugga

SEQ ID NO: 4171014 - RNA, 68 nt, Human
uccagauucucaccaagucccaugauggggcucuggaccuguccugggacccugggugcagagaggga

SEQ ID NO: 4171015 - RNA, 71 nt, Human
uccagcaagcauauuucagucuaagauguguucccuuucaaacagggacacauugaacauagcuugcugga

SEQ ID NO: 4171016 - RNA, 56 nt, Human
uccagcagggaauuaguagucuacgaaaagugaccuugcugccuucuuugcuugga

SEQ ID NO: 4171017 - RNA, 59 nt, Human
uccagcaggugucuagcaagggucuacugugugcugggcucugugcugggccugcagga

SEQ ID NO: 4171018 - RNA, 58 nt, Human
uccagcagguuggucaggugcaggcuuucagcucaaccuggcugcucaaccugcaggg

SEQ ID NO: 4171019 - RNA, 83 nt, Human
uccagcaucuccaguuagcaguacugauuuuuuuuccccccaacaaaggaacacuacaucaacacuguuggcggggaccugga

SEQ ID NO: 4171020 - RNA, 58 nt, Human
uccagcaugaaggggcuuuuauagccacagaagccaugaggggcccagcauccuguga

SEQ ID NO: 4171021 - RNA, 65 nt, Human
uccagcccucuggcccgcggugugaugccucuacucauggcaacaggcguggacaggugcugaga

SEQ ID NO: 4171022 - RNA, 90 nt, Human
uaaauuuaaggcccaucaguuuuaucugacaaaauaguuauuaucuaugucaaacuuuuugucagauaaaacggaugagucuuguauuua

SEQ ID NO: 4171023 - RNA, 81 nt, Human
uaaauuuauauauguuuucugggaagaaaagcuauuuuacaauauuaagucuuucuaucugagaagauaucuauuuguuua

SEQ ID NO: 4171024 - RNA, 129 nt, Human
uaaauuuuaugucuuauuuucagaaguagcagcucugugguaauaagaaacagcaauuauuuuagggcuaaaauagaagcucucugguucucagacugucacuugagcugaaagacauuaaaggaccug

SEQ ID NO: 4171025 - RNA, 59 nt, Human
uaaauuuuccaccuucuaaccuauaauuaaagacacugugggugaggauggagaauuug

SEQ ID NO: 4171026 - RNA, 102 nt, Human
uaacaaaccauccaaacuguagugacucaaaacaaaagccaucuauuuuacacauuauuauuuaagguggcaagcuggguuggguagccagugguucuguua

SEQ ID NO: 4171027 - RNA, 82 nt, Human
uaacaaaguaaacugagcaagauuuacagacaacuucggcgugguuucauacgagauguauugaagcacauuuauuuuguug

SEQ ID NO: 4171028 - RNA, 63 nt, Human
uaacaagaugauccaggaaagcuccugccaauuugguuguggagugucauuugaucauuguua

SEQ ID NO: 4171029 - RNA, 97 nt, Human
uaacacaccucuacccagguuggagaucugucuauggcagugcagaaauuuucccagucauuacaagauuuccaauuugaauguauuggugauguug

SEQ ID NO: 4171030 - RNA, 62 nt, Human
uaacacaguucucuguugcacagaauuucuaaugggugaauggcuacagagcaauuugguua

SEQ ID NO: 4171031 - RNA, 69 nt, Human
uaacacuacagggccauuggaggauuauaugagcuacugcaugugaagaauuucccaagguccuuguua

SEQ ID NO: 4171032 - RNA, 66 nt, Human
uaacacuguaaaccuagauguugcuaugguagcuccaaacugaauugucuagcuuugacaguguug

SEQ ID NO: 4171033 - RNA, 57 nt, Human
uaacacuguaacagcaucauuuucuaauguauggagaguuuguuaguacagcuguua

SEQ ID NO: 4171034 - RNA, 88 nt, Human
uaacacuuuuuauuuaguuuuuugcuguguuucauuggacauuugcuaguuauccaucaagcacaguaaaagcagauuuuagguguua

SEQ ID NO: 4171035 - RNA, 67 nt, Human
uaacagaaaggggacagaaauaagaauuugaaugaaaauaguugcuuuuaugucuuugguucuguug

SEQ ID NO: 4171036 - RNA, 80 nt, Human
uaacaggaugaaaauuacagauauuuuaagauucucuccaacaaguaucuucaaaugaguguggauuauucagauuguua

SEQ ID NO: 4171037 - RNA, 71 nt, Human
uaacagucaugugcuacugcuaaugagccugacccaaauugcauauuugugagcaaagcaaaugucuguua

SEQ ID NO: 4171038 - RNA, 80 nt, Human
uaacaguguguacauugacaagaacaccgguuugagcuuuaaguuaaaugaaauucaaaucccaguucuaccacuuguug

SEQ ID NO: 4171039 - RNA, 108 nt, Human
uaacauagguuaaaauggguagagguggcuccuucagggaauauggaaauuaagaagcaguacuuuauaugaaugacugacgcuuuucugcaauuuuaguuuuuguug

SEQ ID NO: 4171040 - RNA, 129 nt, Human
uaacaucagccucuagcuguuuaaaauguauuauuuagcaagguagguccauggacaucacaauuuacuggcguacaggacaccuaugcucaaauuuucauuuuuuauuuuggagacuuuuuuuuuuug

SEQ ID NO: 4171041 - RNA, 84 nt, Human
uaacauccuaucuguuauuuacccaucucugugaaacugauuaugagauuuuucccaggugacuagcaggaagcaggucuguua

SEQ ID NO: 4171042 - RNA, 61 nt, Human
uaacaugauauuguuugaggcuaauggccaccauguuugccuccuagcaguaaacauguua

SEQ ID NO: 4171043 - RNA, 85 nt, Human
uaaccaagacacaaaacucuaguuaugaaguuugucuguguaacaaaagauccauaauuggaguuaauagagaugugauugguug

SEQ ID NO: 4171044 - RNA, 79 nt, Human
uaaccaggcuauauauauuuauuaggcacuagaaugucaauugguaugccaaacaucugguuaccuagggucuggcuua

SEQ ID NO: 4171045 - RNA, 102 nt, Human
uaaccauguuguuuuucuagaccuuaaaggccacccugugaagcugcugccuggguauuguggucucuuaaaaugguccuggugaaaaaaacaacuugguua

SEQ ID NO: 4171046 - RNA, 99 nt, Human
uaaccauuccuuuuuacuuuauuuaaggaaagccaaaaugaauuugccucagaaaagcaaauguugacaauuuccugaugagaaaagaagggauaguug

SEQ ID NO: 4171047 - RNA, 79 nt, Human
uaacccucuaagcucugaaguagauucguugcaucuuguuuggauaaaugacaacaccugcuuuugacuuggaguauua

SEQ ID NO: 4171048 - RNA, 81 nt, Human
uaaccuaaccuuaccucauuacaucugcaaugaccuauuuccaaaugaggucagacucugagguacuggguuaagggguua

SEQ ID NO: 4171049 - RNA, 55 nt, Human
uaaccuuugaccuugcuugugcuugugaaggcaggaugcuggaggucaaagguua

SEQ ID NO: 4171050 - RNA, 55 nt, Human
uaacuacccuuacauuccucaggaaauaaugucuugagguacaaugggucaguua

SEQ ID NO: 4171051 - RNA, 75 nt, Human
uaacuacuagguuuaggccaggcaggcccaggccuaguuucgggccuggcgccgggcugccugucuuugguuuua

SEQ ID NO: 4171052 - RNA, 84 nt, Human
uaacuagaauggcaugggaaaugcaguggccuuuaagaaaucugguuuaugccacugucuuuuccaggcugaaauuucuuguua

SEQ ID NO: 4171053 - RNA, 75 nt, Human
uaacucagaacaguaaaauuaagggcaguuaauguuuauauuaauguuggcaugcucauuuuauuuuaagaguug

SEQ ID NO: 4171054 - RNA, 118 nt, Human
uaacuccacagcugcugugaucuuuguccauacaauguaacaucuuugagccucucuuugccuccagaaugaaggugauaccguaucucauaaaauucacagaggccugaaugaguua

SEQ ID NO: 4171055 - RNA, 57 nt, Human
uaacucucacagugcaacaugaagagggccaggugacccugcacgugaagagaguug

SEQ ID NO: 4171056 - RNA, 55 nt, Human
uaacucuuuugucuccuucuacugcuuuaaaaugcuggcggggaugagggaguua

SEQ ID NO: 4171057 - RNA, 64 nt, Human
uaacugcaugcuuuuauaucuguuuaaaagugauuucaauuaggcagguuagaagauacaguug

SEQ ID NO: 4171058 - RNA, 83 nt, Human
uaacuguauuuuaggucucauucuuuguauaugccuugacaauuaugauugcuugauuaaagaaagagcuuuugugcuaguua

SEQ ID NO: 4171059 - RNA, 55 nt, Human
uaacuuauuuuucccuaccugagaaaacugagucucagaaaggagaaguaauuug

SEQ ID NO: 4171060 - RNA, 75 nt, Human
uaacuuuuucuaguuaguuguugaacauggaugugaugguucuccuuucaugaaagacagcaacugugaugguua

SEQ ID NO: 4171061 - RNA, 74 nt, Human
uaagaaaaagcuguagcugugcugauuucuagucuuccuuugagucugguccucuucacaguggcauuuuuuua

SEQ ID NO: 4171062 - RNA, 67 nt, Human
uaagaaacugucacaguacuauccauagaguggaaaacaaugaaguacucguugacaguugcacuua

SEQ ID NO: 4171063 - RNA, 72 nt, Human
uaagaagacccucucuguggcaauuagcauuauuuuaaaaauugucaacagauacuagagagcuuuuuuuug

SEQ ID NO: 4171064 - RNA, 79 nt, Human
uaagacccuuuggugaaccucugaaaggcagugacuaggagacccucucugcuggacaaagggguuuccgacagucuua

SEQ ID NO: 4171065 - RNA, 56 nt, Human
uaagagaugguuaucaaaagcacuugcaugccaauguuuucuugugccauuucuua

SEQ ID NO: 4171066 - RNA, 57 nt, Human
uaagagcagaacagcaacauauagggagaggugcauauguguuuguuuugcaucuua

SEQ ID NO: 4171067 - RNA, 81 nt, Human
uaagaggauccgggguucauuuucacugagaggacggaagaccuuuaaguugauuauaaccacuggaguaaagcucucuug

SEQ ID NO: 4171068 - RNA, 89 nt, Human
uaagagggguaagagacucaucauaauauggaaucuuguucugacaucuucggaaaaguucucuaugguguaaaaacuucaaccucuug

SEQ ID NO: 4171069 - RNA, 66 nt, Human
uaagaguaucuauuaaguacuuugcacaauaucugaugcauauugaguacuuaaaagcuauuguua

SEQ ID NO: 4171070 - RNA, 73 nt, Human
uaagaucaaagaagagaugugggcugcugugcauugugcaugccaguguauuuaguccagucucucaugcuua

SEQ ID NO: 4171071 - RNA, 61 nt, Human
ucaggaagugccuaggcuggccaagucuggggaaagugggcuggcccggggcugcuccuga

SEQ ID NO: 4171072 - RNA, 67 nt, Human
ucaggaauaaacuuagaaugucuacucuuaccaugccuauuaacaugguacaagauguucuaacuga

SEQ ID NO: 4171073 - RNA, 90 nt, Human
ucaggacagggaggcagggccaggagcaagccaggcucugggagggacccgggagcaauggcagcuucugauguggucccuugcuuuuga

SEQ ID NO: 4171074 - RNA, 57 nt, Human
ucaggacauuugucagcaggagccaaaugggaaauucugagcaacagguguuccugg

SEQ ID NO: 4171075 - RNA, 65 nt, Human
ucaggaccaagcaaaguuucuuugcuaggcaaaacuccaacuggaaggaaaagcuuggucucuga

SEQ ID NO: 4171076 - RNA, 86 nt, Human
ucaggaccacaguggagauugcagauucaguucuggcaaaguaggacuuuaagagaaucacuggaauuguuuuuuacagguucuga

SEQ ID NO: 4171077 - RNA, 82 nt, Human
ucaggaccuggcucugugcagucagggcucagucccaggcaggccugggacuggccuggggcugggcacagcagguccauga

SEQ ID NO: 4171078 - RNA, 55 nt, Human
ucaggacgaugaucaucuucauaggauucccgaccugugccuggcuuuguccuga

SEQ ID NO: 4171079 - RNA, 68 nt, Human
ucaggagcuggguuccuuuggugggaaauuggcauuuuuugaagccacugaaggauuucagcaaauga

SEQ ID NO: 4171080 - RNA, 57 nt, Human
ucaggagggaguguggauagaguggauuguuguccccaguuuuccacacccuccugg

SEQ ID NO: 4171081 - RNA, 61 nt, Human
ucaggauccauagacucccaaaggccuccacagauaaacuugagaaucucauggacccuga

SEQ ID NO: 4171082 - RNA, 70 nt, Human
ucaggaucuaaaguuagaaagcccauaaagauaggacacuugucugccaugcuaacuucaguauccuaga

SEQ ID NO: 4171083 - RNA, 60 nt, Human
ucaggauucuccucagaguacagcauuggauugauucuaagauuugaggaaauguccuga

SEQ ID NO: 4171084 - RNA, 64 nt, Human
ucaggcaggacccaaccucccugcucugugcucucacagugccuggcugauggguccugucugg

SEQ ID NO: 4171085 - RNA, 63 nt, Human
ucauaaaguucuaagaauuguagaaaccauaaaguugagguuuauaguuuuuagaauuauaga

SEQ ID NO: 4171086 - RNA, 79 nt, Human
ucauaaauacuuuaugcgauucacagcuguaaccuaaugaguucucauauuguuccugagagucaguggagugguguga

SEQ ID NO: 4171087 - RNA, 55 nt, Human
ucauaaauuggguuggcuggguacuucauguguucauuccacccauauuuaucga

SEQ ID NO: 4171088 - RNA, 67 nt, Human
ucauaaugauuccuuuuaauuuaagcuaaaacuauaguaguuuuguaaaaggaggaagcauggauga

SEQ ID NO: 4171089 - RNA, 83 nt, Human
ucauacaccagaauucagaucaugaaugacugacagaauauuuuguugggcaguccugauuuaaaacuaauacuggcuugugg

SEQ ID NO: 4171090 - RNA, 71 nt, Human
ucauacuaauuuacacugccauuaguuaguauauucucugacuguaagguaaggauaaaaccuugguaaga

SEQ ID NO: 4171091 - RNA, 65 nt, Human
ucauacugugaauuuuccaauauuccguuaggaaagcucccuggaauuucagaagagcagcauga

SEQ ID NO: 4171092 - RNA, 77 nt, Human
ucauagacauuaauuucuuugguaauuuaaaacuaguaaauccuaguaauuaucaggguaaggagauuaagauguga

SEQ ID NO: 4171093 - RNA, 56 nt, Human
ucauagucagugggauaaugucaguaaagugucuugauuucuuccaaagacuaugg

SEQ ID NO: 4171094 - RNA, 68 nt, Human
ucauaguuacacaaaagcaagugugugugcguguguaugcacgucuaugcuugugugagaaaauguga

SEQ ID NO: 4171095 - RNA, 111 nt, Human
ucauauaauuuuguuguuuugaguucuaucuucaggauacugguucuaaaauuggaauucccaagucccaggcuggaaucaauauucuggcucuuacugacuauugugugg

SEQ ID NO: 4171096 - RNA, 62 nt, Human
ucauauagcauuuugcaaaauggcaguuagcaaaaaauggcugcucaguaaaugcugaguga

SEQ ID NO: 4171097 - RNA, 65 nt, Human
ucauaucaaauugacauaugcuguacuugcuuaaaagugagucagccaguuaagucaagaaauga

SEQ ID NO: 4171098 - RNA, 129 nt, Human
ucauauguaaagucagcccaguauccaggaaagguagaagauucauuuccucugaauuagucguaggaaguggcauauucaggucauuuggaucccugccugcccugggcugaauucacagcucuuaca

SEQ ID NO: 4171099 - RNA, 105 nt, Human
ucauauucuuuguguccaucagucucucauugcaguauguuguauaucauguaaaaaugaugccuaugaauuguaaugugaaauugcaaauauuucaagaguuga

SEQ ID NO: 4171100 - RNA, 89 nt, Human
ucauauuuagcacuugcugguggcauuuacaguuugccuucuagccauuggaaugcacacccagaaaaauccaauugcugagguuauga

SEQ ID NO: 4171101 - RNA, 74 nt, Human
ucauauuucuacuugccaaaugacacauuguauuuucccugucaaugcaaucaguaagcaaguggagaaaaugg

SEQ ID NO: 4171102 - RNA, 107 nt, Human
ucaucaacauuggccaggcgcgguggcucacgccugucaucgcagcacuuugggaagccgaggugggcggaucacaaggucagggaccagccuggccaauaugguga

SEQ ID NO: 4171103 - RNA, 58 nt, Human
ucaucacuccccucaucaggacuguucuuuacaccccucaggggaccugugagccuga

SEQ ID NO: 4171104 - RNA, 66 nt, Human
ucaucacugccugccccugccccccagccagguuugcugaggguccaggucuucaggcagagaugg

SEQ ID NO: 4171105 - RNA, 78 nt, Human
ucaucagcuugucuuuugauagcaugaguauuaacuaugaaaugguuauaaauugcuaugcagaaugaacagcuguga

SEQ ID NO: 4171106 - RNA, 117 nt, Human
ucaucagggcaaagagucacagugagaaugggaagggagagcccuuggcugugucacacacagggauccaguguccuuccuuuccauggaaguggcuuuugagccaagacaggauga

SEQ ID NO: 4171107 - RNA, 69 nt, Human
ucaucaguguagaguugcuggauuggcuggacacuuuccagcucugauccauaauuuauaccaagaugg

SEQ ID NO: 4171108 - RNA, 81 nt, Human
ucaucaguucccaucgcauuugagcaaucuuuuccuaccagggugggaagaugcaaaauagauguagugaauacgagaaga

SEQ ID NO: 4171109 - RNA, 75 nt, Human
ucaucauggcuguagcccugugaauuagugccuugaugauagggccacagaacagcuacaggacacccauggaga

SEQ ID NO: 4171110 - RNA, 76 nt, Human
ucaucaugggcauucuuggaagcccucugcaagauccuguuucaaguucugcaaguuugggguccaaccuguguga

SEQ ID NO: 4171111 - RNA, 89 nt, Human
ucaucauguucucaugacuagaguauuaguucaaugucuuccgugccauggcuguugaaaguggagaaccugguugugaagauggauga

SEQ ID NO: 4171112 - RNA, 58 nt, Human
ucauccaccauaagcaccuacugugugcuccaggcccaggggacaguaugguggauga

SEQ ID NO: 4171113 - RNA, 67 nt, Human
ucauccagaccauggucauacucgagucagcauguugugucaguuaccugacagugguuaugaauga

SEQ ID NO: 4171114 - RNA, 89 nt, Human
ucauccgcagcaauuggacgccugccuuuugccuacacuuugugagcaacguguggcagaggaggcagcguccccgcggcugccguuga

SEQ ID NO: 4171115 - RNA, 93 nt, Human
ucauccuauuugggucuucuguuacuugcaaccacaggaugcuaguuaauaaacccacuuguaguuuuaaagcaugagccccaaauuauuuga

SEQ ID NO: 4171116 - RNA, 67 nt, Human
ucauccuucuaccuaggacuauuuuucagacuuugacccugggagguagagcuccaguagaaaaugg

SEQ ID NO: 4171117 - RNA, 58 nt, Human
ucaucgccucgugcaucuuggcucugaaaugaaguugccccagguuugcaggcguugg

SEQ ID NO: 4171118 - RNA, 129 nt, Human
ucaucguguccauuccuacauaauucacauugaaggugcuuucuucauuuugauacacuguaggauuuuaguagaggaaaaagaaagcauuaaagugaauauuguucuguggagauuuccuuauagugg

SEQ ID NO: 4171119 - RNA, 67 nt, Human
ucaucuccuuccuuaggcaauuugggagaguacuaaguguaacuccuuugcuuugccuaguugaugg

SEQ ID NO: 4171120 - RNA, 87 nt, Human
ucaucuccuuuugagcuggagguuaucagagagcaucucaauuuauagaaauggaaucugaggccuucagcaugaaucuuuggguga

SEQ ID NO: 4171121 - RNA, 80 nt, Human
ucaucucuauuggaacugagcaauggcaugaaauuaggagaaaaguaauuucauugagaguugaguuccuguggagauga

SEQ ID NO: 4171122 - RNA, 74 nt, Human
ucaucucuucaaccaugaaaucacaagcugaggacuuaggggagucauuagagauugguuugugguaagaguga

SEQ ID NO: 4171123 - RNA, 111 nt, Human
ucaucugaagauugaacuggguaucuauuuccaagagcuuuaauuguugaccgaauuugguucgucaagggcuguuggacuagagaaugcccucaguuccuugucauauga

SEQ ID NO: 4171124 - RNA, 59 nt, Human
ucaucugcauguguuauauuugguucaucaacagggaaaaaaauagacacaugcauuga

SEQ ID NO: 4171125 - RNA, 64 nt, Human
ucaucuguaagauuuuuggcuuucgagguacuuauuugaaagcuaaaugaggucuuacagaaga

SEQ ID NO: 4171126 - RNA, 78 nt, Human
ucaucuucaguguuggcuacaucugccuggcagcaacauggcugcaacaauuucaggcaggguuaacaucuggaaaga

SEQ ID NO: 4171127 - RNA, 63 nt, Human
ucaucuugcugccauugcuuuaguuuaaacuggacccacaaaucugagcaaugucagcaauga

SEQ ID NO: 4171128 - RNA, 78 nt, Human
ucaucuuuuccaagauuuauacagaaauuuuauaaucagagaaaagguagugggaagagggguauaaagaagggauga

SEQ ID NO: 4171129 - RNA, 68 nt, Human
ucaugaagcuuacaguaugaucaacuuuucaccuguggaaaaauauaauuaugcuguaaguuguuuga

SEQ ID NO: 4171130 - RNA, 63 nt, Human
ucaugacaugugaauugaauauuauuugcugcucacugcaaacauuuucagcauaugguauga

SEQ ID NO: 4171131 - RNA, 82 nt, Human
ucaugacuaucauauuuucaugacuaccuuaaauaagcacaaagcuuauuucaggggguacaagaagauaggguaguuuuga

SEQ ID NO: 4171132 - RNA, 114 nt, Human
ucaugagcaauuacauucacauuucucugaaauauauacaggaauugaauuguuuaaacaaauaauuuaugguauguguguaauaguggauauguauugauggguguguacuga

SEQ ID NO: 4171133 - RNA, 55 nt, Human
ucaugaggaugcacaaaacaacuuuuccuuugcuugugcaauaguuuucucauga

SEQ ID NO: 4171134 - RNA, 100 nt, Human
ucaugagggucaaauaccuugagauaacagaguugggaagugaaaccagauugguuuuacuccagaauuccuauucugugacguucaaauaacuccguga

SEQ ID NO: 4171135 - RNA, 85 nt, Human
ucaugauuccguuuauguguuuacuauugcauaaauaccuccaagggcuuuggcucuaguaaauauaaccugacuauugaucuga

SEQ ID NO: 4171136 - RNA, 74 nt, Human
ucaugcaauguuaguuugaaagcaccgguucauuaaggauauuaauuuucugauaacuacacauuuaagcauga

SEQ ID NO: 4171137 - RNA, 58 nt, Human
ucaugcagauaagaauaaguaaggagauaacuaaaugauuuggucaaugucugcguga

SEQ ID NO: 4171138 - RNA, 62 nt, Human
ucaugcccauguugggguucuuugaacuggccccagauuauagugggcccaacauggcgugg

SEQ ID NO: 4171139 - RNA, 60 nt, Human
ucaugccugagacuguuaauuggcucagcauucaggcacauuugagacauccaggcaugg

SEQ ID NO: 4171140 - RNA, 74 nt, Human
ucaugcgguuaggaaauguaaaaguagauaagaauuacggguuuucuuguacaaaugcauauuccugggcgugg

SEQ ID NO: 4171141 - RNA, 90 nt, Human
ucaugcuaccagcuagguaauagacuugcagcccaugggaacaaagaggacuuacaugcagcugcucuguuucuuagcuggguaaaauga

SEQ ID NO: 4171142 - RNA, 81 nt, Human
ucaugcugagcccuuauuuguagaauaauaucuuucuggaguaggcauuguagagagccauguuuuacaacccagcaauga

SEQ ID NO: 4171143 - RNA, 85 nt, Human
ucaugcuuaagauauuaaugacaugugagaggaaugaccugaaagacaagcuucuguucacauuuuaucuauuuuaagucaauga

SEQ ID NO: 4171144 - RNA, 60 nt, Human
ucauggaccaacaucugacugaucccuaagaaaucugaaggucagaggauuuggcuauga

SEQ ID NO: 4171145 - RNA, 56 nt, Human
uacugucagaaugucaaagcaaugaauuuaauaauguuuugauagcaaagacggua

SEQ ID NO: 4171146 - RNA, 76 nt, Human
uacugucuuuccauccuugccuggucuggaauugagaacagaagaccuaugggggcaucaaggagggaaaguagua

SEQ ID NO: 4171147 - RNA, 95 nt, Human
uacugugcagcagaggucugacacugaaugguacuaccagucagaaggcuggggaacaaucauacaugcuuuagaccucuaagagccuagcagua

SEQ ID NO: 4171148 - RNA, 62 nt, Human
uacugugguaacauuuuaaauugccauauguagaggcaaaauugguuaaaaaugcuacagug

SEQ ID NO: 4171149 - RNA, 87 nt, Human
uacugugguucagggacuguccuacauggagagguccaguaccuggacuuuggggucugauaguccuagguuugaauuucacgugug

SEQ ID NO: 4171150 - RNA, 62 nt, Human
uacuguguaguauuguugugaugauuaaaugcgugaacacaucuacagcugucugcacagua

SEQ ID NO: 4171151 - RNA, 59 nt, Human
uacuguguugugcugaaagggagaaugguuguuuucccucacuuguguucaauacugua

SEQ ID NO: 4171152 - RNA, 61 nt, Human
uacuguuauuucuuccuguccuucaaacaccccugcaagacagacaggaaggcuaccagua

SEQ ID NO: 4171153 - RNA, 72 nt, Human
uacuguuuuacagugauagagaguagcuaugagaaaauuucaaaguaauacuaaauaucaccuagaaaagua

SEQ ID NO: 4171154 - RNA, 64 nt, Human
uacuuaaaacugauagaaucucaucauuuagaugaauccauaauugugucagugaauuugagua

SEQ ID NO: 4171155 - RNA, 73 nt, Human
uacuuacaaaggagaggagauagguaccaaagacuaacgcuauaagaaaucucuccaucuccuuuuguaugug

SEQ ID NO: 4171156 - RNA, 84 nt, Human
uacuuacauacccagcuggggaaguggggcauaugguucuacauaucuuauuuuauuucuccaaaacaugcuaagugguaggua

SEQ ID NO: 4171157 - RNA, 83 nt, Human
uacuuauuuuuuauagacaaguaugagaaagcuauuaccuccugaggagcaauagccuacaugcgucagagacagagugagug

SEQ ID NO: 4171158 - RNA, 108 nt, Human
uacuucaaaaguauguucuugacauagauguuuuaguaauacugucauaaacaaagacuuaggugaugguacuaaaauaguuuauucaaggcuaaacucuuuugagua

SEQ ID NO: 4171159 - RNA, 61 nt, Human
uacuucacaguaaauccagaagaaauuaugcacuuaauuuuucugggugaauuguguugua

SEQ ID NO: 4171160 - RNA, 56 nt, Human
uacuucuguaagugcgccaaggggccgcagguacuuaggcugcacuugaggaagug

SEQ ID NO: 4171161 - RNA, 129 nt, Human
uacuucuuccuuuagagucagguguugugugucucuuuuuccugccuuauuguacuggagaggauaccagugcaauauucaaaguggagaggaguuuuuucaauaaacaaacaaauauuaaaguagaua

SEQ ID NO: 4171162 - RNA, 97 nt, Human
uacuugagacugccacagaauuaaagagcaacaaguuugguuuuaggaaacuaaaauuccagccucaguucuauuauaugugugugcucucuuggua

SEQ ID NO: 4171163 - RNA, 64 nt, Human
uacuugaguagcaugauucuagguauugauauaugcaauaaaagagaucaaagcuugccaagua

SEQ ID NO: 4171164 - RNA, 93 nt, Human
uacuuggugacuugugaguuguugauacgggagcuagauuacaugucaguaaacaugagaauagaaaugugauaauagcuuaaggaacuagug

SEQ ID NO: 4171165 - RNA, 72 nt, Human
uacuugucacuguuuuacauguuauuuaauaauuuacaguuauuuaaaagugguaagauuccaaggcaagua

SEQ ID NO: 4171166 - RNA, 116 nt, Human
uacuugugcuuuuauucauuuauucaaaaagugcuaaauaagcccugaaggggcuuuuggggggucauuuggggcuuauuuagcacuuuuugaauaaauaaauaaaagcacaagua

SEQ ID NO: 4171167 - RNA, 81 nt, Human
uacuuguguaaacaucaguacaaagacuaaaagcucauuguaaugaauauguuaguuaauugacuauguugcauacaggua

SEQ ID NO: 4171168 - RNA, 68 nt, Human
uacuuuauauaugagaaagcugaacuucagaggguugaaaugaaguuccugagcucauauagcaagua

SEQ ID NO: 4171169 - RNA, 76 nt, Human
uacuuuguggugucuauauuuuuauucguggagaucugucuucaaacugaaaauuuagaaugaacauuucaaagua

SEQ ID NO: 4171170 - RNA, 63 nt, Human
uacuuuucuuugucaugcaucuuucuguuggagaaacugaccacugcauacagaggggaagua

SEQ ID NO: 4171171 - RNA, 80 nt, Human
uagaaaagaaggccaagaggcuccaagaucuuaagaaccuguguuuuauaucaagaagcguuuuugcuuucuucauuuua

SEQ ID NO: 4171172 - RNA, 65 nt, Human
uagaaaagguauuggcuggaagccgagagaccugaugugauccuggcucucccaauaccuuucug

SEQ ID NO: 4171173 - RNA, 55 nt, Human
uagaaaaguaugggacugacauacacauuaaaguauggucccucacuaaauucua

SEQ ID NO: 4171174 - RNA, 101 nt, Human
uagaaaauaaaguagagcucuugcuaaaccauuucuagggaucauaaaguagaaucuugcuaacuauuccuaaagaucaaggguuuaauuuguuccuucua

SEQ ID NO: 4171175 - RNA, 101 nt, Human
uagaaaauacagugagauuugcuggguaaauagguuuugaaccaugaaaaaauugauggcaugcaagaucuuccucaauagaccuaagagucucauuucua

SEQ ID NO: 4171176 - RNA, 59 nt, Human
ucaugaaaacugaaauucagaguggcagcugcugcuggcugacucuggucccaguauga

SEQ ID NO: 4171177 - RNA, 91 nt, Human
ucaugagcucucugaaugcaaggccuguaucugauuuacuuuugauucccugguccgaggccuuaguauauaaagagccaucagcucguga

SEQ ID NO: 4171178 - RNA, 60 nt, Human
ucaugaguggcugauguccucuagucuugcuuacugaccaaaauaucagcuacuucaugg

SEQ ID NO: 4171179 - RNA, 55 nt, Human
ucaugaguuuucuggucaccuugguuguaagagcaaaagauuagaaaacacauga

SEQ ID NO: 4171180 - RNA, 63 nt, Human
ucaugaugagggucccuggggaugcacuaagaaugcaaugccaccugagacuccucaccauga

SEQ ID NO: 4171181 - RNA, 57 nt, Human
ucaugcacaugugucaccaucagcauuuuuaugugccaguaaugcaucuguguauga

SEQ ID NO: 4171182 - RNA, 74 nt, Human
ucaugcacuagcuaaauaaccaguugcgcucauguacccugaagcaaauuguuuagccugacccauguguaaga

SEQ ID NO: 4171183 - RNA, 58 nt, Human
ucaugcagcaauaugcauuaggugccuguaauguacuagaugcuauuuuagcugcugg

SEQ ID NO: 4171184 - RNA, 60 nt, Human
ucaugcagugaaucuuucuugccagagagacuaaaaaggcagagagcuagaacuucauga

SEQ ID NO: 4171185 - RNA, 86 nt, Human
ucaugccuaaaauuacuucauuauuggaaccaguguuugaucugugauuaagagcuggaugaagaaaucaaguaaucagccauuga

SEQ ID NO: 4171186 - RNA, 71 nt, Human
ucaugcuaccauuauugaucuuaggcuuuuggggauaacaaccuaagcucagagguagauaauguugcaga

SEQ ID NO: 4171187 - RNA, 73 nt, Human
ucaugcuaugugccauucaauucuacaaguauagagagcgaucugucuuguagacugaaggcuucaggcagga

SEQ ID NO: 4171188 - RNA, 61 nt, Human
ucauggagagguguguucuugaaguuuucccaagggaaagaaucuauauaucaccaccaga

SEQ ID NO: 4171189 - RNA, 81 nt, Human
ucauggauucguuugcuagauuuugaauucagugaucuaauucaagagaauucaguuaucuaauucaagaagaucaaauga

SEQ ID NO: 4171190 - RNA, 70 nt, Human
ucauggcauccucuccagugcugucaucccuuccaccaaguggguuucagggagucacgcuggugccaga

SEQ ID NO: 4171191 - RNA, 71 nt, Human
ucauggcuugggggcuacccuaacauugccuguaugaaaugcaggcuuugacuuggggcagccaggccaga

SEQ ID NO: 4171192 - RNA, 55 nt, Human
ucaugggcugcugacaggggcucagggaugcucccuggccccauccauccuauga

SEQ ID NO: 4171193 - RNA, 83 nt, Human
ucaugggggcugccuugggcagaguuacggagccgcucacucagcgcucaugucggcaggacucgcccauugugccacccaga

SEQ ID NO: 4171194 - RNA, 81 nt, Human
ucaugggucugcugggaaggucugcucaguucugugguugcagguguuuacagcugagcccucaucccuaguuuccgguga

SEQ ID NO: 4171195 - RNA, 72 nt, Human
ucaugguucaaucuggccugacugcagcauccacggcauuguggaaaugcucgccuuggccgagacacguga

SEQ ID NO: 4171196 - RNA, 59 nt, Human
ucaugguuggagucaaaucccagcgcuaccuacuggaugugcuguguggcccagcauga

SEQ ID NO: 4171197 - RNA, 72 nt, Human
ucaugguuuugagccuauuaugcuguuaguaugaucagcauugccccacaauuuaggcuuucaaaugccaga

SEQ ID NO: 4171198 - RNA, 83 nt, Human
ucauguaaauguaaguugccaaaggucauagucuuggaucauauacuccagugagaauucuaaacuucuuggcaauuuuaugg

SEQ ID NO: 4171199 - RNA, 82 nt, Human
ucauguaauacauuaucuucagugaauggcaagaucuauucuaauacguugaacaccuucacuggaugaauguaauacaaga

SEQ ID NO: 4171200 - RNA, 55 nt, Human
ucaugucaaaaucuaaugccagcccauuuuuccuugauauuagguuuugucauga

SEQ ID NO: 4171201 - RNA, 56 nt, Human
ucaugucucuaugugccuauuaccuaaucugguaguaguuacugaauaaaggcuga

SEQ ID NO: 4171202 - RNA, 77 nt, Human
ucaugucugggaguccuauauucuuuuaaaauuugcauuagauuaauuguggaaccuguauggucucucuugcauga

SEQ ID NO: 4171203 - RNA, 67 nt, Human
ucaugugacaggcacuguucugaguguuaaggaugcagcagagaaaagacagucccugucuacauga

SEQ ID NO: 4171204 - RNA, 82 nt, Human
ucaugugguacucuucucaagagggaggcaaucauguguaauuagauaugauugacaccucugugaguggaguaacacauga

SEQ ID NO: 4171205 - RNA, 70 nt, Human
ucaugugucuagugcuaaagcaacucccuggguaggcuuuucuaacagauguggaacacuagacugcuga

SEQ ID NO: 4171206 - RNA, 56 nt, Human
ucauguguuaaacuccaagauagguggaaucucaccauccugacauaaccacauga

SEQ ID NO: 4171207 - RNA, 58 nt, Human
ucauguguugcacugaggaccugccaccuuaugugguguuuuugccaaaaaugcauga

SEQ ID NO: 4171208 - RNA, 64 nt, Human
ucauguucugggagaucugacuuuacaaccaaaauucuguguuagaauuuacccagcaacgugg

SEQ ID NO: 4171209 - RNA, 79 nt, Human
ucauguuuucaggaagugcugccuggugucuaaccugaaggcguccugcugcaguauaagccauuccuuccucccauga

SEQ ID NO: 4171210 - RNA, 66 nt, Human
ucauguuuuugccauaugacucuacuuuccugacuguagaugucuugccugggggcaaauacauga

SEQ ID NO: 4171211 - RNA, 66 nt, Human
ucauuaaaaugcagauucugacucagugaaucuggagugggaccugggaaucugcauuucuaauga

SEQ ID NO: 4171212 - RNA, 69 nt, Human
ucauuaagggauuuagagccagagucuuuuuccaaagagaaaaaggacugaauaauucucuuucguuga

SEQ ID NO: 4171213 - RNA, 60 nt, Human
ucauuagaaccgucaauaguaaaugaaagcagugagaugccucauuuacgguuuugauga

SEQ ID NO: 4171214 - RNA, 56 nt, Human
ucauuagcagcuaugucagcagaggccacacuccugacaagaagaccugguaauga

SEQ ID NO: 4171215 - RNA, 84 nt, Human
ucauuaggacuuuggcauuuuaaauaguucagcuuguaaacccagggccaucugugcaggugaccuaauccaugucucugauga

SEQ ID NO: 4171216 - RNA, 85 nt, Human
ucauuagguuggugcaaaaguaauugugguuuuugcaauuccuuucagcuacaaaauugcaauuacuuuugcaccagcuuauaga

SEQ ID NO: 4171217 - RNA, 79 nt, Human
ucauuauuguauucuguuacagcaacauaaagacaaugcucuauguuucugagauuaauagagauagcaguuagaauga

SEQ ID NO: 4171218 - RNA, 95 nt, Human
ucauuauuuauuuugaaaccuuaaguauguuuacacaagucuguccagcauagauuuagcugugaacagcuuggcuuuaaaaugcuagcugauga

SEQ ID NO: 4171219 - RNA, 62 nt, Human
ucauuauuugcuuuaguuauguucuauaaagucaccaagaacacugacuuggugaauacuga

SEQ ID NO: 4171220 - RNA, 60 nt, Human
ucauucaccauaaccaacaugucaguuucaggguaaacaggcaagaugggugguggggga

SEQ ID NO: 4171221 - RNA, 94 nt, Human
ucccauuuccaggagggagaugccuuuggcucggaggugacauauugguugaguuacccagugaagccgaggcagaacucccugugagauggga

SEQ ID NO: 4171222 - RNA, 86 nt, Human
ucccauuuccuuugucguugauugguuuagguauggguaaugugauuuaauccuggacaaugagaugucaggggaaauuuguagga

SEQ ID NO: 4171223 - RNA, 70 nt, Human
ucccauuuguucgcccagcuccaagagaagucaucgccuucauuguggguuguuuugggcaaaugaugga

SEQ ID NO: 4171224 - RNA, 94 nt, Human
ucccauuuuuggaaggccccucacagcuuggggcaggagagggugagggguggcucccacugucugucuugcugcaggguuggcggggauggga

SEQ ID NO: 4171225 - RNA, 55 nt, Human
uccccaagcagcagaacccauggcagcucgagacagcgucuguguggcuugggga

SEQ ID NO: 4171226 - RNA, 82 nt, Human
uccccaaggccuaggcugggccugccuuccagggggcugaaauauggacacccuuugggaaaggcacagccaggacaaggga

SEQ ID NO: 4171227 - RNA, 130 nt, Human
uccccacagcagcccucccuucugaugagggacucagccugacuccuuggaucugggagguucuucaccuccaggcccauggagcagagcugagccgcucaaguuuccaggcugggaaaauccuguccag

SEQ ID NO: 4171228 - RNA, 65 nt, Human
uccccacaguuuauaaaaugcuuuuuccaacucagagaaagugaccuugaaaacugguuggguga

SEQ ID NO: 4171229 - RNA, 60 nt, Human
uccccacaucucugcaucaggcugucuugcaaauuccugacuuguuaggggaugagggga

SEQ ID NO: 4171230 - RNA, 60 nt, Human
uccccaccuaagauacccaucucccauuccucgggccagagggaagagcuuagaugggga

SEQ ID NO: 4171231 - RNA, 63 nt, Human
uccccagagucucauuuggacaaggacagagccuuguccuuuacuugagacucaaugugggga

SEQ ID NO: 4171232 - RNA, 130 nt, Human
uccccaucugcagaaaggaucugggcacccuuccuccagccuaagccucgccuggcccccaggaguguccaagucauccuagggucaguguggcaggagaaggaggugccuguaggagagaugcagccga

SEQ ID NO: 4171233 - RNA, 129 nt, Human
uccccaugcauacagcucagucaauguccugugguuccucagggcagcuguacucugugucagggacaggugagaugaggaacaccugcagugaccaaggccuggcugaggcugguaagaggcaggaaa

SEQ ID NO: 4171234 - RNA, 55 nt, Human
ucccccaacucuuagcacuguagccagguguaguuauaaauaaacguugggguga

SEQ ID NO: 4171235 - RNA, 57 nt, Human
uccccccagauccccaugugaccugcucaucagaggaggcccagagucuugggggga

SEQ ID NO: 4171236 - RNA, 72 nt, Human
ucccccccgaccccgaccucgcaaagcgcacucccgggcaggguguggucuggaaggcggggcuggcgggga

SEQ ID NO: 4171237 - RNA, 106 nt, Human
uccccccucaaauacccuaguggcuccuucaaucugggccacuuccucaggggaaacaggaugucuucuccaggcuugggccaggucucuggggucugggguggga

SEQ ID NO: 4171238 - RNA, 63 nt, Human
ucccccgugugcaucgcuggcugaucccaguuccaggggugugagaagggcaugcagggagga

SEQ ID NO: 4171239 - RNA, 82 nt, Human
ucccccuaaagcagugggcaccuugagggcagaaccuugccgcgggcaucucuggccccugggguccgagcacugagcggga

SEQ ID NO: 4171240 - RNA, 56 nt, Human
ucccccucauuaccucauucaacucucucaauagccuugugaguaaucagggagga

SEQ ID NO: 4171241 - RNA, 60 nt, Human
ucccccugcccagggauauggccugggcaugucuauccauauccugggcauggcauggga

SEQ ID NO: 4171242 - RNA, 60 nt, Human
uagaaaauggccaagcaggacuugaaucuaaguucacuauucugcugugccaugccucug

SEQ ID NO: 4171243 - RNA, 59 nt, Human
uagaaacaaugacaugcuuguagcaauaagcacagcuagcacccaggucuuuguuucua

SEQ ID NO: 4171244 - RNA, 56 nt, Human
uagaaaggcaagcgugaaauaugaugguauugcccucuauuucaaagugccgucua

SEQ ID NO: 4171245 - RNA, 67 nt, Human
uagaaauaagaugugcuugaguuuggagucuuacaauuucacaaaauaucaagcacuuuuagaacua

SEQ ID NO: 4171246 - RNA, 80 nt, Human
uagaaauacaaauuauaggccccauccuagaucuacugaaucagaaacucuagggauggggcucagcaauuuguuaccug

SEQ ID NO: 4171247 - RNA, 96 nt, Human
uagaaauaucccuguuuucaguagaaaggagcauuuuagacuacuuuuaaagauaauaaacuggcaaaugcuccuuccauuacaguuuuguuucua

SEQ ID NO: 4171248 - RNA, 61 nt, Human
uagaaauauuccuuguggcucguaggcugccuaugcgguaaagacagccuucaggauucug

SEQ ID NO: 4171249 - RNA, 58 nt, Human
uagaaauccccagucucauaguaucuuuuguuacuuuugucagggcugggggauucug

SEQ ID NO: 4171250 - RNA, 63 nt, Human
uagaaauguacaccguggguuuuuuaauuuuuaaaauuaaaacaucaugguuguacauguuug

SEQ ID NO: 4171251 - RNA, 83 nt, Human
uagaaauuguuuacauuucccccuuggaggcugcuaagcccuuagagagccucagaggaggggcagugugaaaauaaaggcua

SEQ ID NO: 4171252 - RNA, 83 nt, Human
uagaacacugacaugggaucaaugaggcaggcuaucuaauccaggcagccugcucuggaauccauguaaaaaccacuguuuug

SEQ ID NO: 4171253 - RNA, 64 nt, Human
uagaacaggaagugagaagcagcacagacaagacacugcuucuccagaccacugccucugucug

SEQ ID NO: 4171254 - RNA, 91 nt, Human
uagaacauguguuccggugucugggacaugcccuuacuccucuucagcuagggcucugugcaccccagcaccgugaaugcacaggacuuug

SEQ ID NO: 4171255 - RNA, 74 nt, Human
uagaacucugcuuggaauuucuuggacuuggucucauuuacuugguucaacuuuucuaaguagucagaguacua

SEQ ID NO: 4171256 - RNA, 71 nt, Human
uagaagaaaguagaauaacuacaacuaaguuuucaauaaauugguuugaguugucucuauaaucuuuucug

SEQ ID NO: 4171257 - RNA, 121 nt, Human
uagaagaaguuauuucccuuuauguuguauuccuaagucaugacaaauuuuuauuagcaauuuggagaauuagagaaugccuggcauuaacaaaguuuuggggaaaugggacuuuuuucua

SEQ ID NO: 4171258 - RNA, 73 nt, Human
uagaagacgaauggcuacauuugugcugguuugcuuauuucugggcucucaauguagugcccuuugucaucua

SEQ ID NO: 4171259 - RNA, 58 nt, Human
uagaagaggauaucgaagucauuuaagucaaaauuucaauugaugauguucucuuuug

SEQ ID NO: 4171260 - RNA, 89 nt, Human
uagaagaucauggugucagcaggauagguuucuuuggaggccucuccuuggcuugcagacggcugccuucuugcuguaucuuucuucua

SEQ ID NO: 4171261 - RNA, 62 nt, Human
uagaagccagaagaguaauccuaguuccucucucucacaaagaguugcucuguggucuuuua

SEQ ID NO: 4171262 - RNA, 101 nt, Human
uagaagccuuaggcucuuuaaggguaaggaacucagaucagccuccuaccagaccuaggaaucuccuccacagaguccuugccaaagggccucacugucua

SEQ ID NO: 4171263 - RNA, 111 nt, Human
uagaagcuuugauugcagguaaauuuaaggcaagauguuuuauaacccaccagcaaaccauauuagcaaugauuauaaagcauuuuugaaauuaugagauuaaagcucuua

SEQ ID NO: 4171264 - RNA, 77 nt, Human
uagaaggcagggugccgacuucagggaugaggccaaggugacauccuagcuggggaguuggcgcuaccugcugguua

SEQ ID NO: 4171265 - RNA, 62 nt, Human
uagaaggcccugguauucuugaggcucacuuugccuugggauuucucaugccaaugcuucua

SEQ ID NO: 4171266 - RNA, 57 nt, Human
uagaaguuuggcgggagagauaauuuuuacaaaauuuguaaauaccugccaauucua

SEQ ID NO: 4171267 - RNA, 94 nt, Human
uagaauaaagaucauucugaaggcuuagucucugaagauggcaagggggaaaacuuuaaagagggaaagacuucagauuuuaauuuaauuucug

SEQ ID NO: 4171268 - RNA, 68 nt, Human
uagaauaagcuuuugauuagaggaggagugugaagcacuucuucugagagaaaaagcucauuauuuua

SEQ ID NO: 4171269 - RNA, 87 nt, Human
uagaauaccgcuaauggucaucugucaaauugcaauaagagaguuuaauuuuauguucaaucagagcaggguuccuguugguuucua

SEQ ID NO: 4171270 - RNA, 82 nt, Human
uagaauggaauacuuagucuuucugaugaaauggaucuuacuuaauuucauugauuuuugaggacugguauucuccuuuuua

SEQ ID NO: 4171271 - RNA, 55 nt, Human
uagaauguggagguaacagacuccuaccggaucuguagaugcccaccagguuuua

SEQ ID NO: 4171272 - RNA, 90 nt, Human
uagaauucugccucacagucuaggugugugauuuaauuucuuccauuuuaagacuuugcuuuauuccuagcccuugugguagcuguucug

SEQ ID NO: 4171273 - RNA, 62 nt, Human
uagacaaggaggcaggaucuggggaguuuuacagaggcuccaggcaauguuucugaacucug

SEQ ID NO: 4171274 - RNA, 59 nt, Human
uagacaguggcagucguguucucuagaagagccuggagaucaggaagacugaacugcug

SEQ ID NO: 4171275 - RNA, 57 nt, Human
uagaccugaaugaucauuuucaaccagauggaggaaggugucauugaugggauucua

SEQ ID NO: 4171276 - RNA, 74 nt, Human
uagacgacaucuuuccuagauacccagaaaacgggagucgcugucaggcugggaguuucuagagaaagacucua

SEQ ID NO: 4171277 - RNA, 112 nt, Human
uagacuauuaaacaugcauguacacacacauacaugcacaccuaaauauauauguauauauguguuuguguguguguguguauauauguguauauauauauuuuauaguuug

SEQ ID NO: 4171278 - RNA, 79 nt, Human
uagacugaguuccuucacagcaguuauuuuacucaucuuugucucuccaguaccuaaaacuuugaaggugcucagugua

SEQ ID NO: 4171279 - RNA, 83 nt, Human
uagacuuugauuauaaauucacuccugguagaccugaacuacaguuauuagguacuucuacuaguuguggugagaucaagcua

SEQ ID NO: 4171280 - RNA, 56 nt, Human
uagagaaaaccacuggugagcuacauguagcuucucaaagcuacugguuaccucua

SEQ ID NO: 4171281 - RNA, 66 nt, Human
uagagaaauaagaggauauuuggccagaagaauguauuucucugcaguguguuuuccuuaacucug

SEQ ID NO: 4171282 - RNA, 68 nt, Human
uagagaagagaaugcacaaaggugucuauugcaguaaguuuuguucucaacauguuugugucuuccug

SEQ ID NO: 4171283 - RNA, 60 nt, Human
uagagaagauggucagaucuccacuacagaacucuccucuggcuucagccauuuucucug

SEQ ID NO: 4171284 - RNA, 59 nt, Human
uagagacaaagauuugcagauuaggcuagcaaauagaauaaaacuguaacuuuguccug

SEQ ID NO: 4171285 - RNA, 56 nt, Human
uagagacauccauauaguugcuucuaugauauggcaagcaacaauaaaauguccug

SEQ ID NO: 4171286 - RNA, 56 nt, Human
uagagagaugaggccuaaucagacacacuggagauuucagagccuuuaucucucua

SEQ ID NO: 4171287 - RNA, 70 nt, Human
uagagagugaggcuuuuggaugaacuguaagugacuucuauauagauucuugaaccagugccucucacua

SEQ ID NO: 4171288 - RNA, 125 nt, Human
uagagaucagggaaaaauuauagccuaugucuuaacucuuuaugguguuuaagagcuguuaugaggcuuucaguuacagcugcaccagagccugagaauaggcuucucucuuuccuccuucuuug

SEQ ID NO: 4171289 - RNA, 71 nt, Human
uagagcaagcccagaugugagaacugaggcuccgagagguucagugacuuaccuggagccauuaacaucug

SEQ ID NO: 4171290 - RNA, 107 nt, Human
uagagcaaugauuauggaaguuucauaaaugcauauaaauguugcugucauaagaccaugaaagacuauuguuugugucaaugacuucugcaacagaauuuucucug

SEQ ID NO: 4171291 - RNA, 83 nt, Human
uagagccaccguauaaagucauuucaaaaguugaagugggaauguauuuagauuuuugagauauuuuauuugguacagcuuua

SEQ ID NO: 4171292 - RNA, 55 nt, Human
uagagccagcaccuagcagacuaccuggaucugcugccauggucgcuggugucua

SEQ ID NO: 4171293 - RNA, 80 nt, Human
uagagcuagauucuuugcuagaucauugggaggucaggaggacccagcagugguaugggaggggauuugggauaauucua

SEQ ID NO: 4171294 - RNA, 64 nt, Human
uagagcuauuuaucagccagaaguagucaaauccuugacuuauucugguucuuggacuguuuua

SEQ ID NO: 4171295 - RNA, 73 nt, Human
uccccaugucuaaauaugagguuggaauaaauacauucuaaaaaccuuucccauacuaagagauuaugcggga

SEQ ID NO: 4171296 - RNA, 56 nt, Human
uccccauucagagugaugcagugagggccagaugucuuccugcugugugaagggga

SEQ ID NO: 4171297 - RNA, 58 nt, Human
uccccccagcccccacuuaccccaagggaaccugggagugaaaggagggcugcaggga

SEQ ID NO: 4171298 - RNA, 67 nt, Human
ucccccuccaugggggcuggccugugucaucaaaaaggaagcagcagccaucccccaaggaaaagga

SEQ ID NO: 4171299 - RNA, 80 nt, Human
ucccccucucuaauccuugcuaccugggugagagugcuuucugaaugcagugcacccaggcaaggauucugcaaggggga

SEQ ID NO: 4171300 - RNA, 68 nt, Human
ucccccuggccaguuugcucaggcaguccaucccgagacagcaagagccagcugggcaagccggggga

SEQ ID NO: 4171301 - RNA, 63 nt, Human
uccccgaagaggaaggggcagggggagccuauaucucucucccaccccuugacucuuuaagga

SEQ ID NO: 4171302 - RNA, 78 nt, Human
uccccguuaaugaacuggacgcccccuuccugcggggcuagguggcaagggcagccaguaacgucauugcccggagga

SEQ ID NO: 4171303 - RNA, 69 nt, Human
uccccguucacagccucugccccaggcacaaggaaaaguccccagugucugggcaggccugagcaggga

SEQ ID NO: 4171304 - RNA, 62 nt, Human
uccccuccaccagagcagcuccuuugcucagugaagaguaaagcagcguggguggggcagga

SEQ ID NO: 4171305 - RNA, 81 nt, Human
uccccuccuucucuagggguuucucuuucucucucaaaacaagaguuuagagaauuaacauuccauggcuagugaguggga

SEQ ID NO: 4171306 - RNA, 76 nt, Human
uccccucucuuauaauccugaagaaccaguauugcuaacccacuucaagaaccacuggcaggaugagugaugggga

SEQ ID NO: 4171307 - RNA, 63 nt, Human
uagaguuuguaauaaugaaggaaguaagugcugcugaugguuccacaucuauuauaggcuuua

SEQ ID NO: 4171308 - RNA, 61 nt, Human
uagaguuuguaguucuacauggcuccauauacauggagauuuuuagaauuacagauauuua

SEQ ID NO: 4171309 - RNA, 64 nt, Human
uagauacacauauauuauuuguggcucaauuuuuguuugggaauuuaacauauguguguaccug

SEQ ID NO: 4171310 - RNA, 60 nt, Human
uagauagauucuccuauagaguggcagggcucacgucaucauuaggagagaauuuauuua

SEQ ID NO: 4171311 - RNA, 87 nt, Human
uagauaggccagucuaagggugccugaguuagggcagaacuuuucucauauguucuuguaaagcucaggcacaaagaaaacuagcua

SEQ ID NO: 4171312 - RNA, 79 nt, Human
uagauaguaaggcacaauaucuguucagcaguggauucaaauggaaacuuccaccaaauaguauauaugcaucuguuug

SEQ ID NO: 4171313 - RNA, 96 nt, Human
uagauauaagauaaagaugaaaacaggacaauuuugagccaccugacugaggauuggcaguaggcagguugucuucuuaguuuuguuguguguuua

SEQ ID NO: 4171314 - RNA, 55 nt, Human
uagauccagcuguuauguuauggccuuggaggacauauucaccaguugugaucua

SEQ ID NO: 4171315 - RNA, 88 nt, Human
uagauccuggugcuauucuuucaggcauaucaaguaaaagacauuuaaaugguuuuuguccuuccugaaaguaguagguugagaucug

SEQ ID NO: 4171316 - RNA, 72 nt, Human
uagaugaucaggacuucacuucuuuugauuuauuuccugaggggagugucugcagugaugucucuucuucua

SEQ ID NO: 4171317 - RNA, 60 nt, Human
uagaugcaguauaaaucauuucuggaggugacauaguaccccaccguaguacuguauuug

SEQ ID NO: 4171318 - RNA, 75 nt, Human
uagaugccugugacagucucugucauauaaauaagaauaugcugcaauuuauaugaacuggacuuuaggaaucug

SEQ ID NO: 4171319 - RNA, 58 nt, Human
uagauguggugguuucuguugaauaacccuuaugguggucaauuuucuacaacauuug

SEQ ID NO: 4171320 - RNA, 61 nt, Human
uagauuaugaguagaaugcaaggccauaaauuguaucugcugcaggcuacuucugacucua

SEQ ID NO: 4171321 - RNA, 95 nt, Human
uagauuauucuuagcuugacaugucagcucuuuauugaaacaaaaauggaaaaaauccauagcuguccuucaaagaguuccaugaagaauaacug

SEQ ID NO: 4171322 - RNA, 98 nt, Human
uagauuauuucauugucauuaaaugaagggaaaguaggaggaucuaauucuaucccuagauuccuuaauaaguacuucauugucagugaaauaauuug

SEQ ID NO: 4171323 - RNA, 59 nt, Human
uagauuccauccagaguuugggaagcugaauucuuccuacaacugugugaaggaaucug

SEQ ID NO: 4171324 - RNA, 62 nt, Human
uagauucuacagcucagcuguccaacaggugccuauugaacaugugagauguggcuggucug

SEQ ID NO: 4171325 - RNA, 89 nt, Human
uagauucuuacugucugugacuacuacgugccaccaagaacuucccacuggugaugccaaaaacguggagccacagauggagcagucua

SEQ ID NO: 4171326 - RNA, 68 nt, Human
uagauugauugcaaagacaggcauacuauucaccaaucucuguaugcacacucuuugcaaugagacug

SEQ ID NO: 4171327 - RNA, 83 nt, Human
uagauuggauugguuuaaggucuacuucaucuugcaagcaucuuuguucccauggauagugaccuuguucuugauucagccug

SEQ ID NO: 4171328 - RNA, 78 nt, Human
uagauuggggcaaaaguaauugcgguucuugcaauuaaaaguaaugggaaaaacugcaauuacuuuugcgccaaccua

SEQ ID NO: 4171329 - RNA, 59 nt, Human
uagauugggucuguuauuaugggcuaguguauaguauaaguaauauacagacccaucug

SEQ ID NO: 4171330 - RNA, 82 nt, Human
uagauuuaacaucauauugguagagauguguaacuucuuacauggauuagacaucaagaagccaauguguacauauaaacua

SEQ ID NO: 4171331 - RNA, 80 nt, Human
uagauuuauuucaugaggagcccucauuuagguuucaaacaucuggagccuuagucuggcuucucuuuugaaaacaucug

SEQ ID NO: 4171332 - RNA, 71 nt, Human
uagauuucacacucagagucuguuugguaccugaaacaacagguagcuauccagacgcugaauggaaucug

SEQ ID NO: 4171333 - RNA, 104 nt, Human
uagauuuccucuccuugugauuuugauuauuucuuuuaugguuuuaaguaaagaguuguuauguuagaaggaauguuaaaaguaacaaguaacaaggaugucua

SEQ ID NO: 4171334 - RNA, 90 nt, Human
uagauuuggaaggugcugaaacuggucaauuaaucuggauacucagaugacuuuuagguucauuuugauuuuucaguccuucugacucug

SEQ ID NO: 4171335 - RNA, 56 nt, Human
uagauuuggacuuuauucacaaauaaaguacagugugaguuaaggauccaauucug

SEQ ID NO: 4171336 - RNA, 62 nt, Human
uagauuuguccagacuugauuacagcauuauuauguuuauugauaaaagcuggacacuucug

SEQ ID NO: 4171337 - RNA, 62 nt, Human
uagauuuuuaaaagguggcucuggaugcauaagaguagaagcagaggccaguuaggagucua

SEQ ID NO: 4171338 - RNA, 81 nt, Human
uagcaaaugccugguuaauuagaaaaucucauucagacuacauuguuuuugucagagaaugguuagccuguguuuaugcua

SEQ ID NO: 4171339 - RNA, 124 nt, Human
uagcaacauguauuucauaggaaaaagggaggaaggaaauuugauaagccauuguuacugucuuuuagcaguggggauuauauuuauauuuucuucuuaccuguccauauuuuucaaguugcua

SEQ ID NO: 4171340 - RNA, 61 nt, Human
uagcaagagagagugcgcucacagaagcauuaugcaaaaugucuuuugucucuuuuugcug

SEQ ID NO: 4171341 - RNA, 85 nt, Human
uagcaagccagaauuggaacccagagcucauaaaauuuguaggaauaagacauuuuaacaucuggguuuuuauuagguuaagcug

SEQ ID NO: 4171342 - RNA, 79 nt, Human
uagcaagccuuuacuaaugucuucuucagcugaauaauuguuuguuaucuaguuggaggagaugcuaaagaaaguguua

SEQ ID NO: 4171343 - RNA, 74 nt, Human
uagcaauauugaucuuggaacugauuuugguguuacaccgcccgagcggguuuaauuaggguuugaaaaugcug

SEQ ID NO: 4171344 - RNA, 79 nt, Human
uagcacacgaaugcacucacccaucacucaguucagugcaugauuaugugugaaugugugauugcuagauuggugguug

SEQ ID NO: 4171345 - RNA, 59 nt, Human
uagcacagucuucgccaggcugaggcugcuucccagcuccugugugucugacugggcua

SEQ ID NO: 4171346 - RNA, 96 nt, Human
uagcacguuuggaccucuuccugcacuuaaagucaugccuaccuucaugcgcuccaggugucccagguaaaaagagccauuccccaagcgaugcug

SEQ ID NO: 4171347 - RNA, 102 nt, Human
uagcacugaaaugaauucauugacguuuguagagcuuuguagaaacacuugcuugaccuaccacaaguguauuaagcaacguuauugguccacccugugcua

SEQ ID NO: 4171348 - RNA, 71 nt, Human
uagcagagcagggaucagagccugggcugucaggcccguuaacuggccauggucaccaauaugucgugcua

SEQ ID NO: 4171349 - RNA, 55 nt, Human
uagcagcacuauuuguuguagugcagagcuagaugcaauccacagaagucugcua

SEQ ID NO: 4171350 - RNA, 57 nt, Human
uagcagcauccuguggugaugguuuauggagaacaguauggccuggggcugcugcug

SEQ ID NO: 4171351 - RNA, 86 nt, Human
uagcaggacuaaaucaucugccagugccagaguacauaaaucuaucucaagcugugacuuuucacaggcugguccuuuuccugcug

SEQ ID NO: 4171352 - RNA, 82 nt, Human
uagcaggcaggaauagcuuucgacacagcucaguucucauaaaugugaggcagugugggccaagcuucccuuccuaccgcug

SEQ ID NO: 4171353 - RNA, 67 nt, Human
uagcagggagggaguaggagucauggagccuuuuuuuccccuguuuuccaacuucccaucccugcug

SEQ ID NO: 4171354 - RNA, 55 nt, Human
uagcaguagcauuuaacauauauugaguacucacucugugucaggugcuaugcua

SEQ ID NO: 4171355 - RNA, 74 nt, Human
uagcaguaugaucuccagggcacagagucccuuaggacaagagccacugaugcccugguagacacagacuguua

SEQ ID NO: 4171356 - RNA, 56 nt, Human
uagcagugauaguagaaagccaggaccccaaaucuuuggccagcugucuccugcua

SEQ ID NO: 4171357 - RNA, 76 nt, Human
uagcauaaggucucaaauuugcuggaccaguagaaauucuuuagucuuugcauuccaaaauuugagauugauguua

SEQ ID NO: 4171358 - RNA, 64 nt, Human
uagcaugcugguuacguguagcaugcugguuauguguagcaugcugguuauguguggcaugcug

SEQ ID NO: 4171359 - RNA, 65 nt, Human
uagcaugggaguugguggcagagcugggucuagaaacccaaguccugcugccacucuaccugcug

SEQ ID NO: 4171360 - RNA, 69 nt, Human
uagcauugcgguuuugcuauguuuguguuuugauaaauuaauguaaaaacaugcagcacaugaaugcua

SEQ ID NO: 4171361 - RNA, 65 nt, Human
uagcauuucccaaaugcauuugaccuucuaggaccuagucaaguguggggccuggggaaaagcug

SEQ ID NO: 4171362 - RNA, 72 nt, Human
uagccacacaggcgaugauaucugauaacaguagaguguuauagugucuauuugaauuauccuaaugggcua

SEQ ID NO: 4171363 - RNA, 75 nt, Human
uagccacauaagaccaaaguucuguagggaugaguuugagaacuguuccuuaccucaagcuuguggucauagcua

SEQ ID NO: 4171364 - RNA, 67 nt, Human
uagccaccucuuggcugguuugcagugcuguggauuuucuggacagccaugcaaaugagcuugguua

SEQ ID NO: 4171365 - RNA, 61 nt, Human
uagccaggcgaggucagugucggcaggcuaccuggucauuauugcugccucguccaggcug

SEQ ID NO: 4171366 - RNA, 61 nt, Human
uagccauuggcaggggaggcgcuugagcccuugagugggugugcucccuugcgagucgcug

SEQ ID NO: 4171367 - RNA, 58 nt, Human
uagcccccaaaagugcuuaugaucaaaauuagcuggacaagauauauuuuggggggua

SEQ ID NO: 4171368 - RNA, 57 nt, Human
uagccccugaaucuaaaagcaucucucucucuugcucaugggugcuccagguggcug

SEQ ID NO: 4171369 - RNA, 70 nt, Human
uagcccugagucucucaaccucggcacuauuggcauuuggagccugauaauucgugguuguggagggcug

SEQ ID NO: 4171370 - RNA, 112 nt, Human
uagccucaggcauguccuucaggagggauuccagaggcauuguuauagacgaugacagcucuguguguguuauugccacugaagaccuuccaugggacgcgauguggagcug

SEQ ID NO: 4171371 - RNA, 98 nt, Human
uccacuuaaucauaaucacuauacaccaaaauauuaaggcuggugguauuucaagugaccuuuauuuuguguguguuuagcuggagugaagaagaggg

SEQ ID NO: 4171372 - RNA, 67 nt, Human
uagcuauucacaaguugauggauauuugggucauuuccaguuuuuucaacuauuguggauaaaguug

SEQ ID NO: 4171373 - RNA, 71 nt, Human
uagcucuacuuauugugauuccugccucuuuccacaaguugggaugaugguggguuauuacacugaugcua

SEQ ID NO: 4171374 - RNA, 57 nt, Human
uagcugagugagcuuagguaaauuacuaauguucuucagcuuuaguuuacucaucua

SEQ ID NO: 4171375 - RNA, 80 nt, Human
uagcugcaugacauuuagcaaacugacuucucuggacucuauuccuuuaaaagugguguguuggaagaaaucauguguug

SEQ ID NO: 4171376 - RNA, 66 nt, Human
uagcuguuaauauacaaaugguggaaaguauuauugccuaucacaguuuugaauauaaugcagcua

SEQ ID NO: 4171377 - RNA, 57 nt, Human
uagcuuacagugacccugcagauuuuguauuauauaagacugccucacuuaagucug

SEQ ID NO: 4171378 - RNA, 64 nt, Human
uagcuucauguauugucucugcguuguucuauuuuaauaguugcauauggagacaauaaagcua

SEQ ID NO: 4171379 - RNA, 88 nt, Human
uagcuugccauuuuuuccaguguuauuuuagagugugauaaauguaaauauauauauauaaggagauacuuucuuaacauggcagcua

SEQ ID NO: 4171380 - RNA, 72 nt, Human
uagcuuggugcacaaguuauugcaguucauugaaaauaaugggaaaacugcaauuauuuguucaccaaccua

SEQ ID NO: 4171381 - RNA, 68 nt, Human
uagcuugucagugaauagcuguagaagccacauaauaaugaggggcauggcugacucacuguacgcua

SEQ ID NO: 4171382 - RNA, 66 nt, Human
uagcuuguugaccuacuguaacaugugaaauauaccguguuucacaucagagguagauuagugcug

SEQ ID NO: 4171383 - RNA, 74 nt, Human
uagcuuucccuccucaccaaccuugccuucuccucucccaagaaaagcaggguccaaggagauguagagagcua

SEQ ID NO: 4171384 - RNA, 55 nt, Human
uagcuuucucccugacgcuuuggacaagcuguccugauucagcaggagaaaucug

SEQ ID NO: 4171385 - RNA, 63 nt, Human
uagcuuugaagaaagaugacaccaccuuugaugagguagguuaaauuucuuuaucuaauguua

SEQ ID NO: 4171386 - RNA, 65 nt, Human
uagcuuuugggacaucuggcauacaguuauaauaacugccuuuaugccuuugucuucuaauucua

SEQ ID NO: 4171387 - RNA, 70 nt, Human
uaggaaacacauccugaaagaaacauuuccugauccaaccuagaucaggugccucuccucagggucccua

SEQ ID NO: 4171388 - RNA, 130 nt, Human
uaggaaagaaaaauauauacauuuccuucuucuuuuucacuuugauuacacagcagcuaaaaauacuggaggcuguuuccauuuaagugaauccagaauaaggauauuaaaagaguuugccugucuccug

SEQ ID NO: 4171389 - RNA, 63 nt, Human
uaggaaaggggauagaauuaugugaaugguuuaagcuaaucagaauuuguccccugaguucug

SEQ ID NO: 4171390 - RNA, 82 nt, Human
uaggaaauaaucgguuagagaugcaccuacacauuuauuaacuuaaagaugaauguaaguggauuucuuuaccuguuuugug

SEQ ID NO: 4171391 - RNA, 56 nt, Human
uaggaaaugccagccuuccuccaggugcccagcuccuuccagggcagcauuucuug

SEQ ID NO: 4171392 - RNA, 70 nt, Human
uaggaaguaaaauguugcuguaugaauaggaaggagggucuuccugucaaugagaauuaauguuuuccua

SEQ ID NO: 4171393 - RNA, 68 nt, Human
uaggaaguggaagaaucuggcucauucuuuuuccauaguaggagucagaacacuuucucuacugacua

SEQ ID NO: 4171394 - RNA, 85 nt, Human
uaggaauacaggcuuuaaauuuaaaaccaacgcuucaaagugcauugucauggagaaugggaugaauguggaggcugugguccua

SEQ ID NO: 4171395 - RNA, 58 nt, Human
uaggaauaguuuaauaguguuccaaaaaaaggaauguuaaacuauugagguauucuug

SEQ ID NO: 4171396 - RNA, 89 nt, Human
uaggaaucguuuuaaggccaaucugaguugggaauguauuuaguuuggauagaguacaauuauauuuagaugguuuggugccauuccua

SEQ ID NO: 4171397 - RNA, 62 nt, Human
uaggacauaaguauucuaacuucuagaaugauggagaaugagaauuggagacuuagguccua

SEQ ID NO: 4171398 - RNA, 71 nt, Human
uaggaccaacaccuucuccuugcaggccagacggcaguuuggcugucaaagacaggauguugucacuccua

SEQ ID NO: 4171399 - RNA, 99 nt, Human
uaggacgaaggaauaaagacaaagggucuaugugcugucucugaaggaugauucccagaaguugccacaugacccuucugcuuugagcccucuggccug

SEQ ID NO: 4171400 - RNA, 78 nt, Human
uaggagacacauugcaguuguuuagaauauguguaacuuccuauuuauauuuccauuaacagcaaauggcaguuccua

SEQ ID NO: 4171401 - RNA, 63 nt, Human
uaggagcaugugagauacuggaggccacagaagaaaagacuucuaguguuucaugugcuuuua

SEQ ID NO: 4171402 - RNA, 56 nt, Human
uaggaggaaagccaggauuugaacucaauucuguuguagagucugugcucuuccua

SEQ ID NO: 4171403 - RNA, 88 nt, Human
uaggaggaggccucccaaucuauugugucugugaggccugcccaauuccacagcagcccucagcaggaaagaucaacagguuccccua

SEQ ID NO: 4171404 - RNA, 60 nt, Human
uaggaggccauccagccugccuucaagccacugauggagagaggcugacuggcuguccug

SEQ ID NO: 4171405 - RNA, 81 nt, Human
uaggagggagguagcaugcuggaagggacccagaauuggagccugaacaccuugguuccugagcgagcuccaucaccccua

SEQ ID NO: 4171406 - RNA, 58 nt, Human
uaggauaggauggagacagaauuugguaacauaaagcagucuuuaauuauccuuccug

SEQ ID NO: 4171407 - RNA, 75 nt, Human
uaggaucuuacguaggucaagccuuauacagaaaccugggcagaucccagaggauauaugguuuguauguuccua

SEQ ID NO: 4171408 - RNA, 55 nt, Human
uaggaugggcuuccugcagcugacauguguacacacaacagugaggcccagccug

SEQ ID NO: 4171409 - RNA, 117 nt, Human
uaggauucuaugaucuacaaacagcaacuguugaccuauguuucuucaucugaagaaauccauaauuuuagauucagauauuuaggacaauaugcuagaauguucaugguaugccug

SEQ ID NO: 4171410 - RNA, 66 nt, Human
uaggauuugaaggaagccggguaucucauuaugucaacagaggacuuggcuucuuucagagaccua

SEQ ID NO: 4171411 - RNA, 120 nt, Human
uaggauuuugugguugaauuugaggauuuccagauuucuuugguuggguuugaggauuucuagaccuaauucuuuaauucaauugaaggauucucccagacaaucagcaaguauauccua

SEQ ID NO: 4171412 - RNA, 65 nt, Human
uaggcaaacugagcaucagaaaguuuaaguuauuugcccagacucacuugauguuguagugccua

SEQ ID NO: 4171413 - RNA, 77 nt, Human
uaggcaaauauugaauagcugcuuguuguauuugaugaauacagaauccaaaugaguacugcuaauuaaugcgccua

SEQ ID NO: 4171414 - RNA, 55 nt, Human
uaggcacaagaccaugcaaaggccccacaugguuauugaguagugguccugccug

SEQ ID NO: 4171415 - RNA, 62 nt, Human
uaggcacaggaggaaggggcucugucauaugacccuauuuucucacuucuuccuuuugucua

SEQ ID NO: 4171416 - RNA, 55 nt, Human
uaggcacuagacaugguuaccaaagaucacuuagugguuaccugaaaagugccug

SEQ ID NO: 4171417 - RNA, 57 nt, Human
uaggcacugguuguggauaguugccauggugacaaucaagauaauccagaugaccua

SEQ ID NO: 4171418 - RNA, 90 nt, Human
uaggcagauaacacaaauagguuaugugcuucaacugagccuacugcaguaggcagugguaggaacuuagaugaacacaugcccugccua

SEQ ID NO: 4171419 - RNA, 89 nt, Human
uaggcagauggcagggggcucaguccuucuuggcagcugcuuuccucauggcagccaggacguugcucagcuccuccugccuucucuug

SEQ ID NO: 4171420 - RNA, 59 nt, Human
uaggcauggcccugccaggaggaacaaggcacacaccguuguccuuuagggcuugucug

SEQ ID NO: 4171421 - RNA, 56 nt, Human
uaggccagauuacuagaguaggcuccugauuuuccugcuuuuacuccugccgccua

SEQ ID NO: 4171422 - RNA, 92 nt, Human
uaggccagggaaaacuagagauggcagguggaaugagaggucuucuggacuuguuuuggauguuuccacugcauguuuuuaguaccgcacua

SEQ ID NO: 4171423 - RNA, 72 nt, Human
uaggcccugucuuccugaggcucacuuugaauguuguggcaaaaccacugacagagcuuuuugaagagucua

SEQ ID NO: 4171424 - RNA, 75 nt, Human
uaggccuugguuuccuuaacagccuaaagggacagggagguggacccuuuguggcaggagcggagaccgggccug

SEQ ID NO: 4171425 - RNA, 81 nt, Human
uaggcgugaugugcugcuguaucugccuugcugccuucuccugaguggaagcugcagcuacaguguugguuauuacaccug

SEQ ID NO: 4171426 - RNA, 89 nt, Human
uaggcgugugacaccacacccgacuaauuuuuguauucccaguagagaugggguuucaccauguuggucaggauggucucaaacgccug

SEQ ID NO: 4171427 - RNA, 96 nt, Human
uaggcucaugggacccuggacacaaagaucaaauauuggugucauuaaauagcuacuugaauccaauaagugcuuuuguuuagcaacuaugucuua

SEQ ID NO: 4171428 - RNA, 80 nt, Human
uaggcuuauuguucauugcccccuguguaaaaagucucauuugagaaauuuauaguauagguaaugccaagaaagaccua

SEQ ID NO: 4171429 - RNA, 65 nt, Human
uaggcuucuugcuuccaaaugcauuguuauccaguaagauuaugcuuugccagagcaaaagucua

SEQ ID NO: 4171430 - RNA, 70 nt, Human
uaggcuuucugggcuauauggucucugcucaccucuaucaugguagcacagaggcagccacagacaccua

SEQ ID NO: 4171431 - RNA, 56 nt, Human
uaggcuuugguuucauuucucccacaggaaagggaaggacugaaaacacaaaccug

SEQ ID NO: 4171432 - RNA, 59 nt, Human
uagggacagagccaagugcuauguugacaagcauuaauaagaaauggcuccuguccuua

SEQ ID NO: 4171433 - RNA, 69 nt, Human
uagggaccaaguggcuuuaagaacuggauuaaaguugauccagugcauucagacacuuggcauucccug

SEQ ID NO: 4171434 - RNA, 60 nt, Human
uagggaccucauagaggcagaagcccaugggccuucugagcagaccuccuggggucacua

SEQ ID NO: 4171435 - RNA, 67 nt, Human
uagggacuaguuucaaggcuaaaaggugauuauaaucacccacacagcuguugaaaaugguguccua

SEQ ID NO: 4171436 - RNA, 126 nt, Human
uagggagcggcugugucauacauucguauaucuccuguaugggacuggcgaguaggaaaacuuucucuccucccauguaggagaugaugucuuuugaauuacuucuacuuuuacagugguuuccug

SEQ ID NO: 4171437 - RNA, 61 nt, Human
uagggaggcagcguagcaaggcuaguauuugcuauuuuaugcuggucacccugucuucuug

SEQ ID NO: 4171438 - RNA, 56 nt, Human
uagggaugagccaguggguaguaaguagagcaauucugccagacugauucaccuua

SEQ ID NO: 4171439 - RNA, 62 nt, Human
uagggaugaggauagauuuuucacugagccacuccuucucucauuuagucuccucaucccua

SEQ ID NO: 4171440 - RNA, 62 nt, Human
uagggauggcagcauguagcuuuuuauuaggcucaccugaaaauacacaguugcuuuucuua

SEQ ID NO: 4171441 - RNA, 59 nt, Human
uagggauguaaacauaguaauuacucaauuguaguagcucaagaauuauuacauccuug

SEQ ID NO: 4171442 - RNA, 80 nt, Human
uagggauuaaugauguuuuaauagguaaauauuguuuuauuaacagcaauuacauuuauugagcauucacuguuucucua

SEQ ID NO: 4171443 - RNA, 56 nt, Human
ucccccuggcucucccauagccuccaucaggagguuagauaagaagguugugggga

SEQ ID NO: 4171444 - RNA, 83 nt, Human
ucccccuuucuuuggccacuaucugucagaagcccuuuagggaaauuucuuggagugaaucacuagaugcagaggagugggga

SEQ ID NO: 4171445 - RNA, 78 nt, Human
uccccguccuguggacugugcugccacagugggcauucuccauccaccucacaguggcgugacagccauggaugggga

SEQ ID NO: 4171446 - RNA, 85 nt, Human
uccccgugugucacucacucagcugaugaagcacaaguggaaauuauuuauucuugcauugcugggaaacauugaugugugggga

SEQ ID NO: 4171447 - RNA, 63 nt, Human
aaacaagagucuugcuccaccuuugucuccgagcaccuuuaaacuggagcagggcccuuguuu

SEQ ID NO: 4171448 - RNA, 55 nt, Human
aaacaaguguaaacuagucugugucuuuaacaaaggcauacccuaacacguguuu

SEQ ID NO: 4171449 - RNA, 60 nt, Human
aaacaaucagagauugucucuguuuccuuaccaucggaaccaugaucugcucugguguuu

SEQ ID NO: 4171450 - RNA, 64 nt, Human
aaacaauguacauuuauaaugccucuuuaggagagaggaauuagauauuaguggugcguuguuu

SEQ ID NO: 4171451 - RNA, 109 nt, Human
aaacaaugugucuuuuagguaguaauuaagagaacaauuuggcuguauacuccaaaucccccaauuguccuaauuaauuagauuuaugcuuggaaagauacuaauguuu

SEQ ID NO: 4171452 - RNA, 59 nt, Human
aaacaccagcacuguuuacaaagaguugaccccaagaaauuuaaacaguguuaguguuu

SEQ ID NO: 4171453 - RNA, 85 nt, Human
aaacacuaaggcucauguaauuagagauaaccguaucugugaaacuaacuacagguccuaaguuauaugauacugaaagucguuu

SEQ ID NO: 4171454 - RNA, 70 nt, Human
aaacagacacuaaggggcuaguuuauaguaaagauauacuguguguguguauuagcuucuggugcuguuu

SEQ ID NO: 4171455 - RNA, 57 nt, Human
aaacauauucccuuuuaguuuagcugauuucuacaaugaaacuaaggggaaauguuu

SEQ ID NO: 4171456 - RNA, 57 nt, Human
aaacaucucaaagagguauuuguuaugugugagaacagaugccuuguaaugguguuu

SEQ ID NO: 4171457 - RNA, 85 nt, Human
aaacauuucagaaauuggacuuugugugaaggaaaauacauuaucuguguguuuagaugcaaagucucacagucagauauuguuu

SEQ ID NO: 4171458 - RNA, 55 nt, Human
aaaccaccuccccagcugcugugcuaaggcacaguaauagauuugagagugguuu

SEQ ID NO: 4171459 - RNA, 97 nt, Human
aaacccagaguuuucaauucaguagcucuggaauaggaacugauaauuagcguuuguaacaaaguuucuaggugcugcugaucaagaugauguauuu

SEQ ID NO: 4171460 - RNA, 84 nt, Human
aaacccuucucuguucagcugccucaggguauacaguuguccuugcucagauaucccaugagccagcugcagcagcucaaguuu

SEQ ID NO: 4171461 - RNA, 63 nt, Human
aaaccuggcuuuaggaccaaggggcuccucagcagacucuuuaagcuccuaacagccauguuu

SEQ ID NO: 4171462 - RNA, 79 nt, Human
aaaccuuaucagucuguuggaauaucgcugcaaaaccauguuuugaacggguguguucugucagacugauuggagguuu

SEQ ID NO: 4171463 - RNA, 66 nt, Human
aaaccuuuucuaauacuugcuuuggauguauguuucauauauauucuuaaguaguguagaggguuu

SEQ ID NO: 4171464 - RNA, 63 nt, Human
aaacuaacuaaaaaccuugcccugugaaaacaggcauauggcagagguuuuucaguaugguuu

SEQ ID NO: 4171465 - RNA, 75 nt, Human
aaacuacggcauugaaggcauuuuaucuacuucaauauuuucuguguuguguaaaugccacuuaauguaaaguuu

SEQ ID NO: 4171466 - RNA, 86 nt, Human
aaacuacuggccagggcugcaguccuaaggugcuagaggauccacuuccaagcucacuuagguggcuguuagcggggccccaguuu

SEQ ID NO: 4171467 - RNA, 130 nt, Human
aaacuagucagguguauaugaggcauguggaggaaaugaguguacacuguaauguacacauuauauucucuaugcugugcaucauuuccuccauaucgcacacauuauaauagaaaauaaucugaauguu

SEQ ID NO: 4171468 - RNA, 61 nt, Human
aaacucagaagguacagaagggaaguaucucccagccacccuguugcucucuccugaguuu

SEQ ID NO: 4171469 - RNA, 75 nt, Human
aaacuccacaaaaaucuaggaugggaagacuagagaaggagcugugagucuguauguccagauuuaguggauuuu

SEQ ID NO: 4171470 - RNA, 64 nt, Human
aaacuccagaggaucaguacuggcuggggaagaggacccaguguggccaggucuucugguuuuu

SEQ ID NO: 4171471 - RNA, 87 nt, Human
aaacuccaucauucugacucuccauuagucuuugguaacuggcucugcaucuaucagaaggcacauggagucucccugauuaaguuu

SEQ ID NO: 4171472 - RNA, 110 nt, Human
aaacuggcccaaaaggguuuaaaauugucagaaguugaucuugaucaguucaaauauuuuuugacaaagaaaaucaguucuggucaguucaaaucuauuuugaccaguuu

SEQ ID NO: 4171473 - RNA, 56 nt, Human
aaacuguuccuuuuucagcaacugcaauuuuguuguuguugcuuuaggaaaaguuu

SEQ ID NO: 4171474 - RNA, 74 nt, Human
aaacuuugauucucucuggaucccauggauaugggaacugugauguccaggagauccagagagaaucagaguuu

SEQ ID NO: 4171475 - RNA, 68 nt, Human
aaacuuugguauguagcaaaacugcuggguuuaauaaaacagauuacucagcucuacugccagaguuu

SEQ ID NO: 4171476 - RNA, 72 nt, Human
aaacuuuucuuggggaccugccauguuggaaucuccauaaauaagucagauagggcagccuaagaaagguuu

SEQ ID NO: 4171477 - RNA, 91 nt, Human
aaagaaaacuggcggugccugugugcucuucugugcauuaauaccucaugcauuccuggacaaacaucaaaagcacugcugguuugucuuu

SEQ ID NO: 4171478 - RNA, 81 nt, Human
aaagaaaauuuccagcaucagcauugucuuagggaacacuuagacucugugaugaugugaugguguuuaugaauuauuuuu

SEQ ID NO: 4171479 - RNA, 66 nt, Human
aaagaaguuucugcuuucgggguuaaacaucaggcuugcugcaacucugccaggcagaacggcuuu

SEQ ID NO: 4171480 - RNA, 56 nt, Human
aaagaaucuguugauuccccacugccaagcucuguaguaggguguacaaauucuuu

SEQ ID NO: 4171481 - RNA, 70 nt, Human
aaagaaugaaggacuuguuuaaaguuugugcugacuuucagaugaacuauacauaguucccccaauuuuu

SEQ ID NO: 4171482 - RNA, 84 nt, Human
aaagaaugacauugaaaagacauugccccgagguuugguagagcaaaagucuggaucauuuguacuguucaaugucaugccuuu

SEQ ID NO: 4171483 - RNA, 129 nt, Human
aaagaauuaaaugaacagaaagggaguauagcauaguaguuaagagugugagcucuguagcuggaaugcuuggguaugaaccucagcucuuuauacuagcugugugaccuuuugugucacaauuucuuu

SEQ ID NO: 4171484 - RNA, 105 nt, Human
aaagaauuuauauuaauuuauaaucauauggcuuaaaauuucagcauggcuaaauccauauuggguuagugagucagaguuuaucaaauggaaugugauuuuuuu

SEQ ID NO: 4171485 - RNA, 66 nt, Human
aaagacgaugcucaacuauaugaauuuugaaaaauuaugaaugucagaaugcagaguguggucuuu

SEQ ID NO: 4171486 - RNA, 67 nt, Human
aaagacugacagggggcagagguggcugaaccuuucggacuacccacugcaugcuuccuuuguuuuu

SEQ ID NO: 4171487 - RNA, 62 nt, Human
aaagacugucauugacagaaaaucucccccucagcuuuugaucaucugucuguguugucuuu

SEQ ID NO: 4171488 - RNA, 104 nt, Human
aaagacuguuccauugcaggggcuguggcacauggugugauccaggucuacaggggcacauggugagcggcaggccuauagggcaggaggauauagacagcuuu

SEQ ID NO: 4171489 - RNA, 75 nt, Human
aaagagaaaagacaugcaccuggaaaaaaauguuagccacuguuuaucuccagagcuguaugauuuuuuuacuuu

SEQ ID NO: 4171490 - RNA, 109 nt, Human
aaagagaaaggguaagagagcaaugaugacaaugaggaugacuaaaaguguguuuuuaguuugucaaccacugucacagauuuccuuucuugcuccuugugaacucuuu

SEQ ID NO: 4171491 - RNA, 56 nt, Human
aaagagaacuuuuacccaagaaaaugguaaugacuuuugggccuugaguccucuuu

SEQ ID NO: 4171492 - RNA, 85 nt, Human
aaagagacccucacugacaucucaguaggacaucuaacccugugaguguccacucuguugcugagaugaauagggcugucucuuu

SEQ ID NO: 4171493 - RNA, 56 nt, Human
aaagagcaagcugagauuugaauucagcucugucuaauucuaaagcucugcucuuu

SEQ ID NO: 4171494 - RNA, 79 nt, Human
aaagagccaaaacuguguccuuagcucucacuagguaaagcaaauaggggaggaaagagggcucagugauuuccuuuuu

SEQ ID NO: 4171495 - RNA, 130 nt, Human
aaagaggcauuuugcuaugaaaguguuaaauggugauauuucugcaagguuuuuacagugugcuuauuuuggaaaauugagaagaggcuuuguaggaaagaggcaugacaaaguaggaaaauggcuagau

SEQ ID NO: 4171496 - RNA, 94 nt, Human
aaagagguuuugaaguguuuugaggaugaaaucucccagggacauuuugugaauguuuacugaaaagauuucaauaccuuuucgguuuuucuuu

SEQ ID NO: 4171497 - RNA, 72 nt, Human
aaagaguaggaugaaggccacucacuuuagggagguuccugguuuggguaguuauuauuauuauuauuuuuu

SEQ ID NO: 4171498 - RNA, 58 nt, Human
aaagaguggcuucuuugacaugcuucuuuucuuugagccaucucaucagcagcucuuu

SEQ ID NO: 4171499 - RNA, 60 nt, Human
aaagaguuaagagucuuaagcuaaagcagcucuucugccaugugggacucugacuugguu

SEQ ID NO: 4171500 - RNA, 75 nt, Human
aaagauacacacaggggcucugagauugucuaagguuguaaagaaucagaauuagaacucaagcacccuaucuuu

SEQ ID NO: 4171501 - RNA, 98 nt, Human
aaagauagaaaauauuacuacugaaacucagaaauucaaacucacauuaauuuagugcaaaggcuugaucuggguucagugguauauuuuauuucuuu

SEQ ID NO: 4171502 - RNA, 82 nt, Human
aaagaucuggcuccuuaauuuaaaauaguucaggcaacaagauucuugcuguguuuuauguuagguuaacaugcugaacuuu

SEQ ID NO: 4171503 - RNA, 58 nt, Human
aaagaugugucaccccaugacugcuuugcauaacuaaggugucagugauacaugcuuu

SEQ ID NO: 4171504 - RNA, 85 nt, Human
aaagauuacaggaaaauagcugguccuuggcaguucucagaagguucuguuucucaccugggccaggauugugccugugguuuuu

SEQ ID NO: 4171505 - RNA, 68 nt, Human
aaagcaaauuuggaauugaggauuuacauagagucauuuguggggaacuucauuuucaucaaugcuuu

SEQ ID NO: 4171506 - RNA, 72 nt, Human
aaagcacucugugaggugcauucuauaguauauagccuaugcuacagauuuaucauguuauauagugacuuu

SEQ ID NO: 4171507 - RNA, 81 nt, Human
aaagcagacacccuguacaaauggacaucuuggcauuacagccaggaugcugugcuuuuguaggggggcaucuuuuguuuu

SEQ ID NO: 4171508 - RNA, 64 nt, Human
aaagcagccacagagagagcguuagauaaaaggaccaugauuuuuacucuguuugcgcugcuuu

SEQ ID NO: 4171509 - RNA, 87 nt, Human
aaagcauccaaucacacccuuccucaaccucucacaccaagggggagcaucuccuggaagccagaguugaggaggggagcaugcuuu

SEQ ID NO: 4171510 - RNA, 70 nt, Human
aaagcaucuucuuccaucaguucuggccucacaagacagagaggaaugagcagggguggaagguagcuuu

SEQ ID NO: 4171511 - RNA, 57 nt, Human
aaaauggaucccggggcuuuccaaggagccuggaauuucagcucacagaucuguuuu

SEQ ID NO: 4171512 - RNA, 62 nt, Human
aaaauggcaagcagaauaugguguccagcuguggauuugcuuacauauugugcuugcauuuu

SEQ ID NO: 4171513 - RNA, 73 nt, Human
aaaaugggaccauauuguauauacuguucuuaaccugcuggguuuuuugcuuaaugcauugugauucuguuuu

SEQ ID NO: 4171514 - RNA, 57 nt, Human
aaaauguuaagaaugcagacaaauggcacuuagugcccagugaguucuugacagauu

SEQ ID NO: 4171515 - RNA, 91 nt, Human
aaaauugcuugacuauuuugaaacauaaaguuaucuucaguccaacaggacugcaagguauauguuaucauaauuggaaauugguaauuuu

SEQ ID NO: 4171516 - RNA, 88 nt, Human
aaaauuuaguuuuauugaccagugcagccacugugcccacgaggggacuggugcacacagccugcugcacucaagaaacgaugauuuu

SEQ ID NO: 4171517 - RNA, 64 nt, Human
aaaauuuguagagcuuaggcauaggccagagcaacggcuaugcaagcaacauuuugcacauuuu

SEQ ID NO: 4171518 - RNA, 81 nt, Human
aaacaaaacacaacugaguuaaacaaugaagaaagcaagcuuuugaugacaaacuuuuggcugagaaguugugcuuuguuu

SEQ ID NO: 4171519 - RNA, 84 nt, Human
aaacaagagucggaagaguuauaaauaccuaauaggauuugucaguuauaauaaaacccaguauguuuauagcuccuuuuguuu

SEQ ID NO: 4171520 - RNA, 112 nt, Human
aaagggagcagggguacaaaauuagugcaccagguugaagucaccuagagcugacuuugagacuuuggcccuuaauuuacauuaauuuauaaaguaacucccugagcccuuu

SEQ ID NO: 4171521 - RNA, 90 nt, Human
aaagggaugaggauuucagauggcacacagagccugcugagcgcauagccaugcaccgcugugcugugccuuuuccucugacaucccuuu

SEQ ID NO: 4171522 - RNA, 56 nt, Human
aaagggcaguagugaucuuguuaggguuuggcaucugaaugaucugguugccuuuu

SEQ ID NO: 4171523 - RNA, 67 nt, Human
aaagggcccauuugguugaagaguugauguuuaaaaugacaagggcucacacaugacugggcucuuu

SEQ ID NO: 4171524 - RNA, 61 nt, Human
aaagggcugucaaauaagcaacggucaaaaggauaagcuguuucuucaguugucacccuuu

SEQ ID NO: 4171525 - RNA, 63 nt, Human
aaaggggaauggagaaaauggcaggaagcugaagacgugagccagccacaucuguaccccuuu

SEQ ID NO: 4171526 - RNA, 74 nt, Human
aaaggggccggggagcugugacacgcagcccagggcugucuuagucaaggcugucuccagcuuccaaccccuuu

SEQ ID NO: 4171527 - RNA, 60 nt, Human
aaagggucuguggcuugaacauguuggaaagucuugcuuuaaagcuccagcagauccuuu

SEQ ID NO: 4171528 - RNA, 85 nt, Human
aaagguaaugagaugggggcaagggagacaggaauucagguaagcaggcuuuacacuuuucugguuacucuugcuuauugccuuu

SEQ ID NO: 4171529 - RNA, 129 nt, Human
aaagguggcaaaaugggugcagggggagucaggcucaccauggccucccugcucuccggguccucugggacacucggcaugggccgaggugccuccucccccucacuguccagauguucuccuccgugu

SEQ ID NO: 4171530 - RNA, 72 nt, Human
aaaguaauuaggaaguaaguaucacaagucuguaauauauuuugacauugugauuggcuuucuaaugaauuu

SEQ ID NO: 4171531 - RNA, 74 nt, Human
aaaguacauagcauauuccaacucuugaacccuggauccuucuccccccacuggguugggugucucuguacuuu

SEQ ID NO: 4171532 - RNA, 75 nt, Human
aaaguacccugaccauaguuauuuuucccacaugcugagaaacugagaaacuaaccugguaggguuccaaacuuu

SEQ ID NO: 4171533 - RNA, 73 nt, Human
aaaguacuuugaggagucuaauauggauuuuaacuuagucaccacggugauccuguuagcaccuucaaacuuu

SEQ ID NO: 4171534 - RNA, 95 nt, Human
aaaguaggauguauucagggcuagucagaggaaguuucaccagugacuacuuaguuaacuccugcugaccaguaaaugaaugaggguccuauuuu

SEQ ID NO: 4171535 - RNA, 67 nt, Human
aaaguagucucuuucaucuuuuugucaucccuuccuaaguagagaagaaauuggaacagacagcuuu

SEQ ID NO: 4171536 - RNA, 73 nt, Human
aaaguaucuuacugcagccgaggauacauguagccaaaugggugagcaacugggaguugagugagguugcuuu

SEQ ID NO: 4171537 - RNA, 70 nt, Human
aaagucucaguuugaagugaugccagaccuggguuugaauccagcuuggcuacuuccagcugggugauuu

SEQ ID NO: 4171538 - RNA, 72 nt, Human
aaagugcacuagucaagugaacaauuuucuauauccauuuuguggcaaauuaucaugauuauuguguauuuu

SEQ ID NO: 4171539 - RNA, 85 nt, Human
aaagugcagauuccuuggcauugccccuggaauuuugauucagcagauuugagguggggccaaaugcuacaguagucugcauuuu

SEQ ID NO: 4171540 - RNA, 61 nt, Human
aaagugcugggauuacaagcgugagccgcugcgcacggccaugacguuucuuaaguacuuu

SEQ ID NO: 4171541 - RNA, 59 nt, Human
aaaguggccauccucugcaucgguaagcuuagggauccauggagagguuuggcuuuuuu

SEQ ID NO: 4171542 - RNA, 103 nt, Human
aaagugguuagugcaacugagaagcugaauuuuuauuguauuuagauuuauauuuaaaugcucacauaaagguagcagcuacaguauuggacggugcagcuuu

SEQ ID NO: 4171543 - RNA, 74 nt, Human
aaaguguacaauuuaguggugugugguucauucacaaagcuguacaaccaccaccaucuaguuccaaacauuuu

SEQ ID NO: 4171544 - RNA, 87 nt, Human
aaaguuccaaacaacugcauguguuucugcuggguuaccuugggaaaagaacuuuaguguacaucaucaguucugaaugguaacuuu

SEQ ID NO: 4171545 - RNA, 69 nt, Human
aaaguucuaccaaguuuagagucauguagggacaguuuccuaagugcaugauugaacuuggcaaauuuu

SEQ ID NO: 4171546 - RNA, 72 nt, Human
aaaguugaguaucuuaugugccuuugggugcugggacuuguagccauggcaaaggagauguuuucugacuuu

SEQ ID NO: 4171547 - RNA, 95 nt, Human
aaaguugcaugacauugugaauguacaaaaugccacugaauuuuacacuuuaaaaugauugaugaauuuuguuaugugaauguuauuacaacuuu

SEQ ID NO: 4171548 - RNA, 60 nt, Human
aaaguuuaguguccucuaccacaugcuuacuacaguggagagcuccagaagcuaaacuuu

SEQ ID NO: 4171549 - RNA, 129 nt, Human
aaauaaaccaaaaggaaacucuugagauuugcuucugggaagauggugacagaauuuccgauacuugaaaauauaaauauuugcuuuuaucuucuuauagaaauccuaagaguauuccauuucuagccu

SEQ ID NO: 4171550 - RNA, 97 nt, Human
aaauaagcaauaguaauuuuggauacagauauaagauugaggagguuaaacauaucucuuuaguccuaaauuugaauugaaaucuuuauuuuuauuu

SEQ ID NO: 4171551 - RNA, 82 nt, Human
aaauaaguagcagacugacuucuaguucuuaauaaccugguuguaaucuccuuugagaguagagucuucaucugucuuauuu

SEQ ID NO: 4171552 - RNA, 122 nt, Human
aaauaauccaggcagcuuuugaaacauacugaugcuugggcuucaccccagagauuauaauucgauugaucugaaauggggcugaagcacugguauguuuuagaaguuuccuacuuuuauuu

SEQ ID NO: 4171553 - RNA, 96 nt, Human
aaauacacauuaaguagcagguauucuggugugagggguacaauucuagacaguuucacuccagaaccugugcucuuuauguugguuuuuguauuu

SEQ ID NO: 4171554 - RNA, 87 nt, Human
aaauacauauauguaaguugcaaaugaaggacauggaagaugaaggaguccaugcauuagauucuucuuuccaauuacaugguauuu

SEQ ID NO: 4171555 - RNA, 89 nt, Human
aaauaccuuucuagcuccauauaaagcaggaugccacagccuacauguauuaaaucaugcauuguauugaguugaauugaaugguauuu

SEQ ID NO: 4171556 - RNA, 63 nt, Human
aaauacuucuagaaauacuaugcaaagauauuccugucuguguaaguacuuauggaaguauuu

SEQ ID NO: 4171557 - RNA, 69 nt, Human
aaauagacgugaauucccuggcuucccuuaacacuuagauuccuaaggucaggguauucacgucuguuu

SEQ ID NO: 4171558 - RNA, 58 nt, Human
aaauagcauuguauuuagcugagugacaaaugccgcuugguugaagaauaugcuguuu

SEQ ID NO: 4171559 - RNA, 61 nt, Human
aaauagcuugguuaaggguucuuagaguuuguuuuaucucuuggcucucuuaaagcuguuu

SEQ ID NO: 4171560 - RNA, 82 nt, Human
aaauaguaauuuagggaaagaugagaauaugauauaaauauuaauuacuauguaucuuuuguuuucccugcucaaccuguuu

SEQ ID NO: 4171561 - RNA, 75 nt, Human
aaauaguggacuuugccauucugagaugagaagaauacuucuauauuguagcugaugacaaaugugccauucuuu

SEQ ID NO: 4171562 - RNA, 61 nt, Human
aaauaguuuggggauuuuuugaguuagggauuacuccucaucacugaagccuaagauguuu

SEQ ID NO: 4171563 - RNA, 59 nt, Human
aaauauaggcagcuccuuguuacaaguaaaauuuagcugagaggcaggugcuaauauuu

SEQ ID NO: 4171564 - RNA, 113 nt, Human
aaauauauauauaauuuuuaguuuaucaaauccucaccucaucaugaaauuuuacuucauuguuaauauucaugcuugguguggggauuaugaauuaauguaaguaaguauuu

SEQ ID NO: 4171565 - RNA, 81 nt, Human
aaauaugugcauaugagauuagacuacaucuaauccauaaauuggagcagauguuuuguguauuucaucaugugcauguuu

SEQ ID NO: 4171566 - RNA, 77 nt, Human
aaauauguuucugggcuugauauuuaaaaugaucaucucugacuaugcuuguaaauauaaagcagcagaaauuauuu

SEQ ID NO: 4171567 - RNA, 82 nt, Human
aaauauuaaguccguuuuccacuggauuguuuggagacuauuaguauucaggcuugaauccauggaauagggacauguauuu

SEQ ID NO: 4171568 - RNA, 98 nt, Human
aaauauuauacugcagucacugcagacucucuuugauguauaaauaaucaaguuaaauuaugugcagcaaggagacuagugcucugccauucuuauuu

SEQ ID NO: 4171569 - RNA, 62 nt, Human
aaauauuguccugcauuauuacgugacaauguuuguguucaauauaaggcaggaggaaauuu

SEQ ID NO: 4171570 - RNA, 77 nt, Human
aaauauuuggaucuugcuaaagaccaacacauuuuuuuaaguguguauaauuuuagggcaauuugauccauauguuu

SEQ ID NO: 4171571 - RNA, 62 nt, Human
aaaucacagggucucuaaguauucucaugugucauugguuuguauagaggcuugauugauuu

SEQ ID NO: 4171572 - RNA, 68 nt, Human
aaaucacgugguccuggugcaagugcauuuccaguuugaaaaacuucagcaccagaccucagugauuu

SEQ ID NO: 4171573 - RNA, 103 nt, Human
aaaaguugccuuguuaaugcaguagagcagcucuggggugaagauccaagucuuacacccuucuccugaguguguuucuauugcuuuaauucaacagacuuuu

SEQ ID NO: 4171574 - RNA, 64 nt, Human
aaaaguugggaauggaugcuaagugcuaaccuuuuagcuacucggaaaccaugcucaaacuuuu

SEQ ID NO: 4171575 - RNA, 56 nt, Human
aaaauaaguugguccuguccuuguuugcucuuggcauagagaaggccacuuguuuu

SEQ ID NO: 4171576 - RNA, 65 nt, Human
aaaauaauggucuuuuuguuaugagagaggcuuagcuuuucucuuucaaaggaaaccaucauuuu

SEQ ID NO: 4171577 - RNA, 94 nt, Human
aaaauauagacagaguuccuuccucccuuucauaccccaacccuaacucuaacuaauagcugggauagggaggaaggaacuccuucuauauuuu

SEQ ID NO: 4171578 - RNA, 63 nt, Human
aaaauauuauugcuuaaggggagcuggggggauuuauucuuucucuuuguggcaauguauuuu

SEQ ID NO: 4171579 - RNA, 96 nt, Human
aaaaucaagaaugcucuguauagggcugcugcagaugacaggaagcuuaugcugccuagugcagauggcugcgucccuugcugaggucuugauuuu

SEQ ID NO: 4171580 - RNA, 130 nt, Human
aaaaugaacaggcaaacuauaggaacuucaggcaaagaggcuuucagugaacuuguggguaguaacuauugccuucuuuugcuaguuuuuugaaaagccacuuuaaaggaagugcugugccuggcuuuuu

SEQ ID NO: 4171581 - RNA, 91 nt, Human
aaaaugaaggcagggaacaaaggcaacauauacuuguuugacaauauuugaaagcaaugucaaguuguggugagauucuccugcccauuuu

SEQ ID NO: 4171582 - RNA, 130 nt, Human
aaaaugauguaauuagugcaacggugaugcugugacucagagggaggacugggcuggugaugagugaggugaugugugugacguugccagccaagcuucuccugguaucugucugccacuaacucuccuu

SEQ ID NO: 4171583 - RNA, 77 nt, Human
aaaaugcaaauuauugggccccaacuucugaucuacugaaucagaaacucugaguugagcccagaaauuuguguuuu

SEQ ID NO: 4171584 - RNA, 92 nt, Human
aaaaugcucagcaccaggucuggaauguagugaguuccugcuugguagugauugcugauauuccauuuuacugucaccgugcuggguauuuu

SEQ ID NO: 4171585 - RNA, 59 nt, Human
aaaaugugaucuacaaaugcaagccacauagaggauuguaaauuuuguagucacauuuu

SEQ ID NO: 4171586 - RNA, 92 nt, Human
aaaauguguugugugugugcucuggaggcuagauuucugggucaaucaaauacuugcaaacuaccuacagaugcaucacuacuaaauguuuu

SEQ ID NO: 4171587 - RNA, 93 nt, Human
aaaauguugaagucucucuggagaguagaagccugggagaaaacaaaaccaaacccauuuuccauugucacccagagauacugucaacauuuu

SEQ ID NO: 4171588 - RNA, 100 nt, Human
aaaauucuguaaaugagaaguggaaaaauuauggaguaguagagaauguuaaauaaccaucuauauuauacauccaggauugcuuuuaaaacaggauuuu

SEQ ID NO: 4171589 - RNA, 71 nt, Human
aaaauuugcaugggagguaguaaucaauaguuuuacuaaauucuuaaugugauuucugccccucaaauuuu

SEQ ID NO: 4171590 - RNA, 93 nt, Human
aaaauuuguagucugaaccuuuuuagaugcagaauaguuacaaaaguauuggcuuugauaucuaaagggauaaagacauuauuugcauauuuu

SEQ ID NO: 4171591 - RNA, 66 nt, Human
aaaggauccguuuuaacaaugggaguuuugccaguggaaaucccaaugggaugaaaccuguccuuu

SEQ ID NO: 4171592 - RNA, 58 nt, Human
aaaggauucucuugauuucaguggaaaaaaacucugcuuuuaaguuugagagaccuuu

SEQ ID NO: 4171593 - RNA, 58 nt, Human
aaaggcagaggauuuauuuuaaaggacuccuuugaaagggauauaucuuucugcuuuu

SEQ ID NO: 4171594 - RNA, 79 nt, Human
aaaggcagcaggugcauuuggugacucucacccuguauguuaauaugcgggggaguuaaauucaagugcacccgucuuu

SEQ ID NO: 4171595 - RNA, 55 nt, Human
aaaggcaugcugcugaaugauggguauggaacuuuuuaaaaaaguacaugcuuuu

SEQ ID NO: 4171596 - RNA, 92 nt, Human
aaaggcuaaagugggccgggaaucuuuuucauaagccucacgucucucaugagauuuggaaaaugauuccugugcuucccgcuuuugucuuu

SEQ ID NO: 4171597 - RNA, 72 nt, Human
aaaggcugccuggcauuacagcacuccugcucugcacagugguggaguguagcuaaaugcagcucagucuuu

SEQ ID NO: 4171598 - RNA, 92 nt, Human
aaagggaaguucuuauuuucuguaacuauuucuauagcugcugcuuuucugcuguugugauuauuuauagacagucaaaagagucucucuuu

SEQ ID NO: 4171599 - RNA, 74 nt, Human
aaagggacaucgaaccaguaggagguuaacccugugguaaacuggguucuuccucauugcuuugaaguuuuuuu

SEQ ID NO: 4171600 - RNA, 69 nt, Human
aaagggucagauucugcuagugaccaagcuacagcuugggugcaugguguggacagaauuagacacuuu

SEQ ID NO: 4171601 - RNA, 98 nt, Human
aaagguaauuaugugaagugauguauauguuagguaguugcuugugauaaucauugcacaauguauauguauaucaaaaccucacauuauacaccuuu

SEQ ID NO: 4171602 - RNA, 58 nt, Human
aaaggucuucagugcuuucacuagugaaugaacacucugaaugagcaucuggacuuuu

SEQ ID NO: 4171603 - RNA, 55 nt, Human
aaagguuuucugacccuuaguacuucagcagaaggaucuaggguggaguaccuuu

SEQ ID NO: 4171604 - RNA, 78 nt, Human
aaaguaauguauaaguggguuuguaaugugccuaaaauaauagguauuaucauuacagaucuuccuugguuuuacuuu

SEQ ID NO: 4171605 - RNA, 114 nt, Human
aaaguacgaugaaaagugcccaaauucugcuuuugauuaggauuccauaaguuuaaagaacuuuauggaaaauacaauuauaagcauaguaugguguuaauuaaaaaugacuuu

SEQ ID NO: 4171606 - RNA, 65 nt, Human
aaaguauguuguucucagcuacuugggacuccucucucaagagaagcugcaagagcaacaucuuu

SEQ ID NO: 4171607 - RNA, 73 nt, Human
aaagucuuacagacaagcugaaguacagguaccuacuuugaaaugucuucuguuuccugcugugaaagauuuu

SEQ ID NO: 4171608 - RNA, 55 nt, Human
aaagugcugugauuacaggcaugggccccagcacccggccagugcauugcauuuu

SEQ ID NO: 4171609 - RNA, 64 nt, Human
aaagugugacacuguguuaauuagagaaaguugcuguucccugagauuccuaguguccuacuuu

SEQ ID NO: 4171610 - RNA, 61 nt, Human
aaaguguugcuguggagccugguuuguuaaucuguacacaugaggucugcagcugcaguuu

SEQ ID NO: 4171611 - RNA, 85 nt, Human
aaaguuacaugugaauagaaaguauuauuugggggcaucucuaccacuuguuauacaaaaucuuacuuucuucuauguauauuuu

SEQ ID NO: 4171612 - RNA, 79 nt, Human
aaaguucaagaguucaguuuugaaauguuaauuccuuuuugggaaauugacauuuguagaauaaugguuuaggaauuuu

SEQ ID NO: 4171613 - RNA, 94 nt, Human
aaaguucaauuauuuagaaucuuaggucauuuucuagccugaaauaaaugaacauuucaguuagcugagacccaggauuuaccaauaggaguuu

SEQ ID NO: 4171614 - RNA, 105 nt, Human
aaaguucuccccuguugauguuuuagaacuaagaguuaucauuuagcuaucuucuucagcuaucauuuagcucuuaguucuagaguaucaacagaagagaacuuu

SEQ ID NO: 4171615 - RNA, 66 nt, Human
aaaguugagcacugcagaaaguucagucugcuuagagcuguguaagucauguagguguucaucuuu

SEQ ID NO: 4171616 - RNA, 86 nt, Human
aaaguuuauuucaaaucugccuccaaguccauguguucugaaaaggacagagggggccuuggagugcagccagauggaaggacuuu

SEQ ID NO: 4171617 - RNA, 63 nt, Human
aaaguuugagccucccaacacacauguucccaacugagguggaacaaagggaugcucaucuuu

SEQ ID NO: 4171618 - RNA, 69 nt, Human
aaauaaagaauauuuucaguacagaugguuggcaguugcugcugugugugugugaauguguguguguuu

SEQ ID NO: 4171619 - RNA, 107 nt, Human
aaauaauagacuucaugagaauucuagagauuggacuuccuagauuuggcagauacuauuucuaagaagcccucuaaaacuuuaggaaagugcaagcacuauuguuu

SEQ ID NO: 4171620 - RNA, 76 nt, Human
aaauacagaguuauggaccucagcucuagggauucugacucaauaguucuggcauaggguccaggacucugaauuu

SEQ ID NO: 4171621 - RNA, 57 nt, Human
aaauacaguggcagcagauaauggcaguaucucuguaacugcugguaaacuguauuu

SEQ ID NO: 4171622 - RNA, 62 nt, Human
aaauagcugaaaguuccuagauuuuugaugcucuuauucuagguuugauuuucaguauguuu

SEQ ID NO: 4171623 - RNA, 55 nt, Human
aaauagcuucuaagccuuuugauguccauuaagaggaaggaauggggagcuguuu

SEQ ID NO: 4171624 - RNA, 76 nt, Human
aaauauagaugccugggugauaucccaguuauacauuauuagugucucuggagagggagcccuggcaguuguguuu

SEQ ID NO: 4171625 - RNA, 66 nt, Human
aaauauaguaaaugcauaguucagccaagaaucaaagaugcagaaguacuaugcauuuauuuguuu

SEQ ID NO: 4171626 - RNA, 81 nt, Human
aaauauggcauuuuguaggcagggcaguuagaagcugacaugaacccagcaucuaccuccacccuauauauuaucauauuu

SEQ ID NO: 4171627 - RNA, 88 nt, Human
aaauaugucaucugcuuccugcugggauacugaguaugaagugcuccaggcaucccccaggacagagccccuguaucaugaucuguuu

SEQ ID NO: 4171628 - RNA, 102 nt, Human
aaauauguguacauuugcaauaauaggaaguuauagcuaugaucuuaauaagaacacuuuccaguuaagcaugcugcaacuucugcagagauggccauuuuu

SEQ ID NO: 4171629 - RNA, 104 nt, Human
aaaucaaauuguguauaauuuuagaagagauggaagugucacccacaaaauuacuaagggugaguuuucaugucauuuugauuuuauauaacuaauguugauuu

SEQ ID NO: 4171630 - RNA, 58 nt, Human
aaaucagaauuuauugaaucuuuuaugacacagugaaagaauuaaaggacucugguuu

SEQ ID NO: 4171631 - RNA, 57 nt, Human
aaaucaguuucugugaagaacacagguuaaugccuguaaagaucaagugacugauuu

SEQ ID NO: 4171632 - RNA, 60 nt, Human
aaaucauguaucuggcccugccugaaguuccaccccacucagguauaagaaaugugauuu

SEQ ID NO: 4171633 - RNA, 76 nt, Human
aaaucauuaugaacuaaaguguuuguaugcagauaagcuuaucuguacauucaugguuuaguugauuucuugauuu

SEQ ID NO: 4171634 - RNA, 76 nt, Human
aaaucucaguaaggcaaugccacuaagauggguuuuuaaauaaguguauuccaucucccugccucaacagagauuu

SEQ ID NO: 4171635 - RNA, 87 nt, Human
aaagcaugcuccccuccucaacucuggcuuccaggagaugcucccccuuggugugagagguugaggaagggugugauuggaugcuuu

SEQ ID NO: 4171636 - RNA, 65 nt, Human
aaagccaaagucauccaaauuuuuaugucauggcauaacauaagcucgagauggcuuuguguuuu

SEQ ID NO: 4171637 - RNA, 59 nt, Human
aaagccuauuaggagcugggcaagagauacucaugaaaaaguaguuucuaauggccuuu

SEQ ID NO: 4171638 - RNA, 103 nt, Human
aaagccuguguaaauagggaggcaguggcagggagccuggggcuggaagucaggaggcuugaauuccaguucuggcuuugccacucucuggcugugcagcuuu

SEQ ID NO: 4171639 - RNA, 84 nt, Human
aaagccuuucuggccgguauuugccucugggggcugcaucaucgucuacccagaguucuuaaauacugagcaacuuaagguuuu

SEQ ID NO: 4171640 - RNA, 128 nt, Human
aaagcuacuaaugaaucucucuugguaaauuauucacagacacauacauggggaagaugagcagaaaacacugcacuucacuaauacuguguggcaggauaauuuacuggaaaauucauuuguguuuu

SEQ ID NO: 4171641 - RNA, 86 nt, Human
aaagcuaugugauucaucaaguucaauauuuaggggccccggaaaggaauaugggucccuaaacucugaacugauucacauucuuu

SEQ ID NO: 4171642 - RNA, 63 nt, Human
aaagcugaugucccaguuugaagguaggaggaguucuuccuuccuuaggugaggcucagcuuu

SEQ ID NO: 4171643 - RNA, 121 nt, Human
aaagcugccaggugguucccagugccuggaaaaugaagaagcagaggcuccaugcugggucaugacuucuguuucagcuguucccugcuucugauuuucacgggggcugauugccugcuuu

SEQ ID NO: 4171644 - RNA, 64 nt, Human
aaagcugcuuuauaaucucggcagagcuguuuucacugcuuuuuugggaacguaauccagguuu

SEQ ID NO: 4171645 - RNA, 70 nt, Human
aaagcugugugccagacaugaugcuauggcccaaguuccccauggaauuuucuaggcauaaaacugcuuu

SEQ ID NO: 4171646 - RNA, 80 nt, Human
aaagcuuauuuccucagcuuuagacuaugaauagaauagcuuuaauuuauaguugauaaaagcagaaggaagaaaguuuu

SEQ ID NO: 4171647 - RNA, 72 nt, Human
aaaggaaauggucuuuguuaauuccagucagauaauggcauuguacagacaugggaaacaaccaauuuuuuu

SEQ ID NO: 4171648 - RNA, 83 nt, Human
aaaggaacagugcacucuuugcuggaucuuaagggguuuugcacauuucacuggccaagcuggauuuagcugcacauaacuuu

SEQ ID NO: 4171649 - RNA, 82 nt, Human
aaaggaaggacaaagaguuuugagacuguggauugcaacaaagaacuucaguuuuaucuauaauguuuuacuuccuuucuuu

SEQ ID NO: 4171650 - RNA, 77 nt, Human
aaaggaaggagacaggguugaaccacgcacuccagccugguugcacagugagacccugucucuaaaaaaauucuuuu

SEQ ID NO: 4171651 - RNA, 83 nt, Human
aaaggacagucagcaggguuugccauacuuaugcaucagcuaaaaguauaaaccuugguagcaucuugcuggcacuaucuuuu

SEQ ID NO: 4171652 - RNA, 65 nt, Human
aaaggacuagguguugccaaaaaguuaacauuuuuuaaagaaguuugguuaaacauuaguucuuu

SEQ ID NO: 4171653 - RNA, 74 nt, Human
aaaggagacagucuuaccuggacccuuuaaaggcuuccuugugccaaauaaaccaggaaauggcuugcuucuuu

SEQ ID NO: 4171654 - RNA, 66 nt, Human
aaaggagauggaaauuguucuaaugaugcuucuaauuuaagcaugugcaacuuuucugucuuuuuu

SEQ ID NO: 4171655 - RNA, 78 nt, Human
aaaggagucaccuugggaagguauuuagcugcugaagauuaucaugauuucucagcaccuuuuuaggacuucucuuuu

SEQ ID NO: 4171656 - RNA, 69 nt, Human
aaaggcaaauguauuugauguauuagccugggcucuccaaggugggguguuggauguuuauuugcuuuu

SEQ ID NO: 4171657 - RNA, 72 nt, Human
aaaggcacugaugcaaaaaucacucaggucuccucccugugacuuggugcacaccugggcaucacugucuuu

SEQ ID NO: 4171658 - RNA, 56 nt, Human
aaaggcagucugguuucaaagcagaugguuuuugcuacuucacuccaguugccuuu

SEQ ID NO: 4171659 - RNA, 73 nt, Human
aaaggcauugcugauccucagguugugccauacauaguccuuggugcuaucagagcucucagcacaugccuuu

SEQ ID NO: 4171660 - RNA, 60 nt, Human
aaaggcuaugauaguccaguggggaauucauaucuaacugggaacugagcaugguccuuu

SEQ ID NO: 4171661 - RNA, 76 nt, Human
aaaggcuuuauaaguuacagucagagguuaacaguaaucacauuuguuuccuccucuggcuuuaauaaaugcuuuu

SEQ ID NO: 4171662 - RNA, 86 nt, Human
aaaggcuuucugggaaaguaaauguaaaggaguugauaaaaauaaugucaaacaaucuuugcauucauuucauuccuguagcuuuu

SEQ ID NO: 4171663 - RNA, 68 nt, Human
aaagggagaaugaccaagguauauugaacuccuaugcacccuucaauacccuguuccauuuacccuuu

SEQ ID NO: 4171664 - RNA, 81 nt, Human
aaagggcaagaaaauucuuacuugccuacuauguccuaagauggcuucacagucuggcagguguugaaagcugagucuuuu

SEQ ID NO: 4171665 - RNA, 77 nt, Human
aaauuaaguauguuuaguaggaguuuaauacuuguugaagcuccaguuagugauauuucuucuacgcaucuugauuu

SEQ ID NO: 4171666 - RNA, 102 nt, Human
aaauuaaugaauaaguacaauucagcucuuaacacagcuuguauuagcuaagugcuagaaaauauaaacugaagauauggaauggcuuaaacguaauaguuu

SEQ ID NO: 4171667 - RNA, 59 nt, Human
aaauuaggaaguucagugucacuaacaacauacagacaugauacagagcuuccuaauuu

SEQ ID NO: 4171668 - RNA, 81 nt, Human
aaauucucuacuguuuuccuaaugagcaagaguguauaauuucuggcuacuucuuuuuaggagaauuaagcugagcaauuu

SEQ ID NO: 4171669 - RNA, 61 nt, Human
aaauugauguucccaguugaaaugacguacccagggucaugcagguggaauuggucaguuu

SEQ ID NO: 4171670 - RNA, 77 nt, Human
aaauugcagacuuuuaucaguuacggaugucacccauguuacggaugaagaaacuguggcugagaaauugacaacuu

SEQ ID NO: 4171671 - RNA, 56 nt, Human
aaauugcagguaggugggugauugacuuggccaaugaugucaccuucugucaguuu

SEQ ID NO: 4171672 - RNA, 84 nt, Human
aaauugcuauuuguucuuuuccaacuugugaaaagaugagacucacuucucugucuucacauggagaagcaacucaggucauuu

SEQ ID NO: 4171673 - RNA, 55 nt, Human
aaauuguccuuuuaagaaacagguuauaaagauagcuggcuuagguggacaguuu

SEQ ID NO: 4171674 - RNA, 78 nt, Human
aaauuguggauaguccucccucccaaaauuugaacuaauuaucauuucucaauuauguggaagaggauuaaacaauuu

SEQ ID NO: 4171675 - RNA, 79 nt, Human
aaauuuauauugcagggacucaauaagaauguuguuuauguuaacagaaaguuuucauugauucucugcaggcugauuu

SEQ ID NO: 4171676 - RNA, 74 nt, Human
aaauuuaugcaugugaaacuuagcaguuucuccauggacccauggaaugaguggcuaagauucaaacugaauuu

SEQ ID NO: 4171677 - RNA, 96 nt, Human
aaauuuauguaucacacaugguuaacaguuuugaguuuugcuucaaauaggucacccgaagagauggaagaauuguaaacuugauauuuuaaauuu

SEQ ID NO: 4171678 - RNA, 115 nt, Human
aaauuugaauuucagauaaauagugaauaauuuuuuaguauaagacagucccaaauauugcaugggacgaacuuauacugaaaaauuauuugucguuuaucugaaagucagauuu

SEQ ID NO: 4171679 - RNA, 64 nt, Human
aaauuuggcuucucaaaauaacugguuuuaacuuuguugaacuagaaaagggaggcucaaauuu

SEQ ID NO: 4171680 - RNA, 92 nt, Human
aaauuuguuugaacaguaugaagaugaugaaaaauagcauguaaaaauaagguguuguuuuaauuaaguuuaugcuuuauuuuaauagguuu

SEQ ID NO: 4171681 - RNA, 70 nt, Human
aaauuuuaaggcuggaacuuaauccaaugauguaugcuggaagaaauugaauucacggccugggagauuu

SEQ ID NO: 4171682 - RNA, 73 nt, Human
aaauuuuagaccaggcaaaacuaacauauggcaggaaaaaaagucagaaaagugauugccugggguaaaguuu

SEQ ID NO: 4171683 - RNA, 90 nt, Human
aaauuuuauuccaugucaauuuggccuuuguaugcaguauccuagauggauucuuucauauaaaggcucaguacugaacagaaaaaauuu

SEQ ID NO: 4171684 - RNA, 100 nt, Human
aaauuuucugcauaugaugcuuccuuuuucccuuaaggacaacuguaagaaauacaaaaucuuuggaggaaaauggaaagcuagcauauuuagaauauuu

SEQ ID NO: 4171685 - RNA, 84 nt, Human
aaauuuuguuuugcuuuucacauuuagcuguacaaucuauguggaauuuacucuguguaugaugugaguuaagggccaagauuu

SEQ ID NO: 4171686 - RNA, 55 nt, Human
aacaaacauuaccuggugcugguuuuaucaagguccaguuuggguucuguuuguu

SEQ ID NO: 4171687 - RNA, 70 nt, Human
aacaaagauuccugggcucccccuugaacuucugcaccagaacugccaagauggaguccgggaauguguu

SEQ ID NO: 4171688 - RNA, 66 nt, Human
aacaacacccauaugcacuguuuaggcucuugcaguacugccuaguauaugucuaugguuguaguu

SEQ ID NO: 4171689 - RNA, 71 nt, Human
aacaagauucucgggagauuuguauucacauuaaaauuucagacaugauguguuuaccugaggaucuuguu

SEQ ID NO: 4171690 - RNA, 67 nt, Human
aacaagugaucagacacugaagucaggaagccugagucauagacuucagacuuauggcacaauuguu

SEQ ID NO: 4171691 - RNA, 68 nt, Human
aacaauaggagugaugcaguaugauuccugaagcuaguuucuaaaaauguauccacuucuaccuuguu

SEQ ID NO: 4171692 - RNA, 69 nt, Human
aacaauauaguccaugagcaugcuuggcaaaauauaaagagcuuagcaaaagcauggaauuguauaguu

SEQ ID NO: 4171693 - RNA, 73 nt, Human
aacaauauugacacagggaaagcggauccauacuccauggguuuggaaagcuacucuguguucaauauguguu

SEQ ID NO: 4171694 - RNA, 61 nt, Human
aacaaugaccacacaauguacuaagucaacauggcuaagggugcacuauggguuauuuguu

SEQ ID NO: 4171695 - RNA, 129 nt, Human
aacacaccacucugcuucuucccacagaguucugagacagcuuuuacauaaugaucuugaacauauuguaaucuuguuuaugacagaaaugaaaagcugucaucacauuucuguuuuggagaguucauu

SEQ ID NO: 4171696 - RNA, 90 nt, Human
aacacauacucguguguaugaauauguauuuucauaugugugcacauaugugagcaaguuuauguguacauacauacaucuauuuguguu

SEQ ID NO: 4171697 - RNA, 59 nt, Human
aacacauaggcagagcaugacaacacagaguaaccugaguagagugcuaccuggguguu

SEQ ID NO: 4171698 - RNA, 64 nt, Human
aaagaccacuggggcaagucuucaaagggggagcuucucugcagaaaguggcucagugggauuu

SEQ ID NO: 4171699 - RNA, 94 nt, Human
aaagacugaugagaaaugauucagggaguuuucaggagcuauaccucaggggucucuuuuuagccucuucugaucaacauuuuugucaguguuu

SEQ ID NO: 4171700 - RNA, 82 nt, Human
aaagagauuuugagauguuucugggaaggaaaagucagaaucauaauuuaugcuuuucuagcuagaacauccgugucuuuuu

SEQ ID NO: 4171701 - RNA, 87 nt, Human
aaagagcccauacauccagguagccuucagauauggugucaaacagccccuuuuucugucacucccugaugaugaaugagguucuuu

SEQ ID NO: 4171702 - RNA, 57 nt, Human
aaagaggggacuguuaauuccauuuaucucuugaacaggaauugcuuuccugucuuu

SEQ ID NO: 4171703 - RNA, 62 nt, Human
aaagaguggcauccaauuuguugccauaugagguauggcagcaauuugugauguugaccuuu

SEQ ID NO: 4171704 - RNA, 55 nt, Human
aaagaguggguagcuucccugguucaaggccagccucuggcagcugccacuuuuu

SEQ ID NO: 4171705 - RNA, 68 nt, Human
aaagaucaugcuguuuugugaugcucagcauuuguaauuaaugcaccuaccauugacaguauaucuuu

SEQ ID NO: 4171706 - RNA, 129 nt, Human
aaagauccugccuuugcucugcgcaguuucaaaguguucacugugaacucauauucagacucuagcauuuucuucugaauauccucacuggugauaaaucuuuggccuuugaaaguggaugugauuuuu

SEQ ID NO: 4171707 - RNA, 110 nt, Human
aaagaugacucaauauggugguagaugggguaggagggaguugaagaguaugggcucuacaugcuuccaacugccccauccuaagcuccuacccuauuccuucuaucuuu

SEQ ID NO: 4171708 - RNA, 93 nt, Human
aaagauguaacuauuuucuuuguuggcaguacauuaagcaaaaguucauuaaaagugugugacuguuaagaaggaggauggaaggauuucuuu

SEQ ID NO: 4171709 - RNA, 92 nt, Human
aaagauucuauauguguaagguaauauuuuucucucuaagguauagugaaucuuauuugggacauauguugaaagacugcauaggaauuuuu

SEQ ID NO: 4171710 - RNA, 86 nt, Human
aaagauucuuuacaaguuuacagaaugauggacugagcuauagcuuccagaaaauauuuuuuaguuaacaagugcaggaaaucuuu

SEQ ID NO: 4171711 - RNA, 85 nt, Human
aaagcaacauagugugaaucagccugucaguuccauuccaaagcgacagcuugggaagaacagguuuauuuuccuauguuguuuu

SEQ ID NO: 4171712 - RNA, 129 nt, Human
aaagcacguagaccugugucaagagcauaauaaauucuuagaaaauguugguaguuguaauuuuaugauuagcuuuaaagcauauuucuaagguacuauguaaauauucauggcacuugucauuucuuu

SEQ ID NO: 4171713 - RNA, 59 nt, Human
aaagcagacaucuggagagaagaaacaauguuugcucuccagcagauguagucuguuuu

SEQ ID NO: 4171714 - RNA, 64 nt, Human
aaagcagaggaggaaaguuucaccagugcuuguucugagaaaccucuuagccucucuuugcuuu

SEQ ID NO: 4171715 - RNA, 107 nt, Human
aaagcaugaauagcaauaggaaaaggucauuggggacuaucuccgagucugacaguuacaaucuugagaugagcuuccuaaugaaagauuaaugcucaacauacuuu

SEQ ID NO: 4171716 - RNA, 57 nt, Human
aaagcaugugaauagaauauggcuacauuaaguggauucugugagagucacagcuuu

SEQ ID NO: 4171717 - RNA, 63 nt, Human
aaagcauuauucuguggaaaaagugagcauucuauuuuaacugaauucacaggaaaugucuuu

SEQ ID NO: 4171718 - RNA, 63 nt, Human
aaagccaggguguugugcaaaggucuguucuaugcccacuguggcacuaggcaccuuaccuuu

SEQ ID NO: 4171719 - RNA, 64 nt, Human
aaagccccucucggaaucuauccagccagaugguucucuuguguuaguccaguaggggggcuuu

SEQ ID NO: 4171720 - RNA, 56 nt, Human
aaagcgcagacacagagaguggagaguauacgauucucuuuccucuuuuguguuuu

SEQ ID NO: 4171721 - RNA, 83 nt, Human
aaagcuguauuuucuauauauaaauuuguagcugguagcagugaccuagacugcagguaaauuuguggaggauuccaaguuuu

SEQ ID NO: 4171722 - RNA, 59 nt, Human
aaagcuugacaaguaauacuuaaauuacuuuuguaaguagcaaguacuuguuaaguuuu

SEQ ID NO: 4171723 - RNA, 107 nt, Human
aaaggaaaucaauguuuugcucuugaggauuagcuuuuauugucuucguguuuugcgaaauguauaagcuggucuuuuggaagcaagaggaaauauguuggucuuuu

SEQ ID NO: 4171724 - RNA, 63 nt, Human
aaaggaaguaugagguaaagucuaucaaagaugaacaaagugguagauuucauacuucucuuu

SEQ ID NO: 4171725 - RNA, 55 nt, Human
aaaggaggaauggagagaugcuggguuaauuccagggaucagaauuuccuccuuu

SEQ ID NO: 4171726 - RNA, 76 nt, Human
aaaggauuuaaucagucucucugaaguauuaagauguauuaugucauaccuggcagagagaucccugagacccuuu

SEQ ID NO: 4171727 - RNA, 78 nt, Human
aaaggauuuugugugugugcuagauugucuucuaaaucacugauuuggaacaaauauuaguaaagcauuuaauucuuu

SEQ ID NO: 4171728 - RNA, 94 nt, Human
aaaggcaaaagauacgggaaaauguagaagugggcauuauagaagaauccaaaugugucuaaugucuucuucauacuaauuccuucuagccuuu

SEQ ID NO: 4171729 - RNA, 56 nt, Human
aaaggcaucuagccaaguugagaauaggcccuucauugacuugcuucuuugcuuuu

SEQ ID NO: 4171730 - RNA, 67 nt, Human
aaaggccaauguaucaagaagcaucaguaaagggacagucuguaauugaugacuugauuacacuuuu

SEQ ID NO: 4171731 - RNA, 78 nt, Human
aaaggccuccaccugcugggcugcuuugggccaggagggucucuguuucccacaggcugcccgcagcugggagccuuu

SEQ ID NO: 4171732 - RNA, 87 nt, Human
aaaggccuucagguguuagaagaaauuucaaacuauaaacucugccuuugggggaugacauuccuuugagcaucugaggaauacuuu

SEQ ID NO: 4171733 - RNA, 71 nt, Human
aaaggcucccucuucucgaguguugcucuacucaaccaucaauacucagcucaacacucagggaagucuuu

SEQ ID NO: 4171734 - RNA, 55 nt, Human
aaagggaggggcgauaagccggguccuugggagcguccuggucucccuucgcuuu

SEQ ID NO: 4171735 - RNA, 73 nt, Human
aaagggauguugcuaagauaugcuguggaucucauuuuuuuauauguacaucuugagcaaugaagcucccuuu

SEQ ID NO: 4171736 - RNA, 72 nt, Human
aaagggcccugaguugcagcccuggauccccauggaaccaaagggcccugggggcuggagcugggcuccuuu

SEQ ID NO: 4171737 - RNA, 59 nt, Human
aaagggcuuauggaaaaaagaugcucaugggugcuucuuggcucccuuguaggcccuuu

SEQ ID NO: 4171738 - RNA, 59 nt, Human
aacacugugcccacccuaguccuuuucuuaaauuugggcagagauccaggguauagguu

SEQ ID NO: 4171739 - RNA, 83 nt, Human
aacagagauuuguccagaugcacagauaauaauuaccuggaaugugauucaaaacuaggauugucugaauccaaagcucuguu

SEQ ID NO: 4171740 - RNA, 95 nt, Human
aacagaggcccagagagaauuaaaggagcuaugcuauagaaaguacuauagaaaguagguggcacagcccggauucuaugacuggccuucauguu

SEQ ID NO: 4171741 - RNA, 66 nt, Human
aacagaggccuuccucucaagcacauggaacgggguccauuuguggacuuggaggagagcaagguu

SEQ ID NO: 4171742 - RNA, 72 nt, Human
aacagauaaguauaucuauguauaccuacuaugcauaagccuuacaggugcuacauagaggugauaucuguu

SEQ ID NO: 4171743 - RNA, 76 nt, Human
aacagcagcagcacggauaguucagcuaaauacuucuguauuuuuagcugaaaaaauucaugcaaggcuuucuguu

SEQ ID NO: 4171744 - RNA, 56 nt, Human
aacagcaggcauuucuuagcucacauuuagugugacugggaagaucuuuuguuguu

SEQ ID NO: 4171745 - RNA, 90 nt, Human
aacagccacuucucucuuccuucgcccuugcuguuucagugggaggaauaugaauucugaaaggcuuggcggagggaggggguggcuguu

SEQ ID NO: 4171746 - RNA, 68 nt, Human
aacagccugagccauccauaccagcuuaccucuuuaugauaagcugcaauggauagcuuccugcuguu

SEQ ID NO: 4171747 - RNA, 77 nt, Human
aacagcgucuucugcaacugcaccugccucgcuugccucuggaaagggugggggcaggucagcagagccaugcuguu

SEQ ID NO: 4171748 - RNA, 55 nt, Human
aacagcuauuagaacuucauggagaauaauuuccuccacugaacuuuaagcuguu

SEQ ID NO: 4171749 - RNA, 83 nt, Human
aacaggagcaaagcuuuucagagaguugcacugucaaaagcacuggcagcuugaaugcagucuuugaacagauuguugcuguu

SEQ ID NO: 4171750 - RNA, 57 nt, Human
aacaggagucauugucauuauuguuacuuauuaguagugucauccucagcuucuguu

SEQ ID NO: 4171751 - RNA, 88 nt, Human
aacagggggcaucaggauuuucaucauuacagucauguuaugguauuguuuuccaaacaaaagacgaaugauaaucuaguucucuguu

SEQ ID NO: 4171752 - RNA, 119 nt, Human
aacaguaggaaagguaaacacagaagacagcuguuucacucgauuguggaaaaagcagagugcauguccugggugaaugcauuuguuccugugauuuauaguuucacucuuuccuuguu

SEQ ID NO: 4171753 - RNA, 85 nt, Human
aacaguagggagaauaugucuauagugccauggcaaacugucuugaagacaggaccagcaggccaggggcacugcucucuguguu

SEQ ID NO: 4171754 - RNA, 76 nt, Human
aacaguuaauuaaucagucucauuuagcagggagggaguuccuauuucuguugaauagcugauaaguuuaacuguu

SEQ ID NO: 4171755 - RNA, 113 nt, Human
aacaguuccuagauucuggcaguuggcauuggcaucuggcauuaacucucuccaccccgugcccauuuuauagaugcgaacaggccaacugaugcaggacugugguuucuguu

SEQ ID NO: 4171756 - RNA, 64 nt, Human
aacauaaucugccagcaagcuacccuggcauaaauucaauuacugcuacauugcugguuauguu

SEQ ID NO: 4171757 - RNA, 56 nt, Human
aacauagaauggcuccagagcuucuacuaaaaauaagacucagagcuauauauguu

SEQ ID NO: 4171758 - RNA, 61 nt, Human
aacaucagcacacaauagcaaggggcccauuccaugauuucuuugcucagaguaugauguu

SEQ ID NO: 4171759 - RNA, 55 nt, Human
aacaucauuauguccauuaaugaguuuucuuucaaguugagggcauucugguguu

SEQ ID NO: 4171760 - RNA, 100 nt, Human
aacaucugcuuuagaaaugcaccguuugguuuggauuuacagcuuuaguggguugaaaauuuauauuaccagaagguuuauaaaccccugugcagaaguu

SEQ ID NO: 4171761 - RNA, 71 nt, Human
aacaugagauacuugguuucuguuucugcauugguuugcuuaggagaguggauuccagcuguauccauguu

SEQ ID NO: 4171762 - RNA, 72 nt, Human
aacauggcugcucaguggagauaauugcuaguccuucuuauuaguaguuuccauuucugaguuugcuuuguu

SEQ ID NO: 4171763 - RNA, 97 nt, Human
aacauguguuaugaauuccucagcucugaaugaggcuuuaaggcuuuccuaaaguccaauuuuguucaggcuauguugaaauuuaccaucucauguu

SEQ ID NO: 4171764 - RNA, 62 nt, Human
aacauucaccucuaccuccuucugaaaucuuuuucugauagcuugaggcagagguaaauguu

SEQ ID NO: 4171765 - RNA, 71 nt, Human
aacauugagaugugccuaguucuguauuuacaguuuggucuggcuguuugaguucuagcgcauuuaauguu

SEQ ID NO: 4171766 - RNA, 56 nt, Human
aacauugauugcaucuguucacuauaauucucagugggagggauggaaaugauguu

SEQ ID NO: 4171767 - RNA, 59 nt, Human
aacauuuauucuaauucugggaaucacaaaauacucccaacggcauuagaguagagguu

SEQ ID NO: 4171768 - RNA, 57 nt, Human
aacauuugcugacuggaugcaguugguuggcaccaugcugugccauuagcaguuguu

SEQ ID NO: 4171769 - RNA, 67 nt, Human
aaccaacgagaaccaccaguguucucuacucaaagccuccuagaaaugucaaguguucuuguugguu

SEQ ID NO: 4171770 - RNA, 75 nt, Human
aaccacagaagcacuaggaggaaacguugcuauuuguauuagugacguggucacuggagugcaguuuccaugguu

SEQ ID NO: 4171771 - RNA, 68 nt, Human
aaccacauccaguuuccaaucacugcacggcuuuucagguuaaugguuuuuuggagacugcugggguu

SEQ ID NO: 4171772 - RNA, 59 nt, Human
aaccacauggcucaguggacauacuuauccauuaaguaugcuuauccugaccauugguu

SEQ ID NO: 4171773 - RNA, 62 nt, Human
aaccacuugaaacuuaguggcauaaaguaucauuaauuuuaugcccauggauucgguagguu

SEQ ID NO: 4171774 - RNA, 58 nt, Human
aaccagacucuccaaaggcaaaaaaugggcuuuuguuguccucuggaucgguuugguu

SEQ ID NO: 4171775 - RNA, 61 nt, Human
aaccauggauuucaguucaccuuucauuaucuaccgagaaguggucaucuaucccaugguu

SEQ ID NO: 4171776 - RNA, 81 nt, Human
aaccauuaacauaggaagcugguuuuuguuuguuuuacuguuguuuuaauacaguuuagaaaaucuguuucuucaaugguu

SEQ ID NO: 4171777 - RNA, 60 nt, Human
aaccauucacaguguagccaaauuucucuuauccauguuggcuccacuacuggguguguu

SEQ ID NO: 4171778 - RNA, 55 nt, Human
aacccagagcacagaugcaacgugcucaccaggagcaugaaugagcugugagguu

SEQ ID NO: 4171779 - RNA, 79 nt, Human
aacccaggcagcuuauucagauacagacucuugggccuuaggccuagaggugcugacucggaaagucuaugcuaggguu

SEQ ID NO: 4171780 - RNA, 75 nt, Human
aacccaugagucccaaaguauuagcauuucaacauguaagcaugucgguaagauaguugugcuuugcuuaggguu

SEQ ID NO: 4171781 - RNA, 57 nt, Human
aacccauuaauccuugcaagcaccucuguccauggugcugauuaugcagguuggguu

SEQ ID NO: 4171782 - RNA, 124 nt, Human
aacccuccuugggaagugaagcucaggcugugauuucaagccagggggcguuuuucuauaacuggaugaaaagcaccuccagagcuugaagcucacaguuugagagcaaucgucuaaggaaguu

SEQ ID NO: 4171783 - RNA, 59 nt, Human
aacccugccagaauugagcuugaauuccaagaucaacaagaucaagugcuggcaguguu

SEQ ID NO: 4171784 - RNA, 68 nt, Human
aaccguauuuccaaauaaggucacacucagagguucuggguggauauaaauuuuuggaggauacuguu

SEQ ID NO: 4171785 - RNA, 96 nt, Human
aaccuaccuggcuuuuuauaauuaugaguuauauuauugccuccucuuaaaggcccugugacuuauaacauagaauuugacagagugcuugugguu

SEQ ID NO: 4171786 - RNA, 65 nt, Human
aaccuccuucuucuguccugcucagaacaaugagaaaaagccaaggucaaaagcaaggccagguu

SEQ ID NO: 4171787 - RNA, 77 nt, Human
aaccucuaguauucaacagcaucaagacauaauaugauuaauauuauuaaauguuauuuggguuguguuuauggguu

SEQ ID NO: 4171788 - RNA, 86 nt, Human
aaccugcuacauugagguaguagauuuuuguccauugauacuuuaucuuuguagccuaacaucugccuucuuaaugugaucaaguu

SEQ ID NO: 4171789 - RNA, 70 nt, Human
aaccuggaggcuguguagucuuuuuggaucuuaaccgcuagcuaucccuggauucacagccacucagguu

SEQ ID NO: 4171790 - RNA, 107 nt, Human
aaccugugguucauuaaagaugaauauagauuucagaaaaccagguaaucuauguuguuuuuguucucuggaaacuaugauucaccuaugugacauaaacccagguu

SEQ ID NO: 4171791 - RNA, 84 nt, Human
aaccaguucucuguucuucuccacuguaugugcagaacuaaacacagcaccuggcauauagggagacagcacagaauagugguu

SEQ ID NO: 4171792 - RNA, 95 nt, Human
aaccauuugaaauuaaacuaacuaguuagaaaugcuuuucauaauucuuuugugcaggguccuaauuguuaaggaguagaauuuuaaguuugguu

SEQ ID NO: 4171793 - RNA, 101 nt, Human
aaccauuuugccaaaaaguuacacagauuucaguaucaucacucuauaagaaaacuagacugauagugucuaaaucugugcccaguuucuguacuuugguu

SEQ ID NO: 4171794 - RNA, 107 nt, Human
aaccccacucugcccaagccaccacugcagugguccagggagcggcccacacccugggccuuccaccuaggccucugcuuuguggggcacagggucagggugugguu

SEQ ID NO: 4171795 - RNA, 86 nt, Human
aaccccgagcagcuuaaaaaauaugcagcuaaugucauguaguuaaacugauguagcaugcauguuguuuugcaagcuaaccgguu

SEQ ID NO: 4171796 - RNA, 130 nt, Human
aacccuauucugcuugccaaaaauaauuacaucccauuuuuuucugccaaccauuuaaacucauuucauagaaaacggaaaaagaggguuggugcaaaugggauguuucccgcaagaaagaagaacgguu

SEQ ID NO: 4171797 - RNA, 72 nt, Human
aacccugacagaacuuuuucacaucuccuggauuucaaccagguaauuucugagauguucugcuccuuaguu

SEQ ID NO: 4171798 - RNA, 68 nt, Human
aacccuggagaaggcuuuggauguauugagguacuagaaugaaguucaaggcaguucuauguaggguu

SEQ ID NO: 4171799 - RNA, 87 nt, Human
aacccuucgagaugcacaaggauuuugauuguuugaaauguugguaacauuucaucuucccagagaccuuguucauuuaucaggguu

SEQ ID NO: 4171800 - RNA, 75 nt, Human
aaccgcauucuucucccuuaccuuccagacuuuuucuuuguucaguggugguggcuguaagggagagaagugguu

SEQ ID NO: 4171801 - RNA, 126 nt, Human
aaccggaggccugagauagugacacuggaaggugggcaggcugcuaaugaggauuccuggcugcgauucagccucagcacgcagcucugugugccuggcuguuguuaacugugcagugcucugguu

SEQ ID NO: 4171802 - RNA, 55 nt, Human
aaccuauucuguaagacaugacuuguaaacaaacucuaagccuugcagauggguu

SEQ ID NO: 4171803 - RNA, 69 nt, Human
aaccucaaguccaacacuaaaaagccucaaaaaguuaacauagggcuuugcugaaggccucuugggguu

SEQ ID NO: 4171804 - RNA, 65 nt, Human
aaccucauuuuacauaaggaagguuuaacucauaaggguuaaauaaacuuggucaagaucagguu

SEQ ID NO: 4171805 - RNA, 55 nt, Human
aaccuggguguacauuauggucaucuuuuaaauguuauauaaacacacuuagguu

SEQ ID NO: 4171806 - RNA, 64 nt, Human
aaccugugcagccaguggaacagcuccauuaucuuggccauuguugcucuuguugccacauguu

SEQ ID NO: 4171807 - RNA, 129 nt, Human
aaccuuaauuuauauagucuagcuuuguauuuucgaggcauuaugccaucguuaaauugcuaauacuuaccacauuguuuaaagcaggcaucauuccucaugugcgacgcagagacccagagauggguu

SEQ ID NO: 4171808 - RNA, 78 nt, Human
aaccuuauagaagaugucagaugauaucccugcuaaaauaaccccauagaagaugucaucugauauuacuuauagguu

SEQ ID NO: 4171809 - RNA, 130 nt, Human
aaccuucugaaaaugaaugccugggagcugugcuugacagugggaagcaugagaauuccagaaagcuuucaugucauauuuuuuuccucucaaauauugucaguaucuccaggcuucuguucucaagguu

SEQ ID NO: 4171810 - RNA, 68 nt, Human
aaccuuguuugucauuguuagaggcucugggaagggucucaaggaauauaaugagucgagucaagguu

SEQ ID NO: 4171811 - RNA, 59 nt, Human
aagccaggaagggagcuguccccagaaacugaauuugcugacaccuuaaucguggacuu

SEQ ID NO: 4171812 - RNA, 63 nt, Human
aagccagguguugggagaagagauaaagagcagcuucagucuuagaaccuaacaaccuugcuu

SEQ ID NO: 4171813 - RNA, 89 nt, Human
aagccauuuuuucugaccuaucuacauuuagaaaaacacacauuuggggaaagaauaaaucaguagauaugguauaggagcaguggcuu

SEQ ID NO: 4171814 - RNA, 60 nt, Human
aagcccacugaguuaccuuuacaccauucccugccaucuaaagcaauuacucaguggcuu

SEQ ID NO: 4171815 - RNA, 56 nt, Human
aagcccagaugagaucccuggauguggauaaagauccagguucucauagggggcuu

SEQ ID NO: 4171816 - RNA, 72 nt, Human
aagccccaagaacuuuauaacuguaaaugucaagaaaggucccuggcaauaguuguggguucuuuagggcuu

SEQ ID NO: 4171817 - RNA, 94 nt, Human
aagccccggcaucuucuugcugccgucccagacaacagaaguuaccagaugaacagacuuggaugggccacggggguggagagcuggaaagcuu

SEQ ID NO: 4171818 - RNA, 93 nt, Human
aagcccugaauaaauagucccugcuuauucucauuugguuggacuucauuuauuuccacauguaguaagcaggcaaugauaguuuucaugcuu

SEQ ID NO: 4171819 - RNA, 87 nt, Human
aagcccuguucuugcugacccagaauguuaaugaaauaaaggcaacucagaaacaguguucuaggguguggcuaggaacaaggguuu

SEQ ID NO: 4171820 - RNA, 106 nt, Human
aagccggagugcucguugucaacauauuaauuauguucucuguuuccacaggcuuuucaggaggauuuaaucaguuggcauuuaugagccuauuuugaaaaugcuu

SEQ ID NO: 4171821 - RNA, 72 nt, Human
aagccucccuggcugguguagagggaucagguccacaguggugcagauucaaccaccacccagggagugcuu

SEQ ID NO: 4171822 - RNA, 62 nt, Human
aagccucuuuccaauuucuuguucuuggcaauauuugaggagcauacaguugaaaguggcuu

SEQ ID NO: 4171823 - RNA, 83 nt, Human
aagccugacucuuguugagugagucuguggaccgggcacugugaugggcagugugcgugcacaacgucacuuaauccuugcuu

SEQ ID NO: 4171824 - RNA, 102 nt, Human
aagccugaguuuuuuuuaacuguggcuucaccccaguugucucugggguccucuaaccuggagauaacaauaaagaagcacaagguuggagagaauuuacuu

SEQ ID NO: 4171825 - RNA, 66 nt, Human
aagccuggcugccuauagucucccuuaaagguuaaggagugauauaugggugcuaaagaaaggcuu

SEQ ID NO: 4171826 - RNA, 88 nt, Human
aagccuuggaguuuggagaguuaauugacaguuacgaagauaauucacuucuuuguguuaacugccucuucaacuaaaauuuaggcuu

SEQ ID NO: 4171827 - RNA, 56 nt, Human
aagccuuuuccaccuaauagagauccaaguacaucacuaagaggaggacuagguuu

SEQ ID NO: 4171828 - RNA, 119 nt, Human
aagcgauugugaagagaacauagggauuuuaucgucauccuucuggaacuuauuugucuucaaaguguuuaguuucaaaggguccuuaacaugagauccaguucccugaaaaaguccuu

SEQ ID NO: 4171829 - RNA, 91 nt, Human
aagcgccauuuuuguuacaucaagagucuuacuaucaguauaaauuaugacugaugaugcugacugugaucaccuggcugagauaguguuu

SEQ ID NO: 4171830 - RNA, 73 nt, Human
aagcgguaauuguucuggacacgugacucucauuuaguaucugcugaagagcccuuguucauaauuauugcuu

SEQ ID NO: 4171831 - RNA, 79 nt, Human
aagcguauacauacauauguacacuuacguuacaaauaguuuuauauuauuucuguguguguguguguguacaugucuu

SEQ ID NO: 4171832 - RNA, 62 nt, Human
aagcgugcagaaauaugaugcauaaagggggcguucccugugacauuagaauuucauugcuu

SEQ ID NO: 4171833 - RNA, 83 nt, Human
aagcguuggaaucacagaagguggccauagcugaguuggcaugacuggucugcagcagaaguguuacuuucaugaaaacgcuu

SEQ ID NO: 4171834 - RNA, 83 nt, Human
aagcuauagauguuuauuaaaacuguuggcucugugguuuaaagcagaccuugggggauuguuuuaaugaauaggcaaggcuu

SEQ ID NO: 4171835 - RNA, 81 nt, Human
aagcuauaggaaagauuugucacaugaaugcuccaauaagagacuuuggguuauaugauguucaaacucuuccacuagcuu

SEQ ID NO: 4171836 - RNA, 122 nt, Human
aagcuauucuaauagcacuagucuaauagcauaaaauuugcuacuguuaaauaaaugcuuauccccugcauaauuuacagguagaauuuuaaguaauuggaucaaauagcuagaagaggcuu

SEQ ID NO: 4171837 - RNA, 126 nt, Human
aagcucaaggaaggaugaucccugccucaggaaguuuugaaucaacugcuauuuuuaacaaguauacaguagaacuugagaucaggucuucacucaguugguaggaaaaguuuuccgcugaagcuu

SEQ ID NO: 4171838 - RNA, 89 nt, Human
aagcuccuggagggcaagucuugcauccacugcuuugcuggcaacccgacugguaagcuucuggaaggcaaggcuugcauccagugcuu

SEQ ID NO: 4171839 - RNA, 66 nt, Human
aagcucuguccagccuaugauuucccacccugcggaagcacaugaagcucaggcuggaccuggcuu

SEQ ID NO: 4171840 - RNA, 82 nt, Human
aagcugaagaaauacuggguuagcuuucuauacauacagugacaaaguauguauagaaaguuaacccaguauuucuuuucuu

SEQ ID NO: 4171841 - RNA, 56 nt, Human
aagcugaagacacagcuccaguuucauccuagacuuuggaaaaugcucuuuaguuu

SEQ ID NO: 4171842 - RNA, 57 nt, Human
aagcugauauugcugcaucguguucaucuggauguauuagauguaaaauaguagcuu

SEQ ID NO: 4171843 - RNA, 69 nt, Human
aagcugcaugaaguugaguagaacaccagaaccucaucuacaaaauuacuguucaaauuuauguagcuu

SEQ ID NO: 4171844 - RNA, 55 nt, Human
aagcuggcuaaauaaaagguccuuuaguauccagagccccuuauuugcccagcuu

SEQ ID NO: 4171845 - RNA, 86 nt, Human
aagcugguucuuuuucuguuuuuaagauuguacugauuuccuuuuguuuucagcaguuuuauuaugauggaaauaaacauuaguuu

SEQ ID NO: 4171846 - RNA, 55 nt, Human
aagcugugcucuuaugauuugugcacuuuaugcaugucauauuucaauacaguuu

SEQ ID NO: 4171847 - RNA, 61 nt, Human
aagcuuaagucuccuuuuaugaugacgcagagaagaaaugguagaggugggauuuggguuu

SEQ ID NO: 4171848 - RNA, 69 nt, Human
aagcuuaucauaaaacaaauaguuaaagauggacuauaccauugagaauugggccuuuucugguagcuu

SEQ ID NO: 4171849 - RNA, 73 nt, Human
aagcuucaggcccacccauguccaacugccaucuacacacugccagcagcugugcagagggagccugaggcuu

SEQ ID NO: 4171850 - RNA, 61 nt, Human
aagcuucuuuacaggagagauuucaccaaaaucuguaaaaugaauucuuguucuggagcuu

SEQ ID NO: 4171851 - RNA, 74 nt, Human
aagcuuggcauucaacccagccuucugccaggaugguucugccuggcagcaaaaagccugguugaauuaagcuu

SEQ ID NO: 4171852 - RNA, 129 nt, Human
aaccuuacuuucauugacaucauaaaaucuaacacuuuuggcacgauuugcaauuuuacuuugcaguauaauugaauauauugcauuguauuguaaauguuugccacuaugagagcaggagagaagauu

SEQ ID NO: 4171853 - RNA, 130 nt, Human
aaccuucaacuauaaagaguuuguuuaacuagaggcaggaagagcugauuuucccuugaaaugcauggaaaauucauucauuuuuguuuguuuuaaacuuuuaaaaaucuggaguuauuaagggcuguuu

SEQ ID NO: 4171854 - RNA, 95 nt, Human
aaccuugagcucuauguauuaaaacuacauuugacauuuugucuuagucuaugaagauaaaguggagguaguauucauuccauuaguugaagguu

SEQ ID NO: 4171855 - RNA, 76 nt, Human
aaccuuuccuaugaggcacuucauuagcuggcuccauuuucuggguguuaugaagaugccugguacauggaagguu

SEQ ID NO: 4171856 - RNA, 66 nt, Human
aacgauauugacaagugagcugggcugcuuggcaccagguagucugaauuugacuugucaguuguu

SEQ ID NO: 4171857 - RNA, 64 nt, Human
aacggaggcuaacauuacggacaucugucagacuggcaucuggcccugccuaauguacuugguu

SEQ ID NO: 4171858 - RNA, 63 nt, Human
aacggcacaaggcaacuuuuggggaugaugggaauauuccacaucucaauugcggugguuguu

SEQ ID NO: 4171859 - RNA, 130 nt, Human
aacgugggacaggagcaagcauguaacagacaccaaugcacuuuguaaucuguucaauuacauuaauugauagauuacaaggugcauuggcgacacugaguaggcaugcucagcucuaccuagaaagguu

SEQ ID NO: 4171860 - RNA, 83 nt, Human
aacgugguguuuaaauuuguauuccuuuuccguaaaauacaaaugcugugggaaaauaauacauacuuauaggcaucuauguu

SEQ ID NO: 4171861 - RNA, 72 nt, Human
aacuaagucaacuucaaaugugacuuugcauuguaagauguaaugucagauucuggagaaaaauucuuaguu

SEQ ID NO: 4171862 - RNA, 123 nt, Human
aacuaaguuaggauuuuauuuuauuguggggaauuuaugugcaaauuauugugcaauuuaaugaaaauaagccaauguuuuauacagaaguacccagaaaauuaaauaacacuauacauuguu

SEQ ID NO: 4171863 - RNA, 57 nt, Human
aacuagaaaucacuacagguauugcuaaucaugguagugcuagaggaauucuugguu

SEQ ID NO: 4171864 - RNA, 78 nt, Human
aacuagaauuucccugcaagacuauuuaguuccacaaacuuuguugucauggaaaggaagagcuugagguuucaaguu

SEQ ID NO: 4171865 - RNA, 78 nt, Human
aacuagagauggcagaaccuggcugaagugggaaggcugaauuuuauuuaaccucuaauuuaguucuccucucaaguu

SEQ ID NO: 4171866 - RNA, 57 nt, Human
aacuaggaagcaagagaaacagggacgggauuuucuucuuucuguuugcuucugguu

SEQ ID NO: 4171867 - RNA, 55 nt, Human
aacuagggcagaugaacagggggcacaguccuaccuccagacaucuagcucaguu

SEQ ID NO: 4171868 - RNA, 109 nt, Human
aacuaguggcaauagaauugcagcaugauauuccauuagguaacuuauuuuuggcugcuuguuaagaaguguugccuaaugcaauguuguaaggacaaaaaucacaguu

SEQ ID NO: 4171869 - RNA, 76 nt, Human
aacuauagggguuaccuuuagcaucuccccucucugaucacacuauggagggaugccaaaagugccccccauaguu

SEQ ID NO: 4171870 - RNA, 62 nt, Human
aacuaugaauaccuauuugggguugaauuguguucccucaaucccaagaauaugcauaaguu

SEQ ID NO: 4171871 - RNA, 61 nt, Human
aacuauuagaggaaccaagguggagcuggccucuagggcucuucauaggucuucuggaguu

SEQ ID NO: 4171872 - RNA, 77 nt, Human
aacucaauuucccuacuuguaacuggaaacaagaauaacagcuguuucguagaguuguaguuaggguaaaaugaguu

SEQ ID NO: 4171873 - RNA, 78 nt, Human
aacucagaauaaagauccugcuuuugcuucugugaucauaaagcaagcacaaggcaauggcaggauuucaaccugguu

SEQ ID NO: 4171874 - RNA, 57 nt, Human
aacucagcucaggagcuggcuggggacagaguugcccagagagcagugaguggaguu

SEQ ID NO: 4171875 - RNA, 55 nt, Human
aacuccagugucagcugcaauguacauuagcaccagcaucuugagacugugaguu

SEQ ID NO: 4171876 - RNA, 81 nt, Human
aacucccauuccacaucugcccaaauccuucuuccucugggcaaccaccccgggggugggagguugggugggacggagguu

SEQ ID NO: 4171877 - RNA, 59 nt, Human
aacuccugaauucucacacagcucugugagguggauguuggcagaugagaccagggguu

SEQ ID NO: 4171878 - RNA, 126 nt, Human
aacucuaccagagucagauugggcagaaugaagggcaugauaugggugggagagaugauucuuccucuaaaaaucagguucccaaaauauaacaguuaacaaucuccuaauaauucugagugaguu

SEQ ID NO: 4171879 - RNA, 110 nt, Human
aacucucaguuaauggaagaagaacagugucaugaaucaaagauuauuuaaaaauugcuuauaaaaaugggacuuuggaaugcacucuuugacuuuuuuggcagaggauu

SEQ ID NO: 4171880 - RNA, 61 nt, Human
aacucugagacaggcuuuggugauacaucaaugaucagagaaaaaauccugcucucaaguu

SEQ ID NO: 4171881 - RNA, 68 nt, Human
aacucugcucuuauaguguuauagugugaaaccagcuauaggcacuauuuuacuaagugagcauggcu

SEQ ID NO: 4171882 - RNA, 85 nt, Human
aacucuuucccaagauuauauccagagagauuucucagaagacuugaagaggaaugucauagaauaaucaugcaugaaagcaguu

SEQ ID NO: 4171883 - RNA, 77 nt, Human
aagauaugucccauaaauuuucuagaacaucacauuaaagugauuuacagaaagguugugggauagaauuagaucuu

SEQ ID NO: 4171884 - RNA, 66 nt, Human
aagauccugccauugccccuggcuuccaggaacugaacuggauucugagcaucauggcagaaucuu

SEQ ID NO: 4171885 - RNA, 61 nt, Human
aagaucgaauaauugcauucuauaauagggaagucuguugucuuugugguugguuggucuu

SEQ ID NO: 4171886 - RNA, 101 nt, Human
aagaucuuagaucuucuaaguagaauuuuuuagguuguuguuuuauguuaaauaguugcaacuuuagaaaaaucuauaaaaugugaggaggaaaagguuuu

SEQ ID NO: 4171887 - RNA, 102 nt, Human
aagaucuuuaacuuaaccacauucucaaugucucuuucuaaaauguaagguaauauacacauacauuuggaggauuaggaugugggcaucuuuggagcucuu

SEQ ID NO: 4171888 - RNA, 93 nt, Human
aagaugaaaauacgguaaaauauguacacacacaagucccauuccccaagaauugauuaaguggaaugaguauuuguuuucccauuucaccuu

SEQ ID NO: 4171889 - RNA, 105 nt, Human
aagaugaacaaguggugcagaaggcucacucaguuaagaaugaagaccauaaaauauauuggcuacaaucuuuauguugagugguuuaucacagcuuagcaucuu

SEQ ID NO: 4171890 - RNA, 62 nt, Human
aagaugagcuccagggaacagcagcuaccuuggugaagccaugggucccuggggcaaauguu

SEQ ID NO: 4171891 - RNA, 55 nt, Human
aagaugcacaauguggcaauuaacaggauaguauuguuuccaaauugugcauuuu

SEQ ID NO: 4171892 - RNA, 57 nt, Human
aagaugcauauucccagaccucacgcccagagagucugggcaggaaucugcauucuu

SEQ ID NO: 4171893 - RNA, 56 nt, Human
aagaugccugccagugcaguucugucuuucucaugggacucuacacaggccaucuu

SEQ ID NO: 4171894 - RNA, 70 nt, Human
aagauggaaauucugaaauucccuucguuaagaacuuuuugcugauucaugauuugagaauuuuucucuu

SEQ ID NO: 4171895 - RNA, 56 nt, Human
aagauguuacucaaccaggauaaaucuuccagugucuauaccugugguagcaucuu

SEQ ID NO: 4171896 - RNA, 56 nt, Human
aagauguuauugucuuccuugcuuuguagaagcaaaggaaagaaacaauggcacuu

SEQ ID NO: 4171897 - RNA, 68 nt, Human
aagauguugcauuagaauaccuguucuccaacaauucguccuggauaaaggcaucugagucacaucuu

SEQ ID NO: 4171898 - RNA, 74 nt, Human
aagauucccacaguuucugauguguguguuuauagucuucaauguauguuaacauguuaggaacugaguaucuu

SEQ ID NO: 4171899 - RNA, 62 nt, Human
aagauuccucuuaaugaggcugacuuguauuuuuacaaagcaaaucaucuaagagagaucuu

SEQ ID NO: 4171900 - RNA, 55 nt, Human
aagauuuucccauugguucugcuacuaaauaggugaacacauuugggaaaaucuu

SEQ ID NO: 4171901 - RNA, 72 nt, Human
aagauuuuucuucagcagcccagaaaucuuuucucucugacagguuggaagcacugaagagacaaccaucuu

SEQ ID NO: 4171902 - RNA, 124 nt, Human
aagcaaagaaaaguaaaauuuuaaguaagcaguagagcagauguagcuuaaaaccuccaaauuauuucaggccucaagcugcuuuaaggcuguauuuuaagauucaguacuuuuuuauuuguuu

SEQ ID NO: 4171903 - RNA, 92 nt, Human
aagcaaagggagaaaauauuagcagugaucaaaauggaguucuaaauauauaggucuuuauuagguuauucucuguacuuuuccaaaugcuu

SEQ ID NO: 4171904 - RNA, 86 nt, Human
aagcaacccaauaucaguauccugcaguuucuaugggcccuuucugcagccuuuacucauggaagacaagggaucuggguuuguuu

SEQ ID NO: 4171905 - RNA, 112 nt, Human
aagcaauccucugggucuuuuguuaaaaugcagauucuguuucaguaugucugaagcaaggucuaaguaucuguauuuaugacaagcaagcuuccaggugauuacaaugcuu

SEQ ID NO: 4171906 - RNA, 60 nt, Human
aagcaauugugaaccaccugcaaugcgguccugugugugcaugugaauucauacuuguuu

SEQ ID NO: 4171907 - RNA, 130 nt, Human
aagcacaacuaaaucucagccauuuucaaguacagcuaggucuucagcacuuuaagaacugccucucagugcaaaguggaaaaugaaaaccagcuccugcauauugauuguagcugauuacaauuguguu

SEQ ID NO: 4171908 - RNA, 58 nt, Human
aagcacaccucccuggcaggagcaaauccccuuaugcuccugggggguaggugaguuu

SEQ ID NO: 4171909 - RNA, 86 nt, Human
aagcacagagagacagcugcucgcagagcuaugggcagaggauugguuuucaugguucucuaugaagcauugucucacugcugcuu

SEQ ID NO: 4171910 - RNA, 71 nt, Human
aagcaccuuaucccgggguauaggcaggggcaggggcauccuccacacgccuggccaccccagggcugcuu

SEQ ID NO: 4171911 - RNA, 71 nt, Human
aagcacuuucuuuuggucuccaagccaugugucaagucagugaacugcuggggaggccaaacucaguccuu

SEQ ID NO: 4171912 - RNA, 70 nt, Human
aagcagaccagauccuuuuuauggcauuuuaaguugguauuuacaguugcuacaaaggauaauucuguuu

SEQ ID NO: 4171913 - RNA, 95 nt, Human
aagcagagagaaaugcuuuucccuucuggguccaggaaggcagcuccauaacccguuucugacuccagagaggaauaagaauaaacucacugcuu

SEQ ID NO: 4171914 - RNA, 65 nt, Human
aagcagaggaccgacggagggauacuuucugcucuuuugugugccuccucuuucucucucugcuu

SEQ ID NO: 4171915 - RNA, 86 nt, Human
aagcuuuaggguacauguacacaacgugcagguuuguuacauauguauacaugugccauguuggugugcugcacccauuaacgcuu

SEQ ID NO: 4171916 - RNA, 76 nt, Human
aagcuuuuugagaaacugcuuugugauguguguauucaucucacagaguuaaaaguuucuuuugauugaucagcuu

SEQ ID NO: 4171917 - RNA, 59 nt, Human
aaggaaaucagggggcucuagagucuggcuaugugauuuucucaggccccaguuuucuu

SEQ ID NO: 4171918 - RNA, 55 nt, Human
aaggaagaggcagguuuugcugaccacauuuuggcaaaucuguuggcucuuucuu

SEQ ID NO: 4171919 - RNA, 65 nt, Human
aaggaagccccagacccagagucuagguagaaacaagggcacaggcgggguccuggggcuuucuu

SEQ ID NO: 4171920 - RNA, 79 nt, Human
aaggaagccccgcucugcugugucauuggaaugauucucuagaucuaauucuaaagacucauggaagugggaagucuuu

SEQ ID NO: 4171921 - RNA, 69 nt, Human
aaggaagucagcuggugccuaccuggagcgugcugucccuccagggaaggcugcuggcugugucuccuu

SEQ ID NO: 4171922 - RNA, 61 nt, Human
aaggaauaugguguuguccuauucuuguuagggaaggauuggaccacuacuguuuucucuu

SEQ ID NO: 4171923 - RNA, 82 nt, Human
aaggaauuaaugacacauauaaggaauugaucgacuaagguagaguugagaacaguuaacuucauaugaucauuaaucccuu

SEQ ID NO: 4171924 - RNA, 57 nt, Human
aaggacaggcuaaccugacauugaauuguaucuuuggaggccugcagcacuguccuu

SEQ ID NO: 4171925 - RNA, 68 nt, Human
aaggacuaguaaaguacucaaauagccccuauaaagaggcuucuuuguuucuuugaucucuggcccuu

SEQ ID NO: 4171926 - RNA, 68 nt, Human
aaggacucuugggaugacacuggaccuaccuggaugauccaggauaauuucuccaucucaagguccuu

SEQ ID NO: 4171927 - RNA, 84 nt, Human
aaggagaaagaaauggcuccucguaagaauaugauauuuuccccuuuccaagaaaauagauaaugccagggucacuaucuccuu

SEQ ID NO: 4171928 - RNA, 63 nt, Human
aaggagaaugagugcuagguaucaaaccauuuagauaaaaccaccuuagcauuuaucuuccuu

SEQ ID NO: 4171929 - RNA, 84 nt, Human
aaggagaggagaagggaacugugggagggugagagaaccagugcugacuggcuucucucgccuucccucgccuucccucaccuu

SEQ ID NO: 4171930 - RNA, 75 nt, Human
aaggagcauucuaugugaacguuauaguuugagcuuacaguaaacaggaagagcauucacaugguagugcuuguu

SEQ ID NO: 4171931 - RNA, 58 nt, Human
aaggaggagagugcauggaggaauguucucuuccccuucuccauggcucuucauccuu

SEQ ID NO: 4171932 - RNA, 129 nt, Human
aaggaggaugaaaaaucaggagcugucaacaaccgccugguaacccugggucggcaccauuuucuaguugcuugcaaucaaggauugugugauuccagagguuauuccuggccagcucccaucuuccuu

SEQ ID NO: 4171933 - RNA, 81 nt, Human
aaggaggggugacuguguaucuuauccuggcccuguuuggaaggaagagggcauaaaauagagcacgugucacugcucuuu

SEQ ID NO: 4171934 - RNA, 79 nt, Human
aaggaguaugccuuuugugcugaagauccagagcagggguugccaacuucucugaagagucagacauaacaaauuccuu

SEQ ID NO: 4171935 - RNA, 57 nt, Human
aaggagucugggccauucagagccagccucaggcagcuuugucccccaguauuccuu

SEQ ID NO: 4171936 - RNA, 90 nt, Human
aaggaguggguggaagagguccuggggcuggugagaugaaaaaugcauuguccuugggcugcaggcuucccuccagcauucugacuccuu

SEQ ID NO: 4171937 - RNA, 112 nt, Human
aaggauaugcuuauagguacaaaaugaacuguugacaguaguugcuucuggaaaaugagacaaaguggcuaaugaaaaauagauuauagguugacuuucuauuuuugucuuu

SEQ ID NO: 4171938 - RNA, 56 nt, Human
aaggcacagccacuugaucauccuggugacuccauuugaaauaaggaguuguccuu

SEQ ID NO: 4171939 - RNA, 57 nt, Human
aaggcacauuccugaaaacaauguggguuagaccaggcaguucauaggaugagucuu

SEQ ID NO: 4171940 - RNA, 61 nt, Human
aaggcaccugguaagugcucaguaaagggucaugguugcuguuguuauuaccagguguguu

SEQ ID NO: 4171941 - RNA, 64 nt, Human
aaggcagaaaguacagaugagacacuuuuugaaagaguucuucuuuuuguacucuuuuugcuuu

SEQ ID NO: 4171942 - RNA, 55 nt, Human
aaggcagccauagcaccauccagggauuucaucuugggggagaauugguugcuuu

SEQ ID NO: 4171943 - RNA, 61 nt, Human
aaggcaguacuuuauguccauaucaguuaaaucguuugaaaugaccaucaucugcugcuuu

SEQ ID NO: 4171944 - RNA, 86 nt, Human
aaggcauaaaggaagacuugucagggaugcugauaagagaauuuuugccuuauggguaggguuugauaagauuccuuccaugucuu

SEQ ID NO: 4171945 - RNA, 76 nt, Human
aaggcauaguucuuauccuucagcauucuggaauucccucgaugaccacagggcugcaggaugaggcucugcucuu

SEQ ID NO: 4171946 - RNA, 76 nt, Human
aaggcaucaucuggcuuuuagaaaaaccagguacaauagagaagaacuguuuuauuaucagaguuaggggugcuuu

SEQ ID NO: 4171947 - RNA, 75 nt, Human
aaggcauuacucccagcucuaaggcgacaucgcugucauuaaagaaaaccugugccugaguuggcugaguaccuu

SEQ ID NO: 4171948 - RNA, 62 nt, Human
aaggcauuuguuggauuucucaccaauuugaacaucucugguuuggaauacggugaauccuu

SEQ ID NO: 4171949 - RNA, 58 nt, Human
aaggccacuuuaccuuaaauccuguugauuuuaauuuuuuuuaguguuaaguggcuuu

SEQ ID NO: 4171950 - RNA, 78 nt, Human
aaggccaggauggagaguuguugguugaccacugcacuccugugaucaccgcaccccugcacucuccuccucggcuuu

SEQ ID NO: 4171951 - RNA, 78 nt, Human
aaggcccaauuauucucuagguugauauaaauuauuuguuauugggggacaaugguuuagcaacuuagggaaagcuuu

SEQ ID NO: 4171952 - RNA, 56 nt, Human
aaggcuagaaugaaaucugaguugauuacaggucaacaagauagagcucuugccuu

SEQ ID NO: 4171953 - RNA, 74 nt, Human
aaggcucuugaguggugauagugacaaugcugcaacuuaauaucuacauagugcuacaccauuuucaaggcguu

SEQ ID NO: 4171954 - RNA, 86 nt, Human
aaggcugauauguaauagaugauugggaaguaccuaaguaacacuccauauacaacuuaaucuuuauauaagaagcgugcagcuuu

SEQ ID NO: 4171955 - RNA, 58 nt, Human
aaggcuuguuaugauauaaaauacaaauauuuugggaaagaguaauauaauaagccuu

SEQ ID NO: 4171956 - RNA, 79 nt, Human
aaggcuuugcugaauucucauucccuggagaaauagccaagaguguugggcuuuuccaaagggacuucagcggaaacuu

SEQ ID NO: 4171957 - RNA, 103 nt, Human
aaggcuuuuuaaaggagggggccuuggagcugaacuuugaggccaguggcauucgaacacauccacgggucucccuuucggauuucagugcccucuuggccuu

SEQ ID NO: 4171958 - RNA, 60 nt, Human
aagggcuuuuaagauuuauccuccaugugaaauuuggggcuuuauauucuauaggccuuu

SEQ ID NO: 4171959 - RNA, 114 nt, Human
aagggggagaggacuuagaauguuaagaauauguauauauacacacauauauauauaauaagaauauauguauguguauguauguguauuuuugagacagggcuucucucuguu

SEQ ID NO: 4171960 - RNA, 63 nt, Human
aagggggagcuuuuauuucuuggucucuuccuccuuagacaaagucuugaugaucuccuccuu

SEQ ID NO: 4171961 - RNA, 85 nt, Human
aagggggauggaguaaaagaugaggcaguagaaaugccuuugaaugguuuucuguagcuaauucucuuuaaauuuuguccugcuu

SEQ ID NO: 4171962 - RNA, 72 nt, Human
aaggggugagcagaggcuucgcuuaacuuccuuaaggcucucaauggaagaaccgcaagugucuguccccuu

SEQ ID NO: 4171963 - RNA, 86 nt, Human
aagggucuuggugaccacuauaucaaggauuuuguuugcugagguaaagacaauuucucaauauagaaacuauucacuaagaacuu

SEQ ID NO: 4171964 - RNA, 57 nt, Human
aagggugggcaccgccaggucauccaugccagggaugcaccuguggccccaauccuu

SEQ ID NO: 4171965 - RNA, 119 nt, Human
aagggugggucugagauguuuggguggguuaagcggacauuuugacaacauggcuucuccuuuggcauguuuaauugcgauguuugacacacauccuugcaguuuaagaugacgcuuuu

SEQ ID NO: 4171966 - RNA, 87 nt, Human
aaggguuacugucaauuagugggggugugaauuggcauggugcuuuuggaaagcaauuugacaguacauaucaaccagcaaauccuu

SEQ ID NO: 4171967 - RNA, 81 nt, Human
aaggguuuuuguagauaaggauugauuuuuauuauaucuauuuuaguuguuaauaauuguuaaucguuguuucauuucuuu

SEQ ID NO: 4171968 - RNA, 60 nt, Human
aagguaagaaccagagucuuguauaugcccuuagucuuugaaguuucugguuuauaucuu

SEQ ID NO: 4171969 - RNA, 71 nt, Human
aaggucugcuagcuuguagugauuugugguaaaucacaauuuucaugauccauuuacaaaaugguaaucuu

SEQ ID NO: 4171970 - RNA, 79 nt, Human
aaggucuggaggcuucauccuacccagagugcauggggagcugaccagaguuuggagagggugaggcaauggagacuuu

SEQ ID NO: 4171971 - RNA, 126 nt, Human
aaggucuucagagaccaccugggucuaccccugcuggcaccgaugaaagacagugcuucauugugucuagcgcuggugcucaggcuagggauucaggcccuuuguuccaaauaucuguaugaccuu

SEQ ID NO: 4171972 - RNA, 90 nt, Human
aaggugaaaccugggggaauuccaggguuagcucauuugguagcucuggggagccagguuggcuucucugggauucuuuuguuucuccuu

SEQ ID NO: 4171973 - RNA, 61 nt, Human
aaggugacauucacaguuuccgaugguuaggacauggccaucucuuuuuggaggucagcuu

SEQ ID NO: 4171974 - RNA, 78 nt, Human
aaggugagugucuagggagcugcucaggcuccguggugaucccagagggcucggguccuucucuagagaucaggccuu

SEQ ID NO: 4171975 - RNA, 125 nt, Human
aaggugccagaugcaguggcucaugccuguaguccucaacuugggaggcugaggcaagaggaucgcuugagcccaggaguaugaggcugcaguaagccaugauugugccacugcacuccagccuu

SEQ ID NO: 4171976 - RNA, 74 nt, Human
aagguggagaaacugaaauauggcuuuucuuccucccccagguuccccugugccauucuuucuuucuucaucuu

SEQ ID NO: 4171977 - RNA, 66 nt, Human
aaggugguaauuuaauccuacacuguugggaauaccucagcagaauguuuccuggguugcuacuuu

SEQ ID NO: 4171978 - RNA, 77 nt, Human
aagguguguuacugugguuaccagaagcuucucucauuccaggaagaaucugcuuucugggcuauagaacgggcuuu

SEQ ID NO: 4171979 - RNA, 80 nt, Human
aagguguuauagcugaggaauaaaacugacauugaauaauagucauguuuacccauaucuccuuauuugcuuaaagccuu

SEQ ID NO: 4171980 - RNA, 92 nt, Human
aagguuaaggucaguagucauaagucauaagucaugauguuauguauccuuaauauaacaugauaaguaugauacuuugccuguguagucuu

SEQ ID NO: 4171981 - RNA, 62 nt, Human
aagguuaguaaguaucuuaugucccuggaacuacgcuaggcacauacauaccuuaccaccuu

SEQ ID NO: 4171982 - RNA, 67 nt, Human
aagguuagucaagggagacuugggguaagugccuguucaaggcccuccaccuggucucucuggccuu

SEQ ID NO: 4171983 - RNA, 68 nt, Human
aagguuaugggagagcugacacugagaccugaacuuccugaguaccuauucagugcuccuauguccuu

SEQ ID NO: 4171984 - RNA, 130 nt, Human
aagguuccagcccagcucuucccacucagugcccgcuucaggucuuccgagaggccugugcuccuggagacaggugggcacagagaggcccuggaaggaccuggacaaacucuguagggggcugaauucu

SEQ ID NO: 4171985 - RNA, 62 nt, Human
aagguugucagauuuaagagggauuaaauucucuacgaauucucuagaaaucgaauaaccuu

SEQ ID NO: 4171986 - RNA, 70 nt, Human
aagguuuggcuccguuguacaggcuggagugcagugaugcaaucucagcucauggcagccuugaacgcuu

SEQ ID NO: 4171987 - RNA, 92 nt, Human
aaguaaauagucagcagugcuuuuacaaauauauucacaugaaaauuuuuaugcugaaauuuauugguaaggaauugcuaaauguuguacuu

SEQ ID NO: 4171988 - RNA, 103 nt, Human
aaguaacuauugaauauucuguaaucuuagacauguauuuuucaagcuaacccuuugaagaaauguguucaagguaggaaaauauaaaauuuuuugguuauuu

SEQ ID NO: 4171989 - RNA, 78 nt, Human
aaguaaggcguuuugaugaucaugaccugaaucuuucccuaaagacuucagagucagggaucucagagggccuggcuu

SEQ ID NO: 4171990 - RNA, 130 nt, Human
aaguaauagaccuugggauuaucauagugaauugugcucugccccugacuguuuuaguaagauuaaaauuaauaacuucaucaaauaggcacauuucaugugugugaaaauuacucaauuucuuuuccuu

SEQ ID NO: 4171991 - RNA, 61 nt, Human
aaguaauuguaacuauugguugaauguagccucgguaauuaccaauguuuacagauuacuu

SEQ ID NO: 4171992 - RNA, 112 nt, Human
aaguacaaauuguuuuagacacggcaauuuuuguacuuauaguacuuauaauggccuaaaauacacauuuuaguguauaugugcugagaaacguguuuuuaaauguugacuu

SEQ ID NO: 4171993 - RNA, 60 nt, Human
aaguacauuauaugagcagaaugaaacauguuccaaaauauuuugcuuguaaguguaguu

SEQ ID NO: 4171994 - RNA, 64 nt, Human
aaguacuaaggcuauuaugaugcauuuagucauccagauaguugaucauauucagccuauacuu

SEQ ID NO: 4171995 - RNA, 68 nt, Human
aaguacuugauagauuaacuguggguuuuaauauauugcaaaaaaaauugacaguugucaggauacuu

SEQ ID NO: 4171996 - RNA, 112 nt, Human
aaguagaacgauuuuucuguauugcucgaaauaauuuagaauauagagccuaaaguuuacuaucuucucugacauuagauuaauuggaagcaagaacacagagauccuauuu

SEQ ID NO: 4171997 - RNA, 79 nt, Human
aaguagauuagccuuaauaauuuagaagugacaacuacucuugcuguuccuucugaaacagcauuaugggccuuuacuu

SEQ ID NO: 4171998 - RNA, 59 nt, Human
aaguagcaaucucauuaguuggaauacaaaguccaggauuucuaaggagauuguuauuu

SEQ ID NO: 4171999 - RNA, 65 nt, Human
aaguauacuuaggcauaaugguacaauguaagagcagacaaaaaacacagcgcccaaguguacuu

SEQ ID NO: 4172000 - RNA, 57 nt, Human
aaguauguugaguuuugcuuuaguauacuugaugcuaagccagcuguucagcuacuu

SEQ ID NO: 4172001 - RNA, 97 nt, Human
aaguauuauuuucaaggcccacaaguucuauugucacuuuauuaugaggaugccuggaaugguccagugacagauaggcacuguggcucgaaugcuu

SEQ ID NO: 4172002 - RNA, 104 nt, Human
aaguauuuagagucuuuaagugugcugaaauggugugcugugcaaugauauauguacacauucaauguauuacauauuauuuuaaagcuuuuaucuauuuauuu

SEQ ID NO: 4172003 - RNA, 77 nt, Human
aagggaaaauguguugaaauuuggagauaccacuacaaacugugaguaauagugucuaaaugcaauggauuuccuuu

SEQ ID NO: 4172004 - RNA, 100 nt, Human
aagggaaauaacuaaguaggugaguuuuaagcacaugguguauuuuauagguguuguaacacuuuucuauuaauaggcauauauaacuacuuuuucccuu

SEQ ID NO: 4172005 - RNA, 76 nt, Human
aagggaaguauaauacagagcaguaauagaggagaauuuaaaguuauaagaaaauucucucugucucucuuccuuu

SEQ ID NO: 4172006 - RNA, 55 nt, Human
aagggacuugucauuggauuuaggacccaccuggcuaauccaggauaagccccuu

SEQ ID NO: 4172007 - RNA, 75 nt, Human
aagggagaugcuguuuaaguggaauuuguuuuuagaaaacaggucagaaacaagagcuuacauggcugcucucuu

SEQ ID NO: 4172008 - RNA, 109 nt, Human
aagggagcuggaaaauggcaaagaugaacguucauaguuauuuguuucauacucuuuauauaacaggcuccuugugaauggauauuuccaauuuccacacaaggcccuu

SEQ ID NO: 4172009 - RNA, 107 nt, Human
aagggagguuuguaggaguccucggacgugggauauuggggguaucuagggcuuggaugguuuguggaauguccucagcauccucccgucccaacccaaccuuccuu

SEQ ID NO: 4172010 - RNA, 87 nt, Human
aagggaguaauugauagaacuuagcacuagacuuguugugggauuugagaccacuuacaauuuggaagcuugggcugauccuuccuu

SEQ ID NO: 4172011 - RNA, 68 nt, Human
aagggaguuggaggaaagaagguugauauaaagaguauuaaauuaaauuucuuucuuuuugcuuuguu

SEQ ID NO: 4172012 - RNA, 86 nt, Human
aagggaucagguuucugaaggccuugguacccagugggugccccacaccuacccugcaccuggcacuacaggcaccugucuuccuu

SEQ ID NO: 4172013 - RNA, 60 nt, Human
aagggauguguuuggaaagguagguuuggcacaaaccuugaauacuuaaauacaucgcuu

SEQ ID NO: 4172014 - RNA, 87 nt, Human
aagggccaaagcaugcuuucccugggugguuuuaugccugucaugaacaccguaagacagcuaaucccccuagauucuuuguacuuu

SEQ ID NO: 4172015 - RNA, 57 nt, Human
aagggccagggcucuagagauaagcagcccuuguuucgaaucccagcucuggcccuu

SEQ ID NO: 4172016 - RNA, 57 nt, Human
aagggcucccaacucaucuuuuaucaacuaguuugaugaugguaggguguggccuuu

SEQ ID NO: 4172017 - RNA, 98 nt, Human
aaggggaacaaaugagaucguguaggcgaugccacuuugcacauucugaagcacuaaaugaaugugcaauggugucaccacauggucuuuugccucuu

SEQ ID NO: 4172018 - RNA, 88 nt, Human
aaggggaguggguucuaaaaugaaagggaaauggcacuugacuucuuagauggcgggaacaugcuuucauuucagagaaacugcccuu

SEQ ID NO: 4172019 - RNA, 79 nt, Human
aaggggauagauauaagugacuuagaagaaaauauuggagacaauaguacagcauuuuuccugagucaccaauccucuu

SEQ ID NO: 4172020 - RNA, 111 nt, Human
aaggggcugaauuaauggauuggcaugaccaaagcagggaaaucuauuugcaugcaauauuaacugugcuaauaaacuccaggcugagcucagcaggccaggcagccucuu

SEQ ID NO: 4172021 - RNA, 60 nt, Human
aaggggcugagaaauguuguaauuauuaagaaauuugguauuagcaaucucagucuccuu

SEQ ID NO: 4172022 - RNA, 58 nt, Human
aagggggcacagucacuguaauaucaagcacugagcucugcaggaauuugcauuccuu

SEQ ID NO: 4172023 - RNA, 75 nt, Human
aagggggguggccaaggcagagaaagagcccgacaggccaggagccggcuuuucucccugcuuucuuccucccuu

SEQ ID NO: 4172024 - RNA, 69 nt, Human
aaggggucuauucaucaaggcaucacggcagugugcuuccugccuuuggccuugccgugaaagcccuuu

SEQ ID NO: 4172025 - RNA, 78 nt, Human
aaggggucuucuuuggucuccucucugccagucuccugaaagaggggagggguggaaggagugccuggaaggucucuu

SEQ ID NO: 4172026 - RNA, 103 nt, Human
aaggguacuuguuggggucaagucgcugcacgaucuccucgaugcucuugugcuucuggauuagauccacagcccgcuugggcccaauacuccagauacucuu

SEQ ID NO: 4172027 - RNA, 61 nt, Human
aaggguagaugggguaaaauaauuaagauuaagauucuuguauuuccaacccuuuauccuu

SEQ ID NO: 4172028 - RNA, 114 nt, Human
aauccuguuuuugguuugacacauuaugagcaguugucuuuccuuccucaaauagugggaaagcagacuugucuucuaaugucauuucagucucccuuuucccagaaauugauu

SEQ ID NO: 4172029 - RNA, 63 nt, Human
aaucgaguggugagaacacaacagaaguccaauuuagauucugaguguuguaaccauaugauu

SEQ ID NO: 4172030 - RNA, 62 nt, Human
aaucuaagcaauuguccugucucuacagacuuauaauuuuuaggauauggauaaugcagauu

SEQ ID NO: 4172031 - RNA, 77 nt, Human
aaucucugagucacaaggcagacagacacacaggagagaucaggguaaauguauuucucuuuaaagacucagagauu

SEQ ID NO: 4172032 - RNA, 90 nt, Human
aaucucuguacauguuaaucuuaaguuuagauuucucuauaucugguuuccuaagaggaggagagaaaacucauugaggugucagggguu

SEQ ID NO: 4172033 - RNA, 130 nt, Human
aaucugaguuuuuguggaacaggauuggggaacugggaagacaagaaagauagggaguuucuguuucuuuguuuuguuuucauguuauuuccagucuagaaauuacugcuuaucauaagaacuaaaauau

SEQ ID NO: 4172034 - RNA, 62 nt, Human
aaucuggaauaugcuacauuugaucaaugaagauugaagagugcauuagcauauuguagguu

SEQ ID NO: 4172035 - RNA, 65 nt, Human
aaucuggccuuaucacaaagcuagagagacccaaaauucucuuugggaaacuuaggggucagauu

SEQ ID NO: 4172036 - RNA, 59 nt, Human
aaucugguuugacaacuuuugucuuuuaaugggagaggacaauaacaguuggauugauu

SEQ ID NO: 4172037 - RNA, 87 nt, Human
aaucuguagucauaagcagugugggugaaauacaaaguguauauuuagacuuuaguguugcucauacauaugcauuguuuuuagauu

SEQ ID NO: 4172038 - RNA, 84 nt, Human
aaucuguuauaagcuccaggugauuugagguacccugaaauuugagaaccacuaccuuaagacauccguugcuuauaaugaauu

SEQ ID NO: 4172039 - RNA, 126 nt, Human
aaucuuaucuauugggagguagacuaaaguggagauaaggcuuuuguggguuuuuugucugugcuuagacaaaauuaugaagaggccuuguuuuguuucauuuugucauguucucaguguaacauu

SEQ ID NO: 4172040 - RNA, 129 nt, Human
aaucuucaguauguuggcuuuucaaaccugucucaugaagcaauggcagagaauuugucaccgacucuugguggucaaagccaguguucuuguugccauuugaagcugccaguguuuuaaacuaaauuu

SEQ ID NO: 4172041 - RNA, 67 nt, Human
aaucuugccuagcuuagggaaacugacagaguagauuucuuggcaguaucuuugugguuguuagauu

SEQ ID NO: 4172042 - RNA, 83 nt, Human
aaucuuugacuuuggcauuguuccaacaguauguaucaguaaaauuauauagcagaaacaccacaaugucaaggucagacauu

SEQ ID NO: 4172043 - RNA, 105 nt, Human
aaugaacauagcugcucugaaaguuuagugcugaacauuugggacuuguuuuagaucgaaaagaaucccauucuucagaugaaucgauaaaguguuauuuucauu

SEQ ID NO: 4172044 - RNA, 75 nt, Human
aaugaagacacaucuuucucauagguuuauuagacacugggguguauuacacugauagagguuguucucuucauu

SEQ ID NO: 4172045 - RNA, 65 nt, Human
aaugaagucuucaucugaugcucugaacagagaaacuuuagagguuuagagugaggacugacauu

SEQ ID NO: 4172046 - RNA, 60 nt, Human
aaugaaugugaaauuugaugagaaggauuggcuccugcugcaaauaaauuucuguucauu

SEQ ID NO: 4172047 - RNA, 130 nt, Human
aaugaauucagagaugaaacauuuauauauauacacauuuuuaccuauaguauuaaaaucacugaucaaucaucgggggaggcuauaggaagaaauuuguuuugcauauuucuucucauguuuuugcauu

SEQ ID NO: 4172048 - RNA, 91 nt, Human
aaugaauucucagacacaagaguaaagucaaauacuagaaaacgguuuuaaggugcuuuauuuagcucuuucugugugugcauuguuuauu

SEQ ID NO: 4172049 - RNA, 94 nt, Human
aaugaauucuggaaagagacucuccagaugggaagaaauggcuguaguaacaaucccaauucauccucuggggcuucauuuuuccuauggcauu

SEQ ID NO: 4172050 - RNA, 114 nt, Human
aaugacaagaauguaaacagugcuuagaaaguccccuucuucuggugccuguggaugagaaucacaguaaaagcauggaagaggcaggagaagacaaggcacuagcuggucauu

SEQ ID NO: 4172051 - RNA, 55 nt, Human
aaugacauguguaccuauuguugcuuguccuugaugaugaguacacuuguacauu

SEQ ID NO: 4172052 - RNA, 117 nt, Human
aaugacauucauuucauagaacuguuaagagcgugaaaugaguugaauuauugcucuuuauuuccaaagcccuuagcucaauuucuugcccacaguaucugcuauguaacuguuauu

SEQ ID NO: 4172053 - RNA, 70 nt, Human
aaugaccucauucacuccaaacccacggguacuuucugcuccaccucuuggcagugugugagcuguuauu

SEQ ID NO: 4172054 - RNA, 112 nt, Human
aaugacuucacaggugcccagcuccaccucacagacaccauuuuucucucugcagaggccugauacauucugugggucagacgcugggcagcaaagugccuguggggacauu

SEQ ID NO: 4172055 - RNA, 68 nt, Human
aaugagcggucaggagaaauaagcauuguuuguucaaugcaugauuuuuucuuacuuaggaguuuguu

SEQ ID NO: 4172056 - RNA, 74 nt, Human
aaugaguucauugguaggagucaagcuguagugccccguugaggcucauauuuuggcuccauggguggcucauu

SEQ ID NO: 4172057 - RNA, 62 nt, Human
aaugauauagacuagcagcagaauuuaucacuguugauaguauucugaugaaguuuaacauu

SEQ ID NO: 4172058 - RNA, 79 nt, Human
aaugauauuucacauuagugguucuauauacaaugguauguaaaauuauuaugguggagauuaaauuuucuguaucauu

SEQ ID NO: 4172059 - RNA, 64 nt, Human
aaugaucggcuaucacaaaaggagcaagugaaggcuccucuacugcuuuuggaaagugaucauu

SEQ ID NO: 4172060 - RNA, 115 nt, Human
aaugauugcucuaaaauagugguugucaaauuuuaacaugcauuagaguuacuaaccaucuguguaauucuaaugcauguuaaacuuugagaaccacuauuuuagagcaaucauu

SEQ ID NO: 4172061 - RNA, 83 nt, Human
aaugauuucugcuuaguagacuuccugucuuggcgguaucacucagagaggauuuuaauaaguguuguuuuucagagaucguu

SEQ ID NO: 4172062 - RNA, 92 nt, Human
aagucagcaaacaagcgaguaauggaaucaggauaugaacccagguauccugagguccuggccauaccugguuuccaucauguuccugacuu

SEQ ID NO: 4172063 - RNA, 60 nt, Human
aagucaggacagauuuucuggggguauccucugguugcucuuccagauacuuccugacuu

SEQ ID NO: 4172064 - RNA, 69 nt, Human
aagucaggagauguaaccuuagcugugcugguuaaaagccagcuuugagaguugcauuuuaccucccuu

SEQ ID NO: 4172065 - RNA, 84 nt, Human
aagucauuucuugagcugaaugcaaucaggagaaagugggccaaggagccagcucaaggugagucauuuggcucaagagaacuu

SEQ ID NO: 4172066 - RNA, 128 nt, Human
aaguccaaaaugaaacucuggaacuaaaaaucagggaggcagcagggcugguuccuucuggaggcuccaggggagaaucuguucuuugucucuuccauuuucuggagguuacuggcauuccuuggcuu

SEQ ID NO: 4172067 - RNA, 62 nt, Human
aaguccuagacuuggauaguuuuuucacauaaaugugguggucaguauucagucuaggacuu

SEQ ID NO: 4172068 - RNA, 63 nt, Human
aaguccuucaagucuggauguuggguaaucacguuuucuuccagaagccauuuguuaggacuu

SEQ ID NO: 4172069 - RNA, 71 nt, Human
aagucuaagauccacauaaugcuguucauuguuuggcaaaaacaaacaaguuagauuuugugucuugacuu

SEQ ID NO: 4172070 - RNA, 85 nt, Human
aagucuacacaauuacauuuaagaguucugaauuugagugucucaccucuuuaauauucaaagucuagauguaguguugaaacuu

SEQ ID NO: 4172071 - RNA, 62 nt, Human
aagucucauccguguagcuccacguguaauaaaugugagucgagugaacgaaugaaagauuu

SEQ ID NO: 4172072 - RNA, 81 nt, Human
aagucuguauuggaagauagggaauagaaagucugccauaauaggcuuccuaauacucccuacacuuagcgauacagacuu

SEQ ID NO: 4172073 - RNA, 56 nt, Human
aagucuucagguuuuucauaugagauccauuuuaauuucuaaagaaucugaagcuu

SEQ ID NO: 4172074 - RNA, 61 nt, Human
aagucuucucaaaacucaggguaucugcuaugcaugguagauuuaaguuuuugggacacuu

SEQ ID NO: 4172075 - RNA, 59 nt, Human
aagucuuucauaagucucuuauuaaggcauaaauacuuuggggcauuuauggaggacuu

SEQ ID NO: 4172076 - RNA, 70 nt, Human
aagucuuugcuacugugaauagugccacaauaaacauaugugugcaugugucuuuauaguagcaugauuu

SEQ ID NO: 4172077 - RNA, 70 nt, Human
aagucuuugcuacugugaauagugccacaauaaucauaugugugcaugugucuuuauaguagcaugauuu

SEQ ID NO: 4172078 - RNA, 70 nt, Human
aagucuuugcuauugugaguagugccacaauaaauauacgugugcaugugucuuuauagcagcaugauuu

SEQ ID NO: 4172079 - RNA, 64 nt, Human
aagucuuuguguucugauccaaaggccaagauaucuguggcuauggcaaagaacucagauucuu

SEQ ID NO: 4172080 - RNA, 98 nt, Human
aagugaaggaguuagaguagaaucaucaaauagacucuagaauuuauuucaaauagacuccagggucuauuuugguucuggugucccuugauucauuu

SEQ ID NO: 4172081 - RNA, 99 nt, Human
aagugaaucagcacuagcauuuucuugaugguugacucaauguauaauuaacaaauauacauagcagagucaauuaaucauagugccauuaugucacuu

SEQ ID NO: 4172082 - RNA, 58 nt, Human
aagugaguccuucuggcuggcaggauucuugugaucacugggcagguagggcuggcuu

SEQ ID NO: 4172083 - RNA, 57 nt, Human
aagugagugacagagccaggggcacugauuauagcccaugcuccuuaccacucacuu

SEQ ID NO: 4172084 - RNA, 59 nt, Human
aagugauacgccugccucggccucccaaaguacugggauuacaggcagauguuuuauuu

SEQ ID NO: 4172085 - RNA, 55 nt, Human
aagugauagagaggaaauaaaccugaguucaaaucuaguucuccucuguguccuu

SEQ ID NO: 4172086 - RNA, 86 nt, Human
aagugaugucauuccguucuggagauaaguaaagaggcaauucugugaguugcuccugaauuuguccuuuacagcaugacacauuu

SEQ ID NO: 4172087 - RNA, 85 nt, Human
aagugauugcauacuggcugcacuucaacacauccucugauaaaaaggagaggaaaaugaagucaugcuagauuccacaucacuu

SEQ ID NO: 4172088 - RNA, 68 nt, Human
aagugauuuagaggaauagaauuagaaugugggguuucuguauuccaguccuauccucuuuuccacuu

SEQ ID NO: 4172089 - RNA, 68 nt, Human
aagugcaauagcaaagaacaacaucugauguuuugcugccaucuuuguuauuccagguuaauguacuu

SEQ ID NO: 4172090 - RNA, 71 nt, Human
aagugcaauauugccauguucuugcugcucaaaauaauugggagcagcaaggagaugauaauauugcacuu

SEQ ID NO: 4172091 - RNA, 114 nt, Human
aagugcagacauuuaggugacaguaggaauggagucaggagcugagucuaacuuuucuggcucuaagaccaguuucuuuccauuguuaccucgauaccuuuaaaucauguacuu

SEQ ID NO: 4172092 - RNA, 129 nt, Human
aagugccagggguucaagucacccagccuggaggcaggaauccuggguucuauuuuuggcuucacagcuaauccgcugugugacagucguuaggagcucauucuccccucugggucucccugagcccuu

SEQ ID NO: 4172093 - RNA, 129 nt, Human
aagugcuaggauuacaggugugagccacugugcccagccucaugggcuuucuuauuuuuaauuuuccuccuguaagauucauuuauucugggcugggcgagguggcucaugucuguaauccuagcacuu

SEQ ID NO: 4172094 - RNA, 110 nt, Human
aaguggaaaauaaaacagcuuagaugagaaugauuuaaaauguacaggggaaaguguuaguagacacaauacuauuuuuaggucuuucuuaucuguuuuauauugcccuu

SEQ ID NO: 4172095 - RNA, 81 nt, Human
aaguggcacucuuugauucucauguuugagguucuaauugcuaccucaugcaggacuuacgagagaucagccaugcugcuu

SEQ ID NO: 4172096 - RNA, 60 nt, Human
aaguggcagaaaauaggugguggcugaauucccacugcaucuccaucugcucugccccuu

SEQ ID NO: 4172097 - RNA, 107 nt, Human
aaguggcugguuuaagcuuccucucuguagaauagccccaggguauguggacuucuuacacacuggcucagaguuccuagagaucaaaguggaagcugccaguccuu

SEQ ID NO: 4172098 - RNA, 88 nt, Human
aauauuaauugcuagucaccaagucuuuuugaaucuauaacuuggcuaaugcaguuacauauaagaagacagacugagaauuaauguu

SEQ ID NO: 4172099 - RNA, 78 nt, Human
aauauucaaauguacaguggaaaauggauucguuguguaaauuucacaauggucagcaugcuuuacuuauagaauauu

SEQ ID NO: 4172100 - RNA, 63 nt, Human
aauauuccagcagcuccuuagugguccuucauagguuccaacauauugaaugcugagaauuuu

SEQ ID NO: 4172101 - RNA, 97 nt, Human
aauauucuguuuugauuuguguggaaagcaaauaugaaauauugaaauaauauuucaaguucccaguuuuguggcacaaauagacauacagaauauu

SEQ ID NO: 4172102 - RNA, 61 nt, Human
aauauuucaucaugcagugcuauuuuuaaaaagugaggauggcauuuuccaaugauauguu

SEQ ID NO: 4172103 - RNA, 86 nt, Human
aauauuuucugugucauauuuucuccuuucaagauagcauuuccagggauguauuuacugagaaggaaacgaugucaggaaauauu

SEQ ID NO: 4172104 - RNA, 60 nt, Human
aaucaaggugccaggagggaauuuagguuaaaaaauccaaccuccuucuugucacaaguu

SEQ ID NO: 4172105 - RNA, 116 nt, Human
aaucacgugaucucugcuuguacacauugcaccguauauguuugcugugcccugacguccaagggacacguugcauauguggagagcaguggcaaggaaugauugauugcuugauu

SEQ ID NO: 4172106 - RNA, 70 nt, Human
aaucagagcauuguuucaguuaaaacauccuuccuucuaauguuauggcugagagcaauugacucugauu

SEQ ID NO: 4172107 - RNA, 60 nt, Human
aaucaguccuguggguuaaagaguugcuuauggaaggggccuuaaacacagagauagauu

SEQ ID NO: 4172108 - RNA, 69 nt, Human
aaucaucucagagagguauguuagucauaucuuucagaugugaacuuuaauacucuuuucuggauuguu

SEQ ID NO: 4172109 - RNA, 79 nt, Human
aaucaucuuagcgcuaaucaccgagcuucauugaguacuuuguaaugugccaagcugggagcugaaggcugauuugauu

SEQ ID NO: 4172110 - RNA, 81 nt, Human
aaucaugguuaaucugaaucaguaaacacuacauuuugaaguuuaacaaguagcagagugucugaucaguugacuagaauu

SEQ ID NO: 4172111 - RNA, 63 nt, Human
aaucauucucaugccaguuuccugugaaggacacgcaucuuggaauggcgugaagaggagauu

SEQ ID NO: 4172112 - RNA, 58 nt, Human
aauccaagcucucuaugccaugauucugcaaagagcauuguauauuggagguuggguu

SEQ ID NO: 4172113 - RNA, 77 nt, Human
aauccaauuguaaggucauccaguucuaaggucaaaguuguaagaucauagauuguucuuaacuuuauaaauggguu

SEQ ID NO: 4172114 - RNA, 55 nt, Human
aauccacuaaugaagaaugggcuauagcaaagaaucuguuuauuagaaguggauu

SEQ ID NO: 4172115 - RNA, 102 nt, Human
aauccagaagcagucacagcaaggucugucaauagugguaucuaggucaauguccacuguucuuguggcaugagcuuagcuguguuuuucugcuucuagauu

SEQ ID NO: 4172116 - RNA, 60 nt, Human
aauccaugcaugcaaggaaagggcacaaggacaaauccucugacuuugugugucuggauu

SEQ ID NO: 4172117 - RNA, 130 nt, Human
aauccccugagagcucagcuccucaccauggacuggaccuggaggauccucuucuugguggcagcagcuacagguaggaggcucccuagucccagugaugagaaagagauugaguccaguccagggagau

SEQ ID NO: 4172118 - RNA, 74 nt, Human
aaucccuggagggguuuccaaagauagaguaguauccggacauauuuuucuuucuuuuuaaauuccaggugauu

SEQ ID NO: 4172119 - RNA, 68 nt, Human
aaucccuggugugucuuuuugugugucccaauuuccccuucuuauaaggacaccagucacacuggauu

SEQ ID NO: 4172120 - RNA, 75 nt, Human
aauccucguaccagugcuaaauuaccuuugguaucccaaggaccagaggcuaaggguagcuuggggugagugguu

SEQ ID NO: 4172121 - RNA, 56 nt, Human
aauccugaccugggcaugcuugagaccagaagacacucaaugauuccaucaggauu

SEQ ID NO: 4172122 - RNA, 88 nt, Human
aauccuguguaugaucagcacaguagggugacgaggagguaaugccguuuaucucacccaacgugcaaugaguuucguaagcaguuuu

SEQ ID NO: 4172123 - RNA, 89 nt, Human
aauccugugucuuauguaugcuacuuuguggucaaguucauauccuuacaccugcuuaucaaauuagcauuuaugaaccaacuaggguu

SEQ ID NO: 4172124 - RNA, 55 nt, Human
aagucuuuuaccauguuucuauaggaaguauuuagaagcacagguaaagugauuu

SEQ ID NO: 4172125 - RNA, 55 nt, Human
aagucuuuuguucaggcuggcacugccaaagugggaaaucagccaaagaagacuu

SEQ ID NO: 4172126 - RNA, 56 nt, Human
aagugaagauuuuguagcuuucagcaaaaauaugcugccucuguuggucuucaguu

SEQ ID NO: 4172127 - RNA, 73 nt, Human
aagugaaggcuucaaaagguguaauugaaagagcauuuuuagcuuccuaauuacuuuauugaacuuuuuacuu

SEQ ID NO: 4172128 - RNA, 62 nt, Human
aagugacagugaacugggacucuaacaucauaccuagggucccaguccucucccugcuacuu

SEQ ID NO: 4172129 - RNA, 69 nt, Human
aagugcaccagagguuaagcgggagaucuggagccagcgauccuggauuuaacccuggcucugccacuu

SEQ ID NO: 4172130 - RNA, 79 nt, Human
aagugcagaaaaauuucaauuaacagagggcuuauuacuugggcacaaguuaauauaaguuuuacuguuacugccacuu

SEQ ID NO: 4172131 - RNA, 56 nt, Human
aagugcagagagaaauaaagcaagaaaaucuccgauggccuuucucucugcuauuu

SEQ ID NO: 4172132 - RNA, 78 nt, Human
aagugcauuggguuggugccugauuucaguggggagccuguaagggcuacccggaaaggcgauuaucccucugcaguu

SEQ ID NO: 4172133 - RNA, 81 nt, Human
aagugcgcucacagggcaucuaguucccucucuugaguuccuuuuaagcaagcaaggcaaccuauguccagagaagcaguu

SEQ ID NO: 4172134 - RNA, 81 nt, Human
aaguggaugacugagcccuaagggucaagcaggcccuugucuauaugcaacaaaugucucuuguccuuggguuuuuugcuu

SEQ ID NO: 4172135 - RNA, 63 nt, Human
aaguggcugcccccucccguggacacagcaggccugcugacguguucaccagggcagcagcuu

SEQ ID NO: 4172136 - RNA, 79 nt, Human
aagugggaauauuauuuaaaccauguacugcuuuauuuugcuggagcauuugauauguuuaaaaagugucagaccauuu

SEQ ID NO: 4172137 - RNA, 86 nt, Human
aagugguacacucaggccccacccuaccacagcacaggccuaccugugcugaggagaggggguggucuggcggcuggucacuauuu

SEQ ID NO: 4172138 - RNA, 78 nt, Human
aagugguacaguauuuauggcuugaguauuucauauuugugacucaguaauauucaagcucuaagacagguauggcuu

SEQ ID NO: 4172139 - RNA, 69 nt, Human
aagugguccagagauggacgagcagaugacuucagccuggaacaucaacgucuaucuguuggacuccuu

SEQ ID NO: 4172140 - RNA, 55 nt, Human
aaguggucuagucugaggauuauuuuucagucgaauagccucuaggagacuauuu

SEQ ID NO: 4172141 - RNA, 84 nt, Human
aaguguccauuacuauuguuugcucugacuaucuugcgcaaagaugccaaguaaggcuggagcaaaggccuuggugauacucuu

SEQ ID NO: 4172142 - RNA, 94 nt, Human
aagugucuuugucacagcuuguaucccaauggagcuauuaauuucauuugaaaucauguucucuuugugauauaagcagauuauaaagaaauuu

SEQ ID NO: 4172143 - RNA, 66 nt, Human
aagugugcuuuaaagacaguuaugcuggaaaaugcaucugucccauccuagcaauuguccauacuu

SEQ ID NO: 4172144 - RNA, 59 nt, Human
aaguguuaaagacuugaacacugggagaaacuuuucacuguuuuauguuuuuacuacuu

SEQ ID NO: 4172145 - RNA, 83 nt, Human
aaguguuauaaucugguuuuauuaagagcaggaaacccuucacaugcaugcuguucuuguuauugaccacgaauaaaacccuu

SEQ ID NO: 4172146 - RNA, 71 nt, Human
aaguguuaugagucaaggagcuacuggcauuuaaucuguagcagguaugcuguuagauuuaauaagcauuu

SEQ ID NO: 4172147 - RNA, 83 nt, Human
aaguguugacgguuagccuaaaacaugccucuaugagacacauccucuuucuugccagguucuuuuggccaaccucaugacuu

SEQ ID NO: 4172148 - RNA, 59 nt, Human
aaguguuuuggcuucuguacacauaaggaaagaaaaauugaguagaaguuagaacacuu

SEQ ID NO: 4172149 - RNA, 85 nt, Human
aaguuagccuguuaagcuuuaagugucagucagccaggauuuagcuuggcugguuggugguuguggcauuggcaccuguuaauuu

SEQ ID NO: 4172150 - RNA, 61 nt, Human
aaguuaugaaauuuggacagcuuggaaaugcugauuccaagcuguccaaauuucauaacuu

SEQ ID NO: 4172151 - RNA, 55 nt, Human
aaguucaaguguaaucuuuauuaaccuucacuuuauaaaggaagcauuuggacuu

SEQ ID NO: 4172152 - RNA, 55 nt, Human
aaguucacugugguuccuauggccuuuccugggguucucuaucauuagugaauuu

SEQ ID NO: 4172153 - RNA, 71 nt, Human
aaguucuaaaaugccuugauucaugauucugugauuucauauacaggacaauuuauaaugggcaagagcuu

SEQ ID NO: 4172154 - RNA, 111 nt, Human
aaguucugccaguguucgaacuuccuauaaauggaauuuggcaguauuuacccuuuugugccuauauacuacauaguuccauuuacaggaaguuaagccugggcagaacuu

SEQ ID NO: 4172155 - RNA, 63 nt, Human
aaguugauugcuucaaauuucugcuacuaacuucaagcuaugggaguuuggcaguagucacuu

SEQ ID NO: 4172156 - RNA, 97 nt, Human
aaguugcaagaauagggcaaaagaacgcacguuaaacuuuggcucagauucaccuauuguuaacaauuugcuucauuuguuuuaucauuuguuucuu

SEQ ID NO: 4172157 - RNA, 59 nt, Human
aaguugcauagcugcaaggacgacugggaaauauauuuauucugggcagccauguacuu

SEQ ID NO: 4172158 - RNA, 81 nt, Human
aaguugccuagacucagacagaaaaugugucuucccuauguuaugcaacagcugaauuuucugcucuggucuuaacaacuu

SEQ ID NO: 4172159 - RNA, 104 nt, Human
aaguugcuauaaaguauugacuauuagaaugucuugaacuuugguuacugugagccaagucggugcucaaaguauauuucauagucucaauuauauaguaauuu

SEQ ID NO: 4172160 - RNA, 55 nt, Human
aaguuggacagguggacuuuaacccauuuuggcuuaguccaaagccuguuuacuu

SEQ ID NO: 4172161 - RNA, 129 nt, Human
aaguuggggcagaauguccaaacacaguuuaguggaggugauucugugaggggcugaccuuaauaugguccaacauguagucucccuguauuaguuaucuacugcuguguaacaaaugacucccaacuu

SEQ ID NO: 4172162 - RNA, 74 nt, Human
aaguuggugaagcugugcauuugucuauugcaaucauuuugcaguacacacauauguauucguguuaugaauuu

SEQ ID NO: 4172163 - RNA, 59 nt, Human
aaguuuaggccaaauuagauuuauaauuaggaaacaaaugcugguuugguacuaaauuu

SEQ ID NO: 4172164 - RNA, 130 nt, Human
aaguuuccugagccgcucuccuuaggcauugggaauauuuugugaacccucaagcaaugcaguagcacugcauacuacucaacugugugaucgccaaaauucccacugugucuaaugcacuagguaugcu

SEQ ID NO: 4172165 - RNA, 89 nt, Human
aaguuugaccuuuaaauccggagggccucagguagauaucuaaagaaauuguuuuccugagggacuuuugagauuuaagacacaagcuu

SEQ ID NO: 4172166 - RNA, 61 nt, Human
aaguuuguucauucauucaucccuuuagcauuaugccagaggauggauagggaagagauuu

SEQ ID NO: 4172167 - RNA, 84 nt, Human
aaguuuuaugaaauuuaaacacagaucaaguacuaauaagaaaaucugguacucaaguugagaugugcuggauuuuggagacuu

SEQ ID NO: 4172168 - RNA, 79 nt, Human
aauaaagcugaaauaguacauuaggcauuuugagucauaaggaacagacaauggcuaaguaaccuguuaggcauuuauu

SEQ ID NO: 4172169 - RNA, 80 nt, Human
aauaacaaggagaugccagcaagguccagcauagggagguaacaaacuccagucuggagccuucugguuaaucaguuauu

SEQ ID NO: 4172170 - RNA, 101 nt, Human
aauaagauacaucuaucacaaugguauuagucaauuacaguggggcaagaguugucccaacuaccuuugacaaucaccagugagauauugaauauuuuauu

SEQ ID NO: 4172171 - RNA, 84 nt, Human
aauaagaucauugaaauauauucagagauuuagccugaaaauaacugagucuugaggucaucaucugaaacaaugugccuuauu

SEQ ID NO: 4172172 - RNA, 81 nt, Human
aaguugugcagaguugccuuuauuuauuuagcuuuguauuagcugcuuaagaaauguugguaaaacuuugaacauuuacuu

SEQ ID NO: 4172173 - RNA, 61 nt, Human
aaguuuaagagcauaggcuugaaaauaggacacuuagguuucagucucugcucugcugcuu

SEQ ID NO: 4172174 - RNA, 97 nt, Human
aaguuuaauuuugcuauaagacgccaguuuucgagucuauuuuauucggugcuuccagauaacaagauuuguaaaauuguaaaguaaguuauuucuu

SEQ ID NO: 4172175 - RNA, 58 nt, Human
aaguuuauguugguaagauaucccaguuguuaaugggauucaguggcaagauaaucuu

SEQ ID NO: 4172176 - RNA, 61 nt, Human
aaguuucucaauggcaacuggguucgcuuuuuuccaaacccagguguuuaaugggaaacuu

SEQ ID NO: 4172177 - RNA, 126 nt, Human
aaguuuugugauaaaaaggauggagcaacacaugugugcaugugggugcaugggugugugugucuguuguguauccuuauucacacacauuaugcucaucauccugaaaaauuauuaacaaagcuu

SEQ ID NO: 4172178 - RNA, 106 nt, Human
aaguuuuugcaugccuucauuucccuugguuaaauauguaggaguagaauagcuacucuuggguagguaccuagaauagguuuauaugaaagaguauguuugacuu

SEQ ID NO: 4172179 - RNA, 90 nt, Human
aauaaaaaaacagcaagucagugaguagaagauugauaccucugugauagugugucuguuucucucuauuuauuugucuuguauuuuauu

SEQ ID NO: 4172180 - RNA, 60 nt, Human
aauaaaucccauuuaugccuaguguuccauuacuggaaugcuaagcaugugggaguuauu

SEQ ID NO: 4172181 - RNA, 58 nt, Human
aauaaauguuaagauugucucagcuguaagccaugcaccaccagucuugacacuuguu

SEQ ID NO: 4172182 - RNA, 80 nt, Human
aauaaauuaguugaagauuuauaggagccuauuaacucuugugcaugaguuguagguuaauugaacuauaacaguauguu

SEQ ID NO: 4172183 - RNA, 66 nt, Human
aauaacaacuagcagguauuaauuuugugccaaggggcauagauuuugugaaugcuacuugucuuu

SEQ ID NO: 4172184 - RNA, 55 nt, Human
aauaacuucaguucuuacauuagggaguaaucgugauguuaagcaugagguuguu

SEQ ID NO: 4172185 - RNA, 75 nt, Human
aauaagccagagccagcaacucuagcccuguagagauuucuuuccaggaauagaucuguuuugccuggugauguu

SEQ ID NO: 4172186 - RNA, 102 nt, Human
aauaagucuguggauauuuaggagaccaggcacaagaagcaaauguuagcuaugcucaaaugcugccuuugugugcccuuuucccacugucuauaucuuauu

SEQ ID NO: 4172187 - RNA, 55 nt, Human
aaugcaaccugcugaucugacaauggguuguugguaagcgucuuuggguuguguu

SEQ ID NO: 4172188 - RNA, 68 nt, Human
aaugcaaggaccuuugagcgugccagcacucuuuauccucucugcuuggugcuguguuguccuguauu

SEQ ID NO: 4172189 - RNA, 61 nt, Human
aaugcacuggugaaagguggagaauaaauauauuuuccagauggauacuagaauuugcauu

SEQ ID NO: 4172190 - RNA, 77 nt, Human
aaugcagauaagaaucagguuugauaaaugagggaaaacaauuuuauaggauaaaccaaugauuuaaaaucuguauu

SEQ ID NO: 4172191 - RNA, 69 nt, Human
aaugcauaauaaggagcaaaauguauggaaucauccaaaugcuugcucuugauuauuuucuaccgcauu

SEQ ID NO: 4172192 - RNA, 59 nt, Human
aaugcauauguaggcaagcaguggcaguucugugacucuucucuaacuuacauaucauu

SEQ ID NO: 4172193 - RNA, 58 nt, Human
aaugcucaaugaaacguuuguguguguguauguguacacagauauuucauugaacauu

SEQ ID NO: 4172194 - RNA, 60 nt, Human
aaugcucuucuaagaugucuagcauaugcuagcauaaaggucaacguuuuagggggcauu

SEQ ID NO: 4172195 - RNA, 88 nt, Human
aaugcugaggaauuugguuuauguuuauguagguaacgaugagccugauaagugacacaaaucauguuuuucaauuaccuaucguauu

SEQ ID NO: 4172196 - RNA, 69 nt, Human
aaugcugaggauguucagagugcuugcuuaugaaacugcuugagagcuggauucuggauagguggcauu

SEQ ID NO: 4172197 - RNA, 102 nt, Human
aaugcuggacauuuaucuggagcugcaggggguaaagugucauccuugggaaauucaaagcuggccuguaccugcugagagcaccagggauauggucacauu

SEQ ID NO: 4172198 - RNA, 55 nt, Human
aaugcuguugaguuguuccuguuuuauucuucagugaaugacuguuuucagcauu

SEQ ID NO: 4172199 - RNA, 78 nt, Human
aaugcuugaugagcugcuauuagagguuccugaaaauaaauaccaggugacaguuugcacuguucaucaaagagcauu

SEQ ID NO: 4172200 - RNA, 66 nt, Human
aauggaaagucaccccacacucuugggacaguggguguuuuugucagagcaaagggugccuccguu

SEQ ID NO: 4172201 - RNA, 68 nt, Human
aauggagaaaccaaaucggacugugccucuacacuguacacuguagaaggcccauucauuuguucauu

SEQ ID NO: 4172202 - RNA, 60 nt, Human
aauggagaucugacuagggaaagaggcugcuuaaagcccuuuggcuuuuagauauccauu

SEQ ID NO: 4172203 - RNA, 79 nt, Human
aauggaggguguccuucuguggacucugaggaacguggccuugccaaaacuuagagcgcacacaaggagcccuacuguu

SEQ ID NO: 4172204 - RNA, 77 nt, Human
aauggaguuauugagacauagaguuaugaguguguuuaacuucacaagacuauuccuaaaauguccuaauuuccauu

SEQ ID NO: 4172205 - RNA, 75 nt, Human
aauggauaagagacuugugaaaccaguaacuucacuaacaccacaauuguuauuguauccagucuuauuaccauu

SEQ ID NO: 4172206 - RNA, 69 nt, Human
aauggauugcguaaaugaaaugcaaaaugauccacggugauggauugucugaauauguauguauccauu

SEQ ID NO: 4172207 - RNA, 71 nt, Human
aauggcagagggauugaacagcugagaauauuuuuguaacuuaagaaagcugcucauuacuuucuguuguu

SEQ ID NO: 4172208 - RNA, 67 nt, Human
aauggccaaaguagaaaauaauaggguucuuaagauuaauaucucacuauuguuaagacuggccauu

SEQ ID NO: 4172209 - RNA, 65 nt, Human
aaugggcuggaagacaggaaaugcuauuuuauuucucuuagcuccaugguucuuuauaguucauu

SEQ ID NO: 4172210 - RNA, 78 nt, Human
aaugguaggacaaaugcucaagacuaggcucaacugcugcccaagcucagcacuagccuguuuugcugugcugcuguu

SEQ ID NO: 4172211 - RNA, 130 nt, Human
aaugguaguauuuuuuuagauuuuuuaaagcaauuguguaaggcugauuaggaaggaggcucucuacagcacagcuuuccaauucaagcuuuuacguuuuuuaauguuucauuuuuauugacuuuuuuuu

SEQ ID NO: 4172212 - RNA, 89 nt, Human
aaugguaguuuaucuggaaaucaauuucuugguugauaguguuucauucagcacuucuaucauuuaguugucuucuuguuucuauuguu

SEQ ID NO: 4172213 - RNA, 61 nt, Human
aauggucauagcaggucuccuuuuagguucuguuaagcagaggccuggucuaugagauguu

SEQ ID NO: 4172214 - RNA, 68 nt, Human
aaugguccauuuuauucagagacuuugcaauaagcugagcauuguuaugaaaauaagauguuuccauu

SEQ ID NO: 4172215 - RNA, 60 nt, Human
aaugguguaucuauccuuguucugugucccaagcagagaacagguucaggguauaaaauu

SEQ ID NO: 4172216 - RNA, 76 nt, Human
aaugguuccuugaaaaccagcauguagccuguucauaaauuuuaugaugugugaagcacauguucaaggaaguauu

SEQ ID NO: 4172217 - RNA, 76 nt, Human
aauguaauauaacugccaguuaagguagacaguaguuguggucuuaguuacauuugauauggaguuguguaauauu

SEQ ID NO: 4172218 - RNA, 87 nt, Human
aauguaggugacaaugucuauuaaacugucauaaggauuuauaaauauaaacuauuguuauaauguuuaaagcauugguuuugcauu

SEQ ID NO: 4172219 - RNA, 82 nt, Human
aauguaucaugauuuugcacuauaggaaaaugugucuugcugagauguacaauauuucuaaguguauucuguccauugcauu

SEQ ID NO: 4172220 - RNA, 62 nt, Human
aauguauucugggaaaauguuaaauggaugcaacacuauaagauuuuccacagaaauauguu

SEQ ID NO: 4172221 - RNA, 61 nt, Human
aauguccuguuuugugguauacauuccaagagaaugcuaauuccaugagcacagggacauu

SEQ ID NO: 4172222 - RNA, 64 nt, Human
aaugucugccugaacuuuauauucugaggauuucuucuccucuguaaaucgcagguuagauguu

SEQ ID NO: 4172223 - RNA, 129 nt, Human
aaugucuguuucauuaucauuaucuguuugucagagucacaacuacauccacacuuuguuaugcccagaagcaucacuacugacagagauguguaagugacauuacagacaacacaggaaaauccaguu

SEQ ID NO: 4172224 - RNA, 62 nt, Human
aaugucuuuauuucagguuuacuuauggcugucuauacgguagaaccuaaaaaaaggauguu

SEQ ID NO: 4172225 - RNA, 58 nt, Human
aaugugaaacugcuguuuaugggggucaaguacgaccaaagaacagcaauuucauguu

SEQ ID NO: 4172226 - RNA, 84 nt, Human
aaugugacgucuuuagccagguacuuaauuauuuuuccacauuuuaaggguuaaagagcugagaccugguggaguuaaaacauu

SEQ ID NO: 4172227 - RNA, 84 nt, Human
aaugugccaaaaugacauuucuuguugauauaaaaauauuccgaaaggcuuuauguggggagaaauguugggaugagguauguu

SEQ ID NO: 4172228 - RNA, 75 nt, Human
aaugugccaagagggaagucaccuggaggugcuguguguuaucagaccucguuuuccuuuugucaugugcacauu

SEQ ID NO: 4172229 - RNA, 55 nt, Human
aauguggucucucuuaguagaaauccaugucguuucucuggaauuagaccauguu

SEQ ID NO: 4172230 - RNA, 56 nt, Human
aaugugucauuucccacaggugcuaagaacgcucaagccauggagagagaugcauu

SEQ ID NO: 4172231 - RNA, 70 nt, Human
aaugugugugugugugugugugugugugugcacacgcgugcagguguguauaaacauacauauauguauu

SEQ ID NO: 4172232 - RNA, 67 nt, Human
aauguguucuuauuccccauugcuucuucuaauacugaguugggaggagccaugaguuggauauguu

SEQ ID NO: 4172233 - RNA, 114 nt, Human
aauguuaaugaguuuuguuauaucgguuccaauauuucucauauauggaaaaugucauuuucccugggaauuaauauuuggagcugguguuuaagaaaaaccauguuugauguu

SEQ ID NO: 4172234 - RNA, 91 nt, Human
aauguucuuccaaaugaaguguuugcuuugccuugaaaagacaaauuaauauuuuacauggcaacaacucuuuauuccuuggugggauauu

SEQ ID NO: 4172235 - RNA, 57 nt, Human
aauguugacaguggugaucucauccacaccuuuggucuugauggccauuucaauguu

SEQ ID NO: 4172236 - RNA, 78 nt, Human
aauguuuaaggaacugguuugcuaacucauuucuuaaugacaagaauuaagccagcacagccucugguuucugacauu

SEQ ID NO: 4172237 - RNA, 72 nt, Human
aauguuuucagaacccacagugaaguuagagaaagagucagaacaaaaucucugucacugggagaagauauu

SEQ ID NO: 4172238 - RNA, 59 nt, Human
aauguuuuguagcccaugcuuauggugaagauccauuuucaagcauuagccaaagcauu

SEQ ID NO: 4172239 - RNA, 88 nt, Human
aauuaaaagacagcuuuuuaauuuuaaagacauuauuagacuguccaaacaugucugaauucuuagaauuaaagggaaguuugaaauu

SEQ ID NO: 4172240 - RNA, 129 nt, Human
aauuaagguuucccuauucauccaacaaacacuuauugagcuuuuucuucauacaagaaccuuuacaauucaaaucuuaggaagcaaagaguuuagugggugauucauauuauuaggggaaaaaacauu

SEQ ID NO: 4172241 - RNA, 85 nt, Human
aauuacagugacaccugaggguccagcccuguguaaaagauaugaauauuuacaaugcacucaccuuuagaaguggacuauaauu

SEQ ID NO: 4172242 - RNA, 72 nt, Human
aauuacaugaugcuaaauaacugguuugacuggcauuugucacccaaagaguuguuucagcuuugugcaguu

SEQ ID NO: 4172243 - RNA, 57 nt, Human
aauuaccuuuuccacuuaggcccuggucagcaggacuugaaugguaugagaguaauu

SEQ ID NO: 4172244 - RNA, 87 nt, Human
aauuacugcuaugaagcagccgcugaaacacuuuaauggccacaauuaaacagucccagaggcugaccuuuagacguggcagugguu

SEQ ID NO: 4172245 - RNA, 63 nt, Human
aauuagcacaggcaacuccacauaguuugcaaucagagaauuauauugugccaagugcuaauu

SEQ ID NO: 4172246 - RNA, 82 nt, Human
agcugugguugagguccccaguacccacuguggcagcguucucccuuguccagaaaccaaaugggauggggacucuccaguu

SEQ ID NO: 4172247 - RNA, 129 nt, Human
agcugugucccuuuagccucuuacaucaucaccagcaauaaagauuuuacugucaggacuuggcugacaaauuugcaggcucuuuauuacuggugaugauggacuauaagaagcagaaaaaacacagcu

SEQ ID NO: 4172248 - RNA, 56 nt, Human
agcuguguguuugucaugggcguagacagcucaggacagcacagaacagcacagcu

SEQ ID NO: 4172249 - RNA, 56 nt, Human
agcuguguuaggauguuaauaaguagaggaacaccaagcaguuuccuaacucagcu

SEQ ID NO: 4172250 - RNA, 61 nt, Human
agcuguguucugguugauucacccuucucagcacaguguguaguuaaucagaggacacguu

SEQ ID NO: 4172251 - RNA, 73 nt, Human
agcuguuaugaacuuuauuuaaauuuaaucugguagcaguguuuuuguuacuauuaguuugagcauaagagcu

SEQ ID NO: 4172252 - RNA, 60 nt, Human
agcuguugaaccuguaaguauagauguggacugugucagcauguaucuuucaggugugcu

SEQ ID NO: 4172253 - RNA, 85 nt, Human
agcuguuggcuuugccauuugcuaguccucugacuucuucuucaguauugacuuagaggcauuaaugaauaaacagggccaggcu

SEQ ID NO: 4172254 - RNA, 56 nt, Human
agcuguugucugcaggagaagcaaguauuucuccccuauucaaagcaacagcagcu

SEQ ID NO: 4172255 - RNA, 60 nt, Human
agcuguuuuacugguuguauaacuaaaaauaagauaauguuaugcuggguaaccacggcu

SEQ ID NO: 4172256 - RNA, 109 nt, Human
agcuuaccuuucacuuugacuaaaacaaacaagauugcuuucuuuagccaacuaguuagggaugacaguacagucuuagauuuuauuuuggucaacuuguggguaaucu

SEQ ID NO: 4172257 - RNA, 80 nt, Human
agcuuaggaaggacauggauuguuuuaaaagaugguggaaaaauugcucuguuaaauuguccagccacuuuuccuaaccu

SEQ ID NO: 4172258 - RNA, 57 nt, Human
agcuuagucacucuuaaauuuauuagaaucauacuaugacuugaggcugacugagcu

SEQ ID NO: 4172259 - RNA, 76 nt, Human
agcuuaguucuguguuucugcagcagaaauacugccugguaagugaguauucuguauggggaaacuagaggaggcu

SEQ ID NO: 4172260 - RNA, 101 nt, Human
agcuucaaguuuauuucucucuuauuccagaaggcuggcagauugagauuagaaucucucauccaauuuuaguuucugaggagcaacugauuugccaagcu

SEQ ID NO: 4172261 - RNA, 59 nt, Human
agcuucccaagguuggaagguuauguuuuuaaauuuuaaguuugaacuuucgggaggcu

SEQ ID NO: 4172262 - RNA, 68 nt, Human
agcuucgacugaggaugccacagugagacaccaucugggucuggaggguccacugugaggcagaggcu

SEQ ID NO: 4172263 - RNA, 105 nt, Human
agcuucguggagcuguggauacuaugggagauucauugcuuuaggcauuguagaaaugcacugcuuuaaggcugaguaacucauucuauagacucuaccacagcu

SEQ ID NO: 4172264 - RNA, 64 nt, Human
agcuucucauguuuauuuuuacauauuucaaaucccucauuaugucuuguaaacaagaggggcu

SEQ ID NO: 4172265 - RNA, 83 nt, Human
agcuucugacuucaaaugagaacuccaggcacuagcaggcauguuuagugcuuaauaaauuucagaaaagaagaauagaaguu

SEQ ID NO: 4172266 - RNA, 66 nt, Human
agcuucugaguucuugcuuaauaauauuaguaucaccuguugcuguucuacguuaacucaggagcu

SEQ ID NO: 4172267 - RNA, 62 nt, Human
agcuucuggcguuggaggucugaguucucgcgggccacgcguucgauauccgcccggaggcu

SEQ ID NO: 4172268 - RNA, 67 nt, Human
agcuucuuuaaaaugauauuuugaauucuuugucaggaaauucauagaucucaauuuugaggggguu

SEQ ID NO: 4172269 - RNA, 72 nt, Human
agcuugaguccucuuuggagaagcacguauuauuaauaacaauggcuuguguuuguucaggguuuuagagcu

SEQ ID NO: 4172270 - RNA, 79 nt, Human
agcuugcagagcagccagccccagccucugauguuauaaauguagaugugcugguggugggccaguucugucgugggcu

SEQ ID NO: 4172271 - RNA, 65 nt, Human
agcuuggaggagacaggacucagaaagcauggcagagcgucuuucgaucaagggucccuucagcu

SEQ ID NO: 4172272 - RNA, 81 nt, Human
agcuugggugugcauguauugauuuguaccauuugcuaauuuucuugguguaaauuuuccuacugucaaugauuucaagcu

SEQ ID NO: 4172273 - RNA, 65 nt, Human
agcuugguguugccugcuugagaaaguuccccuggucacccugucuaaagcagccacuacaagcu

SEQ ID NO: 4172274 - RNA, 57 nt, Human
agcuuguucuccuucccuguggcuuccuauuggauauagccaaaggagaacagugcu

SEQ ID NO: 4172275 - RNA, 85 nt, Human
agcuuguucuuacacuguauagucuuguggcaguuaucauagcuuauaguuacauuacuugugcaguuguuaguuugccugagcu

SEQ ID NO: 4172276 - RNA, 65 nt, Human
agcuuguuuaucaccuuggagauugguugcuaaaauguucaaguuuaaggcacugauaaguagcu

SEQ ID NO: 4172277 - RNA, 96 nt, Human
agcuuuaaugaccaauuuucacagaaagaagcuaguuuaauauucaucuucacugaauucaagcgaguuuuguuuuguucagguuuucauuuuguu

SEQ ID NO: 4172278 - RNA, 75 nt, Human
agcuuuacacuuucguuuguggauuagauucaagcacaguuuaucccuucaugcagaugagaaugucagacagcu

SEQ ID NO: 4172279 - RNA, 55 nt, Human
agcuuuagagagccaagacucacucauguggaacagagaucugcucccuggagcu

SEQ ID NO: 4172280 - RNA, 55 nt, Human
agcagccagaaauccagaggugaaugacauaaugggauagaauuucauggcugcu

SEQ ID NO: 4172281 - RNA, 64 nt, Human
agcagcucaucuagcuuugagguauagaucaagaaagucauccagagagguuaggugacaugcu

SEQ ID NO: 4172282 - RNA, 80 nt, Human
agcagcuuggaaagcacccaagauuuccuucuuuagagaaucagaaugaaggcagaacaggguuucuuucuauuguugcu

SEQ ID NO: 4172283 - RNA, 56 nt, Human
agcagcuuggggccgagauagaguuucaaagcguuauucaaugguuuuaaguuguu

SEQ ID NO: 4172284 - RNA, 56 nt, Human
agcaggaagggaaagguugacuccuggaaaggcucagggguuguccuccuuccucu

SEQ ID NO: 4172285 - RNA, 76 nt, Human
agcaggaaguagguagaaaugcauucacguucuagaauuuagcucugggaacucugucauuucccuacucacuguu

SEQ ID NO: 4172286 - RNA, 72 nt, Human
agcaggaauauaguauuucgagggcucauuguaaugcguaaugagaaacucuuugugugcagugugccugcu

SEQ ID NO: 4172287 - RNA, 86 nt, Human
agcaggacugguuucuucuggaggcuccagggagguuccauuucuuguaucuuccagcuucuagaggcugccaacaguccuuagcu

SEQ ID NO: 4172288 - RNA, 56 nt, Human
agcaggaguacaguauuuuuaaacaaaaggacaaccugaguccugugcuccuuguu

SEQ ID NO: 4172289 - RNA, 55 nt, Human
agcaggcaggcccagcggcuggguuucucuagcaccucggcauugucugccugcu

SEQ ID NO: 4172290 - RNA, 68 nt, Human
agcaggcaugauuagaucacuguuuuacagcuaaagaagcuggcugacagagauuuaaaaguggcucu

SEQ ID NO: 4172291 - RNA, 55 nt, Human
agcagggaagcucagaagaggccagugggcuucccgaguucugugcuuccuggcu

SEQ ID NO: 4172292 - RNA, 64 nt, Human
agcagggacaucuuugucuaguaccugaaucuucagcaucaguacguacagaugugcccuagcu

SEQ ID NO: 4172293 - RNA, 76 nt, Human
agcagggagccccaggagucaccugcccaaagucacccuggggugauuggcaagggcagggacugggcugcuugcu

SEQ ID NO: 4172294 - RNA, 57 nt, Human
agcagggcagugaucagaaagggaacucagauggccugucaggaaaauugcccugcu

SEQ ID NO: 4172295 - RNA, 56 nt, Human
agcagggcugcggccccaccacuuacucacuaugugauucggagccucaguuugcu

SEQ ID NO: 4172296 - RNA, 55 nt, Human
agcagggucccggcuuguguucaggauuuugaaacauuuguaaggugauuuuguu

SEQ ID NO: 4172297 - RNA, 75 nt, Human
agcaggucaacugagcaguagcgucuggagucagaggagcaggagcuccaggcauaaugcccagugguacuugcu

SEQ ID NO: 4172298 - RNA, 57 nt, Human
agcaggugccagguguacccgccugucuucagacacugguuaugccugguccaugcu

SEQ ID NO: 4172299 - RNA, 63 nt, Human
agcagguguuuguaucauaaggcaagaucaaguuacaucacccucaucuauacaaacucugcu

SEQ ID NO: 4172300 - RNA, 60 nt, Human
agcaguaagacuuuuuucuguggcucuaccccuuuccagagcagaagcuaggcuuacucu

SEQ ID NO: 4172301 - RNA, 78 nt, Human
agcagucagcccggccaggaacagaguauauucccugccgaugcacacuugugucuguccucgguugaugccucugcu

SEQ ID NO: 4172302 - RNA, 64 nt, Human
agcagucaggucugcacagugagagagugagcuccccgucuguggcugugcugggccagaggcu

SEQ ID NO: 4172303 - RNA, 57 nt, Human
agcagucaguccugaaugaaggugcauuuguguuuucuaauucuaacuggcagagcu

SEQ ID NO: 4172304 - RNA, 57 nt, Human
agcagugaugcaugacagccuagccccacugggaagcaugugauggcauaaccagcu

SEQ ID NO: 4172305 - RNA, 57 nt, Human
agcaguggcuaauaacagcuaaacaguccaucuagauuguugcuguaagccuuugcu

SEQ ID NO: 4172306 - RNA, 61 nt, Human
agcaguggcugacagacuuaccucuuugccuucuuaauggcuggugugucaaauuacuguu

SEQ ID NO: 4172307 - RNA, 56 nt, Human
agcagugguggaaugaggaauuguacccaaacaaucucaaccucagaacuacagcu

SEQ ID NO: 4172308 - RNA, 74 nt, Human
agcagugucccuaguccccggauccuguccagcugagcguagacggcaguagccagggacuggcagcacaggcu

SEQ ID NO: 4172309 - RNA, 63 nt, Human
agcaguguuuaggcauucaguaguccuugggagacacugaaauaaaguugcuaaaauucugcu

SEQ ID NO: 4172310 - RNA, 72 nt, Human
agcaguugggcucuuccuggcaaaagguauucuaaguguaggagggacuugaugucagggagauucucugcu

SEQ ID NO: 4172311 - RNA, 72 nt, Human
agcauaaggucaaggccaggagacuuggagucagacaguuuuggguucaaguccuccugcuaacacuauguu

SEQ ID NO: 4172312 - RNA, 68 nt, Human
agcauaaucucaugguggaagagugccuuagcuucuagagcuguguugucuaguaccgaggaugugcu

SEQ ID NO: 4172313 - RNA, 56 nt, Human
agcauagaguccugagggcaggggacacagccugcuccaucuagagcucugcagcu

SEQ ID NO: 4172314 - RNA, 55 nt, Human
agcauauguggggcgggacccccuggagggcaggguccagccccugcauguugcu

SEQ ID NO: 4172315 - RNA, 76 nt, Human
agcauauugugaaaauguugggaaauuuagguuauuuuaaugauggcugagaauuugugaacuuuucucauaugcu

SEQ ID NO: 4172316 - RNA, 128 nt, Human
agcaucaagaaucacauuauuucacagcugguuugcugaauagauuguaaacuuaguuaaugauauugcuccauuauggugccaauuuauuuagccaagaaagcaaaaauaccagugauuuuucagcu

SEQ ID NO: 4172317 - RNA, 91 nt, Human
agcauccaguccagagaggaggcugugugcgcuggggaaauggugacugacccacagauacugagcauccuuucuguggcagcuuggugcu

SEQ ID NO: 4172318 - RNA, 80 nt, Human
agcaucccucagacagaggccuggugcuguguccacacaaccucuccccuguggcaccuccuggcuucccugaggaggcu

SEQ ID NO: 4172319 - RNA, 76 nt, Human
agcaucugauucaguaggucuagaauaagacacaauaaguuacgugucuaacaaguuucuaggcaaugcugaugcu

SEQ ID NO: 4172320 - RNA, 63 nt, Human
agcaucuggaacagcaugugcagagacccagggccagggcugucacuggcauguuccggggcu

SEQ ID NO: 4172321 - RNA, 80 nt, Human
agcaugcaguaaagcccaugucucuggugugcagcaggcacaccuuggcacuccuuggguuaucuccuguugcugcugcu

SEQ ID NO: 4172322 - RNA, 60 nt, Human
agcaugcugguguucauggcaggauauuaggaugaggagccugcuggaacaucaguagcu

SEQ ID NO: 4172323 - RNA, 67 nt, Human
agcauggcaagggcccgagcuauaaggaggaucacccaccgagguggcuaaaggcucuaguccugcu

SEQ ID NO: 4172324 - RNA, 90 nt, Human
aggauugaaaauuaaugugucaaggaauucaugaaaagcuuaaaugagugguucuugggaauuuuuccaacacacaaaguauucuacccu

SEQ ID NO: 4172325 - RNA, 124 nt, Human
aggauugcaggggugguacaggcugcagauuuguugccauggugcucaacaggugaaagagaaagugacugcuuccuugggaaacaucauguaauacaccuguaucuuuuccccucucccuccu

SEQ ID NO: 4172326 - RNA, 64 nt, Human
aggauugcuguggcuuuauaguacaguuugaagucaaguacugugauagcugaaguuuuguucu

SEQ ID NO: 4172327 - RNA, 69 nt, Human
aggauuucagaagaagagacuccacagcuccacaggagcucuuuucuuuucuuugaauaauuguauccu

SEQ ID NO: 4172328 - RNA, 65 nt, Human
aggauuugaagguuuaacugagaggcacgccaauacguuuugaugcuuuauuggaaccucauccu

SEQ ID NO: 4172329 - RNA, 57 nt, Human
aggcaaaagaaugucauaaauguacuguaaucuguaugucugauguauuuuuugccu

SEQ ID NO: 4172330 - RNA, 74 nt, Human
aggcaaacaaauggguguggcugcgugccaauaaaacuuuauuuacaacaccaggcaguauccugaauuugucu

SEQ ID NO: 4172331 - RNA, 88 nt, Human
aggcaaaccuugccaauuuuuaguuugaucaauggcagccuuguauaugcaaguccaccagucagacuaggaaauaccaggguugccu

SEQ ID NO: 4172332 - RNA, 78 nt, Human
aggcaaagucuuuugauuugcaagaggcugcuuuugcugagagaagaaaaugcucuugaaaaucaaaagggaaggccu

SEQ ID NO: 4172333 - RNA, 81 nt, Human
aggcaacauauauuuuguuuuccugugaacggggcccaucuuuaaagggguaagccaggucacagggauaaaugguugccu

SEQ ID NO: 4172334 - RNA, 55 nt, Human
aggcaacugugacaccucccugggguccuuuuggugccagggauuuacagagccu

SEQ ID NO: 4172335 - RNA, 70 nt, Human
aggcaacuuuaaauggcuaugucuguguaaaguaucaugcauucugaccuggaaauuuauaguuaaaccu

SEQ ID NO: 4172336 - RNA, 59 nt, Human
aggcaagaagacgccaggacugaugucaccggcucuguaguucaaccgucuucuccccu

SEQ ID NO: 4172337 - RNA, 72 nt, Human
aggcaagauuaaaaccuuugccuggaagggagucggaagauucucuggguuccaguaaauggucucaugccu

SEQ ID NO: 4172338 - RNA, 67 nt, Human
aggcaagcaccgggggccuuuucaggagggugugucuaccugucaugaggcugucugcugcuggccu

SEQ ID NO: 4172339 - RNA, 60 nt, Human
aggcaagcugcagagaguccuuuacucccaggccucuucucccaccagcuaucagugucu

SEQ ID NO: 4172340 - RNA, 127 nt, Human
aggcaaggcucugaguugcagaggacagaggauuucuucccagccagcacagcccaugguaaaguggacuuuagcagcuggagaggagcaaaucaaucuuuacccacugggcacuaagagucugucu

SEQ ID NO: 4172341 - RNA, 64 nt, Human
aggcaaggugugguaugaagaugguagcucuuuaucgaguguuuauugugugccacacacuccu

SEQ ID NO: 4172342 - RNA, 67 nt, Human
aggcaaugcuaucaugucagagauaagagagggggccuuugucuuugagagcugcauggacuugccu

SEQ ID NO: 4172343 - RNA, 80 nt, Human
aggcaauggggagagguuguaaauauuaaacuguaauacccuugucccuguuaugcuuccaauauucucccuuuuugccu

SEQ ID NO: 4172344 - RNA, 66 nt, Human
aggcaauuuucugaugaugaagcacgugcuuauuagcauuuguauagcuuccucaguaaaaugucu

SEQ ID NO: 4172345 - RNA, 83 nt, Human
aggcacacggccaccucugcuguccacaggauguuagcacaacucacucccgugucccccaccagaggccuggucugucuccu

SEQ ID NO: 4172346 - RNA, 55 nt, Human
aggcacagagaaugcccuccauacauauuuauugaaugaagggauuaaugugucu

SEQ ID NO: 4172347 - RNA, 87 nt, Human
aggcacagagagauuauguaauugcucaagaucauccagccuagugagugguagagcuggaauuugcagcaaggucugucugacccu

SEQ ID NO: 4172348 - RNA, 82 nt, Human
aggcacagcugccgccccggacgucugaccaaacacaccagguuugugcgggacaugauccgggagguguguagcuucgucu

SEQ ID NO: 4172349 - RNA, 58 nt, Human
aggcacaggaggugguaagaagaaaugcaggucagauuuaacgacaugccuagugccu

SEQ ID NO: 4172350 - RNA, 72 nt, Human
aggcacaggguuacugucacuguugauugaccaaacuugcuuuuuuggcagcucagaaacuucauugugccu

SEQ ID NO: 4172351 - RNA, 57 nt, Human
aggcaccagguugugguuugucgauugaacccauaggcaggaugcaucuuggugucu

SEQ ID NO: 4172352 - RNA, 66 nt, Human
aggcacguuuuaugacagaagaagccuuaagacaccguggcuucaggagggugugggacagugccu

SEQ ID NO: 4172353 - RNA, 114 nt, Human
aggcacuauuccaaguauuuuacauauauugcuucauuaaguucucacaguaucaauauacaguugagaaaacugaagcagacagauauagguuaaaugacuuguccaaggucu

SEQ ID NO: 4172354 - RNA, 58 nt, Human
aggcacugaagaacucuuuuuggaaauccuauaagauauaacaguuuuucaaguguuu

SEQ ID NO: 4172355 - RNA, 81 nt, Human
aggcacuugugagaauuccugaucacagguccacucaugggcauguuugggguuggaauuuucacacuauuuauggggccu

SEQ ID NO: 4172356 - RNA, 60 nt, Human
aggcacuuuccuugaggaguuuuugcaagaguuaauugagauaauucauggaaggugcuu

SEQ ID NO: 4172357 - RNA, 95 nt, Human
aggcagagacagcaggcucccucugcuuuuaugugccggcgcugccagaggcagaaggcuggcuuucugagagcaggggcccgcacgcucugucu

SEQ ID NO: 4172358 - RNA, 62 nt, Human
aggcagaucacuugaggccaggaguucaagaccagccuggccaacauagugaaacccugucu

SEQ ID NO: 4172359 - RNA, 62 nt, Human
aggcagauuacuugaggccaggaguucaagaccagccuggccaauauagggaaaucuugucu

SEQ ID NO: 4172360 - RNA, 58 nt, Human
aggcagcagucaugaggaaagaagggcuuuugaccuucuugcacagugucugcugucu

SEQ ID NO: 4172361 - RNA, 61 nt, Human
aggcagcucuucacagggcggcaggagggagagugauacugagcaaagggggaagcugcuu

SEQ ID NO: 4172362 - RNA, 67 nt, Human
aggcagcugaguguuggcauguucagggaacuuuaaaauuaacugcauuucugacacacaguugcuu

SEQ ID NO: 4172363 - RNA, 64 nt, Human
aggcagcuuuucuuacugugcuugucuggguuaauuuaaaccacaccuguuaagaagagugccu

SEQ ID NO: 4172364 - RNA, 59 nt, Human
aggcaggacucugggucagaacucaaauccagaucaaucuggccugaaaguccaugcuu

SEQ ID NO: 4172365 - RNA, 97 nt, Human
aggcaggaggaucgcuugagcccaggaggcugaggcuguagugagcugugaucaugccacugcacuucagccugggcaauagggugagacccugucu

SEQ ID NO: 4172366 - RNA, 118 nt, Human
aggcaggcucuuaccaggacucaugagaaagccaagccaagcaccacuggcacucgaggguccuuccuugucccuuugggugauuggcacgguuguccacugagcccagagccucacu

SEQ ID NO: 4172367 - RNA, 55 nt, Human
aggcaggcugcuauggaguagaucccuuaucuccuaccuagaaggcaucuugccu

SEQ ID NO: 4172368 - RNA, 72 nt, Human
aggcaggggaaggccauggccauaggacuacagcacuuuccgggcgcuuuuggccaccccuuucucugcacu

SEQ ID NO: 4172369 - RNA, 74 nt, Human
aggcaggguuuauacuauacuaauaaugcuuuguuucucaagcuuuaugguaaguauagaugacuauucugucu

SEQ ID NO: 4172370 - RNA, 66 nt, Human
aggcaggugcaggagcugugcagggacagaaugcagaaugcucaccuguuguauuccucacuuccu

SEQ ID NO: 4172371 - RNA, 80 nt, Human
aggcaguaagaguggagucaaacaggaaugcgaugugcuucguguguccugcagacagacucaggcuucuuacacuggcu

SEQ ID NO: 4172372 - RNA, 87 nt, Human
aggcaguaagugguacaguguuuaagagauggcauuugcaguuggaaagccuaggauguaagucccagcucugccacuuacuagcuu

SEQ ID NO: 4172373 - RNA, 71 nt, Human
aggcaguguggcuggugcuaagucagguccuuucccguguccucaccugguuugucucaucaccaccgucu

SEQ ID NO: 4172374 - RNA, 73 nt, Human
aggcaguguuuaaugccuuuuccagcugcugguuugaggagacuggguagagaggacaaguaaacagaggccu

SEQ ID NO: 4172375 - RNA, 80 nt, Human
aggcaguucaaacagaggcgaggcagcugaaccuggugaggcugccaggaacagcgaguucugccucugaauuugcuccu

SEQ ID NO: 4172376 - RNA, 84 nt, Human
aggcaguuccagugagacgaguacccucugauaagaaauacucauagugguucuuggcaaugguauucauccauucagaagccu

SEQ ID NO: 4172377 - RNA, 104 nt, Human
aggcauaauugauuggacacuggugacuaauuuaacuuucagccccucuucccuuccuggaggcugaggggugggcuggaaguuauaacccucuaaucaugccu

SEQ ID NO: 4172378 - RNA, 73 nt, Human
aggcauagcuuuuugcaggcaccccucaguacagcaggcaguauugacaggugccugcagacauaagcugccu

SEQ ID NO: 4172379 - RNA, 67 nt, Human
aggcauauuacaauuauagaaggaucaugucucaaaugauccaggcaucugaauugagugaaugucu

SEQ ID NO: 4172380 - RNA, 74 nt, Human
aggcauccgaggcagcaugcauugaccacauggauacacuuugcuaugcuguccacucuugguguuuaaugccu

SEQ ID NO: 4172381 - RNA, 58 nt, Human
aggcauggauggauccagggcucaaaugauguuuugaagcuccacuuucucuccaccu

SEQ ID NO: 4172382 - RNA, 111 nt, Human
aggcauggcauccuggaaaguuugcuucuuuuaccgaaugugucaagauggaaagcauuaaugauacuuggucugaacacauuuuagguaaauaaauuccugauucagcuu

SEQ ID NO: 4172383 - RNA, 66 nt, Human
aggcauggcuucuggggacugcugauuuccuugacgauaaugccagucaggcccauagcagugccu

SEQ ID NO: 4172384 - RNA, 86 nt, Human
aggcauuuagucccuggauucucacuggacuccagugagauuuuuucucauuuugcugagucacuggguaaucuggauugaugccu

SEQ ID NO: 4172385 - RNA, 55 nt, Human
aggcauuuuguucaagaugacagcaugaugucaaaauaugaauccagaaaugccu

SEQ ID NO: 4172386 - RNA, 65 nt, Human
aggccaagcaggcaagguuguggggcaccuggaagguggguguccagcggccuggcugcugaccu

SEQ ID NO: 4172387 - RNA, 80 nt, Human
aggccaaguuauggcaguuacccuugaugauaccaacacauauucuugauaccaucuuuugaauuuuuauauauuggccu

SEQ ID NO: 4172388 - RNA, 66 nt, Human
aggccaauuaaggcugugguuguggauaaaguuauccugagaaggacagggccuaugauugagcuu

SEQ ID NO: 4172389 - RNA, 57 nt, Human
aggccacaagaaaaugcuucaugccaacagugaguaugagauguggaugugaugccu

SEQ ID NO: 4172390 - RNA, 75 nt, Human
aggccacuggugccagagaacagaauuaagggcagaaggaauucaaggacuguuuuuaaugguaccagacagcuu

SEQ ID NO: 4172391 - RNA, 94 nt, Human
aggccaugggucuguugcaccugcuagcuagcagcauuacaacaaauggaggcauuuguuuucugcagcagcauuaucaggggucccagggucu

SEQ ID NO: 4172392 - RNA, 56 nt, Human
aggcccaaaagaaaccacugggugacaaaugagaucagccucuuuuggacuagccu

SEQ ID NO: 4172393 - RNA, 55 nt, Human
aggcccagagagaugaagugaugggccaagggcucgcagcuggcucuguggguuu

SEQ ID NO: 4172394 - RNA, 83 nt, Human
aggcccauuuuaaauggaucuuuuuauaaugcagauaccucucaucuaucuguuuuguaaugauggauuuguuuugggggcuu

SEQ ID NO: 4172395 - RNA, 116 nt, Human
aggccccacuuaauguucuugucagucuuugucuagagagcaaauauuaauggcaaauacucuuuaucuguuauauguuuuuucuaaagucacaugaauagcaaauaggaaggccu

SEQ ID NO: 4172396 - RNA, 72 nt, Human
aggcccgugaauggacacuccauccuguuguuacuuggcaccagggagggugugcuucaagcaguggagccu

SEQ ID NO: 4172397 - RNA, 79 nt, Human
aggcccuaccuacaaauacagucacauucugaggucuugggggcuaggacuuccauggauggauugggugagggggccu

SEQ ID NO: 4172398 - RNA, 79 nt, Human
aggcccucacagucuauugugaguagcugacaguagcaugagcacuauaaguacuaaagcacagaugcugugagagccu

SEQ ID NO: 4172399 - RNA, 94 nt, Human
agcuguuaaacucgggaauggauuguguguuugaguggugcgaccacugauguauaaaaugcacaggagaaccaauucacugagguaggcaccu

SEQ ID NO: 4172400 - RNA, 79 nt, Human
agcuguuuauuacccagagugggcguggucgcaacagacaaucugucuggcaagcucguuugggucagaaagaauggcu

SEQ ID NO: 4172401 - RNA, 79 nt, Human
agcuuaagucuuagauuuacaguggccuucugaacucagaaaagcaaggcagucugucugaggaccuaagauuugugcu

SEQ ID NO: 4172402 - RNA, 81 nt, Human
agcuuagaaggaucagacaaguagcucuguuugucuaaauuccauaggauuuacagaugguuauugucauuucugguagcu

SEQ ID NO: 4172403 - RNA, 100 nt, Human
agcuuagauuaauacaucuuuugauauuucuuaucuauuucucagaaaauagagaaaaacuaagaguggguggugaagugucagagugaguggcagaguu

SEQ ID NO: 4172404 - RNA, 69 nt, Human
agcuucaaauggcaacaagaacacuggcuuugaccaccaagagucggugacaaauucucugccauugcu

SEQ ID NO: 4172405 - RNA, 60 nt, Human
agcuucaggaacaggcagccuguaacauucuacaaggcagacgcgugucuccaugaaguu

SEQ ID NO: 4172406 - RNA, 65 nt, Human
agcuucccacacucuaguuuccaccuuagaauuggcuuccauggaaacuagaguguggcaaagcu

SEQ ID NO: 4172407 - RNA, 70 nt, Human
agcuuccucugugacaaacaguccuggcaucauuucuggauggcugggcaguggucacagcagagauucu

SEQ ID NO: 4172408 - RNA, 66 nt, Human
agcuuccuuguaaaggcucucuugauaagaaaguccaguggaccuucugucagaaaagcugaggcu

SEQ ID NO: 4172409 - RNA, 82 nt, Human
agcuuccuuuauuuuaagacuuaauuucuggugaugucaugauucaaggcaucagaaauagucuuuaaaaugaaaagaagcu

SEQ ID NO: 4172410 - RNA, 55 nt, Human
agcuucuagcccauccagcagggguucuuucuccucauuaggauggucugaagcu

SEQ ID NO: 4172411 - RNA, 62 nt, Human
agcuucuccaugcagaaggcugaggugugcuccuguuccaggccuguguuguguggagggcu

SEQ ID NO: 4172412 - RNA, 58 nt, Human
agcuucuggaagccuggcagcagcacacuugaccucucucucugggcuucccgaggcu

SEQ ID NO: 4172413 - RNA, 56 nt, Human
agcuucuucugcugucucuguuugcuugaagaguaaccugagauugcaagggagcu

SEQ ID NO: 4172414 - RNA, 69 nt, Human
agcuugaaccuaaaacaauaauuuaaguggacauacuaaugugguuguaaguuuuagguguuucaagcu

SEQ ID NO: 4172415 - RNA, 60 nt, Human
agcuugaggcagcccuuaauugggacccauuucucuuucucccaagcugcuggcucagcu

SEQ ID NO: 4172416 - RNA, 59 nt, Human
agcuugauggauugcugaggcagagugcaccgagcaaggguucaguccuccauagagcu

SEQ ID NO: 4172417 - RNA, 55 nt, Human
agcuugauuucucugcagugugaacauuggcuguucagauugccuauaaucagcu

SEQ ID NO: 4172418 - RNA, 57 nt, Human
agcuugcuuuccccucagucagagcuuccaguugacaauggguggacaagauaggcu

SEQ ID NO: 4172419 - RNA, 58 nt, Human
agcuuggcuugugaccagggagugacgucuaggaagagaggucagcaggggccaagcu

SEQ ID NO: 4172420 - RNA, 84 nt, Human
agcuuggucaagauuacacacugguguuuugucaguacaauucagaaaauaaaauccagcaaauaaugugcucuucacaaagcu

SEQ ID NO: 4172421 - RNA, 74 nt, Human
agcuugucuuucaaaggaguuuguucacguauugagugcuccaacuuuuauagcuccuacaugagggauuggcu

SEQ ID NO: 4172422 - RNA, 86 nt, Human
agcuuguuccuguaauguagaguguguuuuauugggaguuugccauauaaauuuuuaaagagaugcugugcauaaagaaacaaguu

SEQ ID NO: 4172423 - RNA, 65 nt, Human
agcuuuacacuuggacccacacuugauaguacaccaggaaaggguucaugguguaggauguagcu

SEQ ID NO: 4172424 - RNA, 72 nt, Human
agcuuuauagaaaggaucagugggagacccuucuucuccacaauuucccaugauccuaaguuaauagagacu

SEQ ID NO: 4172425 - RNA, 90 nt, Human
agcuuuauucagucaauacagauggcaugugaagauguaauaugcuuuuuuacauuuucauauggguuauuuguaaauaacuauauugcu

SEQ ID NO: 4172426 - RNA, 57 nt, Human
agcuuucccuauuuuaagauuuuuugaggccccuuggaucucuggaaggagaaagcu

SEQ ID NO: 4172427 - RNA, 62 nt, Human
agccauucauugugcucucagauucuguaggucagaguccaagugggacagcaaggauggcu

SEQ ID NO: 4172428 - RNA, 71 nt, Human
agcccaacccuggguucccgcagcaccaccuucucucucagguugugagcuccaggaagccagggauggcu

SEQ ID NO: 4172429 - RNA, 74 nt, Human
agcccacacugggucuggccacaggaaguagaguacccugccuuuucuuccugaaagucaggcugcaaaggguu

SEQ ID NO: 4172430 - RNA, 67 nt, Human
agcccacagaugucuccuuucugcuucccccagaaggccagacaggaccacaucuccuccgugggcu

SEQ ID NO: 4172431 - RNA, 79 nt, Human
agcccacuguuacucugagaggauccugcccgggccuggaguucagggagggcuccucuaaggacaugacguuggagcu

SEQ ID NO: 4172432 - RNA, 79 nt, Human
agcccagcaucuaaacugugauaccguugauacauggcacuuccaugguauuagaggcaacacauuuggaaagcaagcu

SEQ ID NO: 4172433 - RNA, 73 nt, Human
agcccaggagccuuuggaggguuucaaacagagucuggagggugucugacugacuuuucaaaauguuccggcu

SEQ ID NO: 4172434 - RNA, 62 nt, Human
agcccaggucucaaaguacagggcugugagugaugacuguaccugugcuaucagcuuggguu

SEQ ID NO: 4172435 - RNA, 56 nt, Human
agcccagguuugaguuucugggaacaucccagagcccucugcaaugccucagggcu

SEQ ID NO: 4172436 - RNA, 79 nt, Human
agcccaucuucccuuuuuaugucuucagcacuuauugacaaaagcaaaguugagaauggcaaagagggauuguucugcu

SEQ ID NO: 4172437 - RNA, 77 nt, Human
agccccagcggggagcaccugcuucucuugggcaauuacccuugagaggccagaaggcgcaccccgcgcaaaggguu

SEQ ID NO: 4172438 - RNA, 57 nt, Human
agccccaggcccggacgccucuaggaucggacccgcgcgccccggaugcuuggggcu

SEQ ID NO: 4172439 - RNA, 72 nt, Human
agcccccaaaucucaaaggcuuagcaucucacauccaauguggaguugccagugguugggagggugggggcu

SEQ ID NO: 4172440 - RNA, 82 nt, Human
agccccugccccauuccugccaucugaggguccagccuggaagccaaggucugucuuuggauuguugcgggggguagggguu

SEQ ID NO: 4172441 - RNA, 61 nt, Human
agcccgagugguucacccucacagucucucuguuagagaagugaguugugacuaugggguu

SEQ ID NO: 4172442 - RNA, 75 nt, Human
agcccggcagauggagagcccgagacauccuguaucuccggauaaggcuaggggcccucuccccgcacccgggcu

SEQ ID NO: 4172443 - RNA, 85 nt, Human
agcccucaagucccuugaagagucuuucuuucccccuucuucuuagaagggcugaaacacacuuuaaguuaacuuaggaaugguu

SEQ ID NO: 4172444 - RNA, 66 nt, Human
agcccucaucacugagcccuguagauucaguuuccacuucacaggaaacacagggaucagaggguu

SEQ ID NO: 4172445 - RNA, 60 nt, Human
agcccucccagugccuccagagcagcaggggaauguggugggguggguaagggagaugcu

SEQ ID NO: 4172446 - RNA, 103 nt, Human
agcccuccgcaauuaucuuaagggguccagaauauuugggaaagaugucauauuacuaucuuucccaaauauucugggccccuuaaaauaauugcagagggcu

SEQ ID NO: 4172447 - RNA, 78 nt, Human
agcccucucuaaacaaaucauucugaccuugggccaaaccuaucacugugauucuguauggauuccaucugaggugcu

SEQ ID NO: 4172448 - RNA, 118 nt, Human
agcccucugggggcagugggcugggggugggagaggcagcucuucugaauggggugagcaggucuggcuucucggcuuugggcugcacucucccugcccagcccagccgccagcggcu

SEQ ID NO: 4172449 - RNA, 128 nt, Human
agcccugacaggugccuuaccauguacucuuuuguucauuuggaugcuggcagccgagugcuccaugugccuggcacuggagauuccugugagugugaaaaagacauggccccugcccuuauggggcu

SEQ ID NO: 4172450 - RNA, 99 nt, Human
agcccugagcccuuuugcuccugcuucugccuugagguccucagcucugcaugcacggucgguccuagggcccggggcagcccaggugagggggcggcu

SEQ ID NO: 4172451 - RNA, 120 nt, Human
agcccugccgugagcgaggcggcgcaggaggugcauuccagauguuacugaaaggcugugagguagcugacucagaugcagcuggauuugaguccuggcagcaccacuuacuggcuggcu

SEQ ID NO: 4172452 - RNA, 84 nt, Human
agcccugcuugucaaaaagacuuauucacuaguuuccaucaguuuaagcauuaagaauaaugucuuuggcuugaccagcaagcu

SEQ ID NO: 4172453 - RNA, 66 nt, Human
agcccuggggauucugacacggagugggcuggaagucuccauucaaaugucaaauccaccaguacu

SEQ ID NO: 4172454 - RNA, 60 nt, Human
agcccuggggugcagaaccauggaaaugauaauggaugcuauugguggugaccccaggcu

SEQ ID NO: 4172455 - RNA, 94 nt, Human
agccgcuccgagcgucgggccccgcgcccuggcccuccuggguguagucccgguccugccucugcggggcccgagcccgcccacggcgccggcu

SEQ ID NO: 4172456 - RNA, 59 nt, Human
agccgcucuuggcuuugcccagcaccgagaaggcagccugggcagauggcaguguggcu

SEQ ID NO: 4172457 - RNA, 55 nt, Human
agccgggggucaggccucccaggacugucaagcugggcugcuugagucccuggcu

SEQ ID NO: 4172458 - RNA, 119 nt, Human
agccgguccuggcuuagcacauggucuggcuauuguauuggcuuagcacaugguuuggcuauuguauuagcacaauacaauugucugguuauuguauuggcuuagcacaugaucugguu

SEQ ID NO: 4172459 - RNA, 82 nt, Human
agccguuuccagugaguuuggggaaaguucuugaaaguaacaauaaaguuauuuacaacucuucucuuccugggaaaaaguu

SEQ ID NO: 4172460 - RNA, 86 nt, Human
agccuaauuggguuuacuugugccuuggcuuaaggucuagaauauaauaaacuuaaaggucugaacacagugagguuaauuaugcu

SEQ ID NO: 4172461 - RNA, 62 nt, Human
agccuaggccucuggccaaagggcuuggaccaaaguaucugaguccaggaggaggccagguu

SEQ ID NO: 4172462 - RNA, 121 nt, Human
agccuauggaaaaauuggaaggauauuuauuaggaggugaggcucugugaguuacuccuauccuaacugaacacacacaucuuaauaaucuaucuucauucauccaaauuccucauaggcu

SEQ ID NO: 4172463 - RNA, 86 nt, Human
agccuauuuacuugaucuauacccaucaugauuuaaguaauggaaaacuguuuaaaugauuuugggugagcaaguuuaaagugguu

SEQ ID NO: 4172464 - RNA, 60 nt, Human
agccucaacagggugaagauguagguuugaugcaaugccuaucaaaauccuauugagguu

SEQ ID NO: 4172465 - RNA, 65 nt, Human
agccucacagaacaagccugguggagggguaagaaucucuuuuuagauuguuugugaaauucgcu

SEQ ID NO: 4172466 - RNA, 74 nt, Human
agccucaguuucuucauauuguaggauggggaugacuauaccugccuuacaguguugagggaauuaaaugagcu

SEQ ID NO: 4172467 - RNA, 71 nt, Human
agccucaugcccaaugucacaauuuuugaacagauggccuccuuccuuccuguuuacugacaugcaaggcu

SEQ ID NO: 4172468 - RNA, 109 nt, Human
agccuccagugagugcugcggugaccugauuuccaguugcugggugcuugcuuugggcaaguguaccuccacgauugaaaucuucccuccaccccgagcuccugaggcu

SEQ ID NO: 4172469 - RNA, 65 nt, Human
agccucccgaggaauuuuuauaagaucugaucuaaucaugaauuuguuuaaaaauccuucuggcu

SEQ ID NO: 4172470 - RNA, 65 nt, Human
agccucucccucauuggguuccauuucucagcugggaaaacugagaccgaaagggguaggggacu

SEQ ID NO: 4172471 - RNA, 61 nt, Human
agccucugcuggcccuggcacuugcucccagcuagguccugcccaguggccagcaaaggcu

SEQ ID NO: 4172472 - RNA, 58 nt, Human
agccugaaaagagaauccaagucuuggacugacacugguucaaguugggucucuggcu

SEQ ID NO: 4172473 - RNA, 83 nt, Human
agcauauuuuucaagucuuuugcuaagaguaaugccauggagcagccucccaucauucuuguuaauaggacugucuguguguu

SEQ ID NO: 4172474 - RNA, 129 nt, Human
agcaucagcauuguuggaaauguuagagaggaaaucuuaggccccaaccuggacuuaucaaaucagaaacuguggggugggucugauguaucuagccuuuaacaaaccuuucagaugauucugaugcuu

SEQ ID NO: 4172475 - RNA, 82 nt, Human
agcaucaguaacuccuauuugguagauggaagagaaguuaaaugcuuuaccuaaagucauacaaggugggagggcuacugcu

SEQ ID NO: 4172476 - RNA, 58 nt, Human
agcauccaggccagguugggcaggguuuaauaagcgcugggccuuucaccuggaugcu

SEQ ID NO: 4172477 - RNA, 68 nt, Human
agcaucugaggaggaaacauccaaagcuaguuaccugaagcucagcuuucucuucuuuagaaagugcu

SEQ ID NO: 4172478 - RNA, 74 nt, Human
agcaucugaugcaauguaagucuugguuauauacucugauauguuuccacagauauuuauuuagucagaaugcu

SEQ ID NO: 4172479 - RNA, 82 nt, Human
agcaucuuaaauguuuugcauuaguuuucuagaacagacucuuagaaguucuagaaauaaguugaagaccauuuugaugacu

SEQ ID NO: 4172480 - RNA, 67 nt, Human
agcaucuuaguuacuacugugggacuagcaucuuguugggcuaacagaaaagaacugaguuugugcu

SEQ ID NO: 4172481 - RNA, 61 nt, Human
agcaugacagcacugcugcuguuaaucuugauuaccuggcugagguaguguuugucaaguu

SEQ ID NO: 4172482 - RNA, 69 nt, Human
agcaugcuguagcugugacccaaguaccacuucugagaagugccacagggccacauguaaacagaugcu

SEQ ID NO: 4172483 - RNA, 80 nt, Human
agcauguaaaggucuaugacagaaagacaaguuuucuauuuacuagaaggcagguauugaugccacagccuuuggauguu

SEQ ID NO: 4172484 - RNA, 61 nt, Human
agcaugucuuucuugugucccaagagagaacuguuggauguggcagaggagaugacuggcu

SEQ ID NO: 4172485 - RNA, 65 nt, Human
agcaugugugccugagugauggacuugguauuuacaccagccacgcugauaagugcacauguguu

SEQ ID NO: 4172486 - RNA, 129 nt, Human
agcauuagaggaaucaaacaaacaaggucuauauuuuugcauaggguguuuuacguucaauacuacaauauuuauguuuggcacuauucacuccaugggaaaauauaggcugugugucuuuuauuugcu

SEQ ID NO: 4172487 - RNA, 94 nt, Human
agcauuaucuggaaaaggggaauggguagacuguugaauucaggcaccugaccucauguucacuucguaaaccccucccauuuccaauguugcu

SEQ ID NO: 4172488 - RNA, 57 nt, Human
agcauuauguccaugcuaaauugugcuguaaaugauaugguauggaacauaugugcu

SEQ ID NO: 4172489 - RNA, 130 nt, Human
agcauuuacuuagagaauugcaauccuuaaacuguucgguguggucucauagaccagcucaaagacaugacuugucuggcagaucaugcaaccucaguucucuaagcuuucauuucuuucauuguaaacu

SEQ ID NO: 4172490 - RNA, 85 nt, Human
agcggcuagcuggucaguuuuuaacuuagcuguaacgaaauaaggcccagagaaguuuaaucauuagaccauagagucagcugcu

SEQ ID NO: 4172491 - RNA, 71 nt, Human
agcgggagccugaacagcucauucagcacuaagaaaacugcauuugcagaauggcuuuuauggcucaggcu

SEQ ID NO: 4172492 - RNA, 63 nt, Human
agcggguccauauuccuguggcuccuucuccagauucuuugcccaccuggauaugacccagcu

SEQ ID NO: 4172493 - RNA, 69 nt, Human
agcggugaguagaauguuucuggauggucaaaggagaaagggauuuucucagcuacgcuuucaccagcu

SEQ ID NO: 4172494 - RNA, 62 nt, Human
agcggugggaauuucaagaccaaauguuaaaacuuaaaacagccuugccuguuccuacagcu

SEQ ID NO: 4172495 - RNA, 60 nt, Human
agcgucccugacuuucaccuggcaucagcaaaaugguaaauggagaaagcagggaauguu

SEQ ID NO: 4172496 - RNA, 116 nt, Human
agcgucucugccuuagaacauuccuuuucuucuuuaugcagccugaaaaaccaggaguuaaaaaugccuccauggagauugaaaaggguaauaauguugggaaacagaguuaugcu

SEQ ID NO: 4172497 - RNA, 83 nt, Human
agcgugcaggugccggcggccgccuuuuugggcuccgggacccccgggagugggagcggcagucggggacgccucaacucguu

SEQ ID NO: 4172498 - RNA, 72 nt, Human
agcguggggggagcacagcagagcauggcuuggguuuuuacuaccaguaauugcuugugcugucccuguccu

SEQ ID NO: 4172499 - RNA, 58 nt, Human
agcgugugugcgggucuucuuucaaaauaguggggcauuugaaacccgcgcugcagcu

SEQ ID NO: 4172500 - RNA, 68 nt, Human
agcguuguccuccagguuugugcacacugagccagugaggcgcuugcagggagucuggaggaagcguu

SEQ ID NO: 4172501 - RNA, 83 nt, Human
agcuaaaaaaccagcuggaaacaaauagagugaacaauauggauuauguauuuuuuuaguuuuuaguuuuuggucauguggcu

SEQ ID NO: 4172502 - RNA, 76 nt, Human
agcuaaaaggugugcccuguuaaaugcacaguaguaacuugacugcucuguguugucagaggcaccaccugaaguu

SEQ ID NO: 4172503 - RNA, 90 nt, Human
agcuaaacuacauuucgaagacaagucaggcggauuucuagauuaaauuccccuguccacugcugugugcuucaccgaaugugguaagcu

SEQ ID NO: 4172504 - RNA, 64 nt, Human
agcuaaagccaugcuuagugaaaaauguauacuucaaaugcauauuuuauaaagauggaaagcu

SEQ ID NO: 4172505 - RNA, 64 nt, Human
agcuaacauggaggaaaaaguuacuaagaugaaaaaaauuaggaacaaaccucagauguugguu

SEQ ID NO: 4172506 - RNA, 70 nt, Human
agcuaacuguaaugaauuguucaugacuugccaauugacaucaggaucagaaugauuuuugcagucugcu

SEQ ID NO: 4172507 - RNA, 55 nt, Human
agcuaaugggagacccuuucacugcauuaguuuugacagaggucuuuuaauagcu

SEQ ID NO: 4172508 - RNA, 65 nt, Human
agcuaccuggcuuaucacugucuugacuucgaucaccuggccaacguagugggugccagguugcu

SEQ ID NO: 4172509 - RNA, 64 nt, Human
agcuagagucaaggggcagauucagucuuuugugaaacuaguggaaggguuucuugacuuugcu

SEQ ID NO: 4172510 - RNA, 69 nt, Human
agcuagcauaugaggcagggccaccucccuuccagaccucgaggccuggagcuccugcccauccuggcu

SEQ ID NO: 4172511 - RNA, 74 nt, Human
agcuaggguggauauuuguaaaauucugugucuuggcucaaaauguuaagacugcuacaaaaaucuacuaagcu

SEQ ID NO: 4172512 - RNA, 83 nt, Human
agcuaguccccagaaugcaaaugcuucuacuuggaauguucuuugacucaacaaggcagcaucugcauauugggagaccugcu

SEQ ID NO: 4172513 - RNA, 112 nt, Human
agcuauaccucagaugcuguuggccuuggcagugagaagaguugauaaaagucaguaaguccauucuuccggaacuugccagggaagaccuagucuucaaccaaguuuggcu

SEQ ID NO: 4172514 - RNA, 61 nt, Human
agcuauagcuggaucuuaaguggcauucugagaaugaggaacucaauuuucugcuguagcu

SEQ ID NO: 4172515 - RNA, 76 nt, Human
agcuaugauauugauuuauaaggcccuucuuuuguuaucguaacaguggggucuuaauagaacauaggucaugguu

SEQ ID NO: 4172516 - RNA, 65 nt, Human
agcuaugucaaacacaacaccagugguuuuauuuacagccaggaaaccaguguguuucacgugcu

SEQ ID NO: 4172517 - RNA, 90 nt, Human
agcuauucuaacucucaaaagggcuggcuuucccauacauacaaagaagaaaaugcugugcuugcaugagugucugaaucaagaaaagcu

SEQ ID NO: 4172518 - RNA, 64 nt, Human
agcuauugggauuaucacauguagacuugugacuaaaguaaauaugcauguauccuuaucagcu

SEQ ID NO: 4172519 - RNA, 65 nt, Human
agcuauuuugcagggccagggcuauggaauuuuccccacuuccugucucugcccuacagaaagcu

SEQ ID NO: 4172520 - RNA, 61 nt, Human
agcucaaggguuaagaucaagcuuugucagaagacagagcuaaauuucaaucccaggugcu

SEQ ID NO: 4172521 - RNA, 83 nt, Human
agcucacagcugcaggcuguaauagguuuccagagaccacagcccuaugcuuuugaaaucuuccacagcccaagcuccaggcu

SEQ ID NO: 4172522 - RNA, 78 nt, Human
agcucacaucuauuucugcuaauaacaaucccacugcuaauuaugggaugugguaguuauagugauaagagaggagcu

SEQ ID NO: 4172523 - RNA, 130 nt, Human
agcucaguaacuggcuucucagaacuugucaauuauuuuccauauucugugcugcacaaguaugacuucauaaaggcaauuuaacaaauagaaaaucuggauuggcuagaacauuugucaauacuggauu

SEQ ID NO: 4172524 - RNA, 60 nt, Human
agcucaguggcucaguggguauucaucauucagcagaugcuuacuccgcagcauugugcu

SEQ ID NO: 4172525 - RNA, 130 nt, Human
agcucauuaguggccuaguugcucagcuggcucagguucuuguuucaaacagaccccugcacugcugggcgucuuucuggaaacaaacaacccuacuguagcuuugggguuccauggcuuuuuguguuuu

SEQ ID NO: 4172526 - RNA, 59 nt, Human
agcucauuauuauccuagccauguggaucccccauugagcaauuaggaaauaaagaguu

SEQ ID NO: 4172527 - RNA, 70 nt, Human
agcucauugaaguauuuaagcuccccuugauuagauguuauaaugaucagacagagaaguacaaugagcu

SEQ ID NO: 4172528 - RNA, 83 nt, Human
agcuccaaaauaaauugaauaauauuuuaaaaucaugucauuuccauuuuagagcagugguuuuagaguauauucagggagcu

SEQ ID NO: 4172529 - RNA, 55 nt, Human
agcuccaggccuugggccccgggcauggucccaggcccaucucuugcucuggguu

SEQ ID NO: 4172530 - RNA, 59 nt, Human
agcucccagccuccuccgucccacccucacccgggccugguggagaggcuggcgggacu

SEQ ID NO: 4172531 - RNA, 99 nt, Human
agcucccaucuggcuuuuuugagaggcucacucuuggaacccagcuacucugcuaugaggaagccaaacagcuacacagaaaggccagauguaggugcu

SEQ ID NO: 4172532 - RNA, 82 nt, Human
agcucccgccucuguugucugucuugcuguaucacccucgggccuuaucagcugaaaaacaggcagcaaaggaacggcagcu

SEQ ID NO: 4172533 - RNA, 80 nt, Human
agcuccuauccuggugccuccaacagcccauccuagagggaccuuuuaguauugggcucuggaggcugaaagaaguggcu

SEQ ID NO: 4172534 - RNA, 87 nt, Human
agcuccuggagggcaagucuugcauccacugcuuugcuggcaacccgacugguaagcuucuggaaggcaaggcuugcauccagugcu

SEQ ID NO: 4172535 - RNA, 67 nt, Human
agcuccuugccguccuuacuccagcggaugaauggguccgggaaagccgaaaugcggcaagugagcu

SEQ ID NO: 4172536 - RNA, 78 nt, Human
agcucguggucugcacaccgccaggcugacuccuguucccaggcagugggugugugugguguucgcagggcacuggcu

SEQ ID NO: 4172537 - RNA, 56 nt, Human
agcucuagggggcgccguucauauuguaguuuauguaaacaucacccccuggaguu

SEQ ID NO: 4172538 - RNA, 101 nt, Human
agcucucuccaauaucuuccugcuaacaaaucucugucucaaaguguuucaugggaaaaccaaccuaaggcaguggaugucaggaauggucagaggaagcu

SEQ ID NO: 4172539 - RNA, 56 nt, Human
agcucucuugacuucaguuuccucaucugaaaaaugaggagcugaauuagaggguu

SEQ ID NO: 4172540 - RNA, 59 nt, Human
agcucugcaggagcaaagccucugcucgucagagauagagcugcuuugccugcucuguu

SEQ ID NO: 4172541 - RNA, 90 nt, Human
agcucuggaugugucaucuuuccugccauugcccagugauagacuaugcaacauucucuggaauggcaaugggaagucccacccucagcu

SEQ ID NO: 4172542 - RNA, 65 nt, Human
agcucuggcuacagaauuggcccuguuuauggguuggagcagguuccaggcacuguggcugggcu

SEQ ID NO: 4172543 - RNA, 72 nt, Human
agcucuguccucacaggcaucucaucaggcuccugacccucagaguugcagcgucuaagugaguucagaccu

SEQ ID NO: 4172544 - RNA, 63 nt, Human
agcucuguguuugacaggcggucucccuuaugguuaguggaucccucuuuucuagcacuugcu

SEQ ID NO: 4172545 - RNA, 63 nt, Human
agcucuucagaucucagauggucugcucagcugagccgugcucucugaggugcuggcagaguu

SEQ ID NO: 4172546 - RNA, 80 nt, Human
agcucuuccucaagauaaagccaccagaagcuuccagcucaggaagaguucugcaauuguguuuauguaaaggaggaucu

SEQ ID NO: 4172547 - RNA, 55 nt, Human
aggaggguaagggggaauauagguacuugugcaucugugaccuuucuuuccuccu

SEQ ID NO: 4172548 - RNA, 59 nt, Human
aggagguaguucuacaacuuggagcaagacauccauggaaguuacgcuauuacucuccu

SEQ ID NO: 4172549 - RNA, 69 nt, Human
aggaggucauuuugccuauuagaaugccuggaauuaagaagcuuucuaugaagguaagauguacgucuu

SEQ ID NO: 4172550 - RNA, 58 nt, Human
aggaggugguggcagugacaauuccucacuggauuuggaauguguuugaucaccaacu

SEQ ID NO: 4172551 - RNA, 93 nt, Human
aggaguagaaacaccgccuaacucugaaagagaguacauacaguuuagaaagcaagauugacuaaaugugcuuauuuuuaaaaggucacuccu

SEQ ID NO: 4172552 - RNA, 65 nt, Human
aggagucucaaagucgaaugaaacuguguuauucagcucuguauuauucacucugaagccauccu

SEQ ID NO: 4172553 - RNA, 70 nt, Human
aggagucuggagguacauaaugagagggucugggacugguucagaagcucagugaugccuccaggggccu

SEQ ID NO: 4172554 - RNA, 72 nt, Human
aggagugauauaacuauauuauuagaaaaaaauguauggaguuagcugauaauggcuugugguguuauuccu

SEQ ID NO: 4172555 - RNA, 81 nt, Human
aggagugcucuugccacuggccacagggccuggauuuggggaggaagagcaggguccagggccaguggcugagcacggccu

SEQ ID NO: 4172556 - RNA, 78 nt, Human
aggaguggcagguuggguucuuauggaaguggguaaggaaucagaacuauggaaacucaacauuuguuccucauuccu

SEQ ID NO: 4172557 - RNA, 75 nt, Human
aggaguguuauucuucaggacaugaauuucauuuuuauguguucccacuuucaaguuuucagaauagccacucuu

SEQ ID NO: 4172558 - RNA, 73 nt, Human
aggauaaaggucaagcuggacucagguguauuuuccuuauguuauagcugucuaugaauuggcuucaaauccu

SEQ ID NO: 4172559 - RNA, 126 nt, Human
aggauaaauguaauuuuuaacuuuuuagaauauuuucuguucaggauggcugacuuugugauuuguccaaauuaggcaaaaagggcagcuagcuguagaaagagcuaaacaaguagaagaguuccu

SEQ ID NO: 4172560 - RNA, 58 nt, Human
aggauaacaguagccuuauguggucuccccaagacugauaccauguugcuguugaccu

SEQ ID NO: 4172561 - RNA, 71 nt, Human
aggauagggcuggcaaacacuuuuaaaugucacuaaguaauuucaggaaggagcuggccugccacuguccu

SEQ ID NO: 4172562 - RNA, 62 nt, Human
aggauagguuuccugaggauggagaugcagaaauaguugacuuugccuucacgaagcauccu

SEQ ID NO: 4172563 - RNA, 103 nt, Human
aggauagugacagcucugaggcuuuucucuaaauaguggucaguuuacaaagccuaugucagccacugagaccuuuuggaggagugucauccagcuuucuccu

SEQ ID NO: 4172564 - RNA, 62 nt, Human
aggauaguugcaucaugucaguuguaucauguuaggcacaacuauuaccauguuauugucuu

SEQ ID NO: 4172565 - RNA, 76 nt, Human
aggauaugaaguuuagaacuauaagagugaggaaucuucucuuucugacucuugcaguucuaaacuuuauacaccu

SEQ ID NO: 4172566 - RNA, 62 nt, Human
aggauauuguuguauuuagcacaucuguuuuucagaugcugaagcugaggcaacaaaaugcu

SEQ ID NO: 4172567 - RNA, 68 nt, Human
aggaucaaguugguugagcuuuuuacaagauuuuccuuauuuuaccuggcauuugccaaagugauccu

SEQ ID NO: 4172568 - RNA, 58 nt, Human
aggaucagugaauacucaggguccuaaaccagggaugcccugggcccuuccugguucu

SEQ ID NO: 4172569 - RNA, 80 nt, Human
aggauccaguggaguuuuuauacccaguaugucuaagaaucaugugggcuuggguacuggacuccacuccaggggguucu

SEQ ID NO: 4172570 - RNA, 130 nt, Human
aggaucccuugagggaagggcaagugcaccaggcccagcaucuccauggcuuuggaguaucacgcaggacccagcagccagaaugaggagcuugcuguuuaaaaugcagauucaccucugaagggauucu

SEQ ID NO: 4172571 - RNA, 84 nt, Human
aggaucucugacaacaccucuacucuccauggcugucaugacugaggccaacuagggagauggaaaguggugucuagagguccu

SEQ ID NO: 4172572 - RNA, 99 nt, Human
aggaugacaacaccauucuccaacuagagcuccccaguucucacucggcagugggagcacccugaggagcuuccuaguggaaagaggaaaaaucauuuu

SEQ ID NO: 4172573 - RNA, 74 nt, Human
aggaugacagggaaacauugaaguguccuuaguagaggagugacauuaucagguuuguuuucuagcuuaauucu

SEQ ID NO: 4172574 - RNA, 67 nt, Human
aggaugauugacugauggaggcucugguuggagaggccucagccaggucuaagcaucagccacaccu

SEQ ID NO: 4172575 - RNA, 70 nt, Human
aggaugcagcaagaaggcacugucugugaggaagugggcucucaccagacagcaaaucugcuugcaucuu

SEQ ID NO: 4172576 - RNA, 75 nt, Human
aggaugcauccugagagcagcugcuuuggaggaagguucucccugaccugcucguucuuccaugggauucaucuu

SEQ ID NO: 4172577 - RNA, 57 nt, Human
aggucccuaacagcuuuuuaaagucacggauagacuucggaauaugauaagggaccu

SEQ ID NO: 4172578 - RNA, 58 nt, Human
aggucccuagagugggaugacuugguacagcugccccaggucaauauucaggggaccu

SEQ ID NO: 4172579 - RNA, 86 nt, Human
agguccucagucacuguuuccuguacuggacagaaccacauuuacuaggcugugcaucaagagaaaacagugguguuggggcaccu

SEQ ID NO: 4172580 - RNA, 65 nt, Human
aggucgaguuucggggcuacuuugaaaaccacaugaaauuugguuuguaguacucugagugaccu

SEQ ID NO: 4172581 - RNA, 80 nt, Human
aggucguuuuccagagcugcagguaaaaugcuuccccacugcuucugaggcuuuuguuucagcucugcuacuaguggccu

SEQ ID NO: 4172582 - RNA, 70 nt, Human
aggucuacuucuguggcucuaagagacuugucucucauggcuucucucggagcuaccggaaguugggccu

SEQ ID NO: 4172583 - RNA, 65 nt, Human
aggucuaguugcuucuguuccauucuacauaguuuaaauguauccugacagaaauagcugugccu

SEQ ID NO: 4172584 - RNA, 63 nt, Human
aggucucaaaguacuuugguuauugugguacaucagaaugauagcuaguauuuacugagaucu

SEQ ID NO: 4172585 - RNA, 130 nt, Human
aggucucagaaauaaguggaauugauacauagauagacuguaugagauccucuagagaaacuggguaaugcagaggcauuuauugauguauacaaaauaauucacuugaauuuaacucugguaauagccu

SEQ ID NO: 4172586 - RNA, 88 nt, Human
aggucucaguuggcagugaggcaguggcugagaccaggggcucuucuguguagcccaggccuggcacugccuuucugccucgagaccu

SEQ ID NO: 4172587 - RNA, 66 nt, Human
aggucuccuccucucccaguucuagcguuuacucucuuaugugaagaacagaagggaggaaggccu

SEQ ID NO: 4172588 - RNA, 64 nt, Human
aggucuccuggaggcaaaugagcacauuuguuaaaauggaguauuacguuuguaccagaaaccu

SEQ ID NO: 4172589 - RNA, 75 nt, Human
aggucucuccguaggugccugcacgacccaaacacagcuguguuugucuuaauuaggcaucgagugguagcaccu

SEQ ID NO: 4172590 - RNA, 57 nt, Human
aggucucugcccacacaggcuuccaacuuccauggcauaucuccuggguaggggccu

SEQ ID NO: 4172591 - RNA, 70 nt, Human
aggucucuggcuguuucuccuuugucuauugcauuuuuccuggaguugacgagaugagaaauccugacuu

SEQ ID NO: 4172592 - RNA, 87 nt, Human
aggucugauugcuagggagagggaggcaucaugaauccagcccagcccugggcuuaggaaugucccuucccacagcugucacggccu

SEQ ID NO: 4172593 - RNA, 95 nt, Human
aggucugggaggauagugaggugaggcuguugagccccagcaagucucuuuuagggacucugcuugcccaauggaaaccuacugcccccaaacuu

SEQ ID NO: 4172594 - RNA, 61 nt, Human
aggucugggcaccacuggcugccuuccucuuuguucccugggcccugugaugucuugaccu

SEQ ID NO: 4172595 - RNA, 61 nt, Human
aggucuuaggaccucagcugugaguguggggaccugcacucugcucaaaguccugaggccu

SEQ ID NO: 4172596 - RNA, 89 nt, Human
aggucuugacagugagaguguuuggaaauagaaagggguucuuuugguggcauuuucucuuuuguuccuugacauuuuccuguggaucu

SEQ ID NO: 4172597 - RNA, 91 nt, Human
aggugaaacccagaccuccucuuccagccuggaccgugacugccacaccggcagcucugugcaggccuggggagagagaacuaauuuccuu

SEQ ID NO: 4172598 - RNA, 60 nt, Human
aggugaagaaguaaggucauuaauguaaucuuucauacuguaacacuugcuuuuugacuu

SEQ ID NO: 4172599 - RNA, 59 nt, Human
aggugaaguugaggaggcagaaagacauucuugucagucccuucucugugcuucugcuu

SEQ ID NO: 4172600 - RNA, 56 nt, Human
aggugacaggcugugauggccgggaguggacauuccuuguaagcaggcuugaaucu

SEQ ID NO: 4172601 - RNA, 57 nt, Human
aggugaggcugcugaauggcaugaggagaugcucaagccuuguggaggcucucauuu

SEQ ID NO: 4172602 - RNA, 58 nt, Human
aggugagggggcugaucauuuacugggcuaaggccuagcauugaucagccugcucccu

SEQ ID NO: 4172603 - RNA, 80 nt, Human
aggugauuagaucaugagagcaggcuccccccuugcuguucucgugauggugagugaguucucaugaaaucuaguuguuu

SEQ ID NO: 4172604 - RNA, 76 nt, Human
aggugauuucuguucuuggggaucugaaggcaaggucugaacuaagcaccugcccacuucccaugacaugacaccu

SEQ ID NO: 4172605 - RNA, 88 nt, Human
aggugcaguauuuucugugauucugagguuggcugaauagaaucguagcauguagcacaggaauccacagucuuguaccucuguaccu

SEQ ID NO: 4172606 - RNA, 116 nt, Human
aggugccggagagucaaggaggugggccucugacuucucuuuauuggcagucugugugggguggccaggacugaggggucagagggcccaauuccaagucaacuccuguaggcccu

SEQ ID NO: 4172607 - RNA, 88 nt, Human
aggugcgguauuuucugugauucugagguuggcugaauagaaucguagcauguagcacaggaauccacagucuuguaccucuguaccu

SEQ ID NO: 4172608 - RNA, 96 nt, Human
aggugcuagaauccaacuuaaucucugcuagccaagcuuuguguccacagagcugguucuguccagggaauucuuugaauucucccagaggcaccu

SEQ ID NO: 4172609 - RNA, 97 nt, Human
aggugcuaugaagaaugugaauugguagcuuucugucucuagauugaacaguggugaccauucauucauuuguucaacaaacaucuauuuagcaucu

SEQ ID NO: 4172610 - RNA, 86 nt, Human
aggugcuggccaggccagugggcagcagugucucccaucuugccuguggcacuggguauucacugccgccaccugcccccagcccu

SEQ ID NO: 4172611 - RNA, 55 nt, Human
agguggagacccagagaaggcggccaauugcucaaagcugcucugggucucaucu

SEQ ID NO: 4172612 - RNA, 57 nt, Human
agguggcagaggacuccuccugcaggacuuggcgggugggagggcuagggccauucu

SEQ ID NO: 4172613 - RNA, 57 nt, Human
agguggcucacaccuguaaucccagcacuuugagaggccuaggcagguggaucacuu

SEQ ID NO: 4172614 - RNA, 68 nt, Human
agguggcuccccuauucucaucugacgcuggucuggcaagcaaguguuuuuggguagggugaguccuu

SEQ ID NO: 4172615 - RNA, 56 nt, Human
agguggcuccucccauggcuggcaguugaugcuggcuguuggcgaggagcucagcu

SEQ ID NO: 4172616 - RNA, 81 nt, Human
aggugggaggggaaugaaaugaaacagaacauaucagaaugcauuacaugugguaaggguauuauuucauccauuuuaucu

SEQ ID NO: 4172617 - RNA, 59 nt, Human
aggugggcauagcuagaauauuugauaccaaauauugucuaaccaugcugugcuagccu

SEQ ID NO: 4172618 - RNA, 61 nt, Human
agguggggcugggaaagauucccacugggacacuagacagguauuuuuuucagcgacaccu

SEQ ID NO: 4172619 - RNA, 70 nt, Human
aggugggugaguucaggcccacacacaggcucagggccuguaaguaguuugccugagcuaccucuugccu

SEQ ID NO: 4172620 - RNA, 57 nt, Human
agguggucucucauuugucagcagccugacugggcuacaaaguaugagaagaccccu

SEQ ID NO: 4172621 - RNA, 86 nt, Human
agguggugcuuuucugucugcaaaccuaggggccagggcccaucggaaugcucugccuccccuaguguuacugcugacacccaucu

SEQ ID NO: 4172622 - RNA, 118 nt, Human
aguauccuugugaaaccuugaaaggauuuggacauuuacaauagugaaaugggauguuagguaucaaaggaucagucgcuguagcuguuaaaaucaggauuuagggauuuaugaugcu

SEQ ID NO: 4172623 - RNA, 79 nt, Human
aguaucucagucucauuuugcucuucaauccuuuggccauagaucagccaaagagauuucuguaaaauguaaaggugcu

SEQ ID NO: 4172624 - RNA, 59 nt, Human
aguaugagcugcuagaugauuuaugaccaaaggucaaaucagcaagcagcuucccagcu

SEQ ID NO: 4172625 - RNA, 77 nt, Human
aguaugucucuaaaucuuaacaggcugaucauauauccucuauaucuccaagagaggcuguagguuucaggcauacu

SEQ ID NO: 4172626 - RNA, 63 nt, Human
aguaugugagguugguuuccagggccuagugguagcacuacuuuggggauuauuuuuacuacu

SEQ ID NO: 4172627 - RNA, 70 nt, Human
aguauguuacagaaagcaaagaugaguauuguuucucaaagccuuugcuuuauguauuuauacacauacu

SEQ ID NO: 4172628 - RNA, 103 nt, Human
aguauguuuuauuucuucuaauuauucuagucacauagcauuuaaucacaugaucccacuuuugucugcuuuguguuugaauagauaauggaaugaucguacu

SEQ ID NO: 4172629 - RNA, 85 nt, Human
aguauuauuaugcucuguuucacauuugaaaauuacuacuucaucuugguagugaaaugauaguguaaauacagccaaugaugcu

SEQ ID NO: 4172630 - RNA, 62 nt, Human
aguauucuugaguggcaacuagguggugggccaacaacccuagaauguacuuaauagaugcu

SEQ ID NO: 4172631 - RNA, 70 nt, Human
aguauugagacuuccaguauaugagaguguucaguagagacaguaaaucagaauacuggaaguaucagcu

SEQ ID NO: 4172632 - RNA, 76 nt, Human
aguauugagggcagugaugucaaacagugaauaaaguuauauaucuauguggugaucuuauuuuaaccucaauauu

SEQ ID NO: 4172633 - RNA, 83 nt, Human
aguauuguguauccuuauguaggucuauuugcuaucaauuuuuuucugagcacaauuacuuacaucuuaguggugcaaguacu

SEQ ID NO: 4172634 - RNA, 125 nt, Human
aguauuguuucgaaaugcauuguaaacauguuagauuccugaugaauuuaaaauugugugaugcuucuaaucauugugaucgucauggaguaaguaacugcaauguuuauuuuaaacaacuugcu

SEQ ID NO: 4172635 - RNA, 70 nt, Human
aggaugcugccgaggaugaaugacagcugcaagaagcaguccccagcccucagguccucagcagccuccu

SEQ ID NO: 4172636 - RNA, 63 nt, Human
aggauggaaagggguguuugcugaugguaccuucuaagggaacagcugcccuuuucacauguu

SEQ ID NO: 4172637 - RNA, 60 nt, Human
aggauggaauuagguagcaaguugaaggcauaaaacccaguuuccuccuauuuccacccu

SEQ ID NO: 4172638 - RNA, 69 nt, Human
aggauggcagagauuagugcccuuaaggaucuaaugaauccagguuccggggauaguguuucccaucuu

SEQ ID NO: 4172639 - RNA, 59 nt, Human
aggauggcagcaaguucuugggaggucuaucaccuggagucuucuaauugcuguuuccu

SEQ ID NO: 4172640 - RNA, 57 nt, Human
aggauggggaauugaccgcggaucuucaugugaagagcaucgguggagcccccaccu

SEQ ID NO: 4172641 - RNA, 72 nt, Human
aggaugggucagcuagaguccauuuaggaaugaaauguggacuugacccaaaauagcugucaugcucagccu

SEQ ID NO: 4172642 - RNA, 78 nt, Human
aggaugguggacggugaccaagcaucaccgagcccuuacuaggucucggguaccaugcuaggcacuuccaccggugcu

SEQ ID NO: 4172643 - RNA, 78 nt, Human
aggauguccagaaggguccccuguucugacagacuccacaccugaggaagcagaacaggagggcagaucugacaucuu

SEQ ID NO: 4172644 - RNA, 56 nt, Human
aggauguccuggguguuaggagcauauaaugguuuuaaccuaauaugagggguccu

SEQ ID NO: 4172645 - RNA, 83 nt, Human
aggaugucgcaaagucuggguggccuucaguccaugaaagagaacacaucuguucuaucucaggcugaggucaucugcauccu

SEQ ID NO: 4172646 - RNA, 78 nt, Human
aggaugugaaguagagcauuugguuauaguaauuucuaaguuaggcaguucuaaguuuaaauucuauuuuugcaucuu

SEQ ID NO: 4172647 - RNA, 70 nt, Human
aggaugugagccagccuggccugcucaccauggugggccuaauaucuaguguuaggcguauuuagguccu

SEQ ID NO: 4172648 - RNA, 60 nt, Human
aggauguguguaggcugguuaauuucgaagaugaaaaccuuuuccucccugccacaucuu

SEQ ID NO: 4172649 - RNA, 84 nt, Human
aggauuaaugaagcucuuagcagcacucuuugcauggaguaaugcucaguaaaugguugcuguuauuuuguuguuauuaccccu

SEQ ID NO: 4172650 - RNA, 64 nt, Human
aggauuacauguuucuuugcugcaggacuucucagagccuuaguaauguguuaauaugaaucuu

SEQ ID NO: 4172651 - RNA, 56 nt, Human
aggauuagagacuucucuaccucaguuuuaacugagaguuuuauggcuuuaauucu

SEQ ID NO: 4172652 - RNA, 62 nt, Human
aggauuagaugacuaaugagcugugacauccucugugacacagacauuguacaucuuguuuu

SEQ ID NO: 4172653 - RNA, 67 nt, Human
aggauuauaguaaacauuuguugagcucuguguguugggcacuguuccaagugcuuuacuuaauccu

SEQ ID NO: 4172654 - RNA, 59 nt, Human
aggauucauggugcagacaaagacaggcccaggcuucaagcuucuguucaugcauaccu

SEQ ID NO: 4172655 - RNA, 67 nt, Human
aggauucucugcagacuggagagaagacaaagaauauuccaucuuccagaaucucagagggcuuccu

SEQ ID NO: 4172656 - RNA, 86 nt, Human
aggauugcuugcaccaaagagguugaggccgcagugagcugugaucaugccacugcacuucagccugggaaacagagcaagauccu

SEQ ID NO: 4172657 - RNA, 70 nt, Human
aggauugucaaguugcuuaugcuggagucagcugggcugguuggcuucuuauaaugcaauagacaauucu

SEQ ID NO: 4172658 - RNA, 106 nt, Human
aggauugucuuugcuguauguccauggagagaggagcaaaggggaacugggaggcgauugucucccauguuagguguuucuguuucccaugcauuugacuauuccu

SEQ ID NO: 4172659 - RNA, 79 nt, Human
aggauuuccuccccagccccgcaggcucaccuggucuuugucacaaguugucucagggcagcuggaggaggcaaacccu

SEQ ID NO: 4172660 - RNA, 69 nt, Human
aggauuuugaaccagacagacuucuuaugaaagccaacacucuuuugucuguucagguuucagagaacu

SEQ ID NO: 4172661 - RNA, 80 nt, Human
aggcaaaacucuuuuucugcacacgugucccauuccuccucccuguaguuuggagagggcauuuuagaaaaagagucccu

SEQ ID NO: 4172662 - RNA, 72 nt, Human
aggcaaaauaauggucauuggugguuauuggauaguaauucauuaaugcauaaucaccauuaauaauugucu

SEQ ID NO: 4172663 - RNA, 63 nt, Human
aggcaaacugaugaaagauuuugagugucagacacacuucuguaguagaaucuguuauugccu

SEQ ID NO: 4172664 - RNA, 59 nt, Human
aggcaacaugggaaaauuaaccuauuaguuccauuaguagaguugaugguuuauugccu

SEQ ID NO: 4172665 - RNA, 55 nt, Human
aggcaacaugggccaggcagaaauggaauucuuugcuuucaggucccuuuugucu

SEQ ID NO: 4172666 - RNA, 88 nt, Human
aggcaacaugguagaauccaaggcaugcaaugucuucagguaaucagaaugccugugcucccauagcuucugugauuuuuuuaugccu

SEQ ID NO: 4172667 - RNA, 56 nt, Human
aggcaagaaagguuaaauucaaagcuaccugcacaaauuucagacccauuuugccu

SEQ ID NO: 4172668 - RNA, 65 nt, Human
aggcaagacuugaacucaagcagccugguucuggagacggugcugagcugcuguucauccugcuu

SEQ ID NO: 4172669 - RNA, 111 nt, Human
aggcaagcuaggugccuagggcacaaaauuuaaggaggugcucacuuccagggcaugcguaugcaaguuagugccuccuuaaauuuugcucccuuggggccugcuuugccu

SEQ ID NO: 4172670 - RNA, 62 nt, Human
aggcaaggugacucuggguucaaggcucaccagcuggugacccugggcaagucaccuaaccu

SEQ ID NO: 4172671 - RNA, 67 nt, Human
aggcaauauguucuuggaaaugaagcuuaagucaggucuucaggugacauucagagaacauuugcuu

SEQ ID NO: 4172672 - RNA, 81 nt, Human
aggcacaaugaauuggaaugguguuagaaagauuuucucuagggaagacuacauuaugacagcauuuuccaaaguguguuu

SEQ ID NO: 4172673 - RNA, 64 nt, Human
aggcacacuuauaauaaguauccaccucccagagcuuugugugaauugcuugugaagugugucu

SEQ ID NO: 4172674 - RNA, 57 nt, Human
aggcacaggucaaaucugacucaggaagaaaacuucuuacuaugauuugagccuccu

SEQ ID NO: 4172675 - RNA, 67 nt, Human
aggcaccauuuucuaaaaauaugacuagggugugaccuaagguuuuauucugugaagaugaguaacu

SEQ ID NO: 4172676 - RNA, 66 nt, Human
aggcaccggcagauuuggcaucuggugagggccuguuucucauagauggcaccuucuguguguccu

SEQ ID NO: 4172677 - RNA, 67 nt, Human
aggcacgaaguguugugugucaagugcaagagcugaaguucugcauuauacacaaccuaaguguccu

SEQ ID NO: 4172678 - RNA, 75 nt, Human
aggcacgcggcuuuccaguucugggcuggcugcugcagcuccccugcagacacuggccuccugaggcugcuguuu

SEQ ID NO: 4172679 - RNA, 59 nt, Human
aggcacugacucaagggagccaagggccaagcauagaaggcuuccuggaggcagugucu

SEQ ID NO: 4172680 - RNA, 71 nt, Human
aggcacugcuauuauuagacaauguguccuuccuucuaaggaaacccacgcugguggauaagcagugaccu

SEQ ID NO: 4172681 - RNA, 67 nt, Human
aggcacugcuucuaaguaggaaucacacugcaguggguuagugacacccugcucagaaauggugccu

SEQ ID NO: 4172682 - RNA, 69 nt, Human
aggcacugugcuucuuauauguuuucuuauuuaauucccaaguccuacaagggaagcacauuauugccu

SEQ ID NO: 4172683 - RNA, 55 nt, Human
aggcacuuguaauugcagucauacagauauuuguaugauuaucaacuuaaugccu

SEQ ID NO: 4172684 - RNA, 114 nt, Human
aggcagacagaaggggaagccacuagcuucggguccuccucacugguuccuuuccuuggagcagggaaacucacaggugcaggggcacuggaaguggcuaucugccuuccgccu

SEQ ID NO: 4172685 - RNA, 64 nt, Human
aggcagagaaaaaccagauaugccuggagauacagguaaggagucuguguucucucagcugucu

SEQ ID NO: 4172686 - RNA, 83 nt, Human
aggcagagaaagucuggcucuggaaggcaaagggcaguuguguucccuuugauguucagagcauggguuugguugaucugccu

SEQ ID NO: 4172687 - RNA, 65 nt, Human
aggcagagcuacaagaagacagugccacauuauuuucauuggaaucuauguacgcaucuaugccu

SEQ ID NO: 4172688 - RNA, 58 nt, Human
aggcagaggaaaaguaaauucuaggaucacaacucaugaguuaauuugaccccugccu

SEQ ID NO: 4172689 - RNA, 56 nt, Human
aggcagaggaaggguggauuugcucucugcuugagcuggaacauccaucuucuccu

SEQ ID NO: 4172690 - RNA, 72 nt, Human
aggcagagggacagugaggaauuugcccagggaggaccaagagaacugguuccucaugaguaccccuuaacu

SEQ ID NO: 4172691 - RNA, 62 nt, Human
aggcagagguagcuggaaccaggaacaaaggacugagucugggguuggguuaacuacugcuu

SEQ ID NO: 4172692 - RNA, 86 nt, Human
aggcagcccucauccuggacacccauuccuuggcuguacccaacagaccacugcuuucagggagccgugccagugaguagcugccu

SEQ ID NO: 4172693 - RNA, 58 nt, Human
aggcagcugaggucuggcgcccccuggcccccaguggaagcaaggauaaagcugcucu

SEQ ID NO: 4172694 - RNA, 55 nt, Human
aggcagcugucuccauggagguuucuuugucuccaaguucuaggaacugcugccu

SEQ ID NO: 4172695 - RNA, 59 nt, Human
aggcagcuuuuacuuaucuaugcugcccacgcuuaacauggaaaacugaaagcugaccu

SEQ ID NO: 4172696 - RNA, 129 nt, Human
aggcaggcagaacacagggaggagucugauguuggaagguucuggucaugguuuugcuacuaauuuaucacauaaccuugaauaaaccucuuuaucucuuagacccucuguuuucuucucuguuaaacu

SEQ ID NO: 4172697 - RNA, 59 nt, Human
aggcagguagaaggaucuuuaugcaguagcacuauaagauugccccauuuacacugccu

SEQ ID NO: 4172698 - RNA, 74 nt, Human
aggcagucacaaagugguuuuaagagguuccuuauaaggcacauuaaaaguagccaacacccuuuccauugcuu

SEQ ID NO: 4172699 - RNA, 96 nt, Human
aggccagacugcuacccuuagggaaguggucugggaacuugggauuuccgagugucccuaccauuuccuaacugguaagggugguuuacugggccu

SEQ ID NO: 4172700 - RNA, 65 nt, Human
aggccagaugucgggcuagaaguacaaucccauaucuuaugaauuuguagccuuuuaucuauccu

SEQ ID NO: 4172701 - RNA, 87 nt, Human
aggccagugacucugcccucugaccuaggacaaggaccugccuccguccucugagaacaccuggcguccaagggaacacguggaccu

SEQ ID NO: 4172702 - RNA, 64 nt, Human
aggccaguuuuuggagggaaacaucaauacuguugccauucaguucucuaugccaugcuggccu

SEQ ID NO: 4172703 - RNA, 61 nt, Human
aggccauaucuacucacuguccauuucaucugugggacacuugacgugagggacauagcuu

SEQ ID NO: 4172704 - RNA, 55 nt, Human
aggccaugggauuuccaauuggcugucaaaaaggaaaguucugagucccuggccu

SEQ ID NO: 4172705 - RNA, 91 nt, Human
aggccauuuaaauaucacuucuuuugugauucuucaguuacuucaggccaucuggauguauacaugcaggucacaggggaugcuauggcuu

SEQ ID NO: 4172706 - RNA, 86 nt, Human
aggccauuuucacuucuuuugugauucuucaguuacuucaggccauguaggcguauaggugcaggucacaagggaugugauggcuu

SEQ ID NO: 4172707 - RNA, 72 nt, Human
aggcccacuaagcugugugguucacucagcaucacguggcuaauaugauaugaagccacacuagcuuguccu

SEQ ID NO: 4172708 - RNA, 74 nt, Human
aggcccagagggcaaguguaguccaguagaaaaccuccaucuuggcuccuggagauaauuugcauugugggucu

SEQ ID NO: 4172709 - RNA, 77 nt, Human
aggcccagcagccucugguccucccucagcuccccucugcccuuguggcugggagugggagcaggggcucugggccu

SEQ ID NO: 4172710 - RNA, 102 nt, Human
aggcccagccuucucacccacccagccccacacggucuagcucugccugaaguaggugcuuggcucgugcacacagauggacggguggaugcggcugggccu

SEQ ID NO: 4172711 - RNA, 93 nt, Human
aggcccaggugaggagaaauggugggcugagucucaucggaaagcacuguuuccugggacucagucccauucagagucugucucccuggaccu

SEQ ID NO: 4172712 - RNA, 76 nt, Human
aggcccaucucagucagguugaauuuggcugaccaagucaggaaaucagaggaccuuacugagaaccugggggucu

SEQ ID NO: 4172713 - RNA, 86 nt, Human
aggcccccagcagauggagaauggagucaggaccagaauccaggccuucugacuccuuaccauaugcuuuccagggagacuggccu

SEQ ID NO: 4172714 - RNA, 66 nt, Human
aggcccuguccauggugcugaaggacacauuggggaaguucugaaguucacagcacugcagggccu

SEQ ID NO: 4172715 - RNA, 92 nt, Human
aggcccuuucugagccucaguaucuccacauguaaagugcaaaugauaaccaucucuacuuugugaugaugugcugaggcuucccugggcuu

SEQ ID NO: 4172716 - RNA, 105 nt, Human
aggccgaguguaaggagcagucauggucuuucauuccuggcccacccagcaggauguauacaggcauaagagauacaugaaagacugucucucaacacuuagcuu

SEQ ID NO: 4172717 - RNA, 100 nt, Human
aggccucgagggagggaugucucaggccccauuccucuugggacagcugaguggucucugagggugggagcugguuugaggcuucuuccgcagcuggcuu

SEQ ID NO: 4172718 - RNA, 105 nt, Human
aggccucuccaucuugcucuucccaucuuggccuuacuugaugauguauaaaguccucuaaauggucuuaugacuuaagugggcccaggggaggggagaggaccu

SEQ ID NO: 4172719 - RNA, 92 nt, Human
aggccugaaaaaguaaaauucaaucuucacugguaaugaaauauuaaauuaguguggacacaguggagagacuuuuacucuuuugcuggccu

SEQ ID NO: 4172720 - RNA, 59 nt, Human
aggccugaaggaagaugagcugauggcauucccagcuuauuaccacuccuugggggccu

SEQ ID NO: 4172721 - RNA, 55 nt, Human
aggccugacuugaauuuagggcugcaaucagaugcacugagaucaauguuggccu

SEQ ID NO: 4172722 - RNA, 59 nt, Human
aggccugaggggcugcgugauguccuggaggggccuccugcagagccgcccucaggucu

SEQ ID NO: 4172723 - RNA, 55 nt, Human
aggccugccuggagccuggcuggcuccugagugagcuaggacuauaggcagcccu

SEQ ID NO: 4172724 - RNA, 66 nt, Human
aggccugcuguguagccuguugucugacuuccucgugcuuuguucucccaggcacgcugcaggccu

SEQ ID NO: 4172725 - RNA, 62 nt, Human
aggccuugggauguggcugcagcugggucagucagccaggcugaagcccacucccugggucu

SEQ ID NO: 4172726 - RNA, 55 nt, Human
aggcgcagacauacagggucugucacucacccgugcucagguggcugcugcgccu

SEQ ID NO: 4172727 - RNA, 99 nt, Human
aggcgcuccuuggucaaaugaggaggcaggugcucagggcucuucaggauuuaaaggugagccagacauggcuccugcuccugcacucaaggagccccu

SEQ ID NO: 4172728 - RNA, 66 nt, Human
aggcgggugguucacuugaggucaggaguucuacacuacccuggccaacauagugaaaccucgucu

SEQ ID NO: 4172729 - RNA, 56 nt, Human
aggcgguccacugucccagugggaccugacguggcccagaguggacgguggccccu

SEQ ID NO: 4172730 - RNA, 75 nt, Human
aggcgguggacggcgugaguccugcucugggcagggugaggggccagccugccugcagggcugcugucccugucu

SEQ ID NO: 4172731 - RNA, 104 nt, Human
aggcuaaagaggggagccccagaaagcuuugcuggaaggaagagaaagacaaaagccuugccuuuucucucgguagaagcugucggucauggcucuucuagccu

SEQ ID NO: 4172732 - RNA, 67 nt, Human
aggcuaagaggccuucagauacuggaacuuacaccagcagccccccaguuucuuaggccuuuggccu

SEQ ID NO: 4172733 - RNA, 80 nt, Human
aggcuagagaugaaggcuuucuccccucugguugguguucuagcuggccuggggagagggccacauuugaacucuagucu

SEQ ID NO: 4172734 - RNA, 61 nt, Human
aggcuagcuuuggcucaguaaauuugcuguguaaugauuuucuaaugaguuaggcuggcuu

SEQ ID NO: 4172735 - RNA, 56 nt, Human
aggcuaggcugaugccucuuccuuugcuaugugagaccugaaggcaaagucugccu

SEQ ID NO: 4172736 - RNA, 55 nt, Human
aggcucaagagagcuggaugucaagauagauucuucacacaugcuccuggagccu

SEQ ID NO: 4172737 - RNA, 64 nt, Human
aggcucacccagggucaagagacuccagcagccuggcugcugcaaggcuugaaccuguugacuu

SEQ ID NO: 4172738 - RNA, 61 nt, Human
aggcucagaaggacucacuagugaauacuguaguagugaacacuguauauucuucuugucu

SEQ ID NO: 4172739 - RNA, 58 nt, Human
aggcucagagagcuguguccauauaacacuaagaaauggaauccaaguucccuggccu

SEQ ID NO: 4172740 - RNA, 59 nt, Human
aggcucaguucacgucaacuuucuuguuaggaaaagcacacuguugacuaauugagcuu

SEQ ID NO: 4172741 - RNA, 62 nt, Human
aggcucauucuugccucugagcucucacacuggcuauuugcucaccaggcaggacuugacuu

SEQ ID NO: 4172742 - RNA, 56 nt, Human
aggcuccaggcccuucaccagcugcagccacucuugcugaugguagucuggggucu

SEQ ID NO: 4172743 - RNA, 79 nt, Human
aggcucuaagugguccugaguagcuuuagaaucugaauaaaucacacauacuagggauccaucgagaccacuagaaacu

SEQ ID NO: 4172744 - RNA, 75 nt, Human
aggcucuagucaagaaugaauucgagugaaggaaagcugugugacaccuggccuuccucuauguucauggagcuu

SEQ ID NO: 4172745 - RNA, 84 nt, Human
aggcucugagagacgagacagaaguuucaaguaagaagugauuauucgcuguacuauuugagacuacugaaacgcucaucgccu

SEQ ID NO: 4172746 - RNA, 68 nt, Human
aggcucugaucagguggcuguggggcccuaauccagaaugagcacaguuauuuugaucaauggagucu

SEQ ID NO: 4172747 - RNA, 59 nt, Human
aggcucugcagaccccagcugucaaauccaaauggagcuggguuuacugcugcaggcuu

SEQ ID NO: 4172748 - RNA, 67 nt, Human
aggcucuggguguuaaugucaguguuaugcagaaaauuacccuagacauagauagcucccagcaucu

SEQ ID NO: 4172749 - RNA, 62 nt, Human
aggcugaggugcuuggggacagaucgggccaccuugcccagcaguacccaagcccuuggccu

SEQ ID NO: 4172750 - RNA, 58 nt, Human
aggcugcagugcagguaggauugucaugcugauuaaaaccuggacacacuugcagcuu

SEQ ID NO: 4172751 - RNA, 64 nt, Human
aggcugcuucagcugcagggagccagugaaaucgacaauuggagcccacagcuguaagggcucu

SEQ ID NO: 4172752 - RNA, 80 nt, Human
aggcugcuucuuguccuuggcauagugauguauaaaacaaacaaccccaucacaauuuugccagacaaaaguaacugccu

SEQ ID NO: 4172753 - RNA, 79 nt, Human
aggcuggagugaaguggcgcgaucucggcucacugcaagcuccaccugccggguucacgccauucucucgacucagccu

SEQ ID NO: 4172754 - RNA, 79 nt, Human
aggcuggagugcaauggcgugaucucagcucacugcaagcuccgccuccugaguucaugccauucuccuaccucagccu

SEQ ID NO: 4172755 - RNA, 79 nt, Human
aggcuggagugcaauggcgugaucucagcuuaccgcaaccuccgccuccuggguucaugccauucuccugccccagccu

SEQ ID NO: 4172756 - RNA, 73 nt, Human
aggcuggagugcaauggcuugaucuuggcucacugcauccuccgccugccagguucaagcgauucuccugccu

SEQ ID NO: 4172757 - RNA, 79 nt, Human
aggcuggagugcaguggcgugaucucagcucacugcaagcucugccucuuggguccaugccauucuccugcuucagccu

SEQ ID NO: 4172758 - RNA, 63 nt, Human
aggcuggagugcuggagugcuggagugcaguggugccaucucagcucacuauagccuccgccu

SEQ ID NO: 4172759 - RNA, 56 nt, Human
aggcuggcggugacugcucugaucacuacgugcugugaagggcacggugccagccu

SEQ ID NO: 4172760 - RNA, 74 nt, Human
aggcugggcauuuacauaaucuuauuuaccuucacuacagcccucaaagguagauauugugaauguuccaguuu

SEQ ID NO: 4172761 - RNA, 83 nt, Human
aggcuggggacccagggaagagccgaugcugcagcucagcgucugucugcaggccgagcuccuucucggggaguucucagucu

SEQ ID NO: 4172762 - RNA, 59 nt, Human
agucugagccugggcguuucucuagugugacaccacugaggauuagcccaggcuagauu

SEQ ID NO: 4172763 - RNA, 67 nt, Human
agucugcagcugauagucagauaucagagacaaaaaucucugaaauaaaugcacuguuaggcuuacu

SEQ ID NO: 4172764 - RNA, 125 nt, Human
agucugcaguguuuggaugggcaggugaacuacugauuuucaaccaaaaauuguuuuucucauuguucuuuggaguguuaucaguaauuacuaauuuugaaucuauaccaagcaaaccccagauu

SEQ ID NO: 4172765 - RNA, 81 nt, Human
agucuggagacuguggugaagagccuguuucuuggagucagacugcuuggcuucaagucuagguucuaccacuaacuagcu

SEQ ID NO: 4172766 - RNA, 81 nt, Human
agucugggaggcuaaccuggcagcuuccuuugcaucugucuuuugugcagauugcacgggggcuguugugucucuuuugcu

SEQ ID NO: 4172767 - RNA, 75 nt, Human
agucugggaucaaaauuuuauuucucaaggacuucagagauuccuaagaauauuaaaauuugagaauugcagauu

SEQ ID NO: 4172768 - RNA, 84 nt, Human
agucugguggaaaauagaaugaggcugagaauucugucuuuugacauauucuccaguagucauucuaucaagucaaacuaaccu

SEQ ID NO: 4172769 - RNA, 89 nt, Human
agucuguuuugagaugcaagcaagucuauuuuacaguuuaaaaagagagagagaaaggaagaaagaaaaugcuagccuuaacacaggcu

SEQ ID NO: 4172770 - RNA, 65 nt, Human
agucuuaacuaugcaaguacuauguauuccaauacacauagacacaucaaguauaguuaaggacu

SEQ ID NO: 4172771 - RNA, 83 nt, Human
agucuucaucugucuagcucaccaacuucaauugauggguaacagaaggucacaccugguuggucagcucaauggagaggguu

SEQ ID NO: 4172772 - RNA, 77 nt, Human
agucuuccuugcccaccauccaauaaaauggacaaauguucaccauuuugcugcauugauugguggcgagucagguu

SEQ ID NO: 4172773 - RNA, 63 nt, Human
agucuuggcagcagcugccuuucagacccaucugguuugaauuggcaaaacugcagcugugcu

SEQ ID NO: 4172774 - RNA, 64 nt, Human
aggcccugaaacccugucauggucuuugucuccagcuuccaaagcccugaagguuucaggcccu

SEQ ID NO: 4172775 - RNA, 58 nt, Human
aggcccugaucuccuggauucuucuauuaauauaaaaggaucucugagaucauggcuu

SEQ ID NO: 4172776 - RNA, 128 nt, Human
agguaaucucauuccacuagaguuuuucaaaccagugauagacuagacacagagcacaugcccuguaagauguguguggugcuguuuugucuuuggauuguauuacugugccuugaaugacauuaguu

SEQ ID NO: 4172777 - RNA, 87 nt, Human
agguaaugaguuuguaugacaggguucuagcgcuucaugggggaagaaagcuacaagucuugucauucauuucauaaguuuuuaccu

SEQ ID NO: 4172778 - RNA, 65 nt, Human
agguaauguugauguagggauuccuguaaaauaaagaauuuucagggguaauauuugcaguacuu

SEQ ID NO: 4172779 - RNA, 67 nt, Human
agguaauuucuccaaacaugcuacuuacucaacaaaaaguagucuaggugucuuagagaaggugcuu

SEQ ID NO: 4172780 - RNA, 71 nt, Human
agguacagaggucaagaucugaagugaggaauccaauuuccuucuuuggcuuacgucuggccuguguucuu

SEQ ID NO: 4172781 - RNA, 63 nt, Human
agguaccaugcugaaugaaagaaauuaguuucaaaagcuaugauuucauuuagaugacauccu

SEQ ID NO: 4172782 - RNA, 83 nt, Human
agguacuaugaguaagaauauuuuuuuaaagugugcugugaauucugaagaagacaugagagaaaaguauucugaggguuccu

SEQ ID NO: 4172783 - RNA, 76 nt, Human
agguagaaacaaaggaauaagagucaaaaugguuuaauucagggccauguuguaucucuuaucggccuucugcacu

SEQ ID NO: 4172784 - RNA, 59 nt, Human
agguagaggccuccaggcagcaacugagguuauccauugggcagccaggugcucuaccu

SEQ ID NO: 4172785 - RNA, 61 nt, Human
agguagauaugcugcugcuguagugaaguuuuaaauggacaagcagcccagugcucugccu

SEQ ID NO: 4172786 - RNA, 65 nt, Human
agguagcagaacuauucauucucauuagcgucauagauguuuucauggagaugguggcguugccu

SEQ ID NO: 4172787 - RNA, 82 nt, Human
agguagccugauacagaaguuuuccacuuauuuagccaauuugacuuaggugcuaaucuuucuuauguuaaaagugcuaucu

SEQ ID NO: 4172788 - RNA, 120 nt, Human
agguaggaaacaaacuugcaaaaaacgaugacuugaaauaagaguguagaccuuuauucuuggccccauagauuagcccuauaguuuuacaagauauuuugggcaggauauuuucuaucu

SEQ ID NO: 4172789 - RNA, 58 nt, Human
agguaggaauaaccuuuguaauucaugauuacauaauuacaaugagacguucuuaucu

SEQ ID NO: 4172790 - RNA, 63 nt, Human
agguagugccuccccuaaguccaggcagccucacccauggcaggacagaggagaaggcacccu

SEQ ID NO: 4172791 - RNA, 60 nt, Human
agguaguguagcugagugggaucccaucuaagacccaucugacuccaaaagccacgaccu

SEQ ID NO: 4172792 - RNA, 129 nt, Human
agguauaucacuaacgauacuuuaaaauuucaauuuaugauuagccuauuguuggaaucaugauugcaauaaugagaaugagaauaaaauaguuaaugagugagaaaaaaaggagagagaaaauguacu

SEQ ID NO: 4172793 - RNA, 60 nt, Human
agguaucauccagcuaaguuacauaugguuuccauauuagcuuguuuggcaggaugaccu

SEQ ID NO: 4172794 - RNA, 79 nt, Human
agguauuaaguggcagagcugugucuugaaaacagagguucugauucuaaguagaagccuguccuacuaauucaugccu

SEQ ID NO: 4172795 - RNA, 71 nt, Human
agguauuagaagagucaugggacccuugcaguuuuuguaggacuaacgcucucugugacauuucugagccu

SEQ ID NO: 4172796 - RNA, 80 nt, Human
agguauuuguuacagcagcaccccacuucucaguaccaauuucugucuuaguccauuugggcugcuauaacaagauaccu

SEQ ID NO: 4172797 - RNA, 64 nt, Human
aggucaacagagacagagacacugagugaugucccuagccccgguguuuccuccucuguuuccu

SEQ ID NO: 4172798 - RNA, 97 nt, Human
aggucaaggaggucugcugggugaggaagcuuucugguuacuucccaaggggcuaggccaggcucuuccauuuggguccaguuucuaccuccuuccu

SEQ ID NO: 4172799 - RNA, 56 nt, Human
aggucaagggcaagagugaggucaggggccuguccccaccaugugcccauuggcuu

SEQ ID NO: 4172800 - RNA, 61 nt, Human
aggucaagguucacaggggaucaagaaauauuauucuuguauaaucuguuuacuuugaccu

SEQ ID NO: 4172801 - RNA, 90 nt, Human
aggucacacagcuaaaugcgaacacacuugggaguucugagagcuuucugcuucagcucuuggguuguuuuauuuuccuauugugcaucu

SEQ ID NO: 4172802 - RNA, 83 nt, Human
aggucacagcucagguggcugagcugaccuuugaacccaaaucagccuggcucacagcucaucacuaccugaugcugccuccu

SEQ ID NO: 4172803 - RNA, 69 nt, Human
aggucacugguccuucucugccugcagugugguggugccuacguagagcagaagcaggaagggaagccu

SEQ ID NO: 4172804 - RNA, 66 nt, Human
aggucagcauaguucacacacaguccugauagcuaacagucggcugugcccauauucugcugaccu

SEQ ID NO: 4172805 - RNA, 75 nt, Human
aggucagccaggaagcggugagggcugcccuggucccugcgcgucacggcugucuucucucuucucucucuaucu

SEQ ID NO: 4172806 - RNA, 67 nt, Human
aggucagugaccuuaguaaaaggaauuauaugacuuuuguuuccuuuauacaagaaaccgcuggccu

SEQ ID NO: 4172807 - RNA, 64 nt, Human
aggucaguguucuuauuuaauuagguauucuugaugccuauuuguuggaaaagaacauuugucu

SEQ ID NO: 4172808 - RNA, 101 nt, Human
aggucauagagcuggaaauuggcagagcugggacuggaagccaggccaggcaccuggcuccugaguuucagcucuaagccuaggccauccuacgcugaccu

SEQ ID NO: 4172809 - RNA, 67 nt, Human
aggucaucagaccugccagacuaggucauuucaugaaauacauauaacuuacauggcucugaggccu

SEQ ID NO: 4172810 - RNA, 62 nt, Human
aggucaucuuggcccaguggcuuguuuuaaaggaggaggaaacugagggccagagaggaccu

SEQ ID NO: 4172811 - RNA, 70 nt, Human
aggucauuccuugucuucuugcaaacuuauuuucuuugacucaguguucccaaugagcgaggaaugaccu

SEQ ID NO: 4172812 - RNA, 60 nt, Human
agguccacaguucagcugcccaagaggagcucaauccugccagcagcaacaugugagccu

SEQ ID NO: 4172813 - RNA, 57 nt, Human
aggucccugaagaugccugaggagaugguguccaauauucuauaacuucagggauuu

SEQ ID NO: 4172814 - RNA, 64 nt, Human
aggucccugggagacagaguauuggaaucuaacauucaagucgugcuugucugccuagaggcuu

SEQ ID NO: 4172815 - RNA, 110 nt, Human
agguccguaauuuaaccaacaugcaccagaaugaucauuuggauuaauugggcaucucuucuaauuggccagugcuugugauuuucuguuuguugaguacuuaggauccu

SEQ ID NO: 4172816 - RNA, 56 nt, Human
agguccugacgugcuccagggcugacucggccuccucccuccagcaaccaggacuu

SEQ ID NO: 4172817 - RNA, 82 nt, Human
agguccugcaguuuuguggagagcaaauaauuggaauccaucugaccuacaggaggaucauuugcccaagcuuuagagacuu

SEQ ID NO: 4172818 - RNA, 68 nt, Human
agguccugggaagaugcucaugacuccuccccucuccucacugagucugaccucuaucucccaggccu

SEQ ID NO: 4172819 - RNA, 70 nt, Human
agguccugucaaaguugucccccacuggaacuaaauaacucuaccuccaacagcuguuagauaugggcuu

SEQ ID NO: 4172820 - RNA, 68 nt, Human
agguccuguuauccucagcucaccucuagaugcgaaacuagaggccgaaugcugagcugggagggccu

SEQ ID NO: 4172821 - RNA, 100 nt, Human
agguccuugugcaaguaucagugauugcuguauacaaaauagcugccuccuccccuuugcugcuuuguauuucucuguagcacugaucaguaacuggccu

SEQ ID NO: 4172822 - RNA, 62 nt, Human
aggucuacaugcuuaauauaucaaacaaauuauagcuuuaggugauugagcaugacagaccu

SEQ ID NO: 4172823 - RNA, 67 nt, Human
aggucuccaagaaggguggccaggauggcauugacaucucuucacagguggccuuggugagagaccu

SEQ ID NO: 4172824 - RNA, 76 nt, Human
aggucucucauuugugugagugauuugacaaccugauccuugguguuagcucaaucuucacagaggagguagacuu

SEQ ID NO: 4172825 - RNA, 69 nt, Human
aggucuggaaucagaccuaaucccagccucucugcuaguuugcugggauuaggucugauuccagaacuu

SEQ ID NO: 4172826 - RNA, 70 nt, Human
aggucuggggcaguuacuggggccuagaugccacuccuccugggucccaggagcuaacugccuuuguucu

SEQ ID NO: 4172827 - RNA, 84 nt, Human
aggucuucugggcucacagagcagcagaugagaaggcccuaaaggcagggauggugccuggugccuggagaaucccagaggccu

SEQ ID NO: 4172828 - RNA, 60 nt, Human
aggucuugaaagaaaaagggauuugcugugaccucugcagcagcuuccugcucuucgccu

SEQ ID NO: 4172829 - RNA, 56 nt, Human
aggucuuuaguggcagagucuaggucuuuuccuuacucuguaauucugaagcaccu

SEQ ID NO: 4172830 - RNA, 82 nt, Human
aggugaacaguuuaucaaguuuuuacaguauguacuuuaaauauuuuggaugugaagauuugacauaaaauugauuccacuu

SEQ ID NO: 4172831 - RNA, 64 nt, Human
aggugacccugagaagagcuuaugagugacagcccuguguuaugaagucuucucagggcaaccu

SEQ ID NO: 4172832 - RNA, 73 nt, Human
aggugagagguuauaaaucagggucauuuaagcucuguuguaccaacaaaugaaccugaaaucucagucacuu

SEQ ID NO: 4172833 - RNA, 92 nt, Human
aggugagcagaaacaucuugggaagagggaaccacgacuguaucuuccucagcagacaugauggugcaggguaccccuuccccugcccaccu

SEQ ID NO: 4172834 - RNA, 66 nt, Human
aggugaggagagggugauuuaagugggauacauuacagaaaaucuauaaagucaccccugcucccu

SEQ ID NO: 4172835 - RNA, 58 nt, Human
aggugaggagcuucucuuugcugguagagcacugcccaaaugaagaaccuucucaccu

SEQ ID NO: 4172836 - RNA, 61 nt, Human
aggugaucgcuuuacuuguccagaggccugaccaagguaggccucucugaagaggucaucu

SEQ ID NO: 4172837 - RNA, 56 nt, Human
aggugaucugccaccuuggccucccaaaguguugggauuacaggugucagucaccu

SEQ ID NO: 4172838 - RNA, 71 nt, Human
aggugauggaaugaacauaauguuaaaagugcccacaguuuuuggugcugcacacuguucuucacacauuu

SEQ ID NO: 4172839 - RNA, 58 nt, Human
aggugcauuaauggaagagcaucaucccagauucuugcacuucuccauagaugcaucu

SEQ ID NO: 4172840 - RNA, 61 nt, Human
aggugccaaaauauuagugcuuaaguacacugauggugugcuaaaggcagaauauucaccu

SEQ ID NO: 4172841 - RNA, 102 nt, Human
aggugcccuccuucacguguaacaaagugcguuuagaguuguaaaccacaggguuacaacugcacaucugaaucacugcauauuuguaaguagagacuaccu

SEQ ID NO: 4172842 - RNA, 57 nt, Human
aggugcucagaaacgaggugcagcccaaaaagauggccccuccuuuccugagcagcu

SEQ ID NO: 4172843 - RNA, 86 nt, Human
aggugcugaggaccccaaacacagagggcccccuggccacagucugugugagcuggcuggguccaugguccucgggucccucuccu

SEQ ID NO: 4172844 - RNA, 93 nt, Human
agguggaacauauauggcuggcauuuauaucccaguuuaugauuuauaaagcaagaacaaaauuaugaagggaauauaagugcugccccaccu

SEQ ID NO: 4172845 - RNA, 128 nt, Human
agguggacucuaggggacgcucacuuggaacuugcaucacccggaacugugucugccacugugacuucagagcagcacagaccugagguggauccagcaaugcccacaacuguccaacaauuucacuu

SEQ ID NO: 4172846 - RNA, 81 nt, Human
agggucauggaguaaguaaauguuggagcucaaauuugaaaucaggcaguucaaauguauacuuuaccaccucuagaucuu

SEQ ID NO: 4172847 - RNA, 67 nt, Human
aggguccuaagccucagauaagaccccagccccagcugacaccuuaauuuuagccuuacaggacccu

SEQ ID NO: 4172848 - RNA, 59 nt, Human
agggucgggggagaagaggccugggcaggacaggccaccugggaucucauccuggcccu

SEQ ID NO: 4172849 - RNA, 89 nt, Human
auagaaggccuuguuguguguaacuugaagaaauauaggcaaguucagagucucauuugucuucacauucacguaacauagguuucugu

SEQ ID NO: 4172850 - RNA, 103 nt, Human
auagaauaaagagauaauuuuauagcaaagaggagaccuaggcagcuuuuccuagcuguuuaugugccucuucuuuuuaauauugaagcucuuaaauuuuuau

SEQ ID NO: 4172851 - RNA, 99 nt, Human
auagaauuaaauauuugaacagggcuugugacaacuuuaauuuaguugaaaggaacugaaaacuuaauguguguacaggauuuugugggagcguucugu

SEQ ID NO: 4172852 - RNA, 75 nt, Human
auagaauuguuuggcgaugagaagagugcucuguucagaaauccuacguugcauuuauuaucugccaggcacugu

SEQ ID NO: 4172853 - RNA, 61 nt, Human
auagaccuucuacacaggacaauaaauucauaaagcuuuucucuugaugauaggaggcuau

SEQ ID NO: 4172854 - RNA, 61 nt, Human
auagacuguggaagacacagaagcuccaagacauggggcuucucaguaguacacacacuau

SEQ ID NO: 4172855 - RNA, 58 nt, Human
auagagcagaaugguuaaaguggaauuucagucuacacagagcuguuguugacucugu

SEQ ID NO: 4172856 - RNA, 65 nt, Human
auagagcagauagugaaacagaauaguguauuuaucuauaugugucuuucugugcaucuuucuau

SEQ ID NO: 4172857 - RNA, 82 nt, Human
auagagccuuuggguucaaucucggucugguaugagccagcuggguguucuugggccuaauuuguaaaauaaaggcaucuau

SEQ ID NO: 4172858 - RNA, 63 nt, Human
auagagugauguaagguaugugaagugccuggccacaguuuacccucaacaaauucacucuau

SEQ ID NO: 4172859 - RNA, 70 nt, Human
auagagugggaggaagaauauggucuacauuuccuuggaacuuuagauacauuuuucuuuccuguuuuau

SEQ ID NO: 4172860 - RNA, 74 nt, Human
auagauaaauagaugcacaaagcagagggaaucaaguagaauaacaugguuuauuuguguguguauuguucugu

SEQ ID NO: 4172861 - RNA, 74 nt, Human
auagauacacauguacauacauagauauacacacauguauguguguauauguguguguguguguguguauauau

SEQ ID NO: 4172862 - RNA, 112 nt, Human
auagauacuuggacaugcugaccucaaaaucuaccucgcuuuuuugcuggggaggugaaccuucugccagagacuggcugagagaucuuggguuaaugcucugagucucugu

SEQ ID NO: 4172863 - RNA, 78 nt, Human
auagaugggauugugaauugagaguacuucucucaucuucagagagagguccaugucucaauucuuaacacuauuugu

SEQ ID NO: 4172864 - RNA, 95 nt, Human
auagauucagccuuucccagccacagguguagcccucaaccuccccuugcccucccuggguagaggcuccuagccuguggcuggugcuguucugu

SEQ ID NO: 4172865 - RNA, 87 nt, Human
auagauuuuaucuucuuuugcuuguguuuacucuucauucuccaguuugaauugugauaacucaggcagagaauaauugaaauuugu

SEQ ID NO: 4172866 - RNA, 68 nt, Human
auagcaaaaggcaccagagugaaagagaaaccacuaagacaauuuuuuguucuugggcauuuugcugu

SEQ ID NO: 4172867 - RNA, 76 nt, Human
auagcaaucaguguauuugaaaguccauguaagccuuuccccuuaucccugacccugaaauaacugaaauugcugu

SEQ ID NO: 4172868 - RNA, 86 nt, Human
auagcacaaagucuugcccuuuugugaaucuggaaauacugaauagcacccuguacuuuggccaaaaggguaauacuucuugcugu

SEQ ID NO: 4172869 - RNA, 61 nt, Human
auagcaggaccaggcguucugggcugucuuccucaaaggcagucuggaucugugcugcugu

SEQ ID NO: 4172870 - RNA, 61 nt, Human
auagccuggagaagauguguauuguacacaggaauaugaaugcacugcucuccuaggaagu

SEQ ID NO: 4172871 - RNA, 95 nt, Human
auagcugcugucacgcucccugugucuucuugccuuuguguccauccaacuggacagggaacuccaugaggccagagagugucucccagcauuau

SEQ ID NO: 4172872 - RNA, 78 nt, Human
auagcuuuaaauauuaucauucaagacccuucucauuagaauuguuaggcacuugaauugaugauguuagaaggcugu

SEQ ID NO: 4172873 - RNA, 72 nt, Human
auaggacuccuugugccauaaccacccugacuggggaucuagauccauaagguggggauggggcaggccugu

SEQ ID NO: 4172874 - RNA, 61 nt, Human
auaggacuuuguaucaggaugaguugaaaucugaguuuaccauucuguguaaauguccugu

SEQ ID NO: 4172875 - RNA, 93 nt, Human
auaggcaaauuaauucaaguguccaaauuauacaguauuuuucauggguauuauauaaaauucuggaagcuuuuaguguucaguucugcuugu

SEQ ID NO: 4172876 - RNA, 92 nt, Human
auaggcagcugggcgagagggaauguagcagagcuaaaauugcccuagacuagugaugcaaagauuuaucuuucuccaaauccacugcuuau

SEQ ID NO: 4172877 - RNA, 59 nt, Human
auaggccuguuucuuguccagcucuauguagagaaggacuacggaaaacagaugcuugu

SEQ ID NO: 4172878 - RNA, 67 nt, Human
auaggcgucuccuucaauaaucugggccucugaucuccggcaggccuguaaugaagggacaguuugu

SEQ ID NO: 4172879 - RNA, 78 nt, Human
auagggaguaacugggagacaagagagggcugacaggauggaacugucgcugucaccaguuuccuuuuugcucucugu

SEQ ID NO: 4172880 - RNA, 76 nt, Human
auagggaucuauuguuuuauuaaaugagcccuggggaacauuuuuaaaggguucaaaagugagaggggauuccugu

SEQ ID NO: 4172881 - RNA, 129 nt, Human
auagggccugguacuuagcaggugcucauuaaauguauguugaacaaaugaaugaauaucuaccuaacaguguuuauuauugcaaguauauaaaguaaugauguugcuugucauaugguaauucccugu

SEQ ID NO: 4172882 - RNA, 70 nt, Human
auagggucacucugagaaguccuguauuucuauuuaaauaaaauuuaauaugauauguuucaggcccugu

SEQ ID NO: 4172883 - RNA, 129 nt, Human
auagggugcaucuaggggguaaugggauuguuugauauagaggcaggaaauaguucagucaaacuguaggaaaacuacagugauaauuucauguuuagacauuccaaggccccuuuuguuacagcaugu

SEQ ID NO: 4172884 - RNA, 80 nt, Human
auaggguggcaugaaacuuccaaagcugaccuccauaaaaauuuaacuaguaaaaauggaguaguuuuacaucccccuau

SEQ ID NO: 4172885 - RNA, 61 nt, Human
auaggucugaaaguguauccugcuugauuuucuguucaaguggauuggagaacagauuuau

SEQ ID NO: 4172886 - RNA, 88 nt, Human
auaggugcuggcagcuggaaguugggcuggccucacaaaaauaguaagagguuauggacagggcaccacugacaucugcuucaauugu

SEQ ID NO: 4172887 - RNA, 108 nt, Human
auaguaaaaguuaaagaggaaauuugcugaucaucuagcuaauguuuacuauagaccauuaaacuagguaauccaggcaauaaaacuucacuuuaggcuuuaaacuau

SEQ ID NO: 4172888 - RNA, 87 nt, Human
auaguaacacacuugugcugacagauggaagaaugugcauggcaacugcgccugaagcacuuccaucugucaccaggucucugcugu

SEQ ID NO: 4172889 - RNA, 85 nt, Human
auaguaccuauuauugcuaugagaauuaaaugagcuaacauaugugaagugcuuaaaacacucucuggcacauaauaaggucuau

SEQ ID NO: 4172890 - RNA, 55 nt, Human
auaguagugccuaacacugaguuccugcccuucuuaguguuuagaauacuauuau

SEQ ID NO: 4172891 - RNA, 68 nt, Human
auaguauccuguggggaaaagccuaucuuuugagccagaaagacuggcuuaaaucccaguauuauugu

SEQ ID NO: 4172892 - RNA, 83 nt, Human
auaguaugauagggaugauuucagugucugccaaaagggaauugguuaaguaaacugagguacauccaaaugaugcauacugu

SEQ ID NO: 4172893 - RNA, 87 nt, Human
auagucacaggcuucugccgucuugaugcucagccaugcucagcgggugguuuucaucaagaugguugcucaggcuccggucacugu

SEQ ID NO: 4172894 - RNA, 73 nt, Human
auagucucuccuauucaaugggaggaauauugagcucacauuguauaaagaccauugagauaggagagauugu

SEQ ID NO: 4172895 - RNA, 62 nt, Human
auagugagguuaaaaauuccugcaaugcuaaaacagacuuuugcagcauauugaucuccugu

SEQ ID NO: 4172896 - RNA, 70 nt, Human
auagugguauuuccaggcuuaugguagauggcauagcugguaugguagagagccuggaaaaauugauagu

SEQ ID NO: 4172897 - RNA, 79 nt, Human
auagugucuucuaucauacuugaauacauuaauccaaauaaaugugauuaauguauucaaauaugauaggaggcacugu

SEQ ID NO: 4172898 - RNA, 66 nt, Human
auaguuacagauccuucguuaguugaauuuggaguaacuccaagcuacugaagguuuggguucuau

SEQ ID NO: 4172899 - RNA, 61 nt, Human
auaguuaguauguguagucuagcuuuuaauuaacuaaaagcagggccagaauacuugcugu

SEQ ID NO: 4172900 - RNA, 129 nt, Human
auaguucaucauuaauguuuguaaaaauuaauggugucauuuauguuugggaauaaaaaacuagaaauauaacuuuauuugauagagauaaaugauagacauaaaguuuacauaaagcaagagaauaau

SEQ ID NO: 4172901 - RNA, 80 nt, Human
auaguuuagcauacaucuucaggaucuaagaccuaaaaagaucaaucuugcccaaggccugaaaauguaugcaaaacugu

SEQ ID NO: 4172902 - RNA, 67 nt, Human
auaguuucacaggaaagaauuuugccuccgaaacucuaguuuagugcuuuccuucuugugacauugu

SEQ ID NO: 4172903 - RNA, 76 nt, Human
aggcccugggcagggagaccaggcucugaccccccaguuacauccuuggaaugagcucuggcuuccgcccucuccu

SEQ ID NO: 4172904 - RNA, 77 nt, Human
aggccgcgauuagaguaaugccagggccgggacaauguguucugugcccauaaucugguauuuaccuggugugaccu

SEQ ID NO: 4172905 - RNA, 64 nt, Human
aggccguggccgggcccggcugcuuagguaggccuucuccucuuccagugcccgacgcaggucu

SEQ ID NO: 4172906 - RNA, 82 nt, Human
aggccuagaugaucucugauauuucucuuaacacuagaaguuauuuuaauaaagggaaugacagauuuucagaucaaggucu

SEQ ID NO: 4172907 - RNA, 68 nt, Human
aggccucagcuaaagagaagggugucgcuggagcaaguuuccgugcccuucagcuuugcugaaagccu

SEQ ID NO: 4172908 - RNA, 61 nt, Human
aggccucagugaucaucaucagaccauccuucuuauugaacagaugaggaaacugaggccu

SEQ ID NO: 4172909 - RNA, 58 nt, Human
aggccucauuuucacuuuaugccuggaucuauggcagccauuugggaucaugagguuu

SEQ ID NO: 4172910 - RNA, 114 nt, Human
aggccuccugggggcugacagcagcugccuucaggcucucagggugggguccuucaaggagcaacugagcagcugcugugcuccaucuuucucuugcccauccugggagagccu

SEQ ID NO: 4172911 - RNA, 59 nt, Human
aggccucggcccacugcugcgguggccccaaaacaccgcguggccuguggcugaggccu

SEQ ID NO: 4172912 - RNA, 58 nt, Human
aggccucuguagggcccugaagggagggaccagcccuuuagggucuccugccaggucu

SEQ ID NO: 4172913 - RNA, 61 nt, Human
aggccucuucagggagcauggagagcuguguucugccucccugcgcauuagaugagcgccu

SEQ ID NO: 4172914 - RNA, 61 nt, Human
aggccugagaaggauaggaagcgauucccugggucuugguguugcuaaccuuuuuaggcuu

SEQ ID NO: 4172915 - RNA, 56 nt, Human
aggccugccuggaucacacagaaagcgacaggcagcuccugugagagguagagccu

SEQ ID NO: 4172916 - RNA, 63 nt, Human
aggccugggucucgugccuaccccugaaucuaguguggcugaggcuagccagacccagauccu

SEQ ID NO: 4172917 - RNA, 55 nt, Human
aggccuggguguucaccagaagcuaacuuagcugcggggugggaagccagggccu

SEQ ID NO: 4172918 - RNA, 58 nt, Human
aggccuggugaaugaaguaucugaaccuccagguagauuuuuaguaagcacggagccu

SEQ ID NO: 4172919 - RNA, 80 nt, Human
aggccuguaccuugccuuguuucucuucuguaggaaacaaguccugaauuaggaagcuuggggcagggcuacuaggaccu

SEQ ID NO: 4172920 - RNA, 65 nt, Human
aggccuguguguaggccaggggaguguauugaaacuucaggccauuuucaagccugcaccagcuu

SEQ ID NO: 4172921 - RNA, 80 nt, Human
aggccuuaagugagcacuuuaaaauauucccaagguuucccaugcaggguauaguuaaagagcauuccacuugagauccu

SEQ ID NO: 4172922 - RNA, 68 nt, Human
aauucugacacuuguuauaaugguaaggaugacuuuauucaggacuauugcaauacgugucagcaauu

SEQ ID NO: 4172923 - RNA, 65 nt, Human
aauucugagacuacuauauucagauccuugucuugagacauugagaaauacaguguuauagaauu

SEQ ID NO: 4172924 - RNA, 127 nt, Human
aauucugcaagucuugauacuaacucugaggaacugcaugaagguggugcuucugcuccucugcucauacagagcaagcagaacaagccacuguuucuguggugugauuucaggagaaugcucuguu

SEQ ID NO: 4172925 - RNA, 102 nt, Human
aauucugcauccagauuguugggucugccucaagugagccuuuuguggaaggucaccagagagcaggacuucacugagcugacccagcagguuauaagaauu

SEQ ID NO: 4172926 - RNA, 77 nt, Human
aauucugugcagcaacaagauagaauggcacaggucuacucaggugacagccaaccuuucuuuuguaguaaggaauu

SEQ ID NO: 4172927 - RNA, 64 nt, Human
aauugaaagcuguccacuaggcugugucaucuugggauagcuugcuagacagcuuuguccaguu

SEQ ID NO: 4172928 - RNA, 97 nt, Human
aauugaaaugauuuuccuuguggaagcaagcuccucuguucuuuuuuauauuauggaacuacaccuggaauugguuucaagggaaagugaaucaguu

SEQ ID NO: 4172929 - RNA, 130 nt, Human
aauugacaucuauuuauacucucguugucaauggugugaugguaaacauuuaacaacuaguucucuugaaauaaaagcccuauuuuuuuauguuugccaauuuccaugguguaaaugcucauaguugauu

SEQ ID NO: 4172930 - RNA, 59 nt, Human
aauugagcaucauguuugaaugagccuacaauguucugcuuugcauacagaugccaauu

SEQ ID NO: 4172931 - RNA, 79 nt, Human
aauugauacuagagaacaaaugcauucuguuuucacuaggaccaguggcuuuaucuagcagaagcauucuguaucaauu

SEQ ID NO: 4172932 - RNA, 70 nt, Human
aauugcaagaauuguauacccucauugagcucauuugguuuaagugcagagugcuacgauucuugucguu

SEQ ID NO: 4172933 - RNA, 73 nt, Human
aauugcaaugcuuauuauuaauagaauguucaaauuacgguacugucauuuuaugaaguaauaaguagcgguu

SEQ ID NO: 4172934 - RNA, 82 nt, Human
aauugcagcauucucugguugggagguuggcuuucagcuaaaaacguuaaguuggaaacuauccucacaacuagaagcaguu

SEQ ID NO: 4172935 - RNA, 99 nt, Human
aauugcuaugcuggaagacagguaucauuauccacauuguaaaaauaaauuacaccaaauaugugagguaucuaggucuucgucaguuauacaguaguu

SEQ ID NO: 4172936 - RNA, 75 nt, Human
aauuggacuugacacgugaguugguguuucugguugacaauacaagaggaacacaagcuaugauccacaccaauu

SEQ ID NO: 4172937 - RNA, 88 nt, Human
aauugggaaugguccccucagaaagugacaggggggugaaacagacuuuugcaucccuuaaaccacuuuuuugggggcuuucuuuguu

SEQ ID NO: 4172938 - RNA, 78 nt, Human
aauugguuguuuucagcaguuuaugacuuguuauuuaacauuuaacagaauggcuauuuauuuuggaaacaaccaauu

SEQ ID NO: 4172939 - RNA, 67 nt, Human
aauuguaagcuccaugaggacagggucuacauuuuguuuguuuuguuucucagagucuauuacaguu

SEQ ID NO: 4172940 - RNA, 101 nt, Human
aauuguccuaagagcauacagauggagaaacaugcauucaagaaaaucuacuagauauuaguaaaauagugagaauuuuugcaguuuagccauggacaauu

SEQ ID NO: 4172941 - RNA, 79 nt, Human
aauuguuaccaaagcagguaaugaauggaaagauacuguguuuucuuaaugcccuucucuaucugcucuaguagcaguu

SEQ ID NO: 4172942 - RNA, 89 nt, Human
aauuuaaagugaagagcauuuuacuuucccucucagaacucuuagaaaaccucugaaggaguaaagggaaagaaugaucaguuuaaguu

SEQ ID NO: 4172943 - RNA, 56 nt, Human
aauuuaaucaaguucugcucugguccuuuguggccaggcaaucaauggguuaaguu

SEQ ID NO: 4172944 - RNA, 58 nt, Human
aauuuacacuucauuuggagggcugagauuuggaucagugcccagugaaggucaaauu

SEQ ID NO: 4172945 - RNA, 78 nt, Human
aauuuauguuuuucuauagcuuucuugggaguaaugauauuuucauuucacugacuccuguugugaaaaacaagaauu

SEQ ID NO: 4172946 - RNA, 57 nt, Human
aauuucauguauuuaucauguaaaugugccuuauuugcaaaagaaaagcaugggauu

SEQ ID NO: 4172947 - RNA, 81 nt, Human
aauuuccauuuuauuagugacauuuagacuuaauacugucacuuaaacauuuuuugagugcucacugcgaagguggaauuu

SEQ ID NO: 4172948 - RNA, 82 nt, Human
aauuucccaauauguuuaucuagugaagugaagaagagucuuuguacacugucuacuaugaaugaaagcaaauugggaaguu

SEQ ID NO: 4172949 - RNA, 75 nt, Human
aauuucguauauaguauguccuccagaauucuuaccaaugcuaggacauuagggaauacugcugugugcuaaauu

SEQ ID NO: 4172950 - RNA, 60 nt, Human
aauuucuauucaaauaugagcucuauuuugaauaaaaggggcuacauugugagagaaguu

SEQ ID NO: 4172951 - RNA, 65 nt, Human
aauuucucccacagacuguaaauguuaacacuuuaauagaugauuuacagcugugugagcaaguu

SEQ ID NO: 4172952 - RNA, 80 nt, Human
aauuucugacugacagagcucaucccagaggcgagaacauccuuucuguaacugccauguagccugucuccaaagagguu

SEQ ID NO: 4172953 - RNA, 64 nt, Human
aauuugaaacauagucaccacugaugaguggacaaccugcuauuucuuugacugguuucaaauu

SEQ ID NO: 4172954 - RNA, 86 nt, Human
aauuugacauauugacacauuuccuuagcgcugagcucgucagaugaguuuagauggcauuaagguagguauguuauuguuugauu

SEQ ID NO: 4172955 - RNA, 68 nt, Human
acaaauacuguucacaaagacaauuucaaacauuucuuugaauuaugauugaaaugaggaguauuugu

SEQ ID NO: 4172956 - RNA, 69 nt, Human
acaaaugcaguuucauuuguagaauauaccucagacauaaguguauuuugaaaauagacuguacuuugu

SEQ ID NO: 4172957 - RNA, 60 nt, Human
acaaaugucaggugguggauggcuugaguuccaagcuaaugaacuuagaccugacacugu

SEQ ID NO: 4172958 - RNA, 62 nt, Human
acaaauugugagcaaguaucccaagaugggugcagagcccaacuuccuucuaguucauaugu

SEQ ID NO: 4172959 - RNA, 85 nt, Human
acaaauuucuuugggggaagaggauagacagugguccuaaccauaggcaagaaacuucaauuuucucuuucaauauaaacuuugu

SEQ ID NO: 4172960 - RNA, 85 nt, Human
acaaccaagcauauacaaacucauauacauacuuaaauugguacggugguguaugugugcgugcguguguguguguauguguugu

SEQ ID NO: 4172961 - RNA, 70 nt, Human
acaaccacuucagcuugcuaaaagggcaucuccucucuauacagugauggugcccuuagguucugguugu

SEQ ID NO: 4172962 - RNA, 64 nt, Human
acaacucucaguuaaauaaagagcaagauuagaagagcuaauuuacuguuugcuugagaguagu

SEQ ID NO: 4172963 - RNA, 58 nt, Human
acaacugaacacgucucuccucugguuauacaacuugggagaagaaugugucaauugu

SEQ ID NO: 4172964 - RNA, 74 nt, Human
acaacuggugugauggcccagcugucuguugugugugacaguguguggcuauggcugggucaccaucagggugu

SEQ ID NO: 4172965 - RNA, 59 nt, Human
acaacuucaauugggauucuccccugauucuaccuuggagaaccuuucuugaguguugu

SEQ ID NO: 4172966 - RNA, 90 nt, Human
acaacuucauguagaggaaacugaaguucuggagggguaccaggguacucaucucuuuagugucagucucucucauggacugugaguugu

SEQ ID NO: 4172967 - RNA, 58 nt, Human
acaacuuuaauuugggugucagaguccuuuguggacuuuauaagcccuuuaaaguugu

SEQ ID NO: 4172968 - RNA, 130 nt, Human
acaagacuugacugaccugacccucggggauccauccacguggcccacccaaguaaugcaccuuuuagaauauuugcugaaauaacugccaccugguggcaucuucugggucaaugucacuguccauggu

SEQ ID NO: 4172969 - RNA, 78 nt, Human
acaagcaaguaucccccuguaucuggaagaauauuaagucuaaguauucuacaugauagaagggagaacugacaaugu

SEQ ID NO: 4172970 - RNA, 64 nt, Human
acaagcauucaacucucagucagucucuugggcugaggcagaacagagccugaaucucucuugu

SEQ ID NO: 4172971 - RNA, 89 nt, Human
acaaggcagaggagaugaguucuguaaaugcuccugggcucucagcuguguccuaagguuucgauagagcucuucuucuuuuaacuugu

SEQ ID NO: 4172972 - RNA, 62 nt, Human
acaaggccugacugcuugucuaaaccaaucauauagguuuauuacagcgaucagaguaaugu

SEQ ID NO: 4172973 - RNA, 88 nt, Human
acaaggcuguagauggaacucaucaacaucgugacagagaaggucaauaaucugauugaugaguuauccauuugacucucggucuugu

SEQ ID NO: 4172974 - RNA, 109 nt, Human
acaagggaaugagccuuggaaucagaaagauuugggucuacucucugcuauggcauuaacauuuugggaaagacccugagucuuauugagacuuaguauauucaucugu

SEQ ID NO: 4172975 - RNA, 76 nt, Human
acaagguuaaaucgucuuaagcacacugagaacuguguuagcagugggccucaguuuccuuaggaugucucuuugu

SEQ ID NO: 4172976 - RNA, 103 nt, Human
acaagucuuaaaucagguugugguuugauuugauccggagagaugagaaauucaacucuugugaaaggguuacugucaggccacaaaaagcuguaggauuugu

SEQ ID NO: 4172977 - RNA, 119 nt, Human
acaagugagaagggaaagggaccuugugcuagaaccaguacagaauucagagccauuucucuuggcugauuauuugguguuggauaguggacaaaguguuugguccucucugaugaggu

SEQ ID NO: 4172978 - RNA, 65 nt, Human
acaagugcauggaaucagcuguggguauuauugcaaagacggaaaucugauucuauuugcucugu

SEQ ID NO: 4172979 - RNA, 69 nt, Human
acaaguuaauauauagaauuuugaaccauaccuggcaaugguaagcauuauguauguguuagcugcugu

SEQ ID NO: 4172980 - RNA, 83 nt, Human
acaauaguagcauugauucagcauucauuaugcgccaguugcuggacugugcuaguugcugcugaccguaugugcuuuauugu

SEQ ID NO: 4172981 - RNA, 79 nt, Human
acaaucggcagauauucuagaaccuaguagaaucucaggccugauaggaucuguccugguucuggaauguuuaaguugu

SEQ ID NO: 4172982 - RNA, 74 nt, Human
acaaucucauuggcccugaauuaaucaaauacccaucaaugaacaaauggaucguggucagggaaugagguugu

SEQ ID NO: 4172983 - RNA, 129 nt, Human
acaaucuggaauggcuguggugaucuaaccuuuggaggaaaaacggguguugagauauguguaaucauaugugauauguguaaucauaucugauaccuaccucuggggguuugcaagucuuuggauagu

SEQ ID NO: 4172984 - RNA, 63 nt, Human
acaaucuuauuaguaguauagauccaggugccuucuggggacugucaucucuaaaaagauugu

SEQ ID NO: 4172985 - RNA, 98 nt, Human
acaaugauaaagcugugagaaugauuuucuuagaugauguuuugaaccuaaaaaguucaagguaaguaugagaaagcaguacauuuugcuuguguugu

SEQ ID NO: 4172986 - RNA, 58 nt, Human
acaaugcaauaggagcuagaaacaaaaaugauuucaagcaggaagccugauguauugu

SEQ ID NO: 4172987 - RNA, 92 nt, Human
acaaugggaauuggagcucugaggaauucugcagugagaaggucaguuuagcuuuguucaacgcagcauuucucaaguuuaguugccauugu

SEQ ID NO: 4172988 - RNA, 67 nt, Human
acaauggguguuggagggaagacaaaauucuuaaucucaucuuuccugcagacauuuacaccuuugu

SEQ ID NO: 4172989 - RNA, 62 nt, Human
acaaugucuggacagagauucucaaucugagacugaguuauuauuggacagaugcuuauugu

SEQ ID NO: 4172990 - RNA, 57 nt, Human
acaauguuuugaaacaucuaggacaauguuagaccaguuguagguguuuaacauugu

SEQ ID NO: 4172991 - RNA, 66 nt, Human
acaauucaaaugcauaguucacagcccaacucaaugccuugugaauucucuguccauuuggguugu

SEQ ID NO: 4172992 - RNA, 84 nt, Human
acaauuugcuuucuuuuucuaaguuuuagguuuuucuuucucucuuaggaaguuuagugaaacucuagggguuaggcagguugu

SEQ ID NO: 4172993 - RNA, 114 nt, Human
acacaaaagcuuuaugagaaguuucuuuaagucucugcauuagaaucuauugucaccuugguaggaauuagaaucugaauguagagcugaaaagaaccuuaaugaaagcugugu

SEQ ID NO: 4172994 - RNA, 56 nt, Human
acacaaacagucuauagcaccagaaaauucuaguuguugcuguugagugugugugu

SEQ ID NO: 4172995 - RNA, 65 nt, Human
acacaaacaucaauccuguuuuccaaauuacuuuugauauucuuggagcuuuagggaguuugugu

SEQ ID NO: 4172996 - RNA, 82 nt, Human
acacaaauguguucaccucuggucacugguucagguucugggcagucugucccuuuggcuggagguagaagaacacuuuggu

SEQ ID NO: 4172997 - RNA, 68 nt, Human
acacaaucugacugguguccuuauaagaaaaggaaauuuggacacaaagagagauaccagggaugugu

SEQ ID NO: 4172998 - RNA, 81 nt, Human
acacaauggaucauuuaucucagacuucagauugggugauugucaacaggacccucgagguuuucugagguaccccugugu

SEQ ID NO: 4172999 - RNA, 82 nt, Human
acacaccugugcuccugucugucuuuggucccuuucagaguugagagaucaggagaaaagauagccagguucagaagugugu

SEQ ID NO: 4173000 - RNA, 61 nt, Human
acacagagcuggaacugcuucaaugcuauaaaccacgcucuagcauuaacuagcucugugu

SEQ ID NO: 4173001 - RNA, 82 nt, Human
acacagauaaugcucauauagguaaauuuuuaaggacacaaaaacuaucaaauaacuccugauuauauguguaugucugugu

SEQ ID NO: 4173002 - RNA, 70 nt, Human
acacagaucaggcguuucucuccaggcuccaacacacaugcucagccuggaucaauaagccugacugugu

SEQ ID NO: 4173003 - RNA, 87 nt, Human
acacagcaucugugauuaaauacuaguuauuaaagcuuuugaaauaucauccaauugcuuuaguuaccauagugcaccaugcugugu

SEQ ID NO: 4173004 - RNA, 77 nt, Human
acacagcccaggacagagugaacagugggaugugcagggcucgacuggccaagcugaacuguuuucuuggguugugu

SEQ ID NO: 4173005 - RNA, 65 nt, Human
acacagcugugcaguuuuuucaagcucugcucagguguaagaauggaggaaguggacaguugugu

SEQ ID NO: 4173006 - RNA, 57 nt, Human
acacagcuguuugggcauggccagagcgccacucucaaguuauguaacagcuguugu

SEQ ID NO: 4173007 - RNA, 73 nt, Human
acacagguaaugguuuuggaagacuucaugucugauuaaauuuuaaauuacuuuuagaacaucugccuugugu

SEQ ID NO: 4173008 - RNA, 75 nt, Human
acacauaaauauuaguguguaggcuggaaaaaagcuugaaguauuuuuccuuuucaugcacaagucuuuauuugu

SEQ ID NO: 4173009 - RNA, 62 nt, Human
acacauauacauguguuaauauauguaaguauauacauauguuuaaauguauguguaugugu

SEQ ID NO: 4173010 - RNA, 74 nt, Human
acacauauauaagagcauucuggcuuuuuacagcagacuuuaaaauuugaaggccagacuugaguguauguugu

SEQ ID NO: 4173011 - RNA, 69 nt, Human
acacaugcacauuauucaaagcccauugagguauguuucaccuuggaguugcuuauaaucugugugugu

SEQ ID NO: 4173012 - RNA, 61 nt, Human
acacaugcauaccuauguguauauaugauauguguguguguguguaugugugugcaugugu

SEQ ID NO: 4173013 - RNA, 55 nt, Human
acacaugcucauaaauaaauagucuaaaaagccuuuuuuaugugugugugugugu

SEQ ID NO: 4173014 - RNA, 57 nt, Human
acacauuugcuaaaaugagcucugguagauaucaguuugcgcacaggcacaaugugu

SEQ ID NO: 4173015 - RNA, 82 nt, Human
acacauuugggucugcuauuguuguuguuuuaauugaauuuuuccagccuuauugagacaaaauugacagacaaaauugugu

SEQ ID NO: 4173016 - RNA, 59 nt, Human
acaccagccucgcccguguguucuguaacccagacucauuugguugugagggcuguugu

SEQ ID NO: 4173017 - RNA, 55 nt, Human
acaccagggauaugaggaaggaggcggcugaggccccagacucagacccuggugu

SEQ ID NO: 4173018 - RNA, 93 nt, Human
acaccauauguucaugcagcaguuuuuuucugguuuccaagcaccauuagcuggaggagagagggacugucugcacuuagauauuccuugugu

SEQ ID NO: 4173019 - RNA, 55 nt, Human
acaccaugaugagugauguagcucuccugcugccagcuuaccuaucaucggcugu

SEQ ID NO: 4173020 - RNA, 74 nt, Human
acaccaugcaauaaauaacauggaagacauaaaauggcaccaggaauggcuauguuuucuauuuguugcugugu

SEQ ID NO: 4173021 - RNA, 78 nt, Human
acaccauucccgcagauuugcucuuugcaggacccucucuuugguguuuccaaaggcaaaacuguggugucgaggugu

SEQ ID NO: 4173022 - RNA, 59 nt, Human
acacccuuucucuggcuuuggguguugucuucccaguuuccugaagagaaagaaugugu

SEQ ID NO: 4173023 - RNA, 79 nt, Human
acaccuaagaaacauuugagugguaauuacagaaaauaugcuuuuuucuaagugaacauucaaguuucuguuuaugugu

SEQ ID NO: 4173024 - RNA, 56 nt, Human
aauuucaggcauuagccagacaguaagaacaccucuguccuggugacccugaaauu

SEQ ID NO: 4173025 - RNA, 61 nt, Human
aauuuccugggauaaaaagccaauaauugcgcuagaaagcaaagagguuuucccagaaauu

SEQ ID NO: 4173026 - RNA, 93 nt, Human
aauuucucucaguauguagagcaaguucaguuuugaguugggaaugaauuccagucaccuagacagaacuuacuucugaucauauaggaaauu

SEQ ID NO: 4173027 - RNA, 58 nt, Human
aauuucucuuagcaagacauuacacugcaugguggauggccuucuugcucaggaaguu

SEQ ID NO: 4173028 - RNA, 82 nt, Human
aauuucugaguuacacaagcaagggucugcaauguuuuuccauaaaccucucauaccaggcuugaugauuugcuuagaaauu

SEQ ID NO: 4173029 - RNA, 57 nt, Human
aauuucuggaugaaccuggcuuuggaagguacugugcuguagguuuuuccaggaguu

SEQ ID NO: 4173030 - RNA, 116 nt, Human
aauuugaaaauguugcagauggccuuuuaucaggagcuauggacugucaaaauaaauagauauaauuaugaaccauuguuguugaaugggccaucuuaaauaauagcagucaaguu

SEQ ID NO: 4173031 - RNA, 55 nt, Human
aauuugacccaucuuggaauuuuggccccuugguccuguuucccugggacagauu

SEQ ID NO: 4173032 - RNA, 93 nt, Human
aauuugauagucuuugauagcaauaugacauugcuacauccaagugugggagucaguacacuuauauugcgcauaucuuggacauuuuagguu

SEQ ID NO: 4173033 - RNA, 60 nt, Human
aauuugcccagaauauuaauguaaaacaucauguuucaguguaaucuuauugggcagauu

SEQ ID NO: 4173034 - RNA, 121 nt, Human
aauuuggguaaauuuaagguauugaaaaccaggcaaguaguguuugucauaaauucuguccuaucugaacaugauucuugauaggcauugugcuuuguuuuauggcuuuuuaaccuaaauu

SEQ ID NO: 4173035 - RNA, 56 nt, Human
aauuugguggcacgugucagugcaucuuucuguucugcacaaugcaccaucaaguu

SEQ ID NO: 4173036 - RNA, 98 nt, Human
aauuuguguccuuuuacaaaaugccugucaaauacugauucccuuccacaauggggcuugaaugcagcugacagucguuuuguuucacgacauugauu

SEQ ID NO: 4173037 - RNA, 66 nt, Human
aauuuguucuagccuccuguuuugacaaguauuccuucauaacaaccuggaaggccagaccaaauu

SEQ ID NO: 4173038 - RNA, 125 nt, Human
aauuuuagacuuguaucucuuuguaaggacccuuggaaauuaacagggauuguccauacucugagaggaaguggcuucucugucuaguuucuaccacuuauaauuauguuggucuuuuuaaaauu

SEQ ID NO: 4173039 - RNA, 72 nt, Human
aauuuuaucucuaagcaggcuuucucacugugugggcaucccaacugcuaaguuuguuuaauagaucaaauu

SEQ ID NO: 4173040 - RNA, 86 nt, Human
aauuuucagccuucaaagcuacuguggcucuuaaauggcugacuuaaacugcuggauaccacagagacucugcaggacugaaaauu

SEQ ID NO: 4173041 - RNA, 109 nt, Human
aauuuucucuguugccuuguagugauuauguguguaaacuuuucaugucagauggauauguagucaacaccugguucuauuacagacuagcaguuaaauagagaaaguu

SEQ ID NO: 4173042 - RNA, 59 nt, Human
aauuuuuaaggucuguauaauauuccauugaguggauguaugcaguuuacuuagguauu

SEQ ID NO: 4173043 - RNA, 88 nt, Human
aauuuuuucagcaggagcaggggaguggaugauggauuuuuauugaaccaucuuuguccucucccuuaaucccgcucaugaagaaauu

SEQ ID NO: 4173044 - RNA, 82 nt, Human
aauuuuuuucagcuuuauuuugcucugucuuuaaauuauaaauugagguauuacacugugacaagaaagagcuggugaaauu

SEQ ID NO: 4173045 - RNA, 107 nt, Human
acaaaaaacaaaaaggugccaauccauguauuuuaacaaucagaggaagaagcuuacuuuucccaagugaagugaagccaguggauggcccuuucuugugcguuugu

SEQ ID NO: 4173046 - RNA, 67 nt, Human
acaaaacuagagcagcggggcuggguuaggucaucacuuaccccacuccucuguuuuaacuguuugu

SEQ ID NO: 4173047 - RNA, 61 nt, Human
acaaaauagauauaauguguugaauguugacuacauucuggccacuuuauuucuguuuugu

SEQ ID NO: 4173048 - RNA, 72 nt, Human
acaaacacagucccugcaccccauuuuacauuuacauucuccgugugugugugugugugugugugugugugu

SEQ ID NO: 4173049 - RNA, 82 nt, Human
acaaacccaggccccugagccagcuggcaugugcuaaaggcucuucuaguaucacacccuggcuuucucuuccugggugugu

SEQ ID NO: 4173050 - RNA, 58 nt, Human
acaaagagggaccagugacuugacauauauaacugucacucgauggcacuucuguugu

SEQ ID NO: 4173051 - RNA, 61 nt, Human
acaaagauaaucacagaauacccaaguuaucucaggucuucggguauagugguuacuuugu

SEQ ID NO: 4173052 - RNA, 68 nt, Human
acaaagaugaaauagcuuuucauaauucucagaggcuuugaguaggaaaggaaauguuuugucucugu

SEQ ID NO: 4173053 - RNA, 80 nt, Human
acaaagcugguaauuaagugcacaguuuggaggcugguugccuguguuccagucccaucucugucgcuuacuagcugugu

SEQ ID NO: 4173054 - RNA, 60 nt, Human
acaaagcuuuguucuucacagagugcuuuuuaaguaugugaagauuugcgaaggauuugu

SEQ ID NO: 4173055 - RNA, 56 nt, Human
acaaaggugagcagaagacacauuuccuuuggugucagaaguggcuucaucuuugu

SEQ ID NO: 4173056 - RNA, 75 nt, Human
acaaagugaacagaggaagaguggggguuaaauuagauuuuacuaggcagcugcccucuccuuccuacuuaaugu

SEQ ID NO: 4173057 - RNA, 114 nt, Human
acaaaguucccucaguguguggguuuuucugugagcgguaaaggucuugggggaggcugugguguccaggucucaguacuugcacagaagaacuugcuauacugcagauuuugu

SEQ ID NO: 4173058 - RNA, 79 nt, Human
acaaaguugguuaguggaauucuucugccuauauaauaacaucacaguauuucagaguuguuuucuguccucucuuugu

SEQ ID NO: 4173059 - RNA, 60 nt, Human
acaaaugaaucauacauaaugugugugaaagcauauguguauguauguauucaauuuugu

SEQ ID NO: 4173060 - RNA, 76 nt, Human
acaaauggagauugauaaccucuagcuuggaaaugugugauuuuuugucuguuauugagguggagucucacucugu

SEQ ID NO: 4173061 - RNA, 62 nt, Human
acaacaaagacacuugaaaugaugacaacccaguguccuuuuuucaauguguucuuuguagu

SEQ ID NO: 4173062 - RNA, 130 nt, Human
acaacaaggcagccaaaguucccaggaaggccccaggaacaguagaaguagccagaagaggugccagcagguggcuuuaaugagucuuucugcugucuggagucuucgaaagcauuuguguuuugugugu

SEQ ID NO: 4173063 - RNA, 101 nt, Human
acaacauggaugaaccuugaagacauaugcuaagugaaauaagucagauacagaaggacaaauacugugugauuccacucauaugagguuccuagaguugu

SEQ ID NO: 4173064 - RNA, 62 nt, Human
acaaccuggaguugaaggaaggugggccagcuucggugcccaccccacagcuccuggugugu

SEQ ID NO: 4173065 - RNA, 60 nt, Human
acaaccuucucugucuuggcaauaauuucuaaacacaagagguagcacagagcaggaugu

SEQ ID NO: 4173066 - RNA, 61 nt, Human
acaacuccagggggucaauauuuacauuacagucugugugaauggcaucuccuggaguugu

SEQ ID NO: 4173067 - RNA, 79 nt, Human
acaacuguagacugcaugauaauaauagcagaucugauugcauggaucucugugaagguaugugugugucugcagaugu

SEQ ID NO: 4173068 - RNA, 64 nt, Human
acaagaagaggaagucuccauggagaguucucccgagucucaccauggaucuuccauuucuugu

SEQ ID NO: 4173069 - RNA, 69 nt, Human
acaagauacucagcuacaagacuggcaaagaaaugcagaagacuuaaaggcugaauguaggauucuugu

SEQ ID NO: 4173070 - RNA, 77 nt, Human
acaagauagcacaacuuuguagcaauuccacgagauucagauuucaaagaguuugagcuagaaaguauuuauuaugu

SEQ ID NO: 4173071 - RNA, 56 nt, Human
acaagauagguugagucuagccucauaugcuagauuaagaacguggaccaucuugu

SEQ ID NO: 4173072 - RNA, 57 nt, Human
acaagauccagcuucuacacagagcucacaagcuagugagcugucugcugcuuuugu

SEQ ID NO: 4173073 - RNA, 76 nt, Human
acaagauucucaugugauucccgugcauguuaaagcuugacaaguucugugccaugggaacaguuguuaauccugu

SEQ ID NO: 4173074 - RNA, 67 nt, Human
acaagauugauaagucugcccucguggaauacugauuucuggaaggagaugcaggcauuaaucaugu

SEQ ID NO: 4173075 - RNA, 74 nt, Human
acaagcagcuggaagaguaagaugaaaagagaaaaacagaucuucaugcaguauuugucucuuaccacugcugu

SEQ ID NO: 4173076 - RNA, 59 nt, Human
acaagcccucaagacacuggaggcuggaaucccccugccagugccuuuuguggguuugu

SEQ ID NO: 4173077 - RNA, 74 nt, Human
acaagcuccuucuauagcccuucgggggucuacuugucauuaagugcucucuccccagugcuacuggaguuugu

SEQ ID NO: 4173078 - RNA, 56 nt, Human
acaagcuggaguuccucagaguggcaaaaauguaccugaaccaagcccagcucugu

SEQ ID NO: 4173079 - RNA, 55 nt, Human
acaaggcccagugucuggagagggagaaagcccccuccuucaggcagggccuagu

SEQ ID NO: 4173080 - RNA, 70 nt, Human
acaaggcuuucagcuaacuugauugcaucagcucuuuacaucucuguaauuugguugaugaaagcauugu

SEQ ID NO: 4173081 - RNA, 73 nt, Human
acaagggcagagaccuugcaagucuuauacaucccuuaaauguaugagauauucccagcgucuacaaccuugu

SEQ ID NO: 4173082 - RNA, 76 nt, Human
acaaguaaacuuccugaaggauauuuggcuacagaagcucagaaagcuaugagcugaaugucuggauacuacuugu

SEQ ID NO: 4173083 - RNA, 76 nt, Human
acaaguaagaagggagcugagcugugagcagcauucuggggugcuguuggugcuagucucucugaauccugcuagu

SEQ ID NO: 4173084 - RNA, 72 nt, Human
acaagugcuuagcagaagcuucagcuucagaugagagucugaacaaaaaauggugcuucuccugugcagugu

SEQ ID NO: 4173085 - RNA, 110 nt, Human
acaaguuuuugcugugcuuuccuagcacuuccauauguacguagcaggaggaggcugaaugccaucugcucugucugccauguugcuguaaaucacagugaguuuuuugu

SEQ ID NO: 4173086 - RNA, 103 nt, Human
acaauaaaacacgaaguucagauggucauucacuagggugugugauauuuuggaguauagaccuuaagugauuaugacauaucaaaauaauguggucuuaugu

SEQ ID NO: 4173087 - RNA, 90 nt, Human
acaauaaaagauuuuguuaagugguauaaaaauuugugaauguugaaauucaacaugcuucauauuauaaccaaccugcaagaauauugu

SEQ ID NO: 4173088 - RNA, 88 nt, Human
acaauacagcauuuugcuuguucaagauuucuguguaaaaauuuacacguuuucuagagaauaugcagaaagugaaaacuguaaaugu

SEQ ID NO: 4173089 - RNA, 78 nt, Human
acaauaguguucuagaggauucuaaaggaagcugccccagcagcccugagagaaccaucuauacuuuggauauguugu

SEQ ID NO: 4173090 - RNA, 67 nt, Human
acaauauacacauccuaaugggagguaaacgugguauaauauccgauauuacgauguguuauauugu

SEQ ID NO: 4173091 - RNA, 80 nt, Human
acaauaugagggacacaucucaggggacacucucgagugaggcauuagggugugggugcugagaugucucuuuucauugu

SEQ ID NO: 4173092 - RNA, 84 nt, Human
acaauauuucaagucauuugacuguguguuaccagggagggacaacaccuugaacauaucauaggaugucauugaauauauugu

SEQ ID NO: 4173093 - RNA, 62 nt, Human
acacuguaaacaucucaagcacuuggauagucucuucaaauguuuuauucuguaugcagugu

SEQ ID NO: 4173094 - RNA, 69 nt, Human
acacugugucuagcauuuuacaggggagcaauaauguuuguucauaaaaggauagcagauggauggugu

SEQ ID NO: 4173095 - RNA, 97 nt, Human
acacuuagucuucagucacuugguuugauucaagaacaaagaguuagaaacucuucaccuuuugaaugcaaggaaguaggcugaccccucaaagugu

SEQ ID NO: 4173096 - RNA, 87 nt, Human
acacuuccuaguuaauauuucacagcagcucauuuaacgaugucucucagagguugagcagcuucuauggaauaaucagggaagugu

SEQ ID NO: 4173097 - RNA, 68 nt, Human
acacuucuaaucagaaggucuggucuugagcuaagauaugaauuuuaacuagcuuucuggagaagugu

SEQ ID NO: 4173098 - RNA, 57 nt, Human
acacuuuacagcuuccuuugcagaaugucgggggagucaauuuuagcugugaggugu

SEQ ID NO: 4173099 - RNA, 55 nt, Human
acacuuucuguguaucuuccauuguucuaggcacugugggcaccacagagagugu

SEQ ID NO: 4173100 - RNA, 56 nt, Human
acacuuuguugaugaaauaguuuuguuacuuacaguccugugaauucagcaaaggu

SEQ ID NO: 4173101 - RNA, 72 nt, Human
acacuuuuuaucuuuuuucuagauguacuaauuggagaucuagaguggaauguagaaaaaagauguuggugu

SEQ ID NO: 4173102 - RNA, 86 nt, Human
acagaaaaaucauuuaaccucuauuuuuauaaaagugaacaaugccauuuuguauagucuguggaugucguagaugguaguuaugu

SEQ ID NO: 4173103 - RNA, 109 nt, Human
acagaaaauaaggggggcagggcaucuauacugacaggauauguggguuggugaauugaacaaauaaucacaauucagaugucuuagguuugcauccugaauuuucugu

SEQ ID NO: 4173104 - RNA, 65 nt, Human
acagaaaauucauggugaggccaaagccaugacaacaccuguguugccucacauugauuuucugu

SEQ ID NO: 4173105 - RNA, 104 nt, Human
acagaaaauuccauuuguaguagugagucuuuauaaauagcuuuauaauuguuuccaguuuauauuuguaaaaagccuccacuagaauaaagagaauuauuugu

SEQ ID NO: 4173106 - RNA, 75 nt, Human
acagaaacccccagagacuugcuucuaagaccaacacugggcucuauuuuaguagcaggaaucugaagguacugu

SEQ ID NO: 4173107 - RNA, 122 nt, Human
acagaaagcagaaguggggcaaugggaugugcggccccuguggcaggaggaggagcacacgaacccugacccugcuucuuggugcaggccacuccaggccuugcuucuguaagagacucugu

SEQ ID NO: 4173108 - RNA, 62 nt, Human
acagaacuuccagggaacauacgccuucccuuucaaacauauguuccgaggggaauguuugu

SEQ ID NO: 4173109 - RNA, 63 nt, Human
acagaacuuccugcuggaguggcucaaagcucaagggauucgguacuucagcaggguuccugu

SEQ ID NO: 4173110 - RNA, 80 nt, Human
acagaagcuggaaaugugaauuaagguuagcuuuugaaguaucuucaauaccaugauaauuaauucaugcccuuuucugu

SEQ ID NO: 4173111 - RNA, 72 nt, Human
acagaaggagcucaaauuuacucuugguugcacccugacacugugauuucuggguuccagccuuuauucugu

SEQ ID NO: 4173112 - RNA, 76 nt, Human
acagaagggugccuggaagccacucacagaaccucguaucugccaucugcugaagcuucugcaccugcuucacugu

SEQ ID NO: 4173113 - RNA, 130 nt, Human
acagaaguaauuacaccaugacaccugcuccugcaagucaggcuggggucuggcaggcucugugcggggcugcugauguggagcccacccucggcugagcugguggagcugcgguggaaagggcugcugu

SEQ ID NO: 4173114 - RNA, 58 nt, Human
acagaaguccccaugaagaagcuaucauuaucaucagcaucuucgugggguuuucugu

SEQ ID NO: 4173115 - RNA, 69 nt, Human
acagaaguuugacauguuuagcucuuccaaauauagaguuaaucuagcagcuaaauuggaaauuucugu

SEQ ID NO: 4173116 - RNA, 106 nt, Human
acagaauccgggaaguggggugagccggacuggggacgcagggaaaggcugguguccagcuagcaauccguugaucccuugccucucggccccaaaucugcucugu

SEQ ID NO: 4173117 - RNA, 77 nt, Human
acagaaugaguggcuuuggagaaguagggagcaggucacgaggggcacccagcucaucaggagccgcccauggaugu

SEQ ID NO: 4173118 - RNA, 66 nt, Human
acagaauggaacaggacaggcugggcuagacucgagcacgcaguggccccugugccaccacacugu

SEQ ID NO: 4173119 - RNA, 63 nt, Human
acagaauguccuuuuucuuaggaaauauacaaggaaguaucuggaggcaaaggggcgugaugu

SEQ ID NO: 4173120 - RNA, 69 nt, Human
acagacacuuacagaauucccuccuuuugcuuucugcagcaggaaaaucaauucuguguaguguccugu

SEQ ID NO: 4173121 - RNA, 64 nt, Human
acagacagacagagaacuauucaaaacuccaaacuuccaauauugaacaucucuggauguuugu

SEQ ID NO: 4173122 - RNA, 55 nt, Human
acagacaugcuguuuggguggucagaauauuuugcauccaagcauaaauguuagu

SEQ ID NO: 4173123 - RNA, 61 nt, Human
acagaccugggcacagaaaggaccaguucagggagggcguccuuucuccacccagguuugu

SEQ ID NO: 4173124 - RNA, 81 nt, Human
acagacuggcugugggaugagagccucagaagccaccacucuccccuguggaaaugaagguuccauuccaugugcagcugu

SEQ ID NO: 4173125 - RNA, 61 nt, Human
acagacuuaccuaaggucacacagcuaagaagucgugaagcugggaucgaaucaagucugu

SEQ ID NO: 4173126 - RNA, 60 nt, Human
acagagaugggaacauucagguuaguuugacauaucuuugaauguuuuuauuaucuuugu

SEQ ID NO: 4173127 - RNA, 57 nt, Human
acagagcuaauguugcauaggcucaaaagaagguaaggccugagauaaaagcuuugu

SEQ ID NO: 4173128 - RNA, 92 nt, Human
acagagcugacauuuguucauuuguauugauuuuauuuacauuuuucaaaaggaaauagaugcagaugguauagaaaguuucagugaaaugu

SEQ ID NO: 4173129 - RNA, 64 nt, Human
acagaggaccagaaaucaacacagaauguuuauggggcagugaggaagcugucuggaccucugu

SEQ ID NO: 4173130 - RNA, 91 nt, Human
acagaggccucagcccuucucacacaguucucugaagcuugaauauccccucagaccugagcugaauugaagcaaggagcucggccuuugu

SEQ ID NO: 4173131 - RNA, 59 nt, Human
acagaggccucggccugcccagggguggacaaaaacccugcagccaguguggccacugu

SEQ ID NO: 4173132 - RNA, 55 nt, Human
acagagguuauugcucuccaaguucaauguuguggaccugaaccagugccucugu

SEQ ID NO: 4173133 - RNA, 65 nt, Human
acagaguccaggggccuggugugugcuguguuuuacagaugacacauuaaccuuugaaauucugu

SEQ ID NO: 4173134 - RNA, 58 nt, Human
acagaguuaauggauaggcagguaaaauauauguugaaugccauucauguaagucugu

SEQ ID NO: 4173135 - RNA, 115 nt, Human
acagaguucugcaucaauucuauuucuacuuuucauuuuuguagaugcaagcacagaaaagccuuguuugaagacuacugggagugaaagaaguuuaauuacggcaguuuuaugu

SEQ ID NO: 4173136 - RNA, 83 nt, Human
acagaguuuuauucauugccauaauagagccauguaggaaaugcacugacugcauguuauuguggcaagaauauccuaaaugu

SEQ ID NO: 4173137 - RNA, 83 nt, Human
acagaucagccuguauuuccaaauuaaaauguacaaugaaguagcucauuuagacauuugauuugggggaagguugaaauugu

SEQ ID NO: 4173138 - RNA, 60 nt, Human
acagaugaaucugugauugcugguaaacccguccugguguagcacagucaaggucacugu

SEQ ID NO: 4173139 - RNA, 61 nt, Human
acagaugaauuuugggggcacuauucauucagcaguaagugucuuacaugaauugauuugu

SEQ ID NO: 4173140 - RNA, 61 nt, Human
acagaugaggcuggcgagggcaggggugacauccuaccuccgcucucagccucucaucugu

SEQ ID NO: 4173141 - RNA, 70 nt, Human
acagaugcaaggaaaugauugcuuuuuagguuucugaguccggugaguugauugcuucuuugcuaucugu

SEQ ID NO: 4173142 - RNA, 77 nt, Human
acagaugcucuccgucucaucauaguugacaugaacuauaguucugcuggcuguauaugugagaguggaguuuuugu

SEQ ID NO: 4173143 - RNA, 90 nt, Human
acagaugguuugugguagagcccagaucugaaccuugccuguugggccccaagggacccaaaguucaggcucuaucccagaccgcucugu

SEQ ID NO: 4173144 - RNA, 61 nt, Human
acagauugggaacugucuccuuuaugggaaagcucuuuauauuugggacaccccaguuugu

SEQ ID NO: 4173145 - RNA, 83 nt, Human
acagcaaacaguuuauugaaagcauggauuuggauuuggacugaucuaacuuugaauccaaguuucgcuuuuuguuugcuugu

SEQ ID NO: 4173146 - RNA, 72 nt, Human
acagcacauuaugcuacuaccaaauguguucagauagcugcuauucauuuauuaguuaguucgauguucugu

SEQ ID NO: 4173147 - RNA, 64 nt, Human
acagcagccagccacugugagcaucuugccugcgcucugcuccgugguguguugccccugcugu

SEQ ID NO: 4173148 - RNA, 60 nt, Human
acagcaggugcugccugucacccuggagcaccaggcaggguuccaaagcacccuugcugu

SEQ ID NO: 4173149 - RNA, 77 nt, Human
acagcaguaguuaccugggguacaugguuaauuugauuuagcagauucuuuggcuaaacccuaguaaauuaaaaugu

SEQ ID NO: 4173150 - RNA, 88 nt, Human
acagcagucaagggaaaauaguugaugaccaacugaagcaaucagagcucaccaucuuggucuucagcuguuuucccuggacugaggu

SEQ ID NO: 4173151 - RNA, 87 nt, Human
acagcaucuccuggggcugggcccugcucugggagcagccuuccccuucuucucucucaggggccuggaguccugggauggugcugu

SEQ ID NO: 4173152 - RNA, 82 nt, Human
acagcauugacaacuaacuuuuugauucuuggggaacauauugcuguucuguuuccaucucaugaggaauuugucaaguugu

SEQ ID NO: 4173153 - RNA, 62 nt, Human
acagcauugcugagggagggguuuuccagggcagguucaagacccuucucugcagccccugu

SEQ ID NO: 4173154 - RNA, 83 nt, Human
acagccaccaucaccccccuucuacaggcaggaaguagggucccugagagacccagcaguuugcuuagagugauaggaucugu

SEQ ID NO: 4173155 - RNA, 128 nt, Human
acagccaggaaaugaaugagagaagggaucauuuaugcaguuuguguucugcuacccaguagcagucugaacacuugcuguuaauaaguguagcccuccugccugaucauauauugcuuccuuucugu

SEQ ID NO: 4173156 - RNA, 57 nt, Human
acagcgugagcuucaugaagguagaggaggauucuaucuguauuuguucacugcugu

SEQ ID NO: 4173157 - RNA, 72 nt, Human
acagcucaggccauuccuaccaagggaagaaaggcuggccucuguaaccccuguaggaaaggccugcuuugu

SEQ ID NO: 4173158 - RNA, 62 nt, Human
acagcuccuggggcuuuaauggauaauccauauuaauaaauauguaggggccuagggggugu

SEQ ID NO: 4173159 - RNA, 85 nt, Human
acagcugugccuuugccguggggccugcugugguuugcucuuggggaguggacccggaacagaggccccugcaggccucagaagu

SEQ ID NO: 4173160 - RNA, 69 nt, Human
acagcuguguuuuauaaucagcgcuaccgaauauuuccuucaugcuguugauuaaggagacauagcugu

SEQ ID NO: 4173161 - RNA, 66 nt, Human
acagcuucuggaaggcucuggaaaagguaaauaauggaccuuuccuagagucucuagaagaaaugu

SEQ ID NO: 4173162 - RNA, 78 nt, Human
acaggaaaggacacagacuuagauuuaaauuacauguaagauucugugguuuuagucuauucucuguccuuuccuugu

SEQ ID NO: 4173163 - RNA, 71 nt, Human
acaggaaugggccauaauccuugguugacaauaaauggacaaagcagcugggugcgguggcucaugccugu

SEQ ID NO: 4173164 - RNA, 65 nt, Human
acaggaauuugcuggaacacagaucauucaacuuccuugguugaaaucguucaguaauuuucugu

SEQ ID NO: 4173165 - RNA, 101 nt, Human
acaggacagaaagauaauucucuuaugaaaagacaguuaauuugcauuuuaugugaauauuuuaaguguuguuuucaagagauagguuucuucugucuugu

SEQ ID NO: 4173166 - RNA, 56 nt, Human
acaggacaggcccuguggggucugaggguuccucagcuuuccagacgccugccugu

SEQ ID NO: 4173167 - RNA, 66 nt, Human
acaggacagguaggauucgcaggggcuugaaagucccauaacucaagugcauuucaccuguacugu

SEQ ID NO: 4173168 - RNA, 65 nt, Human
acaggacuaacuggaggcggggucaaagcuguaauaccacacuccuacuuccaguuuaguauugu

SEQ ID NO: 4173169 - RNA, 76 nt, Human
acaggacuuaaaaguaacaauaagguucuauuuuccauuuggagaguaggcucccgguuguuuauuuuaugacugu

SEQ ID NO: 4173170 - RNA, 57 nt, Human
acaggagauguaccuguuuuugagaggauauaauaaucacucaaacuacucuucugu

SEQ ID NO: 4173171 - RNA, 82 nt, Human
acaggagcaacagacuaagacauuccuccacacaauaacagacccaggcagugcagagccaugugugucuuaucuguccugu

SEQ ID NO: 4173172 - RNA, 56 nt, Human
acaggaguuucugacagagacaggucaaugcgcuugucuccuagcugucuccaugu

SEQ ID NO: 4173173 - RNA, 85 nt, Human
acaggauacauucagugagcaugccuucucaguucuguuuccucccaggagacacacacaggagguggcaaagcugaacaccugu

SEQ ID NO: 4173174 - RNA, 103 nt, Human
acaggauuguugggaauauuaagggaaauguuaggcaugcuugacccuagauggggacucaagacaucacugugcauuuugcuuuuucuuccacagcuccugu

SEQ ID NO: 4173175 - RNA, 61 nt, Human
acaggauuuucagggaaggugauacauuuugcuuuguacuucauuccugaggaauucaugu

SEQ ID NO: 4173176 - RNA, 67 nt, Human
acaggcaagaugugaaacacggaacuguauaaucaaugugccugaguccccucauucacucuccugu

SEQ ID NO: 4173177 - RNA, 64 nt, Human
acaggcagagaguggcggacucagaaucuuaacucugaucuccagcuuucacgcuccugccugu

SEQ ID NO: 4173178 - RNA, 70 nt, Human
acaggcagcuacugugugucagccacugugccagcccuggaaauacaggaaugccacacagccugcuugu

SEQ ID NO: 4173179 - RNA, 57 nt, Human
acaggcauugcaagcagcaguucacuaaccaaaacaaauugcagccuguagucuugu

SEQ ID NO: 4173180 - RNA, 74 nt, Human
acaggccuauguuccauugcagggauuaagaaauacgaacuugaacacaaaauguagugaagcagagggcuugu

SEQ ID NO: 4173181 - RNA, 90 nt, Human
acaggcugcaugggggucuggcuugcaaaggagcucgcauauaaagugaaagcugcucaggagagccaggucuccccacaggcguccugu

SEQ ID NO: 4173182 - RNA, 82 nt, Human
acagggaacacagcaggcccauacuggaaggugcuggggaggcccgggaccccuguauaguauggcaggcugguguaacugu

SEQ ID NO: 4173183 - RNA, 56 nt, Human
acagggagauaucuucaauauccaaagaccgugaaggguaggaaauaucucccugu

SEQ ID NO: 4173184 - RNA, 78 nt, Human
acagggauuugagagugacaauuuuaugaauagguccuuaauaccugcuucuguauugaaauuguuauuuuccacugu

SEQ ID NO: 4173185 - RNA, 83 nt, Human
acagggcucuccacccugagucacugucugucugcccugauuaccccagggccagguaccagacaacucaggacagcccuugu

SEQ ID NO: 4173186 - RNA, 55 nt, Human
acagggcuucuauaccaauucauuguaaauaagagaagugagagagaagcucugu

SEQ ID NO: 4173187 - RNA, 69 nt, Human
acagggcuugcuuuauggauuuguguccuguguaguuacacaagacucacacacagaagagggcucugu

SEQ ID NO: 4173188 - RNA, 64 nt, Human
acaggggcuguuugccucaggcccuuggcuccuuuccccaagggccugugcugucagcccuagu

SEQ ID NO: 4173189 - RNA, 63 nt, Human
acagggucaagcugcguuaccuucgacaaagaugucacuagucugaagcagccuugauucugu

SEQ ID NO: 4173190 - RNA, 124 nt, Human
acagguaaaaucagaagcagguguacaguggggcuccagggccccccaguugcacggacuccuucugaagccugggagggcucuggcaaugugcccacuggucauauauuuuuguacaauuugu

SEQ ID NO: 4173191 - RNA, 60 nt, Human
acagguacauguuccagauacguaacuugaaacuuaaagaugccuugggacagugccugu

SEQ ID NO: 4173192 - RNA, 57 nt, Human
acagguaggcagccggucucuggccuccgcccggcuguacacaaacugccugccugu

SEQ ID NO: 4173193 - RNA, 68 nt, Human
acagguguaagcugcagaacuggaacuugaggucucauagucuucaggcccuuugcugcugccccugu

SEQ ID NO: 4173194 - RNA, 56 nt, Human
acagguguagguacauuugcauacauugauuuguugcaguuguugcuacuaccugu

SEQ ID NO: 4173195 - RNA, 63 nt, Human
acagguucacuaggaacccauuauuuacuaggcaaaaguaaagcuaaccuuagugaacacugu

SEQ ID NO: 4173196 - RNA, 105 nt, Human
acagguugguugggcaauacuucaagauuccauagggcauucaugccuucuuccuggaaguauguguguuucaguggaaauguugauauaauuaauugacacugu

SEQ ID NO: 4173197 - RNA, 58 nt, Human
acaguaaauauuaagccugaguccuucuaauucauaccaggcuugucauucuugcugu

SEQ ID NO: 4173198 - RNA, 73 nt, Human
acaguaauuuauugaacaccuucacugugcccagcauugugcugugagccauugggugauuaaaagaugcugu

SEQ ID NO: 4173199 - RNA, 97 nt, Human
acaguacuguguuaacugaaccaaguacagaugggaauagaguggaucuuucauuugcaugguucugagcaugguucaaauaugcacaaguuucugu

SEQ ID NO: 4173200 - RNA, 69 nt, Human
acaguacuuaacuuauaggagagaaacaguguuuuaccauaaaaugugcuucuguuguaaguuugcugu

SEQ ID NO: 4173201 - RNA, 61 nt, Human
acaguacuucacauuugcaagucuuggggaaucuuuugaagacuuggaguugaaggguugu

SEQ ID NO: 4173202 - RNA, 70 nt, Human
acaguaggaauagauguagauacaugagcauacuucacucugcuacuauaauuauugcuauuccuacugu

SEQ ID NO: 4173203 - RNA, 55 nt, Human
acaguagguaucucauaagguuguuggaacaacuaaaugcauugguaucuauugu

SEQ ID NO: 4173204 - RNA, 77 nt, Human
acaguaguagacuuugggguuauaaucauauugaugacaacugccauuuauuaaaauuccaagguaugccaagcugu

SEQ ID NO: 4173205 - RNA, 76 nt, Human
acaguauuaagaaacugcagagccaugguucaacccaagcugggucugacaccagaaucugagcucuuuccacugu

SEQ ID NO: 4173206 - RNA, 73 nt, Human
acaguauuuccuaggugcucgagugcuuuaaaauaagaacuucugaaguuugggugcaucuaggaagugcugu

SEQ ID NO: 4173207 - RNA, 67 nt, Human
acagucagauuuuuaagaccuuuaacagagugccuugccuauagaaaguucuugauaaguccacugu

SEQ ID NO: 4173208 - RNA, 66 nt, Human
acaguccauaagguugaaaacuguacacuuuugugaguuacacaaguucuuuaaccuaugaccugu

SEQ ID NO: 4173209 - RNA, 56 nt, Human
acagucccugugcaggcugcgggcaucuucaugcugcuggccuguccacgggcugu

SEQ ID NO: 4173210 - RNA, 56 nt, Human
acaguccuuguguggaacauuaugaaaucauaaacggcaguguucacaaugacugu

SEQ ID NO: 4173211 - RNA, 73 nt, Human
acagucgcaauuuguaaacacagaaaagaggaaugaaaugaaaggccgugucugugcuacaaaucgcgucugu

SEQ ID NO: 4173212 - RNA, 128 nt, Human
acagucggugacaaugugcacaucugguauuuccugugugagagcaaaacugcaggacucagugagugguuucugugguuugcacuuguguaucuggguguaugggaguguguagcccugcugacugu

SEQ ID NO: 4173213 - RNA, 57 nt, Human
acagucuacucaggaaguccccgagaucaaagcaaggggcuuuuuauuuagcacugu

SEQ ID NO: 4173214 - RNA, 72 nt, Human
acagugaacaucugggaucauugcuguguauuccccgcaacagagagcugcagaauggcccaggugcgcugu

SEQ ID NO: 4173215 - RNA, 55 nt, Human
acagugauuucucuccguuauuucagagaacacugaaauaccagaaaaucagugu

SEQ ID NO: 4173216 - RNA, 57 nt, Human
acagugcacauccugagugauuuuccaaauuacugaaucauuuacuuguuccacugu

SEQ ID NO: 4173217 - RNA, 76 nt, Human
acagugcauuguguauuucuguaguacuguuuugcauuuuccauagagacagaaaacuuugcaagucaaucacugu

SEQ ID NO: 4173218 - RNA, 59 nt, Human
acagugcuaucaauagcuagaaguuaaauuaaauccuucauugcuagugagcuuacugu

SEQ ID NO: 4173219 - RNA, 118 nt, Human
acagugcucuggcccaggcuuuguccaugcucugguggaugaauguccucguacaaugagucacccuuuaucugacaggucauuuucuauagagaaagccaauuaaaacagagacugu

SEQ ID NO: 4173220 - RNA, 65 nt, Human
acaguggaaucucaagcuggaagaaaccuuagaggucaccuaaucuuugcaugaguucccucugu

SEQ ID NO: 4173221 - RNA, 63 nt, Human
acaguggucuggaggcccagcaacucucuaauaggucagggccacaacaccagaguccacugu

SEQ ID NO: 4173222 - RNA, 74 nt, Human
acaguguaaauaacucuccagaauuauuacuauuauuuuuaauaaagguaauauuugggggaaaauuauauggu

SEQ ID NO: 4173223 - RNA, 55 nt, Human
acaguguccuaaauucccacagauggcauuuacacugugugaacacggacucugu

SEQ ID NO: 4173224 - RNA, 55 nt, Human
acaguguccuuguggucccuguugaguuggaauuaggggagucuagggaggcugu

SEQ ID NO: 4173225 - RNA, 55 nt, Human
acaguguucaaaccacuaggcugcagacuguauuuuauuugguuugggcacaugu

SEQ ID NO: 4173226 - RNA, 82 nt, Human
acaguguuuguacagccagcuaugcagcugaaggcugccauguaguagcugcuacacuguuuggcuccuguacuuauacugu

SEQ ID NO: 4173227 - RNA, 58 nt, Human
acaguguuuuaugagaauuguuggucaugcccagcuacacaauccucaugcauauugu

SEQ ID NO: 4173228 - RNA, 130 nt, Human
acaguguuuugcccaccccaaccaauguccuugucacuucucagggccucccucuguuucugucuucuggcugagacagaugggcuccugaagagcacacaagagguggaaggggccugugcucugcacu

SEQ ID NO: 4173229 - RNA, 104 nt, Human
acaguuacuaacaugacaacagauuugguuucaggugccuuuguauacacucacacucacaagaggcacuccagccacuggucuucuuugcaauacaagacugu

SEQ ID NO: 4173230 - RNA, 67 nt, Human
acaguuagccuggcacugccccauccaugcaguccaugggcaggaugacuuugcgugccggaagugu

SEQ ID NO: 4173231 - RNA, 59 nt, Human
acaguuagggacuauaaucauuuggaagcuucuuuacucauguuuagugccuagucugu

SEQ ID NO: 4173232 - RNA, 70 nt, Human
acaguuaucuuugaaauagagaaaguaagagcugcaguguagauucucaaauuauuuuaaggacaacugu

SEQ ID NO: 4173233 - RNA, 76 nt, Human
acaguuauuugcaggaugggcauugguuggauuuuucuugaauuaaugaaaucuguauugcucauacuugaauugu

SEQ ID NO: 4173234 - RNA, 74 nt, Human
acaccuaaucuauuggguaaauaauguguguuucagaaaaucuacugugaauuuacauaauagacuuuaggugu

SEQ ID NO: 4173235 - RNA, 102 nt, Human
acaccucaguuccuucuacaugagucaugggcuugagguuacccagaaauggacugugaaccuauaaaccccagcaugcaugugguauugcgucgagcaugu

SEQ ID NO: 4173236 - RNA, 106 nt, Human
acaccuccuucaucugugcuuagccgcagcgucugcccucgcuucuuccuaggggucugaggaccucugaggugaggaggagcuuuuugaggaacaugggaggugu

SEQ ID NO: 4173237 - RNA, 85 nt, Human
acaccuguauguugaggcaccucccagcaccaucagggagcaucuuauguuucuuuugcugagaggggcacaagcccacaggugu

SEQ ID NO: 4173238 - RNA, 85 nt, Human
acaccuucagcugcgaggagagcuguagugagaccuuugugucuaaugacugccgucucucuucaauuucauguaaugagugugu

SEQ ID NO: 4173239 - RNA, 55 nt, Human
acaccuucauucaaaugggcuugcagauuggcuuagccugugagaggacaggugu

SEQ ID NO: 4173240 - RNA, 71 nt, Human
acacgaggaucugauggacagggcuggaggugcagcuccugugccucucuguaagggucccucccucgugu

SEQ ID NO: 4173241 - RNA, 67 nt, Human
acacguaaaucucucaguggccagagagccacugaguggcucucugaccacugagggauuuacaugu

SEQ ID NO: 4173242 - RNA, 58 nt, Human
acacguacaauggauccaacacagugcacagcaaauaguugaauauccauguaugugu

SEQ ID NO: 4173243 - RNA, 83 nt, Human
acacguguaccuguguggaaaccgcaugacgaggcuaacaggcucacacaccuuccauguggucuccacacaagcaacacugu

SEQ ID NO: 4173244 - RNA, 63 nt, Human
acacuacaguagugaaacuccuacaugugguugcacagggagugcaauucauauuguagaugu

SEQ ID NO: 4173245 - RNA, 74 nt, Human
acacuagcgauucuagccaaccaucugagaucacgccacuggguccagggagagggcaggauggaugagagugu

SEQ ID NO: 4173246 - RNA, 81 nt, Human
acacuauacuuccauugcugguggccuugagaauagaaacauuuggcucagcaagaaucugggaguaaaauucuuuggugu

SEQ ID NO: 4173247 - RNA, 79 nt, Human
acacuauguccuuuacaucugacuucuuucacuuaguguggugauuuugaguucaugauguagaaugugucaguagugu

SEQ ID NO: 4173248 - RNA, 56 nt, Human
acacucacucacucucucuggaauguccauuuauacagagcugaaggguguagugu

SEQ ID NO: 4173249 - RNA, 58 nt, Human
acacucuacagagcaaucuaccugcaggaagcagguggaauagaagcuuuguaggugu

SEQ ID NO: 4173250 - RNA, 63 nt, Human
acacugacugggcaguauagucaacgguuguuuagugacugccuucuauaugcuuagucuugu

SEQ ID NO: 4173251 - RNA, 60 nt, Human
acacuggucaagagcuagcagagcuagggucuggcuucauuucuguccuugauuagcugu

SEQ ID NO: 4173252 - RNA, 65 nt, Human
acacugugaguaacugagauccaaucccauugggauaugcuuccaaguuauuccacccaaagugu

SEQ ID NO: 4173253 - RNA, 81 nt, Human
acacuguucuaguuaaaguauguauuagccaaaaucauaaacuaaguaugcuucaccauaaauuaacuggguguuuagugu

SEQ ID NO: 4173254 - RNA, 62 nt, Human
acacuugaggaauguggugauucucagaacagaaagggagagaaguacauaucugugagugu

SEQ ID NO: 4173255 - RNA, 60 nt, Human
acacuuuaagcauuucacacuguuuaugaaggcccuaccuuccagguggaauuaaugugu

SEQ ID NO: 4173256 - RNA, 55 nt, Human
acacuuuagaaaaaagaauggugcauguaauuaccaauccuucacucuggagugu

SEQ ID NO: 4173257 - RNA, 79 nt, Human
acacuuuauucauuaugaccaaaucuagugcaucaaagaauacagauggccuagggauuggucauaagaagcaaccugu

SEQ ID NO: 4173258 - RNA, 58 nt, Human
acacuuuguccuuuuucauuguauuuagauaauuaaucaaugagacagagcagagugu

SEQ ID NO: 4173259 - RNA, 63 nt, Human
acagaaaaggacggggacgcaagucagcaagccaccaggcaugugacuucaccugucuacugu

SEQ ID NO: 4173260 - RNA, 73 nt, Human
acagaaaaggaugcugcugcauagcuucuccaauguaccagucauugaggccagcgcgcagcacuuuuaaugu

SEQ ID NO: 4173261 - RNA, 113 nt, Human
acagaaacauauuucuuacaguucuagaagcugggaaguccgagaccaaggugccagcaaaugugguaucuggugaggguuccccugcuucauagauggugccuuguuacugu

SEQ ID NO: 4173262 - RNA, 73 nt, Human
acagaaaccagugucagaaggucuagcacaaggcuggccacucaggccugcagcccuuccugcauguuuuugu

SEQ ID NO: 4173263 - RNA, 62 nt, Human
acagaaaccuggggguuguacauaacgcaggccccagcuauguuuuaccccaggguuugugu

SEQ ID NO: 4173264 - RNA, 60 nt, Human
acagaaauccaauuuaaacacuuauugcuuuuuugagccagaauuaaauuggauuugugu

SEQ ID NO: 4173265 - RNA, 62 nt, Human
acagaacaagaccugcuuauugguggauaagacaaccucuaguaaggcagcucuuuucaugu

SEQ ID NO: 4173266 - RNA, 59 nt, Human
acagaacagaugugggcuacugugggaucucuguggauccccagauucaugucugcugu

SEQ ID NO: 4173267 - RNA, 74 nt, Human
acagaagaaguucaaggugaagucuggggcuauacauuucaaggucauuuauguuucacugugaguuuuucugu

SEQ ID NO: 4173268 - RNA, 71 nt, Human
acagaagcauggcaggugugggguuuuauggggagcacuuccguauccucuuccugcugugcuugagcugu

SEQ ID NO: 4173269 - RNA, 100 nt, Human
acagaagucaugaugauggggcccaugacuggcaaccugcugggagagguggccugcagugugucuggaguacaugggggaccccgggagcaucuucugu

SEQ ID NO: 4173270 - RNA, 61 nt, Human
acagaaucgaccuuugcaugcaaugcaauuuguacagaauugcuuugcagguggauuuagu

SEQ ID NO: 4173271 - RNA, 99 nt, Human
acagacacacccuaaaacucuccagucuuuccacuguaguuaugaugaaguuaaaacuccuuaauuucuccagacagcugugcaaaaucuggugucugu

SEQ ID NO: 4173272 - RNA, 64 nt, Human
acagaccuggguuggacacuuugggcagguuauuuauccucucugugccaguuuccaugucugu

SEQ ID NO: 4173273 - RNA, 84 nt, Human
acagagaaggcuguucuagucuguaagucacccauuaccauaaacucugguuuugagcuacuugcagcagcagcuauuggcugu

SEQ ID NO: 4173274 - RNA, 84 nt, Human
acagagacagacuaugagccaggcuggauagaaacugugcugcaugcauuggugucuuccucuuggcuugagcuuguccauugu

SEQ ID NO: 4173275 - RNA, 62 nt, Human
acagagaccagcaucuucugccuguagucagcauuucagaaagacaauuguugguuaucugu

SEQ ID NO: 4173276 - RNA, 65 nt, Human
acagagagggagugauaaauccuaugggcaaggacauacacucauaugucacucaccuccuuugu

SEQ ID NO: 4173277 - RNA, 57 nt, Human
acagagcaacuuuauuucaugguccuucaugugaccacuccauaugguugauucugu

SEQ ID NO: 4173278 - RNA, 64 nt, Human
acagagcagcuggcucugggaaaaacuggaaaaccaaguuuguguuccccagccggcucccugu

SEQ ID NO: 4173279 - RNA, 57 nt, Human
acagagcagguccagaagugccaggacagguugucaggcuuggaccuucugcucugu

SEQ ID NO: 4173280 - RNA, 60 nt, Human
acagaggaaggcugagcugcccuucacacacgugggcuugccuggagccauuccaucugu

SEQ ID NO: 4173281 - RNA, 113 nt, Human
acagaggacauuaaaagccaugcuaagaaguuuggcauuuauucuaaggucaaagggaagccaauugaaauuuaguaugaagccauuuuaagcacggguguaguguuuuuugu

SEQ ID NO: 4173282 - RNA, 63 nt, Human
acagaggagaugaggagcagaggacugggggugaagaguucugugcucaaguucugccucugu

SEQ ID NO: 4173283 - RNA, 59 nt, Human
acagagggccagccgacuuccagccuccucaacgauguugcuuaaggcuggcuuugugu

SEQ ID NO: 4173284 - RNA, 86 nt, Human
acagagguucauagauacugcuccucaagggaaccugaguggcuauggccaccaggacagcccugaggggguucaguacccuuugu

SEQ ID NO: 4173285 - RNA, 94 nt, Human
acagaguaacucaucccguugaaacuuaguugaaauuuacacucuauccaaaguggauuuuucugagaugucaggaaugugagauuuauucugu

SEQ ID NO: 4173286 - RNA, 62 nt, Human
acagaguacauucagagacuaugcccacuuggcaugguuagagcauagaaugauacuagggu

SEQ ID NO: 4173287 - RNA, 57 nt, Human
acagagucauaagcggagcucgccauugccuaggggagcagagugcuuugacuuugu

SEQ ID NO: 4173288 - RNA, 85 nt, Human
acagaguguagcuacacaguuaaaggcccaauaucuggauaaggucagccuuagauuuagacccugccugacaguuacucucugu

SEQ ID NO: 4173289 - RNA, 72 nt, Human
acagaguuagaaaugucacagaucugauuugacaaacugucugaucuuggcugcauuucuauuccuuucugu

SEQ ID NO: 4173290 - RNA, 75 nt, Human
acagauacauaaacacuucuagggcacacagauuuucauguauguguguacuaugguguuaaugcagaauucugu

SEQ ID NO: 4173291 - RNA, 57 nt, Human
acagauacucagcucuaugcuuuaggcaaaaaauuaguacuggcagcuguagucugu

SEQ ID NO: 4173292 - RNA, 75 nt, Human
acagauagaaaggcucacgcaguuagugaugcuggagaaggaguauucaauugcaaggugggcaagguuaugugu

SEQ ID NO: 4173293 - RNA, 91 nt, Human
acagauaggaaacuaacucccuuuucccguaaucuauuugaggaagaugguuccgagcugggaaggggcugcagguggguuaccugucugu

SEQ ID NO: 4173294 - RNA, 80 nt, Human
acagauauucagaaguaacugugaaguaauuguggaugggauccaugucuacuugguauguuugucuccugagcaucugu

SEQ ID NO: 4173295 - RNA, 76 nt, Human
acagaugcauugcaucgaguagcuucucuggucacuggugaccacgcaucaacggagcugguuauguaacaucugu

SEQ ID NO: 4173296 - RNA, 55 nt, Human
acagauggcaccuuuuugcuguguugucacacaauagaaagaaagggcuagcugu

SEQ ID NO: 4173297 - RNA, 60 nt, Human
acagauggugagccgcugaugucugcacacggcugagccaggcagcucacuacuuucugu

SEQ ID NO: 4173298 - RNA, 64 nt, Human
acagauguugcuugucauucucuuguuguuaagcaggcaccagauuggaucaagcagcaguugu

SEQ ID NO: 4173299 - RNA, 78 nt, Human
acagauuuggcugguuccauagugagaggaggagagugucaggcuucugagaccugccucugcacuaggccgcccugu

SEQ ID NO: 4173300 - RNA, 58 nt, Human
acagcaaacaggccaguuaaaugaagugaauuccauucacuggcagccugccugcugu

SEQ ID NO: 4173301 - RNA, 130 nt, Human
acagcaacauggcaaaaguugaaaggaaacuguuuggccugggugauuuuuugucuuucaggcagaguaaugaguaaauacaaaaucaccucuggugagacacaguccacugguguuuaugucaugucau

SEQ ID NO: 4173302 - RNA, 96 nt, Human
acagcacucaacagggcagccuaggaugcguuuugugugcaaagauguauagauucacuuguacaacacauauucuacagugccuuugggaguugu

SEQ ID NO: 4173303 - RNA, 59 nt, Human
acagcagagaagacacaggcuucaucaucaagcagaacuggaccuguccuucucgcugu

SEQ ID NO: 4173304 - RNA, 64 nt, Human
acagcagcuggguucccaccauccccccacagugccuagcacggggcugggagacaccugcugu

SEQ ID NO: 4173305 - RNA, 68 nt, Human
acaguucuaugucagugugcucugugguacuauauuuacauacaaguacacuacacauaacacacugu

SEQ ID NO: 4173306 - RNA, 83 nt, Human
acaguugagaagaugagguugacauuuugugcuaaguaugagacauaauagcugaaugugaccuuaaagauuuucagaucugu

SEQ ID NO: 4173307 - RNA, 57 nt, Human
acaguugcagcacuacagauuauuucagcugaauaaaucugugcucccugcauuugu

SEQ ID NO: 4173308 - RNA, 67 nt, Human
acaguugccuguuuccuugugugucucucccacucaaaugugagauauuccaggacaggugugcugu

SEQ ID NO: 4173309 - RNA, 59 nt, Human
acaguugguuuugaggcuguacuggauacucagcagcucccuccucagccacccacugu

SEQ ID NO: 4173310 - RNA, 71 nt, Human
acaguuuggcgugauugauagucuuggcucaggagagucccagaauugaacuaacaaccacacuaaauugu

SEQ ID NO: 4173311 - RNA, 78 nt, Human
acaguuuuuccccuucggagaccuuugaaguuuguuuauucuuacaaagcucuggaaggcucgucugaaagaagcugu

SEQ ID NO: 4173312 - RNA, 60 nt, Human
acauaaauauuuuaugcucuuucauguuuuacuauaaggaagaggcaucacuauuugugu

SEQ ID NO: 4173313 - RNA, 62 nt, Human
acauaaccuagaggaagaugggucagagaaugcuucucagagcugagucuucaagguugugu

SEQ ID NO: 4173314 - RNA, 76 nt, Human
acauaagccagauucucaacuuacguaauucuaugggaauucacagaguuauauugguugagaauuuggcuuaagu

SEQ ID NO: 4173315 - RNA, 63 nt, Human
acauacagaccugcagggcagccucgcacuggaauagugguagcccugacuucuucugagugu

SEQ ID NO: 4173316 - RNA, 62 nt, Human
acauaccuucucuuggagaacucacuuaagcuguuaagugaguucuccaagagaagguaagu

SEQ ID NO: 4173317 - RNA, 62 nt, Human
acauacuuugggauaagaguggauauaauuaaugcuuuguucugauucauuccagagugugu

SEQ ID NO: 4173318 - RNA, 78 nt, Human
acauagaacuggugaagugaagggcagaagaaaggaaucauaggguuaguauuuguccuucauuauauuuguuuuugu

SEQ ID NO: 4173319 - RNA, 57 nt, Human
acauagaagugaugcuuauccacuaacaguccuguuuuggcagugucaugucuaugu

SEQ ID NO: 4173320 - RNA, 93 nt, Human
acauaggcaaucaaugcugcuaguuccuuuuucuucuccucuccccagaggucaaguugccuuaaugaauugcaguacugacuugcuccuugu

SEQ ID NO: 4173321 - RNA, 65 nt, Human
acauauaauggguguggcagaaggcuugguauuuauggcauuucugucauuuagcauugucaugu

SEQ ID NO: 4173322 - RNA, 78 nt, Human
acauauacuaugacacaggccauuauauauguauguguguauaugugugugugugucuguguacaugcaccaauaugu

SEQ ID NO: 4173323 - RNA, 91 nt, Human
acauauagacuuuuugcacuguggaaguagauuugagaagguaaagucauuuauuaacucaacaaauauuuacugagugccuauuaugugu

SEQ ID NO: 4173324 - RNA, 68 nt, Human
acauauagauuaaugcauaaagggauacguagauagaucuauuugcucuagcugcagugaauauaugu

SEQ ID NO: 4173325 - RNA, 86 nt, Human
acauaucauuauacauuugucaaaacacagagaacaccaggaaugaacucuaauguaaacuggauuugagggugguaaugaugugu

SEQ ID NO: 4173326 - RNA, 75 nt, Human
acauaugcaguacagauaauucuacaaaaucauagucguuaguugaucccauguagugugugugugugugugugu

SEQ ID NO: 4173327 - RNA, 82 nt, Human
acauauggguuguuuucaguuuagaagaaucaugaacaacacugugaugaauuuuuuggacuguguuuuggugaauauaugu

SEQ ID NO: 4173328 - RNA, 70 nt, Human
acauauuccuguuuuuaacacuuuggcagcaaauaagacaagauuacuaaauguguuauaggaguuaugu

SEQ ID NO: 4173329 - RNA, 57 nt, Human
acauauucuucaucagagaugcacuagaaaacacugucuagugcguaaagaaggugu

SEQ ID NO: 4173330 - RNA, 60 nt, Human
acaucaguccuuagucuggauggcuucuuggagccacagcaaccucaaaggagcuaaugu

SEQ ID NO: 4173331 - RNA, 72 nt, Human
acaucaucuggugcuaacaaauguggaacacuucacugaguacucugaacauuuuuugcagccuaugauugu

SEQ ID NO: 4173332 - RNA, 93 nt, Human
acaucauuguacagaggaauguucuggaacaccgcuuuguaagauaguucaaggugaugugcaaagcaauauacaguuuguacacaugguugu

SEQ ID NO: 4173333 - RNA, 92 nt, Human
acauccaaaguauguagcaguggguuggguaccagugccagagcaggcuccuggaggccgcuggcugggccgggccuugugccuuuagaugu

SEQ ID NO: 4173334 - RNA, 69 nt, Human
acaucccaacauugccacaugccacguuuuaaauuuaaacaaauaacaguauaacaguguugggugugu

SEQ ID NO: 4173335 - RNA, 76 nt, Human
acauccuucagcugcccuguuaccaaggugcacagccuugaacaaguaggaaguggcagggaggguugaggaaugu

SEQ ID NO: 4173336 - RNA, 61 nt, Human
acaucuccaggaaccaucaugguaacuaaauuaauuguuuaccguauucuuucuggaaugu

SEQ ID NO: 4173337 - RNA, 63 nt, Human
acaucugacucaguuuucugccacaaucuagagagaaaguuuggcuaaacuugggucagaugu

SEQ ID NO: 4173338 - RNA, 126 nt, Human
acaucuggcugaagggugaaaaugaacacaaucacccagguguuuggccugcaugaugacagauaucaaacacuuagaaccaucugggugauuggcauauuuucuuuuucacuuuuauccagaugu

SEQ ID NO: 4173339 - RNA, 80 nt, Human
acaucuugauauuuuuccuuuuuucaccuggccuuucagagcugaaaggucauugaaaaggaggaaguacuuuuaagugu

SEQ ID NO: 4173340 - RNA, 65 nt, Human
acaugacucaucaggaaguucagcucuaguuacaauuuauagcaagcuaccuagauagucuaugu

SEQ ID NO: 4173341 - RNA, 63 nt, Human
acaugagggacguaauucuaaagaguacuggccuugcaauaacucuuuagauuuaucuuaugu

SEQ ID NO: 4173342 - RNA, 71 nt, Human
acaugccauuuacuuggaggagagaggcuugugaaacagcacuaagguuucagucagguugaugaguaggu

SEQ ID NO: 4173343 - RNA, 59 nt, Human
acaugcccaccuucaucagauggaaaccacacacuuguuuauucugcagggggccgugu

SEQ ID NO: 4173344 - RNA, 75 nt, Human
acaugcuauucuagccaaagaagguauauuuguauagauauaaaaucucuacagauuuuuggcugggauauuugu

SEQ ID NO: 4173345 - RNA, 62 nt, Human
acauggaagcaaaguucuauuuuaaacuugauaagcuggagaugucugcuaugcuuccaagu

SEQ ID NO: 4173346 - RNA, 94 nt, Human
acauggagacagggacuuggcccaccugccugcugguggucaccugucuugcuggugcucagaaggagggggcaagcccuggagcuuucccugu

SEQ ID NO: 4173347 - RNA, 61 nt, Human
acauggcacaacccugucucuacuaaaaauacaaaaauuagcagggcgugguggcacaugu

SEQ ID NO: 4173348 - RNA, 64 nt, Human
acauggcaggggcugguagauuucagaugaauuccucccauguaugugccauccccagucaagu

SEQ ID NO: 4173349 - RNA, 55 nt, Human
acauggccacagggucacacgcuguuaggggcagagccaaaugcugugguuaugu

SEQ ID NO: 4173350 - RNA, 59 nt, Human
acauggcgggaguuucagauaccauacaagucacuggucucucuggaacaacuucaugu

SEQ ID NO: 4173351 - RNA, 66 nt, Human
acaugggugaaucuuaaagacauuacgcuaagugaaagaagccagucuccagagguuacauccugu

SEQ ID NO: 4173352 - RNA, 87 nt, Human
acauguauuuuggaaggugcauuuugggcaaaugaucaacauuuguuucuuuggcuaugauuuacuguuuaauuccaaaaguagugu

SEQ ID NO: 4173353 - RNA, 58 nt, Human
acaugugcucuugcuguacagcccuggcuaauuaguugacagcauuacuaauacaugu

SEQ ID NO: 4173354 - RNA, 116 nt, Human
acauguggucagaggaggaugcaugacuugggaggaugucugcccugugaccugagggaagacuaagaauucagggcaugucugauggcccaagucaucccgcucugaaggugugu

SEQ ID NO: 4173355 - RNA, 85 nt, Human
acauguguuuuccuacuuaugacggucacaacuuaauuaaauaaacuggaagcuuagguauagcaugaauagggcauauauaugu

SEQ ID NO: 4173356 - RNA, 57 nt, Human
acauguuaaacaucauggaaugaagucauaaaacucagacuguggauuuugacaugu

SEQ ID NO: 4173357 - RNA, 130 nt, Human
acauguugguuaggggcacucccucucuccuuccuuccaguggcacuggagacuagagcagcucccugaacaggcucuggcaucaggcugccuuggauuugaaugcaguucuaaugccuccuagcugugu

SEQ ID NO: 4173358 - RNA, 65 nt, Human
acauuaaagaguaagguuaguuuaccaccccaaggugagcuucaaugugccuauaccuuuaaugu

SEQ ID NO: 4173359 - RNA, 113 nt, Human
acauuacaagguaugaagcguucgagauagguagaauagagcagguuauauuagagaagucucuucuaaaauuguguuggcuagccugggauuugaacuuauaccguguaugu

SEQ ID NO: 4173360 - RNA, 67 nt, Human
acauuacaaugaugggauucagccaugucaauucaugugguuguaguucauucauucucacugaugu

SEQ ID NO: 4173361 - RNA, 129 nt, Human
acauuagccucaucugaggaacuuaaaaaacacugaugcccaggccccaccucagugauucugauuugauuccucuggguggagccuggucaucuguguuugaagaaucuucccaagugaggcuagucu

SEQ ID NO: 4173362 - RNA, 110 nt, Human
acauuagcuucuggaauccuugcauuauacagauagaguucucgugggacuaccacaagcagcaggaaucuguucuguauaagaauuauagauuuugaauuagaaaaugu

SEQ ID NO: 4173363 - RNA, 64 nt, Human
acauuauacagguagggucuauguuagauaaaacuguuucuaaaaucuaacucuaccuguuugu

SEQ ID NO: 4173364 - RNA, 72 nt, Human
acauuaucccuggcacaacugccucuuagcuagaucuugaaagugccuggggcaaugaccagaggagaaugu

SEQ ID NO: 4173365 - RNA, 65 nt, Human
acauuauccugcuuuuaagccucaaauuauggccaacccagccauuagugaaggaaggaugaugu

SEQ ID NO: 4173366 - RNA, 68 nt, Human
acauuaugcuaagugcaacaagccagucacaaagagacuaauacugugugauugcacuuauaugaggu

SEQ ID NO: 4173367 - RNA, 80 nt, Human
acauuauugaacagcccagguuuaccuuuucauccuauguauugagugggguuaaacuucugagcugugacaguugaugu

SEQ ID NO: 4173368 - RNA, 90 nt, Human
acauuauuuaacuuuucuugcaaagugcuuuucuaucucuuuugguaaguguaauuucuauuaugagaggagaaaagucagggcuaaugu

SEQ ID NO: 4173369 - RNA, 107 nt, Human
acauuccaacuucccaucauggugaacaaggauucccaaagaagaaauguccaaguaauuuuuaccucguuguguccuuguuccuuaggaaaaauauggcccagugu

SEQ ID NO: 4173370 - RNA, 56 nt, Human
acauucuacaggacuggcaaucccuccuaaaggagaggaaaacccuguagugaugu

SEQ ID NO: 4173371 - RNA, 56 nt, Human
acauucuauuguagcacccuguaauuuuccuuuacagcaugaucacaauggaaagu

SEQ ID NO: 4173372 - RNA, 89 nt, Human
acauucuccaugaguuuguguucaugucuggccagcggggcugaccuucugcagcccugagcuagugugggcaggggcuuggagaaagu

SEQ ID NO: 4173373 - RNA, 55 nt, Human
acauucuguaucaucugucucacauuuuaccauuuggagcaggugugcagaaugu

SEQ ID NO: 4173374 - RNA, 76 nt, Human
acaaucagcauguauugcugagaauucucccaaacaauuacguuugaagagcuuuucuguaauaacaucugaaugu

SEQ ID NO: 4173375 - RNA, 81 nt, Human
acaaucgaaaccugcuaagugucuguguuucugcaauccugcagggguuguugaaagacauuauuuauauauuuccuuugu

SEQ ID NO: 4173376 - RNA, 65 nt, Human
acaaugaacacacaaggaauucucguccagacaaagaugaauggauucaucuguuuguucgcugu

SEQ ID NO: 4173377 - RNA, 65 nt, Human
acaaugaauuuaauaccuuauuucacguucaaggaaaccagggguagggcaguuaaguacaaugu

SEQ ID NO: 4173378 - RNA, 59 nt, Human
acaaugaugguauugaugagcuaauuugaauugagugcaaucauugccauuaccauugu

SEQ ID NO: 4173379 - RNA, 72 nt, Human
acaauguaguugucaugagacaauagacuauuugacuuagcaagucuucaguuauauugccaaguauauugu

SEQ ID NO: 4173380 - RNA, 67 nt, Human
acaauucuggguauuuauauaggguaauuaaaacuuaaaggcuuuuuguauguauacugagaaucgu

SEQ ID NO: 4173381 - RNA, 70 nt, Human
acaauugcaaacuagcaucaacuaguacaucaucucuuugaagacugcuggucuauguuauguaucaugu

SEQ ID NO: 4173382 - RNA, 61 nt, Human
acaauuguggcaauuuguauguuuuaacuugaacuuauuguaccaauugccuucuaguugu

SEQ ID NO: 4173383 - RNA, 57 nt, Human
acacaaaaucaaaguccuaggcugaugugacagcucucaaauggcuuuguucugugu

SEQ ID NO: 4173384 - RNA, 71 nt, Human
acacaaugugauagcuaugguggggcagaaaacaauuucugauauaacacucuagcuauaacaacuggugu

SEQ ID NO: 4173385 - RNA, 74 nt, Human
acacacacacauuuaaaaaggaacauauggucuuuuaagugaaccuuuaaagugugagagaagggcaugugugu

SEQ ID NO: 4173386 - RNA, 76 nt, Human
acacacacauguauagacacucauacaguuacuucugaacuuggcugugcugcauuuguuuguugcaugugucugu

SEQ ID NO: 4173387 - RNA, 75 nt, Human
acacacagauuuuacauggugggucaaggauucaauuaaugucauuuggcuucaaaaucuaguggucuguguugu

SEQ ID NO: 4173388 - RNA, 74 nt, Human
acacagacaucauccucagcuucccacgugugcaacccagcaucaguggagcuaagcaugagauaaaauugugu

SEQ ID NO: 4173389 - RNA, 120 nt, Human
acacagaucauuggaccucaccccagaguucugauucaggagguguugccagugccgccgguccagggaccacacugugggaaccacugaaucagggagccuggucccaguuauaugugu

SEQ ID NO: 4173390 - RNA, 81 nt, Human
acacagcaaugccuaggguggauuugugcagagugauuagagccuuagucuggaauaaaacuacuuacaacgugaaugugu

SEQ ID NO: 4173391 - RNA, 56 nt, Human
acacagccgugaaucugcuucucuugcuacuaacagaacaguggaaauggcugugu

SEQ ID NO: 4173392 - RNA, 63 nt, Human
acacagccucuuaagagaaucagaauuuguuucuuccuuugucugucucauaaaggggugugu

SEQ ID NO: 4173393 - RNA, 69 nt, Human
acacaguaaauauugucuccucugugaucauaauagugaugaaaaugauggugacagugaugcugaugu

SEQ ID NO: 4173394 - RNA, 58 nt, Human
acacaguaggccaccaugucauggccagcaugggcgaugugaugguggguugcucugu

SEQ ID NO: 4173395 - RNA, 80 nt, Human
acacagucgugauuagaauuuaacugaugguuuuguauuauaacuucuaagaccugccagaaugcuaguccugagagugu

SEQ ID NO: 4173396 - RNA, 77 nt, Human
acacagugggccuagcaagccugcuacuagagacagccaugggcugguuuagcuguaagguucccucucauuugugu

SEQ ID NO: 4173397 - RNA, 55 nt, Human
acacaguucaggaucaaauagcaccacuuacuggguuuuuaacucuugacugugu

SEQ ID NO: 4173398 - RNA, 100 nt, Human
acacauauguguguguauauguguauauauacacauauguguguauauguguauauauacacauauguguguauauguguauauauacacauaugugugu

SEQ ID NO: 4173399 - RNA, 61 nt, Human
acacaucaccuguccacgcagucugccuaaauccuggccaggaaaaacguggugggagugu

SEQ ID NO: 4173400 - RNA, 64 nt, Human
acacaucuacugauauuccaggaaaauaacucucuuauuuccuggaauacacaguuuggugugu

SEQ ID NO: 4173401 - RNA, 72 nt, Human
acacaugacccacaggaauauaaguuugaguuugccauauuugggaauuuuuguguuucugagucaauaugu

SEQ ID NO: 4173402 - RNA, 77 nt, Human
acacauguacacacaaucucuggucaguauuccuauuaggaaaugugccacaugauauugucucuauguaagugugu

SEQ ID NO: 4173403 - RNA, 60 nt, Human
acacaugugcaugugcacacaugcgugcacaaacaugcagugacacacaugcacaugggu

SEQ ID NO: 4173404 - RNA, 59 nt, Human
acacauuauaggcaaucaaaagugauaauagaaagauuuguugaaugcuuauuaugugu

SEQ ID NO: 4173405 - RNA, 70 nt, Human
acaccaagucuguuucccacauuucuggagaccaaggaauucaagaucaagguggcagcagauuuggugu

SEQ ID NO: 4173406 - RNA, 82 nt, Human
acaccaccacacagcugcucuucuguugaaguuguugcugcauuaaugagcuuccagacaaaggcaugacuguguggugugu

SEQ ID NO: 4173407 - RNA, 115 nt, Human
acaccacguuaagaaccauggcuacuuauaccauuaagccucacuuaguuccuaagcagagcuucauauucaauaaucuguggauggauugaggcagugggagugccgugggugu

SEQ ID NO: 4173408 - RNA, 129 nt, Human
acaccagugucauuagcguaaggacacagaggcaggagcaaaguucacagaagauuccaauuccacccagguaugaauaggaaauuaucuguggaauggucugcuuccccuuaguuacacaugugguuu

SEQ ID NO: 4173409 - RNA, 67 nt, Human
acaccauucauguuuuugaacuaugcauuugauaacaaagguauguuucaucaggcauggagugugu

SEQ ID NO: 4173410 - RNA, 67 nt, Human
acacccaacacuguuauacuguuauuuguuuaaauuuaaaacguggcauguggcaauguugggaugu

SEQ ID NO: 4173411 - RNA, 78 nt, Human
acacccacucaaugucugucuaucuauuuaaauagggcuucuucccccaguggauagaaggaagaauugaucacgugu

SEQ ID NO: 4173412 - RNA, 69 nt, Human
acacccacuggcccauaaaggccugggagccacgccagcacccaaggccuucaagccagcucagggugu

SEQ ID NO: 4173413 - RNA, 96 nt, Human
acacccucaggcagccuccaucauuugauacagcugucuguucaagucugccaacaggacaguuaaaaauagauggccagucuccuuuaagggugu

SEQ ID NO: 4173414 - RNA, 59 nt, Human
acaccuccugcccagguaaggaaccugucugucccugccuuugcaauugaggaggaugu

SEQ ID NO: 4173415 - RNA, 80 nt, Human
acaccuucugcucuccccagaagacuuggaguugcuaucauauuucuguggcagcucccagagcuuccaagcugaggugu

SEQ ID NO: 4173416 - RNA, 71 nt, Human
acaccuugccacauuuguuacauucguaagguuuuucuccaguaugaauuguccgauguugugcaaggugu

SEQ ID NO: 4173417 - RNA, 125 nt, Human
acacggccgcuuuggggccccgagucuuugucugccugggacuggauguguuugugucggugugacuaaugggauuuauggaugucagugccagggugacugaugaagggcuuggcagcacgugu

SEQ ID NO: 4173418 - RNA, 64 nt, Human
acacuaagaucuaggcacuagcuugaccuuccagaguguuucacaagcuuccaggaucuggugu

SEQ ID NO: 4173419 - RNA, 81 nt, Human
acacuaccuagugacaacauugaguuaugugcagcuuaguuaugugugauaugugugauucuguguugcugaugguggugu

SEQ ID NO: 4173420 - RNA, 78 nt, Human
acacucuugcaccaagaugcaacacauuugaugagcgaucucauuucugcaucaugauguuugcaaggagaagagugu

SEQ ID NO: 4173421 - RNA, 104 nt, Human
acacugaaaugcaaucguuuguuaaaaggcuguucucuucuguugucaauaaauuuccuuuugcugacaguuacugcuguaacagaugucuguauguugguugu

SEQ ID NO: 4173422 - RNA, 58 nt, Human
acacugagcugagcauucuuguuccagaggaaucgucugggagagccuagcucugugu

SEQ ID NO: 4173423 - RNA, 59 nt, Human
acacugcagcccuauuguuugcauaguagcuaaaauuaugcagauguuugguucauugu

SEQ ID NO: 4173424 - RNA, 84 nt, Human
acacugcggaaccgcuccugaccagcugugucccacaucugcagcgacaggcacuggucaggcuguccagcccuucccuggugu

SEQ ID NO: 4173425 - RNA, 61 nt, Human
acacuggagauggaccucacaaaugcaagauaugugggaaagccuuuguuuaucccagugu

SEQ ID NO: 4173426 - RNA, 63 nt, Human
acacuggagcuucuagcccacggauuuuuuugugauauggcuaaagaaaguuucuuccagugu

SEQ ID NO: 4173427 - RNA, 104 nt, Human
acacuggauuuaaacugccugugaagcucuuuucaccauuaaaguguaggaaaauagacuuuuuaggggaaagagagauguucauuggaguuuggguuuuuugu

SEQ ID NO: 4173428 - RNA, 61 nt, Human
acacuguagacuguugaaguacagcuguguauccagcauuacuuuucaguguguauagugu

SEQ ID NO: 4173429 - RNA, 60 nt, Human
acacuguugcuuacaguuuuggacccuggcacuuccuggggccuaaguaacaacaguugu

SEQ ID NO: 4173430 - RNA, 92 nt, Human
acacuuacuauaucaaagcacagggcugugcugugcauuuuagcaucugccaggagaauuacaauguaaggcaugguucuuguugucagugu

SEQ ID NO: 4173431 - RNA, 69 nt, Human
acacuuauuucuugucuaaccagugcugaguccuaagucugacacagaauggaugcgcagaaauugugu

SEQ ID NO: 4173432 - RNA, 88 nt, Human
acacuucuugauuucaugcaguuaagauucacauugcacuccagcauguugcaguuaauggcuacuguaugaaauuucaagaucaugu

SEQ ID NO: 4173433 - RNA, 60 nt, Human
acacuuuuguguauauccaguucuauccucauugaacuuuagaauauagcucagaagugu

SEQ ID NO: 4173434 - RNA, 79 nt, Human
acagaaaagaauucucuuccauugaaacagagacuggauaaucacauuuugggggguuguuuggagggaauuuuacugu

SEQ ID NO: 4173435 - RNA, 116 nt, Human
acagaaaaugguauuaaagcacagagauaauuuuaaguuuuaaaaucuuaaauuggauuacaaauaaacuaccaauuuaguagagaaauuaagaaagcucuguugccauuuucugu

SEQ ID NO: 4173436 - RNA, 68 nt, Human
acagaaagauaggcacaaggucacgguugcugaaggaaagagcuauuaccaaaaccuauacuuucugu

SEQ ID NO: 4173437 - RNA, 91 nt, Human
acagaaagccaagaaaagugagcuucagaaaugaacacugucuggaaccaggcuaagauguggucugagcauuuuuaccagguuuuauugu

SEQ ID NO: 4173438 - RNA, 59 nt, Human
acagaaauucaaacuggaauuuagguagcugaaacuggacuugaaguuggaguuucugu

SEQ ID NO: 4173439 - RNA, 69 nt, Human
acagaacagaugaugugcacagauagagauauaaauaguaauuuuugucugggcaugcauuuucacugu

SEQ ID NO: 4173440 - RNA, 57 nt, Human
acagaagaguaaaggauuuuugcucugacaguuggaagaaaguguuuucuuuucugu

SEQ ID NO: 4173441 - RNA, 91 nt, Human
acagaagcacacucucuuccucucccacgcuggcagcggaaagggccgauugaagugaguggcucaguuucugcccagcugggacuucugu

SEQ ID NO: 4173442 - RNA, 58 nt, Human
acagaagugaguggcaagaacuuaacuaaagaguuacaaugccaucccuuauauuugu

SEQ ID NO: 4173443 - RNA, 63 nt, Human
aauuuggggaucaauagaaugccucaugagucccagaacauguaggcaugggaugcccagauu

SEQ ID NO: 4173444 - RNA, 67 nt, Human
aauuuguacacaggucauucagggaugauucaaagaacaaaguaagcccuugacugugugacaaauu

SEQ ID NO: 4173445 - RNA, 123 nt, Human
aauuuuaacuccuuuaugugcgucuuuagagcugaguaguguuuaucuuggggaaaggauaagguccuucuucaauagcaagcgcauaaauagacugauaaggggacgugcagaguugaaauu

SEQ ID NO: 4173446 - RNA, 59 nt, Human
aauuuuauuagaaggcaaggggcuaauggcagccaaucaguguuaaugcugauaaaauu

SEQ ID NO: 4173447 - RNA, 93 nt, Human
aauuuucaguuuuuaaucuaaucugccuuccuaaucuuccuggugauuggaaacagguuaggaaugggagguaauggaauaaacaugaggauu

SEQ ID NO: 4173448 - RNA, 59 nt, Human
aauuuugagacaaaguuguuggauguucaucuguaugaacacugaaaugucuuaagauu

SEQ ID NO: 4173449 - RNA, 89 nt, Human
aauuuugcuuacucuguuaaaugggaaucacaaugccauccgugcauaagaaggcaccccacagaccucuauuuacagaaagcagaauu

SEQ ID NO: 4173450 - RNA, 69 nt, Human
aauuuuguccagauacucaucucuccaccacguagccaacuacaacaggagacaaugagugacagaguu

SEQ ID NO: 4173451 - RNA, 62 nt, Human
aauuuuguucagaguauuaauugauuuauuuguaaaucagcuuaugccuuuugaggaaaguu

SEQ ID NO: 4173452 - RNA, 65 nt, Human
aauuuuuagucagacauugagcaucuaauaugugcacagcauuguucaaaguuugccuaaagauu

SEQ ID NO: 4173453 - RNA, 73 nt, Human
aauuuuucaucaaggucaccuucauaacaacugugacagauucaguguuuguuagguuccuuuguggagaauu

SEQ ID NO: 4173454 - RNA, 103 nt, Human
aauuuuuuauauacuucugaacaaacugaauggguuuucugucaaacuuugugcauuuuuuuaagaguacaagagcccuuucagauugacgaggaaaaaaauu

SEQ ID NO: 4173455 - RNA, 56 nt, Human
acaaaaacuggauggaauagagugcauuuuugcuuuguuucaugcuauuuucuugu

SEQ ID NO: 4173456 - RNA, 129 nt, Human
acaaaacuccagugucuuaauguccuggcgugccaucuccuggucaacugguagagcagcaauccuuuccuauaagccaguggcccucuggagaagggcacacugaacacaauaagcaugacuuuuagu

SEQ ID NO: 4173457 - RNA, 61 nt, Human
acaaaauagaguucuccccugggaggaugaugccuccagggcaauaggaacacuuuuuugu

SEQ ID NO: 4173458 - RNA, 68 nt, Human
acaaacaauugcuaaugcuucuguugagugcucaccaugcgccagccaugagucuaagcaguuuaugu

SEQ ID NO: 4173459 - RNA, 58 nt, Human
acaaacacaguuucugcauugguaguguaaagcauaccuuguuaggaacguguuuugu

SEQ ID NO: 4173460 - RNA, 60 nt, Human
acaaacaggagagagauggauugagaaagcauucaguaacuuacuuauucaccuguuugu

SEQ ID NO: 4173461 - RNA, 86 nt, Human
acaaacaucauggggugaccaugagcauuuaauggaauacuauacauauaaagcucuuggaacacuaccuggucuaugaugcaugu

SEQ ID NO: 4173462 - RNA, 78 nt, Human
acaaaccucuaagguggccauaggaccagccugggcuccaacacccagcccaugcacaccuggccauugcagguuugu

SEQ ID NO: 4173463 - RNA, 82 nt, Human
acaaacucaaagcauuuuagauaaagcaucagucuaauauauuauagauugauggaguauaauaaaaugacauauagucugu

SEQ ID NO: 4173464 - RNA, 61 nt, Human
acaaacucagcaucaguguccagaacaaccgaaguguucggcauauuaauggugggugugu

SEQ ID NO: 4173465 - RNA, 82 nt, Human
acaaagauggcaaugacaucucccugcucuaaacagcugacacagcagcauuaguuggguugguggucacggccucuauugu

SEQ ID NO: 4173466 - RNA, 82 nt, Human
acaaaggauuuuaugcccaggugccauucccagcaaaucugauuaaacugcucugggaugaggccuaggcacgggccuuugu

SEQ ID NO: 4173467 - RNA, 67 nt, Human
acaaaggcagucuaguccccaggcaagaagggguuuuguuuugggaaagggcuguuauucucuuugu

SEQ ID NO: 4173468 - RNA, 76 nt, Human
acaaagggagacaggaagucugaaggagggagaacaaaguugcuucuucuucucucugcuuccuguuucuuuuugu

SEQ ID NO: 4173469 - RNA, 56 nt, Human
acaaagguaguauauauauuguuuaauugccaagcaaaguuauauguuaucuuugu

SEQ ID NO: 4173470 - RNA, 65 nt, Human
acaaagugcagagagcaauacucuacuucgacaaaagugguuagggcugcuuucuauauuucugu

SEQ ID NO: 4173471 - RNA, 57 nt, Human
acaaagugcugacauuacaggcaugagccaccgugccuggcuauuuuuuugcuuugu

SEQ ID NO: 4173472 - RNA, 113 nt, Human
acaaagugugcccuguguauuaauaucagccaacagugcuucauucacacauugcaugacuauugaugucuuaaucuguggagguacugagccaguguggggcauaugauugu

SEQ ID NO: 4173473 - RNA, 108 nt, Human
acaaauauuuauugagccuacugugagccaggccugcaugcacaaaggucggugagaauauucuaguacagggcuuggcucauaaguggaugcucaacagauauuugu

SEQ ID NO: 4173474 - RNA, 84 nt, Human
acaaauauuugcauuacguuuuuuaugugucagggcugugcuuauaguguguacacuguguuuacauagagaauauaauuuugu

SEQ ID NO: 4173475 - RNA, 87 nt, Human
acaaaugcuauaugugaaugaggcagcaagaggccauggacacgcauauugccuggaucuccucuauucauauaugugccccauugu

SEQ ID NO: 4173476 - RNA, 71 nt, Human
acaaauuaaugacuuguccuuaaaauaucaauuuugugauucauguuuuggcaggugguuagauguuuugu

SEQ ID NO: 4173477 - RNA, 65 nt, Human
acaacauggcaguuauuuguccccagagcaagcaacaccggagggcaaggaagaagccaugaugu

SEQ ID NO: 4173478 - RNA, 55 nt, Human
acaaccacccaaaccuuucucucugcccaagccagagccacuuuugggugauugu

SEQ ID NO: 4173479 - RNA, 55 nt, Human
acaaccgcggggcccagcgguuccugugggugcugacaggagccuggcggugagu

SEQ ID NO: 4173480 - RNA, 128 nt, Human
acaacuaaauuccccaguuagaaacuaguucuuuucccuccuucaucucgugggaauguauaacuauaugugcaggugcaggaagggggcugagaguuccuucucuaaaagacuccugggguaguugu

SEQ ID NO: 4173481 - RNA, 109 nt, Human
acaacuggcaaagcuugauguucagguuugaaaaaagcaguauguaauaagcuuucauuauuuacagccugcuuuuuucaaaaaaggauuuaaggagaugagaaguugu

SEQ ID NO: 4173482 - RNA, 63 nt, Human
acaacugucaguaaagaauauuuugaagauauugucaaauccuucuugugagugacaaguugu

SEQ ID NO: 4173483 - RNA, 92 nt, Human
acaacuugcuaaaguagguauuauuauuuuucccgguuuuauugauaaauaaauugaggcacagagaaguaaaguaucaugccuaauguugu

SEQ ID NO: 4173484 - RNA, 64 nt, Human
acaagaaauggaagauccauggugagacucgggagaacucuccauggagacuuccucuucuugu

SEQ ID NO: 4173485 - RNA, 60 nt, Human
acaagaagcaaggucagggcccaggccccaugcaggcuucgggccggccuugcuccuugu

SEQ ID NO: 4173486 - RNA, 60 nt, Human
acaagacugaguggcuuaagaaaagcuauuuuuaggcucggcacaguggcucacuccugu

SEQ ID NO: 4173487 - RNA, 92 nt, Human
acaagagcaucucagcuaucuuuucuauguauguuaucaucccccaaaugccacugugaggcaugcaugcaaggugguguauacugcauugu

SEQ ID NO: 4173488 - RNA, 75 nt, Human
acaagaguuccuauacugggucaguccuuugcauacaauuaagggggucuauaaacuuauaugggaaaaacuugu

SEQ ID NO: 4173489 - RNA, 57 nt, Human
acaagcgagcggcuucuggccggucuugcuaaggggucugcaaagcuguucucuugu

SEQ ID NO: 4173490 - RNA, 85 nt, Human
acaagcuagauaagauaguccagcacaaucugauaaagaaaaccaugggcagaguguguauaucuggauaucuauuaaguagugu

SEQ ID NO: 4173491 - RNA, 69 nt, Human
acaagcuugggcucuucucaggagcuaucuccuucaggaagccuuccaugagagggcccugugccaugu

SEQ ID NO: 4173492 - RNA, 79 nt, Human
acaaggaguaacuggaaaguauucuuucacugguggugauaaagaacaccaaggcagaacuuccccagacucucccugu

SEQ ID NO: 4173493 - RNA, 63 nt, Human
acaaggcacuuuaugaagaggaaaagagcugaacaaaagguguucucuucaggagguccaugu

SEQ ID NO: 4173494 - RNA, 55 nt, Human
acaagguuuauuaauaaguugguaguaguacugacuuguuagauauaaaguuugu

SEQ ID NO: 4173495 - RNA, 105 nt, Human
acaaguaagaaucauagggaugacguuuguuauauuuccuuucaucaugccugagagcauagugggaggaaguggugauauuuuuauccucuggguuguugaugu

SEQ ID NO: 4173496 - RNA, 57 nt, Human
acaaguauuggugaggauguaggauguagagaaaucagaguucccaccauugcuugu

SEQ ID NO: 4173497 - RNA, 87 nt, Human
acaagucaagagucacuccauaaaucccagggccacccacuuucuuaacucccaugggaauuucucguggaugacaaauuugcuugu

SEQ ID NO: 4173498 - RNA, 59 nt, Human
acaagugacucauacucugguugccuuaauacccagagucauccaggagagaugcuugu

SEQ ID NO: 4173499 - RNA, 76 nt, Human
acaagugagggaucuuugggauuucacugggccucaacuuaucacucagugacaguuucaggcauuuuucaaaagu

SEQ ID NO: 4173500 - RNA, 55 nt, Human
acaaguguauugugcuucacagccuaaguguuucuagggcucagaguacacgugu

SEQ ID NO: 4173501 - RNA, 55 nt, Human
acaagugugugcaguuuguaaaaacucaaugagcuguacauuuguguacacuugu

SEQ ID NO: 4173502 - RNA, 115 nt, Human
acaaguguuugcucugucuguaccacuccccaggcacuucaucauuaggguggucaucugauuacucuauuggcuguggguuccuggaaagcagguuaucgagcaccaucacugu

SEQ ID NO: 4173503 - RNA, 75 nt, Human
acaaguucaaaacguuuucaaaagugaaaaagcuuacaccaaguuugucaaguuugcaaauacguuugaaaaggu

SEQ ID NO: 4173504 - RNA, 67 nt, Human
acaauaacuuuuuccugauauaauuaaaguuuguccauugauuucaguucacagggaagguuauugu

SEQ ID NO: 4173505 - RNA, 82 nt, Human
acaauaagagaugaguggaccaaagauaggaggcaguagauagaguggauuuuguucccuaacuucacuucauugaaguugu

SEQ ID NO: 4173506 - RNA, 89 nt, Human
acaauaauacaauuucaucuugugcuucaauguuucauguccugggggcaaguuagguuggugcuacuggaaagagguuaaauuauugu

SEQ ID NO: 4173507 - RNA, 83 nt, Human
acaauacugugauucuaaagcuuugagcagcagccuagggaauuucaccuauucuguagagguauuaggggagcagagguugu

SEQ ID NO: 4173508 - RNA, 81 nt, Human
acaauagaaauaaugggagaaugaugugagguaauguuacauguaaaauguuauacacaauucuuuuacuacguuuacugu

SEQ ID NO: 4173509 - RNA, 86 nt, Human
acaauagguauggacaaucugagccauggcuggggucccugagcccagugggccucaugauggcucaggaaguaggugcugaaugu

SEQ ID NO: 4173510 - RNA, 62 nt, Human
acaauagugguagugcuggucauagugaugaagaagaaacaagagcagcagcuaccacuugu

SEQ ID NO: 4173511 - RNA, 60 nt, Human
acaaucacuugagugaacuugagagugaauccucuccauguuaagccuugaggugauugu

SEQ ID NO: 4173512 - RNA, 58 nt, Human
acagcaggcaggcugccagugaauggaauucacuucauuuaacuggccuguuugcugu

SEQ ID NO: 4173513 - RNA, 106 nt, Human
acagcagugcagguuguccacugcaauacuccagggguugcuauuuacaucauagccgaugugaaugacuuucuggaguuuuguagugcacagccuuccuggcugu

SEQ ID NO: 4173514 - RNA, 56 nt, Human
acagccaacgucuuucuuacuuccugaucggacaggaaguagguuucaguugcugu

SEQ ID NO: 4173515 - RNA, 57 nt, Human
acagccagagcuucggcugaauccuaagccugcugcagggaccccgaggcucucugu

SEQ ID NO: 4173516 - RNA, 94 nt, Human
acagcccugugagauagguaucacucucccuggguuacagaugaggagacugaagcucagagaaguugugccuggccaaggucacacggguugu

SEQ ID NO: 4173517 - RNA, 60 nt, Human
acagccugacuuuuguugucacacggguacuaagccauauugagaggaagugcaggcugu

SEQ ID NO: 4173518 - RNA, 69 nt, Human
acagcgaugcccuucucuuugcuggauacuggcuuucccagcaucccuggcagcuaaggguggucaugu

SEQ ID NO: 4173519 - RNA, 82 nt, Human
acagucugggcauauuagaaauguuuacucacccccuuccauuccuggaagcagggagaaauuuuucuucagucuucacugu

SEQ ID NO: 4173520 - RNA, 89 nt, Human
acagucuugcucuaucacccaggcuggagugcaguggugcagucucagcucacuguaaccuccaccuccuggguucaagcgauucucgu

SEQ ID NO: 4173521 - RNA, 55 nt, Human
acagugauacccuagggacagaagagucgcugucccagucaaggcugucaucugu

SEQ ID NO: 4173522 - RNA, 90 nt, Human
acagugcacugcccaaagugaaacuuaguuucuggcuauuuacugccaaguauaaagucccaggaacuaagaauccuuuagcauuucugu

SEQ ID NO: 4173523 - RNA, 57 nt, Human
acagugcuaaugaugccaagaucaaggguuuaauccccuuggccuacuuagcuuugu

SEQ ID NO: 4173524 - RNA, 63 nt, Human
acaguggaagcaugaugcuaucaucuagugacacucaucuugcaguaucauauuuuuacuagu

SEQ ID NO: 4173525 - RNA, 75 nt, Human
acaguggaagguggcccugagcaugacaaucucugagaccagcguuggaaugaguaguggccacugugacccugu

SEQ ID NO: 4173526 - RNA, 96 nt, Human
acagugggagccucaugggauaagagaugggguccuugcagcugucuguacgugcaucuguaacugcuaucaucuccacugaaaggcccagacugu

SEQ ID NO: 4173527 - RNA, 57 nt, Human
acaguggguccucagaguuuguagucagaaacacgcacacacugaguuuuccacugu

SEQ ID NO: 4173528 - RNA, 77 nt, Human
acaguguuacaugagguuaauuaagcauccuggaauucagcaggaagccuguuagagacuugauggagaacacaugu

SEQ ID NO: 4173529 - RNA, 57 nt, Human
acaguuacuguaugucaaagacucuaaugacacauaguaggauuccacagugacugu

SEQ ID NO: 4173530 - RNA, 82 nt, Human
acaguuagaaugcaaacuucuuguuacuugucauuuucugaaauccuagaccaguuguuuuggaaguuugcagaauagcugu

SEQ ID NO: 4173531 - RNA, 87 nt, Human
acaguuagagggcaggaaggggcaccaggacaugacucccagcucgcagcuguaaguccacuggccugcccuuugccaucuaauugu

SEQ ID NO: 4173532 - RNA, 73 nt, Human
acaguucuggcugaggcagagccugggguaucauaucugaguccccgcuccguuugucuccaugucagccugu

SEQ ID NO: 4173533 - RNA, 60 nt, Human
acaguugagaugcaacuuugggcguucagccauuucucugccaaggacaucuaugacugu

SEQ ID NO: 4173534 - RNA, 84 nt, Human
acaguuuuagaccacuuaccccaugugaaacguuauuguaagcacugacagucagcauauauggaguaaggaucuacaaggugu

SEQ ID NO: 4173535 - RNA, 80 nt, Human
acauaaagccacaguuucacagucaauuuggagucaggcacagagcaugagcuuugaaauuggaaaugauguauuuaugu

SEQ ID NO: 4173536 - RNA, 67 nt, Human
acauaacauaguugacauuuuuucugcugcgugcauauagccaggaguggauuugcuguguuacugu

SEQ ID NO: 4173537 - RNA, 55 nt, Human
acauaagagcaggugaggcacucugucaucgguggaugcuucauuucuuuuaugu

SEQ ID NO: 4173538 - RNA, 81 nt, Human
acauaaguagagucuuagaggauauguccuuugugaauggcuuauuucauguaguguaaugucuucaagauucauucaugu

SEQ ID NO: 4173539 - RNA, 56 nt, Human
acauacaguuuucccuagaugugcuauguuggaaguagcccagggaggcugugugu

SEQ ID NO: 4173540 - RNA, 83 nt, Human
acauagaaggucuaaaaugauauuuauugaauagaugaguggaagcagugcacuguucuccaaaugucuggacucuuucaugu

SEQ ID NO: 4173541 - RNA, 68 nt, Human
acauagagauagugcuuuucauucuauccauuuucuccuccaagagagugagaggacauuuuucaugu

SEQ ID NO: 4173542 - RNA, 68 nt, Human
accaugagcuuugguguaagaucuagguucaaauccuagcucugucacauacacugcaugcucuuggu

SEQ ID NO: 4173543 - RNA, 63 nt, Human
accaugaguuauuugacaggccauccuagaauggacgauguccugucugcagauaucucaggu

SEQ ID NO: 4173544 - RNA, 58 nt, Human
accaugauacuuugcuccuuuacuuaguaauagcuaaguuuggggaaaauguuaaggu

SEQ ID NO: 4173545 - RNA, 60 nt, Human
accaugguucccgggggagugccugaagggaggaccugaagagauucccugggagauggu

SEQ ID NO: 4173546 - RNA, 59 nt, Human
accaugucauuuauuggccaaaccagaacaauuuggagagcuauuaauaaugauguggu

SEQ ID NO: 4173547 - RNA, 116 nt, Human
accauuaauuaaucuaugauuuaagacugaagaucugccugucucuugagucuuauuuuugaggccacaguacuuugcagaccauuuuucuagaaauauagacucugauuucaggu

SEQ ID NO: 4173548 - RNA, 56 nt, Human
accauuacaugauccuuacccagugcuggauucugagugggagaucaauaaguggu

SEQ ID NO: 4173549 - RNA, 56 nt, Human
acccaaagauuagccaaacauuagggaacauauccugcuguggcaaagcuuugugu

SEQ ID NO: 4173550 - RNA, 125 nt, Human
acccaacaccagggcagcuagaaguuuauaaaugaagacucuaugguuccuuuguuugaaaauauguaaguuguuguuggaauaaagcagcuuuaguucuuuauuggaaauauucuguguugggu

SEQ ID NO: 4173551 - RNA, 79 nt, Human
acccaaccuggcucuucuuguuguuaggguccugucguagucugauagggcugccaucacagaagagcuuagacugggu

SEQ ID NO: 4173552 - RNA, 73 nt, Human
acccaacucagacuggauuaaauaaaaggggauuuucuugcuuauuuaacucuagauucagugguaaaugggu

SEQ ID NO: 4173553 - RNA, 81 nt, Human
acccaagacagcagguugcuguuauuuuuguagaucucucugauuuucaaaguugcaugacagcuuaucuuauccuugggu

SEQ ID NO: 4173554 - RNA, 79 nt, Human
acccacagagguaccuguaccauaugagaagaugcuacaagaccagucagcuuugauaguacaggggcuuccagaaggu

SEQ ID NO: 4173555 - RNA, 88 nt, Human
acccacaguggggcagcucugcccaucagaggcucuucuuagcucagagcuggguaccaccucccgguggcagcucucccacuggggu

SEQ ID NO: 4173556 - RNA, 57 nt, Human
acccacugucaucucugaccacaguaccacaugcaaggugaccagaagacagugggu

SEQ ID NO: 4173557 - RNA, 57 nt, Human
acccacugucuucuggucaccuugcaugugguacuguggucagagaugacagugggu

SEQ ID NO: 4173558 - RNA, 63 nt, Human
acccacugugcccuguguguccccugggcucccccgugcaggaggaggugggacacagugagu

SEQ ID NO: 4173559 - RNA, 55 nt, Human
acccagaauucagucuuaggccacaaugauaaagggcuuauuucugguuuugggu

SEQ ID NO: 4173560 - RNA, 64 nt, Human
acccagagaacugaggcaugaauaacucuagccauggaacaguuaugcuugcagauuuaagggu

SEQ ID NO: 4173561 - RNA, 60 nt, Human
acccagaucccaggggcuacuucaggcccuucuacuaagcuccugacccuggcucugggu

SEQ ID NO: 4173562 - RNA, 84 nt, Human
acccagcccagguaccaguccuccuaacugagguucagggccugggaccaagcccuguccuggaugggagcacugggggcgggu

SEQ ID NO: 4173563 - RNA, 77 nt, Human
acccagcuaucauucaucucuucauuaguuccugucccaugcuuguggcacagggucaugcagagcaggugcugggu

SEQ ID NO: 4173564 - RNA, 58 nt, Human
acccaggauagagugcugcagugugaucucggcucacugcaaccucugccuccugggu

SEQ ID NO: 4173565 - RNA, 58 nt, Human
acccaggcuagagugcagugguauguucucggcucacugcaaccuccgcuucccaggu

SEQ ID NO: 4173566 - RNA, 58 nt, Human
acccaggcuggagugcagugaugcaaucucggcucacugcaaccuccaccuccugggu

SEQ ID NO: 4173567 - RNA, 58 nt, Human
acccaggcuggagugcagugaugcaaucuuggaucacugcacacuccaccucccgggu

SEQ ID NO: 4173568 - RNA, 58 nt, Human
acccaggcuggagugcaguggcacgaucucggcucacugcaaccucugccucccgggu

SEQ ID NO: 4173569 - RNA, 58 nt, Human
acccaggcuggagugcaguggcacgaucuuggcucacugcaaccucugccccuugggu

SEQ ID NO: 4173570 - RNA, 58 nt, Human
acccaggcuggagugcaguggcgcgaucucagcucacugcaaccucugcauccugggu

SEQ ID NO: 4173571 - RNA, 58 nt, Human
acccaggcuggagugcaguggcgcgaucucggcucacugcaagcuccgccucccgggu

SEQ ID NO: 4173572 - RNA, 58 nt, Human
acccaggcuggagugcaguggggugaucucagcucacugcaacugccaccucccgggu

SEQ ID NO: 4173573 - RNA, 58 nt, Human
acccaggcuggagugcaguggugcaaucugggcucacugcaaccuccaccucccaggu

SEQ ID NO: 4173574 - RNA, 58 nt, Human
acccaggcuggcgugcaguggcgugaucucggcucacugcagccugugccucccgggu

SEQ ID NO: 4173575 - RNA, 58 nt, Human
acccagucuggagugcagugacaccaucucggcucacuguaaccuccgccuuaugggu

SEQ ID NO: 4173576 - RNA, 61 nt, Human
acccagugccucacccagggauggcggagacuucugucuggcucugcagcaaggccugggu

SEQ ID NO: 4173577 - RNA, 76 nt, Human
acccauauauacuuggagacuaucauuguucuaaugggaaagaucaauggacgcuuagccagcauauguaaugggu

SEQ ID NO: 4173578 - RNA, 75 nt, Human
acccaucugcuaccuuugucggugacugacuuggaacuuuuccauccagcucugaagaaaggugucuaggagggu

SEQ ID NO: 4173579 - RNA, 71 nt, Human
acccauucccaucauggccugagcuaguguuucagguuuacuuuagaaugcucuuggccaaguggaagggu

SEQ ID NO: 4173580 - RNA, 90 nt, Human
accccaccagccagcuucccugaccagagugagggcuuaguuccagggccgcccuccuaccugggcagaaggaaggcccauggcaggggu

SEQ ID NO: 4173581 - RNA, 78 nt, Human
accccagcccugccagucaucacgucuugggcuucccuggggccaggcaggggaagcugcguggucuagggcuugggu

SEQ ID NO: 4173582 - RNA, 68 nt, Human
accccaggccccugcaggccacucuuguagaccacagagcucaguguccccuccaagggccuggcggu

SEQ ID NO: 4173583 - RNA, 63 nt, Human
accccaggcuaguaugauaucaguggaguauagagaagcugacuaaagacauacucuggaggu

SEQ ID NO: 4173584 - RNA, 60 nt, Human
accccaugcauacacaggucaggcaggugcaggcaucaccuggucgcagugcgugugggu

SEQ ID NO: 4173585 - RNA, 58 nt, Human
acccccugccugcagcaggggcaccaucacuaaagaaggcgccugcaggcacgggggu

SEQ ID NO: 4173586 - RNA, 130 nt, Human
accccgaacuccuuggcgaccacugaguccccauagcaacagcggugacuucacucugggcucggcuuacaaccccggugaggucaccggccguugccaggggaacgggagggcgcaaggaguccggggu

SEQ ID NO: 4173587 - RNA, 102 nt, Human
accccgccgcccugacagagcuugggagaggguccccaggacuuggcguacccguccguccuggggcugcugcuguccucagagccuggggagguaccgggu

SEQ ID NO: 4173588 - RNA, 59 nt, Human
acccgcccccugccagggcaaccagugaacucaguguccauggggaaggggaagugggu

SEQ ID NO: 4173589 - RNA, 66 nt, Human
acccgggagcuggaucgcgcgcccggagcuccggucuccgaguccgaguugugcagcucucggcgu

SEQ ID NO: 4173590 - RNA, 65 nt, Human
acccguaaauggcagcccacgauggcaauggacgacuuucuuaauugcccgugaugcuugcgggu

SEQ ID NO: 4173591 - RNA, 61 nt, Human
acccucaauguaauuuaauguuggaaaucaguacuguauguccuggauugaauugagaggu

SEQ ID NO: 4173592 - RNA, 60 nt, Human
acccucaucccacuagggaacacugcgccucacgagagccagcagagugggguggagggu

SEQ ID NO: 4173593 - RNA, 55 nt, Human
acccucugaguuuuuccccuagcuccugggacuaugggugggagagucugagggu

SEQ ID NO: 4173594 - RNA, 63 nt, Human
acccucuggcucauuuccuaguuuaggucaacucuuagguggcaaugcuuaagcucugagggu

SEQ ID NO: 4173595 - RNA, 58 nt, Human
acccucuugagauuagucaguagcuaggacuaucccaguaacugucucugagaguggu

SEQ ID NO: 4173596 - RNA, 107 nt, Human
acccugagauugacauauggggagucugggcuagacuccucgagggugagaaacuaugugaagcaaggucuggccaauagacagccccaaaugccagaauugggagu

SEQ ID NO: 4173597 - RNA, 82 nt, Human
acccugcacccugauccugccccuggaguguuccaaguggauggaacagcuuuaucucagggaucagcaugguuggaagggu

SEQ ID NO: 4173598 - RNA, 87 nt, Human
acccugggcagggugacaugcauggugcugguggguggagccagccacaucugcauuuaauguauaauacuucaccggguguagggu

SEQ ID NO: 4173599 - RNA, 55 nt, Human
acccuggggucacccuucucuguauagucuugauaggaaaggaaguccccagggu

SEQ ID NO: 4173600 - RNA, 56 nt, Human
acccugucuucccugggcaucacagcggugugucagggauuuaaagacacaagggu

SEQ ID NO: 4173601 - RNA, 91 nt, Human
acccuuuaccugcucccucacuuuuucuuccuauggagaccccucuuuuuccuccacaggccuuaggagagaugggggaagggguaggggu

SEQ ID NO: 4173602 - RNA, 59 nt, Human
acccuuuccaggacagccugugaaugugaaauuacccauucacaggcugugggaauggu

SEQ ID NO: 4173603 - RNA, 101 nt, Human
accgaguuuaauuaaauaucaugaguaauaaaagagagguccaggggugauugcugagaacacuuauggauuauucugaauuugaaaauuugacucucggu

SEQ ID NO: 4173604 - RNA, 81 nt, Human
accgcugagauugggaggagcauguggggcuggaaaagauaaaugcccuugguguccuuuucucuuuucacucucaguggu

SEQ ID NO: 4173605 - RNA, 102 nt, Human
accgggauaacagugaauucugagcuccuggauugcuccuagggugcuggauggggauucugggacagucaggaguuuagggagugaugcugaaguuuuggu

SEQ ID NO: 4173606 - RNA, 61 nt, Human
accgggcucagccagcccauucuuccuuuacugggagaagccgagucagcugagccauggu

SEQ ID NO: 4173607 - RNA, 79 nt, Human
accgugcaugggguaucagagaaauugauguguucaguugaaaguaguuucucuuugacaccaaaaucauaagcacggu

SEQ ID NO: 4173608 - RNA, 69 nt, Human
accuaaacuaguaaaaguuuaguugaaaguuuuauaaguaauuuucagccaacguuuugcacuguaggu

SEQ ID NO: 4173609 - RNA, 73 nt, Human
accuaaagcaacaggcaguuugcucaugugcgccagaagaagcgcacaaguggcugugugugugugugugugu

SEQ ID NO: 4173610 - RNA, 88 nt, Human
accuaaagggaacuauuagucagagaagacaucauugugaagucuguguuuccacugaaguuuucuccugagaaacaguccagaaggu

SEQ ID NO: 4173611 - RNA, 58 nt, Human
accuaaaucuaccucauguuuuggucaaagcagaggccaaagcaucccggauucaggu

SEQ ID NO: 4173612 - RNA, 94 nt, Human
accuaaaugugaaacauaagauuaucuaaaaguccuagaagauaacauaggagaaaaucuagaugaccuuguguuaggcaaugacuuuuuaggu

SEQ ID NO: 4173613 - RNA, 86 nt, Human
accuaagacagucuaucuagaagccugagccaagauagucuagcuacuugaauuauauuucuagagaaaggauuguugaauaaggu

SEQ ID NO: 4173614 - RNA, 59 nt, Human
acauguuuggcucuaugcuauacacuggagcucagagaucagaguagagacagacaugu

SEQ ID NO: 4173615 - RNA, 108 nt, Human
acauuacuaaguaaaacaaccuaaaguuacugaucauuuuucuguuuugggaggaaaaugaauacuuuuuuugucgguuuaucuuugcuauuuuuuuaaccuaagugu

SEQ ID NO: 4173616 - RNA, 128 nt, Human
acauuagaaucagcuggggagcuuuuaacaauuaccagugcccagaucucuccccagaacaaacgagaaucucuaggggugaggccaggcaucaguauuuuuaaaagcuucccgggggacucugaugu

SEQ ID NO: 4173617 - RNA, 71 nt, Human
acauuagcauauuaaauagucauugaagucauucaauaaauuguugaaaugcacuacagaagugcugaugu

SEQ ID NO: 4173618 - RNA, 99 nt, Human
acauuauacauauaaugagucagaaaugaucguuauucauuuacaggcucuccaguuagagugaaauacugucguuuuuaggucauuguauaaugaugu

SEQ ID NO: 4173619 - RNA, 101 nt, Human
acauuaucaguuugaacucagcauuuagaauuugaagugucacuggggaaauuauuuacuaacacuuagcaguuuuaauugcauguuaaaauuugugaggu

SEQ ID NO: 4173620 - RNA, 129 nt, Human
acauuaucuuuuaguuaauaagucaacuauccugaaugcuuggagucauaaaaugucuaagccauagugcauugggaauuuuaaacugcagcuuuacaugaccuguaugaaugacuaaaauauugaugu

SEQ ID NO: 4173621 - RNA, 63 nt, Human
acauuaugaugcaacuuggcaacuguaauaaacagagagugccauccugugucaugcucaugu

SEQ ID NO: 4173622 - RNA, 79 nt, Human
acauucauuuccucugggcuauuuucauuuauuuggcaaagaaugccaaauagaagguacucagagaaaaauuagaugu

SEQ ID NO: 4173623 - RNA, 62 nt, Human
acauuccaggcaaagggacuagcaggagcaaaggccccuagcuggggguuugcuuggcaugu

SEQ ID NO: 4173624 - RNA, 60 nt, Human
acauucuagauauguuauauuucuuguaacucgaaaggaaaugaugaauggucagagugu

SEQ ID NO: 4173625 - RNA, 77 nt, Human
acauugagcaucauggugaggggugaagggcagccaguuacggccuggcagcuugacuccacugcugagugcaaugu

SEQ ID NO: 4173626 - RNA, 81 nt, Human
acauugaugaaaagguaucauuucccuuacuguugugaaaaaccggggacaucuuacaauagguucuuuuucaucagcugu

SEQ ID NO: 4173627 - RNA, 70 nt, Human
acauugccaagugcagcggaugcuguccaauucugauaugauuggaacucucugcagcacuugacaaugu

SEQ ID NO: 4173628 - RNA, 86 nt, Human
acauugcuauuuuagacaccauuccaguacuguaacugacgaguuagaguacaguacucuaaugaaaagugcuuugauauuagugu

SEQ ID NO: 4173629 - RNA, 94 nt, Human
acauuguaaggugaccauaauagauuaugagucccaagcagauccuggcuuuaaugcucaauuaauuuauaagugguacuuguugccucagugu

SEQ ID NO: 4173630 - RNA, 64 nt, Human
acauuguaguuguucugcagcauccauuccacuccucucccgcuguauaacaacuaugcaaugu

SEQ ID NO: 4173631 - RNA, 68 nt, Human
acauugucgucaauggacacauagauucgggcaaguccaccucuacuggccaucugaucuacaaaugu

SEQ ID NO: 4173632 - RNA, 72 nt, Human
acauuuacagugcuagacaaucaccaauagaaaauaaauugaggauuccaacuguguuuagauugugauugu

SEQ ID NO: 4173633 - RNA, 78 nt, Human
acauuuacaguuaccaagagggcuuauggaucauagagauuuccagauaggcuuccgagucuugguaucuuagaaugu

SEQ ID NO: 4173634 - RNA, 88 nt, Human
acauuuacauaauuaugaacacaugccuuaagaauaagugguacgccauauauuugugugugcaugugugauauauguauguguaugu

SEQ ID NO: 4173635 - RNA, 80 nt, Human
acauuuauuucuuauucuugucuuauugugcuaccuaggacucccaguacauguagaauaggagugaugagagaggaugu

SEQ ID NO: 4173636 - RNA, 84 nt, Human
acauuucccgcuguagccucaggaaucaagaaaggggcugugucagagcuccugggaagagaccugagcauaugugggagaugu

SEQ ID NO: 4173637 - RNA, 60 nt, Human
acauuucucuugaugucucuauuaaugcaaaauauugagcaagagaccgcaggagaaggu

SEQ ID NO: 4173638 - RNA, 64 nt, Human
acauuucuuccuaauuaucccuauugugggugaugaaauugacagggaugguaggggagaaagu

SEQ ID NO: 4173639 - RNA, 94 nt, Human
acauuugccagcacuguuauaugcuugagcaguggguaugcaguggagaaccagacagacccucuccucauggacaugagccaacuggcagggu

SEQ ID NO: 4173640 - RNA, 68 nt, Human
acauuuggcauaggcagaggcccagacagggagaccacgcugggaccacgccuccuauccaacagugu

SEQ ID NO: 4173641 - RNA, 67 nt, Human
acauuuuagaaguucaugugggauuuuuuuuaguuuauguagaauuccuuuggaucuucuggagugu

SEQ ID NO: 4173642 - RNA, 80 nt, Human
acauuuucuggauauaugucuucgucaccuaucucacagguuuguugugaggcguaaaugaagauaguaugugaauaugu

SEQ ID NO: 4173643 - RNA, 62 nt, Human
acauuuugcccuuauuugcugagccccaauucccacagggcaacaugaugagggucaagugu

SEQ ID NO: 4173644 - RNA, 119 nt, Human
acauuuuggauuauauucccaaaccuguucuagccauguuauuuauuauccucgguugugaaguggcugacaacauuggaauuauaacuggagaacagugggagaguaauugagaaagu

SEQ ID NO: 4173645 - RNA, 59 nt, Human
acauuuuguaguauuuuguuugagauaguucagaagacaguugauauacuauaaaaugu

SEQ ID NO: 4173646 - RNA, 72 nt, Human
acauuuuuauccugagugccaguguuauuuauaagcuucccaaauaaauagaucacuagagguuaaagaugu

SEQ ID NO: 4173647 - RNA, 73 nt, Human
acauuuuucccuuagaagauggaggguggggucucugggaguuguccuuucuuuucuaugggcccagaaaugu

SEQ ID NO: 4173648 - RNA, 92 nt, Human
acauuuuucuaagagagguugucaccuauacugagcuuaauagaaauuguuaaucuuauauguaaagguaauaauuugucauaaauaauugu

SEQ ID NO: 4173649 - RNA, 73 nt, Human
acauuuuugagaaucuucuaggucccagucucucuguccagcacuagagcacagggaauagacagauaaaugu

SEQ ID NO: 4173650 - RNA, 61 nt, Human
accaaagcucugguuaaaaggccuggguugcgugcccacuucugaagcuaagggcuaaggu

SEQ ID NO: 4173651 - RNA, 57 nt, Human
accaaaggcauugggggucaaacacguuacugugauugcugaauugaauccuuuggu

SEQ ID NO: 4173652 - RNA, 66 nt, Human
accaaaguguuuucaguaaggauucucuuguuuugaucuugagagaauacaaagaagauauguggu

SEQ ID NO: 4173653 - RNA, 88 nt, Human
accaaauauuuauauuucucuucccuacuagacacccaguaggauuauacuucuuguguuggggaggagccauguaacuaguucuggu

SEQ ID NO: 4173654 - RNA, 68 nt, Human
accaaaugaauugcuucugguauguuacugaguucaugcucacuggguucagagggaguuucuuuggu

SEQ ID NO: 4173655 - RNA, 71 nt, Human
accaagagacugguuucuauuacaagcuaucuucuuuuuggauaagaucuuuagugaagcuaaaucugggu

SEQ ID NO: 4173656 - RNA, 66 nt, Human
accaaggacuggcugccuccaaagugugcacugcuguguuaugcugccuggugagucaucccuggu

SEQ ID NO: 4173657 - RNA, 130 nt, Human
accaaggcagggaucuuaguuuuguucccugaucaugagcauccagaacagugccugggacauacuaggggcucaauauauaguucuggguugacuacaucagaguaaaauggaugggaucugccuuugu

SEQ ID NO: 4173658 - RNA, 55 nt, Human
accaauagcugcugagcuggaguuugccccugcacuccaaaaccugcggcuuggu

SEQ ID NO: 4173659 - RNA, 80 nt, Human
accaaugguacaaaauguauaaagucaaacugggcauucaagaagcuucucaggaaagacuuuuuaccuugaaucauggu

SEQ ID NO: 4173660 - RNA, 64 nt, Human
accacaccccuguaguuuuucuccuugaugggauggguuugaggagagcagcaguuggugaggu

SEQ ID NO: 4173661 - RNA, 68 nt, Human
accacacgcaagacuuuuagaggcuuuuguauccccugaaagcucucuucccgugaguguugcauggu

SEQ ID NO: 4173662 - RNA, 76 nt, Human
accacacuggaaaguuggauuucauccucaugggacucuucagacgauccaaacauccagcucuacuuaguguggu

SEQ ID NO: 4173663 - RNA, 83 nt, Human
accacagcaggucgccgaagauagcuccuggccagacacuccacugcugggggcuugguggccaugaacaugacuuugauggu

SEQ ID NO: 4173664 - RNA, 124 nt, Human
accacagggcuaggggugaggguugagguuaguaggucagcuucacccaucaacuguggaggcuuuuuggguccaggcuguaucucacucacacuuucaugcccagggcuggccuuggccuggu

SEQ ID NO: 4173665 - RNA, 86 nt, Human
accaccauuguuccugugauucucugaguuggccuaaugcuuugaacgugagaauggcucagauaauucaaggggcucuggguggu

SEQ ID NO: 4173666 - RNA, 86 nt, Human
accacccaucacacuggacauuggauacuccuauuuauucaagaggcuugugaaguaucugugugccagugggggauggugugugu

SEQ ID NO: 4173667 - RNA, 82 nt, Human
accacgcagacagauuucuuuaugaaguacagaaaggcaugaaauaacgagauuuuugucucugaaguagaucucugugggu

SEQ ID NO: 4173668 - RNA, 65 nt, Human
accacgccuggcuaguuuuuguguuuuuaguagagaugggguuucacaauguuggccagguuggu

SEQ ID NO: 4173669 - RNA, 81 nt, Human
accacgggacccuccauuaaaacagaccuauaaggccuggaaugaacaaaugggucuucacugaggagaggcuugcauggu

SEQ ID NO: 4173670 - RNA, 60 nt, Human
accacguggcaggcaucgccauaaacccuucgguaguggcagaggcucugugauguuggu

SEQ ID NO: 4173671 - RNA, 76 nt, Human
accacuacucuacuuucuaugucugugaauuugccucuucuggacauuucauauaaauggaaucagaauagguggu

SEQ ID NO: 4173672 - RNA, 80 nt, Human
accacugccuggggucagccagccagcaagaggucaagccacugccugggcucugguuuccuggcuggggcgguacuggu

SEQ ID NO: 4173673 - RNA, 60 nt, Human
accacugcugcugccucccuugcugggcucugccaguguuaguggcugcagcuggugugu

SEQ ID NO: 4173674 - RNA, 66 nt, Human
accacuggucucacccagcccuuccucuucuugcaaaugaagaaagggagcguggaucaauuuggu

SEQ ID NO: 4173675 - RNA, 58 nt, Human
accacugucuacacauugacucccucucugcuagaggguaaugaugggaugauauggu

SEQ ID NO: 4173676 - RNA, 57 nt, Human
accacuuaucaucacuaucucaggaucucucagcaagagguaguguggugcaguggu

SEQ ID NO: 4173677 - RNA, 58 nt, Human
accagagucaauuauuuugccaguagaagaaucaaaaggcaguuuaauugauuucagu

SEQ ID NO: 4173678 - RNA, 55 nt, Human
accagauccaagccacccucucaccagccuuauugggagcagcuuccuaucuggu

SEQ ID NO: 4173679 - RNA, 70 nt, Human
accagcauccuuccuauuaacagccacaaaaugaacuuaucugugcaauagagaguggggcaggaugggu

SEQ ID NO: 4173680 - RNA, 78 nt, Human
accagccucagccugcgucauggugacacacaucugcugacuggacgcaucggugcaucgugcuguaggcugacuggu

SEQ ID NO: 4173681 - RNA, 73 nt, Human
accagccuggcagguagcauugaggagucaaauaguuguuucccaguauuaccuucaggaagaaugcaagggu

SEQ ID NO: 4173682 - RNA, 72 nt, Human
acauagcaagugcucaauaaauagaagcuguuaggauuguguuaacugacauuuacugagcacuuacuaugu

SEQ ID NO: 4173683 - RNA, 70 nt, Human
acauagcacuggaaaccuccuuuuuucaagaaaugacacuauuagaaaggcugggauuuagcgcuggugu

SEQ ID NO: 4173684 - RNA, 58 nt, Human
acauaggcagacagcuauuuaaguggcuuauuaccaccauauuagcuuuuuccuaugu

SEQ ID NO: 4173685 - RNA, 67 nt, Human
acauaggugcugagagauuuaaagggccauaaaacacaucugguccgauaucuucuuauacaaaugu

SEQ ID NO: 4173686 - RNA, 66 nt, Human
acauaguagaauccaaaccaacaguucaaguaaacagaaugaggggauccuggacuuccacugugu

SEQ ID NO: 4173687 - RNA, 67 nt, Human
acauagugccuaccuaccuuacggacguaagagauuuagcaacugccugguacuuuaggcacuuugu

SEQ ID NO: 4173688 - RNA, 85 nt, Human
acauauaaagcuaauuuuagagcgauagaucacaaaguaagauuuucuagcuuuguauuaucagcauuggcuuggcuuucugagu

SEQ ID NO: 4173689 - RNA, 56 nt, Human
acauauaugcgugggcucaugggaaauauauauugugugucagcacgugugugugu

SEQ ID NO: 4173690 - RNA, 74 nt, Human
acauaucuacucugaaucgauguuauacaugccaaguauguaaaguaaucugucgaucaguacuacuagaaugu

SEQ ID NO: 4173691 - RNA, 77 nt, Human
acauaugacuauguaauuuauguuauccauaacuccguauguuauggauagugaaguuuacacacauuggcauaugu

SEQ ID NO: 4173692 - RNA, 67 nt, Human
acauaugucuauuucauguaaaauaauguuagggagauagcaauagcagauggaguagauaaugugu

SEQ ID NO: 4173693 - RNA, 91 nt, Human
acauauucacuagaagcuaagucuucacauggguacugcugaucucuuccccauagaucauuguuucuaaugugacuucuuuugacugugu

SEQ ID NO: 4173694 - RNA, 96 nt, Human
acauauuuugggauuuuccagauguauuucuguuauugauuucuauuuaauuccuuaaagguuagagcacauacuuugcaugauuccaauuauugu

SEQ ID NO: 4173695 - RNA, 72 nt, Human
acaucaaaauguguagucuugaucuaaugacuuagaucuaaugauuuugauuaagauuacauauuuaagugu

SEQ ID NO: 4173696 - RNA, 57 nt, Human
acaucacagagcccagauaaagucgagagagucuuuguaaaccuugguuccugaugu

SEQ ID NO: 4173697 - RNA, 73 nt, Human
acaucacuagugugccuuguauuuguguggauuuuuguccugcaaauaggaaaagggcauaaccuuuaaaugu

SEQ ID NO: 4173698 - RNA, 89 nt, Human
acaucacugagcuuuaguuuucucaucuaucucaccuaggaaauggguguaaucauugagaagauuugaagagagacugcaugugaagu

SEQ ID NO: 4173699 - RNA, 58 nt, Human
acaucagcugcaguuucacaagcacccgugaggugccaggugcuaagcugugcucugu

SEQ ID NO: 4173700 - RNA, 68 nt, Human
acauccaagccaggaagcaagugauuuucuuggcaauaagucaagaacuggcuccuggcuacuagugu

SEQ ID NO: 4173701 - RNA, 60 nt, Human
acauccacuauccuugcuuguuacuuccacuagaaagaaguuucugagggcuggggaugu

SEQ ID NO: 4173702 - RNA, 58 nt, Human
acauccaggugauguaggggauuuaguuuugaaagucuaauacaugaaaccuagaugu

SEQ ID NO: 4173703 - RNA, 57 nt, Human
acaucguguaucacugaaccuuagccaaguguggugggauuggcugaugucggaugu

SEQ ID NO: 4173704 - RNA, 84 nt, Human
acaucguguguugugacauucuuggaugcauggaugggauauugaaacacauguuugcaucuuggaugacauaacugugugugu

SEQ ID NO: 4173705 - RNA, 80 nt, Human
acaucuauguagauacacacauauaguggugaagccaucuucaaauagagacccgugugugugugugugugugugugugu

SEQ ID NO: 4173706 - RNA, 112 nt, Human
acaucuauuuuuauaacuuugaaaacuuuaauuagcuuaucccauuucugaaacguauuagauguuucauaaguggaguaaguuuaaagauaauuaaagguuaguuagaugu

SEQ ID NO: 4173707 - RNA, 55 nt, Human
acaucucacuucuuugaaggcuugagaucucagguccaaaggagacugagugugu

SEQ ID NO: 4173708 - RNA, 64 nt, Human
acaucugacaugaucuucaguaaaaaguaacauaagucaucacugaaggacucucaugagaugu

SEQ ID NO: 4173709 - RNA, 61 nt, Human
acaucuuugcccauccacuuccaccauguucuaugaagauuuugcaagugugggaagaugu

SEQ ID NO: 4173710 - RNA, 57 nt, Human
acaugaacacugcuugccacauucccuggaggaagccaaggaugagcugugucaugu

SEQ ID NO: 4173711 - RNA, 105 nt, Human
acaugaaugguuauagugacuuuauucguuaacuguuaaaaacuggacacaacacaaauguccguuaacuagugaaugaauaaacaaaguacuuccauucaaugu

SEQ ID NO: 4173712 - RNA, 80 nt, Human
acaugaauuaaggauaacuggucuauccaagagauuuaguuuugggugauacaaugcagauuguuauucccaguucaugu

SEQ ID NO: 4173713 - RNA, 75 nt, Human
acaugacccacccuuuuccauuaaggccuuuagaauccugaucuacagcuggccuuggaaaacugggaguuaugu

SEQ ID NO: 4173714 - RNA, 89 nt, Human
acaugaccugggaguuuguuagaaauguagauucucagacccacuggauuagaaucuucauuuugacaagauucccaggggauucaugu

SEQ ID NO: 4173715 - RNA, 59 nt, Human
acaugcacauuucaagggaauaaacagacuucuucugagccagaguggagugugccugu

SEQ ID NO: 4173716 - RNA, 100 nt, Human
acaugcauacuuagaguuguuguauaaugauggaacuuuagcaauucacucacaauuugaaguacccguuuuuauugcauuuaauuauauauacgcaugu

SEQ ID NO: 4173717 - RNA, 60 nt, Human
acaugcucuccuaaggcccugugcuccuguuuggagccacaaaagcuuuuggaggguugu

SEQ ID NO: 4173718 - RNA, 122 nt, Human
acaugcugcauccagggagggauugugucagauaaucuggagagcauugaacaaaacucuuuacuuuugaaaugcaucaucauuuagaugaugauaccaaauugccuccuuuuuuaugcugu

SEQ ID NO: 4173719 - RNA, 66 nt, Human
acaugcugggcaauguuguuuuccugaaugucuaucaaaguagaugagcaaugcccaguugcaugu

SEQ ID NO: 4173720 - RNA, 69 nt, Human
acaugcuucagagacauccuacucaaggguggaggagccauuguuuggaggcugcucucaggggcaugu

SEQ ID NO: 4173721 - RNA, 64 nt, Human
acauggagaaaccccgucucuacuaaaaauacaaaauuagccagacgcgguggugcaugccugu

SEQ ID NO: 4173722 - RNA, 85 nt, Human
acauggauauggcauccuucuuaaauuggcugcacagauacaaugguauucucugugcagauuuaagacagccaaaaauuuaggu

SEQ ID NO: 4173723 - RNA, 87 nt, Human
acauggauuucucccauuacuaagccuggucuaagagccucauaucaacucugugagcuuaggacagggcuaugggaugaauucugu

SEQ ID NO: 4173724 - RNA, 59 nt, Human
acaugggagugugguuagagaccugggcacuuugcccagcucuguaacccauucccugu

SEQ ID NO: 4173725 - RNA, 71 nt, Human
acaugggcaccuuaaaaugaggcagauacuaugucccccgguauugaacagucucacaagguggcuuacgu

SEQ ID NO: 4173726 - RNA, 59 nt, Human
acaugggcaucuaugaggcucuucugcuccaacgaaggugugaguuuuuggaccugugu

SEQ ID NO: 4173727 - RNA, 61 nt, Human
acauguaaguaaagcugugaaggaggagauuaucuuugccuuccaguuuuaauuaaauugu

SEQ ID NO: 4173728 - RNA, 76 nt, Human
acauguacaaggcaguacaaugaugacacauuuucuguuugcugagugugaguaauaaacugucuugcucugcugu

SEQ ID NO: 4173729 - RNA, 63 nt, Human
acaugucagcucuguuccaucauuacaugccaucaugcagugcaacagaagcaggcuggcugu

SEQ ID NO: 4173730 - RNA, 55 nt, Human
acaugucagggacucugggaggaaggaaacucaggccugggguacacuggcaugu

SEQ ID NO: 4173731 - RNA, 88 nt, Human
acaugucugagaccuggaggcaaagcuggcuuuuacaggggcuggcuuggcuccuggggaggugagcuugugugcccuucugacaugu

SEQ ID NO: 4173732 - RNA, 60 nt, Human
acauguucuaauauugugacauagcguagaauuaagcuggcuuacuaaguagaaacaugu

SEQ ID NO: 4173733 - RNA, 76 nt, Human
acauguuuacucugaucuagaauuucugcacaaaucaauugagugugagcaugaggucuggcaaucagaaaccugu

SEQ ID NO: 4173734 - RNA, 91 nt, Human
acauuaaagguuaaaggauguuugaaaggaaguuaauacuuuuaaaacauugggagaauggccaucuuuucagagaucugaccaaaaaugu

SEQ ID NO: 4173735 - RNA, 78 nt, Human
acauuacuuaccuuggguucuaugccaacguccucaagcauuuuaagaaaauggcuuagagcuuaagucguacaaugu

SEQ ID NO: 4173736 - RNA, 61 nt, Human
acauuagaaccaagguacagucuauugcuaggugucugcagcagcugccugguuuuuuggu

SEQ ID NO: 4173737 - RNA, 130 nt, Human
acauuagaaucaccuggagagcuuuuaaaaauucuaaugcccuggccccagcccagaccaauuauauuaaaaucucuggggugggacccaggcaugaguauuuuuaaagcucuccagguaguuccaacgu

SEQ ID NO: 4173738 - RNA, 63 nt, Human
acauuauagcuuugaguuuggaaauguguagggugaaaucucaaauuuucuuggcuguagugu

SEQ ID NO: 4173739 - RNA, 80 nt, Human
acauucaaguucauguguagucagugccgaaauggagacaugaggucuuaaacugggaugcaugaaauccuugaaauugu

SEQ ID NO: 4173740 - RNA, 56 nt, Human
acauucauugagcaacaacaauuauggauuaucuauuugugcagcucagagagugu

SEQ ID NO: 4173741 - RNA, 57 nt, Human
acauuccugacagcaaguacuguacuuucaguagaguacagugagguguuaggaugu

SEQ ID NO: 4173742 - RNA, 76 nt, Human
acauucugguaaggcuauugaugugaaaaaauaacaccauuugugagacaacaguagccuuuacaaggcauugugu

SEQ ID NO: 4173743 - RNA, 57 nt, Human
acauucuuccagcuggcuguugucgggucuggugagauggagagucuggaagagugu

SEQ ID NO: 4173744 - RNA, 64 nt, Human
acauucuucuugugaauuuacuacauggguauuuucuacacuugauuuccaauaaggagaaugu

SEQ ID NO: 4173745 - RNA, 55 nt, Human
acauugaacauggcaggacauuguuuuuauggcauauguaccuguauuucauugu

SEQ ID NO: 4173746 - RNA, 105 nt, Human
acauugagcaagauucacaauaggagcaugcaaauauuaugcgcuacucauaucaguggugcauaauauuugcaugcuucuauugugaaugucgacuauuaaugu

SEQ ID NO: 4173747 - RNA, 77 nt, Human
acauugcuugggcuuguucccagagacucagugaaaugccccugauaugucuccaggagcaagucacccaggugugu

SEQ ID NO: 4173748 - RNA, 111 nt, Human
acauugguugugauccuguaaaaagccgcaagcaguggcucuuucaguacaaggaaacccuugggacagaaaaguuuacuuuugcucaggcuuuauggugacagccagcgu

SEQ ID NO: 4173749 - RNA, 69 nt, Human
acauuuagaugguguuauaguacuuuuugucauaaugguggaugaauuguagcaccauuagguaagugu

SEQ ID NO: 4173750 - RNA, 60 nt, Human
acauuuauuuuggcacggcacaauucuauucucuugugacuaugucaguaugguaagugu

SEQ ID NO: 4173751 - RNA, 55 nt, Human
acauuucuaagaaggcugcacaucacagucuaugugaugguggcccuggagaugu

SEQ ID NO: 4173752 - RNA, 57 nt, Human
acauuugaaauucugaacagaucccuaaggggaauacuguuuaacauuuuauggugu

SEQ ID NO: 4173753 - RNA, 75 nt, Human
accuaccugagaccucuugguaucgcuaggcagaagcaaaccgccuguacuuguauuaaagguccgggucuuggu

SEQ ID NO: 4173754 - RNA, 72 nt, Human
accuacuacacagugaucaguuacugucuguauucauauuuuacagauauguaaacugacacuuggggaggu

SEQ ID NO: 4173755 - RNA, 61 nt, Human
accuaggaacucaauggcagauauucugagaauggggaugucugucauggaauuucaaggu

SEQ ID NO: 4173756 - RNA, 81 nt, Human
accuauguuguauagugccuggcauaaaccagguagccaauaaaaagcuauugauuaaaugcaggacuuauaagguaaggu

SEQ ID NO: 4173757 - RNA, 58 nt, Human
accuauucuaaccuugacuucugaccugucgcugaggaaaagcaagcuuugagugggu

SEQ ID NO: 4173758 - RNA, 67 nt, Human
accucacaagauacucaguggauaugcaucccuuaaacuggagaagcacacuguguuuuguucuggu

SEQ ID NO: 4173759 - RNA, 124 nt, Human
accucagaaacacucauuggcuccagaaaguuuuugauucuaagagagauucaggguauccuaagcaucauuuuuuacuucucucucaaagggaaucaagacuguuuuaagaaaugaugauggu

SEQ ID NO: 4173760 - RNA, 79 nt, Human
accucagaguuggaaucacauuuuuaagcugcauauuccaguuuuaaacacaucagauugguuccuugcuuugaaaggu

SEQ ID NO: 4173761 - RNA, 61 nt, Human
accucagccugugcacccagccgcucugacugguggccagaaccugcaguaggccagaggu

SEQ ID NO: 4173762 - RNA, 104 nt, Human
accucagucugaacccauauaaaucuuggacagacuaaaauugcacagugggaucauuucauucacaugaguuugccaauauguggguauuaacaggcaaaggu

SEQ ID NO: 4173763 - RNA, 57 nt, Human
accucagugcuugccagguguguuacaagccacuuuggaauaaucaagcucugaagu

SEQ ID NO: 4173764 - RNA, 79 nt, Human
accucauucauggcucuuuguggccaccuaaucuugggauuaugccagugacaugaccacaaagcagcaugacugacgu

SEQ ID NO: 4173765 - RNA, 66 nt, Human
accucauucauucauucagcagguacuuacugagaagcagaugagcugagacugacaugaagaggu

SEQ ID NO: 4173766 - RNA, 64 nt, Human
accuccaggagaauaauggcagauuauaggcucaucuccguggcugccuuuucucucugagggu

SEQ ID NO: 4173767 - RNA, 113 nt, Human
accuccauguuucccucuguggauggaguguaguucauuccguccuauuccuuguagagggauugugaaguagggcugagugauuacacuuggugcagaugagaugaaggggu

SEQ ID NO: 4173768 - RNA, 64 nt, Human
accuccucugccuuguuuccucuuuccagagccacuagggaggacgguccagggcaaaggcugu

SEQ ID NO: 4173769 - RNA, 75 nt, Human
accuccuucaaucuuccugacaacccuauggguaaauauuauuguuguaauucccauuuagcggaugagggaagu

SEQ ID NO: 4173770 - RNA, 74 nt, Human
accuccuuucugguaacacuuggcugcaaccuggaauaggcaaaaaguuuuauucccagcaagguaauggaggu

SEQ ID NO: 4173771 - RNA, 94 nt, Human
accucgcagaugacuugagagugaauguccccgcgggucagcaccacauuggcugugcuguggaugcuguaggacacgcucucucuugcggggu

SEQ ID NO: 4173772 - RNA, 72 nt, Human
accucuaagcugauuccacuuuuuccacagagcugcuccagggcgguguggguggaggggggaucaggaggu

SEQ ID NO: 4173773 - RNA, 129 nt, Human
accucuagauguuaauuccuucaucuuauaaccaaaucuauaaagcugccugugucuauuccuuuuuucccuuccauuacaaaggaaagaaguauuagaacauaggcaucuuugaugaggggcauuauu

SEQ ID NO: 4173774 - RNA, 95 nt, Human
accucuaggccaguuucccaggcuguggggcccuauaggcaauuucccauagggucucagagccugagaaccugugcaucuuacugccugguggu

SEQ ID NO: 4173775 - RNA, 56 nt, Human
accucugcaguagggcugugccauguggccacagcuccagauuaauuguaggaggu

SEQ ID NO: 4173776 - RNA, 64 nt, Human
accugaaauaauaauacugugcaauggauaguauauauuuaaggcccacagugguuaaucaggu

SEQ ID NO: 4173777 - RNA, 61 nt, Human
accugaagagaaauuucccuguauaaugaaaacauuuguacagaaaaaauucuugguaggu

SEQ ID NO: 4173778 - RNA, 130 nt, Human
accugaggacuccacagaggacacagugcuuggaaccugcaucucccuuccuaugcccugcucugccugcccagggccuugggauucuuggaugcuccaagcccacuucagauccugugcaagccucugu

SEQ ID NO: 4173779 - RNA, 68 nt, Human
accugagggcccaaacuugguagaguuuacuuaacaaacacugcgcuuccaaggccaggcccugaggu

SEQ ID NO: 4173780 - RNA, 77 nt, Human
accugaugggucucucccuacugcaaugaugcuucagggcaugucucucacugcuggggagugauugaccaucaggu

SEQ ID NO: 4173781 - RNA, 110 nt, Human
accuggaaacuuguuagaaacacaauuuccugggucucacuccagagcuccugauuuaaaaauucugcagguagagcucaggaaucuauguuuucacaaguccucuaggu

SEQ ID NO: 4173782 - RNA, 82 nt, Human
accuggaaagcuacaucaccuucacgaaccauucagggguccugaccccagucauccugcaggugaaagagcugaucagugu

SEQ ID NO: 4173783 - RNA, 84 nt, Human
accuggaagcugguuagaaaacagagcucaggugccaccccagaucuacugaguccgaaucuguauuuuaaccaggucccaggu

SEQ ID NO: 4173784 - RNA, 123 nt, Human
accuggaccuugucccuccagugaaggcugcccggaugccucagagagcacagccuucuuagcuucauucuuccggagugcuuuuccuuauuuggugcuuucuagggaguaggcaggucaggu

SEQ ID NO: 4173785 - RNA, 56 nt, Human
accuggagcuuccaacucaacuuuaauuaaaggcccuuugcguggaagcuccaggu

SEQ ID NO: 4173786 - RNA, 98 nt, Human
accuggauggucuggcuggggagggcgucaaggccaaguaccucaugccgcccuuugucacgaugaccuccccgucccacuucaccgccaucccgggu

SEQ ID NO: 4173787 - RNA, 68 nt, Human
accugggagaaauggugaaucuggauggaugaaguauguuuauuuauccaagcacaauuucuaaaggu

SEQ ID NO: 4173788 - RNA, 68 nt, Human
accuggggcagaguaggauuuuggccucuacugaucuuguuuauaauccaacucugcucccuuuuggu

SEQ ID NO: 4173789 - RNA, 67 nt, Human
accuguaacauauagcauguucuugauaaauauuuauuaaaugaaugaaacuauguguuguuuaggu

SEQ ID NO: 4173790 - RNA, 64 nt, Human
accugucauguagaguuucagcuuucuuacccuggguacagagucucaaaccuacaaagugggu

SEQ ID NO: 4173791 - RNA, 77 nt, Human
accugugacucuccacuaguaugaaaugggcugccucgaaugagccugacauauucuacaguguuaguguuagaggu

SEQ ID NO: 4173792 - RNA, 96 nt, Human
accuguuucacuaguauucagaguauuccaugagguuagcaugaaaugaccauguccauuuacaccagggaaauucaggguggcugugggacaggu

SEQ ID NO: 4173793 - RNA, 72 nt, Human
accuuagaaugugaccuuacuuggugauaggguguuuacggagguaaucaagcucaaguaagguuauaaggu

SEQ ID NO: 4173794 - RNA, 66 nt, Human
accuuaguguuugacguuuuuguuggaaaguaaggagcaggcagauuguuaauguugcacuaaggu

SEQ ID NO: 4173795 - RNA, 84 nt, Human
accuuaguuggagauggggucucuauggggauaaucaagucaaaauaaaguuauuagccuaggcccuaauccaacaugacuggu

SEQ ID NO: 4173796 - RNA, 77 nt, Human
accuucaagaaacugugcuacagaguuaguuauuuuaguaauccuuuaaauucuguuacaguaaucuuguugagggu

SEQ ID NO: 4173797 - RNA, 72 nt, Human
accuugcgucaauuagcugguacugacaggacugggaaggucguugcaggccccaucugggcauagcaaggu

SEQ ID NO: 4173798 - RNA, 70 nt, Human
accuugggcaaccugcuccugcuagaaaaagccuaaaugcaugaagcaggacuguaggcuugccccaggu

SEQ ID NO: 4173799 - RNA, 76 nt, Human
accuugugggaguggugagaggccacgguuuuccuugggggcauuuccccaaagauguggcugccaccuaccaggu

SEQ ID NO: 4173800 - RNA, 71 nt, Human
accuuguuagacuauggaccuuaugcagcuuucagugucuguaugcgcuguguguguauucuacgcaaggu

SEQ ID NO: 4173801 - RNA, 130 nt, Human
accuuuaguuuucagaccuaaaaaugcauuuggcuguuuuugauuuuuuuuggaaggggaugagguuccuugccaaauuaacauacagaaauuaaagcacauauaaccaugauguuacaaaacuugaggu

SEQ ID NO: 4173802 - RNA, 94 nt, Human
accuuucaggccaccgaaggauucaggccgaggagcugcauagugaccgagggugaugaagcugguuuuggcuuggggauggcuggccagaggu

SEQ ID NO: 4173803 - RNA, 112 nt, Human
accuuuccccuuucugcucucagccuggccuggcacugggcuccuggccagguaucacccccuggcacagggcagggccagguggggcagaggauaguaagguggcaggggu

SEQ ID NO: 4173804 - RNA, 69 nt, Human
accuuuuaaugcuguuagugaaaugguuuauaccuacgaagagaccacauuucugaauagcauaaaggu

SEQ ID NO: 4173805 - RNA, 68 nt, Human
accuuuucaaguccuuuggaaggccuggggagugauaaaucuguagugcucaggagggcuuaaaaggu

SEQ ID NO: 4173806 - RNA, 72 nt, Human
accuuuuuccaaagcuucuuacuguggagucagaauccucccugacgugauaagaauuuugugagaaguggu

SEQ ID NO: 4173807 - RNA, 74 nt, Human
acgaaaggguguuucuaaaggucacaggagcccuugcugggucgccugugggcccuggacagagacccuugagu

SEQ ID NO: 4173808 - RNA, 108 nt, Human
acgaagguggaucuuacuuguaucaaagcagcugaucucagagccuccagcccgugguuucaggucaguuagcuguuuuuaugaugcccuagugggauaugccucugu

SEQ ID NO: 4173809 - RNA, 65 nt, Human
acgagauuagguaauuacagcaaauguggucauuagccucaucugcucuuauuaucuuauuaugu

SEQ ID NO: 4173810 - RNA, 66 nt, Human
acgaggugucccgcaguccccaagcagaucuggagaaccuuggaggaaaggcagggagaccggugu

SEQ ID NO: 4173811 - RNA, 113 nt, Human
acgauacacuguguucucugcucaaagcuauuuauucuugagagugagaagaaacguugcauguuucuuuugugccaaguaaugaauaaucaacaguagacacugaguguugu

SEQ ID NO: 4173812 - RNA, 101 nt, Human
acgaucguauuguagucucucaaagugcucuagaaauugucagugguuuacaugaaguggccaugggugucuggagcacccugaaacugcaccaaaguugu

SEQ ID NO: 4173813 - RNA, 110 nt, Human
acgcaaggaaaugauucgauauagggugggaggcuggcagggugggguccugcugaauccuagaaggcuccuaucgcuuucagcaaucaacuuuucucauuuguuugugu

SEQ ID NO: 4173814 - RNA, 75 nt, Human
acgcagcucuugcagccuuaccaaggcauuuggauuuuauuaugaaugugaaaggaagcugccaggggugggcgu

SEQ ID NO: 4173815 - RNA, 61 nt, Human
acgcggccuuuccggacaccgacugagcugggcuugccuagcugggugcccgaagccacgu

SEQ ID NO: 4173816 - RNA, 61 nt, Human
acgcgguuaggcaucagguauauaaacauuuaauguuuucaugguuaugugucuaaugugu

SEQ ID NO: 4173817 - RNA, 62 nt, Human
acgcugaaucuccacuccuuguuugcaggaggaaacugaggcccaggagccuggagaugugu

SEQ ID NO: 4173818 - RNA, 68 nt, Human
acgcuugccguauccuucuccagucguauuuuuauccaaaagaaggaccuggaggaggaugagagcgu

SEQ ID NO: 4173819 - RNA, 56 nt, Human
acccaacuccaggguuuaucugugcuuagucaaucagaaguuugaccuuggugggu

SEQ ID NO: 4173820 - RNA, 64 nt, Human
acccacagaaccugugacaacaaccaugcauguuuguuguuuuaagucacuaaguuuugggggu

SEQ ID NO: 4173821 - RNA, 57 nt, Human
acccacagccgcugugcgucccucucuccgggugucagugcgcgcggcggguggggu

SEQ ID NO: 4173822 - RNA, 73 nt, Human
acccaccgcacuauucaacguuucucgacccuaguggaguacccgguccccuggagauguugugcaggagggu

SEQ ID NO: 4173823 - RNA, 110 nt, Human
acccaccuucccacagcugcggcaguggugcuuccggcggaugacggugaagggugcuuugcacgccgugcagaagccacaggccucgucuggcacccacuccggggggu

SEQ ID NO: 4173824 - RNA, 58 nt, Human
acccacgaaaucuaggagaguaacaaaaugguuguucuaagcaacuaaguuuuggggu

SEQ ID NO: 4173825 - RNA, 68 nt, Human
acccacuuuauguaauuguagcaaaaugaugcagccuuuguguaacaucguguuucauugcucugggu

SEQ ID NO: 4173826 - RNA, 78 nt, Human
acccagaauggucuuugagagaaguugauugaaugaaaaguguacaugaaucaguucuuuaaaggaugaugucugggu

SEQ ID NO: 4173827 - RNA, 58 nt, Human
acccaggaaguggagguugcagugagcugggauugcaccacugcacuccagccugggu

SEQ ID NO: 4173828 - RNA, 59 nt, Human
acccaggaggcagagguugcagugagccaagauugcaccacugcaacgccagccugggu

SEQ ID NO: 4173829 - RNA, 58 nt, Human
acccaggcgggagugcagugggguaaccuuggcucacuacaaccuccgccuccugggu

SEQ ID NO: 4173830 - RNA, 58 nt, Human
acccaggcuggagugcagugacaugaucucagcucacugcaaccuccgccucccgggu

SEQ ID NO: 4173831 - RNA, 58 nt, Human
acccaggcuggagugcagugauacaaacuccacuugcugcaaacuccgccuccugggu

SEQ ID NO: 4173832 - RNA, 58 nt, Human
acccaggcuggagugcagugaugugaucucggcucacugcaaccuccgccucccgggu

SEQ ID NO: 4173833 - RNA, 58 nt, Human
acccaggcuggagugcaguggcaccaucuugguucacugcaaccuccgccucccaggu

SEQ ID NO: 4173834 - RNA, 58 nt, Human
acccaggcuggagugcaguggggccaucuuggcucacugcaagcuccacccuccgggu

SEQ ID NO: 4173835 - RNA, 58 nt, Human
acccaggcuggagugcaguggggcgaucucggcucacugcuagcuccgccucccgggu

SEQ ID NO: 4173836 - RNA, 58 nt, Human
acccaggcuggagugcaguggggcgaucuuggcucacugcaaccuccaccucccgggu

SEQ ID NO: 4173837 - RNA, 58 nt, Human
acccaggcuggagugcaguggugugaucucagcucacugcaaccuccaccacgugggu

SEQ ID NO: 4173838 - RNA, 58 nt, Human
acccaggcuggcgugcaguggcgugaucucggcucacugcaagcuccgccuccugggu

SEQ ID NO: 4173839 - RNA, 60 nt, Human
acccagggcuuaaggcggugcauugcuucugcagggacaccaugcugcaggcccugaggu

SEQ ID NO: 4173840 - RNA, 69 nt, Human
acccagucagcugacccagugaggaggcaaagcccaggcugccuucuucucccuggcucaggagugggu

SEQ ID NO: 4173841 - RNA, 58 nt, Human
acccaugagauucugaauuuggccuggguuggccagguuuuggaauuuuuugaaaggu

SEQ ID NO: 4173842 - RNA, 75 nt, Human
acccaugcacauucugggcgccuauggcugcagcaugucccucacccuguugccagguagucccagggcaugagu

SEQ ID NO: 4173843 - RNA, 56 nt, Human
acccaugggccaguugggguggucugcaugugaggcaucccaagcagcucaugggu

SEQ ID NO: 4173844 - RNA, 58 nt, Human
acccauuccuuuacuucaucuggcauggauuuaaccaaugaauaaaaggguugugggu

SEQ ID NO: 4173845 - RNA, 84 nt, Human
accccaagaauauuaggauuuuaucuugccaaugaagcuguuuaacaaugcuauuuggaaaugauaaaguacuguuccuggggu

SEQ ID NO: 4173846 - RNA, 61 nt, Human
accccacuucccccaugcaaacacaccucugcuuguucaggccugggacaguuuuaggggu

SEQ ID NO: 4173847 - RNA, 65 nt, Human
accccagcccugcuucugggaggcucuccugagccucaguccccucagggguguggcugcugggu

SEQ ID NO: 4173848 - RNA, 60 nt, Human
accccaggcccagggaagaggcugggcuaggagacggucucgucuggggaggccuggggu

SEQ ID NO: 4173849 - RNA, 55 nt, Human
accccagggcucuaggaaaaaagaagugauucagauuccauagcacccugugggu

SEQ ID NO: 4173850 - RNA, 94 nt, Human
accccaugacauugauuagcacaucuucuuggccugcaacucauucauaugugcauauuuugucggcccaaugagaguguuagcagaaaggggu

SEQ ID NO: 4173851 - RNA, 56 nt, Human
acccccgucugggccacuccugcguggcaggcacacagguggcuccugcugggggu

SEQ ID NO: 4173852 - RNA, 77 nt, Human
acccccuaaagcugaaacagugcuucacucagccaacguuaagggcuugaugcauucugguuccagucuggggaggu

SEQ ID NO: 4173853 - RNA, 67 nt, Human
accccuaugagcugccuuggggaaggauggcaggaaggccucugaguucugcccaaggucugggggu

SEQ ID NO: 4173854 - RNA, 68 nt, Human
accccucuggugccauucuguggccuagacuugcuuggcugggccaagaaguuguguaugugaggggu

SEQ ID NO: 4173855 - RNA, 74 nt, Human
accccuuuggcuggcuggcugugcaaaggcaggccccacaggggaguaauguauuugugacagccaguuggggu

SEQ ID NO: 4173856 - RNA, 116 nt, Human
acccgugugacaccaauuccaucuuccaggacaccaggguaguauucugugcaaugaaaguaauuuacuaaaugguccucuggugucguggaagagugaauucauuuugcacaggu

SEQ ID NO: 4173857 - RNA, 98 nt, Human
acccuaguuccugugaguguggcuuuauuuggaaauagggucuuuauacguauaauuaaguugagaaucuccagaugaaguccuccuggauuuagggu

SEQ ID NO: 4173858 - RNA, 77 nt, Human
acccuauauguuagguuuuaucugaaggaaaucuacacauucaguuuucuccagacacaaaaucuaagaguuggggu

SEQ ID NO: 4173859 - RNA, 75 nt, Human
acccuaucgaugauaguaauuauugcugauaauauuaaugguaguuuuacuaaugauuauugucauugugagggu

SEQ ID NO: 4173860 - RNA, 89 nt, Human
acccucacagccucucuggccgagagucccugggcgcucacuugccgggaugcacaggcacgccucuggccaggccgggcugcgggggu

SEQ ID NO: 4173861 - RNA, 66 nt, Human
acccucagccugccccccagccucagucuccccaagccugcaguggggccggugaggccgaggcgu

SEQ ID NO: 4173862 - RNA, 55 nt, Human
acccucagcuggagauugaauuaauauuauaauaacaucguucuccaacuggggu

SEQ ID NO: 4173863 - RNA, 64 nt, Human
acccucauuucuguuacuuuuauguuuuuaaugauagaaguaugaagaauacauagaugauggu

SEQ ID NO: 4173864 - RNA, 57 nt, Human
acccucucuagacauuugugaugagaaaugacauuuugacauuugucaagagaaggu

SEQ ID NO: 4173865 - RNA, 62 nt, Human
acccugagguguuuaguaggggcggagcagcagcaugagcugggccgugaccaccugggggu

SEQ ID NO: 4173866 - RNA, 88 nt, Human
acccugcagcagggcagcacaucugauuauaugacucugacgaaaugucagagaaaugaaaacaaauggcugagcagucccugggggu

SEQ ID NO: 4173867 - RNA, 69 nt, Human
acccugcagcccugggcaccugugaggggccagcugugggcagacccugggccacagaggagguagggu

SEQ ID NO: 4173868 - RNA, 61 nt, Human
acccugggaccuggagguggaucaccugcggucaggcccuggaggaccuccagucaagggu

SEQ ID NO: 4173869 - RNA, 76 nt, Human
acccugugcuccaggagguugcugcuuccuuucucauuuugaaggaugaacaaguggccucuggucaccuaagggu

SEQ ID NO: 4173870 - RNA, 89 nt, Human
acccuuacugagugugaccucaucuuaacuggaacccaucugcaaagauccuauuuccaaagaaguucacauuuacgauuacugggggu

SEQ ID NO: 4173871 - RNA, 79 nt, Human
acccuuagaaaccaucagauaauucauacuggagagaaacccuacaaaugugaagaaugugguaaagcuuuuaaguggu

SEQ ID NO: 4173872 - RNA, 68 nt, Human
acccuucggacuuuggaaagugggaagcucauugcaguuuugggcuggccuucugcagaguucugggu

SEQ ID NO: 4173873 - RNA, 85 nt, Human
acccuuuugcuccuauuguucauccaauccugagccuacccauaggguggauuucagcaagggugggugggaggaggaggagggu

SEQ ID NO: 4173874 - RNA, 79 nt, Human
accgaagcuagaagaagaaaagugaacauagauuaguuuguuucugcugacaagccaguuuguaguucucucuuuaggu

SEQ ID NO: 4173875 - RNA, 62 nt, Human
accgacacucuccagguuagagcacuuauccaguggaugguucagcuuucuggaggauaggu

SEQ ID NO: 4173876 - RNA, 79 nt, Human
accggcugucucagcuagaggugaaacaugccaauaagauacaauguaggcaauggguggcccuagaaugacugcuggu

SEQ ID NO: 4173877 - RNA, 57 nt, Human
accgggagaauuuagcaaggccugauuguucagauucuuuucuguguuccucccugu

SEQ ID NO: 4173878 - RNA, 81 nt, Human
accgggagacgaggcacaggccuggugcugcugacaggugucagcuucagcugcauuaggaucugagucuaugauucuggu

SEQ ID NO: 4173879 - RNA, 114 nt, Human
accgggcccgcgcggcggccgccgucccggccaagccggggccccgaagccagagccggagccgggcgggccgcggggucauggcugggccgcggggcgcgcugcuggccuggu

SEQ ID NO: 4173880 - RNA, 74 nt, Human
accggguuuggagaggaaacacagagcagugucuauuuagaucuucagcgagguuuccuuucuuucuccacggu

SEQ ID NO: 4173881 - RNA, 69 nt, Human
accgguuggccccuucggcuccaccuggcucaacagacagccaguggcaugcggcagggaccaaugggu

SEQ ID NO: 4173882 - RNA, 65 nt, Human
accgucuuucaucuuucaugcaggguaaaagaagacaccuuggcuacagcaagaggaaagaaggu

SEQ ID NO: 4173883 - RNA, 55 nt, Human
accgugucugacacuuugggcgagggcaccacgcugaagguguucaugaugcggu

SEQ ID NO: 4173884 - RNA, 62 nt, Human
accuaacucugacauuaucucuugucaacuguuuuccuaguagacaggagaguuagguaggu

SEQ ID NO: 4173885 - RNA, 94 nt, Human
accuaaggcuaugaugugguugucucucacuagcugggggaacacaaggcauucugcuuccagagcaugaagggcaaugaccagagucauaggu

SEQ ID NO: 4173886 - RNA, 68 nt, Human
accuacagcauggggaucacuguaggcaacuagaaauggaggugucuugugguacccauggcuaccgu

SEQ ID NO: 4173887 - RNA, 94 nt, Human
accuacccagauaauccaguauaaugcccccugugggguauaauccggggggauaaucccuuggggggacauuauucugcuaucacaggagggu

SEQ ID NO: 4173888 - RNA, 55 nt, Human
accuagaacugcaggcuauuuuugcugguuucaaaagugaccuguagcuccaggu

SEQ ID NO: 4173889 - RNA, 55 nt, Human
accuagaguagucaaauucauagaaacagaaaguggaacagugauugcuuggggu

SEQ ID NO: 4173890 - RNA, 56 nt, Human
accuagcaugguucuaauauuuaggaacauaacugucucuacaaauuauguuaggu

SEQ ID NO: 4173891 - RNA, 79 nt, Human
accuagcuuucuaugcaucugaacaauagagagguccccauuugccacguucucuaagucuguacagaucaaccuaggu

SEQ ID NO: 4173892 - RNA, 79 nt, Human
acauuugaugaugguacuguauuugaauaagaaaacacuaaauauuuuaaucaagucaaccaucaugugcaacagaagu

SEQ ID NO: 4173893 - RNA, 60 nt, Human
acauuuuaaaaacaguaccuggaggugacuaagugacuacugcacugugauuuaaaaugu

SEQ ID NO: 4173894 - RNA, 91 nt, Human
acauuuuaauuugugggacuauaaugcagguuaauauagcaucuguauggcaucuuuugcauauguagcucccaucccguuuucaaagugu

SEQ ID NO: 4173895 - RNA, 97 nt, Human
acauuuuugugucuauauaucuguauuacauuucuguacacuucugagcuauauucuaaaguucaaugaggauagaacuggauauacacaaaagugu

SEQ ID NO: 4173896 - RNA, 63 nt, Human
accaaaaugcuaaaugcagcaaguagucucuggucuccaucuuauuugauuuggcacuuuggu

SEQ ID NO: 4173897 - RNA, 77 nt, Human
accaaacuagccugucccauuuucuacuauggaauggugucccauuuucuacuauggaauggaauaguuaggugggu

SEQ ID NO: 4173898 - RNA, 125 nt, Human
accaaagcaggaggccaacaaacgacgggaucagggcaugggcgcccgguggggccuggccauggggcuggcucugcgucuguucgugggguccuggcacaucccguccaucuccuucuugcggu

SEQ ID NO: 4173899 - RNA, 57 nt, Human
accaaaugcuuggcugcugugauaacugcuggagccacagaucuucaagacauuggu

SEQ ID NO: 4173900 - RNA, 111 nt, Human
accaaccgcauggccuuggugugccuagauuuccucuuuuguaaagugaggcugaagugucucccuuuggaugguaggcgaggaccaagaggcccagcgccuggcgguggu

SEQ ID NO: 4173901 - RNA, 112 nt, Human
accaauccuuacgcguuuuaaauccuaaaauuuuucuuuagguuuagguaaauaguuaaaaaauuauaacaucuaagggagagaaaguguuauuguauggaacagaguuggu

SEQ ID NO: 4173902 - RNA, 130 nt, Human
accaauucaaauuauccagaagcccgaagguuauaaugauguucauguauagagagcuuuuauucaacaauucaaaguucugugcaggaagucauuaugauaaaagcuuucuuaccaaauuaugaagugu

SEQ ID NO: 4173903 - RNA, 129 nt, Human
accaauugaacuauaacuucuuuuaaagaucuugugccaagcugagcaauuuagaguggcaaaacucaacaaauaaguggcacuuaaagucuuagcuuacagcuaagguccagugaaacuuuauuuggu

SEQ ID NO: 4173904 - RNA, 79 nt, Human
accacacucaaauguguacaugacagauagaaagauuauaguauuuuuuaauguuugagucaguauauuuauugguggu

SEQ ID NO: 4173905 - RNA, 77 nt, Human
accacaguauauaaagucaaggcauuuuaugaucuuccuggauguaauuauuuuccaugacuuuguguaaucauggu

SEQ ID NO: 4173906 - RNA, 55 nt, Human
accacagucucgaagcacugcaggaaagguccacugcagugucccuaacaguggu

SEQ ID NO: 4173907 - RNA, 62 nt, Human
accacagucucuccacacugcagggcgccaagcuugccuuuagcccaagggagggacuuggu

SEQ ID NO: 4173908 - RNA, 55 nt, Human
accacauugcuccacaggguuaacagacaacuguuaaaucaaagaauaauguggu

SEQ ID NO: 4173909 - RNA, 62 nt, Human
accacccucagcagagcugaaaacuggggcaauuccccagaacucagugugugggagguggu

SEQ ID NO: 4173910 - RNA, 64 nt, Human
accaccucacuaguuaaagaagucagcgacuggucacuucagauaacuggugucaccaaggggu

SEQ ID NO: 4173911 - RNA, 70 nt, Human
accacuacagaugugacugggcaaguuacuucaccucucugagucucaguuuccauaucugcaagcuggu

SEQ ID NO: 4173912 - RNA, 60 nt, Human
accacugaaacagguauugcuggugauuuuuguucaccuuggauacauuuuucacauggu

SEQ ID NO: 4173913 - RNA, 85 nt, Human
accacugaaaugagcaauguggaccagcucagggugggcacugcaguacuuuucaugggcugaguccuuuugagguuuccuuggu

SEQ ID NO: 4173914 - RNA, 55 nt, Human
accacugaggccggagcacugaagaguccagcucuuuuucaccucugucagcggu

SEQ ID NO: 4173915 - RNA, 58 nt, Human
accacuuuacagaaauggaaaggucaccaacaaccuucauguuguuaaguauaguggu

SEQ ID NO: 4173916 - RNA, 65 nt, Human
accagaccgggcuaauuuuuguaucuuuaguaaagagaggguuucaccauguuggccaggcuggu

SEQ ID NO: 4173917 - RNA, 101 nt, Human
accagagaaguaggcagaugccagaucaugcagggccuuguggaaucuaagugagaaaugaugugaccuggccuagcaugaagcgucugucuucuauuggu

SEQ ID NO: 4173918 - RNA, 74 nt, Human
accagagacucacagcuggagugaggauggagucucuugcuucagacagauucuuuuuccuccucugugcuggu

SEQ ID NO: 4173919 - RNA, 57 nt, Human
accagagauggggcuucucugugggaugaccugauggauucaguucuuucuuuaggu

SEQ ID NO: 4173920 - RNA, 56 nt, Human
accagaggaugaucuggccucucucgguuuccugccagggaggccucaccuguggu

SEQ ID NO: 4173921 - RNA, 79 nt, Human
accagaggcaguagaaauuugagagauauuuaggauguggaaauaucaagaauugcugaugaaucugauuggcuuuggu

SEQ ID NO: 4173922 - RNA, 58 nt, Human
accagagggagacuuccucuucuacuucagaaaugaauggggaguauaauuuucuggu

SEQ ID NO: 4173923 - RNA, 74 nt, Human
accagaugauguaccacuuucucaguucugaguuugcugagugacuggauagagagucgguacaacagcaaggu

SEQ ID NO: 4173924 - RNA, 67 nt, Human
accagauugagauuguguuuucaaaaaauacagcuucacuggaaagaaaucacuguccaaucuuggu

SEQ ID NO: 4173925 - RNA, 82 nt, Human
accagauuucucuagggaaauaaacugaguggugaccaaaauuuaauauauuacuaggcaguuuuucucuguguuuacuggu

SEQ ID NO: 4173926 - RNA, 67 nt, Human
accagcaaagucucaggcagaggaaggcuaugcuugauagcaacaccaucuggugagaaaagcuggu

SEQ ID NO: 4173927 - RNA, 83 nt, Human
accagcaaggugaaagcaguaucccuuggggccugaggcaggacuacaggcuccacggcaggaugcugucugucuugcuuggu

SEQ ID NO: 4173928 - RNA, 57 nt, Human
accagcagagcuggaagugugcucuuggcuuucagagauaucuccagugaugcucgu

SEQ ID NO: 4173929 - RNA, 88 nt, Human
accagcaguucaaugcuuuuagcuucagcuugcccagaaacaaaccuugagggcaaguuguuuaggagguguuguagauguugcuggu

SEQ ID NO: 4173930 - RNA, 56 nt, Human
accaggaaaucacucugauuuugguucaugccagcuccugagcaugguuuccaggu

SEQ ID NO: 4173931 - RNA, 60 nt, Human
accaggagucuagccuagucaaaaccauuuugauuaagucucuggugcugguuuccuggu

SEQ ID NO: 4173932 - RNA, 59 nt, Human
accaggauaauagguugggaugggacacacuuccaguccaaucuugcuguccacuuggu

SEQ ID NO: 4173933 - RNA, 103 nt, Human
accaggccagaaagugcagugacccuggagagcugggaagcaggcuagaugagcucuacaguuuguccagguuacugcuuggcaaaauuuucaaggccauggu

SEQ ID NO: 4173934 - RNA, 61 nt, Human
accaggugcggccagcuucauucguuaccuugguuagcaguguugccguuggcugcugggu

SEQ ID NO: 4173935 - RNA, 58 nt, Human
accagguggcuaugaggaugcagucaugauaaauguaauugcucauauggcaccuggu

SEQ ID NO: 4173936 - RNA, 59 nt, Human
accaguaugugccuucagugucucuuucuugauaucugcaugagggcauuugucugugu

SEQ ID NO: 4173937 - RNA, 56 nt, Human
accagucuggcuaauuuuuuguagagaugggaucucacuuuguugcccagacuugu

SEQ ID NO: 4173938 - RNA, 81 nt, Human
accagugcccagcaucauuaaggcagaauuaaggcgucucccacuguggacccuguuagucuuuauaguggggcacuuugu

SEQ ID NO: 4173939 - RNA, 91 nt, Human
accauacguguuccaucaacaucuuuuuuccucccuguggcagagagauuggcuuuacaaauagggagggagugaugaaagauauuuuggu

SEQ ID NO: 4173940 - RNA, 56 nt, Human
accauacuuagauggaugccccugcucggcugcagagcagucugccucuguguggu

SEQ ID NO: 4173941 - RNA, 119 nt, Human
accauauaucuauuuguuuguuuccugccuuaggugccaagagggcauuaacucugucuuguucacugcugaacacuuaagucccuggcacuuaaaguuguuggcaaucguuaauuggu

SEQ ID NO: 4173942 - RNA, 83 nt, Human
accauauugaacacuguguccuauuuccuugacauucuagugaaugaaaaaugagagaacacaguuaaugauuugauuauggu

SEQ ID NO: 4173943 - RNA, 96 nt, Human
accaucauaguaaugggcaauaucagguccgcguaagucauggcagcagagcaagacuagguaggauuuagguacauuauauaauacuaaaaaggu

SEQ ID NO: 4173944 - RNA, 128 nt, Human
accaucuguugggcacaucacagcguuaucucauuuaauucccucugcugguaaaggagacacugauuuuacagaguagggaauugaaguucugagagugcauguaaauugcucaagaucucacuggu

SEQ ID NO: 4173945 - RNA, 72 nt, Human
accaucuuuugucuuauccaaucucucagguauccuuguuugguuuuggggaagacaauugcaaaagguggu

SEQ ID NO: 4173946 - RNA, 86 nt, Human
accaugaccaagaguccaggucaagaaugccagugugcuucucucaacaaaacauagcuugauucugggcuuuuaggcuuuuaggu

SEQ ID NO: 4173947 - RNA, 64 nt, Human
accaugcaagcuugaccugugcgcugcucauaucuagagcucagcuucagcaaggcuugcuggu

SEQ ID NO: 4173948 - RNA, 123 nt, Human
accaugcccagugaugaggccugaagguuagggaucaggaacaagagcuugaggaucccugcaagaggugaagcuaugcauuuugguuccaucccuggcugaaugcuugaucagcugcaaagu

SEQ ID NO: 4173949 - RNA, 86 nt, Human
accaugccuucccucagucccucucaucuucacuuagauuccaucccauagugagucagugacaugaacuuguggggagacauggu

SEQ ID NO: 4173950 - RNA, 60 nt, Human
accauguaaaaaauuaggucaucuugggggaacucaaaugaucacuuuguucugcuuggu

SEQ ID NO: 4173951 - RNA, 93 nt, Human
accauuugacaucauggauauguuaauuugcuuaucuguaguaauuauuucacuauguauacguauauugaaauaucaugagccagccauggu

SEQ ID NO: 4173952 - RNA, 58 nt, Human
acccaaaaggcgaagguugcagugagcugagaucaugccacugcacuucagccugggu

SEQ ID NO: 4173953 - RNA, 62 nt, Human
acccaacacucaccuccggauuaaugagcugauauuugcuaaguaacuugugauugcugggu

SEQ ID NO: 4173954 - RNA, 76 nt, Human
acccaagauaggucgguuucucuuuggagguaaaauuaaaagauuccagagcauuuggaagccacguguccuaggu

SEQ ID NO: 4173955 - RNA, 55 nt, Human
acccaagcuucucacagugauagcauuugcauauuacacagugaaagcauggagu

SEQ ID NO: 4173956 - RNA, 105 nt, Human
acccaagugagaccacaauauccugacuuccagucuagagcuaucuguaaugcaauaaaucucuucacaggagcauauacacugggaacgggaacucucacaggu

SEQ ID NO: 4173957 - RNA, 127 nt, Human
acccaauucaccgggaaaccuccagguuaagcucugguccauaaggagaucucccagaaugccaaagggugaugaucaucucuuuguggccaggagaggaaaauggcccuuccccacugccuugggu

SEQ ID NO: 4173958 - RNA, 67 nt, Human
acccaauuucucgguuuugauauugugcuaucgcuaugcagaauguuaccacgggagaaaacugggu

SEQ ID NO: 4173959 - RNA, 79 nt, Human
accagcgcccaggggugcgggugagcaccuccuggugacacccagccgccggugccagccgcaccccaggagagcuggu

SEQ ID NO: 4173960 - RNA, 110 nt, Human
accaggaaaaauucugcaucuuuaggcagucauugaacaaguagcuuuguguuauuuccuuugaauuguccaugaagccugauguauuauuaaugaauuaauuucuuggu

SEQ ID NO: 4173961 - RNA, 60 nt, Human
accaggcuccccuuggauccugagggguuucuuuggggaucucacucaggagcuuuuggu

SEQ ID NO: 4173962 - RNA, 63 nt, Human
accaggcucugccaguguuuacugagcaccuacugugcccuggacacugugcggggacuaggu

SEQ ID NO: 4173963 - RNA, 63 nt, Human
accagggauuucugggggccaggggugcuggaaggcaccaggcugaaccagaggggaccuggu

SEQ ID NO: 4173964 - RNA, 68 nt, Human
accagggcuccaggggaccaucaguuuuauaagcaggugagagcugugggauuugggugugccugugu

SEQ ID NO: 4173965 - RNA, 62 nt, Human
accaggggugucaacagcauuucccaacaucagagauggcuucuuugugacagcucuuaggu

SEQ ID NO: 4173966 - RNA, 106 nt, Human
accagucuucccugggcagagguagagaaggagcuccuuggggucugucugcuucucauacagacuuccaagcagucuuucauuccugugucuaggggugccuggu

SEQ ID NO: 4173967 - RNA, 95 nt, Human
accaguggaaugagcagccuggucagagcagucaggaucaggguccuggguuccugauuaucaccuggacuccugcugacucucuuuucucuggu

SEQ ID NO: 4173968 - RNA, 98 nt, Human
accauacgaauguucccauuucuugcauccuugcugacucuuucuuucuguguuguagucauccuggugggugugaaguggggguacuucauuguggu

SEQ ID NO: 4173969 - RNA, 62 nt, Human
accauagcagaaggaaaggggcccccucccgcuccagccccuucagccucaacuacuauggu

SEQ ID NO: 4173970 - RNA, 57 nt, Human
accaucuccugugccuccagcuucgcuuuugggguugguggcuuguaggagggaggu

SEQ ID NO: 4173971 - RNA, 129 nt, Human
accaucuccuuguagaaaaacgucucugacagguguucuuccaggccggagucuugauuggccauaaucuaaaauccaugcuuggaaagugaaugccuuuucagcagcugucugccuaacagagaugau

SEQ ID NO: 4173972 - RNA, 57 nt, Human
accaucuugcuuuuaguagucaaugcaguuugcaaacuagaaaucagcaagauaggu

SEQ ID NO: 4173973 - RNA, 64 nt, Human
accaugaacaugaagcagaagaaugaagaugaugugcuagucaguucuaagugcuuuacauggu

SEQ ID NO: 4173974 - RNA, 68 nt, Human
accaugcccagccaguuuaugguaauuugcugcaaccacaggcaauuaauauacacuguuagcauggu

SEQ ID NO: 4173975 - RNA, 59 nt, Human
accaugcuggagucccuagcugucagucaccaaaacagacagccaugauaccagcuggu

SEQ ID NO: 4173976 - RNA, 73 nt, Human
accaugcugggccuugggugcacucaucaaaaaacggaccacaggcaugaugcucacaggugcccggcauggu

SEQ ID NO: 4173977 - RNA, 58 nt, Human
accauggggguagucaacagggucggccugugcuggcaguggcacugcccccauaggu

SEQ ID NO: 4173978 - RNA, 62 nt, Human
accaugggucagccaccucagccccuuuaguauaggggcccuaaaggucucuugcccauugu

SEQ ID NO: 4173979 - RNA, 81 nt, Human
accauuagccuguaucugcuagaauuauccccaguaugguuagaaggagauaauauuagaagauacaaauugccaaauggu

SEQ ID NO: 4173980 - RNA, 98 nt, Human
acccaaaucucaucuugaauuguaacucccacaauuccuauaauucccauaugucaugggaggaacuggugggaggugauugaaucauggggaugggu

SEQ ID NO: 4173981 - RNA, 61 nt, Human
acccaagaugugggcacugcuuuguagucaagggcuauuugagcagcagaugcacuuaggu

SEQ ID NO: 4173982 - RNA, 102 nt, Human
acccaagccucagaccuugucgucacuuagaggaagugccagggacgcaugcuucugguugguauuugugugagcugauaggcuuugaugaugggcuugggu

SEQ ID NO: 4173983 - RNA, 129 nt, Human
acccacaauuuaugcauaagugcaugccuucacaaccacauuucugugagucaauauugcaggggccuuggacagucuuacucaagaaauaguuauuuuguaaaaugcaaauuguaaaagucugugugu

SEQ ID NO: 4173984 - RNA, 61 nt, Human
acccacaucaaaugcuaauucugaugugcauccccaucagauuuggaaagcugaguggcgu

SEQ ID NO: 4173985 - RNA, 61 nt, Human
acccacccccaagaggggccuucagcuuuggggcucagaggcacgaccucuuggggagggu

SEQ ID NO: 4173986 - RNA, 67 nt, Human
acccaccuucccucgagagcaaaccccucugcagucaggaggcagcucugugucugggaagcagggu

SEQ ID NO: 4173987 - RNA, 58 nt, Human
acccacuccccacgugcugucagaacucaucacagaguuggacugggaaguggugggu

SEQ ID NO: 4173988 - RNA, 113 nt, Human
acccacucugacaucgagguuaaaugcaacuuuagggccagcaaguacaagccuuauucugccacuuacuagcugcagggccugggguggcacuuggccucccaagggaaggu

SEQ ID NO: 4173989 - RNA, 62 nt, Human
acccacuucuuaccucucuuaaaauccagcaggaaccagcgauaacagaaguagaagugggu

SEQ ID NO: 4173990 - RNA, 106 nt, Human
acccagaaguuuauuuaagcugcacauuucuaggaaauuaaaugcaauaacaccuaauuuaucugauauuauuggagaugugcucucuuauguggauuuuccaggu

SEQ ID NO: 4173991 - RNA, 63 nt, Human
acccagaauagcacaugcuguauauuuuuucagaaaugacagaaauauucguggugcuugggu

SEQ ID NO: 4173992 - RNA, 60 nt, Human
acccagagccagggucaggagcuuaguagaagggccugaaguagccccugggaucugggu

SEQ ID NO: 4173993 - RNA, 59 nt, Human
acccaggaggcugagguugcagugagccgagauugcgccacugcacuccagcucugggu

SEQ ID NO: 4173994 - RNA, 58 nt, Human
acccaggagguggagguugcagugagcugagaucgcgcuacugcacuccaccuugggu

SEQ ID NO: 4173995 - RNA, 88 nt, Human
acccaggccacagcucagcccucccccuccugguugcuucaaacacuaaccccugugaagcagaggggucuugagcugugaugagggu

SEQ ID NO: 4173996 - RNA, 58 nt, Human
acccaggcuggaaugcaguggcgcuaucuuggcucacugcaaccuccaccucccgggu

SEQ ID NO: 4173997 - RNA, 58 nt, Human
acccaggcuggaaugcaguggugcuaucuuggcucacugcaaccuccaccucccgggu

SEQ ID NO: 4173998 - RNA, 58 nt, Human
acccaggcuggagugcaguggcucgaucuuggcucacugcaaccucugccucccgggu

SEQ ID NO: 4173999 - RNA, 58 nt, Human
acccaggcuggagugcaguggggcgaucucugcucacugcaagcuccgccucccgggu

SEQ ID NO: 4174000 - RNA, 58 nt, Human
acccaggcuggagugcaguggggcgaucuuggcucacugcaagcucugccucccgggu

SEQ ID NO: 4174001 - RNA, 58 nt, Human
acccaggguagagugcaguggcgaaaucuuggcucacugcaaccucugccucccgggu

SEQ ID NO: 4174002 - RNA, 58 nt, Human
acccagguggcagaagcugcagugagcugagaucacaccacuguacuccagccugggu

SEQ ID NO: 4174003 - RNA, 95 nt, Human
acccagugauauaggaagcccagaaugauucagcgacaguucagcuucaggggaacugugacugugucuucugggcaaguguucuuuccuugggu

SEQ ID NO: 4174004 - RNA, 82 nt, Human
acccaguucccauucuuacacaauauuuuaauauuauuguguccagugagguucaaauuaaguguuuaaugguagcugaggu

SEQ ID NO: 4174005 - RNA, 57 nt, Human
acccauaggcuguacaacaucaggcauaaacccuaagguaaaauauggucuuugggu

SEQ ID NO: 4174006 - RNA, 63 nt, Human
acccauuacccaugaaagccauuugagguuuguuagcaaauaguggccugauuaugaaugggu

SEQ ID NO: 4174007 - RNA, 76 nt, Human
acccauucccaaaaaacaguuucauagaguuuagcaauauauuugcaggaaacuaguuuuaauugucugauagggu

SEQ ID NO: 4174008 - RNA, 85 nt, Human
accccacuuacuuucuauauagcuuauuuauccacugaacauuagaguucuuaggacuaguauagcaugagguaauugugguggu

SEQ ID NO: 4174009 - RNA, 56 nt, Human
accccagcacauaguagguauucacuaaauguuaguggguguuguagugugggggu

SEQ ID NO: 4174010 - RNA, 88 nt, Human
accccagcaggacuucauuguagcuugacuaauuauauuugcaaugaguauauuuccagaugagguuacauuuugagguacugggggu

SEQ ID NO: 4174011 - RNA, 65 nt, Human
accccagcuccaggcauugcaucugaauucaaagaagauacaguguauguauuuguagguggggu

SEQ ID NO: 4174012 - RNA, 64 nt, Human
acccccuaccuaggaacguauucaccaacacagauggucacagugucguccuuggguguuaagu

SEQ ID NO: 4174013 - RNA, 66 nt, Human
accccgccaacugguacccacaggucaggaugaggggggcaugugggaagaggccagcuggcaggu

SEQ ID NO: 4174014 - RNA, 71 nt, Human
accccguagaauaugucaugucuuagagaaugagcucacagugauucauuccuaacaugguucuuaggggu

SEQ ID NO: 4174015 - RNA, 55 nt, Human
accccuaaacccaggaguggucgguucuuaaaggacugugacuggguguaugggu

SEQ ID NO: 4174016 - RNA, 83 nt, Human
accccucacccccagggcccagcagcauuucaguggauuaaaggauccugcuucacccaacuuugggauugggggucaggcgu

SEQ ID NO: 4174017 - RNA, 57 nt, Human
accccucagcuccuuugaccuuaggauccacuuauuuugucaauaaaaguuaggggu

SEQ ID NO: 4174018 - RNA, 60 nt, Human
accccugccauugccugcccccuagcagauauuugauggccagugugcaguugcaggggu

SEQ ID NO: 4174019 - RNA, 70 nt, Human
accccuucagccucaagauccuucaucuccgauacacaccagagaugggggaucuugaggcugaagaggu

SEQ ID NO: 4174020 - RNA, 66 nt, Human
accccuugacuguaauggaguagggggaaucccauuuugcccuacgccucauacagaccagagggu

SEQ ID NO: 4174021 - RNA, 64 nt, Human
accccuuuccugccucaggaaguagcauggccuccaaacuccacuugcuggguaggaaaagagu

SEQ ID NO: 4174022 - RNA, 63 nt, Human
acccgaggacgccaccugggcccuagucccacuuggacacuggcucugggugugaccuugggu

SEQ ID NO: 4174023 - RNA, 121 nt, Human
acccgcggucuuggccauaggcgaugccacuuccgacagcccagcagggucuggcccugggucccagaggcgcagccccugcgggguuuggauggguuccugcggccuccgauccgcuggu

SEQ ID NO: 4174024 - RNA, 69 nt, Human
acccggccuguuuugacauucuuaaugaucuuaauaauuuggcaucugaaagucugaaacagugucagu

SEQ ID NO: 4174025 - RNA, 55 nt, Human
acccuagcccucugcaugcccugcccugccagcagccaugcugaccugcuguggu

SEQ ID NO: 4174026 - RNA, 65 nt, Human
acccucauuguggggaauguaacacuauugcugcuauaugcauaaauggcuuucauuccuagggu

SEQ ID NO: 4174027 - RNA, 69 nt, Human
acccucucuccauuccuuugaaggaagucacugugcacagacuauuccaaaggaauggggagcuauggu

SEQ ID NO: 4174028 - RNA, 58 nt, Human
acccugaacuggggcucaggagauugagguuuuugucccagcucugccuccaguuggu

SEQ ID NO: 4174029 - RNA, 78 nt, Human
acccugaugagaauggugauucugcagaaaacugcacugcccguggcuguaucugggagguaaccaugcugauggggu

SEQ ID NO: 4174030 - RNA, 80 nt, Human
accuaugugguaggcagaauucugauaugacaccuaaugcccccuggccauguagaauuccuucuacuuugagugugggu

SEQ ID NO: 4174031 - RNA, 82 nt, Human
accucaagacuuucaaguaugcaugcaugcauucauucuucaacuaggguauuugacaagcauuuuugaguaucugugaugu

SEQ ID NO: 4174032 - RNA, 73 nt, Human
accucagaaugugacuguauuuggauauaagaucuuuaaggaggcaauuaaauuuagaugaggucccugaggu

SEQ ID NO: 4174033 - RNA, 83 nt, Human
accucagaguaaacagagaucuugaggucagcagauuguauguaaauuugaugaguuuguaagucuucguaaggcuuuggggu

SEQ ID NO: 4174034 - RNA, 96 nt, Human
accucaggggaaucauguaacuucugugaaucugacuuuucucaucacaggaugcugucaggauuaaugggaguaugcugugauauccucuguggu

SEQ ID NO: 4174035 - RNA, 58 nt, Human
accucagguggcuuggagggggacggagcagaccaucuuccucugggucaccuagggu

SEQ ID NO: 4174036 - RNA, 95 nt, Human
accucaguguuuuggcuuaugggacuguaagcucuggaaugucccuguguuaguuuccuagggcuucaguaccaaaguuugaagacauugguggu

SEQ ID NO: 4174037 - RNA, 62 nt, Human
accuccggcauuacucagaccagccaucuaagcccauguugcuuuggaugugugccugaggu

SEQ ID NO: 4174038 - RNA, 62 nt, Human
accuccucuugccaagacauacugcaucacuauuucuguucucuguggcagcaugaugaggu

SEQ ID NO: 4174039 - RNA, 95 nt, Human
accuccugagaucauuauccaaucuacuaugggggauaccauuccccucacccauaugucucccacgguacaggauaaacaagaauccaacaggu

SEQ ID NO: 4174040 - RNA, 82 nt, Human
accucggccucccaaagugcugagauuacaggugugagccaccgcaccuggccaauuuuuguauuuuuaguagggacggggu

SEQ ID NO: 4174041 - RNA, 66 nt, Human
accucuacuggccuugcccagcgccuagguauguacccacagcuggcgcugcauggccagccaggu

SEQ ID NO: 4174042 - RNA, 61 nt, Human
accucucaggguuuccuaaugcaaauccuugaacccugcagaagugagcauccagagaggu

SEQ ID NO: 4174043 - RNA, 74 nt, Human
accucucucugccucagugauuucuuuaguguuacucaaaauauacauagagcaaggaguggcaggauagaggu

SEQ ID NO: 4174044 - RNA, 84 nt, Human
accucucugugcuucaguuucccaucuggaaaauggguaauguaaugcucaccugggagggcugugguagguuuacagggaggu

SEQ ID NO: 4174045 - RNA, 92 nt, Human
accucugaagugccacaagauaaaguaucauaaaugcagaggaaugauuccauugcuuugugcauauuuaaaaggauauggcgcugagaggu

SEQ ID NO: 4174046 - RNA, 65 nt, Human
accucugagggccaaucgcggggcuggaggaguuuccaauggugcucagugugguccucagaugu

SEQ ID NO: 4174047 - RNA, 92 nt, Human
accucugauuuuuuuugcuuccaggucuuuggccuuggcacucuuugucauauuagaguuccugggucuaggccugggcaggauucauaggu

SEQ ID NO: 4174048 - RNA, 63 nt, Human
accucugggaaaaguauggaaaauaagaaucagaguuuuagaaacauacggaauuuuagaggu

SEQ ID NO: 4174049 - RNA, 79 nt, Human
accugaaaccuucacaucuacucuacaggccccccaggcuagagggcuguuguugcagggagggugggagguaguaggu

SEQ ID NO: 4174050 - RNA, 80 nt, Human
accugaaguggaauugcuggauaauaucagauagaguuucuuuuuaaggugaugaaaauguucagcaauuaaauaauggu

SEQ ID NO: 4174051 - RNA, 61 nt, Human
accugagacuugggaugggaauauauguuucaaugcauucaaaacucuugagucucuaggu

SEQ ID NO: 4174052 - RNA, 90 nt, Human
accugagaguuuguuggaaaugagaaccaacaccuggcuccaccucagagucacuggaucagaaucugauuuuuaacaagaacuccaggu

SEQ ID NO: 4174053 - RNA, 58 nt, Human
accugaggagcucagccucccaugaccaacccuguguugggcugugccuccucguggu

SEQ ID NO: 4174054 - RNA, 77 nt, Human
accugauggucaaucacuccccagcagugagagacaugcccugaagcaucauugcaguagggagagacccaucaggu

SEQ ID NO: 4174055 - RNA, 95 nt, Human
accugccugugcuauauaacgagaaacugcauuuauuuauuuccuuuuucuggaguuagaugcuugucaguuucugucgauaacaguugcagagu

SEQ ID NO: 4174056 - RNA, 57 nt, Human
accugcuauaaaaugggcauagaaagcaaacauuccaaugcuuaauuccuaguaggu

SEQ ID NO: 4174057 - RNA, 75 nt, Human
accugcuccauuguuccuuuacuguguucuuuauaauugacuucucaguaagaguugacaauggccauagcaggu

SEQ ID NO: 4174058 - RNA, 55 nt, Human
accugcugugauucuaauuggcugagaggaaacaauaaaccaaucacauguaggu

SEQ ID NO: 4174059 - RNA, 84 nt, Human
accuggaagcugguuagaaaacagagcucaggugccaccccagaucuacugagucagaaucugcauuuuaaccaggucccaggu

SEQ ID NO: 4174060 - RNA, 69 nt, Human
accuggaauaggcagcaggaugcuccucuugagguuucagagggagcacagccuugccaguaccucggu

SEQ ID NO: 4174061 - RNA, 67 nt, Human
accuggaauauggugccuccaauaccuauggaucccaagcagguauuuacccacuuuuguuuuaggu

SEQ ID NO: 4174062 - RNA, 102 nt, Human
accuggaggccucauuacagcacaaaaacauucccagaguuucuuauccaguagauccaagguggggcccugagaaugugugugucuaauggguuuccaggu

SEQ ID NO: 4174063 - RNA, 61 nt, Human
accuggauucuuacuucuaagcaagcugcccucuaggcagucauuuauacgggaaccaggu

SEQ ID NO: 4174064 - RNA, 85 nt, Human
accuggcaaucuguuagaaaugcagacacucaguccccaccccacaccuacugaaucugaaucugcauguugacaagauccaggu

SEQ ID NO: 4174065 - RNA, 58 nt, Human
accuggcaggcggagguugcagugagccgagcucacaccaguacacuccagccugggu

SEQ ID NO: 4174066 - RNA, 72 nt, Human
accuggcaggucucgcugacgugucuagccccauucaggacaccuuuucagccugaccaguugcuccaaggu

SEQ ID NO: 4174067 - RNA, 58 nt, Human
accuggcagguggagguugcagugagccgagaucacgccacugcacccuagccugggu

SEQ ID NO: 4174068 - RNA, 58 nt, Human
accuggcugagaacgugcagcuggcagaaacaggcccauuugucacaauucaucaggu

SEQ ID NO: 4174069 - RNA, 82 nt, Human
accuggcuugccuacaucauaauuucauuguguacaucaaguaagacuuuauguacuaaagaaauuugcaggccauacaggu

SEQ ID NO: 4174070 - RNA, 65 nt, Human
accugggaggcggagcuugcagugagccgagaucgcccacugcacuccagcacuccagccuaggu

SEQ ID NO: 4174071 - RNA, 58 nt, Human
accugggaggcggagguuguagugagccgagaucgcaccacugcacuccagccccggu

SEQ ID NO: 4174072 - RNA, 84 nt, Human
accuggggagucugugcagcaugccucuggguggcugcucuggcagagcagcaccaaccagggccuguuuauauuuccccaagu

SEQ ID NO: 4174073 - RNA, 72 nt, Human
accuggggucaaugugguggcagaugucagugccagauggcaugacaccuaauaaccaacauguuuccuugu

SEQ ID NO: 4174074 - RNA, 64 nt, Human
accuggugggaauguguuagcuuuuacuucuuaaugccugcuuugucaucaguauccacuaggu

SEQ ID NO: 4174075 - RNA, 58 nt, Human
accugucugggcuacauuugcauaagcucacaaaaugcaggggaggcuuaaagcaggu

SEQ ID NO: 4174076 - RNA, 71 nt, Human
accugucuucagagugaaagucugugauucacggggucaguggucucaucuucauaucugaaagacagugu

SEQ ID NO: 4174077 - RNA, 81 nt, Human
accuguuauuuguggugcugauuuguugcugagauuuagauuuucauguguguuacucaagagauagcuuuaaaugcaggu

SEQ ID NO: 4174078 - RNA, 99 nt, Human
accuguuccucuucugauggccaucauuugguuugacccaaaagccuugugucuggggcugaggguuaagaucagacagcuguucacuggagagcgugu

SEQ ID NO: 4174079 - RNA, 59 nt, Human
accuguuuagaaagcuuaugaggaagaucuguuccuccuuugaguugcuguagacaggu

SEQ ID NO: 4174080 - RNA, 81 nt, Human
accuuacggcagcaaucagucaauggacuagucccugcuccuuagucaugacaggcaggguuucuccauucugcccaaggu

SEQ ID NO: 4174081 - RNA, 61 nt, Human
accuuacucuuuagucuuccuuguugguucacaguagggaauacauugggguaaauuaggu

SEQ ID NO: 4174082 - RNA, 128 nt, Human
accuucauuuccaacaagcuuugggagccugugugucugcucacagcuaggaggaaagcagaggaaggccaguucuccuuacuuuuugccuguuguggcccagcuaacccaauaaaugaaauucaggu

SEQ ID NO: 4174083 - RNA, 80 nt, Human
accuucuaugguuuuauauuucugguagccuucaggaucuugguguuuauuccugauuguuuugugugacaccuaguggu

SEQ ID NO: 4174084 - RNA, 76 nt, Human
accuucuuuugggauuauuggaauguuauauuugcagagcaagucagacacguuuuccauuaguacuaaaaguugu

SEQ ID NO: 4174085 - RNA, 78 nt, Human
accuugacaguguauuaaggaucuugaccuagcagaguauccuggacuauucagguguccauuaauccaaucacaggu

SEQ ID NO: 4174086 - RNA, 78 nt, Human
accuugcaaugacaguuggaaugacauuagacucucaaaugagagacuaagaaguuuuaacuuugucuaguagauggu

SEQ ID NO: 4174087 - RNA, 64 nt, Human
accuugcuuagcgacuccccuuccucuaccuucaaauagagggaggcaaccugcaaagcugggu

SEQ ID NO: 4174088 - RNA, 100 nt, Human
accuuggagaggagcagccccagggaggauggccucgguggcugccguggaucugaagcagcagcagcaggaggcuguccaccaccaugcuccccacagu

SEQ ID NO: 4174089 - RNA, 58 nt, Human
accuugucuguuuuccaguauguaggauccccuagcacagagauggcacagagaaggu

SEQ ID NO: 4174090 - RNA, 114 nt, Human
accuuguguauuagcuuucuagggcugcuguagaaaacugucacaaacacggugaguaaaacacagaaacuuauugucuuacaguaauagaggcuagaagucugagaucaaggu

SEQ ID NO: 4174091 - RNA, 77 nt, Human
accuuuaaggagcuacucaccgucagacucacccaaguauaggguuggccccugagagcgaguaccuccuuaaaugu

SEQ ID NO: 4174092 - RNA, 55 nt, Human
accuuucccauccucucccugggcuucaguuugccccugaagacaauggagaggu

SEQ ID NO: 4174093 - RNA, 57 nt, Human
accuuugguaaguuuccaaaacauaaacucauguaaguaaaugggaacuuuagaggu

SEQ ID NO: 4174094 - RNA, 57 nt, Human
accuuuuauguaaauauauguugacuugcugguuuguguaugcauugcauguaaggu

SEQ ID NO: 4174095 - RNA, 85 nt, Human
acgacuccccuuuucuucuccaccguugaccuuuagguuccuggaaaacuuugguggugagggugugaaaugagggggugcacgu

SEQ ID NO: 4174096 - RNA, 84 nt, Human
acgacuuguacacugugaugccaucuuuccaccuauaaaauggaaacaauccuauagacuugaugguauuaagugagcaguugu

SEQ ID NO: 4174097 - RNA, 64 nt, Human
acgagccuggcucccucugcagcuccucugggguguccuggacgguggcugggggcaaggccgu

SEQ ID NO: 4174098 - RNA, 82 nt, Human
acgaucuuggccacgugcugggagcugcccucucugagcccuuccuugcccagaggggcccgguucuccgucuuggccucgu

SEQ ID NO: 4174099 - RNA, 67 nt, Human
acgcuugguaugugagggccaaccccaauagucaccaaaguaaggggagccacauucuuccaggugu

SEQ ID NO: 4174100 - RNA, 130 nt, Human
acggaaaugugauugaauacauuauaaagugauaauacagaauuugcccuuuucauauuguaagcaagaugaguuuauggaaggauuucuugucuaucacuuuagguaaagaaaaacaucuuuuuucugu

SEQ ID NO: 4174101 - RNA, 63 nt, Human
acggaggccacguucucagccaccgugccacucugcaugucagcuggcugggcgugccuccgu

SEQ ID NO: 4174102 - RNA, 64 nt, Human
acggaggggagaaagcuggcauauugaucccccacuccuugguugucagcucccuguccugugu

SEQ ID NO: 4174103 - RNA, 83 nt, Human
acggcuucaacugcgcagaggccaucaacuuugccacuccacgauggauugauuaugguaaaguggcuucacaguguagcugu

SEQ ID NO: 4174104 - RNA, 71 nt, Human
acggggcugguuccuguguacuguggcuuagcuggcugggaugagaagcagcuuacagguguccaccuugu

SEQ ID NO: 4174105 - RNA, 79 nt, Human
acggggucacuuugagaaacugcacacgaugugccugaugcacgguaggugcucaguacgugggcaguuccuuccccgu

SEQ ID NO: 4174106 - RNA, 58 nt, Human
acgguccuuggggaccaaauugaaagcuuuagggcuuugacuuuguccucaggaaagu

SEQ ID NO: 4174107 - RNA, 70 nt, Human
acggugccuagcacagugcucuggacagaguggaaacgcuaccugcauagucauugagcgagggcaucgu

SEQ ID NO: 4174108 - RNA, 66 nt, Human
acggugugaucucaaagcauggagcagaaugagucuccacuuuguccgcuaugggaucuucacugu

SEQ ID NO: 4174109 - RNA, 88 nt, Human
acguccagggaagagcuguggauaguccuggauuguccugcguuuggcagcggagguggaccaggcuguuccagucuaacccugaugu

SEQ ID NO: 4174110 - RNA, 55 nt, Human
acguccgcaggagagcacgugcacaccacggggagcgugugccucugcaggacgu

SEQ ID NO: 4174111 - RNA, 70 nt, Human
acgugaaaucuugagaaacaucuaaucuuuguguugaaagacaguaauauuuuacauguuucuugcaugu

SEQ ID NO: 4174112 - RNA, 130 nt, Human
acgugcaagauccaggcucugcgugauaagcuguggaucuuccugguucagucuuucuaugcuguucgucacacagaaagcuggaagcugaugagcacagaugaucaacagaaaauccaagcagguacgu

SEQ ID NO: 4174113 - RNA, 73 nt, Human
acgugcauauguauacacacauacacuuauuuuacaacaaucaggucauauuguguauacuguuguagcaugu

SEQ ID NO: 4174114 - RNA, 79 nt, Human
acgugcccauuagguucauuuagugaaggagauaccaaaggaaauggccuucucuucucuagugagcaacuggccacgu

SEQ ID NO: 4174115 - RNA, 58 nt, Human
acgugcugggucugcggggccguggcccgguggccaggcgagcucuucuccagcacgu

SEQ ID NO: 4174116 - RNA, 66 nt, Human
acguuuucagccuuaauguagauaguuuuucuaagccgucucgagaaacacaugggguauaaacgu

SEQ ID NO: 4174117 - RNA, 55 nt, Human
acuaaaacuagccccuccucccagcccuaccuggggagggguugcauguuugagu

SEQ ID NO: 4174118 - RNA, 102 nt, Human
acuaaagguuauacccucuuuuauuaauucagcuucaaauuuggugaaguacagcuaaauuucaagaggcauuucacauuaauuugaugcucagccuuuagu

SEQ ID NO: 4174119 - RNA, 99 nt, Human
acuaaauggugaaaggcucauacagaaaauacaggcuuccacaggaguuaauacgaagucuauuuucuauagaugaauuaacugccuaccauaaauggu

SEQ ID NO: 4174120 - RNA, 74 nt, Human
acgugugcacaaugaccuaggcaagucagaggcuguccaggaacccuucucuauuugccuaggcuugugccugu

SEQ ID NO: 4174121 - RNA, 84 nt, Human
acgugugugugccugucaacaagugguuauugggauggacgacuggucagucaugugacugcuuuuggguggugugcuuuacgu

SEQ ID NO: 4174122 - RNA, 56 nt, Human
acguguucaauuuccaucugacuccacucucuauuucagauugagguucugcacgu

SEQ ID NO: 4174123 - RNA, 103 nt, Human
acguucuaaaaucuccuucaggugacagauuugcugcgcaugguguguuuaacugaggauucagcguaccuagcagaguuucuggaggaaauuuugagauugu

SEQ ID NO: 4174124 - RNA, 69 nt, Human
acguugcuggaacucagugaaucauuaaaaaucaaguaaugauuuuucugaauuccauuuuuguggugu

SEQ ID NO: 4174125 - RNA, 73 nt, Human
acguugguggauaugauguuauuauaaauacuacucuaugucaaaggcuguuauaacaucgguugacuaaugu

SEQ ID NO: 4174126 - RNA, 61 nt, Human
acguuuugaguagauagccauauuugauaagcagguuggaugcuucuguugcuuaggaggu

SEQ ID NO: 4174127 - RNA, 59 nt, Human
acuaaaacugcggcauuuagggcagcacacuaaacugcacuaaacucugcagauuuagu

SEQ ID NO: 4174128 - RNA, 121 nt, Human
acuaaaaggucuauucucccaucaaugcauaagggauuuacaaguuuaacucucauugcuguuaauaggaauucuaugugugauccaaggguguauucauggagaaaaugcaucuauuagu

SEQ ID NO: 4174129 - RNA, 73 nt, Human
acuaaagggcaguucagccacaggcucuggauucaaauccagcaccuucucauguuagcugugugacuuuagu

SEQ ID NO: 4174130 - RNA, 81 nt, Human
acuaaauaguaagucagaaggcuuuccuguaggaagacacaacuacgguuuguuucacugaaagccuuacuacucaacagu

SEQ ID NO: 4174131 - RNA, 69 nt, Human
acuaaaugcaauauguguuucuguuuaggauccugcaccugaaagagaggcauuguugggacauuuggu

SEQ ID NO: 4174132 - RNA, 78 nt, Human
acuaagaaucuccaaggaagccccaagggaucugggaucuagacuuuagaaaaggggcccuccuuggaugaugcuggu

SEQ ID NO: 4174133 - RNA, 79 nt, Human
acuaauauuaaagacagcagauggauggcucaagaguuccuaccuuuugucuuaucucuuugucugauuuugguugggu

SEQ ID NO: 4174134 - RNA, 65 nt, Human
acuaauuccacaauuuuacaaguuaaaaauauucuuaguuuuagcuugaaaguuuuggagguugu

SEQ ID NO: 4174135 - RNA, 67 nt, Human
acuacaagugugcaccaccauguccagcuuaggugucaguuugauaugagucaguagcauaaguagu

SEQ ID NO: 4174136 - RNA, 120 nt, Human
acuaccaggagagauugggguagggcaggcugagaaauauacuacuccugugugcucgggaagaaaauauauugucucugccuugucuggacucucaguuuaccuucucuccucuguggu

SEQ ID NO: 4174137 - RNA, 57 nt, Human
acuacccagaugcuauagugaaauguguguguucauauaaacucaggaucugggagu

SEQ ID NO: 4174138 - RNA, 58 nt, Human
acuaccuuauacaaaauguagguuucauacaaacacaugcauucuuguguaagguagu

SEQ ID NO: 4174139 - RNA, 93 nt, Human
acuacuauaaaauauuauuagauucuuaauuguaaucgcaguaagccuugcaaccucuuauaguuacagaauugggguaauguggauauuagu

SEQ ID NO: 4174140 - RNA, 83 nt, Human
acuacuauaauuuauaacuuuggauaugacaagagauguuuuuuagcaaaguuugcgacucuugaguuaagaaguuuagaagu

SEQ ID NO: 4174141 - RNA, 56 nt, Human
acuacugagaaauguaggggcaggggccagagccucugcccacaucacucaggagu

SEQ ID NO: 4174142 - RNA, 63 nt, Human
acuacuguuaggauucaugagguaucacaggaaaacugccuagcucagaagccuaugcauagu

SEQ ID NO: 4174143 - RNA, 64 nt, Human
acuagaaagcaaaagccauuucagacugcaguuuuugguugaaaauggaaaaugcuguuuuggu

SEQ ID NO: 4174144 - RNA, 56 nt, Human
acuagaaagcacuaagcuaggcugccaggccggggcuguguggagguguuucuagu

SEQ ID NO: 4174145 - RNA, 87 nt, Human
acuagaagugagguggaugaacauuaagagagacuucuuccuuccccucuguuaccaaaaucuuguauauccauuucaaggaucagu

SEQ ID NO: 4174146 - RNA, 67 nt, Human
acuagaaguuuggguccauuaagaaaagcauuuuaucauuuguucacugauguaccucaagccuagu

SEQ ID NO: 4174147 - RNA, 69 nt, Human
acuagagggaggaguucugucaccaaggaagcucccaggcauuccuucaaacgccuccugcacucuggu

SEQ ID NO: 4174148 - RNA, 58 nt, Human
acuagcagaaacugaucauggcuggacuccacuggccaggauagccaguucugguagu

SEQ ID NO: 4174149 - RNA, 59 nt, Human
acuagggaguuuauguuguauuccaaaagcauguggagcuacaagggagacuuuuuugu

SEQ ID NO: 4174150 - RNA, 59 nt, Human
acuaggucaacauucuaauuagcguccagauggaaggugccuguuauuguuggcuuagu

SEQ ID NO: 4174151 - RNA, 82 nt, Human
acuagucuuuugaaaaauccacuuugcuuguauucugaauaacuaguuggagugcagcaagaccggauaugucgagacaagu

SEQ ID NO: 4174152 - RNA, 128 nt, Human
acuagugguacauuugauugaaucagaaaaauaaacaaaucuuuccugugggagaaaacaaagucucucagggaaugugauacaggaagagugauuugguuuguggucaugguugaagugccacaggu

SEQ ID NO: 4174153 - RNA, 64 nt, Human
acuagugugacacccuguuaagaucccuuuaccagcuaacacuuaauauagguucacaacuagu

SEQ ID NO: 4174154 - RNA, 84 nt, Human
acuaguuauuuuuuaaagcauguugcuuaacaggcacacacauugugaacauuuuuuuuaaguugcauacuuuaagggauuagu

SEQ ID NO: 4174155 - RNA, 57 nt, Human
acuaguuuucaggcaugucuggaucucuggguucaaacaaugucaucaggacuuggu

SEQ ID NO: 4174156 - RNA, 122 nt, Human
acuauagcccccaugccuggaacagugcuugccaccaaguaacaaccccauaaagacuugcucagucuuuaagggauguucugcuuuuagggaacucugauucaggugaacagguaucuagu

SEQ ID NO: 4174157 - RNA, 62 nt, Human
acuaucaagugcuuaaaaggguggucuauuaggaaguugauaaccagggagagcaugguagu

SEQ ID NO: 4174158 - RNA, 99 nt, Human
acuaucaauuaauauagcauacuugaaugauuuuaaacagauguccagcaaaucaggugugagaaggguucaggaauauguuaggauuaauucuuaagu

SEQ ID NO: 4174159 - RNA, 57 nt, Human
acuaucuccugaugaaaauugacucuggaguugggugucaauuucagguagcauagu

SEQ ID NO: 4174160 - RNA, 71 nt, Human
acuaucuuauaggugugccccaaauuuauacccaaaauuaguauaaauuugggguauaccuaugagauagu

SEQ ID NO: 4174161 - RNA, 91 nt, Human
acuauguccuguuacauuuuguuccacgguccagaauacguuccaaugaacacauuuuggcuagguggagaagugguagcaaugaaguagu

SEQ ID NO: 4174162 - RNA, 77 nt, Human
acuauguuucccuguuuuauauccuaacaagaaauguuacuuguucuugauuccgauaaagaugggagaaacacggu

SEQ ID NO: 4174163 - RNA, 88 nt, Human
acuauuagguugguacaaaaguaauugcaguuucugccauuacuuucaauggcauaaaccgcaguuaccuuugcaccacucuaauagu

SEQ ID NO: 4174164 - RNA, 127 nt, Human
acuauugcuucaguacauuauuuuugcuuaaauuaggucucauuaguuucuguuuguugcaaccaagaaugcugacagaacucaaacaugagaaggagcagaaaguaaugcaaugaaagcuaaaagu

SEQ ID NO: 4174165 - RNA, 77 nt, Human
acucaaauucaaggaauuuacaacuaugagggggaaaauaaggucuccuuacaaugcaguuuacuuaggauuugagu

SEQ ID NO: 4174166 - RNA, 60 nt, Human
acucaacugccauacagcuccaugguucagagcacuguuuuaggaguugguggccugagu

SEQ ID NO: 4174167 - RNA, 60 nt, Human
acucaaugggaagaagggccucuccaguguucccauugcugcaggcccccuuccuggagu

SEQ ID NO: 4174168 - RNA, 60 nt, Human
acucaauuaccucucucucuucucucugugccgacauggggcccaaagagaggucugagu

SEQ ID NO: 4174169 - RNA, 65 nt, Human
acucacaauuuuucagugacuauugcagacuuggcugagauaagcuucuuugaaaaauugucagu

SEQ ID NO: 4174170 - RNA, 56 nt, Human
acucacagacugcagguuuauugggugcuaagugugcccugcuguagucuguuagu

SEQ ID NO: 4174171 - RNA, 71 nt, Human
acucacucuuaaucagacucccucaggagcagagauuacucuugacaccuaagucuguuaacacagugagu

SEQ ID NO: 4174172 - RNA, 79 nt, Human
acucacuuauuccucuguaacugugcuuggcccuagaaggcaauuauuaaguauuuguugaaugagugaauaaaugagu

SEQ ID NO: 4174173 - RNA, 79 nt, Human
acucaggagaaagccaauuagagugaacaugugucacuccuuugacccacccaacaccuuugaaugucuucucucuagu

SEQ ID NO: 4174174 - RNA, 57 nt, Human
acucagggcagaaaguuucuggagacuucccucccuucagcagcaucugccuagagu

SEQ ID NO: 4174175 - RNA, 68 nt, Human
acucagucuugccuuguaggucugcuuauaauuagaaagaggcauaccuacauuauagggauaugggu

SEQ ID NO: 4174176 - RNA, 77 nt, Human
acucaguuuacacagcucugaauuuuaacuacacaaagauaagcaaauauuuugggauaaauucaugagcacugagu

SEQ ID NO: 4174177 - RNA, 71 nt, Human
acucauaacccucugaagaggcauuauuuuucauuuuacagaugcagaaacugcagcucagagaagugagu

SEQ ID NO: 4174178 - RNA, 58 nt, Human
acucauagaaauuauacuaagaacuaaaguugccuguucuuguauuggaucugugugu

SEQ ID NO: 4174179 - RNA, 55 nt, Human
acucauauacuguuguuuuuaagucuuuuaaauuuagauuuguaaguaugugggu

SEQ ID NO: 4174180 - RNA, 66 nt, Human
acucauaugguguauacccugaaggacguuacuauuacauguauggguuaaacaugcuauaugagu

SEQ ID NO: 4174181 - RNA, 55 nt, Human
acucauguuuucucuagcuggaagcccuccuggcugcccuggcccuaaccugagu

SEQ ID NO: 4174182 - RNA, 59 nt, Human
acucauuuccugcuugauuuugugauuuagccaucaaugucagcugguaggaaaugugu

SEQ ID NO: 4174183 - RNA, 68 nt, Human
acuccaaggaaacaugaaaugcauuggggacacaucccuucaaggcagauucauguuuccugaaaagu

SEQ ID NO: 4174184 - RNA, 130 nt, Human
acuccaaucugacuaauauuugcuuugcuugugcuacacuuucaaagcuaauuucuuuagcauuuaaacuuaucccuuggguuucagcugguaaaggaguagcgaguacauuuacauuuuauuacagauu

SEQ ID NO: 4174185 - RNA, 69 nt, Human
acuccagcaaccugacaagacuaugaguaguucuccuucauccuauuuaugugguacagguugugaagu

SEQ ID NO: 4174186 - RNA, 73 nt, Human
acuccagcagucacugguugagguucacuggcaaacucacugccugguguugccaaucugugccuccuggagu

SEQ ID NO: 4174187 - RNA, 74 nt, Human
acuccauaacagcuggcaccaaauauaguaaauugugaaauaaugagcuuguauauugcuagcaauuacagagu

SEQ ID NO: 4174188 - RNA, 66 nt, Human
acuccaucacucaucacucauuggacaacagaggcuucuugauguuugcugaagugaugguggggu

SEQ ID NO: 4174189 - RNA, 62 nt, Human
acuccauuccuguaggugaccacugcuggcuucugggaaagaguggagcuggaaaguggggu

SEQ ID NO: 4174190 - RNA, 60 nt, Human
acucccagguggagguccugagccacgcgaucuccuucuaaagccuccaccauggagggu

SEQ ID NO: 4174191 - RNA, 67 nt, Human
acuccccacagcccuggacugguuggucuccucagaagccugggucuccaguucagggcagggcagu

SEQ ID NO: 4174192 - RNA, 56 nt, Human
acucccuugguggagaaugcaaccuucuugcuucaguuucaagucccucugggagu

SEQ ID NO: 4174193 - RNA, 72 nt, Human
acuccuaggcuuuuguuuugagcaauuggauggguaucauauaauagcaucuucugagacaaagacuggagu

SEQ ID NO: 4174194 - RNA, 81 nt, Human
acuccugagggcuucauugaaggagggacuugcuugggggaaacuggaagcaauuuccuguucagugagacccauggaugu

SEQ ID NO: 4174195 - RNA, 78 nt, Human
acuccugagguucuggagcugacucacaccagcuagcaagagacagcuguggucagaauucaguuccaucuugugagu

SEQ ID NO: 4174196 - RNA, 112 nt, Human
acuccugguuaauucuaagcuauuaccuucuuaggccauugauuuuuauaaguuuuaacuuggauuuuuaauauuaucaguagguaaaggucauacuguauaagacuaaagu

SEQ ID NO: 4174197 - RNA, 61 nt, Human
acuccuuuggcagcauguugagaccuaaggaccucccucagaauaauguuucuaaaggugu

SEQ ID NO: 4174198 - RNA, 72 nt, Human
accucuaagcugauuccacuuuuuccacagagcugcuccagggcggugugguuggaggggggaucaggaggu

SEQ ID NO: 4174199 - RNA, 91 nt, Human
accucuacaguauuuaaggcauacauauuguuauagguagcuuuuguuuugcaucugaccucaaaauguguauuucaauauaaauaggggu

SEQ ID NO: 4174200 - RNA, 105 nt, Human
accucuaccccucucuuucucuguuacacacacacuguuaauguaggaguaugugugcaagcauguguaugcucaaaggcuaucaauagugugaaaauagaaggu

SEQ ID NO: 4174201 - RNA, 66 nt, Human
accucuacuguaggugggucacuaguacagguggaucacuaguacagguggaucacuaguauaggu

SEQ ID NO: 4174202 - RNA, 82 nt, Human
accucuagcccugcacagccggaccccugcugugggcagaacucccaggcuggguugcaggcugugccuuaggcuucaaggu

SEQ ID NO: 4174203 - RNA, 62 nt, Human
accucucagagcucgugggaccuuggagaccacucuaaggacuucagcuuugauuuuugggu

SEQ ID NO: 4174204 - RNA, 95 nt, Human
accucucugggcugcugugaggaugagaugagauaacacacaggaagguguucucgcuacaugaguguucccagucauucuuagggccaagaggu

SEQ ID NO: 4174205 - RNA, 93 nt, Human
accucucuuuccauaaauguauaaugcgccucagaaaacagagagccccaacucuacuuuggcuucugugggcguuuaccaaggaaaauuggu

SEQ ID NO: 4174206 - RNA, 62 nt, Human
accucugaagggccaagcaaugcuaggagucguggaugcauuguuucauguaucuucagggu

SEQ ID NO: 4174207 - RNA, 72 nt, Human
accucugucuaagguauagucuggaaaagggcauuuuccaagcuguguuuugagauauuauuaacaguaggu

SEQ ID NO: 4174208 - RNA, 58 nt, Human
accucugugugaugcgcaaaguacaccuguuucuauuguaccugccucucgcgguggu

SEQ ID NO: 4174209 - RNA, 73 nt, Human
accucuuuuugucucaccccuuugaggaacuuuguuaucuauacguuugaguucuaaggugaguagagagggu

SEQ ID NO: 4174210 - RNA, 61 nt, Human
accugaaccaggaugggaguagcgggaguugugagaggagcuugcauucuggaucuauggu

SEQ ID NO: 4174211 - RNA, 110 nt, Human
accugaagagcuuguuaaaacacagauugguaggccucacucucagagcuucugauucaguagguuugggagggugaggcccgcaaauuugcauuaucaaguucucaggu

SEQ ID NO: 4174212 - RNA, 67 nt, Human
accugauaccuauagugaugcuaggcuuuucugacugaaggagcuucagcgugugcuaagggcaggu

SEQ ID NO: 4174213 - RNA, 69 nt, Human
accugcaggagcagaagccuaaacccagccuucacuccacugcuggccaggaggcugcuucugacacgu

SEQ ID NO: 4174214 - RNA, 59 nt, Human
accugcaggggugcucucugggacaucucauuaaccgugucaucaaagcccccucaggu

SEQ ID NO: 4174215 - RNA, 66 nt, Human
accugcccauuuucaagucuaauaaaaauguccugacauuugcaugaccuuugcaaguggguuggu

SEQ ID NO: 4174216 - RNA, 63 nt, Human
accugcccuggaggaagauauucagccccauucccccaagcccugaguuuuccaggggcaggu

SEQ ID NO: 4174217 - RNA, 69 nt, Human
accugcuccaagagagaaguguaguuacucugauaguucacuagaccacauuuuucuaggaggcaaggu

SEQ ID NO: 4174218 - RNA, 59 nt, Human
accugcugguuuaagcuuuccucucagcugaggauuccuagagcugcagaccaggaggu

SEQ ID NO: 4174219 - RNA, 61 nt, Human
accugcuguuucuuugaugauggaaugaaugccucuuauucuaucuaaagugaacaaaggu

SEQ ID NO: 4174220 - RNA, 90 nt, Human
accuggaauguaaguagggaugcuucaguuacuucuccccaccccagaaugaaguugaccuucaagcaccauauuuaucccuuuccuggu

SEQ ID NO: 4174221 - RNA, 68 nt, Human
accuggaggggagguguccccaaaucucauuaccuccuuugcucucucucucuuucuccccuccaggu

SEQ ID NO: 4174222 - RNA, 74 nt, Human
accuggagugauggaaagugcuuggccaaaguuuacaaagcccuguagccaauaacugguuccaaauuucaggu

SEQ ID NO: 4174223 - RNA, 71 nt, Human
accuggcuggcugugccccugccguccugcauuguaaauuggcuuuagguugcauguuucuccagcuuggu

SEQ ID NO: 4174224 - RNA, 57 nt, Human
accugggaacgcuuuguggaggaccuggucacugguuuuccgaaggccagcccaggu

SEQ ID NO: 4174225 - RNA, 112 nt, Human
accugggaagcuugucaagaugcauguucccaagcucccaggcucccacucccagagauucuaauacuguaauggagcugaggacacuacauuuuuaacaggcugaccaggu

SEQ ID NO: 4174226 - RNA, 130 nt, Human
accugggacuuguggccuuaggaaagcgaaaauccacaaggugucuucagggugagacagaggcaggcaccuuuucaacccuccuguuacugccugcaggacaccucgcuaauuaagcugccuucccugu

SEQ ID NO: 4174227 - RNA, 129 nt, Human
accuggggugccgguguguuuuacaaggcuggcuuucauggcgcaguugaguucccacuugcagaacauacucacccuguggcuauaaggcaaagcgcuggggcuuguaggcacuggaccccaagcagu

SEQ ID NO: 4174228 - RNA, 67 nt, Human
accuggguuggagcuaucauuaguggcagaauaaaguuccuuccagguuuuggcuccauuccaaggu

SEQ ID NO: 4174229 - RNA, 80 nt, Human
accugugcuucagaaauuuucucaguaguuccggacaaguuguucaauuuggacagauggcaaguuuauggaguucaggu

SEQ ID NO: 4174230 - RNA, 61 nt, Human
accuguugcugaaucaccugggcguucguggggguaaaaugcagauucuuagccagcaggu

SEQ ID NO: 4174231 - RNA, 55 nt, Human
accuguuuacccugggcuccccugacuugcuccggggggaaaguggugagcgggu

SEQ ID NO: 4174232 - RNA, 83 nt, Human
accuuaaguugcucuaggugaggucuuuaggcuaucuggucccauaauaacuagcaaagacacaacaccagggauaacaaggu

SEQ ID NO: 4174233 - RNA, 68 nt, Human
accuuacccagucuggauguaggaccuuacuaguguucuucaaagugacaacuaaacugggguuaggu

SEQ ID NO: 4174234 - RNA, 67 nt, Human
accuuaugagguagguauuauacuuacauacauuuuguggguguagaaaacuugagcucagagaggu

SEQ ID NO: 4174235 - RNA, 78 nt, Human
accuucaaucaaacagagagaaucucaguucagccagguaacugauggaaagagaaacucuugcuaauuggugggggu

SEQ ID NO: 4174236 - RNA, 123 nt, Human
accuucaucuaguaucugcucuuuauaaucuaaaacaguaucuacgggaacuauuucaagguuugaauucauaguucauggagaugccaagcauuguuaaagaaauuauuuuauuuugagagu

SEQ ID NO: 4174237 - RNA, 67 nt, Human
accuuccucuaagacauuuagcucagaauaaagcacacauucaucuuagcuguaguagagagagggu

SEQ ID NO: 4174238 - RNA, 75 nt, Human
accuucuggaauucuguaggauagacuuugucaaagugaguguauaagucagaauccugcugagaaacagauggu

SEQ ID NO: 4174239 - RNA, 83 nt, Human
accuugagcaaaguuaccuuaccucucuguacuucaguuuccucaagugaagcacagagagguaaaguaacuuugcucaaggu

SEQ ID NO: 4174240 - RNA, 100 nt, Human
accuugcaaaguuauuccuugggaauuauugaaugucucuuugccagaaccguaggcuaaagcaaccauuccauaacaaucaacgagggggcagcuaggu

SEQ ID NO: 4174241 - RNA, 84 nt, Human
accuugcacaugcaugucuaugggcagguaacuguaugcaauauauagacuaacauauucaugauauaugcaugaacaaaaggu

SEQ ID NO: 4174242 - RNA, 58 nt, Human
accuuggcauggccuuuguccacaucucaggcaguggacaucuuagucaugucaaugu

SEQ ID NO: 4174243 - RNA, 76 nt, Human
accuuguuuccccgugaggcuccgaucgcugggccagguccuccagcuccuccugagugucugggagggacgaagu

SEQ ID NO: 4174244 - RNA, 65 nt, Human
accuuuacucugaguuccuacuugcuccugagaagcagaaccaggauuuuagaaacucaguaggu

SEQ ID NO: 4174245 - RNA, 59 nt, Human
accuuucucccuggugccaugugagccacuuacccaucaguagugucaaggaggagggu

SEQ ID NO: 4174246 - RNA, 68 nt, Human
accuuugcugauuuguuucuauuccauuuguccauggcauugugggaaaagagauagauggccuuggu

SEQ ID NO: 4174247 - RNA, 68 nt, Human
accuuuuggccaucuucucgcagagugcucccugcuaacggggacagguaaagaugguggcaggaggu

SEQ ID NO: 4174248 - RNA, 70 nt, Human
acgcaagucuucucauuucacaugcuuucacaaaugcagaguaagaagaaaagagaugggggaagugugu

SEQ ID NO: 4174249 - RNA, 87 nt, Human
acgcaggaaccuggaguaguagcauuaacuaaggcccaaagauggagugcuuauaauguuacugacaacaacaaacaaagccugugu

SEQ ID NO: 4174250 - RNA, 81 nt, Human
acgcauaugagaugcucagcuaauaaaaucaguaugagaaaauauuuauacauuuuaauaugcuuaguguguuauuuuugu

SEQ ID NO: 4174251 - RNA, 68 nt, Human
acgccgggaugcgccuggcugcagccggcgaggcuauugucuccccgcccugaagccagccccggcgu

SEQ ID NO: 4174252 - RNA, 66 nt, Human
acgcugagguacgcuggcucccuggcaccuagauccagcggcuguaggggccagugaccuucgugu

SEQ ID NO: 4174253 - RNA, 62 nt, Human
acgcugucuacagaugaaauaagcagccaccagcugcucccaggcauucucuguugauaugu

SEQ ID NO: 4174254 - RNA, 106 nt, Human
acggacggacagacagauggacaacagcuggaggcuuggcccggccauagggcucucugcgggacagucccagcugcuagugucgcuguugcugcuacugacccgu

SEQ ID NO: 4174255 - RNA, 68 nt, Human
acggagacauguggaggaggcgaggguaacauuuuucugugcacugccuuucuuggcaugaccuuugu

SEQ ID NO: 4174256 - RNA, 76 nt, Human
acggaggcccugacacacaccgaagacucauuuacagugagagugaagcuuuccuguggucaggaaauacuucugu

SEQ ID NO: 4174257 - RNA, 58 nt, Human
acggaggucaacuuggucaccaagcguggcuuggugcccacucuggacccagcucugu

SEQ ID NO: 4174258 - RNA, 128 nt, Human
acggauuguggcucaccuaagcagggaagccgauuuggaacuuaaacaagcucccaaguugugaucagucgagcuuggcaagcacuguuugagagaguagguguccugcaagcaggagccgguuuugu

SEQ ID NO: 4174259 - RNA, 57 nt, Human
acggcaggcucagagcuggaauuagaacacuggcaaccaaacucuagagccuguugu

SEQ ID NO: 4174260 - RNA, 75 nt, Human
acggcuuucucugaguuucuccagugcuaguugucauguaaagugacaagguucuuguggaggaauuaaggcugu

SEQ ID NO: 4174261 - RNA, 55 nt, Human
acgggcagacagagcuacucgcuuccuaauuuggaugagacuuuuguuugcuggu

SEQ ID NO: 4174262 - RNA, 57 nt, Human
acggucacugcagaugaguccuaagggcugcuucuugggcucaguggcaggaagagu

SEQ ID NO: 4174263 - RNA, 91 nt, Human
acgguguagacauuucccccaguaugagcacagugccuggaccugaaugaucaucuuggcaguucuugugcuuuuacuuuguaaacauugu

SEQ ID NO: 4174264 - RNA, 88 nt, Human
acgguuauugcuuucagaacagggauugggccuguaaucuuuaguaagagagaaagacagaguaggcccaaucccuguugugagcugu

SEQ ID NO: 4174265 - RNA, 99 nt, Human
acguaauaucauacauguucacaucgauggauuuugcuuagguuuucuucuccuugccugugugcaugcauguguuuguguguguguguguguguuugu

SEQ ID NO: 4174266 - RNA, 67 nt, Human
acuguguacaagucacuuaaaauaacucuuuuuuccucuggguaauguuacugauuugauauacagu

SEQ ID NO: 4174267 - RNA, 79 nt, Human
acugugugcccugacgccagggacugugcacuuucccccuacaccccccacaccaucuggcagagucagugcacacagu

SEQ ID NO: 4174268 - RNA, 81 nt, Human
acugugugcugcucaagggacaggacagugcaugggcacugugcuggauuuugguuccuuguaaaaagcaauggcuauagu

SEQ ID NO: 4174269 - RNA, 68 nt, Human
acuguguguguguguuuuuuuaaugugaguuuuauauuuaucugaggaaagcagacaauagacacagu

SEQ ID NO: 4174270 - RNA, 70 nt, Human
acuguuccuucagugcuguuguaagcucauugugaagucagagcuuuggaaauguguacugaugggcagu

SEQ ID NO: 4174271 - RNA, 76 nt, Human
acuguucuaggugcuagggacaaagcagugaauauaaaaaggcaaaguguucaaagcauuagcaucuauggggagu

SEQ ID NO: 4174272 - RNA, 80 nt, Human
acuguugagugugaguacuaugcaaaggugagagccauuuguuucuaucuuuggugcuuggugcucccacccaccucagu

SEQ ID NO: 4174273 - RNA, 69 nt, Human
acuguugcaucuuuggguacaaacuugccuuuccaaugggauagguuaauuucugcugaaagagacagu

SEQ ID NO: 4174274 - RNA, 78 nt, Human
acuguuugcuucugccagaaguucugagaguauccuacaccuggacuacuuuucauguuacuuuuggggccugagagu

SEQ ID NO: 4174275 - RNA, 64 nt, Human
acuguuugcuuuuugcacccuuugccguuacaaaaauauaauggaugugcagagguaggagagu

SEQ ID NO: 4174276 - RNA, 58 nt, Human
acuguuuucuaaagaacagaugcuucauaugaaucugugacaagcuggggaaaacagu

SEQ ID NO: 4174277 - RNA, 63 nt, Human
acuuaaaaugccauugcucuaaaaauugauaauggaaagaauaguggcaaaagcauuuugggu

SEQ ID NO: 4174278 - RNA, 65 nt, Human
acuuaacaguggucugugguaucugaggaaacuuuagaugaacagaaagccacuguuuuaugagu

SEQ ID NO: 4174279 - RNA, 105 nt, Human
acuuaauacuggaaggaaucucaagugucauuuuguccaucuucucauuguauggaugaggaaaugaggccuauggcaauuaagugauuuguuccagcuuuuggu

SEQ ID NO: 4174280 - RNA, 70 nt, Human
acuuaauggaugugcuaauuggaucaaagacuuauuucuuuuucagauuucaaaaguagauccaucaggu

SEQ ID NO: 4174281 - RNA, 72 nt, Human
acuuaccccacaucacguagcugguggaggagaaaaagacccugugaaggcuguuggauggggaagguaagu

SEQ ID NO: 4174282 - RNA, 79 nt, Human
acuuacccuaucuggcaucauuguuuucauacauaaaauggaguuuauaaugucugugccaaaauugauucagggaagu

SEQ ID NO: 4174283 - RNA, 61 nt, Human
acuuacuagguuucucccuugugcuaggauuuuugcucaagccugggagacacuaaguugu

SEQ ID NO: 4174284 - RNA, 67 nt, Human
acuuacuauagguagguggaaaaguaauggcaaaaaccuauuauguugcaccaaccuaauaauaagu

SEQ ID NO: 4174285 - RNA, 59 nt, Human
acuuagauacuucuuuuaagggggucccuucacucuuuuugaacaggaguaucuauagu

SEQ ID NO: 4174286 - RNA, 129 nt, Human
acuuagaugcuaaccuagcuucaauaccuucuagcuugggauguccagucacugucaauguuccuuuugcaaaguggggaggaguugcuggagguaacugggaagguggaaggagaggaagaggagcgu

SEQ ID NO: 4174287 - RNA, 59 nt, Human
acuuagcagcuuaaguaauuagaauuuauuauuucuuuggauucuguggguugcugggu

SEQ ID NO: 4174288 - RNA, 66 nt, Human
acuuaguaaaugugcuaaaaugugucgggcuacauagaagcuugacacccagcucauuaacuaagu

SEQ ID NO: 4174289 - RNA, 88 nt, Human
acuuauagaaguuacauugcugaaaagcuggccuuuguaaagcucgcucuuggcaaauugcuagcuuucucugcgugugucuauacgu

SEQ ID NO: 4174290 - RNA, 65 nt, Human
acuuauggcgggaugcugcuuaucuuaguuuauuucagacaguuggcaaggucuggccagcgagu

SEQ ID NO: 4174291 - RNA, 70 nt, Human
acuuauguuaggcuugaaucaaugauuaaauauuuauuugagggucaauguucaaguaugacaauguagu

SEQ ID NO: 4174292 - RNA, 129 nt, Human
acuuauucacggugcguacagguaguaaauguaggagucagaacauauauuuugugaugucugaucccagcgucauguuauuagaugugguucugcuuucuaacucacaaucuacuagugugaacagau

SEQ ID NO: 4174293 - RNA, 61 nt, Human
acuuauuuccaguccagaaauuuaagauuugugggugauggauguagggguggaaauaagu

SEQ ID NO: 4174294 - RNA, 74 nt, Human
acuuauuuuccucagcacuuugaagauacuuuucuacugucuucuggacuuuauggugcugauaagaaagaagu

SEQ ID NO: 4174295 - RNA, 57 nt, Human
acuuccauuaugugcuucugugucugaaaaggaugcacaaguuauauguauggaagu

SEQ ID NO: 4174296 - RNA, 58 nt, Human
acuucccaggcgcugugugcugcaaagguugcagcugaccagcaaguccugggcaggu

SEQ ID NO: 4174297 - RNA, 85 nt, Human
acuuccccauaugacaaugugggccuaaggguucaaaaggugaaaugauuugccccaaggucuuacaguuuguucuuggcaaagu

SEQ ID NO: 4174298 - RNA, 116 nt, Human
acuucccugcccccagcauggcagcaagugccugcucagaccuagcaggccuggaacaaagaugucuuuguggcugcggagucagagcaggccucccguccucaaggcaggagagu

SEQ ID NO: 4174299 - RNA, 96 nt, Human
acuuccggcauucauuuacuuucaacagcuaagcauguuggagauaccuccuaggagcuacagagcugacuugcgggguagagggaggcuggaggu

SEQ ID NO: 4174300 - RNA, 94 nt, Human
acuuccuuucgauugugcauacacacaucaaauguuuaaaacuagcuaagaauauuggacaaauguauguguuaugauucagucugcaggaggu

SEQ ID NO: 4174301 - RNA, 60 nt, Human
acuucucuauuuugugcucuguugaaugacuuggggugaacagaugggacguggaggagu

SEQ ID NO: 4174302 - RNA, 61 nt, Human
acuucugaggagcaccgaggcuugguggaaauaucucuugcaugcuuuuuagaguccuggu

SEQ ID NO: 4174303 - RNA, 65 nt, Human
acuucugcucugucaagaaaagaugcccucccccgcugggaggucagugcuggcgugagagaagu

SEQ ID NO: 4174304 - RNA, 79 nt, Human
acuugaaaucuuccaauggucacaucaaucugaaaucacugauucauucuaaauggugugccauauggagcuuuccugu

SEQ ID NO: 4174305 - RNA, 85 nt, Human
acuugaauuugguaguagccaacuuuucuuagacuuugaacuguaaaugucuuuaaacuugaguuguuaccuuggaaauuuaggu

SEQ ID NO: 4174306 - RNA, 65 nt, Human
acuugacugggagaaaccaauuuccugggggaagucucaauaaaauuguuuuccuaucaucaggu

SEQ ID NO: 4174307 - RNA, 64 nt, Human
acuugcaaagugagggaguguuaucuuaccuagacccaagauuaauuucucagacuuuggaagu

SEQ ID NO: 4174308 - RNA, 63 nt, Human
acuugcucugggggaagccagcuguucuguuguaagaacacucgagcagcccuacagaggggu

SEQ ID NO: 4174309 - RNA, 65 nt, Human
acuuggauuauaguuuuugucuuuuuaaucaaauuauagaaaaaugacauaaagcuaugcuaggu

SEQ ID NO: 4174310 - RNA, 103 nt, Human
acuuggcuacauccucccaauacuauucggaccaucucuggguacggauacagagaagucucaagaauauauuacuaagggcaaaaaucaggguguggaaggu

SEQ ID NO: 4174311 - RNA, 70 nt, Human
acuuggcuccuauaggaaacauacgugacuaggccaggggcuggcaaauguuuucuguaaagggccaggu

SEQ ID NO: 4174312 - RNA, 82 nt, Human
acuuggcuuggauuuaagauaagauacucuaugguaauuuugaacauacuguagaaauuccauuuacuuugacuccccaagu

SEQ ID NO: 4174313 - RNA, 55 nt, Human
acuugggggcccacucucugccgcggaaaggggagaagugugggcuccuccgagu

SEQ ID NO: 4174314 - RNA, 82 nt, Human
acuuggguugacucauaccugccugacccaaagcacauccuucugggcugaaagggcacugguagguuuggacagcucaggu

SEQ ID NO: 4174315 - RNA, 129 nt, Human
acuugguaaccagcaugaucuucuaacgcuaguuuuacccuugucagcacuuugccgaaaaccucaaauaaagacuuuuuuaaaaaugugcgauggaaaacuaaaguuauaaauuauaucauaaccauu

SEQ ID NO: 4174316 - RNA, 81 nt, Human
acuuggugcaaacugguacucagcuggcacucacauuuuccaguauguagauguaagcuuggaucaggcauguacauaagu

SEQ ID NO: 4174317 - RNA, 88 nt, Human
acuugguuuaugagcaucagaaaaacauaauguuauuauggcagaagcaaagugauaaauguuuuucauugccaacauggacuucagu

SEQ ID NO: 4174318 - RNA, 58 nt, Human
acuuguaccagcucauuucagaaccuacucuauugggucaagauagugugguacuggu

SEQ ID NO: 4174319 - RNA, 61 nt, Human
acuugugucauuuuuuugcauuccagauuggcgagauuguaaugaugaaagaugacagagu

SEQ ID NO: 4174320 - RNA, 70 nt, Human
acuuguguuccagauuuagccaaccgaagauggcaguuucuauaagucuuuggcauuuaggagcaggagu

SEQ ID NO: 4174321 - RNA, 130 nt, Human
acuuguuguuuuauugugucuuugcuggcuccaggagagcugcuucaaaaugggcuccuuugucuuuucuugaaugggucugguaggaggaguggcuggagcccaacaggcaccaaugacugcagcaggu

SEQ ID NO: 4174322 - RNA, 64 nt, Human
acuuuaaacugucauuuuauauaguuauuagaaugcuagugguauguaauguaauaguuuuagu

SEQ ID NO: 4174323 - RNA, 110 nt, Human
acuuuaauuucaucuguuuuugguuucagaaggggagaaaggucaaagcuucuuuguuuuaagugagcuggucacuccuucugaaguguaaaaugauaggggucaggagu

SEQ ID NO: 4174324 - RNA, 77 nt, Human
acuuuacaaugcacauauugcauaaauauauguugauaaauaaacuugcuagcugguguaugcauugcauguaaagu

SEQ ID NO: 4174325 - RNA, 63 nt, Human
acuuuaccagagaggcaaaacuccuuccauuuguaaaagcauaaauguaguugccucugaagu

SEQ ID NO: 4174326 - RNA, 55 nt, Human
acuuuacccgcacucagacacaggcgaccuugaagcaguucucgguguguagagu

SEQ ID NO: 4174327 - RNA, 61 nt, Human
acuuuacucuuuaauuggggagauacugggugguaggguuucuuuggugggagauugaggu

SEQ ID NO: 4174328 - RNA, 95 nt, Human
acuuuaucgaaccaaguaaacaucagcaaauacuacuaguuuuuaaccauuaguuuuaaaagugauauuuggagcaauauuugguaugauacagu

SEQ ID NO: 4174329 - RNA, 63 nt, Human
acuuucauggaucucuguucaguuguuacaagguacucaacuuuuggauagaugccauagagu

SEQ ID NO: 4174330 - RNA, 58 nt, Human
acuuucaugguaguuguauucuuggagaauucgcuguaaauuaaaacuacaugaaagu

SEQ ID NO: 4174331 - RNA, 130 nt, Human
acuuuccuucuacuuagauuuuuaaauaaucaauucagggaaauagcagggcugaaauuucagcagaugguucagcucuaaaauuucauuugagucucagauuuuuagauuccuuggcagaauaaaaagu

SEQ ID NO: 4174332 - RNA, 112 nt, Human
acuuucgaaagcauuuuaaggcuauugucucuucauguguuuaauuuuuacauaaaauaaugauaauaaaaaaugaauaugauggaggauucucuguaaagugcaagacagu

SEQ ID NO: 4174333 - RNA, 84 nt, Human
acuuucuuugacuaauuuuucgugaaguuuacagggcaaaaauugucaccccaaaagcuggagaguuaggugaauacagaaagu

SEQ ID NO: 4174334 - RNA, 58 nt, Human
acugugguggcucuggaaccugacaacccauguccaaauccaggcuccuccacuuagu

SEQ ID NO: 4174335 - RNA, 67 nt, Human
acuguguaaaguucuacuagaaucaacauagaauucuugagauucuuuccagaacuuugaaugcagu

SEQ ID NO: 4174336 - RNA, 65 nt, Human
acuguguauucaagccgaagucaacugccuuuccuucccagguguugauuuagugagugagcagu

SEQ ID NO: 4174337 - RNA, 97 nt, Human
acuguguuaguuugcuagggcugcugaaacgauaccacaagcugaguggcuuagccagcagaaacauauugucucacaguuuuggaggcuggaaggu

SEQ ID NO: 4174338 - RNA, 66 nt, Human
acuguuacagagcaggaaauuguaauauuuuagggaaaggugagagauuuucugacuccugauggu

SEQ ID NO: 4174339 - RNA, 60 nt, Human
acuguuaucuguagauauuuguauauagcuuauggauacaauuauucugcagauauuugu

SEQ ID NO: 4174340 - RNA, 77 nt, Human
acuguuccuccauguaugucaggguuguccagagaaacagaaccaauaagauaaauagagauauauaggaggaaagu

SEQ ID NO: 4174341 - RNA, 63 nt, Human
acuguuccuguuuucuugagcacgcugccagcagagaaggccugagacaaugggguuggcagu

SEQ ID NO: 4174342 - RNA, 122 nt, Human
acuguucuagaaaaugacuuauuauuaagugugguuguuuuaggauucuuuucuauguguucaagugacagaaauucaauucuaauuagcuuauuaucuuaauaguucagacccagaguggu

SEQ ID NO: 4174343 - RNA, 56 nt, Human
acuguucuucauuuagcaaagacugaccuggcacucauugcuggacccagggcagu

SEQ ID NO: 4174344 - RNA, 124 nt, Human
acuguugaauuuguccuuuuuauucguuuuuauucugugcuuucaaaagaaggguuuuucucaaaggcuaauucaagaaggagcagagaagcagagacugagggauagucucaacauguucagu

SEQ ID NO: 4174345 - RNA, 109 nt, Human
acuguuggucuucuguuuagccauuauucucaguucugugcaggagugagcugaaacaaaguuguauagcccagagagugagaagcugcauuucaugucucccaacagu

SEQ ID NO: 4174346 - RNA, 67 nt, Human
acuguuuaacuuucaugcaaaaacuucccaguguuugggaaaucugucuuuguuugaauaguuuagu

SEQ ID NO: 4174347 - RNA, 88 nt, Human
acuguuuuggaaaugcaaauuccaaagcacaucagaacuaugucaucauggcauuuugccugcuguuuugggucauuuacauaacagu

SEQ ID NO: 4174348 - RNA, 75 nt, Human
acuuaaauucagauccugacauuuuagguauuuuugaaacaacaacuaugcuuaauaggaguugaacauuggagu

SEQ ID NO: 4174349 - RNA, 91 nt, Human
acuuaacauuucaagguacuuacugggcauuguguauuaucuaaguuaaaaauuuacaaagccugguagauaucugggaguuauguugagu

SEQ ID NO: 4174350 - RNA, 58 nt, Human
acuuaagaguaugaggagagcccugguuuaugucagcuccagucauagccucuugagu

SEQ ID NO: 4174351 - RNA, 72 nt, Human
acuuaauaauguugacgauagucuuaaucacuugguugagauaguguuugucagauuuauccauuauaaagu

SEQ ID NO: 4174352 - RNA, 87 nt, Human
acuuaaucuguguuauaaacuguuauagcagaaaggacuuugguggauuuuagaggcccagcuguauauuacaguuuuagagagagu

SEQ ID NO: 4174353 - RNA, 60 nt, Human
acuuacacuucugaaagccuagguccgacuauagggcugauaccgggagagaagugaagu

SEQ ID NO: 4174354 - RNA, 55 nt, Human
acuuacccaccccuggguugaggguaugguaucauuucccagcuggugggucagu

SEQ ID NO: 4174355 - RNA, 71 nt, Human
acuuagaaauuaccuugcacugagucugaaaaauacaaauuuuucuauaaaaagugcuaggauaacugggu

SEQ ID NO: 4174356 - RNA, 67 nt, Human
acuuagauggcucuguaacugcuuuaaucaaaguauauagcuguugcauaaaagaguauaucuuagu

SEQ ID NO: 4174357 - RNA, 102 nt, Human
acuuagcuaugcaauuuguuacuucuuggggaaaguuuugcauuacauaaauuuguguuucagaaccuucuuucauucugggugcaagcugaauagccaagu

SEQ ID NO: 4174358 - RNA, 81 nt, Human
acuuagcugaguugacccaucaggccacaugagguccuuguggcuggagaccuguguggccaggcuggagucuugcuaggu

SEQ ID NO: 4174359 - RNA, 76 nt, Human
acuuagcuuuguacuuguucuguuuccuugaggcuagacacagugccauccaggacuuauuacaguauaacugggu

SEQ ID NO: 4174360 - RNA, 55 nt, Human
acuuagcuuuguuuaacacagggaguucccuuaacuugcuguccucagaguaagu

SEQ ID NO: 4174361 - RNA, 61 nt, Human
acuuaggagaauaucugguuauguguauacacacacauacacacauacuuucuccuugugu

SEQ ID NO: 4174362 - RNA, 71 nt, Human
acuuagguuccagaagaggaguuaagacucauaaaccacugggcucuguggcucauaucuguaaucucagu

SEQ ID NO: 4174363 - RNA, 111 nt, Human
acuuagucuguuuucaaacuggcagcaaaaaaguaauauuuaucuacuuggccauccggagaaguguuauggauuugcaauuuugcacuuuaguggggucauagaacaggu

SEQ ID NO: 4174364 - RNA, 69 nt, Human
acuuaucuccugaaaaauucacacugccgugaacacgauccagccuugcagugugucucggagguaagu

SEQ ID NO: 4174365 - RNA, 90 nt, Human
acuuauuaaauuacauauuccuggucccuaccacagaccuacuuaauaauguccaggugaggaauccaggaauuuuuaguuugaucaagu

SEQ ID NO: 4174366 - RNA, 80 nt, Human
acuuauucacaugaaaacaaauuuuuagauuuuuacguuugaaucugucuggucagaguucuguuuucuuguugguaagu

SEQ ID NO: 4174367 - RNA, 75 nt, Human
acuucacauauaaauacaauauguguuaaaggacuaaauuucuagugucacaguuuguacuuuauaguuugaagu

SEQ ID NO: 4174368 - RNA, 55 nt, Human
acuucagaaugcggagcaggcuuuccaacagucugccuuccccauaaucugaugu

SEQ ID NO: 4174369 - RNA, 121 nt, Human
acuucagcuuccucuggccccggucuucacagcugcuggcuguggcugcaagguuaagaugacguuagcuuucuaaggcuagagagacugugccuaggacgcgccaugggaauguaauggu

SEQ ID NO: 4174370 - RNA, 57 nt, Human
acuucaguagcucagagcugccugguaccacagaacuggccauggguugccugaggu

SEQ ID NO: 4174371 - RNA, 83 nt, Human
acuucauauuuuuacacguguguguaucuguauuuguguauauauauggauauauguauauacacgugugugugugugugugu

SEQ ID NO: 4174372 - RNA, 67 nt, Human
acuuccugggaccgagggaagagcugcuucugcuucaguaacagccucugauggcucccaaggaggu

SEQ ID NO: 4174373 - RNA, 70 nt, Human
acuuccuguacuuccagccaagugagacaaaugaaaccucuucauccugugcaguugaagugcaggaagu

SEQ ID NO: 4174374 - RNA, 82 nt, Human
acuuccuuuucaaccauacagccaccgcuggggccaaccacucccuacguuuguauaaugcuguaugguuuucaaagcaagu

SEQ ID NO: 4174375 - RNA, 70 nt, Human
acuucuacacagugcggguuaacaaugaucuuaaugcacuuucaucuguaaacuccuuggugugugaagu

SEQ ID NO: 4174376 - RNA, 79 nt, Human
acuucucagcucuaguggcaucuccuaauuguguagaaaauaaaaguauuuacacaaaauguuaguagaugcugggugu

SEQ ID NO: 4174377 - RNA, 76 nt, Human
acuucucucuacuuagucuucuuuguacaagaugcagauaaccauacugucuaauaagauugaugggagaggaagu

SEQ ID NO: 4174378 - RNA, 65 nt, Human
acuucugagcauuauuuaaugaugggcuuuugauuugagcucacaucauaguaagcucauugagu

SEQ ID NO: 4174379 - RNA, 69 nt, Human
acuucugauaccuugcaggauccuuauuauuauuagacuuagagauuccuaaaguaagauaucagcugu

SEQ ID NO: 4174380 - RNA, 66 nt, Human
acuucuggcuuuucucuuggauggucuucaugaagaucuuaaucgaguccaugaaaagccauaugu

SEQ ID NO: 4174381 - RNA, 87 nt, Human
acuucuguuggagagcaaaguaaucaaauuaagcuaauugcuuguacaaaguuaauggcuuguguuauucacauuuuccaaaucagu

SEQ ID NO: 4174382 - RNA, 69 nt, Human
acuucuuauuugauaucuucacuugaaggucuaauagguauuucaaguuuaguguguucaaauagaagu

SEQ ID NO: 4174383 - RNA, 68 nt, Human
acuucuuucuucuuaaauaguaguagaugguggauaagcuauguguaucuguuagagagcaaugaagu

SEQ ID NO: 4174384 - RNA, 59 nt, Human
acuucuuuucaaaucaugcaaaguuauacgacuuaacugauugcucugguugaggaagu

SEQ ID NO: 4174385 - RNA, 76 nt, Human
acuugaaaaaauaccugagccugucuucuuaaggaauuacuaaauauagaguuuggaagucaggcuuuucucaagu

SEQ ID NO: 4174386 - RNA, 72 nt, Human
acuugaaccccggaggcggagguugcagugagccgagaucgugccauugcacuccagccugggggacagagu

SEQ ID NO: 4174387 - RNA, 74 nt, Human
acuugaaucucucagccucacucccuucaaagccaaguacugaagagacuguaaaggcgugaguaggggcgggu

SEQ ID NO: 4174388 - RNA, 88 nt, Human
acuugacucuacuugaauccaaaugggagaugaaucauugcagauuuccaucuuuuucuccaugugaggauucaagagagggcagcgu

SEQ ID NO: 4174389 - RNA, 96 nt, Human
acuugaguacuuacagcauaucagcaucaaaacacaggcuguuuccaugucauaaaaaugauuugugcuuuugagcugagaugagugaagucaagu

SEQ ID NO: 4174390 - RNA, 96 nt, Human
acuugaguuaugguauuuuguguggagcuccaaguagcccgaaucuaaagucuagagcauccaugcauggauuugacauguguacuguauuugagu

SEQ ID NO: 4174391 - RNA, 58 nt, Human
acuugaguuccaugagccaauaaauccuuauuuugucuuaaacuugugggacuucagu

SEQ ID NO: 4174392 - RNA, 129 nt, Human
acuugauauuaaaggaaaaugagcaaagugaaauaguccuuaguaagcugugaaugaugcaaauucucucagaucucccuggggacuaaucuucucuuuuaauagcacuguuuaacucaaauuccaggu

SEQ ID NO: 4174393 - RNA, 59 nt, Human
acuugcaagucugggaaauggccacuuugucaggugccaaauauucucuacgugcuagu

SEQ ID NO: 4174394 - RNA, 73 nt, Human
acuugcacugguccacucccauggguggucuuaucugccaagauguggccggcuagggagagcccuuggaagu

SEQ ID NO: 4174395 - RNA, 62 nt, Human
acuugccuccauauuuuauugccagcucuuaccuagcuaugauaaucgugagggaggcaagu

SEQ ID NO: 4174396 - RNA, 65 nt, Human
acuugcucaaggucacacaggggugauugauggggucacccagacugucugacucuugugugggu

SEQ ID NO: 4174397 - RNA, 55 nt, Human
acuugcucuccugaccuccacugauguugcuucacagcaaggaagucgaguaggu

SEQ ID NO: 4174398 - RNA, 66 nt, Human
acuugcuggaaaguagcagagucaggacucaaacuuagguucuggcucggauuugucuagcacagu

SEQ ID NO: 4174399 - RNA, 72 nt, Human
acuuggaaagagaaaguuaaagacugaggcaaaggauauuagccugcuucaaguugaaauauucuuacaagu

SEQ ID NO: 4174400 - RNA, 77 nt, Human
acuuggcagguucggguccagguuuuggucagccuugcaaaugaccaggcacucagagacugggacuuguuuugagu

SEQ ID NO: 4174401 - RNA, 63 nt, Human
acuugggcaguauguuuauuagaacugcaggaguuuguagucucagggagcugcuucucaggu

SEQ ID NO: 4174402 - RNA, 57 nt, Human
acuugggguaugggcuugccuuagcaccagauccugcucuagcccccacucccaagu

SEQ ID NO: 4174403 - RNA, 79 nt, Human
acuuucuuuguuucuguuuaaauuguguauacuuaucauaaacaauucaagcaagagagacaaaugcaaaggagaaggu

SEQ ID NO: 4174404 - RNA, 57 nt, Human
acuuugaaggggaacauuuuaaaggaucuuuaggaauacauuuuguucccccaaagu

SEQ ID NO: 4174405 - RNA, 60 nt, Human
acuuugcaaauaaacucucuaaugcucaaguauguauaaggugguauuuaauugcagagu

SEQ ID NO: 4174406 - RNA, 60 nt, Human
acuuugcagguacaugagcaucuuuugugucaaagucuaccucugagguaucuguaaagu

SEQ ID NO: 4174407 - RNA, 58 nt, Human
acuuugcuggggugacccgaggggugcagccauguggcucuguugcucgcaguuuugu

SEQ ID NO: 4174408 - RNA, 80 nt, Human
acuuugggucucugucaaauucauaacacuuauuucuugguggaauacaguuaaugaguuggacaguucaggaaagaagu

SEQ ID NO: 4174409 - RNA, 72 nt, Human
acuuuguaaccauuuaggggggaaaauaucuaugaagugauacuauguucuuccuaaauagugcuucaaggu

SEQ ID NO: 4174410 - RNA, 56 nt, Human
acuuugucucuaagaagggaauuauugccagugauuucauuuguuauagacaaagu

SEQ ID NO: 4174411 - RNA, 67 nt, Human
acuuuuaaaaauagcauauugcuuucuuucguucccacaaaggaggaaaagaaaaugcugugaaagu

SEQ ID NO: 4174412 - RNA, 79 nt, Human
acuuuuaaaaaugcagauuccuagguucuacugucugcugugucagguuagggccagggaagcuguauuuuuaacaugu

SEQ ID NO: 4174413 - RNA, 68 nt, Human
acuuuuagugaaugguacaugucuuagucuucgugggcuuacaugacagaauaccauugacuaggugu

SEQ ID NO: 4174414 - RNA, 71 nt, Human
acuuuucauguauuucccaaagcuuuuaacaguaaacaugauuggguugggggaaaugccuggauucaagu

SEQ ID NO: 4174415 - RNA, 67 nt, Human
acuuuucuuaucagaaaggccacguccaaacccacuguucacgcgauggucaucugcugaggaaagu

SEQ ID NO: 4174416 - RNA, 90 nt, Human
acuuuugaguacguuuuguaagagacuuucaggaguugauacaagaagggaaaaugagcuccugggcaccucuuucacauguagugaagu

SEQ ID NO: 4174417 - RNA, 89 nt, Human
acuuuuguaagauuuccuucaguagagcuauuggaaacacagcugcuaaauaaacuaaugcuuuauuuuaggaauauuuuaacuagggu

SEQ ID NO: 4174418 - RNA, 85 nt, Human
acuuuuguugucaaugcccuuaugccagaggcaauuuggacuaagaaauaauugucaaaaaauggcagggcuuuacuacaaaugu

SEQ ID NO: 4174419 - RNA, 92 nt, Human
acuuuuuauugauaaauuuuuacauguuuaugugguacauggaguaguuguuacauuacacauuacagaauauguaaugaucaacugagagu

SEQ ID NO: 4174420 - RNA, 108 nt, Human
acuuuuugagcuacuuuguuuuaggaguauuuaaauuaauguaaaaguguagggaaaugucuuagcucagaaaauuuaaacuuacuagauauuaagugcuuaaaaggu

SEQ ID NO: 4174421 - RNA, 89 nt, Human
acuuuuugucauaauaauuauauaugcauagugauuuagaacagaauacguuuauuuagugcucuauguauauauuuaguguagaaggu

SEQ ID NO: 4174422 - RNA, 130 nt, Human
agaaaaaaagaacgguuuaacuagaaagaaagggugucuccuggaagaauaccacacuuuggcacuggaguaggagcaauuuauaggcagccacaucuuaaacuuuucaaagcagccccucuucuguucu

SEQ ID NO: 4174423 - RNA, 128 nt, Human
agaaaaagaagcacccagaugggugauggugauagggcuugugguggacacaggguugugguaagauuccucagugcuucggcgagcaccuaagacuauuacccuggaacugacugcuuucuagagcu

SEQ ID NO: 4174424 - RNA, 122 nt, Human
agaaaacaaaucaaagugaugguuauuuucuuuuccaagcugucuuggcccacauuguuaccauggugacucagugacugccaugacauuugguacagaaugagcauuuguuuauguuuuuu

SEQ ID NO: 4174425 - RNA, 56 nt, Human
agaaaacacugcaaagcugauugguaaauugauuuugccauuugcugugguuuucu

SEQ ID NO: 4174426 - RNA, 55 nt, Human
agaaaacacugcccccucucuccuuuugagcgaggucagagacgugguguuuuuu

SEQ ID NO: 4174427 - RNA, 107 nt, Human
agaaaacauccuuagcuugcagacugagcagguggugggccagauuuggccucugggccuuuauuugccaaccccugaauuaacauuuguaagcuggaagguuuuuu

SEQ ID NO: 4174428 - RNA, 88 nt, Human
agaaaaccugauuucccuuuucucagaaccagggaaggcccauugcucaggccucacuucuucaagagaaugggagacgugugcaucu

SEQ ID NO: 4174429 - RNA, 83 nt, Human
agaaaacugugcaaucuuggcagauggguggggacugugagguggugccucugggccucaccugcugcucagcgccacuuucu

SEQ ID NO: 4174430 - RNA, 58 nt, Human
agaaaacuuuauuguuaggggcuaaauuugaauuuagcuaauacgauuuaaguguucu

SEQ ID NO: 4174431 - RNA, 75 nt, Human
agaaaagccguguuaaucauuuuugauuuugccuuuaugaggguaaaaucaugacagauugacauggacaauucu

SEQ ID NO: 4174432 - RNA, 59 nt, Human
agaaaagucugcuuucuauuaucaucuugucuuggugagauuaguuugcaaauuuuucu

SEQ ID NO: 4174433 - RNA, 100 nt, Human
agaaaaugguaaaguguucugagccuuucuaagaaacauugcucacauaugcagguuguugcaucuugauagugucugaguaaaauuacaaccauuuucu

SEQ ID NO: 4174434 - RNA, 81 nt, Human
agaaaauuauucuuaggcuuugaaaucuaaucaaggaacagacaaccuuuguucauugggauuucagaacugcuauuuucu

SEQ ID NO: 4174435 - RNA, 69 nt, Human
agaaaauucaggggcucacaagauuaaugagauuuuuggccuaauagucugaggcacccugaauauucu

SEQ ID NO: 4174436 - RNA, 70 nt, Human
agaaaauuccaagaguuuaaaucaauggccagagauuacauuaucucuuuguugaggagcugaauuuucu

SEQ ID NO: 4174437 - RNA, 55 nt, Human
agaaaccagggcuuaccagugccuaagaucacagagcugguaagaggaagguucu

SEQ ID NO: 4174438 - RNA, 119 nt, Human
agaaacuagaggugaaaguuuuagucaggaauuaauguagucucugagguaaacaacuauuaaauuuauuuguuuacuuuuaauuaccugucuccugagagcagacaccugucuuuucu

SEQ ID NO: 4174439 - RNA, 84 nt, Human
agaaacugagcgguggggaggcuuuuggagcuccugcuaauguuagcagacuguagggcugaggcuaccacuggucugauuucu

SEQ ID NO: 4174440 - RNA, 130 nt, Human
agaaacuuaauugacaacuuaggggaaguacucauucacaauuuguauuuugcauccacuguuuuuugccuguggggcuuucuguagaacagauuguguaucucuuacuguaguaaauuucaacauuccu

SEQ ID NO: 4174441 - RNA, 79 nt, Human
agaaacuuacauucacuuuuuccugguccauuuugguuccuaagaauagauaggccauuaagaaggauauuagguuucu

SEQ ID NO: 4174442 - RNA, 65 nt, Human
agaaagacuuggcuuaugauuugcguauguguuaccuaauuugcauaucauuuauaagucuuucu

SEQ ID NO: 4174443 - RNA, 71 nt, Human
agaaagaucugacuuagacacagaauaagcugcuugugcuggguguguuugugagcugggugagguuuucu

SEQ ID NO: 4174444 - RNA, 65 nt, Human
agaaagauuugguaucagaagaccuaaguucauucuugcacuucaauagauaccacaucugaucu

SEQ ID NO: 4174445 - RNA, 56 nt, Human
agaaagcacagcggguccauuuuaaggauuuuuccaaauauaccagcuggcucucu

SEQ ID NO: 4174446 - RNA, 72 nt, Human
agaaagcagcagccgacauggauugcacucuugcucugugccuugcaugcguuaguuggcguguugcuugcu

SEQ ID NO: 4174447 - RNA, 85 nt, Human
agaaagcaggucuuuaaaugcaaugugcuuuaccagggaccaugguuuccuugcaguagccacauugcauuaacuccugauuucu

SEQ ID NO: 4174448 - RNA, 67 nt, Human
agaaagcuuauuuguaugcauguuguuucacaaacugcagggugcagaacaaauuaagacacuuucu

SEQ ID NO: 4174449 - RNA, 80 nt, Human
agaaagcuuguuaaacauguagaaucucagauccccaccccagaucugcugaaucagaaucugcauuuuaacaagccucu

SEQ ID NO: 4174450 - RNA, 71 nt, Human
agaaagggaauggaguggaaaaguacugcagaaaccuuuccuuucuucacacuuuggaauuccaccuuucu

SEQ ID NO: 4174451 - RNA, 65 nt, Human
agaaagggccaucccagaacagaaagggaugucuuuaauccuuucucuuggaaaaggccaauucu

SEQ ID NO: 4174452 - RNA, 75 nt, Human
agaaagguuagggauaucacauauccuaagcuagccccuuagguacuggaauaaugugauauuccuguccuuucu

SEQ ID NO: 4174453 - RNA, 76 nt, Human
agaaagguuuuguucaucgauuuucuuaaauggaaaaguuuuaaaggaugaggguaagugaacggcgagcuuuucu

SEQ ID NO: 4174454 - RNA, 80 nt, Human
agaaagguuuuuugaauaauucagaaacagcaaagcaaguggugguuugucuguacugccguuauucagagagaacaucu

SEQ ID NO: 4174455 - RNA, 70 nt, Human
agaaaguaaguagaaaccugcaaggacucagccuaggcugggaacuggggcauuguuucuguuguauucu

SEQ ID NO: 4174456 - RNA, 73 nt, Human
agaaagucaacccuagaagcccagcaaacugugaucauaucauuuauaucacgauaaaugggcugguuuuucu

SEQ ID NO: 4174457 - RNA, 55 nt, Human
agaaagugugucauacuaagugcuguucuaagccacuaaguagacugcccuuucu

SEQ ID NO: 4174458 - RNA, 78 nt, Human
agaaauaauuguagauaaacacugagagaaaggccucuuugggaugucuuucaucuuauuugucuacauccgauggcu

SEQ ID NO: 4174459 - RNA, 78 nt, Human
agaaauagaauguaagagucuaagauuguagaguuauuggcuuaauguuauuuaaaucaaacuuuugcuucuguuucu

SEQ ID NO: 4174460 - RNA, 55 nt, Human
agaaauagcagagucaggcggggccgguuggacacccccugaucuguuuauuuuu

SEQ ID NO: 4174461 - RNA, 62 nt, Human
agaaaucacaggaggcagaaggcuuccaucucaguuucagccucagccucagcaggauuucu

SEQ ID NO: 4174462 - RNA, 55 nt, Human
agaaauguaauugcaacugucuguucaaauacuggguaacagcaauugcauuuuu

SEQ ID NO: 4174463 - RNA, 61 nt, Human
agaaaugugagccccuuaucaagcagauugcugcccuugucaaguaaggcugacauuugcu

SEQ ID NO: 4174464 - RNA, 115 nt, Human
agaaauuuucacucgguuuuuuguuuuacuuaaugaggaaacauuguagaagcagucauuauguagacugggcuuguguuuuuccucagagacagaaaguacucaaguaauuuuu

SEQ ID NO: 4174465 - RNA, 77 nt, Human
agaacaaagcccugcccaagagcucguuuccugggaccugccaacuuccaugaauaagcgggcaaggcuuuaauucu

SEQ ID NO: 4174466 - RNA, 74 nt, Human
agaacaagugucacaggcccagcucuucaccagaagcuuugaugauggccugggcuuugaauacgugauguucu

SEQ ID NO: 4174467 - RNA, 98 nt, Human
agaacaggaugagcauaugaccugggcauuuuggaugauuaagauagcccaucuuacauguugauaaucuuugaaugccagauugugcuccuugcucu

SEQ ID NO: 4174468 - RNA, 90 nt, Human
agaacagugccuggcauauaguaggugcucuguguuugauaaauuuauucaacauuuauugagcaccuacuggaugccagaugcgguucu

SEQ ID NO: 4174469 - RNA, 94 nt, Human
agaaccaacauagaacuaguaaaagcaacaguauagccuggacaguucaagggauaugcugacgcuuauauugcuaagaaauuuaccauggucu

SEQ ID NO: 4174470 - RNA, 59 nt, Human
acucgaagagauuaagugauuuaaaggucaagaccacauaaaucucuguauucuucagu

SEQ ID NO: 4174471 - RNA, 68 nt, Human
acucgcagccucagccugcuucccccaaccuggcccaguuuggagggaacccaggcugcucugcaggu

SEQ ID NO: 4174472 - RNA, 66 nt, Human
acucgcuguaauguuuagaagcagacagcuuaucuaagccuucugagucucagcaugcuugugggu

SEQ ID NO: 4174473 - RNA, 66 nt, Human
acucgcuuguugggggcaggauggguuuccuuccuccgcuuuuuccuccuggccuucucgggcagu

SEQ ID NO: 4174474 - RNA, 80 nt, Human
acucuaagcaucaccccuacauuucccuugcucucuuaccaaguaagcuagggugggcugggggaguugcuuuuuggagu

SEQ ID NO: 4174475 - RNA, 76 nt, Human
acucuaauaugacucuuuuucuggugaacucuucaguccaauagaacuaucagauuuagaggagucauaaaagagu

SEQ ID NO: 4174476 - RNA, 84 nt, Human
acucuacuuucuuguuucuuaagauugcuuucucuaaauugcgcuuccaugagagcuguguuaagaacaggccacaagcagagu

SEQ ID NO: 4174477 - RNA, 57 nt, Human
acucucaauuaucuggacugaaggcacuguucucacuauggccagaugaaugggagu

SEQ ID NO: 4174478 - RNA, 61 nt, Human
acucucagggcuccagggaaagaggacacaguauaaugugccccuggggccacuagggagu

SEQ ID NO: 4174479 - RNA, 87 nt, Human
acucucaguugcugugucacuuagcaauuugauuaaaagaugugcccaucuuucuuaccuguuaagucaggaaguaguaccuagagu

SEQ ID NO: 4174480 - RNA, 62 nt, Human
acucucccagcuauauguggugaaaaggaauugcuuaacuauguaaacuggcgugggagagu

SEQ ID NO: 4174481 - RNA, 92 nt, Human
acucucucacgcucacaugcaccuucaguuuuucccuugcuguccccccauaugggaggaagagaagaugucuccagaagugugagcagagu

SEQ ID NO: 4174482 - RNA, 82 nt, Human
acucucuuccccuugagaugagcuaauuuuuuucauuuucugaaggcaucuauacauuauguucauuucgcuggaggggagu

SEQ ID NO: 4174483 - RNA, 63 nt, Human
acucugagcgccuccgcaucugccagauguuuguugggaugcggagccccaagcuugaagagu

SEQ ID NO: 4174484 - RNA, 71 nt, Human
acucugaugccugggcaaggaugacuggaagacuuagacuaccuccccaugcugcuuggcacccucagagu

SEQ ID NO: 4174485 - RNA, 71 nt, Human
acucuggaaagaguuuugguauauuugaaugcaauugcuccagauguucuacauaacucuuuaaucacagu

SEQ ID NO: 4174486 - RNA, 56 nt, Human
acucuggagauggaugucaggagucauucagguucugacauuuucuaguccaaagu

SEQ ID NO: 4174487 - RNA, 75 nt, Human
acucuggcaucauucaucauggagucuagccauacaaucaggaaagcuuuccuccagugggggugagccuagagu

SEQ ID NO: 4174488 - RNA, 60 nt, Human
acucuggguucuuucacuugacauuaugauuuuagauucagugauguugaaccuagcagu

SEQ ID NO: 4174489 - RNA, 78 nt, Human
acucuguaaacuuacagagugguuguccaacucuguaaacuuacagagugguuguccaacucuguaaacuuacagagu

SEQ ID NO: 4174490 - RNA, 129 nt, Human
acucuguccuuucucccaggagcagcuggccggagaguaacacgacuccagccggacauggucaugacuauuucagccugcaaggucaugacucucuggcccaccuaggacuccuaggggaaaggaagu

SEQ ID NO: 4174491 - RNA, 69 nt, Human
acucuuauguacacccuaauuauaauugcauacaaugucugcauguggauauguuagggugaugggagu

SEQ ID NO: 4174492 - RNA, 93 nt, Human
acucuucacaguaccugcugcacuucaccacuguccugguuugccugguagaaaagagacagggugggugauuagguugacaaagucgagggu

SEQ ID NO: 4174493 - RNA, 72 nt, Human
acucuucuuaccacugugucaguuugguuagacaaggcugcugauuaaguuugucaacaggcaaagaggagu

SEQ ID NO: 4174494 - RNA, 77 nt, Human
acucuuuacuguuuggugcucuauugacuaaauuuuuccaauaaagugaugauaaugauaccaaacauguagauagu

SEQ ID NO: 4174495 - RNA, 105 nt, Human
acucuuugacaauuucucuagcagauguuuuuaaucuuggauugagggcucaaguguuaccuggauccaugaaaaggcuacuuugggaguaaugacaggaagggu

SEQ ID NO: 4174496 - RNA, 64 nt, Human
acucuuugucuguugccgcuuacucuaaagauggucuuucuuaaacaacagaacaccaaggagu

SEQ ID NO: 4174497 - RNA, 85 nt, Human
acucuuuuaagcuacauuguacuagaaauuguauucagaauguuuuccgugaacagauuuuuaaugcaaaggguuuuaagagggu

SEQ ID NO: 4174498 - RNA, 78 nt, Human
acugaaaccgugagaguaccaccucaacaucugcauauaauuaugccugauaucaguuggaacucugcacuuuucagu

SEQ ID NO: 4174499 - RNA, 55 nt, Human
acugaacagaccauuuuguccuucauuucugagaaguaaaaugucuguggucagu

SEQ ID NO: 4174500 - RNA, 62 nt, Human
acugaacgccgccgucaggagagcugaggggacccgacggcccuggcggaggcgggagaggu

SEQ ID NO: 4174501 - RNA, 58 nt, Human
acugaacguggcaguggaaggcuggguggagacuucucccccagcuccugccaucagu

SEQ ID NO: 4174502 - RNA, 61 nt, Human
acugaacucucucaagugacagaauuacucuuuggauauuugucacuagaaaggguaaagu

SEQ ID NO: 4174503 - RNA, 69 nt, Human
acugaacugaugccaagagugcucccaggagacagaccuucaaaggcagcaucuugauauugguuuggu

SEQ ID NO: 4174504 - RNA, 68 nt, Human
acugaacuuuuucuaaauugcugaaaaaguuguuaaauugcagcugguucagaaauuagauggucagu

SEQ ID NO: 4174505 - RNA, 58 nt, Human
acugaaguccacacauguaggauugaugauauuuacaauccuguggcacuguuucagu

SEQ ID NO: 4174506 - RNA, 112 nt, Human
acugaaguugcugguaaacacucaugccaccccuuucuucaguauucauugauuugaccaauauggaagcuggcaguaaaggguuuggcauuaacugugcaguggcuucggu

SEQ ID NO: 4174507 - RNA, 76 nt, Human
acugaaucagcuuugcuacucuggaacaggcugcaacagaauuugugcaggacucaaggguagcaggugaugcagu

SEQ ID NO: 4174508 - RNA, 56 nt, Human
acugaauguauguguauaugugugcgcauucacauguaugcagcaaaacaauuagu

SEQ ID NO: 4174509 - RNA, 58 nt, Human
acugacccggaaagaaaaugaagauguccucuaggccaggcuuuaccucuggguaggu

SEQ ID NO: 4174510 - RNA, 79 nt, Human
acugacccuucaaauauccucaaaugacuuucauuuacuuguuuuuguuacuuuuaagagaugucugaaaagggcuggu

SEQ ID NO: 4174511 - RNA, 98 nt, Human
acugaccuauugcuuuggaacuacucuuuuagccccacagagacugugaaacaguguuuugguggucuauaggaaagguucaacuuggcaaauguagu

SEQ ID NO: 4174512 - RNA, 92 nt, Human
acugagaucuaaagauguauuuucaagagcaguaguauggcuuaccaagcuaagcugaaauuccuccugaaauucuauuuguggauuuuagu

SEQ ID NO: 4174513 - RNA, 82 nt, Human
acugagaugcuagcaugcagguuagagcauccacacagauacuaaacacuuuugggauguuggcuggauuuuagauuuuagu

SEQ ID NO: 4174514 - RNA, 95 nt, Human
acugagauuuuacuuuggugcuuaagcuucugcuuuaugugcuuuaaaccagcuggugcaugccagguuugaguaucuugauaggaacacucagu

SEQ ID NO: 4174515 - RNA, 69 nt, Human
acugagcaauuuuguguguguguagauuccccucagauuucagagaggaacagauauuugauuuucagu

SEQ ID NO: 4174516 - RNA, 80 nt, Human
acugaggaggaacucagaaagaagguggccuuagugggucugugcuugucauuacugguuucucguuuuauucauucagu

SEQ ID NO: 4174517 - RNA, 64 nt, Human
acugaggguagaggucaguguugaaaauuuugauuuuaaacaucugaauccugcuucccacagu

SEQ ID NO: 4174518 - RNA, 59 nt, Human
acugaggucuaucaugagccaggcugggugcuggggacacauagugaauagaccucagu

SEQ ID NO: 4174519 - RNA, 94 nt, Human
acugaguaacagauguguaucaugaucagcaacuaaucacgucacaucucucaacauuugucagugaauggucacugagcaucuguuacucggu

SEQ ID NO: 4174520 - RNA, 67 nt, Human
acugaguaagaagcuguuuggauuuuucauggucaucaaauccccagacaguuccuugagguucagu

SEQ ID NO: 4174521 - RNA, 63 nt, Human
acugagugaauucaaguaaagggccuguaagagugccuggcacuugcuaagaauucacuaagu

SEQ ID NO: 4174522 - RNA, 81 nt, Human
acugagugggacuuagcaguauaaauccagguaguuccuaucucucaacugucuuauuuauauuucugucauuaacucagu

SEQ ID NO: 4174523 - RNA, 55 nt, Human
acugaguuauagagguuuauaucuuugaaaaaugagauaacuacauuggcucagu

SEQ ID NO: 4174524 - RNA, 80 nt, Human
acugauagcugacuccagacauagcucucuuuaaacauaacagccaaagggcauguuuguuugagccagucucuucaugu

SEQ ID NO: 4174525 - RNA, 67 nt, Human
acugauaugauuccuuacacuauaguuuugauuugugcagaaugucguguaaacggacucaugcagu

SEQ ID NO: 4174526 - RNA, 76 nt, Human
acugauauuuccagugcacugaauagaaaagcugcaaucacaguuguauucugccaagagcaauggaacuguuagu

SEQ ID NO: 4174527 - RNA, 69 nt, Human
acugaugccccuggaccugugacucugaauuuucuuggaggacaccccggguaccaggucugcauuugu

SEQ ID NO: 4174528 - RNA, 62 nt, Human
acugauuacacgaguucugacuccuacuaccugcuugucugucaguaaccuccuggaucagu

SEQ ID NO: 4174529 - RNA, 66 nt, Human
acugauugaaaggugacauuguuagagauuauaaauaauucaacaaauggcaucuaucugauuagu

SEQ ID NO: 4174530 - RNA, 56 nt, Human
acugauugcauucauaggguuuuuccccaguaugaauucuuugaugugcaauaagu

SEQ ID NO: 4174531 - RNA, 104 nt, Human
acugauuuauguugugaggaggaagaauuagacaugcuuugcuuuuauguugacaguauauaaacugguauucaaauguuugguuaaauucacaugugaacagu

SEQ ID NO: 4174532 - RNA, 101 nt, Human
acugauuuucaaguggguuuauguuuccugagcuuacaccaguggucacguaagaggcauucugguggcugaggaaaaguaggcugagagugaauguuagu

SEQ ID NO: 4174533 - RNA, 105 nt, Human
acugcaaaauacuucagggcucaaaaccaccucuucacccuccuuuugcaggugagcaugagccuggauugaagugggugguaaugaacucuugaaggaagcagu

SEQ ID NO: 4174534 - RNA, 64 nt, Human
acugcaacuuucaguuaaugacuccauaggaucugcuuaaacuggguuagacugaauuuucagu

SEQ ID NO: 4174535 - RNA, 91 nt, Human
acugcaagguuaaguacuauuagucucuuucauuuguaaggacaaaggaagauuaaagagauuaaaguaacuugccuuuuauccagcuagu

SEQ ID NO: 4174536 - RNA, 63 nt, Human
acugcagaguuaucaacagaucuguuuucuccauggaaaacaggaguuuugguaggcugaagu

SEQ ID NO: 4174537 - RNA, 55 nt, Human
acugcagcaaagcccgugucuuugcaggaguaggagacacagggguugcuggggu

SEQ ID NO: 4174538 - RNA, 74 nt, Human
acugcaggaacugaggugagaggaggccaugugacaauaaagaucauuauguacucacugccugaguccugagu

SEQ ID NO: 4174539 - RNA, 61 nt, Human
acugcaucagcccaggucacguaaucaagucuuccuugacagcagcucuggguugaguagu

SEQ ID NO: 4174540 - RNA, 76 nt, Human
agaaccuagaaaaugguuuugucucaucaauguaauguccuccuccacacaaugauugaaaccauauuaggucucu

SEQ ID NO: 4174541 - RNA, 71 nt, Human
agaacuacacaauggaggaaaacauuucacuguagauguauauaggaaugugcuccaauugucuacuuucu

SEQ ID NO: 4174542 - RNA, 64 nt, Human
agaacuaggcauucccguggcaucaugugcccaaugcacagugccacaggaauggccaaugucu

SEQ ID NO: 4174543 - RNA, 88 nt, Human
agaacucagggacgguauggaacuggcuuuacagauuugccucuuguugcuugcuauuaaaguuaguuucuuauaugucucugacucu

SEQ ID NO: 4174544 - RNA, 58 nt, Human
agaacucugaacacugucuggagcucacacaaguuccuggaauaaugcuuuaaguucu

SEQ ID NO: 4174545 - RNA, 59 nt, Human
agaacuggauuuaggaacagagaaacugcaaccaaugcuucucuggauaggccaguccu

SEQ ID NO: 4174546 - RNA, 60 nt, Human
agaacuuguuuuguguaucucuagcuaaauauugccauuauugcacacagauaaguaucu

SEQ ID NO: 4174547 - RNA, 81 nt, Human
agaagaacauugaaaccuguuucucucugaguuacuuguaagcauuaagaaaaaagagagcugacagaaacauuuucuuuu

SEQ ID NO: 4174548 - RNA, 71 nt, Human
agaagaauaauuuguggcaugugaaaaugacaagaaagucaaaugucaguguccauaaauaaaguuuuauu

SEQ ID NO: 4174549 - RNA, 83 nt, Human
agaagacucccagcccauggagagggucugaccugcacagccccagugccgagacccugcaccucucgugggcugagucuuuu

SEQ ID NO: 4174550 - RNA, 109 nt, Human
agaagacucucuaaauauuuuuuccugccuuuucaucugagcuggaguucacccugucuucauuuucccucagcaggaauguggcaggcaagugaguggaguaacuucu

SEQ ID NO: 4174551 - RNA, 130 nt, Human
agaagacuucagccgcugcucccgaagccacuaagggcagggaggccaaagugugggcggcucugcucagaccauucgcgcuuuaggcccaccgcucugcgcucuugguaaggcggaggaggcagcuucu

SEQ ID NO: 4174552 - RNA, 79 nt, Human
agaagagaaaauuaagugucugggaagccuccagauuagcaauaaagauguggcuucuuagaauuugacuuacucuacu

SEQ ID NO: 4174553 - RNA, 129 nt, Human
agaagagggaaaaagcagggugcuggcggaaagccagguuucaacuaaaucaagaagguggugagaacaaccuaugaagauguugaggcugggaauuucucuacacaugaagauggguuccagaggucu

SEQ ID NO: 4174554 - RNA, 75 nt, Human
agaagauaggcaguagcaggaucugccauaauucuaaaagugugcaugggagaaucuugcucugcuaccucuuuu

SEQ ID NO: 4174555 - RNA, 57 nt, Human
agaagauauaaaaauacgcagcuuaacuauaucuuccugcguguguauuuauuuucu

SEQ ID NO: 4174556 - RNA, 76 nt, Human
agaagauuaggguaucacaucacagguugagcuagauaaacuagaguaucuucaauucaugaaguccaugucuucu

SEQ ID NO: 4174557 - RNA, 71 nt, Human
agaagcagacagaccauggcuauucagaaaccucccugcagagucaaguagcccugguccugaguguuucu

SEQ ID NO: 4174558 - RNA, 61 nt, Human
agaagcagcaguaagacugagacaagggaaaucucuucaagucaguuaaguugcugaaucu

SEQ ID NO: 4174559 - RNA, 72 nt, Human
agaagcagugccauuuugugauaguuuuugaugcuccaaaucugaauuaauacacagaauggcauucauuuu

SEQ ID NO: 4174560 - RNA, 80 nt, Human
agaagcaugccuacuagaacacgucucggaaugagagauguuuaauucugucaccucccagaaaguuuugcaggguuucu

SEQ ID NO: 4174561 - RNA, 56 nt, Human
agaagccauaguaucucaggguagaaaaacccaauagguagaaaacauggccuucu

SEQ ID NO: 4174562 - RNA, 74 nt, Human
agaagccaugucucagguggccacaagaggagauggugaaucccaggccauuaccgcugagacccagggcuucu

SEQ ID NO: 4174563 - RNA, 58 nt, Human
agaagccauguuuaguaggaugaaagucaugacagcaucuccucuaccauggauuucu

SEQ ID NO: 4174564 - RNA, 95 nt, Human
agaagccucuuuuucauguccagggacagcgggacucugacagcugagagcuggugggcggcugucucaguucccuucucuggacaagagcuucu

SEQ ID NO: 4174565 - RNA, 87 nt, Human
agaagccugcucuguccuugugcagcugcggcaggcaggagcuggaacauaugccugucugaaagaggacgagcugggaaggcuucu

SEQ ID NO: 4174566 - RNA, 87 nt, Human
agaagcucggcagugacuugcucaaaucagauuuuagacacgauuuaaagcauguuucaguaagguuaauauaguguccgaguuucu

SEQ ID NO: 4174567 - RNA, 57 nt, Human
agaagcuggggucacuuauccuugggaaggaacaggauugagacagagaccaguucu

SEQ ID NO: 4174568 - RNA, 78 nt, Human
agaaggaagucagaggaaugggccaggcugguagguguaaucauggaagucugugcaaguucucuuuacauuccuucu

SEQ ID NO: 4174569 - RNA, 59 nt, Human
agaaggaaucuccauuuagucugugaaccacagcaacagacagcugggaguguccuucu

SEQ ID NO: 4174570 - RNA, 55 nt, Human
agaaggaggaauggguagaaaggcaaaaaguucaaacucagcucuuccucccucu

SEQ ID NO: 4174571 - RNA, 78 nt, Human
agaaggauuccagaggaugaguggagaguaccguguuucuaagacaccuguuucuucucaucccugaaaucagugucu

SEQ ID NO: 4174572 - RNA, 57 nt, Human
agaaggcaaagagaugacaggggccagaucaugauggauguuaugacuuugccuuuu

SEQ ID NO: 4174573 - RNA, 68 nt, Human
agaaggcauugccuggauucucuucugaugaaauuucauuagcaaguuuuccagcuaauuggcagucu

SEQ ID NO: 4174574 - RNA, 55 nt, Human
agaagggaaaugcuaacagaugggcaagcuuuuuguucaugguguauuucuuucu

SEQ ID NO: 4174575 - RNA, 90 nt, Human
agaagggaagcuguuaggggaaaugagggggcaacauuccuggcuuuuucugcaggacuagaaaugucgucuccacauuugcucccuucu

SEQ ID NO: 4174576 - RNA, 60 nt, Human
agaagggaggugggaggugcggaggggaugguccugucuguggcuuccuauuucuuggcu

SEQ ID NO: 4174577 - RNA, 59 nt, Human
agaaggugggugaagcuugcucaguauccugcuuaaugcuaucaguuucuucccccucu

SEQ ID NO: 4174578 - RNA, 58 nt, Human
agaagguuguuaaaggggauucaaaucaauuacuuugaaacuaugaagacaaccaucu

SEQ ID NO: 4174579 - RNA, 102 nt, Human
agaaguaauagagaagaaguuaaguaaauaucuguagucuuuacagaggaacgucaauaacaacugcugagguauuugaucuuacauuuauuuucuaauucu

SEQ ID NO: 4174580 - RNA, 124 nt, Human
agaaguacagaaucaggcauuagauucucauaggagugcuaccccuauugugaacugugcaugcgagggauguagguugcaaguuccuuaugagaaucuaaugccugaugaucugucacugucu

SEQ ID NO: 4174581 - RNA, 66 nt, Human
agaagucaaguggucuaugaaaucacagguaauaaugaaaaaaaugccucaugaccauuggcuucu

SEQ ID NO: 4174582 - RNA, 79 nt, Human
agaagucguccaguaggagguucugagguucuggguuucgaucaaacgcauccuuuaucuuuccuaggaauacacuucu

SEQ ID NO: 4174583 - RNA, 106 nt, Human
agaagugagggcaagggcuguggaucagaggacuucccacucaucuggccacuggacucugcccugaggaggugaagucuccaucauuccccucuccuucccuucu

SEQ ID NO: 4174584 - RNA, 72 nt, Human
agaagugcaauaaaguaguagaauugcaauaaagagaugugcaaauaaauauuuacacuuuguagcauuuuu

SEQ ID NO: 4174585 - RNA, 58 nt, Human
agaaguggcagaacuggaauucgaauccaggcaguuuguguccagagcuggugcuucu

SEQ ID NO: 4174586 - RNA, 58 nt, Human
agaaguuauggugcccagccucugugugcaagacagagacaccgcgcaucauggcucu

SEQ ID NO: 4174587 - RNA, 65 nt, Human
agaaguugggguuaucacaccaggaaucugggaagagacuccuuggugcuggagcucagacuucu

SEQ ID NO: 4174588 - RNA, 61 nt, Human
agaaguuuaaccaggugcuacucauagaaaaucaguuauuuguauuauugguuaaauuucu

SEQ ID NO: 4174589 - RNA, 65 nt, Human
agaaguuuucauuaccuauacagagugauuuuugauuuuuacauauguauuuaaugaaggcuuuu

SEQ ID NO: 4174590 - RNA, 74 nt, Human
agaauaaaggauaauccauuagacuggaugcauuuaguuucaugaacaacuuauggcauuguccuuauuguucu

SEQ ID NO: 4174591 - RNA, 83 nt, Human
agaauaacaagaaagccaugaauguuauagaggaauccagaaagccucuccuuuagcuucuguggcacauucauguuuauucu

SEQ ID NO: 4174592 - RNA, 78 nt, Human
agaauacaagggaggucuagaucagguuggagggacaccagugccuugaaucucugcucuagaacuuucuucuagucu

SEQ ID NO: 4174593 - RNA, 65 nt, Human
agaauacucuuuaaggaaaguguugaucugaaauaggaucagcaaucaaauugcagagugugacu

SEQ ID NO: 4174594 - RNA, 86 nt, Human
agaauagcacaucugcagggaugugaggggugagccgaagauucacuuauggaguuacucgucaucuuccucagggucgcugaucu

SEQ ID NO: 4174595 - RNA, 78 nt, Human
agaauaggggcaacagaaaucugucucuuugucuagacaacaacugcacagacagauuuugucugauguaucuauuuu

SEQ ID NO: 4174596 - RNA, 62 nt, Human
agaauaguggcaaugacugcacauaaaguauauuguagacguagucaaugucacugaauucu

SEQ ID NO: 4174597 - RNA, 73 nt, Human
agaauaucuagauaccaagaagcacauucugaugaguugucagguucuuuguagcuuccuuggucucugcucu

SEQ ID NO: 4174598 - RNA, 87 nt, Human
agaauaugagggaagaggccugacauuuucuugagaacugaaaccuuucuuuuaagauggcuugccuuuaucaccauccgaaauucu

SEQ ID NO: 4174599 - RNA, 67 nt, Human
agaauauggaaacaauaauuggaauugucuuuucaaaggccuuucaacuuguuugcuuccauagucu

SEQ ID NO: 4174600 - RNA, 57 nt, Human
agaaucaggagagagagaagcaagcuauuuuaugcagccacuaguuuuccuguuuuu

SEQ ID NO: 4174601 - RNA, 60 nt, Human
agaaucaggcagagggagaagccaagcugugaugccagccuggcagccucagccaauucu

SEQ ID NO: 4174602 - RNA, 55 nt, Human
agaaucagugcuggcuauuagcuacaaagguaccagcuaauaccucacugaaucu

SEQ ID NO: 4174603 - RNA, 128 nt, Human
agaaucccauuaaauuugaauuucagauaagcaauaaauaauuuuuaguauaaguaggucucaugcauuauuugggauguacuaaaaacuuuugcuguuuaucugaaauugaaauuuaacugacaucu

SEQ ID NO: 4174604 - RNA, 67 nt, Human
agaaucuauggaggguaggccaggguaugggcauauuuccaaaacucugcaguuaguuucuaguucu

SEQ ID NO: 4174605 - RNA, 99 nt, Human
agaaucuauucaagggguucacagucuuugacaagcccuuucaagcagcaggaugcaguggaaggggcagagacugaagaguccaaugaccuggguucu

SEQ ID NO: 4174606 - RNA, 92 nt, Human
agaaucugcuacauuaauaacuucauguaacauuuaacauguaauuaaacaacauauuauggauuuacugaguuauugaguuaggagauuuu

SEQ ID NO: 4174607 - RNA, 83 nt, Human
agaaugcagaguguugcacauuuccuagaauuucaauagauugaaaaaacuauaaaaggugauguagcuaauuuugucauucu

SEQ ID NO: 4174608 - RNA, 110 nt, Human
agaauggaagaaaacaagcacuuuucccuuagaucauuugaauugagguaggaauuuaaccuuuuuguccuuacuugcaugaugugggaguagcuuguuucuuucuuucu

SEQ ID NO: 4174609 - RNA, 66 nt, Human
acguagagcuacagccugaugaacauuccuuauacaaaggaauguacaucucaguguaguacucgu

SEQ ID NO: 4174610 - RNA, 66 nt, Human
acguaguuacauacaaaggcuggguuaucugaaccuucagaaacccuagcaugugugugugugugu

SEQ ID NO: 4174611 - RNA, 68 nt, Human
acguaucuucagaaacuaguaacagcuaucuucuauauauggcuagaauacuguuuuagaacuuaugu

SEQ ID NO: 4174612 - RNA, 74 nt, Human
acguaugggaaggacauucugggcucaggaacauccaguacaaaggcccugaggugggaguuuuucucauaugu

SEQ ID NO: 4174613 - RNA, 66 nt, Human
acguccacacagcacuggcugcugcagugccaccgcccagcagccucuugugccuguggugguugu

SEQ ID NO: 4174614 - RNA, 57 nt, Human
acguccauuauugccagccauacugaaucccuuugauuccguggaugcaauaugcgu

SEQ ID NO: 4174615 - RNA, 79 nt, Human
acguccuccagggcagugacuacagcggccgccaccccagggcugcugagcaucagggcugcccuuggacccuggacgu

SEQ ID NO: 4174616 - RNA, 61 nt, Human
acgucuugacguggagagagcuggguuugcaaguguccaguccuucuccauuaaggcucgu

SEQ ID NO: 4174617 - RNA, 63 nt, Human
acgugcgccaauaaaugcacuggaaagcaauucacuuugauucaacauuuauugagcguccgu

SEQ ID NO: 4174618 - RNA, 56 nt, Human
acguguaacuucaaaugggaagaucccuuguccuuccugagaauagaguugcaugu

SEQ ID NO: 4174619 - RNA, 78 nt, Human
acgugugugcauuugugcaugcacaugugugugccuauucauuugcauguguuuugcaugcaucaugugcacgcaugu

SEQ ID NO: 4174620 - RNA, 88 nt, Human
acguguuuucauuugauucuaugagguaagcuauuaucccccauuuaauagaagucaauuuugccuucauggagugucugaaaacugu

SEQ ID NO: 4174621 - RNA, 76 nt, Human
acguuagggacaagugugucugugaguuccuaguuugcauaaccuggccuuguagaauugaaauggucucaaaugu

SEQ ID NO: 4174622 - RNA, 77 nt, Human
acguuucucaacuaucaagccucagaaucuucuccauucagcuagugaauaaggaaagagggaggguggaggauugu

SEQ ID NO: 4174623 - RNA, 130 nt, Human
acuaaaaagcauauagaagaaaauaaaaauuacucauaauaucuauacucagaguuaauaucuguugguauuuggguauguaucaucugggugggaguguggguaauuucccuucuuugugcuuugauau

SEQ ID NO: 4174624 - RNA, 73 nt, Human
acuaaaaggagguugaagcugucaggguuuuaugugacuuugaugacagguauuuuuaaggcuuccuuucugu

SEQ ID NO: 4174625 - RNA, 84 nt, Human
acuaaaggauuuucaguugugccggccccucugucuacuagauccccaggcagaacagcugcaaaacuuaaucuagcuuuuggu

SEQ ID NO: 4174626 - RNA, 120 nt, Human
acuaaauuugauuugcuucauuagaagaauugauauuucauucuacaugugcucagagugucuagaacuugugaaauaucaauguuauuucuuaguaauaagcagugauuuguaguuagu

SEQ ID NO: 4174627 - RNA, 66 nt, Human
acuaaccagcaguacucuaaugcacagcuccagugccacggcugaaguuugaaaugauugguuggu

SEQ ID NO: 4174628 - RNA, 61 nt, Human
acuaagaaguagcauuaucauuuuaccgaaaaaaggugcaggagauaauggugcuuagagu

SEQ ID NO: 4174629 - RNA, 65 nt, Human
acuaagggcugcuguagaagcagagcccacugcccuggccaugcucuucuauguagucucaaagu

SEQ ID NO: 4174630 - RNA, 89 nt, Human
acuaauaaccuguaugauuucuaguaugucuuuggaagguuuguaaacuuuccaaaguuaguuauuagaaaggagauaacauuguuagu

SEQ ID NO: 4174631 - RNA, 124 nt, Human
acuaaucuuagauuuuacaauaaugauguuauuuaugggagcaauuggggagguuacaauccacgugaccucugguuacaugacuccugauacauaaucuuaaccuuguggcuaauuuguuagu

SEQ ID NO: 4174632 - RNA, 70 nt, Human
acuaauggauuaacgucccugucgugugacauuuucugguaugacagcugaagauguugaaccguauggu

SEQ ID NO: 4174633 - RNA, 60 nt, Human
acuacacugcccuggggaucaagguagaggaacuaagggagugccuuagggcaguguggu

SEQ ID NO: 4174634 - RNA, 115 nt, Human
acuaccuaagaucucugcuaguaaauggcugaaugaucuggacuacaauucuuuggacucuuccuucucaggagauccuguagucucacagccccauagcugugaucuagguagu

SEQ ID NO: 4174635 - RNA, 55 nt, Human
acuaccuuaucugucucggacuaugaagucuuuggaagcuuucagagaagguagu

SEQ ID NO: 4174636 - RNA, 55 nt, Human
acuacugcacaccagcaaaagaaaaucccuaggaaguuaucuguguugcaguggu

SEQ ID NO: 4174637 - RNA, 55 nt, Human
acuacuuggccaaccuaggaugugccuaaggcaaaugcucuccuuggucaggagu

SEQ ID NO: 4174638 - RNA, 75 nt, Human
acuacuuuuaaaauaucagcacuuuugugguauaauagagccuauuaacaacaguuggcugacauuagagguagu

SEQ ID NO: 4174639 - RNA, 124 nt, Human
acuagaaagauaacagagccacuaucaaagagccucaaacuucaauuucagucucagagaguucucaacaggaugcucuggcuagaaauuauuaguucuuugcaagggcucggaguccacuagu

SEQ ID NO: 4174640 - RNA, 73 nt, Human
acuagaaaucuuuucaucucauuugaagccaugauuauaauugacuucacaggaggacugaaagauauuuggu

SEQ ID NO: 4174641 - RNA, 66 nt, Human
acuagaaucugauuacccuaugaauaauuuauuacuuguuuugguagacuguaaucaguuuguggu

SEQ ID NO: 4174642 - RNA, 70 nt, Human
acuagaauggaaagacuggagagugauuuuguaauuuuaaaacauuagauuuguuuuucuagccucuagu

SEQ ID NO: 4174643 - RNA, 63 nt, Human
acuagacccucugguuugcccuugggugcugcaguacuugucuagucuaccagagacuccagu

SEQ ID NO: 4174644 - RNA, 89 nt, Human
acuagccuggagauuuagauuccauuuaauucugcuggauugccauuucugcugucagucuacaaucuuaaaugaacuaguuccuuagu

SEQ ID NO: 4174645 - RNA, 88 nt, Human
acuagcugacuaucaggacauaugaguggcaaauaaaucaagaugugauucacauuauuuauggcccucaccugauauagggcuuagu

SEQ ID NO: 4174646 - RNA, 128 nt, Human
acuaggcaauuguuguuauuucccuguacacuauuaaaccugcucauuagggaugggugcauuggguaacccagggugacggcuagguuuaauagugugauuuauuaaacauuucauauuuaccuagu

SEQ ID NO: 4174647 - RNA, 85 nt, Human
acuaggcaugagaguagguauccacauugaggaggggaacucaguaaaagggugcuuuacucuaaaauuucuacuaugucucagu

SEQ ID NO: 4174648 - RNA, 106 nt, Human
acuagggcaaguaauuucagcucacauguccugggaaaauaacuggacuuggaucuaguuccugcccugaccauguggccuugaaaaccacucaccugcucugagu

SEQ ID NO: 4174649 - RNA, 75 nt, Human
acuaguagacuaauggacaccaucaugcuccuucuuauuuuuaaggaagcagcauaauugcuauuuuauccuagu

SEQ ID NO: 4174650 - RNA, 86 nt, Human
acuagugaauuuucugcugauucuuaaaugugguugugauacaacuaaaugaugacaguuagauauaaccccaggaaauguauggu

SEQ ID NO: 4174651 - RNA, 83 nt, Human
acuaguuaggaguuggguuaggugugaaguguguuauaauuguuauuucacucaguauaccauagguuucaaauuccucuagu

SEQ ID NO: 4174652 - RNA, 85 nt, Human
acuaucuccucaaaggucaaagacaguaacuuuuauuauuaagcuuuguagaagcuaauucaugucuuauggccagagugauggu

SEQ ID NO: 4174653 - RNA, 86 nt, Human
acuaugaaaucgacguguaaugagucacuuaccuuaaagagcuagaaaugcuuuuaagccaaagggaccauuacugauuaaauggu

SEQ ID NO: 4174654 - RNA, 56 nt, Human
acuaugaaucagagaaaauaagugaccugccuaaggucauccaguugguuuauggu

SEQ ID NO: 4174655 - RNA, 65 nt, Human
acuaugugguucagagaacccgucuagucugcccaacugcaacagagcauucugcacuacaaggu

SEQ ID NO: 4174656 - RNA, 110 nt, Human
acuauguuugccaggcuggucuugaacuccugaccucaugauccacccaccucggccucccaaagugcugggauuagaggcaugagucacugagcccggccugacauagu

SEQ ID NO: 4174657 - RNA, 65 nt, Human
acuauucagaaucaccagccuucaaguuacuauucagaaugugaaaagcguguguucuagguggu

SEQ ID NO: 4174658 - RNA, 130 nt, Human
acuauuuagcuuguguuccauuaagacuaccgagucaacuuugaucucaguuccucagagguagugcucauucuccaccuuggaacugaaguguuuuuguugugauggugaugguggcaguugaauuuuu

SEQ ID NO: 4174659 - RNA, 64 nt, Human
acuauuuuccauuacuuagaaaggaacugagaucaaaucaguuuuaaaucugugaugaaauggu

SEQ ID NO: 4174660 - RNA, 63 nt, Human
acuauuuuuaaguuccccuguagccuccagugcaccaaaugcagggcagaacauauagauagu

SEQ ID NO: 4174661 - RNA, 62 nt, Human
acucaaaggaugcugccgauuccaucagucaggugcaguuggcauuccugcauccuaugugu

SEQ ID NO: 4174662 - RNA, 63 nt, Human
acucaaauugucuuuugaaaguugauaaacuucagaucacaugucaagaagauaauuugcagu

SEQ ID NO: 4174663 - RNA, 73 nt, Human
acucaacaaauaaguggcacuuaaagucuuagcuuacagcuaagguccagugaaacuuuauuugguuuggagu

SEQ ID NO: 4174664 - RNA, 90 nt, Human
acucaagaaugcuuuucauccagccucaucaggagcugcugagaauggucccugagaagugaaacuuagauggggguggguaggcagagu

SEQ ID NO: 4174665 - RNA, 77 nt, Human
acucaagcaacacaguuuuccaaaauagagcauagucccugccauuagacuuauucuagaaagacuaugguuugggu

SEQ ID NO: 4174666 - RNA, 65 nt, Human
acucaaggcaaguuaacaaaucuguuugaacagcuguuggaacuagagcuuccagcuucuugagu

SEQ ID NO: 4174667 - RNA, 81 nt, Human
acucaaggcagagauauucuugaucucugugggaauaaucacaauuuaaccaaaguagcaaagaguaauuuuguuuugugu

SEQ ID NO: 4174668 - RNA, 76 nt, Human
acucaauagcgagguccauuuucacauaugauucugaugacauuaccuaaguggaaaaggauccucuuccuauagu

SEQ ID NO: 4174669 - RNA, 65 nt, Human
acucacagcaugagcuuggcagaguuccccauacccucuuucugucauuuggcuaccugugaagu

SEQ ID NO: 4174670 - RNA, 99 nt, Human
acucacaugguuagcuuguccacucuccugggagcaccauacuuguuucuucaagaacuaaagaaaagggaagugcugccccagaggcugacugugagu

SEQ ID NO: 4174671 - RNA, 87 nt, Human
acucacccuauucccuaccucaaguuggaaauaaaauguucaucuucagaugacaugugugacaacagaggugaguauauguugagu

SEQ ID NO: 4174672 - RNA, 72 nt, Human
acucagcacagugcauggccaauaaaaagcacucagucagcuguuguuaccauuguuaucauugugcugugu

SEQ ID NO: 4174673 - RNA, 67 nt, Human
acucagggcguccuuccccagcugagcccgaggggcagcggccggugaggaaggggagcucgggggu

SEQ ID NO: 4174674 - RNA, 71 nt, Human
acucagguuuacuuuaucauagaugauuaauagguguuacguguuaaauucgaugauggauaaacuguugu

SEQ ID NO: 4174675 - RNA, 77 nt, Human
acucaucucauagugcagugcuguaaucuacugacauuaccaaguuucuugacuacaguuuuucacugaagaugugu

SEQ ID NO: 4174676 - RNA, 58 nt, Human
acuugguugcuucugaaaugacacuuuaauuaauugaagaauguuagaggcaucaagu

SEQ ID NO: 4174677 - RNA, 76 nt, Human
acuuguagacuaacagaagaauuuauaagauaauucuauucuagguaggaaaaguaugaguucaguuaucuuaagu

SEQ ID NO: 4174678 - RNA, 120 nt, Human
acuuguagauggguucucuggagagauauggaagagccugggaauuuagcggcucaaaucagcuggcaacuggaguucauuuaggugauucacauacaauuuccggcuuuccuugcaggu

SEQ ID NO: 4174679 - RNA, 55 nt, Human
acuugucacaaaaucaccagugacuuuucaucacggucacaggcaggugauaggu

SEQ ID NO: 4174680 - RNA, 63 nt, Human
acuugugauucaauuaucugaugcuuuccauugugcaaaagagagcuuguaauugagucaggu

SEQ ID NO: 4174681 - RNA, 76 nt, Human
acuugugccaggugucauggauaauggguagcagagucaggaucuaaacccagagucauggcacuuagccaccagu

SEQ ID NO: 4174682 - RNA, 57 nt, Human
acuuguggccagguuuaucggcugucauccucaaaguuaagcaaucuggcggcaagu

SEQ ID NO: 4174683 - RNA, 64 nt, Human
acuuguguaacuugagcaaacacaagagaaauaagagguuucuguguguucagauacagcaagu

SEQ ID NO: 4174684 - RNA, 55 nt, Human
acuuguugaggaauguuuuccacagugcaguguuuuacauucccaucagcaaugu

SEQ ID NO: 4174685 - RNA, 87 nt, Human
acuuuaaauguauuagguugaugcgaaaguaauugcgguuuuugcaauuacguggcaauaauuuuuucaccaaccuaauaacugagu

SEQ ID NO: 4174686 - RNA, 102 nt, Human
acuuuaagaauauuugccagaagugacucugcauuuuauggaucuaaguaaaucuuaagugaccuuggaauuuaguagucuucccuagcaaaguaagaaggu

SEQ ID NO: 4174687 - RNA, 73 nt, Human
acuuuaauuaagagaugcuuuucuaaauaauuaguauauauuuuuguuugguuguagcauuucuuuuugaagu

SEQ ID NO: 4174688 - RNA, 98 nt, Human
acuuuagucugaaacauuuacugcuacuauuacauuuugcaauuacagugaagugaggcagaaaauagcaguucaaaaauguauucaaguaaugaagu

SEQ ID NO: 4174689 - RNA, 58 nt, Human
acuuuauacacugaguuuagaaccucuaugugagauguuauucuucaguguguugggu

SEQ ID NO: 4174690 - RNA, 64 nt, Human
acuuuaugugcuugcucuuuccuugauaacaugaacauuguuauagagugcaguauguagaagu

SEQ ID NO: 4174691 - RNA, 92 nt, Human
acuuuccaggugucacacagugaguggcauaaucagaguacaauuugagucaugcccauacaucacauugccagugauuacccaaggaaagu

SEQ ID NO: 4174692 - RNA, 78 nt, Human
acuuuccuggcagugugacccuggacagaugcuuaacuucucugugccugucagguuucccaucugcaaaaugagggu

SEQ ID NO: 4174693 - RNA, 66 nt, Human
acuuucgggcaucuuuucccuucuacuaaucaugaaaacaagaggggcaaaugugagccuggaagu

SEQ ID NO: 4174694 - RNA, 56 nt, Human
acuuucuauuguuuagauucugaaauagaguuuauagaaucugagaaauggauagu

SEQ ID NO: 4174695 - RNA, 57 nt, Human
acuuugaucuaaguuucuuugauuuaacacugcaauuaagaagauuugguucaaagu

SEQ ID NO: 4174696 - RNA, 98 nt, Human
acuuugauugauucugaaaauacacauacuaggggaaagcugacauuucacuuucaaaccuacuuguauguuuguuuugauauggagcccugcagagu

SEQ ID NO: 4174697 - RNA, 56 nt, Human
acuuugcagagccagaagagaagaauuagauuuauuccuccuuucguucugaaagu

SEQ ID NO: 4174698 - RNA, 57 nt, Human
acuuugccccaggucucaugacuagcaaaccccagagcuaagaucugaggcuaaagu

SEQ ID NO: 4174699 - RNA, 82 nt, Human
acuuuggcuguuguacagauuagcaaugagagucugaauauagaagauaaaucugauucauucaugugcaccagccccaagu

SEQ ID NO: 4174700 - RNA, 66 nt, Human
acuuuguauaaaguccuugaaccggauguauguccuccauguacauuucauuauggggcacagagu

SEQ ID NO: 4174701 - RNA, 65 nt, Human
acuuugugcccaacagaaagaagaaauaacaucuauuggcucuuucacauuguggggggcauggu

SEQ ID NO: 4174702 - RNA, 58 nt, Human
acuuuguguuacccagcaaggacuaaccaagguuuccuucugaaaaaugcacacgagu

SEQ ID NO: 4174703 - RNA, 55 nt, Human
acuuuguuuggcuauuagagucaagauauucuucucuagugugcucagucaaagu

SEQ ID NO: 4174704 - RNA, 72 nt, Human
acuuuuaaaacuucucauuuuuauggugaaaaagucauaaauuuauucugaauuugugaaguuugaaagagu

SEQ ID NO: 4174705 - RNA, 60 nt, Human
acuuuuaaaugaguuucaguuguagaguuagaaugcaacugauucuugaaguugacaagu

SEQ ID NO: 4174706 - RNA, 70 nt, Human
acuuuuaccuuuggaagggacccuuagugaaggucuugucuuuucaucuguagcaucuuccaauaaaagu

SEQ ID NO: 4174707 - RNA, 104 nt, Human
acuuuuacuuuacugccuagcauauuaguuuucaguaaauauuagugaucugcauuuuacacauggguccuaugugcuuacugaagauggcuguaucuuaaagu

SEQ ID NO: 4174708 - RNA, 103 nt, Human
acuuuuauauaccaucgaauguuauuacacuugugaaauucuccugucuaaccugaauuuacauuccauggugguuacaugguauauguauuauuauuaaagu

SEQ ID NO: 4174709 - RNA, 72 nt, Human
acuuuucaauuguuuaaaaugaacgaugaagcacaaaauccagccucauuaugcaaagaacacuugagaagu

SEQ ID NO: 4174710 - RNA, 92 nt, Human
acugcuacauggggagacauauauacauauauguaggaguacaccuaugugugcauguguguguauuuauaaaucucucuccauguagcagu

SEQ ID NO: 4174711 - RNA, 55 nt, Human
acugcucaugaggaccuuucauuugucuuuuaaagauguguggguuuagaguagu

SEQ ID NO: 4174712 - RNA, 77 nt, Human
acugcuccccuccccacuguguugcagucuagugcuucaggaguugacuguaaguccacggauggacuuugagcagu

SEQ ID NO: 4174713 - RNA, 56 nt, Human
acugcucuguuguuuguuucccuuugcuucccugcugcaagcagacagcagacagu

SEQ ID NO: 4174714 - RNA, 100 nt, Human
acugcugccuugucggaaggaaaggugcuguuuggucucuucgcuggcauccccaucuuuaggaauuccagcccaaacaagccgccuuccaauuagcagu

SEQ ID NO: 4174715 - RNA, 91 nt, Human
acugcugguuggaucaggguuucugcugccaccugggcacaugcagcccacccuaucuggcagcagacaucugaggucuaaccucagcagu

SEQ ID NO: 4174716 - RNA, 92 nt, Human
acugcuguauuuaucuauuguauuguugauggacaauuaggauuaguucuucuuucuuggucuuaacaaacaguguggauauaaacacaugu

SEQ ID NO: 4174717 - RNA, 106 nt, Human
acugcuuaacuuguauuagggagucugaagauggaggaacuuagaauuugaucaaguaaucuaagugcggccguuuaagcacucucaaguugaauauuggaguagu

SEQ ID NO: 4174718 - RNA, 116 nt, Human
acugcuucuugcuucaggguuugcugugggcaguacauaagcuacuugacccaauacucaugugaaaguuuauucugcuuggcccucccaguugccuugcagacauccaggagagu

SEQ ID NO: 4174719 - RNA, 104 nt, Human
acugcuuuauacugcuuugcugccauuauauuuuacugcaugggaggaccacaaucuauuuuauuuauuagugaagacauagucaguuuccaguuauaagcagu

SEQ ID NO: 4174720 - RNA, 57 nt, Human
acugcuuugucuuauauugaugaaauuuucagaugucaaaaagcugggacaagcagu

SEQ ID NO: 4174721 - RNA, 56 nt, Human
acuggaaaaccacugaaaugagcccaugaggcacauguguuuucaguauuuucagu

SEQ ID NO: 4174722 - RNA, 77 nt, Human
acuggaacagcuauacugacagaguuguaaauauuucccuuugaaaucacaacaguccaguauagacugucucuagu

SEQ ID NO: 4174723 - RNA, 89 nt, Human
acuggagagagguaggguuggguacuggggcaaguuuagccaagggaacuauacaaaccugcccagacucagauccuagcucugccagu

SEQ ID NO: 4174724 - RNA, 100 nt, Human
acuggagguauugguuggugcaaaaguaauugugguucuugccauuacuuucaauggcaaaaaaacacaauuucuucugcgccaaccuaauaacuguagu

SEQ ID NO: 4174725 - RNA, 90 nt, Human
acuggagucacacacagcucugguccuuuagagagguauagaaaugagcacagcuucucuagcaaaaccagcuaguagugagguuccugu

SEQ ID NO: 4174726 - RNA, 76 nt, Human
acuggauuuaugaacauauuucucaagaaugucaagaaagaauuguacaaucugaugauguauggugaguuucagu

SEQ ID NO: 4174727 - RNA, 101 nt, Human
acuggcaaugaacucuaguggcuucauggcaagucuuaguaucuuugaagagugauagacuauuaggacuuuguugaacccuguaagguaacauuacuagu

SEQ ID NO: 4174728 - RNA, 60 nt, Human
acuggcagagacccugauggccaaggaguccacccagggccaccggaguuauuugcuggu

SEQ ID NO: 4174729 - RNA, 78 nt, Human
acuggcagguaaaggaggaauaaagagguggugaagacauauuuuuauccugcuuuguuccucuugagcacuacuagu

SEQ ID NO: 4174730 - RNA, 75 nt, Human
acuggcugauggaaggacaggcgccgugaugguuaaguguguccauguuggcuaccugauuucuuuucagccagu

SEQ ID NO: 4174731 - RNA, 87 nt, Human
acugggaagcacauuuuauugucuguauugccuauaguucaccuuuauauaauagacagaaagauaauagaauaacuccuucuuggu

SEQ ID NO: 4174732 - RNA, 82 nt, Human
acugggagggagcugcugacacuuuauuaagcuguuguuuugcuuaaauugcaguuaucuaaagugacacuuccccuccagu

SEQ ID NO: 4174733 - RNA, 99 nt, Human
acugggcggcccacccacuguccgugcaguggaggguguggcugugccugguucacccgcaggugggcccuucauugauggagagcaggugccccgagu

SEQ ID NO: 4174734 - RNA, 58 nt, Human
acugggggaggaggugguuugcugacgaucaguagcauuuccgcccucuucugccugu

SEQ ID NO: 4174735 - RNA, 80 nt, Human
acuggguucuagagggaccagaacauacuguguucccucgcaguuccccacaguauguucuggucccucuggaacccugu

SEQ ID NO: 4174736 - RNA, 66 nt, Human
acuggguuuaggccgggcaggcccaggccugguuucgggccuggcgccgggcugccugucuuuggu

SEQ ID NO: 4174737 - RNA, 82 nt, Human
acugguagugggagaaggugugcagggccaaaguuugaccaauguccagcauccugcuugcugucugugaaucacugccagu

SEQ ID NO: 4174738 - RNA, 58 nt, Human
acuggucuugggaagcaggcaguuuaaugaacaacucuuuugauuucacaaggccagu

SEQ ID NO: 4174739 - RNA, 59 nt, Human
acugguguaugugcucaauaagcauuugaauaguaaaugaaugaaccacauauaacagu

SEQ ID NO: 4174740 - RNA, 68 nt, Human
acuggugucaggaaaaucucaguguuaaucaacuguagaacuacuggguucuuccuggcacagucagu

SEQ ID NO: 4174741 - RNA, 118 nt, Human
acuguaaccaaaagaguaugucccauguuugcaaaaugaggugaagagucuauuuugacucaucgggugguuuuguauugcaaugggaauuauaucucucuguuauaugaguuacggu

SEQ ID NO: 4174742 - RNA, 76 nt, Human
acuguaacuggaugguuauauguaagguaccucuaagcuguagcaccuuaggauuucccauauagcuccauacagu

SEQ ID NO: 4174743 - RNA, 60 nt, Human
acuguacuguguauuguagaauguuuaguagcaucccuggccacuacccacuaguacagu

SEQ ID NO: 4174744 - RNA, 66 nt, Human
acuguagguuccuggagggcagggucaugugucacucaucucuguguccucaggaccuggcacagu

SEQ ID NO: 4174745 - RNA, 69 nt, Human
acuguaugccuucugugcuccaggcaauaugcucggguuuuggagacacagagcaacaaaauauacagu

SEQ ID NO: 4174746 - RNA, 112 nt, Human
acuguauuucucuuuugguaaucuguacuucuaauuugaauuugaauauuguacaagucaaauauacuaagagguaaagauugcagauaaaagagcaaauuuucccagcagu

SEQ ID NO: 4174747 - RNA, 64 nt, Human
acugucacccgggcuggagugcaauggcucgaucucggcucacugcaaccuccaccuccccagu

SEQ ID NO: 4174748 - RNA, 57 nt, Human
acuguccgggacaggcccauccagagacagggaggggaugugugggugucggggagu

SEQ ID NO: 4174749 - RNA, 65 nt, Human
acuguccuucagcuuuaucugaacacccccauaacaaugugugacuaaguggaguugaggacagu

SEQ ID NO: 4174750 - RNA, 63 nt, Human
acugugacgugccuuauggagagaauaugcguguuaguaagcuuuguucaggcaaguuacagu

SEQ ID NO: 4174751 - RNA, 59 nt, Human
acuguggcagggguuuucugacuugagucuccaacucugguccugccuccugcaauggu

SEQ ID NO: 4174752 - RNA, 77 nt, Human
acugugguagguccuggggauacagaagugaaucagaaaugguccuucaguuaaagaucucacagccuugcugcagu

SEQ ID NO: 4174753 - RNA, 57 nt, Human
acugugucuaucuaggcuguaaguccccagggcucagcacagggcuggcaucccagu

SEQ ID NO: 4174754 - RNA, 87 nt, Human
acugugugggcugagagcaguguuuuuaaccagucuuacuauccugaggggagugguuuaaccugucucuuauuaacucauagcagu

SEQ ID NO: 4174755 - RNA, 67 nt, Human
acugugugugggaguuagagugugguaaucaaucaguaaguccucaccuggcacauucuaccacagu

SEQ ID NO: 4174756 - RNA, 61 nt, Human
acuguuacaaaguguuaugauaaacauuucuguguauuugugcacuucuguguguuacagu

SEQ ID NO: 4174757 - RNA, 55 nt, Human
acuguuauaguucacuuuucccuuguuuaugaggacuaguguuaucuguagcagu

SEQ ID NO: 4174758 - RNA, 65 nt, Human
acuguuggcuuggcucuaggugccaugucuaucuuuaguaccuagcacagugccaggcacacagu

SEQ ID NO: 4174759 - RNA, 63 nt, Human
acuguugguugugaagguuaagugcaaaguucuuuaagcaggguauuacacacaaugagcagu

SEQ ID NO: 4174760 - RNA, 96 nt, Human
acuguuuccgagaaugagacugucaaguggcaggaauuaagaguuggauuugcagcuccucuagaucugccacuugaauuccauuuuggggggagu

SEQ ID NO: 4174761 - RNA, 67 nt, Human
acuguuugcugauagauauuuaaagguuauuuuuuauuaaugaugggaauaguucuguggcagcagu

SEQ ID NO: 4174762 - RNA, 81 nt, Human
acuguuuuuguuggauguaugcuuuuaugacaauuuccacauaaacuuccaguuacagguauuuuauugagcagagacagu

SEQ ID NO: 4174763 - RNA, 59 nt, Human
acuuaaggaaaauggacaucaaacaguuaauuuguuuaggugccuguuuucuugaaagu

SEQ ID NO: 4174764 - RNA, 67 nt, Human
acuuaagugaguuauuugaaaugccucuagacaacugugaccagaaggcuaaaguaacuuaguaggu

SEQ ID NO: 4174765 - RNA, 84 nt, Human
acuuaauacaagaaacuacaugaaugcauaauuaagauauucauuagucugucuuguaucugauguggauuuuuugcauuaagu

SEQ ID NO: 4174766 - RNA, 112 nt, Human
acuuaauuuuauuaauucaagaaaguuugcucuguuuuccguaugugccagaaaugaucaugguucauugagaagacugaagggaacuuugcugaauaaaccuuuauuaagu

SEQ ID NO: 4174767 - RNA, 94 nt, Human
acuuacaauaggauuaaguuuggauaaacucacuguaaguugaaagugaauuuucaacuuacaauagguuuauggggacaacacugucauaagu

SEQ ID NO: 4174768 - RNA, 65 nt, Human
acuuaccuggaacuuggucauuuuuccccuccuccuucugggaaaaggcagaguuccggggaagu

SEQ ID NO: 4174769 - RNA, 66 nt, Human
acuuagagugcuuuauuagauguagcuuggagauuauagggugccacuaaagaaccacucccaagu

SEQ ID NO: 4174770 - RNA, 71 nt, Human
acuuagaugagcaguagguucauggcugauauuuuaguccuguauauuagaaugaggcuguuucucuaagu

SEQ ID NO: 4174771 - RNA, 91 nt, Human
acuuagugaacuuagugcacuuagugcucuaaguuuaccaaguuuaccauuuauuguacuuaguguacuuagugcucuaaguuuaccaagu

SEQ ID NO: 4174772 - RNA, 72 nt, Human
acuucaagaguuaugaaagcaaggcauuuucaaaaaucaaaagaaaaugaggcuauuucauagauuuuaagu

SEQ ID NO: 4174773 - RNA, 77 nt, Human
acuucaagauuuuccucgcucugcucugcaggucucuccuuuuucuggggguuaagugaggacaaguucuuugaggu

SEQ ID NO: 4174774 - RNA, 64 nt, Human
agagugguucuugaucuguagaguugaugugagucuuacaugagaaagaaccugcaaaagcucu

SEQ ID NO: 4174775 - RNA, 67 nt, Human
agaguuagagccauagagcacggguuaugucuccccuacuucuguaaccccuuuagucucuaacuuu

SEQ ID NO: 4174776 - RNA, 55 nt, Human
agaguuaucacuccaugcagcucucuccucucugaugcuguacccugaaaacucu

SEQ ID NO: 4174777 - RNA, 61 nt, Human
agaguugaaagugccaaguccuagugguuuugagaagccucuggucugcucuuucugcucu

SEQ ID NO: 4174778 - RNA, 78 nt, Human
agaguugaaaugauccugaguuccugccucuaaaugacaaauguauuuauaugaaagugaccaguggacaucaacucu

SEQ ID NO: 4174779 - RNA, 58 nt, Human
agaguuggggcaccaccguguuccuuguaguacaaagcaccugugauuuccuagcucu

SEQ ID NO: 4174780 - RNA, 79 nt, Human
agaguuuaaagcauacauauuuucucaagggauguuaggaagauucaagaaaugaucuaugugaacugcuuuaagcucu

SEQ ID NO: 4174781 - RNA, 57 nt, Human
agaguuuauggauuagaguuugauucuuuuaugaggcucagcaucugauucauaucu

SEQ ID NO: 4174782 - RNA, 71 nt, Human
agaguuucagaccuagacaucaaggcaucaagaggccaugaggcuucuguuuucauuugucuugagacucu

SEQ ID NO: 4174783 - RNA, 56 nt, Human
agaguuuuaugccauaaaacuggauacguuuauucuguaagaugggauaagacuuu

SEQ ID NO: 4174784 - RNA, 55 nt, Human
agauaaaaguauguguacacuugaaauuucuacaaagugcauauacugccuaucu

SEQ ID NO: 4174785 - RNA, 76 nt, Human
agauaaaaugguucaaaggcuauuuucaccaccuacuagacaaggugguuauuaacggccuuuguuccuuuugucu

SEQ ID NO: 4174786 - RNA, 97 nt, Human
agauaaaggauagaguccagagaauuuuagacaaaaaucacucuguuaauucuauuaugguaauauuuaagucugaauuccugguuugacuuuugcu

SEQ ID NO: 4174787 - RNA, 59 nt, Human
agauaacauuuauugaauguaacuagugugcuuggcauguuacagaaaugauguuauuu

SEQ ID NO: 4174788 - RNA, 71 nt, Human
agauaacugugugucaugcauuacuuccacccacaucccaauggcuaaaaugcaugugcauggcucuaucu

SEQ ID NO: 4174789 - RNA, 56 nt, Human
agauaaguaguaaguauguaugccuugaagccaucaggcugugacuuacacuaucu

SEQ ID NO: 4174790 - RNA, 95 nt, Human
agauaaucuccuugucagggauucauugaagcccuugacaagccuuccuuguaguuaggcuuuuauccauuucaguuuucuugauuagguuaucu

SEQ ID NO: 4174791 - RNA, 63 nt, Human
agauacaaaagauaagauuuagcaguuuauucuuugguagguuguaagaggucuuuuguuucu

SEQ ID NO: 4174792 - RNA, 66 nt, Human
agauacauggaacgucaaaccugggcccuucucccaaugccccuggaauugauuacucuauggucu

SEQ ID NO: 4174793 - RNA, 78 nt, Human
agauagccauaugucuacugcuuucuguaaggacagucacguuugcacagagacaggcagacagucuugauggcaucu

SEQ ID NO: 4174794 - RNA, 112 nt, Human
agauagggagagagauugaucacaaaguuguaauucaaucuguagauugugauguuuaugauaucaucaguaucaugagauuaaauuacaaguugcaaucuaucuuccuucu

SEQ ID NO: 4174795 - RNA, 69 nt, Human
agauauaaauuucaugguccaacuaguaagcacccuauuuugcuuuuaaggaaugugcaguuuauauuu

SEQ ID NO: 4174796 - RNA, 58 nt, Human
agauauagcugagggguauuauaauuuagcagaaauuuaaucuuccuacagcugaucu

SEQ ID NO: 4174797 - RNA, 58 nt, Human
agauauaguuguugagaagaacugggaugccccccagauuuucuuaaauuuuauuucu

SEQ ID NO: 4174798 - RNA, 58 nt, Human
agauaucaccaguuuuacauacacuuguguguguguguguguguguguguguguauuu

SEQ ID NO: 4174799 - RNA, 95 nt, Human
agauaugaaguuucguuaauaguauuuuuccaaaguuaauuuccuaguauuaggggaaaaugagugaagaguauauuuagugaaaucucuguacu

SEQ ID NO: 4174800 - RNA, 80 nt, Human
agauaugaugauaaaguauuuggcacuugggucaacaaucuaguuuauucaguaguucagcaaauauuuuaaauauaucu

SEQ ID NO: 4174801 - RNA, 84 nt, Human
agauaugggccuagaggucgauaucugggccuggaguggagauaugggccaggaguggagauaugggccuagaggucgauaucu

SEQ ID NO: 4174802 - RNA, 56 nt, Human
agauauguuacugcaucaugggguuaaacaauuuccagaaaacaguaagaaugucu

SEQ ID NO: 4174803 - RNA, 55 nt, Human
agauauuucacugaaucuaucucucuaagguugagaguaggcaaaggaaagaucu

SEQ ID NO: 4174804 - RNA, 88 nt, Human
agaucaaugacuauuuuauuugcucaacccugccuccaguccauggcuguggccuccaucaugaaguagcuggaaugauuaaugaucu

SEQ ID NO: 4174805 - RNA, 102 nt, Human
agaucacaauguauucaguuuggcaggagagcagggcacuugugggaaggagucagagguguccuugcaguuugaagaaagaaguuugagaaauugugaucu

SEQ ID NO: 4174806 - RNA, 71 nt, Human
agaucacuugaccuguaauaugucaugccugugguggaauauaaggcucugugaccuuaggcaaguuguuu

SEQ ID NO: 4174807 - RNA, 84 nt, Human
agaucagagcuguuaagagggagugacaggugguguaugcauccccaggcccugacucacuaaauucuaaauggcacuuacucu

SEQ ID NO: 4174808 - RNA, 90 nt, Human
agaucagcaacgccaggcugacucccccggccuuaucuucuuggccugcccauuggcccaggugggggacucaacugcgcugcugcuucu

SEQ ID NO: 4174809 - RNA, 95 nt, Human
agaucauaggggcaaaaugggagugcaggaguaggagagggcuuucugggaaagauacuuauuuuaauuuugcaugcauugaguuuuugagguuu

SEQ ID NO: 4174810 - RNA, 81 nt, Human
agaucauuuauuaugucaauuuauugacuuugguguuccuagaauaugaaaguaguauaaaauucaugugagggaagaucu

SEQ ID NO: 4174811 - RNA, 97 nt, Human
agauccaccaccacuuauugaaaagcccguccuuucuccacuguucugcaauaucaacuuugucauaauaaaccaggaugggucuguuucuggauuu

SEQ ID NO: 4174812 - RNA, 74 nt, Human
agauccaucaucauauuuucuauauggcauauagucaaaugcauuaucacuccuggaagauguguggugggucu

SEQ ID NO: 4174813 - RNA, 63 nt, Human
agaucccaggauacuggccuauaaugcugagaaaggaaauagugucagagaaucuugguuuuu

SEQ ID NO: 4174814 - RNA, 73 nt, Human
agaucccaucgugaaugugauuuaacugugaugauuaauuuaacuugcaguuuucuuguuauauuugggagcu

SEQ ID NO: 4174815 - RNA, 98 nt, Human
agauccuucacugcacuccuaagagcugagccucguauucaaaucugaaugaaucagguucugauucagucucuucaggagaauugucugagagaucu

SEQ ID NO: 4174816 - RNA, 81 nt, Human
agaucgaucagcaaauagaugggccuccccguauucugaauuacaguguguguuugggcgguuuauugacaguugauaacu

SEQ ID NO: 4174817 - RNA, 99 nt, Human
agaucuucaaaaacacuuccaugaacuuucuuuacaguuuugugcuauucucuuucuaaauuugccaauuguaugugguaagguugauggugaggauuu

SEQ ID NO: 4174818 - RNA, 69 nt, Human
agaugaauuguuauggcuacgagaggcauaaagacuuacagaaaauuguccuguagauagcauucguuu

SEQ ID NO: 4174819 - RNA, 76 nt, Human
agaugagaaaaucguuagcauuuugcuauugcaguauuuugacaccagcagcagcaacaauagcggucacucguuu

SEQ ID NO: 4174820 - RNA, 70 nt, Human
agaugagucaacaaauacuuaaagcagagagcuuaguuccuguuccuauggauauuuguuuuucucauuu

SEQ ID NO: 4174821 - RNA, 63 nt, Human
agaugauauacuacauggcuucaaagaaguuuccuaucuauuggcuucaaagugugaucaucu

SEQ ID NO: 4174822 - RNA, 62 nt, Human
agaugauuaugauagcacuguucuaggcacuuuauaugaagaagguacuauuauugucaucu

SEQ ID NO: 4174823 - RNA, 76 nt, Human
agaugcaacacucuuuccuuguuauuauuuguccugauauguaggcaauuaucaaauuaggcaaguuuguuguucu

SEQ ID NO: 4174824 - RNA, 77 nt, Human
agaugcagaaaaacuaagugauuucucuaagaugacauggccacccggagauucuauccucaguguuucugacaucu

SEQ ID NO: 4174825 - RNA, 78 nt, Human
agaugccaucaagacugucugccugucucugugcaaacgugacuguccuuacagaaagcaguagacauauggcuaucu

SEQ ID NO: 4174826 - RNA, 83 nt, Human
agaugccuucuuuccagcaggaauuacucugacagcggggcuggugucaucaagaguaauuucugcugaaaagguuccaaucu

SEQ ID NO: 4174827 - RNA, 58 nt, Human
agaugcuaagaucauaguuuaaaauccauagcuuugggcugccucuuucuuagugucu

SEQ ID NO: 4174828 - RNA, 57 nt, Human
agaugcucacccugggcugaugagucacucuggcuuccaguccaggcugcagcaucu

SEQ ID NO: 4174829 - RNA, 92 nt, Human
agaugcuugggcaguaaucagauggcagucaaccaggugaggagguaacagaucuucaaugaaauuccaucagaaaaauugcuugaucauuu

SEQ ID NO: 4174830 - RNA, 70 nt, Human
agauggaagagaguuguuucugugcagugacaugcuagauucacaugacagacagcuucucauuuuauuu

SEQ ID NO: 4174831 - RNA, 79 nt, Human
agauggaggacuguagguaaaagcaucuaguguaugauggccauagcagauguucgauagcuuaauuacuccucccucu

SEQ ID NO: 4174832 - RNA, 68 nt, Human
agauggaugaguguugacagccaagccuaugcccaauacaaaggcuccuucacagcacucgcccaucu

SEQ ID NO: 4174833 - RNA, 87 nt, Human
agauggauuaauuuaguggaguauuccagucugauggguacuuucucaauccguuuauuuugaagauuccacugauuucugaccucu

SEQ ID NO: 4174834 - RNA, 75 nt, Human
agauggcacgaggggcuggguagggcaacccccuucauaaaguggagguugacauucaguuccuugccaccauuu

SEQ ID NO: 4174835 - RNA, 77 nt, Human
agauggccaccaagugcaaauucugaauucuuauauuuuuauaagaggaguagaugugguugguaaaagguuaugcu

SEQ ID NO: 4174836 - RNA, 83 nt, Human
agauggcccagaaaugccacugacaagcaugaaauacauuaaaccaaugcaucuuuucauagcagucccuuucugggucguuu

SEQ ID NO: 4174837 - RNA, 92 nt, Human
agauggccuuucuaacuugguuaaguguucauuccauuugaaucugauaggaaugaaacucuaacuuaacaaguuuuggagaaauaacaucu

SEQ ID NO: 4174838 - RNA, 62 nt, Human
agaugggguuccucaguuuagauuuuguguauaugacacuaucuaaaaggagcucuuuaucu

SEQ ID NO: 4174839 - RNA, 60 nt, Human
agaugggguuucacuguguuggucaggccggucucaaacuccugaccucgugauccaucu

SEQ ID NO: 4174840 - RNA, 69 nt, Human
agaugguaagggauuugaacauagguuaauccauugcuguuaggaucaagaccagaucccuuaccagcu

SEQ ID NO: 4174841 - RNA, 64 nt, Human
agaugguagguaacacauggaacauuuacauguuuauguaaaugaaguaugcuuuacuuuaucu

SEQ ID NO: 4174842 - RNA, 78 nt, Human
agauggugcugacugaggauggcuuggcaggguuacucccugggcuuuaccuggucccugaguaguuaugcagcaucu

SEQ ID NO: 4174843 - RNA, 56 nt, Human
agauguaaacucucaugucauuggccaccuaaagccaaacacagaguauuggaucu

SEQ ID NO: 4174844 - RNA, 63 nt, Human
acuuugaaagccuuggccccggcuuaucauuuuuuccauucuuaggccaaggcuauuuguagu

SEQ ID NO: 4174845 - RNA, 84 nt, Human
acuuugaaauggaagugaaaauucuaccuuguaagauaaaagagauuaggaugaggagauguuuucuaauucuauauuuuuagu

SEQ ID NO: 4174846 - RNA, 58 nt, Human
acuuugaacuggggaaguguucaaagacuagcaaugguuugggcaucauucacaaagu

SEQ ID NO: 4174847 - RNA, 127 nt, Human
acuuugcaucuagaaucaccuggagagcugaugaagaaugcggagucccaggcuccuggaggugggaggggccugggccuuuguguuuugaccaagugccccaggugauucuguuaaagaucagagu

SEQ ID NO: 4174848 - RNA, 57 nt, Human
acuuugcccuacagcagcucugccuccccauguaugcugcugagguggaggcaaagu

SEQ ID NO: 4174849 - RNA, 56 nt, Human
acuuugccuacaagcccauggucaguuaauagaagaccugggcuugaaagcaaggu

SEQ ID NO: 4174850 - RNA, 75 nt, Human
acuuugcuuccaaauguucauuugacaaguagugaugcauugaauauccuuguacaugugagcaugcaguaaagu

SEQ ID NO: 4174851 - RNA, 82 nt, Human
acuuuggaauugaugccuggggccugucaccagaaauuaauuggugccagugggucucaggauauuuaaaaguuccccaagu

SEQ ID NO: 4174852 - RNA, 69 nt, Human
acuuugggggaagaauuaaaacaagaauggcauuucuuuuucuucauguaacuuuucuucuccauaggu

SEQ ID NO: 4174853 - RNA, 80 nt, Human
acuuuguaaaugauuagaauaugucagucauaaucaugccaagagauuauggauuuaugcauauuuuguuuugcuguagu

SEQ ID NO: 4174854 - RNA, 84 nt, Human
acuuuuaaauuauaaaauucucuacugugcuaaauuucggagggaaaugaagcagcaaaagagaauaguuuguggucaaagagu

SEQ ID NO: 4174855 - RNA, 87 nt, Human
acuuuuaugcuggccauguugccucugagacuauuauaagcuuucauauaguaaggaaaauggcagaaugguuauugaauagacagu

SEQ ID NO: 4174856 - RNA, 104 nt, Human
acuuuucagguacuccauauuaaaugaucaaaaagagagaaauauauugcagcaguucucaacagcaagaugguuuugucuuuaugauucuguagccugauugu

SEQ ID NO: 4174857 - RNA, 115 nt, Human
acuuuucauuaacuuaaaagacgaacacagguggcagaguauggugauuauaugcugucccucauaagcucacauucaaaucugccuucuaucuuuugucuguguuaaugauugu

SEQ ID NO: 4174858 - RNA, 87 nt, Human
acuuuugcaauuuuuuuucaaaguuuuggggucuugcaaacacauugcuacagcuccugccagggccuuggaagaaaccuuagaagu

SEQ ID NO: 4174859 - RNA, 55 nt, Human
acuuuugccuuaaacagauggggucugucggaucccauaauuuuguuucagaagu

SEQ ID NO: 4174860 - RNA, 119 nt, Human
acuuuuuaaaaauuacucuauauaaggauauugguuaauuuugguugguguauuuuuauaauauacacagccauuaugaauuagguuuauuuucaguaguaguuauugauguggaaagu

SEQ ID NO: 4174861 - RNA, 67 nt, Human
acuuuuuauaugaaggauagugcguuugaacuggagcaguacacaagcuuucauguauucagagagu

SEQ ID NO: 4174862 - RNA, 71 nt, Human
acuuuuucucauacaucucauaagagcagugguguugcugaggccugauugagauaguauauggaaagagu

SEQ ID NO: 4174863 - RNA, 63 nt, Human
acuuuuucugcaguguuaacaaugucaucuucauuggugguaucguguuggcacucaguaagu

SEQ ID NO: 4174864 - RNA, 55 nt, Human
acuuuuuuucauguuaagagcaagaaggcuuuuguucuuggagcaggcagagagu

SEQ ID NO: 4174865 - RNA, 79 nt, Human
agaaaaacauaauuucuguaucagcaccaugcgcuaaccaauugcgccacuggagcuccacuggaaaaauguaauuucu

SEQ ID NO: 4174866 - RNA, 78 nt, Human
agaaaacaggcaaggaggcacugagggagaaagacacagacuuuaucgcucuguggcucauuguuacuggaauauucu

SEQ ID NO: 4174867 - RNA, 117 nt, Human
agaaaacuaucaauaguugagagagcuaaaguggaagucguguuuuaaggauucauagaguagagguguggagaaacaggcuuccauuagagcaaaacaagugauuuaaauguuucu

SEQ ID NO: 4174868 - RNA, 59 nt, Human
agaaaaggaaccaguaguaagcuuuaugagauagcuuaacaaagcucuguuccuuuucu

SEQ ID NO: 4174869 - RNA, 63 nt, Human
agaaaaggcagauuuugaggcuaccccagaaauccugcagcaggcccaggaauuugcauuucu

SEQ ID NO: 4174870 - RNA, 130 nt, Human
agaaaaguauuagaugaugcugacaacugcugaguuuccaaaucuugcagauauuuggguaguauaaaucuggagaaguuuguacauucaaaugucccaucuucaggcaggcauuguacaauauuuuugu

SEQ ID NO: 4174871 - RNA, 60 nt, Human
agaaaaguuuaaaucuuggcacucucuucucuuugagaaugcagagauuuuuacuugucu

SEQ ID NO: 4174872 - RNA, 91 nt, Human
agaaaauaguagauugaucucauauaaaggccauuuggauguagacugggcuccagaugugauacgaucaggguuucugcuuaggguuucu

SEQ ID NO: 4174873 - RNA, 86 nt, Human
agaaaaucaagaugagcugugauuaauaaguagggccugauuauuggaacuuggcauuggauauaauuaaguugaucagaauuucu

SEQ ID NO: 4174874 - RNA, 63 nt, Human
agaaaaucauguuggcacaauaaaaccacucuugguguuuguuuuuccaauauguaugccucu

SEQ ID NO: 4174875 - RNA, 130 nt, Human
agaaaaugaaauuuuccugguaaagauggaggaaaaagaaaugcuggcuuguugagaaaaugaagcuuccaagaguagcaaauucuuuuaucuccuuguucaugcuuuuccuuuguucaguaaaauauuu

SEQ ID NO: 4174876 - RNA, 92 nt, Human
agaaaaugugacagaguucucagaccucuggauagaugugaggagcauuuuucaguuuagacuaaagguagagguuucucuaguccaaaucu

SEQ ID NO: 4174877 - RNA, 100 nt, Human
agaaaauuguuuuguuaagaggaaggcaguuaauuuggcuagaauccaaaaacucauucagcauggcuguuuucccuuauuucaaaugaaaaacuuuucu

SEQ ID NO: 4174878 - RNA, 114 nt, Human
agaaacaaacaaaaagaaaugaagaaagguagagagaaggaggaagauaggcugguacgucaauauuucacuauucucuguaacuacuuuucuugaaaaucuuucuaaguaucu

SEQ ID NO: 4174879 - RNA, 89 nt, Human
agaaacagaagaguggguuugcauggaagacagugaguucaguuuggaauucauugagcacuuacuauguauaguccaagaacugcucu

SEQ ID NO: 4174880 - RNA, 58 nt, Human
agaaacagcauuagcaucaauugugagcuagcuuuucaucgggugcaagcugcuuucu

SEQ ID NO: 4174881 - RNA, 80 nt, Human
agaaaccaaagacauuauuauuggugaguuaaggaaagguaacuuuggaaguuaucauauaauucuggccuaugguuucu

SEQ ID NO: 4174882 - RNA, 67 nt, Human
agaaaccaaggucauugcaccucccuguaggggccccuacaaggaggcuaaugaugacacagguucu

SEQ ID NO: 4174883 - RNA, 64 nt, Human
agaaaccaggcccauuuucagccagucugaggaggaaagaggucccugaagaggccugggguuu

SEQ ID NO: 4174884 - RNA, 119 nt, Human
agaaaccuuagccagcuaacucacuacugggguggcauagggugauggcuuaggguguucuaacaggcauuuucacugaugucauccuacagagcaguauagaaaggacuaauguuucu

SEQ ID NO: 4174885 - RNA, 64 nt, Human
agaaacuacuuggaggaaagauaacagggauguaaucuuggaguuuuuccucguaagaggaucu

SEQ ID NO: 4174886 - RNA, 75 nt, Human
agaaacucagaggggacuggugugguacaaagggcaugaguucagagccauaaaaccggguucccucacuuuucu

SEQ ID NO: 4174887 - RNA, 91 nt, Human
agaaacucaguuugauaguaauguguuuaaaugucaaguaauucuuauugccuauggccugguuauauugcuaucauuuguacauuuaucu

SEQ ID NO: 4174888 - RNA, 57 nt, Human
agaaacugaaguaggaauucuaugcugcaaucuugaggcagaauugcugcuucuucu

SEQ ID NO: 4174889 - RNA, 103 nt, Human
agaaacugggaagugucaucuaguccacuguccugccuccagagagaaauuuaucuucaucaugugagacaggugguucauuagauaaaacacucuagcuucu

SEQ ID NO: 4174890 - RNA, 64 nt, Human
agaaagaacagacuuuuagguuuuuaacucccaaucguagaaucugaaaguggcugugaguucu

SEQ ID NO: 4174891 - RNA, 70 nt, Human
agaaagaggagcaggagucucuugaauuuggucuuauaaaauucaauuaacuuucaugcuuacucucucu

SEQ ID NO: 4174892 - RNA, 72 nt, Human
agaaagaggcacuggguuuucuucaucauucaaucaaucucuagaggcagcuuucagugucucucaaauucu

SEQ ID NO: 4174893 - RNA, 98 nt, Human
agaaagaguuucgcucuuguugacuaggcuggagugcaaugaugggaucucggcucacugcaaccucugccugccagauucaagugauucuccuuucu

SEQ ID NO: 4174894 - RNA, 77 nt, Human
agaaagcaggaaguuucuggugaggacgaggugagagaucuuacagcuuuuggcuagccaagaaacaaaaugcuucu

SEQ ID NO: 4174895 - RNA, 79 nt, Human
agaaagccuuccagcuugggaguuugguuuuauccaacaaagauacaaucaaccacuugcgagcucccgaaauauuucu

SEQ ID NO: 4174896 - RNA, 117 nt, Human
agaaagcucaauaucauauucauuguauagaggauuucagagcagauauugaaggguggguuuggaacagacccuucaugcucuaacuccucaggccuguaagacugugggcguucu

SEQ ID NO: 4174897 - RNA, 66 nt, Human
agaaaggagagaaugagagugucgagugggccuugaccucauucacaaagcugguuccuucugucu

SEQ ID NO: 4174898 - RNA, 57 nt, Human
agaaaggaggaagaaugaccucaugcugaaaaggaaccuucaaucuuucuucuuuuu

SEQ ID NO: 4174899 - RNA, 102 nt, Human
agaaaggaucauuugaucucucucaggaauagaguggcagcaguuuaugcucuauucucugaagugcugccuuuaauuuaugauagaauuagaaugcuuucu

SEQ ID NO: 4174900 - RNA, 57 nt, Human
agaaaggugaaauggcuuauucacauuuucauaguaggcuaggaaucaagccuuucu

SEQ ID NO: 4174901 - RNA, 55 nt, Human
agaaagguggaugcucuggaauuaccucugugcuuucagagcaguuggcuugucu

SEQ ID NO: 4174902 - RNA, 58 nt, Human
agaaagucauauuacccuggggccagaacucaaucaguggaaucaggugugacuuuuu

SEQ ID NO: 4174903 - RNA, 63 nt, Human
agaaagucuguccuuauuccucauucucccccaaaaaccccagugaggaggcuucagcuuucu

SEQ ID NO: 4174904 - RNA, 55 nt, Human
agaaagugauauaguuggaauccuacaguacaugggcuuuucagauucacuuucu

SEQ ID NO: 4174905 - RNA, 63 nt, Human
agaaagugguggggaguucuaacugugaauaacgcuugaagaucuaaacccuacuuucuuucu

SEQ ID NO: 4174906 - RNA, 74 nt, Human
agaaauacaauguuuguuagagcucuagagaugcuucugauucuucuggaugcauaacaugacauuucucaucu

SEQ ID NO: 4174907 - RNA, 67 nt, Human
agaaauacuuacacagagccucagacaaaccuguaaugacagaugaauuugucuguuaaguguuucu

SEQ ID NO: 4174908 - RNA, 114 nt, Human
agaaauagcuauaaaaacaaagguuuuggcaggcuuauggggagacagagucagaguucagggccuuucaaagauauguggucugauaaccucccaaaccuuugagcuuguucu

SEQ ID NO: 4174909 - RNA, 109 nt, Human
agaaauauagagcuuuucaguucucaugagcaaggugguuuuuauuacucccuuagauagcuuucacuauguucggagaacucugauuauuugaacaguuuuuuuuuuu

SEQ ID NO: 4174910 - RNA, 80 nt, Human
acuucagagaaagagggaauucuuauaucugucucuuccuaauuccauugacauggauugaacccuuccuucucucaagu

SEQ ID NO: 4174911 - RNA, 79 nt, Human
acuucagugucuucuaguuuucauauguuccuuugaaugaaugaagcaagacaucugaauauuagagagaaccuggagu

SEQ ID NO: 4174912 - RNA, 74 nt, Human
acuucaguuuucuaaugcuucugauuugggaacacugggaacuuguuuucaaguuacauuagaaaucaugcagu

SEQ ID NO: 4174913 - RNA, 56 nt, Human
acuucauguugcucuuggcuaucgcuggggaaaggcuugagccaggcauaugaagu

SEQ ID NO: 4174914 - RNA, 61 nt, Human
acuuccagcugauuggcauccaggaugggcaccuaucacugcuccaggacagcauggaggu

SEQ ID NO: 4174915 - RNA, 59 nt, Human
acuuccagugucugcugcuagcauauccagcaggugaacuagauacaacaacuggaagu

SEQ ID NO: 4174916 - RNA, 56 nt, Human
acuucccaagcugcagagcuggaccaugaugaaucugagcuacagcauggcgaggu

SEQ ID NO: 4174917 - RNA, 73 nt, Human
acuuccugaauggggcuaauuacuagaaagaguggccucuggugaguugauuguguccggucucucaggaagu

SEQ ID NO: 4174918 - RNA, 70 nt, Human
acuuccugcguguuugcacccugucuguuugaacguuuauauuuagaauucucaaacaugcccagggagu

SEQ ID NO: 4174919 - RNA, 127 nt, Human
acuuccuuagggccuaauguuccuuaucugaacaaugguaaauguaacagcauucuauuuguagaaauggcgaagugagugugauauguuugucauuguuaggaaaagucaucaguaccuaggaagu

SEQ ID NO: 4174920 - RNA, 102 nt, Human
acuucgcaccugaaucccacaugcugaccuuugguagccaccuuugauguauucuguagaggugagccaucaaggggcaguguggcagagcagagcagaagu

SEQ ID NO: 4174921 - RNA, 55 nt, Human
acuucguccuggaaaguuaaucacauuuucagugauuaacuuguagauaugaagu

SEQ ID NO: 4174922 - RNA, 95 nt, Human
acuucgugauuccagggccuagagcuuucugcugguguugaucuuuaaugacaaaugcagccuggacagaagcuuuugguuauggagcacugagu

SEQ ID NO: 4174923 - RNA, 57 nt, Human
acuucuaugcacagagcuuggaaacagacacauguuccaagggcuuuggcgugaagu

SEQ ID NO: 4174924 - RNA, 58 nt, Human
acuucucuuccccggaacucuagcaacucaacuggaaacaugcaccagggaagagagu

SEQ ID NO: 4174925 - RNA, 59 nt, Human
acuucugagaaauuuaaggacaguaacauaaugucuuuaaaaccagugucucaagaagu

SEQ ID NO: 4174926 - RNA, 80 nt, Human
acuucugagucuucaggggagguugaaucgucuccagcccagcacgagaccccagcucagccuccagaacaucaugaagu

SEQ ID NO: 4174927 - RNA, 71 nt, Human
acuucugauggugagauccuuuuccuuaagaaaugauauucuccaaguugauguuucuuaaaucaagaagu

SEQ ID NO: 4174928 - RNA, 81 nt, Human
acuucuuucaaugugaaaccauguaaagauggagucagcagguaguugagacauacauggcuuauauauugaauaguaagu

SEQ ID NO: 4174929 - RNA, 69 nt, Human
acuucuuugcagcuaggacucuguacaugaucuagcuucugcuuggcacaguccuagcugcaaagaagu

SEQ ID NO: 4174930 - RNA, 69 nt, Human
acuucuuugcagcuaggacugugccaagcagaagcuagaucauguacagaguccuagcugcaaagaagu

SEQ ID NO: 4174931 - RNA, 79 nt, Human
acuucuuuuaggauuguuuuccuucuucauuguguuacagcugcuucaguacaaaaggaagagggaucuuagagguugu

SEQ ID NO: 4174932 - RNA, 56 nt, Human
acuugaaaagcucagcaguaguggugaaaaaaugauaaugagcuggcauuucaggu

SEQ ID NO: 4174933 - RNA, 60 nt, Human
acuugaauaggaaagccacaaaccacuaaucaggguaucucagguuugaccuauucaagu

SEQ ID NO: 4174934 - RNA, 60 nt, Human
acuugauggaguuucacuguauuauguucaugaugggccccagugaacuccauaucaggu

SEQ ID NO: 4174935 - RNA, 73 nt, Human
acuugccuagguguauauuaaauggauucaauacagaaaauaguuauuuaauauauuaugugccugguauggu

SEQ ID NO: 4174936 - RNA, 100 nt, Human
acuugcuucgaauaccaccucuucacaaagcucucuuuauguguuuuguggcacuggggagugguuuugggaaguggguaaugaauguauucacguaugu

SEQ ID NO: 4174937 - RNA, 65 nt, Human
acuuggaaauuaacuugguacauauccuuuccacucugggaaguguucaaguugauuaucucugu

SEQ ID NO: 4174938 - RNA, 87 nt, Human
acuuggaaugccagaaaagaguuccaagucauuuuaugcaaugagaauguauggaagauuuuugagcucauucucuacuuccucagu

SEQ ID NO: 4174939 - RNA, 68 nt, Human
acuuggccagugugaccaucuguuagcucgcagccaugguagcuugauuccuggucaaacuuccaagu

SEQ ID NO: 4174940 - RNA, 61 nt, Human
acuuggcugcuuuugugcacauuucaaauguuuuugaucaaaugcguaugcaguccaaugu

SEQ ID NO: 4174941 - RNA, 129 nt, Human
acuuggucaugggucugugaucuccauucucacuguugacugggcugccugguucuucuaccagaugucugguggagggcaggagcucaggaaauaagugugagugggaugcacauguaacugaagagu

SEQ ID NO: 4174942 - RNA, 55 nt, Human
acuugguuucaaaugagugguaagauuuuacuuaccuuaaacuuuacagccaagu

SEQ ID NO: 4174943 - RNA, 79 nt, Human
acuugguuuuucaucuguacaacaaagggaugagacacauaucugucucauuuuucagguacaguuuuaaaaaucaagu

SEQ ID NO: 4174944 - RNA, 58 nt, Human
acuuguauggagacuuggaaccugauucuuuuuuggaaugaccaaaucucuuauaagu

SEQ ID NO: 4174945 - RNA, 67 nt, Human
acuugucacauucaugcagaaucaaaaugaugcuucuuugguccucucucugugugugugugugugu

SEQ ID NO: 4174946 - RNA, 66 nt, Human
acuugucgacaggggcaguagucucguagaguguuucacuuuccagauuuguccaguuauucaggu

SEQ ID NO: 4174947 - RNA, 123 nt, Human
acuugucguuuccuauguuuucuagcuugauugcuuaugguauauauucaguaaauguuugcuuaaugaacagauacacauaggcauauuuuggaaaaggacuuagaggaaccuagaccaagu

SEQ ID NO: 4174948 - RNA, 74 nt, Human
acuuguuucaugagggcugaugcuuacuuauuuuuccaaugagggaaaaauaauuuuagcccuuauaaucuggu

SEQ ID NO: 4174949 - RNA, 78 nt, Human
acuuuaauagaauuacgaucauuucuaaaauaaaguaauugugaucacuauaugcuaaggaggucguagucuaaaggu

SEQ ID NO: 4174950 - RNA, 56 nt, Human
acuuuacuucucaaaauaaagcaggcuugccuagaucugcuugaguaaaguaaagu

SEQ ID NO: 4174951 - RNA, 77 nt, Human
acuuuauaaggaauugugaaugccugucagucuuuucuccuauugcaagaaggcugaccaguuuacacuuuauuagu

SEQ ID NO: 4174952 - RNA, 67 nt, Human
acuuuauguuuguguauaauacacauaucagaaauucaagacguguguguguuuauaaaucuaaagu

SEQ ID NO: 4174953 - RNA, 76 nt, Human
acuuuauucauaaucaccaaaaacuggaagcaacccaaauguccuucaguuggugaauagaaaaacaaacugaggu

SEQ ID NO: 4174954 - RNA, 59 nt, Human
acuuucacaguccugacugagcggccuuggauaagcccucaguuuccacacuguaaagu

SEQ ID NO: 4174955 - RNA, 77 nt, Human
acuuucagcucucuaugcaacaccccuauggauggacauccaauguucaaagccaaugguuguggggaccuggcagu

SEQ ID NO: 4174956 - RNA, 90 nt, Human
acuuucggagacugaggcgggcgaucaccugaggucaggaguucaagaucagccuggccaacaugguaaaaccccgucucuacuaaaagu

SEQ ID NO: 4174957 - RNA, 113 nt, Human
acuuucucauuaccagccauggccaagcaugccuguggccaggcaaugcuuguuuugcauucaggggccacuagagcaagagcuuuuaagcuauggcaaaguaaaagaaaagu

SEQ ID NO: 4174958 - RNA, 57 nt, Human
acuuugagaaaagcauguuuucuguguuaaccuaggaauguauguuuaucucacagu

SEQ ID NO: 4174959 - RNA, 86 nt, Human
acuuugaggauauuaugcuaaguggaauaagccagucacaaaaagauaaauacugcaugauuccacuuauaugaaguaacgagagu

SEQ ID NO: 4174960 - RNA, 112 nt, Human
acuuugaggcuuucucuuuauauuuuauuugauugugaaacauucugcuugcuaaaaugguggcuuagaacuugauagacaguacaaaucagugaagaggaauucucugagu

SEQ ID NO: 4174961 - RNA, 126 nt, Human
acuuugcaaauaagaaacucuguagucaaaaucuuggcaagaaaauacuauuuaauuucuaaagugaaauuugggagcugucaucaguguugucaugccaugauuuuguuagcuacuugagugagu

SEQ ID NO: 4174962 - RNA, 130 nt, Human
acuuuggaaccaccuggagauguuuuaaaaaucucugugcucaggcugaaccccaggccaauuaagucagaaacuuugagggugggcccugggcaucugugcuuuuaaaagcuccccagaugauuccaau

SEQ ID NO: 4174963 - RNA, 66 nt, Human
acuuuggaggguguuguagaugaaaacacaaguuuccuaagcuuuuuacacauaccucuuuaaagu

SEQ ID NO: 4174964 - RNA, 61 nt, Human
acuuuggaggucauagccaagaggccugcaggcuucugggucauucuggcuugccuagagu

SEQ ID NO: 4174965 - RNA, 88 nt, Human
acuuuggcccugcgugggucagcauguggucugagguaacccucaaaugccuccaccacacaucuguccaccugcacggguucaaggu

SEQ ID NO: 4174966 - RNA, 62 nt, Human
acuuuguaacagcugcuuaauagagcggggaaauguuucuguuuuaagcccuguuaggaggu

SEQ ID NO: 4174967 - RNA, 60 nt, Human
acuuugucugcauggaauaauauacucaucuguucagugaguuacauguauagauaaagu

SEQ ID NO: 4174968 - RNA, 127 nt, Human
acuuuuaaauuaaugauguucuuauauguauuauuuuaacuuuuguguuaugugugagugcguguuugccccuacacauuuucaacacugucaagguuaaaaucaaguguugugguuguauaaaggu

SEQ ID NO: 4174969 - RNA, 82 nt, Human
acuuuuagcuucacuugaaggguaucugugaaccagauacacauuuucacaguuacuccuucagaugaaauuuggcuuuggu

SEQ ID NO: 4174970 - RNA, 97 nt, Human
acuuuuucagccucagcuuagucaauuauaaauaggcgauaauaauaucuaccacugccaguuuucugaggauuaaguaugggaaaaauguaaaagu

SEQ ID NO: 4174971 - RNA, 64 nt, Human
acuuuuuuucuccugccucaguucagcucagugauaaauaaggaacugagguuagauaacaggu

SEQ ID NO: 4174972 - RNA, 93 nt, Human
agaaaaacaggccaaagagagucagucugagcaccaggauuuaaaccuagagagccugacucaagagccugacucaucuuucaccaguuuucu

SEQ ID NO: 4174973 - RNA, 92 nt, Human
agaaaagcuugguauugagaggugcauaggaaaccagguuaagauuuaucucuuagggaaugugaaaacaccucucagguuucaguuuuucu

SEQ ID NO: 4174974 - RNA, 57 nt, Human
agaaaaggaucaguuauuuucuuuucuucaauaggaaagaaucaagugauccugucu

SEQ ID NO: 4174975 - RNA, 70 nt, Human
agaaaaggucagaaacacucuucuucugucucccuagagcagaaaugugugaaguguguuuccuuuuucu

SEQ ID NO: 4174976 - RNA, 129 nt, Human
agaaaauaacuuucuguuguuuaaaccacucagucuuagguauuuuguuaugucagcuugucuuagucaguuggggugcuauaaaaaugaucuuacacuggguggcuuaaacaauacaaauguauuucu

SEQ ID NO: 4174977 - RNA, 67 nt, Human
agaccugggacaugcuuggaaucuagaagcuaaucuuuccuaaguuccguuuucgugucagaguucu

SEQ ID NO: 4174978 - RNA, 70 nt, Human
agaccuuucauaaacaguagaagacuagagcucucucccucugucucucucucuguguguguguaucucu

SEQ ID NO: 4174979 - RNA, 122 nt, Human
agacgcaguccuuggcacaugguaagcacuaaauaaagggcagcuauuaucgucaucucaugcaacaacugagaugggcguggcaguccagcuguuugcuuauguugagaggaagaaugucu

SEQ ID NO: 4174980 - RNA, 55 nt, Human
agacgggaacagaggaggcaaagcccaacccagcccugucuccuccccgccgucu

SEQ ID NO: 4174981 - RNA, 125 nt, Human
agacgugacuugaaaugauuucauuugucagcggcuguguaguuugcauuguaaugaagaaagcaaacuuuaccacuucaaauacaaguagauuauguuucguuugaccguuuuuaguacugucu

SEQ ID NO: 4174982 - RNA, 86 nt, Human
agacuauacauugaggauaugcuaaagaauaucagguaacugucuaaaaagauauauaugcaauuuuuuagugcaaugaguauucu

SEQ ID NO: 4174983 - RNA, 125 nt, Human
agacucaccuggggaauuaaaaaaaaaauacauugaugccugggccccaccccagagauucugauagaauuggucuggaguggacccagagcacuaauauuuucaaauguuccucagcugagucu

SEQ ID NO: 4174984 - RNA, 68 nt, Human
agacucagagccccucccaggagccggguggugaggucagccuggcucaaggcgaggacuccaaguuu

SEQ ID NO: 4174985 - RNA, 63 nt, Human
agacucugauucccucaugucauagccagcauggcagggaaggaauguagggauucagcgucu

SEQ ID NO: 4174986 - RNA, 84 nt, Human
agacugaaacauuugauugaugaauuaaauguuagucuuaaaauucaaauugaaacauuugauugaugaaucaaauguuagucu

SEQ ID NO: 4174987 - RNA, 60 nt, Human
agacugaaguaagaaugcagcugagaguaguaauacuuaacguuguuucuucuucgaucu

SEQ ID NO: 4174988 - RNA, 58 nt, Human
agacugcaccuuccaugccugucucuuucauuagagaucagacucugcauugcagucu

SEQ ID NO: 4174989 - RNA, 56 nt, Human
agacugcggcaguuggugggagcuuucaaaggcgcucuugaaaauuguagcaguuu

SEQ ID NO: 4174990 - RNA, 67 nt, Human
agacugcuaagcccagguauagucuggggaaucagaugaccucaacuccuggcuguuaggcacaucu

SEQ ID NO: 4174991 - RNA, 70 nt, Human
agacuggacaagaaagguaggauucaggugcugaaguggcaucaucugauuucucucucucucucuuucu

SEQ ID NO: 4174992 - RNA, 63 nt, Human
agacuggaguucucacacuugccaguugugagauaaagggcaagugguagaacaucugagucu

SEQ ID NO: 4174993 - RNA, 57 nt, Human
agacugggacuggugggaaugugccagcaaugugugcaugaagccgguucccuguuu

SEQ ID NO: 4174994 - RNA, 71 nt, Human
agacuguauuccaaagguuaaugcccauuaauccgaagggaguggugaguaaauuccuuauauaucagucu

SEQ ID NO: 4174995 - RNA, 101 nt, Human
agacuugaggucccuuuagauacaguaaccacauucuauaguuggaugucugugaacuuacauauggagaaagguuaaugaucaaguggucuaaauagucu

SEQ ID NO: 4174996 - RNA, 83 nt, Human
agacuuuugaagaggccagaucaucauagaugggagaaauaaaucucaacacaggcuaaugaauuuggucuacucaucugucu

SEQ ID NO: 4174997 - RNA, 122 nt, Human
agagaaaaaagggaaucucaagccucuguugcaguacuucuuggaaacuggauuaggcacacuguugcuaaucuaguuuccagcaaguacugugacagagguuugagauuccuacuuucccu

SEQ ID NO: 4174998 - RNA, 65 nt, Human
agagaaaacaaauguuucugagagaauucacacuucauuucucucugagguccugugauuucucu

SEQ ID NO: 4174999 - RNA, 89 nt, Human
agagaaaaucuugucuuguauuugaacaaaaugcucucuuaccuuagaguugguauauauuugucuaauugcaaggcaagucaagcucu

SEQ ID NO: 4175000 - RNA, 87 nt, Human
agagaaacgucauuuagagcaggauuuaaggaagcuugaagauaauuucuucaucuguuucucuguaguucugugaguuguuucucu

SEQ ID NO: 4175001 - RNA, 82 nt, Human
agagaaagacugcaagucugggaaaggagaaaguuuauuuuccucucugcuaccucugacuccaguuuugcuuccuauuucu

SEQ ID NO: 4175002 - RNA, 79 nt, Human
agagaaagggcauuuaauauagccuuuauuagucacuuuauuagucacugguaccugucuugaauuuuccaaaggcucu

SEQ ID NO: 4175003 - RNA, 65 nt, Human
agagaacaggcucuggagucagacaacuguguucucaucaacagacucugaugagcccguuuucu

SEQ ID NO: 4175004 - RNA, 89 nt, Human
agagaacuacagagugaaugcagaaaauauugaauuugccaaugggcuuguugcuagguuauuagcauuuacuguuguaguuugacucu

SEQ ID NO: 4175005 - RNA, 91 nt, Human
agagaagaaagacuagaauauugaaaguucuugacauugcauuaaaugagcaauaguugaaggaacuaauguuuuaaagucuccauuguuu

SEQ ID NO: 4175006 - RNA, 72 nt, Human
agagaagaguauuguguguccuguuuauaugaugaaaauaaauuuuucuagggcugccauuugcuuuucucu

SEQ ID NO: 4175007 - RNA, 94 nt, Human
agagaagcaccagcccugggauucucagguguuuccacuuugucaucagcaacaaacaaauuaccauggaauuugggcugagcuggguuuuucu

SEQ ID NO: 4175008 - RNA, 75 nt, Human
agagaagccagcauuugccuacccagagagucagccuccugagucuccacacuggcagaugccuuuggauuuucu

SEQ ID NO: 4175009 - RNA, 73 nt, Human
agagaagcccagugugccagcccugcagaugugagaauggccacacuaagguuggagucacaguguucucucu

SEQ ID NO: 4175010 - RNA, 88 nt, Human
agagaaggaagcaugcaaaauguauuuuauuagcuccucccacacugcgauuuaguggaugaaauacguuaggcgaaucacuucaucu

SEQ ID NO: 4175011 - RNA, 64 nt, Human
agagaaguacuacaguuucucauuaaauguaauaacauucaugacaggauaguagugcagcucu

SEQ ID NO: 4175012 - RNA, 116 nt, Human
agagaagucauaaggggcaugaaccuuugugauguacccugcagugucuuagccugacuuuccuaugacaguaacagucuauuucucagaggucucucagcugcuuugacuuuucu

SEQ ID NO: 4175013 - RNA, 58 nt, Human
agagaauagccuuugagccacugggaaagaaauugcugagaaucacagguuauaaucu

SEQ ID NO: 4175014 - RNA, 77 nt, Human
agagaauauauuggaaggaaauuggggcaguuguucugagugauggaauaucaggugacauuuuccuuccaaucuuu

SEQ ID NO: 4175015 - RNA, 89 nt, Human
agagaauguaaaugaguguggaccagcuaucaaugccagggcagcuccagcugugauggcgggugguuggcacuuauuaacagcacucu

SEQ ID NO: 4175016 - RNA, 105 nt, Human
agagacaaucaaaagugacaaccagcaggacuuagugaaccuuauauuugcacaucacgaaaaguuuuuguugguuuuguuuugcuuguuuguuggauugucuuu

SEQ ID NO: 4175017 - RNA, 56 nt, Human
agagacccauugccggaaucaccuauuuugugguccuguccucagucugggucucu

SEQ ID NO: 4175018 - RNA, 59 nt, Human
agagaccugaaagugugggcgaccuggagcuaccaggccccucagucaucacggucccu

SEQ ID NO: 4175019 - RNA, 64 nt, Human
agagaccuuccugacuccagagcucaaaugcccaaugcaaucccaaggcucuggcagggacucu

SEQ ID NO: 4175020 - RNA, 55 nt, Human
agagacggaaauguguagccugaggucaaaaccucaccuaguacaaucuguuucu

SEQ ID NO: 4175021 - RNA, 128 nt, Human
agagacgggauuucaccauauuggccaggcuggucucaaacucccgaccuugugauccucccgccuuggccucccaaagugcugggauuacaggugugagccaccaugcccggccuguucccauuucu

SEQ ID NO: 4175022 - RNA, 86 nt, Human
agagacuucuggaggaggcugcaacagggaaccagcugaaguccucagcugaaucucaggcauccuuucccuccuagaagcucucu

SEQ ID NO: 4175023 - RNA, 92 nt, Human
agagagaacaugcaaugugauuccauuuauaugaaguucagaaauaagcaaaacuaaucaauguggauggaagucagauagcaguuguuucu

SEQ ID NO: 4175024 - RNA, 59 nt, Human
agagagaaggugguggugaugugucugaaugcggagauugaauaaccaccuuuuucuuu

SEQ ID NO: 4175025 - RNA, 67 nt, Human
agagagacaagccaacagcacagcuggacgccccacucgcaauuuguucagcucaguuugauucucu

SEQ ID NO: 4175026 - RNA, 66 nt, Human
agagagacagugagaaugaguugaaaaagcacaugauuuuuuuaagucccaguccugucacuuucu

SEQ ID NO: 4175027 - RNA, 70 nt, Human
agagagagaagugguuuuccagaguggcaagaggacacggucccagugcccuggugaagugcucuccucu

SEQ ID NO: 4175028 - RNA, 81 nt, Human
agagagagagagaaauauauuuaaauccagguugaaauuuguggaaaaguuaugaucuguauuaaauucuuucacugcucu

SEQ ID NO: 4175029 - RNA, 90 nt, Human
agagagagcuggagaaacaaaacacauuagcccuguggaaaaucacaugauuucuaagaaaguaaugguuaugauucuuaggcuuucucu

SEQ ID NO: 4175030 - RNA, 85 nt, Human
agagagaggugggcagugaauauuggugggaaaagacauaguaacaagaauuucaaggcaauguucacgccaaaacuuaacugcu

SEQ ID NO: 4175031 - RNA, 129 nt, Human
agagaggaaaugagguaacacugcaagguggcuuauaggauuggaaagaaugugaguuuuaaaaaucagaaagaccaggcuuacauacuuacuagaucuaugaccuuguccaacuuauuuauuugcucu

SEQ ID NO: 4175032 - RNA, 99 nt, Human
agagaggcuucugucucauuccuccguggcuguggacgcagccccuccaaaccaaggugggcuggcgaccugcagcgacgugcgacacccagcuucccu

SEQ ID NO: 4175033 - RNA, 68 nt, Human
agagaggugaagagggcaaaaacuucccaaagugugaacauuucaggauuauacucucuucccuuucu

SEQ ID NO: 4175034 - RNA, 105 nt, Human
agagaggugcuuucuucuucucucacccugggugagaggcaaacaggugcuugcuuguucucuuacccagggucuagaggaagcaauuuauuuauuuaucuguuu

SEQ ID NO: 4175035 - RNA, 71 nt, Human
agagaguauauuuggggagaacuuugcauaugcucaccugagucauugcagaguggauucuguauaccuuu

SEQ ID NO: 4175036 - RNA, 94 nt, Human
agagagucgcuugaacccgggaggcugagaggucgcagugggccaagauugcaucacugcgcuucagccugggugacagagcaagacuucaucu

SEQ ID NO: 4175037 - RNA, 85 nt, Human
agagagugguaucuauggaaauuaauucaacugucuuuaaaaaggucauagaucaaagauuaacauuucuaagaugccauuugcu

SEQ ID NO: 4175038 - RNA, 65 nt, Human
agagaucaguguauucauagggaauauucaaaaucuacagauuguuucuagaaucauugaugucu

SEQ ID NO: 4175039 - RNA, 88 nt, Human
agagauggaggggaggggacacuggggacucuggccuuuugacaggacaugugucaaaaugccgagugcccaggucgaucagauuucu

SEQ ID NO: 4175040 - RNA, 67 nt, Human
agagaugucuagugaaugacacuuaagaagaugaucucauuuuauauguaucaaucacggcaucuuu

SEQ ID NO: 4175041 - RNA, 71 nt, Human
agagauguuuagauguuuguccaaggucacacagcuaguaccugcuggagcagaaauuugaagccaugucu

SEQ ID NO: 4175042 - RNA, 68 nt, Human
agagauguuuccucugagagcaggauauauguuucuuccuaucauaaacucugccucagaagagcucu

SEQ ID NO: 4175043 - RNA, 68 nt, Human
agaaaucaaggcuacauucagguucaacugccaaggcaagcacagaccagauuguagucugggucucu

SEQ ID NO: 4175044 - RNA, 76 nt, Human
agaaaucccaucuuuucagaagccauucuggauuuaaaagaauccagaauggcuucugaaaaggauugaaauuucu

SEQ ID NO: 4175045 - RNA, 59 nt, Human
agaaaucuauguuuugguuagauguauuuuuucaucuuuuauagaauauaggucauucu

SEQ ID NO: 4175046 - RNA, 62 nt, Human
agaaaucucaguaucucagggauucuugguaagacagaaguaacugaugugcucagauuucu

SEQ ID NO: 4175047 - RNA, 110 nt, Human
agaaaugaauuaaugaaaaauacuggagugauaaguuuuauauuaugaucccaagagauguuaugauacaagcaaaacuaaucaauguagauuauucaguuauuauuucu

SEQ ID NO: 4175048 - RNA, 116 nt, Human
agaaaugccgaugugcuucuaaguaacuagcuuguacaaauguuuaaacacuuuaaauuucacaagagcuuacacuuuggcaagcuauuaaaaggggaaauaucuguaguguuucu

SEQ ID NO: 4175049 - RNA, 108 nt, Human
agaaaugccuaugccagucuuuugggcauuuuuaguauugguuuuuguccacuuaggugugacaagcauuguauauugguuuuuguccacuuaggaccauuaguuucu

SEQ ID NO: 4175050 - RNA, 86 nt, Human
agaaaugcucauagacuugggcucuuuguucuagcacuuacuuauagugcugccuuaaaaaauucuaaacaucuugagcauuaucu

SEQ ID NO: 4175051 - RNA, 74 nt, Human
agaaaugcuuauggguuccauaauaccgcuuggcauugcacacuaagcaauauuguucuugcucaaguucuucu

SEQ ID NO: 4175052 - RNA, 79 nt, Human
agaaauuaaguuacuuucugaucaguguguccaggcuuucaugcugcuuucugacaucaucagugagugaauaguuuuu

SEQ ID NO: 4175053 - RNA, 98 nt, Human
agaaauuacagggucagaagguuugaaaguucaacaggaaaaaaggucccauuaccuuuuuaagaagcuuccaggccuagcacugacauuuguuuucu

SEQ ID NO: 4175054 - RNA, 63 nt, Human
agaaauuacccagagcugagucugauauaugcuguuaguauacuucaauucagccugauuucu

SEQ ID NO: 4175055 - RNA, 57 nt, Human
agaaauuaugcaguaguuuuauaggcugaccuguguaaacuccuugucauaauuuuu

SEQ ID NO: 4175056 - RNA, 98 nt, Human
agaaauugaagaaauaagagcuuuccuugggaggauccaagagucugcauuugaaaacaguguuaucucagggacggcaucucauuucuuuaaccucu

SEQ ID NO: 4175057 - RNA, 76 nt, Human
agaaauuuauuagugccuacuaugugccggacaucauucuguguggagauauacuguaggccacuauaagaaaucu

SEQ ID NO: 4175058 - RNA, 85 nt, Human
agaacaacacugaaggggaauuaucacaguuucuggugacuaaaaucacucaguuuuugcugucugguucaucccugagguuucu

SEQ ID NO: 4175059 - RNA, 74 nt, Human
agaacagauaucacaggcccagcucuucaccagaagcuuugaugauggccugggcuuugaauacaugauguucu

SEQ ID NO: 4175060 - RNA, 62 nt, Human
agaacauucacagacucaccauuauuguacaaugauaauguaguguauagugugugaagucu

SEQ ID NO: 4175061 - RNA, 100 nt, Human
agaaccaaauacagaaggagaaagcuuguguuucugucgccuuucuuucaaugaaauaaaaguucaagagaguacagauuuccccucuguucacaguucu

SEQ ID NO: 4175062 - RNA, 56 nt, Human
agaacccagaccuggaagcuagaccccagacauaggucauccaccucucgggcucu

SEQ ID NO: 4175063 - RNA, 128 nt, Human
agaaccucagggaguugauaguuggagccagguuauuuuaucucugagagguugucaaauuggaacauuauuuaauauaucagagauagagguaaagagaaccuccauaaacguuuucauuguggucu

SEQ ID NO: 4175064 - RNA, 104 nt, Human
agaaccuccccuuuccgugcuggcucugggccaagcagggaggcaaagaucugagagucacccuguucuuuguccagaaggacagcacagagaauggcacuucu

SEQ ID NO: 4175065 - RNA, 67 nt, Human
agaaccuggcaccuguguuuucuggaugcugaccaggugcgucugauggaaccagguuccagggacu

SEQ ID NO: 4175066 - RNA, 65 nt, Human
agaacuaaauucagagacaugaagugacauucccaaugucacucagcaaguauuuggaagauucu

SEQ ID NO: 4175067 - RNA, 64 nt, Human
agaacucuccaggggcugucuuggaaucuugggauaaagacccccaccggccccugaguggucu

SEQ ID NO: 4175068 - RNA, 103 nt, Human
agaacugccaacgcgggcuccuuggcaaccagagcucaccaucugcccaggcaaccagggagggcacagagggcagugagccucugccaggauggacaguucu

SEQ ID NO: 4175069 - RNA, 92 nt, Human
agaacuguacauuggcuacaauugagaggcagagaggcuuucugggucauauuuauaucuccugccucacaguugaaguuuuaggcaauucu

SEQ ID NO: 4175070 - RNA, 59 nt, Human
agaacuguccccagagagcacuaaucaaucagugugaccuccaaaggggacccaguccu

SEQ ID NO: 4175071 - RNA, 78 nt, Human
agaagaaacagcaucccacauaauugcuuuuggcagccuauuagucagcaaaaaauuuaugugaggaaagguucuuuu

SEQ ID NO: 4175072 - RNA, 70 nt, Human
agaagaaaggaagcugccacccucuugccauacacucugggggccucuguucugcauuccuccuucuucu

SEQ ID NO: 4175073 - RNA, 74 nt, Human
agaagaaauagaaaagaaaaugaggcagugccacucuaguuggugauacaugacauuucuuucuguucucuuuu

SEQ ID NO: 4175074 - RNA, 63 nt, Human
agaagaaaugugaaggccacugugcacaugaaacagcacagaguggacccagcuauuucuuuu

SEQ ID NO: 4175075 - RNA, 70 nt, Human
agaagaauauauaaugauuuugucagcuaaaaguugggcugagagagacaucacucauuuauguuugccu

SEQ ID NO: 4175076 - RNA, 70 nt, Human
agaagacaacagcauauggacugucauuuagauuaaaagauaucuauuguuagccuggugcuuuguuucu

SEQ ID NO: 4175077 - RNA, 96 nt, Human
agaagacauuuuuuuaguaaguaaaaucagguugaggcuuggaugacaggcaagagucauccaggaaaagauuuggaaaaaugcuggaaaacuuuu

SEQ ID NO: 4175078 - RNA, 56 nt, Human
agaagagaguccuaccccauacacauauguaguuggaaaagggaggacuuuuuuuu

SEQ ID NO: 4175079 - RNA, 57 nt, Human
agaagaggccugggagagcucacagugggcagggcugggggcuccuugggccucucu

SEQ ID NO: 4175080 - RNA, 73 nt, Human
agaagagugggaauguucuaagaauucuuuuuggcuuaaucuuuguugaauugaaaauauguauaacucuucu

SEQ ID NO: 4175081 - RNA, 78 nt, Human
agaagauaauuaaauuauguccaaagaauuaauauugcuuacuuuagagauauaaguuaguggucauguuuaucuuuu

SEQ ID NO: 4175082 - RNA, 68 nt, Human
agaagaucaugcauauuuguaguaguucaauaagaauugagcuaaagcuuguguuuauacuaucuucu

SEQ ID NO: 4175083 - RNA, 80 nt, Human
agaagcagcuguggaaaaguaacuaaauuacguggggaggcugcaggaagauaggcauuauuuuaccacggucuguuucu

SEQ ID NO: 4175084 - RNA, 99 nt, Human
agaagccaaugucggaaaaugaauccuguagauucuaauuccugcacugugugaggacuacuggugaauuauuuuccgccacaauuugcauuuucuucu

SEQ ID NO: 4175085 - RNA, 58 nt, Human
agaagccacugcucccagugagcaguagggccuggacuucauuuagagcagggcuucu

SEQ ID NO: 4175086 - RNA, 56 nt, Human
agaagccauugaagcagaccucuagcugccagucaggucugcucugaaggcugccu

SEQ ID NO: 4175087 - RNA, 114 nt, Human
agaagccugaguguggaggaugacuagcccagagucccaauuccagcccuguucaucacuagcugguugugaaacuuggguaaguuuuuaaauuuuucggaaccucaguuuucu

SEQ ID NO: 4175088 - RNA, 75 nt, Human
agaagcugcuguguucucuugacccacccuuacccccugacuggccuguagcugggaggaggacuagcagcuucu

SEQ ID NO: 4175089 - RNA, 65 nt, Human
agaagcuuacuguaauuaaaagacuuugaacucagacacccagaguuuugaauucagaagcuucu

SEQ ID NO: 4175090 - RNA, 64 nt, Human
agaagcuucuccuccuaacaggcaagcaugacacacucugccaaaccaggaagggcaaguuucu

SEQ ID NO: 4175091 - RNA, 88 nt, Human
agaagcuuuaggugcuuagcuuuuuacauuuaaguuuaugauugauuuuuaguuaauuauggugugugguuaagggaucaaagcuuuu

SEQ ID NO: 4175092 - RNA, 130 nt, Human
agaaggaaauacaaccuucauucuaagagguucuccgaggucaugcgggcagcuucucccaggcuguuugugaaauauggggggaagaugcucucggaggacccaagcaaagaagccuauuuauccuugu

SEQ ID NO: 4175093 - RNA, 80 nt, Human
agaaggaagcagggguagagauugcugguguaagggacuuuuucuucccuucugucuucucucccacuguuuugucuucu

SEQ ID NO: 4175094 - RNA, 65 nt, Human
agaaggaagccguuucucuccaggacaugcagugucugcuggaguuuuggaaaaaugcuuucucu

SEQ ID NO: 4175095 - RNA, 91 nt, Human
agaaggagaagacuucaaaucucuugaaagcaauggguuuuuccuucaccuagggauauuuugacuuuuaacagugagucuaucuucuucu

SEQ ID NO: 4175096 - RNA, 65 nt, Human
agaaggagaguaguuaggacuggggcacguauaggucucaaugacuccuauuuacauuuuuagcu

SEQ ID NO: 4175097 - RNA, 79 nt, Human
agaaggcaguggagcucagauuccaauguuggccuauuugacugcaggccaaguugcuaaaggaguucuuuguccuucu

SEQ ID NO: 4175098 - RNA, 67 nt, Human
agaaggccaggaaauuaucccuaugacgaacugaugauguccaauaggagacuguucuuggcuuccu

SEQ ID NO: 4175099 - RNA, 55 nt, Human
agaaggccccaugaacacugcaaagacaguuugcuuguuguaaauggagguuucu

SEQ ID NO: 4175100 - RNA, 59 nt, Human
agaaggcccuguguggucugagccuggccuaccuguucaaccuaauugcacggccuucu

SEQ ID NO: 4175101 - RNA, 58 nt, Human
agaaggcugagacugggaugaaacuuaucacaaaaguaaaggaaccacuuagccuucu

SEQ ID NO: 4175102 - RNA, 55 nt, Human
agaaggcuuuccagaaagucuugaaacuugauuucagcccaggaaugagccuucu

SEQ ID NO: 4175103 - RNA, 63 nt, Human
agaagggccugggagucguauucucugcaucgccucagcacaggggaucuuccaggcucuccu

SEQ ID NO: 4175104 - RNA, 96 nt, Human
agaaggggcuggcugccaaugugauaauugagaaacaccuggugaaaaugucucucuauuaauugacaauggcuuucuccucccuaguccucaucu

SEQ ID NO: 4175105 - RNA, 59 nt, Human
agaaggguguauacauuuccuggaugugauccuuacauauagaaguaugugacccuuuu

SEQ ID NO: 4175106 - RNA, 83 nt, Human
agaaggugccugggcuuuaggguugaaugcaucuggguuugaagccuggagcccccacguuuccuggguccaggugaucuucu

SEQ ID NO: 4175107 - RNA, 85 nt, Human
agaagguuuacucugaguccaggaagcaucauggucuauuuaugauaauagaaauuuguaggcaucuggcuucaggugaaccucu

SEQ ID NO: 4175108 - RNA, 59 nt, Human
agaaguacauggaggauagcugcucuguuuugucaggaagugcuaagccaugugcuuuu

SEQ ID NO: 4175109 - RNA, 56 nt, Human
agaagucagccucauugaagccacuguaacagauggcagauacaggcaugacuucu

SEQ ID NO: 4175110 - RNA, 81 nt, Human
agaagugagauggugcugccagagugccgacccccgaauccucaggggcccuggccucuccuggcagcauccacccauucu

SEQ ID NO: 4175111 - RNA, 55 nt, Human
agauguccugaaaagcccugagacccuucacgugcagaggcugagagggcaaucu

SEQ ID NO: 4175112 - RNA, 79 nt, Human
agaugucuuucugagaugaauuaacugacuuagacauacagaaguagagucaccuugaaaugucuugaaaagaaauucu

SEQ ID NO: 4175113 - RNA, 72 nt, Human
agaugugcaguccuggcauauagguccucacugaaaguaguggaggaacaugaccaggaccuggaaacauuu

SEQ ID NO: 4175114 - RNA, 77 nt, Human
agauguguauugaugagcauuacucucuaacugcucgugucaaagcacuuggggaggcucaucaaucuugugcguuu

SEQ ID NO: 4175115 - RNA, 81 nt, Human
agauguuuccuaacuggccuuuauggauaaguuugcuaaccuguacucuagaucacgugaaguccauaauaguuuauauuu

SEQ ID NO: 4175116 - RNA, 84 nt, Human
agauuagcuuagugcuacuucauggguucucugggauaggugugaaauaaaaacagugggaaagugaagagcauuaaauagucu

SEQ ID NO: 4175117 - RNA, 57 nt, Human
agauuaggcuacaccuggaaaagccuuccaagaaggccuccuggucuaggcuagacu

SEQ ID NO: 4175118 - RNA, 81 nt, Human
agauuauaccaacagcuacaggacgggcaucugcagucaagcaugcagaaaaggcagugcccaguguuguagaaauaaucu

SEQ ID NO: 4175119 - RNA, 64 nt, Human
agauuccagggggacauuggaggcaaaugauauaugccccaaagaaaacaguaccucaggagcu

SEQ ID NO: 4175120 - RNA, 77 nt, Human
agauucuacaaaggcaggauugacuuaguuaaaggauacaaaccgauaacccucacugaguuuuuacugcaggauuu

SEQ ID NO: 4175121 - RNA, 82 nt, Human
agauucuagaccagugguuuccaaacuuguuccacauuaguaucaccuggacaucuuuagaaacuacugcugucuggcuucu

SEQ ID NO: 4175122 - RNA, 75 nt, Human
agauucucugucaccagugcucccagaggccagcugggcccggccaggucugggagagcugcugucagagcgucu

SEQ ID NO: 4175123 - RNA, 95 nt, Human
agauugaccugucaggggguuugacagcaguaggaguuuccagggugggaagacucaagaaggagacuccacugugauccugugugguucaaucu

SEQ ID NO: 4175124 - RNA, 78 nt, Human
agauugaggcacagggcagagccaggauuucaaccauuacagucuaauuccagaguuugugcccuugagccuuaugcu

SEQ ID NO: 4175125 - RNA, 82 nt, Human
agauugaggucagcuagaggaugugacauucgaguugggucacaaaggauguacaggaguuuuucaaggcugaccacagucu

SEQ ID NO: 4175126 - RNA, 81 nt, Human
agauugagguccagccagguuuuacaauccagccagaaugacauguugagagagguggagauggccucaggcccucagucu

SEQ ID NO: 4175127 - RNA, 88 nt, Human
agauugcuucuugauuuauucuacccagaauguacaccuagaucugcuacuaagcuuuuggauaggauagaacagaauuugguacucu

SEQ ID NO: 4175128 - RNA, 69 nt, Human
agauugggauuagagaucuguaugcagguauaauuuccaucccuguccuuuagucuuuauucuuaauuu

SEQ ID NO: 4175129 - RNA, 56 nt, Human
agauugggguccagacuccugagugcuccccaucagggcucguguuucccaacucu

SEQ ID NO: 4175130 - RNA, 60 nt, Human
agauugguguugcagaaccaugaauguuuaacaauuugucaguucaguauacacuauucu

SEQ ID NO: 4175131 - RNA, 84 nt, Human
agauuguuaaggaagucuaggaucuauguguaauuuuacuacuuaaauuuuauacauguguuuugagaugaguuuuaauaaacu

SEQ ID NO: 4175132 - RNA, 114 nt, Human
agauuguuuagugccauggaaagguuucuuaaauacuauugaccaggucucugcaaucauagacaugaauguuuauaguaccuugagauauaacucaucccagccuauaaauuu

SEQ ID NO: 4175133 - RNA, 69 nt, Human
agauuuaaugauggcuucuaacaggcuucucucauucuuguugaacugguuacaagccuuguuaaaucu

SEQ ID NO: 4175134 - RNA, 86 nt, Human
agauuuacccuuucugggaggcaguuucucaggaguacaucuguaaaaggaggcugccucuuuugagaggguacugacaagaaucu

SEQ ID NO: 4175135 - RNA, 57 nt, Human
agauuucaggcuaucuaugcagacuuaguugagggucugauaguuaaucugaauacu

SEQ ID NO: 4175136 - RNA, 130 nt, Human
agauuucuuaaauuuuuaaauauauaguagauauaauuuuaagugguaaauuaguucuuugauaggcaugauaacauaguuuucuacuuauucuuguguugugugcucauauauuuuuuaugagaaaucu

SEQ ID NO: 4175137 - RNA, 72 nt, Human
agauuugaaaauaguacaaucuacagacauaguguuagcuguuuuuucuaguuuugugucuuuugcaaaucu

SEQ ID NO: 4175138 - RNA, 83 nt, Human
agauuugucaucuacagugcgauuuuuaggccucuugacuuuuuguugagcccuaggcuuuugugacugccugugacagcucu

SEQ ID NO: 4175139 - RNA, 55 nt, Human
agauuuucaaggaaaucagaaccaaauuaagaguucuuaauuuccuugugaguuu

SEQ ID NO: 4175140 - RNA, 78 nt, Human
agauuuucauaugcuugacucuuucacaucgccuuccucagagaaaugugaugagaacugugcauaaugugaagaucu

SEQ ID NO: 4175141 - RNA, 113 nt, Human
agcaaacaccagcuccuaugggccagcccugugcuuggcuaagcuggggaggccuggggaggaauccaggccuggacggguggccuggguggccauaaggacuagugugugcu

SEQ ID NO: 4175142 - RNA, 65 nt, Human
agcaaaggcacuagcuaggucauggaggacugugaacacguccaggaggcugaaguguuuuugcu

SEQ ID NO: 4175143 - RNA, 61 nt, Human
agcaaaguggcuuuccaaaccauagucuacuuuuucuaguuuuuguaugagucauuuuguu

SEQ ID NO: 4175144 - RNA, 104 nt, Human
agcaaaguggggacacguagcuuccccuugcaguuauaaguaaaugugaauucuguucugugacuucaagguucagcaccuucuguccucaaaacuucuuugcu

SEQ ID NO: 4175145 - RNA, 73 nt, Human
agcaaauuauccagcaccaaugucagagguguagcucucccuucuggauauucaguuggauaaacucauugcu

SEQ ID NO: 4175146 - RNA, 55 nt, Human
agcaacagcaacgacauuucucuaaaagguagcagagaucucugaagcugcugcu

SEQ ID NO: 4175147 - RNA, 63 nt, Human
agcaacagcagguuugcacuccuaacauagcaaccccauggagggugcagguaacgcugugcu

SEQ ID NO: 4175148 - RNA, 63 nt, Human
agcaaccguggcucuugggaccaguugacucauguucaaguacaccuuuggaguccacgugcu

SEQ ID NO: 4175149 - RNA, 101 nt, Human
agcaaccuacccaaacccugcacccccuucaaggcuccaccacauuuaagugggaauugaggugauugugagggaaucagggcagaggaugggauggugcu

SEQ ID NO: 4175150 - RNA, 68 nt, Human
agcaaccugccagucacucaguggccuccaaccagagaaaacaaccugccaaguuggcagccguugcu

SEQ ID NO: 4175151 - RNA, 82 nt, Human
agcaacuaaaugaauguuccucagacuuccccaaaauuuuugauucugggauagaagcaggaauaaucuuuuguuagaagcu

SEQ ID NO: 4175152 - RNA, 55 nt, Human
agcaacugcucugggcaacagccucccucaauaggcaaggcccccagaguaagcu

SEQ ID NO: 4175153 - RNA, 56 nt, Human
agcaacuguaauauuggaagaucaguccuucuguauuauauuguauaauaguugcu

SEQ ID NO: 4175154 - RNA, 75 nt, Human
agcaacuguucccaagauaagauuaugauuuacaccaguacuucuuaaaaugugggucugcggaaugguguugcu

SEQ ID NO: 4175155 - RNA, 78 nt, Human
agcaagaccaggguuuuguguuugugaaccuaucuaauauugcugggguuugaaaacugaacccugaguuuuauugcu

SEQ ID NO: 4175156 - RNA, 73 nt, Human
agcaagagcggaaaggcccugggaugcucagcagugguuguggucccuaguguccugagggcugugacuugcu

SEQ ID NO: 4175157 - RNA, 64 nt, Human
agcaagauugaggcuuccucagcuuuuggaucgacaaucgacagcugagaggcuauuuuuugcu

SEQ ID NO: 4175158 - RNA, 55 nt, Human
agcaagcugucaagagagcugacaggugagauaauuguuagcucucuggcuugcu

SEQ ID NO: 4175159 - RNA, 72 nt, Human
agcaaggaaaaaggccuuuagagcuuaaauuacaaccacaucuaaugaacucagagguguuuuucacuuacu

SEQ ID NO: 4175160 - RNA, 76 nt, Human
agcaaggaggcacagccagcugccuuucacaucuggcucuaaaugagccacggcacuggcucuguccacauuugcu

SEQ ID NO: 4175161 - RNA, 58 nt, Human
agcaaggauuauccugggaagggagcuuaacuaccucuaaauccaggaugcuuuuucu

SEQ ID NO: 4175162 - RNA, 55 nt, Human
agcaagggaagucgacagaauagcaccucaaaugauguggacucaguuucuugcu

SEQ ID NO: 4175163 - RNA, 68 nt, Human
agcaaggggucuggcuuucugaacaucagugaauggaaguguuuacuuuaguaaauccagcccuugcu

SEQ ID NO: 4175164 - RNA, 70 nt, Human
agcaagggugagagacagaauuugagcucaauuuauugaaugccaaagugcugcucuuuaccacugugcu

SEQ ID NO: 4175165 - RNA, 97 nt, Human
agcaagguauuuagaacaaaggaggugauaggcccucuuuuucgugcugagcuaaccacauguggaguauuguagcuuccaguucaagugccuagcu

SEQ ID NO: 4175166 - RNA, 67 nt, Human
agcaagugggugggacuaucuuuugagccucuguaauaggccaaguacuguaucacuuacuccugcu

SEQ ID NO: 4175167 - RNA, 72 nt, Human
agcaauagauuccagugugcuuccuugcuacacauaauuuugggaugacaauggggcacauggaaaguagcu

SEQ ID NO: 4175168 - RNA, 57 nt, Human
agcaaugcuaccgggugauucguagaaaauugggauucaugccuucuagcauuugcu

SEQ ID NO: 4175169 - RNA, 71 nt, Human
agcaauggaacucauguucugguggaaaacagaugcaaaucagauaauuucaacagaauaugaucagaguu

SEQ ID NO: 4175170 - RNA, 79 nt, Human
agcaauggaauugucuuggccagugagaagggccuuuuccuucacgauggcugagacgguauuuuaguuuucuauugcu

SEQ ID NO: 4175171 - RNA, 73 nt, Human
agcaauguuugacaguuuucuggguaaggucuugcucacaccuugcuaaauuuauuuucgaacauuucaugcu

SEQ ID NO: 4175172 - RNA, 100 nt, Human
agcaauucuccugucucagccuuccaaguagcagggauuacaggugugugccaccaugcacggcuaauuuuuguauuuuuaguagagacgggguuuugcu

SEQ ID NO: 4175173 - RNA, 72 nt, Human
agcaauuuaggaacuucugucucaguguucaguuuuuacuuaguaccuugacacuacucuuaguuccuggcu

SEQ ID NO: 4175174 - RNA, 123 nt, Human
agcacaacuaacucauuguaucaguuaccuguugucacgauaacacugcuaacaaacacucacagaagcccagugguauacacggguaacuguuuauugcucaugugcuuggaguuguuggcu

SEQ ID NO: 4175175 - RNA, 78 nt, Human
agcacaaugaucaaugcaugugacaaagaguaugaaucacuaggaauugcccuugucagugcauuagcuugaugugcu

SEQ ID NO: 4175176 - RNA, 82 nt, Human
agcacacacagggcacuucuaagcauggggcucugugcaccugccuggguugcaugccagaagccagcccugucucagugcu

SEQ ID NO: 4175177 - RNA, 64 nt, Human
agcacacauaacacucuucucuagugagcagucucuggugcugacugaguauauguuuggugcu

SEQ ID NO: 4175178 - RNA, 75 nt, Human
agcacagcauucacagaaagacaucaaucugcacuuuuuguaaaagaagcacaauguccuucuugagggcuuguu

SEQ ID NO: 4175179 - RNA, 104 nt, Human
agcacagcgugccuuuccucccagcuuccucagaggccacaggcauuuuuggcucagcgaggucccuggggaacuaggcugugcggagggaggagugugcagcu

SEQ ID NO: 4175180 - RNA, 60 nt, Human
agagauuacagcaggguccagcguuugcuuggagaaaacucuugaucuuguguagucucu

SEQ ID NO: 4175181 - RNA, 88 nt, Human
agagauuagaaggcaauuuucacauaaaagcuccaaagaaacauguuguuauucuguggaaguuauuugauuguuccucauagucuuu

SEQ ID NO: 4175182 - RNA, 71 nt, Human
agagauuaguugagauagucaaaguucuuucuguuccaggaagugcuuucauauagucuuaaugaugcuuu

SEQ ID NO: 4175183 - RNA, 127 nt, Human
agagauugaaagguuggaggaggaguguucagguuguuaauucgcuugguuacuccacuguacaagauucaaugaauugauugcaucauucacgcuggacauccuucuccaugcaauugccaucucu

SEQ ID NO: 4175184 - RNA, 77 nt, Human
agagauugaucuguguaauuuuuugugccaacuugucagguuuugguaccagggguuauuucugcauauucauuucu

SEQ ID NO: 4175185 - RNA, 81 nt, Human
agagauuugggcuauuuugaauaaugcugcugugcacacuuguguacacauuuuuauguuaacauauguuuucacuucucu

SEQ ID NO: 4175186 - RNA, 60 nt, Human
agagcaagugauaugcuucccaggucaaaggaaacuaaaacugaaggauauuauaguucu

SEQ ID NO: 4175187 - RNA, 82 nt, Human
agagcagaaugucauuucaaaaaccacaucuaauauucuucuguggauguacaguuacuuugaaaauugauauuucugcuuu

SEQ ID NO: 4175188 - RNA, 59 nt, Human
agagcagagaaggcagcucugauaaugagaugacaaaacagagggcuuuucucuguucu

SEQ ID NO: 4175189 - RNA, 69 nt, Human
agagcagagcuucucagcuucagaacuguuggccagauaauucuuuguuguaagaggcucuucuguucu

SEQ ID NO: 4175190 - RNA, 55 nt, Human
agagcagaggcauggccguggggaggaggguccauggaacccgggcgucugcucu

SEQ ID NO: 4175191 - RNA, 58 nt, Human
agagcagagggcucugggacaagaauguuucucucuucucccucccuuuuccugcucu

SEQ ID NO: 4175192 - RNA, 65 nt, Human
agagcaggcacuggguaauuaguagcucuaccucuuagcaagguaugagcucccacuuuuggucu

SEQ ID NO: 4175193 - RNA, 86 nt, Human
agagcauggcuuucuccuugcugucuuuuucccuuccuaacaucacuauaaugucugugaggugagcaggcaugcagaagcccucu

SEQ ID NO: 4175194 - RNA, 79 nt, Human
agagccagaggaagaagcaaaccagcuaaucuccugggguggccugcauccccuuuaugcugguuucuuccugggcuuu

SEQ ID NO: 4175195 - RNA, 77 nt, Human
agagccagcagcagcauugagcgcuuguagggcaccaccuuugugcuaggcacgugcucagagcuuugauggccucu

SEQ ID NO: 4175196 - RNA, 56 nt, Human
agagccaggcggcugggcaccuucccccaccuuggugugucgaagcuccugucucu

SEQ ID NO: 4175197 - RNA, 76 nt, Human
agagccaguccucugggucaggacacaaaaguuccugggaggggauuuaugucugauacccagaaugccugccucu

SEQ ID NO: 4175198 - RNA, 60 nt, Human
agagccaguggacuucaguaugggucgcuuucauuggcagacccucaauccacuuguuuu

SEQ ID NO: 4175199 - RNA, 71 nt, Human
agagcccugacugaugcagugggucaccuccuaagguuuuacuagcagagggcugaugccauugcagcucu

SEQ ID NO: 4175200 - RNA, 69 nt, Human
agagccuccaguuuuuuucugaacuuugaaagucaguaccaaagagucagaacugaauggaaggacacu

SEQ ID NO: 4175201 - RNA, 60 nt, Human
agagccucucugaugugacagcuacaggaaguccggugcugugcuggcggcagaggcccu

SEQ ID NO: 4175202 - RNA, 55 nt, Human
agagccugaaauacaggucacugaguagccuuucuguggccuacauuuagguuuu

SEQ ID NO: 4175203 - RNA, 81 nt, Human
agagccugacugccaggcaggcagggguaucuuuggggcucugggagccccagccucuggauucugcccucagugagcuuu

SEQ ID NO: 4175204 - RNA, 57 nt, Human
agagccugagccugaucuugaaauccagucagcugcauugggaagggcaugggcucu

SEQ ID NO: 4175205 - RNA, 64 nt, Human
agagccuguaacaucuuucuuaggguaacuaugaacuccugguucagauuuuggcaaggcaucu

SEQ ID NO: 4175206 - RNA, 76 nt, Human
agagccuucaguucccuuucucaucucuucauguagggcuuaugaggguguuggggagaugggaaaugaaggcucu

SEQ ID NO: 4175207 - RNA, 74 nt, Human
agagcguaauacaaucuagcaguucauugugcuauggggcuuuugucauuuugcagugugcuguuggcagcucu

SEQ ID NO: 4175208 - RNA, 58 nt, Human
agagcuacugauaagcacaguagucugaagaagacuucucaguuuuauuaguaguuuu

SEQ ID NO: 4175209 - RNA, 90 nt, Human
agagcuauuucagggaugugaugagcugagccagcugcuggagagggacuccaugggaaaaugggcucggccgucagcuucaugagcucu

SEQ ID NO: 4175210 - RNA, 59 nt, Human
agagcucaagacgcucacaguaaggucuccaugaccugcugugacaucccuugugcccu

SEQ ID NO: 4175211 - RNA, 69 nt, Human
agagcucaaugaaagaaauaguuauguuaaaaauaaaugacauguauucuggaucugucaucgaguuuu

SEQ ID NO: 4175212 - RNA, 88 nt, Human
agagcucaggcagauaggaacaaguuuccuugcugugguucguguuuuugacagugggaacauuuguucuaguccagccguucacucu

SEQ ID NO: 4175213 - RNA, 85 nt, Human
agagcucaggugguaaugcgagugaugcagaguggcugcaaauacagaugaagcuuuguuugcucacccgccgcucaccuccucu

SEQ ID NO: 4175214 - RNA, 112 nt, Human
agagcucuuauaaaauugccaaaauaacugauuugaucugguuaacagagaccuaauccacaguguuuccuuuuggcuaggugugaaaaaguuuggcacuaugaaugguuuu

SEQ ID NO: 4175215 - RNA, 77 nt, Human
agagcugauaaguggcagagccaggguugggacacagguguguucaaagcccuuucugcuuuuacauuccagacucu

SEQ ID NO: 4175216 - RNA, 56 nt, Human
agagcugcuugcccagaagcagagcacauccguucuggagcucagcaugcaguucu

SEQ ID NO: 4175217 - RNA, 57 nt, Human
agagcuggcacugacccucacccucaauuauucgugugggcaguucaaugccacucu

SEQ ID NO: 4175218 - RNA, 56 nt, Human
agagcuguuagaagggauuagaucauuucaguuugcacagucccaucuucagcucu

SEQ ID NO: 4175219 - RNA, 70 nt, Human
agagcuuguuagaaaugcagcuucuugggccagcuccacagaaucagaaucugcauuuuuaauaacaucu

SEQ ID NO: 4175220 - RNA, 76 nt, Human
agaggaaucaucacacugucuuucagaaugguugaacuaguuuacauucccaccaacaguguaaagguguuccuuu

SEQ ID NO: 4175221 - RNA, 57 nt, Human
agaggacacagaugaacauuuauugagugcccucuuuagaaaucagcuggugccucu

SEQ ID NO: 4175222 - RNA, 86 nt, Human
agaggacucauuaagcaggagaaauguggcugcuaccauggacaccaugggugggagggcugcguuccucuugcuuccaaucuucu

SEQ ID NO: 4175223 - RNA, 72 nt, Human
agaggagaaauuuggggaccugaaagagaaacugcucucagucauaucuccuuaauuuucugucaacccuuu

SEQ ID NO: 4175224 - RNA, 122 nt, Human
agaggagaagaauggggcacaaggcgguuaaguaacuugcuuagagucacacagcugguggcagagcugagcagucugacucaagcuagugcuccugaccacugcauagugacccuuccucu

SEQ ID NO: 4175225 - RNA, 62 nt, Human
agaggagcuuuuggaaaaggccacucucccugggggcucgcucaucauccacaagcuucucu

SEQ ID NO: 4175226 - RNA, 91 nt, Human
agaggagggucuccucgaggggucucugccucuacccaggacucuuucaugaccaggaggcugaggccccucacaggcggcuucuuacucu

SEQ ID NO: 4175227 - RNA, 57 nt, Human
agaggaguuugggccagaaucugaggagggcuuggcugcugucccagacucugcucu

SEQ ID NO: 4175228 - RNA, 70 nt, Human
agaggauuacuucugcuugcccagugacuacagaccagcucuggcaugggcaaaccagggaaacuccucu

SEQ ID NO: 4175229 - RNA, 56 nt, Human
agaggcacaaacuggaaaggacaaagucuguugguccuugguuuuuugugcccucu

SEQ ID NO: 4175230 - RNA, 55 nt, Human
agaggcagaaguguucaaacccacguugugagucugguuugagagccugcauucu

SEQ ID NO: 4175231 - RNA, 75 nt, Human
agaggcagggaaggaaaggucucaugccuuucagguugacacuaagaaagaggcuuccauuccuuucccuguucu

SEQ ID NO: 4175232 - RNA, 62 nt, Human
agaggcaucacuaacuggaccuucuucagggagaggaaauagguauucagagagaugcuuuu

SEQ ID NO: 4175233 - RNA, 59 nt, Human
agaggccacggaagggagcugugugcucagaccuuguacaucaaccuccugugggcucu

SEQ ID NO: 4175234 - RNA, 56 nt, Human
agaggccagcccaggccaccgagccugcauccuaccucgugccugggucucccucu

SEQ ID NO: 4175235 - RNA, 57 nt, Human
agaggcccuggccugacucaauguugcccuggcaacaguagggccuggagggccucu

SEQ ID NO: 4175236 - RNA, 59 nt, Human
agaggccucccucccagcugguugugcacgccccauucaguuggcugggauggccgucu

SEQ ID NO: 4175237 - RNA, 71 nt, Human
agaggccugguuuguguuuccuggaaagggagugucguuacagcucuccuggggagcacacacacgccucu

SEQ ID NO: 4175238 - RNA, 86 nt, Human
agaggcuaauuugcccaagguuuuguagcuaggaaacagcagaauugggauuuucacugcuuuuuuggcuauguacauuguccuuu

SEQ ID NO: 4175239 - RNA, 75 nt, Human
agaggcuagagagcugcuuccagaguugagugguauagaaggcucacagacuugagaagcaccuuacuuuccucu

SEQ ID NO: 4175240 - RNA, 84 nt, Human
agaggcucugaagccaguguuugaagaauuuguuccugaaguaccuccuggggguaggcuagaggcuucuggcuucaggguccu

SEQ ID NO: 4175241 - RNA, 55 nt, Human
agaggcuuuguucccauuaaugguguguaacgcaugaagguagcacaaagccucu

SEQ ID NO: 4175242 - RNA, 73 nt, Human
agagggauggaauguauauugcaagcuugacuuuucuaauaaucuuugcucugcucuaacauuccugacuucu

SEQ ID NO: 4175243 - RNA, 99 nt, Human
agagggaugugggaauuagagaaguuuuacuuaagaauccuugaugaugcaguaaaaauuauauuuuuuaaguaugaacucuugaguacacaucuuuuu

SEQ ID NO: 4175244 - RNA, 55 nt, Human
agaggggaaucuggaucagugaauuugaaaaccuugaauuucuagauuauccucu

SEQ ID NO: 4175245 - RNA, 109 nt, Human
agaggggagauuagaggggaagacgggaccaguguucucaaguucuuucauuggggcagugucgaggucugguccagacucauucccucugguccagaucauuuucucu

SEQ ID NO: 4175246 - RNA, 73 nt, Human
agaggggccgaggggggguuauggagauggggacuaagauuuuccugcauuccacucuucucuggacuuaucu

SEQ ID NO: 4175247 - RNA, 56 nt, Human
agagggggaaaauagagguguucugacuagacuuaggauuccuggccucugccucu

SEQ ID NO: 4175248 - RNA, 59 nt, Human
agaggggguguuccagaagcauccucuccuccagcgauguggaucugggcuccuccucu

SEQ ID NO: 4175249 - RNA, 59 nt, Human
agaggggguugucuuccaagggucucuguuauuaaaagaccugaagaguuucucuuucu

SEQ ID NO: 4175250 - RNA, 65 nt, Human
agaggguaacaagaggccuggaugcaugaaauaagacuauuugggccaucaucuugugacuuucu

SEQ ID NO: 4175251 - RNA, 112 nt, Human
agaggguaccaguagaaaauuuuagcauuaucugucuuaucauugguauaauuggaugcugacacguggcauugacuuaaggccgaaaugcauuuuucuauuguuaccuucu

SEQ ID NO: 4175252 - RNA, 94 nt, Human
agaaaauaucagugagcuauuucugagauuuugccuaagcuuuguguguacaauauauagauauuagcaaaauuuuauucuuuugaugcuuucu

SEQ ID NO: 4175253 - RNA, 125 nt, Human
agaaaauaucaugcgagugugaaacaagggaguugaaaggugcuuucacucauuucacauuaugaauucuauccagugaaagcacucacuucugcucuuuucuuuuaacaucaucuugacuuucu

SEQ ID NO: 4175254 - RNA, 110 nt, Human
agaaaaucuuaaaccaaucuuaaaccaacuuaaacccacucauguagauuagcauagauuagcgugaucugcucagguaguuuaggcuuggggaaaaaguuagauauucu

SEQ ID NO: 4175255 - RNA, 83 nt, Human
agaaacauaagauucucagagagcuuagugugcugcauguuaaguugcagacagacaugcuaguuuucuuugaaucaguaucu

SEQ ID NO: 4175256 - RNA, 63 nt, Human
agaaacaucgcuuaguccucauuuacucacugggaaccucggaggauuucagcugauguuuuu

SEQ ID NO: 4175257 - RNA, 72 nt, Human
agaaacuccuaauucugcuuuaacagaugauggugugaauguguuuagauuaucauuuuuagagggauuucu

SEQ ID NO: 4175258 - RNA, 74 nt, Human
agaaagacgugaugaagaaguauccuaauauccaugcucuaaauccugggagcuuuucuuuccacaucuucucu

SEQ ID NO: 4175259 - RNA, 76 nt, Human
agaaagagcggcuggcagcuucaucccagauuuauagauuguggagcuggaggugucagaaaaaaaguuacuuuuu

SEQ ID NO: 4175260 - RNA, 64 nt, Human
agaaagaugggauuaguccugaucaucuguuagagaaugaucugagagcagaucaccaucuucu

SEQ ID NO: 4175261 - RNA, 74 nt, Human
agaaagcugcugcaauaacccaugagauagaagcugguggcuuugaucucagugguaguuguuguggagcuucu

SEQ ID NO: 4175262 - RNA, 63 nt, Human
agaaaggcaauauuaacuacacccauaguauauuggauguguaagcugaaauguugccuuccu

SEQ ID NO: 4175263 - RNA, 74 nt, Human
agaaagggucagguaaacacagggggauaggguaggccgauucuaagcaucucauucuugccuguccauuuucu

SEQ ID NO: 4175264 - RNA, 69 nt, Human
agaaagggugaauuagauaacuauggauuaggaaaaaaauccagacucuuuaaguucauuuuccuuuuu

SEQ ID NO: 4175265 - RNA, 62 nt, Human
agaaauaggagcuuaagcacuucuuuguacauugggaagaguguuauuugcucuguauuucu

SEQ ID NO: 4175266 - RNA, 72 nt, Human
agaaaucaucaacauacugcucaggcauuuaauuuuggugcuuugaauacugauguguguuugguguguucu

SEQ ID NO: 4175267 - RNA, 65 nt, Human
agaaaucccauuuuauaccauaagagcaagcauauuagguugcacucaaauaagaugggguaucu

SEQ ID NO: 4175268 - RNA, 66 nt, Human
agaaaucugaaauagugugaaguaggcuguacugcauugucugccacugucucuauucugguuucu

SEQ ID NO: 4175269 - RNA, 107 nt, Human
agaaaugcugaccugguaucuccucgauugcaguuccuucauggacaaauguugaaucuguuuuaagccauuagaagauguaauagagaguuaucuaaacuauuucu

SEQ ID NO: 4175270 - RNA, 74 nt, Human
agaaaugugaaacgcaaugggaucaucuggaaauaugaaacugaacuaugaugaaaaccuuuuuucucauuucu

SEQ ID NO: 4175271 - RNA, 72 nt, Human
agaaauguuugucggaugacuggagagacagguacacaaaaucaaccugugcuccaucauccauaaucuucu

SEQ ID NO: 4175272 - RNA, 79 nt, Human
agaaauuacagaaagcaauauugagugaaguacuguuauuaaccagaugaaacuuaaaguaguuuuacugugguauucu

SEQ ID NO: 4175273 - RNA, 84 nt, Human
agaaauuaguggguugccugcuguccuguguguuuacauaacagggcaccugagguaggaagggcccuuucaggacugauuucu

SEQ ID NO: 4175274 - RNA, 57 nt, Human
agaaauucaucucugcuagguuucauguucagcaucucuaaguguuggugaauuucu

SEQ ID NO: 4175275 - RNA, 58 nt, Human
agaaauuuguuugugcgaccacugccacuaucacucaggaacaaacaggcagauuucu

SEQ ID NO: 4175276 - RNA, 72 nt, Human
agaaauuuuugagggcaguauuagguugauugggcugauucccacagcuuugcuuuccuuaauauucuuucu

SEQ ID NO: 4175277 - RNA, 87 nt, Human
agaacaagacuuugauggagguugcacucuaguggaauauauuaugacucauaaaugaagugcacaccuuaguacaaaguaaauucu

SEQ ID NO: 4175278 - RNA, 72 nt, Human
agaacacuucuguugauaauaagcuuaaaagauauuuacuuuauuuugcuuacauguucauagaggaugucu

SEQ ID NO: 4175279 - RNA, 89 nt, Human
agaacagccuuuucuggccaccaagcgcugagcauucaugaccuuagccuugggacaggccaaaagggggauaaagguaacacuguuuu

SEQ ID NO: 4175280 - RNA, 57 nt, Human
agaacaggcuuccaggagggacgaaaaggguauuuucggccuuucagaguguguuuu

SEQ ID NO: 4175281 - RNA, 57 nt, Human
agaacaucugaagauacaaaguauuuaauaaccaggugauguguucauagguguucu

SEQ ID NO: 4175282 - RNA, 80 nt, Human
agaacaucuuauccauuuccucuuaauccaguuuauauucauccugagcccaucagagcaggagauggaaugagaguuuu

SEQ ID NO: 4175283 - RNA, 62 nt, Human
agaacauguagagcugucuuuuuuuccaaaugcaucccuuggauuacagagcuacauauucu

SEQ ID NO: 4175284 - RNA, 65 nt, Human
agaacauuccuggaagagugcuuaaguuguaggcaggcuuaccaaaggauauuccaggauguucu

SEQ ID NO: 4175285 - RNA, 69 nt, Human
agaacauuuggcaugagaauuuggucuugacuucacaauauggccaauauuagaucagaccaagugucu

SEQ ID NO: 4175286 - RNA, 74 nt, Human
agaaccaaagaaacccaagcucagggcaucagccccacccaaucucugcccgagccucgguuucuuuucuuucu

SEQ ID NO: 4175287 - RNA, 79 nt, Human
agaaccacaguggagcugaguguccuaggcaugggcuuagcccagcgacugugaccucagcuaaccaauccaguuaacu

SEQ ID NO: 4175288 - RNA, 91 nt, Human
agaaccaucacugagugacagcaguacuucucagagguauuugcagcuugaugcaaaguagucucuaaugaguaggcauucaggugguucu

SEQ ID NO: 4175289 - RNA, 62 nt, Human
agaacccuggaggaggcauaguaagcaaggcagagacugugagaguuuuucuaggagguucu

SEQ ID NO: 4175290 - RNA, 107 nt, Human
agaaccucucagaaucuguuuggagacauuuuaaagagccaugcugaaguuuuuccuggcacugccuaugcaaauguacucuaaggguaggaaggaauggagguuuu

SEQ ID NO: 4175291 - RNA, 82 nt, Human
agaacguaucaacuugcuguaagaggcaaaccugugcaaauuaaguuugucgaaauuaucagcaaacaguugguuucugucu

SEQ ID NO: 4175292 - RNA, 77 nt, Human
agaacuacccacauuucuggacugaaaaggaagugcuaguacccauuuuugacugaggccagagguagggcuguucu

SEQ ID NO: 4175293 - RNA, 56 nt, Human
agaacuagcuucugagcuggguauuaaggauagaaggauccaggucauguaguucu

SEQ ID NO: 4175294 - RNA, 71 nt, Human
agaacuaguuugaaccaggcuaauccaguuccaauugguugaaacuggauuaacuggcucaaaucaauuuu

SEQ ID NO: 4175295 - RNA, 62 nt, Human
agaacuccagggcauugucuccuggggcuaugguuguccucagaagaacaaaccuggagucu

SEQ ID NO: 4175296 - RNA, 60 nt, Human
gaaagugcaugugcccaccauuaguuuagcagauggaaauguauuugggcaugcccuuuc

SEQ ID NO: 4175297 - RNA, 89 nt, Human
gaaagugccaugcagaaauauccuggcgggggaacugcccacacagcugugccaguuauucacccucgccagauucuucaugcucuuuc

SEQ ID NO: 4175298 - RNA, 57 nt, Human
gaaagugccucaguccucuuauacucuguuuucuugcaaagguacugugggacuuuc

SEQ ID NO: 4175299 - RNA, 59 nt, Human
gagcagggcuuguccuccucaucagaccugacccugauagcaagggcuguuuucugcuu

SEQ ID NO: 4175300 - RNA, 65 nt, Human
gagcagggggagacauguguguguuuuaauuuuuaagacauuucauacuauuuuuccaacugcuc

SEQ ID NO: 4175301 - RNA, 68 nt, Human
gagcagggugccucauacaucauaaaaggcuacauggugcgucuuccaggagggugggcaaacugcuu

SEQ ID NO: 4175302 - RNA, 84 nt, Human
gagcagucagauggauggagaugcuuucucugagauggagacgcugagagcaaagcaugucuagggggccgugaugaagugcuc

SEQ ID NO: 4175303 - RNA, 99 nt, Human
gagcagugauccuauuugaaugcaauagcauuuuuaagggaaucagguccagccaauuucugauucuguaaggcuaaauucuauuaggcauuaaaacuc

SEQ ID NO: 4175304 - RNA, 56 nt, Human
gagcagugcuaggaguguugagccuuuaaaguucauugaaauguuucuagcugcuu

SEQ ID NO: 4175305 - RNA, 58 nt, Human
gagcaguggucacagggagggacauuaagagugugugccauucuagguggcagugcuc

SEQ ID NO: 4175306 - RNA, 87 nt, Human
gagcaguuauuguuguacccauuuugucaguagggaaucuaagguucagagagaccaaguggcguguccaaaauaaugauucugcuu

SEQ ID NO: 4175307 - RNA, 91 nt, Human
gagcauaguacacaguggaaauaacguggacuuuaggauaguauuauuauagaaauccaguuugucauuucccagcugugugaccuuguuc

SEQ ID NO: 4175308 - RNA, 78 nt, Human
gagcauauucuuuugaaacuauuuuaauguuaggcuuaagagagaauauauugaaguaguuccauuugugaguagcuc

SEQ ID NO: 4175309 - RNA, 79 nt, Human
gagcauauuuauaauaguuacuuugaagucugucuggugauuccagaaccuguuuagagucauuuuauauugacugcuu

SEQ ID NO: 4175310 - RNA, 60 nt, Human
gagcaucaaagugaucccagugaugucauguagauaggcacagagaaaauguuggugcuu

SEQ ID NO: 4175311 - RNA, 59 nt, Human
gagcauccccaaccccccaguuuacauaaaacccuuaaaaccugggguugccugugcuc

SEQ ID NO: 4175312 - RNA, 58 nt, Human
gagcaucugaugagauuggauuugucaauaagggcaguagccaggcccacggguguuu

SEQ ID NO: 4175313 - RNA, 105 nt, Human
gagcaugcuugucauugcagcaugauuacauguggagucugauugcagagggguuuugcuuuugguccacauuugauuuucauguaaguaaacuagguuaugcuu

SEQ ID NO: 4175314 - RNA, 62 nt, Human
gagcauggauagaaggugggauagagaauugggaucacuuuugcaauccaucuaccauguuu

SEQ ID NO: 4175315 - RNA, 65 nt, Human
gagcauggcauuaacaagauggaaggcuaacuuaauggaaguuccauugauaaaaugccauccuc

SEQ ID NO: 4175316 - RNA, 65 nt, Human
gagcauggguaccccuucugugcagaaggagacaccacagugucuugcagcagaagcccaugcuc

SEQ ID NO: 4175317 - RNA, 117 nt, Human
gagcauggguaucaucacuguugaauugugagguagccuuuggagggcccugguacaagcucccaguggugccuggcucuaucagugguggacauuacagaugaaugcccugggcuc

SEQ ID NO: 4175318 - RNA, 68 nt, Human
gagcaugguuccauagguuggucuuguuucaaucaagaaaauccucauagcagccuggaauccauuuc

SEQ ID NO: 4175319 - RNA, 57 nt, Human
gagcaugucgcuggcuuucccgggccuugguuuccaggcuggucgcgugcaugucuc

SEQ ID NO: 4175320 - RNA, 61 nt, Human
gagcaugugggggcaguggaguuagcuaggccugaaagccugcagcugccacgcccugcuc

SEQ ID NO: 4175321 - RNA, 60 nt, Human
gagcaugugugugcaccucugugcauguuuuugcguguguauuauugcauacacauauuc

SEQ ID NO: 4175322 - RNA, 63 nt, Human
gagcauugccacauggugcauuuccuagguaggcaugucuaaaaucauuaaguggccuagcuc

SEQ ID NO: 4175323 - RNA, 83 nt, Human
gagcauugccuggggacauggagcuccauggaggcugagcuccaggcucccugggugcuccugcucccagcccaggugauuuc

SEQ ID NO: 4175324 - RNA, 75 nt, Human
gagcauuuuggauugggcauuucccacugguugaugcacacagccaugugugguacagucccguuuaagauccuu

SEQ ID NO: 4175325 - RNA, 68 nt, Human
gagccaacgggcauccgaugugcacuggugcagcacccacugaggcacaggcagugcccccgcggcuc

SEQ ID NO: 4175326 - RNA, 56 nt, Human
gagccacagaaggaaauuggggauaggaaaggucuaaaauuuuguuagugugguuc

SEQ ID NO: 4175327 - RNA, 130 nt, Human
gagccacccacauuccuccaaucuuuuuauuguaaauuucuauccacuuuucacuaagaugaauuuguuuacaguuuauuuuugauaagucuugcaauacuuuuuggggaguguuaggggaaagaaacuc

SEQ ID NO: 4175328 - RNA, 67 nt, Human
gagccaccugcccuggccacugugcccaggucauccuucauugcuuggugagcacacccagggucuc

SEQ ID NO: 4175329 - RNA, 79 nt, Human
gagccacugcuuuaacagguaaaguaaaugugcuaaccaggcacacgcacaugccugauugacaagcauaugucggcuc

SEQ ID NO: 4175330 - RNA, 64 nt, Human
gagccacugugugcacugaaggcuucuccaauagcccuccaugagacacaguguaauaaagcuu

SEQ ID NO: 4175331 - RNA, 67 nt, Human
gagccagagauucacguuccaggagcccugacugucucaucucagggaauugaaucuccuugugcuc

SEQ ID NO: 4175332 - RNA, 74 nt, Human
gagccagccagccagggugcuggggcucagcucuugagaaaaauguugauguaaaagccuugguggccugguuc

SEQ ID NO: 4175333 - RNA, 91 nt, Human
gagccagccccagcccgccuggccgcucgagucacccuuaccccucccgaggaguggcgaggggagguccuggcggcgccggcggcggcuu

SEQ ID NO: 4175334 - RNA, 61 nt, Human
gagccagcugagcugcacugucugucugucaugcuuagagagugacgaccucggugggcuu

SEQ ID NO: 4175335 - RNA, 66 nt, Human
gagccagggcugugagcugagcgccacuagaucaagaaaugucagcuuuucucucagcuuuuccuc

SEQ ID NO: 4175336 - RNA, 58 nt, Human
gagccagggucucucgcucuguugcgcaggcuggagugcaauggcaugaucguggcuc

SEQ ID NO: 4175337 - RNA, 67 nt, Human
gagccagucaguggggccugggccuccugggaggaaggaagaggccugagucccaccuggcugucuc

SEQ ID NO: 4175338 - RNA, 64 nt, Human
gagccaguuggcuaugaggaggagggaagcgcauucaccuuuugucuucuuuauguuauggcuu

SEQ ID NO: 4175339 - RNA, 72 nt, Human
gagccauaugaaauugccauuuuuaaaggucaaaaaugauagacuauuggcaauuggcaauuucguaugcuu

SEQ ID NO: 4175340 - RNA, 57 nt, Human
gagccaucuuuucccccggcagcccagcagcucaccacuggggaggaggauguguuc

SEQ ID NO: 4175341 - RNA, 62 nt, Human
gagccauguaccuacaacagcaaaggcucagacaagccuucuccugccuuggguucaugguc

SEQ ID NO: 4175342 - RNA, 104 nt, Human
gagccauguguuguagguggccaugcuuggagcuggggaaacugagggaggcuuggagaggagcuguccuucagccucccagcucaaaguggcugccagggcuc

SEQ ID NO: 4175343 - RNA, 107 nt, Human
gagccauuccagagauagaauacggcacuauaaccuguuagaauagauaucaaaugucaaggauaacugggcuuucggguuuggaugccuccucucaggaauugcuu

SEQ ID NO: 4175344 - RNA, 74 nt, Human
gagccauuucccccugauuugugucugacaggggagcacugaggcugagauaucagggaggaagacaaaggcuc

SEQ ID NO: 4175345 - RNA, 55 nt, Human
gagcccaauuauuuuuaaggaugacgacagugcaugcuguuaagauaauggguuc

SEQ ID NO: 4175346 - RNA, 55 nt, Human
gagcccagcugcggcccucagcccugcccggugggcgcaggagcagacugggcuc

SEQ ID NO: 4175347 - RNA, 64 nt, Human
gagcccagguucugcuuccagcaccacucaggguguuaggucauagguagaaccugcacaguuc

SEQ ID NO: 4175348 - RNA, 128 nt, Human
gagccccaggacccaucaguccugcuggacaacugugagacugcuucugaacccagugaccuccaucucugggagcaguugcaucuccaguggucuccaccacaggcuggacagggucaagguggcuu

SEQ ID NO: 4175349 - RNA, 56 nt, Human
gagcccucauugaaucugcauuuuauagcauguacugugcaaguuucggggguauc

SEQ ID NO: 4175350 - RNA, 68 nt, Human
gagcccucgggcgagcccgcgcggggcugcacuccaccgggccggcgcugggggccgcgcgggggcuc

SEQ ID NO: 4175351 - RNA, 65 nt, Human
gagcccucuucugaugccaguaaccaugaugacucaacacggucacccaucagaguccagggcuc

SEQ ID NO: 4175352 - RNA, 67 nt, Human
gagcccuggcagguuacaaccaguuagcaccagagucugccuugaagaguuuccagccugcuugcuc

SEQ ID NO: 4175353 - RNA, 58 nt, Human
gagcccuguagcaagucaugucccuguaacgaugagugagcugacagcuaaggggcuu

SEQ ID NO: 4175354 - RNA, 69 nt, Human
gagcccuguguggggcugggcagugcagggaaggaaggaggcugagcuugcagugccagccuugggcuc

SEQ ID NO: 4175355 - RNA, 67 nt, Human
gagcccuuccaauugugagauuuuuuaauuauuauuauuauuuuauucuuuggagagauggggucuc

SEQ ID NO: 4175356 - RNA, 71 nt, Human
gagccggcggcagacggggauuggcaggcgcccgagcccagggcccgggccauggcugccccacaggccuc

SEQ ID NO: 4175357 - RNA, 89 nt, Human
gagccggucucuuuacaucucaaauaccagguauuuagguggcuuucuuggaaccuggcauuagggacacgugugaacgggccaggcuc

SEQ ID NO: 4175358 - RNA, 79 nt, Human
gagccuaggacaauggaggaccauccugguuucaccagaucacuacuaggggaaccagggggccuuccuucccacacuc

SEQ ID NO: 4175359 - RNA, 69 nt, Human
gagccuauagggguuuggaaagcagauuuuaugaaauuuaggaugagauauauuuccugcccaaggcuc

SEQ ID NO: 4175360 - RNA, 80 nt, Human
gagccuccauuuccuucuguuacaagucuugcauuguaaaacagcaaaggcaaacauuccacagaaggaaggaaagguuu

SEQ ID NO: 4175361 - RNA, 59 nt, Human
gagccucuggcuuucuggggccaucucaacaucagagauauauccagagcacagagcuc

SEQ ID NO: 4175362 - RNA, 113 nt, Human
gagccugaaucccccucaccucuagacggcacuuuccagucuauagagcagguucccauacagcuuuguaagguaggugugaucaggcgcucucaaggugaggaaacaggcuc

SEQ ID NO: 4175363 - RNA, 63 nt, Human
gagccugagccgccugagcggcggcguggcgcaggccgagcucuaccuggcggcucacggguc

SEQ ID NO: 4175364 - RNA, 70 nt, Human
gagccugcagcugacuucauaggaagacacaaaauaguuggugucucccuuuugagaggcucagaugcuu

SEQ ID NO: 4175365 - RNA, 57 nt, Human
gagccugcgcugccgccacccuuuaucuccaacgcgggagcgggacugcgcaggcuu

SEQ ID NO: 4175366 - RNA, 88 nt, Human
gagccugugcuuugagcagggcucugaaggagacagcugcuccugggcauacuggagccauuuccuucagggucaccagcucagguuc

SEQ ID NO: 4175367 - RNA, 81 nt, Human
gagccuugcagauuacaugauaauuauacuuaagggcugccaaggaacuucaggaauaauuaucauaugauuugcagguuu

SEQ ID NO: 4175368 - RNA, 58 nt, Human
gagcgacgcccaucgcgcuaccuccagaccaggagguagggcuaggcugcgucugcuc

SEQ ID NO: 4175369 - RNA, 75 nt, Human
gagcgagagcuggcuuucugcaaaucuccauggaauccagcuauggcccugugcugaaagcaaucaauucucauc

SEQ ID NO: 4175370 - RNA, 105 nt, Human
gaaagugcuguguuacagagcccuuagggucagcagccuccgaaccccugcacggaaccaggggcuggauuacugaacugagucugucucacaugcaaagcuuuc

SEQ ID NO: 4175371 - RNA, 106 nt, Human
gaaaguggggagagauaugguugggaaggugaacaugaugcagauucuaaaaggccaauggagcacguagcguuaguugccuacccaacagucacaacccccuuuc

SEQ ID NO: 4175372 - RNA, 94 nt, Human
gaagcagugcauuaauauuucuucuaaagcccuuuguacacacaguaguccuacugaaggaaugaaugacauauuagcucuauuuauaugcuuc

SEQ ID NO: 4175373 - RNA, 130 nt, Human
gaagcagugcucucuagugaggaugggggucugucugcaaagauuggaagccacacucauucagugggcuccaaaauccuguagccucccucuauaucuuaauaauuuuuuuuuuuugagacagaguuuc

SEQ ID NO: 4175374 - RNA, 57 nt, Human
gaagcauauagguacugaacuagcaaauaaaggauccucagucaguaccggugcuuc

SEQ ID NO: 4175375 - RNA, 61 nt, Human
gaagcauggagaccguggugauaguugccauaggugugcuggccaccaucuuucuggcuuc

SEQ ID NO: 4175376 - RNA, 121 nt, Human
gaagcauguaaagcuagguggaccaaugcauucugcagauauucucccaaguguugcauccaaguggaugaacuggaaggauugcagaugucauuguagaugaucuagugccaggugcuuu

SEQ ID NO: 4175377 - RNA, 62 nt, Human
gaagcaugugucugugaagugaguagaugagugcauaaaauaucuuugucagaacaugcuuc

SEQ ID NO: 4175378 - RNA, 61 nt, Human
gaagcauucacaccaugggcuauuacggcaugacccggaaggcagugaugugaagugcauc

SEQ ID NO: 4175379 - RNA, 56 nt, Human
gaagccaauauaaaagcaugugauuaaauaauccagaugcugaauuauugugcuuu

SEQ ID NO: 4175380 - RNA, 80 nt, Human
gaagccacucugcagcucggccagcuguuccuugaccucacaggucugggagagcacguggcugacagcgguguggucuc

SEQ ID NO: 4175381 - RNA, 83 nt, Human
gaagccaugacugugugcccaguccuggccaguaacaugaagaaaacagguccucagguggggaggcaugcaguucugacuuc

SEQ ID NO: 4175382 - RNA, 86 nt, Human
gaagcccagaggguccuccuuccagguccagggauguggacaagugccguuuugcauuuuccuagccuggaagauccucuggcuuu

SEQ ID NO: 4175383 - RNA, 129 nt, Human
gaagccugcagggguggcgugggaggggaaagaaaagaugaacugucuucacccauggcuagauccagaggcugaaugaugucaucaugucucucuuucccuuaucuuggucacucaucucugcuuuuc

SEQ ID NO: 4175384 - RNA, 84 nt, Human
gaagccuuauguuauuuucuaagauaaaacuugaaugaaauuucuugaaguuucuugaaucuuggagugggacuuucaggcuuc

SEQ ID NO: 4175385 - RNA, 87 nt, Human
gaagcuaacuuccucaaugauucugggaguguaggaugguuacgaagccaauuucaacugucuugccuacucagcauuggcuguuuc

SEQ ID NO: 4175386 - RNA, 87 nt, Human
gaagcuaucugauugcaccggucacuuucauuagguuaacaugugcacauuuagccaaacaggugaaauugauuuaugccaggcuuu

SEQ ID NO: 4175387 - RNA, 79 nt, Human
gaagcuauuacugcaugcaccuaagcuucuagaaguuugcaccugaaaagcuucugagguccaugcaguacugagucuc

SEQ ID NO: 4175388 - RNA, 114 nt, Human
gaagcucuguaguccuacacugaaguguguucccuuggcuguucauauggggcuggguuugguugaacuuccauucuguauaaaugcuagaacacaguuacuacagauugauuc

SEQ ID NO: 4175389 - RNA, 77 nt, Human
gaagcugcacauuguccucugaugccuucccuggauuugugcagagacugggagggcuuucagggaggaucaguguc

SEQ ID NO: 4175390 - RNA, 73 nt, Human
gaagcugcccugggucuugcugcugccucuccccuucaaagcagcugucuccagauacaggauugccagcuuc

SEQ ID NO: 4175391 - RNA, 105 nt, Human
gaagcuggggaagggaauugcaggcagcagaaguagaaguacagguaaacugcacacauguguuucgagacuguugaguaguucagugacuugucccuaagauuc

SEQ ID NO: 4175392 - RNA, 121 nt, Human
gaagcugugcuugcuuugaaagagcugugcuaaguaucugcagaauagcugcuccaaaaauggaaucuuuauuccagguacuugguuucuaauuuuuuuuucucuugcagguguaaccuuc

SEQ ID NO: 4175393 - RNA, 57 nt, Human
gaagcuguggggaggaggcuagcagaugcucuuugcauccuucuugucaucagucuc

SEQ ID NO: 4175394 - RNA, 55 nt, Human
gaagcugugugaagcucugaaguuguccuuagucucacguggucacaugagcuuu

SEQ ID NO: 4175395 - RNA, 130 nt, Human
gaagcuguguuuccugagcuggagccagagaaucggucugggaucccugagggccgguuguuuuuaccauagaugacaaguacaggggccuguccuggcuucugcugguaccagcuugcauaauagcuuc

SEQ ID NO: 4175396 - RNA, 78 nt, Human
gaagcuuacacaacugucuuuauauauuuggaaaauuucagcugaaagagagagggaguagagauugugucuggcuuu

SEQ ID NO: 4175397 - RNA, 69 nt, Human
gaagcuuccugcagcuccugagcucagagacagcaguggcuucucugugcaggaugcugaguucacuuc

SEQ ID NO: 4175398 - RNA, 102 nt, Human
gaagcuuuuauugcccuagaaagaggcugcccauaaacuuuccaccugcuuuaaccgcuggggaauguguggguauccacgauuucuggccaaugagaauuu

SEQ ID NO: 4175399 - RNA, 128 nt, Human
gaaggaaaggaugaaguacaaauuguguaaggguugacuuuacaguuuucuuagggcaauagucugcucuaugaaaaacuguuaagcucuuuucaugacagaauaccuuuaugacaucccuuucauuc

SEQ ID NO: 4175400 - RNA, 96 nt, Human
gaaggaacuuuugauuuggacugauagaauucacccggagcuggagagcuauucugaguggaaacuaucaauacauuuagacugauuuguuuuuuu

SEQ ID NO: 4175401 - RNA, 91 nt, Human
gaaggaagacaccaugggacaggccagacaggagacugagaauucugaaaccuuaguccucaucuuggcuugguccuuacggucuaccauc

SEQ ID NO: 4175402 - RNA, 55 nt, Human
gaaggaagaggugcuuuuaccaccacccaaggaugaaagcagugauuucuccuuc

SEQ ID NO: 4175403 - RNA, 88 nt, Human
gaaggaagcagcuguuuugacuuauuccuuugaguuucuuuaaauuaccuuaguuucauaugcaaaauaguauuaacaugcuuuuuuc

SEQ ID NO: 4175404 - RNA, 80 nt, Human
gaaggaaggccagagagaguacugggcucugagauagagauuuccguuccagcauuuauguauuuuucuaguuaucuuuc

SEQ ID NO: 4175405 - RNA, 62 nt, Human
gaaggaauucugagcuuagauugcuugcuucuuuuagcuugaauacagugaagaauuucuuu

SEQ ID NO: 4175406 - RNA, 95 nt, Human
gaaggaauuuugcucuugucacccaggcuggagugcaguggcaugaucucgucucacugcaagcucugccucccggguucaagcaauuccccuuc

SEQ ID NO: 4175407 - RNA, 73 nt, Human
gaaggacaagauuuuaugacucuuuuuccaggacaccuggcaaagccaaauuuucaucaaggucauugcccuc

SEQ ID NO: 4175408 - RNA, 106 nt, Human
gaaggacagacagggucggcucuugguggguuaaguggggcguggcugugugcucagcugaggaauacuagauguaugcagaaugagaugauucgguuuguguuuu

SEQ ID NO: 4175409 - RNA, 57 nt, Human
gaaggagcuaccaagacugaauguggcuaauaaagccucuuuaguuccuggcccuuu

SEQ ID NO: 4175410 - RNA, 65 nt, Human
gaaggagggaagcccagcuguucccacuguucucaccacaugggagcagccugccucccaccuuc

SEQ ID NO: 4175411 - RNA, 76 nt, Human
gaaggagggccagcggcacagccuggcccuggaccgagcacaccggggccgucaauggacucgcuggagguccuuc

SEQ ID NO: 4175412 - RNA, 79 nt, Human
gaaggaguagggacagagacuugcuggaggcaccuggagaguguguuuccucacuucucugacucuucccagauccuuu

SEQ ID NO: 4175413 - RNA, 68 nt, Human
gaaggaguaggucaugcucuaauuugcauccauggauguauguuaguguauuaucuaaaugacacuuc

SEQ ID NO: 4175414 - RNA, 73 nt, Human
gaaggaugauugaagaaugugucugaucauuguaaagauuuucaaauacauggucaaucaacuuuuguccuuu

SEQ ID NO: 4175415 - RNA, 71 nt, Human
gaaggauucaccuacaaguuucaaagagaucauggcucugcugacaccuugauuuuaaacuucuagccuuc

SEQ ID NO: 4175416 - RNA, 65 nt, Human
gaaggauugcccagaagagacgugaaggggagcauuagcaucucuucauggccaucugguucuuc

SEQ ID NO: 4175417 - RNA, 86 nt, Human
gaaggauuugucacaaagcgcgguggucgguuaccgguuaccacauaagccaaggccuugaucugcuguguuugaggaaacccuuu

SEQ ID NO: 4175418 - RNA, 78 nt, Human
gaaggcaaaggggaaugcuuguggguucuaguucauuuuugagggcuccagcucaaauucagcuuccaguuugucuuu

SEQ ID NO: 4175419 - RNA, 76 nt, Human
gaaggcaaucaagcagagagguuagaacacaggcuuuggaauuagaccuggauuugaauuccucucugaugccuuc

SEQ ID NO: 4175420 - RNA, 68 nt, Human
gaaggcagcuaagauggauaaugaacagugaugauaauucaggucauuuagccguucuuaguucuuuu

SEQ ID NO: 4175421 - RNA, 68 nt, Human
gaaggcauucuauucuacauauuggagccaaagaggaagaaaaaagugugaggaugagucaugccuuc

SEQ ID NO: 4175422 - RNA, 57 nt, Human
gaaggccauuagagccugugccuuuucuuuggcuuccuugcagucucucuggucuuc

SEQ ID NO: 4175423 - RNA, 55 nt, Human
gaaggccguucaaaccucaacauugaucacccggugcagaggacguggcggccuc

SEQ ID NO: 4175424 - RNA, 55 nt, Human
gaaggccuaggaaggaagccuuaagcuacuugaugcugcuucuuaacuggucuuu

SEQ ID NO: 4175425 - RNA, 92 nt, Human
gaaggccugaagaagcaucuaggugacugacauacagggaauucaucccuuaucuuucuguccuagauucugagcucuuuucauuugcuuuc

SEQ ID NO: 4175426 - RNA, 82 nt, Human
gaaggcgaaacuuaagacacauuucucagacgggccugggccacuuuccugugcugagugaugugacuuacgauguguguuc

SEQ ID NO: 4175427 - RNA, 75 nt, Human
gaaggcugcaguucucaauuucuauugaucauaauuucuauacauuuauggaauggagaaagucugcagcucuuc

SEQ ID NO: 4175428 - RNA, 80 nt, Human
gaagggaaggaagugaaguggcagcuagaaaucaggcugugagccugaaguuucacgcgucauucaauguccaaucuuuc

SEQ ID NO: 4175429 - RNA, 63 nt, Human
gaagggacaccagaagacauaagcagaaggaaggcuuuugcuccugguucugguguacuuuuc

SEQ ID NO: 4175430 - RNA, 78 nt, Human
gaagggauucugguuguguuuuacacuuggggagugucuuucuucaaagauuugauaaagccacgagugagugccuuc

SEQ ID NO: 4175431 - RNA, 77 nt, Human
gaagggauuguguuuuuaguaugcacuggguuuaccaaagguguaucuuauguuguauucaaaaucgccauucauuc

SEQ ID NO: 4175432 - RNA, 55 nt, Human
gaagggcugcaggucugggcccccuuuuuggguacgcuggccccuaucucccuuc

SEQ ID NO: 4175433 - RNA, 66 nt, Human
gaagggcugcaucacaauggccuguagacuucauccuucccucacucugccuguguucagccuuuc

SEQ ID NO: 4175434 - RNA, 63 nt, Human
gaagggcuuauuuacccucacugcagcccaacuaugcugcucuguaaucuaaagaagcucuuu

SEQ ID NO: 4175435 - RNA, 87 nt, Human
gaaggggaaggaaagggucaucauucugacaagucuacauaccaaauugguugcagagcuuaagagagagcccacaucuucuguuuc

SEQ ID NO: 4175436 - RNA, 76 nt, Human
gaaggggaggaggccaguggaaggaagcacugauuccucugggaguccuggcuucuaucacugcuucugcucuuuc

SEQ ID NO: 4175437 - RNA, 125 nt, Human
gaaggggguuagauggaggaaguaauaauugggccucaaauccuauuauauuucuuuuggauaguguaauggagcuuagaguuaucccaaggauguuaucgccgacaucuuucuuuaccccuuuc

SEQ ID NO: 4175438 - RNA, 58 nt, Human
gaagggguccugucaacaaacaaugggaagcuucagucucaacaggauccuccacuuc

SEQ ID NO: 4175439 - RNA, 68 nt, Human
gaaggggugucuuggaaaguuaucauuuuccuguacucagcuagaauguuccuuuucauuuucccuuu

SEQ ID NO: 4175440 - RNA, 61 nt, Human
gaagggucuuuaugcaaauaccuuucaggaaggcgugcgccucaccuguguuugcuccuuc

SEQ ID NO: 4175441 - RNA, 58 nt, Human
gaagggugggagaaucuuuaauccuuggcaugggggaauuaagaaucucugacucuuu

SEQ ID NO: 4175442 - RNA, 73 nt, Human
gaaggguugaggccagacauaucgcucccaaacuuaaacaguuuccacgugagaguuuggcuccuaaaucuuc

SEQ ID NO: 4175443 - RNA, 63 nt, Human
gaacuaaaguucacggucagcuuuaggaauucuaaaaggcugaaagaccuugaaccuuaauuc

SEQ ID NO: 4175444 - RNA, 62 nt, Human
gaacuaaaugaaauuacugguguucaguuuucaccuauaaaaccagcaguuucaugugguuu

SEQ ID NO: 4175445 - RNA, 78 nt, Human
gaacuaagugguggagccaggaaaugugguuugcauuaucauauguggcuucaaguuuugccuccccauccucaguuc

SEQ ID NO: 4175446 - RNA, 63 nt, Human
gaacuaggagacucccagcuagucuugguaguucccaagaacugugcuccaggcuccaacuuc

SEQ ID NO: 4175447 - RNA, 90 nt, Human
gaacucaggugugugguggaaggcagcacaugugaccuaaucuauauuuugacaaagaagaaagcucccugcccucccuugcaccaguuc

SEQ ID NO: 4175448 - RNA, 55 nt, Human
gaacuccagggaacagagccaccacauugacuguggccugauacuuccagaguuc

SEQ ID NO: 4175449 - RNA, 122 nt, Human
gaacuccuaacccacaagcucucuccccucuaccuucccuuuccugagccacggcccagucaguuaaucugggcucugaagggugacagguuuggggauaaaagacaaaaacccauggaguc

SEQ ID NO: 4175450 - RNA, 75 nt, Human
gaacucugagacgcaguguuggggaacagugggagcucccagcucagcacccagcacucagcaggcucauaguuc

SEQ ID NO: 4175451 - RNA, 84 nt, Human
gaacugaaaugauaccuucaggugaguccagaguccaaauccucaaaggagggauuuaggaaaggauucgagaggaucagguuu

SEQ ID NO: 4175452 - RNA, 67 nt, Human
gaacugcaaccccaggacaaguucugaccugacccagucuggcccaggcuccuggggcaccauguuc

SEQ ID NO: 4175453 - RNA, 71 nt, Human
gaacugccuggccagacccuauagagguacaauuaggucacucuagggcaucugaccauggguggcaguuu

SEQ ID NO: 4175454 - RNA, 68 nt, Human
gaacugcuuuaucugagaaguccuuuaaauugcuucgucugaggaaaagaagaggguaaaggcaguuc

SEQ ID NO: 4175455 - RNA, 89 nt, Human
gaacuggacuuaauuauuuagauaugguuggaguagcacagacccaagcaaaacugcaccuccuuuguuuuagauuauaagucuaauuc

SEQ ID NO: 4175456 - RNA, 69 nt, Human
gaacugggcucaggggaccuccuggugccaccugcauaucugagcccauggaguuccucuggucuauuc

SEQ ID NO: 4175457 - RNA, 56 nt, Human
gaacuguauaggagcaguguuucuuuauuucacuggaaauauuuucuugacaguuu

SEQ ID NO: 4175458 - RNA, 66 nt, Human
gaacuguaugaaauugucauuuuuauagguuaaaaauugugaaauguugguaauuuuauauaguuc

SEQ ID NO: 4175459 - RNA, 107 nt, Human
gaacugugagaaauacuaaguuggugcaaacguaauugugguuuuugcaucaaccuaauaaaaaacugcaauuauguuugcagaaaccuaauauauuucuguuguuu

SEQ ID NO: 4175460 - RNA, 59 nt, Human
gaacugugcugguccagggagcugguuuugagaagccugggcuuccacgagcagagguc

SEQ ID NO: 4175461 - RNA, 119 nt, Human
gaacuguuuuuuaauaugagacugagggaugauauccuggaucucacaggggcuggauuuugccugaguguuagagcuaagauaacaucuuauucuugucuauauuucaagaagcauuc

SEQ ID NO: 4175462 - RNA, 65 nt, Human
gaacuuaguagucuacuucuuauugcuguaccucaaaccagugccaaaguauggcucuuagguuc

SEQ ID NO: 4175463 - RNA, 61 nt, Human
gaacuuaguuuuucucugacccuguugaaucacaguucaacaauagagauaaagugagauc

SEQ ID NO: 4175464 - RNA, 55 nt, Human
gaacuugaaugagaacuuuugccaaucuaugauuugagcauguccauucacguuc

SEQ ID NO: 4175465 - RNA, 105 nt, Human
gaacuugcuuuucaaagguagcaugcaagacaaucuuuaaaauccuuacuggauucuuagacaugaucuuguucuuacaugcagcagaacuuguugagaaguuuc

SEQ ID NO: 4175466 - RNA, 69 nt, Human
gaacuugggcagcauccuccacagucaaacguucuaagcucuuuugugugacugggcuggcccauguuc

SEQ ID NO: 4175467 - RNA, 62 nt, Human
gaacuuggugggggagggaauagaugucugccgaccauauucacagcugccgcacucaguuu

SEQ ID NO: 4175468 - RNA, 68 nt, Human
gaacuuuaucaaaaguuguuuaccauuguggaauaucacauuacuaacaauuguugaacuuaggguuu

SEQ ID NO: 4175469 - RNA, 55 nt, Human
gaacuuuauugauucucagggguugcagcauaaacuccugagauuuaagggguuc

SEQ ID NO: 4175470 - RNA, 92 nt, Human
gaacuuuugaaaaauauguauaucugugucccaaaccccaaaaucccagauuuaauuggugugggugggacaucaucuuuuuuuaaaagcuc

SEQ ID NO: 4175471 - RNA, 66 nt, Human
gaacuuuugggaagccgugugacugucaucauuccagcuagaacacuuucuuccuccagaaaguuu

SEQ ID NO: 4175472 - RNA, 59 nt, Human
gaagaaaggacagagugaaacugucagcucauguugccucagugcuuccuccuuucuuu

SEQ ID NO: 4175473 - RNA, 68 nt, Human
gaagaaagggcacagggaaagagugcaccuaaaccuacaggugugauuaccucugugccuugggcuuc

SEQ ID NO: 4175474 - RNA, 78 nt, Human
gaagaaaguggguuuauuguauuucccuuaagauugugagggaguguggauacaguagaaugagccaacaguuucuuu

SEQ ID NO: 4175475 - RNA, 71 nt, Human
gaagaaauugugaucaaaagcugggauuguuuucagaaaaaccuuauccuggcuuuaggucagaggccuuu

SEQ ID NO: 4175476 - RNA, 79 nt, Human
gaagaacacaauuuuuuaucuauguuuucgcgaaggggaccagagcguuccuuccuuuguggggcgguggguaaucuuc

SEQ ID NO: 4175477 - RNA, 61 nt, Human
gaagaacauguuaaaagauucacauuuagaaauucuggaguggggcccaggacuguucuuu

SEQ ID NO: 4175478 - RNA, 88 nt, Human
gaagaagaaguucucuggggacuugguuggagccggaccuguccgauaugguuuccaauccaaacuucaccuuuaaggaagucuucuc

SEQ ID NO: 4175479 - RNA, 56 nt, Human
gaagaagaugaguaauuuuuccuuaaugauggaaacauucucuccaugucuucuuu

SEQ ID NO: 4175480 - RNA, 82 nt, Human
gaagaagggggcgaagacgugauugaaugugucggugcucauuaguucuucugucagucgaucacgaggugccguuuucuuc

SEQ ID NO: 4175481 - RNA, 66 nt, Human
gaagaauggaguugugcuguccgcggugcugaaaguuccgaucccauguagugacuucauuccuuc

SEQ ID NO: 4175482 - RNA, 129 nt, Human
gaagaaugggccagggcugggagacaaagacccagauggcgaggccgggacaggcuggaguccggcuucuccgguccaggaugcccgcuuuugcuuuuucaaaagucucaugcccugugcuuuuuccuc

SEQ ID NO: 4175483 - RNA, 103 nt, Human
gaagaauguguagaaacugagagaagggauuuuaagucacccuuucauaauucaccucagaggauacuaaacauucuugucucucaauaaguacaucuuuuuc

SEQ ID NO: 4175484 - RNA, 83 nt, Human
gaagacaacguuaaagguaacaugaacugcuuuugccaugaggcaauaaagcuguaaaugauuaucuuuuuaguucaguuuuu

SEQ ID NO: 4175485 - RNA, 69 nt, Human
gaagaccuauuuguucaguggagagcaaggcuuacaucuaccuguuacuccuuuggcagauuaugcuuu

SEQ ID NO: 4175486 - RNA, 61 nt, Human
gaagaccuguuagcauucagcugcauuccuguggauuagaaagcuccagugcugacgcuuc

SEQ ID NO: 4175487 - RNA, 79 nt, Human
gaagacggcccaaaccaaguaccucaaauccagugucccaagaacuguuuuuaguguuugagguuguguaccugucuuu

SEQ ID NO: 4175488 - RNA, 63 nt, Human
gaagacucacaagugaugugaauggcaaagcuuggcuugaagcuguucccuugugccucuguc

SEQ ID NO: 4175489 - RNA, 69 nt, Human
gaagacuguuuuucggugugaggcaugaggcacguaagcuguaaagugcucuucaguggugagcucuuc

SEQ ID NO: 4175490 - RNA, 111 nt, Human
gaagagaaagagggagaagggggggagagagagagagagagagagagaggcauuucagcuuuagcuuaauuggcuuauuuccucaaacccauugcuuugucgcguuucuuu

SEQ ID NO: 4175491 - RNA, 96 nt, Human
gaagagaaucauaaugcuuugauucaaaaaccacuccacgacuuuuagaaaaaccacaccuagucugugggcaugggaaucucaaugaggcuuuuc

SEQ ID NO: 4175492 - RNA, 78 nt, Human
gaagagagacaugcauugagaauuucucagggaugaggauggccaaaagauucuagagaacucgagugccuuugauuc

SEQ ID NO: 4175493 - RNA, 89 nt, Human
gaagagagaggucucagggaugguugagaauugguacuguagcaagaaaggauaccaauuccgaucacccaauaaauaucccugucuuc

SEQ ID NO: 4175494 - RNA, 94 nt, Human
gagcgaucccauuuugaaagccagcuuuucuuaucauuauaaggcaacuguguuuauaagaauaagacaaggcuuccugcugagaaacaugcuc

SEQ ID NO: 4175495 - RNA, 72 nt, Human
gagcgccuaaccuggggcgguuucccaauaagucugucuaacguugggaccucuggcccagaguaguguauc

SEQ ID NO: 4175496 - RNA, 57 nt, Human
gagcgcggugcagccccuggaguugagcacgcuuuguuuuccccugcucuggugcuc

SEQ ID NO: 4175497 - RNA, 61 nt, Human
gagcggaaggccuggcugauccggagccccaaaaggaauucugacaacaugccuuuugcuu

SEQ ID NO: 4175498 - RNA, 81 nt, Human
gagcggccagccagauaagcagcagccguuauaggcuugagccugauaaaaaauguugcuugaggccgggcaugguagcuc

SEQ ID NO: 4175499 - RNA, 89 nt, Human
gagcgggguggcauuaggccaggugcauagcccagugcugcucucucuggacuuucugcucucucuggacuuguuugcuagcugagcuc

SEQ ID NO: 4175500 - RNA, 87 nt, Human
gagcuaaauugccuuuucauguuuuauucaguaauuauagauacuauaauuucacugauaugaagucauucuacaggcaguuggcuc

SEQ ID NO: 4175501 - RNA, 126 nt, Human
gagcuacaugaugguuguucuuucguuccuccauuggauccuucaacauuuuugaacaucuauuauuuuaaaggccuugagcugggugccagggauauaaagaugaaagaacagaauucauaucuu

SEQ ID NO: 4175502 - RNA, 84 nt, Human
gagcuacauuaagcugccagccuucauuaucaauccaugcacuucucauuaggauaaacagaggcauggcauggaugguggcuc

SEQ ID NO: 4175503 - RNA, 56 nt, Human
gagcuaggccugaccuuggaguuugagaucacuuccaagaaguagggccuggacuu

SEQ ID NO: 4175504 - RNA, 79 nt, Human
gagcuauugguccuaggaagggcagggccuaaaagauacgccuuuuacagcuuacauuuuaccuuggacacuuuggcuu

SEQ ID NO: 4175505 - RNA, 77 nt, Human
gagcucaaagggaaauguguuguucauuucuaaaaaguguuuaggguauuaugaaauauguuuucuucauugacuuc

SEQ ID NO: 4175506 - RNA, 57 nt, Human
gagcucaagcacauuuuguggugccaaaauauggcuugccucagaggguuugaguuu

SEQ ID NO: 4175507 - RNA, 70 nt, Human
gagcucaccucauugcucuacagcaacaguuuuaacuacuggagccugccuggagcuugaggugauccuc

SEQ ID NO: 4175508 - RNA, 79 nt, Human
gagcucagccacuacaauugguuccauucuacaguaauuauucucaugugguuuguggaacucaauugugaggucccuc

SEQ ID NO: 4175509 - RNA, 110 nt, Human
gagcucagggaaagcaaaaaaggaaguggggaauuugccugacagaccccagugagcaaaauuagcaucagccacaggcaggagguucuccaguuauuuuuccucugcuc

SEQ ID NO: 4175510 - RNA, 73 nt, Human
gagcuccaaauauguguaaaguacuguguugagccuugaggauacaguaaacaaugcagcaaauuucuggcuu

SEQ ID NO: 4175511 - RNA, 86 nt, Human
gagcuccaugccaccaucuggcuguguugaccugugguuuguggcucuagcuguucuuucaauaugccaucaaugguggggaguuc

SEQ ID NO: 4175512 - RNA, 57 nt, Human
gagcuccauuguaaucaccugguggcuugucuguuuccaccaggagacagugagcuu

SEQ ID NO: 4175513 - RNA, 115 nt, Human
gagcucccuaggggcaaguauagguggcuaagaguugaagaaauaguuuugauugguucuucucaauagaaauguauuuuggacuagucacuauugccagccuuuggguugaguc

SEQ ID NO: 4175514 - RNA, 75 nt, Human
gagcuccgauaagcaauucuugugcuccauauggcgacuguugacugggaccacaggaauugcucugugguguuc

SEQ ID NO: 4175515 - RNA, 57 nt, Human
gagcuccuauggucgguggcucugcaacuucucacggcagcgccuggacggaggcuc

SEQ ID NO: 4175516 - RNA, 103 nt, Human
gagcuaccucuuuaccaccaaugugcaaugcaaucuuuauuauauucuaggcagaauagauguauaauauacguguguuucagcgugugguaggguguaucuc

SEQ ID NO: 4175517 - RNA, 67 nt, Human
gacaggucaccucucaucacaugcuacgugacaguuaccuguagugugcaggggggggaagcagguc

SEQ ID NO: 4175518 - RNA, 84 nt, Human
gacaggugugccaugauuggaaggaagccaaggaagguuucuaggaugcuggugacguucuguuucuccaucaggaugcuuguu

SEQ ID NO: 4175519 - RNA, 87 nt, Human
gacaguaauaccuuucuaacacuugauuacagaaucacauuugaacuauguacaagaucuuaggauguuggaggugguaggacuguu

SEQ ID NO: 4175520 - RNA, 69 nt, Human
gacaguauaaaauuaaaccuuagguuagcagggccaaaugcuggcagggccugaaucuuauacucaguu

SEQ ID NO: 4175521 - RNA, 77 nt, Human
gacaguauucugggggaucuuugguaacauuucuucugaaaauugcuugucuucuucccuacuagaauguagcuguu

SEQ ID NO: 4175522 - RNA, 71 nt, Human
gacagucacaguuuuaagugugauccacaguggucagaaauuuggauuccaugucaaaauacagaacuguc

SEQ ID NO: 4175523 - RNA, 61 nt, Human
gacagugacagcuuggaaagcagggcauuagaccagcuauugagggaggcuguuuacuguc

SEQ ID NO: 4175524 - RNA, 73 nt, Human
gacaguugauagugucugacauuuaagagcacuuauacuuuuuaaguucucuucaacuggauucuaaauuguc

SEQ ID NO: 4175525 - RNA, 76 nt, Human
gacauaagcaaaggaauuaacaauauauuuaggugcaggcacauuucuaaaugugguugaucagcugacugagguc

SEQ ID NO: 4175526 - RNA, 64 nt, Human
gacauaauccuccucaccuacuggucucccugggucccuccaccaauggugagguguuacuguc

SEQ ID NO: 4175527 - RNA, 60 nt, Human
gacauagcuugguacuaccagggagucagaauacucagaacucaggagacuaacuauguc

SEQ ID NO: 4175528 - RNA, 63 nt, Human
gacauaggagcucugugccucacugacuaugagcuugucagagaacugcagcccuuccuuguc

SEQ ID NO: 4175529 - RNA, 87 nt, Human
gacauauuuacuccugccauuuacucgugcuucauugaauuucuucauuuugacauucagagcacuggguagaauucacguuguguc

SEQ ID NO: 4175530 - RNA, 56 nt, Human
gacaucaggaagacaugagaggcuaggcucagugccucuccagugguuccugauuc

SEQ ID NO: 4175531 - RNA, 67 nt, Human
gacaucaggauuuuauagucaggaaaaagacuguucuguuugcccacgucucugaagaucugguguc

SEQ ID NO: 4175532 - RNA, 70 nt, Human
gacauccacgaacuaauggaggcuguuggacagacaagucuagagcuuagagaaugaguuugggguaguu

SEQ ID NO: 4175533 - RNA, 63 nt, Human
gacaucugccuaaguggcccuguuggagccuggggaaagcagggcuguguagguaaugauguu

SEQ ID NO: 4175534 - RNA, 58 nt, Human
gacaucuucugcucagaaucacaacagauagugagugguucaagugagaaguaauguu

SEQ ID NO: 4175535 - RNA, 96 nt, Human
gacaugaacuuccaguauaauguuuaauguuagugguaaugaaaagcauccuuguauugcuucugauuuuaaaugagugcuuuaagauuuuauguu

SEQ ID NO: 4175536 - RNA, 130 nt, Human
gacaugacccugcucccaaaccccuuuguggcacccauaggcacuuggcguguuggagacauccgcuggccaccggaugcuuucccaugcacaaggucccacagaggccaccagggaguuggguauuguc

SEQ ID NO: 4175537 - RNA, 64 nt, Human
gacaugauuuacuaaaauuuguuuaguguaauucauuaugcaaguuauauagaugaaucauguc

SEQ ID NO: 4175538 - RNA, 59 nt, Human
gacaugccaagcuucagcugaaacucaagccucaugcaguuuucucugcuuggaauguu

SEQ ID NO: 4175539 - RNA, 94 nt, Human
gacaugcuauuuuauaauugcuuauuagacccaauuuauaugacuuccuuuuauauuuaaguggaguuaauaugcaauuugaagagaggcaguu

SEQ ID NO: 4175540 - RNA, 76 nt, Human
gacauguaaaggguguuaaauuacuccgcggagauguguucgaggcaaugggugguuaaacuggccuguguuuguc

SEQ ID NO: 4175541 - RNA, 57 nt, Human
gacauguagaguuccaggcccugcaccccagaccugcuggcuaagaaucugcauuuu

SEQ ID NO: 4175542 - RNA, 70 nt, Human
gacauuaacccauuagacguggaagauugugcuccaagacuuuuuccagcuucagggugggaaagauguc

SEQ ID NO: 4175543 - RNA, 77 nt, Human
gacauucagcucuaggccacugcagccccucccugcccccagcauggacacagcuaauggcuuaggacugaauuguu

SEQ ID NO: 4175544 - RNA, 69 nt, Human
gacauugaacaguacaaaugauccagacuuuugcucuaccaaaccucggggcaaugucuuuucaauguc

SEQ ID NO: 4175545 - RNA, 60 nt, Human
gacauugaagucucccaccuggccauggccaugggucauccugguggcagauuuuagguc

SEQ ID NO: 4175546 - RNA, 56 nt, Human
gacauugacuuucccuucuccucauuucacagaugaggagucaaggagucggaguc

SEQ ID NO: 4175547 - RNA, 61 nt, Human
gacauugaugaagauaauagcauugguugaaaauuaaccccuacacauguuuauugauguc

SEQ ID NO: 4175548 - RNA, 74 nt, Human
gacauuggcuguucauugggaucggaacucuaguuugcuucauuccuacuucacaacugccauagccagugguc

SEQ ID NO: 4175549 - RNA, 71 nt, Human
gacauuucucacaguucuggagguugggagguccaagaucaagaucccagcagaaucugaugagggcuguc

SEQ ID NO: 4175550 - RNA, 55 nt, Human
gacauuucuuugcuacugccugagccccagcagccagagaacagcaggaaauguc

SEQ ID NO: 4175551 - RNA, 88 nt, Human
gacauuugcuugaacccaggaggcagaggcugcagugagcugagacuguacuacuccacuccauccugggccacagagcaagacuguc

SEQ ID NO: 4175552 - RNA, 56 nt, Human
gaccacgcauaguauauaaacuuaucacaaacaaagggugauucugugaugugguc

SEQ ID NO: 4175553 - RNA, 56 nt, Human
gaccacugaaugcacuucuaauagagcuuuaaucuaaagaaguuaguucagugguu

SEQ ID NO: 4175554 - RNA, 79 nt, Human
gaccagcuagaugauuuugaugcaguaaagacaaguuaagaaaauuugucuuuacugucaacaagacaguaaacuuguc

SEQ ID NO: 4175555 - RNA, 113 nt, Human
gaccagcucaaguaaaggcuucagugucuuugaucugggucugacuugaaugccuggagucagaacagaagaaggaacacgguuaucuuugaagcucacacugguugcugguu

SEQ ID NO: 4175556 - RNA, 94 nt, Human
gaccaggcuggcgggggagucaggaagggaggcugcagcucagugcuccugcagccaccuccugcucugcucacugguucugaacaaccugguc

SEQ ID NO: 4175557 - RNA, 110 nt, Human
gaccagggagauguuagggagugagcugggccuuaugaguaccuggaagagagcauucuaggugaaggggcagucagugcaaaggcccugagguaggcguauaccugguc

SEQ ID NO: 4175558 - RNA, 79 nt, Human
gaccagggcacuugcgaugcucacgggacugcauaggaaacuuggugcaauagacugugguauuaaagagcuuuugguc

SEQ ID NO: 4175559 - RNA, 65 nt, Human
gaccagguacauggagaagaacagcccaaagaggaagggcugcaauucugguuuaucugaaaguc

SEQ ID NO: 4175560 - RNA, 67 nt, Human
gaccauagcaguggcauuuuaauggaugucagccucuugagaguuugaauagugucaguguuagguu

SEQ ID NO: 4175561 - RNA, 56 nt, Human
gaccauggccauggcagcccugcuggccugguaggaggaguugcuguggccugguu

SEQ ID NO: 4175562 - RNA, 67 nt, Human
gaccauggcuuaccccaggagcagcacuuccagagcaguugccguucccaucugugagccaacaguc

SEQ ID NO: 4175563 - RNA, 76 nt, Human
gaccauuccaucaggcaccccuugaguaggggaugaggucucauccucugaaauacauggugaugugugggagguu

SEQ ID NO: 4175564 - RNA, 59 nt, Human
gacccacaaaagcgaauauguuuagcucuucgcagauauuauucuagcucuuguguguc

SEQ ID NO: 4175565 - RNA, 129 nt, Human
gacccacucccgguaguucuggguggugccgggcgggcgcuggggugccgacagggagggcacguagucugaugcccuccacaguggcuccaccccguaccgguuccuguugagcacuguaggugggac

SEQ ID NO: 4175566 - RNA, 57 nt, Human
gacccagaaggagugcccuagaaaauucuggauuguuuucuagcucuacuuuugguc

SEQ ID NO: 4175567 - RNA, 85 nt, Human
gacccagagagcaaaaccggagcauuacagccuuuggagggaaaaagccuucugcuguaguugcaucuguuguuuucugucuguc

SEQ ID NO: 4175568 - RNA, 68 nt, Human
gacccaggucagcacuuggaggugcaagggagguccccgaugcgccuccugcugccugcccugagguc

SEQ ID NO: 4175569 - RNA, 59 nt, Human
gacccauaguuauaaggcaacacuguucaugaacauguuuugugccuugacuaggaguc

SEQ ID NO: 4175570 - RNA, 56 nt, Human
gacccaugauuauaucuuugacccuaaguucagguauaagcauaguugucaggguc

SEQ ID NO: 4175571 - RNA, 91 nt, Human
gacccauuuaacaauaaacuagcucuuaguuuagaggguagaaauucauacucacucugcagcugaagggcugggcagauuuaagaagguc

SEQ ID NO: 4175572 - RNA, 65 nt, Human
gacccauuuacuaaaugcucuggagagcuucaagaucugaaucaggcccagagcaggaaaggguu

SEQ ID NO: 4175573 - RNA, 58 nt, Human
gaccccaggaaagacaggcucaagggcacaagguucugagucagucugcccuggcuuc

SEQ ID NO: 4175574 - RNA, 58 nt, Human
gaccccagugagggggugggugcagguuucagcaacaugccaggccugagcugggguc

SEQ ID NO: 4175575 - RNA, 57 nt, Human
gaccccucugcagccauggaggccacgcuagccccacccgcuggcugagagaggguu

SEQ ID NO: 4175576 - RNA, 124 nt, Human
gaccccugcugcagaaagggccacgacagauuacagugagccccugaggacaucuuugagguuggggccucugagcucaggucucaggaggugucugcugguggccugaugggcugcgaggguc

SEQ ID NO: 4175577 - RNA, 77 nt, Human
gacccgaaagagcaggaaaucaguuuuaauuuaacguaauauuaaucagagcaacuuuuccugcuuugugcaggcuc

SEQ ID NO: 4175578 - RNA, 64 nt, Human
gacccggcccacucucaucugcugguauccugcuguuucaaaaccagccagagggcccaagguc

SEQ ID NO: 4175579 - RNA, 73 nt, Human
gacccuaagcuccucgugugcuaggauccaggucucuucucugggggcuuggcuccuggcucacagguugguc

SEQ ID NO: 4175580 - RNA, 62 nt, Human
gacccucuggaguuccugcaggcuguggccucugagccaccuguugggaacucccgaagguu

SEQ ID NO: 4175581 - RNA, 55 nt, Human
gacccucuuccucuucgauuccuccacggugccagagaucaaggaggggaagguc

SEQ ID NO: 4175582 - RNA, 82 nt, Human
gacccuggggaucuaaaguguuucaugaaagauuaauguccuugaucuguuuguaaguguuuuggaaaaaucuuccaugguc

SEQ ID NO: 4175583 - RNA, 115 nt, Human
gacccugggggcucaggauccagcaaggggcggcaggaguaaaggaggaaggaaugacaggugcaaauaccuucccaccaaagcccuuguugcccucuggcuccuccccagaguu

SEQ ID NO: 4175584 - RNA, 84 nt, Human
gacccuggguacccagaagagguuuggccccuucccagcaacuaugaugggacccucaacaucugcuucuggguuggauggguc

SEQ ID NO: 4175585 - RNA, 66 nt, Human
gacccuuguugaggcccacagggaguaccaagccacggcugggccuacccuguggcccuggggguc

SEQ ID NO: 4175586 - RNA, 62 nt, Human
gacccuuuacaaguacaccuaacagcuggacuaagaguguguagcagcauuugggagggguc

SEQ ID NO: 4175587 - RNA, 91 nt, Human
gaccgaaaauaaaacucucuugagaaacuuguugcccuccugaaaauucugucuggaaugggacuuagcaauaggauuuuuaaguuugguc

SEQ ID NO: 4175588 - RNA, 58 nt, Human
gaaguuaggcuuuccuaugcuuguuuaugguacugaggcaaggcaaugccaugauuuc

SEQ ID NO: 4175589 - RNA, 81 nt, Human
gaaguuagggucagagucccuguuucccguuaaauccuaggaagagccagcaggagacaugggggugguggaccucacuuc

SEQ ID NO: 4175590 - RNA, 63 nt, Human
gaaguuaugaaauuuggacagcuuggaaucagcauuuccaagcuguccaaauuucauaacuuu

SEQ ID NO: 4175591 - RNA, 81 nt, Human
gagcucacagugagcccacuccaggagaggggagagaacacagccaucuccgagagggagcuucggugaaaggagagcauc

SEQ ID NO: 4175592 - RNA, 57 nt, Human
gagcucagggggcuccggggcguggguucccacaccaugggcuugcucucugagcuc

SEQ ID NO: 4175593 - RNA, 82 nt, Human
gagcucauucuguuaaauagacugcagugcacccugggaaauauugguucugugccugcaguucuauuuguucaaguagcuc

SEQ ID NO: 4175594 - RNA, 68 nt, Human
gagcuccacuuagcaaggccacucaggaaacagauggaccaacuugaguucuuuuucugugugagcuc

SEQ ID NO: 4175595 - RNA, 61 nt, Human
gagcuccagcaucucugccaaaggggacaaacuuuaucuguaacagagaauguggaaguuc

SEQ ID NO: 4175596 - RNA, 64 nt, Human
gagcuccaucaugugugagcuaugauuuacuugccuucucaugucuggcacauaagaggagcuc

SEQ ID NO: 4175597 - RNA, 79 nt, Human
gagcucccaucguggcacacccuccggcuaucuacagugaugacacacuggagcaguggcuggauggugugcugggcuc

SEQ ID NO: 4175598 - RNA, 57 nt, Human
gagcucccuggagguucagauacagagaauguauaggagcccauacucaaggagcuc

SEQ ID NO: 4175599 - RNA, 128 nt, Human
gagcuccgggcccucagccugcuaaauuggugcaaggcucuucuccugacgagagccggcucugaaaucugccggcuucaaagggagcgagaucauguauaaaccauaaugugggugcaccguggcuc

SEQ ID NO: 4175600 - RNA, 63 nt, Human
gagcuccuaguuggggagugacuuccuugacaccaacccagcaccuccuuagcuaugaccauc

SEQ ID NO: 4175601 - RNA, 69 nt, Human
gagcucuaggaaucuauaugccuuauuugcuacuauaacccagauacugugugcagaguccuaaugcuc

SEQ ID NO: 4175602 - RNA, 66 nt, Human
gagcucuccaggcagggcagccaucaagugcagaggccuugagacggaguugugccuggcaaguuc

SEQ ID NO: 4175603 - RNA, 60 nt, Human
gagcucuggacccagacaaaccuggauuaggaucuuagguuagaucugguuccagcacuu

SEQ ID NO: 4175604 - RNA, 79 nt, Human
gagcucugugcggggccagaguccaaagucuucauuugcucaauguaaauauccacacugugucccugccacucaguuc

SEQ ID NO: 4175605 - RNA, 65 nt, Human
gagcucuuacuugaaguuuaaugguagauuccuguaacaccaggguacuguuggauuuuuagcuc

SEQ ID NO: 4175606 - RNA, 55 nt, Human
gagcugagcagggagccucacugugagaaggugaacugaggaguccugaucaguc

SEQ ID NO: 4175607 - RNA, 64 nt, Human
gagcugaggcugaggccucacugucaccuucugugagguccaugacauccucacuccugagcuc

SEQ ID NO: 4175608 - RNA, 57 nt, Human
gagcugaucaaugacugcaacagugaggucaggauguacaguuguuugacucagcuc

SEQ ID NO: 4175609 - RNA, 80 nt, Human
gagcugaucccugcaauuugcucucauggggugucagaacauuaaauaucccagggugaaaugcaguaggcuucagauuc

SEQ ID NO: 4175610 - RNA, 69 nt, Human
gagcugauggaagaaaagacccccugcucuucuccucccagguggaauuauuuugucuucccuuaguuu

SEQ ID NO: 4175611 - RNA, 57 nt, Human
gagcugcacaucugaggcuaauguuacccgcuacuuggacuuuccuugaugcagcuc

SEQ ID NO: 4175612 - RNA, 56 nt, Human
gagcugcagacuugauacaggaaggaucucuuccaugauucugggauuuggagcuc

SEQ ID NO: 4175613 - RNA, 60 nt, Human
gagcugcauagcugggauccucaaggcuacacacacacgcuuggagcagggaugcgguuc

SEQ ID NO: 4175614 - RNA, 56 nt, Human
gagcugcaucccaggcauucuaugauuuauaacagaauagcauucaggaugggcuc

SEQ ID NO: 4175615 - RNA, 55 nt, Human
gagcugcaugcaacucgaaaaucguuuuaagguuuaaaaguuguaauguaggcuu

SEQ ID NO: 4175616 - RNA, 72 nt, Human
gagcugccaaguuucucaguuuaaggacuaauaaaguugggauguggguaauucugggagacuggguaguuu

SEQ ID NO: 4175617 - RNA, 67 nt, Human
gagcugccguuucuaucacugauccuccaggagaaagccuuuggaauuaguguugaaaucagggcuc

SEQ ID NO: 4175618 - RNA, 58 nt, Human
gagcugccugaacaagcagcagcugggaaucuugggaaauguugcuucucaggcgguc

SEQ ID NO: 4175619 - RNA, 92 nt, Human
gagcugcugcugggggcaggugagggugggggcacaggggcagaagaaaaugucugaggggccagaccccaccuagacuguggcgguagcuu

SEQ ID NO: 4175620 - RNA, 61 nt, Human
gagcugcugugugcucaggcaggucuccuuuucccagaucacuucaguacacaguaggcuu

SEQ ID NO: 4175621 - RNA, 110 nt, Human
gagcugcuuuugcaucuguuauauggaaauaaagccaccuauuuccuacacacauuagguaaagaagaaguguuauuuuuagaacagaagcaacagauauaauucaguuc

SEQ ID NO: 4175622 - RNA, 57 nt, Human
gagcuggaagggaaaucucuuggcaagcugugguugccacccuucucuucccagcuu

SEQ ID NO: 4175623 - RNA, 58 nt, Human
gagcuggacagagauucgggagcaaugcacgagguagcuggccgaccccucugugcuc

SEQ ID NO: 4175624 - RNA, 87 nt, Human
gagcuggaucauuuuaauacugcguagaaugccaugguuugaauaaacacgucauugaguaauacuguaguguuggccauuuagguu

SEQ ID NO: 4175625 - RNA, 119 nt, Human
gagcuggcugguuggcagaggauggagaacagaggcuaggggccaacuauaccgggaugggucgugggaccucuguaagccucaguuucuucaucauaaaauucagagaccagaaguuc

SEQ ID NO: 4175626 - RNA, 83 nt, Human
gagcugggaagagcuggccauggccugcgccaucccuggauuuccacacugguggcugcacccuggcuaacucuuuagggcuc

SEQ ID NO: 4175627 - RNA, 57 nt, Human
gagcugggccugcgagugcugcgccgacggggccugcuccacaucgaggcucagcuu

SEQ ID NO: 4175628 - RNA, 70 nt, Human
gagcugggcuuuagggcaggcaguguuagaccugaggacugaugcacuagccguagagauuacuagacuu

SEQ ID NO: 4175629 - RNA, 61 nt, Human
gagcuggggcucagugggcaggggucagggggagcccugcagagaccacugaccuuagcuc

SEQ ID NO: 4175630 - RNA, 64 nt, Human
gagcugggugguuuugaugugaauugugggagcaaugagaucagauuuuggccauuuuggguuu

SEQ ID NO: 4175631 - RNA, 60 nt, Human
gagcugguccaauuaugaacuguugucuugacaacugggaaggacugauuggaucauuuu

SEQ ID NO: 4175632 - RNA, 63 nt, Human
gagcugucaguucauuagcacuuccaacuagagugggaagaagcagagaacuggauaaagcuc

SEQ ID NO: 4175633 - RNA, 67 nt, Human
gagcugucucuuugggccuuuugauuuuccuauuugaaaauccacaacgguuccaaacgaguagcuc

SEQ ID NO: 4175634 - RNA, 98 nt, Human
gagcugugauucauguucuccuggguccuggagggaaccugcaccugguucagagcuuggcacagguggccaguacucaaggauauuggugacuucuc

SEQ ID NO: 4175635 - RNA, 105 nt, Human
gagcuguggacuaucaugaaagggagagaacugucaagaagaugggauaugagaugucaaauuuuuauugcaguauaauuccuguaugauuuugaugcccaguuc

SEQ ID NO: 4175636 - RNA, 107 nt, Human
gagcuguucuuaaugcaagcggacugucccauuggagaacggucauguaagccagguuucaguguguuugcugcccucuccuguccgcuuacgugcacugcagucuc

SEQ ID NO: 4175637 - RNA, 63 nt, Human
gagcuuagcaggaggcuggaguggauccauccaucucuggcccaugauccugcuaacaagcuu

SEQ ID NO: 4175638 - RNA, 62 nt, Human
gagcuuauuacacaggauuugccuuacucugggaaggaaccagaccugcugaaaugaaguuc

SEQ ID NO: 4175639 - RNA, 55 nt, Human
gagcuuccuggagaacaaccccucguguggggucugggcugagacuuggaagguc

SEQ ID NO: 4175640 - RNA, 80 nt, Human
gagcuucgguugccucauucggaauucgguucccuuucaggguugcugugagggucuagugaggugauguauguaaguuc

SEQ ID NO: 4175641 - RNA, 60 nt, Human
gagcuucuuggcucagcacuugggagggaaagccuccagggcugguggcugcagaggcuc

SEQ ID NO: 4175642 - RNA, 97 nt, Human
gagcuuggaaagauuaaucaacauuccaaugugguagagucacaaguauuauguccugauucaacugcaaguuugcuuaguuuauguucuuuugcuc

SEQ ID NO: 4175643 - RNA, 62 nt, Human
gagcuuggaaggggcgugugguagcauuuguaccaugcauuugcauacugaccucuaagcuu

SEQ ID NO: 4175644 - RNA, 61 nt, Human
gagcuuggaucucuggggaccuggggcaggcugcugcaauuuuccccaagaguucuagcuc

SEQ ID NO: 4175645 - RNA, 85 nt, Human
gagcuuguucccaucccagagugagccaggggcaggucuggaaccaggacuguuucuccugccaccugggccaggacacgugcuc

SEQ ID NO: 4175646 - RNA, 61 nt, Human
gagcuuguuuuaaaaugcccacccuguuagaacauggcagggccaggugcggaaacagcuc

SEQ ID NO: 4175647 - RNA, 90 nt, Human
gagcuuuaucaguguccuauacugugcuaagugcauuacauacaugaucucauuuaguuuugcaguagcaggcacugguuuucccaguuu

SEQ ID NO: 4175648 - RNA, 108 nt, Human
gagcuuugaaugggggcugggagagguggugggaaguaugcagcaagucagguuuauagagcugcccauacuuucaccccucucucaggccucauuaucucaucucuc

SEQ ID NO: 4175649 - RNA, 68 nt, Human
gagcuuugguaucugagagugcugaguuggaaaccuagcuaugucucuuuacucuuagaacccuguuu

SEQ ID NO: 4175650 - RNA, 59 nt, Human
gagcuuugucuccuggagacccugagccuacagccauggggucaacaggacacaaacuc

SEQ ID NO: 4175651 - RNA, 71 nt, Human
gaggaaaagccaggaggggagagugugucaguaucacuguagugcugaucuucucaucuauccugccccuu

SEQ ID NO: 4175652 - RNA, 65 nt, Human
gaggaaaauaugcuuuaaguuauagugauacuucaugacaacccacagaagcauauuuguucuuc

SEQ ID NO: 4175653 - RNA, 60 nt, Human
gaggaaaaugcaacaggaaugcacagaggaaugaugcaaacacuugugguguucuuccuc

SEQ ID NO: 4175654 - RNA, 66 nt, Human
gaggaaacuaauuaguagaauaaucuuuguuucccaguuugaaagauuacugugauugcuuuccuc

SEQ ID NO: 4175655 - RNA, 59 nt, Human
gaaugcugccuguggcccuucugggugaaauucaccuauucgauacaggcaggcuuuuc

SEQ ID NO: 4175656 - RNA, 82 nt, Human
gaaugcugcuaacugaauuacaaagucuggggccuaaugauuaccagugccagagcuccaggguuuuguagugucagcauuu

SEQ ID NO: 4175657 - RNA, 128 nt, Human
gaaugcuuuuacuuaggaagcacgagaccugugcugcagaccgucuguuggagcuggccgcggcaggacggcgaucaccuuccuggcaggccccuccuggauucugcccucugcuucugaaagcguuu

SEQ ID NO: 4175658 - RNA, 111 nt, Human
gaauggagaaaaugcuauauaacagaaaccucccugaauauuuuccuccagucuaagcagggaaaaucucauuaucaggaagggacucucuguguauaugcucucugccuc

SEQ ID NO: 4175659 - RNA, 93 nt, Human
gaauggcaggggcugguacagucuggaacugcuggcuaugaguaaauaugacagcagggcuuuggcuggcuuucacugggccacuugucauuc

SEQ ID NO: 4175660 - RNA, 90 nt, Human
gaaugggaagauauaugugaaggaguuaucagugguuaucaguugaaugaugacauaugguuugauuuguucuuugauguccuccuauuu

SEQ ID NO: 4175661 - RNA, 66 nt, Human
gaaugggcaauaguugcuaacuuccauuuugguaacucuaaguuauggaagugcaacuugcucauc

SEQ ID NO: 4175662 - RNA, 58 nt, Human
gaaugguuauguggauagcagauaaccaaaguugucugcugaugucacauagccauuu

SEQ ID NO: 4175663 - RNA, 115 nt, Human
gaauguaaauaaggaccuggccaauuuguucuagcacugccuggaagacagggaaucuuggucaaccagaaguuguguaggucauucuuaaauugccaaagucccaaagucauuc

SEQ ID NO: 4175664 - RNA, 97 nt, Human
gaauguaagcugacucaagaauggauauccggcucauuaauauuugcuucauagaaauaggcucaaauguucuucucgagucugaguagguacauuc

SEQ ID NO: 4175665 - RNA, 102 nt, Human
gaauguacaaggaagcaugaaaggguuaggacaagugaaauuucaugugucgacauggauaaauuuuacuuuccugccugccuuaaaucuugguuguauuuc

SEQ ID NO: 4175666 - RNA, 66 nt, Human
gaccuguuucucccaacgcccuaguuuuaaccuugauagagcauggaugggaguggacagauaguc

SEQ ID NO: 4175667 - RNA, 57 nt, Human
gaccuuagguuguucaucuguuaaaugaacggauaggaccagguaaccucuaagguc

SEQ ID NO: 4175668 - RNA, 88 nt, Human
gaccuucagagaagaugacugaaugcuuuggagccuucuaagccacagcuuggauuuuauccugaaggcaugaggagucacugaaguc

SEQ ID NO: 4175669 - RNA, 56 nt, Human
gaccuucuuccaccaaaaacguccucuaucuagagaccacagguggcagaaggauc

SEQ ID NO: 4175670 - RNA, 99 nt, Human
gaccuuggagcccuccugcugaggagugagaaauugguuuccucugccuuucugugucauggaagccacccuccuuccagccccagaggaucuucuguc

SEQ ID NO: 4175671 - RNA, 67 nt, Human
gaccuuguucacagcuuugugugugaacccagguuccacagauguaugaaguggugagaacuugguc

SEQ ID NO: 4175672 - RNA, 57 nt, Human
gacgagggugagaaaaggaguagagcugaauguuauguuauucuguuaaccuuuguc

SEQ ID NO: 4175673 - RNA, 83 nt, Human
gacgaugcccgguugugccugggacacgagauuuucagugcugaagcugggggagucccaggcaaaccagagugggcgagguc

SEQ ID NO: 4175674 - RNA, 69 nt, Human
gacgauuaucucccacucaguccuggugggcauuauguaugccaggugggagcggagacugauuuuguc

SEQ ID NO: 4175675 - RNA, 57 nt, Human
gacgcaacccuuucuguaaccauauggccgaaucgucauggaagaaagguuuguuuc

SEQ ID NO: 4175676 - RNA, 62 nt, Human
gacgcacaugagagacuguuugggagcuucuggggagcccugcuaguugucucagugauguc

SEQ ID NO: 4175677 - RNA, 118 nt, Human
gacgcgauuucuccuccgcccacaccugcggacuggcgcaugcguugugugaugcucucgggcgccaccagccccaugcgcugugcuuugcaccccacggguggggagagaaggcguu

SEQ ID NO: 4175678 - RNA, 125 nt, Human
gacgcgguauguuugccaaggauggccuggccacugcgggccucugcccaaaccuccccaggcucacugccuggacaggcagggguagcauguggcgugcugggccuugaaaacuccacuggguc

SEQ ID NO: 4175679 - RNA, 68 nt, Human
gacgcuacacuuacaguauuguuaaacucuuucaccagaaggagaagauuaaucuguaauacagcguc

SEQ ID NO: 4175680 - RNA, 69 nt, Human
gacggaagccaucuuuguuccccaccaggcuaagcgauuuuccggagggggaguaagaucccuugcguc

SEQ ID NO: 4175681 - RNA, 109 nt, Human
gacggaagugccaggaaaguguuaaugcuucaauuuccuugauucuugucccuuaauuuuuaggggucauugaaaucagaaggguuagacucucuagaggcuguugguc

SEQ ID NO: 4175682 - RNA, 75 nt, Human
gacggcacccagcagguccugggcguggccugcccuguauggccuaaugccccaccugcugagcugggcgcccuc

SEQ ID NO: 4175683 - RNA, 71 nt, Human
gacggcucaggcuuuccgaagcgcgcggugcgcuguccagcacugcguguuccugaagcgcgcuggccuuc

SEQ ID NO: 4175684 - RNA, 65 nt, Human
gacgggagucagagaaaacagcccuguggccuucagagccgcuuaaguugucugugacuugaguu

SEQ ID NO: 4175685 - RNA, 64 nt, Human
gacgguaagaggaaaagcuccaaguaaggaauaaaccuaacuucagcgaguucucuuaauuauc

SEQ ID NO: 4175686 - RNA, 86 nt, Human
gacgguacaggucaaagguuaguuauguuaauauauuuauuugcgaaaauauacaaaagcccugauuaaccuuggcuuuugaaguc

SEQ ID NO: 4175687 - RNA, 79 nt, Human
gacgguucucagucuauuggguaaauacauagccagcuucucacccccaaagcccagccugucuuucccaaugaaccuc

SEQ ID NO: 4175688 - RNA, 62 nt, Human
gacguaucaaggccggacaagaugguucccgaucgucagaauuccuguccgcgccuugcguc

SEQ ID NO: 4175689 - RNA, 81 nt, Human
gacguccgugccccaguugcuggcaccugugaguauguuaugcuuuguggcaacaggggcuuugcagaaggaauggagguu

SEQ ID NO: 4175690 - RNA, 74 nt, Human
gacgucugccucucgggacacuugggacucgauuccacagcuccagaaaacccaggaaacccgaaggcgaccuc

SEQ ID NO: 4175691 - RNA, 70 nt, Human
gacgugaacuucacaaauccuugguuacugaauccugcauugccugagagcuuauuugugauguaacguc

SEQ ID NO: 4175692 - RNA, 126 nt, Human
gacguucaaugaaaaggcacggaggccugcaggacaggcuguugggguccaggguuucuugaguguuggauuuggaugcuugggacacugcaggggcuucagucuugcagggugaccuuucauuuc

SEQ ID NO: 4175693 - RNA, 60 nt, Human
gacuaagaaaagugugcaguccaguugauggcaauugcaacagguagacuuuuccuaguu

SEQ ID NO: 4175694 - RNA, 83 nt, Human
gacuaagccugauaucaagucgggcaucacugagucauggaaggucaggaaaacccggguugacucugcuacuaggcuugguc

SEQ ID NO: 4175695 - RNA, 67 nt, Human
gacuaaguggaagaacugcuuguccuccagcccgaggaagcuagaaggucuucuuuugugcuugguc

SEQ ID NO: 4175696 - RNA, 93 nt, Human
gacuaauauagacaaugguauauucaagggcacuuaacuucaauuggucaaguuaagugucucucgaauuaugcuucuuggacugcccauguc

SEQ ID NO: 4175697 - RNA, 72 nt, Human
gacuaccugcugucuuaggacuugggguaauuuauguagauuaccaaagaauauuuuaaauaguuggucguc

SEQ ID NO: 4175698 - RNA, 66 nt, Human
gacuagagcaggaggcaugaagccaagaguccaacuuucaguggcuucuugacuucuuggcugguu

SEQ ID NO: 4175699 - RNA, 84 nt, Human
gacuagcagcuguagaacuuguuguaagaaaauaugauaauuacaaagauugacaugugcuaugacaacaguccuuugcuaauc

SEQ ID NO: 4175700 - RNA, 117 nt, Human
gacuaggaguuaaagccuuguccugugaaaucaaccuugagcccagccucgagaaaugagagaagaguuuguccaggggccaaggggacuucacgcuuggcugaugaacuccugguc

SEQ ID NO: 4175701 - RNA, 120 nt, Human
gacuaguaggcaauuuaaauaagugcacagucuuguaagagagaauugcaaauuauugcaaugcucuaauaauugcaauaugauccuuacaagaaaaaugcacauuugauggcaauaguc

SEQ ID NO: 4175702 - RNA, 78 nt, Human
gacuaguugucuuagacaacagacacuuauuuucuccagaggcucucagaagucucagaugagguuggcagcaugguc

SEQ ID NO: 4175703 - RNA, 59 nt, Human
gacuauagugcauuauuuacaguaagucauuuuuauuugguaagaugaugcgcuguguu

SEQ ID NO: 4175704 - RNA, 94 nt, Human
gacuauaguuuccugugccaugagaaaguccucguucugaaguuuaacucuccaacacugucacaugaaacuugcucaucacaguggacuaguc

SEQ ID NO: 4175705 - RNA, 57 nt, Human
gacuaucucuucaauuugaaugaauggcaaaggauccucaggcauuugaggagaguc

SEQ ID NO: 4175706 - RNA, 79 nt, Human
gacuaugauacaugcuuuucaaucuaucuuaaggugaccuucacuugcacggaaagucugaaaauguacagucagaguu

SEQ ID NO: 4175707 - RNA, 72 nt, Human
gacuaugcugggcagaauuuuaggauggcccccacaugugguagccccuugguguuccugcaguguaucguc

SEQ ID NO: 4175708 - RNA, 56 nt, Human
gacuauuuuauaaacuagugaaucagucuaacuagauugcugguaggugaauaguc

SEQ ID NO: 4175709 - RNA, 67 nt, Human
gacucaaauucuggcaguuccuuguugauauauuccuucgguguuucuuuggcauugcuguugaguc

SEQ ID NO: 4175710 - RNA, 59 nt, Human
gacucacacagaccuuccugcucccaagagacaucaugaagcccaggccugugugaguc

SEQ ID NO: 4175711 - RNA, 59 nt, Human
gacucacuacccuccagcacaagacuuagaagcaggaagucugguuuagguagugaguc

SEQ ID NO: 4175712 - RNA, 65 nt, Human
gacucagaguugguacuuagccugaggucagaguuuagucuggaguuggugccaagucugggauc

SEQ ID NO: 4175713 - RNA, 57 nt, Human
gacucagggcaucaucaugaauauaauuauuguuauauuagauguugggccuuuguc

SEQ ID NO: 4175714 - RNA, 58 nt, Human
gacucaguuuuauccacugacucacaguuguggucaaaguugaagaagggcaugaguc

SEQ ID NO: 4175715 - RNA, 71 nt, Human
gacucauagggcgaggagacggaggcacaguugucguagacgauggccgagucacucucgucacuguaguc

SEQ ID NO: 4175716 - RNA, 72 nt, Human
gacucaucaggauucaccccagagcugggaauacuaucucuuuccuugugggguggauaccuggguaaaguu

SEQ ID NO: 4175717 - RNA, 101 nt, Human
gacucaucucucacuugggcucaggaguuugaggcugccgugagcuaugauugcaccacugcaccucagcacuccagccuggacaacagagcaauccaguc

SEQ ID NO: 4175718 - RNA, 58 nt, Human
gaggcacugagagugggggaugagaaacgaacuccguccccugcacagucagugccuu

SEQ ID NO: 4175719 - RNA, 55 nt, Human
gaggcacuggaggaaaggagaagccaggggauuccucucucuuccccucuaccuc

SEQ ID NO: 4175720 - RNA, 99 nt, Human
gaggcagaagaaucgcuugaacccaugagguggagguugcagugagccgagauugugccauugcacuccagccugggugacacagcaagaccuagucuc

SEQ ID NO: 4175721 - RNA, 56 nt, Human
gaggcagagguaacauuucuaggauaccuucuacaaugcaaaauacugucugccuu

SEQ ID NO: 4175722 - RNA, 68 nt, Human
gaggcagaugcaucacuugaggucaggaguucaagaccagccuggccaacgugaugaaacccugucuc

SEQ ID NO: 4175723 - RNA, 59 nt, Human
gaggcagccucaguggaccucguccuugcacgggggaagcuccacgguggggccgccuc

SEQ ID NO: 4175724 - RNA, 89 nt, Human
gaggcagcuugggacugacucucaagcacaaguccaccauguguacagguggcagugcuugcgggucuacccagggaguaacugaaauc

SEQ ID NO: 4175725 - RNA, 130 nt, Human
gaggcaggacugauauuuaacugguaaggaagguagccuuguaagaaucgauguuuauuuagacugucugcucugauuggucaguguugaauuuuuugcaaaucauucuugccaucagaucaucugucuc

SEQ ID NO: 4175726 - RNA, 98 nt, Human
gaggcaggagaaucacuugaacccaggaggcugagguugcagugagcugagaucaugccacugcacuucagccuggugacagagugagacuccaucuc

SEQ ID NO: 4175727 - RNA, 99 nt, Human
gaggcaggagaaucacuugaacccgggaggcggagguugcagugagccgagaucgcgccacugcacuccagccuuggcaacagagcgagacucugucuc

SEQ ID NO: 4175728 - RNA, 100 nt, Human
gaggcaggagaaucacuugaacccuggaggcggagguugcagugagucgaaaucgcaccacugcacuccagccugggcaacaagagugaaacuccaucuc

SEQ ID NO: 4175729 - RNA, 99 nt, Human
gaggcaggagaaucacuugaaccuggcaggcagagguugcagugggccaagauugcgccauuguacuccagccugggugacagagcgagacucugccuc

SEQ ID NO: 4175730 - RNA, 99 nt, Human
gaggcaggagaaucgcuugaacccaggaggcagaaguugcagugagccaagaucgugccacugcacuccagccugggcgacagagcgauacuccgucuc

SEQ ID NO: 4175731 - RNA, 100 nt, Human
gaggcaggagaaucgcuugaacccgggagguggagguuauggugagccgagaucacgccauugcacuccagccugggcaauaagagcgaaacucugucuc

SEQ ID NO: 4175732 - RNA, 99 nt, Human
gaggcaggagaaucgcuugaaccuggaaggcagagguugcagugagccaagauugugccauuguacuccagccugggugacagagcgagacuccaucuc

SEQ ID NO: 4175733 - RNA, 99 nt, Human
gaggcaggagaaucgcuugaaccugggaggcggaaguugcagugagcugcgaucgcgccacugcacuucagccugggcgacagagugagacaucgucuc

SEQ ID NO: 4175734 - RNA, 99 nt, Human
gaggcaggagaauggcgugaacccaggaggcagagcuugcagugagccgagauugugccacugcacuccagccugggugacagagcaagacucugccuc

SEQ ID NO: 4175735 - RNA, 100 nt, Human
gaggcaggagaauugcuugaacccaggaaguggaggcuucagugagcugagaacacgccacugcacuccaguccugggcaacagagcaagacucugucuc

SEQ ID NO: 4175736 - RNA, 99 nt, Human
gaggcaggagaauugcuugaacccuggaggcugagguugcagugagccaagauugugccacugcuuuccagccugggugacacagcaagacucugucuc

SEQ ID NO: 4175737 - RNA, 84 nt, Human
gacuccugauuuuaugauucaguuucuuuuccaucugaagcagucuucuguggcugggagccuggcuucgcaggaccagguguu

SEQ ID NO: 4175738 - RNA, 75 nt, Human
gacuccugggaccucugggaaggcuccuuagcccaggcaacugaggcaguugagcuuccugaggaccuggggguu

SEQ ID NO: 4175739 - RNA, 76 nt, Human
gacuccuggggucacugucuagucauacugucuuucuuagugucagagucagcuuaugacacagucucaaggaguc

SEQ ID NO: 4175740 - RNA, 81 nt, Human
gacucuacauuauuaauuaccauaaaguuuaucuuucuggccauuuucauuagaaagguuuauggucaguuguugagacuc

SEQ ID NO: 4175741 - RNA, 91 nt, Human
gacucuaggucuggacuuuaaggccaggcuguggucggcagaagcuguggaagucugugaucacaucugggcugaagcagaagccuuuguc

SEQ ID NO: 4175742 - RNA, 77 nt, Human
gacucucagaguagcacagugcuucucagaugggggugauuuugcaccccaguagacauuuugcaacaucuggaguc

SEQ ID NO: 4175743 - RNA, 57 nt, Human
gacucuccccaugucaguguacccugcaauaugcaggaaccugugcguagggauguu

SEQ ID NO: 4175744 - RNA, 68 nt, Human
gacucugaagcaugugcuggggcuuuuuguaugugcugugucaaaaagguaagcacaaugagaggguu

SEQ ID NO: 4175745 - RNA, 59 nt, Human
gacucugagcuccuagguaaaacugccugcaauugcagucacaucuuagcagccagguc

SEQ ID NO: 4175746 - RNA, 66 nt, Human
gacucugguggcaucucuuuccagauuuguuuugaaacaagcuugaaaacaagauuucacccaguc

SEQ ID NO: 4175747 - RNA, 62 nt, Human
gacucuucaaagguagcuggggucaggccuuuuucaaagggucucuugccaugccucagagc

SEQ ID NO: 4175748 - RNA, 67 nt, Human
gacucuuggcagggauauaguggcagggauauaguaaaacaggccacacauaugguugguaggaguu

SEQ ID NO: 4175749 - RNA, 81 nt, Human
gacucuuuccucuggagaacuuuaggaaugggacaggcaacaucuauccaaacauauagucucucuuggaggcagggaguu

SEQ ID NO: 4175750 - RNA, 111 nt, Human
gacucuuucuuauguuucuuauaaugucaauugcuggcagcuggaucugcaugcacacugcuguguuggagcuuucaguaauggccuacaagaacagcaugagggagaguc

SEQ ID NO: 4175751 - RNA, 60 nt, Human
gacugaaagcuuggaauguuccuauaucaauuuuaauaaggagaaauucccuuucaaguc

SEQ ID NO: 4175752 - RNA, 74 nt, Human
gacugaacuggcaaguccuaaacacacacaaggccuggcaccaccagcuacgguguucagggcugcuggcaguc

SEQ ID NO: 4175753 - RNA, 59 nt, Human
gacugaaguguagguguuuuccuacuggguuucucuuccugggaaaacagacacuaguu

SEQ ID NO: 4175754 - RNA, 55 nt, Human
gacugagaauuggcuuuuuccuuucaaagaggauggaagucacuguuuucuuguc

SEQ ID NO: 4175755 - RNA, 59 nt, Human
gacugagcuucugcaacacuggcaaggcuuugcccuccuaacagugucagaagacaguu

SEQ ID NO: 4175756 - RNA, 56 nt, Human
gacugagcuugaauccugguugcuccucucugugugaccuugggugagugacgguc

SEQ ID NO: 4175757 - RNA, 69 nt, Human
gacugaggcacugggagagcacacuaggcaugagaaaguugagugugacugauuuagugcauguagguc

SEQ ID NO: 4175758 - RNA, 64 nt, Human
gacugcaacagcauggcucaauauuugaaaucacuacgguuaaaagcagucauauugugcaguu

SEQ ID NO: 4175759 - RNA, 57 nt, Human
gacugccuuuuccauuacuuaauuuuuaaaaauacuauuaggagugggaaggguauc

SEQ ID NO: 4175760 - RNA, 68 nt, Human
gacugcuccuuguuggugucuccucaguacccagcccagugcauuggagaucagagacuagggcaguu

SEQ ID NO: 4175761 - RNA, 63 nt, Human
gacugcuucauuaaaacaauauuuucaagaacagucuuggacuuugaagucagugaaguaguu

SEQ ID NO: 4175762 - RNA, 85 nt, Human
gacuggauguuuagagaaauauugggacucagagcuucaauacugaaaaucugguaauuugaauguguguauguauauuacaguc

SEQ ID NO: 4175763 - RNA, 87 nt, Human
gacuggcaaaugcggcaugcugcagggaaugcuugucucaugcagaaggcagagaacgacccuggcaguacugccuggagcacaguu

SEQ ID NO: 4175764 - RNA, 89 nt, Human
gacuggcagugggaagaacaguugggaggugagcccuuucuuccugggcacagagcugggcuauuucucagcuucuuggauagucaguc

SEQ ID NO: 4175765 - RNA, 55 nt, Human
gacugggguugguaugugggaagaaaccgauuugucccugcuuucuggcccaguc

SEQ ID NO: 4175766 - RNA, 100 nt, Human
gacugguacucucugucauaguaagcagaaugacuuccuuuuuaaaggcaucaggacuuucuugugcauuuaccuggaggucauuuuggggauuccaguc

SEQ ID NO: 4175767 - RNA, 84 nt, Human
gacugguuuauucacuacuguccucauuuguuugaacacacuacaauguucugugggauaguagcugagagacaagcaauaguc

SEQ ID NO: 4175768 - RNA, 55 nt, Human
gacugguuucuagccucauaguuguuacuaagaagcuguguccuagcagccaguc

SEQ ID NO: 4175769 - RNA, 59 nt, Human
gacuguacugaaaagccacaaggaccagguuggcugguuuguuuacuuuucagucuguc

SEQ ID NO: 4175770 - RNA, 64 nt, Human
gacuguacuugagagaggaacugcacuaguucagcaguagauggucuuagcuuaagucaugguc

SEQ ID NO: 4175771 - RNA, 63 nt, Human
gacuguacuuuagaaaguguagugaaacccacucguucacuugguucuaacuaguguauaguc

SEQ ID NO: 4175772 - RNA, 81 nt, Human
gacuguaucaauaguaagauggaggcugcauuuggauggaugucugcccgacuccagucuuuauucacuauugauaaaguu

SEQ ID NO: 4175773 - RNA, 73 nt, Human
gacuguaucuggccugugccaccagcuugcuccugcucucuaucuugcaagaacacugccagaauacacuguc

SEQ ID NO: 4175774 - RNA, 77 nt, Human
gacugucaaaaccuuggaggcaaggguuaucauuuauaauuagguacuuucugcaacccccuaguguuuuuacaguc

SEQ ID NO: 4175775 - RNA, 66 nt, Human
gacugucaucguaauauaccucagugaaaugaagguuaauucugauguacaaccugcaugacaguc

SEQ ID NO: 4175776 - RNA, 56 nt, Human
gacugugcuggagcccucuggaggggccagacaaccccaacaguugcaacacuguc

SEQ ID NO: 4175777 - RNA, 73 nt, Human
gacuguuaauaaguaguaguuauuguuauuuuacuuaguggcaggaaguuaacuagauuuauuuaucacaguc

SEQ ID NO: 4175778 - RNA, 55 nt, Human
gacuuaaaugcuccccucagggcagcaacagccuuaaggaagagcauuuuagguc

SEQ ID NO: 4175779 - RNA, 98 nt, Human
gacuuacacaaacguacagccacaggugacucucauuuauuccuguaaaucauguacucaguuaucuggcuguacaaauagaguuaaaauuguagauc

SEQ ID NO: 4175780 - RNA, 82 nt, Human
gacuuacauguuuuauagcugaaaaccuaaggagugacaauaguacaugugacauucuuaacaguuaaaaacugaguaaguc

SEQ ID NO: 4175781 - RNA, 60 nt, Human
gacuuacauugcaucauugaaaugccagaauugucuuggcaggcagugggguaaggaguu

SEQ ID NO: 4175782 - RNA, 73 nt, Human
gacuuagcaguuuagaauaugucucaauuuuuaaaauauuuguugaaaugauuuacuuuagaucuguuggguu

SEQ ID NO: 4175783 - RNA, 66 nt, Human
gacuuauguauaauguuccacauacccguguaauacaauggauagacggaaagcuguacauaaauc

SEQ ID NO: 4175784 - RNA, 62 nt, Human
gacuuauucagauugguuuaagcuaguuagacuuaaaacugcugcccaaacugaauacuguu

SEQ ID NO: 4175785 - RNA, 59 nt, Human
gacuuauuggucuuggaagguuuuguguguauucuugccaggaaaugaggcaauggguu

SEQ ID NO: 4175786 - RNA, 100 nt, Human
gacuuauuuccuuuggcaagaggggaggagcuuuucuugccuucuaagagguuucaggaaaauccucucuuacugucuuccuaaguguaccacguggguc

SEQ ID NO: 4175787 - RNA, 64 nt, Human
gacuuauuugcccauguuuagcagauuuuuaccugagaacaaccucugggccacuugauagguu

SEQ ID NO: 4175788 - RNA, 76 nt, Human
gacuuauuugguugauggcuggaagagucgaagagucaaggaggacggacccuuagcggccauggaauaauaaguu

SEQ ID NO: 4175789 - RNA, 70 nt, Human
gacuucaaguguacaugaacacaugacaguagaacaaaucuguguccggguguucugugcacuuuucguc

SEQ ID NO: 4175790 - RNA, 79 nt, Human
gacuucaguuccaccugggaacucuaggaggcuauauacaacauaucuuagaguuauccuguccuaggggaggggaguc

SEQ ID NO: 4175791 - RNA, 61 nt, Human
gacuucaugcuuuagagagaugaagauaaaauaagaaugacuucauuuguuaguagaaguu

SEQ ID NO: 4175792 - RNA, 64 nt, Human
gacuuccauuuuuguuugucagaguaaggacugggcacgaccaccuucaaacuagauagaaguu

SEQ ID NO: 4175793 - RNA, 76 nt, Human
gacuucuacuuucaaacugcccagcacaccuaugaaauuccaacauucuuuucaggagcugcagaguggggagguu

SEQ ID NO: 4175794 - RNA, 56 nt, Human
gacuucugagcuauccagcuguggcaauucaucagcuaggaucuccucuggggguc

SEQ ID NO: 4175795 - RNA, 118 nt, Human
gacuucugggggucacaggccucuuugaggaagcuuuugaucgcccaguaguaugcacaucaaccauuuugcauucgauuuuggguucacagggcuccugaaacccacucccagaauc

SEQ ID NO: 4175796 - RNA, 78 nt, Human
gacuugaacauugucacauuccuagcuugggcucagaaauugccuguugcuacuuuugugacuuaaugcuucuagguu

SEQ ID NO: 4175797 - RNA, 120 nt, Human
gacuugacugaccugacccucggggauccauccacguggcccacccaaguaaugcaccuuuuagaauauuugcugaaauaacugccaccugguggcaucuucugggucaaugucacuguc

SEQ ID NO: 4175798 - RNA, 130 nt, Human
gacuugcugaagaccgcauggcugggagacggcugaggucaggcagccugauucuaacauuccaugcuuuuuccgcuguauuauccuacagauguuucuccgucacacacugcacuacuuagcugcccuc

SEQ ID NO: 4175799 - RNA, 56 nt, Human
gacuugggaaucaccccucaggcccauucuccaaugcugagcccagaucccagguc

SEQ ID NO: 4175800 - RNA, 61 nt, Human
gacuugggggccauuaaggggccuccuccaucagacugggggcccuuuaagagcucccauc

SEQ ID NO: 4175801 - RNA, 93 nt, Human
gacuuguaccucacugaggcugagaguuuguucuacuucuggucugaauaagcaaauguuuaguuucaguuccucuucaaauucaggacuguc

SEQ ID NO: 4175802 - RNA, 128 nt, Human
gacuugucaucccaagauaauucaugauggauuuucaaagguuuuaugcuaagagaaucuucccaagaaauguauauggauaaaacguucugaaaaacaauguggaauaaugucugggcuugagaauc

SEQ ID NO: 4175803 - RNA, 77 nt, Human
gacuugugugcacauaugucauagguauguguauacauacaagguacauauacugcauacauauguguacauauauc

SEQ ID NO: 4175804 - RNA, 130 nt, Human
gacuuuacaaguaaagcaaaguuugauucguggauuuaggaggaaagguaugugcauacaugcauguguguaugcauucauucauucuuucuaauguguaaaucauaaguuuucaaauauuugaaguguu

SEQ ID NO: 4175805 - RNA, 94 nt, Human
gaggcaaaacuguggccuggguccuggacuuggggaggcuagauucuuguaacacaagaaccucccuguguccucccucccacagcccaaccuu

SEQ ID NO: 4175806 - RNA, 64 nt, Human
gaggcaaaggccacuggggcgauggcgagaaacccucuccccauucuccaagggucuuuucuuc

SEQ ID NO: 4175807 - RNA, 90 nt, Human
gaggcaaauuauaugaaaguuugaaugagauuuaagacugucaaaacuauucuuuaggauuaagacauucagauauuucuaauguuccuc

SEQ ID NO: 4175808 - RNA, 87 nt, Human
gaggcaacacagguagggaccacuccgacauguaggggcugcccuccaagcucccuguccugaguuguccaaacuucugucugccuc

SEQ ID NO: 4175809 - RNA, 61 nt, Human
gaggcaagcccagugggucuaaacgcaguggucugagguagaucgggugggcuuucaccuc

SEQ ID NO: 4175810 - RNA, 115 nt, Human
gaggcaaucccagcaccuucacagcaccaggaucucuccaagagccuucccagagaaaagggccauucagaccauccugcuguuagugagcuacuuugggugcuggguggaccuc

SEQ ID NO: 4175811 - RNA, 60 nt, Human
gagucacugggugacuuuuggagguagcaacaagcucaugaagaaggcauucaguggcuu

SEQ ID NO: 4175812 - RNA, 71 nt, Human
gagucagaaacucacucuauagcuacauaauuuuuacucuuuuuccauguaggaacagugauuuuggacuc

SEQ ID NO: 4175813 - RNA, 59 nt, Human
gagucagcuccuaggaagugccagcgcccacgcaccugugagcuccuggagucugacuc

SEQ ID NO: 4175814 - RNA, 56 nt, Human
gagucaggcuagggugacaggcucagggaagccccacauccucaauggccuuacuc

SEQ ID NO: 4175815 - RNA, 57 nt, Human
gagucaugcacugucuuucucccauucccagucugugggguuugagagagcugacuc

SEQ ID NO: 4175816 - RNA, 65 nt, Human
gagucauugcacacuagcucagccuagauguuagccugggugugacccugggugggcaauggcuc

SEQ ID NO: 4175817 - RNA, 55 nt, Human
gagucauuugggggcuucuugacuuucaugucuggugccugaaauagaaugacuc

SEQ ID NO: 4175818 - RNA, 58 nt, Human
gaguccagagauuaagcaccucugacagcucuuugucuugcuuauccauuuuggucuc

SEQ ID NO: 4175819 - RNA, 60 nt, Human
gaguccccucuaacccaacuuuauuauguauuaauaauaauaaagcugcucagggggcuc

SEQ ID NO: 4175820 - RNA, 67 nt, Human
gaguccccuguccagggccagccagagagugcggagccccaccaugagcugggccugcaggggucuc

SEQ ID NO: 4175821 - RNA, 104 nt, Human
gaguccccuuuccuucuguguccauccugggaaguggugagggccugaggaggcaacgggacagcuuccucgaccaccugcucugagggcaccaugggggacuc

SEQ ID NO: 4175822 - RNA, 65 nt, Human
gagucccugaggcucuccugaauaauggccaccacagcaggccuugacugaaugccucuggacuu

SEQ ID NO: 4175823 - RNA, 63 nt, Human
gaguccuggguucugguguuuuguguguuaaggcgaucagggcugucagggaccucaggacuc

SEQ ID NO: 4175824 - RNA, 105 nt, Human
gagucuaagccagugauucuugguuacuuagaagccauucuaaaacuggaaauaauuccaguggacaauuucugaggaaauaagugaaugacugguguuauacuu

SEQ ID NO: 4175825 - RNA, 69 nt, Human
gagucuccaauccaugccugucagccacucuagaugaccugaaguagacagguaaggguugggagaauc

SEQ ID NO: 4175826 - RNA, 85 nt, Human
gagucucgcucuuuagccaggcuggagugcaguggcgccaucucggcucacugcaagcucugccuuccggguucaagugauuuuc

SEQ ID NO: 4175827 - RNA, 84 nt, Human
gagucuggcucugacgcccaggcuggagagcaguggcucgaucucggcucacugcaaucucugccucuuggguucaagcgauuc

SEQ ID NO: 4175828 - RNA, 68 nt, Human
gagucugugcuugcugaaaggcauuuagaggucccuucugggugccacacagcaugcuuggugaacuc

SEQ ID NO: 4175829 - RNA, 60 nt, Human
gagucuguggucuggguuccccuguuuccuuaggcugagccaguuguagccacagaacuc

SEQ ID NO: 4175830 - RNA, 73 nt, Human
gagucuugaaagcacauuagaguaaaugagagugacugacccucugaaauucuugugagcuuuccaaggacuc

SEQ ID NO: 4175831 - RNA, 86 nt, Human
gagucuugcucugucgcccaggauggagugcaguagcgcuaccucagcucacugcaagcuccuccuccuggguucaugccauucuc

SEQ ID NO: 4175832 - RNA, 92 nt, Human
gagugaaaucuagagacaauuugaauauagagcaaagggagagaauacagaaaccacacuccacauauagaauuggucuuaagaguucccuc

SEQ ID NO: 4175833 - RNA, 69 nt, Human
gagugacagggcagagaggcaggcuugggucuguccagcuccaaagcccaugcucuguccaugcaucuc

SEQ ID NO: 4175834 - RNA, 68 nt, Human
gagugagaauuguuguccuguccuugaagcaaaucaccuucaaguauuacaguguaauauucacauuc

SEQ ID NO: 4175835 - RNA, 81 nt, Human
gagugagaggucguuaucuuugcuggaggagugcuuguucuuuggcaaggacacagcucuucaguaagauggucuuuucuu

SEQ ID NO: 4175836 - RNA, 79 nt, Human
gagugagaugacaacaaguaaguuuauauauauuuugugaaagcaugauaauguggauuuauugugauauauuuuguuc

SEQ ID NO: 4175837 - RNA, 64 nt, Human
gagugagaugauggcacacagacauccccgccccagcuaggggaggggccugcugcguuuccuc

SEQ ID NO: 4175838 - RNA, 115 nt, Human
gagugagccacugugggaauucagggagguggcgcagugaccaccccuggagggauauguguguggcaggggucgagggucucgcccuucccugcuuccugcgcguggcuuucuc

SEQ ID NO: 4175839 - RNA, 118 nt, Human
gagugagcuggcagcccuaggagcagcgggacaugccccucagugggugucucaccugggagacaaagcucgccaccucugagggcgggucauucuugcuguccugccaggucaccuc

SEQ ID NO: 4175840 - RNA, 94 nt, Human
gagugagguacuugauaugcgguguguuucuucucugugaaucaauucagcugagaagcaaagaacugcacuucagacuucaggcguuuuauuc

SEQ ID NO: 4175841 - RNA, 76 nt, Human
gagugagugggugacaguuaacagguuuccacagugauuagugagugggugacagugaacagguucccacugccuu

SEQ ID NO: 4175842 - RNA, 56 nt, Human
gagugauaggugugcagugaugcugggaagagagaauucauugaacauaauuacuu

SEQ ID NO: 4175843 - RNA, 108 nt, Human
gagugauccuccauccagagcaguggagcagggcuccccaggcccgaggugagugccaccugugcuggguguggcgucuugagcgcugcaugguucugauccugacuc

SEQ ID NO: 4175844 - RNA, 84 nt, Human
gagugauggauguagggccugggcaucacaggccuggggaggacccaugggcugugggacccuggaccagccgcguaaucucuc

SEQ ID NO: 4175845 - RNA, 64 nt, Human
gagugauugcaguguguguuccaugagguaguaugcacacagagccuucauacacuaaacacuc

SEQ ID NO: 4175846 - RNA, 58 nt, Human
gagugcaguggcgcgaucucggcuuacuaagaggcccuguuaugagccacugugacuc

SEQ ID NO: 4175847 - RNA, 62 nt, Human
gagugccaagagaagaggcuggugaauuaggaaagagugagaucuuuucagucuugguaguu

SEQ ID NO: 4175848 - RNA, 63 nt, Human
gagugcuggcuccaucacugggugauggcugggcaugccacuaacauccuuggggucugucuc

SEQ ID NO: 4175849 - RNA, 57 nt, Human
gaguggagguggcuagugcuguuaucagggcauaaaacagcagccaaacuucuauuc

SEQ ID NO: 4175850 - RNA, 122 nt, Human
gaguggagugggacaggcuuugguggcugacagcacagagcuaggaguggagggaguggauuucaguuucugacccugccacuggcuugcugugugaccuugggcaagugucuugcccucuc

SEQ ID NO: 4175851 - RNA, 55 nt, Human
gaguggauuuguugucuucugcucuccugccauaugaagacacagaguucaucuc

SEQ ID NO: 4175852 - RNA, 57 nt, Human
gaguggcagaggcucugggaccagacuaccuggguuugaaucccagcucugccacuc

SEQ ID NO: 4175853 - RNA, 55 nt, Human
gaguggccaaacugaggaccugcugcaccagcuccugggucucuguuggcuucuu

SEQ ID NO: 4175854 - RNA, 107 nt, Human
gaguggcugacaauaucaaauucugcaggcacaucugaaaagaugcacaaguagcugcuggauuuggcauuuuucagaugacugguaaccuugguaagguuaguuuc

SEQ ID NO: 4175855 - RNA, 124 nt, Human
gaguggcuugaaaagaguauguguucaauagcaaagugugagauuaaaccgaaucauucaaauaugacugacacaggucaaaucuacuuuugcagugaccuacgacacuuuuuucaugcuauuu

SEQ ID NO: 4175856 - RNA, 73 nt, Human
gagugggaaaauacaaauagccuugaaaauauagccagggauuuuacgagugcuaaugauauugugccuacuu

SEQ ID NO: 4175857 - RNA, 75 nt, Human
gagugggguauggagauuagaauacuucgauuguuuaauaauaauuugcauaauagugauuuguauaucucauuu

SEQ ID NO: 4175858 - RNA, 61 nt, Human
gaguggguaggccucuggugccugcagagccucauguaacuggcaucaggacuacccaguu

SEQ ID NO: 4175859 - RNA, 76 nt, Human
gagugggugucucaagaaugggggucccuccaggccaccauuaccaagaguuccccaauuugagucaccucugcuc

SEQ ID NO: 4175860 - RNA, 64 nt, Human
gaguggugaugacagcaguuucuggcucaagugccacagacuaccacuguucuuacugaaauuc

SEQ ID NO: 4175861 - RNA, 63 nt, Human
gagugguuuucaaauugccuuccguggagcuggaggacuccaaggaggagcuggagauugcuc

SEQ ID NO: 4175862 - RNA, 97 nt, Human
gaguguauccucuagaucuggugggcacuagaaucccuucaagaagcccugggugaagggcuccagauucuggaugacuggguuuucuggaugacuc

SEQ ID NO: 4175863 - RNA, 61 nt, Human
gaguguauggaaggaagagauuuuuaguaaaaucaugaaaucuuuuccaaaccauccacuu

SEQ ID NO: 4175864 - RNA, 61 nt, Human
gagugucugcuuugagucaggugucguaauuauuuuuuacaccauuuucacagcaaaccuc

SEQ ID NO: 4175865 - RNA, 68 nt, Human
gagugucuguauuuugggcaagagaaggaucccauugauccaaccacuugccagagggcuugacauuu

SEQ ID NO: 4175866 - RNA, 67 nt, Human
gagugugaacgcugcugcuuucuggugcuguuuccugcaagccacaaucugcaucagcauucaucuc

SEQ ID NO: 4175867 - RNA, 65 nt, Human
gagugugaccucaucuuaacuggaacccaucugcaaagauccuauuuccaaagaaguucacauuu

SEQ ID NO: 4175868 - RNA, 80 nt, Human
gagugugagccuuucggaguaggagagaggcuggggaaguccagccccuauccucgcuccaccccaccagauggccacuc

SEQ ID NO: 4175869 - RNA, 68 nt, Human
gagugugggcucugcugcguaccaguuggguggcuuugggcagguggaaguuggcagagcgccgccuc

SEQ ID NO: 4175870 - RNA, 69 nt, Human
gaguguguucucauuucauguguuuacaugggcaacaccaaguucuuaauucagaaagggaauaaacuc

SEQ ID NO: 4175871 - RNA, 55 nt, Human
gaguguucccacaccccaguuguuaggacaaggugcuagggaagggggacaccuc

SEQ ID NO: 4175872 - RNA, 80 nt, Human
gaguguucccauuuuggaugcggauugguacgguagaggaaaugagaagccaacaagugccaaguauccagggauuacuu

SEQ ID NO: 4175873 - RNA, 55 nt, Human
gaguguucugcuugaacuuagcuugcagcuucaagccugagcagcggcagcacuu

SEQ ID NO: 4175874 - RNA, 85 nt, Human
gaguguuuuacagaucuguugauuuguuuccagggcagccagauaucugccacacagcaaucuuagcagaaauguagaaugacuu

SEQ ID NO: 4175875 - RNA, 78 nt, Human
gaguuaaaagcccucucagcagcagauaaauauagcuauguuugguccagguuacaguugcugagggaacuauaacuu

SEQ ID NO: 4175876 - RNA, 61 nt, Human
gaguuaaaggaaaauaacuuuaagaaucacucauacugugaaaguuguuuugcuucagcuu

SEQ ID NO: 4175877 - RNA, 60 nt, Human
gaguuaauguguacacaaagggcuuaugacauaguccuugcccuguguaguuacaugcuc

SEQ ID NO: 4175878 - RNA, 74 nt, Human
gaguuacagugcagcuuauaaagcaucaaugaggaagugcauugaccucuauugugacuggcuguuaaaaacuu

SEQ ID NO: 4175879 - RNA, 57 nt, Human
gaguuaccaugaauuguuagccgguugaauccuaaauugacaacaaaaugguaauuu

SEQ ID NO: 4175880 - RNA, 90 nt, Human
gaguuaguagcucauggauugaauauaaauuagaugauugaaauaugauauuuaaugaagcuugauucaguccaugagcuacauaagcuu

SEQ ID NO: 4175881 - RNA, 56 nt, Human
gaguuauaaccuaguuuaacuggauuuagaaaacugguuaaacuaggcuacaacuc

SEQ ID NO: 4175882 - RNA, 66 nt, Human
gaguuaugacuugagaauucauaauuaucuaggaaugucuuggcucauguuucucugucgugauuu

SEQ ID NO: 4175883 - RNA, 77 nt, Human
gaguuauuuauuuuggucuuuuauuuaaagcagcccuaauuuuuagauuguuugaauaacagacaaauuagaagcuc

SEQ ID NO: 4175884 - RNA, 77 nt, Human
gaguucaggaaauuugucucaaauuauuuaacuagccaauggcaggucuggauuuugaacaaaauucugucuuacuc

SEQ ID NO: 4175885 - RNA, 55 nt, Human
gaguucaucucuuccugcccugcuucugagggaagcuguuaaaagguaugaauuc

SEQ ID NO: 4175886 - RNA, 67 nt, Human
gaguucauuucuguuggagaauuugccucuucaauuccuugagcaggcuuuccacagaaggaggcuu

SEQ ID NO: 4175887 - RNA, 56 nt, Human
gauacuuggguagaaguuucccaagcaauuacuuuaucaaacagugccuaaguguc

SEQ ID NO: 4175888 - RNA, 64 nt, Human
gauacuuuaggaagaugcuuuuucuggguaaacuaaaagccugacguggcucuuccugauguuc

SEQ ID NO: 4175889 - RNA, 66 nt, Human
gauacuuuguggaauccuggaugaggaggcacagaaauacucccaccauaguuauaacaaaguguu

SEQ ID NO: 4175890 - RNA, 129 nt, Human
gauacuuuugguagaagcguuguguaaaauguguggaguaaaaaguuuuugcagauaauguguuugacauaccauauuauuauauuggaugagacuuucuuccaccugcagauguuucucuuugucuuc

SEQ ID NO: 4175891 - RNA, 63 nt, Human
gauagaaaacugaguuuucaguaucugaagacuauagauacugaaaacugagucuuccguauc

SEQ ID NO: 4175892 - RNA, 74 nt, Human
gauagaagacgcugagagugguggcucacaguaauucucuccucccugucaugcaccucuccauguccccuuuc

SEQ ID NO: 4175893 - RNA, 95 nt, Human
gauagaauagaauuagguauucagcgcaugcucaguaaauaccuguggaauagaucaauccacagaguggcaugaaugaagccuucugucucauc

SEQ ID NO: 4175894 - RNA, 71 nt, Human
gauagaaucuguuccugaggcaccagagaacuccagggaauauucucugauuguuuagugaauagagcauc

SEQ ID NO: 4175895 - RNA, 87 nt, Human
gauagaauuauaaauuuuaaagcaaguagaagccugaguuauuacuagucauaucuccuucaauucugcuuuauaggugagguuauc

SEQ ID NO: 4175896 - RNA, 83 nt, Human
gauagagaaagccaaugguuuugcagguuuguggagcaccagcaacuguuccucaaauuagcagaucauagguggcuucuauc

SEQ ID NO: 4175897 - RNA, 73 nt, Human
gauagcucaaagguuaaguguggacccugaagccagacugccugguuccacgcugugugaccuugggcaaguc

SEQ ID NO: 4175898 - RNA, 80 nt, Human
gauagcucugguguaggguaaggaugggagccucuguuuucuuaacagcuaagcucucagauacuaagccaguaguucuc

SEQ ID NO: 4175899 - RNA, 79 nt, Human
gauagcuuuacagaagaguuuagagugguauaaaaaggacgcacuucagaaccaagcuagcucuagcuuuagggcucuc

SEQ ID NO: 4175900 - RNA, 64 nt, Human
gauaggaaauaaagggauagugaaacuuaaaucucuauguuuuacaaguucugaaauuuccuuc

SEQ ID NO: 4175901 - RNA, 102 nt, Human
gauaggagacgccgugaggaugguguuggagagggcgggaacggcccaccccuauuguaugggcggcugagucuucucggacaccuccugaggucuccuuuc

SEQ ID NO: 4175902 - RNA, 78 nt, Human
gauaggcaagcaggaugaagcccagggagaacguacggcugcuucccagcaugcauucgccugcugucucuuccuauc

SEQ ID NO: 4175903 - RNA, 85 nt, Human
gauagguuagucagccagucacaguuccuacccaguaaacacuugcaguuuauuuuugacagaauuguacuucaacuggcuuauu

SEQ ID NO: 4175904 - RNA, 74 nt, Human
gauagguucagcuuucauccugaaaaguuguuuaaacacuuuuaauuuguuucaagugaugaaaugaauuuauc

SEQ ID NO: 4175905 - RNA, 97 nt, Human
gauagguuucugagugugcagcaucuguuggauggauaaguuguuugugcccaacguguucauagaggggugauccaacacuggugucagggccauc

SEQ ID NO: 4175906 - RNA, 72 nt, Human
gauagugccaggcauuugacagacacuuccagaaaacaccgaaugugcaucuacuaugugccaggcacuguu

SEQ ID NO: 4175907 - RNA, 70 nt, Human
gauaguggaggggaugcaaagcuucauuguucuuauugaggcaaaggaaguauuccuuagauucauuguu

SEQ ID NO: 4175908 - RNA, 74 nt, Human
gauaguggcgcauuguuuacauggcugugcugauugcagcagccacugugcaggagcaguguagauaccgcauc

SEQ ID NO: 4175909 - RNA, 56 nt, Human
gauaguuuuuuuucagugcaauguauaucaugucuuugucugaaaaggaagcuauc

SEQ ID NO: 4175910 - RNA, 123 nt, Human
gauauaaucauuuaugcaaaugccaggauucuauucgcugaagagguuccagguugaguuacauuugagaagcuggagaauguggaugauccuggagagccguuuagcauacaaagagauauu

SEQ ID NO: 4175911 - RNA, 66 nt, Human
gauauacaauccacaguugauuuucuaaagugguaaaauucacuuuucuuuguguuuugguguguc

SEQ ID NO: 4175912 - RNA, 101 nt, Human
gauauaugagucagaaguucagaauauauucauguugucaggucuggaaguacuguuuugacagugaggguguagcauuuagaugaucugacaaauauauu

SEQ ID NO: 4175913 - RNA, 56 nt, Human
gauauauuaacacccacuugccucauguaauugugaggauuaaauguuaguguguu

SEQ ID NO: 4175914 - RNA, 65 nt, Human
gauaucaucucggugaaacauuuggugcuccagguaacagugugccagggccacggggagguauu

SEQ ID NO: 4175915 - RNA, 67 nt, Human
gauaucuguucucuccacaugucagcacccauucaugucaugguuuggaaauggggagaacagauuc

SEQ ID NO: 4175916 - RNA, 97 nt, Human
gauaugaggaaagcaagagaaucugcugugaaaggugaauauuucagaaauacuuguaguaugcauauuucaaaguaaguuaugcugauaucauguc

SEQ ID NO: 4175917 - RNA, 81 nt, Human
gauaugagggagggaaaaugcaaaugaugaaacuaacuuuuccuacuucagaaaggaaaauguuugccucuccuuccaguc

SEQ ID NO: 4175918 - RNA, 80 nt, Human
gauaugcaguaaacagaauucaggcaagauaccucuaagcuguuuugaacccucugauauuuuguauuuauguguuuguc

SEQ ID NO: 4175919 - RNA, 56 nt, Human
gauauggcacauuuuguuuauccauuuaucugucgauggacaauugagugucuguc

SEQ ID NO: 4175920 - RNA, 72 nt, Human
gauauggcugcccacguuggugcuucccggacuccccaagaggugauggagcauuacgugagcauguacauc

SEQ ID NO: 4175921 - RNA, 81 nt, Human
gauaugggaagacccuguguaccuguucccuugcaaggacugucuuucauggaaggcuaggugcuaggcccugccuguguu

SEQ ID NO: 4175922 - RNA, 88 nt, Human
gauauuaaugggaaaaauagaguauacuuuaaaauuguggauaggaauuaaaauaucagguuaaauauaugcuguauucauugauauc

SEQ ID NO: 4175923 - RNA, 69 nt, Human
gauauucaugaaagcuguuagagcccccagucugcacccggagaugggggauuuuacagcgugaguguu

SEQ ID NO: 4175924 - RNA, 97 nt, Human
gaggcgggagaaucgcuugaacucgggaggcggagguugcagugagccgaggucgugccauugcacuccagccugggcgacagagcgacuccgucuc

SEQ ID NO: 4175925 - RNA, 67 nt, Human
gaggcgggcagaucaccugagguuggaauucgagaccagccuggccaacauggugaaaccucgucuc

SEQ ID NO: 4175926 - RNA, 68 nt, Human
gaggcgggcgcaucaccugaggucaggaguucgagaccagccugaccaacguggugaaaccccgucuc

SEQ ID NO: 4175927 - RNA, 68 nt, Human
gaggcggguggaucaccugaggccggaaguucgagaccagccugaccaacauggugaaaccccgucuc

SEQ ID NO: 4175928 - RNA, 68 nt, Human
gaggcggugugagcaaugugugguuaauguuagggaaacagugcauuuacaccaguuuacacuuccuc

SEQ ID NO: 4175929 - RNA, 59 nt, Human
gaggcucaaaccuggacagagcugguagccaaauuaaccgugaacccaguuugagcuuc

SEQ ID NO: 4175930 - RNA, 59 nt, Human
gaggcucaccucaauguuucugaguccacuucagaaauuccaaacacugggugagccuc

SEQ ID NO: 4175931 - RNA, 120 nt, Human
gaggcuccaagggguuaagcagcaugccccaggucacacaacggaaauggaaccaggguucuauugcauccccauugugccccagggcccaugcuguuaacugccuggcuguuuggccuc

SEQ ID NO: 4175932 - RNA, 56 nt, Human
gaggcucuggaguagguacacagaauaagacauggugcuugucuuuaaggagccuc

SEQ ID NO: 4175933 - RNA, 71 nt, Human
gaggcugaaaccguuauccacugacaucuaucucacauugguugaaggucacuguuaaggguauuagcuuc

SEQ ID NO: 4175934 - RNA, 97 nt, Human
gaggcugaagauacaggagcauggaugauugauggagcacaucccuaagggagcaggaggggaugaaauccagaucacagguggugggauuagccuu

SEQ ID NO: 4175935 - RNA, 60 nt, Human
gaggcugagaguggaucccagggauggucacgaaccuccagagagccacuuuauaguuuc

SEQ ID NO: 4175936 - RNA, 113 nt, Human
gaggcugaggcaugagaaucacuugaaccugggaggcggagguugcagugagccgagaucaugccaccgcacuccagccuuccagccugggcaagagagcaacacccugucuc

SEQ ID NO: 4175937 - RNA, 72 nt, Human
gaggcugaugguccagacuuugaccucucagaaagugcugggcugccugagaggggucuggauguucggcuc

SEQ ID NO: 4175938 - RNA, 56 nt, Human
gaggcugcagcuaucagacauuuccaaagggagugucuucgacuccugcgugcuuc

SEQ ID NO: 4175939 - RNA, 58 nt, Human
gaggcugcaggcaaugcugccccagacccaggggcgaagagucuuugccuggggccuu

SEQ ID NO: 4175940 - RNA, 71 nt, Human
gaggcugcccaacuggaguggacccagggccucccagacugcccucccgccacugugaguuggcuggccuc

SEQ ID NO: 4175941 - RNA, 98 nt, Human
gaggcugcgccguggaggggaggaggcuaagugggcucuggaaucagccagaccccagguccaggcccaccuuggccacuuacgaacugugcagccuc

SEQ ID NO: 4175942 - RNA, 73 nt, Human
gaggcugcuggcuggucaugucaugagcccaggucuucuucuugggcacaaccagaugccauuucucagccuc

SEQ ID NO: 4175943 - RNA, 94 nt, Human
gaggcugcugugagaugcacagauccccaggacccuugggcuggcccccucagaggcuugagggccuggugaccuggguccucugagcagcuuc

SEQ ID NO: 4175944 - RNA, 118 nt, Human
gaggcuggaccuccaaaaggaauggcuguguggggcagccaggaaagcuggacccuggggaccauggcccuguacccuggcuuggcacagacacaauggcgcguucugucuagcacuc

SEQ ID NO: 4175945 - RNA, 105 nt, Human
gaggcuggaucauucuccgugguggcuggagguagggagguccugugcaguguagaauguuuagcagcauccuuggccuccacccacugaguaucucuagcacuc

SEQ ID NO: 4175946 - RNA, 66 nt, Human
gaggcugggggcagccugaccccacguggaagagcuuggggucaugaggcugcugucaccaggcuc

SEQ ID NO: 4175947 - RNA, 70 nt, Human
gaggcuguccuguggaaagcuagccgcugcuuccuccaugaaagcuguuagaaauccgggggaugaccuu

SEQ ID NO: 4175948 - RNA, 99 nt, Human
gaggcuuaaggggcuguggggucagcaggccuggccuguuccagccaucccaggcaggcgaguguugcucugcagacccagaaucacagccuuggccuc

SEQ ID NO: 4175949 - RNA, 67 nt, Human
gaggcuuagucucuaggcaggguccuggagugccgcuccagagucccugcucaggggucugauucuc

SEQ ID NO: 4175950 - RNA, 70 nt, Human
gaggcuugauuggucccuccaggcucaggugcucaucaaugagcccaagcuaugaggugaccucacccuc

SEQ ID NO: 4175951 - RNA, 90 nt, Human
gaggcuuuacauucuugcugauuuugauguaccuaccgaguguggccaaagguggcucuugguaagacauuagagguuacagaauuccuc

SEQ ID NO: 4175952 - RNA, 55 nt, Human
gaggcuuugguuauaaaagaucaaagacauacacuuugaucuucacuagaaccuu

SEQ ID NO: 4175953 - RNA, 75 nt, Human
gaggcuuuucagggucauuucuucacacucucugcagggaagcacggagacagcaggaagaaauauccuaaccuc

SEQ ID NO: 4175954 - RNA, 56 nt, Human
gaggcuuuuggcuaauaacuguuaaauacuuaaugacucuuaaaagccugagucuc

SEQ ID NO: 4175955 - RNA, 113 nt, Human
gagggaaaacagagggaaugugcccacauggugccauggccauucaccaauccuaugguuggggguugguauacgugcauaccauauugggccuguuuauacauguggcccuc

SEQ ID NO: 4175956 - RNA, 109 nt, Human
gagggaaaucugcagguccgcuucaaagcccuggucugccacccacaccccuccaaauguggagaaugggggcuacaggccacaugcaguuguggaccugcggaaccuc

SEQ ID NO: 4175957 - RNA, 75 nt, Human
gagggaaucucauguggcauagugugaucaugggaaugacaucccaccaucuuugccauaugauguaauccacuc

SEQ ID NO: 4175958 - RNA, 75 nt, Human
gagggaaugaguggcagaagccaagucugcaguugggaaaucaugggacgugcuggcuuuuccucucugauccuc

SEQ ID NO: 4175959 - RNA, 72 nt, Human
gagggacaaggagguaagaagaaagggagggcuuugcuuucaaguuuguauuucuguauuucuaaguuccuc

SEQ ID NO: 4175960 - RNA, 76 nt, Human
gagggaccaacggggcugguuccauucguuuaucacaaaggaaagacuguugccugaacuuagccugguggcccuu

SEQ ID NO: 4175961 - RNA, 66 nt, Human
gagggacugaggaaggaguuaggcaguugcucaaagcaggcagccuggauagaccccucuccccuc

SEQ ID NO: 4175962 - RNA, 70 nt, Human
gagggacuuguuuacaagcaguucugaccaccuuagugguguacuguuuucuaggcaaaaaauaucuguc

SEQ ID NO: 4175963 - RNA, 72 nt, Human
gagggagagagagaaacacaacucaggauguccaucaggauuuaucugcagcagugugucucauuuuaacuc

SEQ ID NO: 4175964 - RNA, 86 nt, Human
gagggagagagagauucuggcugcagucccuguaauaaccucuaauuagugcaaugaauaacagccaccaucucuucuguuuccuc

SEQ ID NO: 4175965 - RNA, 66 nt, Human
gagggagagaguccuggaggcaaaugaagacuccugguggggagaucaucagccccaggggaccuu

SEQ ID NO: 4175966 - RNA, 80 nt, Human
gagggagauuggcccucagaggcagccuugugauaggacagaaguccagaagcauccuggcucuaggugucaucacuguc

SEQ ID NO: 4175967 - RNA, 55 nt, Human
gagggagauuuuagaaauuacuuuacauaauuguaauaguaaugaagucuuguuc

SEQ ID NO: 4175968 - RNA, 125 nt, Human
gagggagcugggguuugggguauaggggucugggguuccagaccacggguguucugaggacaaaaccugaaggaggccgggauucuggagauucugccucuaaauccaccucccccgucucccuu

SEQ ID NO: 4175969 - RNA, 58 nt, Human
gagggagcuugauggauguuugugaaauaauacaggggcucugcugcaagucuuccuc

SEQ ID NO: 4175970 - RNA, 67 nt, Human
gagggagggaacgagagaaagaagcaaacauuuuaaauuuuguucugugaaucuuuuuucccacuuu

SEQ ID NO: 4175971 - RNA, 56 nt, Human
gagggagggccaggucccaaccaaugagaaggcaaauggcuccuggcuccucccuc

SEQ ID NO: 4175972 - RNA, 102 nt, Human
gagggaggucaggggcaccccaucuggccagucuguggaagccaggcaggggugcagccccgcugggggcagggcuggcugagggagcccccuucuucccuc

SEQ ID NO: 4175973 - RNA, 87 nt, Human
gagggagucagcugcagcagcuuugguaggggaaaggagagcucagcgcuacacccacacuuggggagccugcugcgccacucccuc

SEQ ID NO: 4175974 - RNA, 90 nt, Human
gagggagucaugagcgagcaggggccucuggugccugaagcgccccucaggaagagcgggucucaccggaaggccacacucaucuccuuc

SEQ ID NO: 4175975 - RNA, 77 nt, Human
gagggcaaauaggagucaaggcuauuaugugggaaaucuggcaccagauuaccugcuuuagaacuccaguuucccuc

SEQ ID NO: 4175976 - RNA, 109 nt, Human
gagggcaauuaggaguuaaaaucuagccuuuucauuguuccucgagcauuguccaagcucagagcuggguaugucuggaggaaggggcaaaagguguccuuugccaguc

SEQ ID NO: 4175977 - RNA, 55 nt, Human
gagggcagagacagugauucaccaacagcacagguggaucccuccuuuaacucuc

SEQ ID NO: 4175978 - RNA, 69 nt, Human
gagggccaaagagcaagagccuguuuaccuuccccaagguccacauuuccucuugcuucuucaucccuc

SEQ ID NO: 4175979 - RNA, 84 nt, Human
gagggccugaggccuuggagagggaacugggaggccuggcuucuagcccggcucugccucugacccucuggccucaguguccuc

SEQ ID NO: 4175980 - RNA, 65 nt, Human
gagggccuuacccagccuggauguccuagaaagcuuccuggaagagggaccccaggcuggcccuu

SEQ ID NO: 4175981 - RNA, 59 nt, Human
gagggcgcggcugcccaccugacgaaccuggccugugucagaguggugguuuugccuuc

SEQ ID NO: 4175982 - RNA, 79 nt, Human
gagggcguguggugcaggccaagcugcgagcuuccggaaacccggcuuccagugacuuuggucgugcgcucacccccgc

SEQ ID NO: 4175983 - RNA, 65 nt, Human
gagggcuaagauaauggcuggguaaaguaccuucuuauuucuagucagccauaucuaguguucuc

SEQ ID NO: 4175984 - RNA, 129 nt, Human
gagggcugaaugcuucuuccuggaaaaacucucagcuccuaagugagugguugugauggcuuuuccuaagacugccugcauccuuaggguagagaguagaaaccuuauauugcuacaacucagcaucuc

SEQ ID NO: 4175985 - RNA, 67 nt, Human
gagggcugccugcucugcauugaagcugcuuuguucauuucucagugacaagagccuggcggcuuuc

SEQ ID NO: 4175986 - RNA, 76 nt, Human
gaggggagugguugggggcuggggagaugcuggcugugcugcuucucuguucuaacccuugcagccuauucuucuc

SEQ ID NO: 4175987 - RNA, 78 nt, Human
gaggggauguccugugcauuguugaguguuuagcagccucccuggccucuacccacuagaugccagcagcaucccuuu

SEQ ID NO: 4175988 - RNA, 79 nt, Human
gaggggcaccucuccccgcagcugucuaugugugggggcaccucuccccgcagcuguccauguguggggggcgccccuc

SEQ ID NO: 4175989 - RNA, 73 nt, Human
gaggggcaguugauugugcuaugaaagcccaacagggcuaagcccagccacagucaaccuguccauaguucuc

SEQ ID NO: 4175990 - RNA, 65 nt, Human
gaggggcccguggcucagcuggcccaccaaccccaagcauuggccaagccagcugcacggcccuc

SEQ ID NO: 4175991 - RNA, 77 nt, Human
gacuuuacagacccugaguuacagauauauaucagggaaaaaaugugcuauuucuguaacucagggucuguaaaguc

SEQ ID NO: 4175992 - RNA, 84 nt, Human
gacuuuacauggaacugaaaucugaauuuagagaugguucacaucguuuccacucugaaacacuuuuuaguaaagauugaaguc

SEQ ID NO: 4175993 - RNA, 68 nt, Human
gacuuuacucaaugaaguagccugguuaaaagggcaaugccagccgggcuauauuucuuugucuaguu

SEQ ID NO: 4175994 - RNA, 129 nt, Human
gacuuugauuaaucuuauucucuugaccaucaguacuauagcuuauuaauccacaaaguauuauaaaguaccugcuuuggaaauaagaggcuaaaugguaauaaugggggagaguuuaguucugaaguc

SEQ ID NO: 4175995 - RNA, 78 nt, Human
gacuuugcaaacagaaaugcaggacgcuccucccucccccaccggaggauguccagcuccuuuuugcuugcgacaguc

SEQ ID NO: 4175996 - RNA, 83 nt, Human
gacuuugcuguggucccauagguaagcgugcagguccaagcgucggcucuacuguuuacugccugugugaccacgggcaaguc

SEQ ID NO: 4175997 - RNA, 71 nt, Human
gacuuuucuggaauccucaaaacaugagagccagacuuuaggagcucucaucucuggacucuagacugguc

SEQ ID NO: 4175998 - RNA, 72 nt, Human
gacuuuugcaaucugauuccaauguaacaaauauguauguguguauacaaauuggaaucagauugugaaguu

SEQ ID NO: 4175999 - RNA, 80 nt, Human
gacuuuuucagugaaagcuacuguuaggcaugacauuuacaggcaacugaaacugaucagaugcauuuauuaagaagguu

SEQ ID NO: 4176000 - RNA, 78 nt, Human
gacuuuuuccaaaaugucagaagcuuuacuucugaaugugacacuucaucaggaggcaaaggucucugauaaaaaguc

SEQ ID NO: 4176001 - RNA, 73 nt, Human
gacuuuuuucucuccuuacccugagaggcauaccaaaauaguuaccucucagggugaggaaagaauuuaaguc

SEQ ID NO: 4176002 - RNA, 99 nt, Human
gagaaaaauuaaguugguacccacauugucugagauguguuucagaggacaauuacuuuccagagcaguuuucagaucaaaaugguaucauguuuucuc

SEQ ID NO: 4176003 - RNA, 63 nt, Human
gagaaaagaguaagggugggggcuuguaaagcuguuuuuccucaucugaccccaucuauucuc

SEQ ID NO: 4176004 - RNA, 73 nt, Human
gagaaaagugauuaugcugucaaagaagcaaaaggagcuuccaacaguaauagugaucauugaggaguuuuuc

SEQ ID NO: 4176005 - RNA, 83 nt, Human
gagaaaaucuuguugagccaauucuuuaagacucccucuugucucuuugagucuuacaagaaauaagccaaugagagguuuuc

SEQ ID NO: 4176006 - RNA, 71 nt, Human
gagaaacacugggauuugguguacuuccucugcucuuuuaaacaucaguucuuauuuggccagugucucuc

SEQ ID NO: 4176007 - RNA, 92 nt, Human
gagaaagaaauauguaccuucugauacugacaucauuuauggagaacagaauggugugauucaguacaugauguauguuacuucugauacuc

SEQ ID NO: 4176008 - RNA, 100 nt, Human
gagaaaggcgccuugguuucaacagcagcagaccagcauauguuuacuuaauuccuaagacaugaugacaguggucucugcgccacuaaaagcuuuucuc

SEQ ID NO: 4176009 - RNA, 66 nt, Human
gagaaaggucuuggcucuggccgcacagcagccugugcccaguugaggccaggacucagacuucuc

SEQ ID NO: 4176010 - RNA, 73 nt, Human
gagaaagucuuaauguaaguuuaguagaguccuuggauggagaacuaauuauaucauacauugccgcuuucuc

SEQ ID NO: 4176011 - RNA, 123 nt, Human
gagaaaguggggaguguugggaugacauauuuugaaagcuaugaguuaauauaugcauuaaauauauuaagucaguuguauuagcauauaugauucaguuuucagcgacagcucuguuuccuc

SEQ ID NO: 4176012 - RNA, 112 nt, Human
gagaaaguguggcccuaccaacaccuugauuucuugcuugcauauugucucucccccucaaggacucuaucaagacagugcaagaagagcaggcaccugguccgugcugcuc

SEQ ID NO: 4176013 - RNA, 129 nt, Human
gagaaauacuuggcaugcugugaauuuggccuaggcagcaguacucaauauccuggcaggagagaaaacucccuaauuugagugucugcuguacaccaaguuuccauuauaucaauauuccuauuucuu

SEQ ID NO: 4176014 - RNA, 55 nt, Human
gagaaauaggaggagagaaauauguuugaaucaaacauuucucuuuuccugccuc

SEQ ID NO: 4176015 - RNA, 86 nt, Human
gagaaaugagccuacuuuaauuuucugcagagacagacuguaauuuguaacaucucugaucagaaauugaggcggcauauggacuc

SEQ ID NO: 4176016 - RNA, 64 nt, Human
gagaaauguauguauguacuuuuguauguaugcauacguaauauacagcuuaugcauauaucuc

SEQ ID NO: 4176017 - RNA, 59 nt, Human
gagaaauuucucucuacuucuguucucaaaaggcauuucggaugugagagaaucuucuu

SEQ ID NO: 4176018 - RNA, 72 nt, Human
gagaacacagaacagggcccaaggggucgggcuucaagccuugacuucuucuagcccugcacucugucacuu

SEQ ID NO: 4176019 - RNA, 68 nt, Human
gagaaccagaguauauuauaguaauacauacuugcuuaugguccaguauaaugucucuaucuguucuc

SEQ ID NO: 4176020 - RNA, 62 nt, Human
gagaaccucuccacaagucuggcacagauguucuagcaucucuaggaugugagaguguucuu

SEQ ID NO: 4176021 - RNA, 60 nt, Human
gagaaccugugacuuuccucuauuuuguugguaauuauaagcaggaggcagucacagcuc

SEQ ID NO: 4176022 - RNA, 81 nt, Human
gagaacuaggcacuuaggaaugugucuguugccugggaaaccacaccuggcacagagacaguccugagaucccuggcacuc

SEQ ID NO: 4176023 - RNA, 56 nt, Human
gagaacugggaaucucaggaacaugggaucccagaucaaaagaaucccagugucuc

SEQ ID NO: 4176024 - RNA, 70 nt, Human
gagaacuuacaaggaugauagcugcaucuuuuuagauagaaauacgcaguuguguuguuguacaggacuu

SEQ ID NO: 4176025 - RNA, 106 nt, Human
gagaagaaagggagagaguuggaugaucucagagcaguagaaaacagccuuuuaaacauagaagguaugucuguuuuagacuauaggaugaucuuuuuuuuuucuu

SEQ ID NO: 4176026 - RNA, 98 nt, Human
gagaagaaagggguauuuuagggaaaggaaauuauuucugcaauggaugagaacaacagccaucaucagauuucuauuucaaauacauuuucuggcuu

SEQ ID NO: 4176027 - RNA, 57 nt, Human
gagaagaacuuagcuuucuaucucauggaacgccaagauagguugcaaguccuucuc

SEQ ID NO: 4176028 - RNA, 96 nt, Human
gagaagagauaugaauaaacaauguccugugagaugauaaauucuguauuuuuucaagcaccuggaauauugauucaugucucccuaaaauaucuc

SEQ ID NO: 4176029 - RNA, 61 nt, Human
gagaagaugagcuuuccugguuggugaaccaaacuccucagcaaggcugcauucucaucuc

SEQ ID NO: 4176030 - RNA, 79 nt, Human
gagaagaugaggagaagggcacggagaaaagcugcugccuuuuuucauucuacccuuucucacuccuuauccucuucuc

SEQ ID NO: 4176031 - RNA, 55 nt, Human
gagcacuugugacagcgagaucugggagaugucucagggccuguugcaagcguuu

SEQ ID NO: 4176032 - RNA, 70 nt, Human
gagcagagcagacagcagcagaggggcucccuagagcagcugggggcccugccugugccgucgcucuuuc

SEQ ID NO: 4176033 - RNA, 99 nt, Human
gagcagagcugcauuccuuucuggagguccuagaggauaauucauucccuugccuuuuccagcuuccagaggccaccuggauuccucagcucaugacuc

SEQ ID NO: 4176034 - RNA, 57 nt, Human
gagcagagcuucucaaaguaaaacuagccguguugcuacaaagggaaauucuggcuc

SEQ ID NO: 4176035 - RNA, 98 nt, Human
gagcagaggaaucauaaugcauagcuuuuguuuaagccacuaaguuuugcugugguuuauuauacaacaaaagcuaaguguuagaauaaucucuccuc

SEQ ID NO: 4176036 - RNA, 64 nt, Human
gagcagcaccccuccuggcuaugaagaugcccucccucuucucuagggcacuggggugcuauuc

SEQ ID NO: 4176037 - RNA, 63 nt, Human
gagcagcagccuaggguuccaucaugagcggaacacugaugugugggaucgggcuugggguuc

SEQ ID NO: 4176038 - RNA, 87 nt, Human
gagcagcaggcucuggcgcucuuccucagggcggaugggcagguucagcucuucuuccuccucccugggaaagccagagucagguuc

SEQ ID NO: 4176039 - RNA, 58 nt, Human
gagcagcagguggggcuggcuuucuaggggcgcagaaggggccccccgccggcugguc

SEQ ID NO: 4176040 - RNA, 58 nt, Human
gagcagcccaaggccauaagaccuuugucaaagaauucaaaggaacccuggguugcuc

SEQ ID NO: 4176041 - RNA, 130 nt, Human
gagcagccuucucuuucccucuuucugggucuccauggaacagacagcugagacaagguaaggucacacuugugaaguucugugccgugaagccacagaaaggauagucagguuagggaacaggcucauc

SEQ ID NO: 4176042 - RNA, 65 nt, Human
gagcagcgugaggggcucccagcaucagacacaaacgugaucuucagcagggccucucugagguc

SEQ ID NO: 4176043 - RNA, 58 nt, Human
gagcagcuccagccgcaugacuucacggcacaggcaaagucaaaggcaaggagagcuc

SEQ ID NO: 4176044 - RNA, 67 nt, Human
gagcagcucugggugacccaguuaggaagucagcaggugugugaccuggcucauccagguguugcuc

SEQ ID NO: 4176045 - RNA, 78 nt, Human
gagcagcugaauggcucccugcuaaauauucaaaugucccccacccuuuugcaguuagauggggucauguagcuguuu

SEQ ID NO: 4176046 - RNA, 102 nt, Human
gagcagcugggcgccgccuuggaaucagcugggggagcaccucuccuugggacgggaugacagggcuucccaggcgguccccacaagcccgcgccccagcuc

SEQ ID NO: 4176047 - RNA, 59 nt, Human
gagcagcugguaggugaacccaggcagucuggcuacaaaguuccuaugccauguugcuc

SEQ ID NO: 4176048 - RNA, 55 nt, Human
gagcaggacagcagcuuccuggauccccucaguuggacuuaguugcucucugcuc

SEQ ID NO: 4176049 - RNA, 56 nt, Human
gagcaggcucugccugugugucacguccacauggugaacauggcagacgucugguc

SEQ ID NO: 4176050 - RNA, 91 nt, Human
gagcaggcuggagaagcagcuucagaggcgggcgcaggaggcaguucucagcugcgcccucuggaagccugucauccaguucacccugcuc

SEQ ID NO: 4176051 - RNA, 75 nt, Human
gagcagggugggggucugaguggugcugacucaggacuggguccuccucacuccuucucaggggccacccugcuc

SEQ ID NO: 4176052 - RNA, 55 nt, Human
gagcaggucuuucauggugcaugcagaagcuccugucccaccaauuaagacccuc

SEQ ID NO: 4176053 - RNA, 86 nt, Human
gagcaguuugguuuuuuucuagcucaaagauucuaguguaacaaauaguggauaccuuaguugugaaaguuccuuccagauuucuc

SEQ ID NO: 4176054 - RNA, 89 nt, Human
gagcaucaacuggauggagucacccuaagcuuuccuuccaccuggguggaaucauugugacaagcucccgguggcccuccugcaugcuc

SEQ ID NO: 4176055 - RNA, 103 nt, Human
gagcaucauuuuaaaagauacugcugccugggccccacauccagugcagcugaccuaacuggucugcagugguguccagguguacuguuuuugaaggaugcuc

SEQ ID NO: 4176056 - RNA, 63 nt, Human
gagcaucucuuugauggcuccugugagcugacagcagcuauggagucacugaaaagggaaauc

SEQ ID NO: 4176057 - RNA, 62 nt, Human
gagcaugugucgguggccucagggcagcagcugccuggugaauguucauggacuggaugcuc

SEQ ID NO: 4176058 - RNA, 59 nt, Human
gagcauucauugcccuuaccuugacuaugaaggagugaagauggaguaguguaaugguu

SEQ ID NO: 4176059 - RNA, 74 nt, Human
gagcauugaaacaauguugucuccaagaggaaauaaauaauccucacacuuagggagggcauuguaauauguuu

SEQ ID NO: 4176060 - RNA, 87 nt, Human
gagcauuuaacucauuuacauuuaagguuaauauuguuaugugugaauuugauccugucauuaugauguuagcugguuauuuugcuc

SEQ ID NO: 4176061 - RNA, 117 nt, Human
gagcauuuaagcaaaugaacgacacagggacagcuuugggcaaugcuaugagugggucuccagcaccccuuucucuucauuaguguucucaagcugaucucugguugcuuagagcuc

SEQ ID NO: 4176062 - RNA, 79 nt, Human
gagcauuuagcuagagucacagcagccuuguugguuucgaguccaaauggccucgaagguuauugucuuuacguuguuc

SEQ ID NO: 4176063 - RNA, 62 nt, Human
gagccaagaagggccauguggauuggcugcuuugggcaauucacugaacuucucugagacuc

SEQ ID NO: 4176064 - RNA, 58 nt, Human
gagccaagcucuucuccaugagucauguucaauagaaguguucacaagggcuugguuu

SEQ ID NO: 4176065 - RNA, 70 nt, Human
gagccaagggcgugcuggagaggccugagagaagaaggaacggcccuucugaccagugcccuuuugguuc

SEQ ID NO: 4176066 - RNA, 66 nt, Human
gagccaccaugcccgcccgcuucgucuuuucacuggacuaaugaagauacagguguggaaugguuu

SEQ ID NO: 4176067 - RNA, 87 nt, Human
gagccacgcuaagccgcugcccaggagagguggggcugcgccgcagccaggacacccucucccugggagcaacagcauccuuggcuc

SEQ ID NO: 4176068 - RNA, 110 nt, Human
gagccagaaaagcuaagguaucaucuggagcugcaggagucggggggaaacccccugcuuuuguuccacaguuuugaagugggugaucccuccagcuuuugcuaugguuc

SEQ ID NO: 4176069 - RNA, 67 nt, Human
gagccagcuguucacauuuccaaaaccccuaugucaacgaauggguuuuggaaaugugaucagccuc

SEQ ID NO: 4176070 - RNA, 77 nt, Human
gagccaggacaucucuagcugcugcaaggacagcuuccccgagggcugaauaagcagacuggagaacuccugugcuc

SEQ ID NO: 4176071 - RNA, 75 nt, Human
gagccaggcauguuuuccauauuuagaccaacuuguugccuauuauaagaaagcugauggaaaggauuuuggguc

SEQ ID NO: 4176072 - RNA, 62 nt, Human
gagccagggaugcagagguugcagugagcggagaucaagccacugcacuccagccugggcuc

SEQ ID NO: 4176073 - RNA, 128 nt, Human
gagccaguucccaaacccaggucugcucacucccagcugggccuucugcaggguccucaccccauggcagauggcucagacacuggggcccagugacuggcugcuccuggugagggggagcuggacuu

SEQ ID NO: 4176074 - RNA, 84 nt, Human
gagcccacgugggauucacaccuccuagaguucacagcacaaguuugcuguaacaguagauaaggucuugguugcccugagcuc

SEQ ID NO: 4176075 - RNA, 64 nt, Human
gagcccagagaagucuugccuggauuuuguucuuugcacaaguucuuuaaccuuucugggcauc

SEQ ID NO: 4176076 - RNA, 62 nt, Human
gauuaguauccuuauuaagagaaagagaccagagcuuccucucuaccaugugaggauacauc

SEQ ID NO: 4176077 - RNA, 73 nt, Human
gauuaguauuuucaccauaugagguaaaacauuuuaaucauuguuaucuuauugugaugaugaagaacuaauu

SEQ ID NO: 4176078 - RNA, 90 nt, Human
gauuauaaaguuaaggugagucaaucuuuuggaguuuaugagcauauaagcaaugacacucgaaaaauugaugcuuuaaugaaaauaauu

SEQ ID NO: 4176079 - RNA, 75 nt, Human
gauuauaggucugaucugucagucaugaagguuuauaacaaauaguauagauugaagcagaucaagcaugaaguc

SEQ ID NO: 4176080 - RNA, 84 nt, Human
gauuauauaaauacuguugguuaucugaauuggcuuuacacugaauauacauuaacucagagaacuggcauguuuagaaugguc

SEQ ID NO: 4176081 - RNA, 126 nt, Human
gauuaucauguacaagagugagauuaucauguacaagagugagauuaucauguacaagagugagauuaucauguacaagagugagauuaucauguacaagagugagauuaucauguacaagagauc

SEQ ID NO: 4176082 - RNA, 55 nt, Human
gauuaucuuaaagugacugcccuuguucuuccaaagagcagaucauuagauaauu

SEQ ID NO: 4176083 - RNA, 81 nt, Human
gauuaugaggcaguacacacaaagcccugcugaguggugggcaggccauacguccuuugagugauagcugcugucauuauc

SEQ ID NO: 4176084 - RNA, 65 nt, Human
gauuauggagacaggcagcuagugggucagugaacuagauucuguaugucugcucucuaauuguc

SEQ ID NO: 4176085 - RNA, 86 nt, Human
gauuaugguuggcugauuuagaaauuccaaaaguauuuuaaacauuaaagacugagaaacaauucuggaagucaaauuucauaauc

SEQ ID NO: 4176086 - RNA, 66 nt, Human
gauuauuaaacaccugucuaguguagcuuagggagguuuuucuagacugggaguuugcaguggauc

SEQ ID NO: 4176087 - RNA, 56 nt, Human
gauuauucaguucccuucacucucaucacuuauggggagaauguagcugaauaauu

SEQ ID NO: 4176088 - RNA, 77 nt, Human
gauuauugcuggcccagggucaccuaggaaauugguagcagcauccaggacuuuugacucugaguucagugcccguc

SEQ ID NO: 4176089 - RNA, 65 nt, Human
gauucaaaaguuugagcuccaagagucuagugugauccugagaguggagcugaauuuuuggcauc

SEQ ID NO: 4176090 - RNA, 72 nt, Human
gauucaacuugguucucauguuuuacuguaaugucaaauuagcuuggaauaaaaugagaauaauucugaguc

SEQ ID NO: 4176091 - RNA, 57 nt, Human
gauucaggcuggcaggcagaauuuggccuuggggcuauagccugccaacuccugauc

SEQ ID NO: 4176092 - RNA, 72 nt, Human
gauucauacugugagaugaccaacugacuggugcuuugacuaaccacuuucagcauuuuauaguaaaauguc

SEQ ID NO: 4176093 - RNA, 69 nt, Human
gauuccacagucuuugcuuuuaaccagagguuagcaaacuacuucuguaaagggaagacaguagguauc

SEQ ID NO: 4176094 - RNA, 78 nt, Human
gauuccauguaugacaucugucuuggagauaaucuauacuugaagauaugucaaaaaagauuauguuucauuggaauc

SEQ ID NO: 4176095 - RNA, 65 nt, Human
gauuccucaaacucugccugcaucucccccaagccagagaggaugcaggguagacaggugagguc

SEQ ID NO: 4176096 - RNA, 61 nt, Human
gauuccuggccccaccccuggagagucuggcucagcagaucugggguaggcccaggacuuc

SEQ ID NO: 4176097 - RNA, 113 nt, Human
gauucggugucugguaagggucccuuuccuagauggccaucuuuccaauacaaccucacaugauggaaggggugaagggugucucuggggauucuuuuauaagggcacuaauc

SEQ ID NO: 4176098 - RNA, 85 nt, Human
gauucuauauuuaccuuugccucugcuuuuuccuucagugauaagagugcagggauuauguagggguugagauggggaaugaauu

SEQ ID NO: 4176099 - RNA, 63 nt, Human
gauucucaauuuugccaaaggguuaggaaaccuacugcccuguuggcaugauugcaaagaauc

SEQ ID NO: 4176100 - RNA, 114 nt, Human
gauucucucuuuucagcaauucaggugucaagcagggagcugagauguaaugguuuccuucagauuucuccuaaaugaccugauuuacucaaagaaugaagauaucugagaauc

SEQ ID NO: 4176101 - RNA, 55 nt, Human
gauucucugugggaagucugagucaauuauagggacaucaggcuuugagagaauc

SEQ ID NO: 4176102 - RNA, 66 nt, Human
gauucugagccugacacacaaauucuugugcaagugauucacugagggggugguuucaggagaauc

SEQ ID NO: 4176103 - RNA, 66 nt, Human
gauucugagcuacauaguacugggugucaaaagguuacagagacaucccuauaccagcugagaguc

SEQ ID NO: 4176104 - RNA, 93 nt, Human
gauucugcagaacagcagcacgucaagcugucacucaguuaggcucgucucagcuggaccugcugauguaucugccuuagcaugaaaggaauu

SEQ ID NO: 4176105 - RNA, 74 nt, Human
gaguuggcaaaugcuauuugggaacaacaugaaaaaaaguaaauguaucagaaauagcauuggcucugaagcuc

SEQ ID NO: 4176106 - RNA, 56 nt, Human
gaguugggccgcacuaggcuggacagcggucaagggcucugggguuggcccaucuc

SEQ ID NO: 4176107 - RNA, 66 nt, Human
gaguugggcugggccugaggccaaaugaguuggcagggucucccuggccucugccuugccccacuc

SEQ ID NO: 4176108 - RNA, 56 nt, Human
gaguuggucgagccacuucggggacaggggcaggccucugucugcuucuccaacuc

SEQ ID NO: 4176109 - RNA, 79 nt, Human
gaguuguguguuuguggcugugucugugugcaauaauaaacaucuuuuguggguacuuacagcaauaaugacaccgcuc

SEQ ID NO: 4176110 - RNA, 110 nt, Human
gaguuguuaaugucccagaagguuuggugugcaggugucagugcagcucucugcauguaaaaugccagcauguacuguacccacuucuacccuuuccguaaaaucaacuc

SEQ ID NO: 4176111 - RNA, 62 nt, Human
gaguuuaauggcaagaaggcugcagccugacuaaggcugucggcuugauucugccauggcuc

SEQ ID NO: 4176112 - RNA, 62 nt, Human
gaguuuacucuuuauuucacucugugcugcacauccuuguguaugaauuaaagauuaaaguc

SEQ ID NO: 4176113 - RNA, 76 nt, Human
gaguuuaucuucucagucaccugugagucuuccuuugagagugggacuugcagaguggcuugguaggguagagcuc

SEQ ID NO: 4176114 - RNA, 59 nt, Human
gaguuuauuugacuggauucucagccgaaucagugcugggagccacuguuuuugaacuu

SEQ ID NO: 4176115 - RNA, 85 nt, Human
gaguuucagauucccuuuaaguagaauauauuauaaaaauugugagaggcaaggaugaauauucagacaagggaguuuaaaauuc

SEQ ID NO: 4176116 - RNA, 59 nt, Human
gaguuuccaaaucccugaagggcugcccaugguuaaagcagauggguuugugacagcuc

SEQ ID NO: 4176117 - RNA, 118 nt, Human
gaguuugaaacagagaauaccugaguuccagguucuccucaggcugcucacacuugucuuuucagaaagaccagccaaacugagggauccuguugagcuauuuucugaauucuuacuc

SEQ ID NO: 4176118 - RNA, 83 nt, Human
gaguuugaggguuacgaauaagagauaaagcaaggaaagggcuuuucuuugccaaauuuaucuuuuuuucacccauaaaacuc

SEQ ID NO: 4176119 - RNA, 77 nt, Human
gaguuugccagagagucucuuauucccuauugcugcugcuccucaccaggcccuggcagaugaagaccuuggcccuc

SEQ ID NO: 4176120 - RNA, 81 nt, Human
gaguuuuaucuuuuuagcuguugcauaaaagcauuuaauuuaucuugaguuaauuuuuauguauagugugugguagagguc

SEQ ID NO: 4176121 - RNA, 86 nt, Human
gaguuuugcuuugucacccaggcuggaguguagucgcaugaucucagcucacugcaaccuccgccucccaguuucaagcgauucuc

SEQ ID NO: 4176122 - RNA, 82 nt, Human
gaguuuuuguuaggaaauuucauuugaggucugaaaauccaucucuagaccuacauucuggauuuucacauaauuaaaacuu

SEQ ID NO: 4176123 - RNA, 63 nt, Human
gaguuuuuuauucuggcuggugggaauaggcaccaccuccagcccuguaaggaugaggcacuc

SEQ ID NO: 4176124 - RNA, 85 nt, Human
gauaaaagagagaugauuuguaccaucaaggagcuuacaauucuccaggagacacaagguacauagaugcauaacucucuaauuc

SEQ ID NO: 4176125 - RNA, 78 nt, Human
gauaaaggucacacucccagagcugaggcuacgugagucuaagcuguuaccucaguuaugggaguguggcuggaacuc

SEQ ID NO: 4176126 - RNA, 77 nt, Human
gauaaaguuaagucauuucugauuauagagauucuaauuauagauauuugugguauagagaugauuauuauaauguc

SEQ ID NO: 4176127 - RNA, 78 nt, Human
gauaaauaaugggaugagugauaggaaggaaaaugauuuuuguucuuuuucucuuuuugcaucucaaccucuuuaauc

SEQ ID NO: 4176128 - RNA, 78 nt, Human
gauaaauaauugaguuggucaauaugaguaaugguuagaacaaucccuggcacauagugagcacucaagguauuuguu

SEQ ID NO: 4176129 - RNA, 98 nt, Human
gauaacauaagcaaagggauagcuauuauuauuucuguuauuauuuagauuucaacaagcagucaacagaagugauagcuauuauuaagagugauauu

SEQ ID NO: 4176130 - RNA, 74 nt, Human
gauaacugauugcaucugaaggagcaugagagagugauugagaucacuuccagccccugucagcaaacaguauc

SEQ ID NO: 4176131 - RNA, 84 nt, Human
gauaacuugcacuuucuguguugugcaaaaaucuuuaaauuauucuugaaacuuuuacaauacagaagguaaggaaguuuuauc

SEQ ID NO: 4176132 - RNA, 81 nt, Human
gauaagaauauugguuccuaugaccuuccuugcuagaugguaaauuucauaaggccaaggggccauagucucauuuuuauc

SEQ ID NO: 4176133 - RNA, 81 nt, Human
gauaagagagcacagcugagagcuggaaagugauugacaccugacgcuacuguccuagauccagcugugcugaggcuuauc

SEQ ID NO: 4176134 - RNA, 57 nt, Human
gauaagagcagugcgagugucugcuggugucaucaucauuugcuugacucucuuguu

SEQ ID NO: 4176135 - RNA, 67 nt, Human
gauuucauaguuaaucuuuuucacacaaacaagaaguugagugaagcaggcauugacugaugaaguc

SEQ ID NO: 4176136 - RNA, 57 nt, Human
gauuuccaggucauuaauaaaguuguuuaauaagaucuuuugugcagccugggaauu

SEQ ID NO: 4176137 - RNA, 66 nt, Human
gauuucuagucugaauuaucuuugacacggucccauuuaccugugaaacauuuaggguagaauuuc

SEQ ID NO: 4176138 - RNA, 78 nt, Human
gauuugaaagcagagcagggcacuuauggccaacauuuaaugguuuuuaaacauauggcucuauuugcucuucaaguc

SEQ ID NO: 4176139 - RNA, 95 nt, Human
gauuugcaaacaaaucugaguuauuuguagggauuauauguuuaacuaauagcaaauguucuaaauuacaugugauggauuuguuuagucaaauc

SEQ ID NO: 4176140 - RNA, 60 nt, Human
gauuugcauucugaaagcuaccaaggaguagaggcucugacaguuuuuaagaauuaaauu

SEQ ID NO: 4176141 - RNA, 60 nt, Human
gauuuggcuaacacgcguuuuguucugauugaucagugggaaccggcaguuuagcuaauc

SEQ ID NO: 4176142 - RNA, 128 nt, Human
gauuuggcuuccccugggcagauguggcuuccccugggcagguacagacccucugggaagguguggcucccccugggcagguguggcuuccccugggcagaugcgucuguccuugggcaggugggguu

SEQ ID NO: 4176143 - RNA, 75 nt, Human
gauuugggacaaaggagaaucagcguuucacguucaaaauugaacugggaagcuguuuugcuuuuaaguuaaauc

SEQ ID NO: 4176144 - RNA, 65 nt, Human
gauuugggggugaauuaaauauagccaggucaacuuuguugacacagaauuuacucccgauaauc

SEQ ID NO: 4176145 - RNA, 62 nt, Human
gauuugguaaaagaaucagggagccuuagaauaaagguuucugauucucacuuuggcaucuc

SEQ ID NO: 4176146 - RNA, 75 nt, Human
gauuuguucuuauaccugaagcaggugauguuucuguagagacaucugaaugacagcgggagugaaggacaaauc

SEQ ID NO: 4176147 - RNA, 81 nt, Human
gauuuuaagcuggcugucagggugagcuggcuuuggcccccagccagggcugcucccaauucugcugccuugcuguacuuc

SEQ ID NO: 4176148 - RNA, 126 nt, Human
gauuuuagauacuucaaccuuaaguugauauuauguaacugugguucagcagagauaagagcaggagauuuuuuugggaucauuaugcauaguguacauuggcuuuugguggggguacuuagaauu

SEQ ID NO: 4176149 - RNA, 94 nt, Human
gauuuuagcuauuucaccuugauggagugaugaaugauucacauuagaacagaugauucacagacuucacaaggcagaaauuuuagcgccuguc

SEQ ID NO: 4176150 - RNA, 93 nt, Human
gauuuuagggaagaaguuaguuaaacuagcgacuuaagaauacaugcuuacaggucaguuugacugaauuuuaccacuuucauccccaaaauc

SEQ ID NO: 4176151 - RNA, 109 nt, Human
gauuuuauccuugugucacugagaauagcagacugguaacuaauuccaaaagagagagagggaaguuuugaaugggcuguuguuuuaaagagcugauacagaugggguc

SEQ ID NO: 4176152 - RNA, 88 nt, Human
gauuuucaauauauggcaaaagugugaaauuaaggaaagauuucuaugaaauuuuuugcacacucugcuaaaugaauuauugaaauuc

SEQ ID NO: 4176153 - RNA, 81 nt, Human
gauuuucccaacauuuuauggcaauuuguuucauuugccgcaggcccguaacgaugcaaauugccauaaagugggauaauc

SEQ ID NO: 4176154 - RNA, 80 nt, Human
gauuuugaauucuguaacuuuacugaauuugucuauuaauucuuacaguauuugguggagacagaauaacuuuuaaacuc

SEQ ID NO: 4176155 - RNA, 70 nt, Human
gauuuugaggugacacaauuuacuccauaucacuggaauuguaacuggaguugugucaucuuuguaaauu

SEQ ID NO: 4176156 - RNA, 129 nt, Human
gauuuugauuuuaucuucuucaaauauucuauggccaagaaguauuccugaccuuauguuuuccaaccacuguucauaaaacuguugaucauuucuuggcuguagugaggugaaaggaugaucaccauu

SEQ ID NO: 4176157 - RNA, 126 nt, Human
gauuuugguucuguugucaaguauucuaggaauccuuucucauuucauuucugugcaaaauggauugacaugagaaaugaagagagucaagguugccaagauucauuugucagcaugcaucgaguc

SEQ ID NO: 4176158 - RNA, 80 nt, Human
gauuuuugcucugggagaagcugaugugaagcaccaaugccuucacuugcucaucaugcuauuuccuaaaguauuggauc

SEQ ID NO: 4176159 - RNA, 98 nt, Human
gauuuuuuucauuucagauugugugacuuugggcaauucacucaaccucuuugagucuuuuuguccugauuuauaaaaugaaggaauugaaaaauauc

SEQ ID NO: 4176160 - RNA, 56 nt, Human
gcaaaaaaguccauaguauguguuccuuaauagaaggcaacacaguacuuuuuugc

SEQ ID NO: 4176161 - RNA, 92 nt, Human
gcaaaaaggagaggagauuguggcauuuuccacagcuucauuuguuccugggaaaaccauguaucuauuuccuuuucuaacauuucacaugc

SEQ ID NO: 4176162 - RNA, 56 nt, Human
gcaaaaaggcaaaugaagaaaauucugacuuuuggaauucuuuguuuccuucuugc

SEQ ID NO: 4176163 - RNA, 81 nt, Human
gcaaaaauuaaugacgcagauaauaauugcuauggccacaacaaagcgggagaauuauuguuugaaguuauugacuaaugu

SEQ ID NO: 4176164 - RNA, 89 nt, Human
gcaaaacaaugaguggguggccggaugggagugucagagucagacuaucccggcuccaacuccuagcuggccucucaccagcaguuugc

SEQ ID NO: 4176165 - RNA, 58 nt, Human
gcaaaacacugguuuggcauuagaugguagccaucuaauacuugcucaguggccaugc

SEQ ID NO: 4176166 - RNA, 129 nt, Human
gcaaaacagugaugguauaguacagagguugguggggaagcuaucagugagcaguaugcauugaccugauggauguccagcucaugauacuaucuuuauucauccugugcacuaauuuucugagucaac

SEQ ID NO: 4176167 - RNA, 99 nt, Human
gcaaaacccuaucgauaaagcaaugguaaugauuuauguaaauugacauucuuuuuuaugagguuuacaaaguuauuuuauucuacuccaggguuuugu

SEQ ID NO: 4176168 - RNA, 64 nt, Human
gcaaaagauacauguuaggagcaaccguggguguucugcgggcucguuagcuguauucaguugc

SEQ ID NO: 4176169 - RNA, 57 nt, Human
gcaaaaguacagccggauuucuguuucccuacagaaauuggaaagccauauuuuugc

SEQ ID NO: 4176170 - RNA, 78 nt, Human
gcaaaauacuacagcagguuuuaacuuugaaguguuuaaaugcauuucauugaacuaaagaaucugcuguauuuuugc

SEQ ID NO: 4176171 - RNA, 61 nt, Human
gcaaaaugaaugugaaaaauagaaagauguuucuacuuuuguguccuucacaucauguugc

SEQ ID NO: 4176172 - RNA, 93 nt, Human
gcaaaauguaaggaggcacucaagcucagcuuuacgcaagggcagggccagcaguugcaggaaacugagugugagccccuccuuacauuuugu

SEQ ID NO: 4176173 - RNA, 93 nt, Human
gcaaaauucaaggaagcacucccucucuaguccuugcaaguauagaguuggcacuuguccagaccugaaagggagugcuuccuuaaaucuugc

SEQ ID NO: 4176174 - RNA, 77 nt, Human
gcaaacaaguucaaggcagguccugagguuagagcuuuauuagcuucaugguaaaucugccuuuaccgggcauuugc

SEQ ID NO: 4176175 - RNA, 91 nt, Human
gcaaacagaaucagacugaccugaguucaaguccuugcucucuggugcaauagcuuugugaucuuagccaagucauuugaacacucucugc

SEQ ID NO: 4176176 - RNA, 74 nt, Human
gaguuguugcuucugcugauauuuugugaggguuucuuugcagccucacaaaacaccagcagaagcaacaacuu

SEQ ID NO: 4176177 - RNA, 125 nt, Human
gaguuuaaaagugaggggcugaacagggcugaagggaggugcucauuuucuccuacugaugcuauucauacuagucaguaaucagggcuucacuuucaugcaucucugaccucaagcuagaauuc

SEQ ID NO: 4176178 - RNA, 74 nt, Human
gaguuucacaggauggacugcauuuuauuuucugaacuuaaaaguaaaaaacauuacucuguccugagaaauuu

SEQ ID NO: 4176179 - RNA, 95 nt, Human
gaguuugaagccagccucaucuuaggagaugguccucuagggauggcuaacaguaucccuauuguccuuuccugaaggaggacuucuuucaauuc

SEQ ID NO: 4176180 - RNA, 60 nt, Human
gaguuuggcagauaagucuaaaguggggaugaaauguucuaggacuugguuuccaggcuc

SEQ ID NO: 4176181 - RNA, 70 nt, Human
gaguuugucaguggucauaguagaaaauaauaaaauuuuauguuuuagcaagauucacugaaucagacuu

SEQ ID NO: 4176182 - RNA, 97 nt, Human
gaguuuugcuuuucauuuuguaaaaugcuacauucacuuaugcaagacacaguucaugggugaggaugaugaggcagcuuaaaaugagggaagucuc

SEQ ID NO: 4176183 - RNA, 88 nt, Human
gaguuuugcuuuucccuuugucuucugagguagauuuauaggcagcucuuguuauuuacacuaaaggaaggaggagagagagagauuu

SEQ ID NO: 4176184 - RNA, 74 nt, Human
gaguuuuuaacauucuuaacuuagaaacagggaaacugguguuuauggaauuaaguaaugcgucccaaagacuc

SEQ ID NO: 4176185 - RNA, 83 nt, Human
gauaaauacugaaacuuuuccuuuauuuaccaauuuucauuuuaauaaguuuguuuauuaggggagaguugugaacauuuauu

SEQ ID NO: 4176186 - RNA, 95 nt, Human
gauaaauucaccaugcuauuuguacagcauucgaguuguuuuccccuagauuaagcaauuugcuucucucuggcaaaugccaugugaaccauauu

SEQ ID NO: 4176187 - RNA, 56 nt, Human
gauaaauuuaacagaguucuccauuuuuauaaugguauacacugguaagauuuguc

SEQ ID NO: 4176188 - RNA, 58 nt, Human
gauaacuagaacagaauuugguaccuggaaguugggugcugauauuguuuuggugauc

SEQ ID NO: 4176189 - RNA, 78 nt, Human
gauaacuuucuaagaaggguacaauaaggcauacucucuaacugugugaccacaagacgcuuauuuuuggaaaauauc

SEQ ID NO: 4176190 - RNA, 66 nt, Human
gauaacuuugaaucuucuaacuguauauaucauuauguacaaaguuuucuuggauugagaguauuc

SEQ ID NO: 4176191 - RNA, 76 nt, Human
gauaagaaaauugccaaaagcuaaaggguugugugacuuugcuugugucaaugcuuuaguuucugguaagaauauc

SEQ ID NO: 4176192 - RNA, 86 nt, Human
gauaagcugguggacacugugcuagccuuuuuuccuuuauguagcaggcucucuagaaggcuggccauggugcccuuggcugaauc

SEQ ID NO: 4176193 - RNA, 83 nt, Human
gauaagugggucacuucuuggguuugcugggguuucaagucaguguaagaaaugaaccuucauaaaauuaagugccacuuauc

SEQ ID NO: 4176194 - RNA, 60 nt, Human
gauaaguuugaucugacaaagcuggaaauaccuguuuuagcucuaucaggccaaaauguc

SEQ ID NO: 4176195 - RNA, 93 nt, Human
gauaaucuccaaggaaucuagaaagggagcaagguugggggagaauggaaaauuuaucuaccuguaucuuucugggauucauaggucauccuc

SEQ ID NO: 4176196 - RNA, 96 nt, Human
gauaauguggggcuuuacuuugggaggcugaguugagaggauuacuugaaaucaggaauucaagaccagcugggcaacaaaaugaaaccccauguc

SEQ ID NO: 4176197 - RNA, 87 nt, Human
gauaauuaauugcuugugcaagaaaccuggaaugguaaauucuuacuauuaccaaaucauucaugcuaacaagcugcuuggauuauc

SEQ ID NO: 4176198 - RNA, 76 nt, Human
gauaauuggucuacuuuauagaugucucuuauuuaauauucuuuggagaauuucucuguggaguuagacugguauc

SEQ ID NO: 4176199 - RNA, 69 nt, Human
gaugugucuccguuucaaggcaaugguagaauuaguugaucuccuugguuuugcugaauggacacgugc

SEQ ID NO: 4176200 - RNA, 105 nt, Human
gaugugucugggauuucuguuagcuagaucucucauaaauuccaagucuuaguuugggauggaaagagguagaggaucuggacuuuucagagacuuaguagcauc

SEQ ID NO: 4176201 - RNA, 55 nt, Human
gaugugugcuuuucgcagugucaauuuuaugaugcucuaagauugagcagacauc

SEQ ID NO: 4176202 - RNA, 62 nt, Human
gauguuaaagguugguaagucauucuacaccugcauguaacuucuugcuugucuuuaacauu

SEQ ID NO: 4176203 - RNA, 85 nt, Human
gauguuccaaugacuaguggcauccuaacccucuaacacguagaucaagguauaucaagggugacuaacucaguccugaaacauc

SEQ ID NO: 4176204 - RNA, 87 nt, Human
gauguucuuuccauugauagcauguagaguuauauauauauauggaaauaauucuacaugagaaaauguauuuagaccagaaccuuc

SEQ ID NO: 4176205 - RNA, 92 nt, Human
gauguuggagguacaagagcacaggcagaaauucacagagccuuuucaugccucugcuggugucuaaccuggcucuucuaccaucuaacauc

SEQ ID NO: 4176206 - RNA, 78 nt, Human
gauguuuggcucauccucauugggguccuucagcuccuggagcuucagccagagguggaugagucacaccacggcauc

SEQ ID NO: 4176207 - RNA, 78 nt, Human
gauguuugguguuuuugaacuuguaauuacuguaguaaagguuauuacaaugcagaaaauagacccccaaaccauauc

SEQ ID NO: 4176208 - RNA, 73 nt, Human
gauuaaauagucuggcuucaacuuuacugaaaagauuuaaguaaucuugccagagaggagaaagcauuugauc

SEQ ID NO: 4176209 - RNA, 130 nt, Human
gauuaacuaugguccacuaacuaucugaaugaacauacaagaagcuguuugcaguggauggagacugaguaguuccaucacaucacugaagacagaagauuuuauucugauuaauuuuccauuguaaauu

SEQ ID NO: 4176210 - RNA, 58 nt, Human
gauuaaggguucagaaugcagugguagccugcuacucuggccaucuuggaccuugauc

SEQ ID NO: 4176211 - RNA, 130 nt, Human
gauuaauaaugaauguuuuauuaauaguucaucuuauaauuguaagugcugaguuaagggaaauuugauagcuuuuccugcacuugaucuuacagucaagagccacauuuuaaaauccauugcucuaauu

SEQ ID NO: 4176212 - RNA, 121 nt, Human
gauuaaucaauguuagaaauuguagaaauuuucaaagaugcaucuagguucuuuauucauguuuuaguggacaaaagaauaagaugagucauuuacuucaacgcuaacauuugguuuaauc

SEQ ID NO: 4176213 - RNA, 58 nt, Human
gauuaaugagggccugcaaccuccucagucuuguauuagggaggaggguuuucaaauc

SEQ ID NO: 4176214 - RNA, 97 nt, Human
gauuaauucagcaugguuuuacucaucacugaauaucccuaucuuuugcaguagaauuuucuagguccugugguuuggguaaaauguuggaaugauu

SEQ ID NO: 4176215 - RNA, 84 nt, Human
gauuagaacaaccuguguucuggaauacaguauuuaaacagugagauuggcauugcugucuuccaggauggugaagguuuaauu

SEQ ID NO: 4176216 - RNA, 74 nt, Human
gauuaggggcagauguuauaugaucugagacauuuuccuggccucagcuuuugauaaugucugaaauuuuaauc

SEQ ID NO: 4176217 - RNA, 90 nt, Human
gauuaggugggauaacuuuaugagacuguuuuacacacuaguacaauacaauuauugagugaaucugucugcaucauguccuuucuuauu

SEQ ID NO: 4176218 - RNA, 63 nt, Human
gauuauauaauggaagcucuuguucacuuauugaugaauaaucuugaguuuccauuguagauc

SEQ ID NO: 4176219 - RNA, 130 nt, Human
gauuaucagauugaauacuggaaagaaacugauuauugccauuaucauuuaugauacccaaauuucucuuccugguagccaagagugaauggcuugguuuuauuugguaacuucuauuuuguauuauuuc

SEQ ID NO: 4176220 - RNA, 58 nt, Human
gauuauggauggacaguggagcccugaguucuaaaucagaaucuguccauuucuaguu

SEQ ID NO: 4176221 - RNA, 86 nt, Human
gauuauguauauguauauauuuaaagugcguuguagaaggcuaugaucuucuaaagcaggaguguauuugcauguaaaaugugguc

SEQ ID NO: 4176222 - RNA, 82 nt, Human
gauuauguguugacuguuuagaaauuuguccaauuuuaaaauuuuuguuggacuguacacaucuacauaucaauauguaauu

SEQ ID NO: 4176223 - RNA, 71 nt, Human
gauuauuaguuuccucucuaggagugagcuggauaguuuccacaguuuaggaugagagaacacugaagguc

SEQ ID NO: 4176224 - RNA, 90 nt, Human
gauuauucaagguuuacauucugaaauaaaugguuugugugaaguugggaacuagcagaauuauuagagugaacaaugcuuugaauccuc

SEQ ID NO: 4176225 - RNA, 58 nt, Human
gauuauucucaccauuucucccuuccauuuguuaggucauuggaaagguagaguaauc

SEQ ID NO: 4176226 - RNA, 119 nt, Human
gauuauugaacaaccuaauuuacugauguaguucagugccaguuugcuccuucuauaggacuguauaagacucugcauggcacuuagcaauuucagguacauuaaaauguucaauuauu

SEQ ID NO: 4176227 - RNA, 68 nt, Human
gauuauuuuacuauuccugacaccuaggcacucaguaaaugccuaggugucagguauagaauuuaauu

SEQ ID NO: 4176228 - RNA, 57 nt, Human
gauucaaagacagacucauuucaagggcacucagacuccuagaagguccuuugaguu

SEQ ID NO: 4176229 - RNA, 106 nt, Human
gauucaaucauauugaacaaaagacucauccuguuguuacuguucuacauacagugaauauuuuuacugguagugcaaaguaauacaggcuccaguaagaggaauu

SEQ ID NO: 4176230 - RNA, 59 nt, Human
gauucacaacugcccugaagggguggcaucggccccuuuacacguaaggcuguugaguc

SEQ ID NO: 4176231 - RNA, 70 nt, Human
gauucacacccacauggaaauucacaguccugagggcagggcuguguugggaaucauguggguggagauc

SEQ ID NO: 4176232 - RNA, 62 nt, Human
gauucacacuuuacuucuuuccaagugguuuauugauuuguggauucagugaaaugugcauc

SEQ ID NO: 4176233 - RNA, 130 nt, Human
gauucaggauguauucagaguguggagaaggguuucucugggaacauaaaugaagugggagccagaaugaauauuuucugcuucaaaugucuucuugagugauccugccacugaaguucauucugugaac

SEQ ID NO: 4176234 - RNA, 77 nt, Human
gauucaugggauguagguauacagagauuucuggggcuguucugggcuauuggagaucuuguagaccuaaacuauuc

SEQ ID NO: 4176235 - RNA, 64 nt, Human
gauucccagaggaguucugggauguaugccucugagaucaucuuagaauccuggacugggacuc

SEQ ID NO: 4176236 - RNA, 88 nt, Human
gauucccuggcaguucucauuaguucagcauucccgaaguguccccuguuuggaggcagaggggaagcugaggaauugaaggagaauc

SEQ ID NO: 4176237 - RNA, 64 nt, Human
gauuccucauggcugucgcagggccgugcgugagcugcugggccuuggcgauccguggggcauc

SEQ ID NO: 4176238 - RNA, 62 nt, Human
gauuccugggcaggacgagagucugggcuggcucggacuuaauuuuuguccucucaggguuc

SEQ ID NO: 4176239 - RNA, 61 nt, Human
gauuccuuuguuuauaaguacugugcuugcauaguuuaauaaaacaguaaagaaaggaauu

SEQ ID NO: 4176240 - RNA, 126 nt, Human
gauucgucaaugaaugaaaagucaaguaauaaaugugucuguuguuugugugcaaaaauguuauuacuaacacacccuuagcaguggcauacauuuugaguguuuuuccauuagucgugauguauu

SEQ ID NO: 4176241 - RNA, 64 nt, Human
gauucuaaucuucagccagcaugaaaaacacuggauuaggagugcuggagugagauuaugaguu

SEQ ID NO: 4176242 - RNA, 71 nt, Human
gauucuagcuggacucauucuuccccuuuuggcagaucaauuagugucaagaacuuugguccugcagaguc

SEQ ID NO: 4176243 - RNA, 55 nt, Human
gauucuauguggcaucaagcucagugguucucaacucugguuccacacuagaauc

SEQ ID NO: 4176244 - RNA, 85 nt, Human
gauucucaggauagugucuguguggacuguauuuuccccucaaaucaggaaagcagcucauggaguaggcacugcauggagacuc

SEQ ID NO: 4176245 - RNA, 62 nt, Human
gauucucagugugauuuugaguaggcgacagagaguucucaauucuagacaacacugaaauc

SEQ ID NO: 4176246 - RNA, 85 nt, Human
gcaaaauucagaagguggaacauaccgaaaauacuuaaggauauacucuaaaggcaaauguguguuugugcuuuuuagauuaugc

SEQ ID NO: 4176247 - RNA, 57 nt, Human
gcaaacaaggacauacauccugugcucauacagccaugcaccauguaugggguuugu

SEQ ID NO: 4176248 - RNA, 80 nt, Human
gcaaacagaguaauggcagaccuccuggccacaaagcaaaguaguuugugcuagcagaacugucgucaucucuggagugc

SEQ ID NO: 4176249 - RNA, 61 nt, Human
gcaaacaguuuugccaaaaggacaaagauaacagauguguucacuugggagaccuguuagc

SEQ ID NO: 4176250 - RNA, 128 nt, Human
gcaaacaucggaaggcaagaggccagguugaacagugguuagcagcuuagacugccugggauuuguccagcucuggcuuggcuagcugugacacugugggcagcuugcuuguucuucgugugucuugu

SEQ ID NO: 4176251 - RNA, 57 nt, Human
gcaaacaugcugagaaauaagaugucuggcggcuacucuugauuugaggcuguuugu

SEQ ID NO: 4176252 - RNA, 60 nt, Human
gcaaacggggucagccguauugaagugagccagcuuuuccaaccugagcugaacccgugc

SEQ ID NO: 4176253 - RNA, 129 nt, Human
gcaaacugaccugugcugccuacacacuaacuuuccugggccuggggccugcacaggcugaaugguccuugagccuucacucugcaucugagcggucuugggcccgcugaguggcaguggcaggaaguc

SEQ ID NO: 4176254 - RNA, 66 nt, Human
gcaaacuuccaggguggcuugagcauaaugaugcuaucaaccagcucagaugcccuaggagguggc

SEQ ID NO: 4176255 - RNA, 56 nt, Human
gcaaagaaaguuuuaaugagguuaaaggaaagguucuauauuaaaauuuuuuuugc

SEQ ID NO: 4176256 - RNA, 57 nt, Human
gcaaagagcugggacuuaaagugcaguuggccugaauucaaagcccagcucugcugu

SEQ ID NO: 4176257 - RNA, 75 nt, Human
gcaaagauauaaagauguuuauuauauccucuggaugccaugaugacaugauugccauuugauagguauguuugc

SEQ ID NO: 4176258 - RNA, 74 nt, Human
gcaaagaugucagauccucagaaagucuagcucagugucaccaguuuuccaaaugaaggauuugaguucuuugu

SEQ ID NO: 4176259 - RNA, 64 nt, Human
gcaaagcagaacccucucuauccagcacaccuuauccuggcuccuggaggaugcuucucuuugu

SEQ ID NO: 4176260 - RNA, 76 nt, Human
gcaaagcaucugcacccuuggucagcucugcaguggauuucuucugcagggcagauaugacuguaggggauguugc

SEQ ID NO: 4176261 - RNA, 55 nt, Human
gcacugcagguggguggagaggagauucaucucucuggucccacucccugugugc

SEQ ID NO: 4176262 - RNA, 76 nt, Human
gcacugccugcaguucaugggcucugccuugaagacuuggaggccaaggggcaggugugcagagcuguuggucagc

SEQ ID NO: 4176263 - RNA, 57 nt, Human
gcacugcuuugcagcuuaagagcaggguuugaaucccagcuccacuaaagcagcugu

SEQ ID NO: 4176264 - RNA, 56 nt, Human
gcacugggagcugccugccgguccuuuaacaaccggcagcgcgagcguccagucgc

SEQ ID NO: 4176265 - RNA, 64 nt, Human
gcacugggguccagauggggagaagauguucugccauaagaaaaucuccuggucugguccgugc

SEQ ID NO: 4176266 - RNA, 81 nt, Human
gcacugguggucacuagggcagguuggcaucccgggcagggguuugauccuggcugggccccccugcugugucaccagggc

SEQ ID NO: 4176267 - RNA, 58 nt, Human
gcacugucucugucuuaacucccagguaggcucugaaauugaugacagggauggaagc

SEQ ID NO: 4176268 - RNA, 69 nt, Human
gcacugugagcagggaaguuucugucucuggaaauacaaucaaaacaugugcuuuuauugcucaggugc

SEQ ID NO: 4176269 - RNA, 68 nt, Human
gcacuuaacuacaagggcggucucuguuucuucaccagagagagaagauuuuccuguguaauuugugc

SEQ ID NO: 4176270 - RNA, 67 nt, Human
gcacuuacauucacaugcauuggcaaaaguguaggugaggccaccuacuggguaugcugugaagugc

SEQ ID NO: 4176271 - RNA, 80 nt, Human
gcacuuacugagcagaauggagggaagagucaccagaaucauuucuauucauucuuucucucuaaucaagcacauagggc

SEQ ID NO: 4176272 - RNA, 56 nt, Human
gcacuuaggguauguacugggcacgucacugccuagguacuuccuccccuaaaugu

SEQ ID NO: 4176273 - RNA, 63 nt, Human
gcacuucaugacuuugucaaauuacuuaucauauucuguagggugacauagcucuuggggugc

SEQ ID NO: 4176274 - RNA, 91 nt, Human
gcacuuccacugcgagacagacgugaguggacagagcugcccguucucacagugcaggucugucuccagcacacacaaaguggaggauugc

SEQ ID NO: 4176275 - RNA, 72 nt, Human
gcacuuggaggacauuuuagcagaaggagcauuugaacuugguccuaaaaguagagauguuugcuaaguagc

SEQ ID NO: 4176276 - RNA, 120 nt, Human
gcacuuguaguauaucucuguccaguggaacagauguugccuguaucuacaaauaauucaaaaacagaucgaaggcaugcaacauccaauuccuuuuggcacgauuuacguacauuuugc

SEQ ID NO: 4176277 - RNA, 58 nt, Human
gcacuuguugguggugaaaucacggaugaccuugacguuggugacugccccaaaaggc

SEQ ID NO: 4176278 - RNA, 96 nt, Human
gcacuuugauauacucaauaugaucuuaaaauaauguugugaagaaggaagcucagaaugcuucaauauuguuucaagaucacagaggacaaaugc

SEQ ID NO: 4176279 - RNA, 59 nt, Human
gcagaaaccacagugucuuuuaggcccuagccucagaagacaccuacugucauuucugc

SEQ ID NO: 4176280 - RNA, 62 nt, Human
gcagaaacuaaggugcuguggacugauuugggagcaguuuuguccauuuaucaugguugugc

SEQ ID NO: 4176281 - RNA, 65 nt, Human
gcagaaacuguguuacuagaaugucuugcagaaacauuacauuugguuacuaauauaggaucugu

SEQ ID NO: 4176282 - RNA, 67 nt, Human
gcagaaagaauaggguauuugucaaaaaggaaacaugcuucugguuagacucaccuuauaguucugu

SEQ ID NO: 4176283 - RNA, 56 nt, Human
gcagaaaggagaccagcucugccccgcaugggguaaaaagcagugucuuuucuugu

SEQ ID NO: 4176284 - RNA, 61 nt, Human
gcagaaauaucuuaggaguauaugagggaguaaccauucagcuuuccaaaaagaugucugu

SEQ ID NO: 4176285 - RNA, 75 nt, Human
gcagaaauuaaccugagggagauuaggccugagcuuugaaguucacgguuuuguuuuccuucagcccaguucugc

SEQ ID NO: 4176286 - RNA, 85 nt, Human
gcagaacaaguggagggcacagagggucuugaagaacagggaugcagccccugcuuccaagacaccuuuagucacucccuacugc

SEQ ID NO: 4176287 - RNA, 93 nt, Human
gcagaacaguuuccuauuuugagacuugacaccuaauuagucaucuuacuauuuaagcugaaaaauagugucguguuuuggguaacguucugc

SEQ ID NO: 4176288 - RNA, 85 nt, Human
gcagaacucuuguuuccagcaaauaguccauuguugacguggugauagggcaaguaguuugcugauggaaaaaagagaggucugu

SEQ ID NO: 4176289 - RNA, 70 nt, Human
gcagaagccacugguaaacugguaggaacacuuaaaucuuaauuuuuacaaauugcuagaggcugaaugu

SEQ ID NO: 4176290 - RNA, 60 nt, Human
gcagaagcccggucagcgcacgugcccgcgagaccugcaaacuugugccaccggcucugc

SEQ ID NO: 4176291 - RNA, 64 nt, Human
gcagaaggguugcaaaaggauaguacgauaagaucuugguccuuacaacuuguuauuuuucugc

SEQ ID NO: 4176292 - RNA, 88 nt, Human
gcagaagucauuggugccagcacuggcccauuccugucuggcuguugcucagccuggacaaagaguggguauagugaacgccuccugc

SEQ ID NO: 4176293 - RNA, 76 nt, Human
gcagaauaaaauuugccuuaccuucuuccaagagcccccuacuguuggaaauaagggaggcaaaaucuuacucugc

SEQ ID NO: 4176294 - RNA, 62 nt, Human
gcagaauacauuuuguuuuccuucaacaugccaaggaagugccaugaaaaugugauuucugc

SEQ ID NO: 4176295 - RNA, 64 nt, Human
gcagaauagugacuuuccuuaagcucaaaguuugauuugagauuaaaugugaauauuauucugu

SEQ ID NO: 4176296 - RNA, 66 nt, Human
gcagaaucuccacuuugccuuuugacccuaguuaucuagaacucugggaugagaaaaggguucugc

SEQ ID NO: 4176297 - RNA, 73 nt, Human
gcagaauuauaucuuuauuaugucuaucugcuauggguagaaaacaagcauggcauuugaagguagaagaugu

SEQ ID NO: 4176298 - RNA, 130 nt, Human
gcagacaauauuaaagcaguauccauuuucagagccuuugauuagcacaugaggaaacaaggguauaugggaagcuauguaauuugccucauguugguuuguuggucugaagaguacaacuuugauaugc

SEQ ID NO: 4176299 - RNA, 68 nt, Human
gcagacacagggaaggcaaggaagggaggcggguaugcugcuggggagcuuuguuuuguuuuguuugc

SEQ ID NO: 4176300 - RNA, 72 nt, Human
gcagacagcugccucuguguagaucuugaaaggaacugcagggcaaucuacgcagaagcaucucccuacugc

SEQ ID NO: 4176301 - RNA, 55 nt, Human
gcagacaucaagcacaggcccagugugcaucugcugggcuuuuggaauggucugu

SEQ ID NO: 4176302 - RNA, 71 nt, Human
gcagacaucuuuguuucaucuguccagcauccucucccgugccuugguacugggcuuugaagccaggcugc

SEQ ID NO: 4176303 - RNA, 61 nt, Human
gcagacaugaccaccaaccaggccacacuugggccugcguugcaccuugaucguaauuugc

SEQ ID NO: 4176304 - RNA, 56 nt, Human
gcagaccagccccuggagcugcugacgcugcagcagcacccagcaggcaggugugu

SEQ ID NO: 4176305 - RNA, 99 nt, Human
gcagaccuccgcgcagcggccgcgggcgcgaggggaggggucuggagcucccuccggcugccugucccgcaccggagcccgugggguggggaggugugc

SEQ ID NO: 4176306 - RNA, 60 nt, Human
gcagaccugaccuugggcagcaacuaggaggaagaccugcugagcuggggugaagguugc

SEQ ID NO: 4176307 - RNA, 73 nt, Human
gcagacguggcucuguuucccuguguaaaaagaacaucaugcuugcugcagggauuucagagacacuuagugc

SEQ ID NO: 4176308 - RNA, 68 nt, Human
gcagacuguucacgaugucagaugguucaugauuuuuuuccagguuugauacagaagaaucaguuugu

SEQ ID NO: 4176309 - RNA, 93 nt, Human
gcagagaagagcauccugguuuuaugaaguccuguuguaaccauaaugaaagaggaaaagaaacuucaaagccaggauugcguaggucuaugc

SEQ ID NO: 4176310 - RNA, 66 nt, Human
gcagagacuaguagugcagacugcccaggguaauuugggucugguuuuccacucaugaguuuuggc

SEQ ID NO: 4176311 - RNA, 69 nt, Human
gcagagacugagggcagcugcaggcuaccaggaauugcuggcagugaagcugucuuuagguuuuucugu

SEQ ID NO: 4176312 - RNA, 69 nt, Human
gcagagagaaugguaaugaggacuugaaggggucuucaccaaguccauaugcaucaugggaugcucugu

SEQ ID NO: 4176313 - RNA, 65 nt, Human
gcagagagagcagggaagggucugcccuggcaaucaagucagccaagcccacccuggcucuuagu

SEQ ID NO: 4176314 - RNA, 58 nt, Human
gcagagagugaagcuugggaaucuugaauauauugcgggauuugcuugucugcucugc

SEQ ID NO: 4176315 - RNA, 67 nt, Human
gcagagcaccaaagugaaagauguagcuuuccccgcuccaggcuaucagcauuagguccugcugugc

SEQ ID NO: 4176316 - RNA, 75 nt, Human
gcagagcagaugguggggcaggaaaaucuguggccaucucgcaauaaguuauuuuucucucucacucugcccugu

SEQ ID NO: 4176317 - RNA, 62 nt, Human
gcagagccaggagcccaggauccagcgcacugggcaccgaccugggaccuggucaucuuugc

SEQ ID NO: 4176318 - RNA, 77 nt, Human
gcagagcccagaggugggagccuggucacaugcacaguugcauuacuuguccacgcccacuuccggccugggccugc

SEQ ID NO: 4176319 - RNA, 59 nt, Human
gcagagcccaugcaacaggccuagcgacacauuucgcaaugucuuaugcaaggguaugu

SEQ ID NO: 4176320 - RNA, 61 nt, Human
gcagagcccucaaggccgaugcaugccaggcugggcucugucaccugccuagggucucugu

SEQ ID NO: 4176321 - RNA, 59 nt, Human
gcagagccgugaauggauuucaaggacaagacuacaucaagacuccccacaggcucugu

SEQ ID NO: 4176322 - RNA, 103 nt, Human
gcagagcucugggguuggggccaggguccccgggucuccugugcccccagcacugucggguaugagguuaaccgggcucacccuguccuggcccuuguucugc

SEQ ID NO: 4176323 - RNA, 123 nt, Human
gauguguuuaguuuguucacaauuucguaaaugaagccuuaauauggauguucuugccauguugagaugacaaugcuuagauccaguuaauagcuucauuguauguugaauaaaccucacauc

SEQ ID NO: 4176324 - RNA, 75 nt, Human
gauguguuuauuugcacacagucuccugugguccagaacacuucugccccccauaggugugugcaaaugcuacuc

SEQ ID NO: 4176325 - RNA, 71 nt, Human
gauguuaaauguaaauagcugcucagaaguaauuuuuagcugcuauuguugugguuauuuucauuagcauc

SEQ ID NO: 4176326 - RNA, 72 nt, Human
gauguuagccaauguuauaggauuauuugaaugaacccuucauccuccauuuuggugugacauugggacauu

SEQ ID NO: 4176327 - RNA, 62 nt, Human
gauguucaaguaccuuugugucuugauuugccuuagcauguagaaaagggacuuguaacauu

SEQ ID NO: 4176328 - RNA, 67 nt, Human
gauguuccuuaaaaaaagauugaugguggaugccgggcuucggguaccauuuaucauuuugaauauu

SEQ ID NO: 4176329 - RNA, 69 nt, Human
gauguucgagcagaagaccagggucaguacaccugcaaauaugaagaccuugaaacuucagcagaacuc

SEQ ID NO: 4176330 - RNA, 76 nt, Human
gauguucugagacuucugaagcuagaacauaagaauucuugcaacuucugcuaaaggaaguucuccuggaauacuc

SEQ ID NO: 4176331 - RNA, 58 nt, Human
gauguugcacagggaugcccagaaguggcgaggacugaaggggcauggaugcagcauc

SEQ ID NO: 4176332 - RNA, 96 nt, Human
gauguuuaacgccugucuuuucaacuuggucuacugagucuucaauacuggugacugagcugcuugaagugaacucuggacaagguggagagcauc

SEQ ID NO: 4176333 - RNA, 63 nt, Human
gauguuuaagaaagucuuccauaguguacccaccucacuaugcuagaaguuuucuucagccuc

SEQ ID NO: 4176334 - RNA, 85 nt, Human
gauguuugaauucaaaauuuuguuauuuaaucugugaaucaaauuuuaguagaagacagauaacaaaacaguuuuuucaaggauc

SEQ ID NO: 4176335 - RNA, 77 nt, Human
gauguuugccugcccaaggucaccuaguuaguaaaugauggagucaggacauuaccugaccuuggcugacugacauc

SEQ ID NO: 4176336 - RNA, 98 nt, Human
gauuaaaauuuugaaaauauuaguuggcacuucauaauaugaaaugaaauuaugaaauuuuauauacaagaggguuaauuauuuuuaaagggcuaauc

SEQ ID NO: 4176337 - RNA, 59 nt, Human
gauuaagcuggagaaaccugggaggguagcagcuggcuuucgagggaaucuccaauauc

SEQ ID NO: 4176338 - RNA, 57 nt, Human
gauuaaggguuaucauuugcagugaagaccauuacaaaugaccauagccacuuauuu

SEQ ID NO: 4176339 - RNA, 81 nt, Human
gauuaauuuggccuguauguaugugaauagggcaacgauuuuaaaauauugucuuauuuuaucauaagcacugaauuauuc

SEQ ID NO: 4176340 - RNA, 130 nt, Human
gauuacaggcaugcacaccacaacuggccaaugcugucuuuugaagcuccugacuggggccaauuagcucucaugucaggggugucaauguucugagacaggccgggcacaauggcucacgccuguaauc

SEQ ID NO: 4176341 - RNA, 112 nt, Human
gauuacaguguguguagcugaaggcauuauuccacagcucagaauuuuuuuucaucuggaaaguaguaaucucaauugugaaauagugccuucagcuguggacauuauaauc

SEQ ID NO: 4176342 - RNA, 65 nt, Human
gauuacaguuagguguguagugguauaucucacuuguuucuuuaucaccagcuccuagcugaauu

SEQ ID NO: 4176343 - RNA, 71 nt, Human
gauuacguuugaguacagcugccuuuuuguacccaucauauaacccaaaggcaaugucucgauugguaguu

SEQ ID NO: 4176344 - RNA, 75 nt, Human
gauuacuuaguuuagucucacuuggaauuuugcagauugggaaguggaggccaagaggcagaaugcagagaaguc

SEQ ID NO: 4176345 - RNA, 73 nt, Human
gauuagaagaacuuguuagccuaagaaagaguucaaagaaagggcaaggcugaauguuugaguuuuucuaauc

SEQ ID NO: 4176346 - RNA, 66 nt, Human
gauuagaaugggaagauacaagaugaccugugaggaaauguaaggccacuuuauccccauuuaguc

SEQ ID NO: 4176347 - RNA, 78 nt, Human
gauuagauagacuugauguuaaaggggaugaggguuauucuguauuaauucuuucucuacuagcagagcugucaaauc

SEQ ID NO: 4176348 - RNA, 72 nt, Human
gauuagcagaggcagagucacaaagagucuuuuauaaaccuugguagagaguuuguacuuuacccugagauc

SEQ ID NO: 4176349 - RNA, 116 nt, Human
gauuagcugauguaggaguagcagcagaagcagcagcaaugacaacagaacuagaguccaagguugaucucuguugcugucuuugcucagcuuugcuuugcagacauaaguggguc

SEQ ID NO: 4176350 - RNA, 97 nt, Human
gauuaggcgggaagguguucgucuuuucuuacuaugguugcaagcucuucagaauaacuguagcaaagaacagcucuggauguuuucaugcuuaauc

SEQ ID NO: 4176351 - RNA, 62 nt, Human
gauuaguuauuucauuguugagggaaaauucauucaguuaacauuaaaagagauaauugauu

SEQ ID NO: 4176352 - RNA, 84 nt, Human
gauuauagaugagagugugggauaguucaucagcaugugaguagaugcuagauaaacuggaaccauugccucuucucugucuuc

SEQ ID NO: 4176353 - RNA, 55 nt, Human
gauuaugaugcgaggucagagcaguuguuuucuguccugaacuggcaucagaauc

SEQ ID NO: 4176354 - RNA, 59 nt, Human
gauuauuugucacugcacuugaaauuuaaaucaaauuuaauguuugguggcaaaaaguc

SEQ ID NO: 4176355 - RNA, 94 nt, Human
gauucaacugccucccugggacguggggagagggggguguguguucacgucacccuuucuuacucacacgcucuuuuacacacagucaugauuc

SEQ ID NO: 4176356 - RNA, 65 nt, Human
gauucaagucucaauguauuauggugagcaaaagagggccagcaagaugaaguugagcuaggauc

SEQ ID NO: 4176357 - RNA, 74 nt, Human
gauucacaggguuuaauugcuuguugucacacaaugauaaguggcacaaucaguauuuagacccagguguauuc

SEQ ID NO: 4176358 - RNA, 80 nt, Human
gagguccucauaauuauaaacugcaguagguauaacaagaggcuaaauacauagcugugguuuuaauuagcuggugcuuc

SEQ ID NO: 4176359 - RNA, 65 nt, Human
gagguccugggagcuaguagaguaaggaaagauguuuaguuucccugccugacagcacccaccuc

SEQ ID NO: 4176360 - RNA, 69 nt, Human
gaggucgggcuggcuuuauggggcuuguggccagcaggacugugcaaggcccaugcucagaaggaccuc

SEQ ID NO: 4176361 - RNA, 123 nt, Human
gaggucuacuggggcaggacccugauggccagcgagugggucagcguugcagcaacaugcccugcucagaucuuucccauuuucccucccuuucccuuaggagccuguuccucucacgcccuc

SEQ ID NO: 4176362 - RNA, 78 nt, Human
gaggucucacuauauauauugcauuggcuggucuugagcuccugugcucaagcuguccuccugcaauauugggauuac

SEQ ID NO: 4176363 - RNA, 83 nt, Human
gaggucucacuucuuugaaaggaagccacacagcuguuuuuuccugacagcugugaggcuacuuuccaagggagggagucuuu

SEQ ID NO: 4176364 - RNA, 111 nt, Human
gaggucugggaaggagcccggcgugguggggcgggccuguaaucccagcuacucaggaggcugaggcaggaggauugcaggaucgcucuuacccaguuucuuucuuucuuu

SEQ ID NO: 4176365 - RNA, 79 nt, Human
gaggugaaaugauuugcuuagucuuacgaauauuugggagccaaacuucaacuggaaugggcuauccugauuucaucuc

SEQ ID NO: 4176366 - RNA, 64 nt, Human
gaggugagaggccugagagcuggaggcuuguugguuugcugcucuuucugucuguccauccauc

SEQ ID NO: 4176367 - RNA, 59 nt, Human
gaggugaggaugggggagcagggaaguaaaucucauauuccucuuugcauccucaacuc

SEQ ID NO: 4176368 - RNA, 55 nt, Human
gaggugaguggcuggagcccauagcuuccuacucuaaggcuucccuacucacuuc

SEQ ID NO: 4176369 - RNA, 71 nt, Human
gaggugcagaaaaaaguccuuuaggaggaaugacucuuacaaaaauaaggcuuuaccucuuucuccaccuu

SEQ ID NO: 4176370 - RNA, 75 nt, Human
gaggugcagaagcaaguagugauucuuuccuggaaauguuaauaaacaagaaaauuacuauuguuccugggcuuu

SEQ ID NO: 4176371 - RNA, 57 nt, Human
gagguggaaagagcaugaaucuuaaaaucagacagaccuguguucaaacuccaucuc

SEQ ID NO: 4176372 - RNA, 71 nt, Human
gagguggcucuggguuguuacacuggauuuacuagcagagugacuuugguuugagcaagucaguccaccuc

SEQ ID NO: 4176373 - RNA, 99 nt, Human
gaggugggaagauugcuugagcucuggagguggagguugcagugagccgugauugugccacuguccuccagccuggaugacagagcaaaacccuaccuc

SEQ ID NO: 4176374 - RNA, 98 nt, Human
gaggugggagaaucacuugaacccaggaguuggaggcuguggugagcagagaucgcaccauugcacuccagccugggccacaagggugaaacugucuc

SEQ ID NO: 4176375 - RNA, 71 nt, Human
gaggugggaggaucaccugaggucaggaguucaagaccagccuggccaagauggugaaacccccccaucuc

SEQ ID NO: 4176376 - RNA, 99 nt, Human
gaggugggaggaucgcuugagccugagagguuggggcugcagugagcugugauggcagcacugcacuccaaccugggcaacagcgcgaaacccugccuc

SEQ ID NO: 4176377 - RNA, 99 nt, Human
gaggugggaggauggcuugagcccaggaguuggaggcugcagugagccaugguagugucacugcacuccagccugggcaauagagugagacccugucuc

SEQ ID NO: 4176378 - RNA, 99 nt, Human
gaggugggaggauugcuugaacccaggaggcaagguugcagugagccaagaucaugccacugcacuccagccugagugacagagcgagaccccuaucuc

SEQ ID NO: 4176379 - RNA, 93 nt, Human
gaggugggauuuguggggcacgugccuaaggagcaggccuaggaaagagugagaugaagcaggcugguccccauugcccaccccucccaccuc

SEQ ID NO: 4176380 - RNA, 58 nt, Human
gagguggggcaggaaagugcuguggugucccccaguggcagcugucaugcccuagauc

SEQ ID NO: 4176381 - RNA, 98 nt, Human
gagguggucaccuauaggagauaguugauucauauagauaugcgugcacaagcauguguuuguguuggauuauuaucugucucgagggugagcaucuu

SEQ ID NO: 4176382 - RNA, 63 nt, Human
gaggugguuuguggugacucauaaaaggauaacuaccuuauugauaaauacaagaccagccuc

SEQ ID NO: 4176383 - RNA, 59 nt, Human
gagguguagagaaagagcucugucuccucccugggagaauacuccuuucccuacaccuc

SEQ ID NO: 4176384 - RNA, 59 nt, Human
gaggugucuggccuuuguaggaguaucucauugaggagucugcuaaggucagaauucuc

SEQ ID NO: 4176385 - RNA, 60 nt, Human
gaggugugagggacagagaaaggggugagacccgugcccagauugcuucuccucacaccc

SEQ ID NO: 4176386 - RNA, 129 nt, Human
gagguguggccagaacaagccagcuccuggggugggguuacucauugugccuagggcgagguggaaggaagagauggccccacagaggaggugacauugagacuggcuguggagguagaacagcauuuc

SEQ ID NO: 4176387 - RNA, 84 nt, Human
gagguguuguacugugguuaagagcaaggauuuggugucgagcugcuugggcuggagcuuguugcuuccccacugcuugaccuu

SEQ ID NO: 4176388 - RNA, 63 nt, Human
gagguuaggccagcgcugcuagcucccggccgucucugccuggcuccugaggcuuggccccuc

SEQ ID NO: 4176389 - RNA, 86 nt, Human
gagguuauaaguggauagcaagccuucggaguuacauccugccccacagaucucugagauaguuucuaucaauuguuguaguccuu

SEQ ID NO: 4176390 - RNA, 122 nt, Human
gagguucagugacuugcccaaggucauagagcuggaaauuggcagagcugggacuggaagccaggccaggcaccuggcuccugaguuucagcucuaagccuaggccauccuacgcugaccuc

SEQ ID NO: 4176391 - RNA, 65 nt, Human
gagguucggcuccagguuggaguuugcuccaugaggaugggccaugccugccugagcugucccuc

SEQ ID NO: 4176392 - RNA, 62 nt, Human
gagguucucagaacaaguucaggguugcccagaaguuguuuuuagagaagcccugaagccuc

SEQ ID NO: 4176393 - RNA, 63 nt, Human
gagguuggaaugucuguuucaacaagcacaaugggucccuacagugugaagcaggcaugccuu

SEQ ID NO: 4176394 - RNA, 59 nt, Human
gagguuggcgcccugccuggcccagagcagccaggcccagcaaccagcgccaaagccuc

SEQ ID NO: 4176395 - RNA, 63 nt, Human
gcaggcucugaggucccaggauucuguggagauucacaggggaccuaggacccucggagcugc

SEQ ID NO: 4176396 - RNA, 62 nt, Human
gcaggcugaguugggaaaccaagcaaaucccaugcuuccuggcuugcccaaauccugccugc

SEQ ID NO: 4176397 - RNA, 77 nt, Human
gcaggcuggugcacagggcauauuuuagagggaccauaacacaccccuauacuagaaaugcaguguacugugucucc

SEQ ID NO: 4176398 - RNA, 59 nt, Human
gcaggcuucaagcacagcuuuuagagacugcaacucagcuggugugugcuggggccugu

SEQ ID NO: 4176399 - RNA, 83 nt, Human
gcaggcuucugccacugggugaguugaugaaggagaugaugucuccucucauaaugcugcaccaaacagauggaauggcaagc

SEQ ID NO: 4176400 - RNA, 70 nt, Human
gcaggcuuuugaaaccgaaaaucacaucugugaaaaaugucauagcuguguaugguuuacaaauauuugu

SEQ ID NO: 4176401 - RNA, 57 nt, Human
gcagggaaguuugaucuuuuucggauuuugcgguuauauuagaugagaugucccugu

SEQ ID NO: 4176402 - RNA, 76 nt, Human
gcagggaaugagauagaggaagaaugggauuucuaacugaaauuccacagcucagccucucuuuucaaaacccagc

SEQ ID NO: 4176403 - RNA, 83 nt, Human
gcagggagcagacggcucggggacccuggugagcaggccuggggagcuggugaccauggugugcccugugcggggcuccccgc

SEQ ID NO: 4176404 - RNA, 70 nt, Human
gcagggauauguauugaaugaucauuuguacaguuugcaaaaugacacucauucagugucaagugucugc

SEQ ID NO: 4176405 - RNA, 55 nt, Human
gcagggcacaaggacgcacaggcccuccugcaccgucaccgacuucugcacuugc

SEQ ID NO: 4176406 - RNA, 60 nt, Human
gcagggcacacaagaaugauaaagaugucuaaaaaggauguuauuuuaagugagcuuugc

SEQ ID NO: 4176407 - RNA, 127 nt, Human
gcagggcacaggggacuucccuucucuggugacaguggugacagcagggacauguaggaagggccaggcuuauuccucccucagcugucagcgucgccgucuucagacugaggccccccaaguccgc

SEQ ID NO: 4176408 - RNA, 62 nt, Human
gcagggccagccccacccucucugguuggcugaaacuagaauggcgugagguuuggcugagc

SEQ ID NO: 4176409 - RNA, 64 nt, Human
gcagggccagggcucaggcugucucggagcccccggagugcuugagcucuccuggaagcccugc

SEQ ID NO: 4176410 - RNA, 89 nt, Human
gcagggccgcggccucuccccuguccuugggcugagccuggccagcugcaggcagcucuggcgucagggagcgagggcgguggguuugu

SEQ ID NO: 4176411 - RNA, 57 nt, Human
gcagggcgaaugcugcuugugucuuauccaggacagacuggccugucucgcaccugu

SEQ ID NO: 4176412 - RNA, 105 nt, Human
gcagggcgaugacauagccggaguccugugggcaagcaggcgagggccuggagcagcaagucugccugugccucccuguccugccugcccaccugcucccccugc

SEQ ID NO: 4176413 - RNA, 81 nt, Human
gcagggcugcacugcuucuggaggcuuuaaaggagaaucaauuuccuugcguuuuacagcuucuagaggcuagccaccugc

SEQ ID NO: 4176414 - RNA, 55 nt, Human
gcagggcuugaaucaaggaagucuugauaagggacuucacacucucaaccacugc

SEQ ID NO: 4176415 - RNA, 69 nt, Human
gcaggggaugcuaauaaaaugcaggauuuuggacacugagcaagguaagagucugccuuuuucuccugc

SEQ ID NO: 4176416 - RNA, 63 nt, Human
gcaggggcagcagcugaggaaugaaacugggaaggagccugggaacccuguuguugccuuugc

SEQ ID NO: 4176417 - RNA, 118 nt, Human
gcaggggcagugaugugaugagguuugcucuaauggaaggcuugcagcucuguggcaccuggacacaugcagauguuuuugaguagcgggcuuuccugccucucccacugcacuaugu

SEQ ID NO: 4176418 - RNA, 106 nt, Human
gcagggggagugaauaggggguaggagagguuggccaugggauuaguuacagcugagggccuggcuucacuuucucaguuccucuguuagaaaaucaccacuuugc

SEQ ID NO: 4176419 - RNA, 61 nt, Human
gcagggguccucccagccaggagcugugggcagccuccaggagguaugaguggcccccagc

SEQ ID NO: 4176420 - RNA, 69 nt, Human
gcaggguauguuuuuaucuacugugagguuccuggggcggagaugugcaguggagcgagaacuuccugu

SEQ ID NO: 4176421 - RNA, 61 nt, Human
gcacuagaaguacgccuuguaaaaaguaacagugcugggaaaaaggguacuuuaagagugc

SEQ ID NO: 4176422 - RNA, 118 nt, Human
gcacuagauaucuuccagcuuuuagcauuguaaaaccugcauguuucuaaaagcaucuuaaugggaaugcugcuuuugggaccugggggcauuugcugagugcggcuggagcuggugc

SEQ ID NO: 4176423 - RNA, 79 nt, Human
gcacuauucuaggagguucuugaacaucuguaaaguaauauauacucuaugagauaaauggugcccccuggauuugugc

SEQ ID NO: 4176424 - RNA, 69 nt, Human
gcacucaggguaggguaaaugaugcaucaugccugcuggcaacaugggcccuaucuggaaagcgagugc

SEQ ID NO: 4176425 - RNA, 61 nt, Human
gcacucagguuaccucccuuuguaagcaagugccucuuuugaucaaagcaggugacagugu

SEQ ID NO: 4176426 - RNA, 97 nt, Human
gcacuccaucagauucuuauucagcaccacuuccagagaaguaaugaggacaauuaagcauaacguucugauuugggcauaagguucugauuugugc

SEQ ID NO: 4176427 - RNA, 65 nt, Human
gcacuccuugcgagagguuuaacuggaugcgacacccccagugucagccugggcaaggaacaugc

SEQ ID NO: 4176428 - RNA, 94 nt, Human
gcacucgucacuuuuguccaacuccacuucagcucaguauugguucugaaauacaguuaaacgaugauggggucaaaggaaggaguggcggugu

SEQ ID NO: 4176429 - RNA, 66 nt, Human
gcacucuaggcguauuccugaaccugaaggcucauguuucagacaggacuucauaugugugggagc

SEQ ID NO: 4176430 - RNA, 63 nt, Human
gcacugacuuccagcaacuuccuccaggcgagcgccuggaggcagucaccugaagucaugugc

SEQ ID NO: 4176431 - RNA, 80 nt, Human
gcacugagcuccauuccaggggccccuccauggcugacuuucggggaaggagcugagggagcgcccuuggagcaccuugc

SEQ ID NO: 4176432 - RNA, 60 nt, Human
gcacugcaucuacuggcaaguacagucuguuucugacugacuucgucuaugaugcugugu

SEQ ID NO: 4176433 - RNA, 55 nt, Human
gcacugcuauuuagcuccaucauuuauaugugaauauaaguuaguguagcagugc

SEQ ID NO: 4176434 - RNA, 67 nt, Human
gcacugcuccagguguggcuuguauuuuugcuguguuagcaucaccuuggagcuuuauuagaagugu

SEQ ID NO: 4176435 - RNA, 59 nt, Human
gcacugggggcagcagugagggccucuuagcagcccagcgcacugacugccccuauugu

SEQ ID NO: 4176436 - RNA, 59 nt, Human
gcacugguagagaauuguagccugcaagaacucaauguuccaggaguucuaauaggugu

SEQ ID NO: 4176437 - RNA, 71 nt, Human
gcacuguccuaguugaagaggcugucaucacuuggguuaagugugacagcacgguucaacugcugcugugc

SEQ ID NO: 4176438 - RNA, 119 nt, Human
gcacuguucugggcacagcuucugcucuccaggagcucagagucuacuaggggauagaaaugaguagauagucaccucuuggagacauaggggcuggauuugagguccauaccaugugc

SEQ ID NO: 4176439 - RNA, 55 nt, Human
gcacuguugauaacauuagaaaguuugguuuucaagcuuguguguaucacagugu

SEQ ID NO: 4176440 - RNA, 73 nt, Human
gcacuguuggaggaggaagaggaguuaauuucaucaauuaacucuuccaacacuccuuccauuuaguaauagc

SEQ ID NO: 4176441 - RNA, 97 nt, Human
gcacuguuuccagagccagucacuccagccugccucagugcacaccugggcaccaggcaggugucuggaagugacucauucucuaaagaacauuugc

SEQ ID NO: 4176442 - RNA, 61 nt, Human
gcacuuaauauuguaugcuuuggguacuuuagguaugcaaagaugaaauauuaaaggaugc

SEQ ID NO: 4176443 - RNA, 65 nt, Human
gcacuuagcuggcaggagaaacggggugcagcugugccugcccuucuuucucacugccacugugc

SEQ ID NO: 4176444 - RNA, 66 nt, Human
gcacuucagucggguugaagagagcaggaguuggcuguccguggcuagaucugcccacugaaguuc

SEQ ID NO: 4176445 - RNA, 59 nt, Human
gcacuucuggccuggccuguguucagcugagaaaugcugccaggcagguagaggagugu

SEQ ID NO: 4176446 - RNA, 80 nt, Human
gcacuugaguccuugcuuuagaaucugcuucuggggaaacccaaaguaaggcaauuccuaaaaugcaucagacccugugu

SEQ ID NO: 4176447 - RNA, 88 nt, Human
gcacuugcucugggaaauggcuacuugucaaaauaaugacggauucaaaucucaauggcguguagucacauuuccauaguaaauaugc

SEQ ID NO: 4176448 - RNA, 59 nt, Human
gcacuugguaaauacucuuuggagacaguaaugcucaaagguuguguuugcuguugugc

SEQ ID NO: 4176449 - RNA, 62 nt, Human
gcacuuucugccucucaggcgcuguuccaggcacagagauggagugggagagggcagacugc

SEQ ID NO: 4176450 - RNA, 55 nt, Human
gcacuuugagaggcugaggcaagaggauuguuugagcccaggaggucaaggcugc

SEQ ID NO: 4176451 - RNA, 61 nt, Human
gcacuuuuccaaauaaaucaguucuaauucuuauguaagaauaugaugguuggagaauugc

SEQ ID NO: 4176452 - RNA, 97 nt, Human
gcacuuuuuguucauaguucuguuuugaaggauuggucaacgagccauaucauaaacacuguuaaaaugggacucuugugcaugaauaaaucugugu

SEQ ID NO: 4176453 - RNA, 69 nt, Human
gcagaaacaaacucuauaggcagaagcaaucagcauagauuaauuuagccuauggaguugaguuucugu

SEQ ID NO: 4176454 - RNA, 79 nt, Human
gcagaaacagagucaaauaauuuucucaauagugacuacuuuaauggucacagaggaacaaaguuauuuggaagucugc

SEQ ID NO: 4176455 - RNA, 84 nt, Human
gcagaaagaaucuuugugcccaacucaauggcaaaacaacuuccauauuuacugaaagcugggcacaagauucuuuccuaaugc

SEQ ID NO: 4176456 - RNA, 64 nt, Human
gcagaaagagcgugaauuuuaacaucugauaaauuuggauucaaauuccaguucuuuuaccugc

SEQ ID NO: 4176457 - RNA, 67 nt, Human
gcagaaagcacuugaaaucuggcaguguuauugccaagaaacauuguggucucuaagugcuuggugc

SEQ ID NO: 4176458 - RNA, 63 nt, Human
gcagaaaguagaguguagcaguuucgaugaaugagagacagccaugcacuucugcuguucugc

SEQ ID NO: 4176459 - RNA, 90 nt, Human
gcagaacaugucaugaauguuguuucggccuuucuucauccaucuccuccuuucaaauggggaaacugaaacaucaucauguuguuuggc

SEQ ID NO: 4176460 - RNA, 130 nt, Human
gcagaacauuaugaauuggaaguuguaacacuaauguagucauagauguuggagugaaaauuguaacaaugccacauuaaguguaugcauuuucuuuauuacacaucuaaauucagaaauauuaaaaugu

SEQ ID NO: 4176461 - RNA, 88 nt, Human
gcagaagccagcucccuccucaucccucugccaggcccagggcugagcaguccuggggcaggugggugaggaaggcagauguggaugc

SEQ ID NO: 4176462 - RNA, 91 nt, Human
gcagaagccuauuauuuauugacauguaggcuacaaggagguuaaaagaaaaccuccuuccuugaugucaaauaagugauacaaaaacugc

SEQ ID NO: 4176463 - RNA, 55 nt, Human
gcagaaggucauucaguguccaguuaaauguccuggacacugauaaucuuguugc

SEQ ID NO: 4176464 - RNA, 55 nt, Human
gcagaaggucuggcacuucaggguaggcagugcucugcagggcuucccucucugc

SEQ ID NO: 4176465 - RNA, 113 nt, Human
gcagaaucgugcgggcugggcccuggcagugccucccaggcaccccucauuuugugccucuuugggaaggacgugucaguggcauagugugggagacacugguggguucaugc

SEQ ID NO: 4176466 - RNA, 76 nt, Human
gcagaaugugggcugaguguggaacuaguuugguaaaauuuuaaaauggaaauuuuguacucauuuuacauuuugc

SEQ ID NO: 4176467 - RNA, 89 nt, Human
gcagaauucuuuaggagacucagcauucccugggucgaauggcuuaggagaaccagagcugacccaaggauugaacucuagaauucugc

SEQ ID NO: 4176468 - RNA, 126 nt, Human
gcagacaauagcaaaugacaucccaagaacuaccagucacucugugagagcuacgguuacuugaguugugaugguugagucuggagagauuggcagugcucuugaguuuuaugcuaaguugccugu

SEQ ID NO: 4176469 - RNA, 116 nt, Human
gagugcaagcuuuagaguaagugggaccugugucugcauucuguguaacucaguagcugugugacauaguagcuguguaacaugagaauguuccucaaucucgcugagcuucaguc

SEQ ID NO: 4176470 - RNA, 80 nt, Human
gagugcaauguuacaucugagcaacagaacacuagguaguuucuauguugucuugccucagguggcaguagguagcacuc

SEQ ID NO: 4176471 - RNA, 58 nt, Human
gagugcacauuuuuucugcugcaugaguggauaaugagcagcagcagaagugugccuu

SEQ ID NO: 4176472 - RNA, 58 nt, Human
gagugcagaaauucccuuccugcaaaucacuuuuugcuaaagggaggcuuucucacuc

SEQ ID NO: 4176473 - RNA, 63 nt, Human
gagugcagaugccagccccaguccuuggcccacggaccagggcacaggagucugaagccacuc

SEQ ID NO: 4176474 - RNA, 103 nt, Human
gagugcauuaguuacucgguccaauaucauucuaauucuccucguaguucauugaauuugagccuguuaggagauaaaauguaucuuuagcuacuauguacuu

SEQ ID NO: 4176475 - RNA, 67 nt, Human
gagugccucuucugugcuuggaaaaugguuagauccugagcguggucucccacagaaagaaguauuc

SEQ ID NO: 4176476 - RNA, 61 nt, Human
gagugcguguuuggggaugugggugggucuugccuggucucucaaacccagaugcucauuc

SEQ ID NO: 4176477 - RNA, 99 nt, Human
gagugcugagaagaaucaggaguaaguuauaaguauuuauuuuuaaacaaguuauauaaauauuugcaagcauuuuuccgguuccuuugauagugacuu

SEQ ID NO: 4176478 - RNA, 102 nt, Human
gagugcuuauccgucagaucucugcuucauguuuggaguuugcucacuuaacacaucagaaguggcuuuguuccguauggcagcaaguucugcagaagccuc

SEQ ID NO: 4176479 - RNA, 78 nt, Human
gagugcuucugguucuaagcaguuuuucuuguauuaauuucgaguuaauuagguuagauuacugugagguaggcacuc

SEQ ID NO: 4176480 - RNA, 80 nt, Human
gaguggaagccugagguucccgugacuuccuuucucugcucccugaguuguuucacagggcaggccccaggccucuacuc

SEQ ID NO: 4176481 - RNA, 77 nt, Human
gaguggaauggugguguuggugggggagugccuguuuacugguaguaggaguaacucucgucaucauauuccagcuc

SEQ ID NO: 4176482 - RNA, 69 nt, Human
gaguggaccaagggcucuggacagaguggaguggacagcagcuccucugccccuacccuuuggcugcuc

SEQ ID NO: 4176483 - RNA, 56 nt, Human
gcagggucuagaacgcccacaugugcggaacuggggaauagagcuggagacccugc

SEQ ID NO: 4176484 - RNA, 129 nt, Human
gcagggugaaggauggauuugaaaggccagagugauacugaaacagaggcucccugcacuugucuugaagugcuuguuacaagaguagacagccuucuuuagugcccuuuaaaccguaauagaaaaugc

SEQ ID NO: 4176485 - RNA, 56 nt, Human
gcagggugcuuagaaauggaccugccuagagggaggucuggacccuuggccccugc

SEQ ID NO: 4176486 - RNA, 78 nt, Human
gcagggugggguggagcgcagggugcuggcggccugcgugagcgccagcccugcacgcugccuccgccggcgcccagc

SEQ ID NO: 4176487 - RNA, 68 nt, Human
gcaggguugccauggugauggggggugucagggacccgcccuaaccacuuccccuguggcgagccugc

SEQ ID NO: 4176488 - RNA, 57 nt, Human
gcaggguugguguccucugcggccucucuccuuggccuguggacggccacccucugc

SEQ ID NO: 4176489 - RNA, 123 nt, Human
gcagguaagaaauucccccaugguuuuccuguucuuuauguugggaaaagucagauuuucugucacaggcaagaaaucuucuccagacauaaggggauuuaaauuaugacaguuuuuaccugc

SEQ ID NO: 4176490 - RNA, 83 nt, Human
gcaggucgcggggcuguggagccgcgagggcugacggcgcucgccgcaaguuugcagagcggcccccgcagcgcagcggcagc

SEQ ID NO: 4176491 - RNA, 73 nt, Human
gcaggugccaggggaugcacgaaggcgccucggagagaccccuuucuccgggugcccacgugccccuacuugc

SEQ ID NO: 4176492 - RNA, 103 nt, Human
gcaggugcuuucugacugagacugggaaccugugcuaggaggggcucccaucaccuccaggccuugcagguuaacuggaugcccaguauaguuugacauuugc

SEQ ID NO: 4176493 - RNA, 66 nt, Human
gcagguggagcucagcaaaggucuguguggaggcuacacaugggcuuuggugagggaucuccuugu

SEQ ID NO: 4176494 - RNA, 65 nt, Human
gcagguuccuuuuagcuuugcccuaacaggggaucuguacuuggacacugcuauaaaggaucugc

SEQ ID NO: 4176495 - RNA, 69 nt, Human
gcagguucucagaaaggauuugaaauucauuuacuauuuuaagagauucaaagaucuucugaaaucugu

SEQ ID NO: 4176496 - RNA, 66 nt, Human
gcagguuggcgcccaggacgccgccgcuguacuccccggcggccgcguccagggccgccaggccgc

SEQ ID NO: 4176497 - RNA, 80 nt, Human
gcagguuuaaguguagugcuaagggcagccuaacuagauuaacuacugaguuauuguccaggcacauauuuuaaaauugu

SEQ ID NO: 4176498 - RNA, 74 nt, Human
gcagguuuugaaggaggauugaggcgguggggcccagugagaaacuggggaaacuguccaguucuccccacugu

SEQ ID NO: 4176499 - RNA, 85 nt, Human
gcaguaaauguaccuuuguccagauggacaucaggcuucagugccaauauuguaccucuaacauauggacaagaacauuuauggc

SEQ ID NO: 4176500 - RNA, 64 nt, Human
gcaguaaggaggggaaggguuuucugccacgucuguggucucuucauucuucucuuccugcugu

SEQ ID NO: 4176501 - RNA, 59 nt, Human
gcaguaaguccacuauauccuucucugucacauccuuagagaugggcgggggcuucugc

SEQ ID NO: 4176502 - RNA, 65 nt, Human
gcaguagcuauuuagcccagauaaguguuuuacugucugagcugauugagcuaaauguaucuugc

SEQ ID NO: 4176503 - RNA, 70 nt, Human
gcaguaucacguagugacaagaucacagggccaagaacuaggagccugggucuggucacuaagucacugu

SEQ ID NO: 4176504 - RNA, 96 nt, Human
gcaguaucugagguguugaugaaacagcaggaacaucuugccaguggucacuuuuaucucccacuggucuuugcuguugcauuucuuaugugcugc

SEQ ID NO: 4176505 - RNA, 70 nt, Human
gcagucacauagguauacacauaucuuaaaagucacugaagauuugugcauuguacuguaugugaauugc

SEQ ID NO: 4176506 - RNA, 55 nt, Human
gcagucaccaucugacaguuuucauugcuaucaaaaacagucaaauguugauugc

SEQ ID NO: 4176507 - RNA, 99 nt, Human
gcagucagaaggauaggcugcacuguguaacagauaacucgaugaucucaguggcuuuguacaucagugcauauuuuuugcuuaugcuuucugucuagu

SEQ ID NO: 4176508 - RNA, 78 nt, Human
gcagucaguaaaggauggugaaauacaagugugauugauuguaaaagcacuacaauuucgcuucauuuuaaacauugc

SEQ ID NO: 4176509 - RNA, 106 nt, Human
gcagucauguuggccaacucucauuuuagguguaagguauaucagccuccuucagucucaggugcaguccuuauaccuaaaauugagggcuggccaagaugacugc

SEQ ID NO: 4176510 - RNA, 61 nt, Human
gcagucauuuucaaaacauguaauccauuucuuaauuaugcauggagguggaugugacugc

SEQ ID NO: 4176511 - RNA, 60 nt, Human
gcaguccagaguagucgaguauucuguaacaaaauaacaggguuacuuauuuuggauagu

SEQ ID NO: 4176512 - RNA, 56 nt, Human
gcaguccaguggguguuaauuaggugaaccugcaaauaaacaugcauuagaacugc

SEQ ID NO: 4176513 - RNA, 75 nt, Human
gcagucccauaugcaaagcuguggguuagguuuaacuaagaaucaaugugaccuacagaucuuugaauguguugc

SEQ ID NO: 4176514 - RNA, 56 nt, Human
gcaguccuaugucugcaccagagccgccucacgggccuaugggcaggcaaggaagc

SEQ ID NO: 4176515 - RNA, 64 nt, Human
gcaguccugggcacagcccugggggccaggagacgccuccaucagccgugggcccaggcgcugc

SEQ ID NO: 4176516 - RNA, 102 nt, Human
gcaguccugucgcuuuaaacagagcaaggcagcuuucacugcuuuugaaucccgaccgagcggggcacugccgugcuuuguuuucuuugccuuuaagagugc

SEQ ID NO: 4176517 - RNA, 67 nt, Human
gcagucugucucaaguucuugcacucauaucacuaaugaaaagaguuaugaaguuugacacaacugc

SEQ ID NO: 4176518 - RNA, 78 nt, Human
gcagugacacagcuuucugaagagcaucuuacuaacuaggauuaugugugugugcuuuuuuugaaguaguuuuaaugc

SEQ ID NO: 4176519 - RNA, 63 nt, Human
gcagugagcagugagugugcugcaggguuaggagcaggcccucagcauccuccugcucagugc

SEQ ID NO: 4176520 - RNA, 65 nt, Human
gcagugauuuugcucagauaaacguaguguuaaguaagacuuuuuacauugucugaucacauugc

SEQ ID NO: 4176521 - RNA, 58 nt, Human
gcagugcaggacaaaucagugcagcagaugagagauguccacugugguccuucacugc

SEQ ID NO: 4176522 - RNA, 72 nt, Human
gcagugcucuuuuuuaaggaugcaguggugaucuuuuuguucaagugcugcaaauccucagaaaggguuagc

SEQ ID NO: 4176523 - RNA, 98 nt, Human
gcaguggcccagcccugcaaggccccagauggugucccaggcucaggcugugcagucgcagucggggccuggaggcaccaggccuugcaggccacugc

SEQ ID NO: 4176524 - RNA, 92 nt, Human
gcaguggggccaagaguguuucagucuuccuagaucagccacacugccaucaaggucuggagggcaccugaggcaccaagggucccaaaugc

SEQ ID NO: 4176525 - RNA, 73 nt, Human
gcagugguccugccagccagguccagguccccucagacagacccuggaucccagaagcacagggcccaccagc

SEQ ID NO: 4176526 - RNA, 81 nt, Human
gcagugguggguaaaacugcuggcacuuuagcaugaaucaaugcaguggcuccaaaccguagucauuuuauucuucauugc

SEQ ID NO: 4176527 - RNA, 115 nt, Human
gcaguguggggccagagcuacuguccugggcuuuuggccuguuccccaucuuaccauacaugaauugggacacaaaccagaccaggagucaggguuucuuaaggccuuaaagagc

SEQ ID NO: 4176528 - RNA, 71 nt, Human
gcaguguguguaugagccuccagcugggccagggaccaacuuuccaggcccagaugaauucucaucauugc

SEQ ID NO: 4176529 - RNA, 103 nt, Human
gcaguguucgagagagugagcagggggccacagucacagccacagccacagcugcuguuagugagucccugugcccaacaccaccucugcuccuaugcacugu

SEQ ID NO: 4176530 - RNA, 57 nt, Human
gcaguguuuuacagaccagcauuucuagagaaauaugggaguuguuggaaaugcugu

SEQ ID NO: 4176531 - RNA, 121 nt, Human
gcaguuaagggagaaggcuuauuucucuuugugcguuuuaguagguuacauuagucgggaaugcuuacuuugaugaucaaugagcgauaucagagccuggagacccaauuuuuaaaacugc

SEQ ID NO: 4176532 - RNA, 69 nt, Human
gcaguuacauauuuaguagguuaaaaugacuccagcguucggacuuguggauggcuucugaacaacugc

SEQ ID NO: 4176533 - RNA, 56 nt, Human
gcaguuacugucuuuuccuaaauggguacacacuuguguaccaggggcagcacugc

SEQ ID NO: 4176534 - RNA, 75 nt, Human
gcaguuagagagccuuucggagccacgcuguacccagucugguugugcagcugugccugaaaaguacucuuaagc

SEQ ID NO: 4176535 - RNA, 93 nt, Human
gcaguuaggguuggcugucugccaaaaggugcaccugcuggcagcagagccggaagcagcaguucuuuugagaagcagacauuuauuaagugc

SEQ ID NO: 4176536 - RNA, 61 nt, Human
gcaguuaugugaaucauguguuauaagagggggcuuaaaggcaugguuagacaugguuagc

SEQ ID NO: 4176537 - RNA, 63 nt, Human
gcaguucacaagcguaggugcugaagcacauuuugguuuaguauuuaauaacuugucaaaugc

SEQ ID NO: 4176538 - RNA, 87 nt, Human
gcaguucacccaagugcagagacugcuucuuccuucugcucacauuuucuaaccugcagaguuuauuucugacuuggcuaggacugc

SEQ ID NO: 4176539 - RNA, 71 nt, Human
gcaguucaucuuccucccagugccugacggagggcacaggcuugcgggagggcacugggaaugugggcagc

SEQ ID NO: 4176540 - RNA, 74 nt, Human
gcaguuccuccccagagcucugacccaggcauugauaugggcccuggaagguagggcagcugggagggacaugc

SEQ ID NO: 4176541 - RNA, 74 nt, Human
gcaguuccuccccagggcucugacccaggcauugauaugggcccuggaagguagggcagcugggagggacaugc

SEQ ID NO: 4176542 - RNA, 68 nt, Human
gauuucucaacucucaagagaagcuauuauuuccuggagagaagcuauuauaugagagcugagaaguu

SEQ ID NO: 4176543 - RNA, 74 nt, Human
gauuucuggaauuggauccucacuguggugugacagaaccauggucaaguuuaugugugggucuacuagaaguc

SEQ ID NO: 4176544 - RNA, 57 nt, Human
gauuucuguggcuuguacauaugagggcuucucucuuuccuguaaaacccagagguc

SEQ ID NO: 4176545 - RNA, 60 nt, Human
gauuucuucaggagcagaggagcuauuucucauuuagacaaauguuccaaggaaggaauc

SEQ ID NO: 4176546 - RNA, 67 nt, Human
gauuugaaagcaaucagauucagaugucaguugaagcucuagacaucgaagagauuguuuuaugauu

SEQ ID NO: 4176547 - RNA, 62 nt, Human
gcaguuuuauugguugaaaucuggcacagguaccacuggacuaagacugccaguagggcugu

SEQ ID NO: 4176548 - RNA, 70 nt, Human
gcaguuuuuucaauugguuuguaguccucaauaauuauauauuaaauugcugucaaaccaguaagacugc

SEQ ID NO: 4176549 - RNA, 56 nt, Human
gcauaacagcaguccucuucucaugcaucugcugagcccauugggugcuguuaugu

SEQ ID NO: 4176550 - RNA, 94 nt, Human
gcauaacuguauuaggugaaaugagccuuguguguguaaaguguagccuaccauauuccagcagaccaucaaggcucagcuuaaacgaaaaugc

SEQ ID NO: 4176551 - RNA, 69 nt, Human
gcauaaggaguucugggaaagcuaucugaaagauguaagucaagaugguucucagaaacucaacauugc

SEQ ID NO: 4176552 - RNA, 71 nt, Human
gcauaagguuaugauucaggauauggauucuggagccugaauccagucugguaugaauccuagcucuaagu

SEQ ID NO: 4176553 - RNA, 73 nt, Human
gcauaauuagagaauucauguuacuagcacuuauuaaugcuuugccuguaaugugacaucucucaauuauagu

SEQ ID NO: 4176554 - RNA, 69 nt, Human
gcauacaguucuaccaggagagguugauucucuuggauugaacagugucucuccagguaggauaaaugu

SEQ ID NO: 4176555 - RNA, 79 nt, Human
gcauacauacagaacuuuaggauuuucacagguaccuuaugagguaguuguagccuccuugagguugugcaaagugugu

SEQ ID NO: 4176556 - RNA, 97 nt, Human
gcauaccuaggccagcagcacagggcuucugagcaggagugggaggcucagguccucugcccuccccugcucagaacucuggugaagcugaggaagc

SEQ ID NO: 4176557 - RNA, 84 nt, Human
gcauacggcucucuuacaggugagaccuuccacguuaccugcagagcagccaccugggagucacaccugagaaagagcagaagc

SEQ ID NO: 4176558 - RNA, 57 nt, Human
gcauacgggagaaacaucugcucuccucaacuaggauaggugggagccccaguaugc

SEQ ID NO: 4176559 - RNA, 74 nt, Human
gcauacuuuuuguuuaggaugcucuauucugacuccugcgauuuuggcaaggggugcuuucucugagaguaugc

SEQ ID NO: 4176560 - RNA, 78 nt, Human
gcauagaacauccaggcugcgggucucaagucggcacugcugacguuugggacauuagucguggggacuguccugugc

SEQ ID NO: 4176561 - RNA, 57 nt, Human
gcauagacccugauggagugaguaauaugagguugcaaaugguaccaagggucuugc

SEQ ID NO: 4176562 - RNA, 61 nt, Human
gcauagacgucuaccaagggcaguucuuaccuaaaagggagagcuguuuggacaucugagu

SEQ ID NO: 4176563 - RNA, 77 nt, Human
gcauagagccugauacauaguagcaugucauuacauuuuguuuagugaagauauagcuuguguucagaacaauaugc

SEQ ID NO: 4176564 - RNA, 81 nt, Human
gcauagaggacauucuuuucccaacugcuuuaaggugaaugaguccuuggauaguagaggagaggaacaagguguccgagc

SEQ ID NO: 4176565 - RNA, 68 nt, Human
gcauagagugguuaacaguuuagaaacuguuugaaucuugauuuucuuacugugugaccucucuaagc

SEQ ID NO: 4176566 - RNA, 84 nt, Human
gcauagcaaaccuccagucaccuggaugagaaacuuacaaauauguauuguucaacacugagguugcugcaguguuuguuaugc

SEQ ID NO: 4176567 - RNA, 63 nt, Human
gcauagcuucugggagcagaaugguuggguuuaaauuccagcccugcuacucacaagcugugu

SEQ ID NO: 4176568 - RNA, 76 nt, Human
gcauaggcugagaaucaggauucaagaucagcuguaaaccccagacugguaaccaguucugaucccauguugaugu

SEQ ID NO: 4176569 - RNA, 55 nt, Human
gcauagucugaugguuugaaauauaucguguaacuuucuaaacuguuaggcuugc

SEQ ID NO: 4176570 - RNA, 116 nt, Human
gcauauaacauucucgaggaacugaggaagaacuagaaacuaauggauuauuaaggaaauugaugggaugaggguuucuuguucuuucccuuauccuuucuuauguuuaaauaugu

SEQ ID NO: 4176571 - RNA, 68 nt, Human
gcauauaagcucgguggcucaugccuguaaccccacccagcacuacccacucaggagcuuaucuaugc

SEQ ID NO: 4176572 - RNA, 62 nt, Human
gcauauauaaacaauuuccaccucuccugagaaguuccucguuuuagguggacauugugugc

SEQ ID NO: 4176573 - RNA, 73 nt, Human
gcauauaugugugugugugugugugugugcacacuuauauuuuuaaugcauacaucaugcuccauauauuugc

SEQ ID NO: 4176574 - RNA, 59 nt, Human
gcauaucuguuucugaggauacaugauuuccgauuaucuuugucucuggagcagaaugc

SEQ ID NO: 4176575 - RNA, 59 nt, Human
gcauaucuucugacaugaucagguuaaauagaagccuggcauauaaauagaagaugugc

SEQ ID NO: 4176576 - RNA, 56 nt, Human
gcauaugaaauuucuaguucugcuuuugcauguacaggagcgguuuuucauguugc

SEQ ID NO: 4176577 - RNA, 75 nt, Human
gcauauguagaaugugugaauugauuugcagaagucuugaauuccugaaaauaauuucacaagacugccuuaugc

SEQ ID NO: 4176578 - RNA, 130 nt, Human
gcauauugaaaucaccugagaagcauuaaaaagucuugaugcugccuagucagagauucugacuuaauugguccagggaguuggcuggauagugggcuguuuuaaagcuucucaggugacuccagggugc

SEQ ID NO: 4176579 - RNA, 70 nt, Human
gcauauugagcauuagaaguuaauuauauuuccacugagauacccaggaugauaauguucacauauaugu

SEQ ID NO: 4176580 - RNA, 74 nt, Human
gcaucaagaguugcuggauguuuacaugucuaucccccaucaguaagacucaacuaccacaacucuugagaugc

SEQ ID NO: 4176581 - RNA, 77 nt, Human
gcaucaagaugucacugaguuggguuuuauuuuaguuccaaguauuguaucuguuuagcacccagccagcuuggugc

SEQ ID NO: 4176582 - RNA, 69 nt, Human
gcaucacacugauuuucuaaaagaagucacugaucuuacgaucuguuauauuuuguagaguugugaugc

SEQ ID NO: 4176583 - RNA, 63 nt, Human
gcaucacagcacaccugacauguagguaauaucacuuccugcuauucuggauguuguugaugc

SEQ ID NO: 4176584 - RNA, 76 nt, Human
gcaucaccaucucugugaccuucaccugugcauaauugggaugaggugaagguggaacgcagagcaugggauaugc

SEQ ID NO: 4176585 - RNA, 120 nt, Human
gcaucacuuggguacuuguuagaaacgcaaauucucaagguuuaucccaccuuuacuaaaucagaaauucuggagaugggacaaagaaaucuguguuugaacaagcccucucuacgaugu

SEQ ID NO: 4176586 - RNA, 67 nt, Human
gcaucagaggggccagguagugguuaggggcagggacuuugcagccacaugaccugggucuagaugc

SEQ ID NO: 4176587 - RNA, 128 nt, Human
gcaucagagucaccuggguggauuguuagaacucauauugcucgccucauccccaaagugccacuuucgguaggucugaggugggcuuguggauuugcauuuccaacacguucccgggagcaugcugc

SEQ ID NO: 4176588 - RNA, 92 nt, Human
gcaucauaucacuugagagcuuguuagcaggcuccgucccaaacugacuggaucagaaucugcauuuuaacaagaucccaggugauuuaugc

SEQ ID NO: 4176589 - RNA, 80 nt, Human
gcaucaucuugacuuuguagguaauugugucugagaucaggggcacuugccugcagggagacaaauuauaagaaugaagc

SEQ ID NO: 4176590 - RNA, 104 nt, Human
gcaucaugaguaucaucugaaagcuuguuggaaauguagcaucuuccccagauuugcugaaucagaaucugcauuuugaacaagauuccuggugauucaugugc

SEQ ID NO: 4176591 - RNA, 71 nt, Human
gcaucaugcuuccuccaaacuacccucuacuguauucugaagagguuauuugcagauggaauucauagugc

SEQ ID NO: 4176592 - RNA, 80 nt, Human
gcaucauggcugggaggagaguaugauggagacugaauccuccgccaaauauaauucuccaccuuuagugccacuggugu

SEQ ID NO: 4176593 - RNA, 55 nt, Human
gcaucauuugagcaagugacuggagugauccacauuacaaagcuacagauguugc

SEQ ID NO: 4176594 - RNA, 79 nt, Human
gcauccacauuuguucuucacuguuguuagcagaggcgguccuuccagcuucagcgugacaccaguggcgggugugugc

SEQ ID NO: 4176595 - RNA, 79 nt, Human
gcauccagggagguagccucaaaagcagcucuguagucucccaggguggcugcaauggcuaacuucugacuggacacgc

SEQ ID NO: 4176596 - RNA, 59 nt, Human
gcauccagucuuggcuccuggaaggcucauguggccaagagggagagagacugaggugu

SEQ ID NO: 4176597 - RNA, 65 nt, Human
gcauccauuguuuauguguuucucauuccuguuaaacugugagcuccaucaucugcaagggaugc

SEQ ID NO: 4176598 - RNA, 85 nt, Human
gcaucccaaguacagcugggaaucagcuggggagugcugucaagaauucucccuaucaauugauuccaggccaguuugugauugc

SEQ ID NO: 4176599 - RNA, 88 nt, Human
gcauccccgugccucuccuccagugggucccucagguagaaucggggcaggccccacuggacguucagggaggaggcucggaggaugc

SEQ ID NO: 4176600 - RNA, 90 nt, Human
gcaucccuaaucagcucucacguuucacacuucccuugcaaucucuggauuuugugaagaguagacauguggugccccauuacuggaugc

SEQ ID NO: 4176601 - RNA, 65 nt, Human
gcauccuaauucugaaacagugucaaucccugguuuagacugaucuuguuuuagaguuuuaaugu

SEQ ID NO: 4176602 - RNA, 130 nt, Human
gcauccugagagccuuggaagagggaacagauuugaggcacuguccugacagucacccuggugcagucaguggagagcuuccaggauucauaucccuauaacccagggccacacuucucaacccugaugc

SEQ ID NO: 4176603 - RNA, 69 nt, Human
gcauccuuaguguuuucucuugaauccugucuucuccuucauggucucuggaggggacacugcagaugc

SEQ ID NO: 4176604 - RNA, 61 nt, Human
gcauccuuccugcugggccuggcucagaagagaaagucaugucagacccggggaagggagc

SEQ ID NO: 4176605 - RNA, 57 nt, Human
gcauccuuguccguggccguuggugcauuugcuuauauggacaggggcauagguugc

SEQ ID NO: 4176606 - RNA, 62 nt, Human
gcaucuacuacaguguucaacauguacuugaaaagcaugugucaaaugauguagcugggugc

SEQ ID NO: 4176607 - RNA, 86 nt, Human
gcaucuaugcacugcacugaggugaaggggugcuuuuccucaguguccaucagagucuccuuggccucaaugccugcuacagaugu

SEQ ID NO: 4176608 - RNA, 100 nt, Human
gcaucucaagcuuuccguucauuauuuuaauuuaucaaaagguaagaauuaagcuuugaagauaacaguaagguauuguacuacuaagcauaugagaugc

SEQ ID NO: 4176609 - RNA, 102 nt, Human
gcaucucacauuagccuccugccucuucauuugugagacaguugauaguguuugucucuuaauucagaggcaguuauagcccccguuaaaugugaaaaaugc

SEQ ID NO: 4176610 - RNA, 78 nt, Human
gcaucucuauugaucaucuugugcugacggcucaauggucagugugugggcaacaguaaggugauuaagaggaggugc

SEQ ID NO: 4176611 - RNA, 56 nt, Human
gcaucucuuacccacgagccaggccagcuggucuguuccacugacuaagagcaugc

SEQ ID NO: 4176612 - RNA, 58 nt, Human
gcaucugccggacgccucacucagcucaagaccaggagugcaugcgccgcugagaugc

SEQ ID NO: 4176613 - RNA, 66 nt, Human
gcaucuggcauguaucacaucaaggccagagcaguguggcccagcagauggcuaugugcuagaggc

SEQ ID NO: 4176614 - RNA, 71 nt, Human
gcaucuggcuuugcacacacaauaacaaauguauucucaauauacaaucgugugagcaaaugucugugugu

SEQ ID NO: 4176615 - RNA, 66 nt, Human
gcaucugguccacauucucaaggcugguuggagaagccuggagauuauuugguccaaucuugaugc

SEQ ID NO: 4176616 - RNA, 62 nt, Human
gccacugagcucugaugagauuugggguuuauuuuucucagaugucauuugaaguucauggu

SEQ ID NO: 4176617 - RNA, 117 nt, Human
gccacugaugagcagcagccauguuucuguggucucccaugucugugggucucagugagggccacaaggugaggaccaagaaugugagcaagcauggccacugcugccaccgcaggc

SEQ ID NO: 4176618 - RNA, 55 nt, Human
gccacugcaaccuuggcacacaccugacaguguuuaugcuggagguugacagggu

SEQ ID NO: 4176619 - RNA, 61 nt, Human
gccacugcgggagaccuaggcuuuuacacagaggccacauugugauucccgcaggaauggu

SEQ ID NO: 4176620 - RNA, 62 nt, Human
gccacuggcgcugugcagagugugagcuggaaacaucguaguuacuuugucagcuuaguggu

SEQ ID NO: 4176621 - RNA, 87 nt, Human
gccacugggccuugugugucucaucuuccagcagucuagccuguugguguuuauuugguggguuacuuaacaggguucuaagugagc

SEQ ID NO: 4176622 - RNA, 87 nt, Human
gccacuguggguucagcuggcuucucugcagacauuaaagcugauuuggucucuguuuaggaagccagauuucugaucccagucggc

SEQ ID NO: 4176623 - RNA, 78 nt, Human
gccacuuauuggagagucagaaagcagacaggggauccuagugagcugguugccuuuguccuuucucacuguccuggu

SEQ ID NO: 4176624 - RNA, 58 nt, Human
gccacuucugcauugaaugaccugggaagaaaaccaauuuguuuaaaggugaagaggc

SEQ ID NO: 4176625 - RNA, 63 nt, Human
gccacuucuuuaauguauacaaaagacaugaaaaaugucccuuuggucuuaaagaaggcuggc

SEQ ID NO: 4176626 - RNA, 63 nt, Human
gccacuuugagccuuacuguuucucagucugcugaauccauuuaacagggggcugcagagggc

SEQ ID NO: 4176627 - RNA, 63 nt, Human
gccagaaagaggaggaccugggacucaucuagcuuccugguccugaaucucuuucucuugggc

SEQ ID NO: 4176628 - RNA, 55 nt, Human
gccagaaaugcaaauuccagggcccccuuggaacuucagaaucagcauaucuggc

SEQ ID NO: 4176629 - RNA, 69 nt, Human
gccagaagcauuucaaggcuacagaaaccuuagucuaaaacauagucuagcugagcccagaagacuggu

SEQ ID NO: 4176630 - RNA, 63 nt, Human
gccagaagggggaagggauuguguuugggggcugauuaugcugaccuuucaacccuucuuggc

SEQ ID NO: 4176631 - RNA, 127 nt, Human
gccagaaguccagggucaaggcuuuagcaggguuggcuccuccuggggcucugagcgagacaugcccaugcugcucuccuugcuccugguggccacuugcgguccuuggcaaaccuuggcuucuggc

SEQ ID NO: 4176632 - RNA, 80 nt, Human
gccagacacagcugggcauaugugcagcccggccacaggguggccacuuggcaugugugccagcaguuaagcccucuggu

SEQ ID NO: 4176633 - RNA, 71 nt, Human
gccagagaauccggagaguccauuggauuugcaaaagcaguggcccauggcucuuggggucuucucugagc

SEQ ID NO: 4176634 - RNA, 101 nt, Human
gccagagagagagagagugaaacuuuuaugcccaacgguguuuggaugagcaagauaauuacacccuuguccauagcagaugcucuguucuucgcuuuggc

SEQ ID NO: 4176635 - RNA, 69 nt, Human
gccagagaguuuaauucagagcugaauaacuggaagaaagaacucagcacugaaucuggauuugcuggu

SEQ ID NO: 4176636 - RNA, 60 nt, Human
gccagagauucugguuagguguauuucacauagaaagcuaccuuggcagaauugaauggu

SEQ ID NO: 4176637 - RNA, 61 nt, Human
gccagaggacucugggcguguauggggaguagguaucccuggguacgcagggcuccucugc

SEQ ID NO: 4176638 - RNA, 62 nt, Human
gccagaggaugaggugaacauauuuguaugcucuguggucuacaaauguauuuuauuuuggu

SEQ ID NO: 4176639 - RNA, 59 nt, Human
gccagaggcagggggagaaagaugaugucucaugaugccagcgcuuccucuucacuggc

SEQ ID NO: 4176640 - RNA, 73 nt, Human
gaucugcacucugagaggcuuggguccaaguuugacucagcuauucuaucuuagagaaucugcugugcagauu

SEQ ID NO: 4176641 - RNA, 60 nt, Human
gaucugccagugggaagaauacauuuugaagaggcuucagugucuuuccauggcuggauc

SEQ ID NO: 4176642 - RNA, 61 nt, Human
gaucuggauucaagucccuguuuucagcuccuugaaaauuguaggaacugaaucaaguauc

SEQ ID NO: 4176643 - RNA, 59 nt, Human
gaucugucuaauauugacagugggguauuagaguuucccacuauuacuguguggcaguc

SEQ ID NO: 4176644 - RNA, 66 nt, Human
gaucuuacugcucuugguugaguugguguccaauagacaguuucagagguuagagcagugggaguc

SEQ ID NO: 4176645 - RNA, 78 nt, Human
gaucuuacuuaauccucaccgcaagcccaugagcugagcacugugcaugcaugcuacugggagguagugggugggauc

SEQ ID NO: 4176646 - RNA, 105 nt, Human
gaucuuacuuaauucucacgacaccccugugggcuaccuaucaaucuccucauuuugcaaaugaagaaacaggggcuuggggaggugagguaucugagcaagauu

SEQ ID NO: 4176647 - RNA, 61 nt, Human
gaucuuagucccauagcccaacuuacaauuaugccaguuaggacacuugagggcuaacauc

SEQ ID NO: 4176648 - RNA, 91 nt, Human
gaucuugaacuguuguaauugaucaaggccuauuuguugccugaguauaaauggaggcaaauaauauacuuugaucuccuuacacaggauc

SEQ ID NO: 4176649 - RNA, 79 nt, Human
gaucuugcugguucugauuuuauuucugacugggcaaaagucauuuacagacaacaacaaagucguugccuagaagauc

SEQ ID NO: 4176650 - RNA, 60 nt, Human
gaucuuggagggucuuccacagccauguaauaccauggucacaugacccuuuccaaaauu

SEQ ID NO: 4176651 - RNA, 55 nt, Human
gaucuuguuucaguuccagagaacauuuaagauccucuggguugaaaucaagauc

SEQ ID NO: 4176652 - RNA, 77 nt, Human
gaucuuuaauggagcuaauuuagcaguagaaaguguuacaaauuuccauuccucaaagguagcccauuagccagguc

SEQ ID NO: 4176653 - RNA, 69 nt, Human
gaucuuugguagcuuccuuaaaugaccuuccauguucccuagaaugucaucuuaaggacugcuauaguc

SEQ ID NO: 4176654 - RNA, 73 nt, Human
gaugaaaaauuugaggggaggaaggaggggcaggagaggggccccuuagaugucuuccuccggauuuuuuguu

SEQ ID NO: 4176655 - RNA, 59 nt, Human
gaugaaauagcaaaggcauuugagauuagaguccaaagggccuugaaugcuauucuguc

SEQ ID NO: 4176656 - RNA, 67 nt, Human
gaugaaggccacuuuguguugagaacuguagggaaacuugauuuucuuacccaaaggguauuuuauc

SEQ ID NO: 4176657 - RNA, 64 nt, Human
gaugaaguggacccuggacagaccccggcaggaaguggaagguuuuucucugggucccuucauc

SEQ ID NO: 4176658 - RNA, 101 nt, Human
gaugaauaguuuuaaacaagaguauccuuucuagccucaaaguuucuauuaauaagcauuaauaagcuuugcuggagagaccucuuugggaaguauuuguu

SEQ ID NO: 4176659 - RNA, 63 nt, Human
gaugaauauccuuuuauccuguaaugaguucccaggugggagcaguuagggauacaaguuauc

SEQ ID NO: 4176660 - RNA, 77 nt, Human
gaugaauuuagucuuuggauguaagauaaagugggccaaagggcuccugcuuugucauuccaaaagaguccuucuuc

SEQ ID NO: 4176661 - RNA, 61 nt, Human
gaugacagcaggauuggauacaucucauggucuuaccauuugagaucccucuguugccauc

SEQ ID NO: 4176662 - RNA, 66 nt, Human
gaugacaugcucauuuccuggguucaucugcugaggagggcuggcaggaccugggcugaugucauc

SEQ ID NO: 4176663 - RNA, 65 nt, Human
gaugaccagcuagaaaugggauugguauccugaaugauauggagauauuuuuugguugguccuuc

SEQ ID NO: 4176664 - RNA, 109 nt, Human
gaugacgcugaugcuauaaaaggcaaugugaggggacagcugaguuauugaagcaagcuuuucugaguucugcccuacaccugaauuuagugguuuaaguagcgcuguc

SEQ ID NO: 4176665 - RNA, 85 nt, Human
gaugacuuaacgcagggcaaccuuaagauucacugcagggcauuuaguacugcuaugcagagggaaaaggugcuccugaggcauu

SEQ ID NO: 4176666 - RNA, 72 nt, Human
gaugagacaacaugauggggaagaacaagaaaaauuucccauggaucucguuuauuuuuaucaugggacauc

SEQ ID NO: 4176667 - RNA, 129 nt, Human
gaugagacaguggcguagcauguuuguguuguggcacaguguaaugccauggcauagcauggucguggugguguggcauggcguggcaucguguggcauagcaugguuguguuguggcauagugagguc

SEQ ID NO: 4176668 - RNA, 73 nt, Human
gaugagaccucuuuauugacuuguuuguccuggugggcuguuucucuaccaggcaacugugaaugggcucauc

SEQ ID NO: 4176669 - RNA, 79 nt, Human
gaugagagcccuccggguggaugggagcaagggaagauuuccuacccaaagcuguaccccaaccuaugagucuucuuuc

SEQ ID NO: 4176670 - RNA, 60 nt, Human
gaugagauaguauguagcaccugaaaacagcagagugucaggugugcggacugcugaguc

SEQ ID NO: 4176671 - RNA, 81 nt, Human
gaugagauccccgugucccucauugacgcugugcccaccagcgccgaaggcaagugugagaagggacuggauaaugccguc

SEQ ID NO: 4176672 - RNA, 69 nt, Human
gaugagccuguccugcugccagagaaaggcuaacagcagagccccagguacuggcagcaggaagccauu

SEQ ID NO: 4176673 - RNA, 93 nt, Human
gaugagcuaucagguugccagugggcccuguucuuaggaucagaagaaucuggcugagccuuuggggcuuucugguaacucugagucuaaauc

SEQ ID NO: 4176674 - RNA, 70 nt, Human
gaugaggaguaagagaguaccaucaucauauucuugucaaaguaaaugaguuggauuuauauucuuuauc

SEQ ID NO: 4176675 - RNA, 80 nt, Human
gaugagggaguuauauguuaggcaaucuuucuuguuauauuauagcuggauucaauuucuugauacaaacucuccuuuuc

SEQ ID NO: 4176676 - RNA, 56 nt, Human
gaugaggucauguuuuacauauuuaccauuauguaauauaacuuuggccuaacauc

SEQ ID NO: 4176677 - RNA, 81 nt, Human
gaugaggucauucugccucagcugauuucagauuuauuuuucaagcuggagccagugugaggcuuuggagauagccuuuuc

SEQ ID NO: 4176678 - RNA, 57 nt, Human
gaugaggugguucaagagccuugucauaaugaaaggcaauucagggccaccgucauu

SEQ ID NO: 4176679 - RNA, 80 nt, Human
gaugagucugccagugagagccugucuggaugucgucagcugugaugggccuacagguugucacggacuuggcggcucuc

SEQ ID NO: 4176680 - RNA, 123 nt, Human
gaugauacauuguaauguuuugggugugauuccuuugcuuuucacacugguuaaaaggauuuuuuuuccgugaucaccaaggacagagggaccagagcccagucuuucaggaaaugauacauu

SEQ ID NO: 4176681 - RNA, 89 nt, Human
gaugauacuguaccuguccugggaaugggaugcagugccuugggugguuucaggagauugacacacuuccaggaccaggcauuuucauu

SEQ ID NO: 4176682 - RNA, 63 nt, Human
gaugauauacaaacuccgaaguuuguaccuucaucaagguaagacuuaggaguuuuagacauc

SEQ ID NO: 4176683 - RNA, 73 nt, Human
gaugaucugugacaaugggucuugaaggcuccuguuuuccacagaggcucuccaggucucaugcacuggucuc

SEQ ID NO: 4176684 - RNA, 112 nt, Human
gaugaugaugaugaugaugaugaugaugauggcagcagcuaacuuaggcagcacuuacuagauguccuacacuuuucuguacuuuuacaucuauauuaucucacuuaucuuc

SEQ ID NO: 4176685 - RNA, 129 nt, Human
gaugaugaugguuuugauaauuucauucacaugugccuggcaagacacuugauccuguauuucugggacaggcaucaauguugggccaaagcaaauggccagguuauaaggguccaucauauucucauc

SEQ ID NO: 4176686 - RNA, 61 nt, Human
gaugaugcacuauguaccaguuccaaggaauacacuaaugaaucaguacauacugcacauc

SEQ ID NO: 4176687 - RNA, 67 nt, Human
gaugaugcauaucuccuaucuccucaaauguauuccaguaugaggaacaugggagaaaugucuuauu

SEQ ID NO: 4176688 - RNA, 55 nt, Human
gaugaugucaugaugaagacgaugaugccauauuguugauaaucguguugucauc

SEQ ID NO: 4176689 - RNA, 71 nt, Human
gaugauguugaguucugcauuaacgaggaaaguaucaccuuaauuauguaauaggguaacauaacaucauu

SEQ ID NO: 4176690 - RNA, 60 nt, Human
gaugauuugaccaaagucuucuaugucuuuagcuagaacaacauggaaggucaaacuauc

SEQ ID NO: 4176691 - RNA, 83 nt, Human
gcaggaugggagcuggggccagggaucuggccugaggcgucccagcuguggcugacuccugguccccacuugcuccucccugc

SEQ ID NO: 4176692 - RNA, 58 nt, Human
gcaggaugggagcuucacuuugucucaguugcucuggcaaagagaagccucaccuugu

SEQ ID NO: 4176693 - RNA, 59 nt, Human
gcaggauguaauccccuuuggagggaccccuaccuuucacagagcauacugcauuuugc

SEQ ID NO: 4176694 - RNA, 86 nt, Human
gcaggauugcauacugagaaaaguaugagcucuggggccagguugcuggacucaucaccuuuucucauuuccuuaagcagugcugu

SEQ ID NO: 4176695 - RNA, 60 nt, Human
gcaggauuggccuuuguaagggaaaauuucuuguucagcucauacauaugccauuccugc

SEQ ID NO: 4176696 - RNA, 88 nt, Human
gcaggcacaaugacaggcacagcuacuugcucacucucuagaagcucuuagaggccuccagcugaguuuugcugucucugugcccugc

SEQ ID NO: 4176697 - RNA, 64 nt, Human
gcaggcagaaaaauguaaaaagagagacuggccuagucucccagccuacaucuuucucccaugc

SEQ ID NO: 4176698 - RNA, 62 nt, Human
gcaggcagaaaaaugugaaaagagagauuggccuagucucccagccuacaucuuucuccugu

SEQ ID NO: 4176699 - RNA, 58 nt, Human
gcaggcaggugagucaaaacagacgaggaagcucugccuugucaccucaucagcuagc

SEQ ID NO: 4176700 - RNA, 108 nt, Human
gcaggcagguguguguguguguguguguguguguguguguguguauguauguauguguggguauguaugucugcauacacauacauuuauacaacucugcuggucugu

SEQ ID NO: 4176701 - RNA, 69 nt, Human
gcaggccacugucuccucuggggaggcuggcucucuuuggcccacccagcucuaggagugguggcaggu

SEQ ID NO: 4176702 - RNA, 56 nt, Human
gcaggccuaagagaaggcauuggcacaauagccccuuacuuccuucaaggaucugc

SEQ ID NO: 4176703 - RNA, 106 nt, Human
gcaggccucagucauccugagaacaugggcaugcacagcgggugucugucaggggaagccccucugggggacuugcuguggucccugggguggcuggugaggccgc

SEQ ID NO: 4176704 - RNA, 74 nt, Human
gcaggccugggagucaucuugucucagacuuguucacauaucauuuagucuuguacauugauuuuaggccaugc

SEQ ID NO: 4176705 - RNA, 67 nt, Human
gcacaguguucacuuaacaauggaugcaugaaaaugacagcauccuggggagcaagagcaaugacgu

SEQ ID NO: 4176706 - RNA, 57 nt, Human
gcacaguuagcuccagucuuagccccacuggaugggguugugugauccugagugugu

SEQ ID NO: 4176707 - RNA, 84 nt, Human
gcacauaaagaauguacaguuuagaaccauagauggcaauuuuaaauggaucaucucaaaauuaugcugcacauguuuaugugu

SEQ ID NO: 4176708 - RNA, 85 nt, Human
gcacauaccucucucagggcucugcaugcacacgcaaacaaacguacauauguguguuugcagguguccacacgggagcaugugc

SEQ ID NO: 4176709 - RNA, 55 nt, Human
gcacauccaaugauuguuuugaccaacaguggucagugacguaaacugcaugugc

SEQ ID NO: 4176710 - RNA, 86 nt, Human
gcacauccccacccucauuuauccaaaagccaguuuauucuagaaaaugugaacuagucuacagugaugaugagguggggguuugc

SEQ ID NO: 4176711 - RNA, 56 nt, Human
gcacaucuagaacaauuacaggugggaaauuucuugccaccuacuuuuggauuugc

SEQ ID NO: 4176712 - RNA, 57 nt, Human
gcacaugucuguucacauguuacaaugacagaauugaggaguugugacagauacugc

SEQ ID NO: 4176713 - RNA, 90 nt, Human
gcacauguggcagggucugggcccugagauguucuucuaguuggggcugggagaacgagcgaggggccaggcccuccucuacacugcugc

SEQ ID NO: 4176714 - RNA, 69 nt, Human
gcacauucauuucacacaacuuccuugucugagcuuaaaucuggaggaggugugaauucugggugcugc

SEQ ID NO: 4176715 - RNA, 65 nt, Human
gcacauucgaacaggagaccuacuccuuaauauuaaggagccaccuaggagcuguuuguuugcgu

SEQ ID NO: 4176716 - RNA, 129 nt, Human
gcacauuuagugguuugcugauagcagguauuuaggaggcugaucugggccaugcuggaaccaccuggccuggcagauggcugcaguauauuuuagagaagucccuaagugugccucaguacacacugc

SEQ ID NO: 4176717 - RNA, 105 nt, Human
gcaccaacaucacuuggaaguuuguuagaaaugcagaauuucagacuccaccuuacugaacuagaaccugcauuuuaacaagaugcccaggugauuuuugugugc

SEQ ID NO: 4176718 - RNA, 96 nt, Human
gcaccacagcagcguuccuccguguguuugcucagcauuccaagcuccuccacucugauacugccuucauauggauaugaaccucugugauugugc

SEQ ID NO: 4176719 - RNA, 99 nt, Human
gcaccagaaugcacagggcacucugcaggaacagaacucacucccaaguaugggaggugaaagguugcugcagagaacagguaccuggcaacugacugc

SEQ ID NO: 4176720 - RNA, 57 nt, Human
gcaccagacccagccuuguaguucgaggagaggaagaaaggcagaguggguuggagc

SEQ ID NO: 4176721 - RNA, 60 nt, Human
gcaccagagugaguggacugucgcuggcugacuguuaaugcugucugccucauccggugc

SEQ ID NO: 4176722 - RNA, 63 nt, Human
gcaccagcuucaccagggccaugguugugaagaagaucgagacccgugaugggaagcuggugu

SEQ ID NO: 4176723 - RNA, 71 nt, Human
gcaccaguagaaugagaaaguguagcaggacaugaacuucuuguuuuaauguuuucuuucucuuucuuugc

SEQ ID NO: 4176724 - RNA, 84 nt, Human
gcaccagugcugaguggcagaucucuggucuggaagccacguucuucucacuauaccauguugccauuuuucagcaacuggugc

SEQ ID NO: 4176725 - RNA, 112 nt, Human
gcacccaauccuucucuuuggaugguaagcaaauuggaugucugugagaagccggcaaauuuuauuaugaacacauaguuugcuacuuaacuauccuuaagaccccgggugc

SEQ ID NO: 4176726 - RNA, 115 nt, Human
gcaccccauggaaguuugaaagauaacucauuuccagcuccggugugcuuauuuccagaacgugagaaguggggagcccgugaggccccuggaguuuccuuguccauggaugugc

SEQ ID NO: 4176727 - RNA, 61 nt, Human
gcacccccacgaggccucuccaaccucagaggcucugaggagguugccagucugggggugc

SEQ ID NO: 4176728 - RNA, 83 nt, Human
gcaccccucugaaaggcaaaauuuaggacaggagcuuaagagaguuuacaggcuuugcuuccuguucuagccucagauucugc

SEQ ID NO: 4176729 - RNA, 82 nt, Human
gcaccgucugucccaucacaguuuuaccauuugguacucucuggagcauugccauggccuagaccugugauuaaauuggugc

SEQ ID NO: 4176730 - RNA, 83 nt, Human
gcaccuaaccuuauggaagacuuccuggaagagaagacauuucugacgaucucuucaaagaauuuuaguaauuuaguaagugc

SEQ ID NO: 4176731 - RNA, 59 nt, Human
gcaccuaggcugcucaccaggcucagaggcggcucugagguuuacugacagccuugugu

SEQ ID NO: 4176732 - RNA, 75 nt, Human
gcaccuauaaaugcaugcugugugccugaaauacacuaaaagguauccguucuuacagcauguuuguguguuugc

SEQ ID NO: 4176733 - RNA, 69 nt, Human
gcaccucacaaggcuguggggagaacugaguaucucuuagcugucucauaugguuuagugguuuagugc

SEQ ID NO: 4176734 - RNA, 59 nt, Human
gcaccugaaccuuaaugcauuccuuaaaaguuuucaaugggagcaugagucaggggugc

SEQ ID NO: 4176735 - RNA, 117 nt, Human
gcaccugccagccggguaagcagaugagcagggacccuacuagcucacaccuggauggagaucaggaacaggaagcagugggagucccugccuuuuguuguccaguuugcauucugc

SEQ ID NO: 4176736 - RNA, 69 nt, Human
gcaccugcuaugugcuuugcacugugcuauguuguuacauguuaugugcaagauacauaagacaugguc

SEQ ID NO: 4176737 - RNA, 76 nt, Human
gcaccuggaguugccugggacugaauaaacacuuagccaacccagugugucuaccagcaccagcauauuccagggc

SEQ ID NO: 4176738 - RNA, 61 nt, Human
gcaccuggggccagcuuaaccaaggggcauacaaauauucccagcauggccuacagugugc

SEQ ID NO: 4176739 - RNA, 60 nt, Human
gcaccugggguacacagcuacaaacacacccagcuacaugcaguugucacaccccugugc

SEQ ID NO: 4176740 - RNA, 62 nt, Human
gcaccugguucuuagguacucauauuuaauuucuaguuggaauuugagaccaagaaaagggc

SEQ ID NO: 4176741 - RNA, 68 nt, Human
gcaccugugaggggcgccugggucccagugcggcgacucugcacuggccuaagcgccucagccggugu

SEQ ID NO: 4176742 - RNA, 75 nt, Human
gcaccuugaggaucaugccugccuugugucaucauaacccagugccuacagcagagccugguacuuacuaggugc

SEQ ID NO: 4176743 - RNA, 58 nt, Human
gcaccuuggcuuucuugguggcuuugguacacccagugucccaaggaugccugggugu

SEQ ID NO: 4176744 - RNA, 78 nt, Human
gcaccuuucccaccccuuccuguuugcauuccucagagucagauuucagcuaaagggauggaaauuaaauaaaggugc

SEQ ID NO: 4176745 - RNA, 57 nt, Human
gcaccuuuuucuaggagaaugugauguacaaaauauucaauuuuuuuuaaaaggugc

SEQ ID NO: 4176746 - RNA, 65 nt, Human
gcacgaagcaaagcugaugagaaggcaaaugccagcuuuugaaaaugaagucuaugcuucugugu

SEQ ID NO: 4176747 - RNA, 60 nt, Human
gcacgaggcaccgcuguuuuguuaaagaccagcaucguuggcaagcaggguccauugugc

SEQ ID NO: 4176748 - RNA, 55 nt, Human
gcacgagugucucacggagucaccugcagugacagggcucagagacaccuguugc

SEQ ID NO: 4176749 - RNA, 98 nt, Human
gcacgauuagcauuugaggugaaguucuguuauacacucaggcuguggcucucugaaagucagugcaucacagaacuuugucucgaaagcuuucuagc

SEQ ID NO: 4176750 - RNA, 66 nt, Human
gcacgcagccuuuucccugcacgcuuuggauguaacagugcaggucauguggcgggacugacgugc

SEQ ID NO: 4176751 - RNA, 124 nt, Human
gcacggaccacaggcaaagaagagagauagucagacccaggauuggggcugccggccuccugucgccccagccccagcuuccuggccuucaagaccagaccccucuuccacuguggucuugugu

SEQ ID NO: 4176752 - RNA, 58 nt, Human
gcacggagaugaacaguguggaaaaaucacuccugggaucuguacacucaucuucugc

SEQ ID NO: 4176753 - RNA, 80 nt, Human
gcacgggcccgcugagccgcgcacugggcauguacagcaccgcgucucccaggcugauguucagcgggugcucgaucagc

SEQ ID NO: 4176754 - RNA, 71 nt, Human
gcacguccaugugaagagaccaccaaacaggcuuugugugagcaacaaggcuguuuauuucaccugggugc

SEQ ID NO: 4176755 - RNA, 75 nt, Human
gcacgugucuguacagaaugcuugguaaggcauggguguaaucaugcguauguguaugucugugugggcaugugu

SEQ ID NO: 4176756 - RNA, 66 nt, Human
gcacuaaaccaacauguaauaaguauuuaauaguuguucauugcuguuguuauuguugguuggugu

SEQ ID NO: 4176757 - RNA, 102 nt, Human
gcacuaaauuuaaauugacauaaguugguagaaaggacucugcuagugccauaauuuaggggaagcuccuaacuacggaaaugugugaauaggaaguauggc

SEQ ID NO: 4176758 - RNA, 85 nt, Human
gcacuaagcacuuccccacuaguggccccaugugguugugugucaucgcugacuaccuguuacaggugaggaagcuggguggugc

SEQ ID NO: 4176759 - RNA, 79 nt, Human
gcacuaguaaaucuaauauguauguguuuucuuuggauuucuuauaaaugaauucuucacauacuuuugguuacugggc

SEQ ID NO: 4176760 - RNA, 62 nt, Human
gcacuaguagaagguuuaugugggcauaauaagagugcccaagguggccuuuuacucugugc

SEQ ID NO: 4176761 - RNA, 56 nt, Human
gcacuauagcugcagcacagagcaaugauagcuaauauuugcugacagcugugugu

SEQ ID NO: 4176762 - RNA, 61 nt, Human
gcacuauguuaaucacuguaguuaagauaauuccuauuauaagacaugguugaucuagugu

SEQ ID NO: 4176763 - RNA, 75 nt, Human
gcacuauuagaauccaugguugcaguggccccugaagcccugcugaaucccauggagucugguuguuaacagugc

SEQ ID NO: 4176764 - RNA, 65 nt, Human
gcacucagagagcugggcuggagcuccaagcggaaaccgcgggagccgagcccagcuaggaaugc

SEQ ID NO: 4176765 - RNA, 66 nt, Human
gauguccugggucaaauccuggucccgccacuauuuucugugugaccuuugagugugacucauauc

SEQ ID NO: 4176766 - RNA, 64 nt, Human
gaugucuauaauaacucaucuuuugggaagcuaacuagcuuccaacaauguguuauuguucauc

SEQ ID NO: 4176767 - RNA, 65 nt, Human
gaugugaacagagcugacuacaaggcagaagaaauuaugccuuaguugcucucucugagaacauc

SEQ ID NO: 4176768 - RNA, 63 nt, Human
gaugugagggcagccccuuuguuggccaaugacaaguuacaugguuuaccccuguccuauauc

SEQ ID NO: 4176769 - RNA, 57 nt, Human
gaugugagggggaagaaugaagcagaaaaagacuguuucaugagauuccuccacauc

SEQ ID NO: 4176770 - RNA, 86 nt, Human
gcaggccuuuaucccugccucaacaaacagaaugguacaaaagugaugcucugugacuucugaggcuagguuagaaaaggccaugc

SEQ ID NO: 4176771 - RNA, 60 nt, Human
gcaggcguguuucacgugccagaaagcacaucuucuguguuaggcacaagcaugcugugc

SEQ ID NO: 4176772 - RNA, 79 nt, Human
gcaggcuaagagcacaguuuugucuugguuuccaguuugugcuccacuacuuaucagcugugugaucuuggccaagugc

SEQ ID NO: 4176773 - RNA, 61 nt, Human
gcaggcuaugaguuucucaccaacgugagaaaucaggaguggaggggaagcucuagccugc

SEQ ID NO: 4176774 - RNA, 81 nt, Human
gcaggcuaugugguuuuaggacugcaucccaccaacucagaugcugaugugggcagccuguccggagaccccacagacugc

SEQ ID NO: 4176775 - RNA, 81 nt, Human
gcaggcugaaggucaggcaggaugcccccacugguggguggcugaggagggucuucugguuggcagcacugucggccuagc

SEQ ID NO: 4176776 - RNA, 58 nt, Human
gcaggcugccaaggcuggggaggacaagguucccucuugaguucuuuaaaagcugggc

SEQ ID NO: 4176777 - RNA, 63 nt, Human
gcaggcugcugagauccuuaggcagcccagaacacaggcggccucgggucccuugcagccugc

SEQ ID NO: 4176778 - RNA, 70 nt, Human
gcaggcuggcaggaggaggugcuguaaugauggcaguagguuacugcagccaccaccucugcugaacugu

SEQ ID NO: 4176779 - RNA, 74 nt, Human
gcaggcugugugacacuggccaucuggguuucuuccccugacucccaaagcccagguccaguucacugcacugu

SEQ ID NO: 4176780 - RNA, 129 nt, Human
gcaggcuuuccuuaauauauaucacagacagcuuucugaguuauggucacagcacaaucagcuaucaaauugaaacuguuucccuccauaaccucagccuugaaguuuuuucuugauaugaaccuuugu

SEQ ID NO: 4176781 - RNA, 97 nt, Human
gcagggaaauggguuaggaggcaauugcaguagucagaggugacagugguuugcacuaguguacaagugguggagauggcucugucucauguccugu

SEQ ID NO: 4176782 - RNA, 71 nt, Human
gcagggaagacauggcugucucuuuuggccacugugguggacaggggcugcuguugucacugccucccugc

SEQ ID NO: 4176783 - RNA, 57 nt, Human
gcagggaagaucuuggagcugcuagaucuuuaagagcaaagucucaaccuuuccugc

SEQ ID NO: 4176784 - RNA, 65 nt, Human
gcagggaagugauggaguucgaucuguguuuuagacagaucgcucacauuuggcuucuagccugu

SEQ ID NO: 4176785 - RNA, 84 nt, Human
gcagggaggagaccacaggcagggagcuggaaaggaugccaggcccagcaaaggggaucucaguuaccuuccaucccgcccugc

SEQ ID NO: 4176786 - RNA, 70 nt, Human
gcagggagggcuugacaagggcuggagccccuggucaaggggcacaaccaguucuaucgggucaccuugu

SEQ ID NO: 4176787 - RNA, 67 nt, Human
gcagggaguguaaauggugcucagcggcaguauaauaucuucaugcccucuuuugcuugcucccugc

SEQ ID NO: 4176788 - RNA, 55 nt, Human
gcagggaguuggagaaggaguauuuuacuccuuuaaacuccuuucaagucccugu

SEQ ID NO: 4176789 - RNA, 73 nt, Human
gcagggcaagggcuggagaggaaagguugucucccauuccucaugggccacccugccuuuaagccuccccugc

SEQ ID NO: 4176790 - RNA, 62 nt, Human
gcagggcagagcugucuaaauggccagaugacugugguucauggcccacggcccugcucugc

SEQ ID NO: 4176791 - RNA, 119 nt, Human
gcagggccaagaccagagugaggcaggagccagccugccuuuguaugacccugagagugaugccuccuucaauuuugcacugaggcacgucaccugccucacccuagucccagcccugc

SEQ ID NO: 4176792 - RNA, 84 nt, Human
gcagggccugucccagcuuuguuccuggugggggcucccugguguggagcuccagcuggggccgaaguggaugacauguguugc

SEQ ID NO: 4176793 - RNA, 79 nt, Human
gcagggcgugcaggagggagggagcagugauuaagagccaaagcucgcaucagaccugucuccucuugccaagucuugc

SEQ ID NO: 4176794 - RNA, 63 nt, Human
gcagggcuauuggaaggagaugcugaauagaaagaaaagaggcacuugacagcccagcccugu

SEQ ID NO: 4176795 - RNA, 67 nt, Human
gcagggcucagguguuaccuccucuagggaccuugcuucuuuugugcccuacagcaccugugccugc

SEQ ID NO: 4176796 - RNA, 76 nt, Human
gcagggcugagucauauagccuucccacggcugcauauugugugaaaggacagggauuaugacugacagccccugc

SEQ ID NO: 4176797 - RNA, 56 nt, Human
gcagggcugagucaugugugccucuugcaagcucugggcaacaucucuguuacugc

SEQ ID NO: 4176798 - RNA, 72 nt, Human
gcagggcugcugaaacuuguuuguacaccucguguugaauuaaaguaugaauucagacucagcaacuccugc

SEQ ID NO: 4176799 - RNA, 56 nt, Human
gcagggcuguuuagugaauagggguacccuaccuuguucuagacuaguagcccugu

SEQ ID NO: 4176800 - RNA, 71 nt, Human
gcagggcuugcagcagcuagacuggcagcacacggggacacagcagcuggacuggcagcagcagggauugc

SEQ ID NO: 4176801 - RNA, 63 nt, Human
gcaggggaguucugagaggaacugugauuguccagaguggaguuucuuugagacuugcccugu

SEQ ID NO: 4176802 - RNA, 103 nt, Human
gcaggggcagaggcacggauaaccacauuugguucauugcaggcgccggggacaucacucaggcccggcaaggagccagucauccagacugcaugugcccugc

SEQ ID NO: 4176803 - RNA, 73 nt, Human
gcaggggcagugguccaggcuacagcuacuguuauggucagaaggcugauucucacugaccucuguugccugu

SEQ ID NO: 4176804 - RNA, 74 nt, Human
gcaggggccugaugggaucgggaucucuccggccucagggacggggaaggccgguccagucagguuuccccugc

SEQ ID NO: 4176805 - RNA, 56 nt, Human
gcaggggcuacucugagcuuccucacagccuggaggucuccggggaguagaccugc

SEQ ID NO: 4176806 - RNA, 73 nt, Human
gcaggggguauuucaguauuauacaacugcugugaccagacuuguauacuggcugaauaucagugcuguuugu

SEQ ID NO: 4176807 - RNA, 58 nt, Human
gcagggggugggaagucuagaauccaucccagagggugauucgauccccaucccgugu

SEQ ID NO: 4176808 - RNA, 68 nt, Human
gcaggggguuggggugccacaaaauuauuaagguguaaucaaauuggcuuccccuaccuuccaauugc

SEQ ID NO: 4176809 - RNA, 71 nt, Human
gcaggguaugggggaggugcuaccgagcucccaagugcucuccaggaacaccacccucccagcaccuaugc

SEQ ID NO: 4176810 - RNA, 69 nt, Human
gcagggugaaggucacauagaaacaguuuuuguucuugugcucuugcuuucuguugugaccucucuugc

SEQ ID NO: 4176811 - RNA, 60 nt, Human
gcagggugacguugcccaccucuggcuccacgcagaugcuggugaaguaacgcgcccugu

SEQ ID NO: 4176812 - RNA, 76 nt, Human
gcaggguggugaugggcaucaaacaugacguggaacauguccccuucauggaggguuuccaucuaaaugcaucugu

SEQ ID NO: 4176813 - RNA, 83 nt, Human
gcaggguucucagcagugauggagggcaggggagagauguaaaggcuuugagacugguucccaucgcuggaaagaggcucugu

SEQ ID NO: 4176814 - RNA, 57 nt, Human
gcagguacaggggcugccaugggguuuuuauauaccugugcaguccaaugugcuagc

SEQ ID NO: 4176815 - RNA, 88 nt, Human
gcaggucacgggggcgacugaucuucucccggguguuugcagggcacgcggcuuguccaugcguauccagggagcgucucuaaacugc

SEQ ID NO: 4176816 - RNA, 58 nt, Human
gcaggucuggcauagagccugcaugcugugcagaucccuacuuguuccccaggccugc

SEQ ID NO: 4176817 - RNA, 69 nt, Human
gcaggucuggugagagaacaguuaaagaaaccugaggacccgcucuuuacucugucuugagccaucugu

SEQ ID NO: 4176818 - RNA, 66 nt, Human
gcaggucuuagagagauguuauggcaacucaguucucuggguccuugcuaacuucuaugagccugc

SEQ ID NO: 4176819 - RNA, 56 nt, Human
gcagguggagcaguagucugguuccuaugagaggcagauguuuaggcaccaucugu

SEQ ID NO: 4176820 - RNA, 69 nt, Human
gcagguggccggcaguuuuagaaauccaagcacacuagggucucagagguuucugcucagcccccuugc

SEQ ID NO: 4176821 - RNA, 60 nt, Human
gcaggugucaguccccaagguggccaucauagcaauggagaccauuggaaugacaagugc

SEQ ID NO: 4176822 - RNA, 55 nt, Human
gcagguguccugggcuggcaguacugcccaccugcugccccaggccugcaccugc

SEQ ID NO: 4176823 - RNA, 93 nt, Human
gcagguguccuuaaguagggagaggcaggcaaccaccugggaagauguuaaaugcacacauccccggguucugucugcccuuggagauucugc

SEQ ID NO: 4176824 - RNA, 59 nt, Human
gcaggugucugacugccuucuucacccuccagucauugaggucugagcagaugaccugc

SEQ ID NO: 4176825 - RNA, 58 nt, Human
gcaggugugcagcccuggaggaggccuauggguauuccagugugugcagauuaagugc

SEQ ID NO: 4176826 - RNA, 85 nt, Human
gcagguguuggagagcaguguguguugccuggggacuguguggacugguaucacccagacagcuugcacugacuccagacccugc

SEQ ID NO: 4176827 - RNA, 104 nt, Human
gcagguuagaagacacaagcaaagacaguuugaguggagaugugaugaggcggucaucaaacaguccuucaaauaaguuguuuuguugguuuuuuacaaucugc

SEQ ID NO: 4176828 - RNA, 118 nt, Human
gcagguugguggcacauguuuuuauugcuguucuuuaaaugaagguccugacacugcaagaugaacucagggaugccucauucagaguuacaccagugcuuuacucccacucuucugu

SEQ ID NO: 4176829 - RNA, 73 nt, Human
gcagguuucugauugcucuguuucugaugcuguccaaaguuacagagccagucagucagaaacucucuccugu

SEQ ID NO: 4176830 - RNA, 88 nt, Human
gcagguuugcucacaugaaauuuuguacugccacagcugacgugggcucgacuccauucacuggcagacagaacucaggcacaucugc

SEQ ID NO: 4176831 - RNA, 71 nt, Human
gcaguaaacuaguuuuagcucuagcaacugaagcagccauucuacaguugagauugggauaguuugccugc

SEQ ID NO: 4176832 - RNA, 63 nt, Human
gcaguaaagcucuuaaugagauuauccaggauugggacuauuuccuuugagaguuucauuugc

SEQ ID NO: 4176833 - RNA, 59 nt, Human
gcaguaaauaggucgauugugacaaaaagguuucagucguugcaauugcuucuugcugc

SEQ ID NO: 4176834 - RNA, 86 nt, Human
gcaguaacaauguccagggccagagcuuggcagcugggggccaccagcggccugcccugcccucuggucucccacauguaggcugu

SEQ ID NO: 4176835 - RNA, 75 nt, Human
gcaguaagaggaaguuuauauuguaauuguaucaugaaaaugagaaccauaauuuacaacugcuuuuaauacugc

SEQ ID NO: 4176836 - RNA, 67 nt, Human
gcaguaagugaggaagucagaaauucuugucuuuccacauguauugucugacuucuuuaguuacugc

SEQ ID NO: 4176837 - RNA, 73 nt, Human
gcaguaaugaggagcccagcaccaucacuuggguaauagagaacaaguggggaaccuggacuucuaccucugc

SEQ ID NO: 4176838 - RNA, 77 nt, Human
gcaguaccaaugcuuggauucuggggugggcuaugaccucauuuggccaguuuccaccuaggcaauuuguguccugc

SEQ ID NO: 4176839 - RNA, 96 nt, Human
gcaguaccucuggcuucuucaggaguccaucuggccugguggaguuuugccuaaguuuccacggccuguaaggacccaggagcagaaacuggcugc

SEQ ID NO: 4176840 - RNA, 73 nt, Human
gcaguacuccuggauuuucuaagacaauuauuauuugaaauagucugucuaauauuauucaggcauguguugu

SEQ ID NO: 4176841 - RNA, 66 nt, Human
gauguggaugaucuuagaugguuuaguagguaaaauaaugaucugccuaagagguccuuccacauc

SEQ ID NO: 4176842 - RNA, 71 nt, Human
gauguggcugcucuaaagcccauuuuuaucuaaauauuuacaacaaaguuggucugcugaacagccguauc

SEQ ID NO: 4176843 - RNA, 96 nt, Human
gauguggugaugcaugucuauaguucuagcuacuugggaggauggccugaacccagggguucuagaccagcuuagacaacauagcaagaccacauc

SEQ ID NO: 4176844 - RNA, 61 nt, Human
gauguguaacaugcugugacauggguguugucaaaagcacuggacaggaauauugcauauu

SEQ ID NO: 4176845 - RNA, 59 nt, Human
gaugugucccuuucaacucagacuuuucauuuuagagaauggggcagauggggcaaauc

SEQ ID NO: 4176846 - RNA, 70 nt, Human
gauguguuccugaggguuccaucucagcaugaccacaugaguacagcaaagaaacccucagucccacguc

SEQ ID NO: 4176847 - RNA, 69 nt, Human
gauguuagaaacaaguuucucuuugggacaauguguauucuccuugcagaguuuuuguuuccuuccauc

SEQ ID NO: 4176848 - RNA, 77 nt, Human
gauguuagaguagaugaagggagagcguagauacaguggcuguagugcucuguucuuccuacauucacauuaaaauc

SEQ ID NO: 4176849 - RNA, 92 nt, Human
gauguuccaggcuccuccuucuucccccagcccugcuccaacaaguuucccaaacuacagcaggcccaagcuggggggaaggagggaacauu

SEQ ID NO: 4176850 - RNA, 89 nt, Human
gauguucgaugccaagaacaugauggccaugugcaacccgcgacauggccgcuaccugaccauggccaccguguuccgggccgcauguc

SEQ ID NO: 4176851 - RNA, 61 nt, Human
gauguucugcuaguggcuuugggauacacacaguucagcagauaaggcacaggagaacauu

SEQ ID NO: 4176852 - RNA, 55 nt, Human
gauguucugggcagagcacaaaaaggcugguagucagguguucucuucagaaauc

SEQ ID NO: 4176853 - RNA, 61 nt, Human
gauguugccuugguuuaugcuagggcacccacccuugccuuugcaccaucagugcaauguu

SEQ ID NO: 4176854 - RNA, 61 nt, Human
gauguugucugagugcuggguggucugucccugugcugugcccugugcucaugggaacauc

SEQ ID NO: 4176855 - RNA, 84 nt, Human
gauguuuacaggagaaacaguguuuuugcuuauauaugugugaaaguguaugaagccagaaucuguuuauaacugguauauauc

SEQ ID NO: 4176856 - RNA, 75 nt, Human
gauguuuaguuauacaguuuugggucugcuauguugauggcuccucuuuuuaaaacuguauacauaaguaauauc

SEQ ID NO: 4176857 - RNA, 91 nt, Human
gauguuugguccccaguguucccucggguucauggggaggauggcuuggagggggcaaacauggagucgggggaacauaugggaggcuguc

SEQ ID NO: 4176858 - RNA, 70 nt, Human
gauuaaaaauaacccaugcugaaagcaggagagugaccuuugcaaaagcaguaaugggauauuuugguuc

SEQ ID NO: 4176859 - RNA, 110 nt, Human
gauuaaagacuuuugaaagauaugcguacuauauacuguguauuuugagugaaaaaaaucagagagcacaauuauuuaugcaguaugacuuuaguuuuauuaguuuuuuc

SEQ ID NO: 4176860 - RNA, 95 nt, Human
gauuaaagcaguaauuccaaugcggguggggguucagauucagaaauacuggaaagcuuuguuuuccucacccugugucuuggaaccgccggauc

SEQ ID NO: 4176861 - RNA, 60 nt, Human
gauuaaaucacgugccuaaagauacacagcuaaguauuggagcugggauuugauuugauu

SEQ ID NO: 4176862 - RNA, 64 nt, Human
gauuaagaguuaucagagagagcuuacuuucaaguaaguuuaacccucugggacuaauggaauu

SEQ ID NO: 4176863 - RNA, 80 nt, Human
gauuaaucucucuagggcauuugcucuuaauaaccaugaaucguuguuucauaagcuugaagccuuggcgagauuccauc

SEQ ID NO: 4176864 - RNA, 106 nt, Human
gauuaauuuauuuuuauuuugcauguuuuaaggcuguggggauuacugcucugaagcagauccaaauauaguucuugaauucuauguagagcugaaagaaucaguc

SEQ ID NO: 4176865 - RNA, 89 nt, Human
gauuacaccucuuuaccucuucgugcuucagaaauuauuuuccuucaaguguucuaagaggcuaaugaagaaugaagucauguuuuauc

SEQ ID NO: 4176866 - RNA, 59 nt, Human
gauuacagccuggcuucccaccagggacuccucugagugagacaccaaaggcuguuguc

SEQ ID NO: 4176867 - RNA, 120 nt, Human
gauuacagguuaucucuguggccagguccaauauggucaggcuccuagacucaucccauugggcuauccauggaucugaacucauaugugucuuggacccacagggaucaauccuuaguc

SEQ ID NO: 4176868 - RNA, 78 nt, Human
gauuacaguauagggcuuauauuguaugagucuuagagaaguuggauucuacauagcugguggccuuguagcuguguc

SEQ ID NO: 4176869 - RNA, 94 nt, Human
gauuacauagaaauguuaaaguuuacagugcacauggguugggccaaagaaagugcuugacacaugugcguagacucuuuauugacugcggauc

SEQ ID NO: 4176870 - RNA, 63 nt, Human
gauuacaugggcuugugaguccuuucaacauggauaggaaaggaaccucuaagccucuguuuc

SEQ ID NO: 4176871 - RNA, 89 nt, Human
gauuacauuucaguuaauugggagugaaagcguugugaucaagagugagaacaaugcguauuuuacuccaaucuagcuuaagccuaauc

SEQ ID NO: 4176872 - RNA, 91 nt, Human
gauuacucaaugcagucucuauuuguuucuuguucuuuuguccuuagggcuugucccacuagaaagguacagauuaugguguuugacaguc

SEQ ID NO: 4176873 - RNA, 79 nt, Human
gauuacugggagaaaauuacugugacuagccaucugguuucccagccaauacuguugauucauagugcuucuaguaguu

SEQ ID NO: 4176874 - RNA, 77 nt, Human
gauuacuguuuacuucaauuauaugccaguuauauauacuccugacugguuuucuugauugaacauagaccuugguc

SEQ ID NO: 4176875 - RNA, 68 nt, Human
gauuacuugguggauaacagcugggauuugggacuucccccaaagauuccuuuauucuccaagugcuc

SEQ ID NO: 4176876 - RNA, 75 nt, Human
gauuacuuuuauugaugcuuggauugggccaucucuggccaguuggcucuuucugacacagcccuaagagugauc

SEQ ID NO: 4176877 - RNA, 61 nt, Human
gauuagaauugaggagugaccuuugcauucaucaauaugaaggucaacacugauuuuaguc

SEQ ID NO: 4176878 - RNA, 64 nt, Human
gauuagagguacaaaccuucacuuccccaccuccacuuagggaaagagguguuugacuucaguc

SEQ ID NO: 4176879 - RNA, 66 nt, Human
gauuagauacaugacucacacauucugcagucguauuuugcaguaaauugagagucauguuugauc

SEQ ID NO: 4176880 - RNA, 67 nt, Human
gauuagcuaaacucucagguucuuuccagcucagauguuuuuggauucugagagucugugcuuaguc

SEQ ID NO: 4176881 - RNA, 61 nt, Human
gauuaggacauggauguauguuuggagggccacuauucaaccugcuacacuuguccuaauu

SEQ ID NO: 4176882 - RNA, 66 nt, Human
gauuaggcuaaaggaacugcugcuauggaaccagcauggugcuaaggaugaggauucugccugauc

SEQ ID NO: 4176883 - RNA, 101 nt, Human
gauuaguaugguaaaaguauauaugcacuuuagaaugaggauuuaauucuaauacuacuucacuucuuccugguagcauauuacuuaccuaugccucaguc

SEQ ID NO: 4176884 - RNA, 74 nt, Human
gauuauaggaaccucugcaaugcaaugucaugaccacugggguuuggcauuggagaugcaagaaccuaaauauc

SEQ ID NO: 4176885 - RNA, 124 nt, Human
gauuauaguuuguaacauguuugaaacagaagcuucgaaagagugauuucucaacuuaguguuaaaugauuuugucugaagucugacucuuuguaagcuuguuuguuucaucaaauuuuaaguc

SEQ ID NO: 4176886 - RNA, 88 nt, Human
gauuauccucgaaauucuguaguuugaauuuaggcauuuucgguuuuaugagagugauugguucgaauguacuaauuugaagguuguu

SEQ ID NO: 4176887 - RNA, 76 nt, Human
gauuaucugaguggggagagguaucauugagaucccaccuaaucacaaaggaucacaaucccucucucugauauuu

SEQ ID NO: 4176888 - RNA, 60 nt, Human
gauuauggcugcagaucaagggcaggcauuuaugccuccucccaguuuauagcagugauc

SEQ ID NO: 4176889 - RNA, 69 nt, Human
gauuaugggcuucugaaccaggcccuggauauggcuauguacauauuuccuuucuagaagccuaaauuc

SEQ ID NO: 4176890 - RNA, 93 nt, Human
gauuauuaacuaaauauuuguuuugugcauuuacaacauggaguugcugcuuuaacacuauuugaaaguguacaaaaacugucagugauaauu

SEQ ID NO: 4176891 - RNA, 69 nt, Human
gauuauuccaggcacagaaggaggguugauucugccauuuucuugcuguuuucuuguccugguauaauu

SEQ ID NO: 4176892 - RNA, 78 nt, Human
gauuauugaacagaaaccaucagagugccuucuuauaaaauaauugaccacucagaugcaugguucuguuuagaaauc

SEQ ID NO: 4176893 - RNA, 124 nt, Human
gauuauuucuaggccuuccuguagucucuaaagcuguuaucuaaguguagacuaaaagaggucaaugacuuggccuucuauauuccagauacagauuaggaggugccggaggcuuagcauaauu

SEQ ID NO: 4176894 - RNA, 56 nt, Human
gauucaaaguuaaugaagaugccucauuucguugguuucuucgaugauuuuguguc

SEQ ID NO: 4176895 - RNA, 72 nt, Human
gauucaaguaaaguagcgccuaacuaaugugggguuucuuuucaaauuauuuacugcuauuguucuugauuc

SEQ ID NO: 4176896 - RNA, 78 nt, Human
gauucaaguucccugggggcucauauauaggaauggucauaccccuaaucugucugugaccucuuuggagccugguuu

SEQ ID NO: 4176897 - RNA, 78 nt, Human
gauucacaaauaacaggugcagagacuccgccaccugccuccgugggacaucgcucugucacuuuuauuuacugaauc

SEQ ID NO: 4176898 - RNA, 63 nt, Human
gauucacauuguuaauuuagccauuuugaaauucagaugagugagcaaguugauaauggccuc

SEQ ID NO: 4176899 - RNA, 57 nt, Human
gauucagagguggcagggguguccagcagggcugggugucaggagccaguucuaguc

SEQ ID NO: 4176900 - RNA, 83 nt, Human
gauucaggcuccugaggguccuuguuguacccuaagcaccaaaauugcuaguuacagaucuaggacuguuuuuuccuagaauc

SEQ ID NO: 4176901 - RNA, 61 nt, Human
gauucagggucaccagagaucugcaugaaguuuauauuuagcagcugucguugcccgaauc

SEQ ID NO: 4176902 - RNA, 111 nt, Human
gauucauaagaaagaguaaaaggagguguuugauagcugaaaagaauaggcaagcuuuccuuucugauaauuuugugaaaucacuuccuuuauaugacuuaaaauuggauu

SEQ ID NO: 4176903 - RNA, 76 nt, Human
gauuccaaguccugccagcugcuucccucugagcucacucauggcagcaaaugucuggcuggggcugaguggacuc

SEQ ID NO: 4176904 - RNA, 77 nt, Human
gcaguagggaauuagaggcagugaauggccagguuuuuuuuaagagccucaugcugcaucucugagguccuaucugc

SEQ ID NO: 4176905 - RNA, 65 nt, Human
gcaguaggugaaggccuggggccgauguggggcaccuugucauguaggucugccuuaucugcugc

SEQ ID NO: 4176906 - RNA, 61 nt, Human
gcaguaguccauaaguacucugcagggauaucucaugucagaagcaccuguugacugcugc

SEQ ID NO: 4176907 - RNA, 55 nt, Human
gcaguauaaguggauuauguccuucauagaagggaaguagaaucaguugugcugu

SEQ ID NO: 4176908 - RNA, 63 nt, Human
gcaguauauccauuacuucauaugaugauuucguuuaacuugaaaaaagugauggaugacagc

SEQ ID NO: 4176909 - RNA, 67 nt, Human
gcagucaccugaagacuugaccauggcuagagaaucugauuugaugauggcucaucuacaggacugc

SEQ ID NO: 4176910 - RNA, 76 nt, Human
gcagucagagggaacaggaguuaaccaugggaaguugggaugcuaacagccccaggcucuccacccucugugcugc

SEQ ID NO: 4176911 - RNA, 67 nt, Human
gcagucaggugacgugauugaaauguuagagcugagauucaaacaacucauuuaugcaagcugaagc

SEQ ID NO: 4176912 - RNA, 65 nt, Human
gcagucaguagcugacuucacaacagagacccgacagaagcccuuucugugauaggcugcgacgc

SEQ ID NO: 4176913 - RNA, 59 nt, Human
gcaguccuagggugcucugcagaguucccagacagcuugcagguggcuccagggacugc

SEQ ID NO: 4176914 - RNA, 58 nt, Human
gcaguccuuaugagaugcugccuuccucuuuuuugaaaggcauagaugauaaggaggu

SEQ ID NO: 4176915 - RNA, 55 nt, Human
gcaguccuugcuguguaauaaauauggagucacauuuguucacacacagggcagc

SEQ ID NO: 4176916 - RNA, 92 nt, Human
gcagucgguuagacaaaagggggcagauaugaauuucaccaauugguuuucuuauuguccugcuuuuguuuuguuuuguauuaaaugacugc

SEQ ID NO: 4176917 - RNA, 61 nt, Human
gcagucucucaggauuuaagcucgacucucuucccacacaguuccugucugaggaggcugc

SEQ ID NO: 4176918 - RNA, 73 nt, Human
gcagucugaauucuguguaacucuauccucauucauaccacauuuuggguggcuucggggaauuugagauagc

SEQ ID NO: 4176919 - RNA, 69 nt, Human
gcagucuuauuagguuaacccugcucagugaaagcaagcaggcuuacuuucugauuagauaaaaugugc

SEQ ID NO: 4176920 - RNA, 114 nt, Human
gcagucuuuacgaugacuuucuuguagugucugaugaggucugugugaaaauuuacaguuaaacacauacacacacagagagauuauucauugucccaaucucagaaggacugu

SEQ ID NO: 4176921 - RNA, 70 nt, Human
gcagugaagauggcagguugggauugcauaaccuugaccagcgcuuguccuuccuucccucuucuucugu

SEQ ID NO: 4176922 - RNA, 64 nt, Human
gcagugaagccucggaaccaagcuccaaacacuucugagggccgugucuccaaggcuucccugu

SEQ ID NO: 4176923 - RNA, 85 nt, Human
gcagugacucgggaugggcaggcaagguggcgaguccccugugaugguggcuuucacuggugucugcguucagccuguaacaugc

SEQ ID NO: 4176924 - RNA, 69 nt, Human
gcagugagaugauagcaggagacaaaugaacacaucacccaaccucucugggccuguuuucucaucugc

SEQ ID NO: 4176925 - RNA, 63 nt, Human
gcagugagcagugaguguggugcaggguuaggagcaggcccucagcauccucaugcucagugc

SEQ ID NO: 4176926 - RNA, 62 nt, Human
gcagugagcuaugaucauguuacuacccucuaggcugcagugagucaugaucaugcuauugc

SEQ ID NO: 4176927 - RNA, 62 nt, Human
gcagugauuccagcaucagaagaugugcugguccagccggccccucugcugcugcguccugc

SEQ ID NO: 4176928 - RNA, 72 nt, Human
gcagugauuuguuacagcagugauuucagacuaauacaugcuuucucugagaaugccuuugaacaucacugc

SEQ ID NO: 4176929 - RNA, 72 nt, Human
gcagugcacacuuuaauagcccguauuccacgugaaagcuaugugucuucuguggguuugaacuguuucugc

SEQ ID NO: 4176930 - RNA, 62 nt, Human
gcagugcagugggacagggcgcccuccauucuguucugcccugcccuguccucuugcuuugu

SEQ ID NO: 4176931 - RNA, 89 nt, Human
gcagugccuucaaacacccaggcuauugugcagcguguugcuacugucugugaugccugcgaggcaugggugagaggaggaggcggugc

SEQ ID NO: 4176932 - RNA, 57 nt, Human
gcagugccuugcuucucugucucccugcucaggagacagggcucccagcaggucugu

SEQ ID NO: 4176933 - RNA, 59 nt, Human
gcaguggagagccacaucgauucaccuguguucuugaucuuacaguguucuuccacugc

SEQ ID NO: 4176934 - RNA, 66 nt, Human
gcaguggcaagagccuggucucgggaaccacacagaccucagcucaaauccaggcuccaucacugu

SEQ ID NO: 4176935 - RNA, 57 nt, Human
gcaguggccacauggaggaggaggcccacccggaacucugcccacacuggccacugc

SEQ ID NO: 4176936 - RNA, 85 nt, Human
gcagugggaggaggccuugaggccaggagcugagugagagccaggacucucagagacgcuggguuugggccuuuuccagacgggc

SEQ ID NO: 4176937 - RNA, 59 nt, Human
gcagugggauugggauuggaaccuagguaguuuaguuugggagucacauucuuuacugc

SEQ ID NO: 4176938 - RNA, 100 nt, Human
gcagugggcuacccaggcccugggagcagagaugcaaaaucggccccucgcccuugucuugccuucucugaucuccagggccagaggguggggccagugu

SEQ ID NO: 4176939 - RNA, 70 nt, Human
gcagugguccaguucacacccauguuggucccuggccaccugugcuguguggguguucuggcccagcugc

SEQ ID NO: 4176940 - RNA, 58 nt, Human
gcaguguagacuuuaguugaugauuccgguggggagaccaaagugaaauuuacauugc

SEQ ID NO: 4176941 - RNA, 67 nt, Human
gcaguguauuccugcugaaaaucuuuaacauacuguugaaaaucuuuaguagaggaauauauucugc

SEQ ID NO: 4176942 - RNA, 63 nt, Human
gcaguguguagaguuuaggaaauaaaacucuuuguuuuucugcuucuuucaucuacacguugu

SEQ ID NO: 4176943 - RNA, 62 nt, Human
gcaguguuaccuugggcugguuccuccaccucuaacagcaucuggcccaugguaaaugcugu

SEQ ID NO: 4176944 - RNA, 64 nt, Human
gcaguguucuugcugaggagucugggcaugagcagaugcuccaggccuucugaggacacucugc

SEQ ID NO: 4176945 - RNA, 61 nt, Human
gcaguguucuuguugcuuuuauggagaagaagauuuuuggaaguaauauugggauuacugc

SEQ ID NO: 4176946 - RNA, 57 nt, Human
gcaguguugguuugcucugcagccuuucauuuugcugccgucuuaccaaacagcugc

SEQ ID NO: 4176947 - RNA, 88 nt, Human
gcaguuaacauuauuguauuaauugaaaugaaugcugacagagauuuuguuggcuuuacaacaaauugaauauggauaauguaaccgc

SEQ ID NO: 4176948 - RNA, 69 nt, Human
gcaguuauguauguguuugagaaguguuucuaauguauucgcaacacucagacacagacauacacaugu

SEQ ID NO: 4176949 - RNA, 57 nt, Human
gcaguuccucaaagguuaaauguaaaguuacauauuuacauaugacccagcaacugc

SEQ ID NO: 4176950 - RNA, 70 nt, Human
gcaguuccugugcccuguucuuuccggggcugcccccugcuuuucgggagccagcagggcauggagcugc

SEQ ID NO: 4176951 - RNA, 70 nt, Human
gcaguucgugccuaagcgcaagugcccgucuauuccgugggggcugccugugcccaggcacacacgcugc

SEQ ID NO: 4176952 - RNA, 76 nt, Human
gcaguucuaagaauguaugggugagaaaguugaccucuuuggauuaacacuugaacucuacauguugggucuuugc

SEQ ID NO: 4176953 - RNA, 62 nt, Human
gcaguucucagccaggcggcaggcggagcccagcagcgggugccuguccuuggcugcacugu

SEQ ID NO: 4176954 - RNA, 56 nt, Human
gcaguugcaggauuuguguuguuuaaagcacacacacaaacacagcuuguaucugc

SEQ ID NO: 4176955 - RNA, 70 nt, Human
gcaguuggcugugccugugcucuguaugucuucuccacucuggcauccaggccgcaggggcagccccugc

SEQ ID NO: 4176956 - RNA, 69 nt, Human
gcaguugguagcaggcaagcuuucuccugggugucgccuugaaaaguugcaaaauugcucuucaccugu

SEQ ID NO: 4176957 - RNA, 56 nt, Human
gcaguuguuaaauacaugagccauuuccuauggcaucaaguacuuuugacaagugu

SEQ ID NO: 4176958 - RNA, 61 nt, Human
gcaguuguuaagagccaggacugcugcagcagguaguaaacuccuuuggccuuagagcugu

SEQ ID NO: 4176959 - RNA, 92 nt, Human
gcaguuguuuacugaguacuuguuuugugcugaugcuuauacuaagcaccuuaaagcuugugcuguaguauuuaauccuucaaucuuccugu

SEQ ID NO: 4176960 - RNA, 83 nt, Human
gcaguuguuucacaaggcaguuggacuucacuuugagaagcacugcucuuaaagcuuacuucaauugugccuuaugggucugc

SEQ ID NO: 4176961 - RNA, 130 nt, Human
gcaguuucaggaaagucugccaggcaugagcugagaccuuaagagaugucagcuagaauuagccacugucaguauaucugcuucugggucccacucuucauccugcuuuucaagguuuucaaauauacac

SEQ ID NO: 4176962 - RNA, 67 nt, Human
gcaguuucaggauucugugucugacaauguuagccaaggcuauuugguagaagaauaugaguauugc

SEQ ID NO: 4176963 - RNA, 58 nt, Human
gcaguuucucucaauaagcaucgauugagcagcuauucgacgcuuaacagaggacugc

SEQ ID NO: 4176964 - RNA, 80 nt, Human
gcaguuugacagccucaaaagauacuugcaucuaacugggagcaucuuaguaagaaugcuuucuucagucuacaaacugu

SEQ ID NO: 4176965 - RNA, 83 nt, Human
gcaguuugcaaagugguauaagucugaagaucagaugaaauagcacugguuuaaaagacauuaugcuuaaaggcuuugccugc

SEQ ID NO: 4176966 - RNA, 65 nt, Human
gcaguuugucuugauucagaacacguugcccaaccuucagcgugguuggauuuugggccagcugc

SEQ ID NO: 4176967 - RNA, 87 nt, Human
gcaguuuuaaagucuacuaauuuuauucuauguguuuaaaaaaauugauaugugaauggcaguuggauagcacucuaaaaagcuagc

SEQ ID NO: 4176968 - RNA, 55 nt, Human
gcaguuuuaccugagcugcuggagaauccccagcaaagacucugccaaaaacugc

SEQ ID NO: 4176969 - RNA, 103 nt, Human
gcaguuuucuagaaagugagucaaguauaucuagucauuaggaauuuauguguccuuugcgcuuuguugaacuaauauauaaacucacuuuuagaaaggcugu

SEQ ID NO: 4176970 - RNA, 110 nt, Human
gcaguuuuuaacaguuuaugauuuucacugaauguguguguguguugugugugugugcauacaugcauacguguguuuaaaacaaauuugaagucaacugcagaaaacgc

SEQ ID NO: 4176971 - RNA, 55 nt, Human
gcauaaauuuggccugggcuggcauauuaaagcugagucacauccauuuuugugu

SEQ ID NO: 4176972 - RNA, 77 nt, Human
gcauaacagguuuuucaaggauuaucuugcuaguuacguaaauagcaagagacuuauguggaaaccugugauuuugc

SEQ ID NO: 4176973 - RNA, 114 nt, Human
gcauaacugauuuuuuuuuuaagaagguugaaugacuacuuuuaaaagucuccuaagaguugagaauggaaaauuuccuuggaccauuuuuuaaaagaaaaucuagaagaaugu

SEQ ID NO: 4176974 - RNA, 130 nt, Human
gcauaacuguguaugaguaauggucagagguauuuuacuuacgcaugacuuuggacuugcuagcucuaguucaaauggaugagaagucauguggaagaauaaccuuggcagguacuuguuauaaacaugu

SEQ ID NO: 4176975 - RNA, 90 nt, Human
gauucccaggagaauauaauguucuuguaagaguuuuguaucuuguuuacuaaugaaaagagagaauaugguguauauucuuggggcuuc

SEQ ID NO: 4176976 - RNA, 117 nt, Human
gauucccauuuggcucgacuuccuuucuuuuugcuuucuguugaacagagucugaagaauauagucaagaccucguguucacgcaggacguuuagcuaggagagcaucuuggguguc

SEQ ID NO: 4176977 - RNA, 64 nt, Human
gauucccuggaggcagagcagagcucuugucuuugcaggagcugcagauucugccuuggguauc

SEQ ID NO: 4176978 - RNA, 118 nt, Human
gauuccuucaacuauuuuauucuuuugugauguauauacuuuuguaaguuggcugaaauccuuuguggauugaggugaggguaaauauaggcaaaggaggaaaaugaauuauggaguu

SEQ ID NO: 4176979 - RNA, 75 nt, Human
gauucucauaggagcgcaaacccuauugugaacagagcaugugagguauauagguugcugcuccuuaugagaauc

SEQ ID NO: 4176980 - RNA, 81 nt, Human
gauucuccauguucucucuccuuuugaagugacccuagaagucauauguuaaggauggcagagcugaaagauggaagaauc

SEQ ID NO: 4176981 - RNA, 67 nt, Human
gauucucccuggcucugagcccaccuccagggugacacucaaacuuuaggagugggagagcgagauc

SEQ ID NO: 4176982 - RNA, 115 nt, Human
gauucucuagucacauugccuagucauggucuugugagaguaacaguuaguggauccaggcuuugaacucugcuuuauacagaccuaguaaucuaggcagagacuggauugaauc

SEQ ID NO: 4176983 - RNA, 58 nt, Human
gauucucuuuucucuguuucaauagaucuauccaagcugacucagggaaaggagaauu

SEQ ID NO: 4176984 - RNA, 66 nt, Human
gauucugagccacagagcuauuucucuacuuccucuagaggcugagauguggguuuguucaguguc

SEQ ID NO: 4176985 - RNA, 63 nt, Human
gauucugaugcaaggagccacuauacucugaaaaucacagcuuaauggaacuugcucaaaguu

SEQ ID NO: 4176986 - RNA, 63 nt, Human
gauucugggaaguuggcagccagcugcacuaggagugaguuaugaugucagcuuuccagaauu

SEQ ID NO: 4176987 - RNA, 95 nt, Human
gauucuuauuuucucccauacaaagucuuggguucuaggcugggcgcgguggcucaugccuguaaucccagcacuuugugggaggcaggacgguc

SEQ ID NO: 4176988 - RNA, 79 nt, Human
gauucuuuaaaagucuugggaaauaaacagauugacuuucacuuuacaugguuuauuuaccuaaggaccaaagagaauu

SEQ ID NO: 4176989 - RNA, 56 nt, Human
gcaguccuccugccucagccucccaaagugcuggaauuacaggcaggagucacugc

SEQ ID NO: 4176990 - RNA, 55 nt, Human
gcaguccugggauucuguccuuauuauaaaaggccaugggucuuuaaaggauugu

SEQ ID NO: 4176991 - RNA, 59 nt, Human
gcagucuaaauuggagccgcaggacccaguguucugaguccuggcguccaauuuccugc

SEQ ID NO: 4176992 - RNA, 100 nt, Human
gcagucuagccagggcccgugugccauuacaaugaaguaauaauguauuuauaacacaccuaaccacugauggcuucuauugcuguggcauucccucugc

SEQ ID NO: 4176993 - RNA, 66 nt, Human
gcagucugaccccagaaucuaugcuuuacaccacugucagguagagauaauggggggaaaaagagc

SEQ ID NO: 4176994 - RNA, 56 nt, Human
gcagugaagauuugggcucuggagucaaaauaucuaggaucaaauaaaaucucugc

SEQ ID NO: 4176995 - RNA, 78 nt, Human
gcagugacaucacuccaggguugggcuugggcuggcugugcucagcugagccccuguacccugagugcuucccacugc

SEQ ID NO: 4176996 - RNA, 69 nt, Human
gcagugaccuucgagcugcggguuguuggagcauccuccugccugauacacugcggugcgaggugcugc

SEQ ID NO: 4176997 - RNA, 78 nt, Human
gcagugacugaaccaccccggagcagacggcgggcgcuccacagaggggccuuccugcugcuccgggccgagcgcugc

SEQ ID NO: 4176998 - RNA, 66 nt, Human
gcaauagucucucccacaccauccuauuuccuuggauaugaggcauauugcuggagaugacugugc

SEQ ID NO: 4176999 - RNA, 129 nt, Human
gcaauauacacaagguaauguuucucaaagaguuuccauugaaaugcuaauuccucacagugccccaugaaaaaggaauucugcauguucaguuggguuugagaaaugcugcaucugguauccucucuu

SEQ ID NO: 4177000 - RNA, 59 nt, Human
gcaaucaagacaugcaauugccacuuuaaucuugaagauggugguucauauuuucuugc

SEQ ID NO: 4177001 - RNA, 120 nt, Human
gcaaucagcaucuaugaaucucacuuaacagaacauauuggugauuagccaaugcuaaaacaagugacugucagcauggggcaaugcaugugcuucugcagugaaaauagaucuuauugc

SEQ ID NO: 4177002 - RNA, 66 nt, Human
gcaaucaucuggguuaaugugcucagccaguacauggaugagcuacuuuauuagccaagguacugc

SEQ ID NO: 4177003 - RNA, 81 nt, Human
gcaaucgauuuaggcugguauucacaauauuuaaagagucaccuucugacuuuuaacaaugugugaugcucagaggauugc

SEQ ID NO: 4177004 - RNA, 63 nt, Human
gcaaugaaaaugaggacuccuguaagcaagcaaagcgcgcgcggcugucauuauuuccgaugc

SEQ ID NO: 4177005 - RNA, 60 nt, Human
gcaaugagagagugcuuuuuacaaugauauaguaguuuacuguagccagccucucaaugc

SEQ ID NO: 4177006 - RNA, 62 nt, Human
gcaaugggcaauuugccuacacacuucaugaaucaacauuuauugggugcagugcccacagc

SEQ ID NO: 4177007 - RNA, 77 nt, Human
gcaaugguggcaauucaaagacagcaccaucaacacacugcuuggcuugcccuuccucuggauugccuucauuuugc

SEQ ID NO: 4177008 - RNA, 59 nt, Human
gcaaugucugugcuaaaaacugggaauacaguggucaaaaauuuagacagacauccugc

SEQ ID NO: 4177009 - RNA, 82 nt, Human
gcaaugugguuuccccuugcuacccuugccugccaggugaccuguugugucuccauggcuugcaauggaguggggccaaugc

SEQ ID NO: 4177010 - RNA, 117 nt, Human
gcaauucacauucacugcauucauagcccaaaagaucaaauauauuaugccacaguccaaguguucauuguaauugugugcacauguaugggugugugugugugugugugugugugu

SEQ ID NO: 4177011 - RNA, 73 nt, Human
gcaauucacauugaagaaauuuuaagucaugauggcaaugggaacuugaaacaucuuuaaauguagagcuugc

SEQ ID NO: 4177012 - RNA, 86 nt, Human
gcaauucccacaugucagagggccaucucuaucuucagagaagacacuuugaaauaaggcucuucugaaauuugacauggaaaugu

SEQ ID NO: 4177013 - RNA, 126 nt, Human
gcaauugacagaucacuagauaaaagaguuucugaugcuguguccuagugaaagaaucagguuuuuucaguugauauucggcaagucagugaacuaacggguuaucugaauugcccuugcaauugc

SEQ ID NO: 4177014 - RNA, 76 nt, Human
gcaauugcagggucuuaagugcuuugugucuuucugaaggaaagacacuugagguuuuuaggugcgccugcagugc

SEQ ID NO: 4177015 - RNA, 99 nt, Human
gcaauugccugauagaagugucagggccuggaacugugggcagggcccgaaagccucccuguguccaguuccagguuguggagcauuuggcaaggcugc

SEQ ID NO: 4177016 - RNA, 66 nt, Human
gcaauuuaguuaaugugcacuccuuguaggcccugguuuuggcccgaguguauuuggguagagugu

SEQ ID NO: 4177017 - RNA, 80 nt, Human
gcaauuuuagaggucacagaacagaggguuuuagaauuagaaaugauuuuagauuccauguucuuucauucuuuaauugc

SEQ ID NO: 4177018 - RNA, 66 nt, Human
gcacaaaaaaacuggaagcccucgaaggagaccuaaguucagaucagggcucacacguuuucuggc

SEQ ID NO: 4177019 - RNA, 84 nt, Human
gcacaauguagcauuugacuaaggaaacaacuuguauuuuuccccccucuucuuuagggaauugcuuuguuuucuuguauuggc

SEQ ID NO: 4177020 - RNA, 68 nt, Human
gcacacacaaauaaaaacacaaagcuacguuuuucagguuuuguucuagaucguguuuguggcugugu

SEQ ID NO: 4177021 - RNA, 58 nt, Human
gcacacagggauuuuugaaugggucggaagugagcgagcugcucagaaacuugagugu

SEQ ID NO: 4177022 - RNA, 61 nt, Human
gcacacaugcauguaagaccucuugggcagcugggaggcaguucuuccugcguguucaugc

SEQ ID NO: 4177023 - RNA, 80 nt, Human
gcacacauuucacaguuuaauggcaaggauuuuuaaaagauaacaugugaaaaggcuuuguaaacuguggaguucuaugc

SEQ ID NO: 4177024 - RNA, 90 nt, Human
gcacacgugugugugcacagcauguuccauguguggucagcuugcccucaggcguguuacuuaccugggacagcaaaugcaugugugugu

SEQ ID NO: 4177025 - RNA, 61 nt, Human
gcacagaacccuaucuuucggaacagagucacagaggugcgacagaagcggguuuugcugc

SEQ ID NO: 4177026 - RNA, 96 nt, Human
gcacagacaucuggggaggucaggccugcuccuaccaccuauugcucucagaaaaagcggaggggccugguuggccucuguugaugacaauugugu

SEQ ID NO: 4177027 - RNA, 63 nt, Human
gcacagagagaagaggcugagcuaggcagaacucaggcagggcagccucugacucugcuuugc

SEQ ID NO: 4177028 - RNA, 63 nt, Human
gcacagagcaaggaugggucuauaguauagagccuccauacaucucaucugugcucuccgugu

SEQ ID NO: 4177029 - RNA, 80 nt, Human
gcacagagccggccaaacgcagccuguguuucccaucuauggaugccagcacacaggcagcgucauugcugcucgagugu

SEQ ID NO: 4177030 - RNA, 86 nt, Human
gcacagaggagaaagcacucggcuucauccagggccagaauuaucaagaaaugcugcuuggaggagguggugcuugauucuugagc

SEQ ID NO: 4177031 - RNA, 64 nt, Human
gcacagauagaccuuaugagauuugacuucaauucuagucaaguucauaauuucuuauuugugu

SEQ ID NO: 4177032 - RNA, 70 nt, Human
gcacagccuuggguucucugggggggcccaggaaaccaccacucuccccggagaucccugguuccacugc

SEQ ID NO: 4177033 - RNA, 126 nt, Human
gcacagcgcugugugacuuuugucacuuuucaugauguauaagcacagcugccuuuuuuaggaaucgugagcuggagucgugagcaaaguguugcaggaguagcauuuuucaggagagugaggugc

SEQ ID NO: 4177034 - RNA, 60 nt, Human
gcacagcugccauggcugcacuugccagaugggggcaagagggcugguggcagcugcugc

SEQ ID NO: 4177035 - RNA, 59 nt, Human
gcacaggcacagagggccacugguacucacaugggcuaaagcaauucugcugcuuuugu

SEQ ID NO: 4177036 - RNA, 62 nt, Human
gcacaggugguuagccacgauucgaugggguggcuucauuccagagugugagcuugccgugc

SEQ ID NO: 4177037 - RNA, 78 nt, Human
gcacagugagguccaguaacuuguccaagguccgagagacaggacuggauccagguggucugaccucccaaccugugc

SEQ ID NO: 4177038 - RNA, 91 nt, Human
gcacaguggcaggguuccaauuccuuauggcagugagugugaagacauuucugcauguaggguaauauuuauggcuuugucagcuguuggc

SEQ ID NO: 4177039 - RNA, 88 nt, Human
gcacagugggaaggcggccauuaagcuuuguugcagcagcacuggcugugcuucaaguucuuaauguuuuucucuugccaucugaugu

SEQ ID NO: 4177040 - RNA, 55 nt, Human
gcacaguugugacaaccaucgcaaacaugaguguccuggagucacgcuguugugc

SEQ ID NO: 4177041 - RNA, 56 nt, Human
gcacaguuuuaucuuauacugaugcagacagcaugguugccugagauaagacuggc

SEQ ID NO: 4177042 - RNA, 70 nt, Human
gcacauagaagugccugaccuagccuggagagucagggaaagcuuuccaucgucggugcacuuggauugc

SEQ ID NO: 4177043 - RNA, 71 nt, Human
gcacauccagaugcagaggccuuggcugggaagcgguucucagcucagguagacucagcaucugccugugc

SEQ ID NO: 4177044 - RNA, 75 nt, Human
gcacaugaggaggcaggggcuggcucacccagggcucugaggaccaggcugagcaccugccuuucaccccauggc

SEQ ID NO: 4177045 - RNA, 97 nt, Human
gcacaugauuuuuauuaauauccugauauuucuccuauuaauauugagcauuuagguuucagaaaugaagcaggaguuauuagauaggaauuagugu

SEQ ID NO: 4177046 - RNA, 76 nt, Human
gcacaugcuguuucucaaauuauuucagcuuaaaauguuuaauaugccaaggugccauauuuuggaauagcauguc

SEQ ID NO: 4177047 - RNA, 69 nt, Human
gcacauggaaauguauucaguggaaacuauggguaaacacuauacuacacauugacuauauuuacuagc

SEQ ID NO: 4177048 - RNA, 74 nt, Human
gcacauggacuaauagaguaacacaaacgaauuggcauaauuccuucuccugcuauuguuacuaguucaagugu

SEQ ID NO: 4177049 - RNA, 82 nt, Human
gcacauggcuguguacauccaaaugaauuagaauucgguaccacugagauuucaguuccuuggcuggccacauuccaagugc

SEQ ID NO: 4177050 - RNA, 63 nt, Human
gcacaugguaggcauuugauguucauuuauucacuaaauaugcaucgaguaccuccugugugc

SEQ ID NO: 4177051 - RNA, 67 nt, Human
gcacaugugggcagauacauuugauaugugaacuucugauaccugcaaagucucugcccaucugugc

SEQ ID NO: 4177052 - RNA, 64 nt, Human
gcacauuuauugagcacccguugugcguguguggcaccugccccaacagguguuuaaugauugc

SEQ ID NO: 4177053 - RNA, 99 nt, Human
gcaccaaauuccuugcagcuucaagcagguugacagagcugagacugaaauaaaaacaccaacaggauuaggccuguuccugacuguggaguuuggugc

SEQ ID NO: 4177054 - RNA, 92 nt, Human
gcaccaacauaugugagcucuguaccugcggagaugagauguugucauguauugaucucaacccagagcagaggcuccgcaagugccugugc

SEQ ID NO: 4177055 - RNA, 69 nt, Human
gcaccaagacccggcaagaugaaggcccccugucucucugcagagcugccauccccugcugggcugugc

SEQ ID NO: 4177056 - RNA, 111 nt, Human
gcaccaagccccacuuucagcuucccucucagauuggcagcuguccacuuucuggggucgaagaagagaacagcugcaaauuguuagaggagggguggcagcggggggugu

SEQ ID NO: 4177057 - RNA, 111 nt, Human
gcaccaauaaugccucuuuuuauacugucuuauuuuagcauuaaagguaagacauuauuucucccauaguuaauggcaugucuuugaugcuaggcagaggggccagggugc

SEQ ID NO: 4177058 - RNA, 63 nt, Human
gcaccacacagcugugucuaauuauggcuggaaguucuauuuaaaaagaggccagcugggugu

SEQ ID NO: 4177059 - RNA, 93 nt, Human
gcaccacuggccauagucuacauuguuaucuguaaguguccccuugcaagaaugggagaggcaugcaaacagucuagaguaggugccaggugu

SEQ ID NO: 4177060 - RNA, 71 nt, Human
gcaccacuguacagcagauauaguguuuuuaaugucauggauauuguaccugaaaguaagugaagaagugu

SEQ ID NO: 4177061 - RNA, 86 nt, Human
gcaccagaggucccggacuuucccguugcaauuccgccaucugcuggucggucucaagauagcaggcaagguccgugccucggagc

SEQ ID NO: 4177062 - RNA, 58 nt, Human
gcccaggauggagaauaguggugugaucucagcucacugcuaccuccaccuccugggu

SEQ ID NO: 4177063 - RNA, 91 nt, Human
gcccaggauuaugugcauuucauaugggcauuggcaauauuuuaagugaaugugggcuaugaacauguuaaauuugugaaugaucaagggu

SEQ ID NO: 4177064 - RNA, 99 nt, Human
gcccaggcacugcccguccaucugcuguugcuuccuggcagggcgagcgggccauacaucacuuagccaugccgaggaggcugggccgggcagcugggc

SEQ ID NO: 4177065 - RNA, 129 nt, Human
gcccaggcccguguucaaagaaacgccuugcccagcccgaugcagcccugcccugagcauacgugaaugcucugggcuuaccugcuuccugcugccuggggccaagguguccucacuggcugugcuggc

SEQ ID NO: 4177066 - RNA, 62 nt, Human
gcccaggccucgcagcccucgcuuucuuccuaacaaaguggcugaggcaugcaggccugggc

SEQ ID NO: 4177067 - RNA, 58 nt, Human
gcccaggcuagcguagagugcagcauucauagcuuacuauaacuucgaaguccugggc

SEQ ID NO: 4177068 - RNA, 80 nt, Human
gcccaggcuggagugcaauggcacgaucucggcucgcugcaacuucgcuugccggguucaagccauucuccugccucagc

SEQ ID NO: 4177069 - RNA, 58 nt, Human
gcccaggcuggagugcaguggugcgaucuuggcucacugcaagcucagccucccgggu

SEQ ID NO: 4177070 - RNA, 58 nt, Human
gcccaggcuggagugcaguggugcgauguccgcucacugcaagcuccacccuccgggu

SEQ ID NO: 4177071 - RNA, 58 nt, Human
gcccaggcuggaguucaguggugugaacacagcucacugcaaccuccaccuccugggu

SEQ ID NO: 4177072 - RNA, 81 nt, Human
gcccagggaaggugcggaacagugguguccugggcugcccccuugcccuuucacuuuaaucugacaccuuagcuccugggu

SEQ ID NO: 4177073 - RNA, 59 nt, Human
gcccagggcagggcaagagugaauucuuugcuggauucuucaugcccaggccuuggugc

SEQ ID NO: 4177074 - RNA, 59 nt, Human
gcccaggggcggguaaaaggccuccgggagcgcggggcccggacccagccucugcaggu

SEQ ID NO: 4177075 - RNA, 57 nt, Human
gcccagguggagugcauuggcaugaucucgacucacugcaaccuccgccugcugggu

SEQ ID NO: 4177076 - RNA, 58 nt, Human
gcccagguuggagagcaguggcaagaccuuggcucacugcaaccucugccuccugggc

SEQ ID NO: 4177077 - RNA, 66 nt, Human
gcccagguuucaucugcuccguggccggcacugugcaggcagaggugagccagugagccucugggu

SEQ ID NO: 4177078 - RNA, 61 nt, Human
gcccaguaauagagugccagggauggggaccucuucccuccgagguaagccugugccaggu

SEQ ID NO: 4177079 - RNA, 71 nt, Human
gcccagucaaguuuucagaaauugcgacccaggccaacaaccugacugcaacuucaugagagacccugagc

SEQ ID NO: 4177080 - RNA, 69 nt, Human
gcccagugggaaucaccaauuggaaaaucggcauaagaaugcugauauucuaccugcugaccaaggggc

SEQ ID NO: 4177081 - RNA, 57 nt, Human
gcccagugguaaaagcaggccugcauggggagcccggcucugcuuuuaccacugggu

SEQ ID NO: 4177082 - RNA, 114 nt, Human
gcccauaagacuguuggagaagaggaaaaaaagaucacaugugguugaaaguaaauuugguuuguguuuuuaucuuguaugugucucuucucaucuuucacacuggcuuggggu

SEQ ID NO: 4177083 - RNA, 81 nt, Human
gcccauccccacuuauccccugggccuggcgcuggacacagccauccagcagaggacaggaaagggguagguguggacggc

SEQ ID NO: 4177084 - RNA, 69 nt, Human
gcccaucucugcccuccagccuuugugcagcugcugagcaguucagggagagcgggacggguggugggc

SEQ ID NO: 4177085 - RNA, 66 nt, Human
gcccaugcgcccuggagcagauggacuguggguacacgagccucugaacucuugggcagcaugggc

SEQ ID NO: 4177086 - RNA, 56 nt, Human
gcccauggcagaacugugagcagaacuggacaaguagcacacauuucugacagggc

SEQ ID NO: 4177087 - RNA, 99 nt, Human
gcccauggcuguucacauugaggcuuaacuuggaaagggaggcccauuuuaacucugcaauucgaccuucccugguguuagcccaaugacagugauggc

SEQ ID NO: 4177088 - RNA, 109 nt, Human
gcccauguuggggaacagaucugaaagcauugugaauuguaaguauuuuauguaggaaaguuaaaugcaacaguucauaguuuuauguucugccaacuuaaccaugagc

SEQ ID NO: 4177089 - RNA, 96 nt, Human
gcccauuggaccauguuugaaaccccaggccucccuuuuccagccauccuucccuggguggcagagucugggcuugggcagaaagguucaaggggc

SEQ ID NO: 4177090 - RNA, 109 nt, Human
gcccauugggaauggcuuauccaucucacacagcauuaacugggacagcucagugauguggcuggcaagucagugcugaugauggaucugauggaagcucaaccagggc

SEQ ID NO: 4177091 - RNA, 79 nt, Human
gcccauugugaugcucucuggcuaguccaucggggucuacaugaaagaacccgaguaucuccagggaguuucugugggc

SEQ ID NO: 4177092 - RNA, 110 nt, Human
gcccauuucucauuuuccucugugcucccauggagcugauccaaugguuuuuaagggagcucugagcuuggacaagcucugaagggcauggggcaagacaagaaacgggc

SEQ ID NO: 4177093 - RNA, 84 nt, Human
gccccaaccccccuugauggacagggaccacuguccuggcccaacucagggcuuccuccuuccugcugucauuuggguuggggu

SEQ ID NO: 4177094 - RNA, 129 nt, Human
gccccaacccccugcucuccaucccucgcgucccgccgcgccuuugcccuccgcagccgccggggcugcagggcacggugcgcgugggaggcugcgcgggccaggguaucccaggggguuccggggggc

SEQ ID NO: 4177095 - RNA, 65 nt, Human
gccccacacgauuccuguuuaaacagacauagcagucaacaaagcaggcaucuguggcacaaggc

SEQ ID NO: 4177096 - RNA, 128 nt, Human
gccccaccacuaguuguuuuugugaucuugggcaaguuacuuuaccucuuuagcucucagucuaccuguuaguaaaauggcauuaaagugucugccuccuaaggguuauugugaggauuaagugaggc

SEQ ID NO: 4177097 - RNA, 63 nt, Human
gccccagagcaacacccuuuacaucgacccacacugguccaugcagccaugugcuuauggggc

SEQ ID NO: 4177098 - RNA, 77 nt, Human
gccccagcaccuccucugugcagcuguggguagucauaucaacaaagggagacccagggcagccagcggggaggggc

SEQ ID NO: 4177099 - RNA, 59 nt, Human
gccccaggaguuggagccugcagugagucaugaucguaccacugcacuccagucugggc

SEQ ID NO: 4177100 - RNA, 63 nt, Human
gccccaggcaucccauuaaggagcaugaaggacauugcucuuagcaauaggaggccugagggc

SEQ ID NO: 4177101 - RNA, 90 nt, Human
gccccaggccagagcguguagcaugcgccaccaccagccccgggggcuucucaaugcuggucgcugcuguauaugagcccaucugccggc

SEQ ID NO: 4177102 - RNA, 67 nt, Human
gccccagggacaaagucugugauucugauuauauuuugaacauuaacuucagucuauaucugagggu

SEQ ID NO: 4177103 - RNA, 63 nt, Human
gccccagggcugcugccugggcuggacagcacugccccagccacagcuuccagcuccugucgc

SEQ ID NO: 4177104 - RNA, 69 nt, Human
gccccagugcaaagaaaucagcuuuguuccuucacuggaaaagaugcacguuucucugacuacuguagc

SEQ ID NO: 4177105 - RNA, 68 nt, Human
gccccauaguauuuugcuuuuacagccaacuggacuacuaagaacaguuauaagagcagacuguaggc

SEQ ID NO: 4177106 - RNA, 59 nt, Human
gccccauucugcugaugaggcuaagugaaccacucagcuuccuacagcuagaaacaggc

SEQ ID NO: 4177107 - RNA, 66 nt, Human
gcccccacugcacccaugagcucaagggaggaauuugcuuccccugcagaugagggcagugguggu

SEQ ID NO: 4177108 - RNA, 73 nt, Human
gcccccauccccugaaggagcuggcugucucaguccugggcucgcgcacuucaccccggcagauggagggggc

SEQ ID NO: 4177109 - RNA, 57 nt, Human
gccccccaacaccuguugaccuacuggggaccagagccugcaucaggcuuggggggc

SEQ ID NO: 4177110 - RNA, 56 nt, Human
gcccccgaggaggugaugucgcucagggcgaucacaucucccacuuccuugggggu

SEQ ID NO: 4177111 - RNA, 72 nt, Human
gcccccgcaguaccacaggcugaggccggggccgcucacucuggcggcuuggcugccuuuggauguuggggu

SEQ ID NO: 4177112 - RNA, 120 nt, Human
gcccccgggccagcugucacccgaguggggugggaguggggugacugccugcccagcggucagggcagcagccacccagcugcucauuaacucagaggcagccacuggcuucagggaggc

SEQ ID NO: 4177113 - RNA, 58 nt, Human
gcccccuagugcagagaugguggcaguggccaagcagccuggacuugggcuggggggc

SEQ ID NO: 4177114 - RNA, 62 nt, Human
gcccccucccucccuacgugagcucacccugcaagaggguggggugagggggagaggggugc

SEQ ID NO: 4177115 - RNA, 88 nt, Human
gcccccuccgcucuggccaagcugcagcgccugcgccgggagcggaagcggccggcgggcacuggcggccucggccugggcggcgggc

SEQ ID NO: 4177116 - RNA, 71 nt, Human
gcccccuggcaccaccagacaccaggagggcacugcugcucuuaauugaaagucuuggugcaggugagggc

SEQ ID NO: 4177117 - RNA, 61 nt, Human
gcccccuggucuacuccuuuccccggacuccggagucccuggagaaggggacgcggagggc

SEQ ID NO: 4177118 - RNA, 95 nt, Human
gccccgagccaaucagcuucuauuucauguugaucuuucgagggugaaaaccuacuggagaagagcaugagcaaagccauuguauuugcuggggc

SEQ ID NO: 4177119 - RNA, 76 nt, Human
gccccgcggcccgcagagucaggcgugagcuucgcccuuucugaaagggccuccgccugggcaggcgccggggggc

SEQ ID NO: 4177120 - RNA, 65 nt, Human
gccccgcuccagcggagcacgugcagugagaggcuucagaaacaggugccuuccgcggagcucgc

SEQ ID NO: 4177121 - RNA, 68 nt, Human
gccccggaaggcccagcccguccucgugcugucuccggccggugcucgugcugaggcucuccucgggc

SEQ ID NO: 4177122 - RNA, 69 nt, Human
gccccggcccgugggccagcgggcagucuacucacgugggccuccgcauggcccagcgccgccaagggc

SEQ ID NO: 4177123 - RNA, 68 nt, Human
gccccggggucugucucaaggggaggcagcugcugcggccucccacauugaggacaugcuuggggagc

SEQ ID NO: 4177124 - RNA, 59 nt, Human
gccccguggcgcuggccugugggaucccgggcgcggccugggccagggccagccggggc

SEQ ID NO: 4177125 - RNA, 65 nt, Human
gccccucagccugagucaaggauucuccauaucuguguagagucuuccaggcagccugaggaggc

SEQ ID NO: 4177126 - RNA, 77 nt, Human
gccccucagcugcugagaauugcaggcaaguugcucugccucucugugccuuuguuuucucaucucugaaauggggc

SEQ ID NO: 4177127 - RNA, 55 nt, Human
gccccuccgggcgcgucauagcgcagcugcagccggacgcggucccgagacgggc

SEQ ID NO: 4177128 - RNA, 93 nt, Human
gccccuccugccccagcccacccgcuugccuuggugcucagcccucccauugggagcagguuggggcgagcuggaggcccgggcuggaggggc

SEQ ID NO: 4177129 - RNA, 99 nt, Human
gccccuccugcuucucggucugugugcuuugggaagugacuugugggaagggaguucugaggguauuuccaccagaggaucauagaagaaggaagaggc

SEQ ID NO: 4177130 - RNA, 57 nt, Human
gcagugcaugcaaugcaaaugaauaaagucagugcauuugcauaaggaugcuacugu

SEQ ID NO: 4177131 - RNA, 60 nt, Human
gcagugccgaagguagugguuguaaagagaacuucuggggagacucacaccuuccgcugu

SEQ ID NO: 4177132 - RNA, 66 nt, Human
gcagugcuagggcagagcacuccugaaugacuggaaaucacauggaggcaggcucuagaaggcugc

SEQ ID NO: 4177133 - RNA, 81 nt, Human
gcagugcugcuuacauggucccagucaggcacaagaaaguccugacgguauuuagggagcagcguuucagagcaucauugc

SEQ ID NO: 4177134 - RNA, 98 nt, Human
gcaguggaaguggcugcaagagcaacaguggcaguggugggaccccuuugcccagcguccccugugcccuguguuccugaggcagccgacucugcugc

SEQ ID NO: 4177135 - RNA, 77 nt, Human
gcaguggaggucaaugucuugcugagccaaugugagccuucuguggggccuggcaaagcuagacauucccucucugc

SEQ ID NO: 4177136 - RNA, 72 nt, Human
gcacccuggagacuucuugaggguugggggaagcccccaucuucccugagggauuuucggaaggcagggugc

SEQ ID NO: 4177137 - RNA, 71 nt, Human
gcaccgcuguggcugcagcccagcggcacggccccguggcucccgcuggccaugcacccucagucugucgc

SEQ ID NO: 4177138 - RNA, 67 nt, Human
gcaccuauauaaugugcuccaugagacaguuuuccaucauguaaucaguagugcauugaauaagugc

SEQ ID NO: 4177139 - RNA, 74 nt, Human
gcaccucagaaagcaagaugcauccgucaagagucgcaccuccauggaaggcguguugcuaaugugaaaugugc

SEQ ID NO: 4177140 - RNA, 66 nt, Human
gcaccucaggacuuccaaaacacagcauggcaguugaaaacugucuuggaguuggaaguguggugu

SEQ ID NO: 4177141 - RNA, 67 nt, Human
gcaccucuuucucacuuuguuaguucuggccucacguuaguaacuugaaguugcagaaaguacuugc

SEQ ID NO: 4177142 - RNA, 64 nt, Human
gcaccugcaggagcugugcggugaggggcugguggccucugcacccccggcuccucguuugugc

SEQ ID NO: 4177143 - RNA, 121 nt, Human
gcaccugccccuugaauuguuggauaauugaauagaagcugauaaacuacuucccuauaagccaaaggagggggguagcaaguggccucuguugaagcucccaauacagagggggaggagu

SEQ ID NO: 4177144 - RNA, 80 nt, Human
gcaccuggaggcugccagcugggaacccccuuuaggcgacgucagcgccguugguucucagccugagccgcccccugugc

SEQ ID NO: 4177145 - RNA, 62 nt, Human
gcaccugguacacaccuccaauggguacaacacugacccaggauaaucuguguaucugaugc

SEQ ID NO: 4177146 - RNA, 63 nt, Human
gcaccugucucggccuggcugugucaccucacuuuccuggggugccagcccugacacaggagc

SEQ ID NO: 4177147 - RNA, 64 nt, Human
gcaccuguucuuuuacuucauuggauccuuacaagagucccauguaagaaggagacaggauugc

SEQ ID NO: 4177148 - RNA, 56 nt, Human
gcaccuuccugaauggauuguugugaggauuaacugcacacauacaugggaagugc

SEQ ID NO: 4177149 - RNA, 93 nt, Human
gcaccuuuuucuauagccugggaauaaaucuugucuugaugcugcaauuucaagauucuguucuuuauguaugguaucguagacaaaaggugc

SEQ ID NO: 4177150 - RNA, 66 nt, Human
gcacgccagcuccugcaggccucguuuugaagccgaggucucaacugcagggagcagauggcgugu

SEQ ID NO: 4177151 - RNA, 64 nt, Human
gcacgccuguccccaggagaguccggcgcuucaccuguucccuccauuccaggacgggcucugc

SEQ ID NO: 4177152 - RNA, 80 nt, Human
gcacgcuauagaauuugcacuaaaucugcucagcacaauauccaaaaguuugcagagacuuggagcuaaauugggugugc

SEQ ID NO: 4177153 - RNA, 88 nt, Human
gcacguauucgauaucuaaccugguuaaugguuacaugguuuuauacauauguaaaaauucaucaggcugagcauuuaagaucugugc

SEQ ID NO: 4177154 - RNA, 84 nt, Human
gcacguauuuaguuuuguaagaaacugccaagccucuuuuucagaguggcuggaccauuuugcauucccacuagcaauaugugc

SEQ ID NO: 4177155 - RNA, 76 nt, Human
gcacguguaaccccugaacucgcauaugacuccagcccacaggcacgcucaauguggguucgaguuacacacaugc

SEQ ID NO: 4177156 - RNA, 72 nt, Human
gcacuaaacuuuuaugaagacaggcaguauauuaucacuguuguaugcuaaggccuuaacucauggaggagc

SEQ ID NO: 4177157 - RNA, 58 nt, Human
gcacuaaauguucacaugcaauuuucaagagaagauauacaucuggauauuugugugu

SEQ ID NO: 4177158 - RNA, 77 nt, Human
gcacuaaguguaugacgaagguaguauaugauucacaguagcuauauugaauauugcuuucucagacguuuaguagu

SEQ ID NO: 4177159 - RNA, 92 nt, Human
gcacuaggagagccaggagugucuccacacagcaaagagacacccugaaauuaccucugauuugcuucuuagauauuccucucucucugugu

SEQ ID NO: 4177160 - RNA, 63 nt, Human
gcacuauucaugaaucuacauugugguauuguuuaaaauaacaugaugugaagcaugaacugc

SEQ ID NO: 4177161 - RNA, 80 nt, Human
gcacucacccccacuauauacccaggaaaaaccaugguauugguuaccauugcccccuagugucuguggaggaggagugu

SEQ ID NO: 4177162 - RNA, 88 nt, Human
gcacuccagugccagccucaaugucuauggugcaaauguaaaaaugaacaauuuuucaccauagacacugguccuggcacuggaaugc

SEQ ID NO: 4177163 - RNA, 74 nt, Human
gcacuccccauaagacauguccaggcugugagggggacucagacucgcccauguuucuuuaugucuugguuugc

SEQ ID NO: 4177164 - RNA, 95 nt, Human
gcacucuaagauuuucuacucugagguuuccugaagaccuuuuaucuauuuuacauauauagucugggcuucagaguuagagaguuauggagugu

SEQ ID NO: 4177165 - RNA, 61 nt, Human
gcacucuccuggcugccacaguaggaaucaccuggcugcugaggaggaacccaggagaggc

SEQ ID NO: 4177166 - RNA, 66 nt, Human
gcacucuggcuugguaaaaacuucuauacaguguacaggcuggcagaagccaagaacagacagugc

SEQ ID NO: 4177167 - RNA, 74 nt, Human
gcacucuugucuuguuucuugcauaggaucuccucaugaccagguucuauaaaacucaagagcaauuugagugu

SEQ ID NO: 4177168 - RNA, 78 nt, Human
gcacugaaguuauuuuaccuguuaaaggaaucuaauucuuucaggucacuuuagccagaugugaaggacaacaguugc

SEQ ID NO: 4177169 - RNA, 62 nt, Human
gcacugagcuuuggaggagcagggggcaaugagguggccggugugacgaggacucaaugugc

SEQ ID NO: 4177170 - RNA, 63 nt, Human
gcacugagggccagcccauaaugccaaaggcuuugcagaguccuugcugugcccucgggaugc

SEQ ID NO: 4177171 - RNA, 106 nt, Human
gcacugcucccggagguacucauucaggaaauggaauucuuguguucauaaaaaugaaggcacaggaaucuucauuuuuuaaccagcccucccaggugacagaugc

SEQ ID NO: 4177172 - RNA, 70 nt, Human
gcacugggccugguucgggaagcugacaaucaaacacccugcagcauuugcugaagcaggagccagcugu

SEQ ID NO: 4177173 - RNA, 59 nt, Human
gcacugguuacccugaguggcugcaggcagagcugauggucagcagguccagccagugc

SEQ ID NO: 4177174 - RNA, 92 nt, Human
gcacuguauuuucaacccacucuuacucugaaaacuuucuccuuauaguugagaaguuacaguuaggggugaugacagaagaauauacaugc

SEQ ID NO: 4177175 - RNA, 58 nt, Human
gcacugugcuagagagaacaagaacauuccucuugcucuccagaggcucacagcaugc

SEQ ID NO: 4177176 - RNA, 65 nt, Human
gcacugugcuagguaucagggauaaaccaucaauguagcaaggucccugcccucaaggacagugc

SEQ ID NO: 4177177 - RNA, 67 nt, Human
gcacuguguacagaaagaagggagugaaaauuagacaaaguucuuucuuucaagaaguucacagugc

SEQ ID NO: 4177178 - RNA, 57 nt, Human
gcacuuaagcaaagaaggugacaaugucagcaagucucuuucaagagcuuaaugugc

SEQ ID NO: 4177179 - RNA, 89 nt, Human
gcacuuaggucaucucagggguuccuucuagaggguaaaaccaucccucauuaaaggaaaucaccugcauaaagcccaugccagagugc

SEQ ID NO: 4177180 - RNA, 88 nt, Human
gcacuucaguuagauuccuugaguuuggaucagaaauacaccacgagcuucugcuuaauucaagucugaagaggacuaauaaaagugc

SEQ ID NO: 4177181 - RNA, 93 nt, Human
gcacuuccuuccuaguguacacguguagggguguaugacugagcagauacugcugcaggcagccccucuacuggggccucugggaggcagugc

SEQ ID NO: 4177182 - RNA, 58 nt, Human
gcacuucuugguucuccugggcuguugcagaauugugcucuaaagaacccagaggagu

SEQ ID NO: 4177183 - RNA, 59 nt, Human
gcacuugaaaagaucaggugcaauucaauuaugaagucguaucugacuuuuugaagugu

SEQ ID NO: 4177184 - RNA, 101 nt, Human
gcacuugcuagaaauauuccaaggucagggagcccugugauucuguugugugacacaguaaagcugugcuagacaguccggggcuggcagugggagagugu

SEQ ID NO: 4177185 - RNA, 75 nt, Human
gcacuuggacuggacccgaggaauguuggauuaaaaagccgauucccguuccucuacuccagcuaccccaagggc

SEQ ID NO: 4177186 - RNA, 59 nt, Human
gcacuuggaggugcccacacagaauauaauaucucgugacaggaugucucuccacgugc

SEQ ID NO: 4177187 - RNA, 78 nt, Human
gcacuugucagaggcuguggcaucacaucaggacaacccugaaaccaggucacugagaagaguaacagcaggcaaggc

SEQ ID NO: 4177188 - RNA, 65 nt, Human
gcacuuucagacauuacagcuuuacugaggaacauaacucagauuuuugagaugucuguuugggc

SEQ ID NO: 4177189 - RNA, 84 nt, Human
gcacuuucucugaggauacuucucaugggcucugagcaggcaguccuggacccguggaaaaggggguagcuuuccugagagugu

SEQ ID NO: 4177190 - RNA, 64 nt, Human
gcacuuucugagacaacuuagcccucgagaauuccacauuucuuguuuuguuguccagaguagc

SEQ ID NO: 4177191 - RNA, 90 nt, Human
gcacuuugugaaguaauauguucugaguuuuucacaucuuuuaaauuuauuuuuaaagcuguagaguuacuugcuguucuuucaacaugc

SEQ ID NO: 4177192 - RNA, 67 nt, Human
gcacuuuucaaaugggaaacucagaaacugagaccucccuucagaaccuguccauauuugaaaaugc

SEQ ID NO: 4177193 - RNA, 57 nt, Human
gcagaaacugaggaguuagacuagggauccccaagggcccuuuaagcuuuaguaugc

SEQ ID NO: 4177194 - RNA, 65 nt, Human
gcagaacagcaguuaugguucauuucccucuaguaagagaugguggagauuggcucugugucugu

SEQ ID NO: 4177195 - RNA, 94 nt, Human
gcaucaccugggagcuguuaaaugcagaauuucagguccuaucccaggccuaccaaacuaaauucugcaauuugacaagauccccaagugacgc

SEQ ID NO: 4177196 - RNA, 84 nt, Human
gcaucaccuuucccagaccucaacaaaguuuucuugacgucucuaaugugaccaaagagcuguucagugucgcugaggagaugu

SEQ ID NO: 4177197 - RNA, 130 nt, Human
gcaucagcaucacuggggaacugguuagaaauacaaauguuugggcugcaucccagaccggcugacccagaaacucuggggaugagguccagugaucuguuuucacaagcccuccaggggauucugaugc

SEQ ID NO: 4177198 - RNA, 57 nt, Human
gcaucaguuuggaacauucaggccugagcguucaggacggaugaagccgacuguugc

SEQ ID NO: 4177199 - RNA, 68 nt, Human
gcaucaugaguguguaagggaucaaagaguuccuucugagcucuugaaaauuuacaccugcauggugc

SEQ ID NO: 4177200 - RNA, 125 nt, Human
gcaucaugguucagaagagggauuacaaaugccauguagucagugcaaaugcuauguggucaguccccauagcaaaacccacugcauuaccggaugagauccuugaggacugaaccagaggaagc

SEQ ID NO: 4177201 - RNA, 68 nt, Human
gcaucaugguuuugagaaacagagugccuacacagguuuguuaaugcacucaucugaagcuauggugc

SEQ ID NO: 4177202 - RNA, 60 nt, Human
gcaucauucucaagaacauauguaggguggggcaucaugacauacuuuugagaagggagc

SEQ ID NO: 4177203 - RNA, 73 nt, Human
gcaucauugagaggauugauuuaucuggcgugcuguaaugacugcagauguggaucuguuauucuagaugagc

SEQ ID NO: 4177204 - RNA, 61 nt, Human
gcaucauuuaauuauaggggcugguggguuaacguuccacagcucuguucauagauggugc

SEQ ID NO: 4177205 - RNA, 71 nt, Human
gcaucauuuuucuuucuaucaccuuuccuugaaaauacaucuucagcucuggguaggaggaaucuuggugu

SEQ ID NO: 4177206 - RNA, 57 nt, Human
gcauccaaauguuucauuucuuuuggaaucuguccaugucgagauacaucuggaugu

SEQ ID NO: 4177207 - RNA, 64 nt, Human
gcauccacugugagcaugaacaggacuacaggcuguuaguugugucauuugcugaugugucugc

SEQ ID NO: 4177208 - RNA, 85 nt, Human
gcauccagaucuugguuucuaaguaccauuauccaguaaaggagcuagggcuucuugaagaaaugguugguucuaaggcuugggc

SEQ ID NO: 4177209 - RNA, 74 nt, Human
gcauccaggcugccccucugcgucugccccgcucaccaugaccuugcgcagcuuguaguuccgggcccggaugu

SEQ ID NO: 4177210 - RNA, 56 nt, Human
gcauccauucacucaacuuagauggcauuuccuuugucguuugaguuaauggaugu

SEQ ID NO: 4177211 - RNA, 76 nt, Human
gccacauucaagcucuugacagcuacaucuggccaguggcuacugaacuggacaugcaguucucaaggguaguggu

SEQ ID NO: 4177212 - RNA, 73 nt, Human
gccacauucacagagggggaagcaucacuccugcaggaaggaaaggaagugaguccccugcuugggaaauggu

SEQ ID NO: 4177213 - RNA, 65 nt, Human
gccacauucuauucugcaggacaaggcacuucaaaucuuuuuaccuggaggauaaauguguccgc

SEQ ID NO: 4177214 - RNA, 62 nt, Human
gccaccacacccagccugggugacagagucuuacucugucacccaggcuggagugcaauggc

SEQ ID NO: 4177215 - RNA, 62 nt, Human
gccaccagcuccaccagggcagguggcucacaagccaugacccuuacaggugguguuggggc

SEQ ID NO: 4177216 - RNA, 70 nt, Human
gccacccaugcuguccugccagggauggcauaggaaagucaugccuuggaaggcgguguguugugguggu

SEQ ID NO: 4177217 - RNA, 58 nt, Human
gccacccuggaauagccccgggaggagacauggcccucagaggccuguccaggguggu

SEQ ID NO: 4177218 - RNA, 62 nt, Human
gccaccuccaccuauugccagcccaguuucacgaaaggaaggcugaaaggugggaggauggc

SEQ ID NO: 4177219 - RNA, 74 nt, Human
gccaccugacaggucugaaagccucagucacacauagaccacuggacugugugacuuuucugauaugcgauggc

SEQ ID NO: 4177220 - RNA, 74 nt, Human
gccaccuuuucacccagcgggcgcacacucgggaucugaacucucugauagaugggccaugcuggggagacagc

SEQ ID NO: 4177221 - RNA, 123 nt, Human
gccacgacucagauugcauccaagugagcacuauaucucuuucaucuuuuucuuauggugcagaagcacaagagggugagcagguacacauggugacucuuaagaauucaacucaaaacuggc

SEQ ID NO: 4177222 - RNA, 56 nt, Human
gccacgacuggguucugcagucuccggaaggauuuuaguugacccccaguccuggc

SEQ ID NO: 4177223 - RNA, 79 nt, Human
gccacgcgcauuccugagcagggcucugcagggcgcggcgugcacggcucuggaaccugccaggaugcgcugauguggc

SEQ ID NO: 4177224 - RNA, 64 nt, Human
gccacggccuuggguggccacugcuggguggaucccacuggacaguggcacccacgggcugggc

SEQ ID NO: 4177225 - RNA, 61 nt, Human
gccacguaguuuguaguauuuuguuacauaagcccugacaaauacauacacuguacguggc

SEQ ID NO: 4177226 - RNA, 115 nt, Human
gccacuagggaaaauauucuccaaugauaagcccagcuaguucagagagauauguaaucuuuuucguaaaaucucuggcuaguuccugggauaucagaaauauuuuuuagauggc

SEQ ID NO: 4177227 - RNA, 79 nt, Human
gccacucuacugugagauuuuuaaauaacuugguacauguagcuaagaaggguuuaaaguuuauaguaauaggauuggu

SEQ ID NO: 4177228 - RNA, 81 nt, Human
gccacucuggacccuccugcugagagccccagcugagacacagacccuuggccaaccccaggaauguccagcccugugagc

SEQ ID NO: 4177229 - RNA, 70 nt, Human
gccacugaaggagccgacauuaagaaguuggguaauuuaacuucagagcugugugguuugacggugaugc

SEQ ID NO: 4177230 - RNA, 97 nt, Human
gccacugcuccugcguguaggccuggaucucugggagcagugugcccaauaacugcuccagcaccaagagcuccagcaucugcuccuuggagcaggc

SEQ ID NO: 4177231 - RNA, 87 nt, Human
gccacugcuucaaugauauuauauaucaucugccucaucacugcaugcccugcuggcauguguggucagaugauaucugcagcuggu

SEQ ID NO: 4177232 - RNA, 63 nt, Human
gccacugucucugauaagcucgaggguagcaaccugcucuugugucaccauggauaaaguggc

SEQ ID NO: 4177233 - RNA, 66 nt, Human
gccacuguuauuacuacuauacauuuucuuuuccacuaauguagaacagguuaaugacagauuggc

SEQ ID NO: 4177234 - RNA, 64 nt, Human
gccacuucaccacagucucaucuacgcuguguuagaggguuagcaugugcuguggggauguggu

SEQ ID NO: 4177235 - RNA, 71 nt, Human
gccacuuccaugcccuccuugccuucacugcuuccagcagggcugguguggagaggcuggcauucgguggc

SEQ ID NO: 4177236 - RNA, 101 nt, Human
gccacuuguaguauucagcuggcggcugaccugguaccuuagcagaaauggcugaaggcugggcucagccagcucuuuuugaauacaggcucuuacguggc

SEQ ID NO: 4177237 - RNA, 58 nt, Human
gccagaagugucuaucaagaugucaaauauaauuguacuuuuggugaucauauuuggu

SEQ ID NO: 4177238 - RNA, 65 nt, Human
gccagacagggugauaugcuggcucucgcugaagcugagagcuguguucauucuaccauccuggc

SEQ ID NO: 4177239 - RNA, 86 nt, Human
gccagagaguggaggagcacuugacggggucuuccuuggauagguaacuuuggaaaucagaccccaagggcauuucauauuuuggu

SEQ ID NO: 4177240 - RNA, 84 nt, Human
gccagagaugugagcucucuccuccugcauuaaccauggcaggauaguggcuggagcaggacggggagugguaucaagagaggc

SEQ ID NO: 4177241 - RNA, 57 nt, Human
gccagagcugagugagguucuucauaacacccaagaacgaaugcuucagcucuaggc

SEQ ID NO: 4177242 - RNA, 96 nt, Human
gccagaggcagggcuuggaccccaggcagggccuaacagagcucucguaccagcuauugaugugucuuccuggcuuacccuagcuccugcccuugc

SEQ ID NO: 4177243 - RNA, 85 nt, Human
gccagaggcauuauuuugccauccuaggcagcauuaacaaguuaaaaaaauucuagguuccaggauggcaauaaugaauuuuggu

SEQ ID NO: 4177244 - RNA, 57 nt, Human
gccagaguaacccuuuccucuuaggagagcagggagcuauuucaggguuauuuuggu

SEQ ID NO: 4177245 - RNA, 94 nt, Human
gccagaguugccggaguuuuggcaacuugugucuuccauaauagagcuggggcauugauggaaauggagggugcuagaaccuugugacuuuggc

SEQ ID NO: 4177246 - RNA, 116 nt, Human
gccagauaaaauauagagagccaaguuaaauuugcauuucagauaaacauacuaaaauauuauccaccguuuaucugaaaugcaaauuugacugagcauccuguauuuuuguuugc

SEQ ID NO: 4177247 - RNA, 60 nt, Human
gccagaugccguaaagaugggcaugaacaauaucccuucugucugaauauggcuucuggc

SEQ ID NO: 4177248 - RNA, 69 nt, Human
gccagaugggcuuuagcaaaugacagcagauuauuacaagcuaauucaggugcuaaggcugaucauagc

SEQ ID NO: 4177249 - RNA, 74 nt, Human
gccagauuuaucuucaugaccucuguguuuuagaugaggucucagagauagaggucagaauuuucccucuaggu

SEQ ID NO: 4177250 - RNA, 70 nt, Human
gccagcaaaauuacaaguauuuaagaugcugucagguaacuggggguacauauuugguaauaagugcugc

SEQ ID NO: 4177251 - RNA, 65 nt, Human
gccagcaagccaggucuguggcuuugacaggagcaaacacagcccugagcugcucucugcauggc

SEQ ID NO: 4177252 - RNA, 70 nt, Human
gccagcaaguaucaccaaagccugaaccucacacccaccuucuaagccaugguguguacuuaaacuuggc

SEQ ID NO: 4177253 - RNA, 61 nt, Human
gccagcaggcugcgauugcucauuguguuugguuauaauuagcagcauauucugcgauggc

SEQ ID NO: 4177254 - RNA, 59 nt, Human
gccagcauuccuuggcuccuggcugucuauuugcaucuucaaagccagcaguagcuggu

SEQ ID NO: 4177255 - RNA, 94 nt, Human
gccagcauuggcccaaaggcaugggaugaacuugaucugcuuccuuaggagaaggcacacucgaguguccggugaaggcuaugaugcaaaaggc

SEQ ID NO: 4177256 - RNA, 105 nt, Human
gccagccagccccgcugggaagggcaguggguagcagcugaaguuuuccucgcuuccagcucccacucucacugcugacuaaggugugcggaggcugauguuggc

SEQ ID NO: 4177257 - RNA, 56 nt, Human
gccagccaggaagaaaguaagaacucuaaccuuacuuuguuuuucuucugguuggc

SEQ ID NO: 4177258 - RNA, 82 nt, Human
gccagccccagccccuguuuuuccagucagagccggagcuagaucggcugggcccuggggauaggggugggugggguauggc

SEQ ID NO: 4177259 - RNA, 59 nt, Human
gcagaacauggaaagagaacuagagugaugaaucaaguugaacucaaucuuuguuuugc

SEQ ID NO: 4177260 - RNA, 73 nt, Human
gcagaacuuuucagcaaagaaaugucagugagaggcagauuaaaagggucucuaacuauuucuuucuuuuugc

SEQ ID NO: 4177261 - RNA, 98 nt, Human
gcagaagcagcaucgggccagcuucaugggugugcaaccugugcagucacacaaggucccaggcccagaagggccucauaauugguuugaugcucugc

SEQ ID NO: 4177262 - RNA, 68 nt, Human
gcagaagcuggcuugcaugcuaaggagcuuguccugaguuuccuaacacaguguaagcaagcaucugc

SEQ ID NO: 4177263 - RNA, 74 nt, Human
gcagaagggagcaggagccugccugccagcugugucuccuaaggcagcccuggcugggcuucucuccccucugc

SEQ ID NO: 4177264 - RNA, 55 nt, Human
gcagaagugcuccucagaagaguuggaagaguuucagcucuccugaagcaucugu

SEQ ID NO: 4177265 - RNA, 63 nt, Human
gcagaaguggauucuacaauuuucauagucuuaagagaaaaauguugcuguuucuauuucugc

SEQ ID NO: 4177266 - RNA, 66 nt, Human
gcagaaguggugcugugccacuuaugggccuaagccuugagaagacuuggcagccuccacuuuugc

SEQ ID NO: 4177267 - RNA, 73 nt, Human
gcagaagugugucuggcggcccagugggguccuggcagccccacaguggaauguguugucgggcaaaggcugc

SEQ ID NO: 4177268 - RNA, 104 nt, Human
gcagaauaacugucauuucuaccucacagcauugucacaaggcugcaaugaaguaugcuggugugcuuugugauaugcugugucuaaauuucagucguuagugu

SEQ ID NO: 4177269 - RNA, 55 nt, Human
gcagaauacugagagcugauugaaccaggaagaacaagaagccucaguggccugc

SEQ ID NO: 4177270 - RNA, 58 nt, Human
gcagacacauccacuccuacaggugucugacgaccuuggggguguagcugugauuugc

SEQ ID NO: 4177271 - RNA, 61 nt, Human
gcagacagagucugugaaacuuuuuauacuggucuauuaaauuuucacuaggcuccccugc

SEQ ID NO: 4177272 - RNA, 71 nt, Human
gcagacagugagcugagacuggaagcugaguuuucugacuccuggcccacuccuagcuucuuaauguuugc

SEQ ID NO: 4177273 - RNA, 87 nt, Human
gcagacauuucaguugcagcuucccagcucacucauaaguacguccucuguccgugcuuggggaugggaagcccagcaucucucugc

SEQ ID NO: 4177274 - RNA, 96 nt, Human
gcagaccgaaguuuccccaggccugggaagacuaagugggaggcgcccaccgugcgaagauccucccggcuuccagggaagggaggcugggccugc

SEQ ID NO: 4177275 - RNA, 130 nt, Human
gcagacgccgcacuuguggcgcagguugugcgugagcaggugcauggcgagcgcgggcauggacacguaggccuugccgcacgucgggcauuugcgcgccagcuggcuguccaggcugcggugcgucugc

SEQ ID NO: 4177276 - RNA, 91 nt, Human
gcagacgcucugggaaggcagccaguucagguuucuuuuucuucagggaaaccagaccugucuuuggcugaaagucucucuggugugcugc

SEQ ID NO: 4177277 - RNA, 80 nt, Human
gcagacuacaacaguucaguugagcucaacaaaauguacuaacucacagaauugugagcucaauauggugguuguuaugc

SEQ ID NO: 4177278 - RNA, 97 nt, Human
gcagacuagucuuccguggcaagcagagcgcuccagucuucaguagggagcugcugaauaggcacagagggcaucugccaccuuuagaccagucugc

SEQ ID NO: 4177279 - RNA, 72 nt, Human
gcagacugagugaucagcuuggguccguccaugugggggacggagcagauggaguggucaaauugggucugc

SEQ ID NO: 4177280 - RNA, 62 nt, Human
gcagacuguacacuggacuuugucuuuaugcauacaaauggccuuuuccagugcuugguugc

SEQ ID NO: 4177281 - RNA, 61 nt, Human
gcagagaggagcuuucccaggugcaagcccucagaaaagccugggagccaagccucugugu

SEQ ID NO: 4177282 - RNA, 81 nt, Human
gcagagagugagcagcaacgcggcccuacugcuuuggagugagagucgaaagcgauggaaccugccugcaccacauccugc

SEQ ID NO: 4177283 - RNA, 74 nt, Human
gcagagauaugaacgugaccgugugccagaagaaggaagggcccagcuggccagauguuacguccaauccaugc

SEQ ID NO: 4177284 - RNA, 60 nt, Human
gcagagauccuugcuggaugacaguugauuugguggcuguugcuaggauagaauuucugc

SEQ ID NO: 4177285 - RNA, 55 nt, Human
cugcagcuccaggugcaagucaugguagagacaccaaugcgugcauggggcucag

SEQ ID NO: 4177286 - RNA, 55 nt, Human
cuggauggcugcaccuagcccuuucugcuugcagauauagcagguuaguuuccag

SEQ ID NO: 4177287 - RNA, 65 nt, Human
cuggaugucggcauuuagcaaggaguuggucaaacagcugacacuagcuaaaugcugauuaacag

SEQ ID NO: 4177288 - RNA, 120 nt, Human
cuggauguguuguugagggaaggcuagccuggguagcuguaggucauuuaaucaccuagugaagcuagaauuaguguguuuagaucucaguugggaagcuuucuuuggagauaagucugg

SEQ ID NO: 4177289 - RNA, 70 nt, Human
cuggauuccuggaguugucuguacucaucuggaaccagagaaacagagaaaucagcuucagccuccccgg

SEQ ID NO: 4177290 - RNA, 62 nt, Human
cuggauucuuacuucugcaggguucaaggauuuacauuaggaaacccugagagguggucugg

SEQ ID NO: 4177291 - RNA, 63 nt, Human
cuggauuuuugaaggacuuuuuuuuacuugaaaaaggcuaaagacaguggauucaaaauccag

SEQ ID NO: 4177292 - RNA, 72 nt, Human
cuggcaagugguugggauggauuugccccgagccagucacacucucuuugcuuccauugugaccacugucag

SEQ ID NO: 4177293 - RNA, 79 nt, Human
cuggcaaugucugcaaugggugugggaugggaaguggcagcccaugggccacauaauuauugucaguaugcauuaucag

SEQ ID NO: 4177294 - RNA, 86 nt, Human
cuggcaauuguccacugucugccgaguggccuuagaaacgccaccauagccauuuuccugguagccaaugaaaugacaguucccag

SEQ ID NO: 4177295 - RNA, 65 nt, Human
cuggcacaguuaacauaugcuacaaacaaccaucuucagacaguguagcgaaccaacugugccag

SEQ ID NO: 4177296 - RNA, 71 nt, Human
cuggcacauaauugaacgugaugaguaugagcuucuguuuggaacucagguguacaauuuuaugugugcag

SEQ ID NO: 4177297 - RNA, 63 nt, Human
cuggcacaugacagaugcaaaggauuggaaaauauuugaauacagaaauuugcaugugugcag

SEQ ID NO: 4177298 - RNA, 112 nt, Human
cuggcaccaacuuuauuuucugggagcccagucugcuuaggaaaggaaaagucaccaaaguucauuguuuuccuaggcaguuggugcuccaugaguuuaaagggagcuccag

SEQ ID NO: 4177299 - RNA, 63 nt, Human
cuggcacugguaguuucagcaaccagcaaucauugcuucugcuuaucacuaacucugugccag

SEQ ID NO: 4177300 - RNA, 60 nt, Human
cuggcagagggcacucaggaugucuucucauccucauggaccucagacuguccuuuccag

SEQ ID NO: 4177301 - RNA, 62 nt, Human
cuggcagaguugggucucaaauucccagaguuugagguggugggacucacucuuuuggccag

SEQ ID NO: 4177302 - RNA, 68 nt, Human
cuggcagcaaggucucccugcaccuggucucacagacaggccagauccuggugaggcuuagcuuccag

SEQ ID NO: 4177303 - RNA, 59 nt, Human
cuggcagcuuagcacucugguuuuuaugugugaagccguaauauuuggugagcugugag

SEQ ID NO: 4177304 - RNA, 57 nt, Human
cuggcagcuuucucacccaugaccugaggcagauucuuggguuaagaagguugugag

SEQ ID NO: 4177305 - RNA, 61 nt, Human
cuggcaggagagcgucagaucaggaggagcaacuuccugagcuuggcuuaucuccagcugg

SEQ ID NO: 4177306 - RNA, 58 nt, Human
cuggcaggagcauucacagaggaguaucaaauucuuuuccugggaugucuccucccag

SEQ ID NO: 4177307 - RNA, 57 nt, Human
cuggcaggaucuaaccagggaaggggagcuaccuagggcaaggaguccugcauucag

SEQ ID NO: 4177308 - RNA, 58 nt, Human
cuggcaggcagacuucugcaaggaaucacauuguucuagcaaaaguugugccugccag

SEQ ID NO: 4177309 - RNA, 60 nt, Human
cuggcagggcuaaaggccacguucucacacugcuccuggagguuggccaggccccgccag

SEQ ID NO: 4177310 - RNA, 59 nt, Human
cuggcaguguccagcucgugaugggcuuaguugcauuaucacuagaguuacauugccag

SEQ ID NO: 4177311 - RNA, 88 nt, Human
cuggcaguucuaguggucacugguaaaugcuauuccuauauuuuuauuagaggagaggaaucauuauuacaaccaaagaaacucccag

SEQ ID NO: 4177312 - RNA, 60 nt, Human
cuggcaugcccaggguauguggaaucaaagaugcuuugagaaauacuuggugcugcacag

SEQ ID NO: 4177313 - RNA, 60 nt, Human
cuggccacugguggucauaggcuguaaucacuuggcaaccguugauauauugguggccgg

SEQ ID NO: 4177314 - RNA, 59 nt, Human
cuggccagcauggcugaaguacgugcacccuuccaccucuucucucccugcugguccag

SEQ ID NO: 4177315 - RNA, 55 nt, Human
cuggccaggcuucauccuggaaccaucuuuguggcugggagcuggaacugggcag

SEQ ID NO: 4177316 - RNA, 75 nt, Human
cuggcccagagggagacacuccuagccauucccuguaagcugccacuaagucccggaggucccuucugguuucag

SEQ ID NO: 4177317 - RNA, 71 nt, Human
cuggcccagcacuccaaguagggagcucuuuauggauauugaucgcugcucuggagaugagcuaggaccag

SEQ ID NO: 4177318 - RNA, 61 nt, Human
cuggcccuaggcaaacacagauuugcuuucucacaguauauacuaguuuugccugggcuag

SEQ ID NO: 4177319 - RNA, 56 nt, Human
cuggcccugguaaggacacccaggagagggccagggugccuguauuuggggcacag

SEQ ID NO: 4177320 - RNA, 59 nt, Human
cuggcccuguaggaugugaguuugcugccggguaggacauucgagguuugcaggguggg

SEQ ID NO: 4177321 - RNA, 95 nt, Human
cuggccgaggggcaggcuccucgcggccucccugggacuccgggcgugucguccagccccgaggccggcgacgggcagauccgccucacggacag

SEQ ID NO: 4177322 - RNA, 64 nt, Human
cuggccuaaaauugcuucugcaucuguucucugcagcaagccuaugaauuuuaaucacggccag

SEQ ID NO: 4177323 - RNA, 130 nt, Human
cuggccuagccauccacacugaccuugguuucaaggucccucggcccccccguggagauaaaugcaccaugcugugggccucugaggacagccuuggcuuggguuaaaacgcuaauguggcuggcaccag

SEQ ID NO: 4177324 - RNA, 58 nt, Human
cuggccucuuaggacauccucuaugaucaacugcacuggaggaagggacuugggccag

SEQ ID NO: 4177325 - RNA, 68 nt, Human
cuggccuggcagagguggcgcgccaucccugccacagacuggcaggaauggguccccuccagguguag

SEQ ID NO: 4177326 - RNA, 68 nt, Human
cuggccuuggaauggggcagaaaauggggcugcaaaccagcccugcuggcccccauuucaggguccag

SEQ ID NO: 4177327 - RNA, 61 nt, Human
cuggccuuguuccuccccaagugcucaacucuucccugacuugggcaggacacaggggcag

SEQ ID NO: 4177328 - RNA, 92 nt, Human
cuggccuuuauuuuucugguuguucauacuccaacagcuagcaccguacguugggguccaaugaagcgagcagcaguagauggcauggccag

SEQ ID NO: 4177329 - RNA, 60 nt, Human
cuggcgagcaggaggcgacggcagaggaaacuucaacccgaugaacuuccugguugcggg

SEQ ID NO: 4177330 - RNA, 76 nt, Human
cuggcggcagccccgggguggggagacgagcuccggagucggaagagcuggguuuucuuccgggccuagccaccag

SEQ ID NO: 4177331 - RNA, 68 nt, Human
cuggcuaccucuggccuucaggcaucauuuugcacaacagaaagaggccuggaggcagaggugaccag

SEQ ID NO: 4177332 - RNA, 88 nt, Human
cuggcuagauggcuagauugcaagaacuccagcuggcuuccucuucuugccacucacccacaguucuaguacuuucugcuucugucag

SEQ ID NO: 4177333 - RNA, 99 nt, Human
cuggcuauaaguauuguauuuggagaggagaaaaaagaggaugcaucacugcagugcuuuagucuguccuuuucuacccagguacaaauuuaauuccag

SEQ ID NO: 4177334 - RNA, 74 nt, Human
cuggcucagcugucacagccuggcucugacaaagccucagaacucaauugccaugugaagcuggacuuggccag

SEQ ID NO: 4177335 - RNA, 107 nt, Human
cuggcuccccacguuugggcuucauuuuugucuccgguuugugcuacucuuucuucauccaaaaaggcguuggagaucccgagaaucugcugcagcuuggaagccag

SEQ ID NO: 4177336 - RNA, 55 nt, Human
cuggcucccucgcugaggugcuccuucagugcccacucaucagcgagggcaccag

SEQ ID NO: 4177337 - RNA, 56 nt, Human
cuggcucugaguggcucuaauucagguucucugauuuuuagccucucugagcugag

SEQ ID NO: 4177338 - RNA, 59 nt, Human
cuggcucugcagagggcccagcuuugccagccacauggcgaggcugucugcaagaccgg

SEQ ID NO: 4177339 - RNA, 80 nt, Human
cuggcucugcaucucugugccagagggcacucaguuccugagccaagaaaggccacucuggucacagaaaggcaggcugg

SEQ ID NO: 4177340 - RNA, 67 nt, Human
cuggcucuuucagccgcuggagggcuggugugaugacaucccuguacuccgggguggcugaggccag

SEQ ID NO: 4177341 - RNA, 58 nt, Human
cuggcugaguuacuccacugagaaggauuucugcagcucuaguggcuugcuuagcuag

SEQ ID NO: 4177342 - RNA, 59 nt, Human
cuggcugcagcuccgaggaagaagaguccugggcggacuccucaggcugcugcugccag

SEQ ID NO: 4177343 - RNA, 79 nt, Human
cuggcugcuguuuggaagaggcucuggugggaguuggugggcugaugccuuagaccaaacaagagcuggcaguagcugg

SEQ ID NO: 4177344 - RNA, 75 nt, Human
cuggcuggcauagcugcaaggccgcuccugaagcuaauugagcuuccugagaacauggcagcuuagugcagucag

SEQ ID NO: 4177345 - RNA, 56 nt, Human
cuggcugggagcucgccugcggcccuggaagccgcgguucucagcaucccagccgg

SEQ ID NO: 4177346 - RNA, 92 nt, Human
cuggcuguaacugagaugcugcucuguaaagugaugaggccggggaggccacaucugcucugggcagcacucgcagagcuguugcagcacag

SEQ ID NO: 4177347 - RNA, 80 nt, Human
cuggcuguggagggcuccugaggcccuucugguacaauuguccauguuccacggcaaacucagaagccuucccacagcag

SEQ ID NO: 4177348 - RNA, 61 nt, Human
cuggcuguggucacagguaacugacaguuugugcuucccaagaauccugugauccgguggg

SEQ ID NO: 4177349 - RNA, 76 nt, Human
cuggcuuccuuucuaaaaugauuucugcuguuuccauaacugaauaacagcacagcaggauuugaaaggaagagag

SEQ ID NO: 4177350 - RNA, 66 nt, Human
cuggcuugcaggagaugcugaugcugcugaccaaacauugaguaucaaggaucuccagcacccuag

SEQ ID NO: 4177351 - RNA, 71 nt, Human
cuggcuugggucuaccugccuuuguacucugcagacacacaaaccauguauagggcauguuucuccaccag

SEQ ID NO: 4177352 - RNA, 62 nt, Human
cuggcuuugcugaucugugcccugcucauggacauagcaggacuggugccagacaagguagg

SEQ ID NO: 4177353 - RNA, 58 nt, Human
cuggcuuugcuggacugggagucccagggcagugugcuccucccucuugcaaugucag

SEQ ID NO: 4177354 - RNA, 65 nt, Human
cuggcuuuggaacaaaucauagggauaauuuuauuacuuucucacugugcuucuuccuaagccag

SEQ ID NO: 4177355 - RNA, 55 nt, Human
cuggcuuuuuucccauuaugcagaguguugauuuggaggggggaguaaaagccag

SEQ ID NO: 4177356 - RNA, 97 nt, Human
cugggaagaagacaacucuguccucaguauuguggagcagaucacauaugugugaacacucuguauuaacugagaagauaugaggucuuuuucgcag

SEQ ID NO: 4177357 - RNA, 59 nt, Human
cugggaagaagggacaacagcggacugucuaaaggaugccuggauuccuuguuucucag

SEQ ID NO: 4177358 - RNA, 105 nt, Human
cugggaagaggcgcuccucacuuccuagaugggauggcggccgggcgcagacgcuccucacuuuccagacugggcagccaggcagaggggcuccucacaucccag

SEQ ID NO: 4177359 - RNA, 60 nt, Human
cuuggucgaugggcuggugcauugaacacaugcaugugcuuggugccagccugucccagg

SEQ ID NO: 4177360 - RNA, 68 nt, Human
cuuggucuuguggcaucuuuccagacacugucagggaugguaggccauggaaagauucaaagaccagg

SEQ ID NO: 4177361 - RNA, 60 nt, Human
cuuggugagacucccacccaccgacaugcucugaugugaagggugagguguuuagccagg

SEQ ID NO: 4177362 - RNA, 56 nt, Human
cuuggugauuuacuuguaaauuuccuaaauggggaagccacacaaaggucgccaag

SEQ ID NO: 4177363 - RNA, 63 nt, Human
cugcaggccaggcaacauucugaaguuuuguuuuaggcuaagaauaggugcuuggcuacgcag

SEQ ID NO: 4177364 - RNA, 61 nt, Human
cugcaggcuuccagggcuguggggccaaaugugcccucuccugcccucauggcagccucag

SEQ ID NO: 4177365 - RNA, 63 nt, Human
cugcaggggccucgagcacagggacugcaaccuuccucccgcugcauuguauucccccugcug

SEQ ID NO: 4177366 - RNA, 82 nt, Human
cugcagguggaguaccugagucuuagguuuacauuggucuuuuggggcaccagugagaaugaagauaaggcugaaccugcag

SEQ ID NO: 4177367 - RNA, 77 nt, Human
cugcaguaggagaaaaggccacuccuaggagcucugguauuuuccagaagcuuucagucagccuucccuuguaucag

SEQ ID NO: 4177368 - RNA, 63 nt, Human
cugcaguauggcucuuaugcucaggagauagaguagucagacccaagagagccaugauuguag

SEQ ID NO: 4177369 - RNA, 65 nt, Human
cugcagugaguuggggucuggggaagcuacaagggcagcacucagucugcagcccacuugggcag

SEQ ID NO: 4177370 - RNA, 62 nt, Human
cugcagugaucagagagaagcaguggaaucaagcaugacuucaguaguuuugaucugagcag

SEQ ID NO: 4177371 - RNA, 79 nt, Human
cugcagugcuuagcauauuaugugaucaauauauauuuaaugaguaaaugaauaagugaugucauauauaagcaggcag

SEQ ID NO: 4177372 - RNA, 59 nt, Human
cugcaguggauugucauuuuuucuugaauaauaauuucaagaugauauuuuaucuguag

SEQ ID NO: 4177373 - RNA, 77 nt, Human
cugcaguucgcauggcaggcauaaggagcgcuaauccagugaugacagcaucuuuaugccuaccugggaagaugcag

SEQ ID NO: 4177374 - RNA, 84 nt, Human
cugcaguugucuugcauguuuauuaguguaaugaaucacauuuaugaaagcauuacaaaguuauaaacaguuauaacagcgcag

SEQ ID NO: 4177375 - RNA, 66 nt, Human
cugcaguuugcuaagagacaaaagaauauuuuauaauuagccuuguguuuugcuugcaaacuuuag

SEQ ID NO: 4177376 - RNA, 112 nt, Human
cugcaguuuugcaagucuagcaagaacuggcuuucauuucaagcacgucucaaggauggagacguuuagaggggaaagcacauuugcaaaaaaggaaagaccaaaacuccag

SEQ ID NO: 4177377 - RNA, 116 nt, Human
cugcauagggcuccaaaugcaucuaugugcccuuucugcuuugcagacaguguuccaaguaucuggcugcaaagauuggguaaguagagcauucauaauggcuuucacacaugcag

SEQ ID NO: 4177378 - RNA, 67 nt, Human
cugcaucaaugacaaugauuuuuuagaguaguuuaaaaugaaacuuuucauugaaucaugucagcag

SEQ ID NO: 4177379 - RNA, 129 nt, Human
cugcauccugccuugauuucccaucugugacaagaggccugaggcugccuggagcccaugucucccuggaggugguuccgcuuggcacccagccucugcgggcggcggggaggagccgaggugguggcg

SEQ ID NO: 4177380 - RNA, 55 nt, Human
cugcaucucucugggcucuggggucugaaaagacuaggagcugauggggaaguag

SEQ ID NO: 4177381 - RNA, 63 nt, Human
cugcaucuuuucauuugccagcugguacugccaucugcgauuccagguacauggagaaugugg

SEQ ID NO: 4177382 - RNA, 70 nt, Human
cugcaugccugggaaagugaggucauuauuucaguccuaaaaauaacuucuacuauuugcagaaaugcag

SEQ ID NO: 4177383 - RNA, 83 nt, Human
cugcauguuagucuaacguucugauagaaaugacaugcauuuaugcugccauuuguuacuaucaggacucgacucgugugcgg

SEQ ID NO: 4177384 - RNA, 58 nt, Human
cugcauuagucaugcuuugcagauuugcaaagaggaauuucagagucagcaaaugcag

SEQ ID NO: 4177385 - RNA, 86 nt, Human
cugcauuuaauuggcauuggugggcaauucauuggaggcauugcaaugugacuucaggaaaugucugccuaccauagugcuggcag

SEQ ID NO: 4177386 - RNA, 100 nt, Human
cugccaaccuccugagccucauggucaucuugagucaagggaauugugugagauccacucaaguggccuugauggcuuucuucuugcaaagguugggcag

SEQ ID NO: 4177387 - RNA, 99 nt, Human
cugccacaggcagccugcccugccugccggugugggucugucaucaggauggugguggcucacagccggcuggcaggggcuuguccuuccccguggcag

SEQ ID NO: 4177388 - RNA, 83 nt, Human
cugccaccaaucuccucaccuccgugcacaagauuauaaaggucagagcucugugcugguacaugugaggaugcauguggcag

SEQ ID NO: 4177389 - RNA, 87 nt, Human
cugccacugccuuggccaccuauccucaccucauagcucgcagcgcgaggcgauaggccagguccgggucaugaggcagcagugcgg

SEQ ID NO: 4177390 - RNA, 59 nt, Human
cugccacuuacuaggcauggugcauuaggaaugucagaugguauguagggagguggcgg

SEQ ID NO: 4177391 - RNA, 80 nt, Human
cugccagaguaguuggucccccagccauguccggccuggacacaggacucaugguggggccagacuucagcucugggcag

SEQ ID NO: 4177392 - RNA, 73 nt, Human
cugccagccgccauguuaucucccagccuggcuagggugccugcuagccugcaguggcuaugguggugugcag

SEQ ID NO: 4177393 - RNA, 66 nt, Human
cugccagcucgccacaaugacacauaaugauuuuugcaaagugugugucaaauguccugagcuuag

SEQ ID NO: 4177394 - RNA, 55 nt, Human
cugccaggauucugugaaccccuccaaaagcugugacucuaugggguccuggcag

SEQ ID NO: 4177395 - RNA, 58 nt, Human
cugccaggcccagcuccagagcugcccacuccaggaagcccugagccagccuggucag

SEQ ID NO: 4177396 - RNA, 62 nt, Human
cugccaggguucauugauuccaggcucuucuagaaauuccaggaggccagucagucuggcgg

SEQ ID NO: 4177397 - RNA, 75 nt, Human
cugccagugcauucuggcagaacaggugcuuagcugauggcacuugauaacugggggaagcacauacucuggcag

SEQ ID NO: 4177398 - RNA, 55 nt, Human
cugccaguuggcacagaggguucugacccuuuccaaaacccuuuccaaacugcag

SEQ ID NO: 4177399 - RNA, 91 nt, Human
cugccaugucuugggagcauucuguggcugucuuuccagaggggcugaugggcuuccugguuagucacaggguacccagagagucuaccag

SEQ ID NO: 4177400 - RNA, 85 nt, Human
cugcccacuuuagagagcagucuggaagaaacagcgacgucagcucagcucaacaauguguuuccuucaggcucucuuggggcag

SEQ ID NO: 4177401 - RNA, 56 nt, Human
cugcccagcaacagcucugaugccaugucaaacugguuagagcugcuuccuggcag

SEQ ID NO: 4177402 - RNA, 59 nt, Human
cugcccagcagggagcuaccuggaguuggucuggcccagcagaagcucccgcugggugg

SEQ ID NO: 4177403 - RNA, 85 nt, Human
cugcccagcuccuuggaugggcaggcuugauaaccaggaacaccugccuuuucagcucuccuguccagggaagggaggugggcag

SEQ ID NO: 4177404 - RNA, 64 nt, Human
cugcccagggauaagccuagagaaagcagucccucagugaucuaauaguuuggcuuuggagcag

SEQ ID NO: 4177405 - RNA, 64 nt, Human
cugcccagucuccgggccagcccugcuggggcagugugggagggagggcuggcggaggcggcag

SEQ ID NO: 4177406 - RNA, 60 nt, Human
cugcccccaccauaguucagaccacguaaacuacuucacuggaucuaaagguggauguag

SEQ ID NO: 4177407 - RNA, 77 nt, Human
cugcccccgcccucugcugcuugccagucauugcuuauuccugggaaaagugcgaguagauucggacgccggggcag

SEQ ID NO: 4177408 - RNA, 58 nt, Human
cugccccuauggcugaugcguggagugcggcugucccagccaugcagccugggggcag

SEQ ID NO: 4177409 - RNA, 70 nt, Human
cugccccugggagcagagccaccauuuggccaagccaaggacuucuggagggccuguuugucaagggcag

SEQ ID NO: 4177410 - RNA, 59 nt, Human
cugcccuaugggcgucuguugucuggaucugcucacgagcagcagagacccauggggag

SEQ ID NO: 4177411 - RNA, 60 nt, Human
cugcccuccaccgacgaacccacaccaaugagcucagugcugggguaguuuguggcacag

SEQ ID NO: 4177412 - RNA, 64 nt, Human
cugcccugcagguugagcagccagguugagcugaaagccugcaccugaccaaccugcuggaugg

SEQ ID NO: 4177413 - RNA, 69 nt, Human
cugcccugccuggccaguguggcuccuuucccugagcugugauuucagccuggcccuggccaguggcag

SEQ ID NO: 4177414 - RNA, 58 nt, Human
cugcccuguucuggacaggcacaaagaccacgacuuugugggggccgggagaggguag

SEQ ID NO: 4177415 - RNA, 110 nt, Human
cugccgcugcagggcgcacggcuucccggcggucggcgacuucugcucuggcaacuuacgccaggguugugugcuggccgcugggagcccaggugacgccaugggggcag

SEQ ID NO: 4177416 - RNA, 62 nt, Human
cugccggaggcguccccucuuucugcacuccaacuuggaggaggaggguuggccuuagguag

SEQ ID NO: 4177417 - RNA, 99 nt, Human
cugccggcucaccccgucuccaugcccucugguuugugucaucuccaaauaucaaaagcagucaucagagguuauguggaggggagggggagcuuucag

SEQ ID NO: 4177418 - RNA, 61 nt, Human
cugccgucuuugucagccauugugggucagaauuguccacagaggcuuaaaugaguggcag

SEQ ID NO: 4177419 - RNA, 56 nt, Human
cugccuaauauccauugggagcaaaugguaugccaaacaucauaauggguguucag

SEQ ID NO: 4177420 - RNA, 110 nt, Human
cugccuacccauuuucuuucuacccagguucugccaaggaggaccugaaggcugagcaucagaggcuccaggauccuuuggccacuucuuaagagagagacaggagacag

SEQ ID NO: 4177421 - RNA, 88 nt, Human
cugccucccugcuccuggcugcgucugcucugacaguucuccuccuugagccucugcacagagcagggcagacacuaaaggguggugg

SEQ ID NO: 4177422 - RNA, 64 nt, Human
cugccuccucacguccacaguggugugcacccggaagcacaggcuugaggacgaugagcggcag

SEQ ID NO: 4177423 - RNA, 112 nt, Human
cugccucuuugucaggaaggucuucaggcuuuuccugccuccuacuacccucacauauuguagugccaauaaaggucagggaaacuaccuugggcccuguugcagaaggcag

SEQ ID NO: 4177424 - RNA, 77 nt, Human
cuuccuuccuuccucacccacuacacucaagggccagagauggccuagguguugagugggggagaaagggaagggag

SEQ ID NO: 4177425 - RNA, 64 nt, Human
cuuccuucucagcccucgaggaugcauauagcuaauuaagcaggcccagagacagagagggggg

SEQ ID NO: 4177426 - RNA, 69 nt, Human
cuuccuuucagaggaaggccuguccugcuggaacuggagccaaggggaggcugccuaugaaggcagaag

SEQ ID NO: 4177427 - RNA, 67 nt, Human
cuuccuuugugagguccugugggggcucacacauccuguggcccuuacauuucuccucugaagcuag

SEQ ID NO: 4177428 - RNA, 69 nt, Human
cuuccuuuucccaugggugccgaccauggugccagcuccagguaccccauggggacaccaugaaggagg

SEQ ID NO: 4177429 - RNA, 102 nt, Human
cuucgaacuccucagauccagcaauucacauguaccuaaaaaagcaagaacagucuucguccugggaucacaguggcagggauuuggggagaaaaauugagg

SEQ ID NO: 4177430 - RNA, 93 nt, Human
cuucgcauuauuuuaaggaaaggcauuaugauuugaguaccacaauucugugaagacauuaagucuaugucaccauuucaaucaugcaagagg

SEQ ID NO: 4177431 - RNA, 56 nt, Human
cuucggagggcugggcagccccaggagacagggcagcagcugcaggcccuccgagg

SEQ ID NO: 4177432 - RNA, 62 nt, Human
cuucuaacuacuccacucccacaacaggauguucugcucugauuggcagggagaguuugaag

SEQ ID NO: 4177433 - RNA, 87 nt, Human
cuucuaaguaaucuuuaaaguguucaguuuuggaaacuuuauucuaaguacuuaggugaagguuuggugagcuaagauuauuuaaag

SEQ ID NO: 4177434 - RNA, 85 nt, Human
cuucuaauuggugcucuuagugaucuugaauuacacuuucuaaacaaaaugaagauuauggugauuaaggauauugaaaaagaag

SEQ ID NO: 4177435 - RNA, 61 nt, Human
cuucuacacguggcugugccaagaaaggggccuccuccuuuggcauaccuuagugguggag

SEQ ID NO: 4177436 - RNA, 92 nt, Human
cuucuagaaaucaugauccauuuagagucuugcaauuuuaccaagcagagugagugaaaugccuugagauuuugacucgucuuuucaagagg

SEQ ID NO: 4177437 - RNA, 90 nt, Human
cuucuagggcaccaauccuucucucggcucugugucaguguuugucgacugugugccugugcagaaacugggaaggaaggagcugggaag

SEQ ID NO: 4177438 - RNA, 80 nt, Human
cugcuaacagcucuguguggcuguaaucugguuuaugcaaauccagucacuuugcagcccacagggaaagcuggaaggag

SEQ ID NO: 4177439 - RNA, 66 nt, Human
cugcuagaugaugggguggcuguccagugugacaagcagcaagggaggcucaaguaucacgggcag

SEQ ID NO: 4177440 - RNA, 61 nt, Human
cugcuagcugugcuuggaaguuugcuuggaaacuagcagcuuaccucccacagcucuccag

SEQ ID NO: 4177441 - RNA, 78 nt, Human
cugcuaggcaggcuguccaggcuccuuugggaauguguacauggggacuaaaauguuuggggcagaaccuccuagggg

SEQ ID NO: 4177442 - RNA, 60 nt, Human
cugcucacaaaaaacccuaacugaaaauuccccagugcacaggguucccuuguucagcag

SEQ ID NO: 4177443 - RNA, 57 nt, Human
cugcuccacaccuccauuuccucucugaaaauggggguaguguggaggguggaccag

SEQ ID NO: 4177444 - RNA, 64 nt, Human
cugcuccagcccagcuguccccuucacgcugcugagagugauauccaccuggaguuggguguag

SEQ ID NO: 4177445 - RNA, 77 nt, Human
cugcucccacggcacaggauguugcucccaugucccugcagggaugugacaagcaguucuucaaugccucggugcag

SEQ ID NO: 4177446 - RNA, 81 nt, Human
cugcucccggaggcacagcccuggucggggccccucuggaggaggguucuugccgggcucugcuccucgccggcggggcag

SEQ ID NO: 4177447 - RNA, 92 nt, Human
cugcucccuaaagucacagucuaugguggaggugcaaacaagcgauccuguuggggcuucaggguacuuccuccugugugcuuugcacguag

SEQ ID NO: 4177448 - RNA, 83 nt, Human
cugcuccuaagcauguccaauagaagggagaagcggugaauucuaauuacucaguuuuuccuccuuauuggcugcuggaguag

SEQ ID NO: 4177449 - RNA, 64 nt, Human
cugcuccuuguggcacugggcagggccuacguucaaggcuagcaguguacucaacaagggacag

SEQ ID NO: 4177450 - RNA, 60 nt, Human
cugcucuccuggcugugcaugcaaggcuucucuguuagggcagugcagcuuggaggguag

SEQ ID NO: 4177451 - RNA, 57 nt, Human
cugcucucugggccucccuuuccaagggucaggcaccuuagauggggcccaggacag

SEQ ID NO: 4177452 - RNA, 74 nt, Human
cugcucugcaugguuauauaagauggguaggcuuguuaggcgguagccacaaccuguucguuuccacagaggag

SEQ ID NO: 4177453 - RNA, 55 nt, Human
cugcucuggcuguguacuucagugucauucacacuuaaguacucagcaagagcag

SEQ ID NO: 4177454 - RNA, 62 nt, Human
cugcucugugcgcugcagaauuuguggguaucccugggaggccuggaccagccacagagcag

SEQ ID NO: 4177455 - RNA, 60 nt, Human
cugcucuuauuuguaggaugaaacuguguaaucacugucaguucuuccagauagaggcag

SEQ ID NO: 4177456 - RNA, 88 nt, Human
cugcugaaaaaauacagaaugcaauucucuugauauagcuugaaaauaguuuuuuaaaaaauauggaacuauucuguguagaagguag

SEQ ID NO: 4177457 - RNA, 94 nt, Human
cugcugacccagaaacguccagaaggucccuuagccagaacgugaucuccugugcugaggguaacacuucgggauccccaaagggucauggcag

SEQ ID NO: 4177458 - RNA, 66 nt, Human
cugcugacggaaggcuguuucugguagugauggugaaaucuggccaaggaugccgucuggaggcag

SEQ ID NO: 4177459 - RNA, 68 nt, Human
cugcugagcucagccugaggccuggcuccuccaggcugggggaaaaccaggcuugcugugcucggcag

SEQ ID NO: 4177460 - RNA, 76 nt, Human
cugcugagugggcucagccuccucacuucgagccauguugacugccucguggaggcaccgugagcuuucucagcgg

SEQ ID NO: 4177461 - RNA, 55 nt, Human
cugcugauuccucaguuaaaaagaagaaaauucccuuggaacaguggaucagcag

SEQ ID NO: 4177462 - RNA, 56 nt, Human
cugcugccucacuccagcccaauacacaggcuugugugguaugcugcaggcagcag

SEQ ID NO: 4177463 - RNA, 69 nt, Human
cugcugccugaugcuuucuggacaugaaaugaaaugguccagggcuaaaucagguuccccacugggcag

SEQ ID NO: 4177464 - RNA, 72 nt, Human
cugcugccuuuccaccuucuggugcuccagcuccucuuccagcucuugaaggugggaucgagaggacagcag

SEQ ID NO: 4177465 - RNA, 81 nt, Human
cugcugcgucuuuauugauuccuucaagcuucacauccauguuagauauauuuguagguauuaaugagacagagcaugcag

SEQ ID NO: 4177466 - RNA, 63 nt, Human
cugcugcugccuggcucugggaggccuggaaaggcccugagccucuugcacgcucagaggcag

SEQ ID NO: 4177467 - RNA, 58 nt, Human
cugcugcuugauugcaggaaguucuccccaaugucacuccugccuuaguccagagcag

SEQ ID NO: 4177468 - RNA, 61 nt, Human
cugcuggagugaagcuuauuuuucaguuaaaauugaagaacaacuuuacaucccacugcag

SEQ ID NO: 4177469 - RNA, 67 nt, Human
cugcuggcagcugcugcauuacguuguuauguuaaugccuacagaacugcagacagugccaaugcag

SEQ ID NO: 4177470 - RNA, 59 nt, Human
cugcugggucccccugcugauugauuaaaucaucaucacuggggugaagcccaaaguag

SEQ ID NO: 4177471 - RNA, 89 nt, Human
cugcuggugagccugucaaugccaccugucugaugccauacugaugacaccugugugcccucagcagguggugggcaggugaguggcag

SEQ ID NO: 4177472 - RNA, 56 nt, Human
cugcuggugaugucugggcaugugucugcuucacaguccaguguuaugaucaguag

SEQ ID NO: 4177473 - RNA, 55 nt, Human
cugcuguccaaggugccuuacauauuguccaaauauggccacuauggugcagcag

SEQ ID NO: 4177474 - RNA, 67 nt, Human
cugcugucuuauguagauacugagaauauuaaaccuguacucuucucauuugcuacauaagcaccgg

SEQ ID NO: 4177475 - RNA, 103 nt, Human
cugcugugguucaacugcacuuuaggccaacuaggcacagggaaaagcaacccucucugcuccucacauggcgcuaaaugcaggagaaacuuccucccagcag

SEQ ID NO: 4177476 - RNA, 56 nt, Human
cugcugugugaccauggacagguaaagucacaucucugacuaucuucacagggcag

SEQ ID NO: 4177477 - RNA, 63 nt, Human
cugcuguugccgugguccaggcaguggaugaugaugaucuaaagcaaggaauuggcaacagag

SEQ ID NO: 4177478 - RNA, 87 nt, Human
cugcuuaacauuaccuaguuuuucagcaaauacaaaaguuuuauaaguucaaaaguuauguguauucugagguagguauauuaacag

SEQ ID NO: 4177479 - RNA, 122 nt, Human
cugcuuaaggaaagugcgugggaaaguggccauuuggaauagauuuguuagaaaaguuugaaauucuuggacuucaacuaauuuguuuuccauggaucccaugaggauacuuguaaaagcag

SEQ ID NO: 4177480 - RNA, 81 nt, Human
cugcuuacacuuuguucuuuuagaagguauuuuaggugcccacacuuuucuguaucaaaaggauuauugaaugcugagcag

SEQ ID NO: 4177481 - RNA, 85 nt, Human
cugcuuaguaaugagguuauauuuaauucacuucucacuuugaaaauaguugauugguggguaaaaauagaguugacacaagcag

SEQ ID NO: 4177482 - RNA, 57 nt, Human
cugcuucacccugccugagaaccagggagcacugcauuucuccacaggguggaggag

SEQ ID NO: 4177483 - RNA, 75 nt, Human
cugcuucauacagugcacauuucuuaggaaagaauaaacuaugauuagcuaagaggucuguauuagucaggguag

SEQ ID NO: 4177484 - RNA, 56 nt, Human
cugcuuccauaaauaaugugcuccauguaaauaaggagucauuaaaaauggggcag

SEQ ID NO: 4177485 - RNA, 59 nt, Human
cugcuuccucccuguaaaggcagguggugggggagccguucugugcaguggaggggcag

SEQ ID NO: 4177486 - RNA, 58 nt, Human
cugcuucucggugcccuucuuagacugguuguaggugauaacagggcccuagaaagag

SEQ ID NO: 4177487 - RNA, 129 nt, Human
cugcuucugaaauuuaugcucaguucucuggccuccuagcaaauguguuaugcuaugcuucccagagacuugcucugugcauguacagcuuaggcaucagcuaagggcccugagagggauuuuaugcag

SEQ ID NO: 4177488 - RNA, 62 nt, Human
cugcuucugcaccaugauggagccucauuagauugucucuagggucccuuccauggugccag

SEQ ID NO: 4177489 - RNA, 58 nt, Human
cugcuugaccuguuguucucacauacagagcuggaugugagaacagcaggucaagcag

SEQ ID NO: 4177490 - RNA, 66 nt, Human
cuugagacucuguaguggguguuugagcaauuaaaaguacccaagaacagagugagcugucucaag

SEQ ID NO: 4177491 - RNA, 87 nt, Human
cuugagauggagcuggagagcuagccuaggccaggaucaugaagaaccuaauuguccaggcuaaggauuuuuaguuuuguccuaaag

SEQ ID NO: 4177492 - RNA, 78 nt, Human
cuugagcucuagggaagaaaggcacagaccauggaaggucacaccgucuccacugcuccuuccucccugaagcucaag

SEQ ID NO: 4177493 - RNA, 69 nt, Human
cuugaggacgugaggaguauuuuuaggugcugaaugcagcccugaaauauuuccacggccacucccgag

SEQ ID NO: 4177494 - RNA, 78 nt, Human
cuugagguagaagugaaagacuugaugucacugugagaagcaguauacuaaagggcaaaguuuucaucucauaacaag

SEQ ID NO: 4177495 - RNA, 65 nt, Human
cuugaguaucuguggauuuugguauccuagggggaucccggaaccaaucucccgcagauacuagg

SEQ ID NO: 4177496 - RNA, 90 nt, Human
cuugauaauacguuuagugcaaucucuuccucagcaugauuaacuguaauagggcugcugcugaaaaggugugcuuaauguauuguaaag

SEQ ID NO: 4177497 - RNA, 57 nt, Human
cuugauccaauauacuauaguagguuugugaauguucuugcaagugucuuggacaag

SEQ ID NO: 4177498 - RNA, 80 nt, Human
cuugauggauggugccuggcagggucagcugcuuggugcagguuccugugcccaugucaugguacgugcuguccgcuaag

SEQ ID NO: 4177499 - RNA, 108 nt, Human
cuugauuugggccagugaagacucucagggagauuguuuagcuaccauggcaucugagaagcaaagcugaggccuuagcaagagacagcccugcuagcccaaguugag

SEQ ID NO: 4177500 - RNA, 75 nt, Human
cuugauuuuaaaaacuuuuuauucuaaugucuauugauacaguagaaaagaauaggaaguuuaagcacaauugag

SEQ ID NO: 4177501 - RNA, 59 nt, Human
cuugauuuugucucuggcccuguaccauuucuucugguuugaggcccagcagagucggg

SEQ ID NO: 4177502 - RNA, 58 nt, Human
cuugcaaaacugaaaggucugucugggcucagcugauaagauguuuugguuugauaag

SEQ ID NO: 4177503 - RNA, 59 nt, Human
cuugcaaauuaaagaggauagcaagcaggcagcuuucuuuccucauuuaguuuagcaag

SEQ ID NO: 4177504 - RNA, 56 nt, Human
cuugcaugcaaaaaaaucugcauugcaaaaaaaccugcauugcuugcagcugcaag

SEQ ID NO: 4177505 - RNA, 72 nt, Human
cuugcauuuauagugcuaugcuaggugucaaaauucaaaauggaaaauuagcacaguucacuaugauacaag

SEQ ID NO: 4177506 - RNA, 71 nt, Human
cuugccagggacucagucaggggacuuugggagaaagacuugauagccaggcugacuggguucuaggcagg

SEQ ID NO: 4177507 - RNA, 65 nt, Human
cuugccauuuaggcuggcuguggucugauggccucuccacaguccaggagcaacuugaaggcaag

SEQ ID NO: 4177508 - RNA, 129 nt, Human
cuugccccaagccagagaccccaaggucugcaguagagguccuaggagcuguggugucccgauugagggggcugccccagccuggggccuucuugggaugugucucuccucauuggcuccaggggcaag

SEQ ID NO: 4177509 - RNA, 62 nt, Human
cuugccccaggugcugagguuggaagaggguucccuaagcuccuccugagcaccugugccag

SEQ ID NO: 4177510 - RNA, 95 nt, Human
cuugccccuuguuuucggccucaguccagucucacucuuggcaggagacuuucuggcaaaacuuaguguggauaaggguugauagacuaugcaag

SEQ ID NO: 4177511 - RNA, 87 nt, Human
cuugccuagacgagacacagugcauaaaaacaacuuuugggggacagguauguuuucuugcagcugcgguuguaaggucuuggcaag

SEQ ID NO: 4177512 - RNA, 73 nt, Human
cuugccuggcaucuagcccugggauuauuaaggcagagaaaauauugccucccgggguaagggccagauaaag

SEQ ID NO: 4177513 - RNA, 89 nt, Human
cuugccuggcucccuucucgggguucccgcgcccuucuccgcccagggcagcagcgcgcggggcccccgggagccgaagagcaggcggg

SEQ ID NO: 4177514 - RNA, 128 nt, Human
cuuucccccggcaucugucuggggacuggcucugugaacagacgacuggauggaaggauauggugccucuccacucagugucugguccagggcucugggcccagaggguugagguggggauggagcag

SEQ ID NO: 4177515 - RNA, 57 nt, Human
cuuuccuaaucagacaccagggcaaaugggcugacccauggucugaucauaggacag

SEQ ID NO: 4177516 - RNA, 59 nt, Human
cuuuccuccuguagcuccggagcccccuggaguccggcccuggagaucgggagaggaag

SEQ ID NO: 4177517 - RNA, 77 nt, Human
cuuuccugcuuuccauaugaaaaagcuguugcucagggagggcaugcgguuugcucacuguggcacaaaggggaaag

SEQ ID NO: 4177518 - RNA, 81 nt, Human
cuuuccuguaacuuagcaugguuacuaaauagaccuguagcacuaauauuuacauaguaaccaguggcuuacagaagaaag

SEQ ID NO: 4177519 - RNA, 58 nt, Human
cuuuccuuccccacauaagcaagagggcgaacuccuccugucugcggaggaguggaag

SEQ ID NO: 4177520 - RNA, 76 nt, Human
cuuuccuuccuucuuccaugguagguuucuuaaagaacauuucuauugauuggcuuccuggauuaggguuggacag

SEQ ID NO: 4177521 - RNA, 75 nt, Human
cuuuccuuuccagcccuuuccuucucagcuuuuagacauguuuuguaaaaguaggggaagggguggauacauaag

SEQ ID NO: 4177522 - RNA, 120 nt, Human
cuuucgguaagguagacugcguguuaacaguuaggcacggguacagcaacggagaacagcucuaauuuugcaauugcuugucacuguucauacuccaugugaaguuaaugcugcuggagg

SEQ ID NO: 4177523 - RNA, 78 nt, Human
cuuucuauacaggcgggacgugggaggaucagacagguaaggacucucugagcccagcgucccguucuguaaaaugag

SEQ ID NO: 4177524 - RNA, 87 nt, Human
cuuucuauucaguuucuucuauuuugaacuaugcuaaggaaauuugggcuuaauguggugcagaaauggaauagaaaugaaaggaag

SEQ ID NO: 4177525 - RNA, 83 nt, Human
cuuucucaccugggucagacaguuguuuugacacaguaaccuaagggaaaaacauacagcauuguucacccagguggugaaag

SEQ ID NO: 4177526 - RNA, 65 nt, Human
cuuucucaugcugcaaauggcuguuucucugguucacucaaagcagcauaugacagcauccaaag

SEQ ID NO: 4177527 - RNA, 74 nt, Human
cuuucuccaagcucagucacauugugguuugauuucccaaauuuuagcuguccaguggauuggaauaaggaaag

SEQ ID NO: 4177528 - RNA, 59 nt, Human
cuuucucuaaggucccguucuggauauucucccuguguucaaggcccuuuuagggagag

SEQ ID NO: 4177529 - RNA, 81 nt, Human
cuuucucuccuuuccuaaucccaaugacauuuaugauuccuauaaagucacaguuuaggggauaugggaaagguaaggugg

SEQ ID NO: 4177530 - RNA, 66 nt, Human
cuuucucuuuaugcaucuguacaucuguaugucuacaaacacacaaacacaugcauagagagagag

SEQ ID NO: 4177531 - RNA, 64 nt, Human
cuuucugauguaaggaacuaggcgaaugcgaauggcucuuggcuguuucuuugcugucagagag

SEQ ID NO: 4177532 - RNA, 57 nt, Human
cuuucuguucaccgcuccugcuuuauuaugcuguaaacugguauggugagaagagag

SEQ ID NO: 4177533 - RNA, 73 nt, Human
cuuucuuaauaucuuggccccaggauuuuaggauaaagacccucuccugauguucaagguaugguacugaaag

SEQ ID NO: 4177534 - RNA, 104 nt, Human
cuuucuucugcaaguggucucagaguuccagugugagagaacaugaggccuucaucuuccauaaucaucacuggagaguucaugacacaugagacagaagaaag

SEQ ID NO: 4177535 - RNA, 65 nt, Human
cuuucuugcuuuccuggcucucacucuacagacuuccaucaugagaggccagcacugcagggaag

SEQ ID NO: 4177536 - RNA, 57 nt, Human
cuuucuugguccugaagauggcugcagauccucacugugucucuuuucccaggagag

SEQ ID NO: 4177537 - RNA, 90 nt, Human
cuuucuuuucucccccucugccuuuaagaacuaguugucugaccucuugaaaugagguaacaauucucaaaagaggggagaaccagaagg

SEQ ID NO: 4177538 - RNA, 60 nt, Human
cuuugaauugccguuucaucugcaggaaugcuacuccuguuucaugaaaccagauuaaag

SEQ ID NO: 4177539 - RNA, 68 nt, Human
cuuugaccuuugcuuagcaucuacuggagaugguaucaugcccuuuagagcagggaaaucugucagag

SEQ ID NO: 4177540 - RNA, 126 nt, Human
cuuugacggcaguaucuaugucuauucauacuuguagccaucauagcaucugacacagugcauugcauauuguaagagcccaguaaaugcuuaaugaggguauauauggaucagauugcccagaag

SEQ ID NO: 4177541 - RNA, 58 nt, Human
cuuugagcuucaauuuuuggcagggaaaaaaaugacaccugucuuaauuaacucagag

SEQ ID NO: 4177542 - RNA, 100 nt, Human
cuuugaggcuaucucuuggcacagccacugaaucgggaagcagucacaaaugcuuagaggaguccagauucuguggaugugccaagagauagucccaaag

SEQ ID NO: 4177543 - RNA, 78 nt, Human
cuuugagguagccacagauagagacuuacauguucauggcuaguuacugaauuuguauggaacuacuuuuacucaaag

SEQ ID NO: 4177544 - RNA, 58 nt, Human
cuuugagucaucggaugugucauuggccccauuugacagaugaaaguguggcucagag

SEQ ID NO: 4177545 - RNA, 70 nt, Human
cuuugaguguugugucuguacugucauagguccucugccuucccaggcuagaccaacauaaaauucaagg

SEQ ID NO: 4177546 - RNA, 73 nt, Human
cuuugaucuacucacuaaacaauucauccucuauagaacugagggugcaaaggugguugguaguggguuaaag

SEQ ID NO: 4177547 - RNA, 89 nt, Human
cuuugauguugccuacuguacuuuucuuggcuagauugucuacuuuuuccuuauuaagcagccuggacaagugcaaaacaauauuagag

SEQ ID NO: 4177548 - RNA, 64 nt, Human
cuuugauucagagagaauuagcacauuauuuuucgugaagaacauaguucucuuugauccaggg

SEQ ID NO: 4177549 - RNA, 90 nt, Human
cuuugauuuuauucuacucuuggacucugguuuaguaggggacugaagaaaauuuuugguuauacuauaaccaggagcaagaggucaaag

SEQ ID NO: 4177550 - RNA, 99 nt, Human
cuuugcaaagagagaaaaauagaacccacaaaggauuucagcuccaccuugaaauguugaaugggcugggguucuguguagggcuuuauuugagcaaag

SEQ ID NO: 4177551 - RNA, 98 nt, Human
cuuugcaagucuaccuggcccuggcauguaaugacagaauauagaggaagauuucauggaagauguagggucagggaccuucuugaauaaauacaaag

SEQ ID NO: 4177552 - RNA, 86 nt, Human
cugggaagcugccgccuggcauucucuccagagagagucucagcugcucuugcugucuagaaugaucacuugguguaguuucccag

SEQ ID NO: 4177553 - RNA, 130 nt, Human
cugggaaggugagcaguucaucuuaacacaaugguucacugaaauaaaagugggguucuuacaguaacaaagaugaaaacauuuauauuuaguggggaauuaguuaucucugucauagccuaccccuuug

SEQ ID NO: 4177554 - RNA, 67 nt, Human
cugggaagugaggagcgccucugcccagccgcccaucgucugggaugugaggagcgccucugcccag

SEQ ID NO: 4177555 - RNA, 99 nt, Human
cugggaauaagucguguuagaaguaaaacacacaguccaccggcagguaagaaccaccugaugggggacuuguuuuucugcgcugagacuucuuuucag

SEQ ID NO: 4177556 - RNA, 65 nt, Human
cugggacagguucagcaguuuauaaaauaauagccaauaucuugugaaugcuuaauauguuucag

SEQ ID NO: 4177557 - RNA, 62 nt, Human
cugggacccagcccaagucuuucuggcugucuccagcuggaacagaaguggcuuggucucag

SEQ ID NO: 4177558 - RNA, 127 nt, Human
cugggaccggauucugaggggcagaggucagcgggcuggagccgcuggcccccagggguuccaugccucauccugugucuggcccagccccugaucccaccagcccacgggaguccaagugccccag

SEQ ID NO: 4177559 - RNA, 56 nt, Human
cugggaccucggggugaucaaauguuaaaaaaggacauggcuauaaaagguuccag

SEQ ID NO: 4177560 - RNA, 64 nt, Human
cugggaccugugugccugggccagucccaugccugccccaagcccugaggcccacaagucccag

SEQ ID NO: 4177561 - RNA, 55 nt, Human
cugggagaauuuguugaaggauauucuuacuuuuccuuccuugaaugccuucuag

SEQ ID NO: 4177562 - RNA, 58 nt, Human
cugggagacacugaauucugccaauaaccucaauaagcuuagaagcagguucucccag

SEQ ID NO: 4177563 - RNA, 70 nt, Human
cugggagaccccaugagaaagauacagagacagacuuuccugcauccuuccauggguuucaaaaauccag

SEQ ID NO: 4177564 - RNA, 129 nt, Human
cugggagagcugggagagucaggccauggguuccaccccuggauucaguucucguuucuggguaggaaaccuggaacauuugacuaggaaagccaaggccucaccuuucccaggacacucucagcccag

SEQ ID NO: 4177565 - RNA, 82 nt, Human
cugggagaguccuguugucucuuccuguugacgagaccgagguuuugccagacagucugaaggaggcgcugcuuguucucag

SEQ ID NO: 4177566 - RNA, 62 nt, Human
cugggagauugaggccauggugugggcgagccccucacccccauguggacuuagcuuccugg

SEQ ID NO: 4177567 - RNA, 67 nt, Human
cugggagccaaggagagaggccuuggaaaaagucagcccugccaacuccuugaucuuggacuuccag

SEQ ID NO: 4177568 - RNA, 76 nt, Human
cugggagcuuguuaggaaugcagaaucucaagcuccucccuacugaaucuaaagcugcauuuuaacaagaucccag

SEQ ID NO: 4177569 - RNA, 57 nt, Human
cugggaggcgggaggcagguggugggaggaagccuucugcagcccaaagucucuuag

SEQ ID NO: 4177570 - RNA, 57 nt, Human
cugggagguggagguugcagugagcugagauugggccacugcacuccagccuuccag

SEQ ID NO: 4177571 - RNA, 66 nt, Human
cugggaguacugggggaugucacuuacuguagaauagacagggagggacacugucaugcucaccag

SEQ ID NO: 4177572 - RNA, 64 nt, Human
cugggaguugacgaggcuuguaacaaucuacugggaugaugugagccuuuauuaaccucaucag

SEQ ID NO: 4177573 - RNA, 58 nt, Human
cugggaucaggguggcaggggaauaggaugaaacuagccacuucuaucuugcuccugg

SEQ ID NO: 4177574 - RNA, 72 nt, Human
cugggauccaaaauuuacuguagcauuucauugacuuacagcuagugugaccauagauuuuggauuuucuag

SEQ ID NO: 4177575 - RNA, 72 nt, Human
cugggauccaaaauuuacuguagcauuucauugacuuagagcuagugugaccauagauuuuggauuuucuag

SEQ ID NO: 4177576 - RNA, 59 nt, Human
cugggaugcuccggccuggauggaggcucuccgcccucucccagcuccgagcgccccag

SEQ ID NO: 4177577 - RNA, 129 nt, Human
cugggauucacaggugcugaccacugugcguuugaccaucugucaguaaagaagcaagugccaacuccccuguuucuugggugcucacaucauggagacagcacaucguccaccauguguuaucaucug

SEQ ID NO: 4177578 - RNA, 98 nt, Human
cugggcaaaggcuaguuagaguggcguccuaggaaaggagggggcuaacaguguuucugguucaucuucuauccucagccccugccuagcuuguccag

SEQ ID NO: 4177579 - RNA, 63 nt, Human
cugggcacagacccccugggccuccugccucuugaccugagugcccaaagaccugcugcccag

SEQ ID NO: 4177580 - RNA, 64 nt, Human
cugggcagagcuaacaccugagcuguuaaagauccugcauucucagguaagggcccugcugcag

SEQ ID NO: 4177581 - RNA, 103 nt, Human
cugggcagcaggcagcagggagcaaagcaggagagccugggcgagcgcacgaagggugaggcucccaucccggggucuccuccgccucugugccuggucacgg

SEQ ID NO: 4177582 - RNA, 56 nt, Human
cugggcagggagacucagccuugaccagagcaagggaaggcuucuacccuguccag

SEQ ID NO: 4177583 - RNA, 65 nt, Human
cugggccaaaugucugcauaaguucaaagucuuucuuuucauuuccagcagcauauuugucucag

SEQ ID NO: 4177584 - RNA, 58 nt, Human
cugggccuaggauggaagggccccuaaauacauccagccagucccaauccagggccag

SEQ ID NO: 4177585 - RNA, 60 nt, Human
cugggccugagcucugaagaguacaggucggcuccucucucaacccaggacucagcccag

SEQ ID NO: 4177586 - RNA, 69 nt, Human
cugggccugguagggcuugaaacaugaaagaacaaugaaaaguuaagcauuaagcauuauuacucccag

SEQ ID NO: 4177587 - RNA, 79 nt, Human
cuuuuaccacaaaauggauguuucccuucugauuugggagacuaugucuucuuagaagaaacaucuaaaaaugggaaag

SEQ ID NO: 4177588 - RNA, 77 nt, Human
cuuuuacccaggggccauuugcuagucuaaggggagcagcugaaaaugaguagcuucauggaaccugaggcuagagg

SEQ ID NO: 4177589 - RNA, 96 nt, Human
cuuuuaccucauccucauauaucuagaauauucuaaugguuaaguccuuucucuuucccaaguuaaagauccaugggaauguuuggcaggugaaag

SEQ ID NO: 4177590 - RNA, 71 nt, Human
cuuuuagcucaggaugacuucaaggaggaaguaaaauuugauuaacucaugucaauuugagcacaugaaag

SEQ ID NO: 4177591 - RNA, 85 nt, Human
cuuuuagguauuucugagcagucuagccagguguucaguuuaugggcacggaguuuaugaggcugcuuuagauucauuuacagag

SEQ ID NO: 4177592 - RNA, 73 nt, Human
cuuuuauaaaugugcacagguuagaagggacuuccaggaugucuguuuuaacccugacauguugcaaggaagg

SEQ ID NO: 4177593 - RNA, 67 nt, Human
cuuuuaugaaccauaggcaagacaauacauugaacuguacuuucuuccaaaugccugagguuugaag

SEQ ID NO: 4177594 - RNA, 79 nt, Human
cuuuucaauuaucuuuguaugaccuacuacacuaaaggcaucuugaagcuauguaugguuuauagggaaauuguagaag

SEQ ID NO: 4177595 - RNA, 80 nt, Human
cuuuucagaaugccaggagagugcaugcagggauuccaucugaucacccucagugcucucucucugguccugcuggauag

SEQ ID NO: 4177596 - RNA, 58 nt, Human
cuuuucaggcuacauuaugggaucacgugaagaaaauuccaugaaggagacugagaag

SEQ ID NO: 4177597 - RNA, 69 nt, Human
cuuuucauggcacaggauuuuaaucaguccuugaaaucaucuuugaccugguccuugucacaaggagag

SEQ ID NO: 4177598 - RNA, 71 nt, Human
cuuuuccaccaucuaagagaaaggaaguucagagccuuagcuucaacaccacaauuucuuaacuggaaaag

SEQ ID NO: 4177599 - RNA, 87 nt, Human
cuuuuccauugacacaggcaaacacagaaaguagggauaaugcaaaaggcaaccuacuuuccugugucuguguauucaguaaaaagg

SEQ ID NO: 4177600 - RNA, 70 nt, Human
cuuuucuggcuacucucccugcuucagggaagacguggucucccaggacucagaggagaagccagagaag

SEQ ID NO: 4177601 - RNA, 81 nt, Human
cuuuucugucuuggaaugaaucuuuugucucgugaauaagcaacucugggcuccuaugagaugagaggccacauagaagag

SEQ ID NO: 4177602 - RNA, 68 nt, Human
cuuuucuuuaugguaucugccucaaauccaccuccccuaaagagcugggaggguacacgagagaagag

SEQ ID NO: 4177603 - RNA, 66 nt, Human
cuuuugaucucccauugugguuucccauugguucaacccaaucacaguuaguaagggagaaaagag

SEQ ID NO: 4177604 - RNA, 67 nt, Human
cuuuugcugaauuugcuuugacugucagcaaguuggauuggauuuguggcucagaguaggguaagag

SEQ ID NO: 4177605 - RNA, 75 nt, Human
cuuuugggcugcuuugguacauagcaauacgaaaaggcuaugugcuuuuacuccccagaguagccucuucaagag

SEQ ID NO: 4177606 - RNA, 95 nt, Human
cuuuuuaauaggcagugcuuugaucaagugggaaauaguaauggacaaauaaaaucaaugaucauuaucuaacuugaugccugcuuuucaaaaag

SEQ ID NO: 4177607 - RNA, 61 nt, Human
cuuuuuacaaagccugucuucucugugauaaaagauagccuauggaaggugaugugaaaag

SEQ ID NO: 4177608 - RNA, 78 nt, Human
cuuuuuacaaguuauugggagagggaaugggagggacuuaauucuucccagauuccugcucuuauauaauguaaaggg

SEQ ID NO: 4177609 - RNA, 64 nt, Human
cuuuuuacaggugagaaaacugaggcacagguuaagugacucacuaagcucucacuguaaaugg

SEQ ID NO: 4177610 - RNA, 127 nt, Human
cuuuuuaggaaaaugaugucuggcuuguuggaugaauuaacuugcacccuagcugugaagcaaaggagcuucagagcauucgggugacaaauugcacagauaagauggcauuucuuuucugucugag

SEQ ID NO: 4177611 - RNA, 62 nt, Human
cuuuuuaucucuuaaugauguuaaggaaaggucaaagcaucuaacagaugggagauggaaag

SEQ ID NO: 4177612 - RNA, 99 nt, Human
cuuuuuccggggguuauuuucauuuuuggcuguccugcuccaaguuaaacagaggagaaacagcaucauauaguggaagaaacucagaccuggggaagg

SEQ ID NO: 4177613 - RNA, 72 nt, Human
cuuuuucugccugcagucugcagcggaggcuguucaaugugcugcccgcugcagcuggcugcagggaaauag

SEQ ID NO: 4177614 - RNA, 82 nt, Human
cuuuuucuuugguagaaauucacagauucuaaaauuugcaugaaaagaaacugugcguaaguagccaaaauaaaugaaagag

SEQ ID NO: 4177615 - RNA, 83 nt, Human
cuuuuugaucccuuugguuucucauccucuggaagaaugaucaggcauuguucauacagugaaggcuacaagagaucaagaag

SEQ ID NO: 4177616 - RNA, 59 nt, Human
cuuuuugcccauuaugcuucuagaauaugguauguucuggaagaauaaugggcaaaaag

SEQ ID NO: 4177617 - RNA, 129 nt, Human
cuuuuuuaccccaccauguugcuuccaguucacaggguuucuagcagagucucuuuaggcuaaauuguugccuugaaugggcaauuugcuugaaauguagcuggaugugcagcaucuuugcucauguug

SEQ ID NO: 4177618 - RNA, 104 nt, Human
cuuuuuuguuauaguuuaaugacuauacggaauagccaaaguaagucuuuuaaaauuaaguuugcauuguaauauuuaguucaaaagaaacuagagccuaaagg

SEQ ID NO: 4177619 - RNA, 91 nt, Human
gaaaaaaauguugcggaagcuuucuuuauguguaucaucuucuagccuacgauaaaccagaaguaaaagcuaccuuccacagcuuauuuuc

SEQ ID NO: 4177620 - RNA, 88 nt, Human
gaaaaaauggcucacucuguuagaggaaagugcugacagccauggaagcaagcacuuccucaacaagucccgccucugucauauuuuc

SEQ ID NO: 4177621 - RNA, 123 nt, Human
gaaaaaccuaguuaauugaggauuauauuuaguaggggguuucaacugaaaguuucaccugagguguaggagaacuugggguugaauguuuaguacuuuccgcuuguccuuuaauuaggauuc

SEQ ID NO: 4177622 - RNA, 72 nt, Human
gaaaaagagaugcaacagagaaaauauugagcauauuucuagaggagcuuaaauuuccugcauuucucuuuc

SEQ ID NO: 4177623 - RNA, 130 nt, Human
gaaaaaucaggauaaaugccucaacagcugucaauguuaaauaaucccuuaaagcugugaaagccuucauuugcuuucaggaguugugacauauggucaaaaauagcuugaagauuuauuaugucauauc

SEQ ID NO: 4177624 - RNA, 72 nt, Human
gaaaaauugagguuugaacuguugaaaagccaaccuaugaggcuuaggauuuaauuucagacucagcuuuuc

SEQ ID NO: 4177625 - RNA, 61 nt, Human
gaaaacacugcaggguuuacuugacuugcccaagaucacuaaacuaguccugcauguuuuc

SEQ ID NO: 4177626 - RNA, 67 nt, Human
gaaaacacugccugcuugacugaggucacagcuguuuacuggccucaguuccuaagcugcaguuuuc

SEQ ID NO: 4177627 - RNA, 81 nt, Human
gaaaacagacacuagugcagugaauaagacauggguuugggguugcuaaugguuuugaaucacugcgcuucacuuguuuuc

SEQ ID NO: 4177628 - RNA, 67 nt, Human
gaaaacagagggagucacauauaagccuaaugaaccaaggcucaaaugaggccaccuucuacauuuc

SEQ ID NO: 4177629 - RNA, 66 nt, Human
gaaaacaggaugugaggaggccauuugugguuaauggccauugguaggggggcacuuccuguuuuc

SEQ ID NO: 4177630 - RNA, 82 nt, Human
gaaaacauaauguucuuaaaucauguggcaaacuccccucagucauaugauuuguagacauuugauugacaugcuaauuuuc

SEQ ID NO: 4177631 - RNA, 103 nt, Human
gaaaaccugaauaaaaggacaauggccuucaggcuuagugauaagaaaaguuaacagugaccugaaugucaauuuuuuggccuauuuguucuuugagguuuuu

SEQ ID NO: 4177632 - RNA, 105 nt, Human
gaaaacucauagcgcaaugagagagcggugcgauccucccagguuuccgccaaaaaacccuucagaucacagcauccuuuccuuuccauugugcucugaguuuuc

SEQ ID NO: 4177633 - RNA, 87 nt, Human
gaaaacugaugccgaaaggcuguuuugaaaaggaguuguuccaagaucucccagcagugaccuucagaccuuucuguaucaguuauc

SEQ ID NO: 4177634 - RNA, 55 nt, Human
gaaaacugugcuugauuucagagcacgacucuaaauccacgguauaguuggauuc

SEQ ID NO: 4177635 - RNA, 64 nt, Human
gaaaacuguggcuggaguaugaggaaaggcguaccccuugcuucugauuugggccaggggauuu

SEQ ID NO: 4177636 - RNA, 58 nt, Human
gaaaacuuggaucucuagaaugguucauuucagagcuuuuccagauagccaaguuuuu

SEQ ID NO: 4177637 - RNA, 68 nt, Human
gaaaacuuggauuugguuaauuuagguuucuagaauauaaauccugaagaauucaaauccagauuuuu

SEQ ID NO: 4177638 - RNA, 96 nt, Human
gaaaagaaaaagaagccuaaaugaugcuauuauggcggcuaauuaaauuucuucuugcuguuacaaugcauucauuuuugaggaucauuacuuuuc

SEQ ID NO: 4177639 - RNA, 74 nt, Human
gaaaagaaaccauguguaaauuagauaacucccagaguucauaauuuuuaugcgucuucguagguuugcuuuuc

SEQ ID NO: 4177640 - RNA, 92 nt, Human
gaaaagaacaaaucuagaauaccguaacugaaucagacuugaaaaugaucaucuguacaagauuuuaugcguaucuacgauguguucaguuc

SEQ ID NO: 4177641 - RNA, 67 nt, Human
cuguacaaagacagguagcaggacagauauggcgcacaggcuguacuuugugguuccugucuuacag

SEQ ID NO: 4177642 - RNA, 67 nt, Human
cuguacaagggucugcugaacuggugguuucagcagacuacccaguuccuaagcauccaugagacag

SEQ ID NO: 4177643 - RNA, 87 nt, Human
cuguacacgagaugggagagcuggguggacuuguaguucagcugguuguugggcaugaacuugugcagcucacucuuuuuguagcag

SEQ ID NO: 4177644 - RNA, 59 nt, Human
cuguacagauugcacacggggaagcuggcagucuuucacaccauguucauucucugcag

SEQ ID NO: 4177645 - RNA, 57 nt, Human
cuguacaucucugaggacaguaccagagcccaugagguccucccuugaauugugcag

SEQ ID NO: 4177646 - RNA, 63 nt, Human
cuguaccgcagugacauuccuugauacuugucauggugauccagugagugcagcuguugucag

SEQ ID NO: 4177647 - RNA, 86 nt, Human
cuguacuaacugugcaacuuuucugugaauuuaaguauuccgaaacaguauuuauuuuaaaacauaggguagagguugcacaacag

SEQ ID NO: 4177648 - RNA, 66 nt, Human
cuguacuauuuguucacuaugaagagguuggggaaugaucacugaccucuaaguaacagagaaugg

SEQ ID NO: 4177649 - RNA, 104 nt, Human
cuguacugugucuggguugcagggaccugcagaaagcucuggcuaccagccaggugugcucggguguggccuucucgcuggccuuguccccugugcauagacag

SEQ ID NO: 4177650 - RNA, 81 nt, Human
cuguagaaacauguuuggauguucuguaagugucuauaaaaacagauagauugcagacuuacuucgagaaaugugcuacag

SEQ ID NO: 4177651 - RNA, 73 nt, Human
cuguagacaucagccaggucagauaguuaucaacacggaugauugucuaauugacuugguguggugccuagag

SEQ ID NO: 4177652 - RNA, 130 nt, Human
cuguagagucucucuuuuacagggauaguugugauuggauuaagggcccacucugaauaaucccauuucaagauccuuaauuuaaucacauccccgaagaucccuuuuccuuaucagauaaaauuuacag

SEQ ID NO: 4177653 - RNA, 61 nt, Human
cuguagaugucuguguccaaauuuccucuucuuauaaggagaggcagcagucauacuacag

SEQ ID NO: 4177654 - RNA, 76 nt, Human
cuguagcucuccacuguccuuugcugguucuuccuaauguuccuaaccucuaacauugcagugguaggugccccag

SEQ ID NO: 4177655 - RNA, 75 nt, Human
cuguaggaaaccauucaaugaggugccugccagacuuucuggguugcuggcugggguaccaguugaacuugcuag

SEQ ID NO: 4177656 - RNA, 67 nt, Human
cuguaggccuggcaugagaccugagagucugugucguaacaaguucucaggugaugucagaccacag

SEQ ID NO: 4177657 - RNA, 59 nt, Human
cuguagucccagcuacucaagaggcugaggcaccagaaucacuugagccugggagacag

SEQ ID NO: 4177658 - RNA, 71 nt, Human
cuguauaacagguggauaugcauggucccugguaccuaguaggugcuccuuaaauauuuacuguuaaccag

SEQ ID NO: 4177659 - RNA, 64 nt, Human
cuguggauguguuuuagaugucauuuuauacuuaacggugauugacaauucauuauaucuacag

SEQ ID NO: 4177660 - RNA, 55 nt, Human
cuguggauuuaggcagagcugaccuguccagaguuacucuccuaauaguuuacag

SEQ ID NO: 4177661 - RNA, 56 nt, Human
cuguggcacauguggcaaggccuucagucagggaccaagccuagucgugcacacag

SEQ ID NO: 4177662 - RNA, 61 nt, Human
cuguggcagguggagccuccugcaggcacucuguguuuccaggaggguuuucugccuucag

SEQ ID NO: 4177663 - RNA, 61 nt, Human
cuguggcuaugguguacauacuuucugauuuaucucaaacagucgugcauaauaguuaugg

SEQ ID NO: 4177664 - RNA, 77 nt, Human
cuguggcucagugaagggugccaaguacaccugugcccuccgcugguagcugcucuaacacccuucugagcccgcag

SEQ ID NO: 4177665 - RNA, 55 nt, Human
cuguggcuucuagguccccgauguagaccaacaaaugaccugagcagagcuauag

SEQ ID NO: 4177666 - RNA, 67 nt, Human
cuguggcuuuuccggggagccuuuucuucucccugaagucacccccgcauaucccggagagccacag

SEQ ID NO: 4177667 - RNA, 90 nt, Human
cugugggaaaagcagacugggaugcgggguugacagcugagacccacaccugcccagcgcccacauucugucccagcccaccucccacag

SEQ ID NO: 4177668 - RNA, 72 nt, Human
cugugggagcugggcuuggccaggucgcucaacccguggggagaaggugucggguuagcucagcccccgcag

SEQ ID NO: 4177669 - RNA, 76 nt, Human
cugugggagggguaugauagggaggugaaauucuuacugaauuucagcaagacucuauuggucauucuuccuucag

SEQ ID NO: 4177670 - RNA, 55 nt, Human
cugugggcuguacugagggcaggcugcagaaagaucugucuuccucagccuaagg

SEQ ID NO: 4177671 - RNA, 90 nt, Human
cuguggggagagcuauggguguggguuccauucuucgggggccacuucaccccccaaaugcccccacacuccuggguccucuccucacag

SEQ ID NO: 4177672 - RNA, 70 nt, Human
cuguggguugcaggguaggugacagguagucaggauauugacuccugccucucuacuucuguggccccag

SEQ ID NO: 4177673 - RNA, 89 nt, Human
cuguggucagcugagcugccugccuugccuggaggaacgcaggucccacagcugccucuguccggcaggcaggcaaguuguaccuucag

SEQ ID NO: 4177674 - RNA, 57 nt, Human
cuguggucaugaguccuuccauggugccaaaguugucauggaugaccuuggccaggg

SEQ ID NO: 4177675 - RNA, 59 nt, Human
cuguggugauaacauggcacucauguaggccauuugguugucaguuauaaucaccacag

SEQ ID NO: 4177676 - RNA, 94 nt, Human
cugugguugacaaucuucucauacugggcacagccauuggccauggugcuguccaugugcaaggaguggcuguuguuccugaacagaaccacag

SEQ ID NO: 4177677 - RNA, 82 nt, Human
cugugguuugggaguucauagugacaugcauucuggcuugcagucauacauugguuagucaaaugcguguucucagacacag

SEQ ID NO: 4177678 - RNA, 67 nt, Human
cuguguagucagguggucccacuuggggaauaaccacagguauggggggcuggcuaggggcucacag

SEQ ID NO: 4177679 - RNA, 72 nt, Human
cuguguauaaauauaaugcuguuuuaugccaaaaccguuggugaaaagucaugcaauguaaaauauauacag

SEQ ID NO: 4177680 - RNA, 67 nt, Human
cuguguauugaaaaaggguuaagauugcaaaaaucaaucuuaggcaauuugauuuuucaagacacag

SEQ ID NO: 4177681 - RNA, 55 nt, Human
cugugucccagccaggauaaugagggggaggcugucugguugccuggggacacag

SEQ ID NO: 4177682 - RNA, 93 nt, Human
cugugucugucacugagggcucaggcgggcccugcaggcagauaaggccaugggucuggcugcagcccucgccuagccacacauggacaacag

SEQ ID NO: 4177683 - RNA, 74 nt, Human
cugugugacacaguagcaaguacauaucagcuguuaagaaacaaagaucuugcuuuccuacuggagacauaugg

SEQ ID NO: 4177684 - RNA, 77 nt, Human
cugugugacccaggacaaaauaaccaggugauuuucuucugaguuuaaucugaaugucuugucugugguaaacauag

SEQ ID NO: 4177685 - RNA, 103 nt, Human
cugugugcaaagcaguguauauuuuuucugucuugaacucccacugacuauagcaugcucauggggcucuucaaguggaggagacacgcagcuuugcucacgg

SEQ ID NO: 4177686 - RNA, 56 nt, Human
cugugugcacgacuaggcuuggucccugacugaaggccuugccacaugugccacag

SEQ ID NO: 4177687 - RNA, 84 nt, Human
cugugugccaggcucuucguacuuggccuucuacacacgacacagugcucaggaggaugagcuacgaggagcucccuuuuacag

SEQ ID NO: 4177688 - RNA, 77 nt, Human
cuguguggaaaucucagggaagcuauggugagggccucauugcuggcccugcagagccagcccugaccuucccaaag

SEQ ID NO: 4177689 - RNA, 130 nt, Human
cuguguggaugagcucugacaacaggcugucugggucuggugagcuccugaaagcggggacugguggagaguacccuagggugggagcucaugaggagggggucuguggggucuggaagccauucuagag

SEQ ID NO: 4177690 - RNA, 73 nt, Human
cugugugucaaauagaguuauuaacacccgcacaguuggacauaugcgaguuaacuauggcuuugucacacag

SEQ ID NO: 4177691 - RNA, 56 nt, Human
cugugugugaccagaagagagcacucucugagcucagaaguuugguuguaacaugg

SEQ ID NO: 4177692 - RNA, 57 nt, Human
cuguguguuuauaucauuuccucaacucagauacugaggcaggauucaaacacagag

SEQ ID NO: 4177693 - RNA, 57 nt, Human
cuguguucauauucauccugucauuugagcucugugacagccuugugauggagacag

SEQ ID NO: 4177694 - RNA, 99 nt, Human
cuguguugaaauuaccuuaccauuuaggguuauauaccauagcauuuauagaugaaaugacaugaugguugaacuuaaagggaauggguagggauauag

SEQ ID NO: 4177695 - RNA, 77 nt, Human
cuguguuggaguagacagugggaaguaugggacccagaggcaggugcuugauuucuuccauugccucuucaaagcag

SEQ ID NO: 4177696 - RNA, 55 nt, Human
cuguguugggcugggcugggcuaagcugggcuaggcugggcugagcuggacggag

SEQ ID NO: 4177697 - RNA, 56 nt, Human
cuguguuucugagaaguggggaaaacugcucuugcuuugaguccucaguaacacag

SEQ ID NO: 4177698 - RNA, 75 nt, Human
cuguguuuggugugaguucauaccacaccccguugucccgaggguuucugcggauugaagucacacugagcucag

SEQ ID NO: 4177699 - RNA, 77 nt, Human
cuguguuugucuucuaaucaguuguucacucugaaaaugugguucaauucuuugaguauaacugagaacaaacaggg

SEQ ID NO: 4177700 - RNA, 70 nt, Human
cuguuaacuguugugcgggucucuggcuucggacugccuaugguugaauccuggcaccaacaauuaacag

SEQ ID NO: 4177701 - RNA, 103 nt, Human
cuguuaaugauaacaggugugcuuguuagcaugcuuaauggauauuuugauuaguucauauccaaaguaugcaaacauuuuugauuaccuguuuauaguacag

SEQ ID NO: 4177702 - RNA, 87 nt, Human
cuguuacaagugaugcaccaauacugacacauuguuauuuacuaaagugcguagcuuacaucagaguugguuccuuguguuguacag

SEQ ID NO: 4177703 - RNA, 126 nt, Human
cuguuacaauuuuugcaaaggcaguuucacagucaagguggaccagaaaaauucaguaaauagucugaaaaauauggaauacuccacuuuuauuucuuaguuguugcuuuuuaaaaggaguaccag

SEQ ID NO: 4177704 - RNA, 63 nt, Human
cuguuagaaaguuuauaguuccucaguguagugugagauagaggaaguauucuuuguuagcag

SEQ ID NO: 4177705 - RNA, 62 nt, Human
cuguuagucauauguggcauuuucuaaucuagugauaagagucugugucauugugaauacag

SEQ ID NO: 4177706 - RNA, 84 nt, Human
cugggccuuggggaccacacugggagcuggaaugggagaagcugaaacaauuuccucacccacucccugucaccuuaggcuggg

SEQ ID NO: 4177707 - RNA, 55 nt, Human
cugggcgggacagcgccaggccuacagucaccacggaaugugcucucucacucag

SEQ ID NO: 4177708 - RNA, 72 nt, Human
cugggcguuguggcucacaccuguauuccuagcacuuugggaggccaaggcagguggaucgcuugaauccag

SEQ ID NO: 4177709 - RNA, 62 nt, Human
cugggcuaauuaagcacagcuggguguacaucagccccagucaagugugacgauuaggcugg

SEQ ID NO: 4177710 - RNA, 119 nt, Human
cugggcuagauugggcugggcuggacugggcuaggcugagcugggcugagcugagcuggacugagcugggcugggcugggcugggcuggccugggcuggccugggcugggcuggccugg

SEQ ID NO: 4177711 - RNA, 89 nt, Human
cugggcucaggucaugcuucugccauacugaggacacauugugauuuucauuacaguuggaauuuugggugucagaggccugggcccag

SEQ ID NO: 4177712 - RNA, 72 nt, Human
cugggcuuugcuccguuguccucggccaagcaccugcccuggcugcaagggcacggacccugccacgcccag

SEQ ID NO: 4177713 - RNA, 74 nt, Human
cuggggaacgggccaucgggugcgggaagccacgcagaacggggucuccagcagcccgaaggcccaucccacag

SEQ ID NO: 4177714 - RNA, 79 nt, Human
cuggggacacagagcucacagucuccuggagggggugagagaugacugacagguggucuguggugcagugugaccuggg

SEQ ID NO: 4177715 - RNA, 67 nt, Human
cuggggacgagcugugagcacuuggcgugucgucguugagaagugauuugcaugcuuaauuccccag

SEQ ID NO: 4177716 - RNA, 56 nt, Human
cuggggacgucgggcaguguucugaacagcgggagccagugccucaacuuccccag

SEQ ID NO: 4177717 - RNA, 76 nt, Human
cuggggacuuugguucuccauguggccuaaauuuccacauaguaugguggcuggguuccaugggugaaauccccag

SEQ ID NO: 4177718 - RNA, 58 nt, Human
cuggggagacgaucgauguucuuggccagcuuuuaaugacaaucgauucucucccugg

SEQ ID NO: 4177719 - RNA, 62 nt, Human
cuggggagccuggggacccuccugaguucuccuccggcucuggaccucuccuggcuuccaag

SEQ ID NO: 4177720 - RNA, 57 nt, Human
cuggggagugaagguaauuacacuagaauaacagguguaaaccagggucauccuuag

SEQ ID NO: 4177721 - RNA, 84 nt, Human
cuggggauuuauuuguucauggguuguuaugcaauccuaagguugagugcaauacagaagaguggcaagggagaaucacuccag

SEQ ID NO: 4177722 - RNA, 90 nt, Human
cuggggcagaccccuccauuuagcucagagcccagaggggaacagggagugacaagucacaccugggcucugaggagggagucgucccag

SEQ ID NO: 4177723 - RNA, 67 nt, Human
cuggggcaucugacagauaaauaaacaagauaguuucucaacaauuuguacagaauuuugccuucag

SEQ ID NO: 4177724 - RNA, 130 nt, Human
cuggggcccagggcugugugugugugugugugugugugcgcgcucauagguguguuugcaggcauguguacguguguguguaugugcauaugugcacacaugcaucuucagggacucaugacaaccucgg

SEQ ID NO: 4177725 - RNA, 129 nt, Human
cuggggcccuggcccaggcccagugugugcgugcauggccguguguaugcggggccccuggagagggacgggaggagagguagcaucacacgcacauacacacacacagaugggcugggccuggcccag

SEQ ID NO: 4177726 - RNA, 65 nt, Human
cuggggccgcccagcccagaaagguucggacacugcccagguccgaaugggcaggggggucucgg

SEQ ID NO: 4177727 - RNA, 57 nt, Human
cuggggcucacuccagcccuggcaaguagccagauauccuuggguugagacccucag

SEQ ID NO: 4177728 - RNA, 105 nt, Human
cugggggagggcggaguuaagguggcgcuggagcuggucccgcucguguauggcauccuggagccggcucuguguggccgccaaggucuccugacucucccgaag

SEQ ID NO: 4177729 - RNA, 55 nt, Human
cugggggcagggagguacccuacaggagaagccagguggggccuccugucccugg

SEQ ID NO: 4177730 - RNA, 65 nt, Human
cuggggggccuggugggugggggcaguaggugagcuccgccugccccucuugcuggcccugucgg

SEQ ID NO: 4177731 - RNA, 93 nt, Human
cugggggguggcagagagggggugaggacaggagcacugcuuuggagucuggaggcugcuucuauccucauucuacuuccuaccagcucucag

SEQ ID NO: 4177732 - RNA, 86 nt, Human
cugggggucagaggucacugcagguuuaacagagugcucaggaggguagcaucugaauaaagacuugcagaugacaagccauucag

SEQ ID NO: 4177733 - RNA, 56 nt, Human
gaagaagccucuguggaucugaccaucuucuugcuccacuuggcagguguuucuuc

SEQ ID NO: 4177734 - RNA, 73 nt, Human
gaagaagguggaguagaacaagcuauuguacauuuuaaaaccaucagggaguuugauuugucuaucuucauuc

SEQ ID NO: 4177735 - RNA, 67 nt, Human
gaagaaguaggugcuaauuucaucuggaaacuugaucgauaaauuaguguuauuagcaagcuucuuu

SEQ ID NO: 4177736 - RNA, 109 nt, Human
gaagaaguaugcagggcugggcaguccaggugaaugguaggguuuaggguacugcaaagcaucucugagcuuuuauuaucaaccugucuuaacuuguauuuauaaauuc

SEQ ID NO: 4177737 - RNA, 65 nt, Human
gaagaauacagcagauggagacaaauagauuugauuucuaucuccacaauaugcauguauuuuuu

SEQ ID NO: 4177738 - RNA, 79 nt, Human
gaagaaugaauagauuucuggaaaugcacaacuaauuggcagaauuucuaaguuaguguuguccagacuuucauccuuc

SEQ ID NO: 4177739 - RNA, 85 nt, Human
gaagaaugcccaguucauagguuugcugugaacauaaaugagguaagccaugauuacugcagggccuauggagugaacacucuuu

SEQ ID NO: 4177740 - RNA, 95 nt, Human
gaagaauguuugaaaaugaaacaauuagcuguaauaucaccacagaacaggaaugguuuuguuguggcuguuguuuguuuucagcauguguuuuc

SEQ ID NO: 4177741 - RNA, 57 nt, Human
gaagacacaauugguggguccacuuggaaggaucaaggacccuagguuuugcucuuc

SEQ ID NO: 4177742 - RNA, 83 nt, Human
gaagacagugguagugaugaugauguuagagacagugauaaugauauugaugauucugaucaucaucauggugguagugauuc

SEQ ID NO: 4177743 - RNA, 121 nt, Human
gaagacaucuguacaggccauccaugcaggagggugacaacugcaaaggaggcuaggacacuuuggggugauuaauguuugcaguugucauccuccugcacagaugccuucaagugccuuc

SEQ ID NO: 4177744 - RNA, 91 nt, Human
gaagacucgcuugaacccaggaggcggaguuuacagugagccgagauugugccacugcacucuagccuaggugacagagcgagaguccuuc

SEQ ID NO: 4177745 - RNA, 68 nt, Human
gaagacucucaggucuuuaggucaguucauugcgaugagaaucaagcuagccugaagccugugucuuu

SEQ ID NO: 4177746 - RNA, 58 nt, Human
gaagacuuaggaagcuuuugaggacaaacauugccucaugauguuugcugagggauuc

SEQ ID NO: 4177747 - RNA, 62 nt, Human
gaagagaagguguaggccauccuggguccaguaagacuuuauggcagacucucuucuccguc

SEQ ID NO: 4177748 - RNA, 61 nt, Human
gaagagaccuuuaaaguagcugcaguguaauugagaagaccgcucagucacaggucuuuuc

SEQ ID NO: 4177749 - RNA, 61 nt, Human
gaagagacuuugcagugucccuaggauucaguagucucucaguaaaugguaaagucucuuc

SEQ ID NO: 4177750 - RNA, 58 nt, Human
gaagagagaguuccuaggcaaaauauacccugauauuucaauaggagcaucuuucuuu

SEQ ID NO: 4177751 - RNA, 128 nt, Human
gaagagaugaaucaugugcauaauuucuacaaguuaacaacauauaagaagcagaauucuacagaugauaaaguagaauauguuugacaucuaagaauucuuacuuuagaagugcaguuuagcucuuc

SEQ ID NO: 4177752 - RNA, 64 nt, Human
gaagagaugaggcugauaguugaagauguccuuuguuuacaacacuguucagccucuucuguuc

SEQ ID NO: 4177753 - RNA, 62 nt, Human
gaagagccaggugucgcugugguccucugcaucugggccgccgccgcgacucuuuggccuuc

SEQ ID NO: 4177754 - RNA, 62 nt, Human
gaagagcuaaaggcacaggcuuugucacauccaccucaaguccauuguggcuuuaccucuuc

SEQ ID NO: 4177755 - RNA, 62 nt, Human
gaagagcucauggugcuaucucagggcgagccaagguugcuucaugggggccaugagacuuc

SEQ ID NO: 4177756 - RNA, 57 nt, Human
gaagagcugacagugucauccugucuauggacgggaggcuggcgauggucauuuuuc

SEQ ID NO: 4177757 - RNA, 65 nt, Human
gaagagcuguucuuuggucaaagguauacaggugguauacugaugaugugaagaaacacaacuuu

SEQ ID NO: 4177758 - RNA, 55 nt, Human
gaagaggagggguuagcagggcacuccaaucuuugucuggugccuuucacucuuc

SEQ ID NO: 4177759 - RNA, 65 nt, Human
gaagaggauucaugugcaagagaagacauuggaugagauuuguaaucucagcauaagaacccuuc

SEQ ID NO: 4177760 - RNA, 61 nt, Human
gaagagguucaacguggucaucaccagguuuuucaaguagaacuccguguugggguucuuc

SEQ ID NO: 4177761 - RNA, 59 nt, Human
gaagagugaaucugaaaggcacuauaguugacagaauuguacagcccagauuccucuuc

SEQ ID NO: 4177762 - RNA, 70 nt, Human
gaagagugggcaggagccucgacuacuggcaauuaaaugcuucuacccaagucacuucuguucacauuuc

SEQ ID NO: 4177763 - RNA, 65 nt, Human
gaagagugucugcacauaggaucucaaaaacuauuuugaaucagugaauuguguagauguuuuuu

SEQ ID NO: 4177764 - RNA, 116 nt, Human
gaagaguucagaauauccuugaaauauuuaacuucugcagaaaagugcaugcuguaucaguuuaaaauacuauguaauauugauguagaguuuuuccaguuaugacuagacucuuc

SEQ ID NO: 4177765 - RNA, 60 nt, Human
gaagauaauguguuuauuucugugaaacuaaaaaacagaauaucguagcauauuaucuuc

SEQ ID NO: 4177766 - RNA, 64 nt, Human
gaagauaccuugaguaaguggaauuagccagacacucuucaaaugacaccucauagguaacuuc

SEQ ID NO: 4177767 - RNA, 89 nt, Human
gaagauagacuuuaucaugacuuccagcaauaucuucuuucucucaacuucauugcuguuuacuuaggaagacagaaaagccuauuuuc

SEQ ID NO: 4177768 - RNA, 58 nt, Human
gaagauaggagcagaagcacuagauacaguauuuggucugagcaacugcccuaucuuc

SEQ ID NO: 4177769 - RNA, 70 nt, Human
gaagauauaaacggagucaucccuucccucaacaaauuuacaccagguggggcagcucuguuuuauuuuc

SEQ ID NO: 4177770 - RNA, 81 nt, Human
cuguuaugcugggcauuggcucucacguguguucuccagucucugaccauacaauccagccauugccacaaucacauaugg

SEQ ID NO: 4177771 - RNA, 62 nt, Human
cuguucagguguacucccuuggccacuuaaagggccccguggucacaggggaccaggagcag

SEQ ID NO: 4177772 - RNA, 100 nt, Human
cuguucagucagugcccuugcaggccaggugcucuguggaauaucaccccugcucaugggucuccugugccugggaggccagccguuucuggcugagcag

SEQ ID NO: 4177773 - RNA, 56 nt, Human
cuguucaguccacuaagacccuuguuagaggaggcggggggucuggaccagaacag

SEQ ID NO: 4177774 - RNA, 70 nt, Human
cuguucccgcaggcucuggccagagacugaccguguacuuggccuuccuggucagaggcugcuggaaggg

SEQ ID NO: 4177775 - RNA, 73 nt, Human
cuguucuccuacuuugccuuucauauagauuuguagauuuuuacaaguccguaaagggcagauaugaagacag

SEQ ID NO: 4177776 - RNA, 56 nt, Human
cuguucucuguucuauugugauuucuagguagaagaauaaguagaugggagaaggg

SEQ ID NO: 4177777 - RNA, 72 nt, Human
cuguucuuaucgucuuaauaucugauacguccuccaucugaggacaacauauuaaauggauuuugggagcag

SEQ ID NO: 4177778 - RNA, 72 nt, Human
cuguucuuuaguuccacugcaauggcuggccaaucgucccccuccuccuuguagcugaaaguaaagaaguag

SEQ ID NO: 4177779 - RNA, 84 nt, Human
cuguugaagucaggugauggggacagaaagguucauuguucuauuuuuguuccuuuuauauggcucaucacagagcuucaacag

SEQ ID NO: 4177780 - RNA, 78 nt, Human
cuguugauguaagauuguauuugauugucauaucguuuguugagaugauggccacuuaaauaugcugcagaucaaggg

SEQ ID NO: 4177781 - RNA, 120 nt, Human
cuguugcauagggaacaagugggaguggugcugguggcuuugcaguuagccuaggauugagcaauugcugcaacuguugcucucugcagcuucagcguuacuucuuacugguggugacag

SEQ ID NO: 4177782 - RNA, 110 nt, Human
cuguugcauggagaacaaugugucugccuaaaauucagggcuuuguuaaaggagaaaggggagaaggaauauuggaguaggcagaugguguucuuagccauugucaacag

SEQ ID NO: 4177783 - RNA, 130 nt, Human
cuguugccaaaacuuuauucuaggcugugucuggcagcuaauaaaagcaguucuuucuguacacagaaauucacuguauuucuugggcuucacguugcuagucaaugguuauuagaggcuugcaagcaug

SEQ ID NO: 4177784 - RNA, 77 nt, Human
cuguugccaaguugauuuuucuggcucagccgggaggcugcucccuggcucuguucuaaauuaauaaggccaaucag

SEQ ID NO: 4177785 - RNA, 65 nt, Human
cuguugccucugggagacugcuacugagcucuaaaaauagcaucuugcagguucucagaggacag

SEQ ID NO: 4177786 - RNA, 61 nt, Human
cuguuggaaugaaaggcguugaucaccucaugauuagcugguugucacagcuuuccaucag

SEQ ID NO: 4177787 - RNA, 91 nt, Human
cuguuggccuccugcagaugaccagccgagauaaacagagggcacccacucucuguugcaaugugcauggugaugugaaggaaucaaucag

SEQ ID NO: 4177788 - RNA, 62 nt, Human
cuguugugaccacaggucucuccuggaugucuucuuuccuccugagcaccagucacuaacag

SEQ ID NO: 4177789 - RNA, 114 nt, Human
cuguuuaaaauggcccccauguguaggacugaagugcugucuaguguuccuaagcacaggaaggcuggaugugccucaccgagaaaauacguguagucaauaaguuuuguucag

SEQ ID NO: 4177790 - RNA, 105 nt, Human
cuguuuaaaguugauuucgggugaaacuggaagcacaaaauugugggcacauuuaacuaacaauucagugaccuaauuacuuacagaauucaacuucugccucag

SEQ ID NO: 4177791 - RNA, 97 nt, Human
cuguuuaaccuuuggucuccacaagcuuucuccuuuuaacaaaaaggucuauuauuucgaguugucaggagauaauuugugaguuguuaaaggacag

SEQ ID NO: 4177792 - RNA, 65 nt, Human
cuguuuaguuuucuuccugcaauuggcauuuaaaagaaaugagcaauuaggaagaaaacaagcag

SEQ ID NO: 4177793 - RNA, 60 nt, Human
cuguuuaucucuaaccuguuuauugacccuguguuuauaggcaggacucagauaugacag

SEQ ID NO: 4177794 - RNA, 66 nt, Human
cuguuugaacagugaucuacauguggcauuuaaacugcuaccuuuuauuucacuguugagagacag

SEQ ID NO: 4177795 - RNA, 66 nt, Human
cuguuugaaugugcugguaacugcuuugcuucuugaguagagccaccaccaccauagcccagccag

SEQ ID NO: 4177796 - RNA, 99 nt, Human
cuguuugccguggaagaaaccugugugcugugaugaaugccacugugccgagucagcauggcggacaguuuaacuccaugaccuuccgcagguagacag

SEQ ID NO: 4177797 - RNA, 75 nt, Human
cuguuuggggcugugauuuuggcuuuuggucagucuuucaugaccacagcuucuuauaucacugggucccuguag

SEQ ID NO: 4177798 - RNA, 76 nt, Human
cuguuuuagagaaguuaggaaauaaaaguguucacaacagccgaggucaucuuuaacuuuucacuuuucaaagcag

SEQ ID NO: 4177799 - RNA, 118 nt, Human
cuguuuugagaaucaacugggcccagcauacuguaagugcaaaaguguagguaaauuauugucauugcucacauucugaaugccugacaguaagugcucaaaaaauuugguagaauag

SEQ ID NO: 4177800 - RNA, 129 nt, Human
cuguuuuguggcugcugauuaaaucuccaggucucacacagaguagauuuuguagcuuuucuauaaaaauuagacuacuaguagugaaaaccuguucuguuuaauauagcaauaaauguuuuucaaugg

SEQ ID NO: 4177801 - RNA, 88 nt, Human
cuguuuuuguguacuugacuuucugcuauacuuucugucccuggagagggagcagccuuggugucagaaaguccguuuaccuaugcag

SEQ ID NO: 4177802 - RNA, 61 nt, Human
cuguuuuuguuuauaguaaauggucucagccugcuggguugaaauacuagaauagagacag

SEQ ID NO: 4177803 - RNA, 56 nt, Human
cuuaaaauacuucaguugcucucugugcauagcagaggcacuguuugugguuuggg

SEQ ID NO: 4177804 - RNA, 66 nt, Human
cuuaaaccagguacugauauugcugcugaguuugcaaauuaagauguaagaucagagcuuggugag

SEQ ID NO: 4177805 - RNA, 130 nt, Human
cuuaaacuuuucucuuuaauccaaaaaagcaaauuaucuugcuugggcaucaccugaucuucucucuccccugcucagaaagucagugucauaucaagaagaugcuugagucugauugaaguacagguag

SEQ ID NO: 4177806 - RNA, 97 nt, Human
gaaacugauagaaagggcagcuucacaauaauguccauccucucuucuuuggagggugcauuuuacccuguguauagcugcucuccagcacaguuuc

SEQ ID NO: 4177807 - RNA, 68 nt, Human
gaaacuucaaaaguuucagcauuugaaaauuauuauuuugucagugcacagagauuuuuguuuguuuu

SEQ ID NO: 4177808 - RNA, 56 nt, Human
gaaacuugauaauugaaacagaauggaaacagaaaguguuuggauuucaagcuuuc

SEQ ID NO: 4177809 - RNA, 67 nt, Human
gaaacuugggugacccugagcaaaaauuacugaaacucauaccuguacuugcucccaccccaguuuu

SEQ ID NO: 4177810 - RNA, 95 nt, Human
gaaagaaauuaguucuaaguuauuuccucgugacugaaauugcaaaugucagauuccauuacaagaggcugagauggaaagagcucauuccuuuc

SEQ ID NO: 4177811 - RNA, 57 nt, Human
gaaagaagugauuaugcuguugaaaucgugaagauuuuacagguaacacuuccuuuc

SEQ ID NO: 4177812 - RNA, 61 nt, Human
gaaagaaucaacuaugucucuggcaugcacaucaaugaugagaacaguguuguauuuuuuc

SEQ ID NO: 4177813 - RNA, 59 nt, Human
gaaagaauguggguggauaugauguccaccccuugauaugauccuccacaccuucucuc

SEQ ID NO: 4177814 - RNA, 73 nt, Human
gaaagaauuacagaauagucuuugaugguuucuugggguucuuucucaaacauaucugauuuuccauucuuuc

SEQ ID NO: 4177815 - RNA, 82 nt, Human
gaaagagaauguuugccugacuagaguggccugagcagccagagugaggaagucaucagcaggcacuaagggauuuucuuuc

SEQ ID NO: 4177816 - RNA, 73 nt, Human
gaaagagaccuaucugugagcuagcaagaguuaucauucccacuagcucuuuauagaaaugagugucuugguc

SEQ ID NO: 4177817 - RNA, 57 nt, Human
gaaagagaggggcugagaugcagaccagucuguucucucaguggcuuccucacuuuu

SEQ ID NO: 4177818 - RNA, 62 nt, Human
gaaagagaugucguuugucuucguauagacggaaauagggggaaaucaaaagauauuucuuc

SEQ ID NO: 4177819 - RNA, 57 nt, Human
gaaagagcuggcauuuauagucuuuagagcucuaaagauucaggcccauguuuuuuc

SEQ ID NO: 4177820 - RNA, 80 nt, Human
gaaagagcuuuagaagugaaauagcuguacaaaugguggacauuguuuuuauugagcaauucaucuuuaaaugcuuccuc

SEQ ID NO: 4177821 - RNA, 63 nt, Human
gaaagaggaagcugaugcccacgguucaacuaaaaaggaaaauguauuagguguuccucuuuc

SEQ ID NO: 4177822 - RNA, 111 nt, Human
gaaagagucaaugcauuaauuuccagcauuuacagguuaagugacacuuaauaaaucauugaagagucgcuuaaccugugaaugagacccguaaaugaaaccaucucauuc

SEQ ID NO: 4177823 - RNA, 83 nt, Human
gaaagauauuaaauauccaagaaacaauuaauuccauaaauguauuauuauuggaauugcagggguuuugugauauauuuuuc

SEQ ID NO: 4177824 - RNA, 66 nt, Human
gaaagcaaguguaucuauuagucagugauacaagugucaccaaguugaugaaugcauaaaucuuuc

SEQ ID NO: 4177825 - RNA, 80 nt, Human
gaaagcacacagcuugcaguacuuguuuuugagccaagaggcagcagaaauauuccaaguacugcagcuuugauguuuuc

SEQ ID NO: 4177826 - RNA, 77 nt, Human
gaaagcauaaugcugucagaaaagaaugugagcuguagugucuauggcuuuuggcuucucucuguagcauuccuuuc

SEQ ID NO: 4177827 - RNA, 68 nt, Human
gaaagccacacuggaggcuaugugcuaagccaaguucucauacucggccaggaccucccagagcuuuc

SEQ ID NO: 4177828 - RNA, 67 nt, Human
gaaagccagauugaagccuugcauagauuuuugcuucauuuauccugcaaggcuugcaauggugauc

SEQ ID NO: 4177829 - RNA, 81 nt, Human
gaaagcccuguuucuuaaucuguguggguucgaccuaaucagguggacacuuaaaaacagauaaagcaucagagagcuuuu

SEQ ID NO: 4177830 - RNA, 61 nt, Human
gaaagccuaagacagaaagacugggcacuauaaugacaggcuuugucucugucuugcuuuu

SEQ ID NO: 4177831 - RNA, 77 nt, Human
cuuagaaaggcuuuauuugaucuauaugccuugugccaagaaccaggaauaagaagauuugaugauagcucuucaag

SEQ ID NO: 4177832 - RNA, 62 nt, Human
cuuagaaaugcagauucucaggccccgcccuccagccacucgaucagaaucugcacuuuaag

SEQ ID NO: 4177833 - RNA, 88 nt, Human
cuuagaaggaugagacaaauuuuuauagugagaauuaugcccagucagggcagcauuuuccauagaaagaaguuauaaaauuucuaag

SEQ ID NO: 4177834 - RNA, 64 nt, Human
cuuagaggcagaagaaauugacaaaagacauaacacuuuuuuguuaucuguaaucugugcuaag

SEQ ID NO: 4177835 - RNA, 101 nt, Human
cuuagauuccagacauggcccugcucaaagcccagaugggagcauuucauauaaugaggccuuuucugucuggcuacuagugggcucucuugauauuuaag

SEQ ID NO: 4177836 - RNA, 71 nt, Human
cuuagauuggagaggcauggugggaaugcgacucaugaguuagaauuuacagccuugccaucuauaucaag

SEQ ID NO: 4177837 - RNA, 56 nt, Human
cuuagcgugguggguuccucauccugccuucacccggaugucccaccgccccugag

SEQ ID NO: 4177838 - RNA, 79 nt, Human
cuuagcucauucuucugaugugaugccuagcugccucugccugugauacaugaggcauucacagaaggcaccagcuaag

SEQ ID NO: 4177839 - RNA, 60 nt, Human
cuuagcuucacugggucucaguuucccuaucuguauauugggagcaguugugaagcucag

SEQ ID NO: 4177840 - RNA, 103 nt, Human
cuuaggaacuucaguucugucaguaccacugaauaucuguagaucaucauuauauaucugaauacagauauucagugguacugacagaauaccauugccuggg

SEQ ID NO: 4177841 - RNA, 87 nt, Human
cuuaggaagaugcacuuucccugugaauauuuaaagagaggcagucuguuaaaugcucagcucggggacucuggccauuugccuaag

SEQ ID NO: 4177842 - RNA, 69 nt, Human
cuuaggaagucagagcaacugagacauuggagaucaucuaguguguucccagcuuuggaccucuuugag

SEQ ID NO: 4177843 - RNA, 75 nt, Human
cuuaggauguaagagaaggaucuguuccaggccucccuccuuggcuuguagacaucugucuucucucucccugag

SEQ ID NO: 4177844 - RNA, 61 nt, Human
cuuaggcuucuugauaaaaugcagauuccuaugaaucugaauugcuaagggcaggcccagg

SEQ ID NO: 4177845 - RNA, 65 nt, Human
cuuagggagaaugccucugcagguacuaaaaaaugagaguuaaugcaugaaauauuuucuguagg

SEQ ID NO: 4177846 - RNA, 59 nt, Human
cuuagggccuccagaaggaaaccuguacaaccuugguagcuucuggagguuacccugag

SEQ ID NO: 4177847 - RNA, 57 nt, Human
cuuaggucugagauugacauaaaggggaaccggucccuagauuuccucagggcugag

SEQ ID NO: 4177848 - RNA, 77 nt, Human
cuuaguaggugaggccagagaguuugcauuucuaacaaguuccagaugaugcgaaugcuguuggaccacacuuuaag

SEQ ID NO: 4177849 - RNA, 60 nt, Human
cuuagucagagcagggcaggcagaggggauucaucaaaaugccugccuccuuuggcuagg

SEQ ID NO: 4177850 - RNA, 67 nt, Human
cuuaguccuuuaucaaacauuuauggguuuacucuguacugugcuaguugaugggagugggacuagg

SEQ ID NO: 4177851 - RNA, 60 nt, Human
cuuagucucaagguauggaaauguuuuaaaacuuuuucauauuauuccuugagucuuuag

SEQ ID NO: 4177852 - RNA, 70 nt, Human
cuuagugccaaauauugcugguguauuaucauuauuggcuuacaccauuuucugcaguguuucacuuaag

SEQ ID NO: 4177853 - RNA, 73 nt, Human
cuuaguuucucuguauguuuaccuagaagcuugccuucucuagugacaggauacagcagagaucaagacuaag

SEQ ID NO: 4177854 - RNA, 94 nt, Human
cuuaguuuucugaacugugaaaaaauugcuggcagagcugugaauccaguguaaauacuagcaguccuguagcgacuuuuuucguuuuacuaag

SEQ ID NO: 4177855 - RNA, 72 nt, Human
cuuauaacaacaguuuacuuuaaaaaaugaccucuuuuuuccccccauguugaaguucugcuguguuauagg

SEQ ID NO: 4177856 - RNA, 79 nt, Human
cuuauaccacaggugaguuugcuauuguacaccucugugaauaaugcagcuuuguaggcagcacaccugugcaaaugag

SEQ ID NO: 4177857 - RNA, 79 nt, Human
cuuauauauacacacacagguauauauauguacauauacacacauauauguauauguacgugugugugugugugucaag

SEQ ID NO: 4177858 - RNA, 81 nt, Human
cuuauauucuuacuacaguaacuggaauucuucuucagcuccuaugagccagggagacaacauuacugguuuagauguaag

SEQ ID NO: 4177859 - RNA, 68 nt, Human
cuuaucuucuccagugcuucugcacaguaaauggaaucacuaucuguguuacacuuugagaagauaag

SEQ ID NO: 4177860 - RNA, 85 nt, Human
cuuaugaaccaggaggugaaacuucaccagacaccagauuuuccagugccuugaucuuggacuuuccagccuccugaacuaugag

SEQ ID NO: 4177861 - RNA, 60 nt, Human
cuuaugaacuguggacaaccacuuuuccugcuaugagaaaguugauuugcaguuuaagag

SEQ ID NO: 4177862 - RNA, 65 nt, Human
cuuauggagaggaaucauuauuagagaggcugacucugcaauaauguaugucacucccccaaaag

SEQ ID NO: 4177863 - RNA, 71 nt, Human
cuuauggcugucuuggaaaaggcaaagagaaaaacauuucucuuuguuuuucuuccaaaacaucuagugag

SEQ ID NO: 4177864 - RNA, 103 nt, Human
cuuaugucaucuuccaucuuccucucuaauugaucagacaagccauaccucauugugugacuaaaacuuaagagguguuagugagaauugcccaaaacauaag

SEQ ID NO: 4177865 - RNA, 74 nt, Human
cuuauguuucaucaguauauuccuuggucuuuagcccaagguuggaguguaggacuugugugaacacuuguaag

SEQ ID NO: 4177866 - RNA, 72 nt, Human
cuuauguuuccagcuguggauuggguacuuucuaaacagagaugucugaccacuagacugaugaagcaaaag

SEQ ID NO: 4177867 - RNA, 69 nt, Human
cuuauuagucauuagucggcauuacuuaucacuguugauuauagcaaugcuuauugcugacuauagaag

SEQ ID NO: 4177868 - RNA, 111 nt, Human
cuuauuaucugguagccucacuggccucuggcugaggacuaacgcuggaagaaaaguaaacugguguuggcuggccuagagguugucuucuggggcugcuaguuugguaag

SEQ ID NO: 4177869 - RNA, 72 nt, Human
cuuauucuacuuuggacauaaaggacugauauccacugaaucugucuacuaagguaugucuaaaagcauaag

SEQ ID NO: 4177870 - RNA, 129 nt, Human
cuuauucuauagacuacaauuucuaccuauauucaaauggcauuuaguugcguauugcauauauuuuaucugauuuguagcuacaugucugaagcuaggacaaugauauuaguaaauaguacaguaaag

SEQ ID NO: 4177871 - RNA, 67 nt, Human
cuuauuuaugucugucucuaauaucuagcauggugugucucauugauagcagacaucuauaaaugag

SEQ ID NO: 4177872 - RNA, 56 nt, Human
cuuauuucagcccugggcacccuguaagcaggguuggccagagaugcugauauaag

SEQ ID NO: 4177873 - RNA, 56 nt, Human
cuuauuuugauccuugcuucuugugaucaauggcacuuaagccaggucaagauaag

SEQ ID NO: 4177874 - RNA, 55 nt, Human
cuucaacaaccaugugcugucugugcggaucaaggggggcaugugagugcugagg

SEQ ID NO: 4177875 - RNA, 61 nt, Human
cuucaacggaucaugugaccuuugagugguugccucugggacaucauaugauucuuugagg

SEQ ID NO: 4177876 - RNA, 109 nt, Human
cuucaacucugacugcagaaggagcuauuguauuuaggagaaaaggguaaagacaacagaccacuuggcccuuguucugaacuuaaauauucucggcagagcaguggag

SEQ ID NO: 4177877 - RNA, 83 nt, Human
cuucaacuucaugauugauucuuuguaucuuaauuuuguaaauuuaaaauuucagauauuaaagaaugagguaguggagggag

SEQ ID NO: 4177878 - RNA, 61 nt, Human
cuucaaguguccccuucauccagauaucaggaaacaucaugggccuguggggaucuugaag

SEQ ID NO: 4177879 - RNA, 68 nt, Human
cuucacaaacuucaugauggcacacagcagguuucucaaauaacuguugguguauguaaguugugagg

SEQ ID NO: 4177880 - RNA, 66 nt, Human
cuucacacccacuaaaaugauguuuaaaaaaaauggaaaauaacaaguguuagcaaggguguggag

SEQ ID NO: 4177881 - RNA, 76 nt, Human
cuucacagacgccuccccucgccucuaggaauccugucccccaugggcugggagguggugggggcagucuaugaag

SEQ ID NO: 4177882 - RNA, 92 nt, Human
cuucuguugguuucuacagcuuuauacccaucaaaagguauaucaaaauaacuuuucgguaugcagcuguuccagagacaucugacagauag

SEQ ID NO: 4177883 - RNA, 84 nt, Human
cuucuguuuuuacucucuaguucuauuugcugauuuuuguuaauauuuauaauaacagaaauaguaggugagggaaagcaggag

SEQ ID NO: 4177884 - RNA, 55 nt, Human
cuucuuacuugucuugcauauagggaaaucuugaauguaggucuuggugagcuag

SEQ ID NO: 4177885 - RNA, 98 nt, Human
cuucuuaugugugccaugcauuggaaugcauuugaagagacacucuuaaaacaaagcacuucucuuuaaaguguugcauaugcauucauuuaaaguag

SEQ ID NO: 4177886 - RNA, 56 nt, Human
cuucuuccuccagucucugaggcuuuagggguccucagggauagaaaggaagacag

SEQ ID NO: 4177887 - RNA, 59 nt, Human
cuucuugauugcuuucaaaccagacuuuuuauguuuguggaagauaaaggaucaaggag

SEQ ID NO: 4177888 - RNA, 69 nt, Human
cuucuuggguccuggcugaagaucucugcugcccccagacucagaagagccacuccaggacucagggag

SEQ ID NO: 4177889 - RNA, 60 nt, Human
cuucuuuagggaucucuugcugugugauugcuauaggggagccaagaaucucuaaagaag

SEQ ID NO: 4177890 - RNA, 57 nt, Human
cuucuuuagucauugucauuccuuugaggcgcaaguuccaaagaaucauuagagaag

SEQ ID NO: 4177891 - RNA, 57 nt, Human
cuucuuuccuguuccacugaagucuugaaucuaaugucugggaaauugggaaagaag

SEQ ID NO: 4177892 - RNA, 74 nt, Human
cuucuuuguccucugauuucuagguauauccagccaaugagaugcauuuuaagaagauaugagggucaaagaag

SEQ ID NO: 4177893 - RNA, 129 nt, Human
cuucuuuugaagcacgauuugcucccuacaagccacaagacauuuuguugaaacccuuguuguuugaaguaccaagcauaacaacagacucuguguuugugggaagggauuggcucuuucaccagauag

SEQ ID NO: 4177894 - RNA, 69 nt, Human
cuugaacccgggaggcggagguuguggugagccaagauugcaccauuguacuccagccugggugacaag

SEQ ID NO: 4177895 - RNA, 55 nt, Human
cuugaagaaaguauguugggaucauaaugaugucacccucaguucucucuucagg

SEQ ID NO: 4177896 - RNA, 80 nt, Human
cuugaagccuguuacuuauuuguaaagguccauaguaagauugaacuuacuauuuggaauuuuaaauugguagcuucaag

SEQ ID NO: 4177897 - RNA, 79 nt, Human
cuugaagcuuugacuccacuccuaacuccuagcacccucaaacccucaggggaggagauaggggugucagggggucaag

SEQ ID NO: 4177898 - RNA, 79 nt, Human
cuugaauuagagugaaaugcaauuguauguacuccauguuguauaacuuggaugacacuugguucacacuuuguucaag

SEQ ID NO: 4177899 - RNA, 126 nt, Human
cuugaauuuauuuggcccagagggagguagacaaggggcaguuaauaugucuuugcauguuaagaugacaguuuagagcaugaugaccaguuuuuagucuucauugcagucugggcuggaggcagg

SEQ ID NO: 4177900 - RNA, 56 nt, Human
cuugacauuaguuaugcagauaaggcaaccgggugcucucuuaacuaauggucaag

SEQ ID NO: 4177901 - RNA, 96 nt, Human
cuugaccccguaaccacuucgacagccaucagcacacgcugcagcaccacacaugcaguguguggugagggcugcccaacugcuuagggggucaag

SEQ ID NO: 4177902 - RNA, 66 nt, Human
cuugacuaauuacacugagcaguugucuguugcuacaacuucugccaaacagcuguuauuguuggg

SEQ ID NO: 4177903 - RNA, 79 nt, Human
cuugagaagcggauccauagagcaacucaucuccacugaaacaguagaacaaugaauuucuggaggaauuguuuucagg

SEQ ID NO: 4177904 - RNA, 74 nt, Human
cuugagauaugcagcuggaacuuagaggagagguaaacaccucucaguuuaaauuuagguugcugucaucuaag

SEQ ID NO: 4177905 - RNA, 77 nt, Human
cuugagauggaaucuguguggagggcucagccugaggauaaaaugaguucaucguuugcacauguuucauucuuaag

SEQ ID NO: 4177906 - RNA, 96 nt, Human
cuugagcagguuucuucaucucucuguguuccaagucuccauuuaugaaacugggaugacuucugcuuuacagaguugauaugaggcuugcaugag

SEQ ID NO: 4177907 - RNA, 63 nt, Human
cuugaggacuucaggccuggccaggggggcaccucuggcucaggagcuguguucagagucaag

SEQ ID NO: 4177908 - RNA, 56 nt, Human
cuugaggagccagauguagaguuuaguuguagauguauacauccggguuacuuaag

SEQ ID NO: 4177909 - RNA, 63 nt, Human
cuugaggcaucacuucuugcuuuguuuccaagugagcauaugcaagaacaggugcuuggcaag

SEQ ID NO: 4177910 - RNA, 81 nt, Human
cuugagggacuuccagcgggucauggcugcuccagccccugcuccgagcagcucaaagccugcaaggaacagaaucacaag

SEQ ID NO: 4177911 - RNA, 86 nt, Human
cuugaguuauuguuaauuagagguaugugaagugauaccauacuaugguuuuaaaaugcauuucucugauuauuuauaaggucaag

SEQ ID NO: 4177912 - RNA, 81 nt, Human
cuugaugacuaugauaagucaaaggcauaauaauuguuauuaugguuauuagcuuuaaagacuuugauucacauucacaag

SEQ ID NO: 4177913 - RNA, 73 nt, Human
cuugauguccuguagcaggaaaacugcucccaagcugcaaucuguggcuugaauucugcuugcaaauaucaag

SEQ ID NO: 4177914 - RNA, 97 nt, Human
cuugauuaagacucacaggucaaauaucaucucucuuuucugcaugcuaauuaaaagcaacucuguucuuagguauuugacagucauuugaaucaag

SEQ ID NO: 4177915 - RNA, 76 nt, Human
cuugauuccugucuggggccagugcugggugggcccagcuccccacuuacccacagggcacagacaggaagcaaag

SEQ ID NO: 4177916 - RNA, 94 nt, Human
cuugauucugucaagccagauagaagaacucauuuuauauagugacaauagacaugaguaaauuaucuguuaaaaaggcacagagagaaccaag

SEQ ID NO: 4177917 - RNA, 73 nt, Human
cuugcaaagcuguaaugcaugcuuucuuuuaucucucaaaguaauagaaaugagauuagagcuuuucugcagg

SEQ ID NO: 4177918 - RNA, 63 nt, Human
cuugcacagaacucuuagagguucuggggccaaaagauuuccaucucugagaaguuuuucagg

SEQ ID NO: 4177919 - RNA, 103 nt, Human
cuugcagagaugaugauaagccugcagcaggugacaacgaguggacucaccuccaagcucuucauuuuuugcauaccuguguccauugccaucucucugccag

SEQ ID NO: 4177920 - RNA, 64 nt, Human
cuugcagaguccuaaacacucaggacugaaucacagcacccauggagguagggcuuaaggcaag

SEQ ID NO: 4177921 - RNA, 61 nt, Human
cuugcaggcccagccuuacaagcacaaguugagugcucagccuguaacugggacugcacag

SEQ ID NO: 4177922 - RNA, 83 nt, Human
cuugcauaaagucaauaagugguagggcugagauucaaaucuaaauacuagauuaugcauuccaaccuuauucacuauguggg

SEQ ID NO: 4177923 - RNA, 129 nt, Human
gaaugguuuuuagaacugagugagauuacuuaggaaauaaauacuuaugguuaauaaaggguaauguguucuaaugagaaguaauuugugcuuguuuauuuuuacucuucuauguuuuaaaaagaauuc

SEQ ID NO: 4177924 - RNA, 67 nt, Human
gaauguacagugauaagagggcagaagucacaggacagacucugaaucuuaauaauuguguguauuc

SEQ ID NO: 4177925 - RNA, 71 nt, Human
gaaugucuccaacuuggggaaaagcucugucuacaguagaucaugcugcuuuucugaaguuuaagacauuu

SEQ ID NO: 4177926 - RNA, 64 nt, Human
gaaugucuccgaagcuggauugauguggggaaagcaccuuucccuucuaguuuugagagacuuc

SEQ ID NO: 4177927 - RNA, 64 nt, Human
gaaugucuucaaaacuagacugauguggaaaaaacaccuuucucuucuaguuuugagagacuuc

SEQ ID NO: 4177928 - RNA, 70 nt, Human
gaaugugaaacugaagcauccauacucaccauuacacccaggaaguguggguguucucacuuagauaauc

SEQ ID NO: 4177929 - RNA, 78 nt, Human
gaaugugagaucgugagaacacacagcugguuggcaagcagcaucaaccagcucuuucuuuucacuauauuacauauc

SEQ ID NO: 4177930 - RNA, 78 nt, Human
gaaugugauaggaggagacccaagcucugcagaggacucuccaguauaaaacagauuggguuugcuucugugccacuc

SEQ ID NO: 4177931 - RNA, 58 nt, Human
gaaugugucacccugucccaugccacagccugagacagugugcagguguuucauauuc

SEQ ID NO: 4177932 - RNA, 79 nt, Human
gaauguuccaugccuucugccagauuaagggugggauucuaccacauauuugccaugaagaguguuugaaaacacauuc

SEQ ID NO: 4177933 - RNA, 95 nt, Human
gaauguuggagcugggaaugauuuuggagaggaaaaaaaugcaucucaaauuuugcagcaauuucuccccaaaggacucacucucaccaccuuuc

SEQ ID NO: 4177934 - RNA, 93 nt, Human
gaauuaacagggagggaacacagaagggcugaaaaaugaggugcuguucuccuucuuuuaccucagcugcugugauuccugcuaucccaauuc

SEQ ID NO: 4177935 - RNA, 122 nt, Human
gaauuaacuagggaauuuucaaaaacuucccaugccuggccccuauccuuagagaaucagauuuaacucguuuggauuaguucccagguguggguauuuuuuagaaguucacacagugauuc

SEQ ID NO: 4177936 - RNA, 70 nt, Human
gaauuaauaauggggggaagauaucagggacguuuauuuugcauccaagaaaauuuucucucuaugauuc

SEQ ID NO: 4177937 - RNA, 82 nt, Human
gaauuacacuguagguggcaggcagcuucuaggauggccccaaugaucccugcuuccugauauucauacuguuguguaauuc

SEQ ID NO: 4177938 - RNA, 63 nt, Human
gaauuagguaauagaacuaguaauuaagaugguucaccucuaacacaguucuguggccuguuc

SEQ ID NO: 4177939 - RNA, 85 nt, Human
gaauuagugacaggaauguguggaugcggaaguagagggcaaaaccauuaaagucuacuuucacucauacuuauucauuauauuu

SEQ ID NO: 4177940 - RNA, 101 nt, Human
gaauuaguugggccaagauauguguauuuccaucgaucagcagugacucugcaagagagaaagcugauaugggacuguccaguguccuguccaaaagauuc

SEQ ID NO: 4177941 - RNA, 72 nt, Human
gaauuaugaaucugucgaaugcaguccuauaggucuucccuacauacuccauaaugacagcaucuguaauuu

SEQ ID NO: 4177942 - RNA, 81 nt, Human
gaauuauuuugauagcuguugccaauuuccaugguguaaauacucccaccguggccaguuucaagcuaccaacaugauguc

SEQ ID NO: 4177943 - RNA, 73 nt, Human
gaauucacaguggguggcuaaguggcugacucuggggucagacuggguuugcagccaccuguucugugaguuu

SEQ ID NO: 4177944 - RNA, 76 nt, Human
gaauucgaccacagcagugcaagaggagaguaacccccucuuuccucauuugcaguguguguaugacuaagaauuc

SEQ ID NO: 4177945 - RNA, 71 nt, Human
gaauucuaccccaugguccccacgcucugaaaagugguggaggagaugguuggguuaacaacuaagaguuu

SEQ ID NO: 4177946 - RNA, 73 nt, Human
gaauucuaugauguaaaauaaguugugagcuuugaguaaaggccuucccacauuccuuacaugcauaggguuu

SEQ ID NO: 4177947 - RNA, 69 nt, Human
gaauucucuggagaacuuccaguuucccaagaagaaacuuagcaaaucuuuuggauucucuagggaauc

SEQ ID NO: 4177948 - RNA, 94 nt, Human
gaauugcugaauugauuguggccuguguggcuuccugggagauggcccaggcuagcugguugggaugcucacagcuguggucauucaccaauuu

SEQ ID NO: 4177949 - RNA, 60 nt, Human
gaauugggagaaguagcugguuuacuuguaugcuuauuuaacuuguauuucuccuuauuc

SEQ ID NO: 4177950 - RNA, 99 nt, Human
gaauugggugucuccaggggcaggccagccguaucaaugauuaaauugaucuaggugguaggucuguuuugaacuguucucuguaaaggcaccaauuuc

SEQ ID NO: 4177951 - RNA, 85 nt, Human
gaauuggucucugagcccagcucuaccucagacuugcugcuuaugccgcaguguagauccugaggcuuggugaguugcccgguuc

SEQ ID NO: 4177952 - RNA, 57 nt, Human
gaauuggugcucuggcacauuccucucuccaucugaggagugugaagagccuagauc

SEQ ID NO: 4177953 - RNA, 77 nt, Human
gaauuguagagggaacagaagcauucagaaccuaacacuucagaguaucuguuccuuucucauuuaauagauaauuc

SEQ ID NO: 4177954 - RNA, 76 nt, Human
gaauuguaugcugucuugauagcaaugcuugaauggacgucauugauguugggcacucaagacagacauggaguuu

SEQ ID NO: 4177955 - RNA, 70 nt, Human
cuguucucaauaugugcuuuggccacuugggaaguggucccaagucauuguuuagucauguuagcuacag

SEQ ID NO: 4177956 - RNA, 69 nt, Human
cuguucucccugcgugggcuccaggguccguuugauaagcugcuuuccccgggguccugugggagacag

SEQ ID NO: 4177957 - RNA, 75 nt, Human
cuguucugaagggcccgcagggcuuaagggaggaaagcggcuucccacaggggcucuguggguucuuuuggggag

SEQ ID NO: 4177958 - RNA, 57 nt, Human
cuguucugcagacuuggaagguggucuggugacuccuguccuauucugcaguaacag

SEQ ID NO: 4177959 - RNA, 76 nt, Human
cuguucugcccacccugagccuugauggcugagccuugagcagcucagcuaggggaccaagguggcccaaggacag

SEQ ID NO: 4177960 - RNA, 79 nt, Human
cuguucugcuguuuucuuuguccuagcauucuacauagagaaacugucuaguguuaaggcaaaguaaagguaagaaggg

SEQ ID NO: 4177961 - RNA, 83 nt, Human
cuguucuggaggccagaagucugagaucagggugccaauauggucagguucuggugaagacucucuuucuggcuuucagacag

SEQ ID NO: 4177962 - RNA, 78 nt, Human
cuguucugucgugucgggggaggaaguugcugccccucagugucccugagucucgguuuccccuccaacaaucagcag

SEQ ID NO: 4177963 - RNA, 56 nt, Human
cuguucuucacauuucauugaggagcacggggaagcuuuggggugggaagaagcag

SEQ ID NO: 4177964 - RNA, 100 nt, Human
cuguugaagcuaaaaagauggaagacaugaugauucuccuuccaguuguauuucauuucgauuaauccuuuaugguuuuccucccuucugguuucugcag

SEQ ID NO: 4177965 - RNA, 72 nt, Human
cuguugaggugggugucaggucagagcccauggacuccucuacacagcuuugagcuggcagcuucccagcag

SEQ ID NO: 4177966 - RNA, 70 nt, Human
cuguugccaggcuggagugcaaugacaugaucucggcucacugcaaccuccaccucccagguucaagcag

SEQ ID NO: 4177967 - RNA, 86 nt, Human
cuguugcuccuucuugcauugggcuggccuguaucaagugaagggguugggcacuguagcuggugcuggggggagcuaauugacag

SEQ ID NO: 4177968 - RNA, 72 nt, Human
cuguugcuuuggcaaugucauuuucaaucauacaggaguauguguuguugaucguaacauuguagagcacag

SEQ ID NO: 4177969 - RNA, 73 nt, Human
cuguuggaguuuguuuacucuuggacagacaugacuuucuguuucuccagagagaaaaacaagcuuuacacag

SEQ ID NO: 4177970 - RNA, 55 nt, Human
cuguuggcuauagggagauggggcagggaagcccagauccucuauaagccagugg

SEQ ID NO: 4177971 - RNA, 79 nt, Human
cuguugguggccuggcugccuaggugcuagggguggguuuggccacacccuggaggcuggaggcaguaggggccagugg

SEQ ID NO: 4177972 - RNA, 67 nt, Human
cuguuuaaugagcuggaggaggaaguggcuccugaaagcaaguccuuuucuuggcucaggcaugcag

SEQ ID NO: 4177973 - RNA, 60 nt, Human
cuguuuaugucacuguagguggaggauggugagaauucucuuaacagugcuacagagcag

SEQ ID NO: 4177974 - RNA, 65 nt, Human
cuguuucacaguagaaaucauuaugucaucaaauuggcuuaauuucaaacugcuagugauaacag

SEQ ID NO: 4177975 - RNA, 73 nt, Human
cuguuucagugaaguaauggugagagauauagguauuagguguccuuacuauuacuuacauuuuuugauucag

SEQ ID NO: 4177976 - RNA, 108 nt, Human
cuguuuccuggggauuccucucuugacucuauauauacuucacugcuuaacucaagaucucuuuaaagaggugcagugagugagaauuauugggggccugggaggcag

SEQ ID NO: 4177977 - RNA, 66 nt, Human
cuguuucucacuuuccagacuuuucaaaauuaucaguaauuuaugaaggguggagaagagcaaugg

SEQ ID NO: 4177978 - RNA, 66 nt, Human
cuguuugaguccugcuuucaauucuuuuggguaaacaccuaggaguggaauugcuggaucauacgg

SEQ ID NO: 4177979 - RNA, 107 nt, Human
cuguuugcuggcuguaucuuggaagcuggaacagaagcacuggagagauaguaaaccaacauucuccaucuguccauuuaggaaaugccaccugagccagcagccag

SEQ ID NO: 4177980 - RNA, 93 nt, Human
cuguuugucuggagauuaggagaggggaaggauggaggaagccucaguggcuuccaagguccucuccacccacucccaguuccagaaaggcag

SEQ ID NO: 4177981 - RNA, 75 nt, Human
gaaggguugacacuugauuuuuauaauaaauggucuuuguauuaugcuguuaggaaaaucaaaauauugcccuuu

SEQ ID NO: 4177982 - RNA, 109 nt, Human
gaagguauauggaguaaagugcaugcaauuaagguuuaaauuuucuguuggugucgccaaagauuuuagaauuugcaauuuuauaguguacuuuucuaguguguccuuc

SEQ ID NO: 4177983 - RNA, 74 nt, Human
gaagguauuuuucuguguuaaaauuugucuuguugauguaacagaauuuuuacacaggguaaauaugugcuuuc

SEQ ID NO: 4177984 - RNA, 63 nt, Human
gaaggucagaggcaauuugaauaguaguaguuggcagaauacagauucagugucucugacuuc

SEQ ID NO: 4177985 - RNA, 86 nt, Human
gaaggucuguugcugucuuuuacuaucauuuacugucucccugcuuggaaaguaugaauuacugauaggacuagcaaucuaccuuc

SEQ ID NO: 4177986 - RNA, 69 nt, Human
gaaggugagacagcagauuagcaaugauuccacaccaagugucacuguacuaacugcucuuucacacuc

SEQ ID NO: 4177987 - RNA, 90 nt, Human
gaaggugauaauguucugaaucaagcaacucuccagugguagaaaacaccacagcccagagaucuugauugagaacauuuuauucccuuu

SEQ ID NO: 4177988 - RNA, 70 nt, Human
gaagguggccuggggucucaauucuagcgggcugaugcagcccaccuggcucugaggcuccagauucuuc

SEQ ID NO: 4177989 - RNA, 99 nt, Human
gaaggugguagauucugcaaugcggccugagguaguaaaaugggcagguaagggugugauuccauuuguaucugggcugcugugggaugcuguugauuc

SEQ ID NO: 4177990 - RNA, 55 nt, Human
gaaggugguaucaugaccucagcagagagagggcucugaagaugguaccagcuuu

SEQ ID NO: 4177991 - RNA, 73 nt, Human
gaagguguaaaggguauggccucugggguccuugcuagacuggcagguccaucgcccuuuacucagugccuuu

SEQ ID NO: 4177992 - RNA, 60 nt, Human
gaagguguucauaccauauuaaguaaagagaacggacuauaagacaguaugaauacuuuc

SEQ ID NO: 4177993 - RNA, 84 nt, Human
gaagguuuauaaagaugcuauagugaaggagucucuggggacacaaaucgaguggcuguuuuauugugauuuuuacagauguuu

SEQ ID NO: 4177994 - RNA, 80 nt, Human
gaaguaaagcacaaacacugaguaucagaguugggaaucaccucagguaucccagccuguacccagugcaaaaugccuuc

SEQ ID NO: 4177995 - RNA, 66 nt, Human
gaaguaacaaggacuuguaguuuuaugccuaagcaaaacuuuaaauuuguaccucuguguuacuuc

SEQ ID NO: 4177996 - RNA, 94 nt, Human
gaaguaacacauugagagcaaaggggggcaauaauucuguaugcaaagugucagugcaacagacuuuauuaacucuuguuaaaauguucacuuc

SEQ ID NO: 4177997 - RNA, 79 nt, Human
gaaguaacagcuauuuaucuuucaugauaagggccaacucuagagauucaugucaugguauuuaaguaaucauuacuuc

SEQ ID NO: 4177998 - RNA, 64 nt, Human
gaaguaccaggccaccucgacacagccuuccugcucuuccuucuccagguggccugggagcuuu

SEQ ID NO: 4177999 - RNA, 83 nt, Human
gaaguagagaagauaaguaacgagccucaguucucauagguaguaagaggcaaagcugggauucgaacuuguuuuucugauuc

SEQ ID NO: 4178000 - RNA, 58 nt, Human
gaaguagcaggaaggguccuccccgagccuggggagggagcauccccuugcugacuuc

SEQ ID NO: 4178001 - RNA, 57 nt, Human
gaaguagcccuaaggugacagugagcaugacgcucggaguuaucaaggggcuacuuu

SEQ ID NO: 4178002 - RNA, 80 nt, Human
gaaguaggguacuagucacacaauuguguacauuugucaaaauuuauaaaauuguguacuucaaaaggguaaauuauuuc

SEQ ID NO: 4178003 - RNA, 90 nt, Human
gaaguaucucucgccugcugaauucuaccauccauuucccucuugguggaagcagaaugggcuagaauuuaggcgagagaaguaugaguc

SEQ ID NO: 4178004 - RNA, 88 nt, Human
gaagucagaaaugagggagugaaagugaggggcaaauauucuagagccauauaagccucugcaucaucacuccagcccucugcauauu

SEQ ID NO: 4178005 - RNA, 63 nt, Human
gaagucagaaauuauucaggaauuuguaggccaagauaaagccaugauaagauuucugauuuu

SEQ ID NO: 4178006 - RNA, 66 nt, Human
gaagucagacugcuguggucuagagacuuuguauuugcccauacucuagauccgcaguaaaacuuu

SEQ ID NO: 4178007 - RNA, 70 nt, Human
gaagucaguaaugcuggaugacuuacauucuugacaacuuguggcaacugaauucagcauucugcacuuc

SEQ ID NO: 4178008 - RNA, 81 nt, Human
gaagucucuuaaagaugacaugacuucagauuuucuuccuucuguuagaacuuugaaggguggagugugaaaucuggcuuc

SEQ ID NO: 4178009 - RNA, 63 nt, Human
gaagucugaaccagauggcaagguucuacuaagggcaaagaaccuucugaccucucggacuuc

SEQ ID NO: 4178010 - RNA, 103 nt, Human
gaagucugacucuaaaguucauauucuugauauagauaguuaaucccugaauuuauuugggaaacucaucaguuuagaaaccuauggaccauagaaucggcuc

SEQ ID NO: 4178011 - RNA, 60 nt, Human
gaagucuggcugacgagaguuauuccauucaaaaggcaggcuuucuuagaccaagacuuu

SEQ ID NO: 4178012 - RNA, 83 nt, Human
gaagucuguaagugggggaaguaauuauaaaccaagggagaucauuguccuguuuacaagccacuuguuaagccacagacuuu

SEQ ID NO: 4178013 - RNA, 57 nt, Human
gaagugaaagagaacaaguccccgaggccuuaggauuuguguuuccccagucacuuu

SEQ ID NO: 4178014 - RNA, 55 nt, Human
gaagugacagaagaaucaagagcaaaccagagcucuugagucuaaucugaacuuu

SEQ ID NO: 4178015 - RNA, 105 nt, Human
gaagugaccaaacuguguugccagggcacaguguuccagagcagugguucccaaauuugcaugagaagcaccuggagggcuuguuaaaauacagauugcagcuuc

SEQ ID NO: 4178016 - RNA, 78 nt, Human
gaagugagaaugacaaagguuuuagaaucuguuggaccugggcaagucccacgacuuuucugagacucauuugaacuc

SEQ ID NO: 4178017 - RNA, 63 nt, Human
gaagugaugacgcuguguuuuucaucccaggccaaaacgaaagaagaaauggugucauucuuc

SEQ ID NO: 4178018 - RNA, 71 nt, Human
gaaguggcuuggagcaggugaugggggcaaacaaugucugccaggccacguagcuucaagauaaacccuuc

SEQ ID NO: 4178019 - RNA, 64 nt, Human
gaaguggucaaagacuagauuucagugcucugucauuuacugacuauguggccuugaccaaguc

SEQ ID NO: 4178020 - RNA, 87 nt, Human
gaaguguacacuuugccccuggccgccuucuucccuccugguguccuggguggacacggaggugugucuggggaagguguguccuuu

SEQ ID NO: 4178021 - RNA, 57 nt, Human
gaaguguagaugaaauuaaacccaguauucaccacugggacauuucuauuugccuuc

SEQ ID NO: 4178022 - RNA, 70 nt, Human
gaaguguagcugggagugucugauggguggggcaaaguguuuugcacuugucaccucucagcugcugcuc

SEQ ID NO: 4178023 - RNA, 59 nt, Human
gaagugucugacacaaaauauguacuuguaaggguggguaacuacaugucaggcacuuu

SEQ ID NO: 4178024 - RNA, 120 nt, Human
gaagugugggcugucuuggcguugccaggagacaucagugggugccaucgugcccuucuuaguuuggaaggggcacaauuguacccaagucucugagugugagcuuaagugcccugcuuu

SEQ ID NO: 4178025 - RNA, 64 nt, Human
gaaguguuuauauuauggaaauauacaugagauaaaacaugauauuuuaugguauaugcauuuc

SEQ ID NO: 4178026 - RNA, 61 nt, Human
gaaguuacacaugaagguccaauguuacuucaagcaucuaucuucaauguguguuuauuuu

SEQ ID NO: 4178027 - RNA, 89 nt, Human
gaaguuacguuuuagauguacuuuguuuucaugaaacagcucuaagagauguuguuaaaugaaaaaagcacacgauaaaaauguaacuc

SEQ ID NO: 4178028 - RNA, 58 nt, Human
gaaguucuggcagcauggagccugugcucccacuggggcuggaccaugcugccccuuc

SEQ ID NO: 4178029 - RNA, 70 nt, Human
cuuggcugcucuuccuugccuugcuucaucauacaaacaauaauaaggucgaggcaggaauucugcgaag

SEQ ID NO: 4178030 - RNA, 73 nt, Human
cuuggcugugacaguuucucagacuuuccuuguuuuuugaugaucuugagaguuuugaggaauagcaaucagg

SEQ ID NO: 4178031 - RNA, 90 nt, Human
cuuggcuucuguuguuggacagaaugaugcaggcuccauaugacaguguguuugcaaagaucauuuucuccaucugcagaacaggcccag

SEQ ID NO: 4178032 - RNA, 106 nt, Human
cuuggcuuguaauauuauugcuucugagcagaggucaagauacuugggcuuuucuucauguaagaggcacucugcuuuuagaggaaauaggguuuauauuguuagg

SEQ ID NO: 4178033 - RNA, 70 nt, Human
cuugggagccagggagcccugaaccagagggucaaggaccccuggacggaguauuccccgggcucccggg

SEQ ID NO: 4178034 - RNA, 55 nt, Human
cuugggaguagaggcaggagcagggcuggcuuacauuuccugccugugccccagg

SEQ ID NO: 4178035 - RNA, 74 nt, Human
cuugggagucacaggccuggaugaggggcaugacauggaggacaugcccugagugaggguguguggugagaaag

SEQ ID NO: 4178036 - RNA, 77 nt, Human
cuugggaugcuuuuccugccacaggccuguggagauggaccagggcuggccagcucaggcuugggaggaggcccagg

SEQ ID NO: 4178037 - RNA, 116 nt, Human
cuugggauggacacagauauacauagguuucuaugcaugguagcagaaaguugagggcacucuugucuggaauuucuauuuugucuguaagauauuagguguggucacauucugag

SEQ ID NO: 4178038 - RNA, 83 nt, Human
cuugggcacagcaaguuacagugcuuggcaauaagugcccuagguacugaaaugaaacugcaccuguggcuugaguguucagg

SEQ ID NO: 4178039 - RNA, 113 nt, Human
cuugggcaucaugugaaaaaucugauugacuauguuaauaucuauuguuauuuauauugaaaauaagauccugaagauauguuuagauuaugaauuuuaaaaugagacuugag

SEQ ID NO: 4178040 - RNA, 89 nt, Human
cuugggcuuuacguaaagaaauugugccauuuuuucaagccagauauagcuucuguaucaacaaauggaacacaaaucuuuagucuagg

SEQ ID NO: 4178041 - RNA, 69 nt, Human
cuuggggagcugugcagugacuacagauagaaagaugggguucaucagagcaccacacaguucccuggg

SEQ ID NO: 4178042 - RNA, 61 nt, Human
cuuggggaugcaaagccagugugccaaaaugaccuacagcauucucaggcccauccucagg

SEQ ID NO: 4178043 - RNA, 108 nt, Human
cuuggggcugccggucuggcugcugaggccagguggugaaagugggcccugggcagccugagggcagcucucaccucuggccagcaaacuucuagacugcaccuugag

SEQ ID NO: 4178044 - RNA, 62 nt, Human
cuguuuuacaaaugacggcauucaaagcaagaaacuuuuaugccaguuauauuguaaaugag

SEQ ID NO: 4178045 - RNA, 67 nt, Human
cuguuuuaucugucauucacccuguuuucuugaggcuaggaaauagacacuuggacagacaaaaugg

SEQ ID NO: 4178046 - RNA, 77 nt, Human
cuguuuugacaccucugggagaggacacuuggagaggaaucccucccuuguacucacuccucucugagagaaggcag

SEQ ID NO: 4178047 - RNA, 70 nt, Human
cuguuuugagaagauaggggaauacuuugucagccucagcguauuggaguauuguucaucuucaagacag

SEQ ID NO: 4178048 - RNA, 75 nt, Human
cuguuuugauaagcuguggucaccagguggcgcuacacacacgcugucaaguccaacaguuuuucagaccugcag

SEQ ID NO: 4178049 - RNA, 128 nt, Human
cuguuuugcaucuccuguuacaggaugugaccauuugacauauccuugcugacaauugaacaaaaugcucuaauacggcaaagaaugagugaguacauaauucugaugaaucugaugaaguaaaacgg

SEQ ID NO: 4178050 - RNA, 108 nt, Human
cuguuuuguaacacuggagucuauugaaggcaugaaacuuccaggggaagucuuggacaguaaauugugcuuaauuucagucaauuuuagcuguuaacaugaaagcag

SEQ ID NO: 4178051 - RNA, 74 nt, Human
cuguuuuugacaucugaauuuagcaguuuugguauaaaaagccacaagagcauugcagguguguuuaagaacag

SEQ ID NO: 4178052 - RNA, 72 nt, Human
cuguuuuugugagaaucaaugaaauauuaugcuugauguuacugugaucaugauacuaucugacaagggcag

SEQ ID NO: 4178053 - RNA, 63 nt, Human
cuuaaaagagaugacggcaggguaagugcaaaguaaaaccuccuugcucuagucucuugggag

SEQ ID NO: 4178054 - RNA, 58 nt, Human
cuuaaaaggucuuuuuucuaacaccaugaugauuguguguuuuaagaggccuuuuuag

SEQ ID NO: 4178055 - RNA, 89 nt, Human
cuuaaaaguaauagucaacauuugagaugcaauggucagaggauauugugcuguugccaucuaaaauguuacuguuucuuacuuuuaag

SEQ ID NO: 4178056 - RNA, 55 nt, Human
cuuaaaauauugccgaauuguucugaaauaaagugacuuuugguaauauauuaag

SEQ ID NO: 4178057 - RNA, 69 nt, Human
cuuaaaauggucuauauauuugagcaaaucauaauugcuuggcuagcugaguauacagacuauguuaag

SEQ ID NO: 4178058 - RNA, 73 nt, Human
cuuaaagcacuuuggaaauugucuauaagagggcagggucuucaaauagcuccuccaaguccuagguuuuaag

SEQ ID NO: 4178059 - RNA, 71 nt, Human
cuuaaagccccugagaguugauauucccuguggaggagaauuguauugauuuuucagagguaaaauuuagg

SEQ ID NO: 4178060 - RNA, 79 nt, Human
cuuaaaggcccuaccuccaaauauaaucacauuggaaguuagggcuucaaaauaugaauuuggaggaggccuaauuaag

SEQ ID NO: 4178061 - RNA, 79 nt, Human
cuuaaaggguuuggaauuucgguuugcagaauuuuucugguccgcagagucuguugaccaagucuucuuccccuuagag

SEQ ID NO: 4178062 - RNA, 74 nt, Human
cuuaaaguguccuagcuaggaggcaggaagacggacaaaaugaccaguagucuccuggcccuaggacuuuagag

SEQ ID NO: 4178063 - RNA, 76 nt, Human
cuuaaaugaggcaccuggggugauauccuggcacccaauauacaggaaaaauauugccugaguguuucauaauaag

SEQ ID NO: 4178064 - RNA, 64 nt, Human
cuuaacauuaggguuccccguggcagcuucauccugagcacugccugugagcccugguucuggg

SEQ ID NO: 4178065 - RNA, 66 nt, Human
cuuaaccuaucagaagacuuacaguaucguuugagaagacaaggcuugaauucugauggguauaag

SEQ ID NO: 4178066 - RNA, 113 nt, Human
cuuaacuaguuuucauguuguuccuaauuuuaacuaggacaugcagaaucacuuagugugagcuaagcuguauuuaguuaaaaugcuaagaauuaucugggugcaaaauuaag

SEQ ID NO: 4178067 - RNA, 84 nt, Human
cuuaacuuuuguaaacauuugcuaccuuuuuuauuaaaugacauuuguuggaaugaagaaaaagguaauaauacacuaguuggg

SEQ ID NO: 4178068 - RNA, 129 nt, Human
cuuaagacuuucucaagauguuggagcugagugggacccuggggaccaucuagcccaacccaagagaagggaguugggcuagaugauccccagggucccauucagcuccaacaucuugagaaagucuag

SEQ ID NO: 4178069 - RNA, 70 nt, Human
cuuaagauaauccauuauaauguuauacacaauuuugucguguuugaacgcagugguggguugucacgag

SEQ ID NO: 4178070 - RNA, 60 nt, Human
cuuaagccacugagauuugggguuaaauuuuaucuauagcauaaaccucuguggcuuuag

SEQ ID NO: 4178071 - RNA, 60 nt, Human
cuuaaggaaaagucucuuuuaaaacauaaaugauguguugggagaauucuguuccuugag

SEQ ID NO: 4178072 - RNA, 84 nt, Human
cuuaaggaggcaaaaaauguccuuccauuuugaucuguaaagaacccuuagccaagcuuggaaggaucauggugcuuucuggag

SEQ ID NO: 4178073 - RNA, 71 nt, Human
cuuaaggcuucagcacagguauauguggggcuuuugguuauucaguuaccugauuuggaguuugccuuaag

SEQ ID NO: 4178074 - RNA, 87 nt, Human
cuuaaguuucuauggccauggaaugguugaaugacgaaccaucuucccacauuuauaugguuucauuccaugcugaaggagaauaag

SEQ ID NO: 4178075 - RNA, 73 nt, Human
cuuaauagcucaugucagcagcaacacaaaagguacagugauuuuuuaaaugcuuggacaagacucuauuaag

SEQ ID NO: 4178076 - RNA, 68 nt, Human
cuuaauagguggugggauuaaaaauguuuugcaguuacuugacaacaugaucccaccugccuauaaag

SEQ ID NO: 4178077 - RNA, 55 nt, Human
cuuaauagugccauguacugcccucucuugacuguaaaccuggcgcuguucaaag

SEQ ID NO: 4178078 - RNA, 78 nt, Human
cuuaaucccuuccauuaaacuuguggacccagugccuguguguauugggcuaacuuuuaaugaaauaggcaaguuaag

SEQ ID NO: 4178079 - RNA, 74 nt, Human
cuuaaugacgugugccaagucccuuuggcuagauaauuauucauaggucccagggauuaggacauggauguaag

SEQ ID NO: 4178080 - RNA, 80 nt, Human
cuuaaugcuccagauccagcugagcugcagcugcaugcagcugccugagugaccccagcuaagaucacauggagcagaag

SEQ ID NO: 4178081 - RNA, 71 nt, Human
cuuaauggugauuucagugaaagaucuggagaugcuucaacaaauuuagacauagcugaaaucauuuuaag

SEQ ID NO: 4178082 - RNA, 100 nt, Human
cuuaauuauuuaccugcuacuguuauugugucugcugaaccuaugauaacuuaaaaaaaggauucugguuacauuguuacagcuggagguuuuuguuaag

SEQ ID NO: 4178083 - RNA, 59 nt, Human
cuuacaagcaaaacaacuguagaauuuagcccaaagucuauguuagugauguuuguagg

SEQ ID NO: 4178084 - RNA, 59 nt, Human
cuuacaguacuucuaauaugauuguacuagcaagacaugcuauagagaagugauguagg

SEQ ID NO: 4178085 - RNA, 62 nt, Human
cuuacuaaaugcuuucuaugaaagaggccucggauuaaggguuucuuacaaaggcagguaag

SEQ ID NO: 4178086 - RNA, 128 nt, Human
cuuacuguauguuagauacucucuaugucaaucucucauucaguccucacaaccucacuaaaagacuucauauuauagaugagaaaauugagaauugaagagaugaaguaggucacacagcuaguaag

SEQ ID NO: 4178087 - RNA, 56 nt, Human
cuuacuucauguacuuuaggaagggcagagcuuccuccaagccuuugugaagugag

SEQ ID NO: 4178088 - RNA, 67 nt, Human
cuuagaaauuguuacucauucaugaugacgcugaugaugcucauaacgaugacuaacauuuacugag

SEQ ID NO: 4178089 - RNA, 58 nt, Human
cuuagaacacugagaaagugaugaggauauucuuuuucuaagagcucaguguuuuaag

SEQ ID NO: 4178090 - RNA, 88 nt, Human
cuuagaacauuugagucuuagaacuacagugccuagaacuauaagauuuuagaaauguggauucuuggacucuuaaccaugguccuag

SEQ ID NO: 4178091 - RNA, 65 nt, Human
cuuagagacuugggggcuuuggauaggcuucagcugggauggucauccaauccccagccucaaag

SEQ ID NO: 4178092 - RNA, 59 nt, Human
cuuagagccuuacucuucuugucuguaaaauaaagaugaggaugacagcaggcucagag

SEQ ID NO: 4178093 - RNA, 64 nt, Human
cuuagauaaaaguguucaauaaauguguauuguaugagcagguuuugugaauaguuuaucuaag

SEQ ID NO: 4178094 - RNA, 55 nt, Human
cuuagcccugagaguucugagccaccccuguggauguucaagaaaaggggcuaag

SEQ ID NO: 4178095 - RNA, 92 nt, Human
cuuagcuagcuucaggaguacuuuuagagaugaagauguuguugucgaaagaggccaggcauucuagaaguaguguguuugaggcaguugag

SEQ ID NO: 4178096 - RNA, 66 nt, Human
cuuagcugcaguagccacauuucaagugcuuaauagacacacauggucaguggcuacucuguuggg

SEQ ID NO: 4178097 - RNA, 61 nt, Human
cuuagcuuuaaaagugagaucucugcuuugcagauaaaacaauucucacuugugaagaaag

SEQ ID NO: 4178098 - RNA, 75 nt, Human
cuuaggaaaauuuaauucucuucugugguaagcauugucugccuucuauaggccaaaggauuagagauuucucag

SEQ ID NO: 4178099 - RNA, 73 nt, Human
cuuagggaauuagaaauaaacaaauuuuccaaaauauaaaaggaagguuaguaauauuucuauauuuuucaag

SEQ ID NO: 4178100 - RNA, 65 nt, Human
cuuaguaacucuuuuuuuaaguguagcccauguuucgcuuuggguugugugaaaagauuacaaag

SEQ ID NO: 4178101 - RNA, 56 nt, Human
cuuaguaccaucagguagcuugcccuauggaaggagaagaaacuugaaaguacaag

SEQ ID NO: 4178102 - RNA, 78 nt, Human
cuuauaauauaccagguccuugggauagaaagaugaauaaaauauggaauauuuccccaaggagccagauguuaagag

SEQ ID NO: 4178103 - RNA, 60 nt, Human
gacaguggcccuauuugaggaccccacagggcaguggaguugaugacuggggucaggguu

SEQ ID NO: 4178104 - RNA, 57 nt, Human
gacagugggggacccaggugcuguccuucuggaaagcauccaggugcccccaggguu

SEQ ID NO: 4178105 - RNA, 104 nt, Human
gacaguguuucugccagugugcccuuugggaugcuagacaccucagauaauauauauucagaggacucuggauaucacuaagcuuggcaaaaugacacauuguc

SEQ ID NO: 4178106 - RNA, 66 nt, Human
gacaguuauaacccacaugauagcaaugcgcaggggcugcaaugcagggcaacauggggugcuguc

SEQ ID NO: 4178107 - RNA, 63 nt, Human
gacaguuguacagaaggcacuaaggucaaauaauauuugaccaguacuauuuuuuacaauguc

SEQ ID NO: 4178108 - RNA, 59 nt, Human
gacaguuuccuuuacugugugcauuuuuacuguacacuguauagaguagaguaucuguu

SEQ ID NO: 4178109 - RNA, 88 nt, Human
cuuggggcuuuccugggcaucccauguggaagucagcaggcaagaccaaguccaggcucccgcuccacugggcaccaggcuccccagg

SEQ ID NO: 4178110 - RNA, 78 nt, Human
cuugggggguucuaagugcacccuuuccuuaaggcaauacagaaggcacaggcuaggggaacacuagaaucuuuuaag

SEQ ID NO: 4178111 - RNA, 80 nt, Human
cuugggugcuucuuuuuugucuugucuguggcugcuuaagucugauggcuccuacauaacccagcgaacucgcacccgag

SEQ ID NO: 4178112 - RNA, 73 nt, Human
cuuggguguucaucuuucccaccaaucuuaucuccuacaagugagauggguguccagggaggaucugcccagg

SEQ ID NO: 4178113 - RNA, 101 nt, Human
cuuggguuuuuauuuagcucuacauaugcgaucauaggaugcagaagauauaucuucuacuggacacguauauauagaugcuuaaauguggcuaucccaag

SEQ ID NO: 4178114 - RNA, 60 nt, Human
cuugguaagauauuagagcaauuccuagcaaggaugcuuaacuuccuagucuauaccagg

SEQ ID NO: 4178115 - RNA, 101 nt, Human
cuugguaggcucuugugaacugacaucugccaguuuggucguggaaaauuugaugauucuuuuggauagaugaugguaugaaguuagguaagccauccaag

SEQ ID NO: 4178116 - RNA, 80 nt, Human
cuuggucaggcagccuguagauggagccagcuaagagcaaagcucugggaagccuguaugcagaaauggaaguggccagg

SEQ ID NO: 4178117 - RNA, 70 nt, Human
cuuggucauuucuuguccuguugugucccauauauaaccgacagacaaaaucaggaagaggugaucuaag

SEQ ID NO: 4178118 - RNA, 84 nt, Human
cuuggucgguguacaugcuccacuuucuccugugggacuuaguuuucucaucagaaaaaugagaagagcugcuuacugguuagg

SEQ ID NO: 4178119 - RNA, 72 nt, Human
cuuggugacuguuuugagcaugugggggugagcugggugacucgucccccaggcucugacacaggagcuggg

SEQ ID NO: 4178120 - RNA, 59 nt, Human
cuuggugccacagcagcuugcgccagagcaggcgcaggugaaagaggcugggcagcaag

SEQ ID NO: 4178121 - RNA, 130 nt, Human
cuuggugugucugaauccacaaggcugguuaaacauugcagggcaggaccauggacagggccccgaggcacuuguaggggugguuuucggcuuaugcuguauugaccgagacccguggaaauauauuuug

SEQ ID NO: 4178122 - RNA, 60 nt, Human
cuugguuagguuaugaaugcccacacaguuuuguguggguauucauucauuuaugcuaag

SEQ ID NO: 4178123 - RNA, 130 nt, Human
cuuguaaagaaguuacagauuaaggagagagagaaugagucuuugaagaaaucagucaccuuaugaggcuggucuaaugagucaaguauuauauucucauuuuacaaauuuaguaauuuugucauaccag

SEQ ID NO: 4178124 - RNA, 80 nt, Human
cuuguaagaauauguagucaaguggauauaugaucaauacgguuaccuuuuccucuuguacuguucauuucauuuauaag

SEQ ID NO: 4178125 - RNA, 130 nt, Human
cuuguaccuugggggcaaucaagaggcaaacugguuagcaugacuuagaaucaggaggcuauguguauucuuagcuccaugucugacagcugagugugucucaguuuccucuucagucuccuccucacag

SEQ ID NO: 4178126 - RNA, 94 nt, Human
cuuguacugaucauuggcacccaguuugucucaggguuuuuggguuauucuuucugccccuacuaacaucugaucgaacagugccagaugcaag

SEQ ID NO: 4178127 - RNA, 59 nt, Human
cuuguagugugcucuucauauugucagaacuggauuggcccuggaaggcuuacugcagg

SEQ ID NO: 4178128 - RNA, 68 nt, Human
cuuguaugcugaauaguucacucuucugccaugaauauugagggcaggggggccauucaguguguggg

SEQ ID NO: 4178129 - RNA, 67 nt, Human
cuuguauucaauauuauuguugcugcucauucaaaugugaugcuguuccaguuauauuguuuaaaag

SEQ ID NO: 4178130 - RNA, 61 nt, Human
cuuguauucagugauuucacaauagcucuccagagaauguuuaaagacucacugaaacgag

SEQ ID NO: 4178131 - RNA, 110 nt, Human
cuuguauuuuuaguagugaugggguuuugcuauguuggccaggcuggucuugaacuccugaccucaggugauccacccgccucggccucccaaagugcugagauuacagg

SEQ ID NO: 4178132 - RNA, 61 nt, Human
cuugucaaagcuagagaguggcagagugggcaugugaccucaggucucuuuggcuuccaag

SEQ ID NO: 4178133 - RNA, 69 nt, Human
cuugucacccaggcuggagagcaguggcaugaucucagcucacugcaaccucugccucccggguucaag

SEQ ID NO: 4178134 - RNA, 69 nt, Human
cuugucaggugacuccucagucaaaaaggagcccaguagagaaaugggcuggugagagcaccugauggg

SEQ ID NO: 4178135 - RNA, 57 nt, Human
cuugucauuaucuuccccuuucuuggggagcaguaacagaggggaggaauugacaag

SEQ ID NO: 4178136 - RNA, 75 nt, Human
cuugucccauucagguacuuguuuuggcuaguuaacguaauuuccccuagcacagauguacuuugaggggacagg

SEQ ID NO: 4178137 - RNA, 98 nt, Human
cuuguccuugcuucacaccuacaauauucaaaguuuugggaaauaacauccaauuggcuuggccaaggcucuggguuucauaggugggaaguagcaag

SEQ ID NO: 4178138 - RNA, 79 nt, Human
cuuguccuuuugucacuucuucagcuuuccuugaguuagacucaauaaaagaagaggaaggugaaccacgaauaacaag

SEQ ID NO: 4178139 - RNA, 71 nt, Human
cuugucucaaucaaagcacugggcuuuguagucgcuuuccagagccgaggccaauguguuuuaugaaaaag

SEQ ID NO: 4178140 - RNA, 61 nt, Human
cuugucuccaauccuaacguaacagaaauguauaugagguuacauuaggauuagagacaag

SEQ ID NO: 4178141 - RNA, 99 nt, Human
cuugucucccuuuuaaccacuagcuaauuuagcgauggagaauaguuucgcuuuuauuacagcuuugauuaucuggugguugcaaauaagucagauagg

SEQ ID NO: 4178142 - RNA, 55 nt, Human
cuugucugaguuuggccacacacagcaauccgggcugguccagacuucagacuag

SEQ ID NO: 4178143 - RNA, 103 nt, Human
cuugugaccucacugggcauugagucugaggccuuggcagcuaagggugguguuccuuagggaacugggaggccauccagacaggaggcacaguacaaacaag

SEQ ID NO: 4178144 - RNA, 59 nt, Human
cuugugcaaauccucgagcacauaugucaaguauguuucugggcacacauuugcacagg

SEQ ID NO: 4178145 - RNA, 60 nt, Human
cuugugcagccuccucuugcagggggcugugaccccuugaaggaaaggucgcugcccagg

SEQ ID NO: 4178146 - RNA, 75 nt, Human
cuugugccaucugaauuugccuuaguuucaucuggaaagaggagguauugaugggcuuucagaauccaggacaag

SEQ ID NO: 4178147 - RNA, 99 nt, Human
cuuguggaggucuuacaagaaacugaaaguggcuucauaauuuguauauaauucauaaggccuguuuauguauucugucacugacucuucaauuauaag

SEQ ID NO: 4178148 - RNA, 61 nt, Human
cuuguggccuccuguuccuggguacagaugaaccuguuugccauggggauggggccacggg

SEQ ID NO: 4178149 - RNA, 60 nt, Human
cuuguguagacaucucuagaagacuugauggacuaaucuuuaagaguucauuugcaugag

SEQ ID NO: 4178150 - RNA, 68 nt, Human
cuuguguugcuuaucauugcucuucucagaagauggaggaaaacaugagcucuggagcagcaaucaag

SEQ ID NO: 4178151 - RNA, 60 nt, Human
cuuguuaaaaugcagauucagaacccuggggauggggccugauucugcauuucuaacagg

SEQ ID NO: 4178152 - RNA, 68 nt, Human
cuuguuaaaaugcagguccgcaucuguaaguucugaagcagggccuaggauucugcauuucuaacaag

SEQ ID NO: 4178153 - RNA, 82 nt, Human
cuuguuacguggcucaggcugaucuauuaauagaauuccugaccucaagcaguucucuugcuucagccucccacauugcagg

SEQ ID NO: 4178154 - RNA, 58 nt, Human
cuuguuaguauugucuuauuucauggagggauacagggaaugaggucccacugaggag

SEQ ID NO: 4178155 - RNA, 75 nt, Human
cuuguucaggagaggguggggaaaggauuucucccagcugauggggaacuggagaaugcccucuuuuuggccagg

SEQ ID NO: 4178156 - RNA, 62 nt, Human
cuuguucaguccugacuuccugacagaugccauuauucgcauuuaaggaagcaggaaacaag

SEQ ID NO: 4178157 - RNA, 77 nt, Human
cuuguuucaagugugugggcaggcaguggucggggagggcgcucugguauaucagugcacuccauacuugaguugag

SEQ ID NO: 4178158 - RNA, 76 nt, Human
cuuguuuuucuucaggcuacauuugcucugagaagccaugagcuggagcuuucuggagcacaagucagaugacaag

SEQ ID NO: 4178159 - RNA, 67 nt, Human
cuuuaaagugguucuuacauccguggucaaaaaacagaccauggucaaagacagaccauuaccgaag

SEQ ID NO: 4178160 - RNA, 84 nt, Human
cuuuaaauagccccaggguuucucugaggugacuuguagcuaauacaauaucacaggaggagaccaagugggugcaguuuccag

SEQ ID NO: 4178161 - RNA, 67 nt, Human
cuuuaaaucucuggcagaaauaaacuuuugaauaauauuaaaguuuggucccuccacggauuuaaag

SEQ ID NO: 4178162 - RNA, 79 nt, Human
cuuuaaguguuuucccagcccagguaugaugauaugaagcaacccccuuccuugucuccacuggccuggggccuugagg

SEQ ID NO: 4178163 - RNA, 78 nt, Human
cuuuaaucauugcuguauaauucaugcucuuauugucuaaacacaaacaacugagcugaaauuauauagguguuagag

SEQ ID NO: 4178164 - RNA, 88 nt, Human
cuuuacaacacaccaggagaguagacugcaacauuguaaugugccacaauauauugcaacauuguaaguuuauauuagguauaggaag

SEQ ID NO: 4178165 - RNA, 73 nt, Human
cuuuacagauuagucuaagaugcuaggaguugcaaagagacuuaacaggcuugaauggauauaaucuguacag

SEQ ID NO: 4178166 - RNA, 65 nt, Human
cuuuacaguuaaggaaauggagguucagagagauucugagcucuuccccaucuuacaucuggaag

SEQ ID NO: 4178167 - RNA, 96 nt, Human
cuuuaccuugccuaagucugcagucacuuguagaaugggaaucaugaaagcccuugccucauagguaguugugagaaugacuuaguguaagugaag

SEQ ID NO: 4178168 - RNA, 72 nt, Human
cuuuacuaucaggaauaaacaauuacaucugcggggagcagaagaucuuuguuuguauuuuugaaaggaaag

SEQ ID NO: 4178169 - RNA, 101 nt, Human
cuuuacuauucuauugacuuucaguuaguaccuaguggcauguaaaaagaauuuuuaaaaaauagccacuguaccacacugaggcacgaugugguguaaag

SEQ ID NO: 4178170 - RNA, 82 nt, Human
cuuuacuguaacaauuucuuacuauuguauugccuuucuuuucaauuuaaaaggauaauaagagaaauaguuacagggaaag

SEQ ID NO: 4178171 - RNA, 90 nt, Human
cuuuacuucuuagcuuuguccuaggucucucuuucccuccuuguuguccccacuggagaagagaccuuuugugauagagcugcaguaagg

SEQ ID NO: 4178172 - RNA, 70 nt, Human
cuuuagauuucuauguaucacuugcuuuuucaaguucauaugaaaagaauaguggagcaagagucuggag

SEQ ID NO: 4178173 - RNA, 75 nt, Human
cuuuagggauauaacuaauacuggccaugagcauuuucuguuccucugucagucaugguuguugcaacccuguag

SEQ ID NO: 4178174 - RNA, 73 nt, Human
cuuuaggugaacuucagauggguagcaggcauccaccaggcagcuucugggcaguuggaaauuucaccugaag

SEQ ID NO: 4178175 - RNA, 58 nt, Human
cuuuaguuugcuguccccugggguagaccgcaggaaggacuuucggacagugcugaag

SEQ ID NO: 4178176 - RNA, 70 nt, Human
cuuuugaaaugugucauauucaaagucaccagaaguuuucuguuugaaggaauugaauacguuuuuggag

SEQ ID NO: 4178177 - RNA, 66 nt, Human
cuuuugagagcugggugaagugccaucaaauuuaauuuuugaguguacaacauuuaguuuauaaag

SEQ ID NO: 4178178 - RNA, 78 nt, Human
cuuuugagguguugaauaguuggcugaaacugcacagguaaguaggggcagcaagaaaauucacaugcucaucagaag

SEQ ID NO: 4178179 - RNA, 129 nt, Human
cuuuugaguaguuguuuauucaaaaauaugccuacgucuuuagcaaauuacucacagggucagcgacuguugacccuguguguuuguuagacuuugaguguaagugacaauauaaacacagccauauag

SEQ ID NO: 4178180 - RNA, 56 nt, Human
cuuuugcacccagaguuauuugguuugacagacugccaaauccugagguucaaaag

SEQ ID NO: 4178181 - RNA, 65 nt, Human
cuuuuggagguuuaagucggguggugggaagagauacauuuccauuccugauauggccacaagag

SEQ ID NO: 4178182 - RNA, 95 nt, Human
cuuuuggcuaucaugaauaaugcugcugugaacaaugauaugcaaguuucugugugcauguauguuuucaguuguauuagguauauacauaggag

SEQ ID NO: 4178183 - RNA, 108 nt, Human
cuuuugggccuauuggcacccagggaaauuaaugaguuaaucuauuuucuuaaauaccagggagagauugaacauuauuuaaucugugggcucaaaauggccuuaaag

SEQ ID NO: 4178184 - RNA, 58 nt, Human
cuuuugggugccugugaagcgugccuacgucguggcccuugcccaggccucccaaaag

SEQ ID NO: 4178185 - RNA, 62 nt, Human
cuuuuguugcccuugucgcaggccgcaagcucugcaggccgugaacagagaguguccgagag

SEQ ID NO: 4178186 - RNA, 62 nt, Human
cuuuuguuuauuucaucuuuguauugucaccaaccacacagcagggguggaauaaacguuug

SEQ ID NO: 4178187 - RNA, 72 nt, Human
cuuuuguuuucugauucucgugugguaguguauuuacuccuuuuuggccaguugagccccagaaaaaagaag

SEQ ID NO: 4178188 - RNA, 103 nt, Human
cuuuuuaaagaaagauaaaguccuauaagugacugcagggaauucacuaagcuuuuugggcaaaugggcucugcagcauuaggucuauauuugcuuuaaagag

SEQ ID NO: 4178189 - RNA, 62 nt, Human
cuuuuuaagcaucugcuaugcuagugugugagugcaugcuagugugugagauguucaacaag

SEQ ID NO: 4178190 - RNA, 69 nt, Human
cuuuuuaaucuguuuaauucauuuucacagaucagugcauuugcaaaaguggagagcagagacaugagg

SEQ ID NO: 4178191 - RNA, 95 nt, Human
cuuuuuacauacuauuucauuugauccucacaacaaucuuaggaaguaagcacucuuaauuaaauuucuaagugaggauaccaauguguagaaag

SEQ ID NO: 4178192 - RNA, 55 nt, Human
cuuuuuacucuguugucucagccgcacuggggcggaggcggucaagggugagaag

SEQ ID NO: 4178193 - RNA, 78 nt, Human
cuuuuucagcucuaaguuuuaugcaaacuuuauuaaacagaucaaauauuuuugaugaaaauuuugggcugaauugag

SEQ ID NO: 4178194 - RNA, 74 nt, Human
cuuuuuccuuaggcagauguuaacaggaaaagauaguucuucauuuauccucaaacuucugcuucaagagaaag

SEQ ID NO: 4178195 - RNA, 81 nt, Human
cuuuuugaaaagucugcauuacaugccauagacacugugugucucugugugugugugugugugugugugugugucagaaag

SEQ ID NO: 4178196 - RNA, 64 nt, Human
cuuuuugccugagggcuucuucaagacagaagaauaugcacacucugcccacagagcauggaag

SEQ ID NO: 4178197 - RNA, 60 nt, Human
cuuuuuggacccauaauaggcaucauucuucaaaaugauuuccaugauugggccagaagg

SEQ ID NO: 4178198 - RNA, 80 nt, Human
gacaauaauuguggaaauaauguuugaaauauuagggauauaaaccaguccugagagacaguguuuguauaauuccuguc

SEQ ID NO: 4178199 - RNA, 59 nt, Human
gacaauagugaauaaaccggugaaauaauaaucaagucugugguuuauuuacuaguguu

SEQ ID NO: 4178200 - RNA, 82 nt, Human
gacaaucaaaagaauucugacaauagaauugguuuaauuuuuaaaaguuuuuaauucuauguuagagucugccaagguuguu

SEQ ID NO: 4178201 - RNA, 55 nt, Human
gacaaucagccauauccagggugggcacuugcuugggaaauguuugcugaugguu

SEQ ID NO: 4178202 - RNA, 65 nt, Human
gacaauguaggaguaugacaguagugaaauucauuuaucuauauucuuauguuccuuuuauuguc

SEQ ID NO: 4178203 - RNA, 86 nt, Human
gacaauuaucacaggaaguuuggaaagccucaauucuauauaaaacagauguagguauccaaaacuuuuucauugaaugaaguguc

SEQ ID NO: 4178204 - RNA, 71 nt, Human
gacaauuaugggaguuaggauucuaucugcccagauaccaaaagacagaggcccucucucuccugaugguu

SEQ ID NO: 4178205 - RNA, 60 nt, Human
gacacaaaagauagcaucuuaacauaguauuacuuaacaaagauggcugucauuucuguc

SEQ ID NO: 4178206 - RNA, 74 nt, Human
gacacaaauuuaucuuucaguucuagaagucagaagcccaaacugggucucacugggcugaaauuaaagguguc

SEQ ID NO: 4178207 - RNA, 70 nt, Human
gacacaauucccacacuugaagcccucuggugugaauauaugagagauggccuuaggugggaauugucuc

SEQ ID NO: 4178208 - RNA, 57 nt, Human
gacacagaguauuuuaaguacucaugaaaauugggagacuuaagaugcuuugggguu

SEQ ID NO: 4178209 - RNA, 70 nt, Human
gacacagcugugauggagggacauuuucuggccaaacgcagcagaaguugauccugcguuuccaaguguc

SEQ ID NO: 4178210 - RNA, 55 nt, Human
gacacagggcugaggacacaaguaaagauugucuggcucaguuucaguccugguu

SEQ ID NO: 4178211 - RNA, 63 nt, Human
gacacagugugcugcagagaacauuuccagacaacaagagaaauagcuccguggcacacucuc

SEQ ID NO: 4178212 - RNA, 78 nt, Human
gacacaguucauaauuugaaggaauaggcuguucaaaagagaaacuuguaucagaucaaauaaugaucauacuguguu

SEQ ID NO: 4178213 - RNA, 59 nt, Human
gacacaguucuguucuaguaggugacauuuccugcucauuacuggagaauggcugaguu

SEQ ID NO: 4178214 - RNA, 68 nt, Human
gacaccagaaucaucaucugaagccuauucagggacaucccagagguuccgaugggaucuggcauguc

SEQ ID NO: 4178215 - RNA, 57 nt, Human
gacaccagguagccuggagaagguagaggaagcuguccugccaggaaacugaguguc

SEQ ID NO: 4178216 - RNA, 80 nt, Human
gacaccagugggcccuguguauccccugugcuuguuauagaguuggcacacaguauuacaauaggugcucauuaaauguu

SEQ ID NO: 4178217 - RNA, 87 nt, Human
gacacccagccuuuuuaugcccuuuuucugucccaaugcuuagcuucacugagccuggagacaaggacaaagggcuggugggauguc

SEQ ID NO: 4178218 - RNA, 76 nt, Human
gacacccugcaguggugugaccagccauguucaccguggaguuguugguuuuggcauggcaacccugcagggaguu

SEQ ID NO: 4178219 - RNA, 78 nt, Human
gacaccuaacaauuauucagugacuuaagagauauacuagucuguuucuuagucauguaauaguccagguuagguguu

SEQ ID NO: 4178220 - RNA, 74 nt, Human
gacacgaauguggcauuugcugaaucuuggagcaguagaauaguucuucaugucagaaagcuauaugguguguc

SEQ ID NO: 4178221 - RNA, 55 nt, Human
gacacuacguggcucacauuucagacacaaugaaaagcagguccaugcugguguu

SEQ ID NO: 4178222 - RNA, 64 nt, Human
gacacuagacauuagaccugcuaguggccccucaaaggcuggccucugcagccuaguuaguguc

SEQ ID NO: 4178223 - RNA, 56 nt, Human
gacacugcacuuggggcccacagacacugagggcuugcuugaaaagugcaagaguc

SEQ ID NO: 4178224 - RNA, 70 nt, Human
gacacugcaggcagagaggagcauuuaaucaaucaauuaauuaauucagugaaucucuguugagcguauc

SEQ ID NO: 4178225 - RNA, 57 nt, Human
gacacuguaacuucccaucuccuggucauaggaacaugauucugggcagucaguguc

SEQ ID NO: 4178226 - RNA, 59 nt, Human
gacacugugguuucugccucucucucagaucacgugcucugggggaaaagccagguguc

SEQ ID NO: 4178227 - RNA, 60 nt, Human
gacacuuuaggauuuaaaagucuggcuguaaacagcuucucuuugaguuuuuaaacuguc

SEQ ID NO: 4178228 - RNA, 80 nt, Human
gacacuuuccucuacuuccaggcggacaaagcccuuucuggugaaagcccggggcugcccuccugggaagagggaagguu

SEQ ID NO: 4178229 - RNA, 84 nt, Human
gacacuuuccuucaacuauuuaagaauaaaaggggcaacaaaaauauacugugccucaguuuucucagauaugaaauggugauc

SEQ ID NO: 4178230 - RNA, 57 nt, Human
gacacuuucucagguaaagcauccuuggcacuauggaugcugauaacuaggaguguc

SEQ ID NO: 4178231 - RNA, 70 nt, Human
gacagaaagcaaugucucugccugguuuuaccaucugucaaaaucucagagucauuguuccuuccauguc

SEQ ID NO: 4178232 - RNA, 63 nt, Human
gacagaaggcagccagauccuuuggguugccaaaccccuccauucugaaggcugccauuuguu

SEQ ID NO: 4178233 - RNA, 59 nt, Human
gacagaauuuuccaucauguggaaugaccuuaacaauacggggguggaaguuucuaguu

SEQ ID NO: 4178234 - RNA, 71 nt, Human
gacagacaaauucugggccccaucccagaccauugcaucagaagcuguaggucaaggcccagaaaucuguu

SEQ ID NO: 4178235 - RNA, 63 nt, Human
gacagacacagggccaugauugccaugccuuccaugcacaacuccagguccuuugaaucuguc

SEQ ID NO: 4178236 - RNA, 55 nt, Human
gacagacaccugggggguugcuacgugaguaagcacuuugagcccuagugucuuc

SEQ ID NO: 4178237 - RNA, 57 nt, Human
gacagacacuauugguaugccugcuacaguaagcagccacccuucugagugauuguu

SEQ ID NO: 4178238 - RNA, 117 nt, Human
gacagacuacuggagaccuguaaucaccucgaaggcuggaccuggaugaaucuucuguaagauccuagcaacuucagcuuuguucaggguaguuuuaggauucuauguaacuuuguu

SEQ ID NO: 4178239 - RNA, 56 nt, Human
gacagacugguuccagaccauuugcuaccccaggaaauggcugggcaaggucucuc

SEQ ID NO: 4178240 - RNA, 65 nt, Human
gacagagcggcuugccuggacuauuauagccacuaauugauuuccuugccuccuguccuucuguc

SEQ ID NO: 4178241 - RNA, 104 nt, Human
gacagaggacgaugacugcugugcucauagucaagagauuuaagauauuccuaaacugccgcccuugaauuacaugacccugaguagauagugaucauucuguc

SEQ ID NO: 4178242 - RNA, 65 nt, Human
gacagagugcagggcuagaagaagucaaggcuugaagcccgaccccuugggcccuguucuguguu

SEQ ID NO: 4178243 - RNA, 94 nt, Human
gacagaucuuuaacagccugcugcauccaggcuauuguucuacugacuguugccuguagguggaugugagcauguuguacaaaggagaucuuuc

SEQ ID NO: 4178244 - RNA, 61 nt, Human
gacagcagcuugcgugucuggucuuuccuccuuaaaaggcucagaaacuaaaggcgcuguu

SEQ ID NO: 4178245 - RNA, 55 nt, Human
gacagcccuggccccagguggucucaggaagugagcugcggguuccaggacuguc

SEQ ID NO: 4178246 - RNA, 62 nt, Human
gacagcucaaggcuuggaguaagcuuggcuguauccacagccuugucuccagccuaaguuuc

SEQ ID NO: 4178247 - RNA, 109 nt, Human
gacagcucuggugucuggugauggggcgguaagggagcuuaggagaucaggcagcccauuuaugucuucuuucuuucugacucccaaccccacaaagacagagggaauc

SEQ ID NO: 4178248 - RNA, 75 nt, Human
gacagcugaguuauugaagcaagcuuuucugaguucugcccuacaccugaauuuagugguuuaaguagcgcuguc

SEQ ID NO: 4178249 - RNA, 96 nt, Human
gacaggagaaucacuugaacccaggaggcggagguugcagugagccgagaucgcaucauugcacuccagccuuggcaacaagagugaaacuccguc

SEQ ID NO: 4178250 - RNA, 58 nt, Human
gacaggaggcagagcucaggugguaaugcucacucccacugcugcucaccuccugcuc

SEQ ID NO: 4178251 - RNA, 68 nt, Human
gacaggauaggagcuuuucuuccaguuaaugaagugaggcuucauggaggaagaagauuuucuuaguc

SEQ ID NO: 4178252 - RNA, 64 nt, Human
gacaggcuagguugcuguccucaaagagcuugccaucucuuauacauagucgaccuuguuuguc

SEQ ID NO: 4178253 - RNA, 99 nt, Human
gagaagagucccugggaaauuaaauaauauuugaagcuucaaagcuguauguuuagguuuuagaacaucagauauuaggacccagugauaagaauucuc

SEQ ID NO: 4178254 - RNA, 65 nt, Human
gagaagauacacuagaggaaugagaucuccuacaugaguaaaguguuuucuaauguguuuuucuu

SEQ ID NO: 4178255 - RNA, 55 nt, Human
gagaagauguuguuauugagcacuaagacacugggguacaaguaggcguuuucuc

SEQ ID NO: 4178256 - RNA, 70 nt, Human
gagaagccgaggccacacagcaggagcuugguacauccacuucucucugcucaguggcuucugcucacuc

SEQ ID NO: 4178257 - RNA, 105 nt, Human
gagaagcuggcucugugacuuggcgagcugagguguaggccugagacgcucuuuuccagcaccuccgcaguucaccuguuuucacacgugaggacugaguuucuc

SEQ ID NO: 4178258 - RNA, 68 nt, Human
gagaaggaaauucucaucucaugaaaccagagaaaucccugcagacaugggagugagaaugccagcuc

SEQ ID NO: 4178259 - RNA, 92 nt, Human
gagaaggacugcaguacacuacacgaaggcauugcaccugugugugaucaggcuuggugucagccccuugguuaguguugaacguuaauuuc

SEQ ID NO: 4178260 - RNA, 109 nt, Human
gagaaggagucgggugguaacgguuggggucaggaagaauucugccaaguaucuuuacugucauucugaccauagccucuuuguucccgcauucgaacuuuugguucuu

SEQ ID NO: 4178261 - RNA, 58 nt, Human
gagaaggauguucuaguuugcugagagaccuuaggcaagcagagcccauccaugucuu

SEQ ID NO: 4178262 - RNA, 58 nt, Human
gagaaggcaccaugagaugcugguuuuccucugaagcuugcugcuaggugccugccuc

SEQ ID NO: 4178263 - RNA, 88 nt, Human
gagaaggcagcaguggggcgguaugucagcauggcuaagucuguggaugcugacuucucucugcagugguucucacucuggccuucuc

SEQ ID NO: 4178264 - RNA, 61 nt, Human
gagaaggcuagagacuugcccaagcuugcccaggaggcuugagugagaaccuggccuucuu

SEQ ID NO: 4178265 - RNA, 65 nt, Human
cuugccucuucuuuuuucugcuugaccuggagggaucagaagccauauuuagggaggaggcauag

SEQ ID NO: 4178266 - RNA, 60 nt, Human
cuugccugugagcuccguccuagucgggccaccgcugaccagcuagaugagcuuggcaag

SEQ ID NO: 4178267 - RNA, 103 nt, Human
cuugccugugccuguccuccuggccucauagccaagcugugucccugagcuggggauggcuuggggaucugaggucauauaagggcugggucucccaggaaag

SEQ ID NO: 4178268 - RNA, 96 nt, Human
cuugccuguuagagaaauggcauaaguuuuaugguauugugcaucuagaauguucuuagcaccaccugaaaauuauuauuuccgcugauaguuaag

SEQ ID NO: 4178269 - RNA, 129 nt, Human
cuugcuaggccccaaauacauccagcaccugcagacccucaagugugaucugaaaaagaugccacucauaucuuucauucuagucugagguuuugucugagagggcauguccauguggccuugugcagg

SEQ ID NO: 4178270 - RNA, 56 nt, Human
cuugcugucuugcauuuagagcccaggguuggguacuuaggaauggggacggcaag

SEQ ID NO: 4178271 - RNA, 61 nt, Human
cuugcugugugagugacugcaucucacugcuuucuagcgugaggcgaagcugcaacagaag

SEQ ID NO: 4178272 - RNA, 76 nt, Human
cuugcuuaccuaguuagcuccacauaggcauccucacaucccauugcuuugguuaaguuuuucuggucaaagcaag

SEQ ID NO: 4178273 - RNA, 89 nt, Human
cuugcuuggucugcugugugcuuacuuggguuuuggacuaagucaaaacugcaaaaucucaggccauaacacagaggagcuuaagccag

SEQ ID NO: 4178274 - RNA, 78 nt, Human
cuugcuuuaggaaacaguagccuuugcucacacagaaccuugaucaaaggccagcaaagcuacucuccaugaagcagg

SEQ ID NO: 4178275 - RNA, 105 nt, Human
cuugcuuuguggaacuuuacucacuucauucauuuggagaauaguaaugaauaccuacuauauuucagguauggugugaaauauuuaaguaaauauauaagugag

SEQ ID NO: 4178276 - RNA, 116 nt, Human
cuuggaagaacuuaauugcucauaaaauuaauuuauggauggcuuuauuugauguuuggaaacaggaauacaaaugaaccaacuuugauguuuaugaguuuccaugguuagccaag

SEQ ID NO: 4178277 - RNA, 58 nt, Human
cuuggacuuuagucucucuccaucacuugacagcuauggagacaugggcgaaucuaag

SEQ ID NO: 4178278 - RNA, 88 nt, Human
cuuggagaaggcaucccauuggauccccugcuuuggaaugggcaucacuucaugcagggcauaggguccaguuugaccuugagcuaag

SEQ ID NO: 4178279 - RNA, 75 nt, Human
cuuggauauugagccugagaaagaagcagaguagagcuugaaguagcucuggagucuucucagaagauauugaag

SEQ ID NO: 4178280 - RNA, 66 nt, Human
cuuggaugauacaugugcauauauguguacuuauucacacaugaauucacauguauuuuaccuaag

SEQ ID NO: 4178281 - RNA, 93 nt, Human
cuuggauuaggccguggagguaggugacagaaggugccagaaugccaggagguuuugacauuauccuguuacuggaugcccuggcgguccagg

SEQ ID NO: 4178282 - RNA, 58 nt, Human
cuuggcaagagggaugcaagguuugggcuggggcuggggcccaguacccucugccaag

SEQ ID NO: 4178283 - RNA, 55 nt, Human
cuuggcaaggacccacuuagagaaguguuacuuagagaaggcuccuuuugccaag

SEQ ID NO: 4178284 - RNA, 71 nt, Human
cuuggcaauagagcuguucaguguaaugauccaagaagguccuuagaaggcugaauaauucugaggucaag

SEQ ID NO: 4178285 - RNA, 64 nt, Human
cuuggcacauggcaucccccugccuauagcagcaagagccuuccaggcagggggagcagccagg

SEQ ID NO: 4178286 - RNA, 80 nt, Human
cuuggcauggguggugggcaggucacucugccucaguccugccccagcugaagaggcgucaccaccacccccaugcccag

SEQ ID NO: 4178287 - RNA, 72 nt, Human
cuuggccaauguuacauaacccauuguccugucauugugacauauggaucuggucugugagcauuauuuaag

SEQ ID NO: 4178288 - RNA, 56 nt, Human
cuuggccguuucacugggcaguuaauaaucaaguuaauucccagaaacagcacaag

SEQ ID NO: 4178289 - RNA, 90 nt, Human
cuuggccuaacaagcggcagcccuggcuagggcgagggcaguugcuuccgaggccccgccccagccugggcugagccgggagcggccgag

SEQ ID NO: 4178290 - RNA, 91 nt, Human
cuuggccugggcucaucccacccauccugcaucucuugcccugcaauccacaggcccaggauggccauggccccugugagcccgcaccggg

SEQ ID NO: 4178291 - RNA, 64 nt, Human
cuuggccuucggaguggccaugcuccaucccucgucuuucuguguggccucuguagaggccaag

SEQ ID NO: 4178292 - RNA, 70 nt, Human
cuuggcgaagccgucugcaggacacgugccccuuucaucacaaggccacgucuccuuccagagcgccgag

SEQ ID NO: 4178293 - RNA, 77 nt, Human
cuuggcuauucugcuuuuguugcuuguacuuuuggagucauacccaagaaaucaugacuaagagcagugucaucaag

SEQ ID NO: 4178294 - RNA, 66 nt, Human
cuuggcuauuuccggaguguguuagccaaucuacccugugguuuucuuucucuggaauuggugaag

SEQ ID NO: 4178295 - RNA, 127 nt, Human
cuuggcuuccuauaaauuguuuuguccuuccucucagcugcaaucagaagcuaagggcucccgcaggccuuguucugaucugcugcagggaauggaggguuuuugaaacagagaggacuuggcugag

SEQ ID NO: 4178296 - RNA, 75 nt, Human
cuuggcuuucuuccuugcugucugcuccaggcggacucccuccaccaggcagccucggcaagggcagccucgaag

SEQ ID NO: 4178297 - RNA, 65 nt, Human
cuugggaugaauacugauuagaaaaaaauaugugauuguuggaaucagugcaguuuuaugccaag

SEQ ID NO: 4178298 - RNA, 62 nt, Human
cuugggaugucacggcagauguaucaaacuacaaaaacgguacacugacaaccauccacgag

SEQ ID NO: 4178299 - RNA, 73 nt, Human
cuugggcacuagcggauucucgacagaaccacaaaguggaguuggcugcagaugagucuguucauggccccag

SEQ ID NO: 4178300 - RNA, 55 nt, Human
cuuggggaagccacugaucccuggcccuagagggccagaucgggggcgccccaag

SEQ ID NO: 4178301 - RNA, 77 nt, Human
cuuggggauauugguaugcaggugacuagcugaauucauuucaugaaggaagcucccuguauagagaaucccuuuag

SEQ ID NO: 4178302 - RNA, 83 nt, Human
cuuggggcgaaugaucugauggaagagcuaacaauaucuacuucucuuuuggguguuguuuuugcucccaucugucccucaag

SEQ ID NO: 4178303 - RNA, 66 nt, Human
cuuggggcugucacucuggcaugcguagguaaagaaccacagaucggagcuggcaggaaccucagg

SEQ ID NO: 4178304 - RNA, 58 nt, Human
cuuggggcuucuuucucgcccaggcucuggaaugucuggcugggaagggggcccgaag

SEQ ID NO: 4178305 - RNA, 57 nt, Human
cuugggugugacuuuuggaaaacaugcguuuguauuucuguuggguauauauccaag

SEQ ID NO: 4178306 - RNA, 78 nt, Human
cuugguaggcgccuguuuucuguugauuuucccaucacuauuugggguuuuuccuaccagcaagacauguuuaucaag

SEQ ID NO: 4178307 - RNA, 55 nt, Human
cuuggucccauugcagaugacuguagaacacaccauucucugugaugggauuagg

SEQ ID NO: 4178308 - RNA, 114 nt, Human
cuuggucuugaaaugauuuuucuuuaggucaccuuucauaguuaaaauaguuugcuuucuuauaguuuacuuuuugucugcugaguuaaaguggcagagagaauugagcccgag

SEQ ID NO: 4178309 - RNA, 59 nt, Human
cuuggucuugggagcagggacaggauagucagaguuccccuccaugcccaggcaccaag

SEQ ID NO: 4178310 - RNA, 115 nt, Human
cuuggugaaaauuuuacugcuuggaauccagugauugugaaaacauuaagaagcaccaauguuuucauaaugucacagucaaaacaauucucaggcgaugaguucuaccaccaag

SEQ ID NO: 4178311 - RNA, 61 nt, Human
cuuggugcaggggacagggcaagcuuagagauggaagaaagcggcaguccucugcucuaag

SEQ ID NO: 4178312 - RNA, 60 nt, Human
cuuggugccaauucugugccaggcacuaugcugcaugcuugacacaguuuucucauuaag

SEQ ID NO: 4178313 - RNA, 65 nt, Human
cuugguggagcugugaguagaaucugucuugcugaacagagucuuauuugcagugucacacuggg

SEQ ID NO: 4178314 - RNA, 57 nt, Human
cuugguguccauaguaugugucuggcuuuaguuuguuccaggucuguggucaccagg

SEQ ID NO: 4178315 - RNA, 77 nt, Human
cuugguuagccagaaaaauccucccuuguccuucccuaagccagcaugggugggauuuuccaucacuugcaaccaag

SEQ ID NO: 4178316 - RNA, 73 nt, Human
cuugguuauuuuugauucuguggauucuugauuguaacauuuaaugaaauaucuaaaguguuaaauagcuggg

SEQ ID NO: 4178317 - RNA, 108 nt, Human
cuuguaaaaauuauucaacauauacagaaauuuaaaaagcagcauugcagguuaugugagauuauguaugucugcucuuuggaacuagguugaaaugauagcuacaag

SEQ ID NO: 4178318 - RNA, 91 nt, Human
cuuguaacuccaguuuuuccauugguaaaaugagagugauaaaugauaucguucacaucguauuauugggaagguugaaaaagugugcagg

SEQ ID NO: 4178319 - RNA, 60 nt, Human
cuuguagcuacuuuaggaaguaguuuuacuucucuuuacuuccacagugagaacugcaag

SEQ ID NO: 4178320 - RNA, 60 nt, Human
cuuguagcugcuucuucugaaggcuggguccccucacggcuucaggguggcagccacagg

SEQ ID NO: 4178321 - RNA, 87 nt, Human
cuuguaggagcugucuguagggcacaggagguucgggguagggauuuuauguaggucaucuacagacagaaaacucacuuuuacgag

SEQ ID NO: 4178322 - RNA, 62 nt, Human
cuuguauauguauauguguacauauguagauauuuacaugcauggacauguauauauguggg

SEQ ID NO: 4178323 - RNA, 63 nt, Human
cuuguauugcagaauaaaaagcaaguggccuagaauuagguaacuuacaucauucugcacaag

SEQ ID NO: 4178324 - RNA, 63 nt, Human
cuugucaggaaaugucccagguugugggcuaggcccuagggccaggaugcaacagggaacaag

SEQ ID NO: 4178325 - RNA, 77 nt, Human
cuuguccuccuccuccucuugcuccagggcacucgcagagguucuuuucacaaaggagcuggaggauggggggcagg

SEQ ID NO: 4178326 - RNA, 81 nt, Human
cuuguccucuguguguccuguuuuaaaauagugcugugcaggguugcacugucaaugugcgggagauuaauggagcacaag

SEQ ID NO: 4178327 - RNA, 57 nt, Human
cuuguggaggcaggcagaguuucuggguugcuccccuaccugucugucuucagcuag

SEQ ID NO: 4178328 - RNA, 89 nt, Human
cuuguggcacaguacaauaacuagucuuauaguacauaaagggaaggguacccucccaggaauuaugagauugguguauuucacacaag

SEQ ID NO: 4178329 - RNA, 70 nt, Human
cuuguguguuaauuuucccuuucucuguagaauccagaauggauauaagggaugugaaagaacacaggag

SEQ ID NO: 4178330 - RNA, 67 nt, Human
cuuguuaaaauguagauucugauucaggcaccugcaguggggucugagcuucugcauuuccaacaag

SEQ ID NO: 4178331 - RNA, 77 nt, Human
cuuguucucuacugccuggagcauuggugcucaauaaauauucauugaguaacugaaagccauguuguaagaaaaag

SEQ ID NO: 4178332 - RNA, 87 nt, Human
cuuguucuguuaguaaacaaacauagguuugaaaguccuaaaacaaggaagacuuucaaaccuauguuuguuuauuaacagaacaag

SEQ ID NO: 4178333 - RNA, 83 nt, Human
cuuguugaaaauacagauuccuaggcagcaccuaaauuuggauacagcuggucuggggccugggaaucugcauugucagcaag

SEQ ID NO: 4178334 - RNA, 69 nt, Human
cuuguugcccaggcuggagugcaauggcacucucuuugcucacugcaaccuccaccucccagguucaag

SEQ ID NO: 4178335 - RNA, 64 nt, Human
cuuguuuauuaugcacuguagacaucauuuucacaaagcugaguaauauaggcauuuagauaag

SEQ ID NO: 4178336 - RNA, 62 nt, Human
cuuguuuccucaaaguuguauaaauauuugaucacaaauuauacuguauuuuggggcacaag

SEQ ID NO: 4178337 - RNA, 55 nt, Human
cuuguuugauaggaaggacagguguuagugaacucuccuucagacgacaagcaag

SEQ ID NO: 4178338 - RNA, 129 nt, Human
cuuguuuuaaaaaaaugaggcuaauauaaaugucagucuuucugucucagaugugcuuuguguaucagaggagacgagacaugugaauucacauuuaugugacuagaccuaaaaucacuuugaaauaag

SEQ ID NO: 4178339 - RNA, 112 nt, Human
cuuguuuuuuguacuagccuuuggaaguaugucuuuggguauuauuuuccuccuucaacuaauguagaaaugagaucagagauaacucaacuaaggccacacaguugauaag

SEQ ID NO: 4178340 - RNA, 86 nt, Human
cuuuaaacaagguaaccucauuguuucugcuuuucaugauggucucaucaaggaagggguaggaauaaucauagccuguugcaaag

SEQ ID NO: 4178341 - RNA, 66 nt, Human
cuuuaaauauucuugaaagauccugguaacugauuuauaguugccaauuauaagaaugauuuaagg

SEQ ID NO: 4178342 - RNA, 71 nt, Human
cuuuaagcccucagagccucuuugacuuugaauuguagaaaagagagcucagagaaaacuggggcuugggg

SEQ ID NO: 4178343 - RNA, 88 nt, Human
cuuuaagcuguggcuuggcauggggcaaggguaggucuagccuauggccugcaaauccuggagccaugguaacaaagcugguuugaag

SEQ ID NO: 4178344 - RNA, 78 nt, Human
cuuuaaucugcauacuugcugcauuguaaauuucuugaucaugaugacacaguuaauaaguaguaagucagugugaag

SEQ ID NO: 4178345 - RNA, 84 nt, Human
cuuuaauuagguggccuggguacaugaaguaucuuuuuggaugccuagaacacaaaaagggacgacaacaggccaccuaauaag

SEQ ID NO: 4178346 - RNA, 97 nt, Human
cuuuaauuucaagguguugucucuuguggauguugggaaguauuguacuugaauauuugaagauaaauauggagaaaagcaguggugagaacuaaag

SEQ ID NO: 4178347 - RNA, 58 nt, Human
cuuuacaauucaagggaacucucaauauugguuugagucaccugggaauuuuguaaag

SEQ ID NO: 4178348 - RNA, 81 nt, Human
cuuuacaugauuggaucaccauuuuuguuucauuuauuuaaccaagagauggaauagaggugcugauauuauuaggugaag

SEQ ID NO: 4178349 - RNA, 70 nt, Human
cuuuacaugcuuuaucggauugacacugcagagaagccuuugauguucucgguuggauaaacagguuuag

SEQ ID NO: 4178350 - RNA, 61 nt, Human
cuuuaccagauuccauugcaagggugaaaaagcucagugaaccauaauggggcuggucaag

SEQ ID NO: 4178351 - RNA, 95 nt, Human
cuuuacuagcaugcagucuuaauagagaaaaacugugcugaaguuuagaaaggcauaguuuacauauguugagauauauauugcuguucguaggg

SEQ ID NO: 4178352 - RNA, 66 nt, Human
cuuuacuucaggggcagggugggggauucugguagagaccauaucacugugcccauugagguagag

SEQ ID NO: 4178353 - RNA, 72 nt, Human
cuuuacuuucuucuacuacuuggagaaagaacaaggaaacuuguugaucaccuuagcuagaggaagagaaag

SEQ ID NO: 4178354 - RNA, 63 nt, Human
cuuuagauggcuuaggaggccccacuggcacccuugccuccagccacacuaagcaucuugaag

SEQ ID NO: 4178355 - RNA, 71 nt, Human
cuuuagauguugcuuuaacuaugaaaaauggcaguaaauuacuaugugaacauguuaaauagcauuuagag

SEQ ID NO: 4178356 - RNA, 59 nt, Human
cuuuagcauucugccugaucuuuaugcccuaagacugcuuagcagagcagaagcucaag

SEQ ID NO: 4178357 - RNA, 86 nt, Human
cuuuaggaaagcucagaucuuguuggaagauccaugcaugacugaagagaugguagcauucaauaaagauuuugagcgauaugaag

SEQ ID NO: 4178358 - RNA, 75 nt, Human
cuuuaggaacaugcccuuaccuuccuuauauaaagaguacggaucugaaagagaaauuaaaggcuguuucuuaag

SEQ ID NO: 4178359 - RNA, 68 nt, Human
cuuuaggaggcugaggcaggaggaucaccugaggccaggaguuugagaccagccugggcaccauagag

SEQ ID NO: 4178360 - RNA, 75 nt, Human
cuuuaggcgaggcagugggcggggugccugggauaaaaucaugaccagaaccugaaacaguccuugcccucaaag

SEQ ID NO: 4178361 - RNA, 95 nt, Human
cuuuagggauuguuuuuaugaaacucuuuccacgauuacuuuaagaguucuaaaaguuguuagcgaugagauuuuuauuggagcaauuucugggg

SEQ ID NO: 4178362 - RNA, 82 nt, Human
cuuuaggggguauauuuucuggaacuaugccugauagcaauucugcagcaaucuggauagucaggagauauauaccagaaag

SEQ ID NO: 4178363 - RNA, 96 nt, Human
cuuuaggguuguuaaaguggaucacuguuccuugguuuguaaacauauucaccucuucaauaccagagacaguguuuaccucuaacuucuuuaagg

SEQ ID NO: 4178364 - RNA, 65 nt, Human
cuuuaguaaaguucaacagccagaaauauuagccauuuggccuggcuaaaguuggauaauuagag

SEQ ID NO: 4178365 - RNA, 69 nt, Human
cuuuagugcuuauuacugugcugucuuugagagcagaucuccugacuucuauuauaaugaggucuaaag

SEQ ID NO: 4178366 - RNA, 117 nt, Human
cuuuauaaagguguuauucugcugcccaguuuuguaauucucaaaaauagugccaggucuucuauagcuuuuuucagaauucaugggcuuacaaguacuguaugcaucuuuaaaaag

SEQ ID NO: 4178367 - RNA, 114 nt, Human
cuuuauaucuugugcacugaguggaauccaguggcugagucauuagacaggaagcucaagagggucugugucuguuuugcucaccauuuuguuuccuuggugcuugguauguag

SEQ ID NO: 4178368 - RNA, 60 nt, Human
cuuuauuauggaacugaagauccucuuaggaauguuagguucacagucuacauaguaaag

SEQ ID NO: 4178369 - RNA, 129 nt, Human
cuuuauucauauuugugugugcaguccuuuguaacuguuugcaaauuucgucuccucagacauucuuucuuccugagguaauagaugugcacaccacuggggcacucagacacagguaugcugucuugg

SEQ ID NO: 4178370 - RNA, 56 nt, Human
cuuuauuguccuucuuaggugggguugggcucagccaguagaucgggaggauguag

SEQ ID NO: 4178371 - RNA, 85 nt, Human
cuuuauuuucauuaagcugaaucccaagugaaauaguuucuuuucccuuacuuacuggaacuuucauucugcuuugaaaauaagg

SEQ ID NO: 4178372 - RNA, 62 nt, Human
cuuuauuuucuuugauggguuguucacaauagaaacugagcaauccaucagagaaaauaaag

SEQ ID NO: 4178373 - RNA, 100 nt, Human
cuuucaaaaugcagguuccugugccaucucuagagacugaaguuuaccaggucuguaguuauucuggugagguagucagaaggaccaugcauugagaaag

SEQ ID NO: 4178374 - RNA, 79 nt, Human
cuuucaaagcuauacuucgauggaguuuccuauacuagugaaaucuguuuuaaaugaacaucaagaauagccuugaaag

SEQ ID NO: 4178375 - RNA, 59 nt, Human
cuuucaaccucauagaaagaaaauguuggacaauauuuuccgaacuugagguagaagag

SEQ ID NO: 4178376 - RNA, 62 nt, Human
cuuucaaucuggcauguaagcuuagaggucgccacucuauccuaacaaguuagauuugucag

SEQ ID NO: 4178377 - RNA, 62 nt, Human
cuuucacaagauuugagaugcugucaaaaauaaaugccagcuccucagauucugugugaaag

SEQ ID NO: 4178378 - RNA, 61 nt, Human
cuuucacauaauugaccuugaaacuuugccucugggggaaucacaggucaaugugugaagg

SEQ ID NO: 4178379 - RNA, 88 nt, Human
cuuucagauacccccuaguuaugccagaagugcagagugcauuuauguuucugaauccuccuugcuggucugguguaauuccugaaag

SEQ ID NO: 4178380 - RNA, 101 nt, Human
cuuucaggauugcaggugggacuauguuuuggaggcuugauggauuuuucaguuauuuaguucauucuuucaaggaauaguuauugagagccuccugggag

SEQ ID NO: 4178381 - RNA, 125 nt, Human
cuuucagggaugaacugaacaaauuauauggcuccagucaucugucacaucagggguguugacagccacuguuuucaaaucugagugccgcugacuuuugcuguauuugguuauuuuccugagag

SEQ ID NO: 4178382 - RNA, 60 nt, Human
cuuucagggcaacacuucuuuuugauuccuauguuuucaugagaagggguugcccuaaag

SEQ ID NO: 4178383 - RNA, 62 nt, Human
cuuucauguuggagaggcccacauugcaaggaaccuagcauggccuccagccaacagcaaag

SEQ ID NO: 4178384 - RNA, 70 nt, Human
cuuucauuacaaccccaaauuacaaauuuaugucuuaagccuugucuuuguagaaaggguuguaugaaag

SEQ ID NO: 4178385 - RNA, 130 nt, Human
cuuuccagaaaccacacuugaguccacagcagagcggaaggggcaggaggcaucaggaccauuuccagauuucucucuggcccugauugucuagauuugcauccaaucacugcaagaguuuauacaaaag

SEQ ID NO: 4178386 - RNA, 118 nt, Human
cuuuccagcaggacacagucgaagagaccacaccaagcagaugggcacaagagacagacucaggaauuuugcuucugucucuuaugccuugagguccuuaucuucccaacacagaaag

SEQ ID NO: 4178387 - RNA, 61 nt, Human
cuuuccaggcuauccggugaagggaguggaaacauuugcuucugggucccagccuggcaag

SEQ ID NO: 4178388 - RNA, 84 nt, Human
cuuucccugaggcuaaggugccagacgaauugggauucuccuucaaccuaauuucugcuacugcacccuagugaaagggaugag

SEQ ID NO: 4178389 - RNA, 75 nt, Human
cuuucccugcuuagaaggauuucagcagaggagguaauaauggaugcuguagaauaaauucuugcauugggagag

SEQ ID NO: 4178390 - RNA, 95 nt, Human
cuuucccuuggcugcccucagguuugacucugcccagccgcuugucugcgagaccccgggggacaaggguucugcagagccugcagaagggaagg

SEQ ID NO: 4178391 - RNA, 66 nt, Human
gaaacuugaauucugccauucagagacuguuuucacucucuguggcuucuauuuaacuuuagauuc

SEQ ID NO: 4178392 - RNA, 69 nt, Human
gaaacuuuggcuaaaagccagaaauaagcacuagcauuuauuugugucucugucuuagcccaagugauc

SEQ ID NO: 4178393 - RNA, 65 nt, Human
gaaagaaaccuagaaggaagggucucuuuguaaauagauggauucuaaaccucugguuucgguuc

SEQ ID NO: 4178394 - RNA, 78 nt, Human
gaaagaacugaaguauuacucugaauguauuugcucacauucuagagugguaaacucagagaauacuucuuaucuuuc

SEQ ID NO: 4178395 - RNA, 60 nt, Human
gaaagaauacuucguaaguaggauccuuuucauuuugggaucaaauuuaguauucuucuc

SEQ ID NO: 4178396 - RNA, 56 nt, Human
gaaagacgggugccugugugugcgcuuguuuguguguacacauguaacaguuuuuc

SEQ ID NO: 4178397 - RNA, 90 nt, Human
gaaagagaccccugccccgugcagggccugcagagaaagguugaggauaagggccacugaggaaagcugcagcgguacgggggcucauuc

SEQ ID NO: 4178398 - RNA, 62 nt, Human
gaaagaggcaucucagcuuccucuugcuguccuguaccagaggucagcugcaugccacauuc

SEQ ID NO: 4178399 - RNA, 61 nt, Human
cucaccaucugguuauggaaggcaaaugacaacuagucaugaacuuccuagccagacugag

SEQ ID NO: 4178400 - RNA, 65 nt, Human
cucaccauggccccuggcacacggaggaugaaggcagccacgucccugucagggucaucugugag

SEQ ID NO: 4178401 - RNA, 61 nt, Human
cucaccugggggcucugaggcauuugagcacuucagcucaguuuuucagcccugaggugag

SEQ ID NO: 4178402 - RNA, 87 nt, Human
cucaccuugcugagauuucucuugacuaccaguuaggaaccguuagguuucaaggucaacuaugggauuccauuagcacuuggugag

SEQ ID NO: 4178403 - RNA, 57 nt, Human
cucaccuugugauccacccgccucggccucccgaagugcugagauuacaggugugag

SEQ ID NO: 4178404 - RNA, 57 nt, Human
cucaccuugugauccucuugccuuggccucccaaagugcugggauuacaggcuugag

SEQ ID NO: 4178405 - RNA, 89 nt, Human
cucaccuuuauuuuguuuucgucauuucuggagugggucaauuacuuaacccugaauagagaugugauauagcagagucuuaggguggg

SEQ ID NO: 4178406 - RNA, 75 nt, Human
cucugccaucuaaaacuacuaucaaaccuaccuuuugucuccagugguggguccugaggggagcugaagguagag

SEQ ID NO: 4178407 - RNA, 78 nt, Human
cucugcccucccugcaguuccaagagcucugggugacagcucaacccaaggcugcagugagcaugagggaggaaagag

SEQ ID NO: 4178408 - RNA, 70 nt, Human
cucugcccuuggcuggaauuacucugggccauguaauauuucaucucucagaguccccaguggguuugag

SEQ ID NO: 4178409 - RNA, 93 nt, Human
cucugccuggugucccauguauccccugcaugaggagcugagucaggucugcaguccuggugaggggacaucacggacaaucuguuggcagag

SEQ ID NO: 4178410 - RNA, 57 nt, Human
cucugccuuggcaaccacagcuuuaguuuuagagaaagcccuugaacaagggcagag

SEQ ID NO: 4178411 - RNA, 55 nt, Human
cucugcggucagccagcccuggguuuggugcuccaggaaaggccagcacguaggg

SEQ ID NO: 4178412 - RNA, 79 nt, Human
cucugcucugcaucacuguggcccaaaaccucagguagagcguccccuaccuggaaacacgcuagugaugagagcaggg

SEQ ID NO: 4178413 - RNA, 58 nt, Human
cucugcugagccagaguccccagguucaguuuacuccgggaaacucugcuuaacagag

SEQ ID NO: 4178414 - RNA, 63 nt, Human
cucugcugcuuugccaguggaaaugcucagaagaagguggaagaccauuggcaggcaguggag

SEQ ID NO: 4178415 - RNA, 86 nt, Human
cucugcuuuccuggguagaccaugggcuccugggacauaagaagugaaucuuguguacguuggugucucugggacccagagcagag

SEQ ID NO: 4178416 - RNA, 77 nt, Human
cucuggaaaaccucuggguuccgugguuugguuagauuaggaauuuccagcaucauacaugaucuaggggaccagag

SEQ ID NO: 4178417 - RNA, 91 nt, Human
cucuggaagggcuuucauaaucaucuuaucugacucauuuuccaccuaaggaaagagagagugcagaaggguaagagaccaaauuucggag

SEQ ID NO: 4178418 - RNA, 60 nt, Human
cucuggagcaccgggcuauccagaagggagaccaugauccuggagcuuggagcucuuagg

SEQ ID NO: 4178419 - RNA, 72 nt, Human
cucuggauuuucccauccuugugcuacaaccugaaaacucugucuaggcaguaagaugggguaaucguaggg

SEQ ID NO: 4178420 - RNA, 58 nt, Human
cucuggcagaaggcagaaauucauuuucuuuagaugagagcuuuagcuucagccagag

SEQ ID NO: 4178421 - RNA, 69 nt, Human
cucuggcagagucugcugucugcagaggugcugaugauaaccccugcaggugacaccacucuuccugag

SEQ ID NO: 4178422 - RNA, 64 nt, Human
cucuggcaggggaagaaaggaaacggggaaucucucuugaccuuuucauugccuuagcgcagag

SEQ ID NO: 4178423 - RNA, 71 nt, Human
cucuggcucccgcagcccccaugguuugggcuuugggcucuucacaugugcagggcagcggagagcaagag

SEQ ID NO: 4178424 - RNA, 64 nt, Human
cucuggcucugacaguugauccaaagcacgcuacaggaagcacacugguuagcuaaaguuagag

SEQ ID NO: 4178425 - RNA, 77 nt, Human
cucugggagcuuaagacaguuccaaucuuaccccacacuuccggggauccugauuuaacuggucuaggggcccaggg

SEQ ID NO: 4178426 - RNA, 57 nt, Human
cucugggauagagccucggucugagcacucucuuuauacccagcucugugcccuggg

SEQ ID NO: 4178427 - RNA, 60 nt, Human
cucugggcaggacgccaggccugugaaaccugcuaaaacaggccuggugaguauccaggg

SEQ ID NO: 4178428 - RNA, 76 nt, Human
cucugggcccugcuguuuggcauuggugucuguaucucugaccagaugaaggcuguguagauggauggaugaagag

SEQ ID NO: 4178429 - RNA, 63 nt, Human
cucugggccugucccugauugaggauucuagcaggaguucucaaacacugcugggccuaagag

SEQ ID NO: 4178430 - RNA, 56 nt, Human
cucugggcugaauggcugaacccuggauccccuggaacaaucacucuggcccagag

SEQ ID NO: 4178431 - RNA, 87 nt, Human
cucugggcuuuugcuaggcuguaaccccugccaggaaggcucagccccugucccuggcuaccucgccuuguucuucaaaguccagag

SEQ ID NO: 4178432 - RNA, 83 nt, Human
cucuggggccagguggaaauggcuuuccuaggggaugggguggcuccaacucaggcuagucagaccccugcggggccccugag

SEQ ID NO: 4178433 - RNA, 65 nt, Human
cucuggggcuucuccucaucucugcagcucugcugggaccuccugagguggagcagggucuagag

SEQ ID NO: 4178434 - RNA, 103 nt, Human
cucugggguccuuaaauaucggucucccguagguugcuguagucggccaauucguaggccuggcagguggcgcccucggccaccucgugugggacgccuaggg

SEQ ID NO: 4178435 - RNA, 63 nt, Human
cucugggguuagaucugaugcuagagucagauauuuagcuguucaccuuuucuauccccagag

SEQ ID NO: 4178436 - RNA, 72 nt, Human
cucugggguucaggagagagaaauuggggcuagauuuaagaauuucauagccuucuuuacugaagccugggg

SEQ ID NO: 4178437 - RNA, 62 nt, Human
cucugggucaccaucggggauucugaacccaguuggguguuguuucccaugcuggcccaggg

SEQ ID NO: 4178438 - RNA, 58 nt, Human
cucugggucuauaaugcagcugauuaauaugaaucauaucauugugucuggcucagag

SEQ ID NO: 4178439 - RNA, 70 nt, Human
cucugguucaauuuagaaagcacaguucguugcaauuauggccaagcuguauguauucugggagacaggg

SEQ ID NO: 4178440 - RNA, 58 nt, Human
cucugguugcagcugaaguuccuggagaaaauauauugagcuuuugaugcugccaggg

SEQ ID NO: 4178441 - RNA, 73 nt, Human
cucuguaaaugugaucauuguguuaggcaaagaauugcucaucaacaugaugaucauggaguacacaaaagag

SEQ ID NO: 4178442 - RNA, 70 nt, Human
cucuguacaauagcuauuaucuccauuuuagaacugguacuaauggcuggagagaguuagcauuauagag

SEQ ID NO: 4178443 - RNA, 98 nt, Human
cucuguaccuauggaucuuggacucccaagaccuuucccugaaugugguaagaauuuaauaagaaagguucuugggaguucacagaccagggacagag

SEQ ID NO: 4178444 - RNA, 58 nt, Human
cucuguaccuuaaaagggcuuucagucuuuccaagggcccuuugcucuuugguuagag

SEQ ID NO: 4178445 - RNA, 57 nt, Human
cucuguagccuguaagagagcagcaaagaggaaugaguugcucagguauagacaggg

SEQ ID NO: 4178446 - RNA, 73 nt, Human
cucugucaaaugcugaguucaaauggugaagcugcguauugacagcuucuucugauuugucagucuggcagag

SEQ ID NO: 4178447 - RNA, 55 nt, Human
cucugucagaguguuguccccaucauguggccucaggcauccuucugacccagag

SEQ ID NO: 4178448 - RNA, 83 nt, Human
cucuguccagcuggccuaacuucagggccuccugaaauuccucuggguucuccaggccccuggaguccuggcaguugaugggg

SEQ ID NO: 4178449 - RNA, 64 nt, Human
cucuguccuuggcuauccagggcuuaugcaauggcucaugaauggagcagccaugaugacagag

SEQ ID NO: 4178450 - RNA, 96 nt, Human
cucugucgcccaggcuggagugcaguggcaugaucuuggcucacugcaagguccgccuccuggguucaugccauucuccugccucagccuccugag

SEQ ID NO: 4178451 - RNA, 76 nt, Human
cucugucuuccuggagggggaaauguucauugaaauuuguucaggaaccauuuucucuuuauauauguggacagag

SEQ ID NO: 4178452 - RNA, 68 nt, Human
cucugugaaccccuccuuucuuugugcuggugucugggaccaaaaagggggaauaugggagggcagag

SEQ ID NO: 4178453 - RNA, 61 nt, Human
cucugugcugaaagauuaaaaugacuuccaucauacagguguuacuugucucagcauggag

SEQ ID NO: 4178454 - RNA, 60 nt, Human
cucugugcuucaauuuauaguacuuaucuguaaaaugggauaauaaauagaggcagaggg

SEQ ID NO: 4178455 - RNA, 71 nt, Human
cucuguggcagcugugggacacuggucuaaggacuacacccugaugccuggugaguuacagaggccaugag

SEQ ID NO: 4178456 - RNA, 83 nt, Human
cucuguuagcugucaaaguguuuaaaggggcaagagguaauaugauccuucugaacugaaagcugcuuugucaggaauaugag

SEQ ID NO: 4178457 - RNA, 58 nt, Human
cucuguucucugauugucugauaggcguauaguuugccucuccagacagagaacaggg

SEQ ID NO: 4178458 - RNA, 62 nt, Human
cucuguugucaguggaagcagcacagaucuucccugcaccguguggccauuugaaaacaggg

SEQ ID NO: 4178459 - RNA, 61 nt, Human
cucuguuuggggugagguacucuaagcucuuggacaugagugaugucacccacagacaagg

SEQ ID NO: 4178460 - RNA, 57 nt, Human
cucuguuugguucuccgguaugguucuuggaguuguauuagagaacacaaacuaaag

SEQ ID NO: 4178461 - RNA, 73 nt, Human
cucuuaaccagaaaaugcacuugucuggaagacuauucaacaugaagacagugugguuguuucugguuaucag

SEQ ID NO: 4178462 - RNA, 74 nt, Human
cucuuaacguuuuucuagacucaaagaggauauaaauguuuccucugcaugagcuagguuccaggaacaaggag

SEQ ID NO: 4178463 - RNA, 78 nt, Human
cucuuagcaucuaccuguuucuugacugacucaugagcgauccaugcccauggcagucagagauaagagugacaagag

SEQ ID NO: 4178464 - RNA, 130 nt, Human
cucuuauugauuaccugaaauagugugccagggcucaucugagacugacauaauaauacugaauaauuccugaacaauuauaguggaaguugagaugauauccuuuagcuguuggucuuaaugaguuaag

SEQ ID NO: 4178465 - RNA, 108 nt, Human
cucuucaaggcuauaagaagacuugggagaagagaaaugucugagacuucugaacuuuggcagauaaaguugguguuagaguuuuucagcucccgaagccaucaggag

SEQ ID NO: 4178466 - RNA, 62 nt, Human
cucuuccuaugccaacauucugugaguccuacaacagcuacaaaauguucugcugggaggug

SEQ ID NO: 4178467 - RNA, 66 nt, Human
cucuuccuauguucauuuuaagagcccucauuugucucuauuccagcuacagugaaccaggaggag

SEQ ID NO: 4178468 - RNA, 80 nt, Human
cucuucgacuggggcagaguagcugggguguggaaaaggaacaccuucauacaacuuccagcuuucagccccuuggagag

SEQ ID NO: 4178469 - RNA, 60 nt, Human
cucuucuccugggugccaggcugauaauagaauuaaagcccagcauauacuaggccugag

SEQ ID NO: 4178470 - RNA, 83 nt, Human
cucuucucgaaguuucucuguaccucugucccacccugcugaauggguuuggcaccaaaggagaagauccuucaugaggagag

SEQ ID NO: 4178471 - RNA, 59 nt, Human
cucuucucucagagggaaacaugagugagaaccugacucgcaaccccuaugagauagag

SEQ ID NO: 4178472 - RNA, 86 nt, Human
cucuucucucuuucacagggcagaucauuucugucuuaguacaaauaagaaaauagauaggaaagggccuugggaccagugaaggg

SEQ ID NO: 4178473 - RNA, 75 nt, Human
cucuucugaaacauuuauggcugagauuuaaaacuacuggaauugagacauucagagguaagggucucagaacag

SEQ ID NO: 4178474 - RNA, 104 nt, Human
cucuugaggggaaagagggugaaaacuauuggccuagaacaagggugaucuaccccaguuguucagaggccaguguuuucaugccuucucuuucccuuuaagag

SEQ ID NO: 4178475 - RNA, 117 nt, Human
cucuugaguagcuaggacuacaggcgccugccaccaugccaggcuaacuuuauuuuucauagagacagggucuugcuauguugcccaggcuggucuucaguuccuggccuuaagcag

SEQ ID NO: 4178476 - RNA, 59 nt, Human
cugauggccaccaaaguccuguggcuuaccaaagcuuucuuauuugguggcuguauuag

SEQ ID NO: 4178477 - RNA, 71 nt, Human
cugauggccauccugccaccugcacagcucccuuccaggacucagggagcuguugaaggugcagggcccag

SEQ ID NO: 4178478 - RNA, 85 nt, Human
cugaugggcuaugguuuugcuuccugcuaaggcugccuggaugaucuggcccuggggcagggaagccccaagagccuugagucag

SEQ ID NO: 4178479 - RNA, 71 nt, Human
cugaugggucauguacucagcuuuuagacaggcauaacuuuauguccuuuuaaaaugugagaaccuaccag

SEQ ID NO: 4178480 - RNA, 78 nt, Human
cugaugguugcuguacuguuuuuuaucuguugugauggccuuaggcuuggguggagagggaacagugaaaggcaucag

SEQ ID NO: 4178481 - RNA, 100 nt, Human
cugauguaaugagcccuccccucuauccuuaucugucuggucgagucauucugggcugacugggcaccaucaugagauaggcaggaggucucaucauugg

SEQ ID NO: 4178482 - RNA, 99 nt, Human
cugauguaugaggccuccccucuauccuuaucugucuggucgagucauucugggcugacugggcaccaucaugagaugggcaggaggucucaucauugg

SEQ ID NO: 4178483 - RNA, 63 nt, Human
cugaugucuuauggucuugggcuucccucugacuuucaggggacagugacaaaugagacacag

SEQ ID NO: 4178484 - RNA, 124 nt, Human
cugaugugauucuaaaguuuauguuuuuaagaacuguucugugcuuuaucuccauggugcugaauguuuuugauaggugaagaggagugucuuaagagcaggggcuuaggacuuguaaggucag

SEQ ID NO: 4178485 - RNA, 66 nt, Human
cugauguucucuuuugcuguugauguauccaggccauuugcagggaacagaaagagagaaugucag

SEQ ID NO: 4178486 - RNA, 82 nt, Human
cugauuagaagaauacuugauguucaugauaauuguggugcaagacaguuuuaaguauguuuuuaguauuuuuauaguucag

SEQ ID NO: 4178487 - RNA, 60 nt, Human
cugauucugaggacccugugacgagcaggcccuggcuugucauugugacuacagaaccag

SEQ ID NO: 4178488 - RNA, 105 nt, Human
cugauuuucuuguugcauuuuauuuuacuuaugaguauaaguugcauuuuauuuuacuuaugagugucagcuaauuauucaugaauuaaacugaaggaugaucag

SEQ ID NO: 4178489 - RNA, 68 nt, Human
cugauuuuuuauaucuggggguuauuuaggauuauucacauaaaacccuuuaagauuugaauagucag

SEQ ID NO: 4178490 - RNA, 74 nt, Human
cugauuuuuugcugagcccuggcuuugggucaaaccaugcugaaugcuaaggcccaggagaaaauaaaaggcag

SEQ ID NO: 4178491 - RNA, 67 nt, Human
cugcaaaguguccuaaaagccauaugggagauagacuucuucgcagcugcaaaggaaacauuugcag

SEQ ID NO: 4178492 - RNA, 59 nt, Human
cugcaaaugggcuuuagguggcuuagucugaugaguaagccaugacugaccccaugcag

SEQ ID NO: 4178493 - RNA, 109 nt, Human
cugcaacaugcccucugucauaaauucgugaauauauuaaaaaggguugggcagagcagcaauuucacuaauaauauuuacugcuuuggggauggagaggagauuguag

SEQ ID NO: 4178494 - RNA, 68 nt, Human
cugcaaccccauuucaaugccuucaacauaguggguguuaaguccuuauggaauugaaauggguucag

SEQ ID NO: 4178495 - RNA, 65 nt, Human
cugcaaccuaauccccuuugccuuguaaucugacauagacacagguacaagggauuaggaugugg

SEQ ID NO: 4178496 - RNA, 67 nt, Human
cugcaagccaggaagagaauccucacuagaaacugaacuaguaggaaccuugaucuuggauuucuag

SEQ ID NO: 4178497 - RNA, 115 nt, Human
cugcaaguacagaaaggaggucaacuugacuguggcuuagggauuaggcuaaagagagagagagucagagcccugugugccaugugaaagaaucugguuuccauucugcaggcag

SEQ ID NO: 4178498 - RNA, 58 nt, Human
cgguacacuagcuauuaacuucacauggcuauugcacacuggaaguguggcuagucug

SEQ ID NO: 4178499 - RNA, 56 nt, Human
cgguacggcguguuggucccagcgguucagcugagguagggacgugccguaggccg

SEQ ID NO: 4178500 - RNA, 85 nt, Human
cgguccugcuuccccagaggugaggcagcuuuuggccauguuguugguagcaaagacucacuuucagcucuggaagcuuuggcug

SEQ ID NO: 4178501 - RNA, 58 nt, Human
cggucugaucuggaaauagggccucaauaugugccgccaguguuuccgucaguacacg

SEQ ID NO: 4178502 - RNA, 58 nt, Human
cggucuucaggguaugggaaagggacucuucugugccuucuugguccccuggguccug

SEQ ID NO: 4178503 - RNA, 75 nt, Human
cggugacuuugcauugugcuggagacagucaggguaguguuugcuggcuguggcucucacaagcaaaugucacug

SEQ ID NO: 4178504 - RNA, 86 nt, Human
cgguggaugggguugagauagaaaaauguagauggcccucauaaacuaguggugcucuuaacauauuauuuuagcacaggccauug

SEQ ID NO: 4178505 - RNA, 67 nt, Human
cgguggccuggcggucccaggguaccccacaggcccuacuaguuggggacugacagccaggccuccg

SEQ ID NO: 4178506 - RNA, 81 nt, Human
cgguucaagcugaaaauguuacacaggaagacauaccauguaaaggucagauucuucuacuauaauaauuuucuugaucug

SEQ ID NO: 4178507 - RNA, 66 nt, Human
cgguucugggugcaggcguguguguuagcgcgaggggcguuuucacaucccgcgcgcccuuaaucg

SEQ ID NO: 4178508 - RNA, 65 nt, Human
cgguugcuggcaucuuaauguucuguagguggaauauuuccaauaaacacaaggugccguaauug

SEQ ID NO: 4178509 - RNA, 90 nt, Human
cguacauuauauuucuauaggaggacaguauuggucuuuacacagauuuuaagguucuguccugcuaugagguuccaugauucaaauacg

SEQ ID NO: 4178510 - RNA, 55 nt, Human
cguaccacagcagugucugguacugaguaagagcucaaugaauauugcuuggacg

SEQ ID NO: 4178511 - RNA, 68 nt, Human
cguagcccuucaaaauuuacgcaguuuguacauauagauaugugcuguauauauuuugaagugauacg

SEQ ID NO: 4178512 - RNA, 76 nt, Human
cguaggcaguuagcacucaguuuccagaugaaaaggugaagauccuucugggaagugagaugcugugugcauuaug

SEQ ID NO: 4178513 - RNA, 93 nt, Human
cguaggccgcauucugggaguuguaguccgguggagcggggguuggcgccgcccgcggacccagccggacuccacuucccgucgagcccugcg

SEQ ID NO: 4178514 - RNA, 90 nt, Human
cguaguaucuauucuuaauuccaaagacugagugaaggaaaugauccugccuuccauuucucauggauauaagaacuguuuagagcugcg

SEQ ID NO: 4178515 - RNA, 94 nt, Human
cguaucugucuaucuggcaguuuacagaguucugaauuuuuaauauauauuuugucuuuaggcacuuuguagcauggugccacugauggauaug

SEQ ID NO: 4178516 - RNA, 57 nt, Human
cgucacuuuggucacacugggcacugggaaggauguucugcaggugaccuggugaug

SEQ ID NO: 4178517 - RNA, 102 nt, Human
cgucagaauugcacugcgguaauuuauuuccugccaguacacaagggcugaggguggagguggggcuggaagauggguacugccgcaagagcagugaugaug

SEQ ID NO: 4178518 - RNA, 111 nt, Human
cgucagggagcuuuagguucauucccucaccugccacagcucagucauucuccaaauucuucuuauggggcugccugaggcagugagagaagcaucugauuaaccgugaug

SEQ ID NO: 4178519 - RNA, 69 nt, Human
cgucauaccagaugugaccacagguaucagaagacagaugucuuuaauuccuuuauuauuuguaugaug

SEQ ID NO: 4178520 - RNA, 79 nt, Human
cgucccugcgcccgucggagcggcgcccuggccgaagccugucacucucggaaggggccgcgcucggacaccaggggcg

SEQ ID NO: 4178521 - RNA, 86 nt, Human
cgucuaggaaugaguuaggaagagcuuucaaucacuguguccauuugugggcaaguguuuaacuucguccugaagcauauuuaacg

SEQ ID NO: 4178522 - RNA, 75 nt, Human
cgucugcaucagccuggcuuccugcacagugucugcgccggugcacaccuuagaggggagcugcgccaucagaug

SEQ ID NO: 4178523 - RNA, 60 nt, Human
cgucugccuaaggacugccuucuugggcugccaagguacuggcuuauccuugguuagacg

SEQ ID NO: 4178524 - RNA, 76 nt, Human
cgucugguggguagaggccagggaugcuguuaaacauccuacaacauauaggauagcccccugcccccaaccaacg

SEQ ID NO: 4178525 - RNA, 71 nt, Human
cgucuuccuggcucaguguugaaggggugcuccaacaugcacccagagcccuuagcacagacuuggagaug

SEQ ID NO: 4178526 - RNA, 78 nt, Human
cgucuuuagagguuacauugguagccugaaacuucagauuuuucuugauuuuucauguggcgaugucucuggaagaug

SEQ ID NO: 4178527 - RNA, 96 nt, Human
cgugaagagccucuuguuucugcagcugaggugaggcuggaaaggagcuaccacucacuuauugcucaucucaugcucagccaaggguuugucacg

SEQ ID NO: 4178528 - RNA, 72 nt, Human
cgugagggucacaggcaaguacacaggcucauggauuuguccagagaacauguguacaugccugcacucaug

SEQ ID NO: 4178529 - RNA, 56 nt, Human
cgugaguguuaacccacugcuucuaaacccgugaagccugucaugugacgcugaug

SEQ ID NO: 4178530 - RNA, 80 nt, Human
cgugaucucugcccucaggguguauaguguagaaguuuguaaagaagcuuuguuucacauacaccuuaacagaguacaug

SEQ ID NO: 4178531 - RNA, 56 nt, Human
cgugccgcuccaggucucgcggugagcggaacagcuucucgcacucggagcagccg

SEQ ID NO: 4178532 - RNA, 77 nt, Human
cgugcuagaugguaguguggcugauugacauggucagcuggaggagaaugauuguguguuagccaucaauggacaug

SEQ ID NO: 4178533 - RNA, 67 nt, Human
cgugcucccuccagaagcucuaggggagaauucauuccuugccucuuccagcuucugguggcugcug

SEQ ID NO: 4178534 - RNA, 130 nt, Human
cgugcuguauaccaauuguaagcaugcaucuuucucagacuuuggauucauuaucuggauauaaaauucauauccuaauaaaaugaaguauguagugagaagugugcucaagucaagcagcccaugaaag

SEQ ID NO: 4178535 - RNA, 83 nt, Human
cgugcugucagucccugccagaggcaaaguuuuaguuaauuccaggcaaggccugccucuggcagaaaaggggugugugugug

SEQ ID NO: 4178536 - RNA, 77 nt, Human
cguggaccuucccuguggccuguacccgucccucaacagagacaggcaauuaccagcgcccaggcuguuguccgacg

SEQ ID NO: 4178537 - RNA, 66 nt, Human
cguggagaaagcugacuuggcuggugugguacagagaagccagcuuguuuacaugcuuauuccaug

SEQ ID NO: 4178538 - RNA, 88 nt, Human
cguggagccaggucgggccgcggcgagcaagccgacccccccaacuuucgaggggucucgccgccccgcuccucucccggcuucgucg

SEQ ID NO: 4178539 - RNA, 109 nt, Human
cguggccuuuccccuuccagagggcagggcggucucagcacccucuugguccacagcugaucuuuuuuagcugcugaagggucuggggcugugcccuggggaagccaug

SEQ ID NO: 4178540 - RNA, 96 nt, Human
cgugggacaguguuaaaucaugcuaguauuacauuuuuguguguaugguuuagauacauuuccagaacguauugcugacauacgcauugucuugcg

SEQ ID NO: 4178541 - RNA, 73 nt, Human
cgugucccaggcccucugcacccucgucuuggggcaggcccugggcgcuggggucagaguggagcaggucaug

SEQ ID NO: 4178542 - RNA, 76 nt, Human
cgugucugcuguguugcugggguggugggcugagcccugagcgggauggccaagcucucauuccagcacagucacg

SEQ ID NO: 4178543 - RNA, 67 nt, Human
cguguggaucauagcguuuacauguggauuaacauuugcuaauccaaaacugaaucuguggcacaug

SEQ ID NO: 4178544 - RNA, 93 nt, Human
cguguggggcagggagauggcaggcccugugggggugucacuggcccaggucacuuugcagggcuugauauccagacccacuugcccgucacg

SEQ ID NO: 4178545 - RNA, 60 nt, Human
cguuaaacaugcaugaagaaguuauauuuuguguaaauguacuucccagugugauuagcg

SEQ ID NO: 4178546 - RNA, 71 nt, Human
cguuagaccucaauaccaggcaccacgcaauaccuggugcauugugugaccacuggaauagaggaugaaug

SEQ ID NO: 4178547 - RNA, 78 nt, Human
cguucagcucaagcaauaauuuucaaaucucuauccaauucuuuugcaugucagaaauuauugcuagagacugcaaug

SEQ ID NO: 4178548 - RNA, 78 nt, Human
cugccacuucaggaagugacccaaugauggccaaagcuuuacugaggcccccagcugcauacuugccaagaggggcag

SEQ ID NO: 4178549 - RNA, 63 nt, Human
cugccagcccuucugacaucuggggaaaagggcucagcagaugugccuccagggcuuuggcag

SEQ ID NO: 4178550 - RNA, 69 nt, Human
cugccagcugcugcgguuauugcuaccuuccuguuuuaagaugaaagcaaugaugguagacacgugcag

SEQ ID NO: 4178551 - RNA, 57 nt, Human
cugccaggcgauggauuggcugaccuugguucaggccuccacaucuugucuguucag

SEQ ID NO: 4178552 - RNA, 61 nt, Human
cugccaggcugucccagguccgggaugccaucggcaagugggcggggacaggccuggguag

SEQ ID NO: 4178553 - RNA, 59 nt, Human
cugccagguuggcgcucgcucucagacuuacugugaggccuucagcccacacuugccag

SEQ ID NO: 4178554 - RNA, 57 nt, Human
cugccaguuaguuaccuuauuacaaauuuaccuuagaugagguaauucacuaagcag

SEQ ID NO: 4178555 - RNA, 60 nt, Human
cugccauccacggcccacucaucacauacauccagcugggcugggcuuuacagagggcgg

SEQ ID NO: 4178556 - RNA, 59 nt, Human
cugccaucugagccaaaagugccuucuuuaaaauucccacugugggguucaacuggcag

SEQ ID NO: 4178557 - RNA, 79 nt, Human
cugccaugcagauuugcauuguagacccucuaaaugccuuuugcuuagaaaucugcugccaugcaaauuugcauuguag

SEQ ID NO: 4178558 - RNA, 80 nt, Human
cugccauuguguuuuaaaguguugaagaaaauguucaugcucaugggcauggaaaagauauuauaagacuuggaugggag

SEQ ID NO: 4178559 - RNA, 77 nt, Human
cugccauuuacuagcaugccagggaacuauggaugaguuagaacucauucccccauaaugguauuuuaauguuguag

SEQ ID NO: 4178560 - RNA, 75 nt, Human
cugcccaacaugccaaugccugcuaguccaaagccacuugaguccugggagcagcauugccaugugcaagagcag

SEQ ID NO: 4178561 - RNA, 100 nt, Human
cugcccaaucucuucucccugcauaguucaccgcugauaccuguuuccccaacuucacuugguagcaaaggaugacuauguaccaggaauugacaugcag

SEQ ID NO: 4178562 - RNA, 82 nt, Human
cucccagcaauucaacagcugucugccuaucucugagcugcaggcaguuuagugagagagcagauacgcugucuagaaggag

SEQ ID NO: 4178563 - RNA, 69 nt, Human
cucccagccauacugacaucaacaaaaauagccacacacauuuuugaaugcccaagguuuggcugggag

SEQ ID NO: 4178564 - RNA, 84 nt, Human
cucccaggaggcccugggcccucugagccucaguuuucuugucuggugauggcugagggccagggcuagucucaugcaguggag

SEQ ID NO: 4178565 - RNA, 61 nt, Human
cucccaggcuggcaggcagcagugcugaggacaagcucacuguugagagucggucuggaag

SEQ ID NO: 4178566 - RNA, 110 nt, Human
cucccagucuuugucuauaucuauacuuacuuugaaugucacaagcaaaugagcugacaccaucauugcaaagugucaugcaaaguaagagagcuacagugaaaagggag

SEQ ID NO: 4178567 - RNA, 60 nt, Human
cucccauaauucucauaugucaugggaggaacccagugggaggugauuaaauuauggggg

SEQ ID NO: 4178568 - RNA, 88 nt, Human
cuccccacagaugccaaauucucagccucuuuuggaugaugaugaaauaauagaaugguuugcuagagcauuagguauggguggagag

SEQ ID NO: 4178569 - RNA, 81 nt, Human
cuccccauaugccucccugacugcauuugccaugugccugucaagccggggaccaaaugcaggucagcaggugucagugag

SEQ ID NO: 4178570 - RNA, 56 nt, Human
cuccccauggcaacaguuaugggacuccucccauaguccacgccugucuuggggag

SEQ ID NO: 4178571 - RNA, 63 nt, Human
cuccccauuccucucggugguggugggggagccuuuucaaccaagacuguuaggaguggggag

SEQ ID NO: 4178572 - RNA, 99 nt, Human
cuccccgcuccaacucuagcccaacccccgucgacgcccccuucuacgcuacguggcuagggaucuagaccaggacugggagccugagggguggggcag

SEQ ID NO: 4178573 - RNA, 67 nt, Human
cuccccggugugggaauggcggucgugcacucuggggguggcguuguucucguucccuacuuggggg

SEQ ID NO: 4178574 - RNA, 60 nt, Human
cucccgaggcuuuagaagaauauaauugccguucuaagaagaaucugaggccucuaggag

SEQ ID NO: 4178575 - RNA, 59 nt, Human
cucccgcaccuccacccagacacacacacacucguucugcacaggagggccguggugag

SEQ ID NO: 4178576 - RNA, 78 nt, Human
cucccgccccacccuucuuuccacgccccuccggagcucccggggaggaagcuggaacacgggauugggguucgggag

SEQ ID NO: 4178577 - RNA, 59 nt, Human
cucccggcuuuuccacucagccucagaaacucuggaagagguggaaguggcuucaggag

SEQ ID NO: 4178578 - RNA, 61 nt, Human
cucccgggcucggggccccuucacuggaggcugcacccccucccaggcugcgagucccgag

SEQ ID NO: 4178579 - RNA, 74 nt, Human
cucccgucgggcuggagagucccacguggggcacagaggagaggaggugcccggggcucugcaugccaugagag

SEQ ID NO: 4178580 - RNA, 80 nt, Human
cucccgucucggccaguuuccugguggagggacaggcuuagcuaaggcuuugcucucccuccagccagcuggggcaggag

SEQ ID NO: 4178581 - RNA, 60 nt, Human
cucccgugcccccaccuggcuggccuguguuacccgccaggcacucacggggcacuggag

SEQ ID NO: 4178582 - RNA, 82 nt, Human
cucccuaacuuucauguucauuuggaaccugcucccuccccaaggcacucugaauggucucaaggacauaaaagcuagggag

SEQ ID NO: 4178583 - RNA, 105 nt, Human
cucccuaauaugcaagcuuagguugcuuuggaauuuuccagguacaguguuggagaaguuguaacacaggaggaggccagagcguagguuuagugugguggggag

SEQ ID NO: 4178584 - RNA, 80 nt, Human
cucccuagugagaugaacccaguaccucagauggaaaugcagaaaucacccgucuucuucugugucgcucucgcugggag

SEQ ID NO: 4178585 - RNA, 74 nt, Human
cucccuaucagcgcuggcccacaccuaaucguuccagcuagcacccaggagugggcucagcuuccaguggggag

SEQ ID NO: 4178586 - RNA, 64 nt, Human
cucccucccccgagagcauaggcugcguuugugggaaaccagggcucagcgcgcugggagggag

SEQ ID NO: 4178587 - RNA, 60 nt, Human
cucccucugccuuugcuuuggcugucacagucccugacuuugcuucagggcagcagggag

SEQ ID NO: 4178588 - RNA, 75 nt, Human
cucccugagguggugguggaggcauagcugacucauccagauuuguucugcuggccucaucacugacuucuggag

SEQ ID NO: 4178589 - RNA, 58 nt, Human
cucccugggcccauuuaaugcaccaccuaucccugugcugggucccaagccuggggag

SEQ ID NO: 4178590 - RNA, 56 nt, Human
cucccugggccucaguuucucuguaacaucugucagacuucauggguccaggugag

SEQ ID NO: 4178591 - RNA, 58 nt, Human
cucccuguggcaugcgcucugaugggucagcacaaaggaggcaccugucacaggugag

SEQ ID NO: 4178592 - RNA, 86 nt, Human
cucccuguguuuuccauggcuugauagaaagcuaguuagcucaaggcauuagcauaguuguguaucaggccaggcauauaacggag

SEQ ID NO: 4178593 - RNA, 59 nt, Human
cucccuguuuugaggguuagaaaugucaaaccauagacugacaaaggcaaggcaggggg

SEQ ID NO: 4178594 - RNA, 62 nt, Human
cucccuuauuuucuagcuugcuugacaauuucacugucugagcuacuuaggauauaacagag

SEQ ID NO: 4178595 - RNA, 73 nt, Human
cucccuuuuggauauggggagagggucaggauaccuuaauuuacaguucgccaugucucuucacagaagggag

SEQ ID NO: 4178596 - RNA, 66 nt, Human
cuccgaggagccaggggaccuucacagagcuucggcaaguucugggaggucacauuggucuugggg

SEQ ID NO: 4178597 - RNA, 59 nt, Human
cuccgauuucauugacaaacauggcucgugaaugugagccuggcaccugcagaucggag

SEQ ID NO: 4178598 - RNA, 78 nt, Human
cuccgccuccucucuguccugauuuacccccugccuggcacaaaaaugaacagagaagucaccaagaggaaggcggag

SEQ ID NO: 4178599 - RNA, 88 nt, Human
cuccgcuuaccuggcuggcucccauugguccuuccucaaccugcucuccuuggggaggcaauucuggaccacccaagacaagcuggag

SEQ ID NO: 4178600 - RNA, 69 nt, Human
cuccgggacccagguagggaggaagauuuugcucaggucauuaucuggcucuuccuggaguuccgagag

SEQ ID NO: 4178601 - RNA, 129 nt, Human
cuccguuccgagcgcgcugcgguuccguuccggaccgcgcauccgcccgccccgcgcaccgaggcuccgcgcggcgcgcccccgggugugucguucgccgguaccaccgcagagcgcgggggaaugggg

SEQ ID NO: 4178602 - RNA, 69 nt, Human
cuccuaagaauuccaucgcagaguauuucugguuuuauacaaauauuuugugcagaguuugaauuggag

SEQ ID NO: 4178603 - RNA, 55 nt, Human
cuccuaagcagcggaggccugacacuccauggacugcauggcugcugcuugggag

SEQ ID NO: 4178604 - RNA, 99 nt, Human
cuccuaauauucacacucuuucuauuccuuuccuuuuuagugugggagggaccugguaacuugcaucuaaugaggagaauauggcaaaaaggauaggag

SEQ ID NO: 4178605 - RNA, 65 nt, Human
cuccuaauuuuugagauagcuguguuuugccaccagaacauuacugcuugggagagguaagggag

SEQ ID NO: 4178606 - RNA, 75 nt, Human
cuccuacaaugagcaguucuucgggccagggacacggcucaccgugcuagguaagaagggggcuccaggugggag

SEQ ID NO: 4178607 - RNA, 55 nt, Human
cuccuaggugcucacugggguccggggagguacagcccccaugagcacuggggag

SEQ ID NO: 4178608 - RNA, 73 nt, Human
cuccuauaugucuaguaauugaccuguagaaaauaauuacauucacuacaaauuaaugggcauguuuagagag

SEQ ID NO: 4178609 - RNA, 55 nt, Human
cuccuauauugcuucuguccuggguaacuccaggcaaaacagauuuguaugugag

SEQ ID NO: 4178610 - RNA, 130 nt, Human
cuccuauuuguccaaccccacagcuggugcucuaaaccauaauggcuauugauuucuuuugggaagaaaguucugugagaaccagugccaggguagaaaaccugaacuguaacugaugaacugaugggag

SEQ ID NO: 4178611 - RNA, 128 nt, Human
cuccucauucccguuauaccuuuucuguugauguuggcucuaaucucugauaaggaaaaauuauuauagggaauucuagaaguccacaaagaccuuagagaucuguaggguguaaaaaagggaaggag

SEQ ID NO: 4178612 - RNA, 112 nt, Human
cuccucccaggccuguguguggugggccaugccaggcugccugggaggaggaagguggggagcuccucccaggccuguguguggugggccaugccaggcugccugggaggag

SEQ ID NO: 4178613 - RNA, 58 nt, Human
cuccuccuggacacaggcugugucaauaccaugaauuaacagcuguaguuggagugag

SEQ ID NO: 4178614 - RNA, 108 nt, Human
cuccucgggugaucuuagacaaggguucugugccuccugcugcugcgccagcugccaggggccuggggcucggagcucucacacuuacuucugggguuguccaaugag

SEQ ID NO: 4178615 - RNA, 56 nt, Human
cuccucuguauugauugggacugacuagaaugucugucccagucagccagagugag

SEQ ID NO: 4178616 - RNA, 57 nt, Human
cuccucuuggcugucacugucaguucagguuguugccugaugcaugccuuugagggg

SEQ ID NO: 4178617 - RNA, 66 nt, Human
cuccucuuuacccgcauggucuuaaggugacuuuuagagagaggacacaggcaaugugagugggag

SEQ ID NO: 4178618 - RNA, 61 nt, Human
cuccucuuuggggauuuacacagcagcugaagcacaacagagcuguccuagaaaugaggag

SEQ ID NO: 4178619 - RNA, 60 nt, Human
cuccugaccucgugauccgcccuccuuggccucccaaagugcugggauuacaggcaugag

SEQ ID NO: 4178620 - RNA, 60 nt, Human
cuccugaccucgugaucugccagccuuggccucccaaagugcugggauuacaggcaugag

SEQ ID NO: 4178621 - RNA, 60 nt, Human
cuccugaccuugugauccgcccgccuuggccucccaaagugcucggauuacagguaugag

SEQ ID NO: 4178622 - RNA, 130 nt, Human
cuccugacgacacacccuuucuuuccucuggccuccuguggacccuucuucauuuaggucugguucuucugagcugcaggcugagcggggucccagagcucacauguagggcaguggcagugacaggcag

SEQ ID NO: 4178623 - RNA, 78 nt, Human
cuacugggcaggagggcucuauggagaugaugccacuucacauuuaaaaaucuuuccauuucgcaucauugcccugag

SEQ ID NO: 4178624 - RNA, 59 nt, Human
cuacugucaaugugagccuugggaagcaggacuagaaccagugcucaaucugacagugg

SEQ ID NO: 4178625 - RNA, 87 nt, Human
cuacugucuacucaugaaguuucuaauuggaacuuugaggaaugaaaauuucucaaagugagaaauugagaaaugaaaauucaguag

SEQ ID NO: 4178626 - RNA, 56 nt, Human
cugcccagaagccagaugggcacuggaggaaggccaggucuuggcauuuggggcag

SEQ ID NO: 4178627 - RNA, 128 nt, Human
cugccccacaaaucugagcaggcaauaaaggauggucuuauuuauuguauugccuuauaccuuugagauaaugcacaugacugaacuauugauuuuuuauugcaccagacagugcuauuugggagcag

SEQ ID NO: 4178628 - RNA, 84 nt, Human
cugccccacugcuaaaauguacaacuugauuauauacaaaauaauuucaauuaagaagguaauacauuuuugcugugguaacag

SEQ ID NO: 4178629 - RNA, 115 nt, Human
cugccccauaacucuggucacaguuucccacuaagucugugcuguuggugaggauuugcaauaggaucugcaguaggacuugguuguuuauuaugagccagagucccugguuugg

SEQ ID NO: 4178630 - RNA, 62 nt, Human
cugccccucagccaggugggaggugccagccuccugucauauacauaccuccucaggggcag

SEQ ID NO: 4178631 - RNA, 65 nt, Human
cugccccuggcuuuaccucacuggggcucauccccuggaagagacucagauggagccuggggcag

SEQ ID NO: 4178632 - RNA, 58 nt, Human
cugcccucccaguugguccguguccccuuccaggcuugagaccagauccugggggcag

SEQ ID NO: 4178633 - RNA, 71 nt, Human
cugcccugcagcuccacggacucgucuucucgggucaucccgagucccccccucuguggagcucagaguag

SEQ ID NO: 4178634 - RNA, 129 nt, Human
cugcccugggccaccuggaucccccugcugggcucugagcagggacaugacuggucucugugcaggccgcagggcagcuuagucccugucacagccccagaaugaucgcccccaccaggcccaggucgg

SEQ ID NO: 4178635 - RNA, 57 nt, Human
cugcccuucuccagcucaugccucuguaucuggacaugcuguggggagugaggguag

SEQ ID NO: 4178636 - RNA, 130 nt, Human
cugccgcgcaacuuccacucuaauucagcgaccaagggcccuggcagcgguuugcagccugggggccacgcuccccaggcucaggccugcucguuggccugcuccuagugccuggacccaguugggggag

SEQ ID NO: 4178637 - RNA, 56 nt, Human
cugccgucagcucuguuuccaagcaauuagaaggcagagggagaagagcccggcag

SEQ ID NO: 4178638 - RNA, 55 nt, Human
cugccguugaagugucauaacaagguguuaugcuuccccucucauuucagcgcgg

SEQ ID NO: 4178639 - RNA, 58 nt, Human
cugccuagaaaaccaggcuccucugacagacguugaacuugguauaugucugggacag

SEQ ID NO: 4178640 - RNA, 81 nt, Human
cugccucaacaaucagcacugaguuuaucuuuaugcuuggcaccaaguaggugcucaguaauugauuguuaacugauguag

SEQ ID NO: 4178641 - RNA, 76 nt, Human
cugccuccccucccacuuuagccagcucucagggggccccccaccacccugagcacugagcuggaauuggaggcag

SEQ ID NO: 4178642 - RNA, 89 nt, Human
cugccucgcaggggcccaucacaucugauuagugacugauuccagauccaucauuuguuuaucaggaugugccagcugcugcuugguag

SEQ ID NO: 4178643 - RNA, 75 nt, Human
cugccucggccucccaaagugcugagauuacagguaugagccaccaugccuggccucuucagcacuucugagcag

SEQ ID NO: 4178644 - RNA, 88 nt, Human
cugccucggcucgccgcuuccagaguaaggcgcugcccaccugguagcuguguucauucuggauguaggcuccggcgggugggggcag

SEQ ID NO: 4178645 - RNA, 65 nt, Human
cugccucuucgcccagccuuugauucccccuccuuugucggauagugucugcggcggggaggcgg

SEQ ID NO: 4178646 - RNA, 68 nt, Human
cugccucuuuagcuagugguuuacugggcagaaaauauucagcugcaguucaaugcuugcuuaggcag

SEQ ID NO: 4178647 - RNA, 68 nt, Human
cugccugaguuuuaagaugcgcuucuguuggucguccaacaaggcugguaucuuaaagaugaaugcag

SEQ ID NO: 4178648 - RNA, 82 nt, Human
cugccugcagucaacaauaugccagacucaauuguuuucagauccucaguuggguccugcaguuuguaaaaucuccaggcag

SEQ ID NO: 4178649 - RNA, 68 nt, Human
cugccugccccugccaggcagcugucuccaaauccagcggauuccuuccuccaggggcaaaaugguag

SEQ ID NO: 4178650 - RNA, 63 nt, Human
cugccugcuuaccaugcaucaggcacagaguuaggucuuguguuauaggggugagcugggcag

SEQ ID NO: 4178651 - RNA, 105 nt, Human
cugccugcuucccuuacucuuccaacaagguucuaagcucugaaauaaaucuggauauaucuucugcuuuuucuauauuucuacuggggccuggaacagcagcag

SEQ ID NO: 4178652 - RNA, 87 nt, Human
cugccugcuuugcugaggaagcaaaggcuugugugggaaggaagaucacagcugguccgcagccucaaagagcaggaagcaggacag

SEQ ID NO: 4178653 - RNA, 129 nt, Human
cugccugggcauaaccuggaaaaugcauuggaggaaagugggccacagguugauuggacauggugcuggaggucucaccaggaaacugugcccacgaccucugcauuuuuucucauccccuagauguag

SEQ ID NO: 4178654 - RNA, 83 nt, Human
cugccugggugaaggcuucuuuuauuaggcugaaaugggaaguacaugaggcuuccuugcaauaaaaggagcccuucccguag

SEQ ID NO: 4178655 - RNA, 57 nt, Human
cugccuguuuccucuugcuccccaggcuggcugagcaccugcggaggaucagagcgg

SEQ ID NO: 4178656 - RNA, 69 nt, Human
cugccuuaaauguguguguccaagugucuuagaaaaagagaaaauuuaaagagacacacauauagguag

SEQ ID NO: 4178657 - RNA, 74 nt, Human
cugccuucacagugcucacaguucagugaagaaaaugacaaaacaaggaauuaagaugaagcugugaugggcag

SEQ ID NO: 4178658 - RNA, 75 nt, Human
cugccuuccagcaucucugcacccucccccacgcccugaaggaaguggggguggaggagagagcgcugcaggcag

SEQ ID NO: 4178659 - RNA, 72 nt, Human
cugccuugauccacagcugcgguaggagacgaggaccgugacugucuccuuccagucugggguaccaggcag

SEQ ID NO: 4178660 - RNA, 65 nt, Human
cugccuuguuccaggaaggauuuaagaugguuuauauuccaguccuuuaaugcuggaauggcuag

SEQ ID NO: 4178661 - RNA, 109 nt, Human
cugccuuugcaaacuuccuuuugcagcauguucuaaucaagagguuucuguccagaaaauaaccugaauuuaauugaaaugaaaagagaggaaacauagcagcggguag

SEQ ID NO: 4178662 - RNA, 68 nt, Human
cugcgaggugucccggccugcggggcucgggcacccggugcguccugggggcugggucgugugcgcgg

SEQ ID NO: 4178663 - RNA, 62 nt, Human
cugcgccucggugagccgguccccagcccuguuuccccuggggcccugaucugugagcgcag

SEQ ID NO: 4178664 - RNA, 60 nt, Human
cugcgcgcuggcgucacuuagcaaccgaucgacagcgggcugcuggguccggcgaugcag

SEQ ID NO: 4178665 - RNA, 57 nt, Human
cugcggccugaggcuugaaagagaaaagcccuccucugggccucaaguggguggcag

SEQ ID NO: 4178666 - RNA, 57 nt, Human
cugcgggaagggagggaccucagucuccaugggaggcucagggacucccucccucag

SEQ ID NO: 4178667 - RNA, 72 nt, Human
cugcgggggacaaggcaaccagggaggcuucccagaggaggugccucguuccugaccuuggaaaccaggcag

SEQ ID NO: 4178668 - RNA, 64 nt, Human
cugcgguauggaugugugacccagugacaauguucacugccaguuguuuuguccagugccacag

SEQ ID NO: 4178669 - RNA, 87 nt, Human
cugcggucuuggcaaauuuggugucuuaguuucccucuuagcuuuggcuguggggaaauucagagcuuaauuuacaguuacaugcag

SEQ ID NO: 4178670 - RNA, 55 nt, Human
cugcgguuagccauaacauaucuacuugccaaacaagugguuuagguuaccgggg

SEQ ID NO: 4178671 - RNA, 130 nt, Human
cugcguuguuaggugacuuccauuugaucuuauagaacccauaaaguauagaucuguggguuggaaugauagccauagaacuaaacucuauuuuuugaaagcaaauaagauguaccuaauaugucuucug

SEQ ID NO: 4178672 - RNA, 64 nt, Human
cugcuaagcagcuauuucuuccagagaguauuuauauuuuaauagaaguagcuguuaauaucag

SEQ ID NO: 4178673 - RNA, 84 nt, Human
cugcuaagucugcaggguauuuguggcuggauugauuuuaccucauuaaauaugaaaaugaauaaguuaacccaggcuuagugg

SEQ ID NO: 4178674 - RNA, 81 nt, Human
cugcuaaucuguguucuaauggcugagggauguguuguauauucagcaucacaccuaccucauuauggacaccacaggcag

SEQ ID NO: 4178675 - RNA, 115 nt, Human
cugcuauaccagaguuccacucuccauccuuccuuguaaugccuguguuuccgcauuggcuccugaugcaggugugugcaagggagggcggcaaguguacauucuagguaugcag

SEQ ID NO: 4178676 - RNA, 65 nt, Human
cugcuaucuagaguccugcugagaacaaagcugagugacauguucucuuucugcuuuagauacag

SEQ ID NO: 4178677 - RNA, 88 nt, Human
cugcucaaguggccuucucuaaggcugccucugccagaggagccacguaaggccaccucugccagaggagccgugggccacagagaag

SEQ ID NO: 4178678 - RNA, 129 nt, Human
cugcucagagaagaccacugcccaguguccuuuagagccuggacaucucaggcccaguugagacaagcauuguuccaggggguccaagcugauaagaaggacacagaaucaggguaguuuuuagauuag

SEQ ID NO: 4178679 - RNA, 61 nt, Human
cugcucagccccagacucaagagaaccccucugcacauuucuggagucauuuucugaguag

SEQ ID NO: 4178680 - RNA, 60 nt, Human
cugcucagcggaaggaagagcgguccccuuccccacccgcauucccgaucagcagagcag

SEQ ID NO: 4178681 - RNA, 83 nt, Human
cugcucauaaacuuucuguuccuucauccccugaucuguugauucuguaacauuauagagggaaggaagaauggauuaagcag

SEQ ID NO: 4178682 - RNA, 75 nt, Human
cugcucaugauuauuaccuacaccgagcucaccaggaccagcaggugaaguggcagguguguaguaucccagcag

SEQ ID NO: 4178683 - RNA, 78 nt, Human
cugcucccagggcacggguccucagggaauguccacaggaauuaccacugcaggcuuccuggggccuccugcaagcag

SEQ ID NO: 4178684 - RNA, 126 nt, Human
cugcuccuaguaagaagccaacuagaauggaacugaggaauaacugaguugccagcauaguuuggaagacucaggaauuauucagcucaacuguccauucccaguucaggagucuucaaagggcag

SEQ ID NO: 4178685 - RNA, 71 nt, Human
cugcucggcgcgcauggcugccaggggaaaguauuguccuuaaauccagagcggcgauacgcgcaggggag

SEQ ID NO: 4178686 - RNA, 67 nt, Human
cugcucuagaaggucucccugccagugucucuggaucuggccuggugggugcugccucugugagcag

SEQ ID NO: 4178687 - RNA, 94 nt, Human
cugcucuauuugcauaucacuuugaauggggaaaauggcuuauuuaaaaugcucaucugucauccaguucacauggugagucaaaguggagcag

SEQ ID NO: 4178688 - RNA, 56 nt, Human
cugcucucugcuuccaagauggugccuaucgcugugucuucaaaggcagugggcag

SEQ ID NO: 4178689 - RNA, 58 nt, Human
cugcucuggucucuucauguuucuugaugucagguucaagugaagugccagaagucag

SEQ ID NO: 4178690 - RNA, 81 nt, Human
cugcucuuauuugggguauagagagggaagagaauagagaaauggggcuguucugacccugagucuauuuucuaaaagcag

SEQ ID NO: 4178691 - RNA, 56 nt, Human
cugcugaccaugaagugggggaaacugaggcuccacacaguuuauccaguuagcag

SEQ ID NO: 4178692 - RNA, 109 nt, Human
cugcugagcacucacuggcccagccaggccuguucccagaagcaaucacguggcuggauuccuaaacaggcccuaggaauugggccaguccuugccccgugcucagcgg

SEQ ID NO: 4178693 - RNA, 56 nt, Human
cugaccccaaggcagugcuuuccuccacagggcaaaggcacucagccuugggacag

SEQ ID NO: 4178694 - RNA, 112 nt, Human
cugaccgugugauggaggcuggccuuggcacuugggcagugagcauuugcagugcaaucucgguuugcauguugucauuggccuguguuaaggagccuuugcagauggacag

SEQ ID NO: 4178695 - RNA, 60 nt, Human
cucuucccuacuacaggauccaagcauaggucaugcuggagcugguauagggacaaagag

SEQ ID NO: 4178696 - RNA, 72 nt, Human
cucuuccucaggucagaccaaggccucuucccuugcucuuuauggaagccagccuugucugccucuuuagag

SEQ ID NO: 4178697 - RNA, 71 nt, Human
cucuuccuccuucauuaacuauuggaaugcagaggacacuuaacugcaaauugugaaugaaggaggaagag

SEQ ID NO: 4178698 - RNA, 77 nt, Human
cucuucuaaccaggauagaagucucuuuucucuuucauauaaaacuaggauaggaauugagaugcuauuugggagag

SEQ ID NO: 4178699 - RNA, 56 nt, Human
cucuucucugccaccaccuucucuaugccacacggaggcacuuaggcagagcagag

SEQ ID NO: 4178700 - RNA, 79 nt, Human
cucuucuggggaaugcacuuccacacucgaggccaaugcugaaauaggcaugcaaggggugugaagugaccuggaaggg

SEQ ID NO: 4178701 - RNA, 59 nt, Human
cucuucuuggcccccaugagggcccaccuaucacugccaucgugguugccaggagugag

SEQ ID NO: 4178702 - RNA, 72 nt, Human
cucuucuugguauuuggggaaauauuuuccuccccguccauuccaggaaauggcuccaagugccaaggacag

SEQ ID NO: 4178703 - RNA, 78 nt, Human
cucuugaacaauauuacuguuuuuaaaauugcauccccaagggguacagauggaaugggggaacaaaguuguucugag

SEQ ID NO: 4178704 - RNA, 57 nt, Human
cucuugaagggcaucugaguuacacaucuccuuggugacuacacaugacugcaggag

SEQ ID NO: 4178705 - RNA, 65 nt, Human
cucuugaccuuuucauguaucucugucuccuaauuuggcaggaaauauaggaaaaggaacaaggg

SEQ ID NO: 4178706 - RNA, 101 nt, Human
cucuugcuauauagucacaagaaagccuuugucucaggcucugcuuuggggaacacuugaccuaagucagacaugggucuuauuuggauugagaagcagag

SEQ ID NO: 4178707 - RNA, 71 nt, Human
cucuuggcucauggcuggaagcucaguuagucaaaugaagauugacuuggugcacagccaaaccucaagag

SEQ ID NO: 4178708 - RNA, 108 nt, Human
cucuuguaauuuuucagcagaaaggcacuagaugaucuugcccacauucuguaauaaugaguuucauuuacaugucuuucucugagaagaugaaaugauuacauugag

SEQ ID NO: 4178709 - RNA, 79 nt, Human
cucuuguuccaggcauggcuugggucaaucagcacucaugacuuugcugugugccugagccgugccuggcuaacugggg

SEQ ID NO: 4178710 - RNA, 69 nt, Human
cucuuguucucuggcuuagguugagugcagcccaugaggugcugcagcaaaaggucagagggaggagag

SEQ ID NO: 4178711 - RNA, 68 nt, Human
cucuuguuuccuuucugcagucuucaaccccuuuguuuguccugaaacucagggagauagggcaagag

SEQ ID NO: 4178712 - RNA, 73 nt, Human
cucuuuaaagguuugacaagcgaaguaccauaaugucaugagagauaugguucuugucaccuuuccaaauggg

SEQ ID NO: 4178713 - RNA, 129 nt, Human
cucuuucucuggcugauccaguaucucaaauucugccuggugagggcuuguaaguggguggagcgggugacuguucacuaagucuggcagccugugcggcacagugcuggcuguggguggaggcaggag

SEQ ID NO: 4178714 - RNA, 61 nt, Human
cucuuugaggcaugguuauaucaucuggaaaacagaggucaauaauaugugcuuuauugag

SEQ ID NO: 4178715 - RNA, 86 nt, Human
cucuuugauguaaucauugucuguacuuuaaaaauguuuggcugaauuaaaaagauacaaaucagacagggaauuauagcagagag

SEQ ID NO: 4178716 - RNA, 65 nt, Human
cucaaccauguccuuaaucugaauguuagagaccuuuccuugacucucaggacgagguucuugag

SEQ ID NO: 4178717 - RNA, 73 nt, Human
cucaaccccacaggcagcccucucccugguucccaggacccagggucaggguuuguuuuaaaaggaaguugag

SEQ ID NO: 4178718 - RNA, 78 nt, Human
cucaaccguuccuuguauuucagacaugaucuuuuuggcucauuaccugaaaaacaagagagaaauuaacaguuugag

SEQ ID NO: 4178719 - RNA, 61 nt, Human
cucaagauauuccagcucucaaggacuuuaggcucucuuuggggagcuggaauugucuuag

SEQ ID NO: 4178720 - RNA, 75 nt, Human
cucaagaucuuccuuuauuccugcccacuuugucacaggcagaacaacguaggaguggagaugugaucuccagag

SEQ ID NO: 4178721 - RNA, 76 nt, Human
cucaagaugcuaagugaggcugaacagguucucaugacugcauggucaugaauagagggccuagccuguguuagag

SEQ ID NO: 4178722 - RNA, 69 nt, Human
cucaagcagggaaggggcaugcuggaguuuacuuuuaggauucuggaaggccucauccuugucaauggg

SEQ ID NO: 4178723 - RNA, 129 nt, Human
cucaaggaaaaacaaguugaguaggugagauuuugaucucuuauucuucuucucuugccaggugccauucuaagccccuucagugaugagaagaauaauucucgaagccucacuagagagaugugugag

SEQ ID NO: 4178724 - RNA, 56 nt, Human
cucaaggaacaaacuguucuucacaaguguuucuuggaaugacaaguuguucagag

SEQ ID NO: 4178725 - RNA, 81 nt, Human
cucaagucacaaguuaucuacuauagugccaugcaucacuuuuauaguugagguaggguuaauggagauauaggauuuuag

SEQ ID NO: 4178726 - RNA, 68 nt, Human
cucaauagaaagcaauaaucccaaagugcugagaaguaaugacucagcuaggagacuguugcucugag

SEQ ID NO: 4178727 - RNA, 65 nt, Human
cucaauggaauaauuguuauuauaucuauagagccagauggcacuugguguaaacagccauugag

SEQ ID NO: 4178728 - RNA, 55 nt, Human
cucaauggggcccacacacccaagcaucagaguuggcuggagagggucccaugag

SEQ ID NO: 4178729 - RNA, 98 nt, Human
cucaaugguauaggcuggcuccaccccaggaggaugagaagcaggcagaggaccucaaggaacguccccugggaguggaggaaggacuuauccuuggg

SEQ ID NO: 4178730 - RNA, 74 nt, Human
cucacaaaguugcagauaguaaguaaguuaucuaaauucuuagagaaucaauucacugcugcagccuuguaggg

SEQ ID NO: 4178731 - RNA, 104 nt, Human
cucacaaauggaugucgaugucauuuauucucuuauucuacagaccuucauuggcuacauggguaguaugggcaagagauaggugguccugacggaggaguggg

SEQ ID NO: 4178732 - RNA, 61 nt, Human
cucacagauacggcuauuccugguccaaaauucauucgcaaggaguaagagaaucugugag

SEQ ID NO: 4178733 - RNA, 78 nt, Human
cucacagaugaguguuuguacccgugcagaugucauuuucuaccaacauguguuaauuccacaaacauucauuauggg

SEQ ID NO: 4178734 - RNA, 62 nt, Human
cucacagcagccagucugccuuaaaaagcuuccaggcaaaaagggcagauuagcuguaagag

SEQ ID NO: 4178735 - RNA, 66 nt, Human
cucacagcaugguggccuuaggguagcccgauuuuucacaugguggcucagggcuccaagcaugag

SEQ ID NO: 4178736 - RNA, 61 nt, Human
cucacagcauucaugcgaaauggaauuuuuaucucuauuuuuauaguugaagugcugagag

SEQ ID NO: 4178737 - RNA, 74 nt, Human
cucacagcccugcugucuucagaguauaaacuggagacagauguacccagaauugaggacgggugggaaaugag

SEQ ID NO: 4178738 - RNA, 86 nt, Human
cucacagggcuucaggcauuccauuacagaucuuuuccuaaugugaggaaaagggaauaguggagaguccugaggacccuggugag

SEQ ID NO: 4178739 - RNA, 89 nt, Human
cucacagucacagccuggccucugcuccugugggccaguggccagacacccccugggauggcucaaaggagucaggacuuggaaguggg

SEQ ID NO: 4178740 - RNA, 130 nt, Human
cucacaguuuccaugggucuggaauucaggaguagcuuggccagcagcucuggcuuagggucuccugugacguuacagucauauguuggcggaaacugcagucaucugaaggccugaccagggcuggaag

SEQ ID NO: 4178741 - RNA, 64 nt, Human
cucacauuucuccccaggacacaugcgguagacaugcugcaacuuguuuggagagaaaggcaag

SEQ ID NO: 4178742 - RNA, 62 nt, Human
cucacccccaggaagcucguuugauugagguaccuuuuccaagcugcaguuugguugguggg

SEQ ID NO: 4178743 - RNA, 117 nt, Human
cucacccuacuucauaggaaagauauuuggauuauuuaauuagugauuguagaguguuacuaagacacacuauguaauuauuauugaacugguaucuccuccuauguauucagugag

SEQ ID NO: 4178744 - RNA, 92 nt, Human
cucacccuuugaagggcagaggcagggcccuccuccaccccuuccugcccaaagggcugguggcagcccagccucugcuuacauaaccugag

SEQ ID NO: 4178745 - RNA, 73 nt, Human
cucaccucggcugcacccugagaacucugccaucacccaagagacaucugcaggaggcuggcugcaggaagag

SEQ ID NO: 4178746 - RNA, 62 nt, Human
cucaccugcccccuugagauucugauucaacugagcugagcuaaggcacaggcaggcuugag

SEQ ID NO: 4178747 - RNA, 77 nt, Human
cucaccugggacuccaggcaucugcuucugcuucaucccaguaggaggcucuaguuuggaguuucuccacagguggg

SEQ ID NO: 4178748 - RNA, 66 nt, Human
cucacguuucagggaagcccucuccacaguuacaggcagaaagggugggccacugagcagcgugag

SEQ ID NO: 4178749 - RNA, 55 nt, Human
cucacucaguuuuuaguucaucugugacuaauuccaggugaaguuggcugguggg

SEQ ID NO: 4178750 - RNA, 80 nt, Human
cucacucuucguuuuguuccccuuacuuacauguuucucuuuuccuuauacugugaacucuggaacaaaacuagauuggg

SEQ ID NO: 4178751 - RNA, 59 nt, Human
cucacugaacuaaacacaugagauuccugccuuugggcagcuugugguuuaguagaggg

SEQ ID NO: 4178752 - RNA, 80 nt, Human
cucacugacaaugugucagacacagccagagacugaaauacgaguagaugccaguucuggacuugucugccuuaagugag

SEQ ID NO: 4178753 - RNA, 64 nt, Human
cucacugcccugaaguuggguuucuaauuuacucaaggggcuccagugucucagagcagauggg

SEQ ID NO: 4178754 - RNA, 56 nt, Human
cucacuggggccuuuggucaggaaaggcggccauuccaugacaagaaacccaggag

SEQ ID NO: 4178755 - RNA, 68 nt, Human
cucacuucuacuuuaaucagagcuccaacaugucgacagguuggagcucugauuaaauuggaacugag

SEQ ID NO: 4178756 - RNA, 62 nt, Human
cucacuucugucaccauuuacagcucaacguagcuguguccuuuggaggaucagcgggugag

SEQ ID NO: 4178757 - RNA, 96 nt, Human
cucagaaagaacaccuuggaaguauuguaaacuuccuaaggaguuguuaggaagcuuuuuagaauuuuuuggaguuuuccaaggugacuuuuggag

SEQ ID NO: 4178758 - RNA, 71 nt, Human
cucagaaaugccacacuuuuaacaggagaauucccuugggaagggaaauuucgguuguagggugcccugag

SEQ ID NO: 4178759 - RNA, 62 nt, Human
cucagaagaacaaaggcucuacaaccugacaggccagccaugggacccuggguucuucugag

SEQ ID NO: 4178760 - RNA, 59 nt, Human
cucagaagccuucagucuuggcuugcaaucccuuauccucagauuagagggcugcugag

SEQ ID NO: 4178761 - RNA, 78 nt, Human
cucagacaaaugauuaagguuaagcucaccaaugauagugcauguuggucucagguaccucuaauugauugucaugag

SEQ ID NO: 4178762 - RNA, 76 nt, Human
cucagacuguacucuuauagccaucugaaauacguuuucuagguauagauagauuguguaaggguacaguugugag

SEQ ID NO: 4178763 - RNA, 90 nt, Human
cucagagacgguaacacugauuugcucuuggucacacauccaauaagugucagggugccagaauaagaccaauccuguguaccuccugag

SEQ ID NO: 4178764 - RNA, 69 nt, Human
cucagagacuuuauuuccuuauuugugagaugcaggcuguaaucaaaguagccggauggaauuuuugag

SEQ ID NO: 4178765 - RNA, 84 nt, Human
cucagagcacagaaagcacauuugaaaugguaaugagaagcgagccccgugacaaagugcuagucggugaaauauuucucugag

SEQ ID NO: 4178766 - RNA, 61 nt, Human
cucagagcacuuuugaaagcuccuggcucuaccuggugcuuacagggugaguguauuugag

SEQ ID NO: 4178767 - RNA, 74 nt, Human
cucagagccuccacuuccucucaauaagaugagaauaaugagguucucagaauugacugggagcaggcuucaag

SEQ ID NO: 4178768 - RNA, 64 nt, Human
cucagaggguugaaggugcucuggaagcaaucuggaacaacucugugcaccuaaauuuucugag

SEQ ID NO: 4178769 - RNA, 76 nt, Human
cucagaguuuagcuucugacaaagcgggagguacaauaaaucuaaguuccagccuggguguuagaagacaucugag

SEQ ID NO: 4178770 - RNA, 60 nt, Human
cucagauaucuucauaaggcaguggcucuaaacccuggcuguacauuggaauuaucuggg

SEQ ID NO: 4178771 - RNA, 65 nt, Human
cucagcagcagggaagaggucaaccaugcugguucuugaaauguuuucuucccuuggcuucugag

SEQ ID NO: 4178772 - RNA, 68 nt, Human
cucagcaggcacugugccuuacagaugauaacugcucaccacgugcuugggcauauugccuggcugag

SEQ ID NO: 4178773 - RNA, 109 nt, Human
cucagcaggcucccccaauuugucuggauagagccuaggcccagugucccaggaagguggauacuugggagucuuuggcauucagggaaauuggggggacucuccuggg

SEQ ID NO: 4178774 - RNA, 80 nt, Human
cucagcagugucaaucuucuuacauaggcccaugagucuaugcccauaguaugaguguguguagaagguacacuacagag

SEQ ID NO: 4178775 - RNA, 62 nt, Human
cucagccaucuccguguagucugacagcgacaguggcagaaccugaacgugagguggagggg

SEQ ID NO: 4178776 - RNA, 62 nt, Human
cucagcccggugcucgugccacgccuuccccacuucugcgggcacgcggggccgcgggcggg

SEQ ID NO: 4178777 - RNA, 59 nt, Human
cucagcgcaggaacacgucugccuuacucacuucuguguuguugacaccuggcgcagag

SEQ ID NO: 4178778 - RNA, 65 nt, Human
cucagcucuccaacuuggcucucuggcuauccacaggacguggacaugagcccaguggggcuggg

SEQ ID NO: 4178779 - RNA, 75 nt, Human
cucagcucuccucuggcugguugucucaauccagggaccuuuucugggccugugacucccauccuuaggacugag

SEQ ID NO: 4178780 - RNA, 66 nt, Human
cucagcugcuuugucuguaaaauggaggugaugacaccaccuccagccuucucaaggcuggcugag

SEQ ID NO: 4178781 - RNA, 56 nt, Human
cucagcuggcaauucuggcucccucaguaagaguggcuacagcuagaacagcuggg

SEQ ID NO: 4178782 - RNA, 68 nt, Human
cucagcuucucuggucuucugccaagcuccuguugaagagggaguuggaggaggcuccagacagugag

SEQ ID NO: 4178783 - RNA, 55 nt, Human
cucagcuuggauccagcugacuucuguuagcugagcauuugauccaccuccugag

SEQ ID NO: 4178784 - RNA, 79 nt, Human
cucagcuuuaacagacauauauauuuguauguguauagaagccuucauauguaaauguauauguguguuauguacugag

SEQ ID NO: 4178785 - RNA, 80 nt, Human
cucagcuuugucauuuggugaguaaguuugaaaaauaucaauuuauuucauucuccuguuucacagaugggaaaacugag

SEQ ID NO: 4178786 - RNA, 66 nt, Human
cucaggaaauguuuuacaaggcauacuucagauuuaaagaaguaugauucuaaaaauauucuuggg

SEQ ID NO: 4178787 - RNA, 79 nt, Human
cucaggaagccagccaggcuggcuguggaggucccaagacccugggucauccuccaucuccagcuucugccuugcugag

SEQ ID NO: 4178788 - RNA, 56 nt, Human
cucaggagcaagugcagacuagagacuuauggaggucuccaguauccuucucugag

SEQ ID NO: 4178789 - RNA, 72 nt, Human
cucaggcaaaucauuagccucauguaccucaguuuucucaccugcgucacaggcuugugaacauugcaugag

SEQ ID NO: 4178790 - RNA, 75 nt, Human
cucaggcaggccgugucccuccucagccucacuuuccccuuguguaaaaugagggaagggacugcgccuucuaag

SEQ ID NO: 4178791 - RNA, 55 nt, Human
cucaggcuccagacuuccguccgucgggaguguggagggaggugcugggccugag

SEQ ID NO: 4178792 - RNA, 77 nt, Human
cucaggcuccugggaucuguggccuuuggcugugaguuccccauuaggccaggcagacaggucaucaggacgcagag

SEQ ID NO: 4178793 - RNA, 55 nt, Human
cucaggcugcaagaaaggcauucagcuuaagcaaagcugaaauugcauccaugag

SEQ ID NO: 4178794 - RNA, 55 nt, Human
cucaggcugguuuggguuguuuucugaagucagaggccaaacucaaggcucugag

SEQ ID NO: 4178795 - RNA, 56 nt, Human
cucagggaggccucugcugguuccuggugcugaaguagcacaacuccucccugcag

SEQ ID NO: 4178796 - RNA, 65 nt, Human
cucagggauuguagugggggaagaaggaccucccuuucugcguguccccucacuugucuucugag

SEQ ID NO: 4178797 - RNA, 87 nt, Human
cucagggcaagcgggaagacagccagcuccaugggauccacaucaugugcagucaccaucggcugagcuuucuuguucucuacugag

SEQ ID NO: 4178798 - RNA, 89 nt, Human
cucaggggggaacauccccaggggccugggcacaguggcguucaggacauaaaccacuguggccaaagccucugggacaggccucugag

SEQ ID NO: 4178799 - RNA, 72 nt, Human
cucagggucccaaugguacuggggucccggaguugaaucgaagcuccugaaaauccagacugggggggugag

SEQ ID NO: 4178800 - RNA, 81 nt, Human
cucagguacccuucccuggcaugaguguaagauuuuauaaagguccaguccaccuuaugccagggugguugguaacuuggg

SEQ ID NO: 4178801 - RNA, 66 nt, Human
cucagguauucuaagcuguguuuacuggcuuugugucagguaacacuacuuaguauacuaauggag

SEQ ID NO: 4178802 - RNA, 74 nt, Human
cucaggugaaacagcuuucuuuccauaagguuucacuuuacuggaagugagauucaagaaugcuguuuaauggg

SEQ ID NO: 4178803 - RNA, 64 nt, Human
cucaggugguauuauuuggagucugguauauaucagauuuagggugauuaccuuaaaaccuuag

SEQ ID NO: 4178804 - RNA, 79 nt, Human
cucagguggucugugggacagcuggagggucccugcugaucucagcugggguuacucaugcuuccucagguuggcuggg

SEQ ID NO: 4178805 - RNA, 64 nt, Human
cucagguuuuggucuggaaucuucaggguccuggggcuccggggguuccagaucauccacugag

SEQ ID NO: 4178806 - RNA, 68 nt, Human
cucagucugccugcuaacuccugcaccaucuuucugguguacuugaugugagagcaggugucucugag

SEQ ID NO: 4178807 - RNA, 78 nt, Human
cucaguggauggaguuagaaaagguauguauguauacucacauauauacaugcacauuuuuauacauuuucuuuugag

SEQ ID NO: 4178808 - RNA, 79 nt, Human
cucaguguccuuaaaugaacucugcaugacuggcuuuacccagaucaaugagcaagacauuugaguucuuaccgcugag

SEQ ID NO: 4178809 - RNA, 56 nt, Human
cucaguguguaguagcgguaguuuucaauccuacuauccguuagaaucaugcuggg

SEQ ID NO: 4178810 - RNA, 81 nt, Human
cucaguuauagcuuacuaacauuuguguaugucuugguggaaacaugagucacaaauaaugauuaguuuggaaagacugag

SEQ ID NO: 4178811 - RNA, 70 nt, Human
cucaguuaucaauucugugugccuuuagggcagaaguucaauaauucugcuggguaucagaaucacugag

SEQ ID NO: 4178812 - RNA, 69 nt, Human
cucaguugcacucaccacauuucaggugcucaguagucauauggucaccaugaugggagugcaaauaag

SEQ ID NO: 4178813 - RNA, 79 nt, Human
cucaguuggggcccagugcaugguguuuugauuaugaaaagaacaucccuaaaguccaugcaugccugaaauugcugag

SEQ ID NO: 4178814 - RNA, 68 nt, Human
cucaguuuccucagcuguguccuggcgaugauaaugcccaucucauggagucaugugggggauuugag

SEQ ID NO: 4178815 - RNA, 68 nt, Human
cucaguuucuauggcugggcucugaggucaggaauacuaaugguaggaucccugcucuggaaaguggg

SEQ ID NO: 4178816 - RNA, 77 nt, Human
cucaguuucugucuacauaacagauacucucugugagggaaagcccucauugaaauuuguuuguugagacagaggag

SEQ ID NO: 4178817 - RNA, 66 nt, Human
cucaguuucuuaucuucaaaauugggcaauaaucaugcugcacaguugucaagaggaugagaugag

SEQ ID NO: 4178818 - RNA, 88 nt, Human
cucaguuuucucauacguaacuagcaauuauuguauaagaacaauauccacuuauguuguuuacaguaauugugguuugggcucuggg

SEQ ID NO: 4178819 - RNA, 81 nt, Human
cucauaagaugcauugaguauuguaaauaaaacaaaccauuuuugauuuguuuaaauugcucguuacaguucucuuguggg

SEQ ID NO: 4178820 - RNA, 64 nt, Human
cucauauaaguggaauuauauaguacuuguccuuuuguaacuggcuuauuucacuuagcaugag

SEQ ID NO: 4178821 - RNA, 93 nt, Human
cucaucacugcauuggaguucucaucucuuugacucuuaaaauagaugaauauuuuuuuccauuuaucuuuaaagacaugugaacuugaugag

SEQ ID NO: 4178822 - RNA, 60 nt, Human
cucaucagaaauaccugacaaauggaucauucucgccuacuguuaugguguucugauggg

SEQ ID NO: 4178823 - RNA, 66 nt, Human
cucaucaggcuugcuagaggagccaaauccaggggugaguuugacucuucuagcaagugugaugag

SEQ ID NO: 4178824 - RNA, 77 nt, Human
cucaucccagaacgguugcgcuuauauuaaaauuuuauauaugaaauguacauaaaaacgcacacagaugggaugag

SEQ ID NO: 4178825 - RNA, 56 nt, Human
cucaucucaacaucccuauggagugcguccuaucaggaugcccauguguagaugag

SEQ ID NO: 4178826 - RNA, 56 nt, Human
cucaucuuguguguuauagguguguacauuuccaucugagacacucuugugauggg

SEQ ID NO: 4178827 - RNA, 56 nt, Human
cucaucuuuccacucuuuuuuuaacccuauaccuaagaaaggagugucccugugag

SEQ ID NO: 4178828 - RNA, 76 nt, Human
cucaugauucgacugagaauuuacauuuuuggugaaaaucccacugaagaguucugcucuucucagugagcaugag

SEQ ID NO: 4178829 - RNA, 70 nt, Human
cucaugcaacauacauucugaagcuuuuauugagcugaacuuagaauauauguauauuaaucugcagaag

SEQ ID NO: 4178830 - RNA, 77 nt, Human
cucaugcaauuuagaggacuguaggugggaauacaggaacucuuuauuuccauaaguguccacuaaaugauugugag

SEQ ID NO: 4178831 - RNA, 58 nt, Human
cucaugcagcuccccaugggaugguaccguaugcaucccuguguacagccugcaugag

SEQ ID NO: 4178832 - RNA, 112 nt, Human
cucaugccaggcagggagaaguucuguuucuccacacucuucccaagaccuggcacccaaccaggccugggaagggcugggcagagaaccucacucaucccuccuuguagag

SEQ ID NO: 4178833 - RNA, 102 nt, Human
cucauggaaucugggaaguguccuaaagguuauugcacuggaguuggacguggaagcaugggaaaauuuuguauaaggacaagggacauuccagguagggag

SEQ ID NO: 4178834 - RNA, 55 nt, Human
cucaugucagggaagagagucagugugugccuacugaugucccuuugaugaugag

SEQ ID NO: 4178835 - RNA, 78 nt, Human
cucauguuuugucuaaucuaaauucugucaagcaagcgaaaaaaagagagacagagacagagagagaaagagaaugag

SEQ ID NO: 4178836 - RNA, 90 nt, Human
cucauuaaaaugaaaauucucaggcucaccccggaacuacccaaucaaaaacucucuggguagagccuagcaguuuugaauuuuaacaag

SEQ ID NO: 4178837 - RNA, 64 nt, Human
cucauuaagauuacgugccagaaguuagacauaagcuuuuaaggccacugugguuuuaugugag

SEQ ID NO: 4178838 - RNA, 61 nt, Human
cucauuauuaccuuuucuugccuacucaaaggaugcuuucaggcagcugggguaguuggag

SEQ ID NO: 4178839 - RNA, 72 nt, Human
cucauucacuagcuguaagagggauguggcucaaacuucaacugagaagcaucagcaauggcuggaaaugag

SEQ ID NO: 4178840 - RNA, 65 nt, Human
cucauucagaagucacuuaggaaagggggcgacuuagauuuucucugcuuaguguuuucuaugag

SEQ ID NO: 4178841 - RNA, 68 nt, Human
cucauucauucagcgcaugguuacugagcaccuacugagugccaggcccugugcugggugauguugag

SEQ ID NO: 4178842 - RNA, 68 nt, Human
cucauucuccacacauccagaccuuacccagaccuagucagccaagggugaugguggagaaaucugag

SEQ ID NO: 4178843 - RNA, 79 nt, Human
cucauucucucaggcuucuuuucuuuccagacggggcccuguaucuugcaugguuagccuugagaguuaagagaauggg

SEQ ID NO: 4178844 - RNA, 66 nt, Human
cucauuguucagauuaguguuagguuacaggccaagaaccugcagcagacauaauguggauuagag

SEQ ID NO: 4178845 - RNA, 83 nt, Human
cucauuucacucagcuguaggguccucaucuauaaaaugggaauaauauugacuuugcaggccuguugugauaauuaaaugag

SEQ ID NO: 4178846 - RNA, 72 nt, Human
cucauuugccaagucggguugcagacacauccucuuucuggagaggcugucucagccugcuugcagaaugag

SEQ ID NO: 4178847 - RNA, 67 nt, Human
cuggggccaagccaaccaguuugcauccgaauacuguuccucacgaaggcagaugcuaggccuccag

SEQ ID NO: 4178848 - RNA, 60 nt, Human
cuggggcugggggaggagaccuucuaaugacccccccauaggccucccucauuuucccag

SEQ ID NO: 4178849 - RNA, 123 nt, Human
cuggggcugggucugcguugcucuuggaauccuuaauuuccugggccucagucacauucugcuguuggggaaacugaggcacagaaaaugguagggauuucauucacgagcgcccagucugag

SEQ ID NO: 4178850 - RNA, 81 nt, Human
cugggggaagggcagcuuaaauugguagcuuccgcacauaacaagcucaagaccagacaaagccugccgaacagcccccgg

SEQ ID NO: 4178851 - RNA, 75 nt, Human
cugggggaggcugggaaagaaacuggguccuggauacaucagguuccagguucgaaucccaucucuaucuccuag

SEQ ID NO: 4178852 - RNA, 56 nt, Human
cucuuugugcuauuaugauccucauuuuuuagaugaggacacuaaggcacugagag

SEQ ID NO: 4178853 - RNA, 60 nt, Human
cucuuuguguucaggagccacguaccugggaacaaagggaugggccagggauacagagag

SEQ ID NO: 4178854 - RNA, 78 nt, Human
cucuuuuccaaugugagugccaggugaaguauguagucuaggccuacaaaucauaagaauucacaaagaggaggagag

SEQ ID NO: 4178855 - RNA, 84 nt, Human
cucuuuuccauuauggugucagcuaauuugggagcucauuauuuauuuggcacuaauuuagccuggcaaauuaauuagaaaggg

SEQ ID NO: 4178856 - RNA, 55 nt, Human
cucuuuugagacagggaaagguccauguuggggucuuuuaccuucuugagagcag

SEQ ID NO: 4178857 - RNA, 87 nt, Human
cucuuuuggccuuuucagagaaagcagauuuacuccugcuuuaaggagcucagucucuacuuucauuugacuugaggcauuauagag

SEQ ID NO: 4178858 - RNA, 62 nt, Human
cugaaaaagacauuugggucacugagugacuaaaagcacucucuguuuacauguuucuucag

SEQ ID NO: 4178859 - RNA, 75 nt, Human
cugaaaacauaauacugcuagaugaaaauguaggggauaaucuccuuuacauuggccucagcaauaauauuuuag

SEQ ID NO: 4178860 - RNA, 127 nt, Human
cugaaaauauauaacauuuaaguaagucuaauguaaugauauguugaaugugcaucuaugaauaccaaugauuauuucugauucaauggauuuuuaccuuauuuugcaaguuguucuauauuuucag

SEQ ID NO: 4178861 - RNA, 84 nt, Human
cugaaacgugaagcuaaugauacaugcuccacacccuuugcgguugugguggugaauauuaauuagauaagcuucaaaaugcag

SEQ ID NO: 4178862 - RNA, 57 nt, Human
cugaaagaguguuuggucccucccaacuuuggguuacacugcaaaguacucuuucag

SEQ ID NO: 4178863 - RNA, 129 nt, Human
cugaaagcauaacauggcaaaaaauuaagggcaucauuuauauuguauucuguaggaacaacagccccuugaaauacacguuuuauaaaauacaaugucaaugguacuuuguagaguugugccaugcag

SEQ ID NO: 4178864 - RNA, 65 nt, Human
cugaaaggaaacaaguuuagaauaaugaauuguuccuauuggagcuguucuuuggacccuuuuag

SEQ ID NO: 4178865 - RNA, 92 nt, Human
cugaaaggccugauuugccucuguuuccuauguagaguagacaucugucuggccugcaucaguggauaugaugguggauggagguucuguag

SEQ ID NO: 4178866 - RNA, 96 nt, Human
cugaaaguacaauggugagcugauguuaagauuuucuucaguauuauuuaacaauaaugaaugcagaguuauuuuuaaaacaacuuagucacccag

SEQ ID NO: 4178867 - RNA, 71 nt, Human
cugaaagugugaugauacuaguugacauaauccauacauuuacuucaucaugagugucaucagcuacucag

SEQ ID NO: 4178868 - RNA, 130 nt, Human
cugaaaguucauauuucccuguuagaauauccaaaccgcagacucugaaaaacaccuccagcuaggaggcagggcuguaauuugagccugugaacuggauguucucgacuuuaaaagugaaucauucaug

SEQ ID NO: 4178869 - RNA, 81 nt, Human
cugaaauggaagacacguagggcuuuucuuugccugagcuuuugguuggggcaagaagugcccugaaguucgaauuuucag

SEQ ID NO: 4178870 - RNA, 80 nt, Human
cugaaaugucuguuggguccucagaacuuauaaggggcuugaccccuuucuuccauagggcccagucagugcagcuuuag

SEQ ID NO: 4178871 - RNA, 65 nt, Human
cugaaccccauguaucuguuuuuacagugucuuuuaaugaaagauauaauacggacacaguucag

SEQ ID NO: 4178872 - RNA, 77 nt, Human
cugaaccuuggauuugggcccuuaaauuuguaaugacagauaaugaucaaguuagggugcauaaaucuagguuuuag

SEQ ID NO: 4178873 - RNA, 81 nt, Human
cugaacgaucuguuucuccaacauugugagcauugacuauccauaaaaagcucaucauggucagaaacaauguucguucag

SEQ ID NO: 4178874 - RNA, 72 nt, Human
cugaacucaaaagacuuaaacauaagagggaaaucucuuuuucaaaaaguguuuuagcauuuuggacaucag

SEQ ID NO: 4178875 - RNA, 82 nt, Human
cugaacugcuggagagauguagcaaagaaccacaaagcaaggggucgugaguguuggcauuguucauuucgacaguaaucag

SEQ ID NO: 4178876 - RNA, 73 nt, Human
cugaacuuugccacuacauucaugcucguguuggccaagggcugaaguuucgagauggauguggaaagagcag

SEQ ID NO: 4178877 - RNA, 84 nt, Human
cugaagaaauaguuuugugacaauaaagcauucaaauauuuuuggaucuugaauguauuagagcaguagaauuauuucaaacag

SEQ ID NO: 4178878 - RNA, 84 nt, Human
cugaagaagaacugggcagugggcaacaagagcuggaaagaaccuuuccagccuuucuacucacugagaaacaggccucuucag

SEQ ID NO: 4178879 - RNA, 99 nt, Human
cugaagacccccggaugagggugcucagggccuggcuggggagacucuugccuuguucuccccaguguccaggccugggcugcccaggggacacuucag

SEQ ID NO: 4178880 - RNA, 79 nt, Human
cugaagaggucugaagcacagcauauaaauaaagggauucuaccaguucuuagcuccuuuguuguccucuccucuucag

SEQ ID NO: 4178881 - RNA, 59 nt, Human
cugaagaugucugagaugcucauagggcaguagccagcugguucuuagugcauuuuggg

SEQ ID NO: 4178882 - RNA, 65 nt, Human
cugaagcaauuccaccuguguuucuagggggaaccgaacccugagaaaccuggugcaauuaccag

SEQ ID NO: 4178883 - RNA, 62 nt, Human
cugaagcaucugugggguucccagggggugggaguguguccaggaagcagauggaaauucag

SEQ ID NO: 4178884 - RNA, 83 nt, Human
cugaagccagccuggcucaguaaucgagucuccuggagaaaucuacacuggggaggucgaggcugggccgcaggcucauucag

SEQ ID NO: 4178885 - RNA, 61 nt, Human
cugaagccuagccuggcacuucugaguugcacgucuucuuagauuucaggcuggcuugcgg

SEQ ID NO: 4178886 - RNA, 63 nt, Human
cugaaggcaccaggggugccagagagccaggagggcaaaaugcugcuucaccccugugcccag

SEQ ID NO: 4178887 - RNA, 62 nt, Human
cugaaggcgcauguuggcuagacaacaaagacaguggugggagcagccaacauggccuuugg

SEQ ID NO: 4178888 - RNA, 89 nt, Human
cugaaggcggccuuggguccagucugcuuuacaaguuauuucuaaaacccaagugugaggaagucugagagccacagguagaucuuuag

SEQ ID NO: 4178889 - RNA, 69 nt, Human
cugaaggugaggguggccuggcuggggccacagccucugaguuuggccuggcuuuugccucauguucag

SEQ ID NO: 4178890 - RNA, 59 nt, Human
cugaagucagauggcacaaggucagauucuauucuaccucuuaccagcccugacuucag

SEQ ID NO: 4178891 - RNA, 83 nt, Human
cugaagugauagcauuaagcuagcauagggguaaauuaaugaguauauuaauuuagaauucgcuagcuaaugucucauuucag

SEQ ID NO: 4178892 - RNA, 56 nt, Human
cugaaguggacaaauggagugggugcauagaaguuguaacucugaguccacuuaag

SEQ ID NO: 4178893 - RNA, 57 nt, Human
cugaaguggccucucucucugcuccucuguacaggggacaugcaguggucauuucag

SEQ ID NO: 4178894 - RNA, 72 nt, Human
cugaauaaggcuucuuuaguguccuaaugauuaaugaucacugaacacuuuugaaagauuagcauuuuucag

SEQ ID NO: 4178895 - RNA, 67 nt, Human
cugaauagauccuugcacuugacuuggcauuuaauggagugcaauugucaguguaagauuuauauag

SEQ ID NO: 4178896 - RNA, 84 nt, Human
cugaauaguaagugcugaauaacaguagaaauuuaauccacuagcuuuaggauaggguuucuguuaucugcauuagcuuuucag

SEQ ID NO: 4178897 - RNA, 81 nt, Human
cugaauaguuaggcaaguuaucuuaggguacaaaggacuuccaaguaaugacuuuguagguagcgaaucaauaacuauuag

SEQ ID NO: 4178898 - RNA, 66 nt, Human
cugaaugugcugguacagggaaauaaaggaaucuaggauaauuccuuguuuucuuguccaauuugg

SEQ ID NO: 4178899 - RNA, 62 nt, Human
cugaauguuucacucugaaaugggaguccuuggaggguuuugagcagaggagagacauucag

SEQ ID NO: 4178900 - RNA, 65 nt, Human
cugaauuacaaagugagacaagcuucuccaaagagagaacauucagucuggcucacuugugacag

SEQ ID NO: 4178901 - RNA, 90 nt, Human
cugaauuauugcagucccaguuugagacucuggagcccccagcagcuccagaaaacuuuauccaaauaaguguggacaaaaauguuucag

SEQ ID NO: 4178902 - RNA, 57 nt, Human
cugaauuauuuaaggugaagggcuauccugucugcaacuuaccgugaaaugguucag

SEQ ID NO: 4178903 - RNA, 89 nt, Human
cugaauugaauccugccuagaauuuacuuauuuuuucauuuuugcuauuggugagacaguuggugaaaucuaaauauaguucagacuag

SEQ ID NO: 4178904 - RNA, 55 nt, Human
cugaauuggggagaggaaaugagaaugaauuucucucuuccaguucccacuuugg

SEQ ID NO: 4178905 - RNA, 63 nt, Human
cugaauugugcuugcuagagccuuaaugagaugauuaaugaucugagcagagcaucauuucag

SEQ ID NO: 4178906 - RNA, 81 nt, Human
cugaauuucacuuccuucuguaagaccaguuguaccagucucagguucagagcuggcaggagcgggaggcuguggaaucag

SEQ ID NO: 4178907 - RNA, 66 nt, Human
cugacaagaggcuaaacugggcuauuccaugaccagggacaaaauaggcuuuuagccucuaagaag

SEQ ID NO: 4178908 - RNA, 67 nt, Human
cugacacccagcagaacugggagccuccuugcucugcucccuccaggcagcuggguacuguggucag

SEQ ID NO: 4178909 - RNA, 90 nt, Human
cugacacugagauguggaguuuguuugaaguuuuuguacauuuagugaccagagguauuuugauaaacgccauugccucaaaguauucag

SEQ ID NO: 4178910 - RNA, 68 nt, Human
cugacacuggcagcugggcacuuuuuaauuaguagaauuagaagagugcuuaaagcuggcuuugugag

SEQ ID NO: 4178911 - RNA, 62 nt, Human
cugacagauacuuaugacauaaaguugaccccaggggguccagugcagugaguguuugugag

SEQ ID NO: 4178912 - RNA, 69 nt, Human
cugacagcagaccccagugccauggaaggaucaagauucuggccgaggacauugggcuucuguucuugg

SEQ ID NO: 4178913 - RNA, 76 nt, Human
cugacagccucugugacccuuagugaacauuagaaggacacaucugggccuuuuaugauuuaucaagcggugucag

SEQ ID NO: 4178914 - RNA, 66 nt, Human
cugacagcugaaucgaauggcccagugguggcacauuccccagagggcuucagguucaggaugcag

SEQ ID NO: 4178915 - RNA, 55 nt, Human
cugacagcugcugccgccgcaucccggaucuccaaagugcggcgggagcggccag

SEQ ID NO: 4178916 - RNA, 55 nt, Human
cugacagugaugguacaggcuggaagaggcuguauaagauaccacacugaaucag

SEQ ID NO: 4178917 - RNA, 60 nt, Human
cugacaguuacauuugaauugcccuaaucaggaaugugcaccccagaugugauuaguuag

SEQ ID NO: 4178918 - RNA, 88 nt, Human
cugacauaccaagaauguuaguagccucaaauuguagagaugagugugcacucacaauuugaggcuacucaauugggaugguaguuag

SEQ ID NO: 4178919 - RNA, 85 nt, Human
cugacauccccucaccaggucuguacagccuggcucugagaggcucugucuggguccgggacuguggauguguguggggagucag

SEQ ID NO: 4178920 - RNA, 104 nt, Human
cugacauugaaacagugccuuugauuuggacagaaagaacaugguugaaaaauacagcuuugaaaauccaaauuacaagguaugggcuguuauuaggauguuag

SEQ ID NO: 4178921 - RNA, 67 nt, Human
cuggggugugcuugggcuucgcagggaagucagacagaaguuugcccacgugcuccggccgccugag

SEQ ID NO: 4178922 - RNA, 63 nt, Human
cuggguacauugacacauguaaaauaacagugcauacaugcuguccugucuuugucagcccag

SEQ ID NO: 4178923 - RNA, 64 nt, Human
cuggguauaggaaacaguuaagaauguguagguaucagugcaaacugugucuuccuguaccuag

SEQ ID NO: 4178924 - RNA, 60 nt, Human
cugggucagucugucccuagggcccucugaggccucuacccaaacaacaggacugcccag

SEQ ID NO: 4178925 - RNA, 57 nt, Human
cugggucuggcuacugcuuccuuagcccagcuggaggagguaaggauccagacucag

SEQ ID NO: 4178926 - RNA, 62 nt, Human
cugggucugucacuagauaaauaauaccagagaaguguugaagaccuagagacaggacucag

SEQ ID NO: 4178927 - RNA, 87 nt, Human
cugggucuugaucguccucucucaugacuacuucuuuuacucccaucaagguaaagugugagugaaaguaguuugauuaaagcccag

SEQ ID NO: 4178928 - RNA, 91 nt, Human
cugggugacccugggugaaucccuucccuucucugggacuccauccugagaucggagagcuggaggagaugacauccaagguuccacccag

SEQ ID NO: 4178929 - RNA, 84 nt, Human
cugggugauaggacguuuggguuacagcacuggacaugagaggccacucuauucaccacacugaaccucagugucuuagccugg

SEQ ID NO: 4178930 - RNA, 93 nt, Human
cugggugcucccauaugccggccagcccugccagagagagcuggcgcccacucccugccuggcgcggcugcgggccccuggcucagcacccag

SEQ ID NO: 4178931 - RNA, 75 nt, Human
cugggugucauguccagggcuauggugccacauugagaacaauauugaacuaaauaguuuugacagaacagccag

SEQ ID NO: 4178932 - RNA, 72 nt, Human
cuggguguuuuguguuguaaugucagcuauaccucaauaacugguguuagugcauauaacuagaauaccaag

SEQ ID NO: 4178933 - RNA, 89 nt, Human
cuggguuagcucuguguuuuuccaaacaugauucuauaacuccucuguagaauacaguaugcaaaaagauggaaauacuuguuauucag

SEQ ID NO: 4178934 - RNA, 81 nt, Human
cuggguuccccacuuggagaccauggagcaccucacagaggccugagggaccucugggugaugcccaggcuuggaacccag

SEQ ID NO: 4178935 - RNA, 78 nt, Human
cuggguugucuuccuggggucgaggguucucuggcaggcauaccauggugcccuugccccucuaccccgacaucccag

SEQ ID NO: 4178936 - RNA, 63 nt, Human
cuggguuuuggagcagcuugccuaccacgaucgugguagauucuagcuggcacuagaauccag

SEQ ID NO: 4178937 - RNA, 96 nt, Human
cugguaaccuuucacggcucuuagagcugggugacuuucuucucaauuuauacaaacaagguauguacacacagcucuaaaugacuugguuaacag

SEQ ID NO: 4178938 - RNA, 65 nt, Human
cugguaagggguggaaccagagcccaaaugggacucacauugaagcuuuuccaugcucuucccag

SEQ ID NO: 4178939 - RNA, 60 nt, Human
cugguacaguaguugggguccaaccaggaaaauggaaaccacucuaacucuuuacaacag

SEQ ID NO: 4178940 - RNA, 58 nt, Human
cugguagauuacugaucagacuuugacucucucagagcucugguucaugaucuauugg

SEQ ID NO: 4178941 - RNA, 66 nt, Human
cugguagcagugaagcuguugauuauguuugucguuguugcauuucaguuacacaaguguuaccag

SEQ ID NO: 4178942 - RNA, 71 nt, Human
cugguaugcaugugugugugugcacaugggcucauggaagagugugugugcacaugcauauacagccacag

SEQ ID NO: 4178943 - RNA, 57 nt, Human
cugguauggaauuugaugcuugacuuuucaauauguguccaugcaguuuccauacag

SEQ ID NO: 4178944 - RNA, 94 nt, Human
cuggucacugugggaccuaaguguggggucucagagcugagagggaaugaacccuugucuagcacuccagcuccacaguugggcacagagccag

SEQ ID NO: 4178945 - RNA, 61 nt, Human
cuggucaugcagaggccucaccagucauuuuauugcuauucccaggccucugugugcccag

SEQ ID NO: 4178946 - RNA, 68 nt, Human
cugguccagacuugggugcucagggaaagcuuccagaggagguuccuacugaagucccaaggggcuag

SEQ ID NO: 4178947 - RNA, 55 nt, Human
cuggucccagaggcaagagauggugggggauuucacucuuuggcuucuggaucag

SEQ ID NO: 4178948 - RNA, 96 nt, Human
cuggucccugucuaugagauguggcugcacccaccgcuccuguacacagcuuguucugagcguggcuggcagcccauguuuccugagcacuuccag

SEQ ID NO: 4178949 - RNA, 74 nt, Human
cuggugaggcuagauguuugcugggagcucagcuggggcucucgaccuucaacaacuacaugugccuuuuccag

SEQ ID NO: 4178950 - RNA, 57 nt, Human
cuggugcaaggcuuuggaauccaacaaauauaauuuggaaucuggucugacacucag

SEQ ID NO: 4178951 - RNA, 68 nt, Human
cuggugccaugugguuucauguugucaugugaaaauuugaugaucugcaagaacuacaugcccaucag

SEQ ID NO: 4178952 - RNA, 129 nt, Human
cuggugcucuguggcugucaugcagacugggguugggguucuguucccucuacuguacuggagcuccaggucaugggaggcagcagagcccagcccuggcccuucgagcuuccguccugcaagcaccgg

SEQ ID NO: 4178953 - RNA, 56 nt, Human
cugguggaauagcauaucaguuacagcauaugacuguaacugaucauuuucaccag

SEQ ID NO: 4178954 - RNA, 57 nt, Human
cugguggcuacaagguggcuauucuagauucccugugucuggaugguguggccgcag

SEQ ID NO: 4178955 - RNA, 58 nt, Human
cugguggcuucuaagggcuccccacaacuuuaaugugguggcuugugguggccaccag

SEQ ID NO: 4178956 - RNA, 69 nt, Human
cuggugggcgugucucuuagccugcuaaugcauuauaauuaguauauaaugagcagugaggaccaccag

SEQ ID NO: 4178957 - RNA, 56 nt, Human
cuggugggggaguugaagggguuuugggcaaggccagaguugaacugcuccacuag

SEQ ID NO: 4178958 - RNA, 77 nt, Human
cugguggucccggcgcacuuugcagauguuucucccacacaguggaaacauucccuaauguguccguagacuuccag

SEQ ID NO: 4178959 - RNA, 59 nt, Human
cuggugguucaugccuauaaucccaccacuuugggaggccgaggcaggcggaucacaag

SEQ ID NO: 4178960 - RNA, 127 nt, Human
cuggugucuuacgggcacaucuaaaaggugacaguccagagacugaauaacaagcaaauaaagcuaucaguuuuacuaauuauuauucagucuuaacuguuguuucaagguguguaagugauaucag

SEQ ID NO: 4178961 - RNA, 63 nt, Human
cuggugugguaaugagaauuauuuuaauugcuuuuugccaggccuuucucauaccucacuuag

SEQ ID NO: 4178962 - RNA, 90 nt, Human
cugguguuuuauugucuaugaacugcuugggggguggucagggagggagcucgccuaacaaauauaacauuuauagaauaguagaaccag

SEQ ID NO: 4178963 - RNA, 74 nt, Human
cugguuaauuuuagggagacaauacaaaaccugagugucauugugugcucccuuuugcuguguccuugagccgg

SEQ ID NO: 4178964 - RNA, 76 nt, Human
cugguuauaauguuuagguauguguauuguguguacauguauguauacauauguguaaucaaacacaugcuaccag

SEQ ID NO: 4178965 - RNA, 55 nt, Human
cugguucaaauucuaugaaauauguauucucaggaguacauggaauuacuaccag

SEQ ID NO: 4178966 - RNA, 65 nt, Human
cugguucacuaaggggucagcucaggccuaggcagcuacuucccuggcucaccccuuauguccag

SEQ ID NO: 4178967 - RNA, 55 nt, Human
cugguucugauuccuaguguuugcugguuaaagaugacacugaauguagaauugg

SEQ ID NO: 4178968 - RNA, 103 nt, Human
cugguugucuguccccucauuagacugugggcuccuugagggcagggaacuggaauugcuguucgucauugacccccagccuagugaaggaucugaugcucag

SEQ ID NO: 4178969 - RNA, 64 nt, Human
cugguuuaugagggaagggauguuggccccaugaaaucauuaacccuguccccacguaaggcag

SEQ ID NO: 4178970 - RNA, 104 nt, Human
cugguuucagaagaucucuuguccucagauaugucuacucucauuaaaacaaagcaugaagaguuccauggcuggggauacaggcagagaaaccuugauuacag

SEQ ID NO: 4178971 - RNA, 104 nt, Human
cugguuuugaaauguuaggacaugagauuuggaggggccaggggugaaaugauaugauuuggcuguguccccacccaaaucucaauuugaauuguagcuaccag

SEQ ID NO: 4178972 - RNA, 75 nt, Human
cuguaaagauaagaagauacugaguuugacugugucucugcucaccguacaaacucuuuauauuucauauuccag

SEQ ID NO: 4178973 - RNA, 61 nt, Human
cuguaaauauauuaguuugaacaagugagacuucacuaaauauaaugcaauguauuugcag

SEQ ID NO: 4178974 - RNA, 122 nt, Human
cuguaaauuuuuaacaauaugcacuaaaauguuuguauauuuuaccaguuuuguauauuuccugguuuggcaaacacugguaugauguauaguaauuguuguaguuugugucaaaucagcag

SEQ ID NO: 4178975 - RNA, 68 nt, Human
cuguaaucccagcuaccugggagacugagcugagagaaucacuuuaacccaggaggcggagguugcag

SEQ ID NO: 4178976 - RNA, 68 nt, Human
cuguaaucccagcuaccugggagacugaggcaugaaaaucucuugaacccgggagcuggagguugcag

SEQ ID NO: 4178977 - RNA, 68 nt, Human
cuguaaucccagcuaccugggaggcuagggcagcaaaauagcuugaacccaggaggcugagguugcag

SEQ ID NO: 4178978 - RNA, 68 nt, Human
cuguaaucccagcuacucgggaggcugaggcaggagaauugcuugauccugggaggcggagguugcag

SEQ ID NO: 4178979 - RNA, 68 nt, Human
cuguaauuaaggcugggaauugcugagcugcucuaucugcagcuggaagauccugguuuugugugcag

SEQ ID NO: 4178980 - RNA, 76 nt, Human
cuguacaacuuguguucaacucggagcuacuagucuggaaagaucagcagaaccugaauugaacauuguuucucag

SEQ ID NO: 4178981 - RNA, 60 nt, Human
cuguacaaguccuucaucagggaaaaacauugaguauucccugauuaaggacuuguacag

SEQ ID NO: 4178982 - RNA, 102 nt, Human
cuguacaccagcaauuuucaaucuuggugcgacaacaaacuauuguguuucaauauguuguggggugcaucaaaaagaguguguugcuaaugguaguugcag

SEQ ID NO: 4178983 - RNA, 65 nt, Human
cuguacaucccaagauauuucuacuucaaaauagaacagaauaucaucucuuuggggugguucag

SEQ ID NO: 4178984 - RNA, 71 nt, Human
cuguaccaagacaaaucagaaacuccccauauuauuuuuugguuguuguuuuuuguguuguuuugguuugg

SEQ ID NO: 4178985 - RNA, 60 nt, Human
cuguaccacaguagacuuuaaguuccaugcaagcaaggaaugugucuaugugguucacag

SEQ ID NO: 4178986 - RNA, 65 nt, Human
cugcugaguuuugcccaucauuuucuguguucugcuauauguggccacacugaucagaucagcag

SEQ ID NO: 4178987 - RNA, 59 nt, Human
cugcugcaauuaucugggugugagaggauaaguagucuggacuuggaugguggcaguag

SEQ ID NO: 4178988 - RNA, 79 nt, Human
cugcugcaccaucaggugagaggcagaggacagcuuccuccggagugaggcuucuucucuccaucauccaguccagcag

SEQ ID NO: 4178989 - RNA, 68 nt, Human
cugcugcauuacugugauggugguccuaaguaguuuccuuuccauaaaagcucaaagaaugcaugcag

SEQ ID NO: 4178990 - RNA, 86 nt, Human
cugcugccccucuucauuguaucguuacaucuuacugcuuuacacaagaaacagggacaaggauagagaaaaggggaacaaagcag

SEQ ID NO: 4178991 - RNA, 66 nt, Human
cugcugccuuccaaaggccaggaacugcugaaauuaaaccaaggcaggggccaggggagcagacag

SEQ ID NO: 4178992 - RNA, 63 nt, Human
cugcugcgggacccacugugggccuggcuugcugccagccagcaaggacggauucugcaggag

SEQ ID NO: 4178993 - RNA, 129 nt, Human
cugcugcucaugcucauacaagucccaauagagagguuucuuccauuguacucccucuccugcccgagcaagagugccguccaagaggucugaguauagggagcccugggaugggccugaagcaaugug

SEQ ID NO: 4178994 - RNA, 93 nt, Human
cugcugcugaaaaggcugugaccaagaaggaacuucagggcgaauggacugcuccagcuccugaguucacugcuacucagccugagguugcag

SEQ ID NO: 4178995 - RNA, 55 nt, Human
cugcugcuuagcauagcagaggcagcauccagauuguaagcuggucaagcagcag

SEQ ID NO: 4178996 - RNA, 75 nt, Human
cuccagugccagcucuagugcuggcuacuguaguacauggcaggcagcagcacauggggcuggcaacauguggag

SEQ ID NO: 4178997 - RNA, 57 nt, Human
cuccaguggugauggggaagaagcuacucuggcugacuuccucuaaucuaucaggag

SEQ ID NO: 4178998 - RNA, 128 nt, Human
cuccaguuuuauuauucugugaagacaguuugguguaaaugauuuaagagguuagucagaauggaguucucuguucaaaugaucuucuuaaauuucuguacugagcucuacucauaggaaacguggag

SEQ ID NO: 4178999 - RNA, 110 nt, Human
cuccaucaagguguaccagggccucaaggagcuggccugaccugaggcuggguuggagcagcccuccugugccugaggccagcucccaggcccuuggaucaccgcgggag

SEQ ID NO: 4179000 - RNA, 58 nt, Human
cuccauccagaaucaauagcaguuaucauucauuuugauguguuuguuucuggaggag

SEQ ID NO: 4179001 - RNA, 79 nt, Human
cuccaucgugaaguauggaaagucucuuuugacuguagcauucguugauuugaaagagaauuucucuguuacgauguag

SEQ ID NO: 4179002 - RNA, 72 nt, Human
cuccauuuuacauugaaguacuguaaaccugugagcuaauggucaccaguuacauaaaugauaaaaugagag

SEQ ID NO: 4179003 - RNA, 63 nt, Human
cucccaaagugcugggauuacaagugugagccaccgcgccccaucuacaguacuuuuuuagag

SEQ ID NO: 4179004 - RNA, 71 nt, Human
cucccaaauggagacccucccccugcuuccaccucuggauguggggcagguggaaggucuccauucaggag

SEQ ID NO: 4179005 - RNA, 73 nt, Human
cucccaacagggcaguuagagccuaccaaaguccccagcucuguguuccucuggauugcuggauuguugggag

SEQ ID NO: 4179006 - RNA, 56 nt, Human
cucccaagauaaauaaggcagugcuuguccuuaaauugcccagggucuggugggag

SEQ ID NO: 4179007 - RNA, 92 nt, Human
cucccagagcucugagcugcccuccuuggccucccaggguggagauuagaagacccuugggguguuggaggcagcccaguaggcuguggcag

SEQ ID NO: 4179008 - RNA, 57 nt, Human
cucccagauuccugcugugggaaccuuguuucacccacagacuaucagaccugggag

SEQ ID NO: 4179009 - RNA, 60 nt, Human
cucccaggacuggcucuaacuggcucaaauuggcuguugagcucugagaccuguguggag

SEQ ID NO: 4179010 - RNA, 60 nt, Human
cucccaggccaugcucuagccaccagaacuuggugacguggaagaagcauugccugggag

SEQ ID NO: 4179011 - RNA, 64 nt, Human
cucccaggccugcaucugcugcgcacacucccuccaugugucuguguggccacaguccuggggg

SEQ ID NO: 4179012 - RNA, 67 nt, Human
cucccaguccagcccccugcuaaaaggccauugauaaagccuugaggcagggucuuggaaguuugag

SEQ ID NO: 4179013 - RNA, 100 nt, Human
cucccaguuuuggcuaaaucucaccauggugcuugcuuaugacucucacuauaggugacaggaaaaauaaagcugcucuuauguugauuggcucuaggag

SEQ ID NO: 4179014 - RNA, 62 nt, Human
cucccauauucguaucuugaaguccuaacccucagggcuucagaaugggacuguguuuggag

SEQ ID NO: 4179015 - RNA, 55 nt, Human
cuccccaagccuuggcuucuccaugugaaauggggcagugggagguucuggggag

SEQ ID NO: 4179016 - RNA, 63 nt, Human
cuccccagcauuucugggcugcacuuguagcugggccagcagugcucccaggaccuggggcag

SEQ ID NO: 4179017 - RNA, 93 nt, Human
cuccccauucccugagagcagggucuuucucucccucucugaagacuaagccagaguaaugagacucaccuuugcucugcaguaggugaggag

SEQ ID NO: 4179018 - RNA, 88 nt, Human
cuccccucugcccugagauucuuggauucugccucaccucaucgguguuuugguagaauucaagauucaacaggcuuuuugaugggag

SEQ ID NO: 4179019 - RNA, 58 nt, Human
cucccgccuuggcuucaguagcucacccagcuuacaggggagcugcccugggcuggag

SEQ ID NO: 4179020 - RNA, 70 nt, Human
cucccuaaauuaaugccaauucucagcauuuucuuauaccugcuagagugauccuaauugauuuggguag

SEQ ID NO: 4179021 - RNA, 81 nt, Human
cucccuaccccacugccucugucuauccuccccagcaaggaucugcagagaagaggacaguucuaacaaaggggaagugag

SEQ ID NO: 4179022 - RNA, 56 nt, Human
cucccucaggccuuagcccugccuuggguggagggagggcaccuggucuguggggg

SEQ ID NO: 4179023 - RNA, 73 nt, Human
cucccucccuuggaaaguagccucacagcugucaggaaaaaacagcuguguggcuuccuuucaaagaagugag

SEQ ID NO: 4179024 - RNA, 65 nt, Human
cucccucuucccccuccugcuuugaaaugcuucauuggcaugggcugaggugggauagaagggag

SEQ ID NO: 4179025 - RNA, 68 nt, Human
cucccugccgacaggaggcauccucuccccaguaauacccaacugggcuggcuuucugugcagcggag

SEQ ID NO: 4179026 - RNA, 96 nt, Human
cucccuggucugcaaaaggugguucgcugguacccaggucccugugcgaaugagaggagcugacgucuaugaaagccacucccugcacccggggag

SEQ ID NO: 4179027 - RNA, 59 nt, Human
cucccugucuuuguguccccauucugcagacagacugguggcuuucagacagaaaggag

SEQ ID NO: 4179028 - RNA, 59 nt, Human
cucccuucaggagaggcucacaaaaugcugaugggcuucuuccaugaagaaugcaggag

SEQ ID NO: 4179029 - RNA, 55 nt, Human
cucccuugcuucuggcauuuugcuggccucagccaaugggaggccccagcaggag

SEQ ID NO: 4179030 - RNA, 81 nt, Human
cucccuugguggaacaacacgucucugacacuuucaauuuaaagacucacauguguuuucucaccaacaagcccuagggag

SEQ ID NO: 4179031 - RNA, 55 nt, Human
cuccgaacaguggcuccaaggcuccccugcgagcuguacaggaaccaguuuggag

SEQ ID NO: 4179032 - RNA, 58 nt, Human
cuccgcacagcccugagcgcaugucuaucuuuaggccguggaagaagggcugguggag

SEQ ID NO: 4179033 - RNA, 66 nt, Human
cuccgcauaugccuggcuagcuccuccacaaaugcguguggaggagcuagccaggcauaugcagag

SEQ ID NO: 4179034 - RNA, 58 nt, Human
cuccgcuggccaggcccagggcaggauaacgcuuccuggccuccuguggcgggugggg

SEQ ID NO: 4179035 - RNA, 71 nt, Human
cuccgggacauguggccccugaaaauggcagcugccauuagguagcagccuugcaggggucgcaccggcag

SEQ ID NO: 4179036 - RNA, 90 nt, Human
cuccggggccaggcuucccccauccuaggaugagucaauugccuuucuagucccaggguccugggggccaggccuucuugaaucauggag

SEQ ID NO: 4179037 - RNA, 113 nt, Human
cuccggguuuucuuuucgaauuaagcuagacacugcuacccagaugucuuuggaggugacuuuuaauugaacauuaaaauugggugggguaaacgagaagggaaaacaaggag

SEQ ID NO: 4179038 - RNA, 61 nt, Human
cuccgugaaggcagggagcuggaguguuggaugaauuuccuuuguuuccugucuuacgggg

SEQ ID NO: 4179039 - RNA, 65 nt, Human
cuccgugcccacguggguguuagaugaggugaugcgcaagcgccuuguguccauggagcauggag

SEQ ID NO: 4179040 - RNA, 66 nt, Human
cuccguuguucaggaggggaaugugaggcugagaggccaaguucuuaacucugagcagcacugggg

SEQ ID NO: 4179041 - RNA, 60 nt, Human
cuccuacugcauuacaauucugcucuauguuugcuagcacaugcauguuguguagggggg

SEQ ID NO: 4179042 - RNA, 64 nt, Human
cuccuacuuguaauuguuuccuccccaguauucuuucuggggacagaauacucauaagaagggg

SEQ ID NO: 4179043 - RNA, 55 nt, Human
cuccuagaggaugguaggaagcuugauagcauccaagcugcuaaauucuuaggag

SEQ ID NO: 4179044 - RNA, 75 nt, Human
cuccuagagguguagguugccuccuagagaagggcgcagaaugccuccuagaacagcccaccuggaagcugggag

SEQ ID NO: 4179045 - RNA, 120 nt, Human
cuccuagguacauuuguguaucuauucguauuuauuaguaauuaaacuucuauguuggucuauaagccauaauguugaugauugucuuuguaaaugaaugcaugcaaauacgcccaggag

SEQ ID NO: 4179046 - RNA, 64 nt, Human
cuccuauaaucccagauacucagguggcugcaacacaggaauugcuugagcccaggaaguggag

SEQ ID NO: 4179047 - RNA, 120 nt, Human
cuccuaucaaacaucuccuugccuaucuuguucaucacugaaaucuuugacucuggcuaacaauuugcuucacaagaauuuguagaugaaaggagaaaaaaggaaaaaaaaggagaggag

SEQ ID NO: 4179048 - RNA, 79 nt, Human
cuccuaucuguuucauauaacaaugugauugaagcuagaagagccuucuggagaauaaucagcauugaacagaaagaag

SEQ ID NO: 4179049 - RNA, 58 nt, Human
cuccuaugugccaggcacugggcugggugcuggguagagacacagucuggggcgggag

SEQ ID NO: 4179050 - RNA, 125 nt, Human
cuccuauucguugaaucauuuccuaaaauaaacaagcugcagacaagccauuauuucagagucugcuuuguguguguguguguguguguguguguguuggggggacuaagacagcuggaaaggag

SEQ ID NO: 4179051 - RNA, 74 nt, Human
cugaccacugaaacaagaaggaaagauugcuagaguguuucugggcaucuugcuugucuuuaguaaggaaacag

SEQ ID NO: 4179052 - RNA, 72 nt, Human
cugaccauccuggagcaaacauuuaauuugguggcagguuagucauauugaacauuguucuaggaggcacag

SEQ ID NO: 4179053 - RNA, 55 nt, Human
cugacccuggaggcauuucucucacgugugggaguaaggggcaucagggcaucag

SEQ ID NO: 4179054 - RNA, 60 nt, Human
cugaccugcccuuaggcuucucacaguaaaguggucucagcccagcaaagggagguucag

SEQ ID NO: 4179055 - RNA, 61 nt, Human
cugaccugggcugggcgucucaugggagacagacucacucaucagagcccagugcaguuag

SEQ ID NO: 4179056 - RNA, 57 nt, Human
cugaccuguggagggcugcuugcuguguauugaauaaaggaggcuucuuggggucgg

SEQ ID NO: 4179057 - RNA, 90 nt, Human
cugaccuuccugaaaugcuagaucuggcaggcacaaggucaagauuggcuucugugagugcagaugcugagguugccaggaggaaaucag

SEQ ID NO: 4179058 - RNA, 57 nt, Human
cugaccuugugauccacccaccuuggcuucucaaagugcugguauuacaggugucag

SEQ ID NO: 4179059 - RNA, 56 nt, Human
cugaccuugugauccgccuaccucggcuuccccaagugcuggauuacaggcgugag

SEQ ID NO: 4179060 - RNA, 57 nt, Human
cugaccuugugauccgccugccuuggccucccaaagugcugggauuacaggcgucag

SEQ ID NO: 4179061 - RNA, 57 nt, Human
cugaccuugugaucugcccaccuuggccucccaaagugcugggauuacaagcgucag

SEQ ID NO: 4179062 - RNA, 57 nt, Human
cugaccuugugaucugcccaccuuggccucccaaagugcugggauuacaagugugag

SEQ ID NO: 4179063 - RNA, 130 nt, Human
cugaccuuuucugaagaauaauuuaauuuaauauugaacaacagagagcuggaagcugcucuuagauugcaucucagguggcuacuaguuuauauguggucauuacuaaucuagagucccuuuucaccag

SEQ ID NO: 4179064 - RNA, 63 nt, Human
cugacuagagucagauucuuaguuggcacauccaggugcuccaacuuugugugaccuagauag

SEQ ID NO: 4179065 - RNA, 75 nt, Human
cugacucaaguaagaaacagaauuggaauuugagguaggauaucccagccccacauuuuguauuuuuugagucgg

SEQ ID NO: 4179066 - RNA, 128 nt, Human
cugacucauguuucucaucugaaguacuggggaggcuggauuaggauucgugguuucaaauuaaucucuguggugcccuggagauuucuucaagcuuucuuuacggaauaucugauggguagugaggg

SEQ ID NO: 4179067 - RNA, 89 nt, Human
cugacuccccguugaugugggugaugagguccccagcccgcaggcccgccuccugggcggggcuuccguccuccacacucugggggcag

SEQ ID NO: 4179068 - RNA, 64 nt, Human
cugacucccugauucuggguuuuaaguucuuaacuauuacagaaaagaagaacaggggaggcag

SEQ ID NO: 4179069 - RNA, 78 nt, Human
cugacucgaauguaguauuuggaaauguaaaaugacuucuauuacauuauuacauuuuugaaaacuacuugaaagcag

SEQ ID NO: 4179070 - RNA, 91 nt, Human
cugacucuaaggggguuggugaauuaccaaaggggcagaucagagccccagcucucuggcucuggaguccaccugccccauacaaugucag

SEQ ID NO: 4179071 - RNA, 80 nt, Human
cugccccuggggagcggcggcggugccacucagcgcugcgcagccagccugagcugccugccgccucgccucguacucag

SEQ ID NO: 4179072 - RNA, 91 nt, Human
cugcccuauccuuuguccacuuuuugaacuggaacaacugcaagaauuugcuaaggguugaaacagcaagaaacagagaaaggauaagcag

SEQ ID NO: 4179073 - RNA, 79 nt, Human
cugcccuccucucugacagccuucauuaugcaauucaggcagaguccacccugcaaagaagggcugaggagcagggcag

SEQ ID NO: 4179074 - RNA, 105 nt, Human
cugcccugcgcugugcucgagcuacugaaauauugauuuuuacagagccggcgcacacacacugaaaaaucaauauuccagugcacacaacagaacaggcagcag

SEQ ID NO: 4179075 - RNA, 79 nt, Human
cugcccugcuccucagcccuucuuugcaggguggacucugccugaauugcauaaugaaggcugucagagaggagggcag

SEQ ID NO: 4179076 - RNA, 90 nt, Human
cugcccuggcacucucagcuguagguauggaugucccuaaucuacauguuuagggucauccuguuucugagcugaucuugaccaaggcag

SEQ ID NO: 4179077 - RNA, 59 nt, Human
cugggugucagaaccaggcaguaugaaaauagaacagaacugugggucugaccaccugg

SEQ ID NO: 4179078 - RNA, 61 nt, Human
cuggguugcaacugccuacaguauucaguaccgucacauacuguaaagguuuguagcccag

SEQ ID NO: 4179079 - RNA, 69 nt, Human
cuggguuuagggucuccccuugagaaaagcgguugggugguuggugagggaagggggcuuauuccacag

SEQ ID NO: 4179080 - RNA, 67 nt, Human
cuggguuucagacacagcgcugggaaaugcuuugguauguaguugucacaaugucucugggaccuag

SEQ ID NO: 4179081 - RNA, 74 nt, Human
cuggguuuguuagugguaauagagcuccaaacuaggcuuuuucgcuuuauucuggcuguauauuauugacccag

SEQ ID NO: 4179082 - RNA, 61 nt, Human
cuggguuuuauuacagugagcugacacaacagaauauucagaaucacuuaaaguagcccag

SEQ ID NO: 4179083 - RNA, 75 nt, Human
cugguaaggagcagaccuaggauuugaauuuggccaauauggcuucagaaccugcaagucuaaccucugaauuag

SEQ ID NO: 4179084 - RNA, 74 nt, Human
cugguacagcuggccacagauccccagggagguagcaagcuccccaucccugcaggugugcaagcugagaccag

SEQ ID NO: 4179085 - RNA, 57 nt, Human
cugguacaguguuacaaaauggggagagugaccacaggguuggggcacuggacgcag

SEQ ID NO: 4179086 - RNA, 87 nt, Human
cugguagaggaagagggagaggcucugaggacuggggugaugggggugccuaucuuaguagagcagggccucuccccuccccaucag

SEQ ID NO: 4179087 - RNA, 61 nt, Human
cugguauguccugagucuuuuauauucuuucaaaagauaugcucuauuugggauaugacag

SEQ ID NO: 4179088 - RNA, 57 nt, Human
cugguauuuacuguucuccaaaccagcuccuugguugaugacagcaaaaaaugcuag

SEQ ID NO: 4179089 - RNA, 60 nt, Human
cuggucaaaaauuaugcuuacugaacgcaugacugguuaaguuaggcagaauuuugccag

SEQ ID NO: 4179090 - RNA, 83 nt, Human
cuggucaagcagagaccggcuaauggagaagggguuguuuccuccccucccuccuugccucggucgauuugcauugaucccag

SEQ ID NO: 4179091 - RNA, 55 nt, Human
cuggucaaugggaacugcccugaacccucaccugggcucagccccauugaaccag

SEQ ID NO: 4179092 - RNA, 93 nt, Human
cuggucauccacauuauuuuugugcuuuuauguuugcuucaaagaggaacuuugaagcacagaccugggcaucagugaugaacgaagggccgg

SEQ ID NO: 4179093 - RNA, 130 nt, Human
cuggucgucgcccacugcugcugcugcagcucccccgggccccgcagggaaagccccaggaaggugagccccuggaaggugagcccugccggccucugggaccugcacggaacuguacuggggguggagg

SEQ ID NO: 4179094 - RNA, 62 nt, Human
cuggucuaauugguuugaauaaauaaagaaccggaaucuuucucauccaaacuaguugccag

SEQ ID NO: 4179095 - RNA, 57 nt, Human
cuggucuagggucuaaacggccauucaguacuuugaacuuuggcuuuccugacacag

SEQ ID NO: 4179096 - RNA, 55 nt, Human
cuggucucuguucacaccgggugcuaauaacccacagcugaaagcagaggcucag

SEQ ID NO: 4179097 - RNA, 79 nt, Human
cuggucuguaacuggacacuggucuguacuggagucagaacucagaacagaaacguuguuccauucaugugaagagcag

SEQ ID NO: 4179098 - RNA, 57 nt, Human
cuggugaauggauaaacuguuguagauuaaugcaauagaauuauuauuucagcccag

SEQ ID NO: 4179099 - RNA, 68 nt, Human
cuggugacauucuagaagucuuugcaaugccuaaaacuuuaaagguaucaauagcuagaauguaccag

SEQ ID NO: 4179100 - RNA, 64 nt, Human
cuggugaccggaccucaguuuuacaugcucaauugcacauuguuuaauugccugucucugccag

SEQ ID NO: 4179101 - RNA, 111 nt, Human
cuggugagcaccccugggacccgagcagcauccucaggagccagugccggagccaucuggcauccagcagugcucuagagcgugccuccugcggucucagcugccccccag

SEQ ID NO: 4179102 - RNA, 79 nt, Human
cuggugcacaucagaauuacuuggggagcuuguuaaaacacaggauacuaagccaccccaauaguuccugauccacuag

SEQ ID NO: 4179103 - RNA, 69 nt, Human
cugguggccauccuuggcccuggccaggagcaggccacagaacugccggugggccaggaaggccgccag

SEQ ID NO: 4179104 - RNA, 94 nt, Human
cuggugggcagccgguggggagggcagggcuggccauagguacaaguccagugcuggcuuuuugguccuugcuuugucguauguccuuuacuag

SEQ ID NO: 4179105 - RNA, 58 nt, Human
cugguggggaguccuggucuccccacagccuuggguggagacaggagcccccauucag

SEQ ID NO: 4179106 - RNA, 61 nt, Human
cuggugucagaacugcugcagauacccuauaagcagagaggggcugcuccagucuggccag

SEQ ID NO: 4179107 - RNA, 97 nt, Human
cuggugucuccaugaggcuuuggggguagaggagucccaagcugcuugagcuauuuguguguuccaggcuucuucugccugucuuugggagacccag

SEQ ID NO: 4179108 - RNA, 94 nt, Human
cuggugugugaccggcacagccgggcaaggcuggaggcuuuguagguugcugcccuuaggaccccacuugcugggccugugcugacacguccag

SEQ ID NO: 4179109 - RNA, 80 nt, Human
cugguucaugacuuagacagugcuaucccaucugugagugagcauacucugucauggucagauugucaucaugaaaucag

SEQ ID NO: 4179110 - RNA, 62 nt, Human
cugguuccugaagggacuggugcagaggcugaccuuugucccaccacccccucaugaguugg

SEQ ID NO: 4179111 - RNA, 87 nt, Human
cugguuuaccugggccugauggcuuuccugggacaugggccaaucacugcccaaacugggaaagucauuggcaaaaggacaaauugg

SEQ ID NO: 4179112 - RNA, 58 nt, Human
cugguuucugcccucagagcucaccuuagguggucagugguggaagcagcaaacccag

SEQ ID NO: 4179113 - RNA, 65 nt, Human
cugguuucuuggcccccaguccuucuggaaaccccuccccugacuggagcccccaaggacaccag

SEQ ID NO: 4179114 - RNA, 60 nt, Human
cugguuugaguaacagggcccucuuugucagcuacaacaagggccucucauuugugccag

SEQ ID NO: 4179115 - RNA, 62 nt, Human
cugguuuucaggccuugggacccagacuggaacuauuccacuggcuuuuccuaggucuccag

SEQ ID NO: 4179116 - RNA, 58 nt, Human
cuguaaacccagggguggggcccgagguccagaaaagcccuuucucuggguugcacag

SEQ ID NO: 4179117 - RNA, 57 nt, Human
cuguaaacuucuggaggucaaguuuauacuuauuuugauuucuucucuuguuugcag

SEQ ID NO: 4179118 - RNA, 96 nt, Human
cuguaaaguucuauacagugugagguugggggagcaaagguuuuagaccggugacuuugcucuuuggauuccuuuacaaacugauugaagauacag

SEQ ID NO: 4179119 - RNA, 83 nt, Human
cuguaagguccucccuucuggggcuggaugauuauggcccaacagccaccaucuccagugcccaaaggaaaucucccuuaugg

SEQ ID NO: 4179120 - RNA, 80 nt, Human
cuguaauagcagagcagacguugagauuaagauaguauuuuuauaugcaaacuucuuuacucugcuucguccauuauuag

SEQ ID NO: 4179121 - RNA, 81 nt, Human
cuguaauagcauauggaggguaagaggguggauauaagugccuaacuaccugaguuaaaauuccaucucugccucuuacgg

SEQ ID NO: 4179122 - RNA, 68 nt, Human
cuguaaucccagcuacucaggaaguugaggcaagagaaucgcuugaaucugggaggcggagauugcag

SEQ ID NO: 4179123 - RNA, 68 nt, Human
cuguaaucccagcuacucgggaggcugagguaggagaaucgcuugaacccgggaggcggagauugugg

SEQ ID NO: 4179124 - RNA, 79 nt, Human
cuguaaucugaaacacuuucaauuacauauauaguuagaaaugcuagaauauguugacuagaaaguguaagaugugcag

SEQ ID NO: 4179125 - RNA, 68 nt, Human
cuguaauuccagcuacuugggaggcugaggcaggggaauugcuccagcccagguggcggagguugcag

SEQ ID NO: 4179126 - RNA, 60 nt, Human
cuguaauuguucuauguguucauaauggaacauccauuuaagaauacagauaauaagcag

SEQ ID NO: 4179127 - RNA, 62 nt, Human
cuguacagaccuauuagcccagaggucacaaauugcagccaagggcuggggucugccugcag

SEQ ID NO: 4179128 - RNA, 123 nt, Human
cuguacaguguaguaugcuccuuuaggcagguuguuacagugcauguggcuucuguagcacccaguuccagcagugcccaguggccaacaguguguagcaccuuccacggacaacuucuccag

SEQ ID NO: 4179129 - RNA, 114 nt, Human
cuguacauucaucauauagucagaauucaugauaguauuuuuugugacagauaguucagacuaucaagauuuucaagaaaaaucucuaaauugguuuugguauaaauguagcag

SEQ ID NO: 4179130 - RNA, 71 nt, Human
cuguaccccaucauuugcaagcccacacagauauguuucggugcugcuggcuuuagugauuggggugauag

SEQ ID NO: 4179131 - RNA, 81 nt, Human
cuguacccugaggcacuuaauaaggauucaauuuugguaaugaauaauauuaguuucuucauuaaguggcuuaaagaauag

SEQ ID NO: 4179132 - RNA, 78 nt, Human
cuguacuacccagcuuucgaagugucacaggugagaaaguuaaccagugaaggacaaccgagcagcugugggaaacag

SEQ ID NO: 4179133 - RNA, 79 nt, Human
cuguacuagccacauuucaaguucuguuccuaaacugggaacacacacaggaacagaacuugaaauguggcuaguacag

SEQ ID NO: 4179134 - RNA, 83 nt, Human
cuguacucuuuaaaguaaaauuugucucuauccaauaaagcuauuaggggcauuguugauuacuuucacuucaaagagguuag

SEQ ID NO: 4179135 - RNA, 84 nt, Human
cuguagaacaagugugggacucaguggcacccaggcucaauccugcugcugagcagaggugcuggagugaguccugcucugcag

SEQ ID NO: 4179136 - RNA, 67 nt, Human
cuguagaacgauccaggcauuuggcucaccagguggaccuacuuuuugucuagauuuguucuuauag

SEQ ID NO: 4179137 - RNA, 77 nt, Human
cuguagaagcagcuguacuggcagcauugugucuuccuucauccugacagagucugugaagucaguuacuacaacag

SEQ ID NO: 4179138 - RNA, 76 nt, Human
cuguagagcaaguuuuugguuugaaauuauuguguuguuugagcaccugucacaagcagaaggcauaacuuuacag

SEQ ID NO: 4179139 - RNA, 58 nt, Human
cuguagcaccaagccuagagugauguuugcuucugacuccugcugguuugguagccag

SEQ ID NO: 4179140 - RNA, 55 nt, Human
cuguagccugggucugugacucugacacucagcagaagcaacauucaggcuuuag

SEQ ID NO: 4179141 - RNA, 65 nt, Human
cuguaggacugagggcuucagcuccuugugguaucucugcuggaagcugcuuucagcuccuagag

SEQ ID NO: 4179142 - RNA, 78 nt, Human
cuguaguacauuuaauccucacaauaaaaucagccuaugaaguuauagguggaaaaacugaggauuagagagauucag

SEQ ID NO: 4179143 - RNA, 60 nt, Human
cuguagucccuuuagucuggagagcugccagcagggcuaagcucuacagaagggcugggg

SEQ ID NO: 4179144 - RNA, 58 nt, Human
cuguauacaugguccauguuauacaugagauaaguaggacauguacuaaugaauacag

SEQ ID NO: 4179145 - RNA, 89 nt, Human
cuguauagauaaaugagagugauuccuauuaguacaugcaaaugguuugcuguuuucaaugauuuuuagggaucaucucaaauuuacag

SEQ ID NO: 4179146 - RNA, 97 nt, Human
cucugcuccagggcacucagagauucaggcuguaacuuguaaacaguucugauuugcagccuucuacugaauccucugcaucugaccaggaaaagag

SEQ ID NO: 4179147 - RNA, 73 nt, Human
cucugcugaaaaccacuguacugaaaaguaagcaaguuaagaacuuguucugcuuuccagagcauucagagag

SEQ ID NO: 4179148 - RNA, 65 nt, Human
cucugcugacaaaauaaaaugcuccguugacuccugaaauuggggcaguagcuuuguuuguagag

SEQ ID NO: 4179149 - RNA, 58 nt, Human
cucugcugcaggaaggcgugcacuucuagcuggagcccacucccccucugcagcagag

SEQ ID NO: 4179150 - RNA, 56 nt, Human
cucugcuucauccaccacuggcgagagagaugccaucagugagugggaggccaggg

SEQ ID NO: 4179151 - RNA, 94 nt, Human
cucugcuucuucacucucuuccccgaugguguuugggauacuagugugugagacacagcugggaacucacacagcagggcugagaagagcagag

SEQ ID NO: 4179152 - RNA, 67 nt, Human
cucugcuuucuugcgcagaugugaguuaggagcugcucaggccacuauguggaaagaauugcaugag

SEQ ID NO: 4179153 - RNA, 68 nt, Human
cucuggacuuuaaaucuguugcuuagcuacugauccacaauagcucccaauugacuugaacuacagag

SEQ ID NO: 4179154 - RNA, 60 nt, Human
cucuggagggaggcugagcuggagaugggagggagucuuugcugccagcgcccugcaggg

SEQ ID NO: 4179155 - RNA, 67 nt, Human
cucuggagucacacacaccaaggucucuagccuagcucugccacuuacugguugugugaccccaggg

SEQ ID NO: 4179156 - RNA, 58 nt, Human
cucuggagucugagaucugaggagggggaagagguuuccuacuucaggagagacugag

SEQ ID NO: 4179157 - RNA, 55 nt, Human
cucuggauaugcacugggugaggagggccugcccccaccuccaggcauaucugag

SEQ ID NO: 4179158 - RNA, 84 nt, Human
cucuggauauuuuuaugaaggucucuaccuugcuaagcuguuuuguuaaugcagaugcagggagggccuuucaugacacuagag

SEQ ID NO: 4179159 - RNA, 57 nt, Human
cucuggccuggggccugcucccuaucuguggaacugggaguagggcccaggcuaggg

SEQ ID NO: 4179160 - RNA, 68 nt, Human
cucuggcuauggcacggcgcucagcuuccccauucaccaacacugagugcuggcugaaaggcacagag

SEQ ID NO: 4179161 - RNA, 59 nt, Human
cucuggcugaauccuagucucauaguuuauuuucauugcuauagugacaucggucaggg

SEQ ID NO: 4179162 - RNA, 81 nt, Human
cucuggcuggcaaguagaacacaagauaagccuugaggaaacuaagaauagaggaaauuugugucuacuuccuaucuaggg

SEQ ID NO: 4179163 - RNA, 125 nt, Human
cucugggagagccaguguaauuagacuaauuuuacaagggaaaggggaaaaaucaaggggauuaugcuauaggccacuuguagaguugggaauuguacuagucaggguucuccagaaaaacagag

SEQ ID NO: 4179164 - RNA, 82 nt, Human
cucugggagcugggaggugggcagugagaugggacagacucagcacccaccccauuuugccugcuuguucccugccucagag

SEQ ID NO: 4179165 - RNA, 63 nt, Human
cucugggcaaguuucuucaugagcuucagucuugucugcucuaagugaggauacugcucagag

SEQ ID NO: 4179166 - RNA, 129 nt, Human
cucugggcccaucccagcccuggccuguggccuuucuugugaccaucagggccuggagacccagcaaggaguugccugggugcuggcuggucacugccagaggccugggcugcaugaggaccuccaggg

SEQ ID NO: 4179167 - RNA, 57 nt, Human
cucugggcuuccuuuguggguucucucaagcacugcuacacaaagcgugguccagag

SEQ ID NO: 4179168 - RNA, 102 nt, Human
cucuggggugagcugagucagggagauagaggccaugagauuuggggauacagcacuccuccacccaucccgaaccucuacuucuuucagaacccccaagag

SEQ ID NO: 4179169 - RNA, 64 nt, Human
cucuggguccuggggcuacaagcuguuuucacccucagccaccagcagcaacaggaucccaggg

SEQ ID NO: 4179170 - RNA, 58 nt, Human
cucugggucuaccuguggccagcuguguccaagguaguuagggcccgcaggccuagag

SEQ ID NO: 4179171 - RNA, 74 nt, Human
cucugggugucauggccucagcugacggaaccaccugcuaaaacacguucauggcagaggcacggcaccaaggg

SEQ ID NO: 4179172 - RNA, 94 nt, Human
cucuggguucaagcaauucuccugccucaggcucuggaguagcugggauuacaggugccuaccaccaugccuggguaauuuuuuguaucuuuag

SEQ ID NO: 4179173 - RNA, 62 nt, Human
cucuggguuuucuuuucuaguaaggccuuccagagagggaagaagagaaagaggauccacag

SEQ ID NO: 4179174 - RNA, 83 nt, Human
cucugguccauucucucccugaagcaaagcagcccggggacuccucuuucaaauguccuuuagggagugggugugggccuaag

SEQ ID NO: 4179175 - RNA, 61 nt, Human
cucugguggggcaguguggagccgugucaagucuuggcacaggagcacugcccugguugag

SEQ ID NO: 4179176 - RNA, 56 nt, Human
cucugguugagugagaaccaagguaaagccccugggguuacaacaguuaaacagag

SEQ ID NO: 4179177 - RNA, 78 nt, Human
cucugguuuuaauguuauguuuaugauacccucagagggaacagggaauaauaaugaagaugauaaugauagccagag

SEQ ID NO: 4179178 - RNA, 63 nt, Human
cucugguuuucuugucaucacgugcauccauuuccucuggguguguuccuaaggaaaccagag

SEQ ID NO: 4179179 - RNA, 65 nt, Human
cucuguaaacuaggucauuuuuaaaaaucagacuuucuacuguuagaguaugucugguagcagag

SEQ ID NO: 4179180 - RNA, 64 nt, Human
cucugucagcaccaguuauccucagggguaucaccacuucugggaggcuuugguguugacagag

SEQ ID NO: 4179181 - RNA, 63 nt, Human
cucuguccuugcacaguuccuagauucuucauguacuccuggaugcugcugucagggauggag

SEQ ID NO: 4179182 - RNA, 73 nt, Human
cucugucugucugaauggacucauuaaggccccauaaaaugcagucacagugagccaugucagagaugaggag

SEQ ID NO: 4179183 - RNA, 56 nt, Human
cucugugccucaguuuucuucucuguaacaaagagaguaguaccgaccgcacaggg

SEQ ID NO: 4179184 - RNA, 92 nt, Human
cucugugcuggcgccaccgcacucuguagccuguaagagagcagcaaagaggaauguguugcucagguauagacgggggugggugcauagag

SEQ ID NO: 4179185 - RNA, 56 nt, Human
cucugugggccagagaggcccccugacaagucugcccuagacuggccucaucagag

SEQ ID NO: 4179186 - RNA, 129 nt, Human
cucuguggucccuucuagccuaaaauuucugucucugcaucagcuucauucuguucaaaaaagagaauggauggaucuguugcagcacagaguggagaguggccaauaugacuggggcccaagacagag

SEQ ID NO: 4179187 - RNA, 55 nt, Human
cucugugucugaagcccuauuucuggccuacaaguggggcguguggacacacgag

SEQ ID NO: 4179188 - RNA, 67 nt, Human
cucugugugggaucuuguuuugucugucagccuuggcuucagagccacuucaagucuaacagcagag

SEQ ID NO: 4179189 - RNA, 60 nt, Human
cucuguugaccagcagauguggaacauuugcagcuucacagaaaguucugcuggacagag

SEQ ID NO: 4179190 - RNA, 88 nt, Human
cucuguuggguggcaaagggcugaugugacauagcugugacauagaugugauguuaggcccuuggccucuccuccuucccauacagag

SEQ ID NO: 4179191 - RNA, 91 nt, Human
cucuguuucccaaugcuguggaaguuccugaagcaauuucucaaaaucagcauugacacacagggcucagggaguuucacaguguacagag

SEQ ID NO: 4179192 - RNA, 56 nt, Human
cucuguuucugcugcuagcucaguguagcgugcacuucagcuauucagaaggggag

SEQ ID NO: 4179193 - RNA, 55 nt, Human
cucuuaaguuucuccaccuuugcagagugcugugaaggcugagacaacucaggag

SEQ ID NO: 4179194 - RNA, 83 nt, Human
cucuuacacugcccggcuguucuucgggacuguccgaaagucacucggcaucccuagaauagccagguagguuaccaaaagag

SEQ ID NO: 4179195 - RNA, 99 nt, Human
cucuuacuguacuagugagacuaaagcucuuacuguacuagugagacuaaagcucuuacuguacuagugagacuaggagucucacuaucauucuggggg

SEQ ID NO: 4179196 - RNA, 72 nt, Human
cucuuagaaugucaacugauguuuauucagcaguucugugugcucagaacaauauuagaugccauuugagag

SEQ ID NO: 4179197 - RNA, 67 nt, Human
cucuuagauuucccucuuguauuugcaugcaggcgagcauagcaaauugacugggggaagggaagag

SEQ ID NO: 4179198 - RNA, 59 nt, Human
cucuuagcuagaggcaauuauguuggauuaauuaauauucauagccuaguggcuaagag

SEQ ID NO: 4179199 - RNA, 75 nt, Human
cucuuaucucaagaacuuguucaugcagaggagcucuuuugaagguucuuuccccauggaguucggaguugaggg

SEQ ID NO: 4179200 - RNA, 72 nt, Human
cucuucacacauccugaccaaguucagggcagugaaggcacugcccucaucguuuccagaauguggauggag

SEQ ID NO: 4179201 - RNA, 80 nt, Human
cucuucacaccugggagugcacagguuucguugauuccauuucaggaaugcucagccuacguguuucccagaauaaagag

SEQ ID NO: 4179202 - RNA, 58 nt, Human
cucuucaucucaguccccuaauccuucucccuuugagcagggcuucugggaucaagag

SEQ ID NO: 4179203 - RNA, 107 nt, Human
cucuuccaauuacauucucauuguccuuucucuuggauaccgauugcuaagauaaacagacacugauuaagugguagaaagagaaagguaaaaugcaacuggaaggg

SEQ ID NO: 4179204 - RNA, 59 nt, Human
cucuuccaccuccuucaggagaauuaaaugaaucaagacuuuggaaagacggggaagag

SEQ ID NO: 4179205 - RNA, 60 nt, Human
cucuucccuuagaagugauaagcauauuuaauuuuagcuuuccacuaucuuagggguuag

SEQ ID NO: 4179206 - RNA, 101 nt, Human
cucuuccuggggaucucagaggauugccucagcgagcaggggagcuggagaacaccccaggggcucaggcugaggcagcuucugugggggccaaggaggag

SEQ ID NO: 4179207 - RNA, 82 nt, Human
cucuucuaaucaaauugcacaugggugcuucuaguuacuuugagcugguaucuuugcauccaucagcagauugacuggagag

SEQ ID NO: 4179208 - RNA, 67 nt, Human
cucuucugcuucccuccuuucuaagauggagucuucuuuccuucuugagcauggguaguacucaggg

SEQ ID NO: 4179209 - RNA, 77 nt, Human
cucuucuguaccucggccuccaagcugccuagaaucuggcuguggcagugcccaaggggaggcgagcagcaggagag

SEQ ID NO: 4179210 - RNA, 100 nt, Human
cucuucuucagggucauucaggagcucaggcugauggaaauucugccaugucacacaguggcuuccacagucauccugggaauugaccucuggcuaggag

SEQ ID NO: 4179211 - RNA, 57 nt, Human
cucuucuuuaguccagaccaucaguuaucugcuuugauguuucugacgguaggagag

SEQ ID NO: 4179212 - RNA, 67 nt, Human
cucuucuuuuuugcauaaucucuguuagaaaagaaagggcccacggaaaaagugcaaaagugaggag

SEQ ID NO: 4179213 - RNA, 70 nt, Human
cuguauccauucauucauugaugaacauuuagguugaguccguaucauguuaucgugaauaaugcugcag

SEQ ID NO: 4179214 - RNA, 55 nt, Human
cuguaucucacauuuccuccuauccugcuaguggauucccuggaaggagaagcag

SEQ ID NO: 4179215 - RNA, 59 nt, Human
cuguaucuuugguauuuaauauggggaugcguagagaguauuagaagccauagguacag

SEQ ID NO: 4179216 - RNA, 68 nt, Human
cuguaugcagacaucaccucagugcuauauagucauacuguaagcucuauuuuagaugcuggguacag

SEQ ID NO: 4179217 - RNA, 71 nt, Human
cuguauuccuaaaugcuauucucuaaggcucaggaccuagaguuguccuugagaagcauuaagagguaggg

SEQ ID NO: 4179218 - RNA, 77 nt, Human
cuguauucuguauaugauugagggcugcaaggaaaucacuguucgacuuguguuuuuaaauaaugauagaaaaacag

SEQ ID NO: 4179219 - RNA, 56 nt, Human
cuguauuuuuuaagugaucuggauguccagauacacagcuacauugaacaauauag

SEQ ID NO: 4179220 - RNA, 88 nt, Human
cugucaagcuuccauaagaguuuuuucucuccucauuauugaaauauacgcucaagaguagaacuagaauucuucaaggguuugguag

SEQ ID NO: 4179221 - RNA, 59 nt, Human
cugucaaugacaguuauuuggguuaaguuuuuaugucuccaaauagccuccauuaacag

SEQ ID NO: 4179222 - RNA, 85 nt, Human
cugucacaucgucugucugaugugcuaggggagggccagggugggaacccuguucacccuccaugcacagaacagacggugacag

SEQ ID NO: 4179223 - RNA, 60 nt, Human
cugucacuaccucugagagaaucauagggucauauaaaccuguggaugagguaaggauag

SEQ ID NO: 4179224 - RNA, 74 nt, Human
cugucacugagccacuggaauguugaggagacaaugaguuagcauuggaaaacaauucagggugaaaggugcgg

SEQ ID NO: 4179225 - RNA, 58 nt, Human
cugucagagauggcaugaaagauuuuucuuagggagugagucaaacauauccugacag

SEQ ID NO: 4179226 - RNA, 59 nt, Human
cugucagaggagcugcagaacgcugggcugcuggagcacauccuggagcaccucaacag

SEQ ID NO: 4179227 - RNA, 78 nt, Human
cugucagauacugaggcaugcaaugacugcugacaguguccuuucugggacaaugugcaauugcagcuagucugaugg

SEQ ID NO: 4179228 - RNA, 66 nt, Human
cugucagcaugccugggcugccugccugauuagcagagcaaaggcaggaacccagggguguuucag

SEQ ID NO: 4179229 - RNA, 55 nt, Human
cugucaggggcggguggagcgggguggggcccuggcuuacucacauccuugagag

SEQ ID NO: 4179230 - RNA, 58 nt, Human
cugucagggggccuggccaucaggcugggaaggugaggggagucaggccugugugcag

SEQ ID NO: 4179231 - RNA, 62 nt, Human
cugucaguuauuuugagcaauugguaccuugggaaucaauucaguccaacaguaauugguag

SEQ ID NO: 4179232 - RNA, 81 nt, Human
cugucauuuaaauuccaggugcaggucuucugaacaaaugccuccugaggauuucugugccuggaaaauaucuguuaacag

SEQ ID NO: 4179233 - RNA, 73 nt, Human
cugucauuugugcaauguagaugaaccuagaggacacaauguuagguaaaauaaaccaggcacagaaagacag

SEQ ID NO: 4179234 - RNA, 80 nt, Human
cuguccaagcucccuggcacaugggcacacuucacacucacucuguggcuccgugccugugccaggggugugcuggaggg

SEQ ID NO: 4179235 - RNA, 55 nt, Human
cuguccacuguucucuguugucagccucacagcacccagaaggagcuaugggcag

SEQ ID NO: 4179236 - RNA, 70 nt, Human
cuguccaggguccugaccauuccuugucuccaggcugguuccagaugggaugaguuguuaggacugacgg

SEQ ID NO: 4179237 - RNA, 57 nt, Human
cuguccauuuugaauuuucaguccuuggccacacauaaaggaaguuuggaaugguag

SEQ ID NO: 4179238 - RNA, 59 nt, Human
cugucccacaagcagugugcacaguuaacguuuacucaacaccacagaauuggggacag

SEQ ID NO: 4179239 - RNA, 130 nt, Human
cugucccuaaauauuugucgaguauguuuugcaaauguuuucagccaugugauuaucuguacugugucuuccauaucagaugaacugugacugaaaaugcugggcagcuuuaugauuauuuagcaaucag

SEQ ID NO: 4179240 - RNA, 60 nt, Human
cugucccugccugcccacucuguaccccuggaggcccagacagcagggcuggcaugacag

SEQ ID NO: 4179241 - RNA, 64 nt, Human
cugucccuuguugaguacacugcuagccuugaacguaggcccugcccagugccacaaggagcag

SEQ ID NO: 4179242 - RNA, 77 nt, Human
cuguccuccugccauccccuuaucccaggcugagccaugucaugaguggcucuaaaggguuggacagguggggacag

SEQ ID NO: 4179243 - RNA, 106 nt, Human
cuguccucuggugagcuagggccaccuggauuccaugugugcuacacccuaggggaagaacgccaggaugucuacguggccuucaaggagaacccugagaagacag

SEQ ID NO: 4179244 - RNA, 69 nt, Human
cuguccuggggaaagccagcccugcuuccucucccaggugggggcucugggccuggcugcgcaggacgg

SEQ ID NO: 4179245 - RNA, 64 nt, Human
cuguccuggugcuggggaucccugaguuguaaucacaucccaaucagauucacuguggggacag

SEQ ID NO: 4179246 - RNA, 80 nt, Human
cuguccuugcaaaguauuuuugucuagcgucucuaguuggauacaacagugauaucaagacagacaguuacugaggaugg

SEQ ID NO: 4179247 - RNA, 98 nt, Human
cugucuaacuagucccagugagaugagccacguaccucagguggaaauguagaaaucacccgccuucugugcuaaucucacugggagcugcagaccag

SEQ ID NO: 4179248 - RNA, 129 nt, Human
cugucucaacacucuggcuuagaauggugcuuggcacauagacgcucaauaagucuuggaugaaugaaugagugaauguguuugugagaugugagguacguucacggaggccgugguagugagagacag

SEQ ID NO: 4179249 - RNA, 87 nt, Human
cugucucacuuagccugggagauucaggugaaguuugugcacagacuugaaagaaaugcagaauuuccuaggguaggcaggagaugg

SEQ ID NO: 4179250 - RNA, 58 nt, Human
cugucuccuccacugcaugggagacucaucacggaagcuugcacagagaaggaggcag

SEQ ID NO: 4179251 - RNA, 78 nt, Human
cugucucucuuauagggcauguagugugcauagagacucggugucauaugcacacuaggugucaggaauaggugucag

SEQ ID NO: 4179252 - RNA, 56 nt, Human
cugucucugcuagauacuaguagcaaaccauauauuauaauuuagcaaguagacag

SEQ ID NO: 4179253 - RNA, 90 nt, Human
cugucucuguucuggauucuugaaauaugcugcuaaagagaagaggcaaggccccugccuuguuggagccuauguccuaggcugagacag

SEQ ID NO: 4179254 - RNA, 55 nt, Human
cugucucuuccuucccuucccagccugccaaucagcagggaaaaggaugauacag

SEQ ID NO: 4179255 - RNA, 55 nt, Human
cugucugccaauaaucuauggccacucccuucagucuggcugagaggcagcacag

SEQ ID NO: 4179256 - RNA, 81 nt, Human
cugucugguuuggucuugaaacugggccagggagauaagacucugcuuccuggcuuagguuuccagaacacucugguaugg

SEQ ID NO: 4179257 - RNA, 56 nt, Human
cugucuuccuagugugcauuggcaggggacccuaugaccagugcaagguaagauag

SEQ ID NO: 4179258 - RNA, 81 nt, Human
cugucuuccucuaccaaaaagugagccccagagauuugggucuguuuauucauucugcaucccuuuuugggccaaggacag

SEQ ID NO: 4179259 - RNA, 86 nt, Human
cugucuucuacucuacaacguuugugcauuuuauccccaaagaccagagaugucuuuggaaugcacagagguguagugacacgcag

SEQ ID NO: 4179260 - RNA, 79 nt, Human
cugucuucuguauuaaaggaguguauaauuguaguaguuuacugaaauggggacaguccuuagugguuguuuggagcag

SEQ ID NO: 4179261 - RNA, 78 nt, Human
cugucuugggaggcugucuguuagccugggaggcugucuguuuucccuucccagagcucccaauagcccccagcccag

SEQ ID NO: 4179262 - RNA, 59 nt, Human
cugucuuguuuccugaaaguagaguagcagauauuuuugagcucucaggcaagaagcag

SEQ ID NO: 4179263 - RNA, 83 nt, Human
cugucuuuuaaagggagagugcaaccgaaacaagcagggcauuauugauacugaucuuuaaaagugcaaauccagcuuggcag

SEQ ID NO: 4179264 - RNA, 126 nt, Human
cugugaagcaaucucucaguacuuaaagugggcuucauucuuaagaugccuaaauguaauauugggucaaaacacuggggaauguugguuaauauuuauugagugcucagaaugaauguguuguag

SEQ ID NO: 4179265 - RNA, 93 nt, Human
cugugaaugugagggcaaagaacucugcugaaguuguuggucuuuugucagaagaaggcuuuaaguacuggcauucuuuccucaugagcacag

SEQ ID NO: 4179266 - RNA, 57 nt, Human
cugugaauuuaaagcacacaucuuuaaaucuggagcuggguggaauggaauucacgg

SEQ ID NO: 4179267 - RNA, 79 nt, Human
cugugacacaugccuuaauuucccuguuuuguuucacuccaugagcauaagaccuagaaauuacaggcuauguaagcag

SEQ ID NO: 4179268 - RNA, 105 nt, Human
cugugacacuccauguguuccuuguauguacuuugugggcagaugggcuucauauguauuucaggaaguaagugagcccucagaguauggcaguggguggggcag

SEQ ID NO: 4179269 - RNA, 56 nt, Human
cugugacugcagcaccaaguaacuaggagugggcuggggacuuggcacagugacag

SEQ ID NO: 4179270 - RNA, 56 nt, Human
cugugacugggugacaguccucauucuuggcugaacacugacauaccugguuacag

SEQ ID NO: 4179271 - RNA, 65 nt, Human
cugugacuuuugcccuguaccagccagaggaaguaaauggcuagaguagggggugaggguggcag

SEQ ID NO: 4179272 - RNA, 117 nt, Human
cugugagaaauaaguuucuguuguuuauagccacacaguuuaugguauucuguuauagcaguuauagcagcccaaacagacuaagacaggcauauauacaaauaauuuuacuuacag

SEQ ID NO: 4179273 - RNA, 56 nt, Human
cugugagauaugcauaugcucucccuuucugcaaaggaggacaucaguacuuacag

SEQ ID NO: 4179274 - RNA, 90 nt, Human
cugugagguacuggaggagccccaacuuguuaaagcuccugcaugauugcagcuuggguuugacagcuuggggcugucccagcuacgcag

SEQ ID NO: 4179275 - RNA, 59 nt, Human
cugugagucuucagcaaguguuggggguaacacacccaaaacagugaaugaggccagag

SEQ ID NO: 4179276 - RNA, 67 nt, Human
cugugaucacaguuaugggccuuggucagucauuugauuucagcacacccaaauuguccauuuacag

SEQ ID NO: 4179277 - RNA, 61 nt, Human
cugugaugaaaccugagacgccaagggcaagaauucuuuugaagucucaguuuucucauag

SEQ ID NO: 4179278 - RNA, 80 nt, Human
cugugaugucuaguacauacaagaggcagcagugggaccaucaucagaugaacucuguguuuacuggacaucauucacag

SEQ ID NO: 4179279 - RNA, 75 nt, Human
cugugaugucucuguuuuugugguacuucucccucuugggguagaaauaaucagcuuaggggcagagaccuacag

SEQ ID NO: 4179280 - RNA, 72 nt, Human
cugugauucagaacaaaguuucucucuguguuuucagguauccaagacaaacauuguuaugauaaauuacag

SEQ ID NO: 4179281 - RNA, 89 nt, Human
cugugauucuccacugaaggauucaaaauggcaggucugcugcagagcuugccuugaggcugagucagauuucauuguguggauggcag

SEQ ID NO: 4179282 - RNA, 75 nt, Human
cugugcagggugggggcagugcuggugcccgcggugcaugugguucacaugaaggcugucuccuccuugcaccag

SEQ ID NO: 4179283 - RNA, 73 nt, Human
cucuugaaaaguuucuuacaggucauggguuggucucaaaccaaacaugucuuuagagaaacauuuauaagag

SEQ ID NO: 4179284 - RNA, 72 nt, Human
cucuugaacccaaaaggcggaguuugcagugagccgagauugcgccacuguacuccagccugggaaacagag

SEQ ID NO: 4179285 - RNA, 65 nt, Human
cucuugagcuuagguucaggauuggaguggaacucaacauacauacaguccacaagagccaagag

SEQ ID NO: 4179286 - RNA, 80 nt, Human
cucuugagucugggcuggccugugacuuuaaucagugcaaugcagaagugguucagugccaguucuaagacuacaaagag

SEQ ID NO: 4179287 - RNA, 70 nt, Human
cucuugccaaugguacaaacgauucucaacaaucucagaaugagagucuuuggggauaauugguggagag

SEQ ID NO: 4179288 - RNA, 58 nt, Human
cucuugcugggucaagcuggauugacuucauugaacagccagcugggucuugcaggag

SEQ ID NO: 4179289 - RNA, 65 nt, Human
cucuuggagucaauaagaucuagacaugagauuaaacauguagauugcuaauauuacuuuaaggg

SEQ ID NO: 4179290 - RNA, 63 nt, Human
cucuuguucccuucaaucaguucuucacuuaauagccauagaacuggcugggaacaccuagag

SEQ ID NO: 4179291 - RNA, 73 nt, Human
cucuuguugcccuggcuggagugcaguggcgugaucccagcucacugcaaccucugccuccuggguucaaggg

SEQ ID NO: 4179292 - RNA, 68 nt, Human
cucuuuaacuuucuggcuuuggggagagguaggcaacucuucuuugcagaaauagaaaggccgaagag

SEQ ID NO: 4179293 - RNA, 109 nt, Human
cucuuuaguacauugaaagaaagugcaacucagagaggugaagcuacucgucugucagcuugccagggagagguugaaaccucagugaugucggcacuucuuuaaggag

SEQ ID NO: 4179294 - RNA, 67 nt, Human
cucuuucaggucuggggcugaaaccugucuuguuuccccaucagaggcagucccaggcccgaaagag

SEQ ID NO: 4179295 - RNA, 80 nt, Human
cucuuucauucauucagaagugcuuucacacucuguuuuccuauagaaugggaaaguauauuuguauaugguuuugaggg

SEQ ID NO: 4179296 - RNA, 62 nt, Human
cucuuucccgucagcuucucagaggucugcauuuaccacuguaaagcgucacagggaccgag

SEQ ID NO: 4179297 - RNA, 63 nt, Human
cugccuuggagucuuuccauucugaaaaugccauaguggaaaaaacccagacucuagaggcag

SEQ ID NO: 4179298 - RNA, 59 nt, Human
cugccuugguuucuagcagggcugcucacugaacugggcugccugccaggggccagcag

SEQ ID NO: 4179299 - RNA, 103 nt, Human
cugccuuuccaccuugcucugcagauccagccuccaucccaccacuucucccccgagcagguaagagucagagugcuggggugcagagagguggggagggcgg

SEQ ID NO: 4179300 - RNA, 60 nt, Human
cugccuuuguccugagagccugggcugggcuccggggacugcagacucucaggcaggcag

SEQ ID NO: 4179301 - RNA, 62 nt, Human
cugccuuuuggggguggagggggugcuccuguugaagaguccuuuuccacuccucaaaacag

SEQ ID NO: 4179302 - RNA, 59 nt, Human
cugcgauuuaucucuuaggaagaccgaauuuuguaaaccuuccugcagguggcuugcag

SEQ ID NO: 4179303 - RNA, 69 nt, Human
cugcgauuugaacccuggccaguaauucuaagccaagcgggaugcugcuaucaggcuucgagucagcag

SEQ ID NO: 4179304 - RNA, 56 nt, Human
cugcgcccugccaauauggcuaauacugguuuauagaugaggccagcagggcucag

SEQ ID NO: 4179305 - RNA, 76 nt, Human
cugcgcuggggucaccucugaccugcuccuccucuucuggagcuuuugaacaucucagaagugacccugagcccag

SEQ ID NO: 4179306 - RNA, 83 nt, Human
cugcggaaucagacugggugcaccaaggcggagggccaugccgggcuucgcccuuccugggugucccggaguccguuccggag

SEQ ID NO: 4179307 - RNA, 57 nt, Human
cugcggaggcacagcuuacaggaccguaauggcccuggggaaggugucuccaaugag

SEQ ID NO: 4179308 - RNA, 130 nt, Human
cugcggcgugcuggcggccgccuuccuccggggcucgaccgccggggugcgaggagcgucuuugaguccccaagcucgcugcugcgccccgccuggcgcccccucccagcgggcggccuagcgcacgcgg

SEQ ID NO: 4179309 - RNA, 64 nt, Human
cugcgggaugacaguggccaacagagauuaagcaagaacuucugcggguugguggcauaugcag

SEQ ID NO: 4179310 - RNA, 64 nt, Human
cugcguggagacaugcaugaaugcaggucucucaaacgaggguccacaugguaugucagcgcag

SEQ ID NO: 4179311 - RNA, 82 nt, Human
cugcuaacaacagugagugcugggaggagugaggaagggaugucuucuccccaaccauggcacucacauguggugugggcag

SEQ ID NO: 4179312 - RNA, 93 nt, Human
cugcuaauuuuaaauuuucacuuuuuuuguguugaaggggagugauuuucauauaaccuuucaaugacacaaaagagaaacuagaguuuucag

SEQ ID NO: 4179313 - RNA, 100 nt, Human
cugcuaccccuuaguggagaggcagcagaguuugggagaugguauuaccuguccuuaucaucucagacucugcagucauucuguuuguuuggguuugcag

SEQ ID NO: 4179314 - RNA, 80 nt, Human
cugcuacuauuauuauccuaauuucuguuuuauagaugaagaaauucagguacacagggguuaaguaauuaugggagcag

SEQ ID NO: 4179315 - RNA, 83 nt, Human
cugcuacuuaauccauuuuaacuguuagugcaaggccgucccucuaaaaccuugcaaacuauugguagagaugggaauggcag

SEQ ID NO: 4179316 - RNA, 61 nt, Human
cugcuauaauuuaucaugucacaguucuggaggcuagaaguccaugaucaagauguggcag

SEQ ID NO: 4179317 - RNA, 70 nt, Human
cugcuaucauguggacuaauccauccuggccacccuacuccuggcugugggacuggaacuacuggugcag

SEQ ID NO: 4179318 - RNA, 57 nt, Human
cugcuauugauaaauuuggucuaguaggagauuaaggugacuaaauaauaauagcag

SEQ ID NO: 4179319 - RNA, 63 nt, Human
cugcucagagcuguugcugccccaccagacacuuggccaaggggccugcaccggucugcgcgg

SEQ ID NO: 4179320 - RNA, 72 nt, Human
cugcuccagccccuggugcacagggugaugagcaauuaaacagguuugcuuugugcuacugaguuggggugg

SEQ ID NO: 4179321 - RNA, 78 nt, Human
cugcucccaaugaccccucuccuuaagacucaggcacaagcccaugggaccugggccagaggacagucuggaaaguag

SEQ ID NO: 4179322 - RNA, 114 nt, Human
cugcuccuauuacccauccccucacuucacgcucugcagacaugagaauaauaaucuucacaagacuuuuugcugaguugaaguuugagguugugccuaacuacauagugacag

SEQ ID NO: 4179323 - RNA, 67 nt, Human
cugcucugacccuuucaccuuccacaaggcgguuuguuuucuuagcugggagggucagggaucccag

SEQ ID NO: 4179324 - RNA, 94 nt, Human
cugcucugccuucugugcucagcaguuguuucggauugggagucaggaggccauucccacacuugaaacaaggcugcaagaggaggcugagcag

SEQ ID NO: 4179325 - RNA, 60 nt, Human
cugcucuucccacucacucccaccucugugcugaggcuggggccaggcagggagaaucag

SEQ ID NO: 4179326 - RNA, 62 nt, Human
cugcucuugagggacugcggucuccggcucugcggagaacuuugcgcaguucccgggggcgg

SEQ ID NO: 4179327 - RNA, 101 nt, Human
cugcugaagucccaugggggcagcucccuuaguccuugccgggagauaacagguguuuccaguugcaugagggugcugaggcccccagugagaaccagggg

SEQ ID NO: 4179328 - RNA, 65 nt, Human
cugcugagagcugaaggcuguaguucagacaaaaccaagcccuacccuuucaccacccucagcag

SEQ ID NO: 4179329 - RNA, 58 nt, Human
cugcugauuacacagaagaacauugcuauuuacaugcaaauaucuuuguaaucagcag

SEQ ID NO: 4179330 - RNA, 57 nt, Human
cugcugcaaucuggcuuccaugugaaucagccucugagaagaagauuagauugccag

SEQ ID NO: 4179331 - RNA, 64 nt, Human
cugcugccauucuugccgcaugaagucagccaaauaaaacaaagcugauguaagaagaaagcag

SEQ ID NO: 4179332 - RNA, 64 nt, Human
cugcugccuaguccaagacgugccuacacuaccaucauauuauacucuuguuccugggcugcag

SEQ ID NO: 4179333 - RNA, 79 nt, Human
cugcugccucaugacccggaccuggccuaucgccucgcgcugcgagcuaugaggugaggauagguggccaaggcagugg

SEQ ID NO: 4179334 - RNA, 130 nt, Human
cugcugccucugcacuugcaggggugauggugaugaucaaauaagauaauauaugugaaggccccaggaaaugggggauguuauucaauuugaauccaaccaacacucagugaggccuccugaggucaag

SEQ ID NO: 4179335 - RNA, 73 nt, Human
cugcugcuguaacucaguuggggaccucgccucaggggaggggaaggcucuggggauugagauaaaagggcag

SEQ ID NO: 4179336 - RNA, 90 nt, Human
cugcuggagcagagggcauggccauuuaagcuuuuggucaacacagugugaugggccugccugaaggcuguaccaguugacucccagcag

SEQ ID NO: 4179337 - RNA, 69 nt, Human
cugcuggaggauuaaacaagucagccucuccacuaauugagcuuugacuucauuggucuuuucuagcag

SEQ ID NO: 4179338 - RNA, 93 nt, Human
cugcuggaugaggaguucuuuccugcugccugauguucuggauccugagcccacacccaggcccuggcagggcugagucuccucucccugcag

SEQ ID NO: 4179339 - RNA, 68 nt, Human
cugcuggcaaauaaacagaucuucgggaaacuguacuugucuuccagagaaaagguuuauuucaguag

SEQ ID NO: 4179340 - RNA, 59 nt, Human
cugcuggccugaccagccacaggcugugaaaagccugcuggauguggccaggccauuag

SEQ ID NO: 4179341 - RNA, 67 nt, Human
cugcuggcgaggccaggccagggccuuagaaguggcuuucaagagguccucuccugccugccggcag

SEQ ID NO: 4179342 - RNA, 56 nt, Human
cugcuggcuagauaaaaccagccaaggccuccuuggcucaccugucuacccagaag

SEQ ID NO: 4179343 - RNA, 97 nt, Human
cugcugggccagcauccgauugccagccagaaacgucacacugcccaggauggccagguacuucaaggucuggaacauguugagcugaguccaguag

SEQ ID NO: 4179344 - RNA, 128 nt, Human
cugcuggggcacacuaaggccuuucuuccucuuucccuggaugucuuggcuugcucucugugacucagggaaggacagagaggcuaggccaggggacagaggcugcaggggccuguccagauaggcag

SEQ ID NO: 4179345 - RNA, 74 nt, Human
cugcuggggucauggggcgcccgaggcugaagucgggggauggguuggugggggccgcgugcacccuuagucgg

SEQ ID NO: 4179346 - RNA, 64 nt, Human
cugcugguccugagaauccuguccucuacugagagaggccacagugucugggggccaucagcag

SEQ ID NO: 4179347 - RNA, 111 nt, Human
cugcuguagaggaagaaggagccgucggaguccagcacgggaggcguggucuuguaguuguucuccggcugcccauugcucucccacuccacggcgaugucgcugggguag

SEQ ID NO: 4179348 - RNA, 69 nt, Human
cugugcaguaaauuuggauaauggauuacaguuguauuuucauuccuuaacauucauuugcuugcauag

SEQ ID NO: 4179349 - RNA, 67 nt, Human
cugugcaugucaauuauguucucuggccaaaagccuugcugcacaguaaacaugacuggaggcacag

SEQ ID NO: 4179350 - RNA, 57 nt, Human
cugugcauguguucucugguaaugacagccaccgucuucacagggaugcaggcauag

SEQ ID NO: 4179351 - RNA, 71 nt, Human
cugugcauugucuugucuguagugccaauuuuuaugguucgaugguguauuuacagacaugacaauaaugg

SEQ ID NO: 4179352 - RNA, 60 nt, Human
cugugccagagggugaccaagggauguucagggacugauuggcacccacuuuuggcucag

SEQ ID NO: 4179353 - RNA, 57 nt, Human
cugugccccuccuauauucauuauaaaguuuuacauugaagauggguagaggcacag

SEQ ID NO: 4179354 - RNA, 80 nt, Human
cugugccuccagccgcuugcuugggaguggggagggugcugguggggcugcccgcaccauccccgggcucuggcgcacag

SEQ ID NO: 4179355 - RNA, 67 nt, Human
cugugccuccagucauguuuacugugcagcaaggcuuuuggccagagaacauaauugacaugcacag

SEQ ID NO: 4179356 - RNA, 84 nt, Human
cugugccuuuuuguguuagagcacaauuauuuuauaaagaucaugaaauggcuacaagaugugcucugagaacuaagcguucgg

SEQ ID NO: 4179357 - RNA, 89 nt, Human
cugugcgacuuuggaagaguuguuuaaccucucugauuuucagcaucuucagggauaauaauaauaauaauacuucguaaaguuguuag

SEQ ID NO: 4179358 - RNA, 74 nt, Human
cugugcugacaauggaacuguuguagguaaagucauuuucagauuaaauacaacaauuuccacauuagaaucag

SEQ ID NO: 4179359 - RNA, 100 nt, Human
cugugcugagagagggugcugcugugaggacaggauguacuggauggcccugaguucagugcuccagucccuugccuccacagcccccacaccagcucag

SEQ ID NO: 4179360 - RNA, 62 nt, Human
cugugcugauuccauuuucucacugggaaaacaguagcgggaaagagaggaguugugcauag

SEQ ID NO: 4179361 - RNA, 60 nt, Human
cugugcugggcccugagacuaaaaagcucagcauuugagccccucauggugucuagacag

SEQ ID NO: 4179362 - RNA, 96 nt, Human
cugugcuuuuaauuuaugcauuuuuccuccuaaugcauguagauaauauauaccaaauucauagacuuaggaaugaagaaguaugauauaacacag

SEQ ID NO: 4179363 - RNA, 57 nt, Human
cuguggagaugcagaccaggccaguaacauuuuggccagcuuuggucugucuccuag

SEQ ID NO: 4179364 - RNA, 91 nt, Human
cuguggaggcaggaggccucucccucacacccuugcccagacuggggaccgucugcggcaguguccagggcuguggcucucaccucugcgg

SEQ ID NO: 4179365 - RNA, 55 nt, Human
cuguggagggaguacuagaaguuccuaccaggauuagugcuaaauacucccacag

SEQ ID NO: 4179366 - RNA, 95 nt, Human
cuguggaggugcagcuucauaaacaguguacuccuuuaccggaggcugaguuguuucaccucugcggggguagauugugagguucacucuaacag

SEQ ID NO: 4179367 - RNA, 76 nt, Human
cuguggcaccuaauauuuaccuuuguagugucccuuucucauuagcaacauggugaauauguguaggaguaaacag

SEQ ID NO: 4179368 - RNA, 61 nt, Human
cuguggcaggaagggacuagcaauugguuuuuuccaugagcaguccuuuguccugggacag

SEQ ID NO: 4179369 - RNA, 69 nt, Human
cuguggcagucagguauguugcucaaaucuucaggcuaaccuacugugaggagcauagcugacugacag

SEQ ID NO: 4179370 - RNA, 62 nt, Human
cuguggcucucagaggcugcuguuuacccucaggugcauucuuggccucugagaugccacgg

SEQ ID NO: 4179371 - RNA, 107 nt, Human
ccucagcucucagcugugaacaugcacagacccaaaggccauccaugugcgugugcuucuccacauauccaagaggccuugggaugugccacgggcagugacugagg

SEQ ID NO: 4179372 - RNA, 84 nt, Human
ccucaggaagucccugguuccuagcaaaaaguccauuagcucaggcuuaaugcuauccuaaagccaguggccuucuuuaugagg

SEQ ID NO: 4179373 - RNA, 56 nt, Human
ccucaggcuucuaguucagugaggcuuccauuaugccaaacugacugugcuuaagg

SEQ ID NO: 4179374 - RNA, 82 nt, Human
ccucagggaaagagaacuuucuguguuuuuaucuccacccccaguggaaggauauguugaguagaguuuuugcuuuuugagg

SEQ ID NO: 4179375 - RNA, 80 nt, Human
ccucagucucccaaguagcuagaaauacaggcacgugccaccacuccuggcuaauuuuuguauuuuuaguagagacgggg

SEQ ID NO: 4179376 - RNA, 63 nt, Human
ccucauacccugaagggaguugccauggugacugugggacugugaccuccaggguagcucagg

SEQ ID NO: 4179377 - RNA, 75 nt, Human
ccucauauugauuaccuuauuaccuuaucugguugaugauaacagguaaggcaauaguaaggagucccucagagg

SEQ ID NO: 4179378 - RNA, 57 nt, Human
ccucaucgccuucaucaucuacgaguuuguccugggagauuguauggaggugagagg

SEQ ID NO: 4179379 - RNA, 89 nt, Human
ccucaucuggcuuguauuuuggagaacuggcaggaaaauaagggaauagagcuauuuaaagauccaggagugcugguuagaguauaagg

SEQ ID NO: 4179380 - RNA, 81 nt, Human
ccucaugguauguugaucauagguaaaagacggccauguuaggaccaagucucagggaccaugaugaugacuccauguagg

SEQ ID NO: 4179381 - RNA, 100 nt, Human
ccucauguagcacugagugcagaggaacucaggaaauucuuuuuaacagaauggcugcaggcuauagaauuucagacuggggccagugcacuaaaugagg

SEQ ID NO: 4179382 - RNA, 78 nt, Human
ccucauguaugccuuauacuaccccauagguuuugacucuggcagaacaggacacagaauaaggcaguuuuauggagg

SEQ ID NO: 4179383 - RNA, 56 nt, Human
ccucauuguaguuaugguugagguuuucuucuaguccuagaaacuacaugaugagg

SEQ ID NO: 4179384 - RNA, 55 nt, Human
ccucauuuccagucuuucuggagcaccggaggcagacugugcgggaagagugagg

SEQ ID NO: 4179385 - RNA, 61 nt, Human
ccuccaaggccuaugcacaccuaggaacauccccuguccaggcuggacaugaggcgggagg

SEQ ID NO: 4179386 - RNA, 83 nt, Human
ccuccacaacuccgccucccagcaguaaccaguggaaauggggcagcacucucagcucugcuacucuguggggugcagugagg

SEQ ID NO: 4179387 - RNA, 55 nt, Human
ccuccacaggggaaacagugugaguuuuuguaauguugcuacucucccugggagg

SEQ ID NO: 4179388 - RNA, 83 nt, Human
ccuccacccucccugcacagccgagccaugcacacaauuacugcugacguacuucaggcugcugcuuggggagagaggggagg

SEQ ID NO: 4179389 - RNA, 89 nt, Human
ccuccacggauuuuguuuugacagaauguuacauauagagauacaaauauuuuuaaaaguuaucaucuguccaacaguuuuuuuggggg

SEQ ID NO: 4179390 - RNA, 79 nt, Human
ccuccacugcucugccaggagcuggaaagaugagcagcccggcuuugugccagcucuuuuggcugagugagaguggugg

SEQ ID NO: 4179391 - RNA, 86 nt, Human
ccuccagaaaggauucccuggugccauccagcaggaaacagaaccaagggcugcaggcuggcacccuuggggauaggaagcugagg

SEQ ID NO: 4179392 - RNA, 86 nt, Human
ccuccagguuucugucuuggguggcuggguggacagucgugccaucacugauccagagacccaaggacagaagugacuuugggagg

SEQ ID NO: 4179393 - RNA, 85 nt, Human
ccuccagugugugcucucgugugguuucaaguaggggcuacuuucaugcccauuuuguaaauacagaagcugagacacugagagg

SEQ ID NO: 4179394 - RNA, 79 nt, Human
ccuccauagaaagagcugguccauuggcacugcucagaaggccugagucagcagaaucggaaccaggucuugguagagg

SEQ ID NO: 4179395 - RNA, 66 nt, Human
ccuccaucaccaucugcccucaccccaagcgcauuccaaggugacggugcacucgguaauggcagg

SEQ ID NO: 4179396 - RNA, 70 nt, Human
ccuccaugucugauuaugaaaaaucccugaucucaucuuugauuccauuucuucaggucagaaauagagg

SEQ ID NO: 4179397 - RNA, 87 nt, Human
ccuccauuauuauauuaaacccucucuguagggccuaaguggacacuguaacugagcaccauugagaugguuaugaauucagggagg

SEQ ID NO: 4179398 - RNA, 115 nt, Human
ccucccaaaggguugggauaacagggcugagccacugcgccuggcugagguucucauuaaaagaaaauaggccaggugcgguggcucacaccuguaaucccagcacuuugggagg

SEQ ID NO: 4179399 - RNA, 69 nt, Human
ccucccacuucuugcugaggucaaaggccugcgucaguugcacuguagccucggcagugaaccgggagg

SEQ ID NO: 4179400 - RNA, 56 nt, Human
ccucccaugcuuucccaaccucugagucuacaaugagcagcugggcaacauggagg

SEQ ID NO: 4179401 - RNA, 55 nt, Human
ccuccccacaggccaaauaggcaagacugcagccauccguugcccugaggggagg

SEQ ID NO: 4179402 - RNA, 56 nt, Human
ccuccccagcuacagggcacggggcuuuccaggguccagaacccaggcuggggugg

SEQ ID NO: 4179403 - RNA, 72 nt, Human
ccuccccaguuuccugggucccacagccucuugcuuaaggcugccugaacuuuggggaaacagaggaggagg

SEQ ID NO: 4179404 - RNA, 110 nt, Human
ccuccccgacccaggaaauauaggggucuccccauucugggucuggcucagggacugugugucccugacugcccuccaugaaggaggccgcccuugggucugccgggagg

SEQ ID NO: 4179405 - RNA, 74 nt, Human
ccuccccggccccuguccucgugggcacugcaggaucucauuucugccccugcugggcacagaggcuugguggg

SEQ ID NO: 4179406 - RNA, 84 nt, Human
ccuccccugagucagggucagugaugagggagccccaguggcugagagcuaugcagaugggcucucgauuagacccuggggugg

SEQ ID NO: 4179407 - RNA, 74 nt, Human
ccucccgggucuggaucccaccgccacacacgggucccgucacaugccaguggggauccugcugcucgaggagg

SEQ ID NO: 4179408 - RNA, 82 nt, Human
ccucccugugcagaaggggugacaucaguaaccgugguugacaacggagccuaggguucugaugucacuucugcccgggugg

SEQ ID NO: 4179409 - RNA, 103 nt, Human
ccuccgcugucguugcaaauugcaagaguuggaucaucuguaaacuaaacagagaaggaauuuauuuucuuguacauuuuuaaacagucaaguauuaaggagg

SEQ ID NO: 4179410 - RNA, 62 nt, Human
ccuccuaucacugcccucacagcugggaccuacaagggcccacuucaugggcaggaaggagg

SEQ ID NO: 4179411 - RNA, 108 nt, Human
ccuccucauaaaagaguuaacaaagcuggccugagaaugcuacccuuugauaggccugcauggaagguuggccuuuggcuagaaucugggaacuuagauuuggggagg

SEQ ID NO: 4179412 - RNA, 95 nt, Human
ccuccuccacccaacuccagcaggugcgucucagagcuaaucccaugcacacgagucaccugagacggggcuuguugaacgcuugggggaggcgg

SEQ ID NO: 4179413 - RNA, 84 nt, Human
ccuccuccuguggccacaucuucacugguuucuggaauccaaccuggggccuuccugaagccaagugagaaacucaggacaagg

SEQ ID NO: 4179414 - RNA, 67 nt, Human
ccuccucuacuacugcaggaguuucuuguuugccaggacagggcuauauuccucagaguugaggagg

SEQ ID NO: 4179415 - RNA, 83 nt, Human
ccuccucugcagggcagugugucuguggggcaguuugcuucuguccuguuucugggaugggccuacacugcccuccagggagg

SEQ ID NO: 4179416 - RNA, 62 nt, Human
ccuccucugcuguuuuguauacaggcuucuauggaggucugcuaugugaacuguagggaagg

SEQ ID NO: 4179417 - RNA, 58 nt, Human
ccuccugcagcuuucgcuccaucagcagcagcuggggagggagaggcgcagguguagg

SEQ ID NO: 4179418 - RNA, 67 nt, Human
ccuccugcccuugcauagaucuuggcaaugguugcuguuucagugccaauuuaguaaaggcaguggg

SEQ ID NO: 4179419 - RNA, 56 nt, Human
ccuccuggaggcuccaagggagaauccauuuccuggccuuucccagcuucuagagg

SEQ ID NO: 4179420 - RNA, 64 nt, Human
ccuccuguugucaccaggcguggaugcccgcaucaugaaauucaugccugggaaggcguggagg

SEQ ID NO: 4179421 - RNA, 68 nt, Human
ccuccuucaguuagaguuuacaaaguugugugguuuugauucauuaauggcuugcuuuaugaaggggg

SEQ ID NO: 4179422 - RNA, 66 nt, Human
ccuccuucauuauaaagucugggccaggcaugguggcucacaccuguaaucccagacuuugggagg

SEQ ID NO: 4179423 - RNA, 118 nt, Human
ccuccuuccuacugcuggggcaguaccaggacuacuguccauggugcuggacggucucaccacuguccauggugcuggacggucucacccuggucccccagacucaggcggucggagg

SEQ ID NO: 4179424 - RNA, 61 nt, Human
ccuccuucucuuuuugcagagcauguguauaguuucaagcucuguggaagaagaaagaagg

SEQ ID NO: 4179425 - RNA, 80 nt, Human
ccuccuuucagacaggugacuugcauuuucacacucucugagcugaguguauaugcagcuuauaguaauugggaaagagg

SEQ ID NO: 4179426 - RNA, 59 nt, Human
ccuccuuuccuguuuuccugagugaucccuccccacuggggaagagaagagaaaggagg

SEQ ID NO: 4179427 - RNA, 62 nt, Human
ccuccuuucuuuacuggagacagaagggagauauauucuuccacuccaaguuaagagggagg

SEQ ID NO: 4179428 - RNA, 57 nt, Human
ccagucauucauuuggagcuuugagcuuggugcuccagagugacaaaugacugaugg

SEQ ID NO: 4179429 - RNA, 64 nt, Human
ccagucuggcaggagggggaaccaugcuggagugugcaugggagguuuucacagccaggccugg

SEQ ID NO: 4179430 - RNA, 56 nt, Human
ccagucugugugccagccugcgagccugcccaggggaugggauggccaaagacugg

SEQ ID NO: 4179431 - RNA, 94 nt, Human
ccagugaacaaggcucccuggcucugcacccucaucagucaaaugggggaaaccucauggcaguggggugaggauucagugagaggcacacugg

SEQ ID NO: 4179432 - RNA, 71 nt, Human
ccagugacagccccaagguggccagcagggacuugacccugagcucaggcccuuggggaaaaugcugcugg

SEQ ID NO: 4179433 - RNA, 87 nt, Human
ccagugauggcuagaucuguguggccagugugucucuguggaagccagggugaccaggccaacagcuaaguuaaugccaaucucugg

SEQ ID NO: 4179434 - RNA, 65 nt, Human
ccagugcagccugucgccaguggauccguggaaauuauauguucucuggcaagggcuguccaugg

SEQ ID NO: 4179435 - RNA, 90 nt, Human
ccagugcaggggcuucuaagugcaguuaaguuuagauuugguuuuaaagaagggacagacugccucuggacugcagcccugaaaaacugg

SEQ ID NO: 4179436 - RNA, 56 nt, Human
ccagugcagucccccugaacuggcacaaauugggcccuggcuucagggugcacugg

SEQ ID NO: 4179437 - RNA, 55 nt, Human
ccagugcuucuuugcuagcuggcuucuguuuaguuugguuaguaagcaucacugg

SEQ ID NO: 4179438 - RNA, 55 nt, Human
ccaguggaaauguggucaggaucuuugugugguuuucuccauacccauucacugg

SEQ ID NO: 4179439 - RNA, 56 nt, Human
ccaguggcagaucaccaacuggaggcaggaagaaacucuuagggagcuguaacugg

SEQ ID NO: 4179440 - RNA, 65 nt, Human
ccaguggccaugcacgagcagcaacuucuugagaugcuuaaagcgggugauggcaaagucgcugg

SEQ ID NO: 4179441 - RNA, 104 nt, Human
ccaguggccuccuuuaaauugcauuuguaucauauguaucuuagagaauuguggaucuuuugguaaauaaaguauaggaaauggaaucugaagggacacgcugg

SEQ ID NO: 4179442 - RNA, 91 nt, Human
ccaguggguaggggcuccucucugagaguagagaccaccagaccacaagucuacuuccagggguggggcucaggucagcugcuagcacugg

SEQ ID NO: 4179443 - RNA, 77 nt, Human
ccagugguuugcagccuuccuugcagacaaccaggcucccugaggggccucugcccagggcagggcuugcaggcugg

SEQ ID NO: 4179444 - RNA, 90 nt, Human
ccaguguaaauguuuuccaguucuucuguaagcacuuuauucuaugaauuagugaacaguuuggaacacauggcagaaucuguacacugg

SEQ ID NO: 4179445 - RNA, 60 nt, Human
cccagaaggcuaagcguggauuucugguuaucagcuuccgugugucagcuuucggcuggg

SEQ ID NO: 4179446 - RNA, 88 nt, Human
cccagaaguuauuaaaggaugaggcuggacacuucuugaugaggucccuuaaucucuaagagaccuucaguauucacuucauaacggg

SEQ ID NO: 4179447 - RNA, 74 nt, Human
cccagacacagcuugcucugccaaauuugccaguucccccaggaaaugggaaguaggacagugcaguugauggg

SEQ ID NO: 4179448 - RNA, 59 nt, Human
cccagagaauuccacauagaggcaaugguaauugacuucuuuuugccaaguuuacuggg

SEQ ID NO: 4179449 - RNA, 68 nt, Human
cccagagccuuuguguccacauuucagaaugaaccaugagaagcaggacagagaggacucuaaauggg

SEQ ID NO: 4179450 - RNA, 73 nt, Human
cccagagcuggucaauguuuucaacuccaaaaagguauuccauuuugguagaaucaacaauguacguuuaggg

SEQ ID NO: 4179451 - RNA, 56 nt, Human
cccagaguucaaacccugcgucaagggagcacuguagauggagucugaggucuggg

SEQ ID NO: 4179452 - RNA, 73 nt, Human
cccagaucugaggcccugcaggcagugugggacagugcagugagccaugugccuuugggucagagggucuggg

SEQ ID NO: 4179453 - RNA, 61 nt, Human
cccagaugagaauaugauuuacuauugcuuuucugguaauauuaucauauguuuauguggg

SEQ ID NO: 4179454 - RNA, 63 nt, Human
cccagaugucaacuuuaagaucuacucugccugacacagcuguggucuucaaguugccuuggg

SEQ ID NO: 4179455 - RNA, 129 nt, Human
cccagaugucagaugaugagugugauuguuuuaguggcucagacaugcccugugagaguuauuaugacuguacagcagacaaacagaaacaggcugcugagccauuugcugggucauccuuguccuggg

SEQ ID NO: 4179456 - RNA, 72 nt, Human
cccagccaaugaacuucagugauuucuggccauaaggcccaauggugagacuuucucugaagucgggauggg

SEQ ID NO: 4179457 - RNA, 73 nt, Human
cccagcccaaagggcucugagugccggacacugagccgcuguccuggggacaagaggcccuugggaagaaggg

SEQ ID NO: 4179458 - RNA, 59 nt, Human
cccagcccuuccuucuguuuauacauggugcaaaugacuaauguaagggagaggcaggg

SEQ ID NO: 4179459 - RNA, 59 nt, Human
cccagccgccaguuccuucccugggccacuguguucuggucccugagagcuggggaggg

SEQ ID NO: 4179460 - RNA, 77 nt, Human
cccagccuaccucaucuucugggauaaucagguggggguacacaugaaugaccuuugaggauggaaauugguuuggg

SEQ ID NO: 4179461 - RNA, 64 nt, Human
cccagccuccuccagcucugagucacaaagacccagggcugacagugaggagucaagcaaaggg

SEQ ID NO: 4179462 - RNA, 88 nt, Human
cccagccucgcccagccagaguggcgacccccucagcugcagcccuggggcugugggggugucgcuuccugggagcggaccggcuggg

SEQ ID NO: 4179463 - RNA, 63 nt, Human
cccagccucuggguucugccggccaggcucguggccccguccucggcaccccagguuccuggg

SEQ ID NO: 4179464 - RNA, 97 nt, Human
cccagccuuuagucacugaaaugggagggaaguguacaguggcguuuuggcccagcugggcucuuuaccccuguacgguguuuacugaacagcuggg

SEQ ID NO: 4179465 - RNA, 122 nt, Human
cccagcuccugccuaggaaagccuuaguguugggagggacccugaugacugaggagccugguagcuccaggucgcccacacuuucaggucucuugcaccagaagguggcaggauccauuggg

SEQ ID NO: 4179466 - RNA, 129 nt, Human
cccagcucugccaugcucuuccugugacaccuuuggaaaauguuacaucucucuagagcucaguuugagcauucauugcuagaauguaauauagguuaggggcauagacuuuagagccagauagcuggg

SEQ ID NO: 4179467 - RNA, 85 nt, Human
cccagcuggcagaugcacagggcugugguagcugugggcagcccgguugccaaaugccaccacagcugcgucacugagagcuggg

SEQ ID NO: 4179468 - RNA, 72 nt, Human
cccagcuggccagcccuccucccuggguucuucccugggaggcgaaauggagaggggagggcugguccuggg

SEQ ID NO: 4179469 - RNA, 106 nt, Human
cccagcuugcccuggcggccccagcagcccuuguagugaccguggcgugugcauggacggcaugaguggcagugggcagugucugugccguucagguuuugcuggg

SEQ ID NO: 4179470 - RNA, 61 nt, Human
cccaggaaaaagagaaacaugguguccguuuucacauguaccauauacuuucuuuccuggg

SEQ ID NO: 4179471 - RNA, 61 nt, Human
cccaggaaagaaaguauaugguacaugugaaaacggacaccauguuucucuuuuuccuggg

SEQ ID NO: 4179472 - RNA, 55 nt, Human
cccaggaaagugaaucuaauuggcuagauucagccaauggagugcaucuccuggg

SEQ ID NO: 4179473 - RNA, 66 nt, Human
cccaggaacgccugguguuggccuggcuaaacucuuggacgaaaaggucugcacaggcuccgaggg

SEQ ID NO: 4179474 - RNA, 130 nt, Human
cccaggacagcaccugccugcccaggauguuacugcccuucccaguggacccuagacuugcugcuggaaucuagcuggagaguuuccaggaaggagggugcucugcaagcaggcucaggcauggacuugg

SEQ ID NO: 4179475 - RNA, 103 nt, Human
cccaggacgguguuuuaggguuaccagucuuguugccaugucugugccccugugcagcgcugugggaacagggcuaugucuggucaccccagcaucccuaggg

SEQ ID NO: 4179476 - RNA, 65 nt, Human
cccaggagaaggcgugccuuccuauuccugcuacacugagagguuggcugagggcagccccuggg

SEQ ID NO: 4179477 - RNA, 55 nt, Human
cccaggagaugcacuccauuggcugaaucuagccaauuagauucacuuuccuggg

SEQ ID NO: 4179478 - RNA, 56 nt, Human
cccaggaggcagagguugcagugagccaagaucacgccacuucacuccugccuggg

SEQ ID NO: 4179479 - RNA, 76 nt, Human
cccaggaucauacauuacaggaaagauaaagaugaacaacaaauaucuugguuucugcugauuguaauuuucuggg

SEQ ID NO: 4179480 - RNA, 64 nt, Human
cccaggaucugcccaggccuuuggaggccagaccucccugauggcacaguggcaggcaucuggg

SEQ ID NO: 4179481 - RNA, 97 nt, Human
cccaggaugaggacccagcuauaucuuccugcaacaccuguguugccaguuuauuggcagccucugcaguucaggaggaccuagcuugucccuuggg

SEQ ID NO: 4179482 - RNA, 88 nt, Human
cccaggauuuuauugcugguaaacuugguuaucuaccuuccggucacgugguccaggaugguggcaugaucagaacuagguccugugg

SEQ ID NO: 4179483 - RNA, 61 nt, Human
cccaggcacucuuggucauuuuccugccauggaaucuuccgaccaaugagugaagccuggg

SEQ ID NO: 4179484 - RNA, 60 nt, Human
cccaggcaggcgauggugcaguggcaccaucucagcucacugcaaucucugccuccuggg

SEQ ID NO: 4179485 - RNA, 123 nt, Human
cccaggccaaugaaaaaauccagcuuuguauuccccauucacccucaagcccaaucaaacugaaucgagauguggcaggugugagcuguaaaggaacagacccuggugcccagcuggucuggg

SEQ ID NO: 4179486 - RNA, 65 nt, Human
cccaggccuugacauaaugaaggagcuuaauaaauagacaagagccaaguugucaaggcacuggg

SEQ ID NO: 4179487 - RNA, 77 nt, Human
cccaggcgaccucaaggcaguucacucacgcagccagcccucagagacgugggcugcgugucugcugcccgccuggg

SEQ ID NO: 4179488 - RNA, 56 nt, Human
cccaggcuagagugcaguggcgcgaucuugauucacugcaagcucugccuuccggg

SEQ ID NO: 4179489 - RNA, 56 nt, Human
cccaggcugaugggaugggccaucccacugcuggugguccugguggucaggcuggg

SEQ ID NO: 4179490 - RNA, 55 nt, Human
cccaggcuggagugcaauggugcgaucucggcucgcugcaaccuccgcgucuggg

SEQ ID NO: 4179491 - RNA, 56 nt, Human
cccaggcuggagugcaguggcacgaucucgccucacugcaagcucugccuuccggg

SEQ ID NO: 4179492 - RNA, 56 nt, Human
cccaggcuggagugcaguggcauggucucgguucacugcaaccuccaccucccggg

SEQ ID NO: 4179493 - RNA, 57 nt, Human
ccauccucccugcucccuaccugggccagcugucagagucaggaugcaaggggaugg

SEQ ID NO: 4179494 - RNA, 128 nt, Human
ccauccugagagagcugaguucaggcggagacagaccgcaagcucaaagcugaagcaggaaaggaugcgaauggcucugggaaugggaagaugcucugugugguggcauucggagguucucaggaggg

SEQ ID NO: 4179495 - RNA, 97 nt, Human
ccauccugaggggacggaaaugguuucaccugaaggaggccagcuuuuuaacuggccuuuuucccuggagggacagccagccaguccaggagggugg

SEQ ID NO: 4179496 - RNA, 65 nt, Human
ccauccuuagguggugcaucagggcauuuaugucccauaugcacugauguguccccaaagccugg

SEQ ID NO: 4179497 - RNA, 81 nt, Human
ccaucgaaggcuuuaggcaggugaaugauggacuaggauuguauuuuaggaagauuauucacaugagaagcugaacaaugg

SEQ ID NO: 4179498 - RNA, 62 nt, Human
ccaucucaucagaucuguauaagcagcuauaauuuaagccaggccagaguuaugaugagagg

SEQ ID NO: 4179499 - RNA, 129 nt, Human
ccaucuccaacaaugugcccaccugaccaccaaccaguucugcccccagcuccucagcccugccuugggugcuuugacccaggagguggaggggccagaggugucagcacauagugaccuagaagagag

SEQ ID NO: 4179500 - RNA, 68 nt, Human
ccaucuccaguuuauucuuccuuagcauuuggggcuccuucccccucaggacgggucccugggagugg

SEQ ID NO: 4179501 - RNA, 65 nt, Human
ccaucugcuggcccugggcuggaugagcgagcaggaagcagcagccagcucugggcaggucgagg

SEQ ID NO: 4179502 - RNA, 73 nt, Human
ccaucugcuuggcagaaaaggucggggguuugcaaagggaguagccucugguccuuuuuucccuuaggcgugg

SEQ ID NO: 4179503 - RNA, 78 nt, Human
ccaucugugggcuucaacacagucaguuccuggaucaacaaacauuuauucagcaccugcuguguuccaggcauaugg

SEQ ID NO: 4179504 - RNA, 76 nt, Human
ccaucuucccccaaaucaagagaccucuaugcaccaguuaaauaaaauuuggauucucucauuggggugaaggagg

SEQ ID NO: 4179505 - RNA, 64 nt, Human
ccaucuugcuggguuuuaucauaucaggguuguuaagauacaguauauaaagcccucaggaugg

SEQ ID NO: 4179506 - RNA, 61 nt, Human
ccaucuugugccuuuuaggagaaagggaccauuucccagguccugcaggaggccugagagg

SEQ ID NO: 4179507 - RNA, 55 nt, Human
ccaugaaaaaacaugcccuggguagcugcaguuccaggaugaugauaauucaugg

SEQ ID NO: 4179508 - RNA, 65 nt, Human
ccaugaacugcaguauaaacuugggcccagggagacuggcuccgauuuauucugacaguuuaugg

SEQ ID NO: 4179509 - RNA, 62 nt, Human
ccaugaagaauaggagaaaaguucuguaaaugaggacagaaauaacuuuuuauguuuuaugg

SEQ ID NO: 4179510 - RNA, 99 nt, Human
ccaugaauagcuguugaauggaugagugaaggagugaauguuuagucuuucccuaggcucugccaauuccuuccucuccacccacucaccucccaaagg

SEQ ID NO: 4179511 - RNA, 56 nt, Human
ccaugaauccuggcacuuaggaggaggauuagcaccucugguccaggucuucaugg

SEQ ID NO: 4179512 - RNA, 89 nt, Human
ccaugaggguaaguaccguuaaucccauaauauggaugaggaaacugauucauuuagagggauuaagcaauuugcccaauaccacaugg

SEQ ID NO: 4179513 - RNA, 79 nt, Human
ccaugaucagaugguggcaagagccaagucuucucacauaaagagaaaucacauugaaucugcuaccuacgaccacugg

SEQ ID NO: 4179514 - RNA, 65 nt, Human
ccaugauggaagggacagaagggcaagagaacucucucucuucaaccuugagcccuuuuauaagg

SEQ ID NO: 4179515 - RNA, 87 nt, Human
ccaugauuuuaaaaaugagggagcuuagggaaugaggaaagaccaaaacuauagucuaagcccuucauuuauaguuggaaucugagg

SEQ ID NO: 4179516 - RNA, 60 nt, Human
ccaugcagggugcuaacacugugacaucauuaacugauaucauuucagcucucugccugg

SEQ ID NO: 4179517 - RNA, 94 nt, Human
ccaugccuaucagguccaccauuauaucucccaugccuaacauagggccuggcauguggcuauauaauguugaaagaaaugaccuacuggaugg

SEQ ID NO: 4179518 - RNA, 63 nt, Human
ccaugccugcucugacauccaucccagaccaaagagucuaggggcuggcagaggcagcugugg

SEQ ID NO: 4179519 - RNA, 62 nt, Human
ccugagcuccccuagugcuuaugggauaccgaaaaaccuuucagcaaggcuggagcuuaugg

SEQ ID NO: 4179520 - RNA, 72 nt, Human
ccugagcugcagacaggcaggugcugcuuugcugucacuggugcaggcagcucgaugccuuguugaggcugg

SEQ ID NO: 4179521 - RNA, 76 nt, Human
ccugagcuuggucuauaggagagauuguaaugggugaagaaauaugucacaaugcucccuguagucaggauucagg

SEQ ID NO: 4179522 - RNA, 66 nt, Human
ccugaggaagaaggaaugaugauaaauauuuccacuggguaucauuauccuccuauuugccucggg

SEQ ID NO: 4179523 - RNA, 61 nt, Human
ccugaggcaugguccugagggagcucagccaaaaggggcuuagaaguacacaugccuuugg

SEQ ID NO: 4179524 - RNA, 73 nt, Human
ccugaggguaauuaagaaaaugucagaugucauugaugaaccauuugccauuaucuuaaggaaaucaugcagg

SEQ ID NO: 4179525 - RNA, 80 nt, Human
ccugaggucaugguccaguguuacugaagacugugguuaauguggagggagaggcagucacacuggugccugaugucagg

SEQ ID NO: 4179526 - RNA, 65 nt, Human
ccugagguuucucccccaguacccugggucaccucagcccagagcuggcggugagaagacaaugg

SEQ ID NO: 4179527 - RNA, 64 nt, Human
ccugagugcaagaugacgguggcagacacguacaaagacuuccccaccaggucuucugcucggg

SEQ ID NO: 4179528 - RNA, 75 nt, Human
ccugagugcauagauguucaaucagauauuugguggauaauugacuaaguaacaugggaacaucugaacaauagg

SEQ ID NO: 4179529 - RNA, 67 nt, Human
ccugaguggugcuaagcagauaacucgugguuauuccaagauagcaucugaguggagccacuucagg

SEQ ID NO: 4179530 - RNA, 57 nt, Human
ccugauaaacccuggaauuuguggccauaaucuaacccagaguuuaggucuaucagg

SEQ ID NO: 4179531 - RNA, 57 nt, Human
ccugauaacacagauacaagauggauacaaaugcuaucagcaaucucguguauuagg

SEQ ID NO: 4179532 - RNA, 95 nt, Human
ccugauacacauuuuucuggauuuuagauuuaagaauaagguauuugcacaaguauuuauuuccuuucugauaaguaaucuggagagauaccagg

SEQ ID NO: 4179533 - RNA, 72 nt, Human
ccugaucaaaacauuacuccaccaaucccaccaggucuuccagggcuguggggagaaaugucuuuguuccgg

SEQ ID NO: 4179534 - RNA, 58 nt, Human
ccugauggcuuugccugcugugaggcugcaucccucuggaccugcauggccaucuugg

SEQ ID NO: 4179535 - RNA, 66 nt, Human
ccugaugggcagcacagcuggccaauccugggacucagaggguaggucggcuggcugaccacuagg

SEQ ID NO: 4179536 - RNA, 57 nt, Human
ccugauguccauaauccuguaagcauuacaaugucauaguauuuuugggcuauuagg

SEQ ID NO: 4179537 - RNA, 59 nt, Human
ccugauguuaucuuuaugagugucuguacuugugggacaaucauacaaaacaugucagg

SEQ ID NO: 4179538 - RNA, 60 nt, Human
ccugauuagggucuuucaaaugcuaaccagccaccucuagaauguggauuccugauuagg

SEQ ID NO: 4179539 - RNA, 69 nt, Human
ccugauucauguagcuuagcagagaggcuggccugcagccucugugcaggaaauacaugugaauaaagg

SEQ ID NO: 4179540 - RNA, 80 nt, Human
ccugauuuaauucugaagugcuaauccugugcuuguggagacaugggcugagguaguagggcacugaagcuggaauuggg

SEQ ID NO: 4179541 - RNA, 70 nt, Human
ccugauuuagguagcugucuaaguguagcaugcugaaaugaacacuaaauacaguugcuguagacuuagg

SEQ ID NO: 4179542 - RNA, 72 nt, Human
ccugcaaaugacucugagauuggagguaccacaaucuauguuuuaucagcaacucagagcagucucuguagg

SEQ ID NO: 4179543 - RNA, 78 nt, Human
ccugcaacaugaaccagcgccaaguguguggaggaggcuuacacccugcucaacgaauauggcgaugacauguauggg

SEQ ID NO: 4179544 - RNA, 64 nt, Human
ccugcaauaaagaggauguauuuacagcaugagagcagagcuggugccuguuucuuuucgcagg

SEQ ID NO: 4179545 - RNA, 116 nt, Human
ccugcaaugaaccaugccuccugguauucaugcccaaauauagcuuccuccuuucaaaucuggacuggccaugggauuuauauuugguugauagaauacuguggaagugaugcagg

SEQ ID NO: 4179546 - RNA, 100 nt, Human
ccugcaauuacagauagaguuuuucucauaaacuguuuaauuguuugcuucuggaaacaauuagacugacgguauuauagagggagugucguauugcagg

SEQ ID NO: 4179547 - RNA, 56 nt, Human
ccugcacagauggacagguguuauauuauagauggcacugaaugccaaaguguagg

SEQ ID NO: 4179548 - RNA, 104 nt, Human
ccugcacagggugacucaccgccccgcuugccaggacuaaagcguccccaggauguugggaaggccgcaggcacaccuggaugugguggucaccugagcccagg

SEQ ID NO: 4179549 - RNA, 57 nt, Human
ccugcacagguugggacagguaagaucccuggaucugucuuuagaggccugugcugg

SEQ ID NO: 4179550 - RNA, 80 nt, Human
ccugcaccacaaggcuucagagcuugggagcugugaguccuuccauugcucugaaccaguuugcucuuguaggaagcagg

SEQ ID NO: 4179551 - RNA, 58 nt, Human
ccugcacccaggccgcaccucuguguaucagccgguccaugugugggugggugucugg

SEQ ID NO: 4179552 - RNA, 74 nt, Human
ccugcacuucuuucucuguguuauucauaagauaugagagucuugagucugagaugaugggauaagagggcagg

SEQ ID NO: 4179553 - RNA, 64 nt, Human
ccugcagacacuuguccagcaaguggccacuccaggauuuggaccaaggugaugugucuucagg

SEQ ID NO: 4179554 - RNA, 62 nt, Human
ccugcagacggcuggcagugagcggcuccaugacccgccgcacguccaggcugagcugccgg

SEQ ID NO: 4179555 - RNA, 72 nt, Human
ccugcagccccggggccagggcugagcggcuggagcaguucaguggggccuugggggacaacaccaggcagg

SEQ ID NO: 4179556 - RNA, 68 nt, Human
ccugcagccccuugggguccagcugccucugcaggaggcucuccaucagcugcuccagggagcucagg

SEQ ID NO: 4179557 - RNA, 71 nt, Human
ccugcagccuaggggcuguccccagcgagcaaggcgagcaaggccccgcuguggccaccccuagcuggagg

SEQ ID NO: 4179558 - RNA, 85 nt, Human
ccugcagcucuuggucuucagagaucugguggugaccaggccuucuguguccuccuccgaaucacugauaaccuuggugugcagg

SEQ ID NO: 4179559 - RNA, 55 nt, Human
ccugcagguaaggcuaacugccacaagguuggugguggggguuaggaccuauagg

SEQ ID NO: 4179560 - RNA, 62 nt, Human
ccugcauguugucucuaccuauguggagcucucucaguucucccagagugugggcaucaagg

SEQ ID NO: 4179561 - RNA, 122 nt, Human
ccugcauugccacaacucucuccuagaacuguccccgcccugccacacccaccccaggucucucuccaggcucccaugguguggcaggacggcccagccucuaugagcugucacaggccagg

SEQ ID NO: 4179562 - RNA, 59 nt, Human
ccugccaaagccauaucucaguaagcaaaggaagugcuucuugaauuguuuugaguagg

SEQ ID NO: 4179563 - RNA, 62 nt, Human
ccugccaacuguagaugggaaccauaguuccuaaaauuaccuaccaguuuaguugcggcagg

SEQ ID NO: 4179564 - RNA, 57 nt, Human
ccugcccacugcccggucagccucguugcuauggggacuggugggcggugagggggg

SEQ ID NO: 4179565 - RNA, 57 nt, Human
ccugcccagggcuugguggacccgagggacacugugggcauggcaccucugggcagg

SEQ ID NO: 4179566 - RNA, 74 nt, Human
ccugcccaugccaggacucuggaggcuuagcuccucccuuuguaccaggcacguccagagcccuggcuaccagg

SEQ ID NO: 4179567 - RNA, 92 nt, Human
ccugccccagucuuggaaucagccauuuuuccaaggagcccuggcuccuuuuauuggagaauggcuuuagaaacugagaucugggugccagg

SEQ ID NO: 4179568 - RNA, 58 nt, Human
ccugccccauggucccuggugggucacacuucccaucauuaacacccuggaggccagg

SEQ ID NO: 4179569 - RNA, 79 nt, Human
ccugcccuccaggagcucacaaucuagugggaaagucagaaagguaacucaauagacugugagcuccuugagggcaagg

SEQ ID NO: 4179570 - RNA, 71 nt, Human
ccugcccuuauugagcuuagucuaguagauuaacagaucagacuagucugcauuacaaaauagguaccagg

SEQ ID NO: 4179571 - RNA, 94 nt, Human
ccugccgcaccagucuccuucccuucaaguguuccuuccuguggcccuggaaaaucccuucauggggacagugagggaugggguagugcucagg

SEQ ID NO: 4179572 - RNA, 77 nt, Human
ccugccguacccacugcugcacucugcuccuuuaugggcagcaaugcugguggcagcuguguugcaguuuuggcagg

SEQ ID NO: 4179573 - RNA, 85 nt, Human
ccugccuagaccccccacuguugccucaaauaucaaaccaauguugucuuguggggcagacgguggcagguuuggggucugcagg

SEQ ID NO: 4179574 - RNA, 66 nt, Human
ccugccuagggucugguaccacacugugaugggcagccuagcugugggcccagauucugaggcugg

SEQ ID NO: 4179575 - RNA, 57 nt, Human
ccugccuauguaagugguuucucagggagggcagagguucuguuuguggugggcagg

SEQ ID NO: 4179576 - RNA, 55 nt, Human
ccugccucccagagguccucuauacccuuggcacuagucuccugcugggaguagg

SEQ ID NO: 4179577 - RNA, 57 nt, Human
ccugccuucagcccugaagucuccugggagcaggaggaucagguuacuggggacagg

SEQ ID NO: 4179578 - RNA, 60 nt, Human
ccugccuucuaaagcgcccgccaggacaggcuccugguggguuguaaggagaacggcagg

SEQ ID NO: 4179579 - RNA, 87 nt, Human
ccugccuuggccucccaaagugcugggauuccaggcgugagccaccacgcccggucuccauaguuuuuaagagcgccguuaggcugg

SEQ ID NO: 4179580 - RNA, 63 nt, Human
ccugccuuucucaguaaucuuuuauuacuuugugaucccgaugaaaaugaugggcagggcagg

SEQ ID NO: 4179581 - RNA, 67 nt, Human
ccugcuauaucuuccugagcuauggauuuuugcaacuagucagaacuuuauuccagaagaaagcagg

SEQ ID NO: 4179582 - RNA, 58 nt, Human
ccugcucaauuccggcacgcuggcccucgcucagacggcacugcgccugauugguagg

SEQ ID NO: 4179583 - RNA, 60 nt, Human
ccugcuccaugcucaccaucaggcagcuggugguccuucuugaagagugagugcagcagg

SEQ ID NO: 4179584 - RNA, 78 nt, Human
ccugcucuaugggagagucuaaaaccgagguaccauguaagaaaaauaaugcuuugaagacuuuuccaggguaaaagg

SEQ ID NO: 4179585 - RNA, 103 nt, Human
ccugcucugcucugcucugcccuggcugagggaccucggguaagucauguuaccucucucuaccucaguuuccccagccauuaaauagagucagcaaaguagg

SEQ ID NO: 4179586 - RNA, 58 nt, Human
ccugcugagaagcuaagcaggaaagacuaaaggaugaggcaugcuuggcuucuuuagg

SEQ ID NO: 4179587 - RNA, 105 nt, Human
ccugcugagacugcugggccaccccagcgcauauggucugcggggcuuacuugauucccuuagcuucccagccaaggugcugguguugccagcagugcuggcagg

SEQ ID NO: 4179588 - RNA, 59 nt, Human
ccuggauggucccaugagcagcuggagucccuaaauccagcauccuaguggucuccagg

SEQ ID NO: 4179589 - RNA, 60 nt, Human
ccuggaugguggagaaguucacuggguugcccaggccagagcugguccacaaucugcagg

SEQ ID NO: 4179590 - RNA, 78 nt, Human
ccuggauuauucuuaaugcagggauuauccacaugugcagaugugugaguaaucccugcauuuaauaauaauccgugg

SEQ ID NO: 4179591 - RNA, 66 nt, Human
ccuggauucaagucuuucuuucuaggcaaacccuugacucacugggaagagaugcuaugauucagg

SEQ ID NO: 4179592 - RNA, 58 nt, Human
ccuggauucaugccaggccacccuccacaauuugcugagggaggccccagaguccagg

SEQ ID NO: 4179593 - RNA, 79 nt, Human
ccuggauuuccacagaaguuuugcucucuugggucccucuugggucuccugugcucugagugcaugcuuuugggccagg

SEQ ID NO: 4179594 - RNA, 68 nt, Human
ccuggcaagggaagcccuggcugagaccccccggcuaaggaaggguccucagcggcuccccagccagg

SEQ ID NO: 4179595 - RNA, 59 nt, Human
ccuggcacagggagacagccguggccugagugcccaggcugguucaucccugggucagg

SEQ ID NO: 4179596 - RNA, 67 nt, Human
ccuggcacaugcaguacucaaggauuugauagauaaaugaguaauuugcuugcauucuugugccagg

SEQ ID NO: 4179597 - RNA, 88 nt, Human
cccugcucugagcucuauaaagcugcgucuucagaguccccugguucugcuaaguccaagggcuccaagagguagcugggcagcaggg

SEQ ID NO: 4179598 - RNA, 83 nt, Human
cccugcuucuguggucuucugucucagcaggcugucaagucggagacugagugccugagcaggcguggaccaugaaggagagg

SEQ ID NO: 4179599 - RNA, 75 nt, Human
cccugcuugcccauggcaggauuucugaaggccacagucagccugggaaguuaggaugccagggaguuggcaugg

SEQ ID NO: 4179600 - RNA, 91 nt, Human
cccuggaaagccacaccaccuccucuccuggcaaaauguggugucgucuuaguccaggaagguggggcagaggauugaggacauucuaggg

SEQ ID NO: 4179601 - RNA, 94 nt, Human
cccuggacccuuauuuucuugagugauguuuaagacuacgcugaccagucuuaaagcaugguguaguuaauucuuuaagaacaaggaaccaggg

SEQ ID NO: 4179602 - RNA, 63 nt, Human
cccuggaggagcuuagagcuugggaugagauagauauggaccauuaaucugagcuucccaagg

SEQ ID NO: 4179603 - RNA, 65 nt, Human
cccuggaggcggcacgcgucaagaagugacacgaugugcugcuucuggcagugcagccaccaggg

SEQ ID NO: 4179604 - RNA, 76 nt, Human
cccuggaucugcucagauuacagccccacaucaauuggccuauaauuagaauggggugaaaucaggcagaaugggg

SEQ ID NO: 4179605 - RNA, 66 nt, Human
cccuggcaccuacucccugucaguguguggguaaguaauugcauguggcuuaguuaggugccccgg

SEQ ID NO: 4179606 - RNA, 60 nt, Human
cccuggcagcuggaaguucuaucuuuagucugaccugaaucucuccaguugcuuucaggg

SEQ ID NO: 4179607 - RNA, 90 nt, Human
cccuggcauaaauauguaacugagagguaaucacacaaaauauauaguuguauuuuuguguguuugcuuuuaaacauuguauuuucaggg

SEQ ID NO: 4179608 - RNA, 73 nt, Human
cccuggcugggauauuuggauuggaguacaugguuuacgugggcugcuucucaaaugucuccauuggucaggg

SEQ ID NO: 4179609 - RNA, 86 nt, Human
cccugggacucgugacucucuggccuguuggccugggcucugcuuuucagagcugaaguucaguccagagaagugaugguccaggg

SEQ ID NO: 4179610 - RNA, 61 nt, Human
cccugggauaggaagguuuccagcaauacuccuacugccugcugcaucaaucuacccaggg

SEQ ID NO: 4179611 - RNA, 58 nt, Human
cccugggcuguauuuuugcaauagacugaauuuggauguucauucugugcagcaaggg

SEQ ID NO: 4179612 - RNA, 57 nt, Human
cccuggggagcaggcgaaggaggagcugcagccaccacguccucucuuuccccaggg

SEQ ID NO: 4179613 - RNA, 80 nt, Human
cccuggggcgcccuuguaggggcuggcggcuaugagcgugugucucuucccugccucagcuguugcaggggccccugggg

SEQ ID NO: 4179614 - RNA, 79 nt, Human
cccuggguucuguccaggcgcccagcuauggcgcccggccggucagcaguaugguuagcgucuaugcaggugcccgggg

SEQ ID NO: 4179615 - RNA, 61 nt, Human
cccuggugccauagccuggccuccgaagcuccuauagggucccagucccugagcaccaggg

SEQ ID NO: 4179616 - RNA, 60 nt, Human
cccugucaaauuggcauuggauuauucuuauggcuagaagagucugucaauuuacagugg

SEQ ID NO: 4179617 - RNA, 59 nt, Human
cccugucccugcuccacguuccugggcagaaaugccucugggugggaggccgggcgggg

SEQ ID NO: 4179618 - RNA, 68 nt, Human
cccuguccgccuccuggcauuguccccauuucagaaugugggugcaggcagcccaggcaggagcgggg

SEQ ID NO: 4179619 - RNA, 56 nt, Human
cccugucucauugaucacuuguccugugccuaucucaggggaggcaacagacaggg

SEQ ID NO: 4179620 - RNA, 68 nt, Human
cccugucugcacggggaggaugggcuugccaggggucgggagcaccaguuucgucgugacaaccaggg

SEQ ID NO: 4179621 - RNA, 74 nt, Human
cccugugcuuuucuugcguuucugagagugggccuggccucuccuccucccacucuugaaucaagagcucaggg

SEQ ID NO: 4179622 - RNA, 58 nt, Human
cccuguggaggcagcauccugcauccauccagggaaagacagguggcgcucuacaggg

SEQ ID NO: 4179623 - RNA, 65 nt, Human
cccuguguaguuaacuuuccacccagugacuuguagaugucuucagugaaagauaacauaggggg

SEQ ID NO: 4179624 - RNA, 88 nt, Human
cccugugucugcaggcugagcgccugccgggaugaagugccagcccagcgccggcuuaugcggcucagugccugcaauuugcacaggg

SEQ ID NO: 4179625 - RNA, 69 nt, Human
cccuguucccagaaacuuucuuuacugagcauucuuuauguuggguagugaaagauucuacacacaggg

SEQ ID NO: 4179626 - RNA, 66 nt, Human
cccuguugccugugaacgcugaguccuccaccacaccaugaggucagcugcacugguguaauuggg

SEQ ID NO: 4179627 - RNA, 115 nt, Human
cccuguuuccuguccuuguucauugggcaguuuccauggaucucuaaauagcuugaggaccaaagguccuaagaagcaugggucccaagaauucgcugcaggauggggcacgggg

SEQ ID NO: 4179628 - RNA, 73 nt, Human
cccuguuugggaaggccuugccugacagcaccagucugaguggggaggcuggucugaaggacuucugaggggg

SEQ ID NO: 4179629 - RNA, 62 nt, Human
cccuuaaguuacacauuuucauuguaauguacaaugcuguauguugaugugcuacucaaggg

SEQ ID NO: 4179630 - RNA, 68 nt, Human
cccuuacacuguagaccccuggaagaaaagaggaggugggauuccuuucagggaagugugcagaaggg

SEQ ID NO: 4179631 - RNA, 73 nt, Human
cccuuagcaaacucuguuagauucugcucauucacuugacacuaucucccaccagaguaugaguuauugaggg

SEQ ID NO: 4179632 - RNA, 55 nt, Human
cccuuagccaggaaaucgaccucucuaagaggucagagaguuccguggcuaaggg

SEQ ID NO: 4179633 - RNA, 80 nt, Human
cccuuagcuccaagggguuugggaucacugcguuuuacagcaacaaucuucaaccuuuuggucacucuuucagcuaaggg

SEQ ID NO: 4179634 - RNA, 71 nt, Human
cccuucacacagguagaagcagaggcucaucauaagccucaccucuuucugucuagcugagugauucaggg

SEQ ID NO: 4179635 - RNA, 64 nt, Human
cccuucauaccuaugauuuuuaauaucccaccaucaaaaaugaacaucuuuggguccugaaggg

SEQ ID NO: 4179636 - RNA, 60 nt, Human
cccuucauguagcuguguguccaaggggacagagacuuuggaauagcuuaaagugagggg

SEQ ID NO: 4179637 - RNA, 73 nt, Human
cccuuccagugucugaaccugcagugggagcacuggugcuggcccugcugggucagagcugaagagggaaggg

SEQ ID NO: 4179638 - RNA, 60 nt, Human
cccuuccccuuauaagucuggcuucuacuugaguuuggagugaauaaguagggggaaagg

SEQ ID NO: 4179639 - RNA, 81 nt, Human
cccuuccuggcgcaaggcuggucaccuccuucccagcuacugucuugucuuuggggcugagguugaaccugccaggaaggg

SEQ ID NO: 4179640 - RNA, 63 nt, Human
cccuuccugugagacagauugaccaucaggacucaguaaaugugucuguggcaccugggaggg

SEQ ID NO: 4179641 - RNA, 70 nt, Human
cccuucucauucugggccucccagucugugaaaugugggagcuggcucaagagguccagaggagcagggg

SEQ ID NO: 4179642 - RNA, 88 nt, Human
cccuugaacuuccugccugccugcuuucugcuuugcagcguugugccugcaccaaagccuggaggugugucagggaggcucgcagggg

SEQ ID NO: 4179643 - RNA, 56 nt, Human
cccuugagcaucuguggauuuguggaccaacagucagaaggaagaugcuuaaaggg

SEQ ID NO: 4179644 - RNA, 70 nt, Human
cccuugcuuuuuccaugccuagaacaggauucucagcccagagaaccagaggaaauggaaaaggggaggg

SEQ ID NO: 4179645 - RNA, 66 nt, Human
cccuugugcucccucccgucuggccagcaccaggcccacuggucagauguaaauggagacgcuggg

SEQ ID NO: 4179646 - RNA, 67 nt, Human
cccuuguuuuauucaauuuccaguagggaagcccugggagggagggaaguuuggaagaaagcaaggg

SEQ ID NO: 4179647 - RNA, 63 nt, Human
cccuuuaauuccaacacaggaaaggucugucacucccagucacuguggaagggaacuagaggg

SEQ ID NO: 4179648 - RNA, 64 nt, Human
cccuuuaucccccacgucugugaggcucaaugaugcaggcaggacaggcucuggggaugcuggg

SEQ ID NO: 4179649 - RNA, 71 nt, Human
cccuuucauuccauccugucccccaggugggaccccacgcccugagguggaacagaggugaagaggaaggg

SEQ ID NO: 4179650 - RNA, 91 nt, Human
cccuuuccccuuuucuucccaucacuagcaucugcaccacucaccagugagggcagcgagccagguagguggccggaggaguggggagggg

SEQ ID NO: 4179651 - RNA, 79 nt, Human
cccuuuccuuaucagguccucugggucccagccccugacccagggagcgggaccgaacaggaaaaagaggaggaagggg

SEQ ID NO: 4179652 - RNA, 55 nt, Human
cccuuucugaaggaagugcaguuuccuucgggcacugucaccugcucagagaggg

SEQ ID NO: 4179653 - RNA, 77 nt, Human
cccuuugccuugucugucccacagcuucccgagaacuauagaaauuucaaggaacagcagggaugacauggccaggg

SEQ ID NO: 4179654 - RNA, 73 nt, Human
cccuuuuuaccuuuuauggauaauaggcaagcuaucuucuaugagccuggguuucaucauugguaaaaagugg

SEQ ID NO: 4179655 - RNA, 58 nt, Human
ccgaagaaagggcuauuguucuccaggauccccuggcucuuaaccguuuuuucagcgg

SEQ ID NO: 4179656 - RNA, 62 nt, Human
ccugcugaggccagaguuuuuaauuccuauuucauuggugaagaaacuuagguucagagagg

SEQ ID NO: 4179657 - RNA, 72 nt, Human
ccugcugaggggcugcccugcucucugcucacugagugcuaagugcagagcauuucgguugcuuccagcagg

SEQ ID NO: 4179658 - RNA, 62 nt, Human
ccugcugcaggggcuggaguuggcuuccuggaagcccauucggcugcccugcacacaucagg

SEQ ID NO: 4179659 - RNA, 55 nt, Human
ccugcuggacagggguguucaucagcugacgcggggaugcuugugaccaggcggg

SEQ ID NO: 4179660 - RNA, 88 nt, Human
ccugcuggcccucuguaaugauucacugaaugaugaaauguccaucaguccucagguucugaaucuugugccuggagaaccagagagg

SEQ ID NO: 4179661 - RNA, 59 nt, Human
ccugcuggcgcuugucugggagaggcaggaucuccgagagguguggaagggccggcggg

SEQ ID NO: 4179662 - RNA, 56 nt, Human
ccugcuggcguggcuggcgcccacguuggcguccucugaaagccccgccagguagg

SEQ ID NO: 4179663 - RNA, 98 nt, Human
ccugcuguggucuuggugcuggaggaagcgccuuccuccucuuuguucggcaugagagaugaagggcauuccccaggccagagcaucccauagacugg

SEQ ID NO: 4179664 - RNA, 62 nt, Human
ccugcuugaggggauauuugugucugucccucauaccggccacacaaaccuccucagccugg

SEQ ID NO: 4179665 - RNA, 76 nt, Human
ccuggaaaauaggaaauaauucacucuggcuugaaaaggguggagauuucuuuguuucuuuuuauauuuauucagg

SEQ ID NO: 4179666 - RNA, 72 nt, Human
ccuggaaagugggaauuucagugcuaaaaccaggacaaguuggucccuccaaagugauucccauuuuccagg

SEQ ID NO: 4179667 - RNA, 57 nt, Human
ccuggaacauaguguuaggucgaacuguuauuauucugcugguaacuauguuucagg

SEQ ID NO: 4179668 - RNA, 71 nt, Human
ccuggaacccaggccuggaagccugugagcauugugucauguggugggcagagccugggccugggucgggg

SEQ ID NO: 4179669 - RNA, 88 nt, Human
ccuggaacugagcuggggucagcuccccugucaaagggucgaagcuguaaaauguagggcgaguauuuaaugaccugagcucagcagg

SEQ ID NO: 4179670 - RNA, 72 nt, Human
ccuggaagcggcagauugggguugcaacugaccuggcuuuggcuacccuagaccccaucuggcugccccagg

SEQ ID NO: 4179671 - RNA, 63 nt, Human
ccuggaaggcaggcauggauuggcuaaguuuaggucauauuguccacccccugcuuuacuagg

SEQ ID NO: 4179672 - RNA, 58 nt, Human
ccuggaauagucuguucucuucugucuuuguugucaguggcuggacagacuuuccugg

SEQ ID NO: 4179673 - RNA, 75 nt, Human
ccuggaauuuacuccagaacauuauaucucaauucuauguuaauggaaaggcuugguauuuuggaguuggccagg

SEQ ID NO: 4179674 - RNA, 76 nt, Human
ccuggacaguugucuacuuuuuaaucuuggcagacaggugaucaccccuagccagauuuaaagagagacuaccagg

SEQ ID NO: 4179675 - RNA, 55 nt, Human
ccccacaacucauguugaaacuuaauuuccaauguggcaauacugagaggugggg

SEQ ID NO: 4179676 - RNA, 60 nt, Human
ccccacaggccaaagaucccauugacacguaaguaguuagcacucggucugcucuggggg

SEQ ID NO: 4179677 - RNA, 129 nt, Human
ccccacauaguaagaaaaugcugauuguugauuuugaagagauuaaguugguuuugaauuaccaaaauuuauuuaaaacacauaaacucucuauuugaguacaaagucauuuuuuuuuauucuaagggg

SEQ ID NO: 4179678 - RNA, 84 nt, Human
ccccaccaccuguccccagcacaugccccaggaaucacucugggaagcugcgugccuguuccaggggagaggcaggccgugggg

SEQ ID NO: 4179679 - RNA, 67 nt, Human
ccccacccaccuaagagaaacuaaaaucuauuccuuugcaagggacaguuccucagguggggugagg

SEQ ID NO: 4179680 - RNA, 88 nt, Human
ccccaccccgccuccacgccccggcucugagacuuccugccuccccggcuccgggcagcucuggcugugggaagcuggcggggcgggg

SEQ ID NO: 4179681 - RNA, 75 nt, Human
ccccacccugugccaauacagcguaucagagguauguucucugggcugucuacagguuggcuugggguccugggg

SEQ ID NO: 4179682 - RNA, 57 nt, Human
ccccacucugggaucuugaaaagaguggaaugaaaguacuauucucagagcuguggg

SEQ ID NO: 4179683 - RNA, 63 nt, Human
ccccagacaggcugcaguguuccuaucugaccgaauaaguggaacucuggggcucauuagggg

SEQ ID NO: 4179684 - RNA, 91 nt, Human
ccccagcaagguuucucaccgugggaguggugggugcucagggauggcucugcagggcugagacuguaccacuuccuccaaccucgugggg

SEQ ID NO: 4179685 - RNA, 68 nt, Human
ccccagcacugcccaggaccugccaccccgaguguugcauggguggcuccuaugggcauagccagggg

SEQ ID NO: 4179686 - RNA, 123 nt, Human
ccccagcccgcgcaggugagccuugcugucuaccucuuccuccuccaucucgaaggcugaguggucuuggcugucgaaacaggaggcgcugaggaagacagggggagccggcggggacugggg

SEQ ID NO: 4179687 - RNA, 127 nt, Human
ccccagccugcuuccugccugauggcucagguguccccaugcuggucaugcuggcucaggcugcaggagcaagccugggagacuucccugccucugccacuuuguguggguaauugugcuuuagggg

SEQ ID NO: 4179688 - RNA, 63 nt, Human
ccccagcucccaaguugcuaugggacauaaaaugaaauaugaaccaggggaugggaacugggg

SEQ ID NO: 4179689 - RNA, 59 nt, Human
ccccaggaagccucagauuugccauguuagagucuguguggccaucugguuucgugggg

SEQ ID NO: 4179690 - RNA, 96 nt, Human
ccccaggccggggugggguaggagucagcgagagaguccagcgcuccaaaggggacuuucuggcccuccgugcccccuaacccagcacuucugggg

SEQ ID NO: 4179691 - RNA, 59 nt, Human
ccccaguccugcuggccuucccuggccccaugugccggcucaggggaccucaggagggg

SEQ ID NO: 4179692 - RNA, 93 nt, Human
ccccaguggcugggacagaagcugcucacaggucuguggcuauugauggucagagccagagaccugcugugcucauucugggacguggugggg

SEQ ID NO: 4179693 - RNA, 120 nt, Human
ccccaguggguguccaggggguggcucugagaugagguagcuuggcccaggggcugguggccucccccuggggcuagagacugcaaggccaggcccccuggacugcuuuagacacugggg

SEQ ID NO: 4179694 - RNA, 58 nt, Human
ccccagugguugcaacagcagaggcuuauugcuugcugugcugugugucuacuguggg

SEQ ID NO: 4179695 - RNA, 69 nt, Human
ccccaucuucccaggaggcucuugucccuggugccaccggugugcaccaugccucucugggcgugcggg

SEQ ID NO: 4179696 - RNA, 73 nt, Human
ccccaugaaguagggucucugauucuuguccccuccccgcuaguucauagagucagauaccagacucaagggg

SEQ ID NO: 4179697 - RNA, 74 nt, Human
ccccauuguggauuaguguuguggcuucauggcccuaauaggggugugucugccaggaacugcacugcaugggg

SEQ ID NO: 4179698 - RNA, 56 nt, Human
cccccacaggugucugaggcaggggauugucuccuuuauccacuguaccugggggg

SEQ ID NO: 4179699 - RNA, 112 nt, Human
cccccacuucaguuccuggcacagagcugggugcccccuggagggugccaaauagauuccucuaaacuccuuuacccagaccuuuuggccaagagcaagacaggaguguagg

SEQ ID NO: 4179700 - RNA, 62 nt, Human
cccccagggagaaaucuccaggagguuuggcaagaucucuaguuuaagauuucuccuggggg

SEQ ID NO: 4179701 - RNA, 67 nt, Human
ccccccagcaggaauacaggggucgacccucgaauuaaaguugaccugcuccuaaucuggggcuugg

SEQ ID NO: 4179702 - RNA, 123 nt, Human
ccccccuucacugucuuuauaaaauuuauauucuaguuguaagagacagauauaaagcaaaauaagcaaaauauguuuuauacugaaaugugcaaugaauggaaauaaagcaggagggguggg

SEQ ID NO: 4179703 - RNA, 72 nt, Human
cccccgauaucacugauguguaauuccgaagacccugagaccagggccugggcccacaaguggaaucguagg

SEQ ID NO: 4179704 - RNA, 55 nt, Human
cccccgggaagcucucguggcugggccucuucuccagcagagccuuccaggaggg

SEQ ID NO: 4179705 - RNA, 95 nt, Human
cccccucucagggaugaucugguccuaaccucuugggucauuuuggugaaaugagaguucauuccugcagaggucaggccagaaaagagaggggg

SEQ ID NO: 4179706 - RNA, 72 nt, Human
cccccugcuccaguagccccaugugguucgguccacaacugggccucuuccauuggcucugaagucaggggg

SEQ ID NO: 4179707 - RNA, 81 nt, Human
cccccuuuccccagaggcugaguugggagcauguuaggaacacuagcuaguugcuccugaacacagcccuaugaaauaggg

SEQ ID NO: 4179708 - RNA, 58 nt, Human
ccccgcaggugucggcagaugggguagcgaaugguccugugccuccaccugcuccggg

SEQ ID NO: 4179709 - RNA, 87 nt, Human
ccccgcgcccccggucuguuuggggucugcagagcggcgccaggguaaagcgcagaccuguugauccuagguucuggcgggucgggg

SEQ ID NO: 4179710 - RNA, 60 nt, Human
ccccgcucugcgcgggaggucgaggcaccccgcucacgcccuccugcccgcaagcuaggg

SEQ ID NO: 4179711 - RNA, 82 nt, Human
ccccggaugggagaaguugggaaagggguaggagucaugcaguccugaguucaaaucccagcucagccucucacaugcgggg

SEQ ID NO: 4179712 - RNA, 57 nt, Human
ccccggccucgccccucuugggggccuucaaggaacuggacagggagggcgcugggg

SEQ ID NO: 4179713 - RNA, 93 nt, Human
ccccggggcagcuccagguuucacuacaauuaaguuggcuuaugauacauucaagccacagcacauuguaagaaaguggaucauugaccgggg

SEQ ID NO: 4179714 - RNA, 66 nt, Human
ccccgugcuccccuagcccguugggagguggacagugagacaucuucccaggcuggggagaggagg

SEQ ID NO: 4179715 - RNA, 55 nt, Human
ccccguuucucaucccuaggaucucaguugaggauucaggacaggaaaaacaggg

SEQ ID NO: 4179716 - RNA, 89 nt, Human
ccccuagaauucggauggggaaacugaggcuggggggcuucucaaggucacagaguaaguucaaggaagccuccaguuuccccaggggg

SEQ ID NO: 4179717 - RNA, 76 nt, Human
ccccuaggcugcugcuaccacccugaaagugccagccugucugcagggaggccccgcagcccucaagccccagggg

SEQ ID NO: 4179718 - RNA, 85 nt, Human
ccccuauggagccagcccccuaaguccccuaucuucccaggucuuccucugucccuucuggaggcugcuggucuuucauaguggg

SEQ ID NO: 4179719 - RNA, 129 nt, Human
ccccucauucuguguugaacccaaacaugccuagaauauuuagaguaucccugauuuagcugcuggguaauuugaggauaguuggguacucugggaugaaaaggcuugauacaauaugggaaaaaaagg

SEQ ID NO: 4179720 - RNA, 89 nt, Human
ccuguccugcugcaccccugccccacaggcuugguagggccaaggcccucagccgcccugccggggccccugguguagggcgggguggg

SEQ ID NO: 4179721 - RNA, 94 nt, Human
ccuguccugugacaaagcaugcuggucagccaguggaugcccccaucgguuccaugccaguggcugcaccgggaccccugcuugcaggcacagg

SEQ ID NO: 4179722 - RNA, 84 nt, Human
ccugucggacgagggccagcugcagcgagacauagaggaugaccugggggucacugggcgccagcugcugagcccugugugggg

SEQ ID NO: 4179723 - RNA, 57 nt, Human
ccugucuauuuccauugcauuuuaauccauaaugaauguagaauggugauuggcagg

SEQ ID NO: 4179724 - RNA, 73 nt, Human
ccugucucaguaagaaaggcuccuguucuagauguuggggucugaguuuacauuuuugcuuggauguaaaagg

SEQ ID NO: 4179725 - RNA, 115 nt, Human
ccugucugacugauuccuccuccagugcuuucuccauuucuccuuuuacucucuucagugcugccgaaguuuaagguggaagugguggaacccaaggaguuaucaacggugcagg

SEQ ID NO: 4179726 - RNA, 81 nt, Human
ccugucugcucaagccagguuccauggaggagcagaacuucauccugcucugcauuuagggccugccucggagacaguagg

SEQ ID NO: 4179727 - RNA, 57 nt, Human
ccugucuggccuuccacggggggcauucaggauggaccugucuggaagagcugcagg

SEQ ID NO: 4179728 - RNA, 77 nt, Human
ccugucuggcuguguccacagaguaagcugggaccauggcgauuauccagcuuauuugaaucuuacaggcagccagg

SEQ ID NO: 4179729 - RNA, 64 nt, Human
ccugucuugcuuccagaagguucuucucaugccuugugaagugugucuugggaagggagggagg

SEQ ID NO: 4179730 - RNA, 79 nt, Human
ccugugagaguucugaggggguguuuauaagcugcugaauuucaggagcucaguuggccacucuuucagacuagacagg

SEQ ID NO: 4179731 - RNA, 58 nt, Human
ccugugaugaagaguccaagaacagccugagauaaggaugucauucuucuuucacagg

SEQ ID NO: 4179732 - RNA, 110 nt, Human
ccugugauucucuccugagggcugccucugacaaugcucugcccaccccaggcagggcaggcugggugucauggagugaugaugcccucaggacaaaagagaaucacagg

SEQ ID NO: 4179733 - RNA, 75 nt, Human
ccugugcagcccuugccaguuuccacgaggcaggauacuccacuagcugauucagacaggcagaggcugcagagg

SEQ ID NO: 4179734 - RNA, 90 nt, Human
ccugugcaggagucagucgcagucaggacacagcaugaacaugaggauccccgcucagcuccuggccuuccugcugcucugucucccagg

SEQ ID NO: 4179735 - RNA, 75 nt, Human
ccugugccaggcacugcucuaagcccugauggugcacagaggugccagggggccuggaugguggcuggcuccggg

SEQ ID NO: 4179736 - RNA, 58 nt, Human
ccugugcccucugcauagcagccacuccccugcugaaagccugcagauggcucccagg

SEQ ID NO: 4179737 - RNA, 61 nt, Human
ccugugcuccaggcugcugaagaucuaccgccaggcgcagaagcagcuucuggaguaucgg

SEQ ID NO: 4179738 - RNA, 59 nt, Human
ccugugcuggcagaccuggaguuguugccacagagggccgauaagauugugaguacagg

SEQ ID NO: 4179739 - RNA, 87 nt, Human
ccugugcugggaaccugcaugggggaaggaggaggagacgugaccagcccugcuccugcuggcccucgugccugguccugccacugg

SEQ ID NO: 4179740 - RNA, 71 nt, Human
ccuguggagcugaguucuucagccggguucugaggacauccugcucuuggcaggaggggcucagccauggg

SEQ ID NO: 4179741 - RNA, 87 nt, Human
ccuguggcuccaaguuccaaauuccaauccccugaagacaccagggugucucaagcugcccugggauuugggguaaugggucacggg

SEQ ID NO: 4179742 - RNA, 60 nt, Human
ccuguggcuccagugaaccaauguagaagcccuccuuccccauggcugugagcccacagg

SEQ ID NO: 4179743 - RNA, 62 nt, Human
ccugugggcgcagcuggagucaaggcuuggggucuugggguaugcuuccagcagccagcagg

SEQ ID NO: 4179744 - RNA, 80 nt, Human
ccuguguaugugugcagcugugugagagcuccagaauuucugcagggaacuuggacagcuagggguuacaucugcauagg

SEQ ID NO: 4179745 - RNA, 106 nt, Human
ccugugugauucuggugugcagccaaguuugagaacacugcccuaagucauuguuacaggcuaguacaguggcauucaaacuuugguguacaauagaaucaccugg

SEQ ID NO: 4179746 - RNA, 55 nt, Human
ccugugugcagggccauccacaccuccgagacuggugcacaguccugcacacagg

SEQ ID NO: 4179747 - RNA, 59 nt, Human
ccugugugccuggccgcgggaggacccagagucgggcuggccugcgccaggcagacggg

SEQ ID NO: 4179748 - RNA, 107 nt, Human
ccugugugcgucuucaggggguguacuuuuauaaauguaugugcacacacagaggugccaaugcauuuguaaaauauaaucgaaauauuagacauaaagcauagagg

SEQ ID NO: 4179749 - RNA, 87 nt, Human
ccugugugcugugcauuuggccccacugcagcugcuggaugcaguccgcuagcagcuguggaggggcuguggcuucagggacauggg

SEQ ID NO: 4179750 - RNA, 62 nt, Human
ccugugugucugucacugcacaauauucucaugacucucuucuuguagugacaggauacagg

SEQ ID NO: 4179751 - RNA, 69 nt, Human
ccuguguugugacccagaccaagaagaaccuccuccaaggagcuugcuacauguggguggcagcacggg

SEQ ID NO: 4179752 - RNA, 66 nt, Human
ccuguucaaugcccuggcuucacucacuauuagcuucaugagaguuggggcaggagcaagaauagg

SEQ ID NO: 4179753 - RNA, 86 nt, Human
ccuguucccgagccccaggccaugauucgcuucacucuggacuucaguuccagagagagaggucaauggcagggcaugggaacagg

SEQ ID NO: 4179754 - RNA, 66 nt, Human
ccuguucuugucucauuggcuaaaguugugucacaugaccauuccugaaccaauggagggaauggg

SEQ ID NO: 4179755 - RNA, 76 nt, Human
ccuguugauaaaaugaaacuaguagaaucuuugugucaaguauuacagucugcuggcuuuuucagcauugaccagg

SEQ ID NO: 4179756 - RNA, 59 nt, Human
ccuguugcgucuaguccaugagcucuuuagcccaaaugcacucagaugcucacaacagg

SEQ ID NO: 4179757 - RNA, 81 nt, Human
ccuguuguaagcaagauuuauugaauuuucucaucauagucuuaaaagagcaguacuccaauaggucuuguuuacuaaagg

SEQ ID NO: 4179758 - RNA, 66 nt, Human
ccuguuuccauucugagucuuaugucuuuuggaaaagaguucuaauauuucagaugguaaauaugg

SEQ ID NO: 4179759 - RNA, 79 nt, Human
ccuguuucucugaggcuggccucccuacggggcugcagcagcaaagggaagccaagccuuagagaagccucauggaagg

SEQ ID NO: 4179760 - RNA, 75 nt, Human
ccuuaaaaugucuacuccuguguuuauuuaugguuuaguguugagagcaugggcucgggagucagauugccuggg

SEQ ID NO: 4179761 - RNA, 98 nt, Human
ccuuaaacacauuuucagcccaguuuuaucaucuguaaaguggccccagagaacuuguaauagaggugaaauaggguguauggaaguguguggaaagg

SEQ ID NO: 4179762 - RNA, 73 nt, Human
ccuuaacaguguauucggaggcuagguacgaaaccaauuuuaucugcuucagugauaugugaacuguaugagg

SEQ ID NO: 4179763 - RNA, 76 nt, Human
ccuuaagagcaaaaacugagguuuccugaagaagaaagaauucugcuucuaggcagccugaguuucuugccuuugg

SEQ ID NO: 4179764 - RNA, 73 nt, Human
ccuuaagaggcagguguuaccucugguuucuguuuaaacugauggccagcaagguagggcaauuugccuaagg

SEQ ID NO: 4179765 - RNA, 71 nt, Human
ccuuaaguauaucugcaaagacccuuuuuccaaagucacauuuacagguucuggguagauguaucuuuugg

SEQ ID NO: 4179766 - RNA, 79 nt, Human
ccuuaaucaccauuuguucaaccauucucgcuugggugacauuccucuuagugaaagaaguuggaagcaaauauaaagg

SEQ ID NO: 4179767 - RNA, 61 nt, Human
ccuuacaagaaauuucugcauauaugcacaaagcaucauguucaagaauauuuuguagagg

SEQ ID NO: 4179768 - RNA, 89 nt, Human
ccuuacaguggccguggucgcugacucucgugucuccccuguucacaugccagccaucgagggugaguacagcggacccaagcuugagg

SEQ ID NO: 4179769 - RNA, 71 nt, Human
ccuuaccugaugauauacuuccuagaacaguuuauguuuuuaugcuuucuuaguguguuaauugggucugg

SEQ ID NO: 4179770 - RNA, 73 nt, Human
ccuuagaaagggggcuguaagcaagcagggggagaagcugagauuuugauuuguauugcaggccccuuuaagg

SEQ ID NO: 4179771 - RNA, 82 nt, Human
ccuuagacauuuauugagcaccuacuuugugccaggcacacucugcuugaugccuuaaugguugguguucuaugucuuaagg

SEQ ID NO: 4179772 - RNA, 75 nt, Human
ccuuagacuuggguggauugugacucuggccaguggcaaugaccaauacacauuaucucuaucuacacuuuaagg

SEQ ID NO: 4179773 - RNA, 79 nt, Human
ccuuagagaauaagcagaacccuucuguaacuagcaugccugggucuucuuuacuuuggguccugcuuauaauuuaggg

SEQ ID NO: 4179774 - RNA, 60 nt, Human
ccuuagccaggcuaaaugagccaugauaauuuuaucacuccuguuaaugacuggcuuagg

SEQ ID NO: 4179775 - RNA, 59 nt, Human
ccuuaggaguucacuugaauagucauuuuuauauuugugacugcaagucacuuuuaggg

SEQ ID NO: 4179776 - RNA, 59 nt, Human
ccuuaggaguucacuugaauagucguuuuuauauuugugacugcaagucacuuuuaggg

SEQ ID NO: 4179777 - RNA, 81 nt, Human
ccuuaggaugaagguguuugagucuucuuuugaccacaaggaagcuaaaaggcucagacagauuuugacacuugccuaggg

SEQ ID NO: 4179778 - RNA, 91 nt, Human
ccuuagggcagugccacaguaaucugggaacuuguuagaaauacacauucucaggccccaucccagacuuauugaaucacagacucugggg

SEQ ID NO: 4179779 - RNA, 105 nt, Human
ccuuaggugccuggucccaucaauuggccaaggagcagucccugugcucucaaggguggcuguuucucuugagucaaaaugaaaauggagugggaaccuuuuagg

SEQ ID NO: 4179780 - RNA, 57 nt, Human
ccuuagucuuucaucagagguuauuuaguuuuucugaauuuugaaggaagauuaagg

SEQ ID NO: 4179781 - RNA, 58 nt, Human
ccuuauaacaguugguauuauuugggugaauggcucauuaaaugcuauuguuauaggg

SEQ ID NO: 4179782 - RNA, 69 nt, Human
ccuuaucauccacuggggaucccauguggccaagaucuccagaugguguuuccccagguggaccagagg

SEQ ID NO: 4179783 - RNA, 81 nt, Human
ccuuaugcuuguguucccaguaaauccuagagcccucaucgcucagccugugcgaggaguaggauuagcacaggcagccgg

SEQ ID NO: 4179784 - RNA, 64 nt, Human
ccuuauggagccuuagacaucugauccuuucauuucaaagguuaggggcugaggcccagggagg

SEQ ID NO: 4179785 - RNA, 64 nt, Human
ccuuaugggaacauuuuuuaaggcagaaaaagaaaguuuuuuuguccugauguucuuuaauagg

SEQ ID NO: 4179786 - RNA, 118 nt, Human
ccuuauguaacagaaacaaucauuuaagccuucuaauuuugucaccaggccuugggaaaaauauggguugguaaaauauuacaaggcacuugaaccuauuggguccgaaauauaaagg

SEQ ID NO: 4179787 - RNA, 55 nt, Human
ccuuauguuccuuggucucaggcaacuagacagccugaaggccagcagcauaggg

SEQ ID NO: 4179788 - RNA, 83 nt, Human
ccuuauucccaggccuggcauggggacuaagggaggaccccauuuuagcuuucccuuacagucugggccagcucugggaaggg

SEQ ID NO: 4179789 - RNA, 74 nt, Human
ccgaagugcguauguccgagcgcgugugcaugugugugcgcgugugugcguguguguauauacacaggcuucgg

SEQ ID NO: 4179790 - RNA, 79 nt, Human
ccgaauguuucugucucccuaaaauucauguuaaagcuguaacccccaaugugauguuuuuggaaaugggaacauuugg

SEQ ID NO: 4179791 - RNA, 107 nt, Human
ccgaauuauugccaugcaaaugucaaguagccaaugcuuccuguuuuaguagaggcaguguccgagaagcagguagaggcuugagggugcaaugauggugauuuugg

SEQ ID NO: 4179792 - RNA, 111 nt, Human
ccgaccgcggucagugccugaggcuggggaacgcgcuggcccgcgccgaccgccucccgguggcccugggcgcguucugugucgcccugcggcucgaggcgcugcggccgg

SEQ ID NO: 4179793 - RNA, 73 nt, Human
ccgagaaauaagaauguguguccagguccaauuuauguaauuacacaauagauacugggcacauaucgacugg

SEQ ID NO: 4179794 - RNA, 84 nt, Human
ccgagaccguggcaacccuguggcugcccguccaagcaugcccaguguuugcugccaccaccgccacagcaucuauggucuugg

SEQ ID NO: 4179795 - RNA, 67 nt, Human
ccgagcuguggucucuuuuacggcuucaugaaaggaccgugcccucacggaggggaccacggcuugg

SEQ ID NO: 4179796 - RNA, 56 nt, Human
ccgaggcuggagugcaguggcgugaucucuacucacugcaaccuccgccucccggg

SEQ ID NO: 4179797 - RNA, 98 nt, Human
ccgagggcgcugggagucugcaaccugagaaugggggcaugugucccuggggcaguaucccccaucuuucauccaacaggcuuggccgggcugcuugg

SEQ ID NO: 4179798 - RNA, 60 nt, Human
ccgaguggcagguauccaggaagcuugauucgacagcucccagggacacuggccacuagg

SEQ ID NO: 4179799 - RNA, 89 nt, Human
ccgaguguucuguaaacugcugauuuuaggacuguuaccagaugucuucacaguuuaacaguuaagagcagauaguaaagaagucuugg

SEQ ID NO: 4179800 - RNA, 62 nt, Human
ccgaugaaaagggagugauauuuguugaaaaggaacaaaaagaagaacucccuuuucacugg

SEQ ID NO: 4179801 - RNA, 71 nt, Human
ccgauucagaauuccacugaucgcaggcggcgggcccuuuaccgcacuucugcuucaaggaaaugaaucgg

SEQ ID NO: 4179802 - RNA, 109 nt, Human
ccgauucccugugaugaguugugcuccuggaaagcugcccugugacauuucuucccuuuugugucccugacaguagcauuucccuggaggcucuuaaaggagaaggagg

SEQ ID NO: 4179803 - RNA, 66 nt, Human
ccgauuuaugucucugacuugauuuauggaaauaauacuaguuguugcaucagcaggcauaauugg

SEQ ID NO: 4179804 - RNA, 56 nt, Human
ccgauuuggcaggguucuugcugaaacuagauuuuacaaggaagugcacagauggg

SEQ ID NO: 4179805 - RNA, 122 nt, Human
ccgauuuuucuucugguucuuagcaggaagcacgaaaacauuuuaauuguccaguucuggagggaauggaacuugaaaaucaaggugguaagugcacugagcucaaccauugggaaaaaagg

SEQ ID NO: 4179806 - RNA, 63 nt, Human
ccgcaaugcaguugcaauggaggacucagccaaucuuacugggagcucuggagcugcaauggg

SEQ ID NO: 4179807 - RNA, 58 nt, Human
ccgcagcuggccacucaggaaggcagcucuuccaucuggcucugaggauuagcugugg

SEQ ID NO: 4179808 - RNA, 96 nt, Human
ccgcagggagaagagcugugugcugugaugugguuuauaaauuaccauuuggaaggagcugcacagcacagcagccugcaacuacucuuccugagg

SEQ ID NO: 4179809 - RNA, 56 nt, Human
ccgcagggccgcgagcgggaccagcaccgccugcagcugccgcucgaggcucuggg

SEQ ID NO: 4179810 - RNA, 77 nt, Human
ccgccacuugaaauaucuuuguucucacccuaucuuuaaacuucaauuuggugauaauaauaugguuuuuagugugg

SEQ ID NO: 4179811 - RNA, 66 nt, Human
ccgccauucccuaaugagagcaaucaaucccuuuaaugauuucucuccccaaguggaauugucagg

SEQ ID NO: 4179812 - RNA, 55 nt, Human
ccgcccagucuucccucuuuagcuuccuccaggcugagggguuauaacagggugg

SEQ ID NO: 4179813 - RNA, 72 nt, Human
ccgcccccaccgcugcucgugccaggacgcgcaguuugcaguugcagcucuggcacuggcgcgggauggcgg

SEQ ID NO: 4179814 - RNA, 90 nt, Human
ccgcccgccccucggccgcccgugcgcgcucgccucccgggcugcaacuuugggggaacuguugcgcgcgggcgucgcgggggcgggcgg

SEQ ID NO: 4179815 - RNA, 68 nt, Human
ccgcccgcgccagccucuccaucucgcaaguuuuaauuaacgcugagggggaggcggcugacgggcgg

SEQ ID NO: 4179816 - RNA, 65 nt, Human
ccgccucgggaagugcccucuucaggagaaaguccuauuucucuguaagcugccuucucgugugg

SEQ ID NO: 4179817 - RNA, 57 nt, Human
ccgccugcggcagagggugggagcgggugccggagccugugcuucagcuggaggagg

SEQ ID NO: 4179818 - RNA, 62 nt, Human
ccgccugcucaagugcgcacccaggggcaagaacggcuucaccccucugcacauggcugugg

SEQ ID NO: 4179819 - RNA, 130 nt, Human
ccgccuguccgguggagcaggcccggcccaagucuccaugccuggagggcagcccauucuggacauagcgcaugcccagaacugccuccacagccggcuuccucugcggcucucucuucacaagacacgg

SEQ ID NO: 4179820 - RNA, 64 nt, Human
ccgccuuucagucucgaugcgaugugcauuugacacaaauugcaagagagucugaaaaaugugg

SEQ ID NO: 4179821 - RNA, 72 nt, Human
cggaguucccugucucaggaaggguggcgaggggagauuuuguggcccuuugggugcaggggcaaggcucug

SEQ ID NO: 4179822 - RNA, 73 nt, Human
cggauuuguggaagcaacaggagggccuuccuuccuuccuaggaagcaccucuaugauugcuuuuuauguuug

SEQ ID NO: 4179823 - RNA, 81 nt, Human
cggcagcaagucuggagggcgaugaggggcaugaggaaguagcuucagcccagaccaccucauugccuccugugcgggcug

SEQ ID NO: 4179824 - RNA, 76 nt, Human
cggcagucccagcccagaggcgccggccuggcggcuggaagauugcacugugggcacaucuggggagcagcugccg

SEQ ID NO: 4179825 - RNA, 57 nt, Human
cggcagugaccaccucaccggacccagagagugggaaccaguaacuggucauugcug

SEQ ID NO: 4179826 - RNA, 67 nt, Human
cggcauuguugcaaguccuuaggaagcagucguuggauucagcgggggcucuggggcuacaaugcug

SEQ ID NO: 4179827 - RNA, 63 nt, Human
cggccagugccgcucucgccucgcggucuccguggggcgccccgagggugcgcacguggcgcg

SEQ ID NO: 4179828 - RNA, 70 nt, Human
cggccauuaggauuugaaaaggggcagaccagaggagauugagguuugcugucaaguccaugaguugcug

SEQ ID NO: 4179829 - RNA, 77 nt, Human
cggccccaccgagggugcaguccugcuagagaaaugcaagggaagcagggcagccaugagccuucaggaggaggccg

SEQ ID NO: 4179830 - RNA, 86 nt, Human
cggccccgcugccccucaccugggccuccagcucugccagccgggccuggcuaugcagcagcucggccuggagcucagcggggcug

SEQ ID NO: 4179831 - RNA, 86 nt, Human
cggcgcgggcggaggcagcaggcggcccgcgggcccggcucccccagucccggccccggcagccccgccagcuccgcucgccgccg

SEQ ID NO: 4179832 - RNA, 64 nt, Human
cggcgugcguuccuaguaaacacgcaccgagagcacggugugcguuccuaguaaacgugcaccg

SEQ ID NO: 4179833 - RNA, 55 nt, Human
cggcucccgcgcgccgccucgcgcuccuccccagcccggcugugcguggaggcug

SEQ ID NO: 4179834 - RNA, 102 nt, Human
cggcuccucugggcgacucuuccagaacagucugggacugagcuccaccacagauccuggguguggcugguucacaggcuuggacugcccagagcacagcug

SEQ ID NO: 4179835 - RNA, 88 nt, Human
cggcucuccagccuccaucugauccaugucuccuggacuugugagcggcgugcucaggagacaaagggugcggagaggcugggggccg

SEQ ID NO: 4179836 - RNA, 75 nt, Human
cggcugcgagaaccuggcgccgcacucggugcagccguagggccggucucccgugugugugcgcucgugcagccg

SEQ ID NO: 4179837 - RNA, 75 nt, Human
cggcugucggcgccuccugcguguccauuggcuccggaaacgggugcucaccgucgggggucgcugucucggccg

SEQ ID NO: 4179838 - RNA, 61 nt, Human
cggcuucucgggucggauuccgcggucccaacccuuccccauggccgacccugaggaguug

SEQ ID NO: 4179839 - RNA, 93 nt, Human
cgggaaaggaauguggaaugaacaaaggaggcgucugaggugcagucuaccugaaagcuagccuucuauuggucaccauuauucccugccccg

SEQ ID NO: 4179840 - RNA, 59 nt, Human
cgggaaguauuuucaguuuuaaaacccagucauuauugacuggcuggcugaguuuccug

SEQ ID NO: 4179841 - RNA, 57 nt, Human
cgggacaggcuucagauguauuaacuaagagaguuuugucuuuguggcuuguuuucg

SEQ ID NO: 4179842 - RNA, 78 nt, Human
cgggaccuaugagcaucgcugagaucccagaccuugaaagaugaggacuguggggaagcagaugccaccaaagccccg

SEQ ID NO: 4179843 - RNA, 130 nt, Human
cgggagaagcacagguuguuuguuuguuuaauccauuuacucuuuacaagaacccuuuuuacaaaugaggagaccaagucuucagagauguaacauauggaagacacagagcaaauagauggcucagcug

SEQ ID NO: 4179844 - RNA, 62 nt, Human
cgggagcuuguacuucucagagugccuuguuuaauaaagcucuccugaaggacaagcugccg

SEQ ID NO: 4179845 - RNA, 86 nt, Human
cgggauagggauguaguccuguauuguggaugaggcaaagaagaauuaaauuuauccagaaucaggauuuuucgucugguauccug

SEQ ID NO: 4179846 - RNA, 87 nt, Human
cgggaucguaaauguuaugacagugaaaaaaaucagacugagaucucuugucugacucagcacuguugaacauauauuuagaucuug

SEQ ID NO: 4179847 - RNA, 130 nt, Human
cgggcacagcucucugggggcucugaaagccucccucucagggccucuucagcagaugggccaguaucccuggccuugauaacuggggagagcagcugacaggaagagggggacucccuggaguggccug

SEQ ID NO: 4179848 - RNA, 74 nt, Human
cgggcagugcccagcggggcagcugugccuggacccuggcaccaacgacucggccacccuggacgcacuguucg

SEQ ID NO: 4179849 - RNA, 55 nt, Human
cgggccaucuaucuccuaguucagggcuucguguugugaggggaggagaggccug

SEQ ID NO: 4179850 - RNA, 55 nt, Human
cgggcccagagucugcaauggagucuuuucuagacucagccaggcucggagcucg

SEQ ID NO: 4179851 - RNA, 74 nt, Human
cgggccccugggggccggucuagggcuggggaggcucaggcccccucuccuugcacccgucccgcaggagucug

SEQ ID NO: 4179852 - RNA, 78 nt, Human
cgggcccucggcugcccaggcccugccuuggcaugugugucuccagagcgugcccggccaggccaucccagccgccug

SEQ ID NO: 4179853 - RNA, 81 nt, Human
cgggccugacccgcaggacccugaggagagcgcuucccgacagcgcuucggggaggcucuucaggagcgggaaaaggccug

SEQ ID NO: 4179854 - RNA, 56 nt, Human
cgggcgagggccugggccgagggacccccaauacccagguagcccucuagagccug

SEQ ID NO: 4179855 - RNA, 60 nt, Human
cgggcgcacuccgggcagcuguagcccuugcgagggccgggcucuccugggggcgccucg

SEQ ID NO: 4179856 - RNA, 100 nt, Human
cgggcggaggggacccggggcgagucaucaagggcgcgugguucggcgugccaggcgcgcugcucugccugcucucuuggcuucugucucccuucgaccg

SEQ ID NO: 4179857 - RNA, 62 nt, Human
cgggcuagcggccuggguugggcuuuguagcugcuccgcaggcccagcccgggccgcgcucg

SEQ ID NO: 4179858 - RNA, 65 nt, Human
cggggaaaaugauccuuguuguuuaaccagugggggugcuggaaaaucaggggacauugauacug

SEQ ID NO: 4179859 - RNA, 79 nt, Human
cggggaauauggaccuggcucuaagugucagcuccccagagcugugguggcugugucacuggaguuaauucugucccug

SEQ ID NO: 4179860 - RNA, 55 nt, Human
cggggaaugcuggaggcuggucccgguuauccgaggccuuccccugcagucuccg

SEQ ID NO: 4179861 - RNA, 83 nt, Human
cggggagagacgagcagaagccugguggucuggggaaguuuaaccagugucuugaugaauggggcuucuguaucugaucuuug

SEQ ID NO: 4179862 - RNA, 57 nt, Human
cggggcaggcugcaggaugcccagccguguccccaggaugcccugcacgcuguccug

SEQ ID NO: 4179863 - RNA, 56 nt, Human
cgggggaugcggggcugggcuguccuccucuagaagcguggcucugccacucaccg

SEQ ID NO: 4179864 - RNA, 58 nt, Human
cgggggccggccacaggcugcugauccaugcggcccuugucuguguggcuggcuccug

SEQ ID NO: 4179865 - RNA, 80 nt, Human
cgggggcuuggaggaaggggcucuucugaugggaucugcaguacccccuggaagugcccacugccuagugagagccccug

SEQ ID NO: 4179866 - RNA, 62 nt, Human
cgggguagcagagggcccagguaacuccagcacuggagucacagggggccccugcaacuccg

SEQ ID NO: 4179867 - RNA, 85 nt, Human
cgggguagcagcugcagggcacaggcuccggguccaggcccagguuuaaacccucauccuggcccuuacaagcuguaucaccucg

SEQ ID NO: 4179868 - RNA, 99 nt, Human
cggggucgcagggcgggagggggagcugagccggcagagaaaaugcccaggaaggggucgaugcuggccugggcugcaccuuggugccuugccaccccg

SEQ ID NO: 4179869 - RNA, 74 nt, Human
cggggucggccauggguugcugggggccaugguccugugccuaugggccaggcucagcagucaaccuggcccug

SEQ ID NO: 4179870 - RNA, 64 nt, Human
cggggucuugcuguguugcccaggcuaacgugcaguggcacgaucagggcacacugcagccucg

SEQ ID NO: 4179871 - RNA, 85 nt, Human
cggguccgagcagcuugaggcuggauuccaagugacacuucccucaggcagcuugggaugcagcuuggaggacugagugggcucg

SEQ ID NO: 4179872 - RNA, 65 nt, Human
cgggucgagugggcacagcuggguggcucuugcucuacuugcuaccagcugggcuuacucacucg

SEQ ID NO: 4179873 - RNA, 76 nt, Human
cgguaccuaguaaacaguaggaacugagaaaugauaacaauuacuuacuuuagaucauacugugugccaggcauug

SEQ ID NO: 4179874 - RNA, 59 nt, Human
cgguauuuaccaaucuucuguaacgagguagacuccauuuagaaucuggugauguaucg

SEQ ID NO: 4179875 - RNA, 55 nt, Human
cggucaggugcagcguuggcacaggguccucaaugccagagcugauggcugcccg

SEQ ID NO: 4179876 - RNA, 104 nt, Human
cgguccacuaaaauccacacucccuuuccuugguauaaaguugccacugagaaguuacauuuucuagcuuuuugcaccaaggugagaccaggugacuaguacug

SEQ ID NO: 4179877 - RNA, 75 nt, Human
cgguccucgcccccgcgcacgcgcagugcgcccuccucugcaaaaggggcugcggucacugcgggggcuggaccg

SEQ ID NO: 4179878 - RNA, 86 nt, Human
cgguccucggcgacccggccggccgguggcugcaccacgccgggucccgcgcuggagccagcggccugcugaggagccggggaccg

SEQ ID NO: 4179879 - RNA, 86 nt, Human
cggugaaaugagaccagagugggcuuccugagaagugucuuugaauacuugagaaucuugaugucuaccccugguucucuuccccg

SEQ ID NO: 4179880 - RNA, 95 nt, Human
ccuuaaugcacauauaccuguuuguaaauugugguuucuucuaauuuuacugaaaaagcugagcacauucaaacaggucuguguaauauugacgg

SEQ ID NO: 4179881 - RNA, 65 nt, Human
ccuuagaucaggcugucuagggaaggacugcuagcucccauccccagacggaucuuauccugagg

SEQ ID NO: 4179882 - RNA, 82 nt, Human
ccuuagcuugcugccuugaaaaugaagcuuuagaugcaguggaaauauuagggcuuugcugguuucaaggcuuccaaagagg

SEQ ID NO: 4179883 - RNA, 61 nt, Human
ccuuaguuaacuagaacuucgauuugcccauuccccaagugcauacacuaguuaauugagg

SEQ ID NO: 4179884 - RNA, 80 nt, Human
ccuuauacuuugugggguggguggauguucucuuuucuuuccugaacuugagcuguccugcccacccugcagggacuugg

SEQ ID NO: 4179885 - RNA, 59 nt, Human
ccuuauaggggugcuguggggacugaugugagaauauguuauacacauuccuggugagg

SEQ ID NO: 4179886 - RNA, 59 nt, Human
ccuuaucagccuuuuacuccuguguugucauauaacgcaacagagcagguuugaugagg

SEQ ID NO: 4179887 - RNA, 55 nt, Human
ccuuaugggaaugagggucaggacauauaauccuuucucucuccuuccucugagg

SEQ ID NO: 4179888 - RNA, 80 nt, Human
ccuuauuagggaaacugacuugucuccaaggcaguuccguuugcuacauuacaaugagacaguaaguuacuuugacaggg

SEQ ID NO: 4179889 - RNA, 82 nt, Human
ccuuauuuaaauguuauguuaauguuauaaauucuugguuuuauauaugaaaccuggacuuguaaugauaacugacuugggg

SEQ ID NO: 4179890 - RNA, 86 nt, Human
ccuucaagaucacaguuugggaaccugagaacucaaagagccccagcucuccugcaggccuguucccaguaucgguggucucaagg

SEQ ID NO: 4179891 - RNA, 73 nt, Human
ccuucaagaucuggguuuucagcuuucugcagccuuuguuuucacugaaauguugaaacuacucgucugaggg

SEQ ID NO: 4179892 - RNA, 60 nt, Human
ccuucaaggcaaggagggcuggcuggccagggcuuacagccucaacuucugccauggagg

SEQ ID NO: 4179893 - RNA, 55 nt, Human
ccuucaaugaaagcugcucccaucgccugagcgguccagagcuaguucauugcgg

SEQ ID NO: 4179894 - RNA, 73 nt, Human
ccuucaccugcccagcaccugggaucugguuaaaaggccuguucggauucaggaggucugggcagggcugagg

SEQ ID NO: 4179895 - RNA, 81 nt, Human
ccuucaccuuuguauuuucuaauuggcugucagggaggucauuuccauggcucuagagauugaaaagcauauggggcuggg

SEQ ID NO: 4179896 - RNA, 78 nt, Human
cccucuggucagaggccggccgagcccaugggcggugagguuggugccuggggucguggcuggucugguacagguggg

SEQ ID NO: 4179897 - RNA, 77 nt, Human
cccucuguuucucuuuuguaucacaguguuguuuggaucuugcuucagcccuacacuguaugaaaacaggaaauggg

SEQ ID NO: 4179898 - RNA, 60 nt, Human
cccucuucuuucccaugcucuuuucuugugagaaaagcauccaacaggagggaagggugg

SEQ ID NO: 4179899 - RNA, 77 nt, Human
cccucuuucuacagccaggggucucugggguucagguagcugaucccaaucuuuccugcuccuggccuggaaguggg

SEQ ID NO: 4179900 - RNA, 127 nt, Human
cccugaaaaacuaucauagaggcuuuuuggacguacacauuagugagguauuuugauauaucuucaaauacuuuauauacuucaaaacuuuaaugugguauagcugagauucuauauugauauaggg

SEQ ID NO: 4179901 - RNA, 88 nt, Human
cccugaauaguuugaaaaauuauguagccauaugaaacaagagcauaagccaugugugauagggcuacguaggaucagcuuucagagg

SEQ ID NO: 4179902 - RNA, 57 nt, Human
cccugacuugaucuuugacuuggcucuuuacugauccagccaaagcugaagccaggg

SEQ ID NO: 4179903 - RNA, 78 nt, Human
cccugacuuuuuucucaucccagaauaggagaauggggccaagccccuccugaaggcagauggggaucaagguugggg

SEQ ID NO: 4179904 - RNA, 63 nt, Human
cccugagaacaacuuaggggucuccuauaaagggaugaccaaguucuagguuuuucucuaggg

SEQ ID NO: 4179905 - RNA, 60 nt, Human
cccugagcucugacugcugggugacacagacguguguuuacagcugaucaggcaucaggg

SEQ ID NO: 4179906 - RNA, 81 nt, Human
cccugaggauagguuuguuuauguaucauuggucucucucagaaacagacuguaugauauccaaauugauaaccuccuggg

SEQ ID NO: 4179907 - RNA, 61 nt, Human
cccugaggcuucucuaguucagcucuccccuguucauagcugcugcuuucaagccucaagg

SEQ ID NO: 4179908 - RNA, 66 nt, Human
cccugauggccuaucuggcagucaucguccugaauaaagacuggaaagaaaaacaggccaugaggg

SEQ ID NO: 4179909 - RNA, 84 nt, Human
cccugcacagccauaacaguguuuugcucuuugcccaguaugcucuuugucggcaggcggaaaagacugcauugucuaguaggg

SEQ ID NO: 4179910 - RNA, 89 nt, Human
cccugcacuccaccccacggcaguggggagcgagucccagagugaaccccaccucagaggaggcuccuggcuccgagugggcuguaggg

SEQ ID NO: 4179911 - RNA, 66 nt, Human
cccugcacuggaaccagccuucugugauuccggcugccacacgcaggagcucguuuccaggcuggg

SEQ ID NO: 4179912 - RNA, 74 nt, Human
cccugcagagauggcagggagagugauugaauuggaguuaugggcucaagcucucccuggccagcugugcaggg

SEQ ID NO: 4179913 - RNA, 129 nt, Human
cccugcagaugggcuacgcgcagggcgccaaccagagcggccaggucuuuggccugggccggcagauauacgaccccaaguacugcccgcaaggcccaguggccgauggggcucccucgggugcaggcg

SEQ ID NO: 4179914 - RNA, 62 nt, Human
cccugcauaauuagagcagcucuuugcugaggaagcagagggcagagucuaaugaugcaugg

SEQ ID NO: 4179915 - RNA, 88 nt, Human
cccugcgccaggacgcucacccaagaccaucggaagugaagcaucagcugcaccacugcauggguggucgugaggugacugagcaggg

SEQ ID NO: 4179916 - RNA, 56 nt, Human
cccugcgccucagaccucaccaguguuuccaucagacacaguaacugggcgcaggg

SEQ ID NO: 4179917 - RNA, 79 nt, Human
cccugcugaaugcaagccauggggggaacugcugaggucuggcucagagccaaucauggugcauuuggacucagcuggg

SEQ ID NO: 4179918 - RNA, 66 nt, Human
cccugcugugucagaguccagggguggguguucucugcccuguucugaggacgugacauugccggg

SEQ ID NO: 4179919 - RNA, 55 nt, Human
cccuggaggaccccaauguggcuguuaaugucuagccaaacguggcacucuaggg

SEQ ID NO: 4179920 - RNA, 79 nt, Human
cccuggcaagacagagggaagcaaugaugcaagcaaucaaguauuuauuaaagcaucuacucugcuuggcccagugggg

SEQ ID NO: 4179921 - RNA, 63 nt, Human
cccuggcagcugcccgagaugcccuguaaacacuacggcuagcagaaagcaggcugcucaggg

SEQ ID NO: 4179922 - RNA, 57 nt, Human
cccuggccagggcacagggaggggagcuguuaccuuuccuuagccugccuuccaggg

SEQ ID NO: 4179923 - RNA, 66 nt, Human
cccuggccuuuuguuucuggagaacggagcuaagguacuuuuucucccagaccaaaggcagcaggg

SEQ ID NO: 4179924 - RNA, 79 nt, Human
cccuggcgccuucagagagagucugucccugaagaugucuugacauuugacuucuggguugcaggucuuggcggcgggg

SEQ ID NO: 4179925 - RNA, 84 nt, Human
cccuggcuggucucccaauccgggacagccuggccugcuccacagaacuggggguucagaggguguucugauugggggacaggg

SEQ ID NO: 4179926 - RNA, 60 nt, Human
cccuggcuuucccaucaauguggcaguggaggcacuuggagagcauugcuggggaauggg

SEQ ID NO: 4179927 - RNA, 55 nt, Human
cccugggaaguauuccagcuauuccuggcugagcccguugugaauauucccaggg

SEQ ID NO: 4179928 - RNA, 56 nt, Human
cccugggaggcuuccaggcagaccuuccacagcggugugugugaggagucccaggg

SEQ ID NO: 4179929 - RNA, 61 nt, Human
cccugggauucaauuucacucuuauagugaugccuaauauacuucaauuugugucucaggg

SEQ ID NO: 4179930 - RNA, 89 nt, Human
cccugggcauuuucuuggagggacagauggcuaggcugaugguuccugcaagcccagacauagaguccuucaaagccgcaaucccaggg

SEQ ID NO: 4179931 - RNA, 63 nt, Human
cccuguacagcucauuuguaaaacggaggcgucuacaucuguccuguuggguuguugcaaggg

SEQ ID NO: 4179932 - RNA, 104 nt, Human
cccuguccaguccccugucccaggauccugacuccaugugacccugggaagccugugccggggcuggguugaggcaucuugggcagggcugacugggaacaagg

SEQ ID NO: 4179933 - RNA, 68 nt, Human
cccugugcuaauucaaggaaacaaggcagccaaggagucuaacuugaggucuucauucuugggcaggg

SEQ ID NO: 4179934 - RNA, 55 nt, Human
cccugugggucuucggaggccccugcaggaccaaggggcuuggaggacucgaggg

SEQ ID NO: 4179935 - RNA, 81 nt, Human
cccuguguugaaacucucagggaucucaaauagacggucuaggcaguuggcucagagccuugagagcugaucggggcaggg

SEQ ID NO: 4179936 - RNA, 55 nt, Human
cccuguugggaagagagauggccagagugucccuggccacugggcaccagcaggg

SEQ ID NO: 4179937 - RNA, 95 nt, Human
cccuuaacaccugccacauagaggaggauauuaaggauuuucuuugccuuuaguucuuuccucuguuugccauucuucacaguagggauuggggg

SEQ ID NO: 4179938 - RNA, 58 nt, Human
cccuuagauaauuuccuuuucucuaugguaaagaagacaaggaggauauguuuaaggg

SEQ ID NO: 4179939 - RNA, 116 nt, Human
cccuuaguucaacuuauuucuuggcuucugaacaauagugguaacaaagcccacaggaaaauuuggccuuccagacacauuguugugaugauuaggaaauaugcuagaacugaugg

SEQ ID NO: 4179940 - RNA, 76 nt, Human
cccuuauacuucgaaaguucaguugaaaagaucuugaagucaauguccagcaugacacauucucaccaguagaggg

SEQ ID NO: 4179941 - RNA, 58 nt, Human
cccuuauggauccucuucucuucucuggaugugaagggaaaggauaugauccuagggg

SEQ ID NO: 4179942 - RNA, 76 nt, Human
cccuuauugagcucucuaccuucaaaacguauccggagugucucugcuccucacaugaauguaagcuccaugaggg

SEQ ID NO: 4179943 - RNA, 108 nt, Human
cccuucaauauguuagugaugaauagcuuuauagugcauaauuaacauggaauaauauccagucuuuuaagcacugugauacuaagguaagacacugaagugaagugg

SEQ ID NO: 4179944 - RNA, 61 nt, Human
cccuucaucagcuggcuuacuguucacuucaaggucaagacauuggcugucugaugcaggg

SEQ ID NO: 4179945 - RNA, 57 nt, Human
cccuuccccaaguagagaggggagcaucccccgugccccacucacugugggggaggg

SEQ ID NO: 4179946 - RNA, 83 nt, Human
cggugaggagcuggguauaggcauagcugagcugaaauuauagaaccuuuguucagaaauaaaauaucccaacuucaucauug

SEQ ID NO: 4179947 - RNA, 78 nt, Human
cggugauagauuuucauaacuuguaguagcuggaaacaggacugggaaaagcuauggcaaaucuccuguaggucaccg

SEQ ID NO: 4179948 - RNA, 87 nt, Human
cggugcgguacuugugacgggagcuugugaagugagccgccucccugaugugucuuggcggccagcaggcccugugauccugcgccg

SEQ ID NO: 4179949 - RNA, 63 nt, Human
cggugggcgggagcaaguaggggcacugggcggcccagagccagcccacuguucccgacaccg

SEQ ID NO: 4179950 - RNA, 70 nt, Human
cgguggucccaagaggguggcaagaacccccacuaauuuuuucucucucuagcuucuugaggcuuggccg

SEQ ID NO: 4179951 - RNA, 85 nt, Human
cgguggugaggaaaggugccuggagcuaauguguauagauaggaguaucauugugccaccgggccaggcauuccccacccagcug

SEQ ID NO: 4179952 - RNA, 73 nt, Human
cgguguccuggagugucagaaacaguguccuggcugggugcaggaccuguaaucccagcacuuugggaggcug

SEQ ID NO: 4179953 - RNA, 58 nt, Human
cgguuccaggacccuggccucugagagaaccugugcuuuccaggagaacugggagccg

SEQ ID NO: 4179954 - RNA, 63 nt, Human
cgguugcuuguggugagaguugcccaucauucugcucuggacuggcagccaccgcggcggccg

SEQ ID NO: 4179955 - RNA, 66 nt, Human
cgguuuaugucauugccaagaugcuaaucuaaggacaaagaacgcuaucuguagugacagucccug

SEQ ID NO: 4179956 - RNA, 129 nt, Human
cguaacuuccuccauaaguuuuuuuuaggaucuuccuccuugccuccucgcuggggcucaucaaaagggauaccaccccagggaaggcagauggaggaugucgaagaggcccccaaguagaggaaggcg

SEQ ID NO: 4179957 - RNA, 90 nt, Human
cguagauggaugcucccaggcugccacgauuacugcucucaaacauccacaucccagaggcacagagucacuagcuaagcaucauccccg

SEQ ID NO: 4179958 - RNA, 82 nt, Human
cguaguacagggcaaugcugaggcucaagggcaggugggagucagcuccuaggcugucagggcuccguuuguucucacuacg

SEQ ID NO: 4179959 - RNA, 86 nt, Human
cguaugaaaaaguuaccugcugacuuacacuguuuauuacuaauuaagaaaugcagacaguacuguuagaacuggcuuuuugggcg

SEQ ID NO: 4179960 - RNA, 65 nt, Human
cguauuguguuccuccuccauuguaagucaucucaggcuguccuuggggaggggaccugauuaug

SEQ ID NO: 4179961 - RNA, 68 nt, Human
cgucaaguaauaguucuaacuuuguugagcguguuaagugcuuaacacagugucuaccauuauugaug

SEQ ID NO: 4179962 - RNA, 129 nt, Human
cgucaccgucagccuucgguacuugaagagugguuaucccugcuguguucgcuuaauuuaugacgaaucauacagggacauccaguuuuucaguaucaaauacugcuuuggaaggcuucccggacagcg

SEQ ID NO: 4179963 - RNA, 80 nt, Human
cgucagucagcagcuguuuacggaacaccagcugcaggccaggcaccgugcugcaaggcguagauauguugcugaacacg

SEQ ID NO: 4179964 - RNA, 111 nt, Human
cgucagugaacuagugguagaaaggagcaaaugccaagugggaggcacagaaucaccucccuuugcuuccagcuuguggcgcuuuccuucugucugucuacaaugcuggcg

SEQ ID NO: 4179965 - RNA, 64 nt, Human
cgucaucuuucuucagcccuguaagaucacccaugaaggaugauugggagaagaugagauaaug

SEQ ID NO: 4179966 - RNA, 60 nt, Human
cguccugagaccauggccuuaguaaauacucauugcuuucagccacuguguuucugggug

SEQ ID NO: 4179967 - RNA, 66 nt, Human
cgucuagagcagagucuauuuccacacuccuuggaucugggguuggucacuugacuugcuuuagug

SEQ ID NO: 4179968 - RNA, 129 nt, Human
cgucucccaggcuguagcucucacugucugucuguuccugcuggcucuucuggguucugugucuggggcaagagaagagagaagggagggccagagagaugaaggggaggggagagucacagagagggg

SEQ ID NO: 4179969 - RNA, 64 nt, Human
ccugcuucagggaugauggcacugugucaaaaaugucaugauuugcauuguugcugagagcagg

SEQ ID NO: 4179970 - RNA, 55 nt, Human
ccugcuuccucacauguaagcaacacacucaaguguauuugcaaaggaaguaugg

SEQ ID NO: 4179971 - RNA, 95 nt, Human
ccugcuucugugugauccuggggaagucacuucucuuugggucucugcaaaauuaaagaguuggacuuucucaggcauuuguagggaaagaaagg

SEQ ID NO: 4179972 - RNA, 55 nt, Human
ccugcuugauauuuguaguagggaaaggugaucuuuacuaaacaaaacaugcagg

SEQ ID NO: 4179973 - RNA, 65 nt, Human
ccuggaaggcauuuauuccacaagcaggucagaagacauguuuuaagggucaacugucaccuagg

SEQ ID NO: 4179974 - RNA, 58 nt, Human
ccuggacagagggcagcggccagguuggagccuccagccacaugcagccucuucuagg

SEQ ID NO: 4179975 - RNA, 80 nt, Human
ccuggacauuuggucacaccaguccacauuaacguggaccagacaauauuaauguggacuggugugaccaaaaguccagg

SEQ ID NO: 4179976 - RNA, 75 nt, Human
ccuggacugucuuguuccaagacuaaaauuuuccaaagaccuucaaauuuacagugcucuucaagacuucccagg

SEQ ID NO: 4179977 - RNA, 61 nt, Human
ccuggagaccaggucuuggugcacacaacuugcuuuaucacucuucacacuugucuccagg

SEQ ID NO: 4179978 - RNA, 83 nt, Human
ccuggagaucuuguuaaagugcagauucugaucuaccaggucugggcuaggcgggagagucugcauuucuacaagcucccagg

SEQ ID NO: 4179979 - RNA, 57 nt, Human
ccuggagauugccacuuggaaggucauugugaccuuugacagcgugguuucuguggg

SEQ ID NO: 4179980 - RNA, 67 nt, Human
ccuggagcacagaggagccugggucuccuuuucaucaugcucuucuguggcucucaccacccacagg

SEQ ID NO: 4179981 - RNA, 83 nt, Human
ccuggagcucugccugccucucuccccgccucugccuccccccggagaggcggcuucugaggaggcugcuguuggcggccagg

SEQ ID NO: 4179982 - RNA, 60 nt, Human
ccuggagcuuuuccaguugacauguuccuccccuccauuucccacugccacagcuucagg

SEQ ID NO: 4179983 - RNA, 80 nt, Human
ccuggagggaaacaugggcagaauugugguaguuaaagucuuuguuuggaauuaacuuuuauuucugcucgcccaccagg

SEQ ID NO: 4179984 - RNA, 75 nt, Human
ccuggaggguugggggucucgggggccacccgcguuuuaugcacagugguccugagcaccagccugaccucuggg

SEQ ID NO: 4179985 - RNA, 67 nt, Human
ccuggauaauagauccuguucuuguugacuggaugaaguuaauaaagcuucugagucuagauccagg

SEQ ID NO: 4179986 - RNA, 57 nt, Human
ccuggaucacacugugaagaauugcugugagagaaauucaaauucagugugacuagg

SEQ ID NO: 4179987 - RNA, 80 nt, Human
ccuggauccaggcccaggaagugacucagauguggcaaagaagccauguuguugaagaacaucccggggcuggauuuggg

SEQ ID NO: 4179988 - RNA, 56 nt, Human
ccuggaucccgauggcugugaggagcuagaguuuccacuuccuaauggauucaagg

SEQ ID NO: 4179989 - RNA, 73 nt, Human
ccuggaugucuaguacuugcucuugaacaggcuuagacacagcuccucaggaagcucuugcugauucuccagg

SEQ ID NO: 4179990 - RNA, 87 nt, Human
ccuggcaagguuggcuuuguagcugugaggggauguucaugugagggaaacaugaaagcucagugcacugacagcccccaugccggg

SEQ ID NO: 4179991 - RNA, 96 nt, Human
ccuggcaauccaacugcugcuguuugccgucauugccuugaugucauuguucaggugggaggcaggaaggguaaggagaaaguagugaaugucagg

SEQ ID NO: 4179992 - RNA, 60 nt, Human
ccuggcacaagagcagcauugguuuaaucaucagcagcccuucugcucucuguagucagg

SEQ ID NO: 4179993 - RNA, 68 nt, Human
ccuggcacaucacuccuaguuuacagcugaagaaauugacugucagaaagguugagucaugugccagg

SEQ ID NO: 4179994 - RNA, 61 nt, Human
ccuggcacaugugagccacaucaucaacauuuccuggaugagggcauuauucugggccagg

SEQ ID NO: 4179995 - RNA, 59 nt, Human
ccuggcaccuccagcucauggcccugagcgggcagaguuggccagcuggaggcgccggg

SEQ ID NO: 4179996 - RNA, 65 nt, Human
ccuggcagcauugguagagauuuuuauuuaaaaucugaacaccacucucugcaaucuguccaugg

SEQ ID NO: 4179997 - RNA, 85 nt, Human
ccuggccaccgagcccccuggaacccauggccaguguagagcagcuacagcuugucugguuucagguccaccucagggugucagg

SEQ ID NO: 4179998 - RNA, 65 nt, Human
ccuggccagcuaauugcccaucuagggcauucucauacugccucuugggcugugucugguccagg

SEQ ID NO: 4179999 - RNA, 55 nt, Human
ccuggccaggcggccccugcaugcucaggugggcagugcugagagccuggccagg

SEQ ID NO: 4180000 - RNA, 55 nt, Human
ccuggccaggcucucagcacugcccaccugagcaugcaggggccgccuggccagg

SEQ ID NO: 4180001 - RNA, 76 nt, Human
ccuggcccagggaguucaugguguguccuaagccacaucagucacaccuagaaccuuaucccugaccaaggccugg

SEQ ID NO: 4180002 - RNA, 79 nt, Human
ccuggccgcaucugccccugggcuggucuggcuuagucaggagggcagcccuuggcccagggcacagacacaugccugg

SEQ ID NO: 4180003 - RNA, 78 nt, Human
ccuggccgggcaagguggcucaugccuguaaucccagcacuucgagaggccgaggcgggcagaucaccugaggucagg

SEQ ID NO: 4180004 - RNA, 93 nt, Human
ccuggccucggccuuuguccagcgaccaggcucuguccccgagaagcuacggccgaccugggucugguguugggacgcauggaccgggcuggg

SEQ ID NO: 4180005 - RNA, 78 nt, Human
ccuggcgugggaggguugggcugggcaugggccacggcugcccccacagagcccacccagcugagccgcucacccagg

SEQ ID NO: 4180006 - RNA, 58 nt, Human
ccuugguccaacccugcacagccucuaaguggcaaagggcaaugcgggagggccaggg

SEQ ID NO: 4180007 - RNA, 56 nt, Human
ccuuggugcuauuucauuucaugguguuaccaagaccugugaaaucagcacccagg

SEQ ID NO: 4180008 - RNA, 61 nt, Human
ccuuguaaguacauugaaacaucuuguuauuaaguacaaggauaguuuuauauuuaugagg

SEQ ID NO: 4180009 - RNA, 58 nt, Human
ccuugucaccaggugcaagacacaacaggaccacugggggcacgcuggcuugauaggg

SEQ ID NO: 4180010 - RNA, 71 nt, Human
ccuugucuuggguaguugugaggaagugaggagagaggagagcuugugucucacagcgaucuaggaagagg

SEQ ID NO: 4180011 - RNA, 76 nt, Human
ccuugugguaggaagugagcuaaggaguuuuuaguuuuaaaguggaaggcugugauuacugugccugcucauaagg

SEQ ID NO: 4180012 - RNA, 74 nt, Human
ccuuguugcaaacauucacuccaccauuccaguacaaaagcaaccauggaugagauguaaaugaaugagcaggg

SEQ ID NO: 4180013 - RNA, 65 nt, Human
ccuuguuguuugacaugcaaagcacuuuagacuauauuuaguaccuaauugauguggcagcaggg

SEQ ID NO: 4180014 - RNA, 66 nt, Human
ccuuuaaauuguuuuacacucucacuucacuuggagaaaguugacagggagguggaauaaguaagg

SEQ ID NO: 4180015 - RNA, 82 nt, Human
ccuuuaaauuugcauuuucaccagagacacuuaaaacuaagauagagagaagucaaugaugagagugcuuuguuauagaagg

SEQ ID NO: 4180016 - RNA, 69 nt, Human
ccuuuaacugggagcaguauuuuguuuugcucaguuucauaauggagaacagcuguucgcagauguagg

SEQ ID NO: 4180017 - RNA, 58 nt, Human
ccuuuaauugucugaagaaaaugauugagaagcagcaaucuucaaaaacaauugaggg

SEQ ID NO: 4180018 - RNA, 56 nt, Human
ccuuuagaaagucaguaguugccccaaauuggcacuucauggcacugucuuagagg

SEQ ID NO: 4180019 - RNA, 102 nt, Human
ccuuuaucuucugauuauuuccccagaaaggcuguuaauuuuguaggcacugcagaguuccacguacagcuuuuguguauuacagaaagucugagaagaagg

SEQ ID NO: 4180020 - RNA, 69 nt, Human
ccuuuauguacuguguauuugaacugcucauagaaucccuuguucuuuaaauacgcugugcauucaugg

SEQ ID NO: 4180021 - RNA, 72 nt, Human
ccuuuauuaaguucuugcugugugucagaugccaugguagguauuggaaauacaguagaaaaauaauauagg

SEQ ID NO: 4180022 - RNA, 69 nt, Human
ccuuucaaauaccauaaaccuaaugaagcagaugauugacauaaggucagaugguguuugauauuuagg

SEQ ID NO: 4180023 - RNA, 59 nt, Human
ccuuucaauaacaaagcucauuuugacucagcuuggucaagaagcaauuuauuggaagg

SEQ ID NO: 4180024 - RNA, 72 nt, Human
ccuuucacacuuuuguucuaauccgguucuuuuaaccgaggacuucaaauggaaacaaaacaaauugaaagg

SEQ ID NO: 4180025 - RNA, 89 nt, Human
ccuuucacugagggugcacuacauguacucacugugcuagauauugggaauacagggcugagugagacaugggcagacucccugagagg

SEQ ID NO: 4180026 - RNA, 57 nt, Human
ccuuucaggcagaauguagacugagcgcuccugcuacugcugccuguugcugagagg

SEQ ID NO: 4180027 - RNA, 78 nt, Human
ccuuucauaaaggaaaugaugagacuuggaauaauuccugaaauggaaaaaccuagacuuaacauuuuaaaugaaagg

SEQ ID NO: 4180028 - RNA, 80 nt, Human
ccuuuccccacugcccaggaaccagaggggcagauaaguaugacucagcugccccguggugcuuguagacuggcaagagg

SEQ ID NO: 4180029 - RNA, 121 nt, Human
ccuuucccucuaguaguacucaacacacuuguaauuacauguucaaauuugucuuucuuauuucuacuuagguucaugaaggcaagggacaugccuguguugcuuacuuucucuuggcagg

SEQ ID NO: 4180030 - RNA, 75 nt, Human
ccuuuccuagagcuuccacucuagaaggagucucagguuaacauuaggacucacuuugggcugggagcugagagg

SEQ ID NO: 4180031 - RNA, 68 nt, Human
ccuuucuacuuccagcagccugcuugcugguaauuucuucagugcccggacaacuggacagagaaugg

SEQ ID NO: 4180032 - RNA, 78 nt, Human
ccuuucucuugaccaugauagacacuugugccgaaaaauagucuggcacacauagaucugcacuggcuuagagggugg

SEQ ID NO: 4180033 - RNA, 69 nt, Human
ccuuucugaggccauuaccaauaaaauggagaucacaaugucuacuuuauaugacgguuucagaauugg

SEQ ID NO: 4180034 - RNA, 71 nt, Human
ccuuugacaacucuucuaucaguccucuugggaacucuaagaggaugauuuuaaggacacugucaacuggg

SEQ ID NO: 4180035 - RNA, 84 nt, Human
ccuuugcguuuuaggucaucuuaauucucaguaucugacggaaugucagcuauugauaaauguuggggaaauuuggaguaaggg

SEQ ID NO: 4180036 - RNA, 55 nt, Human
ccuuuggaagcuggaaauggaaaggaaacagauccucuuucacaaccuccagagg

SEQ ID NO: 4180037 - RNA, 66 nt, Human
ccuuuggccuggcugcccugucuggagugaggagucuuuguggaaggaggccaggcccagcagagg

SEQ ID NO: 4180038 - RNA, 81 nt, Human
ccuuuggcugugcucccaacuucaacucccuuccccaugggcccauccugaaguuagucuugaaguuagucagucuuuagg

SEQ ID NO: 4180039 - RNA, 129 nt, Human
ccuuuggggccuggucagagcugcacggugcugccuuuggggccuggucagagcugcacggugcugccuuuggggccuggucagagcugcacggugcugccuuuggggccuggucagagcugcacggug

SEQ ID NO: 4180040 - RNA, 72 nt, Human
ccuuugggguccucaacacccggcuguccccagacuuguguccagggaagauaguguugagggcccucaagg

SEQ ID NO: 4180041 - RNA, 67 nt, Human
ccuuugguguuuuacaaagguauuuuacauaugauuuuauaugaagaaaucuuugaaaauccauugg

SEQ ID NO: 4180042 - RNA, 81 nt, Human
ccuuuguaaucuucgcugagaugaugaauucauuuucauacuuuaagagggucacucgucaacuguagugacuuagaaagg

SEQ ID NO: 4180043 - RNA, 57 nt, Human
ccuuugucuugggccaagcuugcucagcaugagucauugcauuguuugaggcagagg

SEQ ID NO: 4180044 - RNA, 82 nt, Human
ccuuugucuuuucuucccaagcaguuucagagucuuggauaugacuugagcugccucaguuggguugagcugaagacacggg

SEQ ID NO: 4180045 - RNA, 60 nt, Human
ccuuugugucuugaugguagaugugaauauaaaagaauauucaugcaagauucauaaagg

SEQ ID NO: 4180046 - RNA, 57 nt, Human
ccuuugcugugguuuuagucaacaccuuggagagcagagguuaaaccauaaagaagg

SEQ ID NO: 4180047 - RNA, 55 nt, Human
ccuuuggagcaacugagagcuacucuuggaagauuaaggcuccagucuucagugg

SEQ ID NO: 4180048 - RNA, 78 nt, Human
ccuuuggauacugucucuugcuccugcccuccaggccuaacgccgguauagugcagcagggggaagacaguguggggg

SEQ ID NO: 4180049 - RNA, 58 nt, Human
ccuuuggcugcauagggaaggggugcccacaugcccccgcccgcauucaguucgaagg

SEQ ID NO: 4180050 - RNA, 72 nt, Human
ccuuugggcuccucaacacccggcuguccccagacuuguguccagggaagauaguguugagggcccucaagg

SEQ ID NO: 4180051 - RNA, 72 nt, Human
ccuuugggguccacaacacccggcuguccccagacuuguguccagggaagauaguguugagggcccucaagg

SEQ ID NO: 4180052 - RNA, 80 nt, Human
ccuuuguagguuucauaguuuauagugauacugcugauguugucucagagaauuagucacaauuauaggaacucagaagg

SEQ ID NO: 4180053 - RNA, 126 nt, Human
ccuuuuaccaagcccaugcgccuucuccugggcugcuucaggcaagggaaaaaaaucucccagugucacagugaggcaguucuuguacucagaagaggccauggaaaauuuuugcuuaagaaaagg

SEQ ID NO: 4180054 - RNA, 107 nt, Human
ccuuuuaucacauauaaaacccuucucaugcauaguuauagagacagucuaaaucugaccaucagggucuuuacaaucuaagcauaguuuuggcauauguugaaagg

SEQ ID NO: 4180055 - RNA, 74 nt, Human
ccuuuuccaacccaaaagcguuuccauuuuuuuaaugcuggaagugucuuaacuccuuuuggggucuuagaagg

SEQ ID NO: 4180056 - RNA, 85 nt, Human
ccuuuucccacugugggccugauguucuucucuauuucgcugggauauuuuggggacaauauucaggcccacucuuuugaguugg

SEQ ID NO: 4180057 - RNA, 92 nt, Human
ccuuuuccccagagccccuggaggucagaggccugggaaggcgguggccuaggguugcaggccucagacuuagccaugcucuggguuucugg

SEQ ID NO: 4180058 - RNA, 59 nt, Human
ccuuuucuagaaagggaggcaacacacauguuggguaaaucucaguuucuagagucagg

SEQ ID NO: 4180059 - RNA, 60 nt, Human
ccuuuucuguguggguaauuuaucuaccuagaaagauuacaaacucacagcagaagaagg

SEQ ID NO: 4180060 - RNA, 57 nt, Human
ccuuuucuguuuccugucacuguuguggcaaaaacauggcugaccuagcagagaggg

SEQ ID NO: 4180061 - RNA, 70 nt, Human
ccuuuugaggcuugggcucagaucuaguauaacaacaucuuugccacaaaacaaguccaaaaucagaagg

SEQ ID NO: 4180062 - RNA, 68 nt, Human
ccuuuuucuagagauuuugugaaguaucagaggccaucauaugcuucuaauuuuuuacagaauaaagg

SEQ ID NO: 4180063 - RNA, 98 nt, Human
ccuuuuuuagauggguugggugguacaacugggccauguuuuauguugucauaaaaauuauucauggcuuuuggaucaaaguugccuauaaaaaaagg

SEQ ID NO: 4180064 - RNA, 57 nt, Human
ccuuuuuucuaugccaacucugcuucccagucaagcggaaggagccaagagaaaagg

SEQ ID NO: 4180065 - RNA, 76 nt, Human
cgaaagcucaauugugaugauugcacaaguguauaaauuuacuacaacuuaugaaugucauuauaaugugguauug

SEQ ID NO: 4180066 - RNA, 79 nt, Human
cgaagauuaaggcauuggaagauucugugucuggugagguccugcuccucaaagacagcaacuuccaccuguguguuug

SEQ ID NO: 4180067 - RNA, 63 nt, Human
cgaaggaaucacuuaacacuuucaaagcuauaaaugguuuacaaagugguaaggauuauuuug

SEQ ID NO: 4180068 - RNA, 74 nt, Human
cgaagguaaagccuuaguuaaaagaaguagaauccugacacucgggauacugaauuagguaaagcauacuuuug

SEQ ID NO: 4180069 - RNA, 64 nt, Human
cgaagguaguagggacuugggaguggugacugaaccuggucuggcuccuccuuacuuccucuug

SEQ ID NO: 4180070 - RNA, 56 nt, Human
cgaaucacuguuauugaccauaagccacaaaguugucuggucagcauuaggauuug

SEQ ID NO: 4180071 - RNA, 68 nt, Human
cgaaucugccagguguccgggagucgcucggggacgcgcgagcuccuugaagggcucugggagaugcg

SEQ ID NO: 4180072 - RNA, 84 nt, Human
cgaauuaauguuggagagccaguuaagcacuuacagcugugugguaggcauuugggggcucacaagacaaauauuaaucuaucg

SEQ ID NO: 4180073 - RNA, 76 nt, Human
cgaccaagacagacugcagggcggucaucagccauuauugccucuugggccgggacuguccucugugucugugucg

SEQ ID NO: 4180074 - RNA, 94 nt, Human
cgacgccccuguuucuggaaacggguucaagcuugauccaggauccuucuugaccaggcaagcuugaccuuugauccaggcucagugggcguug

SEQ ID NO: 4180075 - RNA, 69 nt, Human
cgagaaaguuuucuaacaucuaguaauuuguaacuuagaaguggaguugccuuguggaugucuuuuuug

SEQ ID NO: 4180076 - RNA, 66 nt, Human
cgagaagaggugauucauauugagacugccuaggucaaggaaucuaaagugagucauuucgacuug

SEQ ID NO: 4180077 - RNA, 73 nt, Human
cgagaagucgaucaccucguccuccgugccguggaugaugagcacgggagacgugaucuuggacaccuucucg

SEQ ID NO: 4180078 - RNA, 73 nt, Human
cgagaagucgaucaccucguccuccgugccguggaugaugagcacgggcgacgugaucuaggacaccuucucg

SEQ ID NO: 4180079 - RNA, 88 nt, Human
cgagagcucuuuaacaaguauuuacugagcagcuaccaugugccaccaucaggcauggguguaauagugggugagagcaauggucucg

SEQ ID NO: 4180080 - RNA, 66 nt, Human
cgagaugccgaggcggcaggaagccggaacccaucccccgccugcucuggcguacucggcaucccg

SEQ ID NO: 4180081 - RNA, 61 nt, Human
cgagcggugcgcgcuccgaguggccgggacgcgcgccaguccugggagcuugcacugcucg

SEQ ID NO: 4180082 - RNA, 64 nt, Human
cgagcuuaugacucagaagauauuuuccaguuaguaguugguaaauaugucuuuugaguuuuug

SEQ ID NO: 4180083 - RNA, 68 nt, Human
cgaggaagcugaggcccauggcaagguagucuuuaaaagacacuuuguuuucacgcuucauuucuuug

SEQ ID NO: 4180084 - RNA, 66 nt, Human
cgaggagaccaggcuggaguucuguagaguguaaaauccuggauguccucucagccugucuccuug

SEQ ID NO: 4180085 - RNA, 69 nt, Human
cgaggcagacaaaaguuggaaggccgguuaauuuuccccuccuucuccugcuucagcuuugucuccucg

SEQ ID NO: 4180086 - RNA, 55 nt, Human
cgagggcuucacugauguucuuugggaguggagauucaucaaguggaguaucucg

SEQ ID NO: 4180087 - RNA, 57 nt, Human
cgagguaguggcggccgcggcccaccaccaacugcucgccaccgaccccacuacucg

SEQ ID NO: 4180088 - RNA, 69 nt, Human
cgaggugguggucuuggauguugcuaaccaaaguguuguuccccagcccagcagacuguuaccacuucg

SEQ ID NO: 4180089 - RNA, 89 nt, Human
cgaguauacguuagcaugucagucgccacacgucucagugacgugcgcuucagggcacgugggcgaaauggcauccugacuccaacuug

SEQ ID NO: 4180090 - RNA, 60 nt, Human
cgauggcagcagcagccagggaugcaacaagagucacauucgcuuugaaggcugcccuug

SEQ ID NO: 4180091 - RNA, 73 nt, Human
cgauucugcaguucuuuggcuuuuagaauuucugcuucagaauuccguaaggcugaagaugcugcacacuuug

SEQ ID NO: 4180092 - RNA, 66 nt, Human
cgcaagcuggucaccaccucggagaccuacgucaagaccaugucccugcagcaggugaucaaugcg

SEQ ID NO: 4180093 - RNA, 62 nt, Human
cgcagagagagaugaaggguguggaggcugaguccucuaggaaccugacaucucucaaugug

SEQ ID NO: 4180094 - RNA, 58 nt, Human
cgcaggccgcugcuacggaggcgcccgcucgcugucucgcucucuggcggugucugcg

SEQ ID NO: 4180095 - RNA, 71 nt, Human
cgcaggccgugggcgcgcacggccgcugccgccguuuguucugguggaggcugcgagugccugggccugug

SEQ ID NO: 4180096 - RNA, 95 nt, Human
cgcaguaacccaucaauucagugaaacaacuacuauugauuucuggggguuuuccaccccacugguuguuuaacugaauugauggguguucugug

SEQ ID NO: 4180097 - RNA, 81 nt, Human
cggaguuugcaggucuugggagaguccaugaaacacugauacauacauuuauguucuuccaaaucuguaacaaagcacacg

SEQ ID NO: 4180098 - RNA, 73 nt, Human
cggaguuuggagaaugaaggagagcccucugcaggauugcaaugccaguggcacuugucauuucugagcuucg

SEQ ID NO: 4180099 - RNA, 75 nt, Human
cggcaauccuguuaacccagggugaggggagucuagccgggcugcuuuucucacucccuggaaaacuuuuugcug

SEQ ID NO: 4180100 - RNA, 84 nt, Human
cggcacacccucaaagccuuucucauuuuaagcauuagaucacuuuguaucagagccacuuggagaugagaaagugggaguccg

SEQ ID NO: 4180101 - RNA, 57 nt, Human
cggcacaggguaaacguuacccgccucaguuucuguuugucuguccacccugugcug

SEQ ID NO: 4180102 - RNA, 99 nt, Human
cggcacauccgcccuuuggcacguggugugugugaauuacgcguguccugaugcagcacacagugacucgcaccucagugugaccagguuucuguguug

SEQ ID NO: 4180103 - RNA, 57 nt, Human
cggcaggugugcucacucugcccgggagcgucuccccgccgaggagcgcccaugcug

SEQ ID NO: 4180104 - RNA, 68 nt, Human
cggcaguccauuggugacacugggaccaugcuggccucagcaggugcccuucagacagugggcagcug

SEQ ID NO: 4180105 - RNA, 79 nt, Human
cggccgcugugcugcgggaggauuccgauccgggucagguuucgcuggaacgguucccugagcaagugcacgugggccg

SEQ ID NO: 4180106 - RNA, 63 nt, Human
cggcgccgccugcugaugagcggaucuccggaccccccgccagcagcgauagggugagugccg

SEQ ID NO: 4180107 - RNA, 89 nt, Human
cggcggcgguggcggugguggcaguagcacugggccugcgggcgguccgggauccaggccggggcggcgccaucuugugcccggggccg

SEQ ID NO: 4180108 - RNA, 64 nt, Human
cggcuccaggaccagggcuccuggagcugucgccuccgaaaggguccugcguccuucggagccg

SEQ ID NO: 4180109 - RNA, 60 nt, Human
cggcucugaccggauuggagagagcuuuucuuuguguucucuccucccggggagaggccg

SEQ ID NO: 4180110 - RNA, 87 nt, Human
cggcugcaccugucuucugugccucucuccucucuuccccuccaucuggggaaagagggacaggcgcagacacagagcaagcggcug

SEQ ID NO: 4180111 - RNA, 65 nt, Human
cggcuguggcggcagcagcuggugccugucaguaaucacgcauaaugcugccgccgccgccgccg

SEQ ID NO: 4180112 - RNA, 56 nt, Human
cggcuuccaacaagcuuugcugaaacccagaaccagccaagagugucugggggccg

SEQ ID NO: 4180113 - RNA, 61 nt, Human
cggcuucuuuuaagguugcugaagcaaacacuuugcuuaauauuugaaccuagagaaguug

SEQ ID NO: 4180114 - RNA, 57 nt, Human
cgggaaaguuccacagauggaugggggagaugauugcccaacagugugaacauccug

SEQ ID NO: 4180115 - RNA, 79 nt, Human
cgggaagcugugccuauucguggcaaguucaagauaaaaugcauauguccuugcaaugaaggcacacuuauuuaucccg

SEQ ID NO: 4180116 - RNA, 117 nt, Human
cgggacguggccacaggugggcuccgggcgcgggaaggagcccgagaaggcggagcuugcaggggcccugaacucuugcccuccaggucucggcccagccccacuguggucccccug

SEQ ID NO: 4180117 - RNA, 64 nt, Human
cgggagaugaguggagccaggaguugggaugggaacuuugcucuguggcuccuucaggcugcug

SEQ ID NO: 4180118 - RNA, 103 nt, Human
cgggcauggcuguuuaggggcagcccccucauucucugagcuaguuuugcaaaacuugguggggggugaggguaguugcccacaggagcagugaaaugagcug

SEQ ID NO: 4180119 - RNA, 58 nt, Human
cgggcgccuguagucccagcuacucgggaggcugaggcaggagaauggcgggaacccg

SEQ ID NO: 4180120 - RNA, 70 nt, Human
cgggcguguucagcaagaauguuucuauuuugcucuaugucaugauaaauuacgcuugcuggcugcaucg

SEQ ID NO: 4180121 - RNA, 66 nt, Human
cgggcugcagggcuguggucuggagugcggacaguaccagcucccacugcuguccugccaugcuug

SEQ ID NO: 4180122 - RNA, 67 nt, Human
cucaaggguguguuauacauccucacucucauagagaaagaucugaauguaacacaugagcuuugag

SEQ ID NO: 4180123 - RNA, 56 nt, Human
cucaagucaauacauuucuacgaguggaaagacaaaguugagaaaguugauuuggg

SEQ ID NO: 4180124 - RNA, 57 nt, Human
cucaauaaauuguaguuguuaugcuacuaguauuagcaccauuacaguuugauuggg

SEQ ID NO: 4180125 - RNA, 73 nt, Human
cucaaucauuuugcuuuugcaucauugaugaaacuuccuuccuuucuuucuugcaagagcagaaagaacugag

SEQ ID NO: 4180126 - RNA, 59 nt, Human
cucacaagaacugcucagucuuccgcaggauuauucugcuggagaagcaaaguucugag

SEQ ID NO: 4180127 - RNA, 85 nt, Human
cucacacacucaaggggaaucagagaagacuuccugaaggaagugaugucuaacuugaucccugagggaugaguaaaaaguggag

SEQ ID NO: 4180128 - RNA, 89 nt, Human
cucacacauuggccacagcagaugcuucagauggauuguaucaaauggaaguaaggaucaggguauuucgcugggccgagauuggugag

SEQ ID NO: 4180129 - RNA, 69 nt, Human
cucacagcaggguaacaggaagacccccuccuccagccaaaagagucccacugagccccugcuggugag

SEQ ID NO: 4180130 - RNA, 61 nt, Human
cucacaggaaguggucagugccaguaggaaaaaaaaguccucuuugguauauuuccuuggg

SEQ ID NO: 4180131 - RNA, 58 nt, Human
cucacaggcgcagcaccaggugaaggguggacucuuucuggauguucuagucugagag

SEQ ID NO: 4180132 - RNA, 56 nt, Human
cucacagucucucccuaauuuuuaauacaaaagauggagauggggaagagugugag

SEQ ID NO: 4180133 - RNA, 71 nt, Human
cucacaguuucuauaggucagaauuugauagcagcuuaguugagugauucuggcuuaaggugucugaugag

SEQ ID NO: 4180134 - RNA, 61 nt, Human
cucacauagcagagagcagagagagaagaagcaagcucucccaugucucuucuuauguggg

SEQ ID NO: 4180135 - RNA, 55 nt, Human
cucacaugauggccuuuuucauuagaauucuuuuggaacguaggaagucugugag

SEQ ID NO: 4180136 - RNA, 70 nt, Human
cucacauguaaaaggaacaugcaugcuaccuguagcuacggccagacuguguguguguuucugcauguag

SEQ ID NO: 4180137 - RNA, 65 nt, Human
cucacauuccacuugugccaaccuuucccaaggaaugaguuccucuacaagugaaauguucagag

SEQ ID NO: 4180138 - RNA, 57 nt, Human
cucaccaaggccugaacugcccaagacucugcaugagugggcaguggcacuagggag

SEQ ID NO: 4180139 - RNA, 87 nt, Human
cucaccagcccagccaccacaucuagauugcagcccugggacacacucugcaaaagagggugugggaagcggggucauggcuauggg

SEQ ID NO: 4180140 - RNA, 108 nt, Human
cucaccaggcuucaagcugcugccuggauggcucugagcagggcuggcuguuucaccccaagcugagcaccaucugaucaccuagaggcagugcuggggcaggcugag

SEQ ID NO: 4180141 - RNA, 85 nt, Human
cucacccauuggcuguuuuauaggucaguuaagugugcuuagcuaauguacugagacuuaaaagcaagcccaagaauaggguggg

SEQ ID NO: 4180142 - RNA, 130 nt, Human
cucacccccgaagcuuaauuaaaaugaagaugaaguacucuccaugacgggucacacucaguggcagccaccgugccagggacccugucggcccucugaugccgagaauucuucuccagcuucuacucug

SEQ ID NO: 4180143 - RNA, 57 nt, Human
cucaccuagugauccgcccaccuuggccucccaaagugcugugauuacaggcaugag

SEQ ID NO: 4180144 - RNA, 77 nt, Human
cucaccuuagugaggggcagcugagugggcagggugaugccuucuuuagccagcagcuucuucucauccucggugag

SEQ ID NO: 4180145 - RNA, 61 nt, Human
cucacgccuuccccuguauaguauagcaccccuaacuguauguguaaggagaaggagugag

SEQ ID NO: 4180146 - RNA, 76 nt, Human
cucacuaagugcucaauucauauuggucuauuuuaaucaucauuauguuacaguugaguaaauuaaacuuggagag

SEQ ID NO: 4180147 - RNA, 60 nt, Human
cucacuaugcuauggcugccuucuuuuauagucuaggaaaaggcagaagcauggaaugag

SEQ ID NO: 4180148 - RNA, 58 nt, Human
cucacucacugcugugucucuugcacccagcauggugcugggcagagcuggugcugag

SEQ ID NO: 4180149 - RNA, 62 nt, Human
cucacucaggcugugucaggaggaaggaagaguaaaccuccagcugacaucuccugagggag

SEQ ID NO: 4180150 - RNA, 77 nt, Human
cucacugaaucaagauguaucgacucuauucaugucugcggacaucuuugaauccuuuacaucugagacucaguggg

SEQ ID NO: 4180151 - RNA, 57 nt, Human
cucacugcaaaaaaccaaggccaaugucucaaacacugguguaguuuucugcagggg

SEQ ID NO: 4180152 - RNA, 55 nt, Human
cucacugcucuucccaagcugccauguuagaggccacuggaaaguuggcagugag

SEQ ID NO: 4180153 - RNA, 80 nt, Human
cucacuuaaggcagacaaguccagaacuggcaucuacucguauuucagucucuggcugugucugacacauugucagugag

SEQ ID NO: 4180154 - RNA, 65 nt, Human
cucagaaaccauguugucuugaauaggcauguucugcgucaucuguucauacacaugcguuugag

SEQ ID NO: 4180155 - RNA, 130 nt, Human
cucagaagaauaggcuuguuguuuuacaguguuagugauccauucccuuugacgaucccuagguggagauggggcaugaggauccuccaggggaaaagcucacuaccacugggcaacaacccuaggucag

SEQ ID NO: 4180156 - RNA, 76 nt, Human
cucagacuguacucuucuagccaucugaaauacguuuucuagguagagauagauuguguaaggguacaguugugag

SEQ ID NO: 4180157 - RNA, 59 nt, Human
cucagagaagucuuugcuaaacccccuaucgaugaggaggccauggcguggcuuuugag

SEQ ID NO: 4180158 - RNA, 68 nt, Human
cgugaaacagugguuaaguggacuggguucaugaagauuuagcuauggauaacaaccaccgugacaug

SEQ ID NO: 4180159 - RNA, 96 nt, Human
cgugacaaacccuuggcugagcaugagaugagcaauaagugagugguagcuccuuuccagccucaccucagcugcagaaacaagaggcucuucacg

SEQ ID NO: 4180160 - RNA, 63 nt, Human
cgugauagauuucugcucaagcuuaguuccaggaaacguuugguuucugcagauguuuacaug

SEQ ID NO: 4180161 - RNA, 102 nt, Human
cgugauguuuagcauaauauuuguaaaggaacuagcaugauguguaguacaugacaguuuagaaauuuuguuacuucuuuuaguuaaugccaaacacuuacg

SEQ ID NO: 4180162 - RNA, 78 nt, Human
cgugauucugccugugccaaugcuccuuugucccuguuuaaguuggagagaagccugacacuggccaucaggaacaug

SEQ ID NO: 4180163 - RNA, 73 nt, Human
cgugauuuuaucuuacuugcagauguagaaguuaauuucuaaauugaucaaaugcauagaaagaugaaacaug

SEQ ID NO: 4180164 - RNA, 77 nt, Human
cgugcagucagucuggagagguaagucagccggaacauggguuuugguucauuuucucaucuagaugugacugccug

SEQ ID NO: 4180165 - RNA, 113 nt, Human
cgugcgugucagauuuaggccaggaagcggaagucgccagcagcgagaguuuaaccucugugggcgcagaggguugcggggauucagcgcccgggaccguggaucugugcagg

SEQ ID NO: 4180166 - RNA, 64 nt, Human
cguggagggcuccugcaugcugccagccuuggguuguccccuggccuggcaggggaccucuaug

SEQ ID NO: 4180167 - RNA, 68 nt, Human
cguggauggcaguggccaccuccuuggagcacuuaacacccagaccgauguggccauuguaguccacg

SEQ ID NO: 4180168 - RNA, 65 nt, Human
cguggcaguagagcuggaacuugaaucuggaauuaucuggcuagugaucuagcucuucuuccaug

SEQ ID NO: 4180169 - RNA, 130 nt, Human
cguggcggccccgguggagcgggcgcagcuaggcgggcccgagcugcagcggcugacgcaacggcugguccaggugaugcggcggcggcgcugcgugggccuaagcgcgccgcagcugggggugccgcgg

SEQ ID NO: 4180170 - RNA, 107 nt, Human
cguggcuccccgccaggcacggccuuucacagagauuuaaaaagaauaaacuguuggugucaguguuuuuaaguuuaggaggggaguauuuaggggaaggagccaug

SEQ ID NO: 4180171 - RNA, 66 nt, Human
cgugggacgaugcccugcucucgggaagggacccgcggucccugcugaagcggggcaugcaccacg

SEQ ID NO: 4180172 - RNA, 58 nt, Human
cgugggccaggacccgcuguccgcccgccgcccgaggucggguggacgcuuggccccg

SEQ ID NO: 4180173 - RNA, 59 nt, Human
cguggggacuacggccauguccgcugacugugcagaugcggaagcgguagucacccucg

SEQ ID NO: 4180174 - RNA, 102 nt, Human
cguggggugggugggguaggggcagggaugggaucuguggccaggcggauagggaugaagcauagcucccagauuucagccuugugccccacucagcccaug

SEQ ID NO: 4180175 - RNA, 62 nt, Human
cguggguauaggauauuuccgccauuguaaaaaguucaauuggaaaauuccauacacccacg

SEQ ID NO: 4180176 - RNA, 85 nt, Human
cgugguagcacauagaauguuggagugggguuaggggaguggggauacucauccagccccggcuuccuuacaguuugauauuacg

SEQ ID NO: 4180177 - RNA, 75 nt, Human
cgugguuuuguuagaauguagugcuucaagauuuauuuccacuaaaaucuuaaagaauauucuaccagagucuug

SEQ ID NO: 4180178 - RNA, 86 nt, Human
cgugucuuccucaugagacuuagagcuccuugaggguggggaaaauaucugaucuauuucucuaaugucuaauaugaggcagaccg

SEQ ID NO: 4180179 - RNA, 60 nt, Human
cgugugccauuuugcauagcagaagcuugagcaucuucuucaaacaaaaguggcaugaug

SEQ ID NO: 4180180 - RNA, 74 nt, Human
cguguggcuagugcaaccgaggaauugaauuuuaaauuuuauuucauuuuaauuuauauguaauuaggcacaug

SEQ ID NO: 4180181 - RNA, 58 nt, Human
cguguguaugcauggcagugagagaguaaaucucugcaggaugcaaaguguacaucug

SEQ ID NO: 4180182 - RNA, 62 nt, Human
cgugugugugucuguguguguguguguacaugcgcacauacacaugaauauauuuuuauaug

SEQ ID NO: 4180183 - RNA, 69 nt, Human
cguguuggaccaggacacaguggcaaggugagccagguuggccuucugugcuccuggccuuuccucacg

SEQ ID NO: 4180184 - RNA, 68 nt, Human
cguuacucccgaucccugagccauggaagauugucccaggcagauggcucagucauggaugaguaaug

SEQ ID NO: 4180185 - RNA, 130 nt, Human
cguuagaaucacccugggagauguaaaaauaccaauguucugguucuaccccugaccaauuaaauugggauuucugguggugggccacaagcauacauauuuuuuaaaagcucucuaggugauucuaaug

SEQ ID NO: 4180186 - RNA, 80 nt, Human
cguuagugguggcuuagaucuauuacugaaugagcccuguauucagaaauagaaaauuugauuaaacgcuucaucuaacg

SEQ ID NO: 4180187 - RNA, 61 nt, Human
cguucaccuggagaucguuggggccaggagcucugcugccugggcucaccgccucuuuacg

SEQ ID NO: 4180188 - RNA, 71 nt, Human
cguucauucaguauuuaccaagcaccuacaauaugccaccgugagaggugcuagguguguaguggagagcg

SEQ ID NO: 4180189 - RNA, 70 nt, Human
cguuccugcuaacauugcuguaaaccugaaaacaacuguuauacguuuaugagcaaugcugaggggaaug

SEQ ID NO: 4180190 - RNA, 62 nt, Human
cguucuccugcuggugccuccuucuugccgagagcaagggagcaugggugaagcaggccacg

SEQ ID NO: 4180191 - RNA, 64 nt, Human
cguugucaauggugggaugaaagucaggcgaggggucugcagccagcccagcccauugacagug

SEQ ID NO: 4180192 - RNA, 67 nt, Human
cguugucuaucuguucacacggauuaugggccauggaauacuccuucccuggaacagagagacaacg

SEQ ID NO: 4180193 - RNA, 72 nt, Human
cguugucuucuuagccagcuaacuuaagcaccuuccaggggcucugagcucugacuaguauugaggcaaacg

SEQ ID NO: 4180194 - RNA, 86 nt, Human
cguuuaaugaagcucacucuugccugugguuucugaacaccaucaaauagugguaacugaggcagaaggguaaguggauguggacg

SEQ ID NO: 4180195 - RNA, 59 nt, Human
cguuucagcacccagagccacacggaaggguuagugguggguaaacugggucuggagag

SEQ ID NO: 4180196 - RNA, 75 nt, Human
cguuucucauugcccugugcuggaaucuucccccaggauuggggaacagggccugagcuggggaaaggagaggcg

SEQ ID NO: 4180197 - RNA, 89 nt, Human
cguuugcuuccaaucuuucguuucuccugucugcuucccacaugccacaagagaaggggacucagcaagggaacaaagaugaguuaaug

SEQ ID NO: 4180198 - RNA, 84 nt, Human
cguuuggaaaucucaguuacaucuugccucuguucucuaaaugcuugaaagaaaggaagacaagcaguggcugagcauccaccg

SEQ ID NO: 4180199 - RNA, 56 nt, Human
cguuuuucuaauaaagcggugcucuguguugcgccaaagcuggagguggaggugcg

SEQ ID NO: 4180200 - RNA, 71 nt, Human
cuaaaaauuaaauaauuucuuagagcuguuuguaaaaauuuggggacaaagccuaagaaguauuuauuuag

SEQ ID NO: 4180201 - RNA, 63 nt, Human
cuaaacagcuguauuguauugugccccgacgaauaccuguuuggaagccagacagcugugcag

SEQ ID NO: 4180202 - RNA, 92 nt, Human
cuaaacuaguaggauuaggauuagagcaaggagaguuagugaggaaguguaacuuucacugaauacuugucucauccagaauucugcuguag

SEQ ID NO: 4180203 - RNA, 130 nt, Human
cuaaagaaacgaaagacuggucagggggccauuacaauagcccaggacaaguguggccauggccuguggaagagcuagauggcaauacauugucucugaugugaaaucucuggugucaaagcccuggugg

SEQ ID NO: 4180204 - RNA, 62 nt, Human
cuaaagagcacgcuuuucucucucauugcuauacacagaggucagagaugaguguucuucag

SEQ ID NO: 4180205 - RNA, 60 nt, Human
cuaaagccacagagguuuaugcuauagauaaaauuuaaccccaaaucucaguggcuuaag

SEQ ID NO: 4180206 - RNA, 63 nt, Human
cuaaaggcucagcauucuuuucugcucauucauuuacauuugcaaagucuccugagccuuuag

SEQ ID NO: 4180207 - RNA, 82 nt, Human
cuaaagucagaguguuggcagggcugauuccuucuggaggcucuaggacaggauuccuugccuugccuuuucugacuuccag

SEQ ID NO: 4180208 - RNA, 129 nt, Human
cuaaagugccaggaagacauagggacaauucaaauuugaguuugugaugaguggcuaugaucaaauuuugcauuauuccuuagauuuaauuuaucaucucuguaagcaacaaucuucagggcaagggag

SEQ ID NO: 4180209 - RNA, 77 nt, Human
cuaaaguguuugccaugcaacagaauccagauuucagucuuuuaaaaucuaauucuguucuguggagccuccuuugg

SEQ ID NO: 4180210 - RNA, 64 nt, Human
cuaaauaaucccucuggucuuaguaaagcaaaagcucugaguagggcuggaggugaagauuuag

SEQ ID NO: 4180211 - RNA, 71 nt, Human
cuaaauggaaggcaugaaagcgaaaugagauuccaguuucucagugagcuuuucuauguucuaacgugugg

SEQ ID NO: 4180212 - RNA, 75 nt, Human
cuaaauuugaccucuaucucgcacaucuugauccaucaaaauuaucaauacugugaguagggguagaaaguuuag

SEQ ID NO: 4180213 - RNA, 56 nt, Human
cuaacuacaauauguauguauguauguauguauguacauguguauguauguauuag

SEQ ID NO: 4180214 - RNA, 93 nt, Human
cuaacuccauuucagauuuguauacugacuuuuuuguaggcccauucccuugugcuuucaaaaguaaucaguauuagauucccauggcauuag

SEQ ID NO: 4180215 - RNA, 87 nt, Human
cuaagaaacugaucagacauuauuuucaagauaaucgugggcagcaccuugcucuugaaaauugaugcuggcucacaaguuuucuag

SEQ ID NO: 4180216 - RNA, 129 nt, Human
cuaagacugcacauguguuuugcagacuuucuuccugaccauuugccacaugggucucugauaagauucuguugguuuaauagucaaaauaaucuuugcaguuugugagcacugaguagcagguucugg

SEQ ID NO: 4180217 - RNA, 93 nt, Human
cuaagauccuuccugggguguacaaggagagcacacauggggauggcugcugccucacucugcucaucuuugucucacccuugugcuucuugg

SEQ ID NO: 4180218 - RNA, 76 nt, Human
cuaagcacuaaguagcaaacacagagggccuaaucacauggaccaauaucccuucugauguucucuuaugcuguag

SEQ ID NO: 4180219 - RNA, 65 nt, Human
cuaagcaugaagcccucaucagucugagaguuucuccucaucagucugagaguuucuugcuguag

SEQ ID NO: 4180220 - RNA, 76 nt, Human
cuaagcccugauggcuggugauacuggagugaggagaauguccugauacccagagauacuaguuucuagggaagag

SEQ ID NO: 4180221 - RNA, 77 nt, Human
cuaagcuaguaauagaguagaccuggagccagauguccugaaauucuagcccagugcuaugccuauuacauccuuag

SEQ ID NO: 4180222 - RNA, 79 nt, Human
cuaagcuccuuccugcaagggcuggaauaucucuuagaaauuuuucugacaguaauuuuagcuuuaggagaaagacuag

SEQ ID NO: 4180223 - RNA, 80 nt, Human
cuaagcugucaagucugccuaaccuucauguucuguacaaguaggaggagaaggcuaaggcagaguuguaaacuguuugg

SEQ ID NO: 4180224 - RNA, 64 nt, Human
cuaaggacuuuuauggaaaccuaacuugggaugauuuaauuccagguaucuuuaugaaacuuag

SEQ ID NO: 4180225 - RNA, 84 nt, Human
cucagagagaugaaugugguggaaucugaguggugucaccagccaugacuuacacagaaacacuguucagaagccuucucugag

SEQ ID NO: 4180226 - RNA, 59 nt, Human
cucagagagggcaccagggccauccugaguugggguccugggcugugugccacucuggg

SEQ ID NO: 4180227 - RNA, 56 nt, Human
cucagagcaaugaacaugcaaauguaugcaaagcaguuucaggacuugcucuguag

SEQ ID NO: 4180228 - RNA, 80 nt, Human
cucagagggcaaggagcaugccugucuccuuugcacuguagccccagcagcuaggacagugucugcuucaggcccaugag

SEQ ID NO: 4180229 - RNA, 62 nt, Human
cucagaggguacaggugaacccagguuugacauuuggccucauuuccgccucucucuuugag

SEQ ID NO: 4180230 - RNA, 90 nt, Human
cucagagguuggcaucugcuguuccuuggacucaggacucacuagaagaggcucagugccaugggcagacaggccacuaaagccucuggg

SEQ ID NO: 4180231 - RNA, 77 nt, Human
cucagagugugguccacaggcagcaaaaucagccucaccagugagcuugaagugcugaaucugagaacccaccugag

SEQ ID NO: 4180232 - RNA, 59 nt, Human
cucagauucccacgugguucaggaacccagugaacccuggaacauuuggccauacugag

SEQ ID NO: 4180233 - RNA, 55 nt, Human
cucagcaacagcgacuuaagggccugcuaggagcggggagaaguugguugcuggg

SEQ ID NO: 4180234 - RNA, 79 nt, Human
cucagcaguggagauacaagaggccugacguguauugauugcccacgacauggcaggaaucauguguuuuggcugcuag

SEQ ID NO: 4180235 - RNA, 60 nt, Human
cucagcaguugcccccucccagcucuggggacaggcgcugggggaggacugauugcugag

SEQ ID NO: 4180236 - RNA, 61 nt, Human
cucagccccacagcaagccccagggucacagccagggcccagcucugccucuggggcugag

SEQ ID NO: 4180237 - RNA, 57 nt, Human
cucagccuaaaguuucugauaaaccuguuaccuagcacuguuauuuuuugggcugag

SEQ ID NO: 4180238 - RNA, 130 nt, Human
cucagccucacaaagugcugugauuacagguaugagccucugcacccagcucuuuccuccuuuuaaaaacaagaaaccuggccaggcacgguggcucaugccuauaaucucaauaccuugggaagcugag

SEQ ID NO: 4180239 - RNA, 117 nt, Human
cucagccuccugcuugacuuugauguucagcagggccuggcacuccugggccuggagcugccccucugcccaggucuaugccagcucugacuccaggugaagcaggaucccguugag

SEQ ID NO: 4180240 - RNA, 126 nt, Human
cucagccucugcaggaggcccggcugcagccccuggcagucccucugguagcaccgagagcugagcucagguaccugaggacacugucacugggagcugggggaggggcuggccugggagguuuag

SEQ ID NO: 4180241 - RNA, 61 nt, Human
cucagccuggaggccaggagacaguuuggaagcuguuauaauauucuguuuguagggugag

SEQ ID NO: 4180242 - RNA, 129 nt, Human
cucagccuuccugccuccaagcgugugcucugaacuggcaggcuggaggcuguucuggggaggacgcacugugucccaugacucuccagucuccucggagcugcugagcuuccuggcaggaagcccaug

SEQ ID NO: 4180243 - RNA, 63 nt, Human
cucagcgccccuccacccccagcugcccgccugccugugggcuccugauuugagggggcugag

SEQ ID NO: 4180244 - RNA, 71 nt, Human
cucagcuguugagacacagacacaagccuaguguaucauaaaagguaagaguaagucuuucaauagcuggg

SEQ ID NO: 4180245 - RNA, 130 nt, Human
cucagcuuacacuccauguguuuccaacagagagggauacgcacuugauagaaacagaaaauuauaaucaaauagaauucuucuguuggcagagcauacauauuuauacauucuucuguguuuagcucag

SEQ ID NO: 4180246 - RNA, 86 nt, Human
cucagcuuaucucacacuggguuugagggucacuuagcaaagaguguguggcuccaccaaacucagggugggaguaaagggcuggg

SEQ ID NO: 4180247 - RNA, 119 nt, Human
cucaggcaggagcauguuuuuaccugcucaauucaggaguuuggccuacagaggcugguaccacccucugaagaggucacaccugucucugaagcaagaaacacuaaucacuguacaag

SEQ ID NO: 4180248 - RNA, 60 nt, Human
cucaggcaguucuguagccuccauucccuguuuauggagcugcaagacucccugucugag

SEQ ID NO: 4180249 - RNA, 57 nt, Human
cucaggccauucuuccagcugccauugagggugggggcuggagcuuauuggccugag

SEQ ID NO: 4180250 - RNA, 91 nt, Human
cucaggcuaaggguugugagcaggcugcacaaaccgaccaauucucucugguaggagguuacaguagccugucaucaaacccuagugggag

SEQ ID NO: 4180251 - RNA, 71 nt, Human
cucaggcugcuggccagcaggcuguagccccauugcauuggcuucuaagccucauggcucaugucccugag

SEQ ID NO: 4180252 - RNA, 64 nt, Human
cucaggcugucuaauggauuagcaaauguggcuaacacauggauacccauuaguagaaccuggg

SEQ ID NO: 4180253 - RNA, 60 nt, Human
cucagggacaguaucauuuaggagaauauguuuuuauugcccuaaauugcuucaccugag

SEQ ID NO: 4180254 - RNA, 57 nt, Human
cucagggagagccaagaguuccguggacagucuugaagcuugaugggcucuucugag

SEQ ID NO: 4180255 - RNA, 60 nt, Human
cucagggaugggcagauguuaaggauauucuccccacuuacccuacugcuccccucuggg

SEQ ID NO: 4180256 - RNA, 72 nt, Human
cucagggggcagagguguagcccccuccauggugccccugggcccaugucgggggcugcagcugccaugggg

SEQ ID NO: 4180257 - RNA, 68 nt, Human
cucaggguuucucacaaggcugcaauccagcugucaggcaggggugcagucauuggaggaugacugag

SEQ ID NO: 4180258 - RNA, 63 nt, Human
cucagguccccaggguaccuaccuauuucaaguugcuugaaggugugcuucugggcaccuggg

SEQ ID NO: 4180259 - RNA, 83 nt, Human
cucagguccucuuugggaagugggagcaaggugaugaaggaggaaugcacaugcccagaacuucucauuagcaggucucugag

SEQ ID NO: 4180260 - RNA, 98 nt, Human
cucaggucuuccuccaccagggcucugagcucugaagauacaggacauccugacacugcacucccagggcucuagagugcuggcuggaagauucuggg

SEQ ID NO: 4180261 - RNA, 57 nt, Human
cucaggugcagcauuuguaagcagcucccuggcugguucugauuuugcugcauugag

SEQ ID NO: 4180262 - RNA, 81 nt, Human
cucaggugcagccaggagcucccccugcuccagagcuggcagaaggacuggggcuccggggcugcagcccguucuucugag

SEQ ID NO: 4180263 - RNA, 65 nt, Human
cucaggugugaacuauuuggaaagaaauaaacauuuucuguaccaaaaaugugucagacucugag

SEQ ID NO: 4180264 - RNA, 90 nt, Human
cucagguugcagcagaaccugguccucaugaaggaggcgcugagggccaccaucauggacgucaccaugguccugcccagcaagcuggag

SEQ ID NO: 4180265 - RNA, 81 nt, Human
cucaguaaguaaaaaguccgagucuccucccagaguggugcauacacagucaaaggguauuuggauugauuacuuggggag

SEQ ID NO: 4180266 - RNA, 71 nt, Human
cucaguacuagugucaauaauuucuuuuuggccaauuauggaccagaucagggaaugacagaagcccugag

SEQ ID NO: 4180267 - RNA, 69 nt, Human
cucaguaucucccugugugaggugagauaaguauucugucaucuucuauuaauagggagaaauucugag

SEQ ID NO: 4180268 - RNA, 80 nt, Human
cucagucaaucugagacuugacuuguugggguuccuagaugaggguugugucugacaagucaagucuugacucuucugag

SEQ ID NO: 4180269 - RNA, 63 nt, Human
ccuggaguuuguggcuugcucaagcucuggcuguucaguucucgagccagcaccaauuccagg

SEQ ID NO: 4180270 - RNA, 65 nt, Human
ccuggaucuguuugugcuuguggcaugcuguacaucugcggucaggguacauuuuggauacaugg

SEQ ID NO: 4180271 - RNA, 56 nt, Human
ccuggaucuuaggccaagacucaggucacugaauuucugaucuggaaggaaccagg

SEQ ID NO: 4180272 - RNA, 68 nt, Human
ccuggaugucugggaggcuucccugcuugggugaaguugggagggcuuggacccagaugucugugagg

SEQ ID NO: 4180273 - RNA, 110 nt, Human
ccuggauuugggguugucaccgcugcucuauguccucacccagggguagcuccaggcuggagaccccuugggaggggucaugugggcucugguccacccccaccucgagg

SEQ ID NO: 4180274 - RNA, 84 nt, Human
ccuggauuuugaaguguaugggaaagcagaagacuuaugauugaaauauucuacauugcuuucuaauacaucuuacugauaugg

SEQ ID NO: 4180275 - RNA, 59 nt, Human
ccuggcaacauuucaaggucuuuacucaaacaccugucaggugccuuguaugugccagg

SEQ ID NO: 4180276 - RNA, 73 nt, Human
ccuggcaauuccucagcugccccauaaaucacagugccuggcugcugugcuuuaggggugccggggagccagg

SEQ ID NO: 4180277 - RNA, 74 nt, Human
ccuggcacacaggaugaaaucaguguuuauucuguauugugcaauuauuacuguuacuucacacuguguccagg

SEQ ID NO: 4180278 - RNA, 58 nt, Human
ccuggcacagauccuucauacaguaggcugacuggauggauagguggaugguggcagg

SEQ ID NO: 4180279 - RNA, 99 nt, Human
ccuggcacaggguaccccaugugauguggcaguuuaagaggcugggcagacacaagaaucccagcacugccauuggucaaaugagugacuugugcaagg

SEQ ID NO: 4180280 - RNA, 106 nt, Human
ccuggcagccacccagcaucuguacuuuaguuauuugguuuuucucaggaggagauccugagaugaagacucaggagcagguuguugauuuugaggugguccuggg

SEQ ID NO: 4180281 - RNA, 72 nt, Human
ccuggcagccacccuggagggcagacagaugccuucacaagccauuuugucuuucuccagcuuggugccagg

SEQ ID NO: 4180282 - RNA, 75 nt, Human
ccuggcaucccuucccuaagcacuagcucugugcaaacccuuuucucaggcucugcuuucuggggggaucccagg

SEQ ID NO: 4180283 - RNA, 77 nt, Human
ccuggcaugguacgcucugcuuacauccucuccucuguuuggagagagacauguaaacgcggugagccaaguccagg

SEQ ID NO: 4180284 - RNA, 60 nt, Human
ccuggcauuggcuaacauguuaaacuucagcuucucauugcucauuguugguuugucggg

SEQ ID NO: 4180285 - RNA, 63 nt, Human
cuagccuuccuuuuaccaccagccacuagccuuugcugauugggguggagacagggaggaugg

SEQ ID NO: 4180286 - RNA, 56 nt, Human
cuagcucagugggguugagucagggaagguuuucaggaggagccaccuugagcugg

SEQ ID NO: 4180287 - RNA, 66 nt, Human
cuagcuucaaguccuggcugugccacuaauuccauuagugaacauaacagcuauggauugaguugg

SEQ ID NO: 4180288 - RNA, 74 nt, Human
cuagcuuuaugcaaaccugguacuuauaguaccuauuauucacuuuaagugcuuagaaguugcauuagggcuag

SEQ ID NO: 4180289 - RNA, 62 nt, Human
cuaggaagcagcuucccuggcuccuggugcaucgcaugaggaguggcagggcugcucccuag

SEQ ID NO: 4180290 - RNA, 64 nt, Human
cuaggaaucccugucucaccucagucuggcuugaccagcugagaaauggggaaagggcugcuag

SEQ ID NO: 4180291 - RNA, 57 nt, Human
cuaggaccuuuacaauuguccugucagccaucuggacuuaggaauguagaauccuag

SEQ ID NO: 4180292 - RNA, 83 nt, Human
cuaggagaaauuagaaccuguuauuucugauccuucgauccuugagaggccaauaguagguggcauguuuguauuucuccugg

SEQ ID NO: 4180293 - RNA, 55 nt, Human
cuaggcaguagggacaucaguugcaugggcuuugcaaugucugcucucugccuag

SEQ ID NO: 4180294 - RNA, 60 nt, Human
cuaggcaguggcccuucaucaugacagccacgcaagcugaaggagaaggccacuguucag

SEQ ID NO: 4180295 - RNA, 97 nt, Human
cuaggcauggccaauauuaaaaugcaaacauuguaggagauguaacagagcaaccuuauguuucauuuagauaucaggcuuauauuucuaugaauag

SEQ ID NO: 4180296 - RNA, 56 nt, Human
cuaggcuagauaguauauugguucaauuaauggucauauauuuuaauuuagccugg

SEQ ID NO: 4180297 - RNA, 56 nt, Human
cuaggcucugccagcacugucgcugcccacagugagggugcagguguggagucuag

SEQ ID NO: 4180298 - RNA, 73 nt, Human
cuaggcuuuccuagcacaaucugaggucacccgagaugcgguuucagauggagguuuaggacagugagccugg

SEQ ID NO: 4180299 - RNA, 64 nt, Human
cuagggaagucuguauuuugugugaaaccuuucaagcacagugcaccacuuugaaaaacccuag

SEQ ID NO: 4180300 - RNA, 57 nt, Human
cuagggaaugagagacuggaucaaaacauucuauagauaaaguaugccguuuccuag

SEQ ID NO: 4180301 - RNA, 55 nt, Human
cuagggacugggaccuuaguuaaggcccuuuacucucugagccucaguuuccuag

SEQ ID NO: 4180302 - RNA, 99 nt, Human
cuagggaggagggcaggcuccccagcuggggcaacgcaccagcuccuugaagcuguucuguggcucggccagcugcugaagccucuccuccugcucugg

SEQ ID NO: 4180303 - RNA, 130 nt, Human
cuaggggagaggagaccccugcaagcgaagccgcuuuccucauuccugaggcucaucggagucggaaggacccuacucucaugcuacaggggccagagaguggcuugccagcggucucaccgcaccuugg

SEQ ID NO: 4180304 - RNA, 59 nt, Human
cuaggggguucuaugcauuuauuaugaguaggucauucauuucacagugagcuuccuag

SEQ ID NO: 4180305 - RNA, 60 nt, Human
cuagguuaguguuugauugaauaccuggggacuguaacccagucaaguugacacaccaag

SEQ ID NO: 4180306 - RNA, 60 nt, Human
cuaguagacagaaauguccaguguauucauuuugcccacuggauuuagcuauuucacugg

SEQ ID NO: 4180307 - RNA, 89 nt, Human
cuagucagaguggaagucuaggcuccccacucagccuucauuggcaugaggguggcuggggccacaguuuuccugugcuguuugacugg

SEQ ID NO: 4180308 - RNA, 58 nt, Human
cuagucuuuuugaucugguggauauuuuauccacauagcacgucucaauuuggacuag

SEQ ID NO: 4180309 - RNA, 75 nt, Human
cuagugagguaagaaaggagagggauugauuugagaggcucaaaaugcugcucaguccuuauuugccucuaccag

SEQ ID NO: 4180310 - RNA, 90 nt, Human
cuaguggucugaacuucaguuuaucccaucauccagaugaaccuguaauugauauuuuggcauugggauagcuggagauuauauugcuag

SEQ ID NO: 4180311 - RNA, 91 nt, Human
cuagugucuccugagcuuuguauuguacgccugucaacuucaaauugcaguugaggccaccaggcuggcaaugcgucaagcagagaaccag

SEQ ID NO: 4180312 - RNA, 93 nt, Human
cuagugucucuggcugaguucucacccauucuucuuccuccuuggcgucaaaauaaaaggaugggaagagugauaacuuagucacaucacugg

SEQ ID NO: 4180313 - RNA, 68 nt, Human
cuaguguuuguuuggguagcuagacuggaugaaauauaaaauuaugucuaguaugcgaacaagacuag

SEQ ID NO: 4180314 - RNA, 59 nt, Human
cuaguuagauuacuuggauuauauggauuccagucucaggucugccaagaacuaauuag

SEQ ID NO: 4180315 - RNA, 55 nt, Human
cuaguucuagaucccugaggaaucgcaacacugacuuccacagugguugaacuag

SEQ ID NO: 4180316 - RNA, 55 nt, Human
cuaguucuagaucccugaggaaucgccacacugacuuccacagugguugaacuag

SEQ ID NO: 4180317 - RNA, 60 nt, Human
cuaguuggaugcagggcccagagaggagggaacauguuccuggcucaagcauccagguag

SEQ ID NO: 4180318 - RNA, 71 nt, Human
cuaguuguuuaaucucaagaaauuuuuuuuacaauguguaagugauuauuguuuucagguuaaaugauugg

SEQ ID NO: 4180319 - RNA, 59 nt, Human
cuaguuucauacuguguagcccagcuagcugagggucugggcugcugagaaugagagag

SEQ ID NO: 4180320 - RNA, 83 nt, Human
cuauaaccaggcuguucuggcugaaaauacaucuuuaaaacauuuuaacaguguguccagucaguuucauccacuggauaugg

SEQ ID NO: 4180321 - RNA, 72 nt, Human
cuauaauauguggccuuuuaugucugacuucuaucacauagcaacauauuuucaaggucauucguguuguag

SEQ ID NO: 4180322 - RNA, 84 nt, Human
cuauacacaucacuguaucuuucagugacucaguggcaagaaccuugcugggaugguuggauggauacauagguggaugaaugg

SEQ ID NO: 4180323 - RNA, 60 nt, Human
cuauacugauugauauucccaugacuuuagaguauaagguacagggaauagagucaauag

SEQ ID NO: 4180324 - RNA, 58 nt, Human
cuauagaccaggagaaauggugaguuucuguuucauucucauuguuucuucucugugg

SEQ ID NO: 4180325 - RNA, 59 nt, Human
cuauagcuguuuuggugccaguaccaugcuguuuugguuacuguagccuugcacuguag

SEQ ID NO: 4180326 - RNA, 129 nt, Human
cuauauagacguuguacaugccggauuuauuuugaggcgaacgcaaucauuuugaaaugccuaguuuucaaaguaaaaauguguucacguuacaaaaccacuguagcaagacauuucuauuaaaaauag

SEQ ID NO: 4180327 - RNA, 57 nt, Human
cuauaucaucauuaccugcaccaaccaaggccaggcacuagguuuugagugauguag

SEQ ID NO: 4180328 - RNA, 90 nt, Human
cuauauccucauguuucucuuacagcagcucugugugggauucagcaaaaacauagcugcaccuuauaagcaggaaagugaggaauauag

SEQ ID NO: 4180329 - RNA, 95 nt, Human
cuauauggugguugagaaauaugcuauugcuguaauuuaacucacuguaugugggcuucaagaugcacaguggcauuccaaaccaacuuuuaaag

SEQ ID NO: 4180330 - RNA, 75 nt, Human
cuaucagccaagggcugcuaucagcuacugugggcuucucccauuaacuggcacguagcccucuguacaacaugg

SEQ ID NO: 4180331 - RNA, 91 nt, Human
cuaucaguugagcagugguguuuuucuauccccagguauugaucauauaacuaaaccuuaaaggauuaaagaucuauuucucaaaauguag

SEQ ID NO: 4180332 - RNA, 89 nt, Human
cuaucaucuccuuucauuccacgucgucguuuccagcauaagugauugauuaaugcacagaauugacauggguagaaaggauccgauag

SEQ ID NO: 4180333 - RNA, 107 nt, Human
cuaucauuaauuugguaaugcccucaaacaaguucccauuccaacaguuccuacuuggaugcuuuggcaacggagaacuuacucuuucauauaucauauaaugaugg

SEQ ID NO: 4180334 - RNA, 75 nt, Human
cuaucccagucccacuagugccaauaccuugaccuucccaugagacguuaggaaucuuuguggcugcugggauag

SEQ ID NO: 4180335 - RNA, 83 nt, Human
cuauccuuuuacgagcugccaaggagucucuccagcagccugaaccagucuggacagaucccuuguagcuugugaaaguguag

SEQ ID NO: 4180336 - RNA, 82 nt, Human
cuaucgcuuccuggccuggggaauagagucaagggggccacccucagucaccuuccuuugacucuccccacagaaacaauag

SEQ ID NO: 4180337 - RNA, 55 nt, Human
cuaucucuuugcuuucagcaguguauuucaacacucagcuugaaucuagagauag

SEQ ID NO: 4180338 - RNA, 71 nt, Human
cuaucugcaugcuaagucuugguuuugccaaacuucagggcugagccagagaguguuggagauguggguag

SEQ ID NO: 4180339 - RNA, 55 nt, Human
cuaucugugagccaguccccuuauuuuacaaauggggaaacugaggcacagacag

SEQ ID NO: 4180340 - RNA, 73 nt, Human
cuaucuuuuccucagcagcagucacggccgccgcugccucggcaggaugccaucugcugcugcugcuggauag

SEQ ID NO: 4180341 - RNA, 81 nt, Human
cuaugacaaaacauaucuacggauacgauuaaaccacauuuucaauuguaugaucguugaugugauguuggguguacaugg

SEQ ID NO: 4180342 - RNA, 71 nt, Human
cuaugagggagugugaggcuucaaggaacaggaaacuuacugcuccucagagacugcaucuucccucaugg

SEQ ID NO: 4180343 - RNA, 71 nt, Human
cuaugagguggcuauuccgguccuuauagaacaacaaacaaccugugagguauauauucugguccuuauag

SEQ ID NO: 4180344 - RNA, 82 nt, Human
cuaugagucauaaaccaaugggguugguugggaauuuccaagaaguucaguaugacagacgcauuggagguguggcuuggag

SEQ ID NO: 4180345 - RNA, 72 nt, Human
cagcuaaugcauugugugguauaugguuggcaauuaaauaauugcuaaauaacuuacauaguggcugagcug

SEQ ID NO: 4180346 - RNA, 85 nt, Human
cagcuaccaguuagccacuuugggggugaguuuauccuacacaguuuauccuugcucuccccagagugagggauugagugggcug

SEQ ID NO: 4180347 - RNA, 66 nt, Human
cagcuaccgguuggcccagccuggccuaguauacgcuugcgauugggcccuggagucgccagucug

SEQ ID NO: 4180348 - RNA, 71 nt, Human
cagcuaggaaguggcagagagcaagugucugacuccaaaguccacgcucuuucuacuuuucauaaugguug

SEQ ID NO: 4180349 - RNA, 63 nt, Human
cagcuauuauuuucucuaaauuaaaccaacacugagggauuauuuaggggaaaggauagacug

SEQ ID NO: 4180350 - RNA, 60 nt, Human
cagcucaauagccuaccuuaaucuggugauuaaauuccaaggaugggugaucuugagcug

SEQ ID NO: 4180351 - RNA, 74 nt, Human
cagcucacuggaccaaggaaacucuucaacacguaucugauagguagaacaucuuuuuugggauccagaggcug

SEQ ID NO: 4180352 - RNA, 79 nt, Human
cagcucagacuaaguucugcugacggccagcccagcuaugcuuggcugagcacaccaggacuuaacaaggucugaauug

SEQ ID NO: 4180353 - RNA, 57 nt, Human
cagcucagucuggagagaugcaggaucauccucuccuugcauuccaaucugagacug

SEQ ID NO: 4180354 - RNA, 57 nt, Human
cagcuccaaagccccacuguccugucucuguguccugggacaggggacaaggggcug

SEQ ID NO: 4180355 - RNA, 64 nt, Human
cagcuccagcucugggcgccucugcaggaagcgggaggcuggcggcccaugaggacugcagcug

SEQ ID NO: 4180356 - RNA, 75 nt, Human
cagcuccuccugugccaggccagcagcccacagcacggccaggugaggccugggcacauaaccucgagugagcug

SEQ ID NO: 4180357 - RNA, 68 nt, Human
cagcuccuguuuuucugugagcuuaaagggcugucacuuuuaugucacuuugaaagagaguaaagcug

SEQ ID NO: 4180358 - RNA, 95 nt, Human
cagcucguauuguagcaugcgcggcucagucaucuccaggggcugcccguucaccuugaugagaccauugccgcgucugcagugcgccacagcug

SEQ ID NO: 4180359 - RNA, 77 nt, Human
cagcucuaagucugcggccgugugcuugugcuccccuccaggcagggaggacaugcacugcucaggguuccgagcug

SEQ ID NO: 4180360 - RNA, 74 nt, Human
cagcucugcccucgcacaucugccaccugcuuucuguggcucugucuggcgcuuguggggaauggcagagacug

SEQ ID NO: 4180361 - RNA, 130 nt, Human
cagcucuguuuugugaauuaauguuugaacccauguccaugcuuggggcaaccaugacagagagaucaaaaguugucugcagagguugguucuaagauggccagagguaaauuguagaagagugcaguug

SEQ ID NO: 4180362 - RNA, 57 nt, Human
cagcucuucagugccugagauaaugaugagauugagggccaaaaagaugaagagcug

SEQ ID NO: 4180363 - RNA, 60 nt, Human
cagcugaccuggcuaagggagcucaggcccugccaucuccccuguuacacuaggucacug

SEQ ID NO: 4180364 - RNA, 60 nt, Human
cagcugaguggacccuagaggccuccuuguuuaaggcuccugggcugggaacucagccug

SEQ ID NO: 4180365 - RNA, 106 nt, Human
cagcugauaagcucaucuguuaucuucugcauaauguacaaucuguaucuaaaugccaguuuuuauuaggcauuauggggauaaggacuagcagagagaaaaguug

SEQ ID NO: 4180366 - RNA, 56 nt, Human
cagcugcaucaggacccucggcugcaggaagcgagccagggcacugguggagauug

SEQ ID NO: 4180367 - RNA, 55 nt, Human
cagcugcugccucacuggucuguguugaaaacaagacaguggguggggagcacug

SEQ ID NO: 4180368 - RNA, 104 nt, Human
cagcugcuggaucuaaguucuuauagcuccaucagagucagagcucuuucuguuuccaguagaaagggacuuauccucugaauauaagauagaucauuuagcug

SEQ ID NO: 4180369 - RNA, 57 nt, Human
cagcugcugugacaucuggaagcauuaacacuuuguugccagcauguaggcuaguug

SEQ ID NO: 4180370 - RNA, 90 nt, Human
cagcugcuuguagagagcucaggagaugacagaagguauccuguguccccaaggauguaccucugcauuccugccucuaucagcaggcug

SEQ ID NO: 4180371 - RNA, 75 nt, Human
cagcuggaccugagaugugcacuuuucgcuugcuuuucauugcagaggagcagggacauggcaucucuccggcug

SEQ ID NO: 4180372 - RNA, 58 nt, Human
cagcuggacuuuugauagaaguuggauagcugacaacucacaauuaagaugccagcug

SEQ ID NO: 4180373 - RNA, 59 nt, Human
cagcuggcagaaccugcauccaugucuccaggugagacugccucggagcugccaggcug

SEQ ID NO: 4180374 - RNA, 76 nt, Human
cagcuggcagcaaggccucgggugagcuggccuuguaccuccaggguuugcugcuaucuggccuugcucucagcug

SEQ ID NO: 4180375 - RNA, 66 nt, Human
cagcuggcccucguccgacagguggguuguccguguuccuaacccccggguccucgggggcugcug

SEQ ID NO: 4180376 - RNA, 82 nt, Human
cagcuggcugaaaagaaaauguaagcuaaguuuuucuaagcauuuaucaaaugcucuuagcugcuguucuuugagagaguug

SEQ ID NO: 4180377 - RNA, 75 nt, Human
cagcuggcuuugcagggcagaaguacagacacuuaucugcugaugagaugucuuucuucucccccagaacaggug

SEQ ID NO: 4180378 - RNA, 57 nt, Human
cagcugggugaucuugggcagguuauugaaccuuucuuggcuuugaucacccaucug

SEQ ID NO: 4180379 - RNA, 70 nt, Human
cagcuggucaguggugagacagaaauuugaaucgacaccauucacugcuuugagccacugagccauccug

SEQ ID NO: 4180380 - RNA, 89 nt, Human
cagcuguggguucauacaggcaggagcuccccauuccagcuagaagcccuggaaucucagcuucugcccugaugcucccagguaagcug

SEQ ID NO: 4180381 - RNA, 58 nt, Human
cagcuuacagcucuuucccaugggagagucaacagcuuaaugggauggagaguaacug

SEQ ID NO: 4180382 - RNA, 67 nt, Human
cagcuucagcugccugucugcugacccaggucucugagggccugggugucaugggcagcugggggug

SEQ ID NO: 4180383 - RNA, 71 nt, Human
cagcuucaucagaaaauacccaguguuuaaaagucuccucuucuuuaagucaguguuuuuucuggaaguug

SEQ ID NO: 4180384 - RNA, 89 nt, Human
cagcuucucaggugauuacaaaaaaucuaugaugcugccaguuauuaagcagcuucaaagucuaucuguaauuacucccuuaggggcug

SEQ ID NO: 4180385 - RNA, 61 nt, Human
cagcuugaaguuuugaggagaauuacagucacuuccucucaguauugaacuuuauaagcug

SEQ ID NO: 4180386 - RNA, 74 nt, Human
cagcuugcaagacucugccuugccuacagagggugcucaaugccugucuguuagagagguaguucuugauucug

SEQ ID NO: 4180387 - RNA, 87 nt, Human
cagcuuggacaacauggugaaaccccgucucuacuaaaaauacaaaaaauuagccgggaugguggcuugcaucuguagucacagcug

SEQ ID NO: 4180388 - RNA, 70 nt, Human
cagcuugguuugcauguggacacuugaagccacuaaaugggagucaguccuauccaaacuauauagauug

SEQ ID NO: 4180389 - RNA, 107 nt, Human
cagcuuguuuuauaagucagcagcuuggauuuuggcacguguuuucucauaggaacacuguuuugaauaguggucagguuuccaagcuagcccacaaaagcauacug

SEQ ID NO: 4180390 - RNA, 65 nt, Human
cagcuuucagagacuagagauguaagcacaaagcauuucccugagcuucucugaaaugggagcug

SEQ ID NO: 4180391 - RNA, 63 nt, Human
cagcuuucugguuacagucuucagauaauuauugcauuuccugagauaauaacugcaaggcug

SEQ ID NO: 4180392 - RNA, 56 nt, Human
cagcuuuuggcaggaugaccagaccauguacuacuuuuggaagccugcagaaguug

SEQ ID NO: 4180393 - RNA, 66 nt, Human
caggaaaauugauuaaaguccgugcuucaagggcccugaaagcacuuuaugucaauguccuuccug

SEQ ID NO: 4180394 - RNA, 127 nt, Human
caggaaaccacgagcuuaacugcuguguuauucacuacuaaugcuuagcugaaacuuccauauggggaacgcuaggucagcugaaucagugaguggaaauacaaaagauugaaguuaugauuuccug

SEQ ID NO: 4180395 - RNA, 64 nt, Human
caggaaacugugggcuuaaaucucagcucuuccauuuguugugugagcucguguggguuuccug

SEQ ID NO: 4180396 - RNA, 69 nt, Human
caggaaaggcuuuauaauaguuaauguguuguuuuuaguugugccaucacugugauaaugcuuuuucug

SEQ ID NO: 4180397 - RNA, 86 nt, Human
caggaaaggucucaaagggaaacgcagugucaagugucaggcuggccucccuguguuucucuuuccucugggaucuuggcauucug

SEQ ID NO: 4180398 - RNA, 71 nt, Human
caggaaaugguggugguguccaaucugauguuaagacuugacacauugcagacaucucauuaguaauucug

SEQ ID NO: 4180399 - RNA, 59 nt, Human
caggaacaccugcagcuaguggaacaaauuauagggaauacuggcuucagucaaaccug

SEQ ID NO: 4180400 - RNA, 92 nt, Human
caggaacagacaacaguccuggggucuaguggaagcaccucucuaucaaaacuggagcaggguuccuuaaggccauacuuuugcugggccug

SEQ ID NO: 4180401 - RNA, 62 nt, Human
caggaacuccugcuccaagcagcuuagcccaaagucaagcugcaguggcagcagggcaccug

SEQ ID NO: 4180402 - RNA, 74 nt, Human
caggaagaugagcagagcuggccugagaucaucugucuucauuacaccguccccaccagcccugucacuucuug

SEQ ID NO: 4180403 - RNA, 58 nt, Human
caggcagcugacugucagauaugugacugaagcggcuucucugaccaucagcuguuug

SEQ ID NO: 4180404 - RNA, 59 nt, Human
caggcaggagccagggauuccaggaauuuguaaccuucuguguguccuggccugcucug

SEQ ID NO: 4180405 - RNA, 70 nt, Human
caggcaguggaaacuaugcugcuggauugucauacugcaccacuguccagcaggcauguuuccuugcaug

SEQ ID NO: 4180406 - RNA, 62 nt, Human
caggcaugaugggaagugccuggaccauuaugauacuggucuagcacuuggcgccaugucug

SEQ ID NO: 4180407 - RNA, 55 nt, Human
caggcauggaaaagcccagaggagaaggccucuggagccaaacaucacaugccug

SEQ ID NO: 4180408 - RNA, 57 nt, Human
caggccaagucccaagugcggggcaagggagcaagcuucgugcuguccuugguccug

SEQ ID NO: 4180409 - RNA, 77 nt, Human
caggccaggcagagccccugcuggguguagcucagacagacccuacacucacccagcuuggggcccaggccugucug

SEQ ID NO: 4180410 - RNA, 65 nt, Human
caggccagguggcaggcaaaacagucaaguagaucaggguuguuuguagugccaccugcccccug

SEQ ID NO: 4180411 - RNA, 92 nt, Human
caggcccaccaucucccagacaugugccuccuugcucugcuucucuggccucucgcauggccgggcugcauguuugggguuggcaaugccug

SEQ ID NO: 4180412 - RNA, 69 nt, Human
caggcccacgaggcacacagaggcccaugagguggccuuugaugaacucaugcuucuguguagggccug

SEQ ID NO: 4180413 - RNA, 76 nt, Human
caggcccagcagggagaccaucucuuccuuaggacuugccuuaggucccauguccucccugaccacugauggccug

SEQ ID NO: 4180414 - RNA, 60 nt, Human
caggcccagugaucagggcucuggagccagcaguucugggagucuaggguccugggccug

SEQ ID NO: 4180415 - RNA, 75 nt, Human
caggccccacgauguuuugggagaguguuuagcacaggaaaaugcgcagaauacaugcacgacacgggggcacug

SEQ ID NO: 4180416 - RNA, 63 nt, Human
caggcccuuuccugggcauaggcucccagaagcuaccagacaugccaagggagggacagccug

SEQ ID NO: 4180417 - RNA, 77 nt, Human
caggccuaguaguuucuaaagcuuccuaggugaucaugguguauacagaaauaacucuagggaguuuagaaggccug

SEQ ID NO: 4180418 - RNA, 69 nt, Human
caggccugcccugggaguaccuguccuuaugcgagaauagaggauaauagguccucagggcugggugug

SEQ ID NO: 4180419 - RNA, 57 nt, Human
caggccuggagugggguccgugcauggccagcuggcucugccccacggccaguccug

SEQ ID NO: 4180420 - RNA, 88 nt, Human
caggccuggguuuccucaucuguaaaguaggaauauugauaauaauaucuacuucauagaguuucaugagaauacauguaaaggccug

SEQ ID NO: 4180421 - RNA, 76 nt, Human
caggccuucacuccuucaccugccagccuguuucccucuuccaggcaggcauguggcccaggggugagaagaauug

SEQ ID NO: 4180422 - RNA, 61 nt, Human
caggacuucuccgauaagucagagcccucuaucuacuguaggcuacuggaagagaguccug

SEQ ID NO: 4180423 - RNA, 68 nt, Human
caggagaaacauaauuuucuggggggagaauccaggaaggcaucccagaggaagugauguuuuaucug

SEQ ID NO: 4180424 - RNA, 81 nt, Human
caggagaaucacucuuaacaaaaucuucaccugaagcuauauuuauugcuuuuggaagccuaguuaagaugaaaacuucug

SEQ ID NO: 4180425 - RNA, 80 nt, Human
caggagagaauguuccaggcuugagagguugauuugcaguugcacuucucacacgggcaaguugauggagcacuuuccug

SEQ ID NO: 4180426 - RNA, 67 nt, Human
caggagagagaaggccugugggugugggguccuuugcaccucaccucaacagaucugcucuccccug

SEQ ID NO: 4180427 - RNA, 66 nt, Human
caggagagauccuucaaucuaguuuuguggcuaaaagcaguaaggagaaguugaggaaucuacuug

SEQ ID NO: 4180428 - RNA, 75 nt, Human
caggagaggcuccauggaggaguauggacuugggagaaggcuccaucuugaugggcccauggggaucuacuccug

SEQ ID NO: 4180429 - RNA, 101 nt, Human
caggagagggguccgggcgggagcccugggcuguagauaagcaaaacgcacccauuuucucuccuauuuacuccagaggcaccucuccucccccacuccug

SEQ ID NO: 4180430 - RNA, 76 nt, Human
caggagauacaggaaucgcacagucaugcugacuuaaaauacacauguaaacacucacugugccccugguguccug

SEQ ID NO: 4180431 - RNA, 80 nt, Human
caggagcagccaguucucugugguaggaaaaucugaggacucccuggacuggguuacccacagcagagcuggguucacug

SEQ ID NO: 4180432 - RNA, 56 nt, Human
caggagccacauuccaccuugaccuuauauugucaagggugagaccauggccccug

SEQ ID NO: 4180433 - RNA, 77 nt, Human
caggagccagccccccaaacuugggcacuuggauagcaucaggugucuggacuugugaagcagggggcuggguucug

SEQ ID NO: 4180434 - RNA, 111 nt, Human
caggagccgugaagggauucccagagaagauugucaucuaacggagucauucguccgcccaggacuucucugucacaggguuacguuugggagaauuuucacaggccacug

SEQ ID NO: 4180435 - RNA, 59 nt, Human
caggagcucaagaccacccugggucuuccuauguugcccaggcuggucuugaacuccug

SEQ ID NO: 4180436 - RNA, 63 nt, Human
caggagcuggcagugguagacaugggacaccauccuccaucccaacucucuccuccagcccug

SEQ ID NO: 4180437 - RNA, 61 nt, Human
caggagcuucugcccauggccaagaacagaccagcuuggaucacgaaggacugagcaccug

SEQ ID NO: 4180438 - RNA, 70 nt, Human
caggaggaaggaaaacuacuauccauaccaaugaccuugauauuccuguaggaauuuucacuuccucuug

SEQ ID NO: 4180439 - RNA, 59 nt, Human
caggaggacaagauuuuuggauucaggcuugccugaccccaaaggcuauguaucuucug

SEQ ID NO: 4180440 - RNA, 58 nt, Human
caggaggacauacuggcucacacauaaaaagaaaguuuuggaacagaugauccuucug

SEQ ID NO: 4180441 - RNA, 56 nt, Human
caggaggacggaguuagucacaucuuccugcuucugagacagacuuucguccccug

SEQ ID NO: 4180442 - RNA, 62 nt, Human
caggaggcaucauggagcggacuggcuuggcuagcauacauuuggcuucauaaugguuucug

SEQ ID NO: 4180443 - RNA, 61 nt, Human
caggaggucacuaccaggaggucacuaucacuugaccuccugggaucaagugauccuccug

SEQ ID NO: 4180444 - RNA, 64 nt, Human
caggaggucaggagcuccauggugagcacaggaagucugucuuuggauaucgcuagaccguaug

SEQ ID NO: 4180445 - RNA, 64 nt, Human
caggaggugacuuccagggguuguuagcaucucuaaagcucuacccuugggggucacgcuuuug

SEQ ID NO: 4180446 - RNA, 70 nt, Human
caggagugagagagcuagauucacaugggaugaauacaccaguccccuggcuuaaaaaccucauauccug

SEQ ID NO: 4180447 - RNA, 67 nt, Human
caggagugcucgggccucugccugcaccauccgugggaccccagcaggaagaggcucgaagccccug

SEQ ID NO: 4180448 - RNA, 72 nt, Human
caggaguuugaguggggccucaguaauuucuuaggcacugcagucuauuacugagguuuuauggaguuucug

SEQ ID NO: 4180449 - RNA, 67 nt, Human
caggauaacagaaaauagcugaauucaaauauaccugagauuuucuugcuauuuugcuuuuguucug

SEQ ID NO: 4180450 - RNA, 69 nt, Human
caggauaacucuguacaggagacaucucuagguaauugcuggaagaaugcuccacagggaagaagccug

SEQ ID NO: 4180451 - RNA, 61 nt, Human
caggauauaggguaucuuauccaggacucacaaucauccaaguccucccuuugguguccug

SEQ ID NO: 4180452 - RNA, 75 nt, Human
caggauccaugccggugcccaccucuuguccccucccacagugggaagggagcuggguauuuagcacagauccug

SEQ ID NO: 4180453 - RNA, 90 nt, Human
caggaucuuuucccugucccuggcagcuguccuuucaguggagauucucuuucugggacauggugcugucuuuauagguaggaagaacug

SEQ ID NO: 4180454 - RNA, 68 nt, Human
caggaugccaugccccaauccaggccaccuugcacaggccucggugggucuuguggggcagcuucuug

SEQ ID NO: 4180455 - RNA, 60 nt, Human
caggaugcccugagcaggccuucaagcugauggauuuaaaggagaggcuagggcuucaug

SEQ ID NO: 4180456 - RNA, 60 nt, Human
caggaugcuucuggggccaggcuccuauaaguuuggaauuucuaccucugaacuuuccug

SEQ ID NO: 4180457 - RNA, 62 nt, Human
caggcaacguccuuagagaugcugcccuaaugagguuuauuucuuccuggguauguugccug

SEQ ID NO: 4180458 - RNA, 69 nt, Human
caggcaagcacacugauuaacugaacugaauuuacugcccaaguauaaucagcaguuaacucaugucug

SEQ ID NO: 4180459 - RNA, 55 nt, Human
caggcaagcacggugaaccuggaaggucucacccacaggacucgaguuugaccug

SEQ ID NO: 4180460 - RNA, 124 nt, Human
caggcaagcaucuuaguauuccugagucuuguauuucacaucuaugaagugaggauaguuuaacucuaccuuauaguaugauguugagaauuaaauuaaacaauauaguugagaagcuuguuug

SEQ ID NO: 4180461 - RNA, 87 nt, Human
caggcaauuauaugguccugugaugaguaccaggugggaaaagguucaaccuaggccaucauggggaaaccccauagaugaugugug

SEQ ID NO: 4180462 - RNA, 59 nt, Human
caggcacacagcacauggccugggauauaaagauaaguaagggucaaucuguguccuug

SEQ ID NO: 4180463 - RNA, 58 nt, Human
caggcacacccacuggugcagaaggccauuuccuccugugaaccguggggugagccug

SEQ ID NO: 4180464 - RNA, 84 nt, Human
caggcacagcagacacaggcacgcuguugugcuagcaaaucguuugcagaagggugaugugccugagcuuguccucugcuccug

SEQ ID NO: 4180465 - RNA, 67 nt, Human
cagggcuguuuagucugggccuuugggaguucggugcagcuaaugccuuccagaggcccagccccug

SEQ ID NO: 4180466 - RNA, 58 nt, Human
cagggcuuccccuagcggaggugggaagcaggaacuucccugugggaugaggacucug

SEQ ID NO: 4180467 - RNA, 94 nt, Human
cagggcuuucaucugguguucagggcccugucugucugcccagcuggacaucucuccucccagcaccuggauagacaugggcucuccagcccug

SEQ ID NO: 4180468 - RNA, 61 nt, Human
cagggcuuugugugccuggggagaaguugggauuuuaugcuuaggugauaggaagccgcug

SEQ ID NO: 4180469 - RNA, 130 nt, Human
caggggacacugcuucuccaggggacauggcuucuccaggggacacggcuucuccaggggacauggcuucuccaggggacacuguuucuccaggggacacuguuucuccaggggauggcagcuucuccag

SEQ ID NO: 4180470 - RNA, 101 nt, Human
caggggaccacaaagugggggcugucagggcaaaguugccaggaagcuacagaaucccgaguuaucugaaaugucuacagcaaaccccacaugucacucug

SEQ ID NO: 4180471 - RNA, 92 nt, Human
caggggagaggcacacaggcuaggggcagugccagcaugggcagagcguggccgugacuggccucacugcccugcugcugccgucucuccug

SEQ ID NO: 4180472 - RNA, 106 nt, Human
caggggagcuuguuaaacacgcagcucccugggcuucuccagacuugcuguaucagagcuucuggggauggagcccagaaauuugcaugcuugacaaguuucccug

SEQ ID NO: 4180473 - RNA, 112 nt, Human
caggggaggcggcacugugggggcugccggcagccggggcuggggagagacauguggacacguggccucuauggcucccgccugccagauccuccgcugggcccucgcccug

SEQ ID NO: 4180474 - RNA, 58 nt, Human
caggggagguggcagaaaugugcuucuauaaagaggggccagccuccauccucccuug

SEQ ID NO: 4180475 - RNA, 70 nt, Human
caggggccugccagggcucuccguggugauggguguggccugcaaggagggccacugggaaggauuacug

SEQ ID NO: 4180476 - RNA, 62 nt, Human
caggggcugugggcggagccuccugugaugaugacuguugggggcugugccccugccgcuug

SEQ ID NO: 4180477 - RNA, 72 nt, Human
cagggggaacucagaguuuuacccagagacuucagaaaugaugucuggaggggagauuuggguucgauccug

SEQ ID NO: 4180478 - RNA, 76 nt, Human
cagggguaguaggauaacaaauucagccuuucauuguagguuucuaugaauuuaguuucuuuuucuuaccaaccug

SEQ ID NO: 4180479 - RNA, 68 nt, Human
cagggguugcuugcuucuauuuuauacaucauauaauaagguugguuauauuguuuccaagcccccug

SEQ ID NO: 4180480 - RNA, 100 nt, Human
cagggguuucgugcacuccgaccgugccaucuccugccacgacauguuugauuuucugcauuugacaggagguggcuacucaaaggucugcaaacccuug

SEQ ID NO: 4180481 - RNA, 90 nt, Human
caggguacacacuggacauuucgcacccuuccaaagaagcaagucuuacuaugcugggaguacuuguggagugggggcuguguugcccug

SEQ ID NO: 4180482 - RNA, 63 nt, Human
cagggugcagugucgcugcuagccacugguggaucaagggcagaaaugacaguaagcacccug

SEQ ID NO: 4180483 - RNA, 75 nt, Human
caggguggcauuucaguauuuucauaaccuauuugaauaggucauaacauuuuagaauguugaauauaagcccug

SEQ ID NO: 4180484 - RNA, 130 nt, Human
cagggugggauguguugaaugagucuucguggagcaugucacgguccccuucccaucucauuuuggugaugugucuagauugcuguaccgcgugggcuccauugagguagugcuuagggcaggagcucug

SEQ ID NO: 4180485 - RNA, 57 nt, Human
cagggugggcacccagccuccaggggccaauaucuggcuggcgccugccucacccug

SEQ ID NO: 4180486 - RNA, 73 nt, Human
cagggugggguuaggaaacaucauuuuugcugucauuugugaccuggguaaggucuuuccugguuucacugug

SEQ ID NO: 4180487 - RNA, 59 nt, Human
caggguguggucugcauucggaaucauaaaaauuaauuuuggcuaugugguacacucug

SEQ ID NO: 4180488 - RNA, 57 nt, Human
caggguuggccccugaggaagagagcaucuccuugccucccucaguuuccagcccug

SEQ ID NO: 4180489 - RNA, 55 nt, Human
caggguugggguagauaagaaaugauaaauaggucugucuugcaugccagcgcug

SEQ ID NO: 4180490 - RNA, 58 nt, Human
caggguuuuucacaagucaaggauggcuugaccgaccugagaucuguaagggaccuug

SEQ ID NO: 4180491 - RNA, 56 nt, Human
cagguaacuccaggcgcuuggaggauggaaaguuuccuuuuggcuggagugaucug

SEQ ID NO: 4180492 - RNA, 77 nt, Human
cagguaagacugaguuggguccucagcuucagggucuuaagguguagacugggcuguggacacccagcguuugacug

SEQ ID NO: 4180493 - RNA, 96 nt, Human
cagguaaguaacuuuauuaaggccauauagcuugaaugggggacauucacaaaaccacaugccauguggcuuuaaauaguucaaugaauuuaucug

SEQ ID NO: 4180494 - RNA, 73 nt, Human
caggucacaggcugugcgugugcaugccgaacacccacaugcacacaguugguggcucagucugauguaccug

SEQ ID NO: 4180495 - RNA, 92 nt, Human
caggucagggacacccagcugggccaccuccagagccacaccaggcccugagcuauuucuggaggccucccagacgcuggugcccuggccug

SEQ ID NO: 4180496 - RNA, 73 nt, Human
cagguccagcaugacuaguuccccauguccuaggucucccacugccaagauggccacuuguccugcugcacug

SEQ ID NO: 4180497 - RNA, 69 nt, Human
cauuccuggugagauuucguucuguccaguuccagcucccacaggacccuugaucucacuugagguuug

SEQ ID NO: 4180498 - RNA, 59 nt, Human
cauuccuuaacguggggagucuuggacugggugagcucaugacuccaacuuuaagcaug

SEQ ID NO: 4180499 - RNA, 78 nt, Human
cauuccuuaauuucacaguucaacgcacaacguaacuggaucuacaugugugcacaugcgcugaggauagaaggaaug

SEQ ID NO: 4180500 - RNA, 60 nt, Human
cauuccuuccuuucuaaauuccaggcucuugauggagcaggaccaagaaggggaaaagug

SEQ ID NO: 4180501 - RNA, 100 nt, Human
cauucgaauaucgugagcuaguuuguuuuccagucuggaauuuggacguggucuguuagagggccagcuggacagcgagcagcucagcguaguugcugug

SEQ ID NO: 4180502 - RNA, 69 nt, Human
cauucuagcucugacuagaagccucucucugcugccagguguucccagcuguuucuugugaguugagug

SEQ ID NO: 4180503 - RNA, 59 nt, Human
cauucucuccugugucucaccuucugccuuccuggcagugcugggcagaggagagcgug

SEQ ID NO: 4180504 - RNA, 68 nt, Human
cauucuuagcugacacauggauaucuggaauaaagauccuuuuccagguucccuugcagcuaagugug

SEQ ID NO: 4180505 - RNA, 77 nt, Human
cauucuucaaguguuuccgggagacuugguuucuuugcucagagccgugucccauuuaggaaaguacuaggaguuug

SEQ ID NO: 4180506 - RNA, 59 nt, Human
cauucuugcuccugauucccuuacacaccuacucauaguaaggcagcaggccagggaug

SEQ ID NO: 4180507 - RNA, 85 nt, Human
cauucuugugguaagcagagcccucuuuauuagugaccuaggcuaacaggugucuggaggguuugcuugaaauauccacauaaug

SEQ ID NO: 4180508 - RNA, 74 nt, Human
cauucuuuaauuuguauuucuagagggugucuacauuucuuacuuuccuaguaguuacagaaugauaaagaaug

SEQ ID NO: 4180509 - RNA, 62 nt, Human
cauucuuuguguaggugccucuggcuuugagaaacgaggccagagucuauaugcagacagug

SEQ ID NO: 4180510 - RNA, 86 nt, Human
cauugaagcuucagaggguacucuugcaucaguaggucuaaacacuacaaaaugccacuuugcaagauauucagagccuuuuagug

SEQ ID NO: 4180511 - RNA, 73 nt, Human
cauugacacuggaaauauugaauuggauguuggugauaggagccaucaguucuuuauuucacagugaucagug

SEQ ID NO: 4180512 - RNA, 109 nt, Human
cauugacggccucagcauucuuucaguauauaaaauaauuucucuguugugggguauuuucucaccagucuuuauuuuguuauuagucgccauagagguaaaaucgaug

SEQ ID NO: 4180513 - RNA, 76 nt, Human
cauugacuggugcagagucacccagauaauuaggccaaagccauagaaacaaaaucugaugacuccaugucuaaug

SEQ ID NO: 4180514 - RNA, 62 nt, Human
cauugagcaggauggcuaugcacagaccuugagggauguggguggcaucguccuggccaaug

SEQ ID NO: 4180515 - RNA, 76 nt, Human
cauugauagggaugccuuucuuuggugcagguucuucugaaccucaggccaagaaagagcuccauucccucagaug

SEQ ID NO: 4180516 - RNA, 59 nt, Human
cauugaucaucugcaguuuaagcuggacacagcccugaggcaaugcagauagaugaaug

SEQ ID NO: 4180517 - RNA, 67 nt, Human
cauugauuuccauuuucaacuccugcccuagaucugagugucugcagggugaagauggcaguuuaug

SEQ ID NO: 4180518 - RNA, 80 nt, Human
cauugcaacaugccacauaauuacaaauagagacugccuuuuaaaagcauucuauuaaacuguugugugguaccgcaaug

SEQ ID NO: 4180519 - RNA, 109 nt, Human
cauugcacuccauugagaaaauuuagaaguugaugugguucucucugucacgagccugcauggcaaagauuaccacaucuacagaauauuucuccuuuggaacacaaug

SEQ ID NO: 4180520 - RNA, 108 nt, Human
cauugcauaguuugcauuuugaccacagcauuuaucuuguagcaggacuaauaauuuaaggcucuuguccugaaucaacuaaguguucagagaaugaacuaugucuug

SEQ ID NO: 4180521 - RNA, 98 nt, Human
cauugcguagaacugagguuagcagguuaccauugauuuccucuacuuaugcuuuaagagguuggcauugguaagccgcuacacuuucuuggucaaug

SEQ ID NO: 4180522 - RNA, 109 nt, Human
cauugcuccaggugucuccuacucaccaauugcugauaugcagaagacucaugugacacagaacgugucugugcuuauucagcaggggcugugggcaggacaggcaaug

SEQ ID NO: 4180523 - RNA, 58 nt, Human
cauugcuguuaauugucucuagguguguuauuuagauccuuuggagacugcagcaaug

SEQ ID NO: 4180524 - RNA, 58 nt, Human
cauugcuuccuaugucccuucugauugaagugaaaagagggguggguaggaggugaug

SEQ ID NO: 4180525 - RNA, 69 nt, Human
cauuggaauaucaugcagaauaaaggugaucuauauguauugggcccuauguguagugugaucccaaug

SEQ ID NO: 4180526 - RNA, 130 nt, Human
cauuggaaucaccuggggagauuuguaagcuucugcugucugggcugaacccccagagguucggauugaauugguguggggugugguccaggcaucgagauguguaaagaccuccccaggugaugauaug

SEQ ID NO: 4180527 - RNA, 58 nt, Human
caguuucauuucuuaguaccagugacuagucuuacugguacaaugggaugugagaaug

SEQ ID NO: 4180528 - RNA, 66 nt, Human
caguuuccagcagcaccuauuauaguguuuuccacagaguaggcacucaauaaauguugccaacug

SEQ ID NO: 4180529 - RNA, 86 nt, Human
caguuucuugaaucacuuuagagauaccuguuggcuaaauccaagagaaaggaguuauugcugaaaugcugaguucaagauggcug

SEQ ID NO: 4180530 - RNA, 69 nt, Human
caguuugccaugguuaugugauauccuggcaagaaaaugccucauguuauaucacaaacauauggucug

SEQ ID NO: 4180531 - RNA, 104 nt, Human
caguuuguucuuguuucucuaaugccuugaggugugacauuagguugucaaucugugcgugaucuuucagacuuucugauguaaacauuuagugguauaaacug

SEQ ID NO: 4180532 - RNA, 57 nt, Human
caguuuuaaauuguuagauaaucuccaagggagaugagcuagaaggauauaagacug

SEQ ID NO: 4180533 - RNA, 66 nt, Human
caguuuuguuuucuaaguagguagcaccagguacugacugacuugccucuuacuuggaagggacug

SEQ ID NO: 4180534 - RNA, 129 nt, Human
caguuuuuuagcaaugugaucucacaccuggaaggcuucccaccugauauuucaauagacucauuaugagaaucaggacuguugaaguuucucucuaguagugacacuacaugccugaaagaacaucug

SEQ ID NO: 4180535 - RNA, 75 nt, Human
cauaaaagccucaauggucaccugaaauagacucaaggcccguuggugccgacaugagcaggugcugcuuuuaug

SEQ ID NO: 4180536 - RNA, 101 nt, Human
cauaaaauauuagcauauuagacaagaucagauguauuauauguaauuaauguuaucauauaaugauuuucuggugagugaugacaguuaauagcuuucug

SEQ ID NO: 4180537 - RNA, 87 nt, Human
cauaaagccaguuaugagccagaggcccaaggacagcuguugauccugaaaaugguuuuaauuugucucugucucauuagcuuaaug

SEQ ID NO: 4180538 - RNA, 116 nt, Human
cauaaauuaaauacaucugugcucauuccaaguaugcuauuacagugucaucuaaaucuaauggugaacaaaauagcacauauuaagaugauauuaauguuaaacuucaauuuaug

SEQ ID NO: 4180539 - RNA, 81 nt, Human
cauaacaaauuagagucagcuauccauucuccuaugaacgaucagcaaaucucacaggagucaaggaauaguacuguugug

SEQ ID NO: 4180540 - RNA, 62 nt, Human
cauaacauuaagccucuauuucacuuauguaucugcauuuguuucuagagugcuuuguugug

SEQ ID NO: 4180541 - RNA, 72 nt, Human
cauaaccuagagugcuagaauucugugccugauucucuugggccucaugcaacaacacauucuggcaggaug

SEQ ID NO: 4180542 - RNA, 56 nt, Human
cauaaguuggguaauauaaugaaaucuuagaaugguucacuuauucucaacuugug

SEQ ID NO: 4180543 - RNA, 88 nt, Human
cauaauaaucaccaaauacguaguuguugaucacaugcauaucugaacucuguuagauagauagugagguaauagcgugaugaaaaug

SEQ ID NO: 4180544 - RNA, 55 nt, Human
cauaauccauuaauuaaugaccaugauuuaauuacaugucaugcuauggguuaug

SEQ ID NO: 4180545 - RNA, 86 nt, Human
cauaaugagcacgagcaaguauuaauagcauuuuuauauaagauggaaaugcuacacuuguuaaugacuugagagugguuauucug

SEQ ID NO: 4180546 - RNA, 100 nt, Human
cauaauuaagaaaggggagugaacaaguucuacugggacaucagugaggaacaggcccaguugacugauuucuuagaacugcuucaauugcuaaauuaug

SEQ ID NO: 4180547 - RNA, 75 nt, Human
cauaauuccuaccuauguauuuauuccuaguauauucuagacaccaccaggaagggauacauaggauaguuuaug

SEQ ID NO: 4180548 - RNA, 89 nt, Human
cauaauugccuuuguauuuuucuccccuuauccccaacugacaguguuuuaauuaaaaguugaggggagagaacauaaggaagucugug

SEQ ID NO: 4180549 - RNA, 56 nt, Human
cauacacauacaccaauguggucauauaucuguaugaauauauguguguguguaug

SEQ ID NO: 4180550 - RNA, 66 nt, Human
cauacagaagauaaugcugccuuggcuccuggcauuggggguugggcuggcccuugucucuggaug

SEQ ID NO: 4180551 - RNA, 68 nt, Human
cauacaguuuuuaaggaguaagaaagucagaugcuacuuauuugucuuguguccuuaggaccugcuug

SEQ ID NO: 4180552 - RNA, 77 nt, Human
cauacauacacacauaugugaguuuugggguucuuuucaguuuuaggcaucagaaauugugugugugugugugugug

SEQ ID NO: 4180553 - RNA, 69 nt, Human
cauacaucaugaaagcauacaucaugaaauauuugugagacagaguugaugcugcuuucuugaaguaug

SEQ ID NO: 4180554 - RNA, 97 nt, Human
cauacauguacacauauacagauggaaagauacacagguagauagcuguaaaaaauauaguauguguguguuuguguguguauguaguaugugugug

SEQ ID NO: 4180555 - RNA, 61 nt, Human
cauacauugcucauucaguaucucaaacccagaaagaugaguuacugacauugaaugugug

SEQ ID NO: 4180556 - RNA, 98 nt, Human
cauacccagaaacuuccagauugcuuaacuccauauauuuuuagcagcccaacuuggugccuauggauuggagaaggagcugcuguuuccugggugug

SEQ ID NO: 4180557 - RNA, 61 nt, Human
cauacuaguuugaaaauaucugauucuaaaagagaaucaguuuuccuuucaagugguaaug

SEQ ID NO: 4180558 - RNA, 116 nt, Human
cauacucuucccuaguuaagagucugauaagaaugcagcuugccaguaucuuaauugcagaccgagcaguggacccuguaaagucguguccagacucuuggccugcggaaacugug

SEQ ID NO: 4180559 - RNA, 81 nt, Human
cauacuggugggacaggagggacaccuuccugcugagggcccagaucucagcaccucucuucucccuuccuccaccauaug

SEQ ID NO: 4180560 - RNA, 55 nt, Human
cauacuuaaugucaguuugauguucuguuagaacucggacuggcauaagguaaug

SEQ ID NO: 4180561 - RNA, 71 nt, Human
cauagaaaaagguucucuuguucauuauuuuugaauaaacuaaucugcaacauagagggcuuuuuccugug

SEQ ID NO: 4180562 - RNA, 95 nt, Human
cauagaauuuauucacauuucgcaucaguccgauaaacuuccauugaguacuagugugggccagucacugugcuaggugcugaauauaaucugug

SEQ ID NO: 4180563 - RNA, 68 nt, Human
cauagacgcggccgcugaugcagcacuuguugaaggucaagauguucugcgugagcgugcccgucuug

SEQ ID NO: 4180564 - RNA, 64 nt, Human
cauagagcucucaguuccaaaggguccuucuuagaagcaagaauuggaauuugggagcuaugug

SEQ ID NO: 4180565 - RNA, 75 nt, Human
cauagagcuugcugcucugccgguacagcugcacggugcugaagaggcugggcuccgggagcaugcggcucugug

SEQ ID NO: 4180566 - RNA, 63 nt, Human
cauagaugggaggaaccugggucccugacuuaaaguaucauggauuuggauguucccuuagug

SEQ ID NO: 4180567 - RNA, 97 nt, Human
cauagauuguccucuuggaguuuauauucuaauaugagagagaaacaauaaacucuuaaguaaauuuauaaugugauuuugggagguaagugcuaug

SEQ ID NO: 4180568 - RNA, 81 nt, Human
cauagccacagaaaauaaagcacgauucauauucacuaaccacuuuugaaauugugaauucauuuucuggcaagagcugug

SEQ ID NO: 4180569 - RNA, 90 nt, Human
ccacagggcagcccugggauggcuucugaaucagggccugcccgccuccugcaggucccucucaguaagucagaagguacagcucugugg

SEQ ID NO: 4180570 - RNA, 89 nt, Human
ccacaggggaaaauggaagagugaaguugaugcuuccucugguuuuagacugugacugaaggcuuaacucuuucauuuucagcuugugg

SEQ ID NO: 4180571 - RNA, 61 nt, Human
ccacagguucugguaagcuguugcuucugaaaggagguaugcauguuggcuagugcuaugg

SEQ ID NO: 4180572 - RNA, 65 nt, Human
ccacagugcacuuuugggggauguuaguaugaucuaacauucucaaaagagguguaauucagugg

SEQ ID NO: 4180573 - RNA, 57 nt, Human
ccacaguuaagggaugucauguugaacuugagggucagcauucagucacuuaugugg

SEQ ID NO: 4180574 - RNA, 62 nt, Human
ccacaguuucuucaucuauaaagugggacucaugagggugccuccuuauaaugaugaugugg

SEQ ID NO: 4180575 - RNA, 62 nt, Human
ccacaguuugccagccaggaauugaguuugggguaguguuuuucuguguugguagggugugg

SEQ ID NO: 4180576 - RNA, 70 nt, Human
ccacauacaaucaaguucuuuauuagagacaaagacuguuacaugaauugaaaggacugguuguaaaugg

SEQ ID NO: 4180577 - RNA, 68 nt, Human
ccacaucagagcaggauuuauauuccauucaccaacccucagaggaauuuccccugucucugauuugg

SEQ ID NO: 4180578 - RNA, 78 nt, Human
ccacaucaucucucaggggacaagggagagaacuagagggauaguuaugacucagaguucuccugggaggugaaaugg

SEQ ID NO: 4180579 - RNA, 60 nt, Human
ccacaucucccuauugcucuuucauuuguaauucugaaaggaguagaagaaugauguagg

SEQ ID NO: 4180580 - RNA, 80 nt, Human
ccacaucuuagagaucacgccuccuaucugugugccauuugcagcucaggguggcccuguggucucauggagggaugugg

SEQ ID NO: 4180581 - RNA, 63 nt, Human
ccacaugauugucuggcuuggccacguuccacacaaagcuggcuuccccggagugacaugugg

SEQ ID NO: 4180582 - RNA, 60 nt, Human
ccacaugcagcuaguagcuaugguaucagacagugcugaguuauauauacuggcucuggg

SEQ ID NO: 4180583 - RNA, 68 nt, Human
ccacauggagagauggcagaggggagcagucacccuuuauucuggucccagcuggucacugucagugg

SEQ ID NO: 4180584 - RNA, 56 nt, Human
ccacaugguguagcuguggauggcugggaagagccaagcaggcuguaaucaugugg

SEQ ID NO: 4180585 - RNA, 82 nt, Human
ccacauucaaaaagcaucugucaccaguagccauggcaacagccaucccugaacaaauguggagagauguuuuuggaauagg

SEQ ID NO: 4180586 - RNA, 68 nt, Human
ccacauuguagagauuagaaagagaguuguuacuggccuuuuauuucucuuuucauuucugaaugugg

SEQ ID NO: 4180587 - RNA, 78 nt, Human
ccacauuuacugagcgccugguuuaugccagauccugugcuuuguaugauuugugcugaacacaggguuguaaugugg

SEQ ID NO: 4180588 - RNA, 119 nt, Human
ccacauuugaggcagcccgggagaggaauaauuauauucuagugucagcacauccucuuuccacaauggccauacacauagaaaauaaauaguuauuuugggcuguuuuacagcugugg

SEQ ID NO: 4180589 - RNA, 96 nt, Human
ccacauuugucuguguagagcuuuuacugcuguauugaaugagacaaucuuuuuuaauaagaaaaguucaucuuacugcuggugacgaguaagugg

SEQ ID NO: 4180590 - RNA, 64 nt, Human
ccaccacacugugggguuuaccaugcuguguuacacauagaaaaacugaggcccgcagaggugg

SEQ ID NO: 4180591 - RNA, 78 nt, Human
ccaccacuacaagucaaucuagagauuaaaauaggcaaaacugugaucuacguuaggaugggguuguuugaguggugg

SEQ ID NO: 4180592 - RNA, 89 nt, Human
ccaccacucucauuuugcauuuccagaguagcagacuguugugccagaggguuuguugauguugaaaauauagucagaaucaguggcgg

SEQ ID NO: 4180593 - RNA, 65 nt, Human
ccaccagaaguggcuuucucagggauacugccauuuguuuuccuguuccuguucgcuccugcugg

SEQ ID NO: 4180594 - RNA, 68 nt, Human
ccaccaggugcugaagagaggaugacacaaaugagaaauccuugaacuuagacacuaggaagacaugg

SEQ ID NO: 4180595 - RNA, 67 nt, Human
ccaccagugcccuggacggcggccccagcaacuuuggagcuggccgcaguguaccagguaugugugg

SEQ ID NO: 4180596 - RNA, 77 nt, Human
ccaccaguggaugaaugcuggaccgagagcccuagcuucuggauccaggucuaggcccuucaucugcugcucugugg

SEQ ID NO: 4180597 - RNA, 62 nt, Human
ccaccaucuauagagguauuugguugcauuucuugccuuuauuagcccacauggaauggugg

SEQ ID NO: 4180598 - RNA, 82 nt, Human
ccacccaggcucccacaagcucccagcccggugcccacgcuggccaggccugugcuggcuggagcucugggaccuggauugg

SEQ ID NO: 4180599 - RNA, 126 nt, Human
ccacccucccacuuuggacuauuuugcaccagauucuagacaucauaucauuugcuuauaaaucuuuuggcaugaaucucuaaaagaaagggaaugcuauguagauaagguagucaaggaaggugg

SEQ ID NO: 4180600 - RNA, 57 nt, Human
ccaccuccucggccaugugacggagcgaggguucucuccagcgggcugagcaggugg

SEQ ID NO: 4180601 - RNA, 86 nt, Human
ccaccucucugcaccccagcacucugacucuuaccugcucgggggagaaguggugggauggaggcuggaucugcagagcaaggugg

SEQ ID NO: 4180602 - RNA, 90 nt, Human
ccaccucuuccccaccaccuucaagauugugggucaaugggauaaucagguccugcauccguucucugaaggucaggaauauggacgugg

SEQ ID NO: 4180603 - RNA, 66 nt, Human
ccaccugcagccgccugccgucuugcaccucccagaggcgcugccacagcuggccgcgcgggucgg

SEQ ID NO: 4180604 - RNA, 57 nt, Human
ccaccuggaugccacaaagccaccuucuaugaggggcuuccguagcuuccagggcug

SEQ ID NO: 4180605 - RNA, 59 nt, Human
ccaccuggggcuguggccccuucacagggaaugaagcuggccagcagcguccacugugg

SEQ ID NO: 4180606 - RNA, 130 nt, Human
ccaccuuacacuuuuuccucuaccuuucuccagggaagaauaggugugguuuccaguggcacaguucaagcauggcagcaccuuucuuaccccagaaagcagcaguacccggggaaagaauauggggagg

SEQ ID NO: 4180607 - RNA, 62 nt, Human
ccaccuuguguggcaagauauguuacugucugaaccucaguuuuaucuuuaugcaguggugg

SEQ ID NO: 4180608 - RNA, 92 nt, Human
ccacgcuggcccagccccgcccugcucucagucugugcccagggccuacaguuggcugagggccucuugugggugggugagggcccaggugg

SEQ ID NO: 4180609 - RNA, 56 nt, Human
ccacgcuuugcgacugacuugcgagcaaagcagcgggcucagucugcggcgcgcgg

SEQ ID NO: 4180610 - RNA, 78 nt, Human
ccacggacauggcagccugcgugaaggagcuuguuuuccaucuccuggcagagcuccugcgcacggugcacacccugg

SEQ ID NO: 4180611 - RNA, 55 nt, Human
ccacggagcauguuugaaagggagaguccuaccugcauucaucaugacucugugg

SEQ ID NO: 4180612 - RNA, 76 nt, Human
ccacgggugaucacuuugucugaggcaacuuuguuaauaaggcagcuguuguguaucaggcagagaaccugacugg

SEQ ID NO: 4180613 - RNA, 81 nt, Human
ccacgugaggagccugugccuggcacuccagacagacugcauacguuaggugggccacaggcaggcacaucccacacgugg

SEQ ID NO: 4180614 - RNA, 75 nt, Human
ccacgugccaagauggagguguggagucaaagggaaaggcgccucccugcugcacucacaccuacacuugugugg

SEQ ID NO: 4180615 - RNA, 55 nt, Human
caggugcauuuuccuguccuuguucccaccaugggcucagacagugagugccuug

SEQ ID NO: 4180616 - RNA, 79 nt, Human
caggugcccgccaccaugccuggcuaauuuuuuguacuuuuaguagagacggguuagccaggauggucucgaucgccug

SEQ ID NO: 4180617 - RNA, 57 nt, Human
caggugcucugauauggggcuggccagcagacuggcuucuguggcagguggcgcuug

SEQ ID NO: 4180618 - RNA, 59 nt, Human
caggugcugcagggcuggcgucagccuccccaacagccgcuccagcugugcagcaucug

SEQ ID NO: 4180619 - RNA, 83 nt, Human
cagguggaaauagagggucaguucccuacugagcccuacugacaucaaggcccaguggggagcugagguucaacucccaccug

SEQ ID NO: 4180620 - RNA, 72 nt, Human
cagguggaaauguaaaucaguccauguuacucaccucggagaagcagaaguacgauuuacuauuguugcuug

SEQ ID NO: 4180621 - RNA, 57 nt, Human
cagguggcagaggucucuggaaccucacucccuguucccucaaucucuccccaccug

SEQ ID NO: 4180622 - RNA, 70 nt, Human
cagguggcagguaggccagaccuccaagcccagaggccuccccagguugccuggcccaucuaccgcucug

SEQ ID NO: 4180623 - RNA, 97 nt, Human
cagguggcggggggugagggggggauggguaaucugcuuaagcaauuauuuuguuuugaagaagcugaccuauuuuuaccuccucuaugcaaaucug

SEQ ID NO: 4180624 - RNA, 61 nt, Human
cagguggcuuagucccauuuuauagccaugagcaccaaggcuuggaaggcuaagacacuug

SEQ ID NO: 4180625 - RNA, 67 nt, Human
cagguggcuucucccuaggccaaaacuauagcacuuugagcugaaccaccuaggagagaaucaucug

SEQ ID NO: 4180626 - RNA, 68 nt, Human
caggugggcuugggagaacacuggggcaggcuaagucacacagccuaauuucuuucuaaguccacuug

SEQ ID NO: 4180627 - RNA, 63 nt, Human
cagguggguggaugauugacucuguagaccagacuagcuggacuaaucagugauccccagcug

SEQ ID NO: 4180628 - RNA, 71 nt, Human
caggugguguuugguuacaugaguaaguuccuugguggugauuugugagauucucgugcacccaucaccug

SEQ ID NO: 4180629 - RNA, 56 nt, Human
caggugguuccauguuucaugacaccucuaggguuucuggacuugcugcucaccug

SEQ ID NO: 4180630 - RNA, 80 nt, Human
caggugucucaggacucaggugagcaauuugccauagaauaguccagguaggugcccaucaccucacagucucucaccug

SEQ ID NO: 4180631 - RNA, 90 nt, Human
cagguguucauagcagcuuuauucauaguaaacaaaaguggaaacaguucaaauguccaccagcugaugaauggcuaaauguaauaccug

SEQ ID NO: 4180632 - RNA, 98 nt, Human
cagguuagaagguuaaggauaugaauauuuguggggggccauucuguuaacuaccuucaugaaauucucguguaccucauugugccaucuguuuccug

SEQ ID NO: 4180633 - RNA, 57 nt, Human
cagguuagcaacaugguuagagaagugcagcccucuggaucacuuguggcuacccug

SEQ ID NO: 4180634 - RNA, 61 nt, Human
cagguuaguuaaucuuuguuuccuucucuucuuuggaaauuauguagauuggucuaaccug

SEQ ID NO: 4180635 - RNA, 91 nt, Human
cagguuaucuggggaaaaaaaucagaaugugguggguuacauuugcacaagugaaacuucacauuuugauagauuucuccuuaauaauuug

SEQ ID NO: 4180636 - RNA, 89 nt, Human
cagguuccacucaaugccuuauaggcugaaaauugcucugucuucucagagcuagaaaggguguucagauaaggcagggugggacccug

SEQ ID NO: 4180637 - RNA, 56 nt, Human
cagguugaaaguggaggagcuagaaaagcccacaagaaauuccucacuguagccug

SEQ ID NO: 4180638 - RNA, 76 nt, Human
cagguugaacaauguuccuguagcugagccaggauuugaacccagguaguugguugcagggauggaguucaaaaug

SEQ ID NO: 4180639 - RNA, 96 nt, Human
cagguugcaguguguacauuaaggguguggucagaugcugagagaugacaucuguggcugcagaccuuaaacaaagucagcauaucugcaagacug

SEQ ID NO: 4180640 - RNA, 75 nt, Human
cagguugugugaaacaaugguucugucaguugucaaaauuauuuucuuacaaucauuggcuucauuacaacacug

SEQ ID NO: 4180641 - RNA, 58 nt, Human
cagguuuacaaaguaaaguguggguccaacucccggauauuauuagccaugugaccug

SEQ ID NO: 4180642 - RNA, 68 nt, Human
cagguuucaaagagaggcagaaggaacaggucagugggcuguuuguuaggcaaucuuugagaaacuug

SEQ ID NO: 4180643 - RNA, 70 nt, Human
cagguuuccaggaguuugaccugugggcugcuucccuuucagccccauagcugcccaccuccucaaccug

SEQ ID NO: 4180644 - RNA, 85 nt, Human
cagguuuuagucuaggaauuuuuguaaugguacuuuaacccuccaaaagaguauuuacauaaagaaauucaauggauagagccug

SEQ ID NO: 4180645 - RNA, 74 nt, Human
cauccagcuuuuucauacacauucuuauuacuuuugugucaucaaaagacuugggagcaguaugcugcuggaug

SEQ ID NO: 4180646 - RNA, 63 nt, Human
cauccauagccucaauaaauagcuaaaaucugauucuuugcuguuauuccaggcugaugggug

SEQ ID NO: 4180647 - RNA, 57 nt, Human
cauccauuuaauugaggggaaggagaguauuagccucauccuuuuuucuaaguggug

SEQ ID NO: 4180648 - RNA, 71 nt, Human
cauccauuucugauuacagaauacuagguuagucugucugcccuuguuucuagcuaaucacaaguaggaug

SEQ ID NO: 4180649 - RNA, 75 nt, Human
cauccccaugcauauaauagugccuggcauguaacauagccaguguucaauacauauuugugaaaugacuggaug

SEQ ID NO: 4180650 - RNA, 71 nt, Human
cauccguuuugcccaggauauugagucagcaaaggaaaugauggcuucagucuccuuggguccccuagaug

SEQ ID NO: 4180651 - RNA, 66 nt, Human
cauccuaauggccacuguugcuuggaccagggaugggugucuggucugagcggggccauucagaug

SEQ ID NO: 4180652 - RNA, 93 nt, Human
cauccuaguguuauuguuuacacauaacuccuaucaagaguuuggucaggacaauggauuuucuugaggggugugauaggcaugcuauggaug

SEQ ID NO: 4180653 - RNA, 74 nt, Human
cauccuauuccuuguacagaucuugcaaggacgcugugugaaacagcguuguugcaacucugaacaagaggaug

SEQ ID NO: 4180654 - RNA, 66 nt, Human
cauccuggcccucaugaccccuuccagguguggaggaccugugugaagggggcagaggggcaggug

SEQ ID NO: 4180655 - RNA, 72 nt, Human
cauccuggcuccuggagaccugcugauacagcugccuuguggcuacugcugagugggucaccagccagggug

SEQ ID NO: 4180656 - RNA, 78 nt, Human
cauccuugguuccuccugccucaguauccgcaucugugaucugggcugcuaugaggcagagaaaggaccccaugggug

SEQ ID NO: 4180657 - RNA, 89 nt, Human
caucgaaauugcaguaucauagaaacagaugcacuucucuaauuauagagauggugacuuuguuuauaggcaaaugcaguuuucaaaug

SEQ ID NO: 4180658 - RNA, 58 nt, Human
caucgcucauuccucugaugcuggguuucuuuuucaagccacagaggacagggcugug

SEQ ID NO: 4180659 - RNA, 97 nt, Human
caucgugcaccaguugcugaaaaauggcaacaugguauagugagaagaacguggcuuccagaccagagaucugccacucagcacuggugcaauggug

SEQ ID NO: 4180660 - RNA, 82 nt, Human
caucgugcuguaaaggaucugcuguguuucacaccucugggaauuucacaucuguugauacagcaucaccauucagacgaug

SEQ ID NO: 4180661 - RNA, 62 nt, Human
caucguuuuucuccuggccugauucuuauuugcugaggacucagagucugagauaaaucuug

SEQ ID NO: 4180662 - RNA, 70 nt, Human
caucuacguuguggcauguuucaggugcuuaauuccuuuuuaucacugaauauauuccauugcauggaug

SEQ ID NO: 4180663 - RNA, 71 nt, Human
caucuagaaggcgguuucccaagugugguaggcagguuugccacugaacauaugcaagaccauuuuaggug

SEQ ID NO: 4180664 - RNA, 66 nt, Human
caucuagagaaugucagugaucagguguccacuccaucauguggcucagagguuuuucucuggaug

SEQ ID NO: 4180665 - RNA, 94 nt, Human
caucuaucugcagaguuaaauagcuacaugaucucuaggaauuuauccacacuuccugaguguuucuguguuauucaguaaaaugcagauaaug

SEQ ID NO: 4180666 - RNA, 68 nt, Human
caucuauguucauagaaaucaugaccuucacaucuuugaggagugucagugaaacuaugaauaugaug

SEQ ID NO: 4180667 - RNA, 67 nt, Human
caucucacagcaaacugcugaaagggaccaggccuccuaugucugugcagcaguaugguguggcgug

SEQ ID NO: 4180668 - RNA, 67 nt, Human
caucucacugagggguuuacaaaagggccugacuuagugccuggccuuggggacuccucagugaaug

SEQ ID NO: 4180669 - RNA, 65 nt, Human
caucucagaaacauaucuaauccuuaaaaauaaaugaagagaggagaucugaaaugacugagaug

SEQ ID NO: 4180670 - RNA, 65 nt, Human
caucucauuuccuggauuaucuuuccugugccaacucacagugugggacauuaggaaaugguaug

SEQ ID NO: 4180671 - RNA, 92 nt, Human
cagucugaguccacuuuaaaaugucagccugaacucucagacuuaauuguuacagacauuuuauaagcagggcauuuaaaauccucaggcug

SEQ ID NO: 4180672 - RNA, 63 nt, Human
cagucugccaggggccagcccuagaaccaccuuccccucucuaagcugcacacccagcaacug

SEQ ID NO: 4180673 - RNA, 58 nt, Human
cagucuggcacagcacacugaacacuauucuuaguccacguguguagaugcugaacug

SEQ ID NO: 4180674 - RNA, 86 nt, Human
cagucugguggaggaagacagaguuaaauaagcauuaacuuuaaaguaggggaagugcauuaagcuaugggucaccuagcaggcug

SEQ ID NO: 4180675 - RNA, 86 nt, Human
cagucugguugggacaugcaguggcagcuccugguguauaacaucuuucacacaccuugagucuaucugcuugcugccuuugacug

SEQ ID NO: 4180676 - RNA, 64 nt, Human
cagucuucauagaaauaucacgucuuuucugauucaugaaaaggaaauuuucugugugagauug

SEQ ID NO: 4180677 - RNA, 70 nt, Human
cagucuuucaacucaugcuaaaggaaggagcauucagcccugacugagaacucaugaguuagaaaaacug

SEQ ID NO: 4180678 - RNA, 56 nt, Human
cagucuuuuguauauuagcagaccauugggaaacuugucaauauauaugaaggcug

SEQ ID NO: 4180679 - RNA, 65 nt, Human
cagugaaauaguggacaucaaauaacuuuauggguuguauugguuccuuuacuauguucuagcug

SEQ ID NO: 4180680 - RNA, 89 nt, Human
cagugaccuuggcaauucaaacugaggagaggauggccaguuaucuuauuggguacgauuuucagucuugaagaaaagggguuucacug

SEQ ID NO: 4180681 - RNA, 129 nt, Human
cagugagacccauuggcaggcagugggggugucaggagagggagcagcagccacaggaugaaugugggagcccacgggugucucuugcuccuccccucugggcgucaugcugcuggcgcugguccucug

SEQ ID NO: 4180682 - RNA, 124 nt, Human
cagugagacugcucugugcccauucauuucccuccugccauuugcugguuuucugaucugguuuauuuagguuugacaucagccaaaugguguagcgcgaugucucugacagauauucuuacug

SEQ ID NO: 4180683 - RNA, 71 nt, Human
cagugagaggcugcuguuagcccugggcauguggucagccacggccacaggacccacaacagcccugccug

SEQ ID NO: 4180684 - RNA, 129 nt, Human
cagugagcuaugauugcaccacugcacuccagccugggugacagagcaagacccuauuuuauguuuuuugagucaaagucucgcucugucgcccaggcugcagugcaguggcaugaucuuggcucacug

SEQ ID NO: 4180685 - RNA, 55 nt, Human
cagugagggcccccuuccagguagccagacacgcaccaguuuggggggcuuccug

SEQ ID NO: 4180686 - RNA, 61 nt, Human
cagugaguccaagauggcugaaugagagcagguguucugacuucaggugugggcugcaaug

SEQ ID NO: 4180687 - RNA, 72 nt, Human
cagugagugaagcauugcagcaaaugaaauucuggcuuucuuuucauuuugaacaagagcuucacauuauug

SEQ ID NO: 4180688 - RNA, 84 nt, Human
cagugauacuugguuuucuuuagaggugagagauuuuuagcucaccacuggcuucaucaaccucuggagaaaucaggaauccug

SEQ ID NO: 4180689 - RNA, 130 nt, Human
cagugaucuauuaucccaucauugcccuccagccugggcaacagagcgagggccugucuuuuuuuccuuugagauggaguugagcucuguuguccaggcuggagugcaguggugugaucuuggcucacug

SEQ ID NO: 4180690 - RNA, 90 nt, Human
cagugaugcaccuaaucuguguuucugccaguaugaccuuaagagggacauggcuugcaagcauaggagaaucugaugggugcuuuccug

SEQ ID NO: 4180691 - RNA, 62 nt, Human
cagugauggggaaagugagucagagaguuuucaaguuuagaauucauuuugcccagucccug

SEQ ID NO: 4180692 - RNA, 81 nt, Human
cagugauggugaaaggagaguagcauaucaaaaucaccugaaauugagggugauuuuuaaaauucuccuugcuucacauug

SEQ ID NO: 4180693 - RNA, 56 nt, Human
cagugauuuucucagaacuugagaagagaaagaucaaguuugagaggaagucagug

SEQ ID NO: 4180694 - RNA, 68 nt, Human
cagugcacaucaugcuauaaaaauuugaaaaaccuaaugagcccaaguguuagcaaagauguggauug

SEQ ID NO: 4180695 - RNA, 59 nt, Human
cagugcagcugccccgcugguaauacacaagauucugccaaggcuggaagcuguugcug

SEQ ID NO: 4180696 - RNA, 59 nt, Human
cagugcaggcuuguggccgcaggaagcucucuugucuggcauacucccugcucucacug

SEQ ID NO: 4180697 - RNA, 70 nt, Human
cagugcagguucgaccggguucagcaagagagccucugcuucccauaguggaauucggggaccuggacug

SEQ ID NO: 4180698 - RNA, 76 nt, Human
cagugcuaccuucucaaaguugugaaucaggcauuaccaacacuuugaaccugagcuuacaauuuaagaaccacug

SEQ ID NO: 4180699 - RNA, 66 nt, Human
cagugcuguagacaaacgguuuguuugaaaacauuuugugaaagccugcuuuguuccacagcauug

SEQ ID NO: 4180700 - RNA, 81 nt, Human
cagugcugucauucucuuaguauugcuaguuuagcuuauucucuuacaugugcugguucaggccacuaagaagacccacug

SEQ ID NO: 4180701 - RNA, 60 nt, Human
cagugcuuaacccagagcgaacguuagcgacuauuaauacuucugccuaggguuagccug

SEQ ID NO: 4180702 - RNA, 55 nt, Human
cagugcuugguccaugucugucuuuccguuuagacugagaacuugccaaggacug

SEQ ID NO: 4180703 - RNA, 111 nt, Human
cagugcuuuaaggucuaugaaguguguuuacaauaguuccuucuuuuguuuuacucuggggggaagcagagaggauauuauuguccaccugcuuuauggauaaagacacug

SEQ ID NO: 4180704 - RNA, 59 nt, Human
cagugcuuucaacccuguggcuaaaggucauccccgugucccaggugucugaagcucug

SEQ ID NO: 4180705 - RNA, 76 nt, Human
caguggaacacaggacuaucagcuguccucuggcauauuucauguaggccuuuaguuaauauucuguguaucucug

SEQ ID NO: 4180706 - RNA, 60 nt, Human
caguggaauacgagcagaugucuugaauaugcugugagcuuggucuuuuguguuccagug

SEQ ID NO: 4180707 - RNA, 83 nt, Human
caguggauaagaacauuugucagaaaaaaacagccaggcucaaaauauguuugacaagagcaaauguucuugaaauuccauug

SEQ ID NO: 4180708 - RNA, 76 nt, Human
caguggcaggagucagcccuaccuugaggcucagccggggcuugcccuggaggaagcggcugacgaucugccgcug

SEQ ID NO: 4180709 - RNA, 57 nt, Human
caguggcauacuuggcugauauaucuggucacaguagaaugggcuguuaugucauug

SEQ ID NO: 4180710 - RNA, 57 nt, Human
caguggccuuuccugcugcucagcaugaaaugagccaugagcagcaugaaaucacug

SEQ ID NO: 4180711 - RNA, 58 nt, Human
caguggcucaugccuauaaucccagcacuuugggaggccaaggaaggugggucaccug

SEQ ID NO: 4180712 - RNA, 63 nt, Human
caguggcugccucugccauccaggagcacucagaggggugaguggagaacagaggcucuccug

SEQ ID NO: 4180713 - RNA, 61 nt, Human
caguggcuuacaaugaacuagagaggggccuuguccuggucuacuccaccugugagcccug

SEQ ID NO: 4180714 - RNA, 129 nt, Human
caguggcuucucccaggucucugaggguguuuggagcucauacccucuucucuuuaacaagcgugacaguuaaaagaguaagggcugguauggacaaaagcaggaaggugccugggguaguagucauug

SEQ ID NO: 4180715 - RNA, 84 nt, Human
cagugggaagcugguugggagcuggaagcaaggccugaacaggacaguugggcuuaaacacagcucucagacggaaucccugug

SEQ ID NO: 4180716 - RNA, 71 nt, Human
cagugggaccugcucuuggaaugaggccgcccaugggaggccacaugccugugaugccugggugcccaaug

SEQ ID NO: 4180717 - RNA, 55 nt, Human
cagugggggugaggccgagguaccuggauugucaguggccucccacaccgcccug

SEQ ID NO: 4180718 - RNA, 57 nt, Human
caguggguccuaaguacaguucuuaugcucaucuugcugcuagacuuggggcuucug

SEQ ID NO: 4180719 - RNA, 81 nt, Human
cagugguacucucagauaguucuuugggaaguuuaaauuggcacaagcacuuugaagagcuuuuugacacauguauuacug

SEQ ID NO: 4180720 - RNA, 69 nt, Human
ccagcuuuccaggguugacuggggggcuuaaacaauagaaauuuacuuucucacaauucuggaggcugg

SEQ ID NO: 4180721 - RNA, 75 nt, Human
ccagcuuugucucuuaaauguuuacuuuuuuugagaucacaaagaugaaagauuuuuauagagagaaaagucugg

SEQ ID NO: 4180722 - RNA, 81 nt, Human
ccaggaaaaugagauguucaggagucugaguguauguguucacaugugugugugcucaggccuugaagucuuuucuuuugg

SEQ ID NO: 4180723 - RNA, 88 nt, Human
ccaggaagaaacggaucgcauggcucauuuaucuugcagccauuaauuaauggugguuaauuguaguuaugagcuguugaauuccagg

SEQ ID NO: 4180724 - RNA, 58 nt, Human
ccaggaaggcaggccuccccgcggcgccuuccagggcuccccggggccuccucccugg

SEQ ID NO: 4180725 - RNA, 61 nt, Human
ccaggaagguaugggaagaaaacugauuuuaaugugagugucucccuuuuaaccuuacugg

SEQ ID NO: 4180726 - RNA, 78 nt, Human
ccaggaaugaugcuggagcgugauccuugaucuugaggaguccacagggcaugcuucaaguccuuaaaucucuccugg

SEQ ID NO: 4180727 - RNA, 55 nt, Human
ccaggacaagccagagggacaggacaaaccaaggguccacagggguuuguccugg

SEQ ID NO: 4180728 - RNA, 57 nt, Human
ccaggacucaauuaaccucacuuaaacaauuuuuuggugggaccagugaagucuugg

SEQ ID NO: 4180729 - RNA, 63 nt, Human
ccaggagaugauguuggggauuguaaauauccacaagacagcccccccgcacccaacuccugg

SEQ ID NO: 4180730 - RNA, 90 nt, Human
ccaggagccgggauagugaggaguaaguucuggcuaccugcucaucaggcauccugucuugcuucugcugcacuauccugauuuuuuugg

SEQ ID NO: 4180731 - RNA, 60 nt, Human
caguuaugagcuauauuagagaagaggugcuaaucaacagucucuuuuagcuuacagcug

SEQ ID NO: 4180732 - RNA, 55 nt, Human
caguucauggaagauucaauggacauguacaugauccccugagcacccagaacug

SEQ ID NO: 4180733 - RNA, 64 nt, Human
caguuccacagagucucacuaugacagcaucauugcccucacagugagaaauuuguuggcauug

SEQ ID NO: 4180734 - RNA, 66 nt, Human
caguuccccuugaagacuagaaugaggaaucacaagcgugguuuucauuugcugccuucugaacug

SEQ ID NO: 4180735 - RNA, 69 nt, Human
caguuccugagagucaagaaugcagggagagcuuagcuagacuucuacuuuuagacucucacaagacug

SEQ ID NO: 4180736 - RNA, 64 nt, Human
caguuccuggcacacaguaggcaccaauaugugauagcuauugcugcugcuguugcugcugcug

SEQ ID NO: 4180737 - RNA, 90 nt, Human
caguucgucucgguuauuccucauuuaacacugguucaguuaauggaaaagaaagcacuuaagagaaggaaugaccuagcuagugagcug

SEQ ID NO: 4180738 - RNA, 59 nt, Human
caguucuacccagguauaaaugcauuauccucauaucugcaccacccgugggaggacug

SEQ ID NO: 4180739 - RNA, 70 nt, Human
caguucuauugaucuaacauuuguguuugaacuagaacaugcacugaaaauguuggauuccauauuacug

SEQ ID NO: 4180740 - RNA, 71 nt, Human
caguucugggugcaucaguuuuuuagaaguaacuguucaguuaacggcagaucugauguuaccaagaauug

SEQ ID NO: 4180741 - RNA, 57 nt, Human
caguucuggugacacgaaguuugcuaucucaaugggguagcccguucaucauagcug

SEQ ID NO: 4180742 - RNA, 74 nt, Human
caguucuguaccucagcuuugcucccaaccaaccacuuccacauguuuugcugguagagcugaggacagcucug

SEQ ID NO: 4180743 - RNA, 69 nt, Human
caguugaauggaagagaaguguccugugcaucaacguguucuucaggacacuuguucuucucugcacug

SEQ ID NO: 4180744 - RNA, 77 nt, Human
caguugagagugucagaaaacuucccuuugaguucucaaguuucauggcucaaggcgaauuuucuguuucuuuucug

SEQ ID NO: 4180745 - RNA, 57 nt, Human
caguugaggucagguauaaucaauguuccaaugggauaauuuuguccugucucacug

SEQ ID NO: 4180746 - RNA, 72 nt, Human
caguugcagaggcagagugcuaagcuuggcagaauauguaaauguggaagaagcaugugccucugacgacug

SEQ ID NO: 4180747 - RNA, 62 nt, Human
caguugcaguuguguccacagccauuuacauagagaggcucaccuagggagcacugcaacug

SEQ ID NO: 4180748 - RNA, 96 nt, Human
caguugcuggcucuaacucugccuuggugucacaagaagaggaccuuaauuccucuguuuugcauccccaagaauagagaauagaugucaaaacug

SEQ ID NO: 4180749 - RNA, 129 nt, Human
caguuggauaagccacaggugauaucagagguaaaaugccccagcugucaaugaaaugugagauuagagcaaccuagaacucucugugacagcuggguauguccccucugaaucugguuggccagcagg

SEQ ID NO: 4180750 - RNA, 72 nt, Human
caguuggauucaaaauaucagucccggccuaugugguuuaccuccaaaggucuaacugauagaauucaucug

SEQ ID NO: 4180751 - RNA, 97 nt, Human
caguuggggucgguggaugugcuggucugaggagagggaguucccugugugcuuccuaacgccaguauuuucaucaaaugaguuugaccugagagug

SEQ ID NO: 4180752 - RNA, 58 nt, Human
caguugugcccuuugccucagcaguccauuaaaaacuguuuugcagagaaggcgacug

SEQ ID NO: 4180753 - RNA, 64 nt, Human
caguuguggccauaggaggucagaugagcuguagcucaggcugguggucagauggcuaugauug

SEQ ID NO: 4180754 - RNA, 61 nt, Human
caguuguuccuaagucaucaacuuaauagacucauuucuagaagacaaaugggaauagcug

SEQ ID NO: 4180755 - RNA, 84 nt, Human
caguuguuucaggccagguuuucuuuucacuuuauuucuaagggcuccuucaaggcugaaaacgagauggcaauaagauagcug

SEQ ID NO: 4180756 - RNA, 125 nt, Human
caguuuacaagcauuuccuguauauuugccugucuucauccucaucauaacccugugaggauaauuuuuucuuauucucauuuuuauagaugagagaagaggagggagcuaauguuuguuuucug

SEQ ID NO: 4180757 - RNA, 61 nt, Human
caguuuacagaugcuacaggagcacuaacucaugggugugaucaucauggcucuggagcug

SEQ ID NO: 4180758 - RNA, 66 nt, Human
caguuuagccaguggucacugaggaagaauauaaguuagccucguagugaccauguggaaguccug

SEQ ID NO: 4180759 - RNA, 65 nt, Human
caguuucgucuccugggucuucucuaagcugcuccacccacagaacccaggggaagcagaaacug

SEQ ID NO: 4180760 - RNA, 58 nt, Human
caguuucugagcccugucauuugguagguucuuuggauccuugggucucuggaaauug

SEQ ID NO: 4180761 - RNA, 55 nt, Human
caguuucugggaggaaaggaagaaaaaagccauacuucacaacucuuagaagcug

SEQ ID NO: 4180762 - RNA, 58 nt, Human
caguuucuguuaccauauuugacaguguuaaagcugauauauaaggcgauagaaguug

SEQ ID NO: 4180763 - RNA, 97 nt, Human
caguuucuugagauacagcuuggcuguuuuaucuccugguggcccggcguuaaugucacuacugguauuaggaugaggccaggcuuuggagaagcug

SEQ ID NO: 4180764 - RNA, 73 nt, Human
caguuuggauccugcuaaaccagaauaaaaagucuagaacauggauguccucuugauuuagcagaucuagcug

SEQ ID NO: 4180765 - RNA, 96 nt, Human
caguuugggaaggcaaguaggugguagaguugggaugugaaugcgugcauucacuauaauccacagucuuagccaucaaaccagugucccaaaaug

SEQ ID NO: 4180766 - RNA, 70 nt, Human
caguuuguaauaccuuccaacaucaagacauuuuagaacuaaaauugacuaugaaggguaguacuugcug

SEQ ID NO: 4180767 - RNA, 62 nt, Human
caguuuuauacacugcagcuccuggcuuuaccauucauccagcagcucaggauauagacuug

SEQ ID NO: 4180768 - RNA, 103 nt, Human
caguuuucccagcaggagauggggcgugaugucuuuuauagugaccacagagcagauggcgcacaauacaucauccccauugggcuccuuuggaaaugaacug

SEQ ID NO: 4180769 - RNA, 130 nt, Human
caguuuugaggggcaggaaucuggaaguggcuuagcugaguggugcuggcucagggugucucaagacaagcuguuggccaaagccacagucaucuggagcuagacaauuccgugcucacucauacgguug

SEQ ID NO: 4180770 - RNA, 91 nt, Human
caguuuugccuauuacaaucgagagaaacaaauaguuuacacuugggagauucauaguauuuguuuaucgucgauuguaguaaaaauuuug

SEQ ID NO: 4180771 - RNA, 58 nt, Human
caguuuugucuccaugugaucuagaauguuuaugugagaacagaugugggcagaccug

SEQ ID NO: 4180772 - RNA, 101 nt, Human
caguuuuuacucccaagacuuuguuagugcucacguguuagaaaggcacccaaaguuuuccacgcuuuucagaaaggugagacuaccaaaagugaggauug

SEQ ID NO: 4180773 - RNA, 77 nt, Human
cauaaaaacaaguagaaaaccgcacuggacuaguguaaguuaugaguucccuguuuuuuuccacuguacauuuugug

SEQ ID NO: 4180774 - RNA, 64 nt, Human
cauaaaaacagcagagcugugccccuucacaaugggaauaaggccuggcucuguguuuauuaug

SEQ ID NO: 4180775 - RNA, 84 nt, Human
cauaaaagagaaagaaaagguauaucugauccaugagggagaacuugcuuuuuuaugucucugauguucuaaucugauuuuaug

SEQ ID NO: 4180776 - RNA, 87 nt, Human
cauaaaagcuagaaggaaaggcaguacagcugagccucaaggacaacuagaacuacugucacugucucucaucucugcuucuuugug

SEQ ID NO: 4180777 - RNA, 120 nt, Human
cauaaacuggacuaaauaaucaggacucccucaauucaucuacggauucaaugaaaucucuaucgaauuucaagcuggcuucuuuguagaaauugaaaaguugauccuaaaauucauaug

SEQ ID NO: 4180778 - RNA, 71 nt, Human
cauaaagcugcuguuuguauguggacugauuuaagccauaggaagucuauuuucagaagcaguuuucuaug

SEQ ID NO: 4180779 - RNA, 66 nt, Human
cauaaaguaaagaugucuuccaggacaauuuuaauuccuggaaaggaagaaacucuuuucuuugug

SEQ ID NO: 4180780 - RNA, 79 nt, Human
cauaaauauuauuauaaauuauuaggcugcuaaaugggcuguugauuaugcaguauguguaauuuaagguaauauuaug

SEQ ID NO: 4180781 - RNA, 76 nt, Human
cauaaaucuaucugagagauguguaggaagcugaaucuuuaaaaccuggcuucccucuuauuuuauggcauuugug

SEQ ID NO: 4180782 - RNA, 78 nt, Human
cauaaauggaaaccaccgauguuuacccaggguggcauugagcaccuuuccaaguaucaggugguguuuucaacugug

SEQ ID NO: 4180783 - RNA, 106 nt, Human
cauaacauauauagaaaauggaaguaccucugcauuugcuuaggaaaaaagguuaagauccuuguuuuuaagagauguuuacuccaggucaaugaucccuguuaug

SEQ ID NO: 4180784 - RNA, 64 nt, Human
cauaacauccuugcuacuuugacuuuguaucugacaacaucucagucuuugcaaggaugcugug

SEQ ID NO: 4180785 - RNA, 84 nt, Human
cauaacugcaguuucuuuucaggaugacaccauguccagcuuaaaauguguagcuggauguuuuaagucuccuuugcagcuaug

SEQ ID NO: 4180786 - RNA, 75 nt, Human
cauaacuguugucaugguauauuucacucuuuaggaagucccugaggaauagugauuaaacuauuauuacugaug

SEQ ID NO: 4180787 - RNA, 59 nt, Human
cauaagaaauuuaacagaacuucacccugugggaacaaguucuuuuagaugucuucgug

SEQ ID NO: 4180788 - RNA, 69 nt, Human
cauaauacuguacgucccagauaggagcuccuucuucaauuuggcucccaggaugaagacaguguugug

SEQ ID NO: 4180789 - RNA, 69 nt, Human
cauaaugagcugugggauuccagaggauguagaucuccacgaacccucugacuccacacuugaacugug

SEQ ID NO: 4180790 - RNA, 81 nt, Human
cauaauggacagugcuccacauugcacuauucggggguggaaggagucuggaauagugcaauggggaguaaaguuuauaug

SEQ ID NO: 4180791 - RNA, 90 nt, Human
cauaauuguuggcuauucuguuugucuuuauuuucuuggauuagguguucaaguugguaggagacagaaggugaagaauugcaauuuaug

SEQ ID NO: 4180792 - RNA, 56 nt, Human
cauacaagcgugcaugugcuugugaguguguguacaugcaugugugugcuugugug

SEQ ID NO: 4180793 - RNA, 121 nt, Human
cauacacacgaguucaaaccucuaggacugguauuugguauaauucgauucucauauuauuaugagggguauauuaaaugaccaguuuuaauacauggugcacuuugaauugguugucaug

SEQ ID NO: 4180794 - RNA, 60 nt, Human
cauuuugaucucccagacuaaggaguugcugcaucuccuuagcucagggaguucacugug

SEQ ID NO: 4180795 - RNA, 60 nt, Human
cauuuugcuaguucugugguuuugagcaucuuucagcuuagauucauaaucuguaaaaug

SEQ ID NO: 4180796 - RNA, 82 nt, Human
cauuuuguguguauuuauuuugcugcuaugccuugcaacugauuuugcuugcagacuuagcaaauugaaguuauuuaaaaug

SEQ ID NO: 4180797 - RNA, 114 nt, Human
cauuuuuaaauuuaaguuaaugcuaaaauguauuuguuaaucuuaagccucauaguucccuuaaagaggcuugaguaaagaaguauuuuagguucuggcuuaaauaugaaaaug

SEQ ID NO: 4180798 - RNA, 80 nt, Human
cauuuuuauaugagucauuauuguaauuuuugaaacuuacauguuuguugaguuacagagaugaaagaaaugugaaaaug

SEQ ID NO: 4180799 - RNA, 58 nt, Human
cauuuuucgucauuggauuuuagccugggaggaggcuaggucuggcagaagaaaaaug

SEQ ID NO: 4180800 - RNA, 103 nt, Human
cauuuuucuccucgcaaacuugagauaguaauucuuacaggcuaaguacaagcuuaacacuguccaaagaauuccacacugucuaggaaagaggucugaagug

SEQ ID NO: 4180801 - RNA, 78 nt, Human
cauuuuugaaggcucucuuccuuuucugggcuuguuucauuaucucuuccagaaaggucuuccggucuuccagaaaug

SEQ ID NO: 4180802 - RNA, 73 nt, Human
cauuuuuggagaacuuccacucauuuucacuuugaccaugcaaaugaacagugggugagguacccucaaaaug

SEQ ID NO: 4180803 - RNA, 58 nt, Human
cauuuuuuaaacaucucacugccugggcccugaaccaggcauugaguauagacagaug

SEQ ID NO: 4180804 - RNA, 81 nt, Human
cauuuuuuaggaagaaggaggcaguauuaauuuuuaguuacacaagugauauauaaguacagucugcuuuuuuaaaaagug

SEQ ID NO: 4180805 - RNA, 62 nt, Human
ccaaaaagcuguuuuuagguggagguaguggguguuacuauuugagcgaagcaguguuuugg

SEQ ID NO: 4180806 - RNA, 78 nt, Human
ccaaaagggcuugcaaggauucauaggaaacugccccaaauaauuuaaguuucuguucaguugauguaguuuucuugg

SEQ ID NO: 4180807 - RNA, 66 nt, Human
ccaaaaggugauacagaauaacgcugccauugacaaaguaugugugcauauucugccaccucgugg

SEQ ID NO: 4180808 - RNA, 90 nt, Human
ccaaaagucauuucaugaaugcugcuguugaggcauguuuuucucucccgacucucacccaguucugcauuugagagguugacauuuugg

SEQ ID NO: 4180809 - RNA, 97 nt, Human
ccaaaauauaggaaaguuagaacaauauucucccuacaaacagugcauaguccagcugaaauguggggaauuauauaguaaugguuccugugaaugg

SEQ ID NO: 4180810 - RNA, 69 nt, Human
ccaaacaaaagggcagaugaaaagcaguguaauccgugggaaagcaugugucaucugccuuucguuagg

SEQ ID NO: 4180811 - RNA, 96 nt, Human
ccaaacuucacaguagcaauguugaacacugcgugaugcucaguaaccauuuuaaagucauaacacaguaguuugucauugcuaaaccuuuuaugg

SEQ ID NO: 4180812 - RNA, 83 nt, Human
ccaaagaaaguuguuggaggaaaugacugucaacacuuuauuugacuuacucaauuuacuuuuagcaauaauaaagcauuugg

SEQ ID NO: 4180813 - RNA, 63 nt, Human
ccaaagacagacuugacuagagccucguguccccagagggccucacuggaaguuagucuuugg

SEQ ID NO: 4180814 - RNA, 60 nt, Human
ccaaagcauaucauuauaaugggagcaucuagcaauucccaguggugggugcacauuugg

SEQ ID NO: 4180815 - RNA, 83 nt, Human
ccaaagcaucuuggacgugagcgugcaguaguguugguaggaugguaacuccuacaacauuguguugcuucauagugcucugg

SEQ ID NO: 4180816 - RNA, 72 nt, Human
ccaaagcccagugauggugaucagauguuaccuaaguauguagacuacugccuaccacgcuguacuuguugg

SEQ ID NO: 4180817 - RNA, 60 nt, Human
ccaaagccugggcggacuggagagggggccuaccugccaggagucaggccaggcaguugg

SEQ ID NO: 4180818 - RNA, 60 nt, Human
ccaaagcucugaggaacugcauguuacuugggcaaaauaugcaagcaaucugagcuuugg

SEQ ID NO: 4180819 - RNA, 57 nt, Human
ccagccugguucagaauuggcuccauaacuggauaaugcuggaucugaaggugcugg

SEQ ID NO: 4180820 - RNA, 64 nt, Human
ccagccuucugggacucucaucuagggcucuguuuuggaugaucugagagucccaggggcuugg

SEQ ID NO: 4180821 - RNA, 60 nt, Human
ccagccuuuucucuuugccuuucagggcacauugucaugaacaaaggcaggagaaggcgg

SEQ ID NO: 4180822 - RNA, 68 nt, Human
ccagcuacagacugagcauggcucuacugaggaauaaggaagagcuuuagcugcuggucuggaccugg

SEQ ID NO: 4180823 - RNA, 87 nt, Human
ccagcuacauuugugauacuuucagugcuaagaaaaucuauauucuguagcuuugaaguuauuuaacaguuaaguacuauuugcugg

SEQ ID NO: 4180824 - RNA, 56 nt, Human
ccagcuauccugaccagccucgucgcuucccagaggcaccagggaaggaaggcugg

SEQ ID NO: 4180825 - RNA, 72 nt, Human
ccagcuauuuguaggaaaacuguacuuuggagaucuacccagacuuuucacagccuccuacaaaaugccugg

SEQ ID NO: 4180826 - RNA, 72 nt, Human
ccagcuccaggacugggagcugauugguuuaaguuagucaguguaacccaagccccuggccauggaguaugg

SEQ ID NO: 4180827 - RNA, 74 nt, Human
ccagcuccgcaggcuugagggcaggcccagucaccugcaggcagcugggucuggcugugagccgggagagcugg

SEQ ID NO: 4180828 - RNA, 57 nt, Human
ccagcuccugggucuuagucagagguucacauccaccaacuaucuucccaggguugg

SEQ ID NO: 4180829 - RNA, 64 nt, Human
ccagcucugugcauugcccauuaggcagugcuuccuucuguccucugggcuuugagcagucugg

SEQ ID NO: 4180830 - RNA, 69 nt, Human
ccagcuggacugggcuuugguacugugauuagcauagcugggauuuaccaagcgcuuccucuagccagg

SEQ ID NO: 4180831 - RNA, 64 nt, Human
ccagcugggauuaagggaaaauuagaaugaaaugaaaaaagaauuuucauuuaaaauuggcugg

SEQ ID NO: 4180832 - RNA, 85 nt, Human
ccagcuggucccuucugaucucagcugccucucccuggaagauguagaucuucuugugcugggccagcuucaguggggcuacugg

SEQ ID NO: 4180833 - RNA, 55 nt, Human
ccagcuggugacauccccaaccagccccaccuggugucugguguccccaggcugg

SEQ ID NO: 4180834 - RNA, 62 nt, Human
ccagcugguuuauauuccccacccuuucuucauggggcaugggaggauucagaacuauuugg

SEQ ID NO: 4180835 - RNA, 57 nt, Human
ccagcugucagugugaaaauaaagccaaauagcuuaacauuucuaaagacuagcugg

SEQ ID NO: 4180836 - RNA, 56 nt, Human
ccagcuuaaaaccauuuauuuagcuuaugauuuugcuggaugucaaauuaggcugg

SEQ ID NO: 4180837 - RNA, 66 nt, Human
ccagcuuauuaagcagguaagacccgucuuuuugauauaaaaacaauaggcuauaugcuaggcugg

SEQ ID NO: 4180838 - RNA, 58 nt, Human
ccagcuugugucauucaucuuguaaaauaauuuacaagauguguuuauacaagcuagg

SEQ ID NO: 4180839 - RNA, 55 nt, Human
ccagcuuucauaucaugagguaacccuagggagaggccuacaugaguaagcuugg

SEQ ID NO: 4180840 - RNA, 64 nt, Human
ccagcuuuuggggugacaauuuuugcccuguaaacuucacgaaaaauuagucaaagaaaguugg

SEQ ID NO: 4180841 - RNA, 69 nt, Human
ccaggaaagaaaggaggugcauuuacaagagccagagaauccugaaaaaacacaacugucuuucucugg

SEQ ID NO: 4180842 - RNA, 65 nt, Human
ccaggacagugcauuuccuggcaugggagcucacucuuaugcccagacaaugccacugagccugg

SEQ ID NO: 4180843 - RNA, 111 nt, Human
ccaggacccuccauucuccccaccccacuuccaccuuugggggugucggauuugaacaaaucucagaaguggccucagagggagucggcaagaauggagagcaggguccgg

SEQ ID NO: 4180844 - RNA, 112 nt, Human
ccaggagagcacagcagggcuucuggugggaaaacacccugugucaagguaguagaugcacagggcucagcuggcaggguucucacugaaaucuagacugcaccuuuccagg

SEQ ID NO: 4180845 - RNA, 94 nt, Human
ccaggagauaaccaaaauguagcucuauacaaucaucuuucauaguuguuauggcaggugaaguuguuagggacauuugaauguuauuuuucgg

SEQ ID NO: 4180846 - RNA, 65 nt, Human
ccaggagcagggcuggcugcacuggucugcaaaagcaaagugucagccagacgcccugcaccugg

SEQ ID NO: 4180847 - RNA, 94 nt, Human
ccaggagccaucguuuucuaguaaacaggggugaacuucauuguagcauaaacuauagaagauagcuuuuguuucuguaaaugaaaacaccugg

SEQ ID NO: 4180848 - RNA, 81 nt, Human
ccaggaggccuggccuuugcuggcccucaggcugagggcugcuccagcuggucugagugggcaggggccgggggcugcugg

SEQ ID NO: 4180849 - RNA, 67 nt, Human
ccaggagggaccgcggcaucccccuuugcuucuccucaccugggccccuugcucuggucucacuugg

SEQ ID NO: 4180850 - RNA, 69 nt, Human
ccaggagggagaagagggcagagcucagguccgucugacaccagagcccugcccacuugucugagcugg

SEQ ID NO: 4180851 - RNA, 85 nt, Human
ccaggaggucacgggauggguguggcuggggaucugaugcucacagagccuccucuucugccuauaucugccugucuucagcugg

SEQ ID NO: 4180852 - RNA, 72 nt, Human
ccaggcacaguggcucacaccuguaaucccagcacuuugggaggccaaggcagguggaucacugaggccagg

SEQ ID NO: 4180853 - RNA, 129 nt, Human
ccaggcaccuaagggcucugccaauugggacaguaccucagaucagcaucauuuguacccagugugcaaaucccugauaauguaggucugagaucauaacuucccagggcagccuccucaguugucagg

SEQ ID NO: 4180854 - RNA, 71 nt, Human
ccaggcaccugugugucucagggcccagaagagcuuguggccuccuugcagacaucaguaguggccccugg

SEQ ID NO: 4180855 - RNA, 104 nt, Human
ccaggcacgcucccucucccgcuccuccagcccgccguagcugcacuaaccccgaguccagcuagcggugcuggcggcuccgggacggaacuuggcggcccugg

SEQ ID NO: 4180856 - RNA, 80 nt, Human
ccaggccagcagcugccccgacugugaguccaguggccacccacaccggcagccaggagggguagagcagcugcgucugg

SEQ ID NO: 4180857 - RNA, 74 nt, Human
ccaggcccaccccagcuggcucauguugccuuuccccaccagagagccuaggcugggcaugucuuugggucugg

SEQ ID NO: 4180858 - RNA, 67 nt, Human
ccaggcccagugguucacguguaaccaggugugauuucugaggaaccuggaccaaacacuggccugg

SEQ ID NO: 4180859 - RNA, 65 nt, Human
ccaggcccugcaggaguggggacagagggaacccggccgguggcccgacccugcagggaagaagg

SEQ ID NO: 4180860 - RNA, 57 nt, Human
ccaggccuagccccugaggguaaaggaucuugccgaccgaagggggcugaggguugg

SEQ ID NO: 4180861 - RNA, 71 nt, Human
ccaggccucccggugcacacugacacaccgccguccgcgggcugagcuucagugacaccgaagggcacugg

SEQ ID NO: 4180862 - RNA, 56 nt, Human
ccaggccugcauucccucucagaguucugauuuucaaagguuagaaugaggucugg

SEQ ID NO: 4180863 - RNA, 107 nt, Human
ccaggccuuguucuggaaguagcagugccaggcuuuagcccgggcccucggacaccaggaugcuugcucuuuagccauggccacucucguuccagguauaaggcugg

SEQ ID NO: 4180864 - RNA, 59 nt, Human
ccaggcucaauggccacuugggcccuuggaugagggcuagcugcauuuaugagaccugg

SEQ ID NO: 4180865 - RNA, 88 nt, Human
ccaggcucccugaagaguuauggcugugugacugaguucuagucaauggaaugugaacauacaagguauauacuacuuucaggccugg

SEQ ID NO: 4180866 - RNA, 56 nt, Human
ccaggcuccggcggauaccuaaugccccuggugggcacaucugcuggcaggucugg

SEQ ID NO: 4180867 - RNA, 70 nt, Human
ccaggcugagugcuccuggaggacagggacugucuucuucaucucugugucagcagcacucagcccaugg

SEQ ID NO: 4180868 - RNA, 101 nt, Human
ccaggcugcaccgcagguaggugagcagugggugagcaaagcuucaucuguauuuacagccagcugcuucccauagcucgcauuaccugggaccagccugg

SEQ ID NO: 4180869 - RNA, 66 nt, Human
ccaugagacugccucaccaagaguaugacaaaagaaaccugugauuucuaaggcuaggucuuaagg

SEQ ID NO: 4180870 - RNA, 130 nt, Human
ccaugagcucccagauucgucagaauuauuccacugagguggaggcagccgugaaccaccugcucaauuugcaccugcaggccuccucaucugccucucucugggcuucuacuuacacugugacgaugug

SEQ ID NO: 4180871 - RNA, 85 nt, Human
ccaugaggaaauguugaccucagaggcaugguuagaauagcaguuauaggcucccuggccauuccucuaggccuuccuacauugg

SEQ ID NO: 4180872 - RNA, 56 nt, Human
ccaugagguuuagguuccuccucuacaaaaugaagaugaagauaccuaccugaugg

SEQ ID NO: 4180873 - RNA, 82 nt, Human
ccaugauaaguugaaauuugugauaauuuagagaaugauaucaagcaacugcuuuaaaaucauagacuucaguaacuaaugg

SEQ ID NO: 4180874 - RNA, 71 nt, Human
ccaugaucuaucaccuuuagguuuguuguuuuuugccaugacaacugcuuaucuuugguagauguuuuugg

SEQ ID NO: 4180875 - RNA, 59 nt, Human
ccaugaucucaguaguguccugaagccaagaggaacaggcuccacucccugggaugugg

SEQ ID NO: 4180876 - RNA, 81 nt, Human
ccaugaucugaaauugguccaugucauaccccauuagggucagugggcagugacaaaggggaugaacguuguaaucagugg

SEQ ID NO: 4180877 - RNA, 61 nt, Human
ccaugcaaggagaacucucacuucugcgcuagagaagagcaguuauggauucuccugcagg

SEQ ID NO: 4180878 - RNA, 63 nt, Human
ccaugcaggaagucggggagcgggggcccaggggugccuuguggcccauggcuuccugccugg

SEQ ID NO: 4180879 - RNA, 84 nt, Human
ccaugcaguauaauaaccaggaagcugucugauaugaaagccaucaauagcauuuucaaucaaaaccuuucaguuaauugcugg

SEQ ID NO: 4180880 - RNA, 55 nt, Human
ccaugcauaugccguagaauaagucaacugacuuaaaugauggcuucauguuugg

SEQ ID NO: 4180881 - RNA, 65 nt, Human
ccaugcccggcuaauauuuuuguauuuucaguagagacaggauuucaccauguuggccaggcugg

SEQ ID NO: 4180882 - RNA, 66 nt, Human
ccaugcccugaugauguguuucuuccagagagaaguggggaaggaccuauauugucagaggaaagg

SEQ ID NO: 4180883 - RNA, 59 nt, Human
ccaugccgucaucaaaaccugccugcuggaugagcagcgcaggcgugugaaggcgcugg

SEQ ID NO: 4180884 - RNA, 72 nt, Human
ccaugcucaucugagucaaauauuucauuugugcagcucaacauaacauagaauaaaugaguuaggggcugg

SEQ ID NO: 4180885 - RNA, 85 nt, Human
ccaugcugcucuagggcucugugagguugggcaaaucauaucacccuccuaagccauagcucucacaccccuaaaaugggcaugg

SEQ ID NO: 4180886 - RNA, 68 nt, Human
ccaugcuuggcacucaacugucguuguuggaugaaacaauucagaaauugccagaaugucaggcuugg

SEQ ID NO: 4180887 - RNA, 55 nt, Human
ccauggcuaacuuugaagugugcgugccucuuugagcacaucagcagggcugugg

SEQ ID NO: 4180888 - RNA, 57 nt, Human
ccauggcuaaguaucuguagaaucauuuccuuucuacaaugcaaacuuggcccaugg

SEQ ID NO: 4180889 - RNA, 67 nt, Human
ccauggcugccaggagggaggccagucgcgggacuggggaacuggcaggcugcuggccggcgcgugg

SEQ ID NO: 4180890 - RNA, 74 nt, Human
ccaugguggcucaugacuguaagcucagggcuuugggaggauugcuuaaggccagcaguuugagaccagcaugg

SEQ ID NO: 4180891 - RNA, 115 nt, Human
ccauguaaaaaauaacaucugcuguacauguaaauucuugccaaucuggagggucaaacagaacucaagacaguucucucagagaugucaagagucuauaugcagcuuuaugugg

SEQ ID NO: 4180892 - RNA, 70 nt, Human
ccauguauaggcagaaagcaaagacuggauuugaacccagacuuuugauucaauguuuauauaaaaaugg

SEQ ID NO: 4180893 - RNA, 76 nt, Human
ccauguauguacaguaccugccacguuguuggcacuaaguaaauguuaaguaacaaugggaaggacugaugaaugg

SEQ ID NO: 4180894 - RNA, 97 nt, Human
ccaugucacccucauggagcuuucguuagccuuguuugggauacaaagggguaaguguccccucauuuuagagaaagaucaagagccagugaacagg

SEQ ID NO: 4180895 - RNA, 111 nt, Human
ccaugucuauccagggggcuuuuaacucuucauuguugaaccucagcuagaguccuacaugcugaggauauagcaggaacaaagcaaagucccuguuuucauagaacaugg

SEQ ID NO: 4180896 - RNA, 61 nt, Human
ccaugucuuauuaaauugaacccucacuuacuggagugauaaaaggugauaagaucuaugg

SEQ ID NO: 4180897 - RNA, 63 nt, Human
ccauguggugggaaggagaaugacucucagccauguccuuucucccaucucagucuuacaugg

SEQ ID NO: 4180898 - RNA, 79 nt, Human
ccauguguccaucagaagagcaaagaacuguuguaguauuaacaugcuauuacaacagaaguguuuauuuaggaauugg

SEQ ID NO: 4180899 - RNA, 57 nt, Human
ccauguugcaucuccccugcuccucauuaucccucugugaaaaugcaggcgacaugg

SEQ ID NO: 4180900 - RNA, 64 nt, Human
ccauguuuuccacccaagauagguagaugaguccucuacuauucuugugugguggaagauaugg

SEQ ID NO: 4180901 - RNA, 88 nt, Human
ccauuaaaguuauuuugcuuucucugaccagagugagaucaucaauuacuuuccuucucugaagaacugaguaaacaugacucuaagg

SEQ ID NO: 4180902 - RNA, 80 nt, Human
ccauuaccacccccuuuugcagaugagaaaacuguggcuuagagagaucaaguaauuugccuguagcugguaagugaugg

SEQ ID NO: 4180903 - RNA, 65 nt, Human
ccauuagaaacccauguuuauucagugugaugcccugcacugaaaguggugguuuucucucgugg

SEQ ID NO: 4180904 - RNA, 60 nt, Human
ccauuaguaggcucuuggcaggaguccagaugagcaacuguggggccucgugcuagcugg

SEQ ID NO: 4180905 - RNA, 83 nt, Human
ccauuauaaguuucuugaagacugauguuuauugccucuucuuaaguaauuauaggcauauaguguuuaaaaaaauauauugg

SEQ ID NO: 4180906 - RNA, 88 nt, Human
ccauuauucauauauaugcacuacguacccuccuagauuuaguuucuguuccuguuccuguguauguagguauguauguguuuggugg

SEQ ID NO: 4180907 - RNA, 88 nt, Human
ccauuauucauucauuguuuauugaaaguuucaggcaccguacugggcaccagaagaauaaagaugacaaugacauggacagugaugg

SEQ ID NO: 4180908 - RNA, 76 nt, Human
ccauuauugcaaagcguagacucuaaacauauuauuagcaucaaaaaauguuuguuuuguaucuuuguauuaaugg

SEQ ID NO: 4180909 - RNA, 74 nt, Human
ccauucauagcauaugcuuuuagcucugaugagaacagugcuguucuucagauccuacaagucugcaagauugg

SEQ ID NO: 4180910 - RNA, 68 nt, Human
ccauucauuguugagugcuucagcuguacaagccauuuuaaugucaguuugagaccaacagagacugg

SEQ ID NO: 4180911 - RNA, 99 nt, Human
ccauucauuuuaggcgcuucauuauucaguugucuacuacugccuggcacacaguagaugcucaauaaguggagaacagaugaauaagugaaugaaugg

SEQ ID NO: 4180912 - RNA, 81 nt, Human
ccauuccuguacagagacccacaagagacugaaaaaugguguuggucaaguugucuuggguucugugccuucugggaccgg

SEQ ID NO: 4180913 - RNA, 56 nt, Human
ccauucgcuggcucgucuuuucuccugugaucagggguguuuuuggccaggagugg

SEQ ID NO: 4180914 - RNA, 91 nt, Human
ccauucggcaggcaguggaagcugucugaggcuucagggcccccuccucacuaggggcuauaauucaugcaguuucuuaucugccagaugg

SEQ ID NO: 4180915 - RNA, 57 nt, Human
ccauucucuucugaugucuugccauauucccaauggcugaaauaaagaagggaaugg

SEQ ID NO: 4180916 - RNA, 130 nt, Human
ccauugaauguggggugcuggacuguuuuauuugaccacuuuugccuauauccagaagaauuuguuuguuguguaugcaauugagucauagaaaagaaacguccuguuguuaaaguucucauaguuuugg

SEQ ID NO: 4180917 - RNA, 88 nt, Human
ccauugagcuagggcugagcuccucuccaggauucauuccuuuugugcuucagagcauccuggaggcuggaggcuugcuccucagugg

SEQ ID NO: 4180918 - RNA, 106 nt, Human
ccauuguaaugucuuguguaugccuuaauuuaugucuaacauaaugguuuuguauugugagacaauugcaucagggcacuuacacgauuaaaaagagauuuaaugg

SEQ ID NO: 4180919 - RNA, 92 nt, Human
ccauuguuaucuuuuuaguauuuggccucuacagucucccaaagucaugguagagacagauuucacauacacacuaaggugacuucagaugg

SEQ ID NO: 4180920 - RNA, 61 nt, Human
ccauuuauuauguucauggauucucugagucaggaauuuagacagggcauaaagaggaugg

SEQ ID NO: 4180921 - RNA, 65 nt, Human
ccauuuccaaucucugcauauggggaccugcgucauguuuuuaagugccaagaugacuggaaagg

SEQ ID NO: 4180922 - RNA, 64 nt, Human
ccauuuccucucccccaaggacuugcagccaaucuccgauagcccuguccaggagaggcaaugg

SEQ ID NO: 4180923 - RNA, 79 nt, Human
ccauuugaacaucuuuccguggacuuuacuggcugcuccuaggccuaggauucgggcauaaagccauuaagauucaugg

SEQ ID NO: 4180924 - RNA, 85 nt, Human
ccauuugcaaguaaagaaucacauuucuugcggcuaggaagcacuugguuagacaagagaggugauuuauuuacuucuucuaugg

SEQ ID NO: 4180925 - RNA, 57 nt, Human
ccauuugcauaggauggacauuuuaacaauguuauuuuuuccaaucuaugcgcaugg

SEQ ID NO: 4180926 - RNA, 56 nt, Human
ccauuugugcucccucagagagagugaggccccugucucuggaagaguuuaaaugg

SEQ ID NO: 4180927 - RNA, 76 nt, Human
ccauuugugguuaagucacugucaaagccacacacuccuugggggaguggggguugcacugugacugcuccagugg

SEQ ID NO: 4180928 - RNA, 62 nt, Human
ccauuugugugucugaaaaggaggcuacgaugugcuuucucaaguacugcacaugaaagugg

SEQ ID NO: 4180929 - RNA, 81 nt, Human
ccauuuuacagagguucugacaguucucugcuuauuuuuagaaucaaugauuuaggaagcuuccagaacuuaaguaauugg

SEQ ID NO: 4180930 - RNA, 56 nt, Human
ccauuuugagguguuugugcaccaucugugacacacacagcaaacacuguaaaugg

SEQ ID NO: 4180931 - RNA, 62 nt, Human
ccauuuugcauagagaugaggcaagauuagcucagaucaugcaauaugucagugcaaagugg

SEQ ID NO: 4180932 - RNA, 55 nt, Human
ccauuuugucaauauauaagugagaaucaugcucaguuauuggugauaaagcugg

SEQ ID NO: 4180933 - RNA, 55 nt, Human
ccauuuugucugacuucuugcuacuucugcucuuuaggaaaggucgauaaggugg

SEQ ID NO: 4180934 - RNA, 66 nt, Human
ccauuuuuaaaagauggaauaagcuggaagaucuucuguagcauuauuuccucuuuuuguuagugg

SEQ ID NO: 4180935 - RNA, 75 nt, Human
cccaaaagaugauuccagaacaauguggacguauagcgacagagauauacacauguuauuguggaagcugcuggg

SEQ ID NO: 4180936 - RNA, 65 nt, Human
cccaaaauucauauguugaaaugcuagcuccaaaugggaugguauuaggagguggagccuuuggg

SEQ ID NO: 4180937 - RNA, 71 nt, Human
cccaaacucucccacucacucugaggaacaaggguucacacugggagaugaagugggcaguggagucaggg

SEQ ID NO: 4180938 - RNA, 71 nt, Human
cccaaagaagcuggccuguauggugagguguggccgcagaugguggugccacacauugucagguuaguggg

SEQ ID NO: 4180939 - RNA, 71 nt, Human
cccaaagggcuuccuguucucaaauccacugcuccuuccauuacguggugucuagaaggaggcucuuuugg

SEQ ID NO: 4180940 - RNA, 91 nt, Human
cccaaagguuugagaagcaauucaaagccuucugucugucaccuugugcacaagaagagacagacugguuugaauugguaagaucuuuggg

SEQ ID NO: 4180941 - RNA, 65 nt, Human
cccaaaguccuuuccaguccugugauucucacacuaaugaauugaaacagaaaaggauuauuggg

SEQ ID NO: 4180942 - RNA, 58 nt, Human
cccaaaugcuuuguuacagcuggaugcuuagaggucccugcugugggaagaguuuggg

SEQ ID NO: 4180943 - RNA, 83 nt, Human
cccaaauuaauuguuuaaaccauagagucuuaauuauuguugagagugacuuucaaguuaaugauucugguuuggaauuuggg

SEQ ID NO: 4180944 - RNA, 55 nt, Human
cccccacuguguucagucacuggcuguaagcaacccugagugaaggccguggugg

SEQ ID NO: 4180945 - RNA, 60 nt, Human
cccccagaauguccagcuucguggagccaccugacaccaugaagaaacuguucugggugg

SEQ ID NO: 4180946 - RNA, 60 nt, Human
cccccagaugcgagccauagccuaccauguccuggcggccuacuacucgcacuuggaggg

SEQ ID NO: 4180947 - RNA, 80 nt, Human
cccccagcaugcaauccacuauucuaaagccccucaucuucccuuuagggaguuuuacgcuguggguuguuuucuagggg

SEQ ID NO: 4180948 - RNA, 129 nt, Human
cccccagccgauugcggucaggagcacuuuaucuuacagacugaauguugguuuuaggaugagagggcuuaucagaagcucggaauguuuauguguguggagaaguuuauggcaggguuggaaggaggg

SEQ ID NO: 4180949 - RNA, 55 nt, Human
cccccagggcugccuccugccgacaggcugguccccagugaggaggugcuggggg

SEQ ID NO: 4180950 - RNA, 55 nt, Human
cccccauucuggccagcccagcugacaucccagcuaacagcagccacauggaggg

SEQ ID NO: 4180951 - RNA, 57 nt, Human
ccccccauguaauuauugugaacaccuugcuuuguggucacuguaacauuugggggg

SEQ ID NO: 4180952 - RNA, 56 nt, Human
cccccuagucucaccuguccaccugccugggcugcacaggugagacucaggaaggg

SEQ ID NO: 4180953 - RNA, 77 nt, Human
cccccucaaacgcauucuuacaugcuuccaccucuaaacaggagaggggaagcuguugugagugcagcaggaggggg

SEQ ID NO: 4180954 - RNA, 122 nt, Human
cccccucccagacacccagacuggcugccucaggaagaacaaggcuaucuggccuccuugccucagacuugggugcagggagcccagaaggucccagguggcacugggauggccgcaggggg

SEQ ID NO: 4180955 - RNA, 98 nt, Human
cccccuccccccucaugcauccccuaggggcuggaggcuccacuucccuggagggccagaucccaggaggaacugugggguggaaaaaacggaggggg

SEQ ID NO: 4180956 - RNA, 67 nt, Human
cccccuccuacacuucuaagguuggggugcgagucacuugaggauccuggcccagguguggaggggg

SEQ ID NO: 4180957 - RNA, 64 nt, Human
cccccuucucuucuccucccggcuccuuccuccucccuccuaaggcccaagguccagaaggggg

SEQ ID NO: 4180958 - RNA, 85 nt, Human
ccccgagucuccagcccccuccgccaagucuucgucucuggguggauucuucagccccagggaaacuuuggaguggagaccgggg

SEQ ID NO: 4180959 - RNA, 58 nt, Human
ccccgcaggugccggcagaugggguagcgaaugguccugugccuccaccugcuccggg

SEQ ID NO: 4180960 - RNA, 89 nt, Human
ccccgccagccggaccugagggauuccuuugauggcgggcucucuuugugugagcggaacaaggagcccucuguuugggcugagcgggg

SEQ ID NO: 4180961 - RNA, 96 nt, Human
ccccgcccucuggcucgguggaaggccuccgccaauggcagagcucccaucgcagagccugcggguuagguugugaggcccgggccgggggcgggg

SEQ ID NO: 4180962 - RNA, 116 nt, Human
ccccgcucuaagggucagugcaggaggcggcgauggcccugggcaagguucuggccauggcacugguuuuggccuuggccgugcuggggucgcuguccccuggggcccgggcgggg

SEQ ID NO: 4180963 - RNA, 58 nt, Human
ccagaugugagcagagccuugacacacagccgcuuccaggagcucgugcucagccugg

SEQ ID NO: 4180964 - RNA, 73 nt, Human
ccagauucccuugacacaaagccugacuuucuccagggaaauaagggaaagccagguugugugcaggaauugg

SEQ ID NO: 4180965 - RNA, 86 nt, Human
ccagauugaauuucacgagcaggacagacaggcaccaccaaacuggguccaguguccuggcuauggcuucuaauucccuaaucugg

SEQ ID NO: 4180966 - RNA, 60 nt, Human
ccagauuggguacugugugagaucacugcccaacagagggaacauggcucuccagucugg

SEQ ID NO: 4180967 - RNA, 60 nt, Human
ccagauuuaggucacuagaauuuuccuuaaggauggaaaaacucagagaaccagaucugg

SEQ ID NO: 4180968 - RNA, 102 nt, Human
ccagauuuuaggauuuccauaauucagcucauucuauuuguccaaucgacauauacccagaguggguagaguuagaauagaaaaucauuuuuuaaaaucugg

SEQ ID NO: 4180969 - RNA, 64 nt, Human
ccagauuuucaucccucuucucaugcccacgaagaugacuggggcuggagggguuugaaugugg

SEQ ID NO: 4180970 - RNA, 83 nt, Human
ccagcaacacagauaguccaucuguuuacuauaaagauuugccaaaaagguuuggaguucauggguguguauguguguguugg

SEQ ID NO: 4180971 - RNA, 58 nt, Human
ccagcaacugguguaauuucugacgugugucauaaaucauacuccauuugcacuuugg

SEQ ID NO: 4180972 - RNA, 66 nt, Human
ccagcaagccaggugugcccaggauccugaccacuuccuucuggugccuggacacuuggcaaaugg

SEQ ID NO: 4180973 - RNA, 68 nt, Human
ccagcaaguccuuccggcagauuucacucaucccggggaagugauugaucuucuggaagggaagccgg

SEQ ID NO: 4180974 - RNA, 60 nt, Human
ccagcacacagucugcaccaggccaccaacaggugggaucaaugcacagcugugggcugg

SEQ ID NO: 4180975 - RNA, 55 nt, Human
ccagcacagggcgguaaucagaguucauggcuauggccucaaauccucugucugg

SEQ ID NO: 4180976 - RNA, 86 nt, Human
ccagcacagguaggauaaagcagguaggagaagauggaaaagcagacuugcuuagucuucuggccuuuaucuuucuccugugcugg

SEQ ID NO: 4180977 - RNA, 76 nt, Human
ccagcacauucacaacugagcauuguugccugacaauucauuuauucaacaaugaauguuugagugccaugcaugg

SEQ ID NO: 4180978 - RNA, 83 nt, Human
ccagcacuggccuggcuccagcagcgaggucccuggagagugacacuucuucaauaccugcguugcuagucccguaguccugg

SEQ ID NO: 4180979 - RNA, 57 nt, Human
ccagcagacacacaggcgugggcagccuugauuauccagccugaggccaacugcugg

SEQ ID NO: 4180980 - RNA, 85 nt, Human
ccagcagacaccuuguuaaaaugaggauucugauucaguaggucugggcagggccuaggagucugcauuucuaacaagcuguugg

SEQ ID NO: 4180981 - RNA, 84 nt, Human
ccagcagcaaacauuuuucagaggggcauuaccuagggccuugcuccauccugugugccaccacugacaggauucuguggcugg

SEQ ID NO: 4180982 - RNA, 83 nt, Human
ccagcagcaccuccuggcucccugcacagggcucccaggagccuggagagccgugagggugggaggcggguggcaggcugcgg

SEQ ID NO: 4180983 - RNA, 62 nt, Human
ccagcagcauaucagagaaagucauccucuagggauggcugugaagagaguguagguguugg

SEQ ID NO: 4180984 - RNA, 56 nt, Human
ccagcagcauccugcagcacuuuaaagaagugugcauugaucgaggagcuagcugg

SEQ ID NO: 4180985 - RNA, 70 nt, Human
ccagcagccaccuucucgaaauccucaggguugcagaauuccuugauugugaccgucaggagguugcugg

SEQ ID NO: 4180986 - RNA, 62 nt, Human
ccagcagccccucaaugaucuguuguguuccgucuggcuuccguuguccgcgggcuugcugg

SEQ ID NO: 4180987 - RNA, 74 nt, Human
ccagcagcccucuuccaagacuaucuuugggcuacaaauugcuuuacccagcagcugggaggcaggguugcugg

SEQ ID NO: 4180988 - RNA, 80 nt, Human
ccagcagcuaagugcugacacaucauucccagcauccaccccggaugggaaagccagcagugucaccgcacgcaugcugg

SEQ ID NO: 4180989 - RNA, 64 nt, Human
ccagcagcucuaguuucugggcacgucugauuuacagauuuccuagacauggggcagauacugg

SEQ ID NO: 4180990 - RNA, 81 nt, Human
ccagcagcuggccugguucagaggguucacucaguaguuaagaaaacaggagggggucuaugagguagagccaguuuaugg

SEQ ID NO: 4180991 - RNA, 77 nt, Human
ccagcagcuucuuuccuucccaggugucgccgccugcuuucugcagccgcugccugggagggguuccgagguucugg

SEQ ID NO: 4180992 - RNA, 55 nt, Human
ccagcagcuuuauuggcucuccaguguuuuggacccuugcucauacaggcugugg

SEQ ID NO: 4180993 - RNA, 93 nt, Human
ccagcaguugaggugacagcacacugggcuuguuacguugcaggaauaguaagggacuguguggccagagcccaguguguccggggaggaugg

SEQ ID NO: 4180994 - RNA, 83 nt, Human
ccagcaguuugucucagucugucuugucuguguucuuuggguaaucucugaaugugacaagcacagacugugggugcuuuugg

SEQ ID NO: 4180995 - RNA, 59 nt, Human
ccagcaugaccaucuggcagcaggacucuugaggagcccugugcuuggauggcagaugg

SEQ ID NO: 4180996 - RNA, 80 nt, Human
ccagccacagccagggaggagggagcccaggcagauggcccugccugccugugagucaaccccuccuuggcacuggcugg

SEQ ID NO: 4180997 - RNA, 59 nt, Human
ccagccagaagugagggaauggccgucagcccugugcugagucccuucacuccugcugg

SEQ ID NO: 4180998 - RNA, 71 nt, Human
ccagccagauccccuguaggucuaacccaagguuuuucuguaggacaccuuggccuaccugggaaugcugg

SEQ ID NO: 4180999 - RNA, 55 nt, Human
ccagccagcugcccuuggggccuuugcagcuggcccacaggugugagcuugcugg

SEQ ID NO: 4181000 - RNA, 99 nt, Human
ccagcccauaucacagucccuuguauagagucuauugcuggggaaacaaacacauaguuuguuuacuagccaacauggagagucaaggggcugugcugg

SEQ ID NO: 4181001 - RNA, 57 nt, Human
ccagcccucacugaggccucucccaaaucugaacguggaggccccaaggugggcugg

SEQ ID NO: 4181002 - RNA, 130 nt, Human
ccagccgcugagcaucacccccggagccucggucagggccccauugucuccagugaaucacaggacacgcugcuggggagcaagaguagugaggguuucuggguuccucggguggagccgcaacuccugg

SEQ ID NO: 4181003 - RNA, 82 nt, Human
ccagccuccugagaaaggagauaaagggcccuucagcagcggcugggggcuuugcaguccuuaaucuccgcucgggggcugg

SEQ ID NO: 4181004 - RNA, 56 nt, Human
ccagccugccauguuggcccuggguuugccuuuggucacagguguggaggugcugg

SEQ ID NO: 4181005 - RNA, 77 nt, Human
ccagccugccuggaucagccauccugagcuggaaccucccacagcugcaucccacaggagggcccgggcaagcaugg

SEQ ID NO: 4181006 - RNA, 62 nt, Human
ccagccugccuugcaccggcucucuggguugugcucacauguuaggucgggcaaggugcugg

SEQ ID NO: 4181007 - RNA, 74 nt, Human
ccagccuggcugcugcagacagacaggaagcacgucugacgcuccuccacccucggucagcacagcggggcugg

SEQ ID NO: 4181008 - RNA, 81 nt, Human
ccagcgucagcaugcguguggugucugcagucugccucugacaagcagggcagaggagugauuaugccguguggaaaaugg

SEQ ID NO: 4181009 - RNA, 89 nt, Human
ccagcgugacauuacuggaagcgccgaggagcuucgcgcaggcucagaaucgcucagcugguugacguuauccaggagaaucgcguugg

SEQ ID NO: 4181010 - RNA, 94 nt, Human
ccagcuaagugaacgguuagcuuaugcuaaaaacacgugugagugugaucauuugugugcaacgcauggagucgaaccgcuaccauuugguagg

SEQ ID NO: 4181011 - RNA, 55 nt, Human
ccagcuacacuuuccccaucugugaaaugaggugucuggauucgacugugguugg

SEQ ID NO: 4181012 - RNA, 117 nt, Human
ccagcuagagcucgucauggucgucuucggugggugcuucaggcgguggcuccgggcaggcggcuggcgucaucagcuccaugagguacucgcagcgacugggcucuguggugcugg

SEQ ID NO: 4181013 - RNA, 61 nt, Human
ccagcuaggcuugcacucuuguacuucugccauuuccacaagaaggacaugcuugggcugg

SEQ ID NO: 4181014 - RNA, 59 nt, Human
ccagcuagugagggguggaggcgggauuugaauccagcucaucugucuccauuaccugg

SEQ ID NO: 4181015 - RNA, 65 nt, Human
ccagcuauggcuauucaaggucucuaucugguucaaggggccaugacucuccauaccaaagcugg

SEQ ID NO: 4181016 - RNA, 94 nt, Human
ccagcucaauuggaagaaaaagcagaugaaggccugaaugucuacugaguuuucagugacuuccucaaacuucucacuuaccuuucagugcugg

SEQ ID NO: 4181017 - RNA, 61 nt, Human
ccagcuccagcauagccaccauauggagauggcauuuaauggcccggugcaggagggcugg

SEQ ID NO: 4181018 - RNA, 65 nt, Human
ccagcuccagccgcugauggguuucggcgggucccccaggagacccuucagacggcuagagccgg

SEQ ID NO: 4181019 - RNA, 62 nt, Human
ccacagggauaggaauggggcuugggcugggaggugccaggguccauauuccuguuccuggg

SEQ ID NO: 4181020 - RNA, 58 nt, Human
ccacaguaaauggauucagaccugcauaaaggcaagucauaagauauuauuucugugg

SEQ ID NO: 4181021 - RNA, 60 nt, Human
ccacagucauuacauucauaggguuucuccccugugugaacucucugauguacacugagg

SEQ ID NO: 4181022 - RNA, 59 nt, Human
ccacaguccuggcuucugucugcuggcugccucccccagcagauaagaguugacugugg

SEQ ID NO: 4181023 - RNA, 67 nt, Human
ccacaguggaaagaacauggauuuuggagacugguugaccugggaucagauccugucuccaccuugg

SEQ ID NO: 4181024 - RNA, 75 nt, Human
ccacagugucucaguguuaaauauaagguauucuaauaauauagaggaagaacaccuaauuuagacugaacuggg

SEQ ID NO: 4181025 - RNA, 67 nt, Human
ccacaguucuuaaaacuugaauuacuuuucucugugaaauaagacagguaguaagaacauuuugugg

SEQ ID NO: 4181026 - RNA, 66 nt, Human
ccacauagccuggugucucagcauggagcuuggugccaaguccugugcuagagacaccugaucugg

SEQ ID NO: 4181027 - RNA, 66 nt, Human
ccacauccuucagcugagcccagagaucaugaaugggguugagcugggcacauguggagguugugg

SEQ ID NO: 4181028 - RNA, 73 nt, Human
ccacaucuggacucagggccucccucagccucacgcaucugccaaggccagagggcccuggucucagcugagg

SEQ ID NO: 4181029 - RNA, 64 nt, Human
ccacaugaaucuuggaagcaggcccagaaucaccugggcagggacuucggggaugugcauuugg

SEQ ID NO: 4181030 - RNA, 67 nt, Human
ccacauguccacccugcaacuguaccuggcuugugucccacaaggaggaagaugcaggggacuccgg

SEQ ID NO: 4181031 - RNA, 56 nt, Human
ccacauuguaggcccuauaaggggucagcccccuucacagucacccugcugugugg

SEQ ID NO: 4181032 - RNA, 89 nt, Human
ccaccacagacucagcacaugaccuccuuuggaaagugggucuuugagauguaauuaugaccagaugaggucaugcuggguuaaggugg

SEQ ID NO: 4181033 - RNA, 65 nt, Human
ccaccagaaguggcuuucucagggacacugccauuuguuuuccuguuccuguucgcuccugcugg

SEQ ID NO: 4181034 - RNA, 60 nt, Human
ccaccagccagagugacagcuccgaaggaggccguuugugcuuuuaacguggcugguugg

SEQ ID NO: 4181035 - RNA, 81 nt, Human
ccaccagcucccuccugcucagguccuguuuucuuuugaagggaaagaaaccuagucuggagcagcagugggaggaagugg

SEQ ID NO: 4181036 - RNA, 65 nt, Human
ccaccagcugccugccucaggccgagugcugaaggucaaccagcauugcagagggggcacggugg

SEQ ID NO: 4181037 - RNA, 60 nt, Human
ccaccagcuugcagucuuaacccaagaugaccugggguggggugucuguguguucggugg

SEQ ID NO: 4181038 - RNA, 60 nt, Human
ccaccauuucugugacacuuccaucugggaauccagauggaagaauuucaggaagucugg

SEQ ID NO: 4181039 - RNA, 75 nt, Human
ccacccaaagggcuuguugaaacacagauugucgggcuccacccccagaguaucugauucaguaggucagggugg

SEQ ID NO: 4181040 - RNA, 82 nt, Human
ccacccaagaugcuaggagaagucaccagugauuggggugauucuagcagaggcuacugcuccuuggcacugaagugggugg

SEQ ID NO: 4181041 - RNA, 78 nt, Human
ccacccaauuagcaguaacagaauauccuuugcauauaaaaagugcaaaaaaugcuuguugcuuaguuggcugggugg

SEQ ID NO: 4181042 - RNA, 76 nt, Human
ccacccagaaagccacagucccaggcagagucaggagggccagauuuuaaagaaguugccugggcuguccuggggg

SEQ ID NO: 4181043 - RNA, 76 nt, Human
ccacccagagauuaaaagcagcaguccuuuguguaauuuaaaauacugaauaauauuggagcuguaagucuugugg

SEQ ID NO: 4181044 - RNA, 56 nt, Human
ccacccagccuuccacccuggacuacacccuguguuguaccagaaaggccuggggg

SEQ ID NO: 4181045 - RNA, 74 nt, Human
ccacccccagcaacaguugauuagacuagagauggguaucucacccaaacugggccagucagcuguaguggugg

SEQ ID NO: 4181046 - RNA, 99 nt, Human
ccaccccccggcacacauccugggccuugaucacacaggugcauuggagaccaaaucccagcccugaugacacgggcaucaggugcaguggcccccugg

SEQ ID NO: 4181047 - RNA, 79 nt, Human
ccaccccugucaugaagccugcuggaucaagcuuaugcuguuuucagugaaagugaauccagaggcuuugcagaaaagg

SEQ ID NO: 4181048 - RNA, 56 nt, Human
ccacccgcugcgcuaccacguccuugugaccccggggcugugccuccagcuggugg

SEQ ID NO: 4181049 - RNA, 84 nt, Human
ccacccgugccuguugcaugugagaaacagugaugucgucugucuugugugacauguauguuguuggcauguggguuugggagg

SEQ ID NO: 4181050 - RNA, 71 nt, Human
ccacccuauguuucaguucuaaaguuagaagguccucucauccuuuuaagaagaacagagacagaaaaugg

SEQ ID NO: 4181051 - RNA, 59 nt, Human
ccacccucucuccaagggaaauccuaguucccuaauuuccaaauugguggagguggugg

SEQ ID NO: 4181052 - RNA, 56 nt, Human
ccacccuggacaggccucugagggccaugucuccucccggggcuauuccagggugg

SEQ ID NO: 4181053 - RNA, 94 nt, Human
ccacccuuugcgccucugcgucagccacagcugccccgggagcgaguucuccugaggcccuggcugugcugacucuagggcagcgugagggugg

SEQ ID NO: 4181054 - RNA, 84 nt, Human
ccaccgaagggcagagcugggccucagaacacaguccaggagcccaagcccagcguucuuuuaagugcccagugcugccugugg

SEQ ID NO: 4181055 - RNA, 62 nt, Human
ccaccuacccuuagaucacaaggguccucucugaggccacccuuuggaggaagggcuagugg

SEQ ID NO: 4181056 - RNA, 67 nt, Human
ccaccuaguguuuuuaagaggagaauaacauuacuaaguugaaaugaucacucugaugcuagggugg

SEQ ID NO: 4181057 - RNA, 62 nt, Human
ccaccucccuccaaauaagacucgggcucagggaaagccuggccuuaagggcagggagcugg

SEQ ID NO: 4181058 - RNA, 76 nt, Human
ccaccuccugggauccaagcaugggguucaguaggaaucugcauuccuaacacaagcugaugcugccaggaggagg

SEQ ID NO: 4181059 - RNA, 58 nt, Human
ccaccucggcuuccacuugguuuuguuucugaaccaacauaggaaugcagagaagugg

SEQ ID NO: 4181060 - RNA, 65 nt, Human
ccaccucucaggguuuccuaaugcaaauccucgaacccugcagaagugagcauccagagaggugg

SEQ ID NO: 4181061 - RNA, 61 nt, Human
ccaccucuuaggggaacuugcugagaaugaaaccagcucagagguaagggcugagaggagg

SEQ ID NO: 4181062 - RNA, 89 nt, Human
ccaccugauuuuguaaguaaaauuguauuggaaaacacuccugcuuggguguugucuauagcaguguuugcacuauaaugguagagugg

SEQ ID NO: 4181063 - RNA, 62 nt, Human
ccaccuggcagcaggcucggcacagcuuucaucuucugcaccugagucagcugcaugggugg

SEQ ID NO: 4181064 - RNA, 85 nt, Human
ccaccuguaaacaaacacaggcaaggccagugagaaaucagaaaccaaguugcuuauuauuucaugguguugcuguguguugugg

SEQ ID NO: 4181065 - RNA, 116 nt, Human
ccaccugucaggagcgagaggcugucacacuucaggaaauacaagugacaucauucaaguaguggggacauuuguuuccugaaggcugcauucauuucuuagcccgagacaggugg

SEQ ID NO: 4181066 - RNA, 62 nt, Human
ccaccugucuguaaucaacugaguuucuagguaguuucuagcucaauugucugcaguggcgg

SEQ ID NO: 4181067 - RNA, 68 nt, Human
ccaccuuagggagggaugcuccccucagcucuguccucugagggagagacauuuccuucuugacuugg

SEQ ID NO: 4181068 - RNA, 69 nt, Human
ccaccuucuuggccacacccaccuagaggagagcuucuuuccugagccgagggugggcaugggagcugg

SEQ ID NO: 4181069 - RNA, 85 nt, Human
ccaccuuucccuuccugaaucuguagggacucagcucaaaaauggagauaaccacagcugcccugguaagauugaugggcggugg

SEQ ID NO: 4181070 - RNA, 58 nt, Human
ccacgaauuaauauccauuaguggucauccauauggugacaauggauauuaguugugg

SEQ ID NO: 4181071 - RNA, 129 nt, Human
ccacgacagcccuguuuuuccugugcugcguagcugagcucugggucacggcugccgagugcaggcaacacucgggcagucccagggcugaccgacugcgcaucuggacacuggcaaucacagggaagg

SEQ ID NO: 4181072 - RNA, 77 nt, Human
ccacgacucagcauucuuuccuucgcuuguuucuauuucugucaaggugaggagaccuuuugagugugagacgcugg

SEQ ID NO: 4181073 - RNA, 128 nt, Human
ccacgagagguaagacccaugacucccaaauuccacucuacacacugcuggcaacucagucuuuauugaugguuucauuuuuggggucaccagugcuaagagguggaaggugggggggcaccuuuaug

SEQ ID NO: 4181074 - RNA, 83 nt, Human
ccacgcagaccaccaagcuggggacucagaccccaucgggguucacccacugugcucuggccucaguuucucuuucugugugg

SEQ ID NO: 4181075 - RNA, 84 nt, Human
ccacgcagcgcugccugcuggcugccuuccugccgggaauucaacuugcaggugcaaaucagcccaguaccaagcaguuggugg

SEQ ID NO: 4181076 - RNA, 62 nt, Human
ccacggaggaauucuggaauguggugaugaccaacaggaauuuuaugagugucccucugugg

SEQ ID NO: 4181077 - RNA, 80 nt, Human
ccacgguauauauauaaacacauuuuauauauccauucaucaaccgauggaugcuuagguuguuuuauuauauaugaugg

SEQ ID NO: 4181078 - RNA, 127 nt, Human
ccacguccuccagccugcaggguccugcagggccaugggucucacacaggccgagcuggacaggagaggaacagcuggccuuagugagcaccugcuaugugccaggcgagggcaugagaggaggugg

SEQ ID NO: 4181079 - RNA, 56 nt, Human
ccacgugcauuugauacacauaaaagucauacugugugugcacaaagaguacaugg

SEQ ID NO: 4181080 - RNA, 56 nt, Human
ccacguguggcagcuuggucucugaucccuccagaggugcagcugacaccaugugg

SEQ ID NO: 4181081 - RNA, 94 nt, Human
ccacuaacaacgaaagugagcccaccuuccuggggcuucgggucccagugucacuguguucccagguggguuggccucugucgugaaguuuugg

SEQ ID NO: 4181082 - RNA, 57 nt, Human
ccacuacauugagugcuuucucuggcuccuugcaaagaaagauacuuuuuguaaugg

SEQ ID NO: 4181083 - RNA, 61 nt, Human
ccacucagacacagcaauucuguguuggcaucucaggaaugauacagauugugugugaugg

SEQ ID NO: 4181084 - RNA, 69 nt, Human
ccacuccaaggagugcaugacucagaguaagcuccuuacccugcuagcuagcaucucuauuggaagugg

SEQ ID NO: 4181085 - RNA, 78 nt, Human
ccacuccaguaaaccaaguguuuacuagaagugguggaucaaacuuuacuuguggaacauauuuugguuugcugcugg

SEQ ID NO: 4181086 - RNA, 70 nt, Human
ccacucuccaaguuaucaagaugaagacccaagaugguggcauucacucugaagguagccuggaaagugg

SEQ ID NO: 4181087 - RNA, 67 nt, Human
ccacucucucccucuguaggggccucucucugagaucggguccuccuccugcagggcagcagagugg

SEQ ID NO: 4181088 - RNA, 85 nt, Human
ccacucugaguagacccgcuggcugccuuacuuuguggagucugaggccaguuuuauagagaaaggggccagccacucugagugg

SEQ ID NO: 4181089 - RNA, 65 nt, Human
ccccugcuccagccaagguaucaugagaggcacuagugugucccucacuuccccuuggccagggg

SEQ ID NO: 4181090 - RNA, 113 nt, Human
ccccuggagagcuugugaaaauacaaauugccgggcccugaccucagaguuucugauucaguagcucugggguggggccugggaauuuccauuucuaacaaguuuccaggugg

SEQ ID NO: 4181091 - RNA, 55 nt, Human
ccccuggagguacacaagacaguacuugucugugccaucagucuccagaguuggg

SEQ ID NO: 4181092 - RNA, 62 nt, Human
ccccuggcuucaucacucgggcugccaucuuuaugacaguggcaggugggaaggccacgggg

SEQ ID NO: 4181093 - RNA, 60 nt, Human
ccccugggcagcagccagcagcauccccaaccacagauuggggggcugcaguccaggagg

SEQ ID NO: 4181094 - RNA, 73 nt, Human
ccccuggguguugcagggucugauggaguaaggggggccucuccgaggcuucugggcaccugaacaggagggg

SEQ ID NO: 4181095 - RNA, 68 nt, Human
ggagaacaagaaggcucagcugguggugaucgcacaugacauggaucccauugagccaguugucuucc

SEQ ID NO: 4181096 - RNA, 108 nt, Human
ggagaacacuugauuuaucugguacagaguggaguucaguaaauauuuguuaaaugaaugacugauuuauuuugcauuuaggaaaagagaagaaucaggcauaccucu

SEQ ID NO: 4181097 - RNA, 64 nt, Human
ggagaacaggaugucauuucucauguccugaaauggacaaaggagaaaaaacauaccuagcuuc

SEQ ID NO: 4181098 - RNA, 100 nt, Human
ggagaacauagagcaaagaacaugaaaacuaccugugauuuuacaacccaguguaaucgcuugguaauuuuaaaaguguuuuuuuaaccuauuuaucucc

SEQ ID NO: 4181099 - RNA, 81 nt, Human
ggagaaccuucagcuugcaacaaguccuggccguuggagaaaccaugagacuagaccuuguguaaagcagcugauucugcc

SEQ ID NO: 4181100 - RNA, 56 nt, Human
ggagaagacaauucuggguggaggaaacuggauguucuaagccuggaaucuuguuc

SEQ ID NO: 4181101 - RNA, 85 nt, Human
ggagaagagaaaacagcuggucucaaauguuccuucuucuaaaaauagggauuagagcagauguaggcacaguugcuacuucucc

SEQ ID NO: 4181102 - RNA, 94 nt, Human
ggagaagagaaggcagacaggcuggagaccucagagaacccaaagaagggcauggcagugaguucccugggucuccuuucuucuucuuuucucu

SEQ ID NO: 4181103 - RNA, 55 nt, Human
ggagaagaggggugucccuguggcccagcacacuggagccacccuccucgucucc

SEQ ID NO: 4181104 - RNA, 89 nt, Human
ggagaagcucaugguugaguuauuuugagguauuuuugagcugcuuauuagcagguucucauuaguagcuucuuauuaugagcuuuccc

SEQ ID NO: 4181105 - RNA, 56 nt, Human
ggagaaguucagucgugaucacaggaaacacaguccuugcucauggggacuucucc

SEQ ID NO: 4181106 - RNA, 72 nt, Human
ggagaauauaaaacagguugaggucaaaugcaaguccaauuugcucagagcucuaucuguugggaguucucu

SEQ ID NO: 4181107 - RNA, 88 nt, Human
ggagaaucacuugaaccaaggaggcugagguugcagugagcugagaucaugccacugcacuccagccugggugacagagugagacucc

SEQ ID NO: 4181108 - RNA, 60 nt, Human
gcgucuuggcggcaguugguggaaccggagcuucgaguccguccccggugcugccugcgc

SEQ ID NO: 4181109 - RNA, 58 nt, Human
gcgucuuuggaucccaacuggcugggaaaaggggcccaucgggaggaaccaaagaggc

SEQ ID NO: 4181110 - RNA, 76 nt, Human
gcgugacacauccuuguggcaugugagaacuagaaggugcuuaggaaucuucuaguuuugccacaggauaccaugc

SEQ ID NO: 4181111 - RNA, 96 nt, Human
gcgugcucucagagcagguggcggcggcgcuuuucuccucguccgugguguucugcuccugcacggaggugcuggcggccagcucugagagcuugc

SEQ ID NO: 4181112 - RNA, 55 nt, Human
gcguggaccuggaaggcccaaagacugaagccuccgggggcuuacaggugccagc

SEQ ID NO: 4181113 - RNA, 78 nt, Human
gcguggccaagcggcccugaccagaccuuaguugcugucaccaaacaaacaaaggugggcuagggcugguugccuggc

SEQ ID NO: 4181114 - RNA, 91 nt, Human
gcguggccuucaauggcccuaaugaguugguguuccauugaugugcagccucacggaacacccacccauugugggccuaugagacgucugc

SEQ ID NO: 4181115 - RNA, 91 nt, Human
gcguggucgucguccaggauggugacgguggccagcagcggcgccaccagccgccccuugggccgcccgccgccguccggcucgaacaugc

SEQ ID NO: 4181116 - RNA, 57 nt, Human
gcguggugcugcccugcacacaggagaugcucccaggugcugaugggcaacacuggc

SEQ ID NO: 4181117 - RNA, 59 nt, Human
gcguguaucuggcaugucgagugugcacauggcauauacggaucaaaucgggugugugu

SEQ ID NO: 4181118 - RNA, 95 nt, Human
gcgugucccccggacagaggggcagagugugccaggaaaugggaagaaacaggaacugacacagcacuuugccccuccuuuggcaggggagacgu

SEQ ID NO: 4181119 - RNA, 67 nt, Human
gcguguugcguacuguuuauacauguguguagauacacugacagaugagagacaaugugcuacaggc

SEQ ID NO: 4181120 - RNA, 88 nt, Human
gcguuaucuuaucaaaguaaccauucuguugccauuuugcagaugaggaaaccuauuuggaaaagcgguaacuugcucaaaguaaugc

SEQ ID NO: 4181121 - RNA, 99 nt, Human
gcguuauggucagucagggaagacccaggagccacucaggcccacacagaccucucugugugccacuggccucuugcaccccuccuuugacugugacgu

SEQ ID NO: 4181122 - RNA, 64 nt, Human
gcguucuggcucccguuguccuugaaguugcaucucaggcuucugggcauggcagagccugcgu

SEQ ID NO: 4181123 - RNA, 83 nt, Human
gcguugcucugccaugacccagucaaagggaaugggugcagcucuggcucuguuccccuuucuggguucuggagagucccugu

SEQ ID NO: 4181124 - RNA, 58 nt, Human
gcguuggggaccccgaagcugguggaucgcugcacggcugcgcgggguccgccagggc

SEQ ID NO: 4181125 - RNA, 68 nt, Human
gcguuguugggcaauggccccagccagcaccauccccaccucccugggccuugccuugcccacagggu

SEQ ID NO: 4181126 - RNA, 87 nt, Human
gcguuuauuuuuuaauuugcuacuuagacuaacuguagggacuagaagauucugucucuuucccuguguuagccuguagcuaaaugc

SEQ ID NO: 4181127 - RNA, 77 nt, Human
gcguuucugauaucuaagaaauucuaccacugcuucugcuuuuuggguuuugguaguucuuggauguuuacauuugc

SEQ ID NO: 4181128 - RNA, 82 nt, Human
gcguuugcuugucccagauuuuucaugagaugagauuuuucaugagaugaagucucuuuuucaugagaugaagucuaaaugc

SEQ ID NO: 4181129 - RNA, 73 nt, Human
gcuaaaagguagaagugauggaacuuggagaguaaggaaaaguaaguuucuaaucugggcuucugcaguuagc

SEQ ID NO: 4181130 - RNA, 81 nt, Human
gcuaaaauggacauucucaaacaagugguuugauaagaagugcucuugggaccagugucugugagaaaagcacguuugggu

SEQ ID NO: 4181131 - RNA, 63 nt, Human
gcuaaacaucugucauguguuuaucgcagugccaagcucagagcaaacauucagcagauuggc

SEQ ID NO: 4181132 - RNA, 88 nt, Human
gcuaaaccgaggagugcagggcuggcaccggaggcaugauuugaaacgccguuggcccuuugucccugcuuccuucucugggauuggc

SEQ ID NO: 4181133 - RNA, 78 nt, Human
gcuaaagauaauccaugaagugaacaaucuggaugaaaguaauccaucauguuacucuuccauggguggguauauggc

SEQ ID NO: 4181134 - RNA, 65 nt, Human
gcuaaaggcucaggagacuuugcaaauguaaaugaaugagcagaaaagaaugcugagccuuuagu

SEQ ID NO: 4181135 - RNA, 97 nt, Human
gcuaaauaccagauggagaagggugcugcagauaugaugcuccacauuuuccuuuuaugcuucgucuccaaggcccuacucuauuuauugcuguggc

SEQ ID NO: 4181136 - RNA, 67 nt, Human
gcuaacagcuuagauggauacaaagguuuuuauaaaacaccauuaguauucauuuaguauagguagc

SEQ ID NO: 4181137 - RNA, 89 nt, Human
gcuaaggaaagcuuuuaaaaguggccuugauuaagccaggaaggaggaucucccuuggaccaaggucugcucuuucucacuuuucuugc

SEQ ID NO: 4181138 - RNA, 103 nt, Human
gcuaagggaaaggcuggaaguauaggggagaugauuuuaugcucaauauuuuuccuuuucugaguuaucuuuuccugauauaaguuuuuaccuuuuccugggc

SEQ ID NO: 4181139 - RNA, 68 nt, Human
gcuaaguucuauggcuugcaggcagcagucagcaaagaacaucagcugaggcaggccuagaacuuggu

SEQ ID NO: 4181140 - RNA, 61 nt, Human
gcuaaguuguaauuuguauaccuccuugaaaucuaauuugguaugauaauuacaaaauagu

SEQ ID NO: 4181141 - RNA, 96 nt, Human
gcuaaugauccauaguaagaucccauuaucaaucagguuugucgguaucgaacuucauaaacaacugaugguaaucuuugcuaugaaaaguguggu

SEQ ID NO: 4181142 - RNA, 61 nt, Human
gcuaaugcuauuuuucucuguuaaauggcuccauaacaacugaggaagaggcagaauaggc

SEQ ID NO: 4181143 - RNA, 80 nt, Human
gcuaaugguuuuuggcucuggcgagcuuuaguacaggaacacucauuguauugugggugucagagugcaagaauaacagc

SEQ ID NO: 4181144 - RNA, 85 nt, Human
gcuaauguguuggaaaaauuugcuuuuacuauguuaaaacacugagauuuuaggauuagaguagcaaguauuuaccuucauuagu

SEQ ID NO: 4181145 - RNA, 70 nt, Human
gcuaauuuccgauucucauagguguuucugaaaauacagagacugugccacacaugggagugggaagagu

SEQ ID NO: 4181146 - RNA, 62 nt, Human
gcuaauuuuuaaaaauguguuggcauagucuuaaacuauccaaggaguuuuugaaauauagc

SEQ ID NO: 4181147 - RNA, 60 nt, Human
gcuacaaagugguaggaggucacaugaaauuccaaagcguggccuuuucccaccaugugc

SEQ ID NO: 4181148 - RNA, 61 nt, Human
gcuacaagcacauuaaggaacauugaaguugagugugcuuuauauuccuaaugucuugagc

SEQ ID NO: 4181149 - RNA, 65 nt, Human
gcuacagaauauuucugcccugagcucauuaugaacagaguuuuggacugacuugucuuuguggc

SEQ ID NO: 4181150 - RNA, 65 nt, Human
gcuacagagccagcaguggggacagggaggagcacacacccuuccacacuuguaugguucuaggc

SEQ ID NO: 4181151 - RNA, 85 nt, Human
gcuacagccagcucacaccagcuuacaagacuugguuguuaaauacucaggaguuuugcaagcugguuguugaaccauugguagc

SEQ ID NO: 4181152 - RNA, 55 nt, Human
gcuacaggugacagccucugcagugucucauggagaggccuuuaucuccuguagc

SEQ ID NO: 4181153 - RNA, 55 nt, Human
gcuacagugauaggaaacacauuucuaacuaagucuucguguucccucacugggc

SEQ ID NO: 4181154 - RNA, 56 nt, Human
gcuacaguuucuuuaaucagcuggagguaguuuccuccaauuuuuaagacuauggc

SEQ ID NO: 4181155 - RNA, 80 nt, Human
gcuaccaaucuuguuuucuacauccaugaguaacaggauucaccaaugaauuggauugugagaaccaagauaauguaugc

SEQ ID NO: 4181156 - RNA, 56 nt, Human
gcuaccaccucaaccucaucugacagcccagagucugcaggagcgggaggggcagc

SEQ ID NO: 4181157 - RNA, 69 nt, Human
gcuaccucucggcaggaacccagacaaccagggugccugcaucacucugugugguuuucuguaggaagc

SEQ ID NO: 4181158 - RNA, 55 nt, Human
gcuaccuggagaaugugacuuugucuuuaggagaaaaucacuuuguacaggaagc

SEQ ID NO: 4181159 - RNA, 68 nt, Human
gcuaccugggaagugggaccugagggcugaaggauugugaugaacucuggccugcuuccucagguagu

SEQ ID NO: 4181160 - RNA, 59 nt, Human
gcuaccuugaaccccaagcuuugcagcaauaagagggcuggccugggaaguaaggaagu

SEQ ID NO: 4181161 - RNA, 61 nt, Human
gcuacggaaaacccugagcaaacuuguuuuaaaguuuguaccauggggucuuucccuuagc

SEQ ID NO: 4181162 - RNA, 70 nt, Human
gcuacucaggaggcugagucgggaggaucacuuaagcccauaaguucaagaccagccugggcaaucuagc

SEQ ID NO: 4181163 - RNA, 79 nt, Human
gcuacugcaaaucaccauucuuaccccaucuccuagauucugggacuggguguauuagugguguuucuuucucaguggc

SEQ ID NO: 4181164 - RNA, 58 nt, Human
gcuacuggcaggcaaauuggugggagccgcccggcccagccugccuugccgagucagc

SEQ ID NO: 4181165 - RNA, 61 nt, Human
gcuacuggcugaaaaaguccuuuuccuucucagcuccacagcuacuuuuucaggacagagu

SEQ ID NO: 4181166 - RNA, 78 nt, Human
gcuacuuugucaucucaccuuucucucagcacuggcaagucagguucugcagcugaaaggacugaaugacucuugagu

SEQ ID NO: 4181167 - RNA, 69 nt, Human
gcuagaaaaugaggauaccgcagggggcagaggcacaugucccugaccucuuggaguuucuagucuagc

SEQ ID NO: 4181168 - RNA, 60 nt, Human
gcuagaaucuucagucuaauuccuaggagaugcagucugggagaagagacagaugcuugc

SEQ ID NO: 4181169 - RNA, 63 nt, Human
gcuagaauuuccaguggugauucaaagcaaguaauucagguaaucauucuggaaaauucaagc

SEQ ID NO: 4181170 - RNA, 80 nt, Human
gcuagacaaccucuggaguaacucuguuucuggucauggauauguaaaugcgaguuacaguuauuccauuagguaucugc

SEQ ID NO: 4181171 - RNA, 67 nt, Human
gcuagaccuguuuuugagucacagggaauuuuagcuagugucccugugaaucagaagcaggucuagc

SEQ ID NO: 4181172 - RNA, 59 nt, Human
gcuagagagcauguggucuaguuuuagucccuccacuaaccuagugauaugccucaggc

SEQ ID NO: 4181173 - RNA, 66 nt, Human
gcuagauggaacccguugaagaaaccacauauuucuuuuguguggcagucggacuucuaucucagc

SEQ ID NO: 4181174 - RNA, 129 nt, Human
gcuagcaaauagucguugaugcucacugagacagaguccuggcccaggaguacacauuaauacauguggacaagacuccugggccccugaaggggacucuauguccugggcacugccaugugugccugc

SEQ ID NO: 4181175 - RNA, 76 nt, Human
gcuagcaauauacuuucuggcagugaaauaaauuacuugauauuuaaggucagcugcauaagucaccuugcauggc

SEQ ID NO: 4181176 - RNA, 56 nt, Human
gcuagcaccauacagugugauuccagagcagugguaaucaagaguacugguguggc

SEQ ID NO: 4181177 - RNA, 78 nt, Human
gcuagcagcauucuucuaguuaggaaauuguugcaguuuauugccacuuuugcauuuaaauggaaguaguuuguuagc

SEQ ID NO: 4181178 - RNA, 72 nt, Human
gcuagcaguauaguuuguacuccaugccauuauucacagauacuauauugaaguuugaacuguguugcuggc

SEQ ID NO: 4181179 - RNA, 89 nt, Human
gcuguaguuuaaacagcauaaggaggucauggaggcacaacuauauucucaggucuacaugcacacugaaugcuuacuuugagcuaggc

SEQ ID NO: 4181180 - RNA, 60 nt, Human
gcuguauaaaucccuagauuggcuaagaaggcaggacuaacagucuguggauuugugggu

SEQ ID NO: 4181181 - RNA, 65 nt, Human
gcuguauaucuuucuucuaguuuggagaagccaguggggucaucuagaaaaugaaagaaugcagu

SEQ ID NO: 4181182 - RNA, 66 nt, Human
gcuguauuggaacacauccaugcucauucauguauguauuguucauggcuguuuucacacuacagc

SEQ ID NO: 4181183 - RNA, 69 nt, Human
gcuguauuucaucuuucuucaauuacuuaguauuuugguaaggguaggggaagacaagugaaaauaagu

SEQ ID NO: 4181184 - RNA, 69 nt, Human
gcugucaaagguuuuucagcagggagaugauguaaucagaucuguguguuggagaaaagcuuuggcagc

SEQ ID NO: 4181185 - RNA, 55 nt, Human
gcugucacauuuggagcacuggugugaaagcaagagggcucuaggauuuggcagc

SEQ ID NO: 4181186 - RNA, 55 nt, Human
gcugucagcgcccaaggagcuccaggcgaggccaagccguccuggcacuggcugc

SEQ ID NO: 4181187 - RNA, 65 nt, Human
gcuguccagagcaugggagcaaccaguagaaaacuggacuuuucuucuuagcucucagggcuggc

SEQ ID NO: 4181188 - RNA, 106 nt, Human
gcuguccagcagaaccugacacaaccuccugaacaccccuguggacaucaugaugcggacacacgugcugcagguguguucagugaggcugcagggggcggacggc

SEQ ID NO: 4181189 - RNA, 66 nt, Human
gcuguccagcagggaguuagaaauccaggauaagaauauugaagacaagcuaauucccaugucagc

SEQ ID NO: 4181190 - RNA, 59 nt, Human
gcugucccuggaacuauggcuccaguaacacauacuuuagcuggaauccagggaucugc

SEQ ID NO: 4181191 - RNA, 55 nt, Human
gcuguccgcacgucuccgguggcauuuucuguaucuucguggggaggugggcagc

SEQ ID NO: 4181192 - RNA, 82 nt, Human
gcuguccuagaagagcugcucagaacaugaugcuuuuguuccuaaugacugaauaaucauuuuuaagagacucuucuauagc

SEQ ID NO: 4181193 - RNA, 56 nt, Human
gcuguccucugaucucuggaggggagaauggccccaccaagcagcagaugggcagc

SEQ ID NO: 4181194 - RNA, 70 nt, Human
gcugucgcccaggcuggagugcaggggugugauaauggcucacugcugccuugaccuccugggcucaagc

SEQ ID NO: 4181195 - RNA, 65 nt, Human
gcugucgcuggaaauauuucuguagaguaaguugcuaaacuuucagagagaaaccagugggaagc

SEQ ID NO: 4181196 - RNA, 69 nt, Human
gcugucugcaagccaggaaaugaggccucaccgaccuuaccggcaucuuaaucuuggacuugcagucgc

SEQ ID NO: 4181197 - RNA, 90 nt, Human
gcugucuggcagucgaccuuaggugcagaugcaggcaggcaggugagugggcauguggcauguggcccaaggaggcugucacuaggcagc

SEQ ID NO: 4181198 - RNA, 60 nt, Human
gcugucugggagacugaucacccgauaggcauuccuguuccagucggauaacuagacggu

SEQ ID NO: 4181199 - RNA, 56 nt, Human
gcugucugggugcccaaaagaaggcugcacguuggccucuuaacacccagggcagu

SEQ ID NO: 4181200 - RNA, 104 nt, Human
gcugugaagaggggaagccuagccuuuggugaggcuggagacugagaguggaggauucagacaggccucuccagccucagcuugcaggcugacuguccaacagc

SEQ ID NO: 4181201 - RNA, 107 nt, Human
gcugugaauaaugaaugccucuuuccuuucagaucacuuucaggaaagaucaccuugaggccugccuccuuucccuggguugugaugugauggcaagagaaugcagc

SEQ ID NO: 4181202 - RNA, 76 nt, Human
gcugugaccaaaucuuuuguguauuuuaccuuuacggcacauuuccagguaaacugcacaugaggcuggugcacgc

SEQ ID NO: 4181203 - RNA, 56 nt, Human
gcugugaccuuagcaagggaaauuuggaaacggagucuuguguuuucaggcagagc

SEQ ID NO: 4181204 - RNA, 61 nt, Human
gcugugacuuaagcauaggccuucuuucuccccauggcccugugugcccuuaauucacagc

SEQ ID NO: 4181205 - RNA, 58 nt, Human
gcugugagaaacagggagugucucuccucugcuaucugagaccugucaacaucacagc

SEQ ID NO: 4181206 - RNA, 64 nt, Human
gcugugagcacugcuggguggauuagcuggcauuccuucuccuccauugagcggagucgcaagc

SEQ ID NO: 4181207 - RNA, 63 nt, Human
gcugugagugaaugggucugaaguguguggcauccguguacuugggauguaguuacccagagc

SEQ ID NO: 4181208 - RNA, 70 nt, Human
gcugugagugagcugccuaggcacgagccucaggccaccccaugccugagccugggcguuuauauacagc

SEQ ID NO: 4181209 - RNA, 67 nt, Human
gcugugauguaguuucuuuuguucagggaucagcuguggggauugcaugaagugcuacgucuacagc

SEQ ID NO: 4181210 - RNA, 85 nt, Human
gcugugcaggcccuccaggcacacagggaauuuggcuggagagugccggaagucgaguucucccugcugugucuccuguaccagc

SEQ ID NO: 4181211 - RNA, 55 nt, Human
gcugugcauugagccugagaguggauuuuuaaaccauucacagcucugugucagu

SEQ ID NO: 4181212 - RNA, 90 nt, Human
gcugugcccacaguuccuggccuggaacagcccaccccucaccuccgaguuuguggcgcuccucccggcccugguggacgcuggcacagc

SEQ ID NO: 4181213 - RNA, 128 nt, Human
gcugugcuaauuuguggguaugaagacaauuccuagacucugagcugcaagggugagccugggauggagucuggguggccugaauuagcucagggugggaaaggaaaugucccuugccccuagcuagu

SEQ ID NO: 4181214 - RNA, 71 nt, Human
gcugugcucccuccagaggcuguaggggagaauccauuccuugccucucccaaccucuggugggugcuggc

SEQ ID NO: 4181215 - RNA, 67 nt, Human
gcuguggcccuuggcaucugcgguuauauucaacaggagcaccaacgguggccaagaagucacuagu

SEQ ID NO: 4181216 - RNA, 66 nt, Human
gcuguggcugcuguccucucugguugggcuacuuuucauaagagaaauaaagcagccagucaccgu

SEQ ID NO: 4181217 - RNA, 60 nt, Human
gcugugggcaguugccgggagacuggccucaggcaucagucuccgccagcuccucacagc

SEQ ID NO: 4181218 - RNA, 65 nt, Human
gcuguggggaagucauaaaaaggauacugucugcacuuuguagauucauucuugguaugaacagc

SEQ ID NO: 4181219 - RNA, 56 nt, Human
gcuguggguacaaauacacaaugaggaggaauucuuuccuguauuuguaccacagc

SEQ ID NO: 4181220 - RNA, 56 nt, Human
gcuguggguccggaccccacgggaccccuaugggacccccacaggacccccacggc

SEQ ID NO: 4181221 - RNA, 57 nt, Human
gcuguggguuccuggcauuugagugaauaauguucagaugauuaaguggcccaaggc

SEQ ID NO: 4181222 - RNA, 67 nt, Human
gcuguguaauacuccauuguauggauggaccacauuuuguuuauccuuucaucugguaauauauagc

SEQ ID NO: 4181223 - RNA, 69 nt, Human
gcuguguccucaucauccuuuuuugaagaguuuggcaaacuguugagggaagcagaugaaauggacagc

SEQ ID NO: 4181224 - RNA, 70 nt, Human
gcugugugaaaugugcuguggcauucacugaaggacccugcugaagagcuugcucauucuaucacacagc

SEQ ID NO: 4181225 - RNA, 91 nt, Human
gcugugugacauugaacaaguuuccugaccugagcagcuucccuuucugguugugagaaugaaguuagguaauguguguaauguccacagc

SEQ ID NO: 4181226 - RNA, 80 nt, Human
gcuguguuccauuguuguaggugaagaugauaauaaugaugauauuagcucuuugcaaaauacaacaaugguaacccugu

SEQ ID NO: 4181227 - RNA, 61 nt, Human
gcuguguugcuggugugcaaaugcaucaugcccuuccacauuuccacaucuuugcacaugc

SEQ ID NO: 4181228 - RNA, 55 nt, Human
gcuguguuuuagauauuuuaacccuugugaccuggcagaauaucuagcacauagu

SEQ ID NO: 4181229 - RNA, 71 nt, Human
gcuguuacagaacacugaagaccagguaauuuguaaggaacagaaaucuauuauuucagaguucugguggc

SEQ ID NO: 4181230 - RNA, 60 nt, Human
gcuguucucccuugaacuuggcuucacuucuauccccaccauuuaguaaggaagaacagc

SEQ ID NO: 4181231 - RNA, 87 nt, Human
gcuguugcuucaagacacuaagcuuucaggauacuuuaugugcgcauagauaucugugacaaauuuugguaucuagaaguaggaugc

SEQ ID NO: 4181232 - RNA, 64 nt, Human
gcuguuggcagggcugcauuccuucuggaugcuccagggaggaucugcuccuugucuuuuaugc

SEQ ID NO: 4181233 - RNA, 62 nt, Human
gcuguugggauucugccuuuccccucccaggaagugagggaggaagggguccucccaacagu

SEQ ID NO: 4181234 - RNA, 65 nt, Human
gcuguugucagagaguuuguguuuuagaaacaagcuauuuuaaaucacaaauuuucucauuuagc

SEQ ID NO: 4181235 - RNA, 75 nt, Human
gcuguuguccuucuguaauggacugucccuggugcgcucucagacgcagcaggacacgaugcggcaggacccagu

SEQ ID NO: 4181236 - RNA, 91 nt, Human
gcuguugucugggugaggcaucccugucgugggagcagccacagcucugccuggucucccagagcagggacgcuuuguccgcauuuacagc

SEQ ID NO: 4181237 - RNA, 59 nt, Human
gcuguuucuaagcugguuccuaaccucaagacuaagggaaugacucagcuggaaucagu

SEQ ID NO: 4181238 - RNA, 63 nt, Human
gcuguuucuaauaaaaaugaaagauuacauucacaauaguaauuuuucaacuuuggaaauggc

SEQ ID NO: 4181239 - RNA, 78 nt, Human
gcuguuugaugcaucuuuggggcauccaggaaaauaaguuucuuauuccuaucucaggguacccagauacuagacagc

SEQ ID NO: 4181240 - RNA, 103 nt, Human
gcuguuuuccaacucugauauggugacuaagcagguaugacauagauauguccuguuuaggagugucaguguccuuaucugaaaacccagguuuggugauagc

SEQ ID NO: 4181241 - RNA, 88 nt, Human
gcuguuuuccugggcuguuuccuaccguuuuucauucaagggaaucagaggagugggaaaccauguggaagcaggaucuggaagaugc

SEQ ID NO: 4181242 - RNA, 63 nt, Human
gcuguuuuggagaaccaugaaauaugggcuuguagcccauuuacauuguacucugugacaugu

SEQ ID NO: 4181243 - RNA, 89 nt, Human
gcuuaaaggguggauuucugagcucuauccagggucauaaaaaagguuuccaggaagagauagagcuaaguaaguagagcuaaguaagu

SEQ ID NO: 4181244 - RNA, 95 nt, Human
gcuuaagagauagguuggugcaaaaguaauugagguuuuugccaucacuuuccauggcaaaaccgcaauuacuuuugcaccaacccaauacuugc

SEQ ID NO: 4181245 - RNA, 83 nt, Human
gcuuaagagcuuggauuccaugaaaggggauuuucucucacccuuaacaaaagauuuccauucauacaauuuuguucuaaagc

SEQ ID NO: 4181246 - RNA, 78 nt, Human
gcuuaaggugguaagauauuuugugugauguuucauggaaucuauggaaauguaaccaaggcuaucagcucuaugagc

SEQ ID NO: 4181247 - RNA, 74 nt, Human
gcuuaaucuuuaaaugcaucuuuuaauggggcuuuugacacucaaauagccaaagugcauuuaugaauuaaugc

SEQ ID NO: 4181248 - RNA, 83 nt, Human
gcuuagaagcuugaugagggggaacagagauuuuaauuguaauugcagaaauuauagaauucgcuucacugugcugucuaggc

SEQ ID NO: 4181249 - RNA, 77 nt, Human
gcuuagacauucagacucacauggaggcagccuuuauugcugugauuuaugaccaaguuagaauugauggugaaagc

SEQ ID NO: 4181250 - RNA, 64 nt, Human
gcuuagacuaaggugaugguaucucagcugcauaguaaucugugaccaggaaucuuuucugagc

SEQ ID NO: 4181251 - RNA, 55 nt, Human
gcuuagcaaacaucuguaguccaauuacugucaacaguuuacagguguugagagc

SEQ ID NO: 4181252 - RNA, 102 nt, Human
gcuuagcacauuuccuccucccguggauguucuucagucagaggguggggaagacuaaggacagaaggcaucuagggcacgaggugagagaaacgacugagc

SEQ ID NO: 4181253 - RNA, 78 nt, Human
gcuuagcagucacacauuguucucuguauugagauaaauaacugcccuuccuuacugaccauuguguaacugcuaagc

SEQ ID NO: 4181254 - RNA, 95 nt, Human
gcuuagcccacguuguuggaauuaauaggggauauacaggaaaagagcuucuuaaacuaauauauaccuuuguuaggaaauauuggguugcaagc

SEQ ID NO: 4181255 - RNA, 56 nt, Human
gcuuagcucuccuucgcaugggugucucaaugccagggugucaggagagcuacagu

SEQ ID NO: 4181256 - RNA, 68 nt, Human
gcuuagggguauguggguagugcauaugugcauagauuccugucagcacugccaugugcucugcaggc

SEQ ID NO: 4181257 - RNA, 84 nt, Human
gcuuagugguuaaauuucugcguuugugagucaaucaaguuuaaauuuaaauccuguccauuuaccagaugcuugaccuuaagc

SEQ ID NO: 4181258 - RNA, 98 nt, Human
gcuuaguuagaaucucggccgcugcccaggggagugcugucgggaaagaucaaccaccaccgcaaagcggcccucugggcacacugccugagcugggc

SEQ ID NO: 4181259 - RNA, 74 nt, Human
gcuuauggucuuaggguaggcagcuggaauauaauuuuaauagaacuuagcuugauggcuuugaaaccacaggc

SEQ ID NO: 4181260 - RNA, 111 nt, Human
gcuuauguacuaucauuaguaauaaaacacauaugucauugaaaaaucucuauuuguccaaugaaccugauguuagugacugugugcuaguaguagucacauauaaaaagc

SEQ ID NO: 4181261 - RNA, 89 nt, Human
gcuuaugugguaagugagggagcugggacuugaaccaggcaguaaagcuccaaauuccauucaugcucccuuaccacucucuacauggc

SEQ ID NO: 4181262 - RNA, 78 nt, Human
gcuuauguuuauuuguugacuugcuuuucacacucaucuacuuagcaagucagaaaacagagcaauuaagcaucaagc

SEQ ID NO: 4181263 - RNA, 88 nt, Human
gcuuauuaggaagccagaaugggugaauaauucacauaacaaguuugugagccugguuaacuuccccaugucugcauuucaaaucagu

SEQ ID NO: 4181264 - RNA, 110 nt, Human
gcuuauuaguaaauccaccagaauguuucauuuggcauuuuuuuguaaacaucuagauuuguucauaaagaaaucagaaaagcauucguccuuuggggaguauuaauugu

SEQ ID NO: 4181265 - RNA, 55 nt, Human
gcuuauuauagagaguggguuuaguagucccuaauauucaugucuuuauaaaagc

SEQ ID NO: 4181266 - RNA, 122 nt, Human
gcuuauucagucucuuuaaacuguaguuucuuuuccuugcaguaugccuuuuaauuuuguguugaaaggugaacaugaugcacuggguaaaagaaacuauguuuuguuuuuuuuuaauaagc

SEQ ID NO: 4181267 - RNA, 63 nt, Human
gcuuauucucaucuagaggcuguggcagcuugcccaugaaacgaugucucugugggaauuggc

SEQ ID NO: 4181268 - RNA, 87 nt, Human
gcuucaaguuaggagaguaaagugguauuuauaagaacaccuguuccuuggguugcaucauguacuauuuucacuguuaacuugagu

SEQ ID NO: 4181269 - RNA, 66 nt, Human
gcuucaccacuuuuucagugugcaugcaugcacgugcaugugugugugugagaaagaguguggggu

SEQ ID NO: 4181270 - RNA, 87 nt, Human
gcuucaccucuugggacaucaguuucuucaucaguuaagcagggacaacacugccugccuaggaagcugugaaaucaggcaugaggu

SEQ ID NO: 4181271 - RNA, 57 nt, Human
gcuucacuacuugaaauacuaauauugaaguuuguucaguacuucaguagauggagc

SEQ ID NO: 4181272 - RNA, 74 nt, Human
gcuucagaaguugggcucugaccaccagggucuaaaucuugguccugccauucuuuagaugccuaacucugggc

SEQ ID NO: 4181273 - RNA, 81 nt, Human
gcuucagagagagcccagggcaggcaaggcaguccccauuggagcugacuuccaaccccaugcauggcugcuucucugugc

SEQ ID NO: 4181274 - RNA, 57 nt, Human
gcuucagcccauauggacucacugaagagucaccaaagaguccuuaugggcugaggu

SEQ ID NO: 4181275 - RNA, 71 nt, Human
gcuucagcccaucccaguacaucgcauggugaccaaaagauguagucguccuggcacaguggguguggggc

SEQ ID NO: 4181276 - RNA, 75 nt, Human
gcuucagcuccuugucacgagaccugccuucuccauagggcuccuugaaagugucuucaugauguggcagcuagc

SEQ ID NO: 4181277 - RNA, 75 nt, Human
gcuucaguucaucuugcuuuucaaacuccugcuucacagaaccagcuuugaccuaaaguaggaaacagcagaagc

SEQ ID NO: 4181278 - RNA, 79 nt, Human
gcuucauagacaaagcagcaggucaguggccaggacccuggauucuggcccaguucugcguuuugcucucuaugugagu

SEQ ID NO: 4181279 - RNA, 67 nt, Human
gcuucauaucucuguagaguuuuacaguguuuauuaccaaaagauucucccugagauauuuagaagc

SEQ ID NO: 4181280 - RNA, 61 nt, Human
gcuucaugcuugcuccaaagcugagcucugauuucacaaccagcuuggagaagcaggaggc

SEQ ID NO: 4181281 - RNA, 59 nt, Human
gcuuccagaucccaugcucuuacuacugcccuguauugaauaugugaccuucugggagc

SEQ ID NO: 4181282 - RNA, 122 nt, Human
gcuuccaugagaacuucuucccagaacuucuacagagccugggggcgcagaaaccggguccuggacgcugguccuccuugccuucagauccugauggggguuggaggggguugcacuggagc

SEQ ID NO: 4181283 - RNA, 75 nt, Human
gcuucccaaagugcugggauuacaagugugaggcacugcacccaggcuggaucccugcauuuuuacagauuuagc

SEQ ID NO: 4181284 - RNA, 82 nt, Human
gcuucccagcagcccugcagaggagucagccugggcagaggcugccucugcccucucgcugcuuggcagugccaggggaggc

SEQ ID NO: 4181285 - RNA, 61 nt, Human
gcuucccaggcacguaccccuuuaagaggaucuuucucaaaagccacguggccuggggagc

SEQ ID NO: 4181286 - RNA, 71 nt, Human
gcuuccccaccuccagagauaggagcgcgccaccuccuggcacagccuccaccccuggggaguggaaaagc

SEQ ID NO: 4181287 - RNA, 55 nt, Human
gcuuccccgugggcuguggcucauuuacaguccuguaaacagccccauggagagc

SEQ ID NO: 4181288 - RNA, 70 nt, Human
gcuucccguggccucuaaugggauuaugugcuucccauggggagaaaaaccauugagaccauggaggagu

SEQ ID NO: 4181289 - RNA, 113 nt, Human
gcuucccuccugcaaaagggugaugggugugugugugugagugugugugugucacaugucugugcucuugggcucauguuuauacauaucuguauauuacuuagaagggaagc

SEQ ID NO: 4181290 - RNA, 68 nt, Human
gcuucccuguccagucucaucugcaugggcacaccaucaggcugagaaaaucuggaccccugggaggu

SEQ ID NO: 4181291 - RNA, 70 nt, Human
gcuuccugauaauugccagugucacccuugccaggucacucaggcacgggucagugagcgcucaggaagc

SEQ ID NO: 4181292 - RNA, 57 nt, Human
gcuuccuggaacaacuguugcugagcaaaugaagcagcauggaauguuccgggaagc

SEQ ID NO: 4181293 - RNA, 72 nt, Human
gcuuccugggcucacaggcggggcuggcgcugggagcccuggggccucaggccgcccugcugcucagucagc

SEQ ID NO: 4181294 - RNA, 90 nt, Human
gcuuccugugguaauaagacuguguuacaccaaaggggaauguaugaagcaacagaucuucuugggugugaccagucugagccuugaagc

SEQ ID NO: 4181295 - RNA, 81 nt, Human
gcuuccuguuggguaguaugcgacuugaggugacaaacacuugcauuguguuugagaacccuguauuuuaagcaacagagc

SEQ ID NO: 4181296 - RNA, 59 nt, Human
gcuuccuuauuguugccauaguaacugucuacugaugguguauuuauaggggaagaagc

SEQ ID NO: 4181297 - RNA, 67 nt, Human
gcuuccuucaguaggcaggagugaguguaggagcagccugccauuuccagccaacugccuagggagc

SEQ ID NO: 4181298 - RNA, 57 nt, Human
gcuuccuuccuguguaacugucuguggugugcuucaucagauaaacgggaaagaagc

SEQ ID NO: 4181299 - RNA, 58 nt, Human
gcuuccuuuugcuucucuaccuuuacaaaaauuaauuuugggugagggagcuggaagc

SEQ ID NO: 4181300 - RNA, 81 nt, Human
gcuucggauguccuuggccuggccuucugccuuucagcaaugcccguggcauaggcagggugggcuggccuggccugaggc

SEQ ID NO: 4181301 - RNA, 63 nt, Human
gcuucggucauugcagucucagucagguccccacuuaacugaccacagacccaaugacuacgc

SEQ ID NO: 4181302 - RNA, 60 nt, Human
gcuucguugcucucucugguaagccuccuccagggguacuagaugagacagcgugggagc

SEQ ID NO: 4181303 - RNA, 75 nt, Human
gcuucuaaauauuuaucuggauuucuagaacuggaauuuaaguucuacuugaaaguccuagcgauccacagaagc

SEQ ID NO: 4181304 - RNA, 56 nt, Human
gcuucuauugucauauuuggacagauagauacugugcagauacaguauguggaagc

SEQ ID NO: 4181305 - RNA, 83 nt, Human
gcuucuauuuuguuggcaucucuguggucuauucauaguucaccuguuuuagcugacacauggagccaguuagagaugggcgc

SEQ ID NO: 4181306 - RNA, 64 nt, Human
gcuucuccagaccuucaucccccgugcacaccugucaggaacaaugaagcucuggguaugaagc

SEQ ID NO: 4181307 - RNA, 56 nt, Human
gcuucucgggccugaugucguccucgaugaugaguucgaugccagccucagaacgc

SEQ ID NO: 4181308 - RNA, 79 nt, Human
gcuucucugagaagcugaggcuggguggguguuacauaaagcuuuccuagcaacuuagcuuuaucacagaaugggaggc

SEQ ID NO: 4181309 - RNA, 56 nt, Human
gcuucucugcagcuccuggcugggccccuucaucuuguaaacgcugcaaugagagc

SEQ ID NO: 4181310 - RNA, 58 nt, Human
gcucagagcagaugguacucagaguaagauggagcugggagugacuggggcucugagc

SEQ ID NO: 4181311 - RNA, 78 nt, Human
gcucagagcuggcugcaggggugucugacauagguccccacauguccuugagacccuccucgguaccugcuuccuagc

SEQ ID NO: 4181312 - RNA, 99 nt, Human
gcucagaggaggaggaggaggagcaggaggagagccuggcgguggcggagcagguagccgacuuugccagcucccugcuggccgcccuccacugcuggc

SEQ ID NO: 4181313 - RNA, 94 nt, Human
gcucagaggaucccaggcccacugcuugucuagucaggucaccagauuggggagggcuugacaggcuagggggcuggcagucugccuuaggagc

SEQ ID NO: 4181314 - RNA, 63 nt, Human
gcucagaggccagcucccugcacugggaaguggauauuguucccaggcagagagcuggugagc

SEQ ID NO: 4181315 - RNA, 56 nt, Human
gcucagagggaacaaggggcugaguuggcucugggagggucuugcauuuucugagu

SEQ ID NO: 4181316 - RNA, 87 nt, Human
gcucagaguccuuuuguuuugagaugaggucucacuuauuuugcccaguccagucucaaagucccagaugcaaggaauuguuugugc

SEQ ID NO: 4181317 - RNA, 56 nt, Human
gcucagaugcccacacuggaaaugucacucuucauguaucagcuggguuucugggu

SEQ ID NO: 4181318 - RNA, 77 nt, Human
gcucagcacaguccaggcucagucaagcacuucgaguacaaaacaacuugagugcguggagaucucacugugugagc

SEQ ID NO: 4181319 - RNA, 69 nt, Human
gcucagcauguuucucagccguuggagaauacauagauguucuccuggagcaggaaggugggccugagc

SEQ ID NO: 4181320 - RNA, 83 nt, Human
gcucagccauuagcuaaacuuagucucaguauagauacaguagugaaucuguacuaauuaauuaauguagauauagugggggc

SEQ ID NO: 4181321 - RNA, 57 nt, Human
gcucagcccaugguuuguggccagugucuguacaaggcuccgugacuggggcugagc

SEQ ID NO: 4181322 - RNA, 57 nt, Human
gcucagcucauucugcgggggaagugcauuaacucccacuccagaguagaagcuggc

SEQ ID NO: 4181323 - RNA, 73 nt, Human
ggaacauauuuuugauauuucugauauuguuaauggagugguucaguccauaaaccagaaaaucaagacuucc

SEQ ID NO: 4181324 - RNA, 84 nt, Human
ggaacaucugauuacaugagaauauuccugggguuacacauuaaggugacauaaauguauugcuuaugaaaacaggucaguacc

SEQ ID NO: 4181325 - RNA, 65 nt, Human
ggaggaagagguucagagaaggcgaucuugggcaagaugcucccugucugggccucaguuucacc

SEQ ID NO: 4181326 - RNA, 77 nt, Human
ggaggaagcugguaggaagugcuccugccucucucucuuccaagcugguaggaagugccccugccucucucucuucc

SEQ ID NO: 4181327 - RNA, 71 nt, Human
ggaggaaggugacaaguuuagguuaccauaaugaguaaugauggugaucagucaacugucuucccucuucc

SEQ ID NO: 4181328 - RNA, 58 nt, Human
ggaggaagugcguuaugccuuuuaagggcacaaccugaaauugccacacauuucuucc

SEQ ID NO: 4181329 - RNA, 64 nt, Human
ggaggacaagcugugagugggguugcagaacaagucuggagaacccugcuuuaugccguccucu

SEQ ID NO: 4181330 - RNA, 84 nt, Human
ggaggaccagaaacugaagcaauucugcuuacuaaagaaauaauuuucaagugagguaauuagagcugcugcuacaguuccucc

SEQ ID NO: 4181331 - RNA, 57 nt, Human
ggaggaccugcuggcccugcaaggcguuucaguuuguguaaccugccagguuccucc

SEQ ID NO: 4181332 - RNA, 61 nt, Human
ggaggacgcagaucugggcaggcggcaucuggccgggugagccuguggagcugccuccucc

SEQ ID NO: 4181333 - RNA, 85 nt, Human
ggaggacucuggggagagagggaggagcuuugaggggggucacccuucacaguuccugacuuuaacuccacuacuaauguucucc

SEQ ID NO: 4181334 - RNA, 64 nt, Human
ggaggacugagaaucauagaaggcaacugacuugcccaguucagcuuucucguucuaguucucc

SEQ ID NO: 4181335 - RNA, 59 nt, Human
ggaggacugagacacuccuggccaacaucccucucggccaaggcugagugucucccucc

SEQ ID NO: 4181336 - RNA, 83 nt, Human
ggaggacuuagugaguuaaguguccugagcggcaccugcacucaggugacacucagugcugcuggcuccugucacaauucucc

SEQ ID NO: 4181337 - RNA, 60 nt, Human
ggaggagauggaugggggacguuuagcgaagaaaggcaucucccagauccuuuagccucc

SEQ ID NO: 4181338 - RNA, 60 nt, Human
ggaggagcacuucugagcucagugaaugacuaggcugaagcuccguacuaugacuuuucc

SEQ ID NO: 4181339 - RNA, 58 nt, Human
ggaggagccagaauccagacucgggcuccagcuccagagucuguauucuuggcuagcu

SEQ ID NO: 4181340 - RNA, 85 nt, Human
ggaggagccuucuuggggcagcccaggcugagccucuaccccugugacccgcuccuggccgggcugcucuuggaugagguacucc

SEQ ID NO: 4181341 - RNA, 64 nt, Human
ggaggagcugcugugggggcccagcccucccagcgggcagggucccugaucagaggcauccccc

SEQ ID NO: 4181342 - RNA, 70 nt, Human
ggaggaggcacugagaggcucuuccuaaggcuuuguuuuagggacaaagagcuccagucugagcugcucu

SEQ ID NO: 4181343 - RNA, 57 nt, Human
ggaggaguuggcuccucaguguccccuuuguugccccaaaacacagccagguucucc

SEQ ID NO: 4181344 - RNA, 113 nt, Human
ggaggaguuucacggguagugcuacagagggggagggcaagagaccagagaucuaggucaaccauccggcuuauccugcuuuguucagagcagauccuuguugaaaugacuuu

SEQ ID NO: 4181345 - RNA, 86 nt, Human
ggaggauaaaaguucugugaggauaaaaaggaaggagacauaagcuuaugcuuuuucuguaauaucuuauaccuuuguuauucucu

SEQ ID NO: 4181346 - RNA, 60 nt, Human
ggaggauggcggccacgcccccuauucugcgcuguaguaggcccugguuacgccuccucu

SEQ ID NO: 4181347 - RNA, 115 nt, Human
ggaggcaaguggaagcugccugggugucuggacauuggggcccuuucaguguugcugagcugcugggccucaccucuccaccgccugccuccaggcccuuggcuacccuucuucc

SEQ ID NO: 4181348 - RNA, 94 nt, Human
ggaggcaccucauuuuaaaaauagguuuuguaccagcagauucaccagagugaaauuucuagguagagaagcuuagugacuagugcaguguccc

SEQ ID NO: 4181349 - RNA, 70 nt, Human
ggaggcagcuuggggcuguggguaggcuuugggaccagagacccaguuugaaucccagcgucgugccucu

SEQ ID NO: 4181350 - RNA, 60 nt, Human
ggaggcaggcaaguucauaugaggaagguaauuaaguucccauugauugugccugucuuc

SEQ ID NO: 4181351 - RNA, 108 nt, Human
ggaggcaggggcgagacaggauugcuugagccaggaguuugaggcuguagugagcuauggucacaccacuguacuccagccugggcaacauaguaagacccugccucu

SEQ ID NO: 4181352 - RNA, 70 nt, Human
ggaggcagugccuggaccccagcugcccaggagaggugaggggcuagauggggccugaggacacugugcc

SEQ ID NO: 4181353 - RNA, 61 nt, Human
ggaggcagugcugauggaagagaccugaagaaggaaucuccauggaaccggggcugcuucu

SEQ ID NO: 4181354 - RNA, 62 nt, Human
ggaggcaguggcagagcuuggucuaaagcuggaugucuuuagcagucuaugucccugccucu

SEQ ID NO: 4181355 - RNA, 63 nt, Human
ggaggcauuauguuaaaauuuugucuuggaaaccaggucaaagaaccuagcuauagucuuucc

SEQ ID NO: 4181356 - RNA, 93 nt, Human
ggaggcauuugguaaauacuguugaaugaaguaagaaaugaaugaagauuaccagacucauacaagcguucaauagauguuagcuauccuucc

SEQ ID NO: 4181357 - RNA, 55 nt, Human
ggaggccaaggaggagcuugccaagaaguguggcaucaccgugucucaggucucc

SEQ ID NO: 4181358 - RNA, 56 nt, Human
ggaggccggggccgggaggagcacccagacggagugacuucuggcccugagccacc

SEQ ID NO: 4181359 - RNA, 63 nt, Human
ggaggccuagccagcuccaguuucagagauuuuuagaaagugccucuguuuggcuugguuucc

SEQ ID NO: 4181360 - RNA, 57 nt, Human
ggaggccuggacuuccugauggucuuggugggggucaggaggagagcuuggccuacc

SEQ ID NO: 4181361 - RNA, 100 nt, Human
ggaggcgguccugguagggagugcguagcaggguggagucgcuguccggucgcgcuucacuucugcuccgcccucccugcuccccauaacagaccccucc

SEQ ID NO: 4181362 - RNA, 75 nt, Human
ggaggcguggcccucgccguugaccauguacagcacguagugcuccaugcgcucggccggcggcagcggcgcccc

SEQ ID NO: 4181363 - RNA, 114 nt, Human
ggaggcuaauuuugcaaguagucagcucgaacuuccuguuaugugugccucuuauaaaaugacgcgaagaggauuauaugacaggaacaguugaauagcuacagcaaaguuucc

SEQ ID NO: 4181364 - RNA, 76 nt, Human
ggaggcuacuugguggacaggauugagagcugccuuggagaggccugagucagaucuguuugccagaucagccucc

SEQ ID NO: 4181365 - RNA, 93 nt, Human
ggaggcuagaaaucugaaaugaagguaauggcagagucaugcuuucugauagcucuaugggaagagaaucuuuccuugccuucucuggcuucc

SEQ ID NO: 4181366 - RNA, 58 nt, Human
ggaggcuccacugcucuuccugggaucaacuguuccuagaagagaagcaggacccucu

SEQ ID NO: 4181367 - RNA, 55 nt, Human
ggaggcucugcuccguguguucuuuacucaaggacccacacugacaagaguuucu

SEQ ID NO: 4181368 - RNA, 60 nt, Human
ggaggcugagggggaggccaccugggacuaagcaagaccccauuggacccuugggccucc

SEQ ID NO: 4181369 - RNA, 108 nt, Human
ggaggcugaggugggacaaguuccuugagcccaggcauuggaggcugcaguguacugugauugcaccauuguacuccagccugggugacagagggagacucagucucu

SEQ ID NO: 4181370 - RNA, 77 nt, Human
ggaggcuggaagccugagaucaaggggucggcaggguugguuccuucugaugccucucuucuuggcuugucauuucc

SEQ ID NO: 4181371 - RNA, 61 nt, Human
ggaggcuggaaguccaagaucaagaugucagcagguuugguuucuucuggggcuccucucc

SEQ ID NO: 4181372 - RNA, 84 nt, Human
ggaggcuggaaguccaagauuagggugacagcaugaucaguuucuggugaaggcugucuuccuggcuugcagauggccaccucc

SEQ ID NO: 4181373 - RNA, 61 nt, Human
ggaggcuggaggucaaagaugaagugcuggcagucugggguucuucugaggccucuccucc

SEQ ID NO: 4181374 - RNA, 101 nt, Human
ggaggcuggccugucuucuguagguaccaguugaaauagauguauccauuacugugaagggggcugugacuagaccugcaggagauggaggcuggcucucc

SEQ ID NO: 4181375 - RNA, 70 nt, Human
ggaggcugggcuuugagcucggucaccuuugcacccagcuugggagugagagaguuuaaggucauccucc

SEQ ID NO: 4181376 - RNA, 58 nt, Human
ggaggcuggggcagcuggcgugcccagaggacguguucgaacagcucugcagacuucc

SEQ ID NO: 4181377 - RNA, 62 nt, Human
ggaggcugguuuguccuccucauaccccaccagacagggcagagccccucaagccagccucc

SEQ ID NO: 4181378 - RNA, 74 nt, Human
ggaggcuugaugaucuuggauaaauguggaaauuugcacuucuaaauaacuaguuuaaguaucauuaagccuuu

SEQ ID NO: 4181379 - RNA, 109 nt, Human
ggaggcuuguuuuuccuuuuguugguggaggaagggcuggcuuugauauccucagcagcacaauuuggggguguccuucguccgcuggcauugaggcugccccgccucc

SEQ ID NO: 4181380 - RNA, 78 nt, Human
ggaggcuuucguuugcuuauauaauagaucaauuucaaggucucaaacuguguauuauaauuagcaaugcaaaccucc

SEQ ID NO: 4181381 - RNA, 86 nt, Human
ggagggaagacagugcugagcacagccuguguccucacuguguguuuaguguguggacaagugugccucuucccgccucucccucc

SEQ ID NO: 4181382 - RNA, 55 nt, Human
ggagggaaggacccauuuuaaguuccagggaccacuggacuauuccauucccuuu

SEQ ID NO: 4181383 - RNA, 86 nt, Human
ggagggaagggagcugggaggagccagguggggccuguuuaugggggagccuugccucauugugcuucucccaguaccugcacccc

SEQ ID NO: 4181384 - RNA, 67 nt, Human
ggagggaccagcgugagucugaggcuuggguuuugccaucugugucaaggacagggcugguccaucu

SEQ ID NO: 4181385 - RNA, 59 nt, Human
ggagggacccacugcggugaccggaaguuaagaggauacagacgcaguugagguucucc

SEQ ID NO: 4181386 - RNA, 130 nt, Human
ggagggaccugacccuauagaucuuuccagaauagagggagacacccuaggacucugagcccauagacauauggcuuccagggugggggauguuuuuaauuuaucucuggaaagcauuuagaguccagcu

SEQ ID NO: 4181387 - RNA, 90 nt, Human
ggagggagagggauugaaggcaggaacacaaguucagggaugucugcagacaucagccugucccugguuuacucuucagccccuccuucc

SEQ ID NO: 4181388 - RNA, 73 nt, Human
ggagggaggcuugggccaccuggagggacugggcacucugaguaguacccucugggaggcuguacccccuuuc

SEQ ID NO: 4181389 - RNA, 62 nt, Human
ggagggagggggcgacucuuaaaggcacagggugcuuggaagaggaggcccugcucccgucc

SEQ ID NO: 4181390 - RNA, 67 nt, Human
ggagggagguuguccguggugaguucgcauuauuuaaugaugcccaauacacggucgaccucuuuuc

SEQ ID NO: 4181391 - RNA, 63 nt, Human
ggagggagucuccuuagagagagugcagcucugcucacaucuuaguuugggacucuggccucc

SEQ ID NO: 4181392 - RNA, 81 nt, Human
ggagggcaagcuccccagcuggggcaacgcaccagcuccuugaagcuguucuguggcucggccagcugcugaagccucucc

SEQ ID NO: 4181393 - RNA, 74 nt, Human
ggagggcauccacaggaaagcaccucccaugccaagccaggaaaguggggcuuuccagugggaauugguccucc

SEQ ID NO: 4181394 - RNA, 96 nt, Human
ggagggccucagguucuggagaagggccagguauuuccaugucaacccugcuuuuuauaaccagagagaacauaugagguagcaccaaugaccucc

SEQ ID NO: 4181395 - RNA, 96 nt, Human
gcugacuuccuucaaaacauuguccaugaugguucuuacaaaggugcuauuuccugccuagagcauuugugugggaacccaucagugaaggucugc

SEQ ID NO: 4181396 - RNA, 57 nt, Human
gcugacuuugacuuggucauugauaucccuagaauucaaugacugguccaagguggc

SEQ ID NO: 4181397 - RNA, 67 nt, Human
gcugacuuuucauguauguggguuuuacagggcugacugugaaacuugaguauauauggauuuuggc

SEQ ID NO: 4181398 - RNA, 66 nt, Human
ggaaccuagaauccaucugcuuauuauaaucucuguaauuugcacacaguggcauucuuggcagcc

SEQ ID NO: 4181399 - RNA, 66 nt, Human
ggaaccuccuccuggagaaugagcagcagcauuuguccuggcugccuucuggaggaagugaaaucc

SEQ ID NO: 4181400 - RNA, 121 nt, Human
ggaaccugaguguuaaguaacuugccugcaguuguagaauuuggaucucggcagucuggcucuagggaucugugcucugaaccaugauucuauucugccuguuacacugccauuggguucu

SEQ ID NO: 4181401 - RNA, 108 nt, Human
ggaaccugcauccccucauuuacuccucagagcagcucugugccuggagacuugaaagaugagggaagccaggcccagagaugcuagugagugggguggcagggaucc

SEQ ID NO: 4181402 - RNA, 99 nt, Human
ggaaccuggcacccaccguggggguugggcugggugggaggcggggcuccgucaucuucucucagcccaggcuccuccucguuugcucgugcuuuuucc

SEQ ID NO: 4181403 - RNA, 81 nt, Human
ggaacgccucugugacagagcuugagugagaaaaaggaauuguccuucuacaucucagccaaugcuccuucaccguguucu

SEQ ID NO: 4181404 - RNA, 62 nt, Human
ggaacggcuguggcuggcggcagcggcagcgggcggcugcuguggccuggcgcagagcugcc

SEQ ID NO: 4181405 - RNA, 108 nt, Human
ggaacuaagucuucuaagccuccuacccuuucucuugccuuucucagaaggcagagguauucagaaaagggcaagagagagggcaagaggcccaggagacuuaguucc

SEQ ID NO: 4181406 - RNA, 85 nt, Human
ggaacuaagugaugaaaucuuuuccaauuguuuagggaaagugucucauucccauaaacguggaagaauuugcacacuugcugcc

SEQ ID NO: 4181407 - RNA, 86 nt, Human
ggaacuccuuuccacggaauggaauucuccgcuggggcugcaggaacuccuuuccacagaauggaauucuccgcugggguaguucc

SEQ ID NO: 4181408 - RNA, 107 nt, Human
ggaacugacagacuguuuuccaagguagcugaaccauuuuacauucccaccggcaauguaugaagguuccaguuucuccacauccuugucaacacuuguuauuuucc

SEQ ID NO: 4181409 - RNA, 67 nt, Human
ggaacugcagggagaggggacagccugguuugcaaggccccauuugggcuagccucuucccugcucc

SEQ ID NO: 4181410 - RNA, 58 nt, Human
ggaacugggaccuccguguaggacuggugguucucuaguucucgagcgucccuguuuc

SEQ ID NO: 4181411 - RNA, 130 nt, Human
ggaacugggccagucuuaggcuuaccuagaaauauacaccugaucccaugagaccacguuggcugugauaugauagcacuucucaugggaucagguguauauuucuagauagcagcaggcuuccaugcuc

SEQ ID NO: 4181412 - RNA, 69 nt, Human
ggaacuggguuagggucucuucccccguccacagauauugggguaugugggucccugagucuucggucc

SEQ ID NO: 4181413 - RNA, 59 nt, Human
ggaacugugggaccuuuaucaggggaccucugcuagacaaggcucuguucugcaguuuc

SEQ ID NO: 4181414 - RNA, 65 nt, Human
ggaacuguuacagauacauuucuuuuguugaaguuaccuucaacaaaguaauuuguuacggcacc

SEQ ID NO: 4181415 - RNA, 65 nt, Human
ggaacuuagaauauguucaagauuucauuccuguuuucaucugagacuuggcguuuuuaaguacc

SEQ ID NO: 4181416 - RNA, 70 nt, Human
ggaacuuccauacuguuuucuauaauggcuguacuaauuuacauuuccaccaguagcguguauggguucc

SEQ ID NO: 4181417 - RNA, 63 nt, Human
ggaacuugagcaacacugagugacacuccagagaggcucaugugaguguguguucaggugucc

SEQ ID NO: 4181418 - RNA, 67 nt, Human
ggaacuugaggauugccuugucagcuccugucucuaccuaggcaacugacagcauauccuguuuucc

SEQ ID NO: 4181419 - RNA, 70 nt, Human
ggaacuugcaaccucuggucacgcugaacacuuugcccuugcugguguggccaugagaaugugcaggucc

SEQ ID NO: 4181420 - RNA, 56 nt, Human
ggaagaaaaugggcaacagguggcuaucaguggucuccuugugguuauuuuguucu

SEQ ID NO: 4181421 - RNA, 64 nt, Human
ggaagaagcagcugccaggccaguuaagagcuacaccugggacuggcauagcauuacuucuacc

SEQ ID NO: 4181422 - RNA, 87 nt, Human
ggaagaaugaauggucuuuauggaaaaugaauggcagaauaagugauuugucaaguucauugaacuauaaauuccauuuuuacuguc

SEQ ID NO: 4181423 - RNA, 108 nt, Human
ggaagacaaaggaugacuucuugagucggcaccuugacacuagaugggcagaggagccuccuguucauuccggggagggcuaacuugggagaaguuuaagagcuggcc

SEQ ID NO: 4181424 - RNA, 57 nt, Human
ggaagacaucugcuugcaccagaucuagcacauagugggugcucugcaaaugucucc

SEQ ID NO: 4181425 - RNA, 98 nt, Human
ggaagaccaaacuacaacuuuccagaccuccuuguagcugggauggccccgugaugccagcugcugaaagggguucugggaaaguguuugcuuucucc

SEQ ID NO: 4181426 - RNA, 69 nt, Human
ggaagacgcaagauuugccaguggccaacuucuguuugaagacuccgugacagauuugcacaacuuucc

SEQ ID NO: 4181427 - RNA, 121 nt, Human
ggaagacggcugccccugcucuuugcacaaucccacguccuccagcucgugcucuuucugucuugagagucugggcauuuaggauguuggagucagaggagacuggggacaccagccaucc

SEQ ID NO: 4181428 - RNA, 85 nt, Human
ggaagacuaaagaguaugucuuuugaugaauaauaaguucuccccugaguaacugaacauaaugaaagccaaauucuuguuuucu

SEQ ID NO: 4181429 - RNA, 76 nt, Human
ggaagacucuaauuaaucuugccuugaucacauccugauaccagaaucaguuauucuggcuagauugaugaguccc

SEQ ID NO: 4181430 - RNA, 89 nt, Human
ggaagaggaaacacccuggcuguuuauuucggggcuguaggaucuguugugaaugagccccaggaugggccgcaggaugucuuucuucc

SEQ ID NO: 4181431 - RNA, 71 nt, Human
ggaagaggaaacugaggccugggagguccaggggcuugcccaaaucccagcaggaguccaguucccucucu

SEQ ID NO: 4181432 - RNA, 69 nt, Human
ggaagaggagaggagaccuucucugaagggugaggccuuuucagagcugggugcuucuuccugcucucc

SEQ ID NO: 4181433 - RNA, 56 nt, Human
ggaagaggagaguguugcauuuccugauuagaguccaaggagaagacucucucccc

SEQ ID NO: 4181434 - RNA, 63 nt, Human
ggaagaggucacuucuagccaagggaauuuggagaagcuaucuggcugcagugcaccucaucu

SEQ ID NO: 4181435 - RNA, 73 nt, Human
ggaagaguaauaguuugaagagguaagaucuaaacugcagaggaucuuaaucuucagggacucuugcuucucu

SEQ ID NO: 4181436 - RNA, 86 nt, Human
ggaagagugacacacuuguccuggucuuccugggacuuuccugguugcuucuguucugggaaagccaggacaauucgucacuuucu

SEQ ID NO: 4181437 - RNA, 124 nt, Human
ggaagaguguuagaggagaaaacugcugcugagaguauuggcaggcuuggccucaguuuggacucuguaauuuucuuuggacccaagucuguaaccucugcguacuucuucucucuuaccuucu

SEQ ID NO: 4181438 - RNA, 90 nt, Human
ggaagauucagaucuuauauuacucuuuguuuuacaguuuuauuguuuacaggaaauugggacacagagaaaaauagagaggaaucuacc

SEQ ID NO: 4181439 - RNA, 59 nt, Human
ggaagauucaguuaucucaugaaagccugaaaugcuaguaugaggucuaugagauuucu

SEQ ID NO: 4181440 - RNA, 69 nt, Human
ggaagauucggaaguuguuuuauagauagaauagucaaaggcuuuuucagucuuggcuucugauuuucc

SEQ ID NO: 4181441 - RNA, 108 nt, Human
ggaagcagaacuaaugugauauauagauacaugucaagagacuuaucguagggaauuuacuaacccaauuauaagggcuggcuaugaagucuucacaugacuguuucc

SEQ ID NO: 4181442 - RNA, 57 nt, Human
ggaagcagacuuuugcuuauuuggccuauuuauuuggcccaguugcugaguugcucc

SEQ ID NO: 4181443 - RNA, 58 nt, Human
ggaagcaggaggcugggguaaagauggagccgccuucccuucccuccugccugcuucc

SEQ ID NO: 4181444 - RNA, 72 nt, Human
ggaagcaggagucccucuggccagcauguucucucuuccugacaccuggcccuugggaccccugggcauucc

SEQ ID NO: 4181445 - RNA, 66 nt, Human
ggaagcagucugccagccaacucugcaaaacaaagagaagagaacuggcugcaagcagcugccucc

SEQ ID NO: 4181446 - RNA, 84 nt, Human
ggaagcauagccaagggaguaugaagaugugcauaagacuuuugucugauacacacugcuauccuuuuuugugcuaaugaauuc

SEQ ID NO: 4181447 - RNA, 102 nt, Human
ggaagccagggaccucccucacggugaaggccgagugaccagugggagucaggguaaaccuucacugugagucaggaacaagcuccccuggauauauuuucc

SEQ ID NO: 4181448 - RNA, 69 nt, Human
ggaagccaggguccggcugccuggcugugccuuuagugcugaccgcaguggcugcugggccuccccucc

SEQ ID NO: 4181449 - RNA, 78 nt, Human
ggaagccgugaaaggaaaguacagugaugcucgguguuaaucaauugccugcauuucugcuuuugccuuucacuuucc

SEQ ID NO: 4181450 - RNA, 81 nt, Human
ggaagcuaugaggagagagaacacuuggguccauuuguuucuggcuuuuguuaucuucuuucugaccacuucaaagcuuuc

SEQ ID NO: 4181451 - RNA, 66 nt, Human
ggaagcucagcagcugauggggaagugauuuauaauccuaaacacaguucuuucacuguugguucu

SEQ ID NO: 4181452 - RNA, 57 nt, Human
ggacagacagcauggaaccauagcucuacacacacuagcauggcuccagugucuucc

SEQ ID NO: 4181453 - RNA, 57 nt, Human
ggacagacuaaauggcuguaggaugacuccaauuauucuaccccugguggucugccc

SEQ ID NO: 4181454 - RNA, 69 nt, Human
ggacagaguggggaguaggaggggaacagagaggacauccucucuggcucuccagugcucuuagugucu

SEQ ID NO: 4181455 - RNA, 62 nt, Human
ggacagauaaguuggagccucauuguugagaguauugauaauaaggccaaacuaucuggucu

SEQ ID NO: 4181456 - RNA, 82 nt, Human
ggacagauggaccugucuucaggggaggaaucuggcugccucugcucgcugaauucugccuugaggccuuccuuucauguuc

SEQ ID NO: 4181457 - RNA, 65 nt, Human
ggacagcaugcuuuauaguuaggacauucuucuuuauauccagccugacuucuucaugcuguacu

SEQ ID NO: 4181458 - RNA, 124 nt, Human
ggacagccagaugaagguccaguucuggugucgggucccugaggagggagcucuguggacuggcuccguagcacaugcuccuggggcuugccuggcaccggugcagggaucaaggucggagucc

SEQ ID NO: 4181459 - RNA, 59 nt, Human
ggacagccuucccugagagaaguguccuguucuuuucuucaaggguaaaggcaacgucu

SEQ ID NO: 4181460 - RNA, 56 nt, Human
ggacagcucugccaggagcucacauuggggccuggcaacuccuugcagauuugucc

SEQ ID NO: 4181461 - RNA, 101 nt, Human
ggacagcugacacagcagccugucugugcuugcagcccacaaugggauguagcccaagaggcugaaagguaguaguaggcugccagguccugugccugucu

SEQ ID NO: 4181462 - RNA, 66 nt, Human
ggacaggacgggcaaacaggauggucucagcccaaaagagauuuccugcagagccccuccgaggcc

SEQ ID NO: 4181463 - RNA, 60 nt, Human
ggacaggauggccagcugauauugacucagagucuuaucuacacuuggcuugucuugacc

SEQ ID NO: 4181464 - RNA, 88 nt, Human
ggacaggcacacgcaggcucuugguaaaugcgcggugaauuaaauugaacuggaucaugguauaaagagucuaucugguggcaagucc

SEQ ID NO: 4181465 - RNA, 68 nt, Human
ggacaggcagagcauccccugcaguacaacuacacuuucugguacuccaggagaaccccugucugucc

SEQ ID NO: 4181466 - RNA, 83 nt, Human
ggacaggcagcauuuacucugaugaacauagaggcuauuuuccucuucuauccaauaauucucagaguacauguuuuuuuuuc

SEQ ID NO: 4181467 - RNA, 58 nt, Human
ggacaggcaggugauuuccagagaauuuuccacagcucuguaagcaaccugaaugucc

SEQ ID NO: 4181468 - RNA, 71 nt, Human
ggacaggcccggggagccuggauggcaaggggugcaggaaggcgcccauuccgggacugccugggccugcc

SEQ ID NO: 4181469 - RNA, 62 nt, Human
ggacaggcgccagcuccuguuggucuugaggaggcgagggucucuggggcuggcauuugucc

SEQ ID NO: 4181470 - RNA, 56 nt, Human
ggacagggaucauuaucugagcacaucuggccauggauaguacuguuucccugucc

SEQ ID NO: 4181471 - RNA, 61 nt, Human
gcuuccaucagaagcugcaguggaaacaaucaccuuuuccggcagcagcucugaaggaggc

SEQ ID NO: 4181472 - RNA, 83 nt, Human
gcuuccauucuggaguucuccagagacccauucacuaaaagagaaacaggcugcucugggguuaagcuuccauggaugcuggc

SEQ ID NO: 4181473 - RNA, 55 nt, Human
gcuuccauuugcuaggggauuuacaugugaaaccucccccagugcuaaugggagu

SEQ ID NO: 4181474 - RNA, 61 nt, Human
gcuucccacagagauuacauugaaagaaucucuuuccugugugugaucucuuguggauggc

SEQ ID NO: 4181475 - RNA, 59 nt, Human
gcuucccaucaaccuuccugcagcucacccgagugucugagguggagagugagguaagu

SEQ ID NO: 4181476 - RNA, 67 nt, Human
gcuucccccuugaccaccuccuccccaucauuggauugggaugaggaucaaucagggaggaaaaugc

SEQ ID NO: 4181477 - RNA, 63 nt, Human
gcuuccccuccaagcacugccugauuccuuuuagccccuugcggcuccuuggaggcuuggagc

SEQ ID NO: 4181478 - RNA, 60 nt, Human
gcuuccgacagagaucacauugaaagggucugucuccugugugugaccuccuguggaugc

SEQ ID NO: 4181479 - RNA, 56 nt, Human
gcuuccggagccaaaaggccccggaaguggucggccgcuugcgacgcuccggaagu

SEQ ID NO: 4181480 - RNA, 60 nt, Human
gcuuccuagaguggaggagguuucacugcacuuacacauacauuuucuguuuuaggaagu

SEQ ID NO: 4181481 - RNA, 70 nt, Human
gcuuccuagcauuagccauugccagggggccaaauacaguaaauggaucaauggccugaugcuauuaagc

SEQ ID NO: 4181482 - RNA, 59 nt, Human
gcuuccucacagcacugcugcaggcggcacuguugcugcaggagauuuugagagucagc

SEQ ID NO: 4181483 - RNA, 73 nt, Human
gcuuccucaucuguucuucaaaauauuacauaaauuaauucauagauguaaagguuuuagagcagagauuggc

SEQ ID NO: 4181484 - RNA, 72 nt, Human
gcuuccucccugcuuggaaugacccuuacuuaccacguggcacuuagaucagguugggucccaacaggaagc

SEQ ID NO: 4181485 - RNA, 69 nt, Human
gcuuccugagaaacaaucugauguggaacucaggccaccaaaucacacgauuguuuuuuagguuguugc

SEQ ID NO: 4181486 - RNA, 58 nt, Human
gcuuccugaguacacccucaucuuagaacugaggcucaaggugucugcucaagggagc

SEQ ID NO: 4181487 - RNA, 60 nt, Human
gcuuccugaucccccacaucccagcaggccuucccacugccaucgaggggagcaguaggc

SEQ ID NO: 4181488 - RNA, 74 nt, Human
gcuuccugcuguauuacuuuuacaaacugcuucucacaggcuaggcagagacagaggcaauauagcuuacaagu

SEQ ID NO: 4181489 - RNA, 88 nt, Human
gcuuccugguuugcuaucaguuagaguugcugauacuaccaguguauguucagcucagcacugacaagauaaaacaaaacaaaaaagc

SEQ ID NO: 4181490 - RNA, 63 nt, Human
gcuuccugucccucagccaugaagucuuuccuuccuugugacucuguuugagugauggggagu

SEQ ID NO: 4181491 - RNA, 59 nt, Human
gcuuccuuccuuacauugguggucucugggcagcauaccaagguaguggagacagaagu

SEQ ID NO: 4181492 - RNA, 86 nt, Human
gcuuccuugucuguguucaacucgauggguggagaaaauaauuagaauugauuucucugcacccacucaggaauagaauaggaggc

SEQ ID NO: 4181493 - RNA, 61 nt, Human
gcuuccuuucuccaagaauaguuucaggggccaagaaggcugggaaacuggggucaggagc

SEQ ID NO: 4181494 - RNA, 64 nt, Human
gcuuccuuuuggccaggucagugcagggaaccaacaaagacagggaccuguggccagaagaagc

SEQ ID NO: 4181495 - RNA, 81 nt, Human
gcuucuaauauucuuguuuauuaagauauaaagauuguccuaaaaagcuuugaauuuguuagugaagaagaguaguaaagu

SEQ ID NO: 4181496 - RNA, 68 nt, Human
gcuucuacacaugagugagaacaugcaguguucaacugucagccucucaguucauuguucuuagaugc

SEQ ID NO: 4181497 - RNA, 62 nt, Human
gcuucuacagaggcguugccuugacgccaucuaguggcaauauaggcacaauucugagaagc

SEQ ID NO: 4181498 - RNA, 79 nt, Human
gcuucuaccuccucacagaugagcaucgccagcucuucucugcaaggaaagagcuggauugugcugcagaggagagagc

SEQ ID NO: 4181499 - RNA, 65 nt, Human
gcuucuagguuccuaggugaauaauucagacuuuacuuauuuauuuauaccaggugaucggaggu

SEQ ID NO: 4181500 - RNA, 55 nt, Human
gcuucucccauuucgcugcugagggcucacuugcaggacaacagagugggaaggc

SEQ ID NO: 4181501 - RNA, 55 nt, Human
gcuucucccuacagaugucagugucuuuauauugaagaggauggguagggggagc

SEQ ID NO: 4181502 - RNA, 61 nt, Human
gcuucucccuucuucugauugagauggggagucacuagaggaauugaagcagaggagaggc

SEQ ID NO: 4181503 - RNA, 68 nt, Human
gcuucuccugggagcuguggcagagcgcucucugcugcucaccccaugcuccgcaggccugcaggagc

SEQ ID NO: 4181504 - RNA, 70 nt, Human
gcuucucugccagcccugugagucuugaacauucaugcuuuuuaacucauuucuggcaguuuugagaggc

SEQ ID NO: 4181505 - RNA, 57 nt, Human
gcuucugaaggcucuaggagauaauccauuuccuugucuuaucuagcuucuagaggc

SEQ ID NO: 4181506 - RNA, 76 nt, Human
gcuucugacacuggauuucuagaaaugugugugcuuuaaauucauauuuaaauuuguuuaguugucgcccagaagc

SEQ ID NO: 4181507 - RNA, 63 nt, Human
gcuucugacagcaccugaacuucucuguccaaucagugcgcaagagcaggcugucaauggggc

SEQ ID NO: 4181508 - RNA, 60 nt, Human
gcuucugcaggagucaacucugggcgaacuacaugccagggaguauugccugcagagagc

SEQ ID NO: 4181509 - RNA, 61 nt, Human
gcuucugcagguucauuguuuauuccaaguucccagagaaacaaauguaaaaugcagaugc

SEQ ID NO: 4181510 - RNA, 87 nt, Human
gcuucugcugaguagagauagcuaagaaggugauuuuucuucucaggaaaaguacaucaaauguuuggcuauaaauggucaggaagc

SEQ ID NO: 4181511 - RNA, 58 nt, Human
gcuucuggaagcauaugcaagaaacuguucacagugcacaguguugccuuccaggagu

SEQ ID NO: 4181512 - RNA, 59 nt, Human
gcuucuggaagcugcuucugccugccucuguguucauggcaguagcaauaauuagaagc

SEQ ID NO: 4181513 - RNA, 80 nt, Human
gcuucuggagcugggggcuuaguauuagcaucaaacuuuuacuaauggaugcccgacacucugcucugagcuucaggugc

SEQ ID NO: 4181514 - RNA, 68 nt, Human
gcuucuggcagguuaugcgggccacaucuuccagaaaauguguucccuauuucuuguccucagauagc

SEQ ID NO: 4181515 - RNA, 70 nt, Human
gcuucuguagguacuggcuggggccaagguaucugugugcuuugaaagcucccaggacuuacuaagaagc

SEQ ID NO: 4181516 - RNA, 66 nt, Human
gcuucuguauuuauuguccuuuugacucugcugaagauuugaguacuuaaaggcauauauagaagu

SEQ ID NO: 4181517 - RNA, 58 nt, Human
gcuucuguccugcugugccaagugcuggggcagacgcaggcacagaguggacagcggc

SEQ ID NO: 4181518 - RNA, 80 nt, Human
gcuucugugggacuguugccuggggaagcucugaugacagacaccaagcucccacagggcaacccuguccuaguugaagc

SEQ ID NO: 4181519 - RNA, 55 nt, Human
gcuucuguggugaggucaccuuuucuggaaaucccugugauuucuuuccacaagc

SEQ ID NO: 4181520 - RNA, 59 nt, Human
gcuucuguucaaggauauaaggcccaauucacccacuguguaucuucaugaauggaggc

SEQ ID NO: 4181521 - RNA, 72 nt, Human
gcuucuuagccacagagguugaugugguuaggugccaaauuuagccacuuaaccuuucgugcuuugacuggc

SEQ ID NO: 4181522 - RNA, 63 nt, Human
gcuucuuuccuugggcuggaaccauucaacugcacagauaaauguuuacucaaggaagaaugc

SEQ ID NO: 4181523 - RNA, 64 nt, Human
gcuucuuugcagccucccuggcagaagcaucaauugcuuugcugauagagaggcuguccagagc

SEQ ID NO: 4181524 - RNA, 68 nt, Human
gcuugaacccaggaggcagaaguuguagugagccgagacugugccauugcacuccugccugggcaagc

SEQ ID NO: 4181525 - RNA, 72 nt, Human
gcuugaacccaggaggcagagauagcagugagccgagaucgcgccacugcacuccagccugggugacagagc

SEQ ID NO: 4181526 - RNA, 76 nt, Human
gcuugaacccgggaaguggagguugguuacagugagccaagauggcaucacugcacuccagccugggugacaaagc

SEQ ID NO: 4181527 - RNA, 87 nt, Human
gcuugaacuucucacagcauguugccuggauucugaagggccauuucaaaagacccagaaagcagcugcauuuggaaguuacacagc

SEQ ID NO: 4181528 - RNA, 72 nt, Human
gcuugaacuucuuagaagugggcuauaauuaggaagguuuugauucugggcucauuucuuuaaguuucuagc

SEQ ID NO: 4181529 - RNA, 74 nt, Human
gcuugacuacagaagcucucuauggauucuagcccagccagcuugaauuccacuuuggcuuuuggggucaaagc

SEQ ID NO: 4181530 - RNA, 56 nt, Human
gcuugagacccagggagaagaacuucuggugccaaaguucuuucuggaaggucugc

SEQ ID NO: 4181531 - RNA, 70 nt, Human
gcuugagccagggaugcagagguugcagugagcggagaucaagccacugcacuccagccugggcuccagc

SEQ ID NO: 4181532 - RNA, 82 nt, Human
gcuugagccaucccuggcuuccuggagcucacaaccugagagagaagguggugcugcgggaacccaggguugggcugugggc

SEQ ID NO: 4181533 - RNA, 72 nt, Human
gcuugagcccgggagguggagacugcagugagccgugaucacgccacuguacuccagccuuggugacagagu

SEQ ID NO: 4181534 - RNA, 63 nt, Human
gcuugaggcugcacaguacaggcugccuaagggaccgguaagcuauuuacugugcagcucagc

SEQ ID NO: 4181535 - RNA, 72 nt, Human
gcuugaguccaggagguugagacugcagugaacugugaucacaucacugcacuccagccugggcaaaagagc

SEQ ID NO: 4181536 - RNA, 60 nt, Human
gcuugagucccaugaugauagccacaguccuugcugaaggauaucgaugguggcucuugc

SEQ ID NO: 4181537 - RNA, 66 nt, Human
gcuugaucucuggauucagacaguuccuggcuccuccacuuaugagcugugugaccuagggcaagc

SEQ ID NO: 4181538 - RNA, 57 nt, Human
gcuugauggcuucaaaugauagaaauguauucucucucaguuccagaggcuacaagu

SEQ ID NO: 4181539 - RNA, 60 nt, Human
gcuugauugaacuccugaauguuugaaucucuucaugauuuuaggaaguuuaaggcaggu

SEQ ID NO: 4181540 - RNA, 72 nt, Human
ggagcaggagaacaaagcaagcugccccagaccacccggcuuucgcagaacccagaugaugcuccugucucc

SEQ ID NO: 4181541 - RNA, 56 nt, Human
ggagcaggagacacuagcugaccuauauguggucagcucagaguguguccuguuuc

SEQ ID NO: 4181542 - RNA, 103 nt, Human
ggagcaguaagagaugugcagaugagggaugaaaaugaaggcaagaccuuuuauucuacacauuuuuauaacuugauucugcauucaaauuuuuugaucaucu

SEQ ID NO: 4181543 - RNA, 56 nt, Human
ggagcauaaucagcagcucuaccuuaagggcaguggugggauuguuuuuuagcuuc

SEQ ID NO: 4181544 - RNA, 88 nt, Human
ggagcaucgcucugucgcccaggcuggagugcaguggcacgaucucggcucacuacaaccuccgccuuccagguucaagcgauucucc

SEQ ID NO: 4181545 - RNA, 80 nt, Human
ggagcaugauucauagaaagcaucaauucucccuuauauagaaugagcccagggaauuccuuucaaauuaucauggcuuc

SEQ ID NO: 4181546 - RNA, 69 nt, Human
ggagcaugcgcucugugaccgagugagaauuuacccaaccccgcaaaauugaccaagggugcgugcucc

SEQ ID NO: 4181547 - RNA, 56 nt, Human
ggagcauguggacaguuguggcugcuccugagcugacacuaacugcucaugacucc

SEQ ID NO: 4181548 - RNA, 58 nt, Human
ggagcauucucagcuacaagacccaaagcccagcuuugcuuucaucaugagaugcucc

SEQ ID NO: 4181549 - RNA, 73 nt, Human
ggagccagcgcuguagccaugaacgcuuucaggaaggaaaggaagagcagucaggccucagagccguggcucu

SEQ ID NO: 4181550 - RNA, 58 nt, Human
ggagccauauuugcauugaauugugucaauucucagcacauuuaagcagauguggacc

SEQ ID NO: 4181551 - RNA, 67 nt, Human
gcuugucagguguuuauugaagcuagcuuggguuguucugugagagugucuaaacacagggacaagc

SEQ ID NO: 4181552 - RNA, 57 nt, Human
gcuugucaguuugucccuggguaaggcauuuucauacccagagauggaccuggcugc

SEQ ID NO: 4181553 - RNA, 62 nt, Human
gcuugucugcugagccaccuguuucauauccaagacacaguaagcauauuucaguagaaagu

SEQ ID NO: 4181554 - RNA, 57 nt, Human
gcuugucuugccugcucauccucauugccuggaaaugaaugaauaaggcaggaaagc

SEQ ID NO: 4181555 - RNA, 84 nt, Human
gcuugugagcuugaaacguaccaacauugcucuuucaaauaugcaucaauugaauaugcaguuugguacuuuucuagcaaaagu

SEQ ID NO: 4181556 - RNA, 106 nt, Human
gcuuguguacauaaaauggcauaucaacucauccuuuauagaugcgagguauauuuuacuuccagcauauauagagaaugagcgguucuuauuuaugcaaauaagc

SEQ ID NO: 4181557 - RNA, 64 nt, Human
gcuugugugucucuugagcugccugaugcuuguuuuucaaguggucuguaaagagcacgugagu

SEQ ID NO: 4181558 - RNA, 68 nt, Human
gcuuguuucugcaucagcuagcaauuaaaguuuaaacuguugaacaugcagcuugcuguaggcuaagu

SEQ ID NO: 4181559 - RNA, 100 nt, Human
gcuuguuuuaaauguuaagaguauaauuagugucuucuaaagaaacuaaauuuacuuuuucuuguagaagcaaguuuugcucuucacgcacacaaaaagc

SEQ ID NO: 4181560 - RNA, 86 nt, Human
gcuuuaaaaaucuuuuucagaugagcccuggauauuauuguaccuguagagagauauuuauucauacugucagauaaauguagagc

SEQ ID NO: 4181561 - RNA, 79 nt, Human
gcuuuaagagaaguacauucugauagggaagggaagcuaucugccuuuguccuccugaggauuacuuuacucuuggagu

SEQ ID NO: 4181562 - RNA, 117 nt, Human
gcuuuaagauaauauuuuugaugaaaucuccaauguguuaaugagcaaugaccuaaauuuuaggucccugguaauugacacacaugggguuuauuuuaugcaauagcacauugaggc

SEQ ID NO: 4181563 - RNA, 67 nt, Human
gcuuuaaggugaugagagaugcuucuggaugguccugggagccuguguccuucucacauucaggagu

SEQ ID NO: 4181564 - RNA, 60 nt, Human
gcuuuacaaguggugcagauuagaaugucaaguccaauguguuuuauucacuuguagagc

SEQ ID NO: 4181565 - RNA, 56 nt, Human
gcuuuacgggagguuugucccauguuacuggagauaaauuacuaucucccuagagc

SEQ ID NO: 4181566 - RNA, 64 nt, Human
gcuuuaggcuuuuguagcuuuccauuccucauguucaguugauagcugcagucaagccagaggu

SEQ ID NO: 4181567 - RNA, 56 nt, Human
gcuuuaguuguaaguuucuuuggguuauggacccuuuugagaagcugauugaaugc

SEQ ID NO: 4181568 - RNA, 60 nt, Human
gcuuuaugggccaugcggugucugguauaacauucaagucugccguugcagcucaaaagc

SEQ ID NO: 4181569 - RNA, 63 nt, Human
gcuuuauuaauaacaauuguaggacaugacagucucugucaguguuuaccguauguuguuggc

SEQ ID NO: 4181570 - RNA, 59 nt, Human
gcuuucaacccuguaccuguuuacugcguugaucucaccaccaggugcagaggcagagc

SEQ ID NO: 4181571 - RNA, 82 nt, Human
gcuuucaagaacuucccugagacuggguaauuuauaaacaaaagagguuuaauugauucacagucuguagggcuggggaggc

SEQ ID NO: 4181572 - RNA, 72 nt, Human
gcuuucagaugguguagcaugugauaugaccaguggauccuguggucaugggaccaugcuuaccucuuuugc

SEQ ID NO: 4181573 - RNA, 61 nt, Human
gcuuucagccuacaggguugucuguaacaacuucucaacaaugcugucuuagcaugaaagc

SEQ ID NO: 4181574 - RNA, 65 nt, Human
gcuuuccucuggggccaccucuucagcucuuguccuagcugagugaggaagcgguggaggauggc

SEQ ID NO: 4181575 - RNA, 91 nt, Human
gcuuuccuugugcuuacucugugggugugauuuggguuuccuccaacauauuuuccaagagugaagguucucagaggacacaggagaaugu

SEQ ID NO: 4181576 - RNA, 73 nt, Human
gcuuucuaaguucugcuuuuauugccagaguuguugccuuauaccuuugaaauauagugaagucauggagagc

SEQ ID NO: 4181577 - RNA, 78 nt, Human
gcuuucucaugcauguaggaacucacagauauucucaaagaagacauuggagaagaagagcuccucagcagagugagc

SEQ ID NO: 4181578 - RNA, 125 nt, Human
gcuuucucuaggaucucaacaaucuuguucacuuugggucuguuuagcugagaaggggagugaagauccaccuuucauugaccuggaagacccuaaggcgaggccaaccugaccuuguggcuggc

SEQ ID NO: 4181579 - RNA, 62 nt, Human
gcuuucugccugggcuccauuucccugcacuggaauuuggaaauuucccacaggcagaaagc

SEQ ID NO: 4181580 - RNA, 58 nt, Human
gcuuucugcucuguaaaauggggauuacgaaucccauuagucuuacaaagaagagggu

SEQ ID NO: 4181581 - RNA, 71 nt, Human
gcuuucuucuuguucucuggaaauccccuuuccugaggugcacugauuucuagcagggcaggaaagaaugu

SEQ ID NO: 4181582 - RNA, 85 nt, Human
gcuuugaacugcugagguauacuaugugacggugaugaaugaacacguggaaagucgacggcaguguagcuuagugguugggagc

SEQ ID NO: 4181583 - RNA, 80 nt, Human
gcuuugacauucuaugaaaacuaggcaauauacauuuaaucaacauucgucuauugacuguucauagaaugaugccaggc

SEQ ID NO: 4181584 - RNA, 75 nt, Human
gcuuugagguaguuccauuacaaacauguuaagauuuuuaaaaauucagucagguuggugaggaccacacaaagc

SEQ ID NO: 4181585 - RNA, 58 nt, Human
gcuuugaggugcugaagauaucaugacagugaucgaguuuguccacagcccucacagc

SEQ ID NO: 4181586 - RNA, 95 nt, Human
gcuuugagugcacccagcagggggcauccuugcccuuccacugcccacccuggaggggugagacuggcccacugcaggguugcccucuacccagc

SEQ ID NO: 4181587 - RNA, 77 nt, Human
gcuuugcaaggacgggcuccagguagugacggcaaccagcccccuccacguguccuggcucuguccucgcgcaaagc

SEQ ID NO: 4181588 - RNA, 57 nt, Human
gcuuugcaggaaaccagugcauccguguucgagcgguuuugggauccucugccaagu

SEQ ID NO: 4181589 - RNA, 91 nt, Human
gcuuugcauuuaaauuggcucagcaucuuggugccaguggaauuuaccaggcuggugagagcucagcucagauuucucaaugcuucacagc

SEQ ID NO: 4181590 - RNA, 71 nt, Human
gcuuugcugggugcuucauguauguuaucucaucaaaucuccaacaaccuugugaggcagcuaguauuagc

SEQ ID NO: 4181591 - RNA, 92 nt, Human
gcuuuggaaagcuagacuuuuacaaauccccagucucuaaaaguuuucccacgaugaauuuuggggcaggaggaagaguuagcacccagggc

SEQ ID NO: 4181592 - RNA, 108 nt, Human
gcuuuggaaaugugaaaaugcuguguaaauguuaagaaauacuaaguauagggccagaagcuauacaguguuucacuuaaccguuugccauucuguauuuaccaaggu

SEQ ID NO: 4181593 - RNA, 80 nt, Human
ggauguacuacauuuguucuauagcuuuugggaaacauauuuaccaaacagcuugaagggaauaauuugucaaggcaucc

SEQ ID NO: 4181594 - RNA, 70 nt, Human
ggauguagugcaaggagugaauuucaucaguucuauauaaaaagagauuucaccuugaucacugcugucu

SEQ ID NO: 4181595 - RNA, 57 nt, Human
ggaugucaaucaguagaauuaacuugaggguccaaggccauuuuuauugugacagcc

SEQ ID NO: 4181596 - RNA, 81 nt, Human
ggaugucagcaaagcucuuugaccugggccuggcagucaucacucuggucccaucuggucaggguggcugagcugaccucc

SEQ ID NO: 4181597 - RNA, 55 nt, Human
ggaugucuaggguuuaugugccuccagggaagaaucagaaagcccaagacaaucc

SEQ ID NO: 4181598 - RNA, 124 nt, Human
ggaugucuccucccuccccaugauuuucauuuguugugacauucucuucaguugguuuauuugagaggugguaucaggaagcuaaccagggagugagaagugagacaaggaagggaaggaagcc

SEQ ID NO: 4181599 - RNA, 62 nt, Human
ggaugugaaagaagauuuagaugcccagaaauuucagcaucuaaaauucaucauuuacguuc

SEQ ID NO: 4181600 - RNA, 71 nt, Human
ggaugugacaugccugggccguggagcacucugagaucucaucgcggacaccacugcccacaccuccaucc

SEQ ID NO: 4181601 - RNA, 87 nt, Human
ggaugugccugauauaaaugugugucuuucauuucaugaggcauuguauuauauauguccauuagaacacguuucuuagucauguuc

SEQ ID NO: 4181602 - RNA, 74 nt, Human
ggaugugggugguuuuggaggccacuguuuggcccacuauaggauauaaauaaaggucuuuagugcaaacaucc

SEQ ID NO: 4181603 - RNA, 74 nt, Human
ggaugugucuuggcuacuuugcugcccagcagugccugcucucaggcacaugugagaguagaggccuagcaucc

SEQ ID NO: 4181604 - RNA, 83 nt, Human
ggauguuaggccagccuugauggaugaggaaguuucauuuaggggcuccugucacuucccaucuucaggccaagcugacaucc

SEQ ID NO: 4181605 - RNA, 63 nt, Human
ggauguuccugagaaauaaagagagagcaaaagaaccagagcucuuuuaacaccaggaauucc

SEQ ID NO: 4181606 - RNA, 56 nt, Human
ggauguugggggcggcugcaugcauucccugcaccugggcugccuucugcucaucu

SEQ ID NO: 4181607 - RNA, 62 nt, Human
ggauguuguuuuugucccagaaggugucauuacagccccuuaggggugacagaaauaccacc

SEQ ID NO: 4181608 - RNA, 64 nt, Human
ggauguuuucuggccacuuuuccagugaaauaaaaugaaugggaauuuaguggcagauaauacc

SEQ ID NO: 4181609 - RNA, 78 nt, Human
ggauuaacaaagcaaugaaucgaguugcuuguuuugugaauucaagcucacuaucacagguacacuugauugcaaucc

SEQ ID NO: 4181610 - RNA, 84 nt, Human
ggauuaagugcauuuuauagugagguacagauuugauaguaaauuuacauagacuuugcacuucaauauaacuugguuuagucc

SEQ ID NO: 4181611 - RNA, 100 nt, Human
ggauuagaugaguuaaugcauguaaugggcugauagugccuggcucauagcaagcacauaaccaaugucagcuauuaguauuauuaaaaaauuuugaucu

SEQ ID NO: 4181612 - RNA, 70 nt, Human
ggauuaggcagccauucaguagacucaagcugcuacucugcuacuacuagaucaguaugccucaaaaucu

SEQ ID NO: 4181613 - RNA, 99 nt, Human
ggauuauaucuuucuaauguggcaugugaaauauuaagccgaggaaguaucaacugaaauauuuacuuuauuuuauaggucauuaaagaaaaagaaucc

SEQ ID NO: 4181614 - RNA, 74 nt, Human
ggauuaugcagacuuuccagguccugggcuaugaugaaauuauagcuggaggcuuguaaagucgugcacuguuu

SEQ ID NO: 4181615 - RNA, 92 nt, Human
ggauucaaaauauagauuauuuaaauuuguuuauaggucuuuaucaguuuaugcuuauucagcaaguuuggguacuucuguugcuaugaucc

SEQ ID NO: 4181616 - RNA, 62 nt, Human
ggauucaagaucgaguuuaaagugaucuucaaaaugauuaaagccaucuagauuuugaguuu

SEQ ID NO: 4181617 - RNA, 90 nt, Human
ggauucagaaaaauguaaauaugcguguuugucuagagaaagagagaaugauaaaguaaaugugcuaaaguauuaacauuuggagaaucu

SEQ ID NO: 4181618 - RNA, 96 nt, Human
ggauucagaucucuagaaaaguuuccagucuagugugggaaaugugaaaugaaguguauuucuccaacugcacuguucuuuucuacaaucucaucc

SEQ ID NO: 4181619 - RNA, 70 nt, Human
ggauucaguuugccaguauuuuauugaugauuuuugcaucaauguucaucagguauauuggccugaauuu

SEQ ID NO: 4181620 - RNA, 59 nt, Human
ggauuccauuagcugagauaucuugugauagggagagguaucacaguagaauaggaucu

SEQ ID NO: 4181621 - RNA, 92 nt, Human
ggauucgcaguugaaugauuuaugugugacuuaggaaaggagauaauugcaaaacuauuucuaaucuuuaguuacaaaaugaacuguauucc

SEQ ID NO: 4181622 - RNA, 76 nt, Human
ggauucuugaggaaagagugcaaagaggaacguccccacccacuuucccucuaccuggcaucauucccaguaaucc

SEQ ID NO: 4181623 - RNA, 68 nt, Human
ggauugaagagaagcuaaauagagaagauaauucuucaauuuaguuuugcuuuucaaaauuaaguucc

SEQ ID NO: 4181624 - RNA, 60 nt, Human
ggauugacagguuguguagguggccaguaaacagacuuuugguuucuaagcugucagucu

SEQ ID NO: 4181625 - RNA, 75 nt, Human
ggcaguaaggggugagggugugucagccugaguuaaagaccaggaugugaguggacacaguccuuccaagcugcc

SEQ ID NO: 4181626 - RNA, 74 nt, Human
ggcaguauaacuuccacuguugccauaaguguguucugaaagaggaaggacagcuaugacagauggauaaugcc

SEQ ID NO: 4181627 - RNA, 91 nt, Human
ggcaguauccaugauuuucaauauccgaguagccuaagacaguucauuuuugaacucuagugcuccuuggaggaaaacaaaugaauuugcu

SEQ ID NO: 4181628 - RNA, 86 nt, Human
ggcagucacauaaguugcagagggugcauuggacaccaggcccuccagaugccaacucucucugcagcucucugacuauccaugcc

SEQ ID NO: 4181629 - RNA, 96 nt, Human
ggcagucacguguauauuucacauuccgcggcuauuuucauggccuuacugggaaaugugccugggaauuagauuuucuuauacacgugucaagcc

SEQ ID NO: 4181630 - RNA, 57 nt, Human
ggcaguccaaaguggcucucaccaaaauuauuuggguaguguggucucugggcuggc

SEQ ID NO: 4181631 - RNA, 73 nt, Human
ggcaguccaggcggguauagaggcucagagaaauccuuaaggauugaagcucuuuuuaucuuccugaucugcu

SEQ ID NO: 4181632 - RNA, 73 nt, Human
ggcaguccugcuccaccgugggcuggacgaagacaucaucuacuccagggcauccacgcguggggugggagcc

SEQ ID NO: 4181633 - RNA, 83 nt, Human
ggcagucuggccccagcaucagugcucuuaugacucaacacaccaccugucugggacugcucuugcugggguccaagccugcu

SEQ ID NO: 4181634 - RNA, 55 nt, Human
ggcagugacuggggacccccaaaaaggauaagcuuguggguauccagaacugguc

SEQ ID NO: 4181635 - RNA, 68 nt, Human
ggcagugagaugaacauauuccucuccagauugcauauuugcaggauacuauguuccucuauuuugcc

SEQ ID NO: 4181636 - RNA, 104 nt, Human
ggcagugagcacaaaggaguaggggagcaucugugaugguuaauuuuaugugucaacuugacuugguuaccagaugcccagauauuuguuucaacguuauugcu

SEQ ID NO: 4181637 - RNA, 63 nt, Human
ggcagugaggucauguaauuugaugucuuauaauaggaguucccaaauuacaggccacagacc

SEQ ID NO: 4181638 - RNA, 89 nt, Human
ggcagugaguacccagugucuggcgauaagggagccuccgcagaugugucuguugcuggucugcaggcucaccugccagggccacuucc

SEQ ID NO: 4181639 - RNA, 58 nt, Human
ggcagugcuuucauuaagcuuugugaauucccccauaaagcaaagucaagugcacucc

SEQ ID NO: 4181640 - RNA, 67 nt, Human
ggcaguggaaauaguuugguuauagagguguugaaaaucucugucaaaaacuucuuucucacuagcc

SEQ ID NO: 4181641 - RNA, 78 nt, Human
ggcagugggccuggagcccuggagaguuggugccagugagagagacguggugcauuagcagaggcugggccugaggcc

SEQ ID NO: 4181642 - RNA, 63 nt, Human
ggcagugguacuuagcguggcaucauggacauaaaaguguacauguauguguuaauaucugcc

SEQ ID NO: 4181643 - RNA, 62 nt, Human
ggcaguguggcauaacauguaggaagcaugacaagcuguggacuuacucaggccacacugcc

SEQ ID NO: 4181644 - RNA, 67 nt, Human
ggcaguguuaagaaauauuauuuuugucauguucuaaugcaguagauaggcacuuuuaugcacugcc

SEQ ID NO: 4181645 - RNA, 65 nt, Human
ggcaguguuuauggguaacacaugugcacacuuggcauugauaacccuguuucccaaauacuccc

SEQ ID NO: 4181646 - RNA, 58 nt, Human
ggcaguuauguuuuaaguucuuugggaagucuccaaacugcuuuccacaguggcuacc

SEQ ID NO: 4181647 - RNA, 59 nt, Human
ggcaguucucauccucgaucuucuuguucagagaacaaucaaguuuugaugaggaagcc

SEQ ID NO: 4181648 - RNA, 100 nt, Human
ggcaguucucgggagugcuucugcgugugugauaugccucugcacacaugucuugugcaugugggagugucacaugcugcacgaggcucaccugucugcc

SEQ ID NO: 4181649 - RNA, 60 nt, Human
ggcaguugcgugcaucagugguugguuccucucgguugcguggacguacugcagcuugcu

SEQ ID NO: 4181650 - RNA, 84 nt, Human
ggcaguuuauuugcugauuucaguuucagaauuaagauaaaauugugaaaacaaauaccugaaaucugcaaguugaaacuugcc

SEQ ID NO: 4181651 - RNA, 71 nt, Human
ggcaguuucugagguuccagguuuugagauuugugaccccauagagagaacucgaauuucagaggacugcc

SEQ ID NO: 4181652 - RNA, 76 nt, Human
ggcauaaggaaggcagccaugugcuuugggucauguuaguaaaaagacucagagcuuggcuccuugcugacaugcc

SEQ ID NO: 4181653 - RNA, 55 nt, Human
ggcauacgguuuguucacugaagagaaaaaaguucucugaacaaaauguaauguc

SEQ ID NO: 4181654 - RNA, 61 nt, Human
ggcauagcagggaugucagcaaguagaaaagcuaggucuacuaugguuauuaucccucucc

SEQ ID NO: 4181655 - RNA, 65 nt, Human
ggcauauuauaaguuauuucaaguugcaucuuauuuuaaaugaacuuggaucagcuuuaaaugcc

SEQ ID NO: 4181656 - RNA, 61 nt, Human
ggcaucaccaggucagagaauggcugggguguaauugagaaguucuuuggugguggugacc

SEQ ID NO: 4181657 - RNA, 61 nt, Human
ggcaucaguauggccauaggguuguuggagcuggcuuccaugcuaggccauauugguugcu

SEQ ID NO: 4181658 - RNA, 56 nt, Human
ggcauccaacucaccuggguaugagucccagcucugccuuuuacuagcuggauguc

SEQ ID NO: 4181659 - RNA, 56 nt, Human
ggcauccugggacuggcuucuuugugaaagacaaucagagagcagaacugggugcc

SEQ ID NO: 4181660 - RNA, 60 nt, Human
ggcaucggaggcugaaguuucccggguugaccaacccuggcuccuuaucucuccuaugcc

SEQ ID NO: 4181661 - RNA, 117 nt, Human
ggcaucugcugcucccuuugcauaagacgggaggguauacguuuccugagcugaucugacucugagagccagggugggugaaugcuauuuuguugcugguagagggaucugugggcc

SEQ ID NO: 4181662 - RNA, 70 nt, Human
ggcaucuugggaacugccuugccuuuggaaggccaaauguaauaaggaguuucccagucagaagaaugcc

SEQ ID NO: 4181663 - RNA, 56 nt, Human
ggcaucuuguggggcuucaggaaaccuuuccgugugagcagcccacuaggaaugcc

SEQ ID NO: 4181664 - RNA, 59 nt, Human
ggcaucuuugcacccucaaaaccugagcaccgccccggcacagagugggugcagagacc

SEQ ID NO: 4181665 - RNA, 67 nt, Human
ggcaugaaggcccagcgugaccucagugagcauguccuccaacuucugaaucagcuggugccugacc

SEQ ID NO: 4181666 - RNA, 69 nt, Human
ggcaugagcuggggcggauacucagcucuucauccgaggcugcaggcugguucugcccacagcaauccc

SEQ ID NO: 4181667 - RNA, 113 nt, Human
ggcaugaguuaccaagggaugauugcauugccaucugcuguaacaguuuuacaauguuaauauauuguuugcaacaacuagauggaggucaagucuuucuugaugauuuuguc

SEQ ID NO: 4181668 - RNA, 60 nt, Human
ggcaugauggcugaggcuucugcagcuauuuugugaucuugaggcuucaggccacaugcu

SEQ ID NO: 4181669 - RNA, 70 nt, Human
ggcaugcauacguagugauuuucuaacaauggguaucaugaaacagaaucacucauguaggcaguuugcc

SEQ ID NO: 4181670 - RNA, 56 nt, Human
ggcaugcauguuguuuuagguguguuugagaugccugaagaacaucaguguauccc

SEQ ID NO: 4181671 - RNA, 60 nt, Human
ggcaugcauuacaugggauaugcccuagcagggggugggcguuaacauguguuguaugcu

SEQ ID NO: 4181672 - RNA, 70 nt, Human
ggcauggcccaggcaggcugguacuagauaaugugugggggccauauggugauagucccuggcccguguc

SEQ ID NO: 4181673 - RNA, 73 nt, Human
ggcauggcuucugguuuauccuuauauucccuuuugggaaauacugucacagggauaccauggggcccaaacc

SEQ ID NO: 4181674 - RNA, 55 nt, Human
ggcaugggagugagcaaccuuauacuaaaucaauaaguugcuaagacuccuagcu

SEQ ID NO: 4181675 - RNA, 68 nt, Human
ggcaugguaaucaggacacuucuggggauuucagaguaagcuuacucuccuguccuaauuaccacccc

SEQ ID NO: 4181676 - RNA, 86 nt, Human
ggcauguauggucauuauccuaguaucuugaaugggcagagcauguaauucauacccuguagaauagaauggugaccaaacagacc

SEQ ID NO: 4181677 - RNA, 79 nt, Human
ggcaugucagagaccuggaccagagugggugcuggggucuggagcaccucagcccagcucaggucuuucuguccauccc

SEQ ID NO: 4181678 - RNA, 74 nt, Human
ggaagucugguuauugggucaaaggauaugaacguuuuuuuaugucucuuguuaaugauuacuaaauugcuucc

SEQ ID NO: 4181679 - RNA, 64 nt, Human
ggaagugaagcccauuuuuagcugugacagucucacaguugacaaaggaaugguauucauuucc

SEQ ID NO: 4181680 - RNA, 78 nt, Human
ggaagugacguuugagcugaaauguuaauaauuacaauaaaaauaaugauuaaaauuuaacuuaguuaacgugcuucc

SEQ ID NO: 4181681 - RNA, 91 nt, Human
ggaaguggauuccacccaggaaggagcuguguauuucaucaagugaguaagacgcaguuuccuuucugaugucgcuguugguucuacuuuc

SEQ ID NO: 4181682 - RNA, 68 nt, Human
ggaagugguuugagcacagugcugagcuaagcaaguuuuagaagcacugaaucagaccacgugcagcc

SEQ ID NO: 4181683 - RNA, 117 nt, Human
ggaagugugucccucuagcugcugagcuugcuacauagaucagaucugacuggaggaagcgggguuucuggaugugaagaugaguuagguagcuagagcugggauuguacaccuucc

SEQ ID NO: 4181684 - RNA, 65 nt, Human
ggaaguuaacauuugagcuaaaaggcagaaaugaaucaggcuuucuggcugaagugaugaauucc

SEQ ID NO: 4181685 - RNA, 117 nt, Human
ggaaguuaagaaacuauaguuuuccagccuuuggacucccagagcugcucuccuguuuuuucuccgcaguacucagccuggagagcauucuuagucuguuuggagaauauuaacucc

SEQ ID NO: 4181686 - RNA, 83 nt, Human
ggaaguuauugguggagagcacugguguuccuggcuaauguggggucugugauucaguguucucccaggucagugcugcuucc

SEQ ID NO: 4181687 - RNA, 64 nt, Human
ggaaguuguaugaucggggaaucuaaagcccggaguagaauccccagagagaaguacagcuucu

SEQ ID NO: 4181688 - RNA, 84 nt, Human
ggaaguuguggguugugcagaagugccucaguaaugagaacuugguccuucaaugcugcugcuucuguacagccuuucgccucc

SEQ ID NO: 4181689 - RNA, 83 nt, Human
ggaaguuuuaaaaaaaucugucauuuuccaaacccuuagcaauauaagguaucugguaagaggcagacaguuuagaagcaucc

SEQ ID NO: 4181690 - RNA, 76 nt, Human
ggaauaaaacugaauuuuaaauacaggccccaucccuuguuagauagaaggccuugggaaaauuaguuaauauucc

SEQ ID NO: 4181691 - RNA, 80 nt, Human
ggaauaaggaaagacuggggccccagaagacaaacccagcacccaggccccugcuggcagccccagcuuuaacuuagucc

SEQ ID NO: 4181692 - RNA, 68 nt, Human
ggaauaaucaugagagccaccaugcuucuguguccucauagucacacaguggcuuucauuauuauuuu

SEQ ID NO: 4181693 - RNA, 66 nt, Human
ggaauaaugucagucuuuugcugcugggcacagcacacagagcgaugcagcugaaaguaugacacc

SEQ ID NO: 4181694 - RNA, 90 nt, Human
ggaauaauuauuuucuguuuucucuaggauuggguucaaggauaggaugggaaagaacccagaacugggcaacagaaaguaaaagcuucc

SEQ ID NO: 4181695 - RNA, 57 nt, Human
ggaauaauugucaacuaugcuacacagaaguuuagaaaugaaggagauaauuguucc

SEQ ID NO: 4181696 - RNA, 97 nt, Human
ggaauacagcaaugagcaaaacagaugagaucucugccuauauggauguuacuauccaauggggagugaguucuugaacaagucauugcuaaagucc

SEQ ID NO: 4181697 - RNA, 81 nt, Human
ggaauacgguguucgaggugugaccugaguggugcaggaaucaugcugcugucaccucccuccaucuggacacuauauuuc

SEQ ID NO: 4181698 - RNA, 83 nt, Human
ggaauacuucuggcaguggaggaagaaaacucacacacgugaguugggacuuuaucuccaaguugugcuaaguuuaguguuuc

SEQ ID NO: 4181699 - RNA, 66 nt, Human
ggaauaggauuuaccucuguaaccaacaggauacuguggaaaugacagagcguggcuuccaggucu

SEQ ID NO: 4181700 - RNA, 98 nt, Human
ggaauaguaaagucauguuaauauagacagugagcuaugagugguuugauucucaucccaagcugucuugguucgcuguuugaaugacugugaugucc

SEQ ID NO: 4181701 - RNA, 65 nt, Human
ggagugugggauggagcucaggagacacuugauucugucuauggugagcuuaccagcucuuaccc

SEQ ID NO: 4181702 - RNA, 56 nt, Human
ggaguguguuaaggauagggcuugacacaaacacgagguccuaacuuagauacucc

SEQ ID NO: 4181703 - RNA, 74 nt, Human
ggaguguucaguuuuuuuaaaaaaguauaauggaaagccauuggagaguuuuaagaagggaaacaccaugaucc

SEQ ID NO: 4181704 - RNA, 63 nt, Human
ggaguguugaagauaaaguucucauuuugcaagucccaaaaugaugcuuuuuuucagugcacc

SEQ ID NO: 4181705 - RNA, 116 nt, Human
ggaguuaagggagugggggugaguaggggugaaaggagaagguuccagguccuucaccuacagugaagggcucugcugucucuccccuccucugcuucucucccucuuuuuccucc

SEQ ID NO: 4181706 - RNA, 129 nt, Human
ggaguuacuugguuaguuuuuguguuuagccauuuaguagcaacguguuaaaugagacagaauggaaucuggaauuuaaagaucauuucauguuuucuuaaauggcauaugaaagccuaucauaacuuu

SEQ ID NO: 4181707 - RNA, 65 nt, Human
ggaguuagacauccccaguuagcauccucgcuucacuagcuguguaacuuugggcauguugcuuc

SEQ ID NO: 4181708 - RNA, 58 nt, Human
ggaguuagauuuuauccugagggcguugacaauuuucugcaggaguguaaugugaccc

SEQ ID NO: 4181709 - RNA, 77 nt, Human
ggaguuagguacucaaaucgcccucagaggacugacaaggcagccagucauuguagggcauuuagagagcuaauucc

SEQ ID NO: 4181710 - RNA, 57 nt, Human
ggaguuagugaagccuacgaggaugccgccaauugucucugguuauuaacuaacucc

SEQ ID NO: 4181711 - RNA, 90 nt, Human
ggaguucaaacuggaugucuaauuuuucagccuaaggaacucaugaaaaacucuuaucagaaguggcuagaauaauugacuucauucucc

SEQ ID NO: 4181712 - RNA, 60 nt, Human
ggaguucaaaggccuguggaaaggggagaaugcaugccucuccuaaagucauugaauuuc

SEQ ID NO: 4181713 - RNA, 61 nt, Human
ggaguuccaggugagaacaagaaauuuuuauaaugauggccaauuuucaucugggaccacc

SEQ ID NO: 4181714 - RNA, 71 nt, Human
ggaguucugacgggaggugugggagagauucuuuccugugugaggcaggaaacuccccuacaucucaaucc

SEQ ID NO: 4181715 - RNA, 97 nt, Human
ggaguucuguuguguuugaugcugacacgcacccaggcauaauucuuucugcuagacugcccccugcugucugcaacaguacuacaacuagaauucu

SEQ ID NO: 4181716 - RNA, 69 nt, Human
ggaguucuucaacuugcacaugcaucagaaucuccuagagggcucguugaagugcagauugcggagccc

SEQ ID NO: 4181717 - RNA, 77 nt, Human
ggaguugaguuuucguaugcauugcauuugaggaguagacuuguuccaaaggcaguggguauguggaucuuaaguuc

SEQ ID NO: 4181718 - RNA, 130 nt, Human
ggaguuggaacaguucuaggugauguuauaggguauuuacaacagaccuagaugaaugagauauuauaaauuucaauaucuugugucuuugagaauaacccuggaacauuuuuaaaguuguuuuuauuuc

SEQ ID NO: 4181719 - RNA, 56 nt, Human
ggaguugguggagaaguuaggguuucuguccugucuguccuguacccagcaucucc

SEQ ID NO: 4181720 - RNA, 63 nt, Human
ggaguugucuucacgcaacuuuccggcuccuaggcccgcgggggaagcaguggcggcaacucc

SEQ ID NO: 4181721 - RNA, 72 nt, Human
ggaguuucagagacugagugaccuuucugauauugcacagcacaucagagacaaaaccagcacuugaacucc

SEQ ID NO: 4181722 - RNA, 76 nt, Human
ggaguuuccuuagcaggacaugugcagagaagcuaaaggaaggcuguuugcuuguccuguuauucccuggaauucu

SEQ ID NO: 4181723 - RNA, 76 nt, Human
ggaguuucucugagguacaugauuccccauaaaaagaaaggccuucuuguugauggugucagguaacugaagcucu

SEQ ID NO: 4181724 - RNA, 64 nt, Human
ggaguuucuggagaucugccuaugggaggguuaugcgaaaugcucugugucuuugguagacucu

SEQ ID NO: 4181725 - RNA, 57 nt, Human
ggaguuucugucauccuguccccguggcaacgccccccgggaaugauggaagacuuc

SEQ ID NO: 4181726 - RNA, 78 nt, Human
ggaguuugggcccugaauugagacugcucuugacuguucuuggucuugugagagcucucuucauaacggccugaaucc

SEQ ID NO: 4181727 - RNA, 89 nt, Human
ggaguuuugcucuuguugcccaggcuagagugcaauggcaugaucucagcucacugcaacuucugccucccagguucaagcaauucucc

SEQ ID NO: 4181728 - RNA, 109 nt, Human
ggauaaaaggauugguggauucagguucguugcuugguuuccucuaaucaaacaugauuauggaggaauaacagcaaccuuagggcuucuucugaauaucuuuuugacc

SEQ ID NO: 4181729 - RNA, 76 nt, Human
ggauaaacuugcugaugcuguagaucuuagccucuacaugagaucauguggaaaaucugaaagcauuuuagguucc

SEQ ID NO: 4181730 - RNA, 76 nt, Human
ggauaacauucuuuuauggugaaguuacuauaugcauugucaaauggaaugucauaccauaaaagaaaguguuucc

SEQ ID NO: 4181731 - RNA, 56 nt, Human
ggauaacggagagaaaaaggaaagcauucuugcuuuacauccuguuucccguuucc

SEQ ID NO: 4181732 - RNA, 62 nt, Human
ggauaagccaacuucaaacaucugucacccggagacagagcaguucuggagcuggcuaauuc

SEQ ID NO: 4181733 - RNA, 111 nt, Human
ggauaaggguggcauugugaggaucuaaggagauaccaccuaccaaacugcauugaucuaacuuggcauguauuaucuucauagauuuuuacaccaaugccauucuaaucc

SEQ ID NO: 4181734 - RNA, 107 nt, Human
ggauaaguucuggugaaggcacuauuccagguuucuuguuguauccucacauggaggaaagagggugagggaacucugugggauuucuuuuauaaggacgcuaaucc

SEQ ID NO: 4181735 - RNA, 98 nt, Human
ggauaauguccguaagaaucuuuccaguuuugauguaggauucugugaugucaaaaauaagagagauuguauuauugcggauugaaaaauaauuaucu

SEQ ID NO: 4181736 - RNA, 71 nt, Human
ggauaccaguuagccucuuuccccagcccuguucugacagagguggcuggaauagagacugacugguuucc

SEQ ID NO: 4181737 - RNA, 69 nt, Human
ggauaccaugucaagacugaagauccagacuugaggacuuccuccuggauuaaacaguuugauacuucc

SEQ ID NO: 4181738 - RNA, 75 nt, Human
ggauagagacauucauuaagccuuucuguaacuugaaugaaauaucacacagagagauauaauuuguuuugaucu

SEQ ID NO: 4181739 - RNA, 105 nt, Human
ggauagaguggagaugagaacuuaggucuccuggcuuuugucccagugcuuuuaacuccaggacuugucacagugccaggcuucucucaucguccaucaaagucc

SEQ ID NO: 4181740 - RNA, 61 nt, Human
ggauagauauucugcaggucuaauuugggucagcaaauucccauuugcagaaaaucauuuc

SEQ ID NO: 4181741 - RNA, 58 nt, Human
ggauagcuggaaagcccuaccuuggaaauuaguccugggguugaauuguagcugugcc

SEQ ID NO: 4181742 - RNA, 66 nt, Human
ggauaggaaugucuaugcagugagggacaggaggcuuccguguguuucacuagaacguucuuguuu

SEQ ID NO: 4181743 - RNA, 77 nt, Human
ggauaggauaguggguaagaacaugggcuauagaguuaaguagacuuggguucaaauuuuggcuguacugcuuauuc

SEQ ID NO: 4181744 - RNA, 78 nt, Human
ggauagggcccaaguaacuugauuaagguaagaugaaaugagaaauguuugcuccuugaaaauugcuaacaucugucc

SEQ ID NO: 4181745 - RNA, 57 nt, Human
ggauagugggagaaugcuaugugcugagaggguuaaacuagcaaaagccuauuaucc

SEQ ID NO: 4181746 - RNA, 69 nt, Human
ggauaguggguaggagugaagacuuaagauugugcuaagacauuaucagcccguuucugccuucuauuc

SEQ ID NO: 4181747 - RNA, 60 nt, Human
ggauaguuucccugcccucccacuuuuuaaaaauaguuugaugguucaggccagcugucu

SEQ ID NO: 4181748 - RNA, 68 nt, Human
ggauauaaaaagaguucagcaguaucaugauacuggcauacccugcugaaugucucuuugguuuguuu

SEQ ID NO: 4181749 - RNA, 71 nt, Human
ggauauaaccggaagauuguauacucugagaaauguugcuccuucauuucucaaaucuuugcguuguaucu

SEQ ID NO: 4181750 - RNA, 123 nt, Human
ggauauagcacuagccaggacauaacucuacucagcagcauuuaaguuucuucuacuucuaaggaugagguacaaguugcagaaaguuguuuugauuuggucugaauuccuauuguuguauuc

SEQ ID NO: 4181751 - RNA, 61 nt, Human
ggauauauauucguuugggaggccuugucuuucugauugaccuacagauggauauauauuc

SEQ ID NO: 4181752 - RNA, 90 nt, Human
ggauauauggguuuuggaagcagucuauaaaucagcuuugcuuacaguaagcagccauggcuguagaacucuacuuaaaacucuuacucc

SEQ ID NO: 4181753 - RNA, 75 nt, Human
ggauaugaaaccuauuuuuacagcauaaguucuucagugaagauuuaugacuggugaauagaacccaaugugucc

SEQ ID NO: 4181754 - RNA, 115 nt, Human
ggauaugaaggaaguuugaagaagguuuauuuguagaauggauuaagggauugaggucaaucuuuccccuuguauuuucauucauaaaagucaccucagccuucaacaaguauuc

SEQ ID NO: 4181755 - RNA, 79 nt, Human
ggauauguauguucuguuuuguugcuuguuugcuuuuucagaaauagaagcaaguacaauagcaaguaccagcauuucc

SEQ ID NO: 4181756 - RNA, 63 nt, Human
ggauauguugaauuuggggguuugcagagccuucuguccugcagccuuuagaaguucagaucc

SEQ ID NO: 4181757 - RNA, 85 nt, Human
ggauauugaauuauaugguacaaaauuagguagucauauaggucgcugugaugacuuuaagcuaucugauucuaauuuaaaaucc

SEQ ID NO: 4181758 - RNA, 71 nt, Human
ggauauuguacaaugcugagguuugggguaugaauaaucccgucacccaggcacugagcauuguacauucc

SEQ ID NO: 4181759 - RNA, 73 nt, Human
ggauauuuauguuuguuuaguuuaaggaccuaugugcuauugaagguuauauggagcaaauauaauaguguuc

SEQ ID NO: 4181760 - RNA, 97 nt, Human
ggaucaaaggcucucugugguggcugucccauuuuaucuucccguccacauuguuuuagggugggaaggccucugccacugacuugcugaaugaccc

SEQ ID NO: 4181761 - RNA, 92 nt, Human
ggaucacuggucacugcagcuucauaaugagguccuagaggcucuccagagucauuagaggccuuugugaccaugccucuggagacugggcc

SEQ ID NO: 4181762 - RNA, 73 nt, Human
ggaucauggaaucagugaguggcagaggcaggacucaacuugagaaagccuggcucugcagccacuccagacc

SEQ ID NO: 4181763 - RNA, 61 nt, Human
ggaucauggagcugguucuggggaagcuggccaccaccaccacugacaccagcucgguucc

SEQ ID NO: 4181764 - RNA, 66 nt, Human
ggauccuuccagaguuauucucaagcacuuauuuuuaaaaguugauuguuuagauuuggaaggacc

SEQ ID NO: 4181765 - RNA, 78 nt, Human
ggauccuucuccaguuucucuguguccccuguccaccuacacugggccuguacagagaaaacugaucaauaaggauuu

SEQ ID NO: 4181766 - RNA, 64 nt, Human
ggaucuauuuguugugucuaguucaauacuauagaguuggguuggucagaugcugaguggaucu

SEQ ID NO: 4181767 - RNA, 64 nt, Human
ggaucucacagggcugaaaucaagguguagacuggguuguguucucaucuggagccugaggucc

SEQ ID NO: 4181768 - RNA, 81 nt, Human
ggaucucgagccuguguucaagccuguagugugcuaugaucauaccuauaugcauucuagccuggacaacauagugagacc

SEQ ID NO: 4181769 - RNA, 129 nt, Human
ggaucugcauucacagagauaaggagauaagacagauuagucagcaagccagugugcaacuuggcuaaguucaugcacaugaggcugucuuugucuucuggucuccagucucucugcaucuacagauuc

SEQ ID NO: 4181770 - RNA, 92 nt, Human
ggaucugcucaggccccucuguggugggaaccccccggccccccucucccugcugugggucucugucacugaguggccccgugagcaucucu

SEQ ID NO: 4181771 - RNA, 64 nt, Human
ggaucugggcagcccaugcuggccugcaggugcgucacugcaucucaugggcaugccaagcucc

SEQ ID NO: 4181772 - RNA, 130 nt, Human
ggaucuguggagagggaaggacuucauaugcuuccguaaucaucuuuaaaggggagacacccauaauuaggcuagcucuaagggugucuucucuaaggauguggcuauguaaaucucuccccacaauucc

SEQ ID NO: 4181773 - RNA, 62 nt, Human
ggccccuggcagucugccucuucacuguagcuggcugcaaguguagagaagaguugcuggcc

SEQ ID NO: 4181774 - RNA, 112 nt, Human
ggcccggcggcccgggcccagcgaccccggcgaggccccgaagcucucugaaagcuggacagccagucggggccaugcugggccugcccucgcccugcccggacgccgcgcc

SEQ ID NO: 4181775 - RNA, 64 nt, Human
ggcccgggcgaggggagcccagcuagguccacggcggccgccggaggggcuccuguucgccccc

SEQ ID NO: 4181776 - RNA, 105 nt, Human
ggcccuaaaggaguuuaucugacuuggaguggguggaggcgucgagggcaggaagccccuagucccacccgaugccucgccuguccagugugagcuuggaggguc

SEQ ID NO: 4181777 - RNA, 60 nt, Human
ggcccuacaguguggagauuuuagaauuacugccuucucaguucuauagucuucacagcc

SEQ ID NO: 4181778 - RNA, 62 nt, Human
ggcccucagguuggggcugaggaaaggguggagccccaguagcccagccccuaccuguugcc

SEQ ID NO: 4181779 - RNA, 60 nt, Human
ggcccucccugagccaggugggacagauuccugcuguguccaucuggugagugaggagcc

SEQ ID NO: 4181780 - RNA, 65 nt, Human
ggcccucccugggaaaugucaguuucagaggauuuugaagucuaucagaucccagggccugagcc

SEQ ID NO: 4181781 - RNA, 79 nt, Human
ggcccucgugccucaccugcugccccugccccagcguggggaugcaucccaggacacagacagaggcuccaugaggacc

SEQ ID NO: 4181782 - RNA, 56 nt, Human
ggcccucuggggcacacagaggacacuguccaccagccaagucuucccuaagggcc

SEQ ID NO: 4181783 - RNA, 130 nt, Human
ggcccucuguccagccugaucuugcguggaccaugcugagacacccaugcugagacaccugcugcuuuuucuuucucuuuacugugggucccagcugugucugcccagguucagccuggaaaaaauagcc

SEQ ID NO: 4181784 - RNA, 85 nt, Human
ggcccugauccagcagaggagaccacagcugccaaaugcaucgccagcugcaggcccuggcuggguuucuuuaggggaaaaggcc

SEQ ID NO: 4181785 - RNA, 72 nt, Human
ggcccugcagcaggagccaggccuggugcaucccugcauuccacacugcgccugccugaccugugcaaaguc

SEQ ID NO: 4181786 - RNA, 63 nt, Human
ggcccugccuggcaccuucacagacuacugcuucagugugucgagggaggguccagaaggguc

SEQ ID NO: 4181787 - RNA, 68 nt, Human
ggcccugcugggcccugggugcccuagcuccaguggggcucggcggcucccagugccgcagcggggcc

SEQ ID NO: 4181788 - RNA, 123 nt, Human
ggcccuggccacucaccggaagcaguggcgaugguacagccugccgucagccagguagcgcugcaccaagugcacaugcugcuggcaggcugcgcacgugcugcugggggucuggccggugcc

SEQ ID NO: 4181789 - RNA, 62 nt, Human
ggcccuggugaagguguugagugaauggaugugugagcugugggcagcaucuucauuaggcc

SEQ ID NO: 4181790 - RNA, 70 nt, Human
ggcccuucaggagcuggcugcgaaggacacaggagcuuugaaaauguagacgaggccagcccuggcugcc

SEQ ID NO: 4181791 - RNA, 84 nt, Human
ggcccuuccaaacugugucgucugcauagcaacaugcagcccauucgccugucuuuaugcugacgaauauauuucugaaaggcu

SEQ ID NO: 4181792 - RNA, 101 nt, Human
ggauuagagaaugaugcccucaucaacagugucagaugaugcacaugaaagacccgugcaggcccuccccaguuguggaugaggccacucguucugggucc

SEQ ID NO: 4181793 - RNA, 66 nt, Human
ggauuaucaugccugauuauguuacucagcacucuuaagugugaauuuauucucagacaaugaucc

SEQ ID NO: 4181794 - RNA, 117 nt, Human
ggauuaugaagguggaacauuuaccccagacaaagcggaaacuguuuagaaaaggcuucuaucacuguguugucucaugagcauuucuucuuuguuuuuguguccauuuuacacucc

SEQ ID NO: 4181795 - RNA, 57 nt, Human
ggauuauguuuuuagacuugaggauuacauucugucccuuagucuuccacauagucc

SEQ ID NO: 4181796 - RNA, 60 nt, Human
ggauuauuuauuuugcacccaucgccugaccccaagagaugagugcuuagagaguaaucc

SEQ ID NO: 4181797 - RNA, 86 nt, Human
ggauuauuuggauuuguacagugaaagcgagguuauuccaucccugaacuaaccuguaaaaagacuggcagcuuccacuuugaucu

SEQ ID NO: 4181798 - RNA, 76 nt, Human
ggauucaaauccaggcagugugacgcuaggguuuacacuuuguguugaucagugaacuauacugccucuucagucc

SEQ ID NO: 4181799 - RNA, 68 nt, Human
ggauucacgugagggaccugugucugucuaucccacuagcuuaggggcaggauccuuugagccuaucc

SEQ ID NO: 4181800 - RNA, 74 nt, Human
ggauucagaaugguuauucaggguuauguuuuuuaacaaaguuauucauaacaccugauggcaaugaugaauuu

SEQ ID NO: 4181801 - RNA, 57 nt, Human
ggauucagugucuguuaauaguccauuccucauggacugugccuucuuauugggucc

SEQ ID NO: 4181802 - RNA, 63 nt, Human
ggauucccagcugucugcaugaggagggggagucagcugcccuggcaggcagcugggguaucc

SEQ ID NO: 4181803 - RNA, 75 nt, Human
ggauucuauguuuaucuguauuucuguaccuucaguuuuauaucugauagagaauuacagaagaaugucaaaucc

SEQ ID NO: 4181804 - RNA, 57 nt, Human
ggauucugaccugcaaucuaguuaaggaguccuggcugagggggcaguucaggagcc

SEQ ID NO: 4181805 - RNA, 104 nt, Human
ggauucuggccuccugcaggcaucuuucuguccauucagcaggugccacguccccccacauaugcaggguguccggaggaucacugacacgggggccaaugucc

SEQ ID NO: 4181806 - RNA, 64 nt, Human
ggauucugguggucuuggcucuccacagggagaccaggaaagagcuuagucuacucagacaucc

SEQ ID NO: 4181807 - RNA, 59 nt, Human
ggauucuuagggagcagacaucuggguuucccugcuagcugugacucccugggcaaucc

SEQ ID NO: 4181808 - RNA, 80 nt, Human
ggauugacuggagaacuagacccauuuuugugcacagaaauaucugaguaucuagauaguuuagccaucuuucguuuucc

SEQ ID NO: 4181809 - RNA, 71 nt, Human
ggauugaugaaguaucucuucuuuugcaaauauguuauuaccuuugcaaggcagcaggugcaguaucaacc

SEQ ID NO: 4181810 - RNA, 83 nt, Human
ggauugccugagccugggaggcagagguuguagugagccgagauugugccacugcacuucagccugggugacagagcaaggcc

SEQ ID NO: 4181811 - RNA, 72 nt, Human
ggauugcugaaucauaugguaauucuuuuuuaauuuuuugaagagcugccauauguuuuuaaauugugaucu

SEQ ID NO: 4181812 - RNA, 83 nt, Human
ggauugcuugagcacaggagguuggggcugcagugagcugugaucaugccacugcucuccagccuggaugacagagcaagacc

SEQ ID NO: 4181813 - RNA, 70 nt, Human
ggauuggcugugagucaagcugguugaugaagcuucauuuugcuaaaucuccagaauggcuuguuaaucc

SEQ ID NO: 4181814 - RNA, 88 nt, Human
ggauugggauguagacaucuuuagggaccauuauucugccuagcagaguugucuucugaucccaaaagauucacacaugucccaagcc

SEQ ID NO: 4181815 - RNA, 76 nt, Human
ggauugguaucuuuggagaaaguaaugucuaaauucuuugcuucugacugcuuuaccuucccagaaaccacuuucc

SEQ ID NO: 4181816 - RNA, 85 nt, Human
ggauuguucagaggaauuugcuuuucauguuagcagacuaaucacucucuguccuccaucaaauaaagaaauuccuuggauuucc

SEQ ID NO: 4181817 - RNA, 84 nt, Human
ggauuguugugagguugaaaugagauaauucauguggaaugcucagaagagugucugcacauuaucuuauauuauagcaaugcc

SEQ ID NO: 4181818 - RNA, 73 nt, Human
ggauuguuucagcaugaaacaauugagcccauugccuuugcccugggucuuguguuuccuguggaagccaucu

SEQ ID NO: 4181819 - RNA, 59 nt, Human
ggauuuagagcaggaaugcauggugaaaauacucccacaucagcguucuucucuaaacu

SEQ ID NO: 4181820 - RNA, 78 nt, Human
ggauuuagcuugcagaauacuuauucuguauuuugcauuauaaaaauacaauuguaauauuccugagggcugauaucc

SEQ ID NO: 4181821 - RNA, 98 nt, Human
ggauuuauuaaaggguuugagaaaauauuuaauaggcuaagauguuacccugacaagcagagauuaaauguuuuuaauauugaucuuuuauaaagucc

SEQ ID NO: 4181822 - RNA, 59 nt, Human
ggauuugcagagauggcagagccacgucagggcugggcucgagcagcuguguaggaucc

SEQ ID NO: 4181823 - RNA, 59 nt, Human
ggauuugcugcuuuggaacuccacagggugaacugccugggaagcccauagcagcuucc

SEQ ID NO: 4181824 - RNA, 82 nt, Human
ggauuuggggcccagaaucuguuauagcuguuuguauucuccuaggcuggaggccagacagcuagaaacagggccgagaucc

SEQ ID NO: 4181825 - RNA, 76 nt, Human
ggauuugggggcagugaaacuacucucuaugauacaauaauuauagacacauguuauuauacuuucaaccaaaucc

SEQ ID NO: 4181826 - RNA, 73 nt, Human
ggauuuggguggaaggcaggcugggcgacccuugaggagaguugcuguaaguaucuuucuacccccaaaaucc

SEQ ID NO: 4181827 - RNA, 61 nt, Human
ggauuuuaggugauggaguuuagauuuuacuccaggaaaucuaacuucauagcugauuucc

SEQ ID NO: 4181828 - RNA, 78 nt, Human
ggauuuucugagccuucaaauuuuuuuaaaggacuucucagucuggaaagaugaaauuugaauagggauagaaaguuu

SEQ ID NO: 4181829 - RNA, 55 nt, Human
ggcaaaaaguucccaucaguguaucuggaugaaggcuauacuagagcucuuugcc

SEQ ID NO: 4181830 - RNA, 86 nt, Human
ggcaaaaauuuaccuucugcuguaaccuucagagguauuuuauucaauacuuugaugaagcuuauggugaacugacaugauuugcc

SEQ ID NO: 4181831 - RNA, 98 nt, Human
ggcaaaagcugucaaaugcaauucaggaagacaaguguaaugaauauguagcauaauauggguagauuucuuaccggaugcauuuugaauauauugcu

SEQ ID NO: 4181832 - RNA, 59 nt, Human
ggcaaacacaccucggugagaaacugguccuucacagcaugggcacccaggugugugcu

SEQ ID NO: 4181833 - RNA, 83 nt, Human
ggcaaacacuccguggaggcaugcaggcuaggaucaaggcagcaggaggggagccuguaugguugccaugaggggugaguucc

SEQ ID NO: 4181834 - RNA, 82 nt, Human
ggcaaacagcauuggaacucguguuacuuguaugacuucuugagugucguagugucaagcuagaugauuuucaacguuugcc

SEQ ID NO: 4181835 - RNA, 91 nt, Human
ggcaaaccucuuuagugcuuuagaccuuuugggguucuguuaacauaagucuaggccaagaaguaagucuaaacaucaccugaggucugcc

SEQ ID NO: 4181836 - RNA, 89 nt, Human
ggcaaacgugaucuuucuuuccuuugcccaauacaugucaggcucuguguggcaagggcgagggagaggcaugacuaugugucucugcc

SEQ ID NO: 4181837 - RNA, 87 nt, Human
ggcaaacuggagcauguaggcugauguugauacuggagaaagcauuaccaggccuccagguuacuuagccuagcucuccaauuuguu

SEQ ID NO: 4181838 - RNA, 127 nt, Human
ggcaaagacucaaaucuaauaucacugaggcuucugccaggcagagagcaguggccgucugcucaccgcaguggccagugugucuuugugaagagcaauggaggccaggauugaggugaguauuguc

SEQ ID NO: 4181839 - RNA, 60 nt, Human
ggcaaagauaugucuccaaagagauuugugcaucaaauuucuagguucacauguguuucu

SEQ ID NO: 4181840 - RNA, 73 nt, Human
ggcaaaggacuacaaagucagaauaacagguguaauuaacacuucugugugcuggcuuuuugcuccacacgcc

SEQ ID NO: 4181841 - RNA, 127 nt, Human
ggcaaaugugaccugaguucauuuuggauccuuugagaaccuagcacaaugcuguauccguaauagguacucugcugauagguccucagauaugugauuuaaaugcaugaauauauuggacacuguc

SEQ ID NO: 4181842 - RNA, 60 nt, Human
ggcaaauguuaucacuuguaaaagcaauuaagaaaauuguuaggcuguggugacaguguc

SEQ ID NO: 4181843 - RNA, 69 nt, Human
ggcaaauucaaugaucacuggcucaaaacacccccaaguggcauccugagcaggaugguuuaauuuucu

SEQ ID NO: 4181844 - RNA, 77 nt, Human
ggcaacaaggacgucacuuccacggugcaaacaugcuugccaagcugaaguguggagugacaguuuuuggcugagcc

SEQ ID NO: 4181845 - RNA, 130 nt, Human
ggcaacaugacaacgugccuaccuucaccagagagacugcugucaaaaaucacuccauccaugcaaggaggaacgaugcagacacagaaauucucugcugugagggccagcacuguaguauuuacugacc

SEQ ID NO: 4181846 - RNA, 85 nt, Human
ggguccccgaagcccaggcuuccuuggcuuuuagguaaccucaccucugaaucagggcagggaagccugaggugcucggggguuu

SEQ ID NO: 4181847 - RNA, 81 nt, Human
gggucccugccaccaugccccagcagagagugucugggaaaccccugggcugcccugguuggugccacaugguggccaccu

SEQ ID NO: 4181848 - RNA, 61 nt, Human
ggguccugugcccuggguggcgcugaggcucacgcuguacacggggcacggggacaguucc

SEQ ID NO: 4181849 - RNA, 76 nt, Human
ggguccugugggagcauugcuuuguguaucuauuauuccuucauuuuacagagcucucuuugcuacuacaguguuu

SEQ ID NO: 4181850 - RNA, 67 nt, Human
ggguccuucccuuccuuagccucgaagcgggaauaaccacuagacagaaggcugugagggaggacuc

SEQ ID NO: 4181851 - RNA, 67 nt, Human
ggguccuucccuuccuuagccuugaagcgggaauaaccacuagacagaaggcugugagggaggacuc

SEQ ID NO: 4181852 - RNA, 88 nt, Human
gggucgcgccgcgcaggcgcaacagcguggcgcccagcugcguggcgaggcagcggcccagcagcgcuuugcccgcgccccgcggccc

SEQ ID NO: 4181853 - RNA, 118 nt, Human
gggucgucuaguccugguguuccaguucucuaccuucuccagugugguuggcaggugggcguccuggcugauggggguguacacuggacaggaguaggaagaggaaggggcuauuccc

SEQ ID NO: 4181854 - RNA, 58 nt, Human
gggucuaaggcagacagaauauuuggaaucauuuaauugcuuucugcauuagucaccc

SEQ ID NO: 4181855 - RNA, 65 nt, Human
gggucuaugucuaccaagcucacuguagagucacuuuuaccuuuugcuaugguggaaugggaucu

SEQ ID NO: 4181856 - RNA, 55 nt, Human
gggucucaguuuccuccucuguaaaauggaggcaaaugaggauggaaggagaugc

SEQ ID NO: 4181857 - RNA, 110 nt, Human
gggucucauaagauaacccauguguguuaugugggccagggcaagagccagugaaaucugaguccuuccuuuuuacauaaucacauuuguaccugcagcucaugaagccc

SEQ ID NO: 4181858 - RNA, 90 nt, Human
gggucucccuuuugguaucuaauuuccuguauccugauacaauaagagucuuuccuuuuggaguuaggagacaggaugaugucaucaccc

SEQ ID NO: 4181859 - RNA, 77 nt, Human
gggucucuucuguguuuauggcaugcucccucucaaccuucccauccaagugugguugugucuaaauaaggagaccu

SEQ ID NO: 4181860 - RNA, 108 nt, Human
gggucugugcaaguuauggagauuuugccugauucuaagagcucauccaaguacucaauuuaagggugagagcaggguagggcaaagugucauuacucaaacaggccc

SEQ ID NO: 4181861 - RNA, 81 nt, Human
gggucuuaggguagguagguaaacaggacuaauacacuauauuguguaucuuuaggcaaguuacuuaaccucucugggccc

SEQ ID NO: 4181862 - RNA, 101 nt, Human
gggucuucgccgggacuugggacaguguggcuggucuccgagcgucgcccugcggcggagcgcagaauugcagaucaggcacccgagccuugggaggaccc

SEQ ID NO: 4181863 - RNA, 55 nt, Human
gggucuucugauauagguccagcucagcuugcuucuagaccggcuucagaaaccu

SEQ ID NO: 4181864 - RNA, 62 nt, Human
gggucuugcaggcaccucacaauucaguaagccuaguugugcugugaugcaggauagcaccu

SEQ ID NO: 4181865 - RNA, 88 nt, Human
gggucuugcucuguugccuaggcuggagugcaguggcgcaaucucagcucacugcaaccuccaccuccuggguucaagcgauucuccc

SEQ ID NO: 4181866 - RNA, 55 nt, Human
gggugaacacacucuguguguguaugugugaauguauaugcauguguuuucacuu

SEQ ID NO: 4181867 - RNA, 59 nt, Human
gggugaaccagagcuguuuucuccucccagcguagagcugacagcuuggggugucaccu

SEQ ID NO: 4181868 - RNA, 83 nt, Human
gggugaaggaaaucguggcggugccuggcccuggguuaggcgcucucuuucccggcgaggccaccgugguuuccgagcugccc

SEQ ID NO: 4181869 - RNA, 62 nt, Human
gggugaaggaucccucuuggccuggaggcgacuggccugaggcaagaacggguuguucaccc

SEQ ID NO: 4181870 - RNA, 55 nt, Human
gggugaauggauucagaaaauguguuauauagacacaauagaguacuauucagcc

SEQ ID NO: 4181871 - RNA, 72 nt, Human
gggugacagagugagacccugucucaaaauauaaacaaauaggcggggggcaguggcucacgccuguaaucc

SEQ ID NO: 4181872 - RNA, 120 nt, Human
gggugacucugucuugcuauuuauucacuucugcauucgacaaguacuguggacaccugcugugugccaggcacugcucgaggugcuagggggagaucaggaagcaagaaaaaguuuccc

SEQ ID NO: 4181873 - RNA, 73 nt, Human
gggugagaacuguagcacagagcuuugacacuacgaugcuaauggagugucugaaggauuuggcuucuuauuu

SEQ ID NO: 4181874 - RNA, 59 nt, Human
gggugagaagaccuccuggaagguguuuuccauggcauuuaguccuugacuucucuccc

SEQ ID NO: 4181875 - RNA, 68 nt, Human
gggugagacagaaagagcaaaagagcaaagagaaauugaauauauuuugauugcuuuuucuuucaccu

SEQ ID NO: 4181876 - RNA, 55 nt, Human
gggugagagacuugggccaggugccuuacauccgggagccucaguuuccucaccu

SEQ ID NO: 4181877 - RNA, 55 nt, Human
gggugagggcagagugggggcagauagaacucaaaaaccagcucugcaucuuccu

SEQ ID NO: 4181878 - RNA, 75 nt, Human
gggugagugaggucugagcuugagcccaugcucugguugccaaguagggcacauggcacagagcuguguugaccu

SEQ ID NO: 4181879 - RNA, 88 nt, Human
gggugauaagagaugcugacguuuacauuucucuuucuucuucaguuucacaagauaagugaucaacucuguauucucauaucacacu

SEQ ID NO: 4181880 - RNA, 63 nt, Human
gggugauuaaaaacuccggaaacuuacaacugucugaguguaagccuggaauuuuugacuucc

SEQ ID NO: 4181881 - RNA, 59 nt, Human
gggugauucacccaguuucauuguuuaaaaagaugaaauaacuuuugggugaguuauuu

SEQ ID NO: 4181882 - RNA, 60 nt, Human
gggugauucaguugcuuguuaaguuugagaugcacugacuaugcagcuuuugauucaccc

SEQ ID NO: 4181883 - RNA, 71 nt, Human
gggugauuggaauuaauauuuguauacagucaucacuguguaguuauaacagagauaaauuuuaaaagccu

SEQ ID NO: 4181884 - RNA, 64 nt, Human
gggugcagcagggcauccgugcuccaugcugcgcguccagcauggcuggacugcccuugcaccc

SEQ ID NO: 4181885 - RNA, 93 nt, Human
gggugcauucaauauccacucugcacuugacaugcucucagagucuagaccauggcuagcuuugagaauuucaaguugcauugaaaugugccc

SEQ ID NO: 4181886 - RNA, 58 nt, Human
gggugcccgggcgugaugauaucuguguugcgacagccaggugucaugcgugugaccc

SEQ ID NO: 4181887 - RNA, 74 nt, Human
gggugccugccaggacauugcuugaaguagucugccacaaacaagacuuuucagugaagucucagguuucaccc

SEQ ID NO: 4181888 - RNA, 129 nt, Human
gggugccuggcuccacagugcucacaggccuauucuggaccaggagagcaggcgugcagcugcagcauugagcaugggggugccuacaccugccugucugcaggguugucauuagcauggaguccaccu

SEQ ID NO: 4181889 - RNA, 76 nt, Human
gggugcuaacuggggcucccacugcagaacaugaggaucucaguuagugagcucuugggaccucaguuccccaccc

SEQ ID NO: 4181890 - RNA, 81 nt, Human
gggugcugggcugcaagugccaccaucacgucugcccacagggcacaccuugucugagcacaggcagguucugagcugccc

SEQ ID NO: 4181891 - RNA, 67 nt, Human
ggguggaagccagagaggucauucagggcccggccggcuucccgggccagccucccuggcuacacuu

SEQ ID NO: 4181892 - RNA, 61 nt, Human
ggguggacguuaggauuguguagagucacuguugaaucauuuuaucacuaaugucacauuc

SEQ ID NO: 4181893 - RNA, 62 nt, Human
ggguggagaguggcucuaugugggaaagcagaagauauccaccuagcauucaccuccuaccu

SEQ ID NO: 4181894 - RNA, 84 nt, Human
ggguggaggagaugacguguggaaguccuuggagugagcugccacguuagcaccaaaucaccagcacgaucauuccuuccauuu

SEQ ID NO: 4181895 - RNA, 68 nt, Human
ggguggaggcugggggcugccuuccucccuguaaaggggcuggaagucugacagcuucccaaaggccc

SEQ ID NO: 4181896 - RNA, 108 nt, Human
ggguggaggggaaguagaccagaacaggaggccccagaaaguucaaggcacaggaucugucucuguggaaggcuucccugggguccucugguuucauugccacugccc

SEQ ID NO: 4181897 - RNA, 69 nt, Human
ggguggagguggguuuugagauaauugcaaucuuuaucguuugaagccucaagacaccugccuuucccc

SEQ ID NO: 4181898 - RNA, 63 nt, Human
ggguggaugugcaggauccaggcuccuaggcccuagcuuggguccugucuccuuguucugccu

SEQ ID NO: 4181899 - RNA, 59 nt, Human
ggguggauuggaaguuggcugagucuuaaucaaacuacagcccagcugggaucacacuc

SEQ ID NO: 4181900 - RNA, 96 nt, Human
ggguggcaggugguauuggagagugggaggagcacuagcuuuguggccaggccaggcagacaugggaucuauucacagcuuuaccacuucccagcc

SEQ ID NO: 4181901 - RNA, 70 nt, Human
ggguggcauggggagcagcuagaacaaugcagauuuauccacaaucccuuucugcuguucaccaccaccc

SEQ ID NO: 4181902 - RNA, 68 nt, Human
ggguggccgagagggccccagcugaucugagcugcugagucucgggcaggagggcccucucccuuccc

SEQ ID NO: 4181903 - RNA, 75 nt, Human
ggguggcuaagcccucagguaaacaaagacacucucaucaggcgggacucuucaagggccuagaggugaccgccc

SEQ ID NO: 4181904 - RNA, 85 nt, Human
ggguggcucucgggguucuggaacccgguuuuaugguggcacaccaugaggaagggcacacggacccugcuuaguaagcacgccc

SEQ ID NO: 4181905 - RNA, 55 nt, Human
ggguggcugcacuaggcagccagugcacgcaagcagcugcucgcugcagucacuc

SEQ ID NO: 4181906 - RNA, 109 nt, Human
ggguggcuguccccaugggucgccggccuccagcaaacagucacccucccagccucgcgaggagcagggaaggagccugcuugcuagagcccuggucccggcagccccc

SEQ ID NO: 4181907 - RNA, 124 nt, Human
ggguggcuuaaagcaacagagauuuauuugcucacaguuuugggaaccagaaguucaaaaucaagguuuuggcaggguugguuccuucuggaggcucugagggaaaaucuguuccaugccucuc

SEQ ID NO: 4181908 - RNA, 65 nt, Human
gggugggaacaggaugccaggaggugcaaaaauuucugucagucuggcacucuguucccccuccc

SEQ ID NO: 4181909 - RNA, 60 nt, Human
gggugggaaggcuaagggauuggcagcuuguaaggccugggccccuuagccuuuccucuc

SEQ ID NO: 4181910 - RNA, 64 nt, Human
gggugggagaaaugaguaucuauuuucuauucugguucaccaagauccuuaauuucuacuaccc

SEQ ID NO: 4181911 - RNA, 98 nt, Human
gggugggauuugaucuccaccuucugcucccuggccagggcccccugcuucccagggccuugguuggccagcaggucccggggcaucaaucaccgucc

SEQ ID NO: 4181912 - RNA, 77 nt, Human
ggguggggaagcacuuugaacuuaaacugucuuuguguuugcgccuucaguugagcuuuaauugcaguucuccaccu

SEQ ID NO: 4181913 - RNA, 55 nt, Human
ggguggggcaguguggcccguccucuggggcccuggccugagcaccuguccaccu

SEQ ID NO: 4181914 - RNA, 58 nt, Human
gggcucucaaugaagcaugaaucccccuguccuggggugaggaugcagaugagggccu

SEQ ID NO: 4181915 - RNA, 66 nt, Human
gggcucucccacugcaagcccaggcugcugucccagcugcuuauaagauuugggagauaccugccc

SEQ ID NO: 4181916 - RNA, 79 nt, Human
gggcucuccugauuccuggcccagucugccuucccugauguguccacuagcagggaagaagcugguaguaggugagccc

SEQ ID NO: 4181917 - RNA, 70 nt, Human
gggcucuggccuuuaaaaugaccuuauaauuuugagaugauaagucauucuuacaggcuucuaagguccc

SEQ ID NO: 4181918 - RNA, 57 nt, Human
gggcucuguaguuggucauggggccacugggccucagcuugauuucugcagagaccc

SEQ ID NO: 4181919 - RNA, 121 nt, Human
gggcucugucccgagcaacuuuucccccaauaaugcaugcagagcuuccaguggccugggcagcucuccgguggcagccacuggggcccugucacacggggagugcuuucagcaugagccc

SEQ ID NO: 4181920 - RNA, 71 nt, Human
ggguggcagcuguugccaagguguugcugauacaguucugcguauaauuuauuggaaacaggugcuggcuc

SEQ ID NO: 4181921 - RNA, 59 nt, Human
ggguggcaggcccugagcaucccugggggccuggaggcuggggccagggcuugccuucu

SEQ ID NO: 4181922 - RNA, 64 nt, Human
ggguggccggcuacuccaagguaucaauuuaaaucuccaacuaccuugaaggcagaggacaccu

SEQ ID NO: 4181923 - RNA, 98 nt, Human
ggguggcguggacugggcuggaggcugguaacaggcgaugaggacagguccugggcgggcucugagcugccuuuugagcuuccagcucagugcucccc

SEQ ID NO: 4181924 - RNA, 116 nt, Human
ggguggcucagcuucuuggggcuauguagcugagcucgucagcuugggguuccuucuuugcugcccuugcugcgugcuagcacagacuuaccccagcaagacagaacuguucacuc

SEQ ID NO: 4181925 - RNA, 77 nt, Human
ggguggcuggaccagcuucugcaugugauggauacagacucagaccaaggccccaggcagagcuggaaccaggaccc

SEQ ID NO: 4181926 - RNA, 62 nt, Human
ggguggcugggauuaguagcccauguggggaaccuguuggaaugcuuguuccuagcuggccc

SEQ ID NO: 4181927 - RNA, 60 nt, Human
ggguggcugugagcauuaugugagguggcucauuugacaguugcguuuacugccgaaccc

SEQ ID NO: 4181928 - RNA, 56 nt, Human
ggguggcuucuugucauuguccagccuuuagauagaaacacagugagaagucaucu

SEQ ID NO: 4181929 - RNA, 77 nt, Human
gggugggaggcagggagacuaucagccagggucacucccaccauccuggucaccccucucucugcagcccagucccc

SEQ ID NO: 4181930 - RNA, 67 nt, Human
gggugggaugggaggaaggaggcccuugaagacauuuugcaagacuaaaccuuccccucagcuaucc

SEQ ID NO: 4181931 - RNA, 80 nt, Human
gggugggcaccugaggaguaaacucucuaugggaauucuggaagccaguggagaguguagacuucagaguuaucucaccc

SEQ ID NO: 4181932 - RNA, 75 nt, Human
gggugggcauucguugugccgcuuuugagcuuugugggccagagcuggguguagggcuggacaaugagccuccuc

SEQ ID NO: 4181933 - RNA, 88 nt, Human
gggugggcugauauaguuagggaaguguauaggggucaugcaggggcuaucaccucuccuacucccugggaucagcucucagucaccc

SEQ ID NO: 4181934 - RNA, 68 nt, Human
ggguggggagaagagaacagaagagacucguuucugcagaugaggcagcccuucccuucuccccaucu

SEQ ID NO: 4181935 - RNA, 59 nt, Human
ggguggggcuaucucagcuuuugugugggaagccacugcagcuggugguggcucugccu

SEQ ID NO: 4181936 - RNA, 101 nt, Human
ggguggggcucaggcacgaccgucagugggguucagggcuuggucugggaagggcgaggcaggagcaagcccuacaagacaggaguggcuuagcugcacuc

SEQ ID NO: 4181937 - RNA, 66 nt, Human
ggguggggcugauuguguccugcugguagucauggcuuaugaccaguuuauagcgaucugucaccc

SEQ ID NO: 4181938 - RNA, 96 nt, Human
ggguggggcuggggugaggggucagcuccuagcaccccccaaacccacaggguugggcuuggggucaggggucagcucccagcauuccccccaccu

SEQ ID NO: 4181939 - RNA, 65 nt, Human
gggugggggagaugcuuagguccggggaaucucugagauucucggcuuccccucuccccucaccc

SEQ ID NO: 4181940 - RNA, 88 nt, Human
ggguggggguaggucuggaugcugagguucccagggaggugagugggguggcuuucuggcccucagcacugagaccuuguccccaccc

SEQ ID NO: 4181941 - RNA, 97 nt, Human
ggguggggucgcugagucagcaggcaggcugcggucggcucuggucuccgcuggggagccgaggccucucccgcagccgccgcuguggccccagccc

SEQ ID NO: 4181942 - RNA, 62 nt, Human
ggguggggugaggcagccacauuuaacuccagcuaagaaguuaguggaaaauucccccgccc

SEQ ID NO: 4181943 - RNA, 58 nt, Human
gggugggucugggguccucuuggccgcgacgguggcucgcgggcccuggcguccgccc

SEQ ID NO: 4181944 - RNA, 82 nt, Human
gggugggugggagagcuaccugugcauuauaggauguuuugcaacaucccuggcugcuaccagguagcuccccuccccacuc

SEQ ID NO: 4181945 - RNA, 67 nt, Human
gggugggugucacagccuccgucuugcugaaaauaggagcauggucaguggagcugggccccacucc

SEQ ID NO: 4181946 - RNA, 117 nt, Human
gggugguagauauggauucuacacuacagggccgggauggaagcaaagggcuccucuccuuaccaccucccacucccaggcuccaguccagagucuguaaggauuuucugcccaccc

SEQ ID NO: 4181947 - RNA, 69 nt, Human
gggugguggaugucuccacugugggcuucucaaagucugcaggagguaguggggagguccaggccaccc

SEQ ID NO: 4181948 - RNA, 67 nt, Human
gggugguggcugcucaagggaggaggcugcaauuuaaggcacccucugccuugagcagugcccaccc

SEQ ID NO: 4181949 - RNA, 70 nt, Human
gggugguggggaaccccaccauauuuggaucaaacugacacucacauaugcugggauuuccgaacuaccu

SEQ ID NO: 4181950 - RNA, 78 nt, Human
gggugguuccaucauaggugcucaauuaaagucugcugaauggacuggaauaaagugcuuugaucagaggaaucuucc

SEQ ID NO: 4181951 - RNA, 62 nt, Human
gggugguucuggauucuggcagaucugggccccagcacugccacauaaucucagcaugaccu

SEQ ID NO: 4181952 - RNA, 57 nt, Human
ggguguaguguaauaauaacugaacauauuuaucagucacuuuugccugcuacaucc

SEQ ID NO: 4181953 - RNA, 114 nt, Human
gggugucaggcagagggagggaggugucaaccacagagcagagccaggcaagagcacugucagccccacccucagcucugccuguggaggcacacccuacagcugcuuaaccuc

SEQ ID NO: 4181954 - RNA, 72 nt, Human
gggugugacucacacaggccugggcuucaugaugucucuugggagcaggaaggucugugugagucugugucu

SEQ ID NO: 4181955 - RNA, 76 nt, Human
gggugugagcucagccuugggagaccugucagcuucaaccccucaacaucucccuccugugcucagcuacaugccc

SEQ ID NO: 4181956 - RNA, 91 nt, Human
gggugugauugaggcuuauauaauuuguaaaagcaccuaguauguggccuagcaugccagaggugcucaaguaauauccuuaaccucaccc

SEQ ID NO: 4181957 - RNA, 121 nt, Human
ggguguggggugggaguguguuuuuugcuggggaggggauugcaggcuaguuuagggcucacaaagaggccagagagggagcaguagucucucccaucauugguuccucccuccccacccu

SEQ ID NO: 4181958 - RNA, 56 nt, Human
gggugugguggucauggcccagugagaggaugccaggcuguggccgugccagacuc

SEQ ID NO: 4181959 - RNA, 74 nt, Human
ggguguguacuucuuuauuauccauuauaagucagacaaugauuuucagaugcauuguaacgaugugcacauuu

SEQ ID NO: 4181960 - RNA, 79 nt, Human
ggguguguaugugugugugcauauauacauauauaauuuguguauauacauacacacaugaaaauagugggaaacaccc

SEQ ID NO: 4181961 - RNA, 67 nt, Human
gggugugucucuguguccagauuuuuccuuuucuuaggacacauucauacuggauuagggcucaccc

SEQ ID NO: 4181962 - RNA, 96 nt, Human
gggugugugugggggugcugucugccugagaaguggggugccugacaugcaguagauggccucuagauucuaggccagccaucaccuguuugaucc

SEQ ID NO: 4181963 - RNA, 90 nt, Human
ggguguuccugggcggggagguccagccaagcggcaagggucugcgcugugccuuuaguuuuuagguugggccccuccuggggagcaccc

SEQ ID NO: 4181964 - RNA, 66 nt, Human
ggguguucuggucccaggauuucaggugaauaaacugagauucagggaugcagagcaaauuucccc

SEQ ID NO: 4181965 - RNA, 78 nt, Human
ggguguugcuucacuacuucuaggcuccugcagaguccugccucauaggccgcacuggugagugaggccagcaaaccc

SEQ ID NO: 4181966 - RNA, 70 nt, Human
ggguuaaaacaggaagaucagcuaaacaucucuuuuccauggcuggaaaauccuguccuguccugacacc

SEQ ID NO: 4181967 - RNA, 70 nt, Human
ggguuaaauaaacaugagcaucucuucaagcuuugaaauucugugguuuggggauguguauguauuaucc

SEQ ID NO: 4181968 - RNA, 86 nt, Human
ggguuaagccaguccucccucaccucagucugggccucaucaugccccucgcacaugacccagacccagagggaggcagguugccc

SEQ ID NO: 4181969 - RNA, 59 nt, Human
ggguuaaucccauccgugucucaaggccucagcagucuaggggugcagaagggaucccc

SEQ ID NO: 4181970 - RNA, 55 nt, Human
ggguuacaauuuuuaucuguguacuaaaaaguauacaggaaagaaauuugaacuc

SEQ ID NO: 4181971 - RNA, 98 nt, Human
ggguuacugguagcaccucucugguuucagcgaaggggcuucgguuuaugaauuuccuuggaguuaagacccugggaaugagugcaaucuuaaagucc

SEQ ID NO: 4181972 - RNA, 72 nt, Human
ggggaauaauuuaaggaguggcaggccacagugcuggcuguuucuguuagguacuuccugcccacucacccc

SEQ ID NO: 4181973 - RNA, 84 nt, Human
ggggaaugacuuagaucacugucuuccuuuggcuccucaccauguuguguggaggaaacgaaaagcagcucaaguucacuccuc

SEQ ID NO: 4181974 - RNA, 90 nt, Human
ggggaauuuuuaaggugaccaaauaucagauagauuuaucuagaguuuuauauauagguauuucuguguauuugugaccuguaugucucc

SEQ ID NO: 4181975 - RNA, 85 nt, Human
ggggacacagagagguuugcccagagcugccuguuacaggcaauuacugcuguaaauggcccccuuugcgucgacccucuucccc

SEQ ID NO: 4181976 - RNA, 64 nt, Human
ggggacaggaugagaggcccagggaagacuaggcccucuucuuucuccuucucuccucugcccc

SEQ ID NO: 4181977 - RNA, 126 nt, Human
ggggacaguguccuccuuuuacuagauuauggacacagugcuuugugcucucacugcaugagguuaucucugacagugaaugacaagguucuuuggcuuaauucacuaguggaggacagagucccu

SEQ ID NO: 4181978 - RNA, 58 nt, Human
ggggaccaggacuggugguaucucccggaugggggaugagagcuagugcuggcuuccc

SEQ ID NO: 4181979 - RNA, 67 nt, Human
ggggaccuucccuugugccugccuuugcuagcucuuugcuaugccuggggugcucaggccaggccuc

SEQ ID NO: 4181980 - RNA, 60 nt, Human
ggggaccuuuccauuucugagauucuguauauuauuuucaacugcucugggaaggucccc

SEQ ID NO: 4181981 - RNA, 124 nt, Human
ggggacgcugggggcucaggauccagcaaggggcggcaggaguaaaggaggaaggaaugacaggugcaaauaccuucccaccaaagcccuuguugcccucuggcuccuccccagagcugucccc

SEQ ID NO: 4181982 - RNA, 59 nt, Human
ggggacggggccgugggcggggcaucacaguagguguggccugucucacguuccgcccc

SEQ ID NO: 4181983 - RNA, 96 nt, Human
ggggacucgcgucaggacugcgauuccuuucgccugccgagcuguagcggcagugucugcgggcagaggagcggcggccguggcagcagcaucccc

SEQ ID NO: 4181984 - RNA, 76 nt, Human
ggggacugaccugugcaguguaguauguuuagcagcaucccugucuccaacucacuguauacuaauagcaauuccc

SEQ ID NO: 4181985 - RNA, 90 nt, Human
ggggacuggguagguggaaacagcugggagguagaggcggggcccugaggccuguccuguccauaucccacuguguagccccaguccacc

SEQ ID NO: 4181986 - RNA, 75 nt, Human
ggggacugggucccucuagccucagugugagcucauucaaagcacgucugagaguuaagagauggggcugugccc

SEQ ID NO: 4181987 - RNA, 97 nt, Human
ggggacuuauuauaaaugcaaauucuagggcccuauuccagaccuacuguaucagcaacucggguagggccuugcaaucuguguuuugacaagcccc

SEQ ID NO: 4181988 - RNA, 59 nt, Human
ggggagaaucaugugcauguuucaggucuuguucaaaagcagcuuagggaauucucccu

SEQ ID NO: 4181989 - RNA, 105 nt, Human
ggggagaccauugaaguagaagccucaaagcagacuuuucccuuuacuguguguacuccaggacgaagaaggaagaucaugcuugauacuuagauugguuuuccc

SEQ ID NO: 4181990 - RNA, 78 nt, Human
ggggagaguggaggccgaggggcccagguuccugguaggggcuuggcgggagauggggccguucagaguuauuccccu

SEQ ID NO: 4181991 - RNA, 94 nt, Human
ggggagaguuucaucucugcuuccuggagggagagagcugagccccagugacagcuguugugauuuccaggaggcacagggcuggggacucccc

SEQ ID NO: 4181992 - RNA, 82 nt, Human
ggguugugggaggaaugaaugggccuagcuagugacuugaaauggcaaccagucucugccugcuuccuagccuuccaagccc

SEQ ID NO: 4181993 - RNA, 74 nt, Human
ggguuguucaaagacuuuugacuugaguucugcagcaaucaagcacucaaggcucacaguucaagaugaacccc

SEQ ID NO: 4181994 - RNA, 61 nt, Human
ggguuuaagcguguuagccacagcucaugcuaaugagccagauaagggcucacgcuaaccc

SEQ ID NO: 4181995 - RNA, 85 nt, Human
ggguuuccaagaauacuuaaauaauugcugcuauuccggcccucagauuggcgguuuguuugaguaauagcucuggcaugaaccc

SEQ ID NO: 4181996 - RNA, 59 nt, Human
ggguuuccuggguucaacuguggggaccccacuccauacaagaucacuccagaaaaucc

SEQ ID NO: 4181997 - RNA, 98 nt, Human
ggguuugauccuuggacuucgaguaacccaggcugggaauuccaaggcuucaaauggggccaggaaaaaccggcccugcuagccgacuccacaagccc

SEQ ID NO: 4181998 - RNA, 67 nt, Human
ggguuuuacaagguuaaucagcagguucugggaaagcuugcaccugcucagacuugaucuggaacuc

SEQ ID NO: 4181999 - RNA, 82 nt, Human
ggguuuuauuaucuuguaaauuagaauaauuauuugucaugggcaaugaaaauuucuaauugcaaguuuuaguauuaggccc

SEQ ID NO: 4182000 - RNA, 60 nt, Human
ggguuuucagcugacagcagggccuaguggcaacaguccugagauaggaguugaaggccc

SEQ ID NO: 4182001 - RNA, 83 nt, Human
ggguuuugucauguuuuauuuuauuuugagacagggucuugcucugucauccaggcuggaauauaguggcaugaucauagcuc

SEQ ID NO: 4182002 - RNA, 56 nt, Human
gguaaaaugacuuccuccaacauccaaauacucuggaugucuguggucauuuuacc

SEQ ID NO: 4182003 - RNA, 61 nt, Human
gguaaaauuugguaguaugucaacuucccuaacugggaucgaugacacagcuagguuugcu

SEQ ID NO: 4182004 - RNA, 89 nt, Human
gguaaacugugauuugauucuucuuggaguaagaaccaaacagaaaucuuguugcucccgaggagaaaugaagcuaauggaaacagucc

SEQ ID NO: 4182005 - RNA, 84 nt, Human
gguaaagaaacaguggucucuggcuugagcuucgaccaguauaauuacugggauucagucuucagaagacccuucgucugugcc

SEQ ID NO: 4182006 - RNA, 84 nt, Human
gguaaagaguggugaggggcaugugugauuugagaaagucccaucaaugcgucaaauacacacagaauccaccauacccaugcc

SEQ ID NO: 4182007 - RNA, 69 nt, Human
gguaaaggacugaggacaugugaggcauguaaaauuaauaugaucuuuuagucacuuagaaaaaauacc

SEQ ID NO: 4182008 - RNA, 65 nt, Human
gguaaaucaggugcauuagauuaauuaccuaaucugugguagaugaaggcugagcaccuguuucc

SEQ ID NO: 4182009 - RNA, 72 nt, Human
gguaaauccccaaagccaaagugggcaugccucaguguccccacugugcucagucuuuggcugggagcagcc

SEQ ID NO: 4182010 - RNA, 62 nt, Human
gguaaaugcugaguacuggagaggaggaaaggggugccugcugcugccuguggguguuuacc

SEQ ID NO: 4182011 - RNA, 63 nt, Human
gguaaauucacaccuccgguuuuucuuuagagcacugagagggauuguagguguagaaaugcu

SEQ ID NO: 4182012 - RNA, 72 nt, Human
gguaacaguggcaguggaaagcacacgggguaggcauagagcugccugggugcuggcacugucccugacacu

SEQ ID NO: 4182013 - RNA, 68 nt, Human
gguaacauauacuaucaaccuuugccaaccuaauauggagauuggaaaaugcaugguaaaugauugcc

SEQ ID NO: 4182014 - RNA, 92 nt, Human
gguaacgggcugaagaggauggguggagggugacacggaucgccccgagguuauuuauuuucccuuccacucaaucucuuccuccccaaauc

SEQ ID NO: 4182015 - RNA, 67 nt, Human
gguaagagcaggacgcagcacaccagugacauuggagcuacacuggcccagugcuuaugcucugacc

SEQ ID NO: 4182016 - RNA, 56 nt, Human
gguaagagcccuggcugacacaucugaaaugccuuggugugcaugcaugcucugcc

SEQ ID NO: 4182017 - RNA, 69 nt, Human
gguaaggagagagaaauuaugcauuauauaguuaaacacuggcaaaacauuauuucucauucuccuacu

SEQ ID NO: 4182018 - RNA, 77 nt, Human
gguaaguaaauguauccuacuuccugaguuggcuaauuguggauguuaaucucuggaaaaggaucaccuuucuuauc

SEQ ID NO: 4182019 - RNA, 79 nt, Human
gguaaguguacaguacccugaugaacuaaagccaaaaguuagggcugauuucgggcuucaucacggugaacaccucacc

SEQ ID NO: 4182020 - RNA, 68 nt, Human
gguaauaaacgcacccagaucccuugccagcaguggucugucugcugcuuggaggccugggugcuacc

SEQ ID NO: 4182021 - RNA, 83 nt, Human
gguaaucucaugguggagguguauucuggaucgacucacuuuugaaauguuuaugaaagaaauuccuucaccucgggacuucc

SEQ ID NO: 4182022 - RNA, 85 nt, Human
gguaaucuugaauauagcgugccuugaaaaauuauagaaacaagcuguauaaauuuucgagggccuuaaguauuccauaauaacc

SEQ ID NO: 4182023 - RNA, 78 nt, Human
gguaaugcaaacauucucauugggauaugugauaaauauaauauuauguagcuaguuccugauaaugccuguuuuacc

SEQ ID NO: 4182024 - RNA, 75 nt, Human
gguaauguauuuaaaguuacucacagaaauaugcuggauguguugacugguaacuuuaaacauguuuauauugcu

SEQ ID NO: 4182025 - RNA, 78 nt, Human
gguaauugcacaacugcuucacuucgguugcauagauaguuaacugcgcacauuuggugugguaauuggguaguggcc

SEQ ID NO: 4182026 - RNA, 61 nt, Human
gguaauugcaucauuuccuggccgugucuaguauauaacgcggagaagugaagcaauugcc

SEQ ID NO: 4182027 - RNA, 70 nt, Human
gguaauuuguguuuaugaaguuauucugccacaaagaugaacaggcaagaugauaaagaaccaguuuacc

SEQ ID NO: 4182028 - RNA, 63 nt, Human
gguacacggcagaguugauucagauaaacaauuugcuuuguugaagucagcaugcaugugacu

SEQ ID NO: 4182029 - RNA, 82 nt, Human
gguacagacggcaucugcucugcaaggcacagugaucgggcucagcauugucacuggagcucuugcgguucuguuugcugcu

SEQ ID NO: 4182030 - RNA, 61 nt, Human
gguacagccccuccccugacagaugaggcagcugcaaccucuacaggguaaggggcuugcc

SEQ ID NO: 4182031 - RNA, 59 nt, Human
gguacagcugaccccuucucaccauguuguaaauauuuacugagacugggugcaguacu

SEQ ID NO: 4182032 - RNA, 83 nt, Human
gguacauaguuaagaaacaguuucuaaucauggagaauuagugaacucucucugaagagaagcuuuacacucuuauuaugucc

SEQ ID NO: 4182033 - RNA, 93 nt, Human
gguacauuggaaacuauaacgacuucaugacauucaggucagacuuuuuuggcaagaauccauuauaggugauguuauauguuucagauuacc

SEQ ID NO: 4182034 - RNA, 63 nt, Human
gguacauuuuucugucacuuugauuuguaucguuaugaugccuaaguuuuuagaguaugugcc

SEQ ID NO: 4182035 - RNA, 76 nt, Human
gguacccagccagccuuugugaacaucaggugcuuugcaugagguacgaauuguuguuccgagguuugcugcagcc

SEQ ID NO: 4182036 - RNA, 130 nt, Human
gggugggggugggggguuaggccuuaccuuuauuuucugccugagggagaagucacgggcaguuuccacaccaggugcggccccuuccucagcagggugaggguaggugguggccccucccugcccaccc

SEQ ID NO: 4182037 - RNA, 57 nt, Human
ggguggggugucuuuguggucugugagccuuccuucaucuccagaggcaccuggcuc

SEQ ID NO: 4182038 - RNA, 72 nt, Human
gggugggugacguggaguggggagaaguuggggaagcuugacaucuuaauaaaucuccucccugucacacuc

SEQ ID NO: 4182039 - RNA, 107 nt, Human
gggugggugcaaauggagauuuagagacuaugaagauucuuaacuuugccaaaguuuuaaucaaauguaugagaaagucguaugucucccgaccuccauccccaccc

SEQ ID NO: 4182040 - RNA, 55 nt, Human
gggugggugggcaccugcccagagccaagcagccugggagagggcucagcuaccc

SEQ ID NO: 4182041 - RNA, 85 nt, Human
ggguggugugucuuggguuuccaugguguuucuuggguuucuggagcuggaauccagaggguagcaggauuaggagucacucccc

SEQ ID NO: 4182042 - RNA, 86 nt, Human
gggugguucauuauaauaaaugcagccuagcucaguuuucccaguaaggucaucagaucugaguggcugcauguaaauugcuaccc

SEQ ID NO: 4182043 - RNA, 76 nt, Human
ggguguauacucaucuccaagcucaccaaguuguauauauuaaaguugugcagcuuuuuggaugucaguuauaccu

SEQ ID NO: 4182044 - RNA, 97 nt, Human
gggugucuuucagagcaguugugggcaggcagcccuugaauggcuggucaugaggccuuuucaugacaaugguagccuguuaacuugagagacucuc

SEQ ID NO: 4182045 - RNA, 92 nt, Human
gggugugagugcuccccuggcugugggugcuccucaccaacagcuaacgugcggggccuuccugugccccagccaaggugacacgaacaccc

SEQ ID NO: 4182046 - RNA, 68 nt, Human
gggugugggcagagucguggggaauagaggcaagcaagcaguuaauucuuccggacugugaaauaccc

SEQ ID NO: 4182047 - RNA, 65 nt, Human
ggguguuccugucauucacagcaauuccguguuuacagggggcugugggaugcauaggagcuccc

SEQ ID NO: 4182048 - RNA, 88 nt, Human
ggguguugucagcugccucccgccuuggcuucaguagcucacccagcuuacaggggagcugcccugggcuggagaugggcacgcaccc

SEQ ID NO: 4182049 - RNA, 119 nt, Human
ggguuaaaaucuacugaauuugagguuguagccagagcucuucuuuccuuucucuguaauugaugaggaaacuucagaguuuuggucuuuucaaacuucucacaguacauguaggaccc

SEQ ID NO: 4182050 - RNA, 130 nt, Human
ggguuaaauaaggagcucaaguuuccucagaauuggaaaucagaucugauuccauuguguuaauacuauagacagaugagauucauugaccacugacaggaugcucugucuccuaccuauuuguuaaccu

SEQ ID NO: 4182051 - RNA, 69 nt, Human
ggguuaagucaagagaagugcuccacaguaguuuacugcuugagggauauuuuucuuggacauuugcuc

SEQ ID NO: 4182052 - RNA, 71 nt, Human
ggguuaauauuuugagagcuuucuauaaucccuucccuaaagauaaguagagcuuucuaaaauguaaaucu

SEQ ID NO: 4182053 - RNA, 73 nt, Human
ggguuaauggcaaauuaugacugaauggguuugcucucccaggagagaugcauucagcauggaugccuggccu

SEQ ID NO: 4182054 - RNA, 60 nt, Human
ggguuagcccagacuaaaaccucagucuaucuggcuccaggcaaagugcugggcugcucc

SEQ ID NO: 4182055 - RNA, 65 nt, Human
ggguuaggggaugaggguacaaauccuccacacugcucccagucuggaauccucccccuugguuc

SEQ ID NO: 4182056 - RNA, 70 nt, Human
ggguuaguccauaauuuucauaucugaaaaccaguuucagugcaaaaaaugggcuagaucauuccuaccc

SEQ ID NO: 4182057 - RNA, 111 nt, Human
ggguuauauagggaaaucuuucacauuacucgcaguaagaaagucaagcaguugaucuuucacaauggcauguaauucuggcugaaagaaaugagggccuauuuuuugccu

SEQ ID NO: 4182058 - RNA, 56 nt, Human
ggguucagucccucuugcuacuccaucuuacaaggagcugugaagguguugagccc

SEQ ID NO: 4182059 - RNA, 78 nt, Human
ggguucauuguaacuuguuacuuugcaguguuguuaaucguucagcaucaguaaggcaacauagcuuggagugguucc

SEQ ID NO: 4182060 - RNA, 76 nt, Human
ggguuccaagaguaagugucccgagagagagccaggcggaagccacugcaucucuucugaccuagccuuggaaguc

SEQ ID NO: 4182061 - RNA, 65 nt, Human
ggguuccaucugaagugaucaucauuucucuuccucuggggaucugagaaacuucaggcaagccc

SEQ ID NO: 4182062 - RNA, 85 nt, Human
ggguuccgagaugccaauggccuuggcugcagagacauggcugcuguaaguccagccggugccacagggccaggaaucucaaccc

SEQ ID NO: 4182063 - RNA, 77 nt, Human
ggguucuggggcuuggggugguggaggagaggcgccuugcggaaagcccucuucaggcacucgaaggccucuugcuc

SEQ ID NO: 4182064 - RNA, 63 nt, Human
ggguugaauuccugguucugugacuaccuuauguuggguggacuuagauaaggcauuuaaucu

SEQ ID NO: 4182065 - RNA, 78 nt, Human
ggguugauuucuuguugccacugccuggccugaagacagugcuuggcucagcgguggcagcagacgaagcagcagcuc

SEQ ID NO: 4182066 - RNA, 63 nt, Human
gggaguuuacuggaagauacuauuuuuguugguuaacaaagggcuguaagccaaguaaagccu

SEQ ID NO: 4182067 - RNA, 64 nt, Human
gggaguuuugguauugcugguggugguauggggauauucaaaguaauaaccagaacugcauccc

SEQ ID NO: 4182068 - RNA, 70 nt, Human
gggaguuuuuccaaggucacaugacugcuuaguggggauggcagaauucaaacucaacuuuggaaagccc

SEQ ID NO: 4182069 - RNA, 79 nt, Human
gggauaaaauugggggugacgauggcagcugguauuuaauauugccuuuguuuucuuccccccauggcaauauuauucc

SEQ ID NO: 4182070 - RNA, 72 nt, Human
gggauaaguuucuggaccuuaccugcuuaggcagccuguugucuuuagcucuuaguccaagagacuuaaucc

SEQ ID NO: 4182071 - RNA, 76 nt, Human
gggauacacagcugguagguagcagauuuggaauuaaaaucuaggucugccuaacugccaacugccuguuuauccc

SEQ ID NO: 4182072 - RNA, 63 nt, Human
gggauacaguccuguuccuggaguaguucacagcugugaagggcagagacagggcaggacccc

SEQ ID NO: 4182073 - RNA, 64 nt, Human
gggauagaagagcuaaucacugauuugaugucuacaccugcaucucugagagccugcuuguccc

SEQ ID NO: 4182074 - RNA, 96 nt, Human
gggauagagaagacuacagucaacauugaugaugaugauuauuauauagauaguuugaaaaaaguuacagaaaucuugacugucuuuuuuccuccc

SEQ ID NO: 4182075 - RNA, 76 nt, Human
gggauagauauuucaggccaaagaaacagcaugaacaaaagucuuaugcugaaugaagcacuguaauucucauucc

SEQ ID NO: 4182076 - RNA, 85 nt, Human
gggauauguaacaagugcuuacuuugggcuagguguuguaaaugcuuuagcucagcaaauccucaaacaagcacguuaaugaccc

SEQ ID NO: 4182077 - RNA, 97 nt, Human
gggauauuuggcacugucuguagacauuuuugguugucacaacugggugggaggcaaggugcuacagacagugaguguguaagaggccaggaauccu

SEQ ID NO: 4182078 - RNA, 79 nt, Human
gggaucaaagcccccacuggguugggggagccacugcccucucauggcaggcuucccccacaccuacggggaaggcccc

SEQ ID NO: 4182079 - RNA, 76 nt, Human
gggaucaccacuaaggcuggggagcacgguagggaaauggugaccagaucacaguacagcuucccauaggggaccc

SEQ ID NO: 4182080 - RNA, 65 nt, Human
gggaucagcugcugaugagcucaagacacugagcaugugacuuagcuucucugcaucugugucuu

SEQ ID NO: 4182081 - RNA, 90 nt, Human
gggaucaggcgucagcugugcuguggucaucugggggcucagcuacacuggaugcucuagguggcucacagauggcaggcacuggaugcc

SEQ ID NO: 4182082 - RNA, 57 nt, Human
gggaucauugaguaguaggaaaauaacugaauuauucagguccuagucaaugguucu

SEQ ID NO: 4182083 - RNA, 74 nt, Human
gggaucucaagccugccuguggacacccuggagggacccccaauccucccauaccuaugggccaggcaugaccc

SEQ ID NO: 4182084 - RNA, 55 nt, Human
gggaucucacuacauugcccaggcuggucuagauguccugggcucgagagauccu

SEQ ID NO: 4182085 - RNA, 56 nt, Human
gggaucugauuaauaagguggacugucucccucccaggccaccugcuucagacccc

SEQ ID NO: 4182086 - RNA, 81 nt, Human
gggaucugggaaggggauuugugacaacuggguuauuuaaauggaauuuuccaaauauacagaaucuccuccucagauccc

SEQ ID NO: 4182087 - RNA, 59 nt, Human
gggaucuugggaacacccuuacagaacccaagauuugguucaagggcuaccaaggucuc

SEQ ID NO: 4182088 - RNA, 79 nt, Human
gggaucuuguuaaaaugcagauuuggauucucauggucuggaguggagccugaaaagucugcauuucucacaagcuccc

SEQ ID NO: 4182089 - RNA, 56 nt, Human
gggaugaaagagagccaauuacuaacaggcagguuucacaggcuuuaauuuauccc

SEQ ID NO: 4182090 - RNA, 116 nt, Human
gggaugaagcccugaccagguucagaggcagcgggucaggaccgugccugggcucagucccgcccuggcuccuucgcuucucgccgcugugagccugggcaguggcuucgcugcuc

SEQ ID NO: 4182091 - RNA, 64 nt, Human
gggaugaagccugaagaaccccaaucucaagaacugacgagguagacuuucaagguuacguucc

SEQ ID NO: 4182092 - RNA, 55 nt, Human
gggaugaaggucugcauguuaaggaagucugaaagauaaaaugggccuugguccu

SEQ ID NO: 4182093 - RNA, 57 nt, Human
gggaugacaaagugucugucccccacacuggucaaagggacaggucauuguuaugcu

SEQ ID NO: 4182094 - RNA, 99 nt, Human
gggaugauaguagcaaucuauauuuugaaagguauuuaggacauacauauaugcauuugucuaaacucugcaaauguggauuuaaugcuuuugcauuuu

SEQ ID NO: 4182095 - RNA, 72 nt, Human
gggaugcacgcuguggaagggacacuggacuggagucacaucucagcccugcccuuucccauugugcgaccu

SEQ ID NO: 4182096 - RNA, 84 nt, Human
gggaugcagacaggaaugugaccacuagacucucagccccgggagggcgaggcuuuuugcugguuuuguucauugcuguauccc

SEQ ID NO: 4182097 - RNA, 110 nt, Human
gggaugccuccgcacaagggcagcagcggcccaggccuaccccuggaacucgggcugagguuucugaaggcugggcaccguuuugaucccgugugggcgcaggcacuccc

SEQ ID NO: 4182098 - RNA, 59 nt, Human
gggaugcugugucaauggugggauccuacacagggcuacuggcauuaugauagcguccu

SEQ ID NO: 4182099 - RNA, 68 nt, Human
gggauggaacuaggcugucgcucacuugcuccauaauguugggaaaguuauucagccucucugauccu

SEQ ID NO: 4182100 - RNA, 55 nt, Human
gggauggagcuguguacccugggcagggaauggccucagaccacagcucacaccc

SEQ ID NO: 4182101 - RNA, 105 nt, Human
gggauggaggaaugaguccgcuuacauuccuggagguuuuucggcauaggagagguuuauguccuggucuagcuuccgggagagaagugccucauucuauccccc

SEQ ID NO: 4182102 - RNA, 56 nt, Human
gggauggaggguagagcaaguggauguggcuuuguuugcucauuuaacuucaucuc

SEQ ID NO: 4182103 - RNA, 64 nt, Human
gggauggaguauuuuuauuugcuugauauuuuuucccuaagaaaauagauuuaacauccauccc

SEQ ID NO: 4182104 - RNA, 60 nt, Human
gggaugggccuccaauuccagcgggaugagugugccguuguggaggacucccagcauccc

SEQ ID NO: 4182105 - RNA, 65 nt, Human
gggauggggaugaauugagucagaagggcuuccacugagucgcccuuucucccuucaccgcaccc

SEQ ID NO: 4182106 - RNA, 69 nt, Human
gggaugguggcuguuggaccacaggguauguugugcuugcacuguggaaauaaacaaugcuaacaucuc

SEQ ID NO: 4182107 - RNA, 112 nt, Human
gggaugguuaaaacauuacgguacagguugaauaucccguaucuuaaaugcuugggaccagaaguguuuuggauugugggauauugcauauuacuugguggcugagcauccc

SEQ ID NO: 4182108 - RNA, 64 nt, Human
gggaugugcuuucuuuccaaggggcugcugaagcgugccucuguaggagugagagcaucuuuuc

SEQ ID NO: 4182109 - RNA, 57 nt, Human
gggauguggaacucagcugguucacugcagaaccaggagcagcuguguuuucauccu

SEQ ID NO: 4182110 - RNA, 80 nt, Human
gggauguuuuaacaagucacagaacccauuguaacuagugcacaucuggugauacagguguucuggauauaaaacauccc

SEQ ID NO: 4182111 - RNA, 80 nt, Human
gggauguuuuauauccagaacaccuguaucaccagaugugcacuaguuacaauggguucugugacuuguuaaaacauccc

SEQ ID NO: 4182112 - RNA, 65 nt, Human
gggauuaagcacuuggggaaaggauccagaccagcccucaggauccccugccuugggugaguccc

SEQ ID NO: 4182113 - RNA, 80 nt, Human
gggauuauugacaugcaacaauuuggcauuuuuuugagggaaagaagcaagucucaaauaguuacaugcuguaugauucc

SEQ ID NO: 4182114 - RNA, 88 nt, Human
gggauucacauugcuggggcuaaguacaaauugacaucaccuuuuaggaaugaaaugcuucucuuugacccuuuagcuccaguguccc

SEQ ID NO: 4182115 - RNA, 67 nt, Human
gggauucaccugggauagucugacauuacuuaaccccaacuuguccuucagaucucaggagagucuu

SEQ ID NO: 4182116 - RNA, 80 nt, Human
gggauucggauuuggugauugacccuggcuguguugccuacugcuuacugcugagagcaaucccaaaccccgcagguccc

SEQ ID NO: 4182117 - RNA, 85 nt, Human
gggauucuaauauuugcugacagcagcaaauggagauaagcgauuuuacuuuauuaucuguugucuugguuuuuauugcucucuc

SEQ ID NO: 4182118 - RNA, 81 nt, Human
gggauucucuagaggagggaugugguuguugggugaugcucucagggcacagacauauccauauuuaccucagucgaucuc

SEQ ID NO: 4182119 - RNA, 71 nt, Human
gggauugaguuaggugaaagcuaguguuugggaagauggcucgggaaacugcuuacacuagagggaaucuu

SEQ ID NO: 4182120 - RNA, 119 nt, Human
gggauugauuuagcacaugaaugauaaggguaagauauuauauaggggugccaaaacuuucuaucuuccaggcacuucuggugucauacugcauuuaggucuuacuauuuuuuucuccc

SEQ ID NO: 4182121 - RNA, 88 nt, Human
gggauuggggguagaaguggaaauuugauuacuugaguuauugaaaugauucagaauggcaaacuucuagaaguacucccaauuuccc

SEQ ID NO: 4182122 - RNA, 69 nt, Human
gggauuguguaaaggaagggaaccuaauggaagguaagggccuucauucucuuuagauuuacauuacuc

SEQ ID NO: 4182123 - RNA, 79 nt, Human
ggucagaggugagaucguaugcgcggccuaggggcgucuggcaugagcaggcccugcggaaaugaucauucuccugacc

SEQ ID NO: 4182124 - RNA, 59 nt, Human
ggucagcagugcagggcagagcuggaugcagcuuugccagcuugaacugugggcuggcc

SEQ ID NO: 4182125 - RNA, 59 nt, Human
ggucagccccugcucaaggccggcccucauccugccuucugaccagcagggacaugacc

SEQ ID NO: 4182126 - RNA, 95 nt, Human
ggucagcccuuguaccucccugccuucccuguuggucugugauugggaccucugccugcucccagacagaaggcuccuugagguagcagcugguc

SEQ ID NO: 4182127 - RNA, 57 nt, Human
ggucagccuacuuaaucuugcugauauuccaguuuuucaucaggaacaaggcugauc

SEQ ID NO: 4182128 - RNA, 79 nt, Human
ggucagcuuggugaaggugggcugagcaagccucagugccugcaccugagguagccauggcccaaguaccauaccuacc

SEQ ID NO: 4182129 - RNA, 64 nt, Human
ggucaggaagcugaagugcaaggcuuggcccuuguucagcccccccaguuccagcuucuugacc

SEQ ID NO: 4182130 - RNA, 91 nt, Human
ggucagggcauuugaacuaauaacugugcuggcaccuauuacuggugcuuguauuaucuuaggcaaguugcuauucuuuaaugccuugauu

SEQ ID NO: 4182131 - RNA, 57 nt, Human
ggucagguaucccaauccugagcccuugcuagaggcugagcggacuggggucccucc

SEQ ID NO: 4182132 - RNA, 88 nt, Human
ggucaggugcucuuugcaguuuucugccucauuuccaagguaaccuaggauuugucacgguugagagccaagaagcaggcacgcugcc

SEQ ID NO: 4182133 - RNA, 89 nt, Human
ggucaguaaagugucuccagcuggugaggacuccuccagggugggccagcucacucagaggaaacccuccuaggcaucucguaauggcu

SEQ ID NO: 4182134 - RNA, 72 nt, Human
ggucaguccuggaagugcuuggugagggcuucuagcagcuccugcuucuucagccaguacuccaggcaggcc

SEQ ID NO: 4182135 - RNA, 101 nt, Human
ggucagugauuaauuaugcuaagauaaacagaguuaauuuucuuccuggauaaaacuaauuacaacuguguuuguuuugguaggacauggaauuacugucc

SEQ ID NO: 4182136 - RNA, 55 nt, Human
ggucagugcugccagagugaccucauacaauugggagaauucaaagccacugacc

SEQ ID NO: 4182137 - RNA, 62 nt, Human
ggucaguggcaggggguacuucaguauuauacaacugcugugaccagacuuguauacuggcc

SEQ ID NO: 4182138 - RNA, 61 nt, Human
ggucaguucccuuucguauggacugggcaacugaaacccagacagggaagggaauuagacc

SEQ ID NO: 4182139 - RNA, 61 nt, Human
ggucaucacuuuuggugccuggccucaauucuuauuuggcuuagcuucauuauugguggcc

SEQ ID NO: 4182140 - RNA, 56 nt, Human
ggucaucaggaaaagcuccacugagaaggugauuucugagcugccuuuugaagacc

SEQ ID NO: 4182141 - RNA, 60 nt, Human
gggcacaugccuuugcuauugugaauagugcugcagugaucaauacaggugcaugugucu

SEQ ID NO: 4182142 - RNA, 61 nt, Human
gggcacaugcuuagggaggaaagcuuggaaaggcacaggcagaguguuuaaggaugugccc

SEQ ID NO: 4182143 - RNA, 74 nt, Human
gggcacauuucagaccagaacuggauggacucaccuggcuggguaauuuagacauuugugguuugcaauguucc

SEQ ID NO: 4182144 - RNA, 61 nt, Human
gggcaccauggguagguggcccuaaggcuccauguccugcuugccacuccugaugcugccc

SEQ ID NO: 4182145 - RNA, 78 nt, Human
gggcacccaaggagagagagcaggccgggcgcaaggacuguugaccgcuggccagcccucuuccuccacacggagccc

SEQ ID NO: 4182146 - RNA, 78 nt, Human
gggcaccgauucuaccaggcccuccagcugcguggucuccgcagaccaggcucugugugggcuagaggaaugucgccc

SEQ ID NO: 4182147 - RNA, 107 nt, Human
gggcaccugcaugaugaccucccacaccugcauguuuauugggccugguuuaugcauccaaggaucaggaagugugagggugguguaggggaucauaagagugcacc

SEQ ID NO: 4182148 - RNA, 62 nt, Human
gggcacugcuggaggcucccuguucugccaacugcuggauugcggggaguuccagagugucu

SEQ ID NO: 4182149 - RNA, 60 nt, Human
gggcacuggcuucagggggaaaguccuaaauuggggcuggaucuccugcaggcaggaccc

SEQ ID NO: 4182150 - RNA, 55 nt, Human
gggcacugugcuaggugcugaggucacaagggaaacagauuuagucgcaguccuc

SEQ ID NO: 4182151 - RNA, 72 nt, Human
gggcacuuaacugcaaagccagauauuaucauguucuucacuaugagucuguuuugcuugguuuuaugcauc

SEQ ID NO: 4182152 - RNA, 82 nt, Human
gggcagacacacuucuccuagcucuggccagccuggcacugccagucccagccaggcagcugggagggugccugaacugccc

SEQ ID NO: 4182153 - RNA, 95 nt, Human
gggcagagaaggaccgguaaugccagacaggggcuuugcaugcuuuaguuauuaagauucaaaagcagauaaccuuuguuggcuaugccuugccc

SEQ ID NO: 4182154 - RNA, 83 nt, Human
gggcagaggccuuggcccagugcaagcucuuucugcccacauucuccugguagcggcucugcagcugggcgcuguuucugccc

SEQ ID NO: 4182155 - RNA, 66 nt, Human
gggcagagguaccaggaauggggucaccgucuaacacaggcaaagguaagcucccuggauaagucc

SEQ ID NO: 4182156 - RNA, 62 nt, Human
gggcagagguggaaaaacaaccagagaaaauuccacucucaggcuguuagccaccuccuccc

SEQ ID NO: 4182157 - RNA, 59 nt, Human
gggcagaguggagugcggccuccugcaauguccaggaguaggugcuccucacucugccc

SEQ ID NO: 4182158 - RNA, 59 nt, Human
gggcagaguucugcagccggggacuaaguguacagcccacacagcagauccuuuggccc

SEQ ID NO: 4182159 - RNA, 99 nt, Human
gggcagaguuggcccuggggucugccuggaggcagcugcugcagcuuccaugccuauucagagcagccuccagggggagcccucagccauaccgugccc

SEQ ID NO: 4182160 - RNA, 111 nt, Human
gggcagaucuaaggacagcuucuuguuaccuuuccuagguuuacagauacucucauuauauuuugaaaguuuggagaugggaaaaaggagguagugucaauagagcuggcc

SEQ ID NO: 4182161 - RNA, 71 nt, Human
gggcagcaaccuccuggaccaccuuguggccaggcaguugucuucacaagaggcccaggggagcaaggccc

SEQ ID NO: 4182162 - RNA, 84 nt, Human
gggcagcaaguaccagugguuucaguccccugucaccaggcauccugcagcaggcacaggacggaaguacauguccucacuccc

SEQ ID NO: 4182163 - RNA, 56 nt, Human
gggcagcaucaggaggggcuuucugggcacacccaguacccgucucugagcuuucc

SEQ ID NO: 4182164 - RNA, 63 nt, Human
gggcagcaucucauucauucauguucagcaccagcaugaaccuggcacagaggagaugcuccu

SEQ ID NO: 4182165 - RNA, 65 nt, Human
gggcagcauggagugggggaagcacuugaaccuuuuucuacuguguggcucuccuccugcugccc

SEQ ID NO: 4182166 - RNA, 65 nt, Human
gggcagccaacccacagguugcccaaugauguauguguggcuagaccugaaaugggggccugucc

SEQ ID NO: 4182167 - RNA, 59 nt, Human
gggcagccccagcgcguuggcuccaggagcccgggugggggccgaccguuggggugccc

SEQ ID NO: 4182168 - RNA, 61 nt, Human
gggcagccggacugccgcugcacccgccaaaccacgcgggaaccagccgcuuccgccuccc

SEQ ID NO: 4182169 - RNA, 69 nt, Human
gggcagccugcuggcugguagaguuccgugucuucccuucuagcuggagccuggcagcugcaaaugucc

SEQ ID NO: 4182170 - RNA, 57 nt, Human
gggcagcucagccaccaugcaggaauagaaucagcuccaguguugcugcagcugccc

SEQ ID NO: 4182171 - RNA, 57 nt, Human
gggcagcucucacagcagccaagccaaauuuguuuaguauacaugaguuagcugcuu

SEQ ID NO: 4182172 - RNA, 59 nt, Human
gggcaggagagaacagucaugguauuuauuucaucacugucaccaucuuuccucacccc

SEQ ID NO: 4182173 - RNA, 77 nt, Human
gggcaggccaggcacgggggcauggccucuuuuuuccugggagagcagucaccccucugucaccugaccagcugccc

SEQ ID NO: 4182174 - RNA, 55 nt, Human
gggcaggcugagcaugucaccugcagcaggugcagcugcagcucaagccuagccc

SEQ ID NO: 4182175 - RNA, 79 nt, Human
gggcagggcagaggcugccucugggucuccugauuccaggcagucuggggcaggaggcccacaggccccugcacuggcc

SEQ ID NO: 4182176 - RNA, 78 nt, Human
gggcaggugccucccuccugucuccuuauucuacacuuggcacagguguaucugacaguggagcggaggacacagccc

SEQ ID NO: 4182177 - RNA, 98 nt, Human
gggcaggugcgcauguugcauuagugucauaagguggcaugagacuguaccaggccauuaguccugauucugauccagcagcaucacugccuugcucc

SEQ ID NO: 4182178 - RNA, 55 nt, Human
gggcaggugggcugggguggugccaucacuggcagcaugugugguccgcuggccc

SEQ ID NO: 4182179 - RNA, 68 nt, Human
gggcagguggggcuacugagcuggaacuggguuugucugcuccagagaaucauagacuccaucaaccc

SEQ ID NO: 4182180 - RNA, 82 nt, Human
gggcaggugugagggcucccaaucagccucuggcuccugguuugucugggcugugcugucuugggagccuuaaccaccgccu

SEQ ID NO: 4182181 - RNA, 62 nt, Human
gggcagguguuuccaaggugagccuuggcacaggucucaccucauuugaggagucucugccc

SEQ ID NO: 4182182 - RNA, 55 nt, Human
gggcagguuauuggaguagggagaacagaaacucgucccauguccauaucagccc

SEQ ID NO: 4182183 - RNA, 65 nt, Human
gggcaguaugcauaccucaguccuaccaaccaagaacugaaguaggaagcuguguccaugcuccu

SEQ ID NO: 4182184 - RNA, 68 nt, Human
gggcagugacaggcuccacaggggaauccgggguccacccuggucccagcagagcucugagcacaccc

SEQ ID NO: 4182185 - RNA, 69 nt, Human
ggugaagcucaugguuuucucuaaaauuguaacugggauuuuauuuuagaaguucacuuggguuucacc

SEQ ID NO: 4182186 - RNA, 55 nt, Human
ggugaaggcacaagagggcaaguggacauguacaaggccuuuuaaagccuacacu

SEQ ID NO: 4182187 - RNA, 74 nt, Human
ggugaagggauuuaccucaaguuccaggaaagcgguggcgauugcucucaaauaccugguaccuccccgucacc

SEQ ID NO: 4182188 - RNA, 75 nt, Human
ggugaaguauaguuuuuucaacaaauggugcuagaacaacugcgguaucuuuugguggaaaaauaaaucuuuacu

SEQ ID NO: 4182189 - RNA, 77 nt, Human
ggugaaucauuucaucugaggcaccagagcauacaugguuuccucugugccugucacccucagagagcugauucauc

SEQ ID NO: 4182190 - RNA, 68 nt, Human
ggugacaaggaagaugcuggccuggggaguccucucuccuccgugccuguaacuucuacucuggcacu

SEQ ID NO: 4182191 - RNA, 59 nt, Human
ggugacaggcuaccacugaaguucugaagaacccuuugcuauugugacagcuuuucgcc

SEQ ID NO: 4182192 - RNA, 58 nt, Human
ggugacagggcuuuuaaucaguaguuguaaauuggcaaauauuguuuagcucugugcc

SEQ ID NO: 4182193 - RNA, 56 nt, Human
ggugacaguuccggagguacagaugaauacauaacgucagcuuccugccugucccc

SEQ ID NO: 4182194 - RNA, 73 nt, Human
ggugacaugaauaguaaaagauacagcuaaugagaagcauuggccacaaguuauuauacuaaggacaguuacc

SEQ ID NO: 4182195 - RNA, 86 nt, Human
ggugaccaugacuaugcacauccaggcuacuuccugacuaggcccuguucaggaagcauccugagguguccauuccucguggagcc

SEQ ID NO: 4182196 - RNA, 125 nt, Human
ggugaccaugguuauguuuugcacauugauuuccauuuguuucauguuagaaacaguacuaaacuguucugugaccauaauuuguaaauaaagugguguucuguuuaaaaacaagcccuguuauc

SEQ ID NO: 4182197 - RNA, 57 nt, Human
ggugaccucaccuggucccacccuuucaggugaacggccaggcccggugacgucacu

SEQ ID NO: 4182198 - RNA, 56 nt, Human
ggugacgugucuguuagacuuccgacucaaccuugccucuaacagaagugucgucc

SEQ ID NO: 4182199 - RNA, 112 nt, Human
ggugacguuguugccuuuucugcaaucuuuugcgucuaugugugagccuuacauggcaggcugggaaggcauaagaauagggguaggggcgguugaaagggugcagguugcu

SEQ ID NO: 4182200 - RNA, 58 nt, Human
ggugacuaaauguaguaggauuuacuacauaguaaguucucaauacauuguagcuauu

SEQ ID NO: 4182201 - RNA, 93 nt, Human
ggugacugugucuuugaauaucccagauggaggcuggucacccuuuugucuuugggugaauagacuacucgggaaggcaaggaugcaugcacc

SEQ ID NO: 4182202 - RNA, 78 nt, Human
ggugagaauauguuuaauuaucuggguuuugccaugacaggcagggccaggcucagcuauuaagaaacgguugucucc

SEQ ID NO: 4182203 - RNA, 65 nt, Human
ggugagaaucgugcauuauugcuuugagaagucccacaaccaauaucaauuuggcagauucuccc

SEQ ID NO: 4182204 - RNA, 92 nt, Human
ggugagagagccaggcccugggcaggcacagagcuaugcagguggcccccucucagugccugcccuaggcucugcuugugacucucuucucc

SEQ ID NO: 4182205 - RNA, 60 nt, Human
ggugagaggacaaagaucagccaccaggaaggggccuccauccuggcucuguccucagcu

SEQ ID NO: 4182206 - RNA, 56 nt, Human
ggugagaguuaugauuccaauugagguaguuaagccacagaguccgugacuucacc

SEQ ID NO: 4182207 - RNA, 105 nt, Human
ggugagaucuuaaaaggccaaugaaagucauagaugcuacaauuuuguacucucuuuaaggggucgauguaaguauuuacgaaugccacugugggaugacucacu

SEQ ID NO: 4182208 - RNA, 58 nt, Human
ggugagauguuagagaaauuucugcccucaaauuuguggguggcaggugacagacacc

SEQ ID NO: 4182209 - RNA, 89 nt, Human
ggugagauuguggcaaauaaugcuuaugcucucaugauugcuaagacccagagcaagaauauuucugccacugaaugaugaucuuuacc

SEQ ID NO: 4182210 - RNA, 60 nt, Human
ggugagcacugcccugggucucuuagggcauaaccuugggauucagggaguugcuaugcc

SEQ ID NO: 4182211 - RNA, 60 nt, Human
ggugagcaguuguauaaagacuuugauagucuacaaugucugaaauauuuacuguuuguc

SEQ ID NO: 4182212 - RNA, 112 nt, Human
ggugagccacggagcacgcucacuaggcuuguccugaggaauucugggagcuguaguccuggcugguucuguggggcugugugggccugggagcgugcucuguggguucccc

SEQ ID NO: 4182213 - RNA, 66 nt, Human
ggugagccugaugaaacaggcagacucauuccuuuucaagauuuguuugcaguuuuacaggcuccc

SEQ ID NO: 4182214 - RNA, 74 nt, Human
ggugaggaaaguggugggaaaucaggugggauuuaaauauuuccccugcccauacugaccucuaauucacuacc

SEQ ID NO: 4182215 - RNA, 77 nt, Human
ggugaggaacuuuuucuuuccaaagguggcaggaacaagucuguacugacuuuucucccgccuucgggauccucucu

SEQ ID NO: 4182216 - RNA, 63 nt, Human
ggugaggaagacuuggcauugcugaguucccuucuacauuuaugcaauguuccuuucuucacc

SEQ ID NO: 4182217 - RNA, 64 nt, Human
ggugaggccauggcaagacgaccuguaagcccaggccuugcgucccauggccugugaucccgcc

SEQ ID NO: 4182218 - RNA, 59 nt, Human
ggugaacauugaugugguuacagcccacauguggucugucauagaauacagugauuacc

SEQ ID NO: 4182219 - RNA, 70 nt, Human
ggugaagacugaaaacauugugugcuaauuucuuuguuuuaggggagguuaucauaguuguuaucaggcc

SEQ ID NO: 4182220 - RNA, 72 nt, Human
ggugaagagaagaaacucacuuugggaggcagcaagguaguucuuccccucuggagaguuucccucgcuccc

SEQ ID NO: 4182221 - RNA, 129 nt, Human
ggugaagagaagggguagggaaccaccugagggacuuggaguguuaaugacaaguggcauagaaugucuacaacuuaguugucugggucacaugucacaaaacacugccaucaggacacucugccugcc

SEQ ID NO: 4182222 - RNA, 88 nt, Human
ggugaaggagaggcaugucagcagaugccuaaggcuuuagaacuugcuugguccagguccugugacagcaguugcugauuccaucacu

SEQ ID NO: 4182223 - RNA, 95 nt, Human
ggugaaguuacuggguaagaggcuuuguguguguuuaacuucagugguguaguacaaacuguuucaaaguagcuguauccaugugcacuuucacc

SEQ ID NO: 4182224 - RNA, 79 nt, Human
ggugaaugcucagagucuuguuaacuugcuaagcaucuggucagcaggguaguugaguuccagcaaggcucuugacacc

SEQ ID NO: 4182225 - RNA, 55 nt, Human
ggugaaugguguccugacucuagcuuucuaggaucuugggaagcccauuuccacc

SEQ ID NO: 4182226 - RNA, 110 nt, Human
ggugaauguaaccuaaaauguacucccugguguguuaugauacugauaaacuucuguuuaggguaacaugauuuuaguaucauaauaugguauuaugggugacguuuucc

SEQ ID NO: 4182227 - RNA, 75 nt, Human
ggugaauuaaagcuauccagucaugaacugcuuucacucuugcucagaguucaucuugauggcuuccuaauuccc

SEQ ID NO: 4182228 - RNA, 68 nt, Human
ggugaauuugccucccgacugacucuugcacuucccgugaggaccacagacguuggaggaaauauacc

SEQ ID NO: 4182229 - RNA, 66 nt, Human
ggugacaaugaaagucuucaaagucuguuccagugaugguucaauauugcuagcuuuugugucacu

SEQ ID NO: 4182230 - RNA, 57 nt, Human
ggugacacagggaccagagucugaauccagcagcauuccugaggcuccuuaugcacc

SEQ ID NO: 4182231 - RNA, 57 nt, Human
ggugacagcaucgagggaacacaggaaaguccucacucuucccucccugcuguggcc

SEQ ID NO: 4182232 - RNA, 58 nt, Human
ggugacaguaagguggcuucuucuuguggguagguugacaagggccucugcugucuuc

SEQ ID NO: 4182233 - RNA, 70 nt, Human
ggugacauucugguggccaaacgcaugcgaacacuguccucccgcauucagugaguguuuaccggaagcc

SEQ ID NO: 4182234 - RNA, 59 nt, Human
ggugacauugcaugugacuucuggagccugccacgcucccugggcucacacaggucauc

SEQ ID NO: 4182235 - RNA, 57 nt, Human
ggugaccaagcaucuguccccugagcucccagggcagagccagggaugcaugguccc

SEQ ID NO: 4182236 - RNA, 71 nt, Human
ggugaccaugacgucagccugcaggacaggugagcuggaucccuggggacugaaggauguugcuggucacc

SEQ ID NO: 4182237 - RNA, 64 nt, Human
ggugaccauuucuaggaaucagacuccagccuaacuacagucaagaaauccugaaggagucauc

SEQ ID NO: 4182238 - RNA, 78 nt, Human
ggugacgcccuuuguguguguauaggaaaggacgguguacacauuugguuaguuccuucuuuuacaccauaaauuauc

SEQ ID NO: 4182239 - RNA, 56 nt, Human
ggugacuagauaagccccaugggacagcacaucugucacagggcuguggggucacu

SEQ ID NO: 4182240 - RNA, 68 nt, Human
ggugacuauguuagaggcagaggcuauuuugcuguucccugucccucugcccaugagcagaagucacc

SEQ ID NO: 4182241 - RNA, 69 nt, Human
ggugacuauugguucuugcugcugacaaaaaauauuccucagcucaaaccagccagaacuaguguuucu

SEQ ID NO: 4182242 - RNA, 75 nt, Human
ggugacugagggaagaggguuugaauucaggucauugaaaccugcaauccagcaucuuuuucacaaccucaugcc

SEQ ID NO: 4182243 - RNA, 68 nt, Human
ggugacuggcaugguguugcugugagaggugcagcguaaccucagaggugaacaucagugcugggacc

SEQ ID NO: 4182244 - RNA, 68 nt, Human
ggugacuggcccugccucacucaaccuggggugggacuagcguguguguagaaagggcccugguggcc

SEQ ID NO: 4182245 - RNA, 76 nt, Human
gggucagacugccuguggguacaaguggaaucgccuuacaguaauauucuacagauacuggcaggcccucaagccc

SEQ ID NO: 4182246 - RNA, 60 nt, Human
gggucagagucccgccugcagagguaccacgugcguccuucuguggcggacucuaggccc

SEQ ID NO: 4182247 - RNA, 69 nt, Human
gggucagcggcgggggcaggagaugucuggaggaggagaggcccagcauccaugcucccucggggaccc

SEQ ID NO: 4182248 - RNA, 58 nt, Human
gggucagggcuggcugucgucaccuggggugcccugcggucgcaggcagcacugaccc

SEQ ID NO: 4182249 - RNA, 56 nt, Human
gggucaggggccugcaagguagaauuugugugguaucaguaagcaucccugaaccc

SEQ ID NO: 4182250 - RNA, 82 nt, Human
gggucaucaccguggggccuaggacagaggacucuggcaggcgggacccacagagccucugcccugggcacugauaggcucc

SEQ ID NO: 4182251 - RNA, 64 nt, Human
gggucaugaacaguuucccuguagaaaauggaccugaacacucugcaguaaggaauuguuuccc

SEQ ID NO: 4182252 - RNA, 90 nt, Human
ggguccauaggagaggagaggcaccgucugcagcgugcagaggcaucugugcgacagguaggcacggcaagacggggccuccugccaccc

SEQ ID NO: 4182253 - RNA, 76 nt, Human
gggucccagcuucccacuagcagccucagaagacagagagugggugcugcugcagcugugggguggccuggggucc

SEQ ID NO: 4182254 - RNA, 71 nt, Human
ggguccgggcgggggcccuccucggcccucccaacaugggggccaggaggucagccccucaaccuggaccc

SEQ ID NO: 4182255 - RNA, 63 nt, Human
ggguccucagcacccgugucuccccuuuccuugcaggccagaggaggcaggugcagagguccc

SEQ ID NO: 4182256 - RNA, 84 nt, Human
ggguccugagaggcacagggaugcggagccagguauguauucaggccagucgcuucucucugugccucaauauucuggguaccc

SEQ ID NO: 4182257 - RNA, 74 nt, Human
ggguccuggucaauaaauacugugaauaaagguuuuuaaaaggagaaaggaauucuacaguguauucaggaucu

SEQ ID NO: 4182258 - RNA, 86 nt, Human
ggguccuugcagucccugaggggucauuccugaaaagaccgacgccauggccugaguauaggaggccccuccuggguugcuggccc

SEQ ID NO: 4182259 - RNA, 61 nt, Human
ggguccuugggucuccuguguuuggacuagccuguccauaccccaggagcccagguggccu

SEQ ID NO: 4182260 - RNA, 67 nt, Human
gggucgggcaggcgcccucgucucccuggaaacagaugcggacgaggaagcgacccuugcccgggcc

SEQ ID NO: 4182261 - RNA, 127 nt, Human
gggucuagauaacuaaaacagaaacaacagucauauugaagaagacuggcaagaggucagcaucccaugaucgcgcugcacuguugcuuuauaugauuguguuugauggcacgauuguuuacaaccc

SEQ ID NO: 4182262 - RNA, 78 nt, Human
gggucuagugggaagaggccaggaugcugcucaacacccuauaauguacaggacagcagccucuuacaugaaagacuc

SEQ ID NO: 4182263 - RNA, 64 nt, Human
gggucuauuuuaagucugauuaauggagauacuaaucuucauuagcaaggucuucaagugacuu

SEQ ID NO: 4182264 - RNA, 72 nt, Human
gggucucaaacuguggcauguugaauuuguuggccuauuuaccaacaaacagcuaacauauguuaaugacuc

SEQ ID NO: 4182265 - RNA, 63 nt, Human
gggucucaggacaguucccugcaaauucccucuucucggacuuuguccaaacuguccuauccc

SEQ ID NO: 4182266 - RNA, 78 nt, Human
gggucuccagcugggucaugggacagaugcucauuuaugaugcucugggcuuguugaccugcacuuaguggaguuccc

SEQ ID NO: 4182267 - RNA, 97 nt, Human
gggucucgccaugccaccuugcuugcccugcagcggugaguggugaggagcacugaaggcccagggcagguggaaggggcagcccgagcacuuaccc

SEQ ID NO: 4182268 - RNA, 88 nt, Human
gggucucgcucugucgcccaggcuggagugcaguggccugaugucagcucacugcacccucaaacuccugggcucaagugauccuccc

SEQ ID NO: 4182269 - RNA, 102 nt, Human
gggucucgugccccgcugacugcugagcuucuccagggcagagagcgacggcaucaucucugcaucccagggcucagcacacggcuggcacauaugaggccc

SEQ ID NO: 4182270 - RNA, 59 nt, Human
gggucugaccugggcacaccauauugaauagugguuaaggcuuuacagucaaacgaccu

SEQ ID NO: 4182271 - RNA, 61 nt, Human
gggucugagcagggcaguguccauggagcagugugcucuaggggacuucacugcucagccu

SEQ ID NO: 4182272 - RNA, 55 nt, Human
gggucugagucuccgugccaggacauccucccuggacaggacccccuucggaccc

SEQ ID NO: 4182273 - RNA, 91 nt, Human
gggucugcagauuaggacauggacagcuuuggugacuauuauucugucagccacagcauguguguauguaagcgcuuggucugccuuuccc

SEQ ID NO: 4182274 - RNA, 71 nt, Human
gggucuggcaucccagcucugccugcugaaggcugagagcaucagugguaugcgugggagcugccuucccc

SEQ ID NO: 4182275 - RNA, 64 nt, Human
gggucuggccuggcauucuaugggcacagugguuauguggccacggcugugagagucaguacuc

SEQ ID NO: 4182276 - RNA, 83 nt, Human
gggucuggcuccucaggaaguagcaugugucaagggaagaugugugacauggggaagaacuuucuagaggaguuaccaggucc

SEQ ID NO: 4182277 - RNA, 68 nt, Human
gggucuguuaaaugagaaagcagacuagaagauucugcuaauuugcuuucucaauuuaauaguaaccc

SEQ ID NO: 4182278 - RNA, 65 nt, Human
gggucuuacuuaaauauucacacaauuccuuaagucaauauggcuugugaauguuuucuggaccc

SEQ ID NO: 4182279 - RNA, 76 nt, Human
gggucuuauuaaaaugcaguuucugguucaguuggccuaggaugggaccugagauacugcacuucuaguaaguucc

SEQ ID NO: 4182280 - RNA, 72 nt, Human
gggucuuccuggugaggcuagaaguguccauacacauggugcagcuuccuggucucagccaacaaggacacc

SEQ ID NO: 4182281 - RNA, 67 nt, Human
gggucuucgccgccgccauaacugcuccagaggaagaaaagaaagcgacgcggcacgcggagagccc

SEQ ID NO: 4182282 - RNA, 86 nt, Human
gggucuugacucuuuucuggaaggcagggagaacccaggacuaguuucccagggacccuguaccugccagaggagcgucauagccc

SEQ ID NO: 4182283 - RNA, 84 nt, Human
gggucuugcucuguugcccaggcuggagggcagugucaugaucauggcucacugcaaucucagcuuccuaggcuuaagugaucc

SEQ ID NO: 4182284 - RNA, 88 nt, Human
gggucuugcucuguugcucaggcaggaguacaguggugcaauuagagcucacugcagcuucgaccucggguguucaaguaauccuccc

SEQ ID NO: 4182285 - RNA, 86 nt, Human
gggucuugcucuuuugcccaggcuggaguucaguggugcaaauacagcucagugcacccuagaccuccugggcucaagcagucccc

SEQ ID NO: 4182286 - RNA, 63 nt, Human
gggucuuggggaguuggucaauccaugucuuaucuuagacaugagauuagcucacccacuccc

SEQ ID NO: 4182287 - RNA, 86 nt, Human
gggugaaggacugaggccuggguuccgaguggggcggcuaggaaaggaaaaggcuaggugcucccugacccaggucuucucuaccc

SEQ ID NO: 4182288 - RNA, 75 nt, Human
gggugaaggaugggaccuuugagcucagcugaaacucagugaacccagacacggccagauccugcuuccucaccc

SEQ ID NO: 4182289 - RNA, 61 nt, Human
gggugaagggucuaucucucugccuuugucuugcauuacaggggcucugagaauuccaccc

SEQ ID NO: 4182290 - RNA, 56 nt, Human
gggugaauucacagaccuggccagucuccuccuggcuucaaggugauaauuuaccc

SEQ ID NO: 4182291 - RNA, 60 nt, Human
gggugacagugaguuuggugcuuucaaaaugucagggcucucacagacaggcugucaccc

SEQ ID NO: 4182292 - RNA, 95 nt, Human
gggugacgauuguuuaaccaccaccaaaauggguucugaguccaacuauuaauaugaagaugacauccauuguggucuuguacauuuuguugccu

SEQ ID NO: 4182293 - RNA, 59 nt, Human
gggugacuggagggacccaggccuucagugagggcauuuguccaaccuccuagaucccc

SEQ ID NO: 4182294 - RNA, 71 nt, Human
gggugagaaaucugggagcagcucggccagguacuucuggcucacaaucucccaugaaguucucauugccc

SEQ ID NO: 4182295 - RNA, 95 nt, Human
gggugagaaucucaagugggaggugaaaacucaggagaaugguuucuaaaaauucuuguucaguugccucuccugcuuggguggauucuucuucc

SEQ ID NO: 4182296 - RNA, 62 nt, Human
gggugagcaggggccucgucucccuucucuaaucgcuggugaagauuggggccucugcaccc

SEQ ID NO: 4182297 - RNA, 99 nt, Human
gggugaggaaauugaagcuuagagcgcuuaagucaauuaccuaugaucauacagcuguggcuuaagcgcaacucugucuccaauucugaauucuuaccc

SEQ ID NO: 4182298 - RNA, 88 nt, Human
gggugaggcacgcaucugucuauuaggaugguuggaaugcaugaauuugauaagcccuauauuuggugagggaugucuguccucaccc

SEQ ID NO: 4182299 - RNA, 67 nt, Human
gggugaggcugaagguggcguacaggaaacauggugggcacacuucuguggccccuucgccccacuc

SEQ ID NO: 4182300 - RNA, 63 nt, Human
gggugaguccaggcucagaaacccgucguccaugggggcaccacggcuugccuggccucggcc

SEQ ID NO: 4182301 - RNA, 61 nt, Human
gggugauccaaauuggucuggggucaggauuuggcccacagucuaucaguuugcgucaucu

SEQ ID NO: 4182302 - RNA, 81 nt, Human
gggugauuuguacugacuuuggaauauuucuaggcuauguuucuuuaugcuagaaaaaguucagacaguuuuauuuacacc

SEQ ID NO: 4182303 - RNA, 71 nt, Human
gggugcaaaggaucauguggucauuccugagaaggauauccucagaugauacugcauggguccgugugccc

SEQ ID NO: 4182304 - RNA, 72 nt, Human
gggugcaaugggaugaucaccugagcucaggaagccaagucuucagugagccaagaucaugccguugugcuc

SEQ ID NO: 4182305 - RNA, 129 nt, Human
gggugcagcccgggggguguccgggcugagcgggcucacccgguuguuguggcgcgccugcuccagaguggcggugaagaggaagcagcggcaggggacgcccgcggcucgggcacacuggacguaccu

SEQ ID NO: 4182306 - RNA, 61 nt, Human
gggugcagcuggacagagaagcccacaagagaguuuaaguguggccucugcaggccgcccc

SEQ ID NO: 4182307 - RNA, 85 nt, Human
gggugcagggcugagggagagaauggggcaaacaccaaugcaugcuggucuuccuuucuucagucuccuuucccaccugcuacuc

SEQ ID NO: 4182308 - RNA, 90 nt, Human
gggugcauguaugugugcauuuguguguguguauuuuauaaccaugcagguauauagcacacaguuuauaaaagccaucaugcaguuccc

SEQ ID NO: 4182309 - RNA, 56 nt, Human
gggugcauuggcaauccaaucucuccuugaucgggauugaucaggaucaaucaccc

SEQ ID NO: 4182310 - RNA, 57 nt, Human
gggugccccauagccugcugcccucaaggaguaugggcugcagggcccagggcaccc

SEQ ID NO: 4182311 - RNA, 57 nt, Human
gggugcccugggcccugcagcccauacuccuugagggcagcaggcuauggggcaccc

SEQ ID NO: 4182312 - RNA, 83 nt, Human
gggugccguggaagaggccagcacgugugggguggggagggcugccacagcccccaggcacuacaugugaaacuccggcuccu

SEQ ID NO: 4182313 - RNA, 86 nt, Human
gggugccugggaaucacauuuuaucugagauugacacguucaauaugcacauggcaaucucccugaaaucaauugaaaccgcaccc

SEQ ID NO: 4182314 - RNA, 62 nt, Human
gggcagugaguuucugugagccacagucucccccucuuucugugcuccuaccacuucugccc

SEQ ID NO: 4182315 - RNA, 68 nt, Human
gggcaguggccacugcucucaagcucaggaaaagcccaaguccuggccuggcgcaguggcucacgccu

SEQ ID NO: 4182316 - RNA, 105 nt, Human
gggcaguggguggucaggagccacaccugauggagggugucagagagcgaaggugucuuuuugccaucuccuuggucuucaccagagugggcggccccgcugccc

SEQ ID NO: 4182317 - RNA, 97 nt, Human
gggcagugguugggcaaggcugacaggauuagcaaguaaucaggaaggaucagaugucuucuuucucuuucaauuuuguagccucccucuagugccc

SEQ ID NO: 4182318 - RNA, 64 nt, Human
gggcagugucugcaaaugaacaauccauacccuuucagaauccuugaucauuuuugcacugcuu

SEQ ID NO: 4182319 - RNA, 61 nt, Human
gggcaguuuauucuagaugguuuuuuaaaacagcauaccaauuuaugauccaugacugccc

SEQ ID NO: 4182320 - RNA, 70 nt, Human
gggcaguuuugcacagaggaugcuagagacucugucauuggcaaagugacuccuuggggcaagauuggcc

SEQ ID NO: 4182321 - RNA, 83 nt, Human
gggcauaaggaucgcacaccuagugacuagaaggaggagauuugaaacucagucuuucuucuuucauagugugagaguugccc

SEQ ID NO: 4182322 - RNA, 86 nt, Human
gggcauaugccaggcacaguguugcuguucaauaaauaaauaaucuccauccauauugacuuuaauuuuugccuaacgcaaugccc

SEQ ID NO: 4182323 - RNA, 72 nt, Human
gggcauccccagcuccgaaugggacacguuuucccgagauaaaagaucccuucugagcucacacgggagccc

SEQ ID NO: 4182324 - RNA, 90 nt, Human
gggcaucugacauacacaguguggcaaauuucaacuuuucuuaaaguuuaacauuauugucacucuguaggucuuaaaugucagcuguuu

SEQ ID NO: 4182325 - RNA, 76 nt, Human
gggcaucugggagcuagauucaauaaagcuguucugaccaugaacuuggaacuggccccuuucauucuggaagccc

SEQ ID NO: 4182326 - RNA, 71 nt, Human
gggcaugaguagacagauccuaugcaggcacuuucuuugugaucuucaggaucauuuguuuuaucuugccu

SEQ ID NO: 4182327 - RNA, 81 nt, Human
gggcaugcagaauuccuucuaccagcuggauaccucucauacacugagacacuggauucuuguagugaaguccacaugccc

SEQ ID NO: 4182328 - RNA, 103 nt, Human
gggcauggagcucagggggucauacgugcacugaaauugcguacaaauuuguaagugcaaauguguguauuucuaggcgaggaccccuagauuucuucagccu

SEQ ID NO: 4182329 - RNA, 68 nt, Human
gggcauggaugggaagggaaaaggggaugugccagagagaauuuccccugccagcuaucccugaaccc

SEQ ID NO: 4182330 - RNA, 63 nt, Human
gggcauggcagaguaugagauguuuaauuuucuggaauagcauccuguaucucuuccaccucc

SEQ ID NO: 4182331 - RNA, 70 nt, Human
gggcaugguggaccuggcauugaaccuacauggaccauucaguuuuaguguggcagguuccaaaaugucc

SEQ ID NO: 4182332 - RNA, 72 nt, Human
gggcauguaggaauccauggagagggucaucauuauaauaauccacucaagaugauuugauuucuauagcuc

SEQ ID NO: 4182333 - RNA, 76 nt, Human
gggcauguccgguugcacaucccagaaguauauaucuuccccauucuguggcaugguugcaaggacaacauugaac

SEQ ID NO: 4182334 - RNA, 65 nt, Human
gggcauguggcaggagagacacagccaucccugagggaggggcgguucccugcugucugaugccc

SEQ ID NO: 4182335 - RNA, 55 nt, Human
gggcauguucaaauaaguaguuucuauggcaacacguggagugagccaggugccc

SEQ ID NO: 4182336 - RNA, 87 nt, Human
gggcauuuagcccauuuacauuuaagguuaauauugucauguuugaauuugauccugucauuauaauguuagcugguuauuuugccc

SEQ ID NO: 4182337 - RNA, 101 nt, Human
gggcauuuguuuggugucucacguugaugcaaaugcagccauugcagagugagccccgcucuguuacuggaucuccauuugcucaaaagagagcagugucc

SEQ ID NO: 4182338 - RNA, 59 nt, Human
gggccacagagccagcgguagucaagggaggaaccaucugcagcuccucucugugcccc

SEQ ID NO: 4182339 - RNA, 71 nt, Human
gggccaccuugacugugaaggccguggcagaagcccuguucaccagggcugggcaggucugcacagggccc

SEQ ID NO: 4182340 - RNA, 57 nt, Human
gggccagaggauacaucuugauuacacuaaucagcauguacuucuccuccaugaccc

SEQ ID NO: 4182341 - RNA, 55 nt, Human
gggccagccuucugagcugccuggaaggaucugugggaauucagaaggcuguucc

SEQ ID NO: 4182342 - RNA, 58 nt, Human
gggccaggcaguacagcagugugugacaccccugcagcugcugggccugccguggccu

SEQ ID NO: 4182343 - RNA, 73 nt, Human
gggccaggcggcggcggucauugagcauggcuuccacucuggccaugugugucuccaccagcugcugucucuc

SEQ ID NO: 4182344 - RNA, 130 nt, Human
gggccagggaacgcgcccacgcccgcccgucccgcggccucucccgggugccgcugggcccgcuacucacagcgcuguggcguccgcggggaugcgcagcgcgggaccgagcguccgcagcccgcggccc

SEQ ID NO: 4182345 - RNA, 60 nt, Human
gggccagguggaccccagccucuuagccucccccagggcugcagccacauucccuggccc

SEQ ID NO: 4182346 - RNA, 73 nt, Human
gggccaugagagaucacaguggcaacucccuuccuaacaaagaaaggucagagugagcuguggcccaaggccc

SEQ ID NO: 4182347 - RNA, 57 nt, Human
gggccaugcacuuugcugggugcuggggacacagcaaagaucaaguaggcauggccu

SEQ ID NO: 4182348 - RNA, 88 nt, Human
gggccaugcucucugagccgccaggauauuguggcuuuugcuaauuaaggagcggauguguccugccagcgcaauuagaggcuggccc

SEQ ID NO: 4182349 - RNA, 59 nt, Human
gggccauuguaaguuuggaaagcucuugaaucagaguauagucucaaaaauaauggcuu

SEQ ID NO: 4182350 - RNA, 73 nt, Human
gggcccagguggcgggaggggcggggcacagccagggcucugccuggcggacucccggaacaucacuuggccc

SEQ ID NO: 4182351 - RNA, 67 nt, Human
gggcccaugugugcaccaacccuaugugacuuacagaacaagggaaacugaugcaaacauuaagccc

SEQ ID NO: 4182352 - RNA, 75 nt, Human
gggcccggcaugcagcagagugggccuggguggcccccacaguccccgcccucaccugcugcugggccuggaucc

SEQ ID NO: 4182353 - RNA, 71 nt, Human
gggcccggucuguguacuugcuggccguccugcucacaaggcgcuguagggcuggcgacauggcugggcuc

SEQ ID NO: 4182354 - RNA, 59 nt, Human
gggcccguuucuucuccgcaugcaauccgguaagccguggagcagcucuagcgggcgcc

SEQ ID NO: 4182355 - RNA, 56 nt, Human
gggcccucuggugguuucuuccuagacuuacuucauggggacuuccaggggagccc

SEQ ID NO: 4182356 - RNA, 55 nt, Human
gggcccugccuaaggaacacacucugcagagugcugggccaaagcaggguuuucc

SEQ ID NO: 4182357 - RNA, 56 nt, Human
gggcccugcugccaccauggcugggaccuugcccgccuugggcacaggcagggccc

SEQ ID NO: 4182358 - RNA, 57 nt, Human
gggcccugugauuucuugaggauuguuccaggaaacacacuuaagacaccugggcuc

SEQ ID NO: 4182359 - RNA, 87 nt, Human
gggcccugugcuggaaucuaucuaagucuagcuguuuaauaaucacucagacagcuaauuagaaauagauuauuggauacuagcucc

SEQ ID NO: 4182360 - RNA, 71 nt, Human
gggccgcuggaaggugagugacgugcgggucuucuuuuuuauguggcuguggacaccuuucaacgcugccu

SEQ ID NO: 4182361 - RNA, 80 nt, Human
gggccggaagauggcaccagaggaaacuacguuagcaagcuuugcaaaccagccuuucucugccaguuauuuuccuuccc

SEQ ID NO: 4182362 - RNA, 62 nt, Human
gggccggcugcgcuguccugaggaugcccuaccgggcuggccacagugacacgggcuggccc

SEQ ID NO: 4182363 - RNA, 67 nt, Human
gggccgguggugggcagggguggggcagcacuuugauguucuucccuucauuccaccaccacugcuu

SEQ ID NO: 4182364 - RNA, 66 nt, Human
gggccgugugugccaacuuuaugugcaagugcaaugaccugucuuagggauggcugcauaugaacc

SEQ ID NO: 4182365 - RNA, 68 nt, Human
gggccuagcaggguccaaugugaggcagcauuacccugugcuugcaacacauugccccugcucugccc

SEQ ID NO: 4182366 - RNA, 78 nt, Human
gggccucaguuuucucaucuguaauuugccuugcacaaucuuggcaaagauuagauaagauagauuugugaaggcacc

SEQ ID NO: 4182367 - RNA, 93 nt, Human
gggccucguguacaagacugcgcaugaccgccauccugacgggacucucaccaugagucaggaaauggcuucaugguuucuggucuggggcuc

SEQ ID NO: 4182368 - RNA, 57 nt, Human
gguaucuacaggcugggugugguggcccacaccuguaaucccagcacuuugggagcc

SEQ ID NO: 4182369 - RNA, 60 nt, Human
gguaucuccucuaucaauuugguacuccacacaggagagcaacaaauuagggggauuucc

SEQ ID NO: 4182370 - RNA, 81 nt, Human
gguaugauaguauugauuacaaauguugguuauucgugguaacggggaugguggcauuuguaaaaacguugcugggauauc

SEQ ID NO: 4182371 - RNA, 82 nt, Human
gguaugauggcacuauaacugauuucccuguuacccaccagcaugaagggcaugaagacagggaacuucauuagcugucccc

SEQ ID NO: 4182372 - RNA, 73 nt, Human
gguaugcagcuagaaaaugaaagauaauuugaauagucuuuucagauaaucuugaauauucuucuuugauacu

SEQ ID NO: 4182373 - RNA, 63 nt, Human
gguaugccuggcugaugaagauucaacagaugauucuugaguucuuuccguuagguauguacc

SEQ ID NO: 4182374 - RNA, 87 nt, Human
gguaugcugagaaaugugcuuggcuuggugugaccugguuuggcuuguccuccucacugucacaugaagccaacauagccagaaucc

SEQ ID NO: 4182375 - RNA, 56 nt, Human
gguauggcaguuuucaagaguucuguggugcugccaggguugagaauuguugagcu

SEQ ID NO: 4182376 - RNA, 62 nt, Human
gguauggugcuaggucagguagcuguaguuuccaacuggcucucuuaacuggccauccuacc

SEQ ID NO: 4182377 - RNA, 81 nt, Human
gguaugguuuaguggguuuauacaauuuaaauggcuuauauaauuauuugaaaugaaaagaaaaccuagucagccagaacc

SEQ ID NO: 4182378 - RNA, 74 nt, Human
gguauguauuuaggguuuucaaaagagauaauaagcaauugcuaauaauuauuugaagacauuagaguuggacc

SEQ ID NO: 4182379 - RNA, 80 nt, Human
gguaugugcucuaugaagggcucuucuauuuauggcccugugaugggcacauuagacaauagccuagauagaccacuacc

SEQ ID NO: 4182380 - RNA, 75 nt, Human
gguauguguguauuuauauaugaaauguaaauauauuuuacaugcauguguguaaauauacaugaaaagcaugcc

SEQ ID NO: 4182381 - RNA, 56 nt, Human
gguauuagcugugacgaggcauuguucauugcugccucucgguuacguuuaaagcc

SEQ ID NO: 4182382 - RNA, 70 nt, Human
gguauucagguaaaauagauaguauuucugaaguuaucauuaggaacuuuacucuauuuuauagugagcc

SEQ ID NO: 4182383 - RNA, 65 nt, Human
gguauugccacuuuugaacaguugguggcuccaaugcuuugcaacugucuugcaagugugauacc

SEQ ID NO: 4182384 - RNA, 65 nt, Human
gguauuggcuugcaugauauggcaucugggaagucucacaaucugccaucugcaagcuggagacc

SEQ ID NO: 4182385 - RNA, 87 nt, Human
gguauuucuauguuuuaucuggacugugauauaaauuagcuuuaccauuuuaagugauuuucauguuguauucagggaagcaaugcc

SEQ ID NO: 4182386 - RNA, 80 nt, Human
gguauuuuaauggcauuugggcuggcuuuucugcauuauaguauuguuuagagaagggcuuaaaaugcucuugaauugcc

SEQ ID NO: 4182387 - RNA, 76 nt, Human
ggucaaggcaggcaguucacuugaggucaggaguucgagaccaggcugaccaacauagugaaagccugucuuuacu

SEQ ID NO: 4182388 - RNA, 73 nt, Human
ggucaagguaaggcaggcuuucauccagagccaugccaugcacagcucaggugagcacugccuuacccagacc

SEQ ID NO: 4182389 - RNA, 56 nt, Human
ggucaaguguggugucaggcugucucacagguagugcaaagauauaccacauggcu

SEQ ID NO: 4182390 - RNA, 128 nt, Human
ggucaaguuccuuagcaauaccugccuuguugacuuuacucugugccucaguuuucccaucuguaaaauggcgauaauaagaaugggcaauucacaggguuguuaugaggacuaaaugaggaugugcc

SEQ ID NO: 4182391 - RNA, 72 nt, Human
ggucacacaacaaagacgggauaagguuuggauuccaauccaugccuuaaccuugcucuuaaccacuguacc

SEQ ID NO: 4182392 - RNA, 63 nt, Human
ggucacacaccaggaccugcagacaaccugggcuccuacagcaccugagcuccuguguggacc

SEQ ID NO: 4182393 - RNA, 70 nt, Human
ggucacacagcugcuuguuagaauagcagucccccugugcuacugcucccugcacucugcagcccugacc

SEQ ID NO: 4182394 - RNA, 72 nt, Human
ggucacagagcaugauggaagaucgaguuugcuuuucgguuuuagucucuucuauucagcucucauuucacc

SEQ ID NO: 4182395 - RNA, 66 nt, Human
ggucacaggcugggaagccuaggccucgcgguucugcagaguccgggcgcggcccagccuguggcc

SEQ ID NO: 4182396 - RNA, 77 nt, Human
ggucacagggaaaucaccuuucuugcugaagagauuccagggaagacaggaagauuguggaggugguuucaauggcc

SEQ ID NO: 4182397 - RNA, 60 nt, Human
ggucacaucuaaauggagcauugaggaguauuucuccuugaguguagcacagauguuacc

SEQ ID NO: 4182398 - RNA, 65 nt, Human
ggucacaugugauuugagccaauucugugaaugacagaugcuggucaccacgcaaaaaugugauu

SEQ ID NO: 4182399 - RNA, 79 nt, Human
ggucaccgcuggacagcccucacugugugccaggccuguccuuagcgcugugagggagggcuguccucaccaggugacc

SEQ ID NO: 4182400 - RNA, 60 nt, Human
ggucacgucacccaucagccuacuggguaugauuucaggugcugaacuggugaggucucc

SEQ ID NO: 4182401 - RNA, 91 nt, Human
ggucagaaaauuagauuucaugaauuccagaagcuugccuuuaaauaguaaggccugaagccugggagauucagagcauagaauuuggacc

SEQ ID NO: 4182402 - RNA, 74 nt, Human
ggucagagagcaugggaggcccgagcuaccaaugguggcuuuucucaacugggccuugauuccagcuucugccc

SEQ ID NO: 4182403 - RNA, 88 nt, Human
ggucagagauggaaucugucugggugcagcaguccgagcuugcacacaggagggacagcugcuuucaggccacagcgccauccugucu

SEQ ID NO: 4182404 - RNA, 90 nt, Human
gguucauaugaagaaggcaggcagggcucacugucuccuagaacucaucaggggauuggcaccugcagccuggguguuuauauuugaauu

SEQ ID NO: 4182405 - RNA, 77 nt, Human
gguucauccaugucagcguauauagcaguacuucauuccuuucauugcugaaucauauucgacuccauggauauucc

SEQ ID NO: 4182406 - RNA, 64 nt, Human
gguucaugaaaugcugcaguuaaggugcuggucuaucugaggggggccacaccuucugcagacc

SEQ ID NO: 4182407 - RNA, 76 nt, Human
gguucaugcgaugguuggagggaugguaaaagcaguuagcucuugucagcugcuucccucugcuagugcuugagcu

SEQ ID NO: 4182408 - RNA, 91 nt, Human
gguucaugcguuggucagggacuuggcuuucuuggggagacacaauuauuuccuagggcagccuuauagcucccagacagcuagugaggcc

SEQ ID NO: 4182409 - RNA, 101 nt, Human
gguucauuguaucaucacuuuaauuuuaaaauaagaauuagcuucccuuauaaaacacauggagguaggcuaguuaguauuuacaaaagaaacaguguccc

SEQ ID NO: 4182410 - RNA, 56 nt, Human
gguuccaagagauuaaguuacuugcccagggucaagaguuacuaagugcuggaacc

SEQ ID NO: 4182411 - RNA, 82 nt, Human
gguuccaagucuuugcuacugugaauagugccacaauaaacauacgugugcaugugucuuuauaguagcaugauuuauaauc

SEQ ID NO: 4182412 - RNA, 82 nt, Human
gguuccaagucuuugcuauugugaauagugccgcaauaaacauuugugugcaugugucuuuauagcagcaugauuuagaauc

SEQ ID NO: 4182413 - RNA, 70 nt, Human
gguuccaaucuucuuucuuaacaguacaugaaacaauugauggugcauuagaggaaaaagauuugguccc

SEQ ID NO: 4182414 - RNA, 124 nt, Human
gguuccagcagcggcugacaaagccuccaucagauaggugcaagagaaagcuugucucagagucuuccuguugucacagucugcggugcuguccuaagcccugaaauacaguugcucggcuucc

SEQ ID NO: 4182415 - RNA, 84 nt, Human
gguuccagcagcucaggcuccuucccauugguucucacaaagugugccucucuggguggagcaggcuggcgcuuuaguugaacc

SEQ ID NO: 4182416 - RNA, 72 nt, Human
gguuccaggccucuccuuagucuggcagugggugucucaacccgaugcccugagcagagguggggccuggcc

SEQ ID NO: 4182417 - RNA, 108 nt, Human
gguuccauggcuuuguggguacaguuacucauagaagcacuuuaucugaugacugcacuuccccaaagaaaagcuuucuguuaacuguacaaauuuugaaauagaacc

SEQ ID NO: 4182418 - RNA, 70 nt, Human
gguucccccaagggccggcauucaccaccagacacgugagugagaggccccagcucuuggccuuggagcc

SEQ ID NO: 4182419 - RNA, 66 nt, Human
gguucccggaaacaggugacaaucucauuuucuuucuugagaggauccuuuguucuggguggugcc

SEQ ID NO: 4182420 - RNA, 92 nt, Human
gguucccuauugggacagcuuuguuuucccugcugaacacaaaauccccuguucacugggagagcugacaaggagaccccauggggcuggcc

SEQ ID NO: 4182421 - RNA, 79 nt, Human
gguuccggcaggaaggcauaacugagcagccugggcauuuucaaccaaggugcagagaccacugugccuuccugcuacc

SEQ ID NO: 4182422 - RNA, 56 nt, Human
gguuccucccagcaauaaaacgcuaucucuaccugcuguuuaugagcugugggacc

SEQ ID NO: 4182423 - RNA, 63 nt, Human
gguuccugucuggggacucccuggguaacccuguccugcccauggcuucccuaggcacauuuc

SEQ ID NO: 4182424 - RNA, 56 nt, Human
gguucuaggauuaggaggcccaguauuccauuuugggugaacugcuaugaagaacc

SEQ ID NO: 4182425 - RNA, 61 nt, Human
gguucuauuaauuuuggguaguaaauccuuuccuuuuagacuccaaaaguuugguggaacc

SEQ ID NO: 4182426 - RNA, 61 nt, Human
gguucucaaauaccauguaucaucagucauuguuuugucugcauguuugugucugagaacu

SEQ ID NO: 4182427 - RNA, 89 nt, Human
gguucucaauuuccugugcagcagcuugauccuagaaauguguguuacaacuuuuuauuucuuaguuugccacagaggaauagaggacu

SEQ ID NO: 4182428 - RNA, 71 nt, Human
gguucucuccugugccucucuaagcuuucuacaacuauaaauuaauagauaaaguuuggagucaggagacc

SEQ ID NO: 4182429 - RNA, 85 nt, Human
gguucucuuggacuuagccuggguugucugcaucugggaaggacuuggacaggaaagagcuaggcauaggagcugaaagggaacc

SEQ ID NO: 4182430 - RNA, 77 nt, Human
gguucugaucagaugacuaugaccaacacuuuguuacaagacagaaaugauggaaauauguaaucugguuacugacc

SEQ ID NO: 4182431 - RNA, 69 nt, Human
gguucuggaggagcugaucccacuacugauguuucuggacaaaguuagugaagcucaucacagcgaacc

SEQ ID NO: 4182432 - RNA, 58 nt, Human
gguucuguccauucagugcagucauaauuugcauacugcuuccuggauggccagcauu

SEQ ID NO: 4182433 - RNA, 55 nt, Human
gguucugugugaaugguauuuaaaacagaagcagauaccauuugccaaaaggauc

SEQ ID NO: 4182434 - RNA, 59 nt, Human
gguucuucaaucagcuguacuuauguaaauaagaauucaggagucaguugauggggacc

SEQ ID NO: 4182435 - RNA, 93 nt, Human
gguucuucccagagagaccagccuugccaauuuugcaguauuguugaaauaagaaagaauuucuggaagauugcaaggcauuuggaaagaacc

SEQ ID NO: 4182436 - RNA, 59 nt, Human
gguucuugggccgucugcuacauuuccgugauggagguggcagagcuggcccagcgacc

SEQ ID NO: 4182437 - RNA, 90 nt, Human
gguucuuuccccuccuccccgcuggcgugucaaagaugggagguuaucuuuccuguguuacccuugcagugagggggaggccugaggacu

SEQ ID NO: 4182438 - RNA, 71 nt, Human
gguucuuucuguuacuuuuaccuuagauauucuggucccaugaauguaccugaaauagccuagaaagcacc

SEQ ID NO: 4182439 - RNA, 58 nt, Human
gguucuuuuuccuuucaguccuuccuuaauuaucaguaggcugaaaguagaaaguauu

SEQ ID NO: 4182440 - RNA, 86 nt, Human
gguugaauagaaugagggagaugauguagaaagcuguuuugauauguaacucuucaugcucccauuuccuacauucuuauuagucc

SEQ ID NO: 4182441 - RNA, 58 nt, Human
gguugaaucauucuuugcaccguccaguuaagguccugguucgagggcugaaucaacc

SEQ ID NO: 4182442 - RNA, 68 nt, Human
gguugaauuuuaugacaauauuccaccauuuuugacccauagaaauggcagugucauaaggcucaacc

SEQ ID NO: 4182443 - RNA, 73 nt, Human
ggucccuccugggagagcacggaggggucaucucccuuaggagccacccucacagcuucccggggcuggggcu

SEQ ID NO: 4182444 - RNA, 71 nt, Human
ggucccugcucagcuguccucacgcugcaucaugcuggaugaucacagcuggggcucagcugcucagggcc

SEQ ID NO: 4182445 - RNA, 84 nt, Human
ggucccuguugcccugcccagcuucccgagugcacauacguguggauuacaggugggcuggggacccaggggacggcugggauu

SEQ ID NO: 4182446 - RNA, 60 nt, Human
gguccggcugaggaucuccaggccuguucaugcugccugggccaugcccagucccagacc

SEQ ID NO: 4182447 - RNA, 123 nt, Human
gguccguccugucuugaugucuugaugugacuguaugugcccugggggcucacugugguuuacaaguggcuugugaagcuccugggagcaggugguacacccagugcugaagacagggucgcc

SEQ ID NO: 4182448 - RNA, 73 nt, Human
gguccuaagcagucaggcagguacaacccuggcaguaggucccaagggugcaucugucugagugcuuaggacc

SEQ ID NO: 4182449 - RNA, 105 nt, Human
gguccucagccucuccccugccuugggguccacaccgcaggacagggcagcuucuuaccuucccgggugggcugcgaggccagggacaaggaguacugaguggcc

SEQ ID NO: 4182450 - RNA, 58 nt, Human
gguccucuggugaaagcauucccccuuuuggaaaugggaucuguaaaccuggagaacc

SEQ ID NO: 4182451 - RNA, 58 nt, Human
gguccugaguaccuauguuuauugcaucaauaaaugaauaagaaggcauuacgggacu

SEQ ID NO: 4182452 - RNA, 57 nt, Human
gguccugcuggcucagcugagcuugugcagagaaagggcugggucaugcagcuggcc

SEQ ID NO: 4182453 - RNA, 55 nt, Human
gguccuggaaguguaaguggcaaggggauuuucucugggacuucuuucuaggauc

SEQ ID NO: 4182454 - RNA, 74 nt, Human
gguccuggccugauaggcgguuugaggaagcugagugggagcugaccuccucugcgcccuugaucagccagacc

SEQ ID NO: 4182455 - RNA, 98 nt, Human
gguccugguggacagcaaacuugagccaagggcuugggacacccucugaccagaccaugacacccagcaaggccagcucagggcuauccagcagggcc

SEQ ID NO: 4182456 - RNA, 82 nt, Human
gguccuguaucuuagagagucguguuuuguuucaugcuugauugugucuaacacacaugccuuuccuaaguauaucaagacu

SEQ ID NO: 4182457 - RNA, 59 nt, Human
gguccuucaguagguuccagacgugggugugugauagugucaggaacaccugaaugauu

SEQ ID NO: 4182458 - RNA, 84 nt, Human
gguccuugaagagaaucagaagguugaugacugagcagccucugcaaaauacauuaauuucuauuuuuaccuucagaugggacc

SEQ ID NO: 4182459 - RNA, 62 nt, Human
gguccuugcuucgguccaguacagugacauuucuuucauguuugggcugacugccaagggcc

SEQ ID NO: 4182460 - RNA, 106 nt, Human
gguccuuggguggcugaaccuuccagcuggggcaguggcuggggagccugcucugagcucaccccuugcccaggcuccagcugggaugacgugagcaccuuuggcc

SEQ ID NO: 4182461 - RNA, 74 nt, Human
gguccuugucucuaaaacaauucaagguugaaggacuaacccuccucucaacaguggcaaagaggcacggggcu

SEQ ID NO: 4182462 - RNA, 69 nt, Human
gguugauuugaaguaaauacuuuuuguuagcaauaaauacuuugcuugaaacauugcuucaauguaacc

SEQ ID NO: 4182463 - RNA, 57 nt, Human
gguugcaaacuccugggaucaagugauccucccaccuugguccccauccuugcgauu

SEQ ID NO: 4182464 - RNA, 82 nt, Human
gguugcaaauggaggccuggcagccucguccagugccaagaacugcucugagcaucagucaccagcagccuuccauucaacc

SEQ ID NO: 4182465 - RNA, 68 nt, Human
gguugcaacuucucccaucacucuucucuaaaacugaauggggaaaggagggacuggagugugcuacc

SEQ ID NO: 4182466 - RNA, 63 nt, Human
gguugcagagugcugauuucucauuguauacucacaugguugaaagagagagagcaugccacc

SEQ ID NO: 4182467 - RNA, 62 nt, Human
gguugcaggguugaccaauaggcuuaauaacaucaaggccccuggacagcagcuuugcaauc

SEQ ID NO: 4182468 - RNA, 81 nt, Human
gguugcccagcuaggaagggaaaggcuucaacucuagguuagacucccagccucuucucuuucuccucugcugggcagacc

SEQ ID NO: 4182469 - RNA, 55 nt, Human
gguugccggggcaggacuggaaaucaguuucuuuccucucacacccaaggcagcu

SEQ ID NO: 4182470 - RNA, 83 nt, Human
gguugcuagagggcuggcccugggcagaggcaacaugaaaaggggccuuuucaugcccccauagucaccccauugaggcagcu

SEQ ID NO: 4182471 - RNA, 119 nt, Human
gguugcuuccaagaauaaaaugguuguuuuaagaauguuuucccuuuuuucucuuuuauuuacuggugggcagaggagagaacauuauauaaacagaacaucaguuaauuaauugcacc

SEQ ID NO: 4182472 - RNA, 96 nt, Human
gguugcuuucucuguguccuaugcuuucugaaugcuugggcucaccacaauucuaaaauagggacccaggaaaacauggugcagagaaggucagcc

SEQ ID NO: 4182473 - RNA, 94 nt, Human
gguuggaagcugagggaccuugccggcucugagcucagcgucagaguuuagcaaacagugaagcgugcucggugcaggguucggcuugcugacu

SEQ ID NO: 4182474 - RNA, 58 nt, Human
gguuggaggugggaauagcuaguuauccaugacccaauuuauagcucuauuucuagcc

SEQ ID NO: 4182475 - RNA, 59 nt, Human
gguuggauuugaaguuauuacugcaggagauuaggucagaguaugcuacaaagccagcc

SEQ ID NO: 4182476 - RNA, 58 nt, Human
gguuggcaaggccagucucucaaggugauugagaauacacagcugguccuugguaacu

SEQ ID NO: 4182477 - RNA, 79 nt, Human
gguugggacagaccauguagcaccuuccacuuaauuccuauuacuuauuuggagguagcagcacauggugguuuuauuc

SEQ ID NO: 4182478 - RNA, 85 nt, Human
gguugggaggggcagggcacuuuacccauagcuugguaaggugacucuccagcccuggugccaagguuccccuccacuccccacc

SEQ ID NO: 4182479 - RNA, 69 nt, Human
gguugggcgaaagcaauugugguuuuugccauuaaauggcaaaaaaacacaauuacuuucgcgccaacc

SEQ ID NO: 4182480 - RNA, 90 nt, Human
gguugggcugaaggaaaccccggugaaacccacaccuguaaagaugcuucucacagugggacuuuuaucgcuuggguccuggucacaauc

SEQ ID NO: 4182481 - RNA, 130 nt, Human
gguugggggcggcuggaggccucgggguggcggccacgcucgggcagggcaggagaucugcgcucaguccuggagcccuucuuggccuuuguggcccugucacucuuuucaccccuggcuggcccuagcc

SEQ ID NO: 4182482 - RNA, 68 nt, Human
gguugggggugagaaggcaggggcacuccagggacuggcaucacccgagugucuacucacucccaggc

SEQ ID NO: 4182483 - RNA, 111 nt, Human
gguugguaaugaccgugagccuuuucucccaacucuggaagccaguguccccgcaauuggcuuguacgguugggagaaaacuuugagaccaggagucaccucuaucugauc

SEQ ID NO: 4182484 - RNA, 74 nt, Human
gguugguacaaaaguaaucguggcuuuugcuauugaaaguaauggcaaaaaccacaauuacuuuugcacugacc

SEQ ID NO: 4182485 - RNA, 65 nt, Human
gguugguagcagguucucugcuccuuaguuccugaguacuucugagcagacacuugugaccuucc

SEQ ID NO: 4182486 - RNA, 74 nt, Human
gguuggugcaaaaguaaccaugguuuuugcaauuaaaauuaauggcaaaaacugcaauuacuuuuacaccaacc

SEQ ID NO: 4182487 - RNA, 74 nt, Human
gguuggugcaaguguaauugugaucuuuucccuuacuuucaaugccaaaaaucacaguuacuuuugcaucaacc

SEQ ID NO: 4182488 - RNA, 58 nt, Human
gguuggugcugcucacaucuggagguaaacaagaauugcuugugagcacguaucaucc

SEQ ID NO: 4182489 - RNA, 75 nt, Human
gguuguaagcagaucuggguagugcaagacaugaacucugccagauccaaacuaugcaucuccccagauacaauc

SEQ ID NO: 4182490 - RNA, 64 nt, Human
gguuguacacugaagugucuugguauaauaguuuauaaugaaaauaucuucagugaaugcaacc

SEQ ID NO: 4182491 - RNA, 66 nt, Human
gguuguagcuuaugggaaacuccagaggcuggacaagaucucugagguucccugggucccacagcc

SEQ ID NO: 4182492 - RNA, 126 nt, Human
gguugugcucaaaguccuguuugcauguuaagcacaauguuuuuguucaaagaguacauuuauauggaugacuugggaggcugaaggacauuguguuaggaggcaaguaggguuugaagcauaccc

SEQ ID NO: 4182493 - RNA, 64 nt, Human
gguuguggaagugaacaaccaaggcaggugguacugccauuuccugauagaacacuuuccaauc

SEQ ID NO: 4182494 - RNA, 57 nt, Human
gguuguguccuuacaugauagaaaaggcaagacauuucuucuguaaggacauuaauc

SEQ ID NO: 4182495 - RNA, 79 nt, Human
gguuguuggccagcuuucucagaggcuucuaggcagaugugucuucaugucuccuugggaaggcuucagucguguggcu

SEQ ID NO: 4182496 - RNA, 69 nt, Human
gguuguuuugucuuuuuuuguacugaucucagaugagaccacugaugaguaggcagacaaggcccugcc

SEQ ID NO: 4182497 - RNA, 55 nt, Human
gguuguuuuucuggaagguuuguggucuagccauugaacagagagaaaaacaucc

SEQ ID NO: 4182498 - RNA, 112 nt, Human
gguuuaagucccauuaccauugaugugagcuaaguacucucaucaagaggcuugggagcccuugaguuauuuagauucuuuuuguaacauuacaggagaggggaaaaaagcc

SEQ ID NO: 4182499 - RNA, 66 nt, Human
gguuuaaugagcucagcccaaagagcaguguuccuaaacggggcauggcagcaagagcucauggcc

SEQ ID NO: 4182500 - RNA, 72 nt, Human
gguuuacaaagcaguuauaguaucuuauuuuuccucaagagccuugugagguaagagcuauuauugcaaacc

SEQ ID NO: 4182501 - RNA, 58 nt, Human
gguuuagaugauuuucagucaaagcaauucuauugucaccuggaaaucacucuaauuc

SEQ ID NO: 4182502 - RNA, 108 nt, Human
gguuuagaugggggaguuaauuagggucugaggguugugcuggaggacaugggguacuugcccauaagguccuuguauagaugcagacacuuggcuccauugccugcc

SEQ ID NO: 4182503 - RNA, 92 nt, Human
gguuuauccuguucuuuacuagcagaguagugccuccagauuauuuauauagucaggauuuacaaacuucaguuuggcuggaaugggaagcc

SEQ ID NO: 4182504 - RNA, 83 nt, Human
gguuuauuuucaugugcauuuagguucauguguauguuugucccuguguacuuuuguguaucugugugcauaugaugugagcu

SEQ ID NO: 4182505 - RNA, 58 nt, Human
gguuucaacuucaaccucuccauuuuauacuuuguuuugugaggcugggguuggaacu

SEQ ID NO: 4182506 - RNA, 124 nt, Human
gguuucauggaaaauagagaauugcguguuagaagugccagguaggcauacagagcugagaauguucuucuucaucuaucuggccccuuuuauauaagcucuuaauauggugaccaugagaacc

SEQ ID NO: 4182507 - RNA, 93 nt, Human
gguuucauucacuuuuguucaacaucacuuccaccuucccuugugcuucaauaagauaaugggugaggugauagagcaaaaaugucccuggcc

SEQ ID NO: 4182508 - RNA, 82 nt, Human
gguuuccaagguuauggcagauucugguugauacuugcaaacaacugacaagaugaaucaguauguguccuagcaggaggcu

SEQ ID NO: 4182509 - RNA, 56 nt, Human
gguuuccaccuugcuaugagaagagugugaagcaguucucucuagggguggaagcu

SEQ ID NO: 4182510 - RNA, 130 nt, Human
gguuuccauagcauuuaguuuagccaaaaguaaccuuagcugaggcaaauaguuuuaagugaaaauuuauuuaucaaauacuacuuuggaauuuuaggaaagguuuuuuuuaaauuauaauaugguuacu

SEQ ID NO: 4182511 - RNA, 72 nt, Human
gguuuccucucacugggacauauugcuaguguuggcugacaaucaguugccauguguaccugagauaaagcc

SEQ ID NO: 4182512 - RNA, 63 nt, Human
gguuuccugucaaggauuguuuguugaaaucaucuuacagccccauucuucagcagugagacc

SEQ ID NO: 4182513 - RNA, 65 nt, Human
gguuucuagaugcggggcuugugcugaagccucucccauuggacuagaccuugcuucuggauguc

SEQ ID NO: 4182514 - RNA, 114 nt, Human
gguuucuaggaaaugaauuccauguacaguagagccagguucaguugaccucacuggagaccuugaacccagcuugcugcaccgugggguccuuuaaucaucucccugcugacc

SEQ ID NO: 4182515 - RNA, 59 nt, Human
guagggacuguucucaccugagcuucuccagggcugaagcugggugugaccaucucugc

SEQ ID NO: 4182516 - RNA, 60 nt, Human
guagggaugacucuuggcugauuccuaaugugggggguaggguguuggggucaucucuau

SEQ ID NO: 4182517 - RNA, 55 nt, Human
guagguacuuaggauuaguucucaguuuuuacuguuagaucucugcagugccuac

SEQ ID NO: 4182518 - RNA, 66 nt, Human
guagguauuaaagauguguuguugguuuccaaaaaggaacacuggaaauaaauuuugaauguuugc

SEQ ID NO: 4182519 - RNA, 68 nt, Human
guaggucaucagauugacaagggaggcaaagcaauuuggaauuagucucucuggcaaaggaugccuau

SEQ ID NO: 4182520 - RNA, 94 nt, Human
guaggucucaggcacuucggcagcgugguagaggugacaauuccaaaggaggcagccacaguggugcuagcugcccgaaggucucagagaaagc

SEQ ID NO: 4182521 - RNA, 82 nt, Human
guagguggggagagggcccauguugggcugcugggaccuccagaccagcgggagaagggccuuagacuccagauucacuuac

SEQ ID NO: 4182522 - RNA, 69 nt, Human
guaggugucaguacaaauguccauugcacccuaccuuuuuagugaugggcucuguaaagugacaccugc

SEQ ID NO: 4182523 - RNA, 72 nt, Human
guagguuacugccaugggcaucugaggcucagucuuccugggaucuuuugagauacuguggaccacaccuac

SEQ ID NO: 4182524 - RNA, 67 nt, Human
guaguaagcauucaauaaguuccaucauuuguugaaaguggugcugacaguucugagugcaaacugc

SEQ ID NO: 4182525 - RNA, 93 nt, Human
guaguacuugcuucauagggcuauucugaguaauaauggguugauuuuucuauaaugcauuuagaauaauucaugacauuuaguaaguauuau

SEQ ID NO: 4182526 - RNA, 72 nt, Human
guaguagaaagugcauuagauagaaugaugcuuguuuggaaguguuuuucuaauuguaaugcaaucuacuau

SEQ ID NO: 4182527 - RNA, 75 nt, Human
guaguagaauucauucugggcaaacacugaaaaaagugccuuacaguauuucugcucaugaaagaguuucacuau

SEQ ID NO: 4182528 - RNA, 105 nt, Human
guagucuaccauauuagauucuuauuccaguuggguucuaauacauaguuccuguguauuugucuuauagggaacagcauguaauuaggaaauuugguaauuuau

SEQ ID NO: 4182529 - RNA, 64 nt, Human
guagucucagcuacuugggaggcugaggcaggaagauugcuugagcccaggaguuagaggcugc

SEQ ID NO: 4182530 - RNA, 73 nt, Human
guagucuccacuguagaaguuaauugaugaguaguagccuacaaucaggcucuagcuucuccaggaacacuac

SEQ ID NO: 4182531 - RNA, 88 nt, Human
guagugaaaauuaaauuacucaaugcacauaaagagcuuggaacagugcugggcacuuuguuaguguuugauagguuuuagucauuac

SEQ ID NO: 4182532 - RNA, 74 nt, Human
guagugaaguucucaggaggagaauaaauacauuagugucauuuuagagguguucauucucuccauucagcugc

SEQ ID NO: 4182533 - RNA, 93 nt, Human
guagugccaggggcaggaauggccugcugcagugugacaguucugucauaggagagcugcuuugcugggcaggcccuugacucaggauaauac

SEQ ID NO: 4182534 - RNA, 68 nt, Human
guagugcgcauggccuguuugucaccuguaaaugaaggguuagcucaccaacaggcucugcccacugc

SEQ ID NO: 4182535 - RNA, 77 nt, Human
guaguggggccauccugggcacugcaggguguugagccucauccccgggcuccacucaccagaugccaggaccacac

SEQ ID NO: 4182536 - RNA, 61 nt, Human
guaguggguacugggcaggcagagagagaaauuucuugguacaaaccucaugucccaaggc

SEQ ID NO: 4182537 - RNA, 91 nt, Human
guagugucuuagaagacuggauaaauggaugauuugucucccagagcuugaauucauccauuuaugcaagauguuuuaagagaauggcugc

SEQ ID NO: 4182538 - RNA, 56 nt, Human
guaguguguaggcacugugcucugaugugugucaggugucagugagagcacaguac

SEQ ID NO: 4182539 - RNA, 100 nt, Human
guaguguuguucacgaagaauuuuguuuuauuuucuucuguaauuccuuuuuuccccccggaguauaaugacagccagauucuucucuaucaucuacugc

SEQ ID NO: 4182540 - RNA, 85 nt, Human
guaguguuuaauguaacaggaagaacagaauccuagcugaucgguggacuacugggaguucuccaugucccuauauuaaaauugc

SEQ ID NO: 4182541 - RNA, 59 nt, Human
guaguguuuggaugauagagaugaacuucuaaaauguucucagugucaguagccacuac

SEQ ID NO: 4182542 - RNA, 87 nt, Human
guaguucuggaguuggugcaggaaucugcaauugaaaaaguauuuugaguauuguaauucaaguaguucuugcauuuugagaaauac

SEQ ID NO: 4182543 - RNA, 55 nt, Human
guaguuguaaauuggccacagucguucauacgagugcucaugagcccacagcugc

SEQ ID NO: 4182544 - RNA, 78 nt, Human
guaguugucucuuggucuacauuugugucuuuuggugcacaaaugaaaagacacaaauguagaccaaaagacaacuac

SEQ ID NO: 4182545 - RNA, 69 nt, Human
guaguuuagcuuucaugaaccuggucguccacaauggacugccaggauuuuguaaagucccuaaauugc

SEQ ID NO: 4182546 - RNA, 90 nt, Human
ggugcucagaacuuguuucauuggcucccugaugaauccaaaaauggcaagaggaguccccaggacucaguuagugauaaggugagugcc

SEQ ID NO: 4182547 - RNA, 58 nt, Human
ggugcuccacauugucuuuguguaugugcagaaauuauaaacagaacucaggggcacc

SEQ ID NO: 4182548 - RNA, 72 nt, Human
ggugcugacaaacaagguggugucaguuauggcacuggccaucuuucugagacccuuagucuuugucauacc

SEQ ID NO: 4182549 - RNA, 73 nt, Human
ggugcugacauucagagucuggcaggcaguccagagaggugggaaacagcuggacucuggggucagcucaacc

SEQ ID NO: 4182550 - RNA, 61 nt, Human
ggugcugaggaaaaaugugacucuaauuuugcuacaagaagagauacaucuuucccacacc

SEQ ID NO: 4182551 - RNA, 55 nt, Human
ggugcugccuauagucugaaacacugcccuucuguuucaugagcugugaagcacc

SEQ ID NO: 4182552 - RNA, 83 nt, Human
ggugcugcugcuuuuuagcauauggaauaaggcuuguuaguuccaugucaguccuuauuccuauauuccuaugcauagcuucc

SEQ ID NO: 4182553 - RNA, 58 nt, Human
ggugcuggacacguggcacuccuuguucuccugcaggaagcucacguaguccugcacu

SEQ ID NO: 4182554 - RNA, 97 nt, Human
ggugcugggagguccagggcacgggcagugagcacagccugcaccaggugaacgggcacagguggugccuccucccuuccuggcugccccaugcgcu

SEQ ID NO: 4182555 - RNA, 69 nt, Human
ggugcuguguuaggcuuuuucucaugucaucacaucaaccucucagugagccagcuaucacacagcauu

SEQ ID NO: 4182556 - RNA, 79 nt, Human
ggugcuuaaagaauggcuguccguaguauggucucuauauuuaugaugauuaauaucggacaaccauuguuuuaguauc

SEQ ID NO: 4182557 - RNA, 103 nt, Human
ggugcuuagagacaguaguauagauauggaauuuuauucuaagcacguauaaaguuauuauaguguugauagcaguggagugccauagucugauuuaagcauu

SEQ ID NO: 4182558 - RNA, 109 nt, Human
ggugcuucaagaagggccucucugagagagcugagggcaggauggggugaccagcuauccugguuugcccagaacugucccaguuuuagcacugaaaguccugggcacu

SEQ ID NO: 4182559 - RNA, 75 nt, Human
gguggaacuggaggggaaaaugguaguauaaccauauugguauaaaaugccuaccuuuacuucaccacuuccacc

SEQ ID NO: 4182560 - RNA, 78 nt, Human
gguggaaugaguuacagagaggauuaugguggggcguagccucauucagugauucauuuguacaacucaauucccauc

SEQ ID NO: 4182561 - RNA, 77 nt, Human
gguggaaugaguuucccaaugucuuaaagaguugcuaaacaucagauguaggauaugguagaaaucauucccaaacc

SEQ ID NO: 4182562 - RNA, 65 nt, Human
gguggacagucugucugucaaguucaucuccauguucuuggagguuggcagaugcauuggccucc

SEQ ID NO: 4182563 - RNA, 59 nt, Human
gguggacccuuggauuucugaagacauuaauugucuuaauaguauccagguuccuugcc

SEQ ID NO: 4182564 - RNA, 79 nt, Human
gguggagaagggagugaggucaggaucucagggaaagaacacuuuaccuacugcauccaggccucuugcugcucacacu

SEQ ID NO: 4182565 - RNA, 79 nt, Human
gguggagcuggacgcccuugcaaccgccaccccuccugcucauuaacagugaccacuggcgcugcgagacccacucccc

SEQ ID NO: 4182566 - RNA, 69 nt, Human
gguggaggaugugccaccagcuuugcaacucccaaggggccuuagcagucuggugggcagauuccuacc

SEQ ID NO: 4182567 - RNA, 68 nt, Human
gguggaggcacaccucagacugggagcaccaguuucaauauuguuuccaugaggcaugccgcucagcc

SEQ ID NO: 4182568 - RNA, 118 nt, Human
gguggagguagagguugagguuauguauggcaggauacccaguccggcuuccaguuggaucaaggcaucuggguuucuugacccaucccacuugacucuuucauuuagcccuuccauc

SEQ ID NO: 4182569 - RNA, 55 nt, Human
gguggaggugggauuugaaccaaggucagccugacuccaaagcucacguuccauc

SEQ ID NO: 4182570 - RNA, 57 nt, Human
gguggagguguccaacucgugggugugccugggcgucaccuacccccgcagcucccc

SEQ ID NO: 4182571 - RNA, 65 nt, Human
gguggagugauuagaaaguacacuuggguguugauucaagcuacagucuucaguuuagcuccacc

SEQ ID NO: 4182572 - RNA, 56 nt, Human
gguggauaugcaaguagcuuucacacuaggaauugugaagccugaggcauagcccc

SEQ ID NO: 4182573 - RNA, 62 nt, Human
gguggaucuggcuguguccuggccugggucagcuuugccaguaaaacaaaggccauguuccc

SEQ ID NO: 4182574 - RNA, 108 nt, Human
gguggauuaaaaauauaaucuggaggaagaauguuuuggcugggacccacacacuuuuuuucaaaaagcuuuaugaucucucagcuacaauuccucuugauuuucacc

SEQ ID NO: 4182575 - RNA, 79 nt, Human
gguggauuauauuucuaaggacaaggucuuggagagaugaggucucccagcgaugaggucacuugaaggccccuccacc

SEQ ID NO: 4182576 - RNA, 61 nt, Human
gguggcagcauaaagcauuuagcugcaaaugaauuuuccagugugagugcucauguccauc

SEQ ID NO: 4182577 - RNA, 125 nt, Human
gguggcaggaaaaauggugggcacauuuccagaaugacaaaugggagaagcaaucgugacaucuccaggugggggaagcauaggaggaagagguuguucucucaggaaguugccuccuagccucc

SEQ ID NO: 4182578 - RNA, 59 nt, Human
gguggcaucucaguucaugggcacagugugauuguuuccauuuagcaugcgaugucauu

SEQ ID NO: 4182579 - RNA, 70 nt, Human
gguggcccagcugcagaugguggauuagccccaaugcugucugccauugaugagcuggcauuaugccacc

SEQ ID NO: 4182580 - RNA, 98 nt, Human
gguggcccauuuccuguaaucccagcuacucaggaggcugaggcagaaucgcuugaaccugggaggcggagguugcagggagcugagauggcgccacu

SEQ ID NO: 4182581 - RNA, 66 nt, Human
gguggccucagcuuuuuguuuacauaguuuuaguccuugcuuuguaaaacaaaauuuguggagacc

SEQ ID NO: 4182582 - RNA, 81 nt, Human
gguggccuucugcaaaccaaggagggaggccacagaggacaccaacccuucuggcuucuugaucuuggacuugcaggcucc

SEQ ID NO: 4182583 - RNA, 73 nt, Human
gguggcgccguaguguagucggaguggcacagcugaaacucuuagaggccucugcaauuacauugugcccauc

SEQ ID NO: 4182584 - RNA, 58 nt, Human
gguggcggccugggaauaaccuuggcacuuguuaccuuggaaaucaccaggcuccacc

SEQ ID NO: 4182585 - RNA, 74 nt, Human
gguggcuacaggccuggggucccggcuuagaggaccucugagagcucuggggccccuucuuggucgugguugcc

SEQ ID NO: 4182586 - RNA, 55 nt, Human
gguggcucacaccuguaaucccagcacuuugggaggccgaggcagguggaucacu

SEQ ID NO: 4182587 - RNA, 55 nt, Human
gguggcucacaccuguuauccuaacacuuugggaggccgaggcagguggaucacu

SEQ ID NO: 4182588 - RNA, 55 nt, Human
gguggcucacgccuguaaucccagcacuuagggaggccgaggcagguggaucacu

SEQ ID NO: 4182589 - RNA, 55 nt, Human
gguggcucacgccuguaaucccagcacuuugggaggccaaggugggcggaucacu

SEQ ID NO: 4182590 - RNA, 55 nt, Human
gguggcucacgccuguaaucccagcacuuugguaggcugaggcagguggaucacc

SEQ ID NO: 4182591 - RNA, 66 nt, Human
gguggcucaguagcaguguggucagaaggagaaccaaggccuccuggcuuccagagcugcuccacc

SEQ ID NO: 4182592 - RNA, 55 nt, Human
gguggcucaugccuauaaucccagcacucugggaggccaaggugggcggaucacc

SEQ ID NO: 4182593 - RNA, 55 nt, Human
gguggcucaugccuguaaucucagcacuuugggaggccgagauggguggaucacc

SEQ ID NO: 4182594 - RNA, 55 nt, Human
gguggcucaugccuguaaucucagcauguugggaguccgaggcaggcagaccacc

SEQ ID NO: 4182595 - RNA, 58 nt, Human
gguggcucugagcuggccuuuccauggcaugcacugcccagagccccucagcgucacc

SEQ ID NO: 4182596 - RNA, 69 nt, Human
gguggcuggagggacuggcagggagguggggcuugcccugagccuuagcagggagucuguccagccacu

SEQ ID NO: 4182597 - RNA, 68 nt, Human
gguggcuggcagguaaagccccggggcaguaggauccggaacgucccgguggccuccugccugccucc

SEQ ID NO: 4182598 - RNA, 88 nt, Human
gguggcugggauggcccaggugcacccagaggccccagcccuuuggcugccuuuggguugugacuuggguugucucugaggcccugcc

SEQ ID NO: 4182599 - RNA, 60 nt, Human
gguggcuuagugaccucauuuacaguguuucauacacucugaaacuaccuacaagcuacc

SEQ ID NO: 4182600 - RNA, 67 nt, Human
ggugggaaaacagaaugcaggggaugcugcccaagccugggcgcuccugaggguucugcaucucacc

SEQ ID NO: 4182601 - RNA, 66 nt, Human
ggugggagcaguucagguguggcugauuuggguuugacagaagccguacggaugcuguuucuuucc

SEQ ID NO: 4182602 - RNA, 84 nt, Human
ggugggagguggcagaggugggaaguccaauguucuagaaucuaaauuggugacucggagcccuagcugugcaucagaaucacc

SEQ ID NO: 4182603 - RNA, 68 nt, Human
ggugggagugggcacaguuacggucuuugaaccccagcauggacauuuaacaaucucuacuucucauu

SEQ ID NO: 4182604 - RNA, 60 nt, Human
ggugggaguggggaagcagagugcuggccaagccaagaccauuuaugcccccauuccccc

SEQ ID NO: 4182605 - RNA, 75 nt, Human
ggugggagugucugcugggccuggucucugaggcaggcaugugucugcccagcaaggcagcagcagcuucugacc

SEQ ID NO: 4182606 - RNA, 84 nt, Human
ggugggcaauugcuguguccucacuguaugcaaggugcuuuuuauguuucucugcauaauuuugaggcagggauuauugucccc

SEQ ID NO: 4182607 - RNA, 56 nt, Human
ggugggcagagccaguucaugaaggauuuaccauuucugggcugcugcugcccauc

SEQ ID NO: 4182608 - RNA, 96 nt, Human
ggugggcagggaagcgacaggcaggguuuugagauggggaaaucggagccuguggcaagucugccugucacuggauguagcugcucugugcccacc

SEQ ID NO: 4182609 - RNA, 83 nt, Human
ggugggcagggaauuugaacugcauguauguuggauagguagccucucgguggcuucaucugcagcacugccuccugcccauc

SEQ ID NO: 4182610 - RNA, 58 nt, Human
ggugggcggcccccgcuaggcuuccugggaaagcggaagccaggcaagcacccccacu

SEQ ID NO: 4182611 - RNA, 83 nt, Human
ggugggcgugggagccccguuugcgcaaggcaggcgcgggggacuaaauggcugcuggugcagaguggggcugccccggcacc

SEQ ID NO: 4182612 - RNA, 58 nt, Human
ggugggcucugcaucagugcccauucacacagugaccacagagaagcagagcgcugcc

SEQ ID NO: 4182613 - RNA, 55 nt, Human
gguggggaggagcagauguuuugccucuagugagacaauaauuuacuucccuauu

SEQ ID NO: 4182614 - RNA, 110 nt, Human
gguggggaggguuaguuguuggcaauggaccagccacuggggaggugaguggggugagagcccccaagucgguggggguccguccagaaacuccaugccccugccucacc

SEQ ID NO: 4182615 - RNA, 65 nt, Human
gguggggccagcaguaugcgaggcaucaccaccaucacgguaaaccagagccugcugagcccccu

SEQ ID NO: 4182616 - RNA, 57 nt, Human
gguggggccaggauuugaaccucagcauuuugggcuucaaaauuggcacucuuaacc

SEQ ID NO: 4182617 - RNA, 60 nt, Human
gguggggccccgucaccgucgaggcugccuggcuuggucucaggguggcugggcccaucc

SEQ ID NO: 4182618 - RNA, 65 nt, Human
guacuaaguguuucuccagugucuuucauuguaaaauuagagaaagugggauaagcgcuuuguac

SEQ ID NO: 4182619 - RNA, 62 nt, Human
guacuacagcauggcaaagccaagaaaauuccaauuugaugcuggugccuuguuguuguuac

SEQ ID NO: 4182620 - RNA, 89 nt, Human
guacucaggcagagcucugccuugacaccuucucaaccuucuccacagaaucugggggacauagucaggggcaguauuugccaugaguc

SEQ ID NO: 4182621 - RNA, 57 nt, Human
guacucuguugauuucaaguuucucuuucucugaaauuugagaauuggucagagugc

SEQ ID NO: 4182622 - RNA, 72 nt, Human
guacucuuucucugugggcuuuaugcaucuuuugucuuauaaaauguaugaugucuacagagucagauguau

SEQ ID NO: 4182623 - RNA, 57 nt, Human
guacugcacccagucucaguaaauauuuacaacauggugagaaggggucagcuguac

SEQ ID NO: 4182624 - RNA, 72 nt, Human
guacuggauccugcacugaguggagucaguccugcucuucccugcucacuccuucugaggcaggucuugagc

SEQ ID NO: 4182625 - RNA, 95 nt, Human
guacuuaggcccugauucugguagggcauagagauguuggcauuuauucaagaugacuucugauugcuucuauuuaauucaggaaguuugggugc

SEQ ID NO: 4182626 - RNA, 67 nt, Human
guacuucccugggaggcaagcacagccuuuaggacgagcugauggucuuguggcccccaaggaggac

SEQ ID NO: 4182627 - RNA, 55 nt, Human
guacuucugccccacgucccugcaaagguuaggguaagcuuggggcuggcagugc

SEQ ID NO: 4182628 - RNA, 125 nt, Human
guacuugaagaguugugggcauuagugccaggaugcugagcuuaacccuguuagcaaauguguuguuaccacuugcuuguuaagucauguuucaggguaguauggcucaaaaauuuaccagguac

SEQ ID NO: 4182629 - RNA, 98 nt, Human
guacuuuggguuaauuugccugguuucuccaugucucauucuucucaguuguaaaauguggaugacacuugugagaaaucaaaugaaauaacugguac

SEQ ID NO: 4182630 - RNA, 107 nt, Human
guagaaaauguuaauaaugcugauuaaacuuuaaugcguuuugugucuguagccacuacauugugaauagaauagcauagaaaauugaggagcuauuauuuuuguau

SEQ ID NO: 4182631 - RNA, 74 nt, Human
guagaaacgggguuucaccauguuggccaggcuggucucaaacuccugaccucaggugauccgcccgucucagc

SEQ ID NO: 4182632 - RNA, 96 nt, Human
guagaaagcgggaauuuggugggguacauuuacugaugaaaaguaauuucucauuuaucuccucuaagaaaugugugcuuaauucuuacuuucugc

SEQ ID NO: 4182633 - RNA, 127 nt, Human
guagaacucuuuuguaauaauggaaugcaccaaaaggaaaauggaccagaguuguuaaacuccuuuugauggaguaacaaaagggcccauuuuccuugccuuuucccuaauuuagaaaucguuuuau

SEQ ID NO: 4182634 - RNA, 56 nt, Human
guagaagaacuugugccagaggguggaauaaacucucuuaucacaauucauuuugc

SEQ ID NO: 4182635 - RNA, 70 nt, Human
guagaagcuccugggacaagccguggaaguccccucaggaggcuuccgcgauguccuagguggcugcucc

SEQ ID NO: 4182636 - RNA, 111 nt, Human
guagaauuuuugaugagcuuuaauugguuguugagcuugaggaguuauuugaacugaaguaaaauaaguaaucucaaauauuuuaaguccaaaauggccaucgauaucuac

SEQ ID NO: 4182637 - RNA, 91 nt, Human
guagacagucacauaaucauauuuguaucuuuuaaauauuacuuugcagggaauguauuggaaggaagcaagagagggaaugcgauucuau

SEQ ID NO: 4182638 - RNA, 59 nt, Human
guagaccuacugaggcuuggguuccagcucaagaguuuguauuuuucagugaauucuac

SEQ ID NO: 4182639 - RNA, 62 nt, Human
guagacgugaaguuggccugucccggauugaaacucugacagcagccaccucucacccaugc

SEQ ID NO: 4182640 - RNA, 87 nt, Human
guagagaaaaaguaaaucacagaccacaaagcaaauuccuuguugggucauuagagcuugcuuuugucucggguuuggauuuucuac

SEQ ID NO: 4182641 - RNA, 77 nt, Human
guagagaacuggguccagguuugcucuacuugucuuauaacuucuaagaacaaguggcuaccuagauuauauucuac

SEQ ID NO: 4182642 - RNA, 72 nt, Human
guagagacgggguuucaccaucuuggccaggcuggucuugaacuccugaccuugugauccacccgccucagc

SEQ ID NO: 4182643 - RNA, 85 nt, Human
guagagaggucaggaugauuuuuguugauuuuguacuugcuaagucacugucuugcaaaggucagcuccuaguccuggccccuac

SEQ ID NO: 4182644 - RNA, 72 nt, Human
guagaggcaggguuucaccauguuagcagggauggucucgaucuccugaccuggugauacgcccaccucggc

SEQ ID NO: 4182645 - RNA, 72 nt, Human
guagaggcaggguuucaccauguuggucaggcuggucuugaacuccugaucucgugaucuacccgccucagc

SEQ ID NO: 4182646 - RNA, 65 nt, Human
guagaggcucuugcccuucccacacaugcagcuggauugccugugggagcagcagagagcucugc

SEQ ID NO: 4182647 - RNA, 70 nt, Human
guagagguuugaaugaggaagagcacuggccugagggaggaaguccugguccucucauucauuguucugc

SEQ ID NO: 4182648 - RNA, 61 nt, Human
guagagucucagcacugugaugcugaaaggucacccugugugugucugcugaugacucuau

SEQ ID NO: 4182649 - RNA, 93 nt, Human
guagauagaaggccaacuaggaugagcuaggcggaaauaucuguuaaugaaaaauuagaucauuuuagcuaaauggcuuucagaaauaucuac

SEQ ID NO: 4182650 - RNA, 69 nt, Human
guagauagagauguuugggccucauccagauccccucucugcccuguggggcucccaucuccuggcugc

SEQ ID NO: 4182651 - RNA, 78 nt, Human
guagauauuacaagcagcauuaccaagacauggcaaaaagaguuugucugaauuguaauguugcguuugugaaccuau

SEQ ID NO: 4182652 - RNA, 64 nt, Human
guagaucaugagaauguuuuuguuguuccgugauaaaggaucaaaagcuuuguuucuguucugc

SEQ ID NO: 4182653 - RNA, 79 nt, Human
guagaucauguauucugucuccaggaaugugucaguacugaacuuaugacccugucuggacauccuggagaaugacugc

SEQ ID NO: 4182654 - RNA, 65 nt, Human
guagauccgauuuuguugauaccaucguuguuguuguuaacaaugauguuuagauaaaauccuac

SEQ ID NO: 4182655 - RNA, 68 nt, Human
guagaucuguucauuuggcccuuuuguaugaucuauuuagcuacaguggacaagugaacugguccuac

SEQ ID NO: 4182656 - RNA, 109 nt, Human
guagauucugauuucagauuuuguauucucaaaguuaauuugcagcuuucgagcuucaguugggaauuucaaaaguguaauuaaaagaggaaguguguucaggauuuau

SEQ ID NO: 4182657 - RNA, 72 nt, Human
guagcaacuguagcccaaauucuauucugggugaaaauuauaaaguccauuuugaauuggcuaugguuuugc

SEQ ID NO: 4182658 - RNA, 58 nt, Human
guagcaccugcaggaugugcacacggucgacccacguggucuucuccagcagggccac

SEQ ID NO: 4182659 - RNA, 67 nt, Human
guagcagagcugagaguggaacccaagucucucaaagggcucugcuuccuucucucugcucugcugc

SEQ ID NO: 4182660 - RNA, 82 nt, Human
guagcagcaggggacccauauuuuagccuuuaugguuauggcaugaauggccagauuauaugguuuuuagaacuuuugcuac

SEQ ID NO: 4182661 - RNA, 56 nt, Human
guagcagcuucagcccaaauuaccaugcugcuuggaaauggcuuauagcaugcuac

SEQ ID NO: 4182662 - RNA, 64 nt, Human
guagcagugccaaggauggccugggagguuuugcucccccauaaucuucuuuggcaucugcugc

SEQ ID NO: 4182663 - RNA, 55 nt, Human
guagcccaccuggggagggcgagggggagguccugcagcugcucgcgugggcugc

SEQ ID NO: 4182664 - RNA, 57 nt, Human
guagcccucaucugcucaaaagggugucuguagcacuuuuuugagauugaggguuau

SEQ ID NO: 4182665 - RNA, 69 nt, Human
guagcgguuauaacuguuuguuuucuacaugucuguaguaaaguccuguuaacuguuaacaacugcuau

SEQ ID NO: 4182666 - RNA, 59 nt, Human
ggugugugucuaagcccccuucucagugguuuggcugggcuucugguaaagaccacacc

SEQ ID NO: 4182667 - RNA, 63 nt, Human
gguguguguggaaugcucauuuauuuguuagugaaaugaaauguuugagcaucuacaugcucu

SEQ ID NO: 4182668 - RNA, 62 nt, Human
gguguguguuugugaauguguguguguaugugacugaacaccauuuauaacauuuaagagcc

SEQ ID NO: 4182669 - RNA, 64 nt, Human
gguguuaaccagcuaaacuuugcucgaagccuucaguccuuuguagaggagcgagcuggacgcc

SEQ ID NO: 4182670 - RNA, 88 nt, Human
gguguuaucugagcuuuucagaugugugucucugaagguccaggauuuucaaaagaugaacguuuaaaucuacuuucagugugaggcc

SEQ ID NO: 4182671 - RNA, 55 nt, Human
gguguuauucugcccacgacaguaccucaacacaucucugggcagggccagcacc

SEQ ID NO: 4182672 - RNA, 66 nt, Human
gguguuccagccucuuccccucagguugaagccaacuacagaccugcugaggagggggaauuaacc

SEQ ID NO: 4182673 - RNA, 60 nt, Human
gguguugaugauaauagcaguuccaaaguucacucucaaacuguuauucccauuuucacc

SEQ ID NO: 4182674 - RNA, 86 nt, Human
gguguugcugguuuggggcaggaaguagcagucugagcacauuucuuguacaccugcuguuugccuggcucugcgccaggggcucc

SEQ ID NO: 4182675 - RNA, 76 nt, Human
gguguuggagcuggcuaauacugacuuaugagagcauauuguuaaauauucaggaauuuuaccagcagcaaccacc

SEQ ID NO: 4182676 - RNA, 67 nt, Human
gguguuuugguagauugauuauggaagucuggauagacaagccacacuaaacugcucaaaccauacc

SEQ ID NO: 4182677 - RNA, 96 nt, Human
gguuaaaaucugaaagaaauauuacauuagacccacuuucaugagaaaaagcaauaucuucucuggauggcccuggcuguuuucccuucaguagcc

SEQ ID NO: 4182678 - RNA, 64 nt, Human
guaguuuaugcugcugcagugagacccuauuauaacagguuaacacuacaguaguauagaauau

SEQ ID NO: 4182679 - RNA, 124 nt, Human
guaguuuguguguguuuguguguguguguguguguguguguguuuacuucuaugcaguuucaucacaugagcauauuuguguaaccaccaccacagucaagauacaguacaguuccaugacuac

SEQ ID NO: 4182680 - RNA, 70 nt, Human
guauaaaagcaaucgaaagcugagggagcauuuguauuugacaacguugguccaguuuuugauuagguac

SEQ ID NO: 4182681 - RNA, 57 nt, Human
guauaaagacauccauagcaggcuuuauccagccagcuucuuugggauucuuuauau

SEQ ID NO: 4182682 - RNA, 78 nt, Human
guauaaucuggccuucccaucagccucgccuuucugccuacaggagauaagaggcugguguggaggaaacugauauac

SEQ ID NO: 4182683 - RNA, 73 nt, Human
guauacaacuauuguuggguaagguuagauucuaaguaauuuucaugaauaaaaaccccacaauguuguauac

SEQ ID NO: 4182684 - RNA, 62 nt, Human
guauacagcaugaaauauugaaggcuuugguaucuuuaaggcuuagaaauucagcugagugc

SEQ ID NO: 4182685 - RNA, 109 nt, Human
guauaggcgacugucccucucaaauccucgcauuugggcaggagaugcucccuaagcauugaucaccugcccaaaugugaggauuugaguuuaggauuuaggucucugc

SEQ ID NO: 4182686 - RNA, 100 nt, Human
guauaggcuucaagguggcuuucugcugagguggcugccagccucccuggagaaggugucagcugaagaccucaaguaagagccacagugaagcucauau

SEQ ID NO: 4182687 - RNA, 79 nt, Human
guauaucuuuuccuugaugguuaaauauugaucuaguauuuauauugcugaauuauuuucuguggaggaccagauaagc

SEQ ID NO: 4182688 - RNA, 58 nt, Human
guauauggcauuuuguaagggcuugccacguaauaagccucuaacugaugucaaauau

SEQ ID NO: 4182689 - RNA, 71 nt, Human
guauauguacagcugccuuuuuuacuucaucgaguuaacauugacagguaguuugcaugcuguauguguau

SEQ ID NO: 4182690 - RNA, 65 nt, Human
guauauucaugccauuuuucuagauugagaucauagaauguaacgauuucauggcaguaauaugc

SEQ ID NO: 4182691 - RNA, 69 nt, Human
guauauuuuagacacccucacgcaaccuuucuacuucugagaccaggccugucggugucuggugucugc

SEQ ID NO: 4182692 - RNA, 128 nt, Human
guaucagaauccuggaaggcuuguuaaaauacagauugaugggcuuuacccucagagcuucugauuugggagguccaggguggggccugagaaucugcauuucuaguaaguuccggugaugcugaugc

SEQ ID NO: 4182693 - RNA, 61 nt, Human
guaucagaaucuuuggaaaugggacccaucagauguuucacaagucaaaguauucugaugc

SEQ ID NO: 4182694 - RNA, 68 nt, Human
guaucagcaaguaugcauuuggggugauuagguaagaaucuagauaauuaccaugcaacuugugaaac

SEQ ID NO: 4182695 - RNA, 81 nt, Human
guaucaggugauuuuuguccacucaguagagucuaugucucauuaagcugggcaacgggcagaaagauuacagaucgguac

SEQ ID NO: 4182696 - RNA, 74 nt, Human
guaucaguugaagacaagugauaagagaagacuaauguuucuacucauguacaaagguacuuugauguugauac

SEQ ID NO: 4182697 - RNA, 82 nt, Human
guaucauacuuugaaaaacacugugcuagucaaaugccuuugagcuacuugucaugcuugcuggugguguuuucuauguuac

SEQ ID NO: 4182698 - RNA, 71 nt, Human
guaucauaggaaugaggacaauuagcuucagguggcuaauaucugcugaguccuccuuauguccuauauac

SEQ ID NO: 4182699 - RNA, 78 nt, Human
guaucauugccuaaugcucucaguauggacauccuguuacacuaaaccauaaaaauccugagagcugggcagggauac

SEQ ID NO: 4182700 - RNA, 72 nt, Human
guauccagcgcagcugggaggcccacguugggaagucggagaccgaccccgccucccgacugcgccgacugc

SEQ ID NO: 4182701 - RNA, 91 nt, Human
guauccaguuuugucuuaggagagcuguucaaggaagauagagaaaguaagaauuuuaaagugaugcucuccuaauaugaaaacugaguac

SEQ ID NO: 4182702 - RNA, 89 nt, Human
guaucccuggagaaggacugugcaggugaacuguuugccuuuccacgugaaggcaaagagaaacugacuuccuggguugacagggaugc

SEQ ID NO: 4182703 - RNA, 81 nt, Human
guaucuacaauguuuuaugugccagguguuuaguggaaaacaaaacuacaaaacccugcucuuauggaacuuguaguuuau

SEQ ID NO: 4182704 - RNA, 93 nt, Human
guaucuagaccucaguuuccugguuugaagcagcagcacugagaugugugccagugaacugacugggauagcccagggcucugugucugaugc

SEQ ID NO: 4182705 - RNA, 81 nt, Human
guaucucacccugcauuugccgcccacuuuguucccacgggaaacaggaaggugagggugccagugcauggguguagaugc

SEQ ID NO: 4182706 - RNA, 102 nt, Human
guaucucccuccagauauuuguuaauuaugaggcauacccccauauugauuaauugcaaauggaaaaauaguagcuuuauagugaauaaaccuggcagauac

SEQ ID NO: 4182707 - RNA, 70 nt, Human
guaucucuaguaucccuuuuguagguccaaauuugacuuccucauggcccaguagaaaagggaucgauac

SEQ ID NO: 4182708 - RNA, 65 nt, Human
guaucucucugugacagcuuugcugaauauaacuuaaauguagcagaggaaauccagaguaaugc

SEQ ID NO: 4182709 - RNA, 75 nt, Human
guaucuggaauguacagccacuucacaguuaaaauaguuuuauauuuuuuaacuagcuauggauuccuuggauau

SEQ ID NO: 4182710 - RNA, 85 nt, Human
guaucuggggugacucuggggugaugucucugaggugccacucucaucucaggggaccuggcuccgagugagugaguuccagugc

SEQ ID NO: 4182711 - RNA, 130 nt, Human
guaucugguguggugagguagauaucauagcccaaauuugugcccugcaugugccuuuuggcugacagagccaaugcaucaauuaggggcagacaaggcuguguugcuucaucaccaccacugacuguac

SEQ ID NO: 4182712 - RNA, 94 nt, Human
guaucuguacugccacaauccauguugauguauauuuuuacaaucuuaaauuuagaauagauguuaauguggaucuggcuguggauacagauau

SEQ ID NO: 4182713 - RNA, 59 nt, Human
guaucuguuaugugggagaugggaaugacaugaucauuagcucuccaccuaacagguau

SEQ ID NO: 4182714 - RNA, 130 nt, Human
guaucuuaaauguaucaugaaauaccuggcacuauuguucauaaauccaugcauuucaauauaugccuauuuuuugaagugcauaaguaugauuauuuguguauacaggcuccaaguuucuuugagaugu

SEQ ID NO: 4182715 - RNA, 62 nt, Human
guaucuucaaguuccaaagugcaggguuggaaucacucuaguguuuuggaacauggaaaaac

SEQ ID NO: 4182716 - RNA, 82 nt, Human
guaucuuuaagccaucggagugaaaaauaaucaaugucuacguuaguuaaaccaccauucugguauugguaguugaagguau

SEQ ID NO: 4182717 - RNA, 70 nt, Human
guaucuuucccaccaaucacaaugcugcagucuuaguguaugcagucucuaugguaacugggaaacaugc

SEQ ID NO: 4182718 - RNA, 71 nt, Human
guaucuuucucauucucuagacccugguucccgagggcagugaaggagucagauaugggaaaguuucauac

SEQ ID NO: 4182719 - RNA, 99 nt, Human
guaucuuuuaagaaccaauggugauuuuuagggaaauguucuuaagcaauacuuaggaacaaaagguuuuccugaaagacauaguguccgcagagaugc

SEQ ID NO: 4182720 - RNA, 125 nt, Human
guaugaaaagaagugagugucugagauggguggguagccaaggacucuaauguuauagauuucugacgguuuuggcugccuagcauccauucuuucugcuguuaacauucucgauuuuuugauac

SEQ ID NO: 4182721 - RNA, 67 nt, Human
guaugaaguuggacuguauaaauuuggccuacaaaaaacggcaauuuuguaugguugaacuugauac

SEQ ID NO: 4182722 - RNA, 73 nt, Human
guaugaauuuucuuuugaccaccccuuuccccuaccaggggaauaauggcuccauggcagaggcaguuuguac

SEQ ID NO: 4182723 - RNA, 57 nt, Human
guaugagcacauauuuguaccauguguguauauagauacauauguguguguuuauac

SEQ ID NO: 4182724 - RNA, 61 nt, Human
guaugaggagccacgcaguucuuaggcguuacgauaagaaacaaccacugcucuccuuaac

SEQ ID NO: 4182725 - RNA, 72 nt, Human
guaugagugguugaaugguaaacuugacugaaagcucugagaaaagacacguguuccaagcacccgucauac

SEQ ID NO: 4182726 - RNA, 130 nt, Human
guaugaguguguguguguguuugugugucuguguauuuauaggggaaugagagugcccugggugugcacuuuagauauuccucuguacauccugugugugcuuacauggacacauucuguguacuuauac

SEQ ID NO: 4182727 - RNA, 59 nt, Human
guaugaucaacuucauguccuacagauauucgucuuaaggaaacuggguaugguuauac

SEQ ID NO: 4182728 - RNA, 79 nt, Human
guaugcacagccacguaauguggucaucagcacuguccugcugagcugcccuggccacaugcugagcugccgccacuac

SEQ ID NO: 4182729 - RNA, 85 nt, Human
guaugcagguuuauaucagaaggugagauugaauaaugcuugaugcagaaucgaaacuucucauuuaucuguauauuauguuuac

SEQ ID NO: 4182730 - RNA, 85 nt, Human
guaugccuguaaaacagcacccagaggacauacugcuccaugccaugcacagaagccuaacuggguucucguuuugcagagcagc

SEQ ID NO: 4182731 - RNA, 63 nt, Human
guaugcuuauucugugugcuguguccucauaaggguauacagguaauuugaauaauagcauac

SEQ ID NO: 4182732 - RNA, 87 nt, Human
guauggggccacugucagaggggcugugccugcugaguucaagaggaaaugcacuggcacguucuuacacuggcgugugcuucaugc

SEQ ID NO: 4182733 - RNA, 63 nt, Human
guaugguuauacugaccuacaacugcucguuaucaguccauccuauguguaggauaaccauac

SEQ ID NO: 4182734 - RNA, 74 nt, Human
guauguauguguaugcguguauguauggguguuugcacacaugcacaggugcugaugcacgcacaugugagugc

SEQ ID NO: 4182735 - RNA, 76 nt, Human
guauguccuauugguagacauuucuguuccuaauuuuuuuccacugcacaaaaagcugccgauauggucugcauau

SEQ ID NO: 4182736 - RNA, 89 nt, Human
guaugucucucugucuguuucucuuaaguuucuuuauuagcuuguccuugguuggcugcaauuaagaaacuaaaccacuagaggcaugc

SEQ ID NO: 4182737 - RNA, 67 nt, Human
guaugugagagacacacugugcauguaguuuacagacagcacugggugccacaugguuuccagauac

SEQ ID NO: 4182738 - RNA, 73 nt, Human
gggugagccagcaggccuccaguggcgcggaauauuuaucccuccuuagccacgggaugccuucuguucauuc

SEQ ID NO: 4182739 - RNA, 57 nt, Human
gggugaggcucauuuuccugaguucagguuuccuucagcagcagggaagccucaucc

SEQ ID NO: 4182740 - RNA, 67 nt, Human
gggugaggcucccuccaugaggcagaccggcgcgcagccugugaggcggguggaguggagcacgccc

SEQ ID NO: 4182741 - RNA, 63 nt, Human
gggugaggcuggcuggaggcaggugaggcagcccagccucaggagccaggaaccagcuucccc

SEQ ID NO: 4182742 - RNA, 81 nt, Human
gggugagggagcuccaaaauaagauaaggaaguugguagacuacauguuuuguuaauucuuauguuagagugccuucuccu

SEQ ID NO: 4182743 - RNA, 56 nt, Human
gggugagggccugggugcuccagauggcucagugccuggcaggacuggcuccaccc

SEQ ID NO: 4182744 - RNA, 87 nt, Human
gggugagguggaaauuacugcaucauuuucagacaaugggggcauucuagucuuuauuaggaagcaaugugcaucuucuucaagccc

SEQ ID NO: 4182745 - RNA, 80 nt, Human
gggugauggaagagcggcgaccgcgcgcuuuccucguggcgccgccagggccuggcgcguggccgccgcuccucuucccc

SEQ ID NO: 4182746 - RNA, 76 nt, Human
gggugauucuuaccugaucuuaacaaacauuacucuaugaugucugucagauauuaaguuucagguaugugucccu

SEQ ID NO: 4182747 - RNA, 59 nt, Human
gggugcaaacccguucugcaccaagugcacucggaguuuguggguauggguguguaccc

SEQ ID NO: 4182748 - RNA, 73 nt, Human
gggugcagcauagggcaggggaggaaucugaacaagauaugaguuuagcucaguucuagccccauccugaucc

SEQ ID NO: 4182749 - RNA, 59 nt, Human
gggugcagccuagaaccgaauguauguuauaaaagaggugcaggaaagugcugcgaccc

SEQ ID NO: 4182750 - RNA, 65 nt, Human
gggugcagccuuuuaggacuauuuguguuugguuaugauacaaguauguuuuaaaauguuuuccc

SEQ ID NO: 4182751 - RNA, 64 nt, Human
gggugcauucccaaggcugagacaucccuggaguaacuuuaggugucuguccugggcugugucc

SEQ ID NO: 4182752 - RNA, 73 nt, Human
gggugccacuggcaucuaguugguaggagccauggagacuucuaaaaacucuacgaugcacaggauuggcccc

SEQ ID NO: 4182753 - RNA, 84 nt, Human
gggugccugcgcucgcugugguuucuguacauggguaauagaaagcucuuguaauucuggaagccccaugccugccuugccccc

SEQ ID NO: 4182754 - RNA, 55 nt, Human
gggugcuaugugcuaggcacugaauucauaguuuaauucuggcauaauagcucuc

SEQ ID NO: 4182755 - RNA, 57 nt, Human
gggugcugauguugggguagggccaugcugcaaacgcccucuccagcuccaguagcu

SEQ ID NO: 4182756 - RNA, 97 nt, Human
gggugcugcccucagggaccaggugggugcauuccgccacccccuuauccgaggugcgcggggcuccggccuggguucugcugggggcuucuguccc

SEQ ID NO: 4182757 - RNA, 114 nt, Human
gggugcugcggcgauccgggucccggucccagcgcggggggaggauccguguuggauacacggggaagccgcacccguagcagggggacggggaccccaucugugcccagcccc

SEQ ID NO: 4182758 - RNA, 78 nt, Human
gggugcuggagagggcuuuacucugaaguaggggcggccaauauuugaucccaucauucagaaaucccucuucuaccc

SEQ ID NO: 4182759 - RNA, 72 nt, Human
gggugcuggcccugccgccacgacgucucugcagagcugcccgagccgcgggcgguuggggcgaggugcgcc

SEQ ID NO: 4182760 - RNA, 88 nt, Human
gggugcuggguucccagggacucucugccuuccaaaggaccuaccagaaaaacacccgagggaaaggcaggggcccugcccaguuccc

SEQ ID NO: 4182761 - RNA, 72 nt, Human
gggugcuuccugggcuucacagacucuguccugaggagagaggugcaguuugagaaggccagaguggggccc

SEQ ID NO: 4182762 - RNA, 76 nt, Human
gggugcuucuggcccucgucaguuucacugugaugcaaagcuguggagguaucuaaugagggucccagaaugaccc

SEQ ID NO: 4182763 - RNA, 76 nt, Human
gggugcuuugaggggcugggguugacuccaagacccccgcguccuuggagaaagcugcaggcucuggacagcaucc

SEQ ID NO: 4182764 - RNA, 70 nt, Human
ggguggaaauauacaaugugucucuugccagaggcaaaagacuuagaagagauaacaguauguuccacuc

SEQ ID NO: 4182765 - RNA, 61 nt, Human
ggguggaaggugaaggagcagcgagcucugcgugcuugccccgagcccccaccuuccuucc

SEQ ID NO: 4182766 - RNA, 65 nt, Human
ggguggagcauguguagcugaugacauuuuccagagaggaaacaucaauugcaucucccaaaccc

SEQ ID NO: 4182767 - RNA, 63 nt, Human
ggguggagccugugucccagacagauccccuaggccuaucugagacccauacaggcccacacc

SEQ ID NO: 4182768 - RNA, 55 nt, Human
ggguggagcuggaccaggagaggaguaaccaagacucacucccuccugcccaccc

SEQ ID NO: 4182769 - RNA, 74 nt, Human
ggguggagguucaaguucacuugucuacaagggaugcccuuucuacuaacaagugagccugaagcaauauaccc

SEQ ID NO: 4182770 - RNA, 82 nt, Human
ggguggaguucccucaggcagaggauggggagcgucugguguugggacucccuaguucucuaccugcuuuuaacuaauaccc

SEQ ID NO: 4182771 - RNA, 87 nt, Human
ggguggcacaguuagggacuccuguaaguguucugccuuggcuagacagacuucaccuacagcagucucuugaaaacuugguugccc

SEQ ID NO: 4182772 - RNA, 67 nt, Human
ggguggcagcucuuccucccaccggacaccgacccgcccgcugcugugcccugggagugcugcccuc

SEQ ID NO: 4182773 - RNA, 66 nt, Human
ggguggcauuugcugaagagcgguaugacaugaaaaucaaauccuugagaaaauaaaugaccacuc

SEQ ID NO: 4182774 - RNA, 79 nt, Human
ggguggccaggccaacugacauggcaaaggggcuggaucuuucuucacuugcuauguggguugugcacucagcacaccu

SEQ ID NO: 4182775 - RNA, 81 nt, Human
ggguggcccuggcagggcuggcuaggugcguucccugcagaccacgggaagcccugugcuugccugggucagggcuaagcu

SEQ ID NO: 4182776 - RNA, 84 nt, Human
ggguggccuggaccacagucuggaccugcuacagagcucuuacuugcucugggccugucucagagcuggaagccuaugucaccc

SEQ ID NO: 4182777 - RNA, 58 nt, Human
gggugggagagaugagagcagcaaccaggcucugcucacagaacuucucuucccaccc

SEQ ID NO: 4182778 - RNA, 92 nt, Human
gggugggcacaugaccagaucugggccaauccuaguaccacaccugccccuggugcagucauuggcccaggggugggcacguggccuaaccc

SEQ ID NO: 4182779 - RNA, 57 nt, Human
gggugggcaggguucuggagacuggcaucgagccacgcucccugaucccugcuuccc

SEQ ID NO: 4182780 - RNA, 57 nt, Human
gggugggcaggguucuggagacuggcauugagccacgcucccugaucccugcuuccc

SEQ ID NO: 4182781 - RNA, 117 nt, Human
gggugggccaacagcagagggaaagcaguaugaaaggcaauaacucugaguuucuucucauuauguguuacugccuuugauaggcuggacucuccuuuuuugaagguguaagcaccc

SEQ ID NO: 4182782 - RNA, 60 nt, Human
ggguggggacacaggcccacaacuugucucccugcuagggcuggggcuguguuuugaccc

SEQ ID NO: 4182783 - RNA, 56 nt, Human
ggguggggcaggauauuuuggcugcuuugggcggcucagcuagcuuggccccaccc

SEQ ID NO: 4182784 - RNA, 89 nt, Human
ggguggggccugugucucucucucuugucaccccaucugccuaggauacugggcagggccagugcagagaggaagcucaggagccauuu

SEQ ID NO: 4182785 - RNA, 67 nt, Human
gggugggggcugguggugguuucuccaggguucauuuauacugggaccaaauucaccgcccuuacuu

SEQ ID NO: 4182786 - RNA, 103 nt, Human
gggugggggugcugagagagagagagagagaacacaaagggccagcucccacuuggagcuccccucguuucucuccauuuugcucuucaggauguccccaccc

SEQ ID NO: 4182787 - RNA, 90 nt, Human
gggugggguccuguccccagaagggcagcacugggaagggucccuggcagagucucccaggagcuccuaucucugggacagaucuuaccu

SEQ ID NO: 4182788 - RNA, 110 nt, Human
ggguggguaacaggagcuacaggccagcaaugcccuuccuguccucggccuggcucaaggacugggugcagagggcaucagcgaugccaggccuagaaugugccucaccc

SEQ ID NO: 4182789 - RNA, 58 nt, Human
ggguggguguccugugaaggcucaugaucuaugugagcagagcaggcugcgcccuccc

SEQ ID NO: 4182790 - RNA, 69 nt, Human
gggugguauuuuaaaacuagcagcuaagacauaauuuuuuaaagaauucuuguuguuaguauauuuccc

SEQ ID NO: 4182791 - RNA, 64 nt, Human
ggguggucuggcaggcuggaaacccaggauaagcugagguugcauugaagccugaaggccaucc

SEQ ID NO: 4182792 - RNA, 60 nt, Human
ggguggugaaaauuaguggcuaaacauuucuaauuguuuccaucuacggcuauaccaccc

SEQ ID NO: 4182793 - RNA, 129 nt, Human
ggguggugcuuuggucaggagaugcagagaaagggcuggcugugaugagcugggaguggugaugagggccccaaucuggaggcuucuucaccugcccagccccuuucucuuucugaucucccuccaccc

SEQ ID NO: 4182794 - RNA, 97 nt, Human
gggugguucacagaggugaaccaaguaaacaauaugugauucaguuaucaaacaaguaucugaccaaaggugguuuauuugguucaccgaauuuccc

SEQ ID NO: 4182795 - RNA, 61 nt, Human
ggguguccucuggugugugcggucagucuucuucugacuguggaugccaaaggggaggccc

SEQ ID NO: 4182796 - RNA, 65 nt, Human
ggguguccugauggcauugugguuuguguccuguugaaccgggaucugugcugccgucaacaucc

SEQ ID NO: 4182797 - RNA, 83 nt, Human
ggguguccuguggggaccuggcugccacccuccuuaacaacagcuccagggugggagucuggcccucaaagaucagggcagcu

SEQ ID NO: 4182798 - RNA, 56 nt, Human
gggugugcaggucauggcgucucucagagcugggaaugcccaaugaaugcacuccc

SEQ ID NO: 4182799 - RNA, 76 nt, Human
ggguguggcagccacagaggcugggauagcuuggcacuggggucagggcucagccagccugugugccuucacaccu

SEQ ID NO: 4182800 - RNA, 58 nt, Human
ggguguggcugaaaucaaggcaggccagggacaggcacugccgccuauagcuauaccu

SEQ ID NO: 4182801 - RNA, 77 nt, Human
ggguguggucagccugggcuccagagucccuuucagcuuccuggcuaggggucaggaagccccggcucccgcagccc

SEQ ID NO: 4182802 - RNA, 74 nt, Human
gggugugugugauucuggcaggcagaagggccccggguuucuccaguuggccuguguguguugucaccacgucu

SEQ ID NO: 4182803 - RNA, 76 nt, Human
ggguguguguguguuugucuuugagaaauucaucacuuugaugaguuaagcagguagcaagcuaguuuauauuucc

SEQ ID NO: 4182804 - RNA, 57 nt, Human
gguugcagugaggugcagugauuggccagccuggaucacaugcacaucucuggaacc

SEQ ID NO: 4182805 - RNA, 56 nt, Human
gguugcagugagugugggaagucucugcccugcaggcagccuccacucacucagcu

SEQ ID NO: 4182806 - RNA, 98 nt, Human
gguugcauuucaggagugucuguggaguucugcucaucacugacuuaucuucugauuuagggaaagcagcauucccuuggacaucugaagugacagcc

SEQ ID NO: 4182807 - RNA, 69 nt, Human
gguugccaaaagauacuuaauaguugucugaucucaagaaacuagaccauuauagguaacucuggagcc

SEQ ID NO: 4182808 - RNA, 67 nt, Human
gguugcccaguuugcugcucccacccuugccgagcaggggcaccagcuccagcugacgugggcagcc

SEQ ID NO: 4182809 - RNA, 58 nt, Human
gguugcuacacaucacaacagcaggaaugcaagcauuuggcugggcugugggcacacc

SEQ ID NO: 4182810 - RNA, 71 nt, Human
gguugcuauccuacccucaugccaggagucauggcagaacaagaauccagaagcagguagagacagcagcc

SEQ ID NO: 4182811 - RNA, 57 nt, Human
gguugcuccugagagccauucuaauuucaggaccagaauggaaacugggagauggcc

SEQ ID NO: 4182812 - RNA, 58 nt, Human
gguugcugggauucacugauuuagggacacagugguuuccuaaguccugccagcaguc

SEQ ID NO: 4182813 - RNA, 65 nt, Human
gguuggaacaaagaacaugguaggauaacaaaauauuuuuuguagccucuguaguucauccagcc

SEQ ID NO: 4182814 - RNA, 55 nt, Human
ggcaggugaucuagagucaauagugacuuacaaaguguugaccuugguuaccucu

SEQ ID NO: 4182815 - RNA, 61 nt, Human
ggcaggugcucuugugaacccaugaaugcauaaguauuugggggcagagggagcaucugcc

SEQ ID NO: 4182816 - RNA, 57 nt, Human
ggcagguggccaagugucuaagaguuuguuaucuccucuaagcacccccuaccugcc

SEQ ID NO: 4182817 - RNA, 57 nt, Human
ggcagguguugggggcugacugcugauuauuugggugucagugcugaaacaccuucc

SEQ ID NO: 4182818 - RNA, 56 nt, Human
ggcaguaguuuauggcuaaaccuauauuucuuaucuggguuccacuuacuacagcu

SEQ ID NO: 4182819 - RNA, 57 nt, Human
ggcaguaugaguucaaauaauucuguuauuagaaauagaguuuugaauauauaugcc

SEQ ID NO: 4182820 - RNA, 55 nt, Human
ggcaguauucauaaucaacuuucuuauuguaagagagcugacugucaagacuguu

SEQ ID NO: 4182821 - RNA, 86 nt, Human
ggcagucacaagcagggugcugggacaaggucuuuuagaagauggcuguucagaaguccccccagcaucguagcuuggaaguagcc

SEQ ID NO: 4182822 - RNA, 66 nt, Human
ggcagucccagaauccucacucuaucaauuuuuaaccaauuguagaccaaagucugggauuuugcu

SEQ ID NO: 4182823 - RNA, 57 nt, Human
ggcagucuagcuaggaugucacccacaggaggggauacaaaccuugcaggacauguu

SEQ ID NO: 4182824 - RNA, 64 nt, Human
ggcagugaacagaaaugcagaaguggaauuuacuagccaaacacugcaucugagucauuaugcc

SEQ ID NO: 4182825 - RNA, 55 nt, Human
ggcagugcugagaggugaucggaggaagaccuuuuauaucccuuccagcaccucc

SEQ ID NO: 4182826 - RNA, 61 nt, Human
ggcaguggcgugauccggcaccaaaucggcccgcggugcggugcggagacuccaugaggcc

SEQ ID NO: 4182827 - RNA, 62 nt, Human
ggcaguggcuggacagcagggcaccugggggcuuaggguaccccuucugcuccagcuuugcc

SEQ ID NO: 4182828 - RNA, 71 nt, Human
ggcagugggcuguguggaggggauggcuggagguggaagucuacgggcagaucacacagggcuuguaugcc

SEQ ID NO: 4182829 - RNA, 104 nt, Human
ggcaguggggccaggagcagaaugaggcagucuggccugagggcacagggacgcuagcaccucaccaucuccuccugccggagccucuucucugguccauuguc

SEQ ID NO: 4182830 - RNA, 69 nt, Human
ggcagugggugacagacaccucucugugcccaugugggcgcagggcuccacuguggccaagaaacugcc

SEQ ID NO: 4182831 - RNA, 58 nt, Human
ggcaguggugggaggcucgcucugggugcacagacgcugccuucagacaccgcaugcu

SEQ ID NO: 4182832 - RNA, 61 nt, Human
ggcaguggugguggggagcgucaucuagguuucucuccagaugagccaacaccuccaugcc

SEQ ID NO: 4182833 - RNA, 60 nt, Human
ggcaguguguggacagugguggcuggugccugaugcugccaugcuguucuucgcacuggc

SEQ ID NO: 4182834 - RNA, 59 nt, Human
ggcaguguucuaaauccucguuuauucuacucaggacccaccuuauuaggaacauugcc

SEQ ID NO: 4182835 - RNA, 68 nt, Human
ggcaguuggcaggauuugcccggaaggaucaggauagggucuuugggucugaguccugcgugacuucc

SEQ ID NO: 4182836 - RNA, 72 nt, Human
ggcaguuuucuuagagucgagggcaugauaagcuagggacugagaaucucaguccugccauguccuacuguc

SEQ ID NO: 4182837 - RNA, 57 nt, Human
ggcauaagggcagcuggacagugguacauuuuauaccacuguuaguauacuugugcc

SEQ ID NO: 4182838 - RNA, 76 nt, Human
ggcauaaggggauauguagcuuauaugaggaaauugucuuaaguuugucuuuaauucuacauaucucccaugugcc

SEQ ID NO: 4182839 - RNA, 69 nt, Human
ggcauaguggaaaaagaauaggguuagauaaaguuguauguuaugacccuucugguuccuaccaauguc

SEQ ID NO: 4182840 - RNA, 99 nt, Human
ggcauauauaaaauuaaacgguaccugaucgauuuuuuucaucuuuagaauugaugucagcucccaaggauaagagagucugaauuguacuuguauguc

SEQ ID NO: 4182841 - RNA, 72 nt, Human
ggcaucagauaacuucaguuucuguguccucccuugagauauuuuaagauuagaagauucaaaucugauguu

SEQ ID NO: 4182842 - RNA, 97 nt, Human
ggcaucccaucaagaaguaaaugccacaguagcauccaaacaguagaagaugcuggugauguggugcugagugacagcaauuuuacuaugaugugcc

SEQ ID NO: 4182843 - RNA, 69 nt, Human
ggcaucccgccacccugcccuccacucccaggacucggccccguucuggugggaggcaagguggaagcu

SEQ ID NO: 4182844 - RNA, 106 nt, Human
ggcaucccuuuuuguguuuagcaaaagagcucauaacuuaauggauucaucagccugcguuaaguccacaggaguuguguucacucucuaacauccaagaggagcc

SEQ ID NO: 4182845 - RNA, 63 nt, Human
ggcauccuugacaaugagccugguaggucuccaacccuacagaggguaauugaucaaggaccc

SEQ ID NO: 4182846 - RNA, 66 nt, Human
ggcauccuugacacacuccaguacugacaggaaccccuugaagacugugcggggugcggggagguc

SEQ ID NO: 4182847 - RNA, 76 nt, Human
ggcaucuagaaacugugggcagcuucugggaacugaacucagcuuccugccaguggcccacaaaaaaacuagggcc

SEQ ID NO: 4182848 - RNA, 82 nt, Human
ggcaucuauugcccuggccuucaucucagacauucauuuggaaugcagucacauaggauagggcaggggcagggagcaugcc

SEQ ID NO: 4182849 - RNA, 86 nt, Human
ggcaucuccaucagggacuuggcagcaauauggagugagaaacagaucuaagacuucauuugucugcuauagauccugggcaugcu

SEQ ID NO: 4182850 - RNA, 74 nt, Human
ggcaugccagucaucuuaguuaaucuucauauucaguucaugaagcaaauauuucuagagacuggcuauaugcc

SEQ ID NO: 4182851 - RNA, 71 nt, Human
ggcaugccauggcaggaaaaugaacaggcgcugucagagagccagcuuggcagggccugcuggagcaugcc

SEQ ID NO: 4182852 - RNA, 87 nt, Human
ggcaugccccgcugcacuuguggauuugauauacagacacagaauagaagaguguguguguccauguguggugcagagaugcguguc

SEQ ID NO: 4182853 - RNA, 92 nt, Human
ggcaugccccugccucagugccucauccccugcugucagguccugacccaacaagggccugggcugcucauggggaugauaggugguuugcu

SEQ ID NO: 4182854 - RNA, 67 nt, Human
ggcauggauuuaaugaaaggucugcuggaagccacaucaaacagcagcacgaguccacaaauccgcu

SEQ ID NO: 4182855 - RNA, 77 nt, Human
ggcauggcccuguucuguaccucauaaaccacccccaaaaccacauguaguaguagguucacagcgggccgaugacc

SEQ ID NO: 4182856 - RNA, 56 nt, Human
ggcauggcuugguggggcccgcaaguauuacgaggguuugcaugaacaagucagcc

SEQ ID NO: 4182857 - RNA, 64 nt, Human
ggcaugggugcuugcugagugaaggaugaauaaauauuucagugcugaguagcgugcacccccc

SEQ ID NO: 4182858 - RNA, 89 nt, Human
ggcauggugaucacggcuguacacugguuucaaggacaccaacugcugcucuaguccuucugugaccaccagcagccccacacugugcc

SEQ ID NO: 4182859 - RNA, 56 nt, Human
ggcaugguugaguugguguuuaucagucacaaucaagcagcauuguaaccaaugcc

SEQ ID NO: 4182860 - RNA, 109 nt, Human
ggcauguaauauggagauaaaaguuugagaagcuuauagauaucuaacuugcaaaguuggggaagagauacuauggguucuguuuuaaacacguuaagacugaagugcc

SEQ ID NO: 4182861 - RNA, 84 nt, Human
ggcauguagggaaguauauaaauccuuucagacuaccagggaaccacuuaggguuugaaagaauuuauguacuuuccaacugcc

SEQ ID NO: 4182862 - RNA, 82 nt, Human
ggcaugucagcaagggauaaagaguuacuuacagaaguuaaagugaaauuaaauaacucuugaauccauuuguaaaagugcc

SEQ ID NO: 4182863 - RNA, 67 nt, Human
ggcaugugaugcagaagacugagaacaaccaagaaucucugggaagcacuuaucucuggcaugugcc

SEQ ID NO: 4182864 - RNA, 58 nt, Human
ggcaugugccugaggucacacagcaaggaguggcugcgugggaauugggcuacaugcc

SEQ ID NO: 4182865 - RNA, 59 nt, Human
ggcauguggauagcacaggaaugguacuguagauaacugaccaggucuauccacaagcu

SEQ ID NO: 4182866 - RNA, 82 nt, Human
ggcauuagauucucauaggagugugaacugcacgugagagggaucuagguuacaugcuccuuaugagaaucuaacuaaugcc

SEQ ID NO: 4182867 - RNA, 94 nt, Human
ggcauuaguuagauucucauaaguagcgcucaaccuagaucccucgcuugcgcaguucccaguaggcuuggcucuccuaugagaaucuaaugcc

SEQ ID NO: 4182868 - RNA, 80 nt, Human
ggcauuaugccaagaaggugggagggaacgugaggcggacuguuguugcuuuugugagcucucacuuuguggccaauguu

SEQ ID NO: 4182869 - RNA, 64 nt, Human
ggcauuccuuguuccuaggagaucaaugcgcucccugguauuucuccugcuagaacaaggagcc

SEQ ID NO: 4182870 - RNA, 86 nt, Human
ggcauucugaaaggcugucaccccuccuccugagcuagggcuugacaacguucaauccuuagaagggagugaggacugaagcugcu

SEQ ID NO: 4182871 - RNA, 60 nt, Human
ggcauugcggcgugguccggggcgcgacucgggagggagccuccugggcugcgucuugcc

SEQ ID NO: 4182872 - RNA, 77 nt, Human
ggcauuuccuagggucguucaguuggcguuucccacagucuguagcuaaagaaugugcuggcuguucuagggaggcc

SEQ ID NO: 4182873 - RNA, 101 nt, Human
ggcauuuccuggggaauuaauagccagcugggguuaacaguccuugguucgacuuuaggccaucaacucuucuugcugcucauuaauucccagaaagugcc

SEQ ID NO: 4182874 - RNA, 58 nt, Human
ggcauuugcagacuugacuaccugagguguaugguguucagacaaguuuccagaagcc

SEQ ID NO: 4182875 - RNA, 84 nt, Human
ggcauuugcugaacuugaagggagcaguaagcagugacagaauaaugaauauuaucacugaccuguaucaguugugcaaaugcc

SEQ ID NO: 4182876 - RNA, 71 nt, Human
ggcauuuuaaagggugaauuaaacuggcaccacuugagcaaaguaucaaucacccuuugaaguuggcagcc

SEQ ID NO: 4182877 - RNA, 70 nt, Human
ggccaaaaagauguccugaaguuuagugcauuaaugaaugacuuaagcaucagcacaucuaagagaggcc

SEQ ID NO: 4182878 - RNA, 68 nt, Human
ggccaaaucuguaaggcaagaucugccuacgauggcauaaauaaugguguguauuugcaguuuaggcc

SEQ ID NO: 4182879 - RNA, 60 nt, Human
ggccaacaggagaggggaauguagagucugugaccauggcuucccacuuuucucagugcc

SEQ ID NO: 4182880 - RNA, 58 nt, Human
ggccaaccaagggcuauuuacagaacaggugaagucaccucuguuuauucuauuggcc

SEQ ID NO: 4182881 - RNA, 80 nt, Human
ggccaacugagcaaggacagaaaguagagguuguuggugaccuugaccagcccucugcuguucuagucucuugaucugcc

SEQ ID NO: 4182882 - RNA, 68 nt, Human
ggccaacuguagguggccggaggacagucgagcaguuccuucugucuguccugccauccacagcggcc

SEQ ID NO: 4182883 - RNA, 58 nt, Human
ggccaagagcuccuucuuaaccgcacaggcaugugaggcccagaagacuggcucugcc

SEQ ID NO: 4182884 - RNA, 75 nt, Human
ggccaagcaugucuucuuaagcaauuuuccacucaaccaguuggggucacuguugucagguaaaacaguauggcc

SEQ ID NO: 4182885 - RNA, 72 nt, Human
ggccaagcauuuuccugaaguucaagaugccagucaucuucugaagucacugcuucuuggagaaugucagcc

SEQ ID NO: 4182886 - RNA, 65 nt, Human
ggccaagguccagggaaaggcucuagcugucuagucaucuucauggagcuccugggcucugggcc

SEQ ID NO: 4182887 - RNA, 61 nt, Human
ggccaagucucuagagaaaugcuuuauuauugcagacaauacauucucugguuugcuggcu

SEQ ID NO: 4182888 - RNA, 81 nt, Human
ggccaauagaagcagcaggaguaaaggcaugucggucacaaaccuaggcuucaaaagucuuucacuugcucuuuuaaggcc

SEQ ID NO: 4182889 - RNA, 129 nt, Human
ggccaaucaguauuacaucuauugucuccuaaccaguccucagauggucugugccaagugccuaagaaaagggggugucaaaucaucugaaacugugagacaaauaaaagagcuauaaggaaaaggcac

SEQ ID NO: 4182890 - RNA, 64 nt, Human
ggccaauuuggauggcaaggagaacaaaucagugcuugauuugucuagugguauucacguggcu

SEQ ID NO: 4182891 - RNA, 70 nt, Human
gggaaauuccaaagccugaauaauggaauggauacauuucaauuuaacauauauucuggcuuuagauccc

SEQ ID NO: 4182892 - RNA, 94 nt, Human
gggaacagacuucucagaaggacacaucagauugucagcuuggacgcacaggcucacagcuggccugaucucaugcuguccuccucccuguccc

SEQ ID NO: 4182893 - RNA, 55 nt, Human
gggaacagagugccagacugacagaaauuuuugcaccuccuggcauccuguuccc

SEQ ID NO: 4182894 - RNA, 57 nt, Human
gggaacagggcaggccuuuggagcaucugugcuggacagugaggcccuccuguuccc

SEQ ID NO: 4182895 - RNA, 74 nt, Human
gggaaccaaauggaaagagcagaagcuuuauccagaaggucuugggcuucugcucuuuuggugcugggaagccu

SEQ ID NO: 4182896 - RNA, 74 nt, Human
gggaaccacagaguugaugcaauaagacaaaugugagagcuuccaaucuuguuguaacagccucuaauguuccc

SEQ ID NO: 4182897 - RNA, 83 nt, Human
gggaacugcucaggcaaauuucuggugaagcuacugcuuauuaagagaacuucacccaugaauaugccuaaggaguguuuucc

SEQ ID NO: 4182898 - RNA, 89 nt, Human
gggaacuuauucaaucauuuaaucuggcucaugagcauuucuuggugcucuggugcuggugauucagauucaaauccaacaagauuccu

SEQ ID NO: 4182899 - RNA, 74 nt, Human
gggaacuugaggacagaugcugggcacacaguaggugcuuaauaaaagccugacuguguucaguucagggcccc

SEQ ID NO: 4182900 - RNA, 56 nt, Human
gggaacuuggauuauuucuuccugggcaacccugccaccaggccaucccaguuccc

SEQ ID NO: 4182901 - RNA, 63 nt, Human
gggaacuuugugcaagaauuggaaagcaaccauggauggucgcuguguccagaauugcacccc

SEQ ID NO: 4182902 - RNA, 61 nt, Human
gggaagaaauaaagagggaaaugucugugguacaagaaaugacacuuuuaauuuacuuccc

SEQ ID NO: 4182903 - RNA, 64 nt, Human
gggaagaauugagaguuagagauaaaggaauuuucuauucucugaucuuuaauucagauauccc

SEQ ID NO: 4182904 - RNA, 59 nt, Human
gggaagacacaauguagcccagcacgugggccacgaggagcugcccgugugucugcucc

SEQ ID NO: 4182905 - RNA, 84 nt, Human
gggaagagcagguuagggagguggcuuuccagcaguagugcagaagcaggacuggaggccccucccagugaagcagguucuccu

SEQ ID NO: 4182906 - RNA, 81 nt, Human
gggaagagcuaucaugcauguucucuuuuucuaccuuaacaaagaaaucuggagauggaaaacugcugguagucugcuccc

SEQ ID NO: 4182907 - RNA, 130 nt, Human
gggaagaguggcagcucuagccucaguggggucgaugugagggaaguguaaggcacgaaauaaggaaucucuacacaggauucacaugagggguaaaaauuugugaugagagagguauuauacuuuuucc

SEQ ID NO: 4182908 - RNA, 66 nt, Human
gggaagauggcacuugggagcagcagcuuugagcaucuugcaucugcuuccugaggccgucuucuc

SEQ ID NO: 4182909 - RNA, 74 nt, Human
gggaagaugucuuuguuuguacuguuagaauagcugagacuggguaauuuacaaagaacagaaacuuauuuccc

SEQ ID NO: 4182910 - RNA, 61 nt, Human
gggaagcaggugcagcucgccuuagguaaccccaaccuucccuguuagcuuccuguugccc

SEQ ID NO: 4182911 - RNA, 78 nt, Human
gggaagcggggucuccaugugcugggugauggauuuccgggcacagcagcugggggcccugggucaauuauacuuccc

SEQ ID NO: 4182912 - RNA, 74 nt, Human
gggaagcuggcaguuauuaaucaagucuuggccauuuugggccaauggcuagagggguuauuguuuagcuuccu

SEQ ID NO: 4182913 - RNA, 73 nt, Human
gggaagcuuuaccucugcaggcuucucucuucccuaccuccacguugguccuagcugcagagggaggccuccc

SEQ ID NO: 4182914 - RNA, 83 nt, Human
gggaagcuuuggcucuggaacuauuucugaaugacugcaacuuuauugguccuuggggcacaagguccagagccaaucuuucu

SEQ ID NO: 4182915 - RNA, 130 nt, Human
gggaagcuuuuaggcaucugaucagagcgggagccagccgggggaccacagugcuggacagguaacagacauuucuccuacugcggucugucauucugucucccuuuguagcaagaccucaggggcuccu

SEQ ID NO: 4182916 - RNA, 59 nt, Human
gggaaggaaaguuauuagcagagaucucccagaaguccucuguaacugucccuuuugcc

SEQ ID NO: 4182917 - RNA, 80 nt, Human
gggaaggaaggaaggaaaugagguugauggauggcacuuuguccauucuaggcuuuucuuauaucugugucugccuuccc

SEQ ID NO: 4182918 - RNA, 58 nt, Human
ggcucaagcagucugccugccuuggccucucaaagugcuaggauuacaagcuugagcc

SEQ ID NO: 4182919 - RNA, 65 nt, Human
ggcucacaaugucuaagauguuucuaucucugugggccuagaaaucuacuuagacuuucugagcc

SEQ ID NO: 4182920 - RNA, 85 nt, Human
ggcucacugcagcuucuaacuccugggcucaagugaucuuccugucacaugagucucccaaguaguuggaacacaggugccagcc

SEQ ID NO: 4182921 - RNA, 126 nt, Human
ggcucagacuugcacuuuucucucccuagugccucuuucuccagcuuuucugccuuccaaaagguaucaagaaugugggggaaaagagugugggcaguggggaagcagagucaaggcuccagagcc

SEQ ID NO: 4182922 - RNA, 83 nt, Human
ggcucagagaaguuaagcauguucccugagguugcacagccuaggccaucagcccagagagaugcuguagacccuguggugcc

SEQ ID NO: 4182923 - RNA, 63 nt, Human
ggcucagagaccccuggcauggugguggggagaccucgcuuccugucucugggucuuggggcc

SEQ ID NO: 4182924 - RNA, 88 nt, Human
ggcucagauguucaagaacauugugaucacuucagauaauguuuaucuuauuuaugauguugcacagauguucaagaacauugugauc

SEQ ID NO: 4182925 - RNA, 120 nt, Human
ggcucagcaggcugguggcggcagguucaggcucugucugguuccagaccugagggaacacaaagaggacccuuaggaugguacaaggcagggguccccagcucaccugccuggggggcc

SEQ ID NO: 4182926 - RNA, 86 nt, Human
ggcucagcaucacugcaucacucucccagcagguagaacauucaagguugagguggcugcuugcugggaaacaggagagcuggguc

SEQ ID NO: 4182927 - RNA, 62 nt, Human
ggcucagcuuccucugaaaaacgaggcuggugucgccugccaggccucucagagggugugcc

SEQ ID NO: 4182928 - RNA, 72 nt, Human
ggcucaggagaggggcuaaaagugguggcaguaggaagauagagaaaggccuuguuuugccccuuucuggcc

SEQ ID NO: 4182929 - RNA, 55 nt, Human
ggcucagguuuccuucccagcucuaccaccuggagcuuugugaagugacugagcu

SEQ ID NO: 4182930 - RNA, 75 nt, Human
ggcucagugaggggcagagggccuggccacaugaggagccagugcugugggcaggcccgggucugagugcuggcu

SEQ ID NO: 4182931 - RNA, 55 nt, Human
ggcucaguggcuaaacacccacuucucuggggagggugacauuucccaaugagcc

SEQ ID NO: 4182932 - RNA, 58 nt, Human
ggcucaugccuguaaucccagcacuuugggaggccaaggugggaggauugcuugagcc

SEQ ID NO: 4182933 - RNA, 65 nt, Human
ggcucaugccuguaaucccagugcuuugggaggccaaggcggggggaucacgaggucaggagauc

SEQ ID NO: 4182934 - RNA, 86 nt, Human
ggcucaugugcuugucucucugugcccacucgaugccauggagaaggugagagugcagaggacagaggaagggaggcucaggaguu

SEQ ID NO: 4182935 - RNA, 71 nt, Human
ggcucauguuucagaaaguggaggaaauauaaaaacaccuuaacucugugcuuucgagaugugaucuugcc

SEQ ID NO: 4182936 - RNA, 76 nt, Human
ggcuccaagccuucuuuguuacuuacaguuacagcacuguuauccaaacaguaacaaagaaagccuuuggaaggcu

SEQ ID NO: 4182937 - RNA, 63 nt, Human
ggcuccacugcugaccacuccauucagugugcucugggaagagaggcuccugcaguuggggcu

SEQ ID NO: 4182938 - RNA, 56 nt, Human
ggcuccagaaacuucaguccauuuucccaaaauggacaugaugcaucuggcgaguc

SEQ ID NO: 4182939 - RNA, 80 nt, Human
ggcuccaggcaucucagagaaguuucaaagaauaaagguacuuauguucuguccucuuugaagcugcucaaugcccagcc

SEQ ID NO: 4182940 - RNA, 82 nt, Human
ggcuccaggcccagcccuaaggcccagcuggcuacuggaagaccaggggccagcagggaagccuugggcuuggacaggugcc

SEQ ID NO: 4182941 - RNA, 67 nt, Human
ggcuccagggccaguucuggagacucaagaguggcaacguuccucuccagcaaacuggcuaugagcu

SEQ ID NO: 4182942 - RNA, 68 nt, Human
ggcuccauccuggccucgcuguccaccuuccagcagauguggaucagcaagcaggaguaugaggaguc

SEQ ID NO: 4182943 - RNA, 95 nt, Human
ggcucccaggaggggugagcugggccugugccugggugggauuggagaugcucuuuggacaggaugcuggggccccgccugccuucccuggggcc

SEQ ID NO: 4182944 - RNA, 58 nt, Human
ggcucccaggcauggagguaauugggucuuggcuucaaugccacccuuuugggaagcc

SEQ ID NO: 4182945 - RNA, 66 nt, Human
ggcuccccgcccugccagguuccagccccugcucaccuggccggcuguggccagcggggcugagcc

SEQ ID NO: 4182946 - RNA, 69 nt, Human
ggcucccggcgcgcgcuccccucugaccaccuacggaaugaccucagagugggagaaugugccaaggcc

SEQ ID NO: 4182947 - RNA, 70 nt, Human
ggcucccuccccagggucauauugaaggagagagacaucccugcaaaguaaaacuccuggggagccuguc

SEQ ID NO: 4182948 - RNA, 66 nt, Human
ggcucccuggaagagguggccuucuguguaggaggacauagacauuauggcuuucacugggcagcc

SEQ ID NO: 4182949 - RNA, 82 nt, Human
ggcuccuacuuagucauccagggcacuggauauggauuuugccauagcaagauuacuauccacugcuggugagaaaggggcu

SEQ ID NO: 4182950 - RNA, 68 nt, Human
ggcuccucuguccaggcucccuuggugcugccggggcacccacucacaccagagcugggcacaggacc

SEQ ID NO: 4182951 - RNA, 100 nt, Human
ggcuccugacccucagggccagcauggggcagugugggccgucgagccuggaucucgggguccaccuccaagcuggggaccuuggggagucacagcagcc

SEQ ID NO: 4182952 - RNA, 59 nt, Human
ggcuccuggaccagggcuauugggggcucgugugccagacccaggguccagggaaagcc

SEQ ID NO: 4182953 - RNA, 68 nt, Human
ggcuccuucugaggcucuggguuccuggacacaaucuugaauccuaauuaagccguuagagaaaagcu

SEQ ID NO: 4182954 - RNA, 106 nt, Human
ggcuccuugugcaagacugacugcaagcuuuaucugcauggacacuuucuuggcucacagaauuguuuuggaacaaaagcuauucauuucagcuugauuuggagcc

SEQ ID NO: 4182955 - RNA, 77 nt, Human
ggcucgaagcaaucuggcucccagccagguaaacaacaaccucacccugccucugagaccccgguguugcuucugcc

SEQ ID NO: 4182956 - RNA, 55 nt, Human
ggcucgcacuugcuacccacucuggagcaaggugugggugcaagcugcggaugcu

SEQ ID NO: 4182957 - RNA, 61 nt, Human
ggcucgggcuugaggcuguuuaccugguugagguagaaauaaucuucaggcugcuugagcu

SEQ ID NO: 4182958 - RNA, 103 nt, Human
ggcucuacccaguccucuugucuugcacacgguugccacgcucacggagaaaggaugaugguaugaccguggugcaagcacaagggaugaggccaaaagagcc

SEQ ID NO: 4182959 - RNA, 55 nt, Human
ggcucuagagcugugcacacauguucagacauuggagcacaucuugucuagcgcc

SEQ ID NO: 4182960 - RNA, 83 nt, Human
ggcucuagcugaguggggugcagcaguacugugucugguaaaggcacagcaacauagucuguggaccucugucagcuaagguc

SEQ ID NO: 4182961 - RNA, 97 nt, Human
ggcucuagucugagaaagggaggcaaagccagauuuuaggaaguaggauccuuccuggggcuaagucuggugcuguccucacccuucuuccucugcc

SEQ ID NO: 4182962 - RNA, 70 nt, Human
ggcucuauccugagaaggcacagcuugcacgugaccuccugggccuggcggcugugucuucacaggagcc

SEQ ID NO: 4182963 - RNA, 94 nt, Human
ggcucucacggcuccaggagauguggggugugggguauccagaggcugagcagcugaccuucaccuccacaccuugggagaagugcugggagcu

SEQ ID NO: 4182964 - RNA, 72 nt, Human
ggcucucaugguguucuuaguggcacuggcaauauacugacuguuccaccaauccugagacauuugagagcu

SEQ ID NO: 4182965 - RNA, 55 nt, Human
gggacuggaggaccugccuccaagguggcucauauuggcagguggccucaguucc

SEQ ID NO: 4182966 - RNA, 81 nt, Human
gggacuggaggcaguugccccagucacucaggcauugagaaaucugggguauggcuggggcaaaugucucauguggucacc

SEQ ID NO: 4182967 - RNA, 89 nt, Human
gggacuuaacugagaggaucugaguagcagacacccuaagagcaugucauugucuucucaccaguuacucuccaguuggcuagaguccc

SEQ ID NO: 4182968 - RNA, 94 nt, Human
gggacuucaguuaacggaaaggggugugucccaacaaagacucauacagucaacugucuccaugcuggcaugccccacuguuaauugauuuccc

SEQ ID NO: 4182969 - RNA, 58 nt, Human
gggacuucauagcuaggcacuugcauagguacgcagcgcccacagugaggaggauccc

SEQ ID NO: 4182970 - RNA, 72 nt, Human
gggacuuggagagagccucagcuguuggaugaaagagcgaaaacagaugcaguaguuuucaaaccaaguucc

SEQ ID NO: 4182971 - RNA, 71 nt, Human
gggacuuucccaggcuucuggaguaagugccccagugcccggcguccacucccagugccugaggccuuccc

SEQ ID NO: 4182972 - RNA, 66 nt, Human
gggagaaaagucuccacugggaaccaaauucaaagaucuggcugauucccugggacuggacauccc

SEQ ID NO: 4182973 - RNA, 61 nt, Human
gggagaaacauugcacagaaggaagaccuggcucccagucccagcucugccaugcucuucc

SEQ ID NO: 4182974 - RNA, 57 nt, Human
gggagaagcguacagacaugauuucuggaaaaauaacugucugcugagcugcugccc

SEQ ID NO: 4182975 - RNA, 57 nt, Human
gggagaaggagcuaguucuugagggauuaggaaguuuucaguuggcugccaucuccc

SEQ ID NO: 4182976 - RNA, 64 nt, Human
gggagaaggagugcuggccggggcaucgggagccccaggcugucuguccuuugcugccuguccc

SEQ ID NO: 4182977 - RNA, 58 nt, Human
ggccucugcaggccucgacaaggccaggccuccugccucccaaaggccugcacaggcc

SEQ ID NO: 4182978 - RNA, 70 nt, Human
ggccucugcucuucaaaccucggccucacuguuggcugcucugggccccaguguggccaggagcugcgcu

SEQ ID NO: 4182979 - RNA, 72 nt, Human
ggccucugggcucaaucugcuucuguuuacuaacucuccuagaggcagaaagacagagugagcauccaggcc

SEQ ID NO: 4182980 - RNA, 67 nt, Human
ggccucuggucaagacaagcaucuaucaguuuaccuauccaagagcucgagucuuugccagguagcc

SEQ ID NO: 4182981 - RNA, 72 nt, Human
ggccucuguaccccacgucuuccugugcucuccagcuuuggaggcugagaagacagugggguggagacagcc

SEQ ID NO: 4182982 - RNA, 68 nt, Human
ggccugaaccacaggagccaguaaacacaggauuuccacucuauguguagcuuucuucugugggggcc

SEQ ID NO: 4182983 - RNA, 84 nt, Human
ggccugacagccugacaaaggggcucuugucaggcgcagcaagaggggcuguccuggccgcccuugugaggcuguucuggggcc

SEQ ID NO: 4182984 - RNA, 68 nt, Human
ggccugagaaccauggggccaaugggauaagucucaguccaagucccaaggcccaaguacugagugcc

SEQ ID NO: 4182985 - RNA, 57 nt, Human
ggccugaggccaccagcagcccggcaguggcugccucccuguggcugaccucuggcc

SEQ ID NO: 4182986 - RNA, 65 nt, Human
ggccugaguggagggauucugcagcaguucaugagaccugcugacauggggauccaccuuaggcc

SEQ ID NO: 4182987 - RNA, 63 nt, Human
ggccugcacugugggccagcugggugggcucaguacccauaugcugcugccccuagugaggcc

SEQ ID NO: 4182988 - RNA, 61 nt, Human
ggccugcucugcagccucuacaggcccacauggaggcagagacucccaggcugcagcagcc

SEQ ID NO: 4182989 - RNA, 57 nt, Human
ggccugcucuggcuguggucagcgccucggggcucguggcccgagccgggguuggcu

SEQ ID NO: 4182990 - RNA, 63 nt, Human
ggccugcugacccaaguccugugaccguggcccagaaggaagggacaggcaugggcacaggcu

SEQ ID NO: 4182991 - RNA, 65 nt, Human
ggccugcuggggucagagcacuggggguguccccacacccuacugcugagguccccggcacugcc

SEQ ID NO: 4182992 - RNA, 61 nt, Human
ggccugcugucccucugggcuccaugcgcagggcagcugcguggugcaggggcgcacggcu

SEQ ID NO: 4182993 - RNA, 56 nt, Human
ggccuggagcucagugccaucugauuguuucagucagggccugugcucuccagguc

SEQ ID NO: 4182994 - RNA, 92 nt, Human
ggccuggauccuaugaauggcucauggugagugaggcgcaagcuccuuugcugcauuccacaccacucugccugauguuacauggaucugcc

SEQ ID NO: 4182995 - RNA, 83 nt, Human
ggccuggcaccagccaagggccucucugggccuuuccugucauggaugcaggaagggauucaugaggccagagcugccaggcu

SEQ ID NO: 4182996 - RNA, 61 nt, Human
ggccuggcauuccagagauggucuuggaauucuaaaaaugccucugauggaggccagcgcu

SEQ ID NO: 4182997 - RNA, 72 nt, Human
ggccuggccaccuggacuccuugggaguggcuagagaacuccuccugagagcagaguccagguguuugggcc

SEQ ID NO: 4182998 - RNA, 56 nt, Human
ggccuggcccucccggguucaagccguccaggcaggggccccucagggccaggacc

SEQ ID NO: 4182999 - RNA, 62 nt, Human
ggccuggcucccucccccauguccugagcucacugcagaagccaugguggaggagcagggcc

SEQ ID NO: 4183000 - RNA, 95 nt, Human
ggccuggcugcuguucccacuggagaccuggcaucuucuccccgaccuaaaacaaugaaagcagugcucagcccggaugagaucacggccagccc

SEQ ID NO: 4183001 - RNA, 62 nt, Human
ggccuggcuucaugagcaugcgaucuauuuagcugcaugaagcguccaugcuuagaggggcc

SEQ ID NO: 4183002 - RNA, 57 nt, Human
ggccugggagggcaagugcugaugagaacccccauccccaccucccuccccaggacc

SEQ ID NO: 4183003 - RNA, 69 nt, Human
ggccugggcaccugagcacuggggccgcccugggcagagcuggggcggggugcuggggggccuggagcu

SEQ ID NO: 4183004 - RNA, 58 nt, Human
ggccugggcccacugucaagagcagacccugagaaccucuguucugggucccagggcc

SEQ ID NO: 4183005 - RNA, 72 nt, Human
ggccugggcccugguggccaugccucccagagagcaggugggcccuggaggcaggggccccagccccaggcc

SEQ ID NO: 4183006 - RNA, 64 nt, Human
ggccuggguagggccugcgccugugcuugcugcgcagcagcaccccugcgugccuucccuugcc

SEQ ID NO: 4183007 - RNA, 83 nt, Human
ggccuggucccagcccgggguccucagccaccucgguucucaagagagagcugccaggccccugagaacccgcuggccuugcc

SEQ ID NO: 4183008 - RNA, 67 nt, Human
ggccugguuagguccauuggcugugguuugcugaccccuagcaugugccuaguggauuugaagggcc

SEQ ID NO: 4183009 - RNA, 65 nt, Human
ggccuguccuccaagagcacaucugacgugaaagguuagaagaugugucagaggauguuaagguc

SEQ ID NO: 4183010 - RNA, 102 nt, Human
ggccugugaggaaagggaguugggugguccaggcucagcagaugcccaccauccaugcucugcucugagagggccaucagacacccaccuauccagcaggcu

SEQ ID NO: 4183011 - RNA, 55 nt, Human
ggccugugcccucagccuggcucucuucuggggaggggcaggugagggggcagcc

SEQ ID NO: 4183012 - RNA, 76 nt, Human
ggccuguggguuggagcuuggccagaguuagucugugcuucuuggacuauccugggcuguuccgcuugggcagacc

SEQ ID NO: 4183013 - RNA, 63 nt, Human
ggccugugucggccccggguucugccugggaccagauguucugaccaaagggcuggcacugcc

SEQ ID NO: 4183014 - RNA, 58 nt, Human
ggccuuaaucuuuccaggaccucaagccucugugagagucugaagaaagacagggacu

SEQ ID NO: 4183015 - RNA, 56 nt, Human
ggccuuagcugucuuuccuuugguucaggaaauacagaagggaagaccgcugaguc

SEQ ID NO: 4183016 - RNA, 58 nt, Human
ggccuuaggcucuggcuacuacagagcugguuccagucugcacugccacagccuggcc

SEQ ID NO: 4183017 - RNA, 60 nt, Human
ggccuuagugaaaguauuaaacagcugguuagcugcuggguaguaaauuuucauagagcu

SEQ ID NO: 4183018 - RNA, 78 nt, Human
ggccuuauuucaccugugucuccucuguguucucaaauuucucugcuuguaaggacaccagucauaggauuuagggcc

SEQ ID NO: 4183019 - RNA, 80 nt, Human
ggccuucaugggagcccagggcaccugcuucuccacccagcacgcuggucugcuuugcccugggcuuugcuaugacugcc

SEQ ID NO: 4183020 - RNA, 62 nt, Human
ggccuuccaucugccucuguuuuguuuuguuucucagacucuuuagauggaugaggguggcc

SEQ ID NO: 4183021 - RNA, 77 nt, Human
ggccuucugcugcuguucaugguuguaccugcacaggaugccugaaaaggaguaaccguggggucagaagaggagcc

SEQ ID NO: 4183022 - RNA, 65 nt, Human
ggccuugauggauaugguggaugaaaauggcccccagcagggggcuuucacuaggucacaagguc

SEQ ID NO: 4183023 - RNA, 60 nt, Human
ggccuugcgcugaauuuccuccacuguagccucuggauggggagaugcagcccaggugcc

SEQ ID NO: 4183024 - RNA, 64 nt, Human
ggccuugcugaggagaugauaaugucauuuuuugcuaaaauagacgaaguuuuucagauuggcc

SEQ ID NO: 4183025 - RNA, 81 nt, Human
ggccuuggaaaagacacuucaccuuucccagccucagaucccuaaaguucaaggcagggcagguggcgugugcccauggcc

SEQ ID NO: 4183026 - RNA, 55 nt, Human
ggccuuggaaguauuucaguucggaaccccaauucuaaccuuagcuucucaggcc

SEQ ID NO: 4183027 - RNA, 82 nt, Human
ggccuuggagcaguggacccaggagagaggguugcaugggagagaucccagaggcagaaugcucuggguccacucugugguc

SEQ ID NO: 4183028 - RNA, 64 nt, Human
ggccuuggauuuuacccuaaagguaguuauugacugaauuuagguggcgagauacccagagguc

SEQ ID NO: 4183029 - RNA, 66 nt, Human
ggccuuggcugccaagcugcugagucuggccuugauucaguagacccuggggagccuuugaagguu

SEQ ID NO: 4183030 - RNA, 63 nt, Human
ggccuugguucugucacagccgguagauuauuucccuuugugacacacaaaaccagcugggcc

SEQ ID NO: 4183031 - RNA, 80 nt, Human
ggccuugugggcacaagacagauggaaauuaaugauuacagaaauacaguagggaccaugucugaaaugugcucauagcc

SEQ ID NO: 4183032 - RNA, 97 nt, Human
ggccuugugucuugucacgauuuaucuccagacuccagggcucccugggccucgugacaggggcuccuggccuggagagcaggacagauggaaggcu

SEQ ID NO: 4183033 - RNA, 60 nt, Human
ggccuuuagggcaggggaggcuggggaguccccuuuccuaccucucugcccugcaaggcc

SEQ ID NO: 4183034 - RNA, 63 nt, Human
ggccuuuccuucaucaagacuuguccaggaacaucuucaaagauggagggauagauuaaggcc

SEQ ID NO: 4183035 - RNA, 99 nt, Human
ggccuuuggacccugggacucacacuggugcaaccacuccccgcagguucuuggccuuggacugagaguuccaccauugguuucccugguucugaggcc

SEQ ID NO: 4183036 - RNA, 79 nt, Human
ggccuuuguuuuguggccucaaggcugcccucacuuagaaaggaugagugacgguagcagaagccagccaagcagggcc

SEQ ID NO: 4183037 - RNA, 76 nt, Human
ggcgaagcuaaaccuagugguaaaauuagauggacacauaauucugaguguuuacucaaaggguuccaguacugcu

SEQ ID NO: 4183038 - RNA, 84 nt, Human
ggcgaaguguccuuugagcuuggccagcucuggaaggugguagguucucccucauggguuguagagcuggaaggggacaguguu

SEQ ID NO: 4183039 - RNA, 71 nt, Human
ggcgacaguugucaggcugggcugguuuccacaggcauucucuucagcugcagaaaggacaacuaauugcc

SEQ ID NO: 4183040 - RNA, 72 nt, Human
ggcgacccauccuccacuuggcagcgcagggugaaguucuggcccaccggcugccaaggaggcaggggugcc

SEQ ID NO: 4183041 - RNA, 59 nt, Human
ggcgaccucguggcccuggaaggucuggugaaugcugggccaccccuggcacaggugcu

SEQ ID NO: 4183042 - RNA, 56 nt, Human
ggcgagcagagcacugccaggauauccugcccagauuucccaguuucugccucgcc

SEQ ID NO: 4183043 - RNA, 61 nt, Human
ggcgaggcgcgcggcccgggccagcaucuguuugaaggcgcuguuucccgugcgcugcguc

SEQ ID NO: 4183044 - RNA, 69 nt, Human
ggcgccagaaagaaagaagagccaaacuaaauuuggcauuucaccuuucauuuccccccaaaugcugcc

SEQ ID NO: 4183045 - RNA, 56 nt, Human
ggcgccagcgguaaguaagacacacaacauaucuguccaacaugccugauggugcc

SEQ ID NO: 4183046 - RNA, 69 nt, Human
ggcgcccucagcagagcccugcaguucuucaggaggcucucuucucuguuggcaagguuucugaggccc

SEQ ID NO: 4183047 - RNA, 82 nt, Human
ggcgccggccccagacgaggucucuggggaacuccaggggugggagagccacccucuccagcggccucagggccccggugcu

SEQ ID NO: 4183048 - RNA, 64 nt, Human
ggcgccgggcaaggcgagacuaggcccccgcggagcgggggaagcacagaccccagcccgggcc

SEQ ID NO: 4183049 - RNA, 55 nt, Human
ggcgccucccaccgugugcagcugaggaaggcugugcucugagcgugggguugcc

SEQ ID NO: 4183050 - RNA, 80 nt, Human
ggcgcgcggaggcugcgggaggcggcugcuacuggcggcccaagcagcuucccgagcuucugaccuuaaccucucgcgcc

SEQ ID NO: 4183051 - RNA, 55 nt, Human
ggcgcgcucuccuucuggcacccaggucguuuugccugggccggggcagcgcgcc

SEQ ID NO: 4183052 - RNA, 62 nt, Human
ggcgcucagagucaugaggcaacaccaagacauacaguccugucugccuuaugaccuucgcc

SEQ ID NO: 4183053 - RNA, 86 nt, Human
ggcgcucgcggcugcggaacagcagcucguucucgauggacgauccggacgcgggagccaugggagcugcggcugcagugaguguc

SEQ ID NO: 4183054 - RNA, 56 nt, Human
ggcgcucuuguaccugucccucucacuccagaguggaaggugcuggugaggguguu

SEQ ID NO: 4183055 - RNA, 60 nt, Human
ggcgcugcacagggggaaagggagggcuugcaccccaaccaagcugcuuugugcaacgcu

SEQ ID NO: 4183056 - RNA, 64 nt, Human
ggcgcuggcccauggugagcucugggagugucagcucugucgugagugacaaugggucauugcc

SEQ ID NO: 4183057 - RNA, 117 nt, Human
ggcgcuggggcuggcgcuggggcuggggcuggggcuggggcuggggcuggggcuggggcuggcgcuuggguccagugcagcugcgcgucuuccuccauccggcgccagcccgagucc

SEQ ID NO: 4183058 - RNA, 102 nt, Human
ggcgcuucuuggggcugggacaauaguguguggucucucccuuguugcccggagaaagcaaggacagaagcccacacaggggucuuuugggucaugaggccc

SEQ ID NO: 4183059 - RNA, 69 nt, Human
ggcgcuugcaggggcucccccaguucugcgcugugagccggggcacaaagagcccucugcacuagcgcc

SEQ ID NO: 4183060 - RNA, 78 nt, Human
ggcggaacaggaaagaaggcgaagggaccagacgguagaggacuacugcuucuucucauuuguuuuucuauuucugcu

SEQ ID NO: 4183061 - RNA, 57 nt, Human
ggcggaucaccugaggccaggaguucaagaccagccuggccaagauggugaaacccc

SEQ ID NO: 4183062 - RNA, 77 nt, Human
ggcggcaguccagcuggaacggcagcccagcagggacacaaccccagcucgggcgccggccacgcuaccuugcugcc

SEQ ID NO: 4183063 - RNA, 60 nt, Human
ggcggccuugccgcucagcaguggggucuuguccgugggcccgcacagcgguaggccgcc

SEQ ID NO: 4183064 - RNA, 73 nt, Human
ggcggcggcggcagcucgagggccacccgugcaaaucgcguugggcgcggggcccugagcggucgccgcagcc

SEQ ID NO: 4183065 - RNA, 114 nt, Human
ggcggcggcgggcgaggcggcgcccacagcacucgggacucagcugccggagggacaaacuaacuuccugagcgcgggaccugaggcuggcgcggccgggagccaccugcagcc

SEQ ID NO: 4183066 - RNA, 80 nt, Human
ggcggcucuucggcuggagcugagaaaggagcgcuuccccggacucggcucggcuccgaggcucugaagccgacgccgcc

SEQ ID NO: 4183067 - RNA, 62 nt, Human
ggcggcuggcuguguuucaucucugagcccucuaagagacagcagagcacguguuaacugcu

SEQ ID NO: 4183068 - RNA, 101 nt, Human
ggcggcugucccuguuuucuguuuucccuuuccacggcuuggcauuuauucuacgugggagaagcauggggugcagagcgguggcacugggacugcgugcc

SEQ ID NO: 4183069 - RNA, 65 nt, Human
ggcgggacggggcgugcacagaauugcauacuauccccuugcucagugcacgggccaguccugcc

SEQ ID NO: 4183070 - RNA, 96 nt, Human
ggcgggaggaaggaggccucgugagcagauggaggcuucugcagcagcucucucucugcagggccccucugcaugagugugucagcuuccccugcc

SEQ ID NO: 4183071 - RNA, 71 nt, Human
ggcgggagugcaguggcgugaucucggcucggugcaagcuccgccucccggguucaugccauucuccugcc

SEQ ID NO: 4183072 - RNA, 76 nt, Human
ggcgggcaauuuaaagaggauuuccucacuucuucccuaggggagaugagugggggaucucucacacaggccugcc

SEQ ID NO: 4183073 - RNA, 78 nt, Human
ggcggggcugccaggcucugcaggcacccaggguggggaggccacccuuccugcccuacccgcagaauggugcucucc

SEQ ID NO: 4183074 - RNA, 61 nt, Human
ggcgggguggcacucuaaauagaaagcacauaucccccgcuuuccagccgccacuuccgcc

SEQ ID NO: 4183075 - RNA, 75 nt, Human
ggcgggguugcugagaggaugcugcaguggaggccggggauaucucagcagccuccuggaggguccggcccugcc

SEQ ID NO: 4183076 - RNA, 119 nt, Human
ggcggucaggccagacacaggagaagggcagcaugucacuagcauggcaaaggaucccagcggcacaggaggcuuccccuuggcagugcuguguuugcugccuggcuuaaugugccgcc

SEQ ID NO: 4183077 - RNA, 93 nt, Human
ggcggucccucccaccauggguggguugagggcuaaggucuucacugggcucagcccuagccuucggccuacccaucaggggaguucgcugcc

SEQ ID NO: 4183078 - RNA, 70 nt, Human
ggcggucgcugaggucaccccacuggcugugacacucauguuaguaggcagggucacuucggccacagcc

SEQ ID NO: 4183079 - RNA, 83 nt, Human
ggcggugacaagagcucacugugaccucagcagacaauuagcaaggcggugucgaguuacugagcuccagcaggucaccugcu

SEQ ID NO: 4183080 - RNA, 63 nt, Human
ggcgguguccuugcagcucuacccagcucuuggcucugggaaaagggaacaauggacgcuguc

SEQ ID NO: 4183081 - RNA, 65 nt, Human
ggcgucagggugcacagugcaaccgugcccauaggcagagacacauugagcgacccugcaugacu

SEQ ID NO: 4183082 - RNA, 62 nt, Human
ggcgugaauuuugacauggaguacuguggcuuguauugcauugagauuuuaaaauucauguc

SEQ ID NO: 4183083 - RNA, 74 nt, Human
ggcgugacucaucugccauuccuguaccccugaguucucagcacugcuggugccugauggugaugaggucuucc

SEQ ID NO: 4183084 - RNA, 61 nt, Human
ggcgugggcgaggugcucuaucugagacaaaacagcauggggcuguucucugcccugcgcc

SEQ ID NO: 4183085 - RNA, 63 nt, Human
ggcguggggcggguggacacuugcggcuguguucuggaagcaaggucauuucuguuccauccc

SEQ ID NO: 4183086 - RNA, 102 nt, Human
ggcgugguggcaugcaccuguggucccagcugcucaagaggcugaggugaggagauugcuuuagcuugggagguugaggcuucagugagcuacuaccaugcc

SEQ ID NO: 4183087 - RNA, 58 nt, Human
ggcguuacuuccacguagguauguagcacugaaagcaacauaacugucaaguaacguu

SEQ ID NO: 4183088 - RNA, 63 nt, Human
ggcguucugagucacuuggcuggcuugggaaugugagcugggccaggugcaccuuagagagcc

SEQ ID NO: 4183089 - RNA, 78 nt, Human
ggcuaaacuuuuauaacauugagacucaaaauaaggcccaaacaagaguuucauguuacaguguaaaagugagugguc

SEQ ID NO: 4183090 - RNA, 83 nt, Human
ggcuaaauauauucucaggggugaguuggggcuacccugacagugacuccaggcaagcauuuaaccacucauggcauuaaguc

SEQ ID NO: 4183091 - RNA, 77 nt, Human
ggcuaaaucauuacagugccaccucgugguccagccucuugagagguaacaggccacugugaguacaauggugugcc

SEQ ID NO: 4183092 - RNA, 61 nt, Human
ggcuaaauggaauguagaugucaggagaaaaugcuccaccacuuccugcagccauucagcc

SEQ ID NO: 4183093 - RNA, 70 nt, Human
ggcuaagccacccuccuuaggaauacuguguaaaucaguaauucaucuacuccuggagucugguuuggcu

SEQ ID NO: 4183094 - RNA, 62 nt, Human
ggcuaaugaggggaaccaucuguaguacuuugccggcagaugugucccccucauacugugcc

SEQ ID NO: 4183095 - RNA, 77 nt, Human
ggcuaauuuuacaugacaauggcugcucuaugcucuuucauggagcauuggaauggcuuugcaugucccauguggcc

SEQ ID NO: 4183096 - RNA, 57 nt, Human
ggcuacagcugauuggaucaaggacagacaccugaccaaggacagucacgcugugcu

SEQ ID NO: 4183097 - RNA, 66 nt, Human
ggcuacagguggugaagaggcaugaacaagucaggccaggcucagcuuugccaccagcuguaagcc

SEQ ID NO: 4183098 - RNA, 111 nt, Human
ggcuaccaaggggcagagaacagaaacagccaccaaguuccugggccaaguccagggcuuccuggacuguauucagagagcuguggcuuuucucuaccacuugcaacagcu

SEQ ID NO: 4183099 - RNA, 65 nt, Human
ggcuacuagacuuugauacuaggaaaccugcuuggugugccuguuggcucagacucuggugugcc

SEQ ID NO: 4183100 - RNA, 70 nt, Human
ggcuacugaaggcucagguuuucuaagagaugacuggaggccaaguccucaggcuugaguguuuauagcc

SEQ ID NO: 4183101 - RNA, 56 nt, Human
ggcuacugggcagucccuccauuuccccgugccucugaggcugcccagucucugcc

SEQ ID NO: 4183102 - RNA, 93 nt, Human
ggcuacuguuauggaugaccuucaguguguuucucacaugugggugugacauaugguguuaagcaagcagaaguaauaaccaugcagugagcc

SEQ ID NO: 4183103 - RNA, 69 nt, Human
ggcuacuuucuuggucccauguuugauuugauauaguuucagcucaacgcaugcuccaagaaagaaguc

SEQ ID NO: 4183104 - RNA, 75 nt, Human
ggcuagacgggagaccuggaggauguggaugggcggguuuccagggccgggcacguuuccagguugccaucagcc

SEQ ID NO: 4183105 - RNA, 75 nt, Human
ggcuagaggcagagugcaccccaggagugacaaacaccucuguuagugacugggaaugugggcuugccuccugcc

SEQ ID NO: 4183106 - RNA, 62 nt, Human
ggcuagaucuuucacuacuguguagguagucucuacuuacugguaggauagauuacauugcu

SEQ ID NO: 4183107 - RNA, 72 nt, Human
ggcuagcaacugugauuucuaaagaguagcaucuucuaaaggaauauguuauucuaguggaucacgucagcc

SEQ ID NO: 4183108 - RNA, 76 nt, Human
ggcuagcaagguagcagaaugccaugcauuugaagauuaauaaugcaaacaaccaugauguuaacuuuguuaugcu

SEQ ID NO: 4183109 - RNA, 59 nt, Human
ggcuagcacuagauucugaagcagcagucucugcugauaaaccagacucaguacugacu

SEQ ID NO: 4183110 - RNA, 72 nt, Human
ggcugggaugcaaggccuugcucagcacugccaggauuaaggagcauggcuguggcaaguccugcaccugcc

SEQ ID NO: 4183111 - RNA, 61 nt, Human
ggcugggccuucuaaucuggucccugaguaacugagcugggggaccagggaggagcccgcc

SEQ ID NO: 4183112 - RNA, 114 nt, Human
ggcugggcggaucuuuggaacuugacuaggcucaggccucuauggucagcugagggccaggaggucgcucugcugaccuuggugggcuccuuguuggcgaacaucuggccagcc

SEQ ID NO: 4183113 - RNA, 79 nt, Human
ggcugggggcuagcauggauucccucaucagacacccuucccagcugaugggacugccagcugcugauauuucccagcc

SEQ ID NO: 4183114 - RNA, 92 nt, Human
ggcuggggguaggaaguaaugucauagagaaacagagggaccagacucucuauuccagcuguuguuuuaucucagauuuucucuccuaugcu

SEQ ID NO: 4183115 - RNA, 66 nt, Human
ggcuggggguaggagcugugggcggaagagcuggggcaucuguucacagaauccuccccugaaguu

SEQ ID NO: 4183116 - RNA, 69 nt, Human
ggcuggguuggggguccgugaccugguguguuuuuaccuuucucuuggcugcugccaauuuacuuuguc

SEQ ID NO: 4183117 - RNA, 75 nt, Human
ggcugguaauguucauuaaggguagaauguauaaauccauuguggugcauucauacaaugggauauuaugaagcc

SEQ ID NO: 4183118 - RNA, 88 nt, Human
ggcuggucucgaacuccugaccucgugaucugccagccuuggccucccaaagugcugagacuacaggcaugagccaccgugcccggcc

SEQ ID NO: 4183119 - RNA, 66 nt, Human
gggaggaagcacaagugcagugggcuuucuagaguuguacacaugcccacuugaagcauucuuccc

SEQ ID NO: 4183120 - RNA, 64 nt, Human
gggaggaccagcaaaaaagaaucuuguacuaaaagucaaguauuuauuucugcuggcaucucuu

SEQ ID NO: 4183121 - RNA, 55 nt, Human
gggaggacgugccaggcgaucuccagccccugggagccggacgcccacgccuccc

SEQ ID NO: 4183122 - RNA, 58 nt, Human
gggaggagcaugagaggguagugaaacaguaugugacacacccgagcugcugucuccc

SEQ ID NO: 4183123 - RNA, 58 nt, Human
gggaggaggagggccauggucccugcagagacccaggggcccaggccuccuuccuucc

SEQ ID NO: 4183124 - RNA, 75 nt, Human
gggaggaggcugcauucuucccacugcacaaugaagccuccggccgaagcggcaggaagagcgcagccccguccc

SEQ ID NO: 4183125 - RNA, 117 nt, Human
gggaggagggaaggagaggcucccucagaugcuaggucugagccuggcuccccagcacccuggaggccuggcuugccagcccuggcgccugcgccugcccagcuccagcccccaccc

SEQ ID NO: 4183126 - RNA, 57 nt, Human
gggaggagggugcuggcuaaacaggaacugaaugaauggccugaagcucccucuccc

SEQ ID NO: 4183127 - RNA, 58 nt, Human
gggaggagguaagaagagaaagggcuaagugauccaguucuaaguguuaccuuuucuu

SEQ ID NO: 4183128 - RNA, 66 nt, Human
gggaggauaagaaauaaaagccucugaacugaaaagucgcucagggcugugguuccuuuucuacuu

SEQ ID NO: 4183129 - RNA, 108 nt, Human
gggaggaucucagauuaaauguguacacuggacuucugaucuugugaagaacacugccuagaugcauuagucaggugacauguuuagucuuagaagaaagagccuccu

SEQ ID NO: 4183130 - RNA, 81 nt, Human
gggaggcagaggcagaggccggcuggcuccagccgugguaccgcacggcugccacccucggacuuccgucuugagucuccu

SEQ ID NO: 4183131 - RNA, 61 nt, Human
gggaggcagcuuaggguacugacuaagcccauaggagucagacuaucuugguugagauccc

SEQ ID NO: 4183132 - RNA, 104 nt, Human
gggaggcaggcuaggagggccaccggccgagggaggugcugaaggacuauaacgguuugcgagcaggcccuucgcggccucccccggcccuccugcccccuccc

SEQ ID NO: 4183133 - RNA, 56 nt, Human
ggcuggacucugggccucuccagucccagguacggaccuaggcucagagcccagcu

SEQ ID NO: 4183134 - RNA, 75 nt, Human
ggcuggagucucuuguaggggcagaggaagaaccagaugucugcccuuccuuccucugucaggcaggccccagcc

SEQ ID NO: 4183135 - RNA, 60 nt, Human
ggcuggagugcagugacguaaucacagcucaccgcagccuugaccuccugggcucaagcc

SEQ ID NO: 4183136 - RNA, 60 nt, Human
ggcuggagugcaguggcaugaucauagcucgcugucaucuuaaacuccugggcuccagcc

SEQ ID NO: 4183137 - RNA, 71 nt, Human
ggcuggagugcaguggcgugagcucggcucacugcaagcuccgccucccggguucacgccauucuccugcc

SEQ ID NO: 4183138 - RNA, 60 nt, Human
ggcuggagugcgguggcgugaucauggcucauugcagccucgaccugcugggcucgggcu

SEQ ID NO: 4183139 - RNA, 96 nt, Human
ggcuggaguugaggaguggugccacauaaauggagagaguucuucuauaaacggagauaguuccuccauuuacguggcaacuucucaucgccagcu

SEQ ID NO: 4183140 - RNA, 59 nt, Human
ggcuggaugggcugucugagcgcugugccccauacaagaaggauggagcccacuuugcc

SEQ ID NO: 4183141 - RNA, 59 nt, Human
ggcuggcacaaagcuccaaaucuaggcuaugauacuauuuuuggguuccauaugcugcc

SEQ ID NO: 4183142 - RNA, 84 nt, Human
ggcuggcaccuuccuauucuguacacaugacacccaacuauccugagugugcaacaugagacagaacagggcccgguggcggcu

SEQ ID NO: 4183143 - RNA, 55 nt, Human
ggcuggcaggggaugucagauggcacggagccgaggccaucaucccuuugcagcu

SEQ ID NO: 4183144 - RNA, 85 nt, Human
ggcuggccaggccgcaggagcucugcugucuuugggaugagaaaugccacucucacugcuuggcuccugccagcccugggcagcu

SEQ ID NO: 4183145 - RNA, 75 nt, Human
ggcuggcccggggguccuugcugccagccaccauacuggcuccuuaaagcugcugguaccgcgccuccgccagcc

SEQ ID NO: 4183146 - RNA, 71 nt, Human
ggcuggccucgccuguuguagaaugaguccacagaggacagagccauuccagaugaggccaggcccuagcc

SEQ ID NO: 4183147 - RNA, 70 nt, Human
ggcuggccugagcuggagcuuucggccaccgggccuccaggcuccguccagucucaggccucccccagcc

SEQ ID NO: 4183148 - RNA, 63 nt, Human
ggcuggcucuucagacaacgacuccauccaggguccugauggugcuccugcaggaagcaggcc

SEQ ID NO: 4183149 - RNA, 78 nt, Human
ggcugggaaaagacagggucauggcaccugcacggcuggcaucagugguacagugcucauguucucuccuccucagcc

SEQ ID NO: 4183150 - RNA, 62 nt, Human
ggcugggagcuccuggagggcaggaagcugguccuauuggguucuguccccggagccuggcc

SEQ ID NO: 4183151 - RNA, 66 nt, Human
ggcugggaggaugacuugcuacaugaacuugaacaugggagugauagcaagggaucugcuccaguc

SEQ ID NO: 4183152 - RNA, 79 nt, Human
ggcugggccagggccuguggacacgcugccuuuccacaugacagcuguccacccauccacaggcccugcuuccccugcc

SEQ ID NO: 4183153 - RNA, 66 nt, Human
ggcugggcucugccugucugggaugaugccauuccucccuugcccucggcagguagagggccaguc

SEQ ID NO: 4183154 - RNA, 57 nt, Human
ggcugggcugcgggacgcugggcaugcugagaggccacccuggcucugagcccagcc

SEQ ID NO: 4183155 - RNA, 61 nt, Human
ggcugggcugcugggucagagcccuucuccuuccagcaucccgugaccuggcagugcgguc

SEQ ID NO: 4183156 - RNA, 70 nt, Human
ggcuggggagcugcacagagccgaccccagaugccccuccacccccugcccucucacagcucccucagcc

SEQ ID NO: 4183157 - RNA, 77 nt, Human
ggcuggggcaucuccagagcuuuuuccuugacuuggguccaagaccagcucccagaaaggcucugggacccccaacu

SEQ ID NO: 4183158 - RNA, 129 nt, Human
ggcuggggcgggggacgcggcgggcaguggcuggguugcaaagcgcuggcugcagucagguuuggagcaguagugaaaagcagcccagccaagacucugccccuccugggcccucucccagcuccagcc

SEQ ID NO: 4183159 - RNA, 58 nt, Human
ggcugggguguuugccuucgucccugugggggacuagagguggggcugcaccucugcu

SEQ ID NO: 4183160 - RNA, 88 nt, Human
ggcuggguauccucugcucugucugggaggcucagugcucucccgcucgcuuggcggggcaccgaccuccugccgcccggagcccucc

SEQ ID NO: 4183161 - RNA, 62 nt, Human
ggcugggucugugcccagggaccuccucugagaggacagccugagagggcagggacuuggcu

SEQ ID NO: 4183162 - RNA, 89 nt, Human
ggcugggugucagcagaagcaccguggccccgcucucccgccuccccgugcgccugggccuccgugugcuggugcucucgcacacagcu

SEQ ID NO: 4183163 - RNA, 73 nt, Human
ggcuggguuccaagggugagccucacaagacagagaaccagguggaggcugugccaucuuuggucaccuaguc

SEQ ID NO: 4183164 - RNA, 95 nt, Human
ggcugguaccaggcuugccgucccuggagcugagcagugcuguucccucuagaaggagcauuugcuguccagggcacugagccuguggccaugcc

SEQ ID NO: 4183165 - RNA, 58 nt, Human
ggcuggucaggguauuggaggccaaauuagagguggcuggguuauuuauggccaagcc

SEQ ID NO: 4183166 - RNA, 57 nt, Human
ggcugguccuuucucuguccuaauuacaaauuauuagaagagaggauaugaucagcc

SEQ ID NO: 4183167 - RNA, 65 nt, Human
ggcuggucguccuguuguugucucagccugugcagcagagcuuccgacaggagaggcagccagcc

SEQ ID NO: 4183168 - RNA, 69 nt, Human
ggcuggugagggaucucugccugcucuggacuguggcaggagccagcaggaggacucucugagccagcc

SEQ ID NO: 4183169 - RNA, 57 nt, Human
ggcugguuagauuuguggucuucuuccuccuguggaggacccuagagagagccagcc

SEQ ID NO: 4183170 - RNA, 70 nt, Human
ggcuguaaauaccuggaggcuggccucauggggggcacuuuacaggcugccuaccaaguaucauaaagcc

SEQ ID NO: 4183171 - RNA, 65 nt, Human
ggcuguaacuuaaugagaggcagaugucaacggggagcagauguuugcagcucuucaguuauauc

SEQ ID NO: 4183172 - RNA, 56 nt, Human
ggcuguagacguucacagucucccucucucuacggggccugauggacauuucaguu

SEQ ID NO: 4183173 - RNA, 58 nt, Human
ggcuguagggugggcuuuauccucgggacguccuccuccccaaguccagccugcagcu

SEQ ID NO: 4183174 - RNA, 64 nt, Human
ggcuguaguuugaagacuuagcaggugcuuucuacaccucacuuuccucaucacgacuagagcu

SEQ ID NO: 4183175 - RNA, 60 nt, Human
ggcugucacagguucaaacuccccuacucguggcugagucaaugggaucuguuuauggcc

SEQ ID NO: 4183176 - RNA, 60 nt, Human
ggcuguccuaagcuucuaagguguccucccggacaguaucuagaauggcugggcacagcu

SEQ ID NO: 4183177 - RNA, 60 nt, Human
ggcuguccucacugcucacuugcucccccucagguucaguguguauugcugagggcagcu

SEQ ID NO: 4183178 - RNA, 56 nt, Human
ggcugucuugggagcucccccgcggccccgaagccccgcggugcucucaggauacc

SEQ ID NO: 4183179 - RNA, 73 nt, Human
ggcugugcccucacauggggcaggagcagaacacaacagggccaugagcucagcggugccaggaggcgcagcc

SEQ ID NO: 4183180 - RNA, 58 nt, Human
ggcugugcugagggggaagccccucugcccacuggaugagucccccucauucacagcc

SEQ ID NO: 4183181 - RNA, 55 nt, Human
ggcuguggcugcucaggugcagacccugucuguggguggugcuggcagcccagcc

SEQ ID NO: 4183182 - RNA, 55 nt, Human
ggcugugggguccugugguguguggggagcugucacauccaggguccucacugcc

SEQ ID NO: 4183183 - RNA, 62 nt, Human
ggcuguggugccgagagucuggacgcggggcgcugaccagagucacggcgccgaucucggcc

SEQ ID NO: 4183184 - RNA, 56 nt, Human
ggcugugguggcaucccugagccccucgucuguggggagagugccaccaacaaguc

SEQ ID NO: 4183185 - RNA, 55 nt, Human
ggcuguguaucucugugggacagaaaaugaauuuuuugccuuugagguaacaguc

SEQ ID NO: 4183186 - RNA, 58 nt, Human
ggcuguguuucuguuugacauuugcaauuaauuaccgaaaugcaauggagaugcagcc

SEQ ID NO: 4183187 - RNA, 63 nt, Human
ggcuguuauuuuccucugaacucuaauuguugguaucaaaaggauuaaggggaaaaagcagcu

SEQ ID NO: 4183188 - RNA, 110 nt, Human
ggcuguuggggaccuuccaggcguguuaccuguaugcugccugguggcgccugggggauuccaaggggacugccauguagucuauggggcgcagucuggcccugacagcc

SEQ ID NO: 4183189 - RNA, 109 nt, Human
ggcuguuuuaacuaaaauguaagcaaacccaaugucuaacuacaguaaacaaaauuuauuaugauucggacguggcagugguguuuacaucuagguugacaaaauugcc

SEQ ID NO: 4183190 - RNA, 114 nt, Human
ggcuguuuuccucccggggaagguucuggagcauuucuucuccaugggguaagucagaauuuucuaggcaaaccacaggggaggaaugaugcccgggacaggggaggaagugcc

SEQ ID NO: 4183191 - RNA, 68 nt, Human
ggcuuaagagguuuuaggaugcuguuuauucaacugaauugcauuacagaaacuuucaaauuuuggcc

SEQ ID NO: 4183192 - RNA, 75 nt, Human
ggcuuaagauauuucugauuccuuauaaggcagaaauagaaaaugaaaaggagagcaaucagaaauaucgaggcc

SEQ ID NO: 4183193 - RNA, 60 nt, Human
ggcuuacuaguuuaaaaagcagaaauaugcauuaauggaaugcuguaagauuagagagcu

SEQ ID NO: 4183194 - RNA, 90 nt, Human
ggcuuagcaggacaggagcagggcuggggcacgagccaggucucuucucuggcucacagcugccaguccuuccuuugccaccugaagacc

SEQ ID NO: 4183195 - RNA, 73 nt, Human
ggcuuaggcugaacccugggagauuucuccauuuguacuuucuguccagagcaauuuucccuuagucuuuguu

SEQ ID NO: 4183196 - RNA, 77 nt, Human
ggcuuauacaagcuggaagugcauuucucacucaugucaacagcugagcuggugugccaguuccaguuugugaaguu

SEQ ID NO: 4183197 - RNA, 80 nt, Human
gggcauguguagggagacacuugcuuuagagggccccuggguugugggcuccucccugcgauugcucugccuuacagcuc

SEQ ID NO: 4183198 - RNA, 92 nt, Human
gggcaugugucagcucacuggcagccugggguaggcugggacacgcuguccuuuuucugccugaggacugacaccagcucagcaaacagccc

SEQ ID NO: 4183199 - RNA, 55 nt, Human
gggcauugcagacccuuacugcuagagcgucucaggcaccuggucugcaaagccu

SEQ ID NO: 4183200 - RNA, 85 nt, Human
gggcauuuguguucuaauauaauguccuaugggaauaagguaagacuacuccucuauaggaaauuagaacuuggaaacugagccu

SEQ ID NO: 4183201 - RNA, 55 nt, Human
gggcauuuuuccuuaugauccuuccacaguacugggagggauauuuaaaaagcuc

SEQ ID NO: 4183202 - RNA, 74 nt, Human
gggccaaauugauuauauuuuagguaauauccauugugauagaaucagaaggguuuuuuaaaaaucuuugggcc

SEQ ID NO: 4183203 - RNA, 71 nt, Human
gggccacaugcugaguugaugauauagcaagaaccacccucuagcugguccucagcuccagccuugagccu

SEQ ID NO: 4183204 - RNA, 64 nt, Human
gggccacgugaccucuggcuccuuguggcuccagggucuggugaggaucagaggugcguggccc

SEQ ID NO: 4183205 - RNA, 55 nt, Human
gggccagacggggucuccaggcugcaaguccuugccaguccugucccugcugccc

SEQ ID NO: 4183206 - RNA, 73 nt, Human
gggccagcuuugagcugcaggaaggaagacgggagugcaggauucuagaggcguucucugcagcaggcggccc

SEQ ID NO: 4183207 - RNA, 76 nt, Human
gggccaggcaggccuggggucggugcuccggaggaaguggcccucaggagcccguugcuccggcgggccggggccc

SEQ ID NO: 4183208 - RNA, 84 nt, Human
gggccagggaugcuguuuggucaauauugguuuguaaagauuaugaauaaccaacaguccagaugagauggucauuguuugucc

SEQ ID NO: 4183209 - RNA, 56 nt, Human
gggccaggucugaagggagaguaggcuaccccaggacucugcugcgggcuuggccu

SEQ ID NO: 4183210 - RNA, 66 nt, Human
gggccaugagagguucaucaacugccacugaaaugcaaggggcuuggagaggccucugccaggccc

SEQ ID NO: 4183211 - RNA, 76 nt, Human
gggccauuccuccuucccauuccugggggagacacuggagcagcccccauggguguagggagguggauuggacacc

SEQ ID NO: 4183212 - RNA, 110 nt, Human
gggcccacucugcaccugaggccuccagggagggcccgaguugccccggcuaccccauccuaugccgagggcuccagccagcuccuuguggccacagguacccugggccc

SEQ ID NO: 4183213 - RNA, 62 nt, Human
gggcccagcuaauaggaacuuuggacuugaggcagaguauccagagggccggcauguggucu

SEQ ID NO: 4183214 - RNA, 72 nt, Human
gggcccaggccuuaucuccacccugcagauagacaucucugcugggcuagaagcugaggcccaccauggucc

SEQ ID NO: 4183215 - RNA, 59 nt, Human
gggcccagggcugucugacuccagggccuaugccuuaaccaucaggcugcccugugucu

SEQ ID NO: 4183216 - RNA, 92 nt, Human
gggcccaggucccugcgccccggccucccggcccauuucacuccggcuuggggccaagagucuguggagcaaagggaccaaggaagcagccc

SEQ ID NO: 4183217 - RNA, 127 nt, Human
gggcccagucuugagcacugagaccaucccagguguccagggcuuuguuuaggugaccaccuuuugguuuuggaauaugacaaaagcuguggauauggcugcuuacauuagagagaaauaagggccc

SEQ ID NO: 4183218 - RNA, 63 nt, Human
gggcccagugcacagccaggcaggugggguggcccacacuugccugucgcuguugcucagcuc

SEQ ID NO: 4183219 - RNA, 67 nt, Human
gggcccaguggagauaggaguguggcaaaaaaggaguugggugacaaauuagacucuaacuggaccc

SEQ ID NO: 4183220 - RNA, 76 nt, Human
gggccccaggccacagguggaauuaagaaaucugggaaaccaugaacuguuccuuaugccugaggcaauggugccc

SEQ ID NO: 4183221 - RNA, 69 nt, Human
gggccccagggucuuggagaggagugccagccaaggcugggcccagcuccucugcagacccucaggcuc

SEQ ID NO: 4183222 - RNA, 57 nt, Human
gggccccaguccucccacguggacagcagcucugggccugggggugggcuggggccc

SEQ ID NO: 4183223 - RNA, 101 nt, Human
gggccccguuguguguccauuugggcuuugcuggggucccuggucuuuuuacccaggaggcccagaaggaagcccagacucucagggccugcccggggucc

SEQ ID NO: 4183224 - RNA, 59 nt, Human
gggccccuagcuuuguccuccacccucagcacucucucugcuggccaggccaggggccc

SEQ ID NO: 4183225 - RNA, 75 nt, Human
gggcccgcgggacgcacggggccgccaggggaggacaacaagccucaggcccugucccugcgccccgcccggccu

SEQ ID NO: 4183226 - RNA, 104 nt, Human
gggccgaagccuggucucagagaggggccgggccuucucaagugguucugcugccgagaaaggugccagccccuccacugaccacuggccaccugcagaagccc

SEQ ID NO: 4183227 - RNA, 63 nt, Human
gggccgugagcaguggccaggguccuagugcuuaucugggauccacaguccagcuuugagccc

SEQ ID NO: 4183228 - RNA, 85 nt, Human
gggccuagaauaaucagaauagugggggacagucuuuaccagcuggugugaaaauacuucaguguucuggcaaugacuagagccc

SEQ ID NO: 4183229 - RNA, 84 nt, Human
gggccucaaggaacaguuaauccuaaaggcgguacccaaucuucuaauuuccugcuccugagggauaaacugccuuucuggccc

SEQ ID NO: 4183230 - RNA, 77 nt, Human
gggccuccuggguccaggcauaggaacagaaccuacugcucaggucccugaugccuugauccguggacugcuggccc

SEQ ID NO: 4183231 - RNA, 62 nt, Human
gggccucuccggccuuugcauccugacaucagaguucagcaggggcaggagaucucaggccc

SEQ ID NO: 4183232 - RNA, 61 nt, Human
gggccucugugcagaggggccuccuggucgucagagcagccugccccuguggcaggcgucc

SEQ ID NO: 4183233 - RNA, 71 nt, Human
gggccugagcccagaagcccacucggcauaacacauaaggcugugcuuuuggugcauucugggcuuggucc

SEQ ID NO: 4183234 - RNA, 55 nt, Human
gggccugaggcccagacacuggccacccuggcucagagucuggacugcaggcucc

SEQ ID NO: 4183235 - RNA, 77 nt, Human
gggccuggaaugaugacuaggaauuguuaaaucagaaggcagggugauuccacgggcaucauuagugucccaggccc

SEQ ID NO: 4183236 - RNA, 74 nt, Human
gggccuggcacgugugagcugugagcugcaucuuguggagaggugucugcugcacccucacacccacaggaccu

SEQ ID NO: 4183237 - RNA, 115 nt, Human
gggccuggcaggacucuuaacaccccucuacugggcuggguacgugcaggaugugccucgcauaacgggagccugugcccaucccucuggagugugugaggguugagcuuggcuc

SEQ ID NO: 4183238 - RNA, 99 nt, Human
gggccugucugccugcgaacagcuccccuggggaggguuucaggaggucuccaugaccucagggcccagagcucaggcaaguccaggcuggcaaggccc

SEQ ID NO: 4183239 - RNA, 79 nt, Human
gggccuguggggcuggcacaggaccaaacagcuuuucauuuuguuuaagguugaaaccccugugcuccacacagggucc

SEQ ID NO: 4183240 - RNA, 56 nt, Human
gggccuucagccuuggacugagaauuacaccauuagcuuccuuggcgcugaggccu

SEQ ID NO: 4183241 - RNA, 58 nt, Human
gggccuuccgacucccaaggcccuaaauggagucagagccuugagaaucggaaggccc

SEQ ID NO: 4183242 - RNA, 76 nt, Human
gggccuucggcagggagcugcggucuugcgaagacuacuucucugcgcaaaaacgcacagcucguucuugguguuc

SEQ ID NO: 4183243 - RNA, 56 nt, Human
gggccuugccauggagccugaguccuacaaucaggaauuucuuuguguuaaggccc

SEQ ID NO: 4183244 - RNA, 77 nt, Human
gggccuuggccuuggcuguuggagcuugauagacuaaugagauguacaucagcucaggaaacagcugcugagugccu

SEQ ID NO: 4183245 - RNA, 71 nt, Human
gggccuuuaggagguaauuaggucaugagaauggaucucucugaaugagauuacugccuuuauagaagccc

SEQ ID NO: 4183246 - RNA, 79 nt, Human
gggccuuucucuggaggggagugguuaaaaggacaugggagguuaaugucgaaacugccuccccauuagagagacgucc

SEQ ID NO: 4183247 - RNA, 75 nt, Human
gggcgacguagcacagcuucuugaugucacgcacgauuucccgcucggccguggugugaagcuguagccgugcuc

SEQ ID NO: 4183248 - RNA, 61 nt, Human
gggcgaggggccagucuccucugggagcuccccggagagucagagcgcggcccccacgccc

SEQ ID NO: 4183249 - RNA, 73 nt, Human
gggcgagucuuccuccuuguccuaguuacugccuauggaggcaguguuuagaucaagaaggccucucuugcuc

SEQ ID NO: 4183250 - RNA, 95 nt, Human
gggcgcacuggggguucaugaucgcgguucccgggggcggcggcggcggcggcugcuggcucccaggagccgcugugacaucccccggcgagccc

SEQ ID NO: 4183251 - RNA, 75 nt, Human
gggcgcaggaaagaaggaaugugggggcugauuuguggagcuccagcuuccuguccaggccccacauccugccuc

SEQ ID NO: 4183252 - RNA, 90 nt, Human
gggcgccaguggaggaaaagugaguggggccugcagauggcuuccaucucagggagguuccccguucugcuccaaucuccacaggcuccc

SEQ ID NO: 4183253 - RNA, 62 nt, Human
gggcgcgccccgagaggcgcccggcuaccaccagcuagcucagugcuugggggugacgcgcc

SEQ ID NO: 4183254 - RNA, 70 nt, Human
gggcggaagaggggaaguaaugaaugauacuuccagacccaaggaauguuaacuuccuccuccucugcuu

SEQ ID NO: 4183255 - RNA, 102 nt, Human
gggcggagcgccagcggcgcccggggcuacgcgccgcacugcaccgagcggcggcagcggcaagcuugggugugagcccgggagccgcuuugcuuaccgucc

SEQ ID NO: 4183256 - RNA, 81 nt, Human
gggcggaggcacuucaugcugacccgaaaacagacccaaaucgcccuuucugugccuggggggcaugaaccuccacggccc

SEQ ID NO: 4183257 - RNA, 62 nt, Human
gggcggaucauuuguggucaggaguucgagaccagccugaccaacguggugaaacccugucu

SEQ ID NO: 4183258 - RNA, 60 nt, Human
gggcggcaaaccuaaguggcauuuucaccagugcuguuaugcuauuuaauuuuucuguuc

SEQ ID NO: 4183259 - RNA, 67 nt, Human
gggcggccaccugccaacuugcuggaaguuaagaaagggcauuucugagggaggcaggaggcggcuc

SEQ ID NO: 4183260 - RNA, 122 nt, Human
gggcggccccucugaaccaggcuccucgaggccaucuggacgcccuggcaacaugggcaggaagcggcuuccauggcaacuggcguccagggaggcgcugccuggcaacggggccauggccc

SEQ ID NO: 4183261 - RNA, 55 nt, Human
gggcggcgucggcgaggccaucaaaggccggggguggcggcccgccgcguugccc

SEQ ID NO: 4183262 - RNA, 98 nt, Human
gggcggcucagugaugacguuccugugugacucaagugguuucuaaaaggcaagaagccauccccgugaggcauacggugaccagugcugaaucuucc

SEQ ID NO: 4183263 - RNA, 55 nt, Human
gggcggcuucagccagaggaagcugaugagcccaagagcuuccugaaagcugccc

SEQ ID NO: 4183264 - RNA, 93 nt, Human
gggaggcaggugugcggugaguugggggauuagaagcucccagggcucuuccgucagcugcugggaccccagauccacugugacuuuccuucc

SEQ ID NO: 4183265 - RNA, 75 nt, Human
gggaggcauguguuauccacuuaauuauuaagugauauuaauuuugauuucuuggugucuuaacagaucucuccu

SEQ ID NO: 4183266 - RNA, 55 nt, Human
gggaggcucagugguguccucuacugugugguugggggugcuuagaaggucuccu

SEQ ID NO: 4183267 - RNA, 59 nt, Human
gggaggcucugacgucacacguggccccagccaaucggagcugcccguucggagccccc

SEQ ID NO: 4183268 - RNA, 63 nt, Human
gggaggcuggggggcuggggcucuggcugggcggcgcagggcuccgggccaccggccuguccc

SEQ ID NO: 4183269 - RNA, 63 nt, Human
gggaggcuucccagcugagcucagcuccuccagggcugaccauacagcuguggguaagccccu

SEQ ID NO: 4183270 - RNA, 72 nt, Human
gggagggaagauggcucugugagcacagggaggugccagggcagcucccagagcucgagaguaacccucacc

SEQ ID NO: 4183271 - RNA, 65 nt, Human
gggagggcaggccagggcccaggaggagauccgcuccccucugcaggcuggaccugcccaaaccc

SEQ ID NO: 4183272 - RNA, 74 nt, Human
gggcuccgaguggggcguggauccagcgucgcuccagcaacccuggacaacagccucauaaacaggaggggccc

SEQ ID NO: 4183273 - RNA, 55 nt, Human
gggcuccgcccuuggcugagcuggagggcuuggggucaggaccaagggugggucc

SEQ ID NO: 4183274 - RNA, 94 nt, Human
gggcuccucgcccccucgcggccgccggcuguugguccuuuugucugcacuggggagagggccgggggccagcuccggccuaggggggcagccc

SEQ ID NO: 4183275 - RNA, 109 nt, Human
gggcuccuguugggagagggaagguagguucccucuaggauguggcuggaggacacagaacugguccccacucauuccugagaccaccaccugucuggggacagggucc

SEQ ID NO: 4183276 - RNA, 60 nt, Human
gggcuccuuuugaugggccacagucaagaaggcaguuaagcucuguggccuucugagcuu

SEQ ID NO: 4183277 - RNA, 83 nt, Human
gggcucggggaguguccuggggcucgaggacuagacuacuuccugacuauccuugaaaggggcugcagggcacuccugagaac

SEQ ID NO: 4183278 - RNA, 55 nt, Human
gggcucgucugugaacagguuacauggacccucucuagacccagcagaugggcuu

SEQ ID NO: 4183279 - RNA, 62 nt, Human
gggcucucaaggcagggccccauguucgcuccuggcaccagcccuuacuagcuuugagcccc

SEQ ID NO: 4183280 - RNA, 75 nt, Human
gggcucucacaacagagggaauggaucucaugguucuauauuuuucauucugugaccugcucauuuguugagccc

SEQ ID NO: 4183281 - RNA, 92 nt, Human
gggcucucacaugaguggagaggcuucccgcccaugcuggacuguggcuuccaguccugcagccuugggcuggagccugccgcucugagccc

SEQ ID NO: 4183282 - RNA, 58 nt, Human
gggcucugccuggcugggaguaggggauguucuaaggacugggugggaggcagagucc

SEQ ID NO: 4183283 - RNA, 60 nt, Human
gggcucuggacccaggcaagagccugaugguuauucugccacugggucugcaaugagccc

SEQ ID NO: 4183284 - RNA, 78 nt, Human
gggcucugguguguuucuggcugcggcccagggugagcuuguuaaagagguacucugccaggccugcuuccggggccc

SEQ ID NO: 4183285 - RNA, 93 nt, Human
gggcucugguugggggcagcuguggcugccacugcucccucuguccuggggaagcucagccccagcguguuccauuucccccauuccggaucc

SEQ ID NO: 4183286 - RNA, 56 nt, Human
gggcucuguuuagaccagagaucagcaaacuauggucugugggccaaauacagccc

SEQ ID NO: 4183287 - RNA, 66 nt, Human
gggcucuucccacucccccugagugaucccucuccccaccuuccagggcaugugggagaggagccu

SEQ ID NO: 4183288 - RNA, 69 nt, Human
gggcucuuggccacugauuucaaggccggugaugcgacgccuggagacagcagaggcggcaggagcacc

SEQ ID NO: 4183289 - RNA, 61 nt, Human
gggcugaaggcugacguuuguguuuauuuuccagaaaguugcacauuucuagccucaaccu

SEQ ID NO: 4183290 - RNA, 60 nt, Human
gggcugacaaucucuuuacuuaccuuggccaaaagaugugauggaagugacugucaguuc

SEQ ID NO: 4183291 - RNA, 67 nt, Human
gggcugacaguuuccccugaaacuuggcaaugaggggaacaaggacauaggcagagcugugcagccu

SEQ ID NO: 4183292 - RNA, 75 nt, Human
gggcugaccucaugagcuuccagagacaucagaguaagugacccuuauucuaguuucgaagcucuguucuaguuc

SEQ ID NO: 4183293 - RNA, 72 nt, Human
gggcugaccuggaaggacaauagauagugucuggggauccagcuaagauuaagugcuuuuaggccaccgucc

SEQ ID NO: 4183294 - RNA, 83 nt, Human
gggcugagucaauguugcucucaccagucauuccucaaauauuuauggaguuccuacugaugugacagcugagcagaccgccc

SEQ ID NO: 4183295 - RNA, 74 nt, Human
gggcugagugucucgggagaaaggagugggggcauguuuuccuuccaucaccauuucugcgagcuguccggccc

SEQ ID NO: 4183296 - RNA, 111 nt, Human
gggcugaguuaagcugggcugaccugggcugagcuaagcuggguugagccgauccgggcugggcugggcugggcugagccaggcuagguugagcugggcugggcugggcuc

SEQ ID NO: 4183297 - RNA, 80 nt, Human
gggcugccuuuccaggagagccugugcagccggguucugcccucguucggggaacucugccagguuucaggagccagcuc

SEQ ID NO: 4183298 - RNA, 56 nt, Human
gggcugcuacgagaacugaauaagaaaauguauguagagaacucagugugcagccu

SEQ ID NO: 4183299 - RNA, 112 nt, Human
gggcugcugagaggaggcuggugaggucugagauguuggggcagaaggagcccaagggaaauggggcuuguacaggaauccaugguauuacccagcgcucccauagcaggcc

SEQ ID NO: 4183300 - RNA, 55 nt, Human
gggcugcuucuccugccaauccccccucagggcugggguuggagaagagcggccc

SEQ ID NO: 4183301 - RNA, 83 nt, Human
gggcugcuuggcagaccugucccauaaguagugcaacuugggaagauccuaggccucuuguggguagggcagucauccagucc

SEQ ID NO: 4183302 - RNA, 57 nt, Human
gggcuggaccgcucgccucccuccagucccgacacccagggagacgaaguggcuccc

SEQ ID NO: 4183303 - RNA, 58 nt, Human
gggcuggacugcauugccucgcuucuggagggaaagauggcaguggaagucucagccu

SEQ ID NO: 4183304 - RNA, 55 nt, Human
gggcuggaggguggggcguaggguuugaggaggauucugcugcacaccuuccccc

SEQ ID NO: 4183305 - RNA, 69 nt, Human
gggcuggaguguuuaguuauauuuugacuuuuagaaguugucuucauaucuacuuugcaauucaguacc

SEQ ID NO: 4183306 - RNA, 60 nt, Human
gggcuggcagcucuacucagagccuguccuaaggcaaugcuguggugaagcugccuuccc

SEQ ID NO: 4183307 - RNA, 74 nt, Human
gggcuggccagugucccagggaucaggagcggggagcgguccgcgugggucccggaggggacagauggcugccc

SEQ ID NO: 4183308 - RNA, 69 nt, Human
gggcuggcgccugcugcacccacggggggcucucugcucugcgugaugagggugcagcagcgucccucc

SEQ ID NO: 4183309 - RNA, 58 nt, Human
gggcuggcgggaaaggcaauuccagggccacuuccccuuuuccugcgccggccagccc

SEQ ID NO: 4183310 - RNA, 55 nt, Human
gggcuggcuguagccaaacaacuggaucccagccaguugcauaggccagccaucc

SEQ ID NO: 4183311 - RNA, 72 nt, Human
gggcugggaguggugaagccucugccugcacagccagcugggucacgcugcuugcuucccaccagccagccc

SEQ ID NO: 4183312 - RNA, 62 nt, Human
gggcugggauggcuugaagauuagagcugccaaucugaguaucuucaugugguucugugugu

SEQ ID NO: 4183313 - RNA, 64 nt, Human
gggcugggcagggaaaggaagggcccaggcuuccuggcuuuagcugccuucccuaccccagccc

SEQ ID NO: 4183314 - RNA, 59 nt, Human
gggcugggcucacuccucacacucacucccuggagugugccugagucucggcccacccc

SEQ ID NO: 4183315 - RNA, 62 nt, Human
gggcugggggagauggccaggcucacucugccuggcuuuauuaacucauccguaauuagccc

SEQ ID NO: 4183316 - RNA, 69 nt, Human
gggcuggucagcugcgagaugcuuggagguguugaaacaaccaggccagcgcuggcuggaggccagucc

SEQ ID NO: 4183317 - RNA, 65 nt, Human
gggcugguguggcugccagccaagaggcuuggggcaggccuggggcaugcagcugauaccugccc

SEQ ID NO: 4183318 - RNA, 76 nt, Human
gggcuguagucucagauuucugaaagcccucucuacacaauuuugugagaaacacagaggucuggaguugcuaucc

SEQ ID NO: 4183319 - RNA, 73 nt, Human
gggcugucuccauagcuguguguccugcaggaccuggccagccuggcaugcuugcuguuugggaauccagccc

SEQ ID NO: 4183320 - RNA, 74 nt, Human
gggcugugaggcuggguaccugucauaugcuuaaaucggguauacgguggacccuggcuguccuucacaugucc

SEQ ID NO: 4183321 - RNA, 76 nt, Human
gggcugugaguauagaaugcuucuuugccuugcauuugaaaggcugauuugguuauucuaccacuauguacaggcc

SEQ ID NO: 4183322 - RNA, 122 nt, Human
gggcuuagcuaaaagguuaaggaaauacuccuuugaugaaguuuagcuuugaaaggaauguguauauucuuucaucuaacacuacauaggguauguuucuaaguacaaacgucucugggcuu

SEQ ID NO: 4183323 - RNA, 71 nt, Human
gggcuuauauagcuauuccagccaagugugggagagauguuucugccuggaaugagcuggcuaauaaccuc

SEQ ID NO: 4183324 - RNA, 79 nt, Human
gggcuuaugaucuggagguuuuccucaugacugcaggcaggaucucuuuuucaugcaggaccaccccagcaucaagcuc

SEQ ID NO: 4183325 - RNA, 96 nt, Human
gggcuuauuaaaacacagauggcugggccccaccccaggcugucugauucacuagagcuggggcguagcucaggcauuugcauuucuaacaaguuc

SEQ ID NO: 4183326 - RNA, 87 nt, Human
gggaaaggugacaucucugaggagcguuggucacgugugucaaggccuggugacgcgugucuuaugugccucccugggcaucuucuc

SEQ ID NO: 4183327 - RNA, 63 nt, Human
gggaaagucaagacaaggccaaaguuucuaaauugggaaggguucugccagugucuugagcuc

SEQ ID NO: 4183328 - RNA, 80 nt, Human
gggaaagugacagaggcaagaccagaagcccaagcucuugcacuuggcagccuggcaucuugaccugccuggacuccccc

SEQ ID NO: 4183329 - RNA, 62 nt, Human
gggaaaguucugagacugauggcuacuuucugaggugguccccuacaguuucaaagcuuccc

SEQ ID NO: 4183330 - RNA, 59 nt, Human
gggaaauagaucagaacugcugccaguguaggcuuguagauuccaguggucuguguccu

SEQ ID NO: 4183331 - RNA, 75 nt, Human
gggaaauaguacuguuuaaauugucaugccagcaauaggacaacugaaaaugacacccccacagcauuguuuucu

SEQ ID NO: 4183332 - RNA, 60 nt, Human
gggaaaugauguauguauaaggcaggguuucuuaacucuaaguaaaauuugucauuuccu

SEQ ID NO: 4183333 - RNA, 60 nt, Human
gggaaaugugggagagccaguggacauucagugaguaguaaacagcucugccacaauccc

SEQ ID NO: 4183334 - RNA, 67 nt, Human
gggaacaauuuuuaauaaacaugaaguuuucugagcuuuucagaagaaagauguuauuacuguuccu

SEQ ID NO: 4183335 - RNA, 75 nt, Human
gggaacacacugaguguugauuuauccugcucuuugaccuacuuagucauuuuaguguauaucaacauuuguccc

SEQ ID NO: 4183336 - RNA, 78 nt, Human
gggaacacaggcaguguguagcuggaagagaagcgagaagcguacuuugcagguggaacacaugugacuuagugaccu

SEQ ID NO: 4183337 - RNA, 64 nt, Human
gggaacacaugguaacaaaguagcugagugagugauucagcagccaagguaaccugugcuuccc

SEQ ID NO: 4183338 - RNA, 94 nt, Human
gggaacacuuugaaggccccuggguuguuuaaaagacuuugaggucaucuuggcugagguuccagacagcuuagggaaggcaaacucuguuccu

SEQ ID NO: 4183339 - RNA, 91 nt, Human
gggaacagaaaguguugcaaaaugccguuuuucucagugacaaggauuccacagaaggaaguuggcauuuuguuucagcuaucaugauccu

SEQ ID NO: 4183340 - RNA, 56 nt, Human
gggaacagcugggauuuaguuugccacaugcagacaccaagucuggcagcuuuccc

SEQ ID NO: 4183341 - RNA, 76 nt, Human
gggaacagggccacaggggcgggguaauggguauucuuuucugaguuaggccccagcccuguggaccaugguuccc

SEQ ID NO: 4183342 - RNA, 68 nt, Human
gggaaccagggugugaggaggacggggugccggucuggcacagauguaaucuauucacauuauuuccu

SEQ ID NO: 4183343 - RNA, 65 nt, Human
gggaaccgacuaggauaagccaggcucaccccagaggccucugcugcaagccugguuggcagccc

SEQ ID NO: 4183344 - RNA, 77 nt, Human
gggaacguguggagcuguggaguaggggguuggagaaccaggcaagucucuucccuucucuacaccucaguguuccc

SEQ ID NO: 4183345 - RNA, 77 nt, Human
gggaacucagccacaguggcuguggguguaaugcccugaggagguuuacaccauuagaagcuacuuguugaauucuu

SEQ ID NO: 4183346 - RNA, 61 nt, Human
gggaacugaagagagaagccagaguauauucuaauuguaguaaaugguucuuuucauuccc

SEQ ID NO: 4183347 - RNA, 86 nt, Human
gggaacuggagagguuaaagucaucagaaccuuccagaacacuagcgcaucugggacuguaucacuuuaucuucuuuuuaguuuuc

SEQ ID NO: 4183348 - RNA, 69 nt, Human
gggaacuggaguaaaugucacuguugcugugcuuuagcaaagagacugguggcauuuugccccuguccu

SEQ ID NO: 4183349 - RNA, 75 nt, Human
gggcugggucgucucccucgggcugcgugugugugucgggaauccugcgugucgugucugugggcgauccggccu

SEQ ID NO: 4183350 - RNA, 60 nt, Human
gggcugguagggacaagaggggagggaagugaauugcucaaggcuggucccaccaagccc

SEQ ID NO: 4183351 - RNA, 56 nt, Human
gggcuggugggcggggcugaaggagcgcgccccgccuccucuccgcccaccagccc

SEQ ID NO: 4183352 - RNA, 60 nt, Human
gggcugguuccugcugggacggcugguuucugauccauucagcaccagugggggcagccc

SEQ ID NO: 4183353 - RNA, 59 nt, Human
gggcuguauguguugccucuggccaauguauuuagagcaaaggugacaugugacagccu

SEQ ID NO: 4183354 - RNA, 67 nt, Human
gggcugucuccagggcaggugcaggugcugcugagggcuggcuuccugucauggccuggggcggccu

SEQ ID NO: 4183355 - RNA, 102 nt, Human
gggcugugggaacucagaggaaggagagaucccuucugccuggggaaaucgagaggaauucccagaggaggugguuagaacuuugcguucaagcaugggccc

SEQ ID NO: 4183356 - RNA, 56 nt, Human
gggcugugggcagcacgccggccucagcacagagguuuccuguuucucagcagccc

SEQ ID NO: 4183357 - RNA, 66 nt, Human
gggcuguguaucaguuaucuauuguuguauaacaaacacucaacaauguauggcuuaacacaaccu

SEQ ID NO: 4183358 - RNA, 66 nt, Human
gggcuguguccuccugggucauugccagcaaaucaauauuugacugugccacccaggguggugcuc

SEQ ID NO: 4183359 - RNA, 76 nt, Human
gggcuuaguuaaagcugcugaauccuauuucuaaaaugcuucuggaaaaggugguaagucagcaguguuaaugccc

SEQ ID NO: 4183360 - RNA, 64 nt, Human
gggcuucacucugagacuuggagccuagugugcuaagcucccaguucccaaagugaccauuccc

SEQ ID NO: 4183361 - RNA, 94 nt, Human
gggcuuccacagcguugugguuuccacuuggaagggcugcagugggaacugaggggccugcuccgggggcugagcugcaucugugggaaagccc

SEQ ID NO: 4183362 - RNA, 59 nt, Human
gggcuucccauaaggacuuaaguugcccacugugguaacuuucuucauaugugaaccuc

SEQ ID NO: 4183363 - RNA, 58 nt, Human
gggcuucucugcucuccuucccaagucugcgcugcaagggcuggaggaugggaagccc

SEQ ID NO: 4183364 - RNA, 63 nt, Human
gggcuucucuuaugcuaacugguuccuucuuccuugugcaugagccacugccuugaggggccu

SEQ ID NO: 4183365 - RNA, 79 nt, Human
gggcuuggccuugauucucaaacaacuguccaggaaaaucagcacacagauugaucuugagaauuaugucuaaaagcuc

SEQ ID NO: 4183366 - RNA, 55 nt, Human
gggcuuggguauugugagaggucagacagguuugucuccugucacguccaggccu

SEQ ID NO: 4183367 - RNA, 68 nt, Human
gggcuuguccuugggcugugcaugcagcgcauauaaaggcugcuuauguaucucauccaaggaagcuc

SEQ ID NO: 4183368 - RNA, 98 nt, Human
gggcuuguuagaacacaaauugcugggcaccaccuccagaguuccugauucaguaggucuggagaggggccuagaauuugcauuucuaacacauuccc

SEQ ID NO: 4183369 - RNA, 58 nt, Human
gggcuuuaaagcuuuacaugcagugagcaaggaagcuucuggaaagcauuugaggccc

SEQ ID NO: 4183370 - RNA, 61 nt, Human
gggcuuuaacacccagucaggggcagaugugaaaaucacagccucuuggguggcagaggcc

SEQ ID NO: 4183371 - RNA, 65 nt, Human
gggcuuuaccaucugccacagauauggcaguagcuauaaaugaauugggaagguauuucaggccc

SEQ ID NO: 4183372 - RNA, 74 nt, Human
gggcuuugcaaccuguggccaugccuccccacagucuccuugcgcucagggaggcagagccaaggucaaaaccc

SEQ ID NO: 4183373 - RNA, 57 nt, Human
gggcuuuuccauuccaggguucucaucccuuugagcauucaaagaagaggaaggccc

SEQ ID NO: 4183374 - RNA, 68 nt, Human
gggcuuuuguuucugugaguucagacuugaucuuauuuacaguuagcagcuuauuagaaacaucaucc

SEQ ID NO: 4183375 - RNA, 62 nt, Human
ggggaaaaauaugauauaaaguggauuugccacacauccaguuuaugucauauucuuucacc

SEQ ID NO: 4183376 - RNA, 76 nt, Human
ggggaaaauugagcgagggcuggaggggagacagagggaagcggcucugggucuaucccaugccuuugcagucccc

SEQ ID NO: 4183377 - RNA, 69 nt, Human
ggggaaacauucauuuggccucugcuuaaaauucugggaaggguggcauaauauccaugugauuucccu

SEQ ID NO: 4183378 - RNA, 84 nt, Human
ggggaaacugagguacacagaggaacacugacuugcucaaggguguggcugugacaagucacuguucuucaaugaccucucccc

SEQ ID NO: 4183379 - RNA, 97 nt, Human
ggggaaagaagaauuaacuucacaauggaaaauuuuaacauggucugccucgucuagcuagugcaugucaagcuuaucucuguggucuuccuucccc

SEQ ID NO: 4183380 - RNA, 82 nt, Human
ggggaaagauuuagucacucaauauuuaggugccaggcacccacugaacacuaaaguauggaagugaauaagccuggucccc

SEQ ID NO: 4183381 - RNA, 75 nt, Human
ggggaaagguggcuucucccgacacccuggcgggcaguauccaggccugagaucaggagaaagccagcucuccuc

SEQ ID NO: 4183382 - RNA, 76 nt, Human
ggggaaauuacagauucaagcucuuugaagauauuuauuccuucaaaguucuuaauuuguguuuauucauuucccc

SEQ ID NO: 4183383 - RNA, 89 nt, Human
ggggaacagagagcaggagggacaggcgccagggcagagagcaaacucccuaggaccccaccuuccgcagagcuccgccucgguucccc

SEQ ID NO: 4183384 - RNA, 64 nt, Human
ggggaacaucacugaugcccucacugagcucugugggaaaacugggcuccagagauguagcuuc

SEQ ID NO: 4183385 - RNA, 92 nt, Human
ggggaacuggagagcuggggacccggacuccuggguccuggggaaagcagguccaaggauggggucucccagauauuuucucccgugaaucc

SEQ ID NO: 4183386 - RNA, 63 nt, Human
ggggaacugggccucuggaagccuaaugaagguucucuagcuacagaugagcccaguaucccu

SEQ ID NO: 4183387 - RNA, 60 nt, Human
ggggaagcgaagcucuggaaggggcccaggucccgauuggggauccagagaggcuucccu

SEQ ID NO: 4183388 - RNA, 56 nt, Human
ggggaaggcaggcuugacucagguggccaaacagcugucucaagaaaggccucucc

SEQ ID NO: 4183389 - RNA, 81 nt, Human
ggggaagggcagcagagccaggcuggggcaggucagggcuccgccgccaugccugucgagcuuggcagcaauuccuuccuu

SEQ ID NO: 4183390 - RNA, 78 nt, Human
ggggaaguaauuaucuuagaggugauuguauucugccucccucagaauaauuccucccuuucuaggaaaauauuccuc

SEQ ID NO: 4183391 - RNA, 94 nt, Human
ggggaaguguaggcaggccaggccuuucuccauuccugcaggcaaggcacaagcccaggaacggggcgcaaaggccgccuggcucauuucugcc

SEQ ID NO: 4183392 - RNA, 73 nt, Human
ggggaaguuauuugaaggcuaaaggggcagagguuaacuagaauuaacgugucuacuuuuuagucucuucucc

SEQ ID NO: 4183393 - RNA, 89 nt, Human
ggggaaguucagugugcuaaggcagucuaucacaggggauauaaucuagucuagcagucccugaggcagugauguuuaagcaccucccu

SEQ ID NO: 4183394 - RNA, 77 nt, Human
ggggaaugggcaguguggacuagaguaggaguugcauuguugcuauuuuguuuucaguccauuuggccuaagacccc

SEQ ID NO: 4183395 - RNA, 58 nt, Human
ggggaauuggaagcagaauuugauucagucuaaggaaauuauugcucuucaauugccu

SEQ ID NO: 4183396 - RNA, 109 nt, Human
ggggacaagccuccugggcaagcggcugccuccagcucuuguuccaggugaagucccuccugggacagugaccccagaggucaucgcugcucucaggccacccuucccc

SEQ ID NO: 4183397 - RNA, 81 nt, Human
ggggacaggacaguuugcuuugcccugacugguucucuuucuaguuagcaaaaccuaacuuuuuguuuauaaugauacccc

SEQ ID NO: 4183398 - RNA, 93 nt, Human
ggggacaggauucuugaagauguuucuaaacugcagaagauuaaaaauguagcuagcggcacuuugauaguuuaaucuaggaucauuguccuu

SEQ ID NO: 4183399 - RNA, 126 nt, Human
ggggacaggcuucgaaauuccuaaaugacauuagagugacagggcagggccacagugaggcuaagcuuggcacagauugggucugccucugggcucugccccuggcuugcuguguggcuuguuucc

SEQ ID NO: 4183400 - RNA, 75 nt, Human
ggggacaggugugggcagaugcccuacuuaauaaggguuuuuaaggagugggugaaugugcucauaacagucgcc

SEQ ID NO: 4183401 - RNA, 76 nt, Human
ggggacagugcccaccucucuucagcuagggccgagggugaggaccuggcugcagaucugugggacacguggcccu

SEQ ID NO: 4183402 - RNA, 69 nt, Human
ggggacaucacaggggccacaggccuggguguggucuuggcucugugagccacuugauguacaguuucu

SEQ ID NO: 4183403 - RNA, 82 nt, Human
ggggaccaccagggcuggugcaggaaggagcuggcagcagcacggcugucaccacccauguaccacgucuuccaaugucccc

SEQ ID NO: 4183404 - RNA, 124 nt, Human
ggggacccugggggcucaggauccagcaaggggcagcaggaguaaaggaggaaggaaugacaggugcaaauaccuucccacuaaagcccuuguugcccucuggcuccuccccagaguugucccc

SEQ ID NO: 4183405 - RNA, 67 nt, Human
ggggaccgggcaugagagcuggcccgugaggcugggccaggaaaagaagcuggugcucagguacccu

SEQ ID NO: 4183406 - RNA, 56 nt, Human
ggggaccuaggcucugucucuucugguuaagucaguggaggggggcauaguucucc

SEQ ID NO: 4183407 - RNA, 68 nt, Human
ggggacggaccgugugcagagacccacauuuggaaccaaaggauagcucuguccacagguuugucccu

SEQ ID NO: 4183408 - RNA, 76 nt, Human
ggggacugugggagcgcaguggcagcuggugacugcccggauccgcugguucuuguugcuuccuccccaugucccc

SEQ ID NO: 4183409 - RNA, 56 nt, Human
ggggacuugcuauguuguccaggcuggucuugaacuccuggcuucaagcaguccuc

SEQ ID NO: 4183410 - RNA, 57 nt, Human
ggggacuuggaggcuuuaucuggagcugcagcuaccaggagcccccuucuggucuuc

SEQ ID NO: 4183411 - RNA, 76 nt, Human
ggggagaaauagucagucugauuaagggcaaucuuuaccaaucuuuaauccaauauccuggcuauuuacucuuccc

SEQ ID NO: 4183412 - RNA, 110 nt, Human
ggggagaauguggaugugucugaggucacauggcuggccagugggaguggagcagaugaagaugacuauucccaucuggccgcuggcuccuacagaagccaaggcuccuu

SEQ ID NO: 4183413 - RNA, 82 nt, Human
ggggagagagagugugugcagcggcaggugaaguuuugaugucugaguacucugcuuauugcugcaggcagucaaucuucuc

SEQ ID NO: 4183414 - RNA, 73 nt, Human
ggggagaggggagguccaggcauuuggguugggcaggcagcccacgcagcugucuggaguuagcggucuccuc

SEQ ID NO: 4183415 - RNA, 108 nt, Human
ggggagaugauagagcugacagcccccagcccauccugccucagaggugggagcuacuuccccagccuccugcugaauggccaggagcugugggggucagcucucccc

SEQ ID NO: 4183416 - RNA, 55 nt, Human
ggggagauuccaguaaagcugggaacuugaaccccaaguucugcugaaucuucuu

SEQ ID NO: 4183417 - RNA, 65 nt, Human
ggccuggaaugcuuuccuaccacuuuccccacccugugggcuuuagggucagagagauccaggcu

SEQ ID NO: 4183418 - RNA, 55 nt, Human
ggccuggagaaggcccagggagcuuaggacacgucucccucgcuaucuucaggcu

SEQ ID NO: 4183419 - RNA, 82 nt, Human
ggccuggaguaugcuacugcuugggaagcacugugggcagcggcugcaggugacaagaucacagucaaguguauuuggggcu

SEQ ID NO: 4183420 - RNA, 93 nt, Human
ggccuggccgccaccccaauuuaccuugaagagcuugagggccuccgucugcaaggccucagagggcaggguggugagggaggcguauaggcc

SEQ ID NO: 4183421 - RNA, 66 nt, Human
ggccuggccucccuuccuagcguacagaccgaaaccccaaaccgaaauuaagcggagggccgggcc

SEQ ID NO: 4183422 - RNA, 71 nt, Human
ggccuggcucuugcccagccuguaucaacaaaaagaagaaguggggcugaggagacaggggcucccaggcu

SEQ ID NO: 4183423 - RNA, 83 nt, Human
ggccuggcugauggagcuggaaagugcuuuucugagagggaguggugccuucuacuuuccauuccaucuuacaaagccaggcc

SEQ ID NO: 4183424 - RNA, 62 nt, Human
gggggaaauucacaguuuuagcuguccagggauuagcuucagaggaaaggcugauuuucccu

SEQ ID NO: 4183425 - RNA, 69 nt, Human
gggggaagaaagggaggauaagaaugggucuucugauuugucauuuggagccuuccuguuuuauagccc

SEQ ID NO: 4183426 - RNA, 95 nt, Human
gggggaagggggacauuguuuugaacuuaaggcuauaacucaauggaguuaggaauguuuuuaucaacuuacaucuugucuccugcguuuccucc

SEQ ID NO: 4183427 - RNA, 67 nt, Human
gggggaagugucacagacccaaucaggagguuaaggagggcuuccuugaggaggugacacuggagcu

SEQ ID NO: 4183428 - RNA, 82 nt, Human
gggggaaugcgcguugugcgugugugcaaguguauguccaugugugcaugugugugugcgcgcgcaggaagugcgugaaauc

SEQ ID NO: 4183429 - RNA, 86 nt, Human
gggggagaucucuagggcgcacgccgugccccacuucccccuuacgggaaaggcuuuccagcgcgcggacccaggagacucucacc

SEQ ID NO: 4183430 - RNA, 124 nt, Human
gggggagccgggagcggacgcgugggugaguggggaggggagugaguagguaucuucucuucucucggugcaucccucaccuuuucgcuuuuugccuccuggagacaacugaaauuccuucccu

SEQ ID NO: 4183431 - RNA, 100 nt, Human
gggggaggaggaggacgaggaggaggaggaggaggaggagaaggagaaauggacucucacucuucacgccaagugccccucauuguguucaucauccccc

SEQ ID NO: 4183432 - RNA, 61 nt, Human
gggggagggaggcuguuugcuuuaggauaagccuggcuccucuggcccagcugccucugcc

SEQ ID NO: 4183433 - RNA, 81 nt, Human
gggggagggaguugcauguaagugugcaugugcaugaguguguguguguguuuguacaugaaugugcacccaacaucuccu

SEQ ID NO: 4183434 - RNA, 75 nt, Human
gggggcaaaauacgugaauuucuuccuucuccuagaagaaauccuggguuucuuccuagaaggaagaaaucuccc

SEQ ID NO: 4183435 - RNA, 64 nt, Human
gggggcagcggaggacagaugggagcuccuguuaggagccacguuuccucggcugggaaccccu

SEQ ID NO: 4183436 - RNA, 76 nt, Human
gggggcaggaggagagguccagggccccggccagccugugggaggcgggaggcugaggaguuggucgccagccccc

SEQ ID NO: 4183437 - RNA, 60 nt, Human
gggggcaggugcccagggccagaggcuucugcuucaggcuguagugggcacuuggcugcc

SEQ ID NO: 4183438 - RNA, 79 nt, Human
gggggcagucccauugcucugcaauccuccccaaaguguuuccucuuggguggcuauuucagagccugggugugccccc

SEQ ID NO: 4183439 - RNA, 60 nt, Human
gggggccaaggagcagcuucugggcagugugcuggcuccagaugaaugcacuuguucccc

SEQ ID NO: 4183440 - RNA, 57 nt, Human
gggggccagucaucucccaagaacauuagcuguccucuugcaauugauuggcacccc

SEQ ID NO: 4183441 - RNA, 91 nt, Human
gggggccccauauuuacauuucauacuaaggcucaaaaaucauguagcugguuuugcucuugguaaugaaagacuccuugaggugguuccc

SEQ ID NO: 4183442 - RNA, 66 nt, Human
gggggcgguccggagauagugccucucagccaggguugcugggggugacuaucucgggaauccccu

SEQ ID NO: 4183443 - RNA, 78 nt, Human
gggggcgugaggguguugguugguugggauauuaccuaaaggaagcccaguccuaaagcagacgccagugcugccucc

SEQ ID NO: 4183444 - RNA, 119 nt, Human
gggggcuccagugugcuccaccccuuccuuucugucagccugagugcucccgcccccuuugggccucagucucccacagagagggagagcuggguggcccagcaaucucuggagccccu

SEQ ID NO: 4183445 - RNA, 93 nt, Human
gggggcugcaccugguucuauucugauaaaugcauggaaagaacaaggucuuucucugcccaaguuucucaagugugagccaagccaacaccc

SEQ ID NO: 4183446 - RNA, 62 nt, Human
gggggcugccuguugcccaccugauaaagcccaacccccagggcuccaugcacauagccccc

SEQ ID NO: 4183447 - RNA, 76 nt, Human
gggggcuguccugugcauuguaggauuuuuaauagcauccauggccuuuacccacuauaugccaguagcagccccc

SEQ ID NO: 4183448 - RNA, 75 nt, Human
gggggcugugccaggcgccguggccuccaggccagacuggacccuacccggcccucggccucgccagcagucccc

SEQ ID NO: 4183449 - RNA, 56 nt, Human
gggggcuuaccccaggggugaggauguugagcuuucccucccuggggcugccaccc

SEQ ID NO: 4183450 - RNA, 84 nt, Human
gggggcuuucuaaguauauggguaugugagugcuaugauagacaggcugaaaggaacuggcaccaccacccagcccugaccccc

SEQ ID NO: 4183451 - RNA, 78 nt, Human
ggggggauaagugcagggagaauaaaagagucagaaguuccugucuuuucauacuuucccuccccgcucuguucuucc

SEQ ID NO: 4183452 - RNA, 79 nt, Human
ggggggauaccuuagagugaucugcauguaaaccuucacacuguauuuauaugacaguaucauuuuaaaauguugaccc

SEQ ID NO: 4183453 - RNA, 98 nt, Human
ggggggauuuggaacagagauuaucugcaggcuuauacuguaacucuggguagauucuuagugucuguuacgcuugcagaagaguuuuaaguugcccu

SEQ ID NO: 4183454 - RNA, 72 nt, Human
ggggggcacacagagaggcuugucuccaaggcugaaauagcacuuggaggacaugggcuuuuagaacuuucc

SEQ ID NO: 4183455 - RNA, 91 nt, Human
ggggggcauagugacuugugagggaguagaaaauggcuauaaguuccuugaaacuuguugcugcucaaccucuauaaaguucuagccuuuu

SEQ ID NO: 4183456 - RNA, 55 nt, Human
ggggggcccgcuguggggugugcacggccacgcccaccuccuggcgggcauccuc

SEQ ID NO: 4183457 - RNA, 101 nt, Human
ggggggcuacugcaguuugaugcaaucagaaaggcuaaggaagcaucaccucugugcccugcagccugcuuuugcugaacccucaaccugcagagauaccc

SEQ ID NO: 4183458 - RNA, 64 nt, Human
ggggggcuuuacagggcgucaguuaaaacucauugcacacuggaagggcuuuggaaagccuucc

SEQ ID NO: 4183459 - RNA, 66 nt, Human
gggggggccuugauggaguucccagugccaaaggauagagagcugaauggacccagggccucaccc

SEQ ID NO: 4183460 - RNA, 88 nt, Human
gggggggggacauuuaacagaauuugcuugggcaauggguguuuauaguuuuaaaaagccacccaagagauuuggaugugccucuucc

SEQ ID NO: 4183461 - RNA, 55 nt, Human
gggggggugauaaugcuaaauuaacaacaaauaguccagcacagaugaccucccc

SEQ ID NO: 4183462 - RNA, 82 nt, Human
gggggguacaggaggaggagaucccugagaugggucuggacagauugcccagguaaggaugcuccucaucccagcuccuccc

SEQ ID NO: 4183463 - RNA, 58 nt, Human
ggggggugcugaucaguggagcuuagaauuacuuuacacacacaugccuacacccccc

SEQ ID NO: 4183464 - RNA, 86 nt, Human
ggggguaccuauuacaugccugagucugugguguaccugagauaguacaauuagcagcagccacuauucuggcauuagguggccuc

SEQ ID NO: 4183465 - RNA, 64 nt, Human
gggggucagaaucauuugggggacuuugacaugguacauuuguccccaggaaauucugauucuu

SEQ ID NO: 4183466 - RNA, 61 nt, Human
gggggucaucgagggggucaccuuggcucgcccaggccgagggggcuccuccggugcuucc

SEQ ID NO: 4183467 - RNA, 77 nt, Human
gggggucccaugggccacagcaauacaaugucacagaagaggcaaacuucugcugaacuugcugcccagagaccuuc

SEQ ID NO: 4183468 - RNA, 63 nt, Human
gggggucguggcucauaugguaaucuugguggacuuauuauuacuacacaaguaacgauuccc

SEQ ID NO: 4183469 - RNA, 58 nt, Human
gggggucucacucuguugcccaggcuggucuugaacuccugggcuuaagugauccucc

SEQ ID NO: 4183470 - RNA, 92 nt, Human
gggggucuccucagggcugcuggccgugcccucuagaccuugguuguuuccucacuaaaaugagggcacuggccuugagaucagaggccucc

SEQ ID NO: 4183471 - RNA, 86 nt, Human
gggggucucucccggagucggccagcccgaggcaggaagcccugcgguuucuggcuucucccaggcggccuccggaucuggccccc

SEQ ID NO: 4183472 - RNA, 77 nt, Human
gggggucuguugaaguguuuauuuuggccuucccaugggugaaggcccagcuugaaugcugcccaugagagaccccu

SEQ ID NO: 4183473 - RNA, 84 nt, Human
gggggugaagugugugaaggagccacuguucauaagcaccugccuuuauggacgcggcacuuucaucagcauuacaccaauccc

SEQ ID NO: 4183474 - RNA, 110 nt, Human
gggggugagagaggccugagugugcggucccugccugaggcuggccuggcuuguauccaggacuugccuggggagggauuuugggagccacucucagccuccccaccccu

SEQ ID NO: 4183475 - RNA, 129 nt, Human
ggcggggaggcccgggcagggcggcugcggcgcagcucuggcagagcccaacccuggccccgcccaggucgcaggccucgcccaggucccgcugggccgcagcccggccugcacucagccgccaaaguc

SEQ ID NO: 4183476 - RNA, 98 nt, Human
ggcgggucuugcugccucgugagcucugagcagcuggaggucgugacacugaaaugaacacaccugucuccaagcagggcugcaaggcagcuccugcc

SEQ ID NO: 4183477 - RNA, 91 nt, Human
ggcgguauuagauuuucauugauaaauugcaauggggcugucucgucuccacaguacccuuuucacugucacaagaaaacaaagugccacc

SEQ ID NO: 4183478 - RNA, 89 nt, Human
ggcgguggcagcgguggcggcgguggcugcggccucguguugucuacccauccggccuuugcguccacgccgcuuccggggccgccgcc

SEQ ID NO: 4183479 - RNA, 56 nt, Human
ggcggugggugcuuaagggagcaaaauaauguauuuccuuguucuacaucccugcc

SEQ ID NO: 4183480 - RNA, 67 nt, Human
ggcggugucuggagaucagggggcccgggcagcgcaagucugucugcccugcugaucucaccccucc

SEQ ID NO: 4183481 - RNA, 98 nt, Human
ggcguaacgugggagaggaaagaagugucucaucaggcaauaucugauaacagacugauaauuugccucagcauuucagccucuacucaccacaagcc

SEQ ID NO: 4183482 - RNA, 106 nt, Human
ggcguacucgcccaucugguuccccaggcggcccuuggaguugauagugaacagguccucccggggcaggugucugggggccaggaccacacgggcugaguaugcc

SEQ ID NO: 4183483 - RNA, 64 nt, Human
ggcgucccuggugguacggcacuggcagguguaggagcccuccagguugaugcaccaggcagcc

SEQ ID NO: 4183484 - RNA, 69 nt, Human
ggcgucucaaggcccccaggccaagcaccagauccccgcccauggcccccggggucuuggggcucagcc

SEQ ID NO: 4183485 - RNA, 111 nt, Human
ggcguugacagagggggaaaggggaauagaguggguuguggaaaaugucaauuaucaaacauaugcaaggcuuuuucucuguuucuguguuuucuccuuucucacccagcc

SEQ ID NO: 4183486 - RNA, 67 nt, Human
ggcguugcucucccaccccggccgugacgcaaucucuccgcgccgggggcgggacgagcuugacgcc

SEQ ID NO: 4183487 - RNA, 69 nt, Human
ggcguuggguuugguguuguaacaacuggugacauuucaguucaugugacuacuaugaccuaaucacuc

SEQ ID NO: 4183488 - RNA, 60 nt, Human
ggcguugugagcuugguagacacuuguggcuggcaaguggaagagccauguuccaacccc

SEQ ID NO: 4183489 - RNA, 57 nt, Human
ggcguuugggcuguaucuccccaggcuaccaucuugggggggccagcagcagacgcc

SEQ ID NO: 4183490 - RNA, 100 nt, Human
ggcuaaaaucaaggcaacagcagagcuuucuggaagucuaggugagaaucuguuuccuuaccuuuuccagcuucuagaggcauccccuugguucauggcc

SEQ ID NO: 4183491 - RNA, 91 nt, Human
ggcuaaaauuaugaggugcuaugugaaauuccacacaaaugaacuuggaaauagauauuguuuuacuugguguucugcccaggauuuugcc

SEQ ID NO: 4183492 - RNA, 86 nt, Human
ggcuaacacuaucugccuuacagggaugccaugagaauuaaauggaauaaugccucugaggaagauuguguuuucuaaaaauggcc

SEQ ID NO: 4183493 - RNA, 55 nt, Human
ggcuaaggaacgcaggcuucucuuacccagguucccugaacugcuuuuuuuagcc

SEQ ID NO: 4183494 - RNA, 59 nt, Human
ggcuaagggacccuuucuaaugugcuggguauuaagcagcauagauucuuuccuuugcc

SEQ ID NO: 4183495 - RNA, 100 nt, Human
ggcuaauuggcugcuuccacaugggauucugaaacuggagcaagugaggcaaagcccagggugcuuagaacccauucucagugagagcagcaggacugcc

SEQ ID NO: 4183496 - RNA, 60 nt, Human
gugguuuccugaacaccgauggugugcaaggcuguguaugagguauuacaggaaauauac

SEQ ID NO: 4183497 - RNA, 57 nt, Human
gugguuugcugguguacguuuauuauaugcagugaaaguacuuaaucugcaaaccac

SEQ ID NO: 4183498 - RNA, 89 nt, Human
gugguuuucaauuauuugauaugaaaggggcagcgugguuguuuaaacuugauccagccucuuugcaucuuaaacaguugaauagcuac

SEQ ID NO: 4183499 - RNA, 55 nt, Human
gugguuuuuggguuugcaccuacagggagaguuccagugcauuccaaagcaccau

SEQ ID NO: 4183500 - RNA, 58 nt, Human
guguaaagaugccaggaaucuugcaguaaagaucuuugaguccugguauugcaagcac

SEQ ID NO: 4183501 - RNA, 82 nt, Human
guguaacauacauagugaacauuuacagagcacuuauaccacaugccaggcacuuugccaaaugcuuuacauguguuuacgc

SEQ ID NO: 4183502 - RNA, 67 nt, Human
guguaagcauugaaagagauaaagccuuuuuuuaaaagagguguuaaagucucuuuuaaucuuauau

SEQ ID NO: 4183503 - RNA, 69 nt, Human
guguaagccaggccuuagggagaggcaaacaccacuaacuuguuccugcccucccaaugcuucggucac

SEQ ID NO: 4183504 - RNA, 68 nt, Human
guguaagcuaggaacaugccuuauucccuuaagcccauauggaggggaugggcaagccuagugccuac

SEQ ID NO: 4183505 - RNA, 70 nt, Human
guguaagugcccugaugcaauugucucacaauacaaaaccauuauguuagacauaaauuaaggcauacac

SEQ ID NO: 4183506 - RNA, 116 nt, Human
guguacaggacaauaggaauguucauauucauuuuccuggaauuucuuuacagcuuuucucuuaggcauguaaucacucuaggaaggauaugagauuuuucaguuauucaauucac

SEQ ID NO: 4183507 - RNA, 69 nt, Human
guguacauuuguaagcuagagccaugauuuguaaaaccuacaaacuguaacgccagcuuuaaaugucac

SEQ ID NO: 4183508 - RNA, 64 nt, Human
guguacccaguaucaaguguguggggaguucacauaagauauauuauauacauacugugugcau

SEQ ID NO: 4183509 - RNA, 83 nt, Human
guguaccgacagauuuugcauuucacuuucaguaggcauuuggaagcagaacggccucuuuggacugaaaaaaucuagguuac

SEQ ID NO: 4183510 - RNA, 66 nt, Human
guguaccuaccgaaaauuaugauuaggcaaaccuguuuaguuuaugauuuuuuggaaggaaaauac

SEQ ID NO: 4183511 - RNA, 96 nt, Human
guguaccugccacagugccgccauaucaucugccucuuagcucacuuuugaaggugaaugucaagggugaagggugguggccuagaaggugagcac

SEQ ID NO: 4183512 - RNA, 55 nt, Human
guguacuauagcauuuucuaggagcugaaaggcguuuagcaagaguauagugcau

SEQ ID NO: 4183513 - RNA, 101 nt, Human
guguacucuguucucugaguguauuggagcuguuggcuguaaagccugaguuugcauucuuuacaccaagcagaucuuucacuggagacaaaagaagacac

SEQ ID NO: 4183514 - RNA, 83 nt, Human
guguagaacaaaaaggcagaggaagggcagugaauuguugcucucuuuuugagcugggacauccaucuucugccugugaacau

SEQ ID NO: 4183515 - RNA, 75 nt, Human
guguagcuaaguaacaaccuggagagugggggaaagcuuuuauuuccaacauuuaucaagguuguugaccuacac

SEQ ID NO: 4183516 - RNA, 77 nt, Human
guguagcuugcucauuaaaaucugcuuccuuuuacagaaauguuuuuuauguaaaguagauggcagguaaaaaacac

SEQ ID NO: 4183517 - RNA, 55 nt, Human
guguagcuuuauauuguguugggagaaauggaaucccccgauauuacagcugcac

SEQ ID NO: 4183518 - RNA, 103 nt, Human
guguaggacagacucuuuccucaaucuguguggcguugcguggcuaggaguuagauuccuuugccaugacauggcacaagacuaggagcacgguuuucagcac

SEQ ID NO: 4183519 - RNA, 60 nt, Human
guguaggauuuguugaguuucuuagaucuguuuuuucaugaaauuuaggaaauuuuacgc

SEQ ID NO: 4183520 - RNA, 68 nt, Human
guguaggguggucaggaaaguguucucagaggacaugacauguccacuuaauuuccugacuuccccac

SEQ ID NO: 4183521 - RNA, 93 nt, Human
guguaguuuuaagccauuaaauuugugguaauucauuacaacaucaauaaaguaguaguacacuaccaucagguuuuacauauggcauuacac

SEQ ID NO: 4183522 - RNA, 60 nt, Human
guguauaagguggguucucuggcuguuuaaaaacaggcaggagaauucugccugauauau

SEQ ID NO: 4183523 - RNA, 130 nt, Human
guguauacaggugugcacacauacauguauacauguauguauauauguguacacacagugcacacaagcacacgugugugcauguaugugcagguauguaugcaugugcuugugugcacauguguggcac

SEQ ID NO: 4183524 - RNA, 94 nt, Human
guguauauuuucuggugagaaaguuguaucuaagaaaugaccuagagcuuaguugcuuauuuccaaacuggauauaccucagcagaugauacac

SEQ ID NO: 4183525 - RNA, 62 nt, Human
guguaucaguggcuugacagugaauuaugaguuuccugcucuuggcuggacaagucacucac

SEQ ID NO: 4183526 - RNA, 60 nt, Human
guguauccuggaacagauuuuaccuaugaccaauauacaguauuaccuguucaggagcac

SEQ ID NO: 4183527 - RNA, 66 nt, Human
guguauguagauuuuucuggggagagggucuaguuucuucaugacccauaaaaauuuaauaaauac

SEQ ID NO: 4183528 - RNA, 102 nt, Human
guguaugugcuaggggaaucuggcccagucucagagugucagggaagacuucccuggaaaccugucauuggauccaggugguaaguaagguuaaccauacac

SEQ ID NO: 4183529 - RNA, 70 nt, Human
guguaugugggcaaggggcgcauguguguacaguaucuucugaucuucugccuacccugcccgcagacac

SEQ ID NO: 4183530 - RNA, 59 nt, Human
guguauuagugagaaggaagaucugcaucacucacugcacauccagcucacagaugggc

SEQ ID NO: 4183531 - RNA, 77 nt, Human
guguauuguccuaggagacacaaucucauuuacauuuauuagaaguaaugauaucguguccugcagauaauuaacac

SEQ ID NO: 4183532 - RNA, 58 nt, Human
guguauuucauauauugcuguauguacauauuaaucagccagcaaauauuaagugcau

SEQ ID NO: 4183533 - RNA, 74 nt, Human
gugucacauagcacacgcauuagcaaaucauugauuuauucacugucuauggagugcuuguguguucuagacac

SEQ ID NO: 4183534 - RNA, 74 nt, Human
gucauuuuacacaccacaggaaauauuaggagggauuaaauaaagucccccucaaguacaaccuguaaagugac

SEQ ID NO: 4183535 - RNA, 68 nt, Human
guccaaaaguaucagccuggccgcucuguugacaauagucagcaagaggguaagguugaagcaaggac

SEQ ID NO: 4183536 - RNA, 79 nt, Human
guccaaccucacaggcccaaaccacgcuuacauaacccgcagugacacuaaguguuugugaggccugcugaaguggggc

SEQ ID NO: 4183537 - RNA, 72 nt, Human
guccaagggcaggagaagacggauaucccagcuccagcagagugagaaguugcucuuuuucugccuuuuugc

SEQ ID NO: 4183538 - RNA, 72 nt, Human
guccaagguuuauggagcaccacaucuacugauguacaaauuggagcaauguuggccuauauaccucuggau

SEQ ID NO: 4183539 - RNA, 62 nt, Human
guccaaugguaaauccaaauaaacugaacaugggaagugcauuuggauaagaucauuuggau

SEQ ID NO: 4183540 - RNA, 74 nt, Human
guccaaugguugaaaaacauuggcuuuugccaagagugucuuuaaaaagucaagccuuucuuuucccucuggac

SEQ ID NO: 4183541 - RNA, 93 nt, Human
guccaaugugguuuauuauuggaagaauugggugaaucuuguuaaaacacagcuuuaccugaaauuugaucccuaggugugaacccagaggac

SEQ ID NO: 4183542 - RNA, 78 nt, Human
guccacacaucagccagguggucugucacccaucguguguuuaaaaugauggccaagggccuggcguggagugugugc

SEQ ID NO: 4183543 - RNA, 71 nt, Human
guccacaguuuguguuggccaugggcaacuaucucaacgauggacagcccaaaaccaacaagacuacgggc

SEQ ID NO: 4183544 - RNA, 87 nt, Human
guccaccgugcuucuccggcaccgaugccgggagccugcagggggcgcccuugcccaggcuggccuccgcagugccggaggagggac

SEQ ID NO: 4183545 - RNA, 55 nt, Human
guccaccuucuuggucaggccccugaggcaugcauuucuaccaaggaauauggac

SEQ ID NO: 4183546 - RNA, 101 nt, Human
guccacgugcuggauccugccgugccuuucuugauguaccaacuugggagacucucuauugacuccuggccaugcaagaugaggagcuggccagcuuggac

SEQ ID NO: 4183547 - RNA, 92 nt, Human
guccacugucucgguggugguguuuuuugaaucauuaaucagaaugaauagucuaugguacagauaauacaugcugcugaguuucagaggac

SEQ ID NO: 4183548 - RNA, 68 nt, Human
guccagaagcugcaugccccacucaacugucaagaguuagagcaggcaacucugcagugccucuggac

SEQ ID NO: 4183549 - RNA, 70 nt, Human
guccagagagccacggacaggggcaggcuucccccaagcuuuucucuagaauucuggggcuguucugggc

SEQ ID NO: 4183550 - RNA, 56 nt, Human
guccagcaggcagcuucacugcccacaaaggcagcugaggccaauagccccuggac

SEQ ID NO: 4183551 - RNA, 86 nt, Human
guccaggagaguacaguugaaacaagucaacuguacuaacuguacucuaaacaaguugacuuguuucaacuguacucucacuggau

SEQ ID NO: 4183552 - RNA, 70 nt, Human
guccaggaucacgagguugcagcacuggaucaggagacugugggaggcugaguagcuuugugcucugggc

SEQ ID NO: 4183553 - RNA, 59 nt, Human
guccaggcugcccaggguccuggcuggaguaccugggugggucuguggggagccugaac

SEQ ID NO: 4183554 - RNA, 61 nt, Human
guccagggggcuuaagcaaacuccuuauaucuuguggaucuuacuaauguucccucuggau

SEQ ID NO: 4183555 - RNA, 68 nt, Human
guccagucuguuuggcaauacucuguagagcugugcauuuaauuagaguuugguaaacaauucuggau

SEQ ID NO: 4183556 - RNA, 72 nt, Human
guccaguucagcagggcuacccaggggcccuucuuccuccaucccaugguggccugcccugaucccuggcac

SEQ ID NO: 4183557 - RNA, 85 nt, Human
guccaguuuaaagcccugccacccauucacuguaaaucuagaaauacuggacuugaggagguagguaggaggcauuuuauuagac

SEQ ID NO: 4183558 - RNA, 72 nt, Human
guccauaaauaugcaguuuaguuuuauuugucaaauaaaauaaccugagauugagcugccuagcugaaagac

SEQ ID NO: 4183559 - RNA, 86 nt, Human
guccauaguucaauccuagugcuugguggagauggagaggcuuggguucucauuuuggcuccagcacagccuugucaacuuuggac

SEQ ID NO: 4183560 - RNA, 70 nt, Human
guccauccgugguagcauggaucaguacuuccuuccuauuuuuagcugaguaauguuacuuuguauggau

SEQ ID NO: 4183561 - RNA, 66 nt, Human
guccaucugccugucccucucuaucccugcaaguucggggaagaagggucauuggcagcccggggc

SEQ ID NO: 4183562 - RNA, 75 nt, Human
guccaucugucuguccgugcaggucuuauguggaagguaagggagugagaagugccgaaaggaagacagagggac

SEQ ID NO: 4183563 - RNA, 98 nt, Human
guccaugcaccaauugaaguaucugcagcaucucaacucuucagugguugaguuacagagacacuugcugugaggucgcuuccccuuggcuguaagac

SEQ ID NO: 4183564 - RNA, 110 nt, Human
guccaugccauggauguuauggucagcucuggauugaagucgagucacauuucaaaacagaugcaauuucaagaggccagagcgaggccgccgcaucugcuggcugugau

SEQ ID NO: 4183565 - RNA, 76 nt, Human
guccauguucccugcaaccuuucccugggcucuugaggguuuaucaggguugaggguugccuuaguaggcuuggac

SEQ ID NO: 4183566 - RNA, 98 nt, Human
guccauucaccuguugauggacauuuagguagcuuccaguuuuuggccauuagaaauaaagcuacuauaaguguucagauacaaaucuuuguauggac

SEQ ID NO: 4183567 - RNA, 77 nt, Human
gucccaagagcaagaacuugcuguaagaaggauacaugucaugcaguucucuguuguuuuugcucugagagugggac

SEQ ID NO: 4183568 - RNA, 63 nt, Human
gucccacccuggccucgcucucugcagccacagcagcuguugggaagcucugccaggggagac

SEQ ID NO: 4183569 - RNA, 70 nt, Human
gucccacgggccaucauagaggucucugcagugagcagggggugcccagaugaaggaugaacucugggac

SEQ ID NO: 4183570 - RNA, 81 nt, Human
guuuuccagaguggcucccuggguuuggcauucugagcuuaucuaccuggcuuugugaccuaggggcuggcuccuggaugc

SEQ ID NO: 4183571 - RNA, 55 nt, Human
guuuuccauggaggucugaccugaauucaccagugcaaccucauugguggaagau

SEQ ID NO: 4183572 - RNA, 67 nt, Human
guuuuccuucauaucccuuaugugaaggggcgugaacuuuguugaccuagggagauugaaggagaac

SEQ ID NO: 4183573 - RNA, 63 nt, Human
guuuuccuuuuuuccuaugggacaugagggaagaacaccuugugggccaguagaaaggaaggc

SEQ ID NO: 4183574 - RNA, 56 nt, Human
guuuucuaggauccccuccaagcauuuuccaaagcccgaggggcugcuuacaagac

SEQ ID NO: 4183575 - RNA, 71 nt, Human
guuuucuauggguugggcaguaaauauuccaaagaagaauggaaauugaaagaccaacugcauuugaagac

SEQ ID NO: 4183576 - RNA, 68 nt, Human
guuuucucauggcgccaagcccauagcuccaacucgagugaccccugagcuggugcucuugucaagac

SEQ ID NO: 4183577 - RNA, 59 nt, Human
guuuucucugguuuuguuaggugccaaaguggcccccugggcaaaugccagagacaagc

SEQ ID NO: 4183578 - RNA, 66 nt, Human
guuuucucuguguuuuguccaguuuuuaguuguaaucagcaggauuuugacauagcaagacaaaac

SEQ ID NO: 4183579 - RNA, 57 nt, Human
guuuucugccugaaggugaccagugaucuucagagacauuuaucuuuggcaggaaac

SEQ ID NO: 4183580 - RNA, 91 nt, Human
guuuucugguguguuuaauugggccaacagcggagaugccucucucuugagguugcugcaugguucaaaugagcuaaaugcaaaugaagac

SEQ ID NO: 4183581 - RNA, 63 nt, Human
guuuucuguuucuuaacggcauugugguauauuaggagucuuugguuauaagagacagaaaac

SEQ ID NO: 4183582 - RNA, 116 nt, Human
guuuucuuugagcagaaaaguguaacaugagcaaauuugccacuugaguucggcagcuucaggaagucucaauuagcuacauguauagacgaaauauucugaaccuuggagaagau

SEQ ID NO: 4183583 - RNA, 90 nt, Human
guuuucuuuuccuugccaucuaaccagacugccucauaaagauaaaggaaggagagagguagcaucuuuggauguuauuaagaaaaaaac

SEQ ID NO: 4183584 - RNA, 71 nt, Human
guuuugagcagagcaguaacaggagccaacuuucauuuuaaaaggaaugcuuugauugcuguguucaauau

SEQ ID NO: 4183585 - RNA, 71 nt, Human
guuuugaguguguauuauguaucaggaacuaguuaacguuuuagauacauuaucauauuuuacuucgaaac

SEQ ID NO: 4183586 - RNA, 117 nt, Human
guuuugauaucuuuguaguauugagggcagugaugucaaacagugaauaaaguuauauaucuauguggugaucuuauuuuaaccucaauauuauuuuagugauuuguaagucagaau

SEQ ID NO: 4183587 - RNA, 67 nt, Human
guuuugcaauuuucuguccuuguacuauuucacaggaaaagcugcugggcuugaaagcugcuaaaac

SEQ ID NO: 4183588 - RNA, 91 nt, Human
guuuugcauguggcucccagggugugagguucugcagaacaguagccugcuguucccuugaccccagacccuggugcuuucauugcucugc

SEQ ID NO: 4183589 - RNA, 80 nt, Human
guuuugccaagcccugugcuguauuaguguuucaguaaaaggcugcuaaaauauguaagauuagcacuagauuggggagc

SEQ ID NO: 4183590 - RNA, 98 nt, Human
guuuugccucuuaaauucauguauuucuuggcgucuugcuuagagucaccuuuuugacacaugaguccugccagguauguggguuagugagucuguac

SEQ ID NO: 4183591 - RNA, 57 nt, Human
guuuugcucauuugguccaagggucuaaguucugacuuuuauuaccuugagcaaaac

SEQ ID NO: 4183592 - RNA, 75 nt, Human
guuuuggccugaauuauggcagaucuuuauaugugcucaguaagauuuaaauuugcuacaauucuaggcuuguac

SEQ ID NO: 4183593 - RNA, 55 nt, Human
guuuuggcuccuggaggcccuuuagggucucacccucugucccaggaggcggaac

SEQ ID NO: 4183594 - RNA, 99 nt, Human
guuuuguagcagacuagggcuggagucuugaaaguggacuaguucugugaaggagaaagugugggcagguauugcuaacccuggucucagauacagaac

SEQ ID NO: 4183595 - RNA, 104 nt, Human
guuuuguagguuagauguguaaagaauauguaucugagucuaguauguggaguaaguuguuauuuuuauuucuuucagguauguguuguuauuuugcccaagac

SEQ ID NO: 4183596 - RNA, 68 nt, Human
guuuuguuagugucuguugcuuuuguucagauuaagcucugaaacaaaauuaagauucucgucaaggc

SEQ ID NO: 4183597 - RNA, 120 nt, Human
guuuuuaauauggucaauaguauuaaagcuuggaagccuagauucuuuucuuuugaccccaaguggaaaagaaagucuuccuuguuuguuugcuuuuuuuuuccuugugacugugaaagc

SEQ ID NO: 4183598 - RNA, 89 nt, Human
guuuuuauccaaguguuaaggcuuaaugaucaaucccuaggguacucucuuaaacaaugauguuauggcucaaacauuuggaccagaac

SEQ ID NO: 4183599 - RNA, 64 nt, Human
guuuuucaaaggcuucuauuggacguugcagcugacagcugcaguagagcuucuuuugaugaac

SEQ ID NO: 4183600 - RNA, 71 nt, Human
guuuuuccgggagcugaacgucuugcgacaguggcugcacucauacguagguggcucagcaccuggggugc

SEQ ID NO: 4183601 - RNA, 86 nt, Human
guuuuucuaugaacagcuuuguauacaguaacucaauuuugaggucuugaguucugugcaccagaugcuuggaaucauagaagaac

SEQ ID NO: 4183602 - RNA, 83 nt, Human
guuuuugaccaggcucccuaggauucuccaaguucuaaaugagccaugagaggguucccagggguuuccuggagugcagaagc

SEQ ID NO: 4183603 - RNA, 64 nt, Human
guuuuugagaaguuacaaguccucuacggcugucaacucagagaggcacuaauuauucagagau

SEQ ID NO: 4183604 - RNA, 67 nt, Human
guuuuuggaagaugccacuguaucaguuauaauuucuuuugcuagauacuuauaaucuuccaagagc

SEQ ID NO: 4183605 - RNA, 58 nt, Human
guuuuuggcuuuagugccuucugauucaacacccugggucuagcugagagcuaaaaau

SEQ ID NO: 4183606 - RNA, 77 nt, Human
guuuuuuauccuguauucuucugaaauaugggccuguuuguccccaguuauguucaauaggaugcaugauauaaaau

SEQ ID NO: 4183607 - RNA, 129 nt, Human
guuuuuuggggaugcucaagauauuuugcuguugacuuucuauaaggccaaagaauaauaacaucagcuuauuauuagagugcuuugagaaaguuagccaaaacuucagcagaagaaugcccaggaaac

SEQ ID NO: 4183608 - RNA, 82 nt, Human
guuuuuuucuauuagauguuucaaaauagguggauuaaaugaaauuuguucaucuguguguuauuguuuaucagagaaaaau

SEQ ID NO: 4183609 - RNA, 101 nt, Human
guuuuuuuguuucaacguguugcuaguuaucuuaucucaguguauuguauuuauauaacugcauauuugauugagauaccuaaccuaugagacauauuaac

SEQ ID NO: 4183610 - RNA, 67 nt, Human
uaaaaagauuguguagaaaggaugccguauuuaguuacuggugccauauuauauacaguuuucuuua

SEQ ID NO: 4183611 - RNA, 89 nt, Human
uaaaacacaugguaauguguaccauguguuuuacacaugguaauguguaccauguguuuuacacaugguaauguguaccauguguuuua

SEQ ID NO: 4183612 - RNA, 74 nt, Human
uaaaacacuugcucaauucaguugcaaugucaaucaaucugauugcauuguugaugaguugaauaaguguuuua

SEQ ID NO: 4183613 - RNA, 76 nt, Human
uaaaacaguuuuauugaggcauaauugacauagugcacauggcacauacucaguguguucaauuggauagguuuug

SEQ ID NO: 4183614 - RNA, 88 nt, Human
uaaaaccuaaaauguaaauuaaaaugaacaaaauaugcuuugcacaucaaacugucaaggauuuuugucuauugcuuuuucgguuuug

SEQ ID NO: 4183615 - RNA, 65 nt, Human
uaaaacugcaggucaugacccauuaguagauugugaaauuaaguggguugagaccagcauuuuua

SEQ ID NO: 4183616 - RNA, 63 nt, Human
uaaaagcucugcuguuggcuaggucuagcaaccuggauaccaaaauucaauacacugcuuuua

SEQ ID NO: 4183617 - RNA, 57 nt, Human
uaaaaggcccugggcuuggugucuguucagcucucgcacauuccaugggucuauuua

SEQ ID NO: 4183618 - RNA, 70 nt, Human
uaaaagggaaacagccacucaaagggccgaagugauccuacuuggcguuaguauugcugaaucccauuua

SEQ ID NO: 4183619 - RNA, 84 nt, Human
uaaaagucuagauaagguggcuuggaauucuucuggcauucccagauucaaauuccucaaagccaucuacuucauagcguuuua

SEQ ID NO: 4183620 - RNA, 71 nt, Human
uaaaauaagaauauuaguaauaccugucucauaauguuguugugaggauuaaaugcauagugcuuauuuua

SEQ ID NO: 4183621 - RNA, 58 nt, Human
uaaaauagcaugugcagugaaagaaaagcauacacguucucauugcauaugcuuuuug

SEQ ID NO: 4183622 - RNA, 69 nt, Human
uaaaauaugauaagugcuucagugggucaauggacagaauaucuacugaucacagauauguauauuuua

SEQ ID NO: 4183623 - RNA, 59 nt, Human
uaaaauaugcauuugucaguaugaacaaacugaaauaaaugugacaaaggcauauuuua

SEQ ID NO: 4183624 - RNA, 69 nt, Human
uaaaauauguuggugucccugcucaaaguguuaauaaggauacuuugguaucaaacuaaaacuauuuug

SEQ ID NO: 4183625 - RNA, 83 nt, Human
uaaaaucucauuaccuuauguguaaugcugauaaauaugagaccauuugaacagaguuauugugaggaauaagugagauauua

SEQ ID NO: 4183626 - RNA, 77 nt, Human
uaaaaugcagauuccuggaccauucccagacggguugacucagaaucccugcaguguguccagaaaucuguauuuua

SEQ ID NO: 4183627 - RNA, 73 nt, Human
uaaaauggugagcccuugacaucgcccacugucucugaggacauccugggccucagaggugugucccauuuua

SEQ ID NO: 4183628 - RNA, 67 nt, Human
uaaaaugucaaaauaauugauuuguuuucucuugauugugaaaacugaugaagaguuuggcauuuua

SEQ ID NO: 4183629 - RNA, 77 nt, Human
uaaaauuauugcuuuauguggcugauacucauucuguugggucagugccauugccauaugaguugcuaaauauuuug

SEQ ID NO: 4183630 - RNA, 72 nt, Human
uaaaauuuaggaaggcacauuguuggcuaaauuaauucacaauuggguuuagucaguguccuccaaagcuua

SEQ ID NO: 4183631 - RNA, 70 nt, Human
uaaaauuuuucucugaagauuuaucacaguccauucaaaucaagauugaggucucaagagaaaaguggug

SEQ ID NO: 4183632 - RNA, 86 nt, Human
uaaacaaagacucuuaacaugggggguaagucugcauggcaaauucauguagaccuuuucugucuuaggagagguuauuuuguuua

SEQ ID NO: 4183633 - RNA, 77 nt, Human
uaaacaauuccucucuaggcauagccccugaauggcuucuacauggcuaaacaagugccucagaggaagaauguuua

SEQ ID NO: 4183634 - RNA, 67 nt, Human
uaaacaugaucacuccggcuuuuucuuugcaaauagggucaagggagaaggcagguagguuaguuug

SEQ ID NO: 4183635 - RNA, 67 nt, Human
uaaacuacugggcaaggacaggcucagaucuuuaacccucagaucacuugcccuugccaguauuuua

SEQ ID NO: 4183636 - RNA, 69 nt, Human
uaaacugcugugcauacacaaacaugucacgugaaaaccaaccuccaugcaguauaugucaguaguuua

SEQ ID NO: 4183637 - RNA, 69 nt, Human
uaaagaaaaugaaaagaagcuucaaggugugcauaugugucuucuugaaagcauuuucuucauccuuug

SEQ ID NO: 4183638 - RNA, 106 nt, Human
uaaagaaagagggucucagaaaccuuagcuguauuuuuauuucuuuuccuauauuacuacucugagguaaagguacgaagugagggauugacacccuuuuuuguua

SEQ ID NO: 4183639 - RNA, 85 nt, Human
uaaagacucagucaugaaaaggguagaucccuaagucagauugcuauuuuaauuacugucuauguuuugcaugaaaaaaucuuua

SEQ ID NO: 4183640 - RNA, 83 nt, Human
uaaagagagaagauuuuaagcuugaaacacuaaagcuguucuaaaagaaaauagugcuuuaaguuuacagagaaaacuuuuua

SEQ ID NO: 4183641 - RNA, 73 nt, Human
uaaagagugagaguuucugcaacuguauucugaaaguauugacagagcuguuguuaauuaacucauuucuuua

SEQ ID NO: 4183642 - RNA, 76 nt, Human
uaaagauaaagauggugcuguaguagauauuuaggcuaguuccugacaccuugcuaaauggcacccuccuccuuua

SEQ ID NO: 4183643 - RNA, 77 nt, Human
guuuuuaaacagaggaauagugaugcuuaaauuuucaucuuaagcagaugcuuuaaacuguucaucuguucagaagc

SEQ ID NO: 4183644 - RNA, 66 nt, Human
guuuuuacaugcagagggaagggagaagacaggccauuucuucucccccagugcauguggccaagc

SEQ ID NO: 4183645 - RNA, 85 nt, Human
guuuuuccauuuacucauucgcuguucaacauugagcaucugcgacacaucagcuccaguggauacagcagugggguggaaaggc

SEQ ID NO: 4183646 - RNA, 56 nt, Human
guuuuuccguuuauuuucccaaguugguggauuugaggcaaaaucaacgggaagac

SEQ ID NO: 4183647 - RNA, 83 nt, Human
guuuuuccucuuauugcuguuuaaugaugucuuaucauaguagcuagaaccuauagggcaauguugaacaacaauggaacaac

SEQ ID NO: 4183648 - RNA, 90 nt, Human
guuuuucucaaccuggcugccagcaauguguccagccucaucucuuuuuccugcugaaaagcauucugugcuacagccauucagaaaaac

SEQ ID NO: 4183649 - RNA, 66 nt, Human
guuuuucucacacuauuuauucugcuucuuugaagaugguaggaggucaggagagugugagugaac

SEQ ID NO: 4183650 - RNA, 127 nt, Human
guuuuucuuacuuccugguuucuccccaauacuugaaacauucuccuauugauucauugcauccauuuaaguaucuaaguugccagggaguguucaugauguuggggggauacaggggggacaaaac

SEQ ID NO: 4183651 - RNA, 110 nt, Human
guuuuucuucuuuauaguaggccugacagaaacauacugaagcaaucugggagacaaccugugauagauccuaugcuaaauguuaauguuaccucuguugauuuaaaaac

SEQ ID NO: 4183652 - RNA, 70 nt, Human
guuuuugcagcucaguaaaagaggagcagcuuugcugguuguucugauuuucauugacguuguagucaac

SEQ ID NO: 4183653 - RNA, 100 nt, Human
guuuuugcauaaaguugguuuuccaguuaucugugcugcauauguuguugagaaauaugagacacacauucuggagagaaggaguugcauuugcaaaagc

SEQ ID NO: 4183654 - RNA, 56 nt, Human
guuuuuguaguaauguuuuuggcuguuagaggccugaagcacauuucuacaauaau

SEQ ID NO: 4183655 - RNA, 100 nt, Human
guuuuuguaguaggaacacugggcuuaugcuguggaguaggauauaacaauucuacaaaccagcagaauagguccacccacagccaaugcuacuaggaau

SEQ ID NO: 4183656 - RNA, 84 nt, Human
guuuuugugaugccauguuaaugcaaagcagagggcaagcagcugccaaauugcccucccuucauuccacugcaagacagagac

SEQ ID NO: 4183657 - RNA, 80 nt, Human
guuuuuguuaagguugagcucacuuuuauuauggaaacacaaccuccagaguuuaugaaagugaagcuuaugaaaaaaac

SEQ ID NO: 4183658 - RNA, 69 nt, Human
gugaccagccuucagcagacacagggccugggugcccucuggaaaucugugugugccgaggguggccac

SEQ ID NO: 4183659 - RNA, 67 nt, Human
gugaccagguaauguaaagcaggguaaaaucccaucaaauggcugugcugauucauucccugcucau

SEQ ID NO: 4183660 - RNA, 93 nt, Human
gugaccaguuuaagcucuuccugccuguguguauagcaugggacauacagguucucuagggaacagaaagcuuucaggaaaauggaaauucac

SEQ ID NO: 4183661 - RNA, 64 nt, Human
gugaccaugguuuuuacccuacaccauacagaacugcugauggggucaggcugagaacaggcau

SEQ ID NO: 4183662 - RNA, 67 nt, Human
gugacccaaauguccauugaauggaugagcaaaaugugguauacccauacaauggaauuguauucac

SEQ ID NO: 4183663 - RNA, 65 nt, Human
gugacccaggcuggagugcaguggugcgaucuccgcucacugcaagcucugccuuccggguucac

SEQ ID NO: 4183664 - RNA, 55 nt, Human
gugacccagguagguaagcaauggugagaacacgauguguccaucaucugggcac

SEQ ID NO: 4183665 - RNA, 71 nt, Human
gugacccguauggaaaugucuccuucuggagggaacccagaggaaaaauaucucccuauuccaagggucac

SEQ ID NO: 4183666 - RNA, 74 nt, Human
gugacccuaaggaaugaagggauucuuugcaggacuguaauccuggaaaucuuccuucacucuuuccauuucac

SEQ ID NO: 4183667 - RNA, 77 nt, Human
gugaccuuugcugucagccgcuauuuucccagcagacaaaugccucuggagagugagugguaaagacagauauucac

SEQ ID NO: 4183668 - RNA, 81 nt, Human
gugacgacaugagauuugggagggaccagaagcagaaugauaugguuugacacuguccccacccaaaucucaucuuguagc

SEQ ID NO: 4183669 - RNA, 77 nt, Human
gugacgggaccacugcaugugggaggcacacgggcccuguggcauccacagcuguggucuccuuaguguccugucac

SEQ ID NO: 4183670 - RNA, 66 nt, Human
gugacggggcugagggccaauuccuacugauagcgcuuagugggcugggggcacuugcaacgucac

SEQ ID NO: 4183671 - RNA, 67 nt, Human
gugacgugcagguguggccagcagcuuguguuugucaaugguaggugguggcuauggcugugcucgc

SEQ ID NO: 4183672 - RNA, 62 nt, Human
gugacguuuaauagugacaugggugcauucccacacacacccauuccacccagaaaugucau

SEQ ID NO: 4183673 - RNA, 64 nt, Human
gugacuaccccaaggagugaacugcaggucaagcauuucucuuccuccuaggguugcaagugac

SEQ ID NO: 4183674 - RNA, 72 nt, Human
gugacuagaaagagaggccagaaaguaugccaccuuuagagaggggucauguaaucaaggcuuaguucucac

SEQ ID NO: 4183675 - RNA, 66 nt, Human
gugacuagauccacaggaaccaaaacgcaguuuccaaaagcucgagugacugaaggaucuauacac

SEQ ID NO: 4183676 - RNA, 55 nt, Human
gugacuauggcccugucugugagcucuuccagagcuacaaguacauuauaguuau

SEQ ID NO: 4183677 - RNA, 58 nt, Human
gugacucccaacaauauaccaucaggcugaaauugugccuguggucuggagggagcac

SEQ ID NO: 4183678 - RNA, 57 nt, Human
gugacucucacuuuaccugacuccaaaagaaaauggguagguuagaaagagagacac

SEQ ID NO: 4183679 - RNA, 83 nt, Human
gugacucuguccuggauaagucugcacaacugcaaauaaauguguuggaaaagaauuaacuagggcgugauacccagagucau

SEQ ID NO: 4183680 - RNA, 58 nt, Human
gugacuggcacagugagucauaagcaaguggagguuugcagcuccuggaccaggucac

SEQ ID NO: 4183681 - RNA, 87 nt, Human
gugacuguagacaacaggaggaacaugugaguagcuucuguguaucccuguggaacugccuugucucuugccuguugcugcucccau

SEQ ID NO: 4183682 - RNA, 72 nt, Human
gugacugugagggugacaguucuggucucucugugugagcauggggaagcccccuauguucccucacagcac

SEQ ID NO: 4183683 - RNA, 70 nt, Human
gugacuguguuguagaggacgaugccgggaaggcccagccuugcuaauuucuccucaacacacccuucau

SEQ ID NO: 4183684 - RNA, 74 nt, Human
gugacuguuucaaaggguacugugagaguuaaugaguaccucuguugcauuucauccugcuuggaaacagucac

SEQ ID NO: 4183685 - RNA, 65 nt, Human
gugacuuacacagcaggcucucuugggcuaucgaguccuucauagaacacugcuaguauaaucac

SEQ ID NO: 4183686 - RNA, 80 nt, Human
gugacuuaccaggggguuagggauguagccagaacuuaaaucgcaagggcugggguuccugagucccggguaaagauugc

SEQ ID NO: 4183687 - RNA, 77 nt, Human
gugacuuugcaggucaauaaaugcuauuuagcuucaugugcaaaguuuauuaauugacuugugcagaagaaagucac

SEQ ID NO: 4183688 - RNA, 129 nt, Human
gugagaaaggacaggugccugugaggcaggacuuaaaggaggcgcuggcccucaggggcaugcgagggcagggugagcaccugagagugagggccuccuuaaagucugugguccaggguccuuuggucc

SEQ ID NO: 4183689 - RNA, 97 nt, Human
gugagaaauaauaguagcuaccaauguauugaguguuugcauaugugugcauguguguacaugccagccucuaagcacuuuacauucauauucucau

SEQ ID NO: 4183690 - RNA, 58 nt, Human
gugagaacuuccuggaauguuaagguugaucuuucuaccagcauuuggaauucuacac

SEQ ID NO: 4183691 - RNA, 55 nt, Human
gugagaaguuguaggagaauuuugcaacacuguaaaacacuucuacauuuuuugu

SEQ ID NO: 4183692 - RNA, 62 nt, Human
gugagaauaccagcagugagaaaaucauagccaugcugaauucauuacugcgguagucacac

SEQ ID NO: 4183693 - RNA, 61 nt, Human
gugagacucuggggcugcagaaugacuugauaaugucaauucugagaagggugggucuggc

SEQ ID NO: 4183694 - RNA, 73 nt, Human
gugagagcgugcugggucagccucucccuggcgggaauccucuccguccagucuucuaaccuagcagccucac

SEQ ID NO: 4183695 - RNA, 55 nt, Human
gugagagcugcuagacuguuauauuucgggggucuugcaggguagcuuuucuuac

SEQ ID NO: 4183696 - RNA, 68 nt, Human
gugagaggaauggcaaaaggauaacaaggauggauacuauuuuuauguccuauuuuggcaugcuccau

SEQ ID NO: 4183697 - RNA, 68 nt, Human
gugagaggaugucuuaagcccagaaguucaagaacagccuggacaaugaagugagaccccaucucuac

SEQ ID NO: 4183698 - RNA, 109 nt, Human
gugagagggaaaauaagauuuucuuguaggggaaggaugguaagacauaaccuucacguuaugcuuccucccuuccacucaaaauggcccauuuuuauuuuccacuuac

SEQ ID NO: 4183699 - RNA, 63 nt, Human
gugagagugcuguuagguuaauauaguucucaaaggauuggauucuacuuaacaacaccucac

SEQ ID NO: 4183700 - RNA, 77 nt, Human
gugagauacuaaccuuuggucauuuacuuuucaguucuuggauuaaaaggucuggaucagugguucuugguucucac

SEQ ID NO: 4183701 - RNA, 86 nt, Human
gugagaucaagugagguaucuuagagaguguagagacuagagaaaagcaggcuuagugcaaaccucagagacacacuagaacuuac

SEQ ID NO: 4183702 - RNA, 56 nt, Human
gugagauguuugugcuuuguuaaugccguguuaaacgacagcuacaggcaucccac

SEQ ID NO: 4183703 - RNA, 84 nt, Human
gugagauuuggauggggacacagagccaaacuauaucagcauccaagauggagucacucuugucuccacaccccacauucucac

SEQ ID NO: 4183704 - RNA, 67 nt, Human
gugagcaaaaguugauggugcuuucuuuccuggucacauccuuggaagcucccauuaacugagccau

SEQ ID NO: 4183705 - RNA, 73 nt, Human
gugagcaaagggcagaaauauugauacuguggucauucagagccauuuuuauaacuuauauuuuguuccucac

SEQ ID NO: 4183706 - RNA, 84 nt, Human
gugagcagcuggcuaggggcuuccaacccuaccgacuccucacccggggucccuggguucccguggaagugucagucagcccac

SEQ ID NO: 4183707 - RNA, 61 nt, Human
gugagcaguccuuauggggccuugauucauuggauaauaagguuugaagaagacugagcac

SEQ ID NO: 4183708 - RNA, 71 nt, Human
gugagcagugucuacaguggcuggaggguugguaagcaacaccuucacacuuucacuuggauauugcucau

SEQ ID NO: 4183709 - RNA, 78 nt, Human
gugagcaugugugguuuacuguggcgcugcucagcccugaacuccgcugagcagguguuaauagaucacucaguccau

SEQ ID NO: 4183710 - RNA, 56 nt, Human
gugagccacccccugccccugagucugcagccgacucugggguggaggaggcugac

SEQ ID NO: 4183711 - RNA, 100 nt, Human
gugagcccaccccagccuguccuguuggguuguuucccucugccacuggaacccagcagagaacccagcagauuggcugaggaaugcguguggccuucau

SEQ ID NO: 4183712 - RNA, 60 nt, Human
gugagcugcacaggggaugagggcagugugagaugcacgucuuuggccuugugagguuau

SEQ ID NO: 4183713 - RNA, 63 nt, Human
gugagcuggaauaguggagaaaauuuccuugaauugcaagguauugucuucuauuuaguucau

SEQ ID NO: 4183714 - RNA, 56 nt, Human
gugagcugucaggugugccuagaauguaagcauugcuggagucaugggacacucac

SEQ ID NO: 4183715 - RNA, 73 nt, Human
gugagcugucuaugucuuuaguaucuuuuggaagacucaauguauuccacagauuaaaaacauacuuagccac

SEQ ID NO: 4183716 - RNA, 117 nt, Human
gugaggaacugggcaugcaguaaauggguaagaacagugacagccaacauuuauuuaacuucuguaugaagauguuggcuucagugcuuuaccuagaagaugccauugaacccucac

SEQ ID NO: 4183717 - RNA, 66 nt, Human
gugaggaagggugugacggcaccuggcacaagccuggugcucagaguuagaccaggauucacucac

SEQ ID NO: 4183718 - RNA, 80 nt, Human
uaacuuuauuucuaucauaaggaaucucauuuugguggauuauauuuuccauauaaugggauuccuuaucagugagguug

SEQ ID NO: 4183719 - RNA, 60 nt, Human
uaacuuugaagggaauuuuacucaaguaaauuauuauagugggauucuaauuuagaguug

SEQ ID NO: 4183720 - RNA, 58 nt, Human
uaacuuugagaacuuucugguguauuuugaauguauccaggacuuuccuccaaaguua

SEQ ID NO: 4183721 - RNA, 92 nt, Human
uaagaaagaaaaauucaccagucuucuggguguuuccagaggaauauuugauguccucuggacacccagaggucuaggauuuugcauuuuua

SEQ ID NO: 4183722 - RNA, 73 nt, Human
uaagaaagaaaggcucagaaguuuguauuuccuucaguaggaaauaggagauaaugaugccucucuuggcuua

SEQ ID NO: 4183723 - RNA, 87 nt, Human
uaagaaaggccaccagccugccugaauucaauuccuggcuuggucacuuucaagccauaugacuuuggcaagugguguuauuucuug

SEQ ID NO: 4183724 - RNA, 80 nt, Human
guuuuuuaaguugagccaaaauguuuaauaagauauuucuuuguuuaugaaccuuuguguuggaccugggcuuaaaaagc

SEQ ID NO: 4183725 - RNA, 129 nt, Human
guuuuuuaaguuuaaaaaaaaauguaaguaaccuugcagauguuaucacuuagacaugcuaguuaagaaaaauacagaauguaaagugaugauagcuaggauauauaagaaguacuuuugagaugagac

SEQ ID NO: 4183726 - RNA, 68 nt, Human
guuuuuugaugucagagggcucauuuccuggaauuccuagagacagaaaucuucugacuucaagaaac

SEQ ID NO: 4183727 - RNA, 96 nt, Human
guuuuuuuuaaaaagcugaguucucauugcaugagacagaaaacauacgcaagagaaaacuguggguuaucucagcaagagaauauuagaaagaac

SEQ ID NO: 4183728 - RNA, 88 nt, Human
guuuuuuuuuuaaauguguuuuagagcaauguacaagggcaauuuuucguccuguuuugucauguguucuuaaauacauuuccuaaac

SEQ ID NO: 4183729 - RNA, 68 nt, Human
uaaaaacaugcagucaauaaacaugugugauaaacuuuaauaauacagauaaugauuguaugugagua

SEQ ID NO: 4183730 - RNA, 56 nt, Human
uaaaaccaggucuugggauuuacgucugaaagagauaaauccuaaaauugguuuua

SEQ ID NO: 4183731 - RNA, 87 nt, Human
uaaaacgaaggcagguucuaucaaacagccauuaauauacuaugugccauuuuauauugagacuguuugucuguuuuuuaaauuuug

SEQ ID NO: 4183732 - RNA, 72 nt, Human
uaaaacugaaucuauuguuuuuuaaaguaguuuggacaacuguguccaucuuauaggcagaguucaguuuua

SEQ ID NO: 4183733 - RNA, 60 nt, Human
uaaaagauuauauauguguacgaguuuaugcuuuuccuuucuugcacauguguucuuuua

SEQ ID NO: 4183734 - RNA, 63 nt, Human
uaaaaguaaaaucaccaucucuuuguggguuucuuuucacaaugaggcauugauuugcuuuug

SEQ ID NO: 4183735 - RNA, 90 nt, Human
uaaaaguuagcagugauagaugggaacuauggucuuguuucugaucucaaagagaauaaaucuaaaguuucuucauuguuuuaauacuua

SEQ ID NO: 4183736 - RNA, 123 nt, Human
uaaaaguuuugaagcauuuucagcucauggugaauauauguauugauucauuauugaacaaauauuuguaagaauacauguuuucuacuauucuggaggcuuuauaaaaacauaaaacuuuua

SEQ ID NO: 4183737 - RNA, 129 nt, Human
uaaaauaaauguauuauggugacuaaaacagaaccaaauuaaugucaguuuuaggaauauguauuuuaaaguugaguccucucugacuuauuccagcugcaaguuuuggaguuaugcauauacuuuuua

SEQ ID NO: 4183738 - RNA, 84 nt, Human
uaaaauacagcuuugcauugauccuaaaauggaauagacucaguaauaucugaucuccuagaaucuuuguaagauuguaauuua

SEQ ID NO: 4183739 - RNA, 85 nt, Human
uaaaauacaugggaaaguuagacucuucuaaaugggaaaacgauuaucucagaacaguucuuaauauugccgucuuuguauuuua

SEQ ID NO: 4183740 - RNA, 130 nt, Human
uaaaauauacacauacaugcauaaaaaaagaguagauauaaauauaucaaugugccaagugacuuucuacaguauggcauuagcguugaauuuuauuuucuuuagagauauauguaugaggaauauuuua

SEQ ID NO: 4183741 - RNA, 118 nt, Human
uaaaaucacguaccuuagagcuagccugccuugguucaagucauacuaacuucaaguuagaacuugguucaauacuaacuugaaccaaggcaggcuagcucuaagguacaugauuuua

SEQ ID NO: 4183742 - RNA, 62 nt, Human
uaaaaucagccgaccaugguggcacgugcuugugguuccagcuacuugguaggcugagguua

SEQ ID NO: 4183743 - RNA, 63 nt, Human
uaaaaugguaacuuucauuugcauuuccaaaagaauuucauugcaaaugaguugcauauuuug

SEQ ID NO: 4183744 - RNA, 98 nt, Human
uaaaauuuuagcaagucaauucccaguguuuuaagaaaguaauuuuguacuaguguguaggauuuauuccagaaaugcaaggaugguuugauauuuua

SEQ ID NO: 4183745 - RNA, 71 nt, Human
uaaacaagcugucugauauucuguaugaaagggcauuggcaacaguagaguuucaguuuauaguuuguuug

SEQ ID NO: 4183746 - RNA, 66 nt, Human
uaaacagcuacugugucaaaggccaagaguuucuauuuucaaaucaugggacaugguagcucuuug

SEQ ID NO: 4183747 - RNA, 76 nt, Human
uaaacauagaauuguuauauuuucuguauuuccuugauaaguagaaggguugaacauguaucaguucuuuuguuug

SEQ ID NO: 4183748 - RNA, 62 nt, Human
uaaacaugucaucccaaaagcaagagaguaccucccuaauucucuucuggguguuauguuua

SEQ ID NO: 4183749 - RNA, 80 nt, Human
uaaacauuuuauaaggacauucugcuuuaacaaauuacaugguguugagguggggaguauauguaauuguaaaagguuua

SEQ ID NO: 4183750 - RNA, 66 nt, Human
uaaaccugcagagcaaguaacauccuccucauuuuuagaugaggaaguuaacacucugaaaguuua

SEQ ID NO: 4183751 - RNA, 74 nt, Human
uaaacgugcagagaucaauagcauuuugucuguuaaggaucagaauuugcuucuguuuguuucugucauguuua

SEQ ID NO: 4183752 - RNA, 84 nt, Human
uaaacucaaucuggauaaauagauacacuugcacauaaugggaaaaaaauguguguauaguguuguuuauugagguuuuguuua

SEQ ID NO: 4183753 - RNA, 85 nt, Human
uaaacucuuccuggcuacuagguaccauuuagaacuguggggcaauaauuuacuucaugguaccuuggugaccucaaaaaguuua

SEQ ID NO: 4183754 - RNA, 66 nt, Human
uaaacuguagaaagagugugacuacuagcauuaucucugguagcucucuuuaucuuucuauauuug

SEQ ID NO: 4183755 - RNA, 125 nt, Human
uaaacuguuggucuucuguuuagccauuauucucaguucugugcaggagugagcugaaacaaaguuguauagcccagagagugagaagcugcauuucaugucucccaacagucagaaagggauua

SEQ ID NO: 4183756 - RNA, 62 nt, Human
uaaacuuuccuuugucugggugugguuuaagcacaggccauguuuggcagaaggauuguuua

SEQ ID NO: 4183757 - RNA, 93 nt, Human
uaaagaagauuucagguguaucauggaguugaauuggcuaauauuguuuuucugauaguuucuuaggcugccgguacaucuguucuaucuuua

SEQ ID NO: 4183758 - RNA, 90 nt, Human
uaaagaauuuaacuguauaaacucuuuggucucaggaaagguagcacgugugacacuuuucugguacagggaauuacagggaauucuuug

SEQ ID NO: 4183759 - RNA, 65 nt, Human
uaaagagaucuuaauaugaaugcuauguaagauguuauaugagugucauguaugagauauuuuug

SEQ ID NO: 4183760 - RNA, 68 nt, Human
uaaagaugucagucagauaggauuagggcccauucauaugaauucauuuuagcugaaugacuucuuua

SEQ ID NO: 4183761 - RNA, 59 nt, Human
uaaagcgaugggcuaggcagugaauuuucaaaaauguucaauguucaguaauuguuuua

SEQ ID NO: 4183762 - RNA, 57 nt, Human
uaaagcugcaggcucagaaaacacuuguauccccggaugcucugguuuguuucuuua

SEQ ID NO: 4183763 - RNA, 98 nt, Human
uaaagcuggaucuucuauuuauauauuuuugugauauuugauuuuccccaaaaagcaguuagaaucaagaguuguguaauauuuaaggaaaagcuuua

SEQ ID NO: 4183764 - RNA, 57 nt, Human
uaaaggaacagaggacucauuucucuugagugugugugugugcuccuguguccuuug

SEQ ID NO: 4183765 - RNA, 76 nt, Human
uaaaggaggugaaguuggccaguuuaguuuuuucaguuuacuuggggaacucauuagccugcuuucagcccuuuug

SEQ ID NO: 4183766 - RNA, 85 nt, Human
uaaaggcauuuugaauauacuuacagcuuugaucugcaacaaauccuacauggagaaagggaaauuaaugugagcaaugccuuua

SEQ ID NO: 4183767 - RNA, 82 nt, Human
uaaagguaacugucaucuuguaagcaauguuucaaaguagauuagagucugaacauuaaguuuuagaugucaauuaucuuua

SEQ ID NO: 4183768 - RNA, 79 nt, Human
uaaaggugccuguaaguuguaugggcucuagaaucaaacucggguucuuauuucagcucugccauuuacuagcccuuug

SEQ ID NO: 4183769 - RNA, 79 nt, Human
uaaaguccggacuagcaaucugccuuugaguugagcuuuucucuuacaagguaaguuguuaagucaugccuugauuuua

SEQ ID NO: 4183770 - RNA, 88 nt, Human
uaaagugcuuaguacacugccuggcccucagugagugcuauguaagggaauaauguuaauggguccaggcacuaugcuaaguacuuua

SEQ ID NO: 4183771 - RNA, 66 nt, Human
uaaagugggcuuuguggaaaaguuaaauaaaucauuuuaauuuaagaaacggcaggcccuacuuua

SEQ ID NO: 4183772 - RNA, 130 nt, Human
uaaaguuaauaaguaucagagauaguaaucaagaugguccaguagcagggauaccagcaucguaugauaggaaaaaagguauugguagauauugagacuauuuaauaaauuucuguucucauauauuuug

SEQ ID NO: 4183773 - RNA, 75 nt, Human
uaaaguuauuugccucugcuuucaaggauaucugcuggcaucaugagaaucagagcaaauccagaccaagcuuua

SEQ ID NO: 4183774 - RNA, 58 nt, Human
uaaauaaguucagguaaagaaaucagccuaaaguauaaggugagacugagcuuauuug

SEQ ID NO: 4183775 - RNA, 61 nt, Human
uaaauacagucauuugagccauuauuagcgaaagguauugucuuuguuaggacuguguuua

SEQ ID NO: 4183776 - RNA, 65 nt, Human
uaaauacugccugugagguaacucggcgaaauacuuucacagaggccucaugaggugagcauuua

SEQ ID NO: 4183777 - RNA, 58 nt, Human
uaaauauaugcuaaacacuuuuggagggaaacugggagaaaguguaagcauauaauua

SEQ ID NO: 4183778 - RNA, 81 nt, Human
uaaauauauuucuacugugagaaacaugaaugggaucuacuuaaucuagauagucaaacucuacauagggaauuguauuua

SEQ ID NO: 4183779 - RNA, 93 nt, Human
uaaauaugaagugaagcauuggaaagucagaaaucaucuaguguauugacguaauccauguacuaguauuucuacuuuuuuuccuucuuuuug

SEQ ID NO: 4183780 - RNA, 84 nt, Human
uaaaucuguggauaagcacugugauuuauaacauuuuacuuggauaugguagauguuaucauucagaguagcacuuaggauuua

SEQ ID NO: 4183781 - RNA, 130 nt, Human
uaaaugaagaaccuaucugauguuuuugcuuuguuuucuauaacuggacuggauuggauauuuuuauuaagaccuccuagguguuauagaggaaaaaacgcaggaaauauagugaaauaugcuucagaug

SEQ ID NO: 4183782 - RNA, 80 nt, Human
uaaaugacaggguggaaaagcuaguuggaaccucuugaaauaauugguucuaauaugagaauuucacauuugucuauuug

SEQ ID NO: 4183783 - RNA, 99 nt, Human
uaaaugagauagucacagagaacaacaaaaauaguaauuuaagcucccauacaacaucaaguguguucagucuauuuuugguucuucggguucucuuua

SEQ ID NO: 4183784 - RNA, 97 nt, Human
uaaaugauuuuggacggaaaggcuacgggggccgugugcagacaaaaucagcugccgcgucgaugcccucuaguucugaaguucacugcuuuauuua

SEQ ID NO: 4183785 - RNA, 80 nt, Human
uaaaugugucccuggucauaucagaaaguuuuauuaucacuucaggguagcucucugauaaauugauaaagacauauuua

SEQ ID NO: 4183786 - RNA, 90 nt, Human
uaaauuaacacuucaaaauuauacauagaucugugugggcaaacuacuuacccagcagggucucugugucuauaacguaggguuauuuua

SEQ ID NO: 4183787 - RNA, 88 nt, Human
uaaauuagaggaugaggaggugagguuuuggggugcuuuuaaaggcuuuaaaaguugcuggcuuugguucauuauuagcucuaauuua

SEQ ID NO: 4183788 - RNA, 65 nt, Human
gugaggggucuggacgcacagucacugaacgcaaaggauggcacccaugcgucugcacccuacac

SEQ ID NO: 4183789 - RNA, 57 nt, Human
gugagggucugugccggcggggcaugcgacccgccaggcaggugucggagcccucac

SEQ ID NO: 4183790 - RNA, 77 nt, Human
gugagguacaauuuuauacccucaucagaagcuucuccaauuuuagccuuucuaguggguauaaaaugguaucucau

SEQ ID NO: 4183791 - RNA, 87 nt, Human
gugaggucacaguuuccuaugcaaauuuaaugaaacuauguauauagcaaauuauacguacgauuucuguggguacgugaaccuuac

SEQ ID NO: 4183792 - RNA, 76 nt, Human
gugaggucauucauuauaguaauuuuuagugugcuugccaaaugccaagggaaaucauauggugcaguaaucucac

SEQ ID NO: 4183793 - RNA, 58 nt, Human
gugagguccagggaggauacgaagcauuugaaaacauguucccucccuguaaucucac

SEQ ID NO: 4183794 - RNA, 70 nt, Human
gugagguuuguaguugcuuuacaucuuuggguuugcaguuccagaauagaaggcagcugucauucccuac

SEQ ID NO: 4183795 - RNA, 80 nt, Human
gugaguagggcuuagguuuaguuugugguccaugaagcaaaacuguggggcacugcugauuucauaggcaggaaauucac

SEQ ID NO: 4183796 - RNA, 97 nt, Human
gugaguaugacuguauucugagacuugugaguccuucuagcgaauaaucaaacuuggaguggucuuggagacucuacacgcuaauauagacacuugc

SEQ ID NO: 4183797 - RNA, 55 nt, Human
gugagucaugucccaucugauuuauauuggaucuggcuguggagccaugacucac

SEQ ID NO: 4183798 - RNA, 60 nt, Human
gugagucuauuuugcuuauucuauguaauauuuuauauggcaaauaagagaaagauuuau

SEQ ID NO: 4183799 - RNA, 55 nt, Human
gugagugaagaagagcauagguauuccugauauuuggcauguuaacuucacuuac

SEQ ID NO: 4183800 - RNA, 65 nt, Human
gugagugaaguggccaggaccuagcagcugccagugcagccuggauccauguggcuaccaaccac

SEQ ID NO: 4183801 - RNA, 57 nt, Human
gugagugagggacuccaugacuccuaaucucaggacacaggcuggguccuuccuggc

SEQ ID NO: 4183802 - RNA, 84 nt, Human
gugaguggaaccagcuggagggcaucuacuuaguccucugaggacacaugaaggcuguguggagcccccgagcugauuacugac

SEQ ID NO: 4183803 - RNA, 58 nt, Human
gugaguggcggcucuggggcguaaacccaguccuggcaggcuccugggccucacucau

SEQ ID NO: 4183804 - RNA, 68 nt, Human
gugaguuggggucccacucagcuccccuggcagcgggcuccagaggggcgggaacucaaccucaucac

SEQ ID NO: 4183805 - RNA, 99 nt, Human
gugaguuugacuauuucagacacuucauguaaguggaaucauucaguauuuguccuauggcuggcuuauuucacuuaguguaaugucuuccagauucac

SEQ ID NO: 4183806 - RNA, 96 nt, Human
gugaguuuggggaugcagcugucagggagaacaucccuucuugaaugagcagaagacuucaugaauccgcugaacaugcugcagcacuaaauucac

SEQ ID NO: 4183807 - RNA, 75 nt, Human
gugauaagucugggccagggcacagccuaauguggcaaaaaaguccugggagcuguauugugguucagacuucac

SEQ ID NO: 4183808 - RNA, 74 nt, Human
gugauaaucuaucuguucuucauuaaaacugauacuaaguucacauuaaugaauaugacaggagaggaagucau

SEQ ID NO: 4183809 - RNA, 93 nt, Human
gugauaauuuacaacguuccuggugcuaaguaguuccccgcuuaagaaugcguuggcugggcagagauuagcgcagggaguugugugugucac

SEQ ID NO: 4183810 - RNA, 59 nt, Human
gugauagucuccugguuguguugccgagcucuggcauucugcuuaagggaggcugucau

SEQ ID NO: 4183811 - RNA, 65 nt, Human
gugauaguggcugccaagauauaauuccuagucugacagggcuugagauauggcagucaaauuac

SEQ ID NO: 4183812 - RNA, 71 nt, Human
gugauaugggaaguucagaagauucaugggauuuacauucuggauuuuagaaggcuuccuaacaaugucac

SEQ ID NO: 4183813 - RNA, 82 nt, Human
gugauauuucagccaagggaacugagccggagggaaugcauugucucccacagucucccauggcucaagaagauuuaaucac

SEQ ID NO: 4183814 - RNA, 98 nt, Human
gugaucaagcaaagaucaggaauuaggugagauggaaagagggagacccauuuugcucauuacuugaagaucuuguuaaaguuugcuuuauagauggc

SEQ ID NO: 4183815 - RNA, 71 nt, Human
gugaucaagugauucucccuacgcgggagcucccucucccagcucccaaguagaugggaauacaggugcgc

SEQ ID NO: 4183816 - RNA, 62 nt, Human
gugauccaagagagaggaagggggaaacugcuauguuauuucugcauuguccucuugguuac

SEQ ID NO: 4183817 - RNA, 74 nt, Human
gugauccacuccuggaggugccccauggguaggaccuugagccaggugagggugagccccaggauggagaucac

SEQ ID NO: 4183818 - RNA, 69 nt, Human
gugauccuaagccacucaaaucuugugguuggaugcuaccacaggacaaccuggcuuauuaugaaucau

SEQ ID NO: 4183819 - RNA, 129 nt, Human
gugaucgugauccuguuuucauuuaugugcaaaucuuggaagacauuuauuugaaucaauuugccaugcuaaucuagugaaaacaguuauuuaaguagugucuuagagcaaaguauuugaagaauacac

SEQ ID NO: 4183820 - RNA, 84 nt, Human
gugaucugccaugccacugugacugcauugaaagaugucccuuucucugccagucaguuggugugggacaaaacacagauauac

SEQ ID NO: 4183821 - RNA, 130 nt, Human
gugaugaaggccagggacaggacuguggcugugagagggaaaugcagugggaaacuggagagacuucaaagggaagguguccacuucucaccuccucuacugcugccacccugguccaggcgacugucac

SEQ ID NO: 4183822 - RNA, 67 nt, Human
gugaugaggcaaaggacggcacugccauuccuccccuuggugugccaucacugaacuucugaaacac

SEQ ID NO: 4183823 - RNA, 70 nt, Human
gugaugaggggcucagaggucaguagccaaucacagaagcgggcagucugaccuuccgugccccucucau

SEQ ID NO: 4183824 - RNA, 129 nt, Human
gugaugcagguguguccuucuccuauuggcucucgggaugcugcuuaaguaucucaggugaguuucugaggagguagaagccaguguuuuugagaguugucuaagaggaagguuguuaaaguuuuccau

SEQ ID NO: 4183825 - RNA, 92 nt, Human
gugaugcuggugggaggcuugcauggcuuucuuggugugggguucauuugccuucuaggucccuucaucagugagcaagccucuccagccgc

SEQ ID NO: 4183826 - RNA, 129 nt, Human
gugaugcuugagacaaaguccccauucuugaaugguuucugccaauccgacuuugugaauaaacucuaaugacaauauuuuugagaaaaccaucguaagaaugccaucaaugucuuggaagugaauuau

SEQ ID NO: 4183827 - RNA, 85 nt, Human
gugauggaccuggcugagccuggagcaucuggugaggucuaguccccuauuaaugcuuccaugguucccugcacuucuccgucac

SEQ ID NO: 4183828 - RNA, 115 nt, Human
gugaugggaacuucuauacagacagccagccuuucuauugguuucucuucuucucgugguaguuuugggaggagccauagauagugcugcugauaugugcuuccucuuccccaac

SEQ ID NO: 4183829 - RNA, 91 nt, Human
gugaugggauaugaaggcuuaugugugacuuucgcgaggcuguguaugcaugugacaguacgugugugaggaucuucgugugauugugagc

SEQ ID NO: 4183830 - RNA, 65 nt, Human
gugauggguauuuggggugauggguauuugccuucagggucugccucagagaaacagcugcacac

SEQ ID NO: 4183831 - RNA, 58 nt, Human
gugauggucauccuucccuucugguaacaccugaauauagauagcugaugaccaucau

SEQ ID NO: 4183832 - RNA, 62 nt, Human
gugaugucacagaauaagugauaucacaggauaaguggcaucacaggauaagguggcaucac

SEQ ID NO: 4183833 - RNA, 78 nt, Human
gugaugugacggcagaggcagauauuggggugauguguguacaagccaagaaacaccaaugacugcuggccacaucac

SEQ ID NO: 4183834 - RNA, 65 nt, Human
gugaugugagccucuagacccuggccugcagggacugagggcagcucuaggggguuaguuauuau

SEQ ID NO: 4183835 - RNA, 124 nt, Human
gugauguuaaccugggcccuacuuccuugauaaaccuuagugagccuuuuggcugcucaucuacaucaggcucagcaaagcaggcuccuagaaccaaggaagucccuccccaccauaauccuac

SEQ ID NO: 4183836 - RNA, 66 nt, Human
gugauuauuuuuaaugccuuucuagacaagccugcaaacuucuacaggguauucaaggguaguugc

SEQ ID NO: 4183837 - RNA, 98 nt, Human
gugauuccucagccagagcaaccucucuaugccaaguacaggcacugcucagggagaaggagagugcugaacggcaagggugcagguggagggauggc

SEQ ID NO: 4183838 - RNA, 75 nt, Human
gugauucucaguguggaaaugagaaugaaguuuuuuuuaaagacaggcuacaauaauucccaugcagagaaccac

SEQ ID NO: 4183839 - RNA, 79 nt, Human
gugauucucaucugucuccagcauugaacaucaaggcaguuuccuccauguugagagcugagaucagccugugauccac

SEQ ID NO: 4183840 - RNA, 82 nt, Human
gugauugcuuccauguguauuuguuguugugaacaaaguaccaauaugaacaacagcauauuucauauauugaaaaaauuau

SEQ ID NO: 4183841 - RNA, 62 nt, Human
gugauuugaaaucccuucuacuguagggcacagucuacuagacaaaagggaguuucaaagac

SEQ ID NO: 4183842 - RNA, 83 nt, Human
gugauuuuaccuuuacuuccuucacuuuaagccaaucaugaaauuucagugauuucuggggugagggcgaaaggugguguuac

SEQ ID NO: 4183843 - RNA, 82 nt, Human
gugauuuuaguacagugaaacuuguguaggaauucuaggcuacagaacugcaaaauaaucaaguuguauuguuuuaagacac

SEQ ID NO: 4183844 - RNA, 63 nt, Human
gugcaaauacuguacugaacacuguaugcacaugcuguucaaaagccacaguuacuuuugcac

SEQ ID NO: 4183845 - RNA, 76 nt, Human
gugcaaaugguuuggacuauucaauagcccaaauggucaaaugguuuugggcuauugaauagcccaaaucauucac

SEQ ID NO: 4183846 - RNA, 66 nt, Human
gugcaacuuuagaccccaaguagcuagagaaaaguuucucuaggugccugucgucucugguuacau

SEQ ID NO: 4183847 - RNA, 55 nt, Human
gugcaagaggacaguaaggguggagguguggaugcuuaacccagucuuuuugcac

SEQ ID NO: 4183848 - RNA, 108 nt, Human
gugcaagccaacuucagaccucauguauauguuuguggcucuccuuguaauaaagugaaaauaaaggaaggagcuaugcauaacugaucagagaagaagagauggcac

SEQ ID NO: 4183849 - RNA, 130 nt, Human
gugcaaggguagacugggccacugggcaguuuccagagucccucuucacaucccaaauggcaaaggcccauuugucucuaggaagugaggguuuggggacaugucccacccaacccagaaccacaaaucc

SEQ ID NO: 4183850 - RNA, 129 nt, Human
uaagaaccuguuaaauauuauguuacaaguuauagaaggaaaauguaauuaacaaugaaucucugugcuuggcaagauuacauucuccuuguauuaggauuugugcaugugugauacagcagguuguua

SEQ ID NO: 4183851 - RNA, 79 nt, Human
uaagaagcauuuuuggaauguauuugaccaaagaaugcuuauguucuuaagaaauugcauucuaauccgaugucccuua

SEQ ID NO: 4183852 - RNA, 129 nt, Human
uaagaauaaccuggggugugauuuuagcaaaauggauucccagguucuggccccuggagauuaauucaguaggucugaguggagccaggcaaucuguacuuuguaaaagcuucccaggugauuuugaua

SEQ ID NO: 4183853 - RNA, 80 nt, Human
uaagaauuaacagggucauucugaaaauguaaacuugaaaaggcuuccaaaucuguucaaaauggcucugugaucucuua

SEQ ID NO: 4183854 - RNA, 59 nt, Human
uaagacacagaaguugcuguuggguuuucuggcaugagcccuuuggauucuguguuuua

SEQ ID NO: 4183855 - RNA, 83 nt, Human
uaagacauuuacuacuaacaugcugguucaaugaagguguuccccaaugcacaucuuuuuggaaacggcugaguagaugcuug

SEQ ID NO: 4183856 - RNA, 82 nt, Human
uaagacgaguuagcaaauguaaaaugccuacaacaaugccuggaacgcuguaagcauuauauaauuguugauuauuuccuug

SEQ ID NO: 4183857 - RNA, 100 nt, Human
uaagacuuaacaguccuucaagaaaucuggaaacuagagaacuccugcaacauggacucccaauuuuucuagauauuccuugaagugagugagccucuug

SEQ ID NO: 4183858 - RNA, 66 nt, Human
guuuccaucuccaggacauaaucuugcaggaucaccucucacccuuaucucuuggugacuggguac

SEQ ID NO: 4183859 - RNA, 63 nt, Human
guuuccaugcagcagccucccagccacuguagcgcaaacaaagccagaggugcugcugcagac

SEQ ID NO: 4183860 - RNA, 61 nt, Human
guuuccauggcucuguuaaugggaaguaucgacucuuuguaggaauagagccacugggaau

SEQ ID NO: 4183861 - RNA, 67 nt, Human
guuucccagguaauucugaggcagagugaggauucagaacuaguugcuuuaagguaucuggagaaac

SEQ ID NO: 4183862 - RNA, 99 nt, Human
guuucccauugauuucauuauuaaauuuuaaauguauuuccucuuggugagggauaccugcaguauuuuauuguuuaauguaguggcucauggggaaau

SEQ ID NO: 4183863 - RNA, 77 nt, Human
guuuccccagcacagggcuugagaggugucugaggaguucuuagggacucucuagcacccugugcuuuuagggaaau

SEQ ID NO: 4183864 - RNA, 62 nt, Human
guuuccccaucucuaacauggagcuggugacuccucagcuguccaggccaugguggggaggc

SEQ ID NO: 4183865 - RNA, 56 nt, Human
guuucccuuugauuuucacaguaggcuguucugugugggaauguuggagaggaaac

SEQ ID NO: 4183866 - RNA, 72 nt, Human
guuuccggauccuggcacagguuggucccaggcuccucugccggggcgacuauguccagggccuuugggaac

SEQ ID NO: 4183867 - RNA, 72 nt, Human
guuuccuagauaacuuggucuuggauuucuaagucauaauguaagaagucugaagacucaugucugaaaagc

SEQ ID NO: 4183868 - RNA, 90 nt, Human
guuuccucagucauaaaauuuguggauuagauuagaugaucuuuaagaucauuucugccucauguauuuuaugauucuauguguggugac

SEQ ID NO: 4183869 - RNA, 79 nt, Human
guuuccucauuccugguggcaucuugagacgguuugguaacauccaagcugugcagauguuaccacggagcauggaggc

SEQ ID NO: 4183870 - RNA, 55 nt, Human
guuuccucucgccccuggguuuuuggagcacccggguugaggggccaggggagau

SEQ ID NO: 4183871 - RNA, 130 nt, Human
guuuccugaugaaaauaucuuccccagaaaagccagagcuugacgugcaacggaccaaccagaggcugcugggauucccauguugugccuggcugcagcugugggcagguuaccaaccccauugggauuu

SEQ ID NO: 4183872 - RNA, 100 nt, Human
guuuccugggcaagggcucgaaccagcuauuagugucuauuugcacugcaugaaaacaaaauuuaauguaaagacgcuuauagcuugccuacccuaaaac

SEQ ID NO: 4183873 - RNA, 70 nt, Human
guuuccugggcuuuguuucucuccuaccucagcuggguccugagugaguugcaaaguguuacuagaaagc

SEQ ID NO: 4183874 - RNA, 84 nt, Human
guuucgggugagucuuuuguggauggaaaauagcaggaacuaguuguguuaugucuuuaucccaauaugagacucgccacuuac

SEQ ID NO: 4183875 - RNA, 58 nt, Human
guuucgucaauucagguacaggucugucugggagaccuggcccuguggaggcaggaac

SEQ ID NO: 4183876 - RNA, 98 nt, Human
uaaugaaggggaaagguuagcuauggaaugccaaguucacugcugaguuauucaguaacaaaugcaucugggcauucaugcuaauuucucuacaauua

SEQ ID NO: 4183877 - RNA, 80 nt, Human
uaaugaauaugaccucuaucuaugauuguggaaauucugaguugaauuccaaauaucuuggugguuaggucaguguauua

SEQ ID NO: 4183878 - RNA, 62 nt, Human
uaaugagaucuaccugugauguuugcccuuaaguggcaaauacuaaacauaagauuuuguug

SEQ ID NO: 4183879 - RNA, 89 nt, Human
uaaugaucucuacugcuucuucuuuuaauaaaugucuuuaguagcuagagaacaguuacacaagagaaaggaccaacgagaaaucauug

SEQ ID NO: 4183880 - RNA, 59 nt, Human
uaaugcauuaaaguuagagacuucugagagauucugaaguccuuaacuuuggcguauua

SEQ ID NO: 4183881 - RNA, 89 nt, Human
uaaugcuagauccacaugcaauaguaauucuagucugugguuuuauggacauuuaaauuauuguuuugucuagauggguucagucauua

SEQ ID NO: 4183882 - RNA, 59 nt, Human
uaaugcugccaagccaugcagagauggaagagaauuuuagguauguuuuggaaguguua

SEQ ID NO: 4183883 - RNA, 73 nt, Human
uaaugcuguacagcaucauacuaccuaaaugauuuguuguugucauuguuaauuguaugaucugacgauguug

SEQ ID NO: 4183884 - RNA, 63 nt, Human
uaaugcuucuguuaggaucuucuuuauauuaccaaaauugaagaagcuggaagaccagcauug

SEQ ID NO: 4183885 - RNA, 70 nt, Human
uaauggauuucaggguaaaaaguguucaacaaugcauccauuuucugaagcucacccuguaaauucauua

SEQ ID NO: 4183886 - RNA, 84 nt, Human
uaauggcuuuuugaugcauauugauucuuuauguaccauaugacuaauagcauaacucuagauguacacucagaaaagucauua

SEQ ID NO: 4183887 - RNA, 87 nt, Human
uaaugggauucuuaugccugaggauagcucuuccuuacuugucaauauuaucauguagauuugcuucuccugccuggaauccuguug

SEQ ID NO: 4183888 - RNA, 76 nt, Human
uaaugguuagcuuccacaucugucuucaguacaggaaggaacuagacuguaagcucuguggaggcaaaaaccauug

SEQ ID NO: 4183889 - RNA, 58 nt, Human
uaauguaccuccagauguuguacccugagaaggagacaacaucauucagguaguauua

SEQ ID NO: 4183890 - RNA, 93 nt, Human
uaauguauuugacagagauugaaucaggaaauaaauucaugacauuucaguuaacuaguauuaccuguuuguagaaucucuguuggaacauug

SEQ ID NO: 4183891 - RNA, 107 nt, Human
uaaugugcccaugucuagcuccucucaugccuuagacaaugccuagcuuacagggguucuuuaaguggagaaggaaauaaauugcuacaccaaaugggacuauauua

SEQ ID NO: 4183892 - RNA, 66 nt, Human
uaaugugucaaauacauaugcucucucuuuguccagugcccagcacagagccuguguugacaguug

SEQ ID NO: 4183893 - RNA, 59 nt, Human
uaauguuaaggaacugcccuuccuuuccagaugagaaagaggggcagcucuuagcauua

SEQ ID NO: 4183894 - RNA, 76 nt, Human
uaauguugguguucacugaagcuggcuuuaaaauaauuacaacacuaaaaacagagcagcagugaucauuacauua

SEQ ID NO: 4183895 - RNA, 98 nt, Human
uaauguuuuuguuguguuuguguucugacauguuuucaagauuuauaauuuaguuguguuucugugauauguaaacaggaaguagaggagggauauua

SEQ ID NO: 4183896 - RNA, 123 nt, Human
uaauuagauauucucuaaaauauuaggaugaguuaauucauuuuuaacaucauggauuuaggaaggugauucuauaaauccuaaggagaauaugauuuacuuggaauugaagaggaauaauua

SEQ ID NO: 4183897 - RNA, 76 nt, Human
uaauuaggagccaguuuagaccucaguugcuugaugagguagcuucaacuguugucacgaauguggcuccuuuuug

SEQ ID NO: 4183898 - RNA, 77 nt, Human
uaauuauaauuguagacauuugucaagaaugacucauuuggccaauggaguguuggcaaauguuuacuuaauaauua

SEQ ID NO: 4183899 - RNA, 92 nt, Human
uaauuauaugaauguugaaaagucuaaguuuguaacuuggagagugucucuauucuggaaacuaaagaugaaucaacacaaaucauaaguug

SEQ ID NO: 4183900 - RNA, 82 nt, Human
uaauuaucccucuuuagccaggagcucguaacaguaaagaaucugaaguuuguucuuuguugagcaaguaggacgauaauua

SEQ ID NO: 4183901 - RNA, 62 nt, Human
uaauucaugcacuuaucugguccauuuuaauaauggccugggccagaaguaugcauguuuua

SEQ ID NO: 4183902 - RNA, 95 nt, Human
uaauuccaguugaucuacauucucaccaauguuugguaucauugauuuuguucauuuuaaacaacaugguggguguguagucauauuguggguua

SEQ ID NO: 4183903 - RNA, 83 nt, Human
uaauucugcagguuugcucuguucaaaguuaauaggucuguauggugacccauagaugagacaaaguagagacugcuauguua

SEQ ID NO: 4183904 - RNA, 96 nt, Human
uaauugaggguacaaccaguuaaguuacaaagcacuucaagugaaaucauuguuucaucaagaagugucuguauuuuaugagguaaacuaagauua

SEQ ID NO: 4183905 - RNA, 84 nt, Human
uaauugcauauugcuuuuauuucuauggacuaauguuuuaaucagucuuauuauaguagaacaagggagcagagaugccgauua

SEQ ID NO: 4183906 - RNA, 62 nt, Human
uaauuggcuauagcauuauggauuguuucuggagugaaauagucuuagucuauaguuuugua

SEQ ID NO: 4183907 - RNA, 66 nt, Human
uaauuguacaacaggauugauguaccaccucugccuaugagagugguucaguauguuguuaaguua

SEQ ID NO: 4183908 - RNA, 56 nt, Human
uaauuguauggagaaggcugcaagacaggcacuguggucuucaguagauacaguua

SEQ ID NO: 4183909 - RNA, 56 nt, Human
uaauuuaauuguguggugcugggguguuuuucccccuagcaaauacaucaaaauug

SEQ ID NO: 4183910 - RNA, 85 nt, Human
uaauuuacggcagcucaggaaaggccaugcaagggcaaggggcaaugccuuuaguuauuuucuuggggaauuuguccuuaaauua

SEQ ID NO: 4183911 - RNA, 60 nt, Human
uaauuuauaguugcaguagggguagauaaagaugucaugugucugcugcagcuguuguug

SEQ ID NO: 4183912 - RNA, 85 nt, Human
uaauuucugucagagaaagcacuaaaagagaauccuggucaaaggagaggauucuuucaggggcuucuuuauuuggcagauauua

SEQ ID NO: 4183913 - RNA, 129 nt, Human
uaauuugcugcaugaccuuggcaggacccaccgggcuugcaggaucuuuucucugugcacugaugggaugaggcuggaucucuguugccuucauucgugcuguuuaugccaacaggguuugcaguuuua

SEQ ID NO: 4183914 - RNA, 61 nt, Human
uaauuuuacuuccugagcaccuuucuuuccuccaaaggcugcaaaguucaggauagaguua

SEQ ID NO: 4183915 - RNA, 107 nt, Human
uaauuuucauaaucuuaaacaucauguaggaguuuguuuaguaaauuaguaguuauuagcuuauuugauuaguaaaccuguacauguuuagaagauucagauaauua

SEQ ID NO: 4183916 - RNA, 58 nt, Human
uaauuuugucacagugacaugcccugucacagggcguauguguucuguuauacaguug

SEQ ID NO: 4183917 - RNA, 94 nt, Human
uaauuuuuuaauugauacaaaauuguacauauuuaugagcgacacagugauguuucaauacauacaauguauaguggucaaauuaggguaauua

SEQ ID NO: 4183918 - RNA, 102 nt, Human
uacaaaaacuuagccaggcaugguuguccaagcuacuuaggagucugaggugugaagaucacuugggcucaggaguuugagaccagccuggccaacacugug

SEQ ID NO: 4183919 - RNA, 130 nt, Human
uacaaagauguagaagaggaggugauguagaguaaaggccagaguacuagaggcuggauguguuaaauaucagcugugugaccuuggccaaauuauucaaauguucuggcuucaguuccuguaucaaaaa

SEQ ID NO: 4183920 - RNA, 64 nt, Human
uacaaagauucauuugcauuauugcauucucucuagagucauugaugcuuucugagauuuugug

SEQ ID NO: 4183921 - RNA, 58 nt, Human
uacaaaggcagguuucccaggagaaauuuauaggaaguagucuggggugugcugugua

SEQ ID NO: 4183922 - RNA, 68 nt, Human
uacaaaggcccuucggcuuccucagccccgcucagugaguguugugaaggucagcgaggggccuggua

SEQ ID NO: 4183923 - RNA, 56 nt, Human
uacaaaggcgguuuuucugggcuccuucacucugagaucaguaagaaugccuugua

SEQ ID NO: 4183924 - RNA, 79 nt, Human
uacaacagcucugagagcuagguguuauuuuuucccuuauuuuucagaggaaugacuuguagcucugagaagugaagua

SEQ ID NO: 4183925 - RNA, 62 nt, Human
uacaaggucagcuguccugagcaggucccaccagggcagguccaggugagcagaucugggug

SEQ ID NO: 4183926 - RNA, 127 nt, Human
uacaagugagaaggagaagagagccaaaaauuaauguggaaagcucuugaguucuacugugaacaaucaauuggacccauguuuuaaaauuuugagucauuuaauuuuuuuuuuuuuuuuuacugua

SEQ ID NO: 4183927 - RNA, 119 nt, Human
uacaauagagucuuucuuucaaagagcucacaguccacuggaaaaucaggaaaguauguuggugacuccaguacaaugugauaaggucuguggaauggcacauagaaagcuuuguagua

SEQ ID NO: 4183928 - RNA, 71 nt, Human
uacaauagggagguuuaggggagccaauauccaucuguucauggcuuuuauucuucagcacuccuuaggua

SEQ ID NO: 4183929 - RNA, 103 nt, Human
uacaaugguaaugaauuuacagggugagcuucagaaaauggaugcauuguugaacacuuuuuacccugaaauccauuaauauuaucaguccaucaccauuuua

SEQ ID NO: 4183930 - RNA, 70 nt, Human
uacgcauggaaauccaguucccuacucuuauagcaccucgcaugagggggaacugugauuuucugcagug

SEQ ID NO: 4183931 - RNA, 69 nt, Human
uacgcuuucucuuaucagugcacuugaagagauuugucucugagauuuguauggugagacuguugugua

SEQ ID NO: 4183932 - RNA, 72 nt, Human
uacggagaggugggcagucaugaaaucuagagagauguucucuggaguuuuuucugucugugccuuagugua

SEQ ID NO: 4183933 - RNA, 75 nt, Human
uacacugcucucuguucuuugucacugggaacggaauagacuuuucccaggaucugagggcagagaguauccgua

SEQ ID NO: 4183934 - RNA, 55 nt, Human
uacagaaaaacaucuggagccguaaauaaguugagcagcccggauacauucugua

SEQ ID NO: 4183935 - RNA, 67 nt, Human
uacagaaauacagucaggccuagguaaccaccaaaacucuuuuuaguccuagacuuuauguucugua

SEQ ID NO: 4183936 - RNA, 111 nt, Human
uacagaaauugauuugcaaauauuuugcaacuuacaaauacacuuaggagagaaggucuaauuuguucccauuuguauuuugugaaugugcagauuguuaaaauaucugua

SEQ ID NO: 4183937 - RNA, 98 nt, Human
uacagaagcuuggaagugccaguuaguagacuuuuccauuuaguaaagugcugaauaaauaaacuuuuacuacaacugguuucuuuaaaguguuugua

SEQ ID NO: 4183938 - RNA, 58 nt, Human
uacagaagcuuuugaaaagaugaggaaccuuuggaucugggaauggaagccuucugug

SEQ ID NO: 4183939 - RNA, 59 nt, Human
uacagaaguaaauaccaaaagcuucugcuaaaagauuugaagguguuugcuucuaagua

SEQ ID NO: 4183940 - RNA, 82 nt, Human
uacagaggagugagauaggcuugagcuaagagagaaccuguagguucugguuugguuugucugguuucuagcucccaaggug

SEQ ID NO: 4183941 - RNA, 56 nt, Human
uacagagguguguguaggacagucuuuaauuucuaggaacauacaggccggcugua

SEQ ID NO: 4183942 - RNA, 60 nt, Human
uacagaguguuauuacagaauccugccagaggcuuucuuuuucugcaauaacaugcugug

SEQ ID NO: 4183943 - RNA, 63 nt, Human
uacagaguuaaaguggaguuuaaauaguuuuacuuaauguuuaaauuuccaauuaauuuugug

SEQ ID NO: 4183944 - RNA, 55 nt, Human
uacagaguuuuccugccaagaauucuggugacaguugucaggcaauaaaauugua

SEQ ID NO: 4183945 - RNA, 65 nt, Human
uacagauuccugggcuccuccuggcgauuuuaauucaguaggcuuaagaggaucagaaaucugua

SEQ ID NO: 4183946 - RNA, 64 nt, Human
uacagcaacuccuauauugaaagccuggaauucuggagcuugaugauaccuaggagauguuuua

SEQ ID NO: 4183947 - RNA, 62 nt, Human
uacagccaucauguauguauauuuuccucuaaccuuuuugcauguauauuuauauggcugua

SEQ ID NO: 4183948 - RNA, 73 nt, Human
uacagcuuugggaaggccccauaccugcaagggacaaagcucuagccaaaugacuuuccuggcaaaaguugua

SEQ ID NO: 4183949 - RNA, 56 nt, Human
uacaggcaaauauacuaacaucccaguuaaaacaauguuuaguauaacugccugug

SEQ ID NO: 4183950 - RNA, 59 nt, Human
uacaggcauguagcauggugauuaagaaucaaagcugggcauggugacucgugccugua

SEQ ID NO: 4183951 - RNA, 76 nt, Human
uacagguacaugccaccaugccuggcuaauuuuuuaaaaaaauuuagaaggcugggcaugguggcucacaccugua

SEQ ID NO: 4183952 - RNA, 62 nt, Human
uacaggugcaugcuaccaugucuguuuaauucucuuuuuuguagagaugggguaucaccgua

SEQ ID NO: 4183953 - RNA, 64 nt, Human
uacagguuuaggcacaacuacucagcuagaacaagcucucugagggagauggccugccauugug

SEQ ID NO: 4183954 - RNA, 78 nt, Human
uacaguaaaaaguaaacaggccccagggagguugaaagagcugcauucacaaccugggucugucacuggcuagcugug

SEQ ID NO: 4183955 - RNA, 65 nt, Human
uacagucagcuuuuuacaugugaaauacagcaaaauguauaaaugaaaaaagagcugauuuugug

SEQ ID NO: 4183956 - RNA, 101 nt, Human
uacagugagaagugaagcuugugauacugacccagaggaacugcaaaguucuccaucaacccagcuagggccuuugggaucuguaaacuucaugcucugug

SEQ ID NO: 4183957 - RNA, 55 nt, Human
uacaguggcaaguggauuuccagauuuuaaucugcauccagagguagccacugug

SEQ ID NO: 4183958 - RNA, 68 nt, Human
uacagugggcagauuauagaugaugcccuuaggguugugggguaaacauuuucaucugugcccuugua

SEQ ID NO: 4183959 - RNA, 104 nt, Human
uacaguguuuaagagaaucaccccauaauauuaaaugcuuuuguauuaauaaaucuggauguauauggcauuuuaauguaugaguauuuucauugaacacugug

SEQ ID NO: 4183960 - RNA, 95 nt, Human
uacauaaauaaaggcuuuaauuaucuacaggaguaguaaaggcuaaugauguagcugucuuugaguaauaauucugccuuaaaauuguuugugua

SEQ ID NO: 4183961 - RNA, 84 nt, Human
uacauaacaagaaugccagugguuggcccugcaggcuuggugucauggcccccaagguaccacuggagacucugguucuuugug

SEQ ID NO: 4183962 - RNA, 60 nt, Human
uacauaauaaggggcauggugucaauauaguugaaauaucuguugugccucuuauaugua

SEQ ID NO: 4183963 - RNA, 56 nt, Human
uacauacacaaaugcugaaugguggcuaaaaaucucaucagcuucuguguauugua

SEQ ID NO: 4183964 - RNA, 72 nt, Human
uacauaccuccccacauucacuucucuguccaccugggccaggugagaagccauuugaaugcgauauaugug

SEQ ID NO: 4183965 - RNA, 120 nt, Human
uacauacuguauaaggaauaaaaaacaggcuuuauuauugguuaguguugauacuguaugucuauaaaauuauucaaucauauuaaaagucuguguuuugaauucaugugcauguaugua

SEQ ID NO: 4183966 - RNA, 79 nt, Human
uacauagauaugacaauaccaugcagaaauaacauaauacagaagugugugugugugugugugugugugugugugugug

SEQ ID NO: 4183967 - RNA, 66 nt, Human
uacauagcuguuucuuuaaauguguuauaacuuuuuaccacccacaggcuaaagaucagccaugua

SEQ ID NO: 4183968 - RNA, 69 nt, Human
uacauaggagucuggugaagaggucaacuucauauggggacaaauggccuauuucaucaguucaaugug

SEQ ID NO: 4183969 - RNA, 67 nt, Human
uacauaggcagggauuaggguugauuacguaacaggcguaaucaucuguuguucccuuggaaaugua

SEQ ID NO: 4183970 - RNA, 79 nt, Human
uacauauaccuuuaccuugaccaaauaggggaaaaggugagcagaaaggucagauguuuggcaagaagaggaguaagua

SEQ ID NO: 4183971 - RNA, 60 nt, Human
uacaucaaggaacaccugguaucagugcacgccaucauugaugcugguaaccuuggugug

SEQ ID NO: 4183972 - RNA, 55 nt, Human
uacaucacaaacaugaagugucggccaauagucaggcauggcauguagugaagug

SEQ ID NO: 4183973 - RNA, 66 nt, Human
uacaucacagagacagaucuauuuugccugcagcaaaaugcuaggcacaugcucaauguguaugua

SEQ ID NO: 4183974 - RNA, 67 nt, Human
uacaucacaggcauuuugaguguccaccuugaccuuuuuucaggggcaacucaaaugcugugcugua

SEQ ID NO: 4183975 - RNA, 81 nt, Human
uacaucccacacucgaugcuggaaugacagcugcugccuguacaccagcuucugucuaccggcgugaaacuggaagaugua

SEQ ID NO: 4183976 - RNA, 57 nt, Human
uacaucccagccagcagaaucagaaaucuugaauuugguccugcugccuggggugug

SEQ ID NO: 4183977 - RNA, 76 nt, Human
uacaucguugcauaucuuaccuaaaaacaggcugaauuguguuugucucuuagucuuauauguaaaaggagaugua

SEQ ID NO: 4183978 - RNA, 61 nt, Human
uacaucuguaugugcacauguaucauguacuaauagugcauaauaauuccacuacagagua

SEQ ID NO: 4183979 - RNA, 58 nt, Human
uacaugaccuagacuugcuaaaaauacuaauaauuuucgaagggcuuuagguggugua

SEQ ID NO: 4183980 - RNA, 64 nt, Human
uacaugagauaauaaauagcuuucuuauuuaaggcaacuugaagcaaggauuauuguucaugug

SEQ ID NO: 4183981 - RNA, 63 nt, Human
uacaugcaauuuuuucuugucaguuacuccucaauaaaacugggaaggaaaggaauguaagua

SEQ ID NO: 4183982 - RNA, 68 nt, Human
uacauggaaagaacauggacugugggguuaaguaacuuagguucagugucuuguucugcugcugugua

SEQ ID NO: 4183983 - RNA, 84 nt, Human
uacaugucaaggauaggcuaagugaauuacauguauuuuuaaggcuauugugccuuagugacauguauucuucauggcacugua

SEQ ID NO: 4183984 - RNA, 74 nt, Human
uacaugucuggggcuggcugggguuggcugaccuagucuggccuugccucaauagcuccaccucaaaacgugug

SEQ ID NO: 4183985 - RNA, 65 nt, Human
uacaugucugugugucgaaaagauuauaguuguaagaguugacaaaacaacacagauuucaugug

SEQ ID NO: 4183986 - RNA, 68 nt, Human
uacauguguucuguuucaaguuaauuugguuugcugaugaaaggucauugaagucagaaauauaugug

SEQ ID NO: 4183987 - RNA, 103 nt, Human
uacauguguuucaaauguauagcuaggaauugaaaaguggucugagcuucaaaaagucuuacuauauuuuaauacuuccauaugaauuugacuucauuaugua

SEQ ID NO: 4183988 - RNA, 94 nt, Human
uacauuaaauguacuauuacaauggaguuuuuuaagcaaaaucuaguauaaugccuggcccuuuguagacuaccaguaauuguuauuugaagua

SEQ ID NO: 4183989 - RNA, 107 nt, Human
uacauuaauuuuuuuguaaggcaauagcuuuaggaugguucucuugguguuucuauuuaucuaagccaguagguagaccugagguuuuucuucaagaaaauuaugua

SEQ ID NO: 4183990 - RNA, 61 nt, Human
uacauucaacaugucacuaugugagcugcucagggaugcaguucagugagaaugucaugua

SEQ ID NO: 4183991 - RNA, 100 nt, Human
uacauucaacuuuccuuugauuuuaaacuugaaaacuggcaaaggaauggaagaauauuucagucaugaguuguuuucaguuuucagacgaaugaaugua

SEQ ID NO: 4183992 - RNA, 64 nt, Human
uacauucguguguguguguguaugugagugcacacacacacauacacaagcguacaugaacgug

SEQ ID NO: 4183993 - RNA, 82 nt, Human
uacauucuacuuuuucacucccuuucccaguguguaauagauuaaaaacaauggguuaucucugugaagaacuuggaaugua

SEQ ID NO: 4183994 - RNA, 65 nt, Human
uacauugaauuuuuuagcauguaaguaucuucaauaaaauugcaugcaauuaaaagguaagugua

SEQ ID NO: 4183995 - RNA, 92 nt, Human
uacauugaggagggguauaauaauuuuuuucaauuaaaagaagucauacauuucucaacuuugagaaacauuguucuuaccuucccagugug

SEQ ID NO: 4183996 - RNA, 68 nt, Human
uacauuggccuacggaagcuacugauguauauuaucuaugauagcagaaaccaagcuucuucaaugug

SEQ ID NO: 4183997 - RNA, 59 nt, Human
uacauuguuccagcgauagagaagcauuucugguuuuugauuugcuuugaacaauagug

SEQ ID NO: 4183998 - RNA, 85 nt, Human
uacauuucuacuguucaagccacuguuuguguaauucguuauggcagccauaggaaacuaauacagucuggaacauagagaugug

SEQ ID NO: 4183999 - RNA, 61 nt, Human
uacauuugauucucuccuccaacagucacauuggcucuuggcccuagaugauuaaguugua

SEQ ID NO: 4184000 - RNA, 62 nt, Human
uacauuuguguguauauccuuccagaaauuuuuggcgcauuuauauacacaguacauaugug

SEQ ID NO: 4184001 - RNA, 90 nt, Human
uaccaauucaaaugaguuuguucuauuauuugcgugcgucuuaaaacacccaaaucagaucagagacaggcuccugguugaaauuuggua

SEQ ID NO: 4184002 - RNA, 61 nt, Human
uaccacuuuaguucagacuuucauuaucuugcuggauuacugcaaagcugcugaaguggua

SEQ ID NO: 4184003 - RNA, 130 nt, Human
uaccagaguagugcuacagggucauaggaaauugugcagugcguggguguugaaaaagauuccuucuuuuagcaaaaaagcucugcguaauuaucaugucuuugcuugauaauuagcacuacuccaacaa

SEQ ID NO: 4184004 - RNA, 79 nt, Human
uacggagcauaugaccuacaaccuagcaugauugguucccacuugucauaggcauggauguggguucagaugcugugua

SEQ ID NO: 4184005 - RNA, 70 nt, Human
uacggcaaauacuguucuugacuuuuacuguaucgagugagaacuguaaggcuuagaacagcauguggug

SEQ ID NO: 4184006 - RNA, 77 nt, Human
guuucuauguuccuuucuuuuucucucugccucagaagaagcugggcagguagccuagaggagguugcggaagaugc

SEQ ID NO: 4184007 - RNA, 55 nt, Human
guuucuccacacccugggaaggcuccgcgagugccccaugggugccuggggguuc

SEQ ID NO: 4184008 - RNA, 64 nt, Human
guuucuccauaguauuauuaaacuagggggcucaucaguuuacaacaguagcuauggaugagac

SEQ ID NO: 4184009 - RNA, 96 nt, Human
guuucuccauggcaaauagacucuguuaaggguaaacagcaguaauuuaaauuucuaaauggcucuguggucuuagcaugcuuugcuaugagaaau

SEQ ID NO: 4184010 - RNA, 55 nt, Human
guuucucccuugcauaacugguugggcaauggugccagucacagggaagaggaac

SEQ ID NO: 4184011 - RNA, 57 nt, Human
guuucucuacaugcaugcagacauauguauaaauuugcauuaaaaugauggagaaau

SEQ ID NO: 4184012 - RNA, 64 nt, Human
guuucucucugccaugugcucccugcaguucaagagggccauccaugcgccagacagauuaaac

SEQ ID NO: 4184013 - RNA, 61 nt, Human
guuucugacaaauucugguuccuguuucuuggaauccaauccuacucagaaaguuagaagc

SEQ ID NO: 4184014 - RNA, 59 nt, Human
guuucugagagccacacacagcaugagugugagugccguucuguucagcugucagagau

SEQ ID NO: 4184015 - RNA, 60 nt, Human
guuucugauuuccagugagguuaugcauguauucuuaacauuuauuggccuuucaggaac

SEQ ID NO: 4184016 - RNA, 55 nt, Human
guuucugccaucugaaaaucuuguuuggaguuugaaacagggcagaagcggagac

SEQ ID NO: 4184017 - RNA, 66 nt, Human
guuucuguaagacugaauugacuucacuaugaaauaaggcuuucucgguaucaguccugcagaaau

SEQ ID NO: 4184018 - RNA, 117 nt, Human
guuucugugguucucauauggaaauaguuuacacaugcucacuuauuuguucagcaaacaucugagugcuugcugugugcaagaaacuguguucaauacugugaagacuacugagau

SEQ ID NO: 4184019 - RNA, 56 nt, Human
guuucuuaaauguagcaggaccuaagaaguccuagcuccugguauucuuuagagau

SEQ ID NO: 4184020 - RNA, 57 nt, Human
guuucuuagguaaauucuuugagcugagagacaaguuagagaauucccuuuggagau

SEQ ID NO: 4184021 - RNA, 75 nt, Human
guuucuucaguuacucaacagagguggauagaguacuggcuccgugccaaauuacauggguaaacacuggagaac

SEQ ID NO: 4184022 - RNA, 81 nt, Human
guuucuuuaacucauggcugaaacaguaacacagaagacauaaaccucaaaucugugucugggucuguaacauggggaaac

SEQ ID NO: 4184023 - RNA, 113 nt, Human
guuucuuuaccauuuucauaacuucguagagaaucagacuguaauuucauuggugaaaagcuaagauucuuaaauuuguuucucuuugaaagauaaugaaaaccuaaagagau

SEQ ID NO: 4184024 - RNA, 66 nt, Human
guuucuuuccuguggguuuugcucauuucacccaucuuaucuguaaacuucccaggaacagggaau

SEQ ID NO: 4184025 - RNA, 57 nt, Human
guuucuuucuauugacugaacacccccucugguguuguguuuauaaauaguggagac

SEQ ID NO: 4184026 - RNA, 68 nt, Human
guuucuuuguuugauaaguaugcugcacuucacgacaggugaguauucuagcuuauuagcagggaggc

SEQ ID NO: 4184027 - RNA, 86 nt, Human
guuucuuuugcuggcuacucaaauuuuuaguaagaauuucuccauaugaaugagagaguugcuaccaagaugcuagcaaaggagau

SEQ ID NO: 4184028 - RNA, 62 nt, Human
guuugaaacaugcaccuggaggaauuuaucugugaagaguccuuucagaguuuguuucaagc

SEQ ID NO: 4184029 - RNA, 67 nt, Human
guuugaaaugagcaaacugucagcuugccgauuaccaugcacacaguauaugcucauuaaaucaugc

SEQ ID NO: 4184030 - RNA, 63 nt, Human
guuugaagcuaaugucauuucagucucauuuggaggcuucagagauuucacuaguuucuccac

SEQ ID NO: 4184031 - RNA, 88 nt, Human
guuugacccuugagcagagguugcccuuggugaauucgcuuuauuuauguugaaucacacaaaggcaacuuuuguuugaguaucaaau

SEQ ID NO: 4184032 - RNA, 67 nt, Human
guuugagcaguuuaaaucuguauuuucuaucuaauugauguguugcaagaggagacuguacucagac

SEQ ID NO: 4184033 - RNA, 62 nt, Human
guuugagggaggaagcuugugggcaaggccacagccguccgcaaugcaagccuuuuaugaau

SEQ ID NO: 4184034 - RNA, 95 nt, Human
guuugagguaaaauucuuagaacagugucugacacauuguagcucaggagcugugaguggaggaggcugagacuaagaaugauucuacuuuuuau

SEQ ID NO: 4184035 - RNA, 83 nt, Human
guuugagguauaugcauugauagaaaaacauggacuaaaaaaaacucagucuguauuuauauauucauugugaauucucaaac

SEQ ID NO: 4184036 - RNA, 91 nt, Human
guuugagugaguucauuuauuuauaccauugccuuguuccagaaaggauuucaggcaacugguuaaguaaauuguccaagaucacccagac

SEQ ID NO: 4184037 - RNA, 80 nt, Human
guuugaugaagguagaacauuuguagcagcugagugaucugcuuaggaccucagccaggagaguguucacagcaucaagc

SEQ ID NO: 4184038 - RNA, 70 nt, Human
guuugaugcagcagucacaggcuuuauguagugacuuaucuggagauaagagucuugacuguuguuagac

SEQ ID NO: 4184039 - RNA, 65 nt, Human
guuugauucuggccacacacuauuauucugcucuccucucugcaaaugaagguggugcuacagac

SEQ ID NO: 4184040 - RNA, 56 nt, Human
guuugcacuagcauuuguccaugugguucuuuuacacauaagagugaugugcagau

SEQ ID NO: 4184041 - RNA, 58 nt, Human
guuugcagcauucaugucucaauauguucaguauuucaggcaauucgaaguugcagac

SEQ ID NO: 4184042 - RNA, 64 nt, Human
guuugcaggugaagugcccuggaggcaggaugucugaaaacuccuucaggcucuuccccuggac

SEQ ID NO: 4184043 - RNA, 56 nt, Human
guuugcagucccacguggcauggccuccagcccaacccacaguggagacuggagac

SEQ ID NO: 4184044 - RNA, 97 nt, Human
guuugcauuauaauggagaaauguuucuaguuguaugucacugacacuauguugaaacaguggccacugacuuggaaaucacuucagauaugcagau

SEQ ID NO: 4184045 - RNA, 92 nt, Human
guuugccauuuaagccacuguuauguuagguuuucugucacacugcacaacccaaauccuaauaaugcacuagugaaguagauaaggcagau

SEQ ID NO: 4184046 - RNA, 55 nt, Human
guuugcccguugccaggugcccggguuccggcccuggcacuagcgacggccaugc

SEQ ID NO: 4184047 - RNA, 130 nt, Human
guuugccugugugugucaggcauuauucuauaauccuggaauacaagagugaaccuuggucuuauagcauuauauuccaggaagguaagacauaauaagacauuaauauuauaaauacauaaaaguacac

SEQ ID NO: 4184048 - RNA, 80 nt, Human
guuugcguguaaucuaauuacagagguuugccaguuccuacucaggagcuccccuggugacuuucugugguacugcagac

SEQ ID NO: 4184049 - RNA, 71 nt, Human
guuugcuaaugccucugaaaucacaacuuuagcuccauguaaggcugcucugauagaagaggcuuagaaau

SEQ ID NO: 4184050 - RNA, 58 nt, Human
guuuggaagaugcugcaucuuaucucccuucuuggagauuuauagcacacuucagaau

SEQ ID NO: 4184051 - RNA, 84 nt, Human
guuuggaagguagucaaauaucuggcacuuaaaugagaauuugggccucaagaucucgcuuugagggucaguugccuaucagau

SEQ ID NO: 4184052 - RNA, 61 nt, Human
guuuggaaguuaagugcagcaguuuccaaaaaaucauaacugugacauuuuuauuccagau

SEQ ID NO: 4184053 - RNA, 73 nt, Human
guuuggacaguuuguguacagguguuuccaagucagggucugauuaacugagacuuccugugcaauuccuagc

SEQ ID NO: 4184054 - RNA, 70 nt, Human
guuuggacuggaaaguucuuugcgguggggcuguccuguacauuguaagaggcuuugcagcauuccagac

SEQ ID NO: 4184055 - RNA, 63 nt, Human
guuuggcacuaugaugaggcuaucacuucugugcauauuugaucccucagaagguagccaagc

SEQ ID NO: 4184056 - RNA, 79 nt, Human
guuuggcugaccucagauuguggcuccgcuguuacucucuguguaaugugggaucguaaauuugggacaaagccgguac

SEQ ID NO: 4184057 - RNA, 88 nt, Human
guuugggagcaugguaaaguagcaaguuuagacugagcaaucaggagccuuuuuuuuggauguguuaacuuugaaaugccuuuuagac

SEQ ID NO: 4184058 - RNA, 66 nt, Human
guuugggcugggucuggaggaagggagauacuuaacugugucccagggaaggcccagcacucaaau

SEQ ID NO: 4184059 - RNA, 117 nt, Human
guuuggguuuuuuguugcuguugcuuguuuauuuguuuguuguguuuaagacguuuuacuugucccugaaauguuugucaucacacagauacacgcucaggauaagaacuaccagac

SEQ ID NO: 4184060 - RNA, 55 nt, Human
guuugguacagguucgaauaucauggagaugaguguggaagaacacuggccaggc

SEQ ID NO: 4184061 - RNA, 59 nt, Human
guuuggugguagcauuggcuaugcuuguaauuugcaaagaggaagugcugcuggcaaac

SEQ ID NO: 4184062 - RNA, 83 nt, Human
guuuguaacuggcccaggaaaagcagugccagcaacucaaaugacugcucucacugucuucuugagaaaacagcagugcaagc

SEQ ID NO: 4184063 - RNA, 59 nt, Human
guuugucaggagguugaagucaucucccgucuugagcuucaaagugugaccugacaagc

SEQ ID NO: 4184064 - RNA, 85 nt, Human
guuuguguuaagauguugccauguggggacaauaucauaauauaacauacuauucugugugugucugcacauguauaauacagau

SEQ ID NO: 4184065 - RNA, 86 nt, Human
guuuguuaaagagauuuccauauuuuguaacagugccccccuucuccugccccuguuaugauaaauuggcuagucucugugaaggc

SEQ ID NO: 4184066 - RNA, 67 nt, Human
guuuguuuuggcuucuugggaugggucauuauauguauaguggccuauaugugagaagaaaacaaau

SEQ ID NO: 4184067 - RNA, 118 nt, Human
guuuguuuuuguuucuggcagguagguagaauagagacaguuuaacaauauagucagagauugagaugauauauaguuggguuucauucuacagauacacuucugguuuauugcaagc

SEQ ID NO: 4184068 - RNA, 65 nt, Human
guuuuaauguagaacugucaggacccugugaaaauaauggguggugacagguuuaggauuaaaau

SEQ ID NO: 4184069 - RNA, 73 nt, Human
guggcagacagcauuguaagaaugaagaccugggugguuaucagaguccauguucuucagggcuugaggccau

SEQ ID NO: 4184070 - RNA, 77 nt, Human
guggcagagcuggcugguagcccugaucccacucuccacuugaaggacagcugauuaggcuccaaguaccucuucac

SEQ ID NO: 4184071 - RNA, 67 nt, Human
guggcagggugagcgucagccuuaagagggaugaugaccucuggcaggacaugcugaccaugcagac

SEQ ID NO: 4184072 - RNA, 100 nt, Human
guggcagguccgggaaguggaggccgaguucacgcagucagcacucauagcucccagcucccugcuccugagcgguuuccaugacaacccggccagccac

SEQ ID NO: 4184073 - RNA, 67 nt, Human
guggcagguggcaugacugccuacaaacacaaaguucccgggguccacaugucauagacugauccau

SEQ ID NO: 4184074 - RNA, 56 nt, Human
guggcagucgcugacagauacacuugccaccuaaguuaucuuuccaaaacugccau

SEQ ID NO: 4184075 - RNA, 82 nt, Human
guggcauucagcacuuuuuguaaagcuuugagacuacaucaaaccaaaaauagggauguaagcugaaaagucuggaaacuac

SEQ ID NO: 4184076 - RNA, 57 nt, Human
guggccaagguuuauuuugauacauuggacaaagugcagucuucugagccuugcuau

SEQ ID NO: 4184077 - RNA, 67 nt, Human
guggccacugauuggcccauccaugagucugugacacucacaguccaggaguuuccaauuaagcuac

SEQ ID NO: 4184078 - RNA, 59 nt, Human
guggccaguggugggcgcccugggcuguauguccccaucugugucugccuuugugccac

SEQ ID NO: 4184079 - RNA, 74 nt, Human
guggccaguuuugaucagagguuuaagaaacaccaugaguuugucuugucccuggagcuucuguccccuggcac

SEQ ID NO: 4184080 - RNA, 60 nt, Human
guggccauugaaagauugggaacuggauuucuagguuacaacauugauucauuuggcuau

SEQ ID NO: 4184081 - RNA, 56 nt, Human
guggcccaggcuuggcgcuggcagugaugcuaggccugggauggccuugggaucac

SEQ ID NO: 4184082 - RNA, 96 nt, Human
gugucauagauguauauucugugccaggauaucuuuaaguguguuuaaggcugugacaucuauaggccagguugauaugcacucuccaaugaccac

SEQ ID NO: 4184083 - RNA, 94 nt, Human
gugucaugcucuguccugucuucaggacccggaauuuuggggucugagugacaccagcauucacuggaccugcagagaaggacaaagcugaugc

SEQ ID NO: 4184084 - RNA, 70 nt, Human
gugucauguuaacagaggacacaucaaacucucuccaugauaguauugaccucuuugugagcaauggcau

SEQ ID NO: 4184085 - RNA, 68 nt, Human
gugucauuucacaauaucacucacacauugguuuuugucaauugagggauucagaugugaaguggaau

SEQ ID NO: 4184086 - RNA, 82 nt, Human
guguccagaaaguguccagccugcacagggugcauugcaggcagucccagcacgcucucaggccagggcaugaacuguauac

SEQ ID NO: 4184087 - RNA, 130 nt, Human
guguccagcacguggguggucaguagguuguccggaggcuccgugcugcugcccugggccaggagaaggaggccagggugagccucuggagcccugugcccgccuacccacaccaauccugcguccacac

SEQ ID NO: 4184088 - RNA, 76 nt, Human
uaaggauaugagauuugggaggggccagggauggaauaauaugguuugacucuguccccacccaaaucucaucuug

SEQ ID NO: 4184089 - RNA, 68 nt, Human
uaaggauuucuuucauuuugaguucuaucuuguaguaaaaccugauaguuuaaugaaugaauucuuug

SEQ ID NO: 4184090 - RNA, 72 nt, Human
uaaggcauuagagugaaagcaagcaauuuuuuaaugaaacauuuauuugccuucuuuuacugcagugcuuug

SEQ ID NO: 4184091 - RNA, 81 nt, Human
uaaggcccuucacagagucucagggaugaaagcauggaguuggugcuaucauuauuaccgugaggcccucguauugcuuug

SEQ ID NO: 4184092 - RNA, 75 nt, Human
uaaggccugucuggggcucagccaaacuggggaguaguacacgagaagaggaauggggagcccuagaggguuuua

SEQ ID NO: 4184093 - RNA, 100 nt, Human
uaagggaaaaagucuggagauggauguguguguuuguacugccugcgaaguggucaguagggaaauaggcuuauauaaaaacaucugacucuuuuccuua

SEQ ID NO: 4184094 - RNA, 88 nt, Human
uaagggaaaggagccaacuuugugucuguuaauaauuauucccacugaaugaugcaagucagauauaauagacuacucuuauuuuuua

SEQ ID NO: 4184095 - RNA, 83 nt, Human
uaagggccgggcgcgguggcucacgccuguaaucccaacacuuugggaggccaaggcaggcggaucacaaggucaggcgauug

SEQ ID NO: 4184096 - RNA, 83 nt, Human
uaagguaggcuauuuggaacuuauaauaaguuuucugguagaaacaauauccaaagaguuccaugaguuucaggcucccuuua

SEQ ID NO: 4184097 - RNA, 55 nt, Human
uaaggucauggugaauaauaagcuaauagacaaaguauaugacaucaugaucuua

SEQ ID NO: 4184098 - RNA, 128 nt, Human
uaaggugagcagcugggaaccucugauuauaaaauucuguaugccaauggguuuuuuguaguaaaaaagaguuauuuguuagaaaugcauuagcacauauagguauucgauucaaaagcugugauuua

SEQ ID NO: 4184099 - RNA, 93 nt, Human
uaaggugaugcugaauuaguucucccugcauacacauaucacuccuaagcaugggacagacagugugagugaggcugaggaaguaugauguug

SEQ ID NO: 4184100 - RNA, 62 nt, Human
uaagguuuauaggaaauuuguuccugacccaagggucagagaauagcuuacuaugaauuuua

SEQ ID NO: 4184101 - RNA, 99 nt, Human
uaaguaaaauagacugguaacuaggauacaaauucuguaauuuaacaucucagaauugaaaagugcauuguuuguguuccugcagucuguucuuucuug

SEQ ID NO: 4184102 - RNA, 64 nt, Human
uaaguagaguucauaccaggccuggguugaucuauccacgccugggagaaugaccuccaacuug

SEQ ID NO: 4184103 - RNA, 59 nt, Human
uaaguaguuuguagccccauaguacaaguaugacuuggcauggaguugagaauuacuua

SEQ ID NO: 4184104 - RNA, 118 nt, Human
uaagucacacagcgaugcuuaccugcaaaggaggaugggaaagaagcaaguguccagcuuuuuuccagucucuuuugugcagauuggacaaggaagauagacauggcugaguuauuua

SEQ ID NO: 4184105 - RNA, 64 nt, Human
uaagucucaguuugaaugcugacacugacauucacugacagugugacuucaagcuggcuacuua

SEQ ID NO: 4184106 - RNA, 82 nt, Human
uaagucuguucauucagcuggguaggagguucaugucaaugaaagacccucuuucuagguuuaugaauggagaauagacuug

SEQ ID NO: 4184107 - RNA, 72 nt, Human
uaagucuuugcuauugugaauagugccgcaaucaacauacgugugcaugugucuuuauagcagcaugauuua

SEQ ID NO: 4184108 - RNA, 80 nt, Human
uaaguggugugacucauagcucucaguuuuugguagacagcugaagccagagaacauucagagcuguagacaaacacuua

SEQ ID NO: 4184109 - RNA, 55 nt, Human
uaagugucccuauugugauuuuagaugugucuuucccccacugugggggcauuua

SEQ ID NO: 4184110 - RNA, 61 nt, Human
uaaguguucugcugaagcagccacauuagaauagccuguuuggcagcuugggcagcaguua

SEQ ID NO: 4184111 - RNA, 128 nt, Human
uaaguuacugauuaucaaaacuacagaaaaagcugaaacauuagccuaaacuggugauuaaucccccuaagccuguuaucuauuguauuaguuuuuuaucacugcuguaacaaauuaucacaaauuua

SEQ ID NO: 4184112 - RNA, 63 nt, Human
uaaguucuuucuuaaaaggaaacucguucuaauucauauuuuucuucucgaagagggagcuua

SEQ ID NO: 4184113 - RNA, 84 nt, Human
uaaguuuaggaagugaagagauuagaaaucaagcauauguagguuugaauucuggcccucucacuuauugacuacauaaacuug

SEQ ID NO: 4184114 - RNA, 79 nt, Human
uaaguuugugcuugguguaggguagcucaggcaguuggaagaaacaacaugucuggguauucacaaggacacugauuua

SEQ ID NO: 4184115 - RNA, 96 nt, Human
uaaguuuuuuucccuugcuucauuagugucuuaguccauuuggguugcuauaacaaaauaccauugacuggguagcuuaugaacaacagaaacuua

SEQ ID NO: 4184116 - RNA, 80 nt, Human
uaauaaacauuucuuaguaucuuuugauacauagaacagacucuugcuugaguauuaggaaauaugaagaaaguuuauug

SEQ ID NO: 4184117 - RNA, 62 nt, Human
uaauaacacuguaaaaauuguuuggcguaguugcagauaagguuaggauuauaguguuauua

SEQ ID NO: 4184118 - RNA, 70 nt, Human
uaauaauacuugccuuuauguccugcaugcucugagagugucagaguguuauaaaggccaaguuuuauug

SEQ ID NO: 4184119 - RNA, 72 nt, Human
uaauaauuugagaagaaccaacugaaguuauuggguuugagaaaaacaauuugguuccuucugaaaguauug

SEQ ID NO: 4184120 - RNA, 98 nt, Human
uaauacaguaucauuuugguuuuguaaauuagcagacaaauuggaaauauaucauacaaggcuccuguaucuuuacagaagagaaggaugcuuaauua

SEQ ID NO: 4184121 - RNA, 127 nt, Human
uaauaccugggggagagucacuaaccucuguucucuggugaucaaucaccucggcuacguugugcugacaaugucuggaggucaucugguuaaugagacagcacuagaaaauuccuucccaggauua

SEQ ID NO: 4184122 - RNA, 82 nt, Human
uaauagaaagaaaugcaaauauuaaugguaugacucuguaaaagggaguuauauuuuguuauuugcuuuaacauuucuguug

SEQ ID NO: 4184123 - RNA, 56 nt, Human
uaauagaaauaugggugaagggaacguauuuuuuucauucauacucuuuucuauua

SEQ ID NO: 4184124 - RNA, 77 nt, Human
uaauagccugcugaaggagagacguguguguagcaggauguguugcuacaaagaauuucucuagcucuuuguuguua

SEQ ID NO: 4184125 - RNA, 82 nt, Human
uaauagcugguaacuuacagggccccuuuaaaaggaaucauuuuaucuuuauagaccaccuugcaaguuacagaugcuucua

SEQ ID NO: 4184126 - RNA, 76 nt, Human
uaauagggaaccaaauucucuuacuguuugacauaacaaaguuaugaguuuguuaugagaguuugguuccauauua

SEQ ID NO: 4184127 - RNA, 82 nt, Human
uaauaggggguguaguagguaccugguuaucucauacucguuaacauuccuuugagagucagggaacuacuucucccuauug

SEQ ID NO: 4184128 - RNA, 76 nt, Human
uaauaguuggaaauauuggguaauaguuggaaagggaacuuuccaaaacugauacucauauauuugcuggagguug

SEQ ID NO: 4184129 - RNA, 96 nt, Human
uaauauccuaguucacagacuccaugaaucugagccucgguuuccucauauugaaaugugggucauaguaucguguuaagagcuguuaggagauug

SEQ ID NO: 4184130 - RNA, 55 nt, Human
uaauauccuugcagcaaguguuucaguugaagccuggcagcaaacgaggagguua

SEQ ID NO: 4184131 - RNA, 63 nt, Human
uaauaucuauacuggggauugcggagucugaaucuuugugucugccccaaaguuuagauguug

SEQ ID NO: 4184132 - RNA, 110 nt, Human
uaauaugaggggauaucugaauaaagggauagaauugaauguaugaaaaggaaguaaaauacgaguuaauauucaaguuauucuuucuuccaguuuccuauucacuauug

SEQ ID NO: 4184133 - RNA, 76 nt, Human
uaauaugaggucucugcaguucuuaaauggcaaguucauaaauacaugccaggcuguaaacaccuucaaaauauug

SEQ ID NO: 4184134 - RNA, 129 nt, Human
uaauauguagagcaucucaagaguuggcaagaucuugucuuggcuuugagaagccacaaaccucccucaucugcauuuucugggggccaggacagugguaaaaacggcugcucucucuacccgguauug

SEQ ID NO: 4184135 - RNA, 57 nt, Human
uaaucacaucaggguaaaugggguauccaucaccucaagcauuuauccuuuguguua

SEQ ID NO: 4184136 - RNA, 92 nt, Human
uaaucacauuuugaagaggcaauuauacuagguuuuggaauuuuggcuaccccagggacucacaucugugugauugucauuuucugugauua

SEQ ID NO: 4184137 - RNA, 64 nt, Human
uaaucacugugagucuguuuucuuacccacaaaauggaaagauaacuccuucaucacaggauug

SEQ ID NO: 4184138 - RNA, 82 nt, Human
uaaucaggcuuguaauuauguuaauugcuggagacuuacaucaauccuccagcaaagugauaggauuucaggggaacgauua

SEQ ID NO: 4184139 - RNA, 115 nt, Human
uaaucauugaaaaaaaaaauaugcucacaauauuuaugacauuggugcaugauauucugaaauguaacaaaugguauacaugucaaugcgauguaauauuuaucuucaaugauua

SEQ ID NO: 4184140 - RNA, 67 nt, Human
uaaucccugaaacauaauagaugcccaguaaauaacugacagguguacacaguguuauuagagauua

SEQ ID NO: 4184141 - RNA, 77 nt, Human
uaaucuccccucugacacauccauucaacuagacuaaauccaauauugacauuuguaucuuaggggaaaggagguua

SEQ ID NO: 4184142 - RNA, 76 nt, Human
uaaucuuauaggccaucuaaguaauuuugguaauuuuuaauguagcaaaauuacucaaguuggcuuuauuugguua

SEQ ID NO: 4184143 - RNA, 74 nt, Human
uaaucuuggagucagaggaaggcuugcucugggugacauuccuggaaaguucugcucugauuggcuugagauug

SEQ ID NO: 4184144 - RNA, 92 nt, Human
uaaugacagcagagguaauuggcauuuuccuguuuaucuucauagcaugguaaacagguagggacucuaacuugccuuacaugcuguaauug

SEQ ID NO: 4184145 - RNA, 55 nt, Human
uaaugacuugaaggacccauggcacacccauguggagacuuccagcaggacauua

SEQ ID NO: 4184146 - RNA, 118 nt, Human
uaaugaugaaaaagggaaguuaggcaguuucuuaauagcaggggccaauugagaguaagagaaaaaaauugguagugcuauugaaagcccuguuucuucccucauucucaggucauua

SEQ ID NO: 4184147 - RNA, 58 nt, Human
uaaugaugugugcaaacugaauucacaguaaugugguuucuauuuguaccguacguug

SEQ ID NO: 4184148 - RNA, 126 nt, Human
uaaugauguucugugacuuucaguauagcacggggggaauauuuagggggaaaaaaugaccugcuuaaauagucaaaucaguggcaauuauugagauaacagucauucaaucaucuaacgucauua

SEQ ID NO: 4184149 - RNA, 70 nt, Human
uaaugcaugauaguuauguaagaggucaccaucggugggagaugagugauggguacauuggcuugcauua

SEQ ID NO: 4184150 - RNA, 130 nt, Human
uaauggaacuuagaauguuagaauauuguaauauucgaagaauguuagaauauuguaauauucgaagaauguuagaauauuguaauauucgaagaauguuagaauauuguaauauuggaaguuccauuua

SEQ ID NO: 4184151 - RNA, 68 nt, Human
uagcagauguucccuggucccuuuuccuggauuggggugaggaaaggggaccaggggacaccugucug

SEQ ID NO: 4184152 - RNA, 87 nt, Human
uagcagcacaauguaauugaggaauggauaagaaccaucugagaauuuacuggucuuuuccuauugauucuguuacuugugauucua

SEQ ID NO: 4184153 - RNA, 74 nt, Human
uagcaggcauggagaugacuguguagaacccucuaaaucacacuaaccaguccugucuuuaugacuucaagcua

SEQ ID NO: 4184154 - RNA, 105 nt, Human
uagcagggaugggcugggggugccagggcugcuacuggcugaaagucauuuuagggaaauuuauugggugagcaagcucugggccucccuccccaucuccugcua

SEQ ID NO: 4184155 - RNA, 64 nt, Human
uagcaggugcucauuuaacuccuuuauuuauguccuugggagugcuggugaaggcacacuguug

SEQ ID NO: 4184156 - RNA, 57 nt, Human
uagcaguaguagauuauaugagaccaugcaugguucauaagugcucaguuacuguua

SEQ ID NO: 4184157 - RNA, 58 nt, Human
uagcagucauuguggagccugcuguguguccuugccaggcucuaaggagggcugucua

SEQ ID NO: 4184158 - RNA, 89 nt, Human
uagcagugucuuuacuauucacuguggguccuuuggauaguuuaugcuaaccaggugacucauggugagccccuagauaguuuuugcua

SEQ ID NO: 4184159 - RNA, 75 nt, Human
uagcauaugguagaaaucauucccaaacccauaucuucugaguaugagguucagaaagguugaauguuguaucua

SEQ ID NO: 4184160 - RNA, 77 nt, Human
uagcaugagucgugugguuugcagaaaucucuggcagguuuggaccaccagaagauggcucaaaccaugcucugcug

SEQ ID NO: 4184161 - RNA, 58 nt, Human
uagcaugcucaggaaaugcugcagaguggagcaguuaauagauuucccagcagugcua

SEQ ID NO: 4184162 - RNA, 78 nt, Human
uagccaacagaguugaaaauuaagugaauuucaagugaagucaggugaagucauuccauauucaugacucgaugucua

SEQ ID NO: 4184163 - RNA, 55 nt, Human
uagccacaggccaugagauaccagggggccguuccuuggauggagccugugguug

SEQ ID NO: 4184164 - RNA, 92 nt, Human
uagccagagccuguuuaaaauacuuguggccaauguuuguuauacugugguuccccuguagcauguaaauugguuauuaaguacugugguua

SEQ ID NO: 4184165 - RNA, 69 nt, Human
uagccagcaaggcugcugaugacuaggucuuuuagguauuucuaggagccaaauuacuagcucugguua

SEQ ID NO: 4184166 - RNA, 62 nt, Human
uagccucaguagauccacaagugaaagguauacuccuucagcacaugugaauuacugaacug

SEQ ID NO: 4184167 - RNA, 71 nt, Human
uagccugaggccaggaccauuagcccagaucuuucccaccaguucugcugaucguuucccuggcccugcug

SEQ ID NO: 4184168 - RNA, 67 nt, Human
uagccuuauuuuacuuggauucugauugaaauauguucuccucagaauacaggaugaaacaaagcua

SEQ ID NO: 4184169 - RNA, 84 nt, Human
uagccuucacaaggccuccaucucccaggcauucuaaccucugaagaaagcucucuguccccuggacugccuguguggagggua

SEQ ID NO: 4184170 - RNA, 86 nt, Human
uagccuugggugaguuuuguaauauucaagaucugcaugaguaaaucacucauuugauaaugcugcaacagcucaucugaucccua

SEQ ID NO: 4184171 - RNA, 73 nt, Human
uagccuuugguggugaccauuaguccauggcaucccuugaccugcaguggcaguggcaucaccccaauaucua

SEQ ID NO: 4184172 - RNA, 91 nt, Human
uagcgauuauaaguacuugccuaggucaauauggaauucuaacaguugaacagaauguccuuuguaucccuaggcagacaaaauagagcug

SEQ ID NO: 4184173 - RNA, 71 nt, Human
uagcgcuucauguuuguaggacugaggccucagcuccugaaggaugccugccuuugccugcgacguggcug

SEQ ID NO: 4184174 - RNA, 79 nt, Human
uagcguuaauugcugaaaugaaaggauaugggucuguguaauugaaacauuugcuuuuauuugcaguaaucauuugcua

SEQ ID NO: 4184175 - RNA, 76 nt, Human
uagcuauaucaguauuuggcuugauucauguucaauauugacaacagcaugucuaguuaaauacugcucgcagcug

SEQ ID NO: 4184176 - RNA, 60 nt, Human
uagcuaucaaaccaggaguuugcuacuaauuuagguauguuaauuuauucaugauagcua

SEQ ID NO: 4184177 - RNA, 63 nt, Human
uagcuauucaguaagccaaaaccaugguuuucauaagcaagguaaaaauuuacugaaugccua

SEQ ID NO: 4184178 - RNA, 60 nt, Human
uagcucauguaauccgaacauauuccauuaacucuauggugauuucguuuucaugagcua

SEQ ID NO: 4184179 - RNA, 77 nt, Human
uagcucucugucuguuauugguguauaagaaugcuugugauuuuuguacauugauuuuguauccugagacuuugcug

SEQ ID NO: 4184180 - RNA, 72 nt, Human
uagcugauauacaguguagaauccuguacuuagaaaugaagaucugaguugaacuccacuguguauuaauug

SEQ ID NO: 4184181 - RNA, 77 nt, Human
uagcugcagcugcucuucauuuccccccagcaaaacaagaggaaauggaugguggagaugguggagacagcuuccug

SEQ ID NO: 4184182 - RNA, 83 nt, Human
uagcuggaguaggcuauguggucauauaagauaaauaaucauacuuuugauuuauaaagauacuauauagcuuucucuugcug

SEQ ID NO: 4184183 - RNA, 105 nt, Human
uagcuggcugugguggugugcaccuguagucuuagcuacccaggaggcugaugugggcuugagccugggaggcugaggcugcagugagccaugaucaugccacug

SEQ ID NO: 4184184 - RNA, 58 nt, Human
uagcugggccuauacagcuggguauaaugacuauuuuaguguaaggcaggcacaguug

SEQ ID NO: 4184185 - RNA, 70 nt, Human
uagcuguaacacagcuaauaacacucuccaagcuguaacacagcacagucuccuagcuguguuucagcua

SEQ ID NO: 4184186 - RNA, 61 nt, Human
uagcuguauaagcaauaugcaaauaugggaaaauaauguaggcaguguguaugaauagcug

SEQ ID NO: 4184187 - RNA, 69 nt, Human
uagcugucaccagaaauggccauugguagacuccuugacuugcuccugggccuuucugagugacagcug

SEQ ID NO: 4184188 - RNA, 113 nt, Human
uagcuguggggcauggccagcauucggucuggcuguuauacgcuguggugguacuuagcuugugaaccaggccugauaggugagacugggcaugcacuucuacucacaggcua

SEQ ID NO: 4184189 - RNA, 55 nt, Human
uagcuguuacccauaaaagccaaauuugagguuugguaugcaugauugacaguug

SEQ ID NO: 4184190 - RNA, 67 nt, Human
uagcuguuucagugcagcagaaggcuuccuuuaugucuauuucaacugcagcauuggaacaugucug

SEQ ID NO: 4184191 - RNA, 121 nt, Human
uagcuuccaggaauggcaggcauacagaccccaaauuuucacuggaaaugcacagcuguagauguuagcaucugagugaauaagguccaugacagguuuucuggugcccagccauuuucua

SEQ ID NO: 4184192 - RNA, 57 nt, Human
uagcuucgagucaaaagacacaguuccagucucagcugugucacuaacuagaggcua

SEQ ID NO: 4184193 - RNA, 66 nt, Human
uagcuugacuguuuuuuguuccugaaggggaaaucucccucugggccuggaagggcagugcaucua

SEQ ID NO: 4184194 - RNA, 63 nt, Human
uagcuugccaggcucugguuccagcccucgucucaggggcacauggagacuuggcaucaccua

SEQ ID NO: 4184195 - RNA, 89 nt, Human
uagcuugguuuuaugaccuggcugguugugauucccauauauuaauaaguggguucauggucaggacuuacagggccagggccagggug

SEQ ID NO: 4184196 - RNA, 55 nt, Human
uagcuugugccauuuacugcauggcugaaaguuccagugcaagaaagcacagcug

SEQ ID NO: 4184197 - RNA, 83 nt, Human
uagcuuuaaaacaucuuugauaaacuuagugaugaauguggcguuuugaaguaauuauuaguuuguuggagagugggaaguug

SEQ ID NO: 4184198 - RNA, 63 nt, Human
uaggaaaagugaugugaaaaugccuuccaaauggaaagcacuguacaaaugucacuuucccug

SEQ ID NO: 4184199 - RNA, 130 nt, Human
uaggaaaauagguuguaacauaaauugcaaaugaguuguaacauaaaaaauguaaccuuaugcaccuuuuuggagagucguuuggcaacaguuuauguaacggaaacuuacaaaaauaucuauucacuua

SEQ ID NO: 4184200 - RNA, 75 nt, Human
uaggaagccucugcucuggggcuccccaccagagagacuuucuugggauugcccugcaguucgggaugcuuucua

SEQ ID NO: 4184201 - RNA, 83 nt, Human
uaggaaggagcaaaggccaaguuagaagaggauaccugccuccugacuccuuggggggcucucuuuuuggccugcccuaccua

SEQ ID NO: 4184202 - RNA, 82 nt, Human
uaggacacuuguucauuugcaacaaccaaauaugggccuuuuagucacuauagaugguugucgcaaaugaaugauuguuuug

SEQ ID NO: 4184203 - RNA, 68 nt, Human
uaggacaguauguucuuccaggacagaacauucuuugcuauuuuguacuggaagaacaugcaaaacua

SEQ ID NO: 4184204 - RNA, 70 nt, Human
uaggaccagcagggucagggucugcagcagagcgauuuauggaccuggcucugucugcugugugguccua

SEQ ID NO: 4184205 - RNA, 80 nt, Human
uaggacccuugcgugaacuccuaugacccacugaacucccugggaguggguggguaugagggggccucacuaggguccug

SEQ ID NO: 4184206 - RNA, 57 nt, Human
uaggacugauaaggggccagagcagguaaagccagaggcugggccauaucaguccug

SEQ ID NO: 4184207 - RNA, 59 nt, Human
uaggacuugguuugaagauuuuaauuccugugcgugguaagaucucacuccaaguccua

SEQ ID NO: 4184208 - RNA, 92 nt, Human
uaggagaccgccucaaagcagucaggcugcgcuucucugauaauggaccguuccuaugagacuggcaguagcugcugcuggccuuccucuug

SEQ ID NO: 4184209 - RNA, 87 nt, Human
uaggagauaccuugcaaagccacaacauuaguuagccagacugguucagucaucugggagacguguguugucagugguaggauccug

SEQ ID NO: 4184210 - RNA, 58 nt, Human
uaggagcagaguugggauuugagcagguucaccugacuucuccuccaaguugcuccug

SEQ ID NO: 4184211 - RNA, 69 nt, Human
uaggaggaaguuggcaauagugucaaaugcugacaucuuagcagcauuucugagccaacucucuucuug

SEQ ID NO: 4184212 - RNA, 70 nt, Human
guguccauaugucaggugugaauucaaguucaaaauuacagacaugauuuccacauagacgaauggagau

SEQ ID NO: 4184213 - RNA, 85 nt, Human
guguccaucccuaggcccaaagggugacauuuagaugguagagaaagugaauggaaccaagcuauguggucugggguauucacac

SEQ ID NO: 4184214 - RNA, 62 nt, Human
guguccaucuagaauuuauuucuagcagcauguagcuaauagcaauggagcuuagaggacau

SEQ ID NO: 4184215 - RNA, 78 nt, Human
guguccccaugaaaacagccuccugugauaagaggcaacuugauuauuaagguuucuguuuuuuccuuauuggaucac

SEQ ID NO: 4184216 - RNA, 76 nt, Human
guguccccuuugaaauuggcucauugguuugauguggaucagggaugagaucagaaagccaauaucauagggccac

SEQ ID NO: 4184217 - RNA, 99 nt, Human
gugucccuucuucccggugggggcagugggacagaugcuaggagaacacuuggagcuggccuccugacacaguccacacuugcuucccuggagggucac

SEQ ID NO: 4184218 - RNA, 110 nt, Human
guguccuagcuggaguggauccaguguccacagaagcuugagucagaaauuguaagagccuuucuccugguaugugacacugacaucugcucccuccugguaugugacac

SEQ ID NO: 4184219 - RNA, 83 nt, Human
guguccucgcgcccugugcccccgcagcgggcccucagccgggguggggacccagcuugcgggcggcaggaggcugagguugc

SEQ ID NO: 4184220 - RNA, 100 nt, Human
guguccuguaaaugcuuuuagugacuuauugaaccuugggcacauccggacccaggcuccaaggccaaagggccacugucagcauuuaaagccaggguau

SEQ ID NO: 4184221 - RNA, 58 nt, Human
guguccuuagaagaagugaaagagagucaaguucacucucuuggcugugugaggacac

SEQ ID NO: 4184222 - RNA, 67 nt, Human
gugucgcccaggcuggauugcaguggugcuaucucggcucacugcaagcucugccaccuggguucac

SEQ ID NO: 4184223 - RNA, 97 nt, Human
gugucggguggugggcaguggguaguggguggaggguuugguguuuagugucuucuuuucugucagugcccaaauuccugcccaauuacuuagacac

SEQ ID NO: 4184224 - RNA, 78 nt, Human
gugucuaagugacauucuuggagcagucaaagaaguuuccgugaauuucucacaugugcuccagaauucacaaaccac

SEQ ID NO: 4184225 - RNA, 65 nt, Human
uaguuagggauuuugaacuuacugcuugcuagagaagccggacugguaaggaaauucacuaauua

SEQ ID NO: 4184226 - RNA, 77 nt, Human
uaguuaguuauuuuaguagugacuagcucccugaaaaaaauacuuccagccacuucccauugcaaaguagcagacug

SEQ ID NO: 4184227 - RNA, 77 nt, Human
uaguuaugccuggcuaucuauuuauuucuaucucuaagcuaucuuucagaugaaauguguauauuauggcagaauua

SEQ ID NO: 4184228 - RNA, 76 nt, Human
uaguuaugucugcaugcauauuuuagccucaaagagugugucuaauuagguacuuuugaugugugagacauaauua

SEQ ID NO: 4184229 - RNA, 103 nt, Human
uaguucagggaugccuuauaauuuauaugcuauuuuaaugaagaugucuaauguuuuuggagaauuagcauaacaugaauuaagucagucaacccuggaacua

SEQ ID NO: 4184230 - RNA, 66 nt, Human
uaguucauaaauugauuaugugcuuuuguuugcuauguuguauuuaaagcauuuaguuugugucua

SEQ ID NO: 4184231 - RNA, 58 nt, Human
uaguucccagguaaggagaaggcagcuggcagauuuagggcaggccucuugggaauua

SEQ ID NO: 4184232 - RNA, 77 nt, Human
uaguucccauaauuauaaacgcaaguucagaggccccccuuaaaaugaucuuuacugcuguuuauaauaggggagua

SEQ ID NO: 4184233 - RNA, 124 nt, Human
uaguuccuuaggaaagauuuccacaugucaaauuacucagucugaggauaggaacagauuuaaggcguuaugggaaaccuaagaaaguuuguuuuuauccauaagacagucauuccuacaacua

SEQ ID NO: 4184234 - RNA, 63 nt, Human
uaguucuagggcaucaucccagacauuauuuugagaaucucuguggugaggcccuagaaucug

SEQ ID NO: 4184235 - RNA, 82 nt, Human
uaguucuauaguuguucagauaaggaacuguuggugaugacuagaaugacaacagaaggcuuuguggaguagacgagaacug

SEQ ID NO: 4184236 - RNA, 69 nt, Human
uaguucuauuauaucaguaaguggaagcuuguaaugaaggcagagcccagaaaguaugucauagagcua

SEQ ID NO: 4184237 - RNA, 109 nt, Human
uaguucugagguucugagugguggcaugacauggccugacuuagguuuugaagaugucacuuccugcugucugcuguguuaagcacuuaacugcauuuuauuagaauua

SEQ ID NO: 4184238 - RNA, 73 nt, Human
uaguucuucuaggcuuauaacuuccuggaaaacccaugugagaaauuccaaagugcuauguuuauaagagcug

SEQ ID NO: 4184239 - RNA, 64 nt, Human
uaguucuuguccucucuagcagggcuugccuugaaagaaggagcugacuagagagaaagagcua

SEQ ID NO: 4184240 - RNA, 60 nt, Human
uaguugacuuguuccuaugaaauggugcuuuggugucaugucauugguacaaauugauug

SEQ ID NO: 4184241 - RNA, 56 nt, Human
uaguugaugugaugaugcuuuucauucacuaaagaaagugcuaagucacccagcua

SEQ ID NO: 4184242 - RNA, 80 nt, Human
uaguuggccaccuugagguuccugacggugaggaagaggugcagcccuuccaggagcauccaggugaagcaagccaggua

SEQ ID NO: 4184243 - RNA, 60 nt, Human
uaguuuaauuguacauaaucaagacuugauaaauaugucuugaauuguaugauuaaacug

SEQ ID NO: 4184244 - RNA, 71 nt, Human
uaguuuaguguggaauuugucugcccucacugaaaacuccaguuaggcaaugaauuauuccaaguaaauua

SEQ ID NO: 4184245 - RNA, 60 nt, Human
uaguuuauauucaacggaguaucuaauugaaagauuaugaacgcguggaaauguagacua

SEQ ID NO: 4184246 - RNA, 99 nt, Human
uaguuucauuucagaaccauaaaugaggacaugauacuuguguucuuggcagagcuggguacugaugucuucaguugcuguucucuggaagugagacua

SEQ ID NO: 4184247 - RNA, 129 nt, Human
uaguuucuguuuccagauagaaaugggggauaauacuggaaauaguaaugcauaaguggacagggucugaccauuaaaauguuuaccauuuccagaaugaugccugcagauguuacaaaauugaaacug

SEQ ID NO: 4184248 - RNA, 57 nt, Human
uaguuuguaggauccagucuaaacugccaguauuauuaggcugggcuacaacaacug

SEQ ID NO: 4184249 - RNA, 95 nt, Human
uaguuuuaagagguauguucaaagcuuauaucagaacaaugcuuuucuauaaugagugagagaguucaaaauauaugcuuuaccucagaaaauug

SEQ ID NO: 4184250 - RNA, 89 nt, Human
uauaaaaugaaaauggaugucuacauguguucuuaagagagauaauuucuguucagacacuuuacauguauauauucagacauuuuaua

SEQ ID NO: 4184251 - RNA, 55 nt, Human
uauaaaauucucaguuugggguagaugacgcuaugguuaaaacuggaauuuugua

SEQ ID NO: 4184252 - RNA, 70 nt, Human
uauaaaccuaacugccucaucaccagugcacagcacagugccuggggaaaagcaggcauuuaaauuuaua

SEQ ID NO: 4184253 - RNA, 55 nt, Human
uauaaagacauccauagcaggcuuuauccagccagcuucuuugggauucuuuaua

SEQ ID NO: 4184254 - RNA, 106 nt, Human
uauaaaucacaggucauuuucuuaagaagcaagucucagcaaaauauuuucucauaaagaaagagaauuugaagagacaauuuggaaagcaaccuguugaccuaua

SEQ ID NO: 4184255 - RNA, 63 nt, Human
uauaagacacgccccacucacucuaaugcaugauucuaaggagcuaguagaggcugucuuaua

SEQ ID NO: 4184256 - RNA, 64 nt, Human
uauaagaccgcagaacaaauggagcuguggacaguagcucacauuuuauaucucugguuucaug

SEQ ID NO: 4184257 - RNA, 72 nt, Human
uauaagcacauccuugacugaugcaggaaucuagcuuacuccuuuuccuaaugucaggcgaugcugcucaua

SEQ ID NO: 4184258 - RNA, 130 nt, Human
uauaauaaagacaaguauuaauaacucugccuaacagucuuacagaaguagccacagagugacuaauguaugagcugguucuugaggcaugaauaggauuuagguagguggagaagaguagaagaggaua

SEQ ID NO: 4184259 - RNA, 77 nt, Human
uauaauauauugcuggaggggccucugauagcuucuagaucaggauuuauacagugccucuuccauuagauguuaug

SEQ ID NO: 4184260 - RNA, 110 nt, Human
uauaauuaaagcauauguauaugaagaguuuagugaagacaggucagauucaaagacuucagaucugaccugucuucauuaaacucuucauauacauaugcuugguuaua

SEQ ID NO: 4184261 - RNA, 81 nt, Human
uauaauuauaucuccuacauuacguaugcaacgcagacauuuucugaaacauaaauacagugugugggaaaugugacugua

SEQ ID NO: 4184262 - RNA, 123 nt, Human
uauaauuaucauauauuugaaauuguuuucagaaaauauuaucagaaaaauucuuccacagaguaauuuugguguggaaugaucugauguauuuuaugauaacuuuuagacaaugaaauuaua

SEQ ID NO: 4184263 - RNA, 73 nt, Human
uaccuguguuaucuucuugacugauggaaauaguaaggaauucaaucuaucagaguagaaggcaacguuggua

SEQ ID NO: 4184264 - RNA, 62 nt, Human
uaccuucuaggugaugguuacaugggcauacacaucaucgugcuguacacuuaagauaggua

SEQ ID NO: 4184265 - RNA, 70 nt, Human
uaccuugaaaagaaggugcucacagauacuuggagauacaggucugaguucaggcuuucacucaagagua

SEQ ID NO: 4184266 - RNA, 79 nt, Human
uaccuuucuagucuauucauucaauuuagcucuugacuggcagagagagugugaagaaagugcaauggccuaggaggua

SEQ ID NO: 4184267 - RNA, 106 nt, Human
uaccuuucucccuuuccuugcuauuuacagaaucugacauuauauuuaauaccacgcugccgguugucugcaugauucuaggcaggaaaauuggguuagaacggua

SEQ ID NO: 4184268 - RNA, 82 nt, Human
uaccuuugccucugcuagaaggucaaucucuuuuccgcuuaagaggagaucugggcuguuucuggcaggggaaagaagagua

SEQ ID NO: 4184269 - RNA, 66 nt, Human
uacggccaaagcucuggggauagcuuuuucccgcucuuugagaggaggccgauuucagaggucgua

SEQ ID NO: 4184270 - RNA, 77 nt, Human
uacggcuaugucaguauucagcaaacgugaacagaauaauuuguuuccacuagcugcaauacuugaaccaaguugua

SEQ ID NO: 4184271 - RNA, 57 nt, Human
uacgggaagggcggggagaggcuggccagggagggagguuucccagcccuugcugug

SEQ ID NO: 4184272 - RNA, 97 nt, Human
uacguaauguaacuauuaggcugggcugaacuucaucugaugauaaaugauaggucacagaaaguucaugcccaauaacagaaguagcauaucagua

SEQ ID NO: 4184273 - RNA, 76 nt, Human
uacguauauucuuugagucaguaauuccauuucuagauauguauucuagaaaaucuggcaagggaauaauauugua

SEQ ID NO: 4184274 - RNA, 84 nt, Human
uacgucauguaguaggagggugcuuacugauuuugguaucaagauacaguguuacauuuuuaucugcuccauguuaaccaugug

SEQ ID NO: 4184275 - RNA, 68 nt, Human
uacuaaaugagcuguuaggauaguuugugauggaaacugaucauacauaaauaagaguuuaguuagua

SEQ ID NO: 4184276 - RNA, 57 nt, Human
uacuacauacagaauuuagagaagaucaaacaagcuuuucugaguucgguaugagug

SEQ ID NO: 4184277 - RNA, 123 nt, Human
uacuacaucuguaugauaaagugugauagcagaaaaacuaaaauaaggaugugacauucuauguauggaccuuuucugucuuucuuugacacauuuauauuuauagaaauagcuuauguagua

SEQ ID NO: 4184278 - RNA, 119 nt, Human
uacuacauggacaugauguugagaaauccaguguuugaugggauuuucagauguguugaguuugaaauuaauuagguuccuacagauauuguaauuuucauuuucaguauaaggcagua

SEQ ID NO: 4184279 - RNA, 71 nt, Human
uacuacuaaauugaaaaucuacagaacaaaucauuuaugaaaugugugggcaugcuuuuaauuugguggug

SEQ ID NO: 4184280 - RNA, 57 nt, Human
uacuacuuugggauuucaugagagcuaaguaauacacuuaagucucuuagaguagua

SEQ ID NO: 4184281 - RNA, 60 nt, Human
uacuagacugaacccucugcugcacugccacccuuggcacaaacgagggcucagugagua

SEQ ID NO: 4184282 - RNA, 55 nt, Human
uacuauacccucuaacaccuuucaaaagaaagucccagccuuggaggauguagua

SEQ ID NO: 4184283 - RNA, 121 nt, Human
uacucaaugcugugcuucugaauauucagaaaauaaauuggauuauugguuuaguaucaaaaaaguucuucugcucugauaaucugauuugcuuucaauguguauguacuaaauuguggua

SEQ ID NO: 4184284 - RNA, 82 nt, Human
uacucaugccuggagacuuagcugagauuaagugaacuucuccaaguggaaauucucuucucaguggucucucagccuugua

SEQ ID NO: 4184285 - RNA, 78 nt, Human
uacuccucauuuuguaucacuugcaauuuugacaaaacuuccuucuuugucuaaggcauugaacaaaagaggggagua

SEQ ID NO: 4184286 - RNA, 60 nt, Human
uacuccuuaaagugcaccuccucauguucauacaugcuguuaaggagguuuuaaguggug

SEQ ID NO: 4184287 - RNA, 71 nt, Human
uacucucucuguuaccauauggaguaguuucuugacaaggaaaaaggaacacugagggaaaagagauagua

SEQ ID NO: 4184288 - RNA, 57 nt, Human
uacucuguuuagccaucaccauuguaaagaaucucuagugggagaggcaacagagua

SEQ ID NO: 4184289 - RNA, 62 nt, Human
uacucuguuuugugcagugucauauccuaagcaucuagggcagugucugcauauagcaggug

SEQ ID NO: 4184290 - RNA, 66 nt, Human
uacucuuuucaugucauguccuugaggcaaaccuccccagcaucuugucucucacugaagagagua

SEQ ID NO: 4184291 - RNA, 94 nt, Human
uacugaagccacugaauaauggucugugaucuuaucaauuuucauaaauuaagcagguugaaacuggccaauguuuagcuagcaaauuuuagua

SEQ ID NO: 4184292 - RNA, 97 nt, Human
uacugacaagguacuuaaaaguggauacuaauuauugugcaugucuauacauuuuugcaauaaguuguguuaucacucaaaagugaccuuguuagug

SEQ ID NO: 4184293 - RNA, 85 nt, Human
uacugagcccauacucugugcagagaacugugaguucucuggaugugagcagcuuacaguucaaugacaaagacagggcugugug

SEQ ID NO: 4184294 - RNA, 69 nt, Human
uacugaggcugaauucuuagcagagcagauuacauggaacugugcuaaguugagaauaaagcuucagug

SEQ ID NO: 4184295 - RNA, 59 nt, Human
uacugaugauuuuucagcagaggaucucagucagguuuguuuuggaaagaucauuggua

SEQ ID NO: 4184296 - RNA, 56 nt, Human
uacugcccuguaacugccagguacugggcuagugcuuuacauauacagcgggagua

SEQ ID NO: 4184297 - RNA, 79 nt, Human
gguaaaugacacuaggcuuuuugcacucucaaaaguaauuuuuuuuccuuggugcagggaccugucaguaucauuaacc

SEQ ID NO: 4184298 - RNA, 80 nt, Human
gguaaaugauccaaagccacaggggcagaucugccaucuaucucucaagauguggcuccugucuuugggucccaggugcc

SEQ ID NO: 4184299 - RNA, 61 nt, Human
gguaaauuuuaugugaugaaacuagguaccuccuagaaguguucccauauaacuguuuacc

SEQ ID NO: 4184300 - RNA, 89 nt, Human
gguaacaaugaaguacuacuuuaccuccaucagacugaaauagccauuucggcugcuugauauggggaaaguuuacuucaaguauugcu

SEQ ID NO: 4184301 - RNA, 63 nt, Human
gguaacaggaccccgcguggugucucugcuagagggagagacugauuggguguccgaguggcc

SEQ ID NO: 4184302 - RNA, 66 nt, Human
gguaacaggugaaaaagcaaccauauucgaaugaauguggacucuuguauuuuucacuagauuauc

SEQ ID NO: 4184303 - RNA, 76 nt, Human
gguaacauaauguuugaccaaaaaacugcaugaagacuggcuuuuagcuaugcauucuuggugacauuauuuuccc

SEQ ID NO: 4184304 - RNA, 67 nt, Human
gguaaccaauccucauguucaacaaccgccuccuuguuaagaaagguaaugugaggaauuguagacc

SEQ ID NO: 4184305 - RNA, 118 nt, Human
gguaaccagagggcagcaaaggggauugauauacuuugagaugaugcugaucgggguugggaagauacaacaaacgcaguuuuucuaaguaucccuuuugggccccuugcuggucucc

SEQ ID NO: 4184306 - RNA, 64 nt, Human
gguaaccauauuuuccauuaaguucccacuauuagaugggaacuuacagaugggagaauggacc

SEQ ID NO: 4184307 - RNA, 94 nt, Human
gguaacucaaguaauuuuucaaagucagugcaagcaguacacucaaagcccuggcucuguugucucugaauugcaacagaaaaauaauuguacc

SEQ ID NO: 4184308 - RNA, 73 nt, Human
gguaacucuguaaagcauaacguuuguuauaaaacagaaggaaaacaacaaguggguacuuuacagggaugcu

SEQ ID NO: 4184309 - RNA, 55 nt, Human
gguaacugaggccauauucugaaaucaaaaauaccaggaggccuggguauuugcc

SEQ ID NO: 4184310 - RNA, 90 nt, Human
gguaacuuaaaaauguacucaaacucacuaagacagauggucugaaauaaucugaauuaucuguggguagagugaguacuugauuaaacc

SEQ ID NO: 4184311 - RNA, 68 nt, Human
gguaacuuagcucauggcugugaaaaaccagaccgcugaccagucuuagccugugggucauaguugcc

SEQ ID NO: 4184312 - RNA, 79 nt, Human
gguaagcuuaaagucuuuacaaccuaaguugaagcugggguucacauuugaggaacuuagguugaaggaagcaagggcc

SEQ ID NO: 4184313 - RNA, 68 nt, Human
gguaaggccuuggcagaggccaggcugcuacaaaugaaauccaccuggcuucagagucuggccaugcc

SEQ ID NO: 4184314 - RNA, 81 nt, Human
gguaagucaugacuguuauuuuguugaagugauuuuuuagaauuuuuaaagguuuauucaacaaaauagaguuaucuuacu

SEQ ID NO: 4184315 - RNA, 76 nt, Human
gguaagugcuaaagacuaagagaacaggaucuggaaucagacugccuggguauaaauccugccucuuguauuuauc

SEQ ID NO: 4184316 - RNA, 93 nt, Human
gucauagcagcugcugauggccugacagacaguuuccgcagcgcuacaugaggcccuuuggugucucugucaggagauuggcagcugaaugac

SEQ ID NO: 4184317 - RNA, 65 nt, Human
gucauauaacccacugcuuugguucuuuagagaaaacgcugaggcccagagaguagguuagugau

SEQ ID NO: 4184318 - RNA, 84 nt, Human
gucauauucucugaccacuguagccacuuaagauagucucaaauaugaauaauuuucaguggccauaguggagaagaugcugac

SEQ ID NO: 4184319 - RNA, 129 nt, Human
gucaucaucaucauuuugccacaugcuaaaauaaaucauagcaauggugguauuuggagaacuaguuaaaugcuaauuucauaaaugguauccuugcugugcugauauuucugcaguugacauugauac

SEQ ID NO: 4184320 - RNA, 63 nt, Human
gucaucucaaauguuuccacuucugcuuccugagacagccaggagagcaaagcaagagaucac

SEQ ID NO: 4184321 - RNA, 76 nt, Human
gucaucucauugugaucugucuuuccuuauagucucuguucagagaaggaguguacaggucaugcagauagaugac

SEQ ID NO: 4184322 - RNA, 116 nt, Human
gucaucuggaguuuaggugaacagugcaauuucugggccucacacaagacuugaugauuuggggucuaugggguugagucccagagaucugcauugcaaugggauuuuuggaugau

SEQ ID NO: 4184323 - RNA, 78 nt, Human
gucaucuggcagucccugauugagugcaaaaauacagauugcugcugcugcucaaaucagucaggagaugccagagau

SEQ ID NO: 4184324 - RNA, 94 nt, Human
gucaucuucagugugaaggacuagcauggagggcaggagguugaaggacucguccagcaaagcucucuagccagugcuuugggccugggaugac

SEQ ID NO: 4184325 - RNA, 81 nt, Human
gucaucuugcauuucgcagauccugugguuuuccugugcaugaugcaugccccucagggaacggguaucuugcaaagagac

SEQ ID NO: 4184326 - RNA, 61 nt, Human
gucaugagcaccgaacccaugugguccagccucagggccugauggccaaccugcuuaugac

SEQ ID NO: 4184327 - RNA, 61 nt, Human
gucaugauugggggugggcaggagccagggaugcugcugaacaucccgcagugcacgagac

SEQ ID NO: 4184328 - RNA, 74 nt, Human
gucaugcagcagcuguucuugggacagacaggcugggacacucacgucaaggucugccaggauagcaugcaggc

SEQ ID NO: 4184329 - RNA, 71 nt, Human
gucaugcaugcaaaugugcuaaucugaauccuugaaaauggcuucagauuuaugccauuguaaucguugac

SEQ ID NO: 4184330 - RNA, 78 nt, Human
gucaugcugcacauggccuuuaucucagugucuguggaacuucccgauuggaagaguuaaggccacugucaguaugau

SEQ ID NO: 4184331 - RNA, 75 nt, Human
gucaugcuuacacucagguaaaacuagggagacacguugugccccuagcagaaaaucugaaaugucaaagcagau

SEQ ID NO: 4184332 - RNA, 74 nt, Human
gucauggaaauacacaagagguuuccauucuuggucagucugaguuugggguuugaucugguguguuuuuagau

SEQ ID NO: 4184333 - RNA, 58 nt, Human
gucauggguggccccgugugcagucuggaguaagacugcaagguuggugacuaauggc

SEQ ID NO: 4184334 - RNA, 119 nt, Human
gucaugguaaguucaauguguguauauauauguauguauguguguauaaguauguauauauguauguaugugugugcuuaaacacauacauacauacacugacauuguacauacuauac

SEQ ID NO: 4184335 - RNA, 82 nt, Human
gucauguaccacugugccuauuuuaucuuggacugauaaggguguuccuuucugugauagguggcauagugagauggaugac

SEQ ID NO: 4184336 - RNA, 85 nt, Human
gucauguugguugcuugcaggccuuucuagcucuaugucuucguggaggaagauagccugcagguguaaugccuuggaaaaugac

SEQ ID NO: 4184337 - RNA, 80 nt, Human
gucauuaacaagaccagaggauauaaccagacuuuagucauugcuccugugugguugaguuccuugagggcuuugaagac

SEQ ID NO: 4184338 - RNA, 129 nt, Human
gucauuaauaaccacccucagagugcauuuuccugggcuuucuguguaaucuuuauguucuuccuuuugaauaguccagaauuugcaugaaugaggcccagaagaguacucugucugaguuuuaaugau

SEQ ID NO: 4184339 - RNA, 66 nt, Human
gucauuaguaaaucuggccucagcaaacauuuacugagugucugccagcugccaggugcugaggac

SEQ ID NO: 4184340 - RNA, 79 nt, Human
gucauuccaaccaaauaucugcucaagcaaucaguugugauagcuguaaaugucaaccagguauuuuggucugaauaac

SEQ ID NO: 4184341 - RNA, 59 nt, Human
gucauuccuugagccguggccagggccagcauguggcacuggccuggggccaagaggac

SEQ ID NO: 4184342 - RNA, 60 nt, Human
gucauucuaucuuggacuggaucuaggacgguguccagaaaucaauacaagauaaaugau

SEQ ID NO: 4184343 - RNA, 66 nt, Human
gucauucucagaucuuagaggaauauuaaagugugaauguuuuauuucuaagauugggaaacugau

SEQ ID NO: 4184344 - RNA, 79 nt, Human
gucauucuccugccaucugcuguugaucuaauggugaguacaugacccaagauggaucagucagacugaaggggacgac

SEQ ID NO: 4184345 - RNA, 95 nt, Human
gucauucugcgcgguguagucguacaucccaaucaccuggcacacugcaggagacagggcugggugagcggcugcacacccgccggagaaugcac

SEQ ID NO: 4184346 - RNA, 91 nt, Human
gucauugagggcuacuuccagagaguuauuccccuggcacuuccagccaagcagagcagccucucugguuguggcaaaagccauuagagac

SEQ ID NO: 4184347 - RNA, 60 nt, Human
gucauuguaauauucucauuuaguuuggguccugagacuuauaaagagaauaccgguggc

SEQ ID NO: 4184348 - RNA, 67 nt, Human
gucauuucucaguguacauuauguuaguuccuuggaauggagauagguguuauauagggaaauagau

SEQ ID NO: 4184349 - RNA, 65 nt, Human
gucauuugcucuuacugccacuaguggauaacuguuaucaggcugagggcuguaacagcagaggc

SEQ ID NO: 4184350 - RNA, 91 nt, Human
gucauuuuccaccaccccguuucccacuguggcagagccucgcauagaagauucgagggccugggugggagaagaggcacuggggaaaggc

SEQ ID NO: 4184351 - RNA, 69 nt, Human
gucauuuucugccagugaaauugugucaguuuugugacugaaucaguuuccuggcacucugcaaauggc

SEQ ID NO: 4184352 - RNA, 78 nt, Human
gucauuuuucaugugugucuguuuuuaaaguuuaaacaauuaacaguacucaagugacagagacucaugaaagaugac

SEQ ID NO: 4184353 - RNA, 95 nt, Human
guccaaaaguauacuugaauuggggguuuugcaaggcauagugaaauucauccauccaucugucuugaaaauuccuaauguuggucuaugaaggc

SEQ ID NO: 4184354 - RNA, 86 nt, Human
guccaaauccauuagguuuuuuguuguguuugaaagcuguaauccagagagaguuugaaagcauaugcuaaagaccauuuuuaggc

SEQ ID NO: 4184355 - RNA, 85 nt, Human
guccaaggucacaccaugaaggagugaaagggcuagaacuugaaaucagggaugucuggcuccacuuucuucauuuacuggggac

SEQ ID NO: 4184356 - RNA, 92 nt, Human
guccaauugcagccggggcuccuccagccugggaugagucuuggaaaaucugucaucauccuggagaagcuccuucgggccugcaaaaaggc

SEQ ID NO: 4184357 - RNA, 61 nt, Human
guccacagagguacucuuuugggcuuuuuaugucuuaaagccaaaucuuaacuucuguuac

SEQ ID NO: 4184358 - RNA, 66 nt, Human
guccacagcuggccagggccucucgggcaugugccugccacuuagugccuuccaguucaguggcac

SEQ ID NO: 4184359 - RNA, 64 nt, Human
guccacagggauggccacacauuuaacauucccaaccagaaauguccuagucaauccucuggac

SEQ ID NO: 4184360 - RNA, 60 nt, Human
guccacauagugaggcugauacaggccgucuggugacaggaggcugucuggcguguggau

SEQ ID NO: 4184361 - RNA, 66 nt, Human
guccaccauagggagggcguggcgugugccugguuggcaggcccguaggucccuugugguuggagu

SEQ ID NO: 4184362 - RNA, 77 nt, Human
guccaccuggcuucaguuccuguguuguuuuccuagcacuaugguggacagcacacaagcuggcugcuaagagggac

SEQ ID NO: 4184363 - RNA, 79 nt, Human
guccagaaccucaagagcuggcagagagcagaagccucguggcaaaguguucagccuguucaugcuguugcagggggac

SEQ ID NO: 4184364 - RNA, 66 nt, Human
guccagagccagcuguccuuggcauccgucaggcagaggggugaggugauugcugguguuugugac

SEQ ID NO: 4184365 - RNA, 58 nt, Human
guccagagcugguguuacaaguccacagugugaagaaccauggagccagcucuaggau

SEQ ID NO: 4184366 - RNA, 66 nt, Human
guccagaggccucuggagugcucugcaggugggcagccuggggcucuccacagugucucaagggac

SEQ ID NO: 4184367 - RNA, 65 nt, Human
guccagauugaaauacauguuugauuuggaaaguaauuaaaucuuacaccgaauuuaaacuggau

SEQ ID NO: 4184368 - RNA, 57 nt, Human
guccagccaggccugucucugggaagggguuugagagcuuugggccacuggcuggau

SEQ ID NO: 4184369 - RNA, 55 nt, Human
guccagccugagucagucaguggcugccugagcccugagcugguccaggcucaac

SEQ ID NO: 4184370 - RNA, 70 nt, Human
guccagcguccccgccgucgcucaggcugcugcugcgucguuugcggcugacuuuggcggggcgcggggc

SEQ ID NO: 4184371 - RNA, 87 nt, Human
guccagcguuacaaaugccaaagcugagagagaggacaacugaaaauucacaggaauuucugaguuuugcuauuaccuguacuggac

SEQ ID NO: 4184372 - RNA, 95 nt, Human
guccaggggcagagcugagccaggguugcagggagccagcagaaggugguucccagcugcccucuccagcccugagcugagcccacucucuggac

SEQ ID NO: 4184373 - RNA, 55 nt, Human
guccagugcagucaaggaagaaccagcccugcuggggcuccaguacugccuggau

SEQ ID NO: 4184374 - RNA, 99 nt, Human
guccauauuugucuuaucuguacuuuuaaugagcauugcugucuucauuuuccaaaggcaugcgccaauuuauuagagucauagagcaaguuuaguggc

SEQ ID NO: 4184375 - RNA, 83 nt, Human
guccaucaaggguaaaucuauaugacaagagaacaauucagcugguucugaaagucugcauggagauauacuauuugaaggac

SEQ ID NO: 4184376 - RNA, 71 nt, Human
guccaucacugcuuguuuucuaaaacaucauuuauagaccguaagagauucagcagaagacggguaaggac

SEQ ID NO: 4184377 - RNA, 79 nt, Human
guccaucuggagacuuccuggucuguauguugugucauuuugauuucuuguugaagggccauggagacuuagaaugggc

SEQ ID NO: 4184378 - RNA, 56 nt, Human
guccaugauucuguguaguagauguuaucauacauuuauacauuuauuucauggau

SEQ ID NO: 4184379 - RNA, 69 nt, Human
guccaugccauuaacauuagcuagcagacaucaagcugccuaguggauaaaauguuguuugacaagggc

SEQ ID NO: 4184380 - RNA, 60 nt, Human
guccaugcccucaagcagcaucaaagcaacugaaacagagcugcaaaggcacacuugggc

SEQ ID NO: 4184381 - RNA, 66 nt, Human
guccaugguugcuuucauguaaaagcagcagagucaaguuguugcaacagagaucagcugaugggc

SEQ ID NO: 4184382 - RNA, 83 nt, Human
guccauuaaaguaggcugaguaucuagagugcaaaauaaagucacaauuuguaagauauucagcuuauugaaauaauauguac

SEQ ID NO: 4184383 - RNA, 110 nt, Human
guccauuccuaguuguagaaguaaaaugccauuguaucauugagaguagaaaaaauuaauucugucuggcuuuagagacacacuggcauuugagcucagccuuggaggac

SEQ ID NO: 4184384 - RNA, 91 nt, Human
guagaagagagaaugcaagcaucuugagagucagggacuacaucuuagauacauuuguuuccuucaugaugcuuagcagagcuucuuguac

SEQ ID NO: 4184385 - RNA, 90 nt, Human
guagaaggauccagcuuugccugaucauauacccuggagucaauauuuuauuuucuuuguuuaagacagugcaagcugaauuuuuacuac

SEQ ID NO: 4184386 - RNA, 65 nt, Human
guagaaguuugggggcgaaggcagagagcauuuccuucucggcuuuuggcgccuccacgcugcac

SEQ ID NO: 4184387 - RNA, 61 nt, Human
guagaaucccaguggcuauauuggcaaaaugcagcaugcguggccuucauugggguguuac

SEQ ID NO: 4184388 - RNA, 79 nt, Human
guagaaugauaugugugccauuucagcaguuuagagguaugaaacuuugugccuuaccugagacacacaaguuagcuau

SEQ ID NO: 4184389 - RNA, 58 nt, Human
guagaccauuuaucuggggaguuuuaucuaugggaacaauccagaugauauggauuac

SEQ ID NO: 4184390 - RNA, 56 nt, Human
guagagaaaguguuagagcagaggccugcuggcuuguuucuuuguauugucucuau

SEQ ID NO: 4184391 - RNA, 84 nt, Human
guagagaaccucaucaugagauuugagaauagcuuuagaguuacucuugggauagugucucauggcccugugagggaacucuac

SEQ ID NO: 4184392 - RNA, 71 nt, Human
guagagacgggguuuuacuauguugcccaggcaggucuugaucugggcucaagugaugcuccugucucagc

SEQ ID NO: 4184393 - RNA, 67 nt, Human
guagagagagagcaagcaugcauauguacuugcacaauacccaaugacaugauucuuucuuucauau

SEQ ID NO: 4184394 - RNA, 74 nt, Human
guagagauggggacuugccuuguugcucaggcuguucuugaacuccugagcucaagcaauucacccgccucagc

SEQ ID NO: 4184395 - RNA, 74 nt, Human
guagagauggggucuugcuauguugcccagcuuugucucaaacuucuggcuacaagcaauacucccaucuuggc

SEQ ID NO: 4184396 - RNA, 55 nt, Human
guagaggacauuugacaugauguuggacaccagcauccuaagugccuuucucuac

SEQ ID NO: 4184397 - RNA, 126 nt, Human
guagagggagagguuaaaacguguguuuacauuuacacuugccaugcugcacacugaggaacauuuguuuccaguucccaugacagguguuaccuguucagauaaagcuuuagccuuuucuucugc

SEQ ID NO: 4184398 - RNA, 62 nt, Human
guagagguugauaguaauguuuagcccuaguggguauagaacaaauucucaucaacuugugc

SEQ ID NO: 4184399 - RNA, 90 nt, Human
guagagguugcuaggacuauaguguacauguagacacccuuggggaugccaguccuauauguccaccuguaugcuaaacuucucuucugc

SEQ ID NO: 4184400 - RNA, 70 nt, Human
guagagguuggguggaccacgagcccaagcagacaagcucagucugcagcuuccaucuccacugcccuac

SEQ ID NO: 4184401 - RNA, 72 nt, Human
guagagucacgugggugaguguccucccaugguuuccucccuggaagcggugcuggcccauggggacuguac

SEQ ID NO: 4184402 - RNA, 57 nt, Human
guagauaacucauuuuguauauccauucaucaguaaauggacauuugaguuguuuau

SEQ ID NO: 4184403 - RNA, 73 nt, Human
guagaugauuucuguagauuugaucuaauagaucuaaauucuauuagauuuguuucuguagaugugauauuac

SEQ ID NO: 4184404 - RNA, 66 nt, Human
guagaugcuagcaccaagaacccagcauugagcugcuccuaugcuuuaguugagucuggggucuac

SEQ ID NO: 4184405 - RNA, 80 nt, Human
guagaugggccuguuccuaugcugguugaguucuuacggugagcuucuauuggcuguaguagagaagagacggccacuac

SEQ ID NO: 4184406 - RNA, 111 nt, Human
guagaugguguaggagacugagcugaaaauguauugcacccaguaguuuaaauucugagcucuugagagaagagacugggugcauuuuguucaaucuucuauccuggaugc

SEQ ID NO: 4184407 - RNA, 81 nt, Human
guagauuuaagaaguucugaaauaaaauccugucuugaauuucuagaguagugauuuccauuucaggguuuuggaauuuau

SEQ ID NO: 4184408 - RNA, 76 nt, Human
guagcaacugagguagggcacaccuagguggggcaucccauauaaccuuuucuagguuggccuugcccagugugac

SEQ ID NO: 4184409 - RNA, 58 nt, Human
guagcagugguuccuacguguugguaucuaagccagguucuggggcuccacugugaac

SEQ ID NO: 4184410 - RNA, 55 nt, Human
guagcauacacugccaagucuggucaauuguuugacaaggcagcugugugcaugc

SEQ ID NO: 4184411 - RNA, 55 nt, Human
guagcaucuguacugacauaauccgcacuuuagggugaugaaugucaauugcuac

SEQ ID NO: 4184412 - RNA, 86 nt, Human
guagcccagcacagcagagugugagauagccaccccugacagccaccugguauuuccucauucugcuuugcacuggauuauguuac

SEQ ID NO: 4184413 - RNA, 80 nt, Human
guagcccuaguauauauuuauagaacgguucugugcaaaucuauuucaggauuacacagaaauuuuauugccugggcuau

SEQ ID NO: 4184414 - RNA, 61 nt, Human
guagcggcauccauucugcaguucuguuuggaacuguucuuguguuugcuauguauguuau

SEQ ID NO: 4184415 - RNA, 55 nt, Human
guagcuaagagcuccaggauuuuguaauuaaugagacuuuauaguuuuuggcuau

SEQ ID NO: 4184416 - RNA, 70 nt, Human
guagcuacacccaagucaaccccuggcuuguuuuccacuaacggagccaaauacaaacugggguggcuac

SEQ ID NO: 4184417 - RNA, 64 nt, Human
guagcuacugcaguuguugcauuuaaauugauuuacaugucaagacuggcaguuuagcagcugc

SEQ ID NO: 4184418 - RNA, 74 nt, Human
guagcuauuuuggagucagaugacuguaggacacacaagauuaugugucuuuuguaugacugccaauuaguuac

SEQ ID NO: 4184419 - RNA, 100 nt, Human
guagcugauuuuuucccucugucuuaaagcucauuaauuagaagcuaacuucccccaguuguagcuuuuuaaugugcugcuuuagaagagcuuucacugc

SEQ ID NO: 4184420 - RNA, 78 nt, Human
guagcuggcacauagcagguacucaguuauugaugcaucauguccccuuuacugccuuauaugcugugugugaguagc

SEQ ID NO: 4184421 - RNA, 56 nt, Human
guagcugucucggucaggaguuaacagacugcuuaaccuuuacuaugacuagcuac

SEQ ID NO: 4184422 - RNA, 60 nt, Human
guagcugugugacuuugggcaugucauugauccucucugagccucagucacauggccuac

SEQ ID NO: 4184423 - RNA, 84 nt, Human
guagcuuaugauugugcucuaauaaagccugacauuaauuaugacaugggaaauggaaggucuauuaguuauaauuauaauuac

SEQ ID NO: 4184424 - RNA, 66 nt, Human
guagcuucuguucaucuuccaggcacagugcuaggugcugggaugcuaagaugagcaaaagaaaac

SEQ ID NO: 4184425 - RNA, 118 nt, Human
guaggaaagaggagggauccaucuggguuggucuguggauuuuuaauauuuuuuaauggaacaugaaaaccuccacagcaacaucgaaaccagggagaaagugauccuugcucccugc

SEQ ID NO: 4184426 - RNA, 59 nt, Human
guaggaaaguaaaugaaauacagcaauuuacacaaaugauguuucauaagcuguccuau

SEQ ID NO: 4184427 - RNA, 74 nt, Human
guaggaaauuugaaauaugugggucuuacuacacaggauaaggcuagagaucuauagauuugaugauugccuac

SEQ ID NO: 4184428 - RNA, 87 nt, Human
guaggaaggccuuugagcccagguggccuugccaucuccugcuaaagugguaggaguaggaguggccaucccucagaaguaaccugc

SEQ ID NO: 4184429 - RNA, 84 nt, Human
guaggaaguggguauucuugcagcuucuaacagcuucagcaacuuuguuguucaaagccagagcugcaagacaccuuaucucac

SEQ ID NO: 4184430 - RNA, 96 nt, Human
guaggaauucagacucuucaagauuuucauguuuuuuaucuuuugagugauugggaacauucuagaguguugugaaaaugugucugcauguccugc

SEQ ID NO: 4184431 - RNA, 82 nt, Human
guaggacaagggaaagaucaaccacgccggguugccaggacaauagugaauggaacagcuggguugggugccuuggcugugc

SEQ ID NO: 4184432 - RNA, 87 nt, Human
guaggaccagcuacaugauguaagagcccaucuagguguggaacccaugugaauguauaguuuguauauccaugaagcugggccugc

SEQ ID NO: 4184433 - RNA, 71 nt, Human
guaggagaaaguaaaugugauuuacugaugaagaugccacccccaagugacccauuaaccacuuucccugc

SEQ ID NO: 4184434 - RNA, 58 nt, Human
guaggagucaggaccaaauggaaauucccuuggauuuauuuuccuccugacuucaugc

SEQ ID NO: 4184435 - RNA, 77 nt, Human
guaggaguucuucaccaaggucagaggcaacaagaauaguagguuccagccuguccuugugaggucccagcuugugc

SEQ ID NO: 4184436 - RNA, 120 nt, Human
guaggauggaggccagagagggcacguggccugugguccugguggugccggugcccggagggcuucccugggcucuggggucccggugcaaggcgcaccuguccuggcugcuccuccugc

SEQ ID NO: 4184437 - RNA, 72 nt, Human
guaggauugggagagaggcauagagucuggaagacauuauauuaacuguagauguaucuucucuuaucgugc

SEQ ID NO: 4184438 - RNA, 59 nt, Human
guaggcaaggcuguggcccuggucuagcauuucccaugcaggauuuacagccucgcugc

SEQ ID NO: 4184439 - RNA, 73 nt, Human
guagggagugaauguuugaugagaaauagaguggauacagaguuccacucccuacaaaucauuuauuaacuac

SEQ ID NO: 4184440 - RNA, 103 nt, Human
guagggaugcuguuuggauauucagcauaaacuucauggauaauauaaagcuccuaaacagaaaacaaagggagccaugguguuaaggcugaaaaacacccac

SEQ ID NO: 4184441 - RNA, 73 nt, Human
guagggccagcuguggacuggcagugaccuuggugccuuugacucauauacccauuguccuuccacccccuac

SEQ ID NO: 4184442 - RNA, 72 nt, Human
guaggggaggcaguguugaaaaggagagccagccagggcuuuguucucccaucagccacuuccgucugcuac

SEQ ID NO: 4184443 - RNA, 59 nt, Human
guaggggcucugugacaguaacccuuucacugccagaggaaacugaaggggcccucuau

SEQ ID NO: 4184444 - RNA, 61 nt, Human
guaggggucagugcgauuucccacucccauaacuuggagcagugacggguacugacaaugc

SEQ ID NO: 4184445 - RNA, 58 nt, Human
guagggguguggguacuaggacuggcuaaaucagaucugaccuaaccccaccaccagc

SEQ ID NO: 4184446 - RNA, 75 nt, Human
guagguaagaccuugagucaccuggaccagccucaucauuucugaggcuucagaugaccuuagcauccaaucugc

SEQ ID NO: 4184447 - RNA, 90 nt, Human
guaggugcucuccuggguguccauccggccaccuccagccccacacaugaaugagugggcugcagagcugggugggccuccgagcccugc

SEQ ID NO: 4184448 - RNA, 57 nt, Human
guagguggagcuuuagggacugggacagucaguuuccagccucuugcucucacaugc

SEQ ID NO: 4184449 - RNA, 68 nt, Human
guagguggaguggugccugcagaucccuucuuuggcaaugugucugagagagcaccuauccacucuac

SEQ ID NO: 4184450 - RNA, 64 nt, Human
guagguguauaugaaaauuuuuguccuuugcagcugucuuagacacauauucauauguacuuac

SEQ ID NO: 4184451 - RNA, 77 nt, Human
guaguaaauaacuuccuggguuuacguauugggucucuguugggacucaguguaaagaacucagaauuauaaauugc

SEQ ID NO: 4184452 - RNA, 66 nt, Human
guaguaaauucaaggggaguuaaaguggaugauuucuauggcaacuuccaggccuugaauuauuau

SEQ ID NO: 4184453 - RNA, 79 nt, Human
guaguaacuaaguuagcaucaaugcauucacuucaaaccacuugaagaaaugaaguguuauuuaguuucacagagcugc

SEQ ID NO: 4184454 - RNA, 62 nt, Human
gguaaguguuauuugcaagugagucacaccaagauguaauuuacuugcaaauaacaauuauc

SEQ ID NO: 4184455 - RNA, 118 nt, Human
gguaaguuuuuacaagauuugaagaaaaaguuccaucaaagggguauaauugcauaaugaauaucauuggaaaaugcaugcuuuuuaggcaggaauuuacuucaaacguugacuuacc

SEQ ID NO: 4184456 - RNA, 73 nt, Human
gguaauagcucugaccaagagacugagggauauagauuucuccccacccuucuaaacucagagccuagcuacc

SEQ ID NO: 4184457 - RNA, 76 nt, Human
gguaaucagcagaauguugguagcaggaguucuaaagucuuagagguuuccuguuagccauuauuagcuauacacc

SEQ ID NO: 4184458 - RNA, 76 nt, Human
gguaaugaggauuccaagaugaaggaagccuaugcccuucccugggccucuucauaaucuugggauugagauugcc

SEQ ID NO: 4184459 - RNA, 92 nt, Human
gguaaugcauuuuccuucuuguaaugaucugccugaaacaaacauuuagccuuacucguggaaugucaaaacuagaaggaacuguagugauc

SEQ ID NO: 4184460 - RNA, 56 nt, Human
gguaaugcuuccuauauagcacucugauucaagagagcuauuuggcaagcauuucu

SEQ ID NO: 4184461 - RNA, 62 nt, Human
gguaaugguguuccaggcuucucccuuccaacagagagaaaccgauucugcaugucauuacu

SEQ ID NO: 4184462 - RNA, 97 nt, Human
gguaauucauauuguauugggauuuuggcuguaguucuaaaacuauagauaauuaaugcuaaggcucagguucuaaggacaauacaaaagaguugcc

SEQ ID NO: 4184463 - RNA, 78 nt, Human
gguaauucauguuguacuauucaucaaugauucauucuuguuuuccuguugaguaguauuccauuguauggauauacc

SEQ ID NO: 4184464 - RNA, 61 nt, Human
gguacaaaugucuccucuuuuguuagggcucuuauauacccucccaagugggcauuggucc

SEQ ID NO: 4184465 - RNA, 78 nt, Human
gguacaacuguggcacaucguuucuuugguauccauaugaucuaccaguuaaagggaaauugaaaaguguuuugugcc

SEQ ID NO: 4184466 - RNA, 60 nt, Human
gguacaauucugggguaugcucuacacagucccuaagaacguccucaacaggauugcacc

SEQ ID NO: 4184467 - RNA, 69 nt, Human
gguacagaaauggggccccaggugcugucugcauaccuucccugcaccaggaggccuugguucugagcc

SEQ ID NO: 4184468 - RNA, 77 nt, Human
gguacagagagagcugacuuuggagucagaagguccuguuucaaauucuggcuccauuacucagcaucugauugacc

SEQ ID NO: 4184469 - RNA, 57 nt, Human
gguacagcagccuucagggccacugguucccacuaugcccuguagaggcugcugacc

SEQ ID NO: 4184470 - RNA, 67 nt, Human
gguacagcauuugaaauuacuggaauaugacaagugcugcuguccccaugucuuuggaaugcugacc

SEQ ID NO: 4184471 - RNA, 85 nt, Human
gguacauuuuuaaagaaaacguuuugaggaguuugggucuaccuaauguuuuuuccauguuuuacuaaaucuuuucaaaugaacc

SEQ ID NO: 4184472 - RNA, 72 nt, Human
gguaccaagugcauuccaccgugcagguugcagucacuagagagucuccuguccauuguggauuguggcacc

SEQ ID NO: 4184473 - RNA, 76 nt, Human
gguacccaaguggcuauaggauaaaguacaaauccuuauuuaauguauuauucauggucuuccacaauugggcuuc

SEQ ID NO: 4184474 - RNA, 62 nt, Human
gguacgggaacuugggcaagccccagcuguagccuacucagccuugcccagggucuccugcc

SEQ ID NO: 4184475 - RNA, 64 nt, Human
gguacuacuuucccccacauauuugcagucguuauccugcaaaaaaugggggauggguguuauc

SEQ ID NO: 4184476 - RNA, 100 nt, Human
gguacuaugcuagguguuuucuaauuaaaucuacgcuagguguuuucuaauuaaaucuacgcuagguguuuucuaauuaaaucuaugcuagguguuuucu

SEQ ID NO: 4184477 - RNA, 65 nt, Human
gguacugacauguauuaguacauauggugcugauaauacaucaaggugcuaauaaauguacaacc

SEQ ID NO: 4184478 - RNA, 56 nt, Human
gguacugccagggcaagccaaagccucagcggcuggaggagccuggagcacgugcc

SEQ ID NO: 4184479 - RNA, 57 nt, Human
gguacugccgucaugaagggcccaguuggcuaagcacaggccuucagacugcaugcu

SEQ ID NO: 4184480 - RNA, 114 nt, Human
gguacugccucgcucuuuccaauuaauaauaugcccuguggugcuauaugacuuuccuucagguaccuaucacaggugugauuuacauuauuugguggauauauaaucaauacc

SEQ ID NO: 4184481 - RNA, 66 nt, Human
gguacuggaaguggcccuaggaagcagaaccucaggaugguauuauugaaggaucacuucuguacc

SEQ ID NO: 4184482 - RNA, 64 nt, Human
gguacugucaugcauuauggcauguuuuagcaucccuggucucauaugccaaaugccaguaacc

SEQ ID NO: 4184483 - RNA, 82 nt, Human
gguacugugucuuaggauguggaauacagcuuguuuuguuguucccuaaggcugcuucuuccccgucuuaagagauaguucc

SEQ ID NO: 4184484 - RNA, 82 nt, Human
gguacuguuagagcgauuuguccugcauuucugggcaaccugugggcagaagaggagaaggauagauccuucugauaucucc

SEQ ID NO: 4184485 - RNA, 82 nt, Human
gguagaauugaagaaguuacuuagggacauuuugaauuuuuugaauuagaguuuuuguaaguacaauugauucucauuugcc

SEQ ID NO: 4184486 - RNA, 67 nt, Human
gguagaccaaugcauacguguuuguggcaagugugcuuguuuggcaaaugugugugugguguaggcc

SEQ ID NO: 4184487 - RNA, 75 nt, Human
gguagagacaggaucgcccuguugcccagauuggucucucaaauuccugagcucaagcgauccucccaucucacc

SEQ ID NO: 4184488 - RNA, 87 nt, Human
gguagagaugcauauucugggcuucacgccagagccacugacucacagccucugggguggagcccagcacccugcauuuaacaaacc

SEQ ID NO: 4184489 - RNA, 63 nt, Human
gguagagcucccugccuacacggaccuuccauuauagaaggggaggcaggcagagcuaguacc

SEQ ID NO: 4184490 - RNA, 98 nt, Human
gguagaggcaaaauggauguaugcacaagaggcuagaaaagagccauauugcauuuugaucuucuuuuucugcauucguucauguuauuuccucugcc

SEQ ID NO: 4184491 - RNA, 84 nt, Human
gguagagugugucuauggaagggguugucaugguaacagcuucuguuggcuucuagcccuaccuuuucuggacacauucaugcu

SEQ ID NO: 4184492 - RNA, 60 nt, Human
gguagaugggaauaauuaucuucuuacaagaacauaaagaaguaaugugucucuucuacc

SEQ ID NO: 4184493 - RNA, 59 nt, Human
gguagaugggccaggcaaccuggggaggccucugggcuuggaggucuggccuaccugcc

SEQ ID NO: 4184494 - RNA, 57 nt, Human
gguagauugaugagucauggggguugacguuuccauguuauuauuagcagucuugcc

SEQ ID NO: 4184495 - RNA, 86 nt, Human
gguagauuugucacuggggccacaugcagaagagggccauugucuucuuucaauguucugcucagugagaacaucuucacgucacc

SEQ ID NO: 4184496 - RNA, 77 nt, Human
gguagcaacagccugcaggaggccgucagcugcacccaggagccaggacgacauggucauccucaggcacagcugcc

SEQ ID NO: 4184497 - RNA, 80 nt, Human
gguagcagagagggagucccaggcagccgagccgguagugcccagcccagccuaccacagcuccuggcccucugagcauc

SEQ ID NO: 4184498 - RNA, 66 nt, Human
gguagcagguagugcuaaagacuuacuagacugcauguuugugcuuucugcugcauuccucuaauc

SEQ ID NO: 4184499 - RNA, 111 nt, Human
gguagccaacuauuuauaggguagaagucuggcuuuaaggaguaaaaaugccuccauuucauguugguuuuauuaccccuuaaacaccagugcccuugaauugugugcucc

SEQ ID NO: 4184500 - RNA, 58 nt, Human
gguagccacaaguuaacuccaaguucuccaagggguucuggaggcaccuguggagauc

SEQ ID NO: 4184501 - RNA, 58 nt, Human
gguagccauaaguuaauuccaaguucuccaagggguucuggaggcaccuguggagauc

SEQ ID NO: 4184502 - RNA, 68 nt, Human
gguagcccacugaacuucagcaaucaccagugcccagcacauggccagcccugagguucagcccuauc

SEQ ID NO: 4184503 - RNA, 57 nt, Human
gguagcccucuccagcgaggucugagagcagcucucagauucuggcagauggcugcc

SEQ ID NO: 4184504 - RNA, 76 nt, Human
gguagccugcaggcugggcggggccuugggcucuggaggagcuuaaagggccgauuuccaggccaaggugggcacc

SEQ ID NO: 4184505 - RNA, 65 nt, Human
gguagcucugggacuagaaccccaggggcaaucuggacuuccuggcucuaaguccugagugcacc

SEQ ID NO: 4184506 - RNA, 83 nt, Human
gguaggacuaugguguggggaucuucuguaugccagguacacaugcauaaugcaugcacagauccuggcacuuagucaaugcc

SEQ ID NO: 4184507 - RNA, 70 nt, Human
gguaggaggaucaccugaggucaggaguucgagaccagccugaccaacguggugaaaccccaucucuacu

SEQ ID NO: 4184508 - RNA, 56 nt, Human
gguagggggcaagaguuggguggacuugagagugggaugcccagagcccucuuauu

SEQ ID NO: 4184509 - RNA, 69 nt, Human
gguaguaaaauaugugagcagcguucuguggaagacacacaauuuccuguccauaugugcugugcuacc

SEQ ID NO: 4184510 - RNA, 73 nt, Human
gguaguaguuuagugggacaguuuaaaguugggauuugaaguucaaaucugucccuuaacuagucauauuacc

SEQ ID NO: 4184511 - RNA, 91 nt, Human
gguaguauaggcuaauaauuauuuguaguucuucaugaauucagcuucugccaagugaauaccaucaagagcuuugcuagcaggugcuacc

SEQ ID NO: 4184512 - RNA, 58 nt, Human
gguagucaguguuaguuugauuuggcaauagcaccagacuaauaaaacagugacagcc

SEQ ID NO: 4184513 - RNA, 61 nt, Human
gguagucauggauagcuaugagucacaaauugaaacaaaugguguccgugaauuaguuacu

SEQ ID NO: 4184514 - RNA, 87 nt, Human
gguagugaaaauuuuauuacugcuguagcagcuacuaacucugaaaaugguuauuugcuccuagagaguaauacaguuuugacuucc

SEQ ID NO: 4184515 - RNA, 56 nt, Human
gguaguggagcaugagaggugugauccccccacucugccacugugcuuacacugcu

SEQ ID NO: 4184516 - RNA, 85 nt, Human
gguaguggcagucugaaacacugguaaagacugccgauccuggugugagucagacuagguuugauuccaggcuguaccacuuacc

SEQ ID NO: 4184517 - RNA, 62 nt, Human
gguaguggcauucgauuuuggugggaaauguaucucuuugccugccguuaaauguuacuucu

SEQ ID NO: 4184518 - RNA, 76 nt, Human
gguaguggggcauaggugauuugagaagaagaacccagagauguggguucaaauccuagcccuguggccugcuauc

SEQ ID NO: 4184519 - RNA, 74 nt, Human
gguauaaaauaaugucuuaaugucuuauuucuuccagugaggaaguugacauccagagacauucuuugucuucc

SEQ ID NO: 4184520 - RNA, 90 nt, Human
gguauaaaauguaagucuaugcagaguucaauugaaaauuuucauuguugacuugauuacucaaccauaggcuaauagaaaaguuaugcc

SEQ ID NO: 4184521 - RNA, 61 nt, Human
gguauaauccuugcagccauugcacagacccacaggcgucugccagugugugccaggagcc

SEQ ID NO: 4184522 - RNA, 81 nt, Human
gguauagaacaaaagaaugugugauugaagcucuugaagagauuuauuucaggagagaggcaaacauuuugcucugauacc

SEQ ID NO: 4184523 - RNA, 80 nt, Human
gguauagcagucagaggucuucuaaaacagaugcacaaucuuuuauuuauuacagaccuuuuuauuguuacagcuguacc

SEQ ID NO: 4184524 - RNA, 59 nt, Human
guccacugcacuggauucuugcccugaguacacagagguuagaggucagugcagucgau

SEQ ID NO: 4184525 - RNA, 62 nt, Human
guccacuucuauugggucuugguguguuuccaccaaccuauugauucccucuuggaagggau

SEQ ID NO: 4184526 - RNA, 62 nt, Human
guccagagaguaaaggggguaagcaagcucuuguuauuagcccauauguacuuacccugggc

SEQ ID NO: 4184527 - RNA, 81 nt, Human
guccagccaagcagcuccuugauucaaggccauugcauuuucugaguauggccugacuguccagccagggcugcucuggac

SEQ ID NO: 4184528 - RNA, 109 nt, Human
guccagcgagaacauccagaaacuucauuugcaagcuugggguuacccugaaggaaauccucauggcuugcaagauucaguuccuggggcuuggcucucuuuccuggac

SEQ ID NO: 4184529 - RNA, 58 nt, Human
guccaggaagcaauaaauagaauucauuaugaaaucuauaauuggaacuucacuggau

SEQ ID NO: 4184530 - RNA, 59 nt, Human
guccaggacuuucuuaaggcacuccagauuagguuggaauugcaagccaguccugugac

SEQ ID NO: 4184531 - RNA, 62 nt, Human
guccaggagagcucucguucagugugcggaagaacacucugaccucuagagcuguccuagau

SEQ ID NO: 4184532 - RNA, 58 nt, Human
guccaggcaccucccuugugcuggguguuaccuccaugcugaggggucugacuuggac

SEQ ID NO: 4184533 - RNA, 64 nt, Human
guccaggcuccagcucuaacaugcugggccccaagggcugggcaggagagauugcagccaagac

SEQ ID NO: 4184534 - RNA, 61 nt, Human
guccagugcuuauagaaucagugcuugugccaaaacauuuuguuucaugaagcacuuggac

SEQ ID NO: 4184535 - RNA, 56 nt, Human
guccaucuugcaaugagaccuaacuugcaccugccuguuuuucugcaugauuggac

SEQ ID NO: 4184536 - RNA, 129 nt, Human
gucccaaaagaauuaaugugacauuacagaaugugccauuuggucgucaucuuguuucccauuauuggauuggacuugugguaucacuucuguuuacaucaacccuagaauucaaauaaugaggaaagc

SEQ ID NO: 4184537 - RNA, 61 nt, Human
gucccaaggccaggcaucuagaaaagcucucuccuuguuuuaucuggcagaacuuugggac

SEQ ID NO: 4184538 - RNA, 60 nt, Human
gucccagcaagauaagaccauguccagaaggaccaguggcaguaaagcuggaaaagugac

SEQ ID NO: 4184539 - RNA, 75 nt, Human
gucccaggucaucacugagagcagaucccacgcgcccgagcugccgcggugaagaugccucaggugacccgagac

SEQ ID NO: 4184540 - RNA, 113 nt, Human
gucccaucccaucccugucccugagcugucuaugguccugucugugcccucuucccuggagaaugaggagaugccugcuaggauggcaagcagccacgugguguucuuuggac

SEQ ID NO: 4184541 - RNA, 67 nt, Human
gucccaucugaugugcaaaaggcagacgugaaggcaggugcuggagcugagagcacauagaaggggc

SEQ ID NO: 4184542 - RNA, 76 nt, Human
gucccaugcugagaugagggagcuggaggaggggagacuggcucucacuccucauugcugcccauugggaugggau

SEQ ID NO: 4184543 - RNA, 69 nt, Human
guccccaaaggccaagcucagguaaaaggcagacccggcuuuucuccaaaguggcuaggucuaugugac

SEQ ID NO: 4184544 - RNA, 68 nt, Human
guccccaaguuagcaucuccuccagucuauucugcagaauucugguucucaggaaugcuaauaggggc

SEQ ID NO: 4184545 - RNA, 59 nt, Human
guccccagcugugacgagagcccaucccagggaggggcacuuggaucuuaguuggggac

SEQ ID NO: 4184546 - RNA, 89 nt, Human
guccccaggcagagcacaggcugcugugaacuguggcccaacugcagggccaguccagggcagggcaagaccagugugggcugaggggc

SEQ ID NO: 4184547 - RNA, 61 nt, Human
gucccccugaaagcagccgcagaaacagcugccaccuauuugcauagcugagcaggaggac

SEQ ID NO: 4184548 - RNA, 119 nt, Human
guccccgcuggcccagacuugcagccucgucuaaaaccucccgccccagguuaaaaggcaaaauaacggcaccuggaggggcaauggagcgcggacgggcuguucgagggcagcggggc

SEQ ID NO: 4184549 - RNA, 60 nt, Human
guccccugcagccccuuggagucccaugagugggcuccugaaggcucugcagggucuggc

SEQ ID NO: 4184550 - RNA, 75 nt, Human
guccccuugcuuuccuuaguccagcccuccaggucccaaccagcagggcugggccaauggcaauggcaauggaac

SEQ ID NO: 4184551 - RNA, 75 nt, Human
gucccggagcugacuggcugccuuuucagugugcccccgccacuggccagugccugccagugcagcugaugagac

SEQ ID NO: 4184552 - RNA, 127 nt, Human
gucccgugguggggcucagggugcaggaggagcccuggaucugguuccuugaggaugccacacaaaaggccuucagaguaccauguccuccuggccucuuucuccacccuggguuggacauaggggc

SEQ ID NO: 4184553 - RNA, 73 nt, Human
gucccuaaaaguagcuccaaggcaggaauuaaaaaugguucuggaagcuuuugagcaacugagcuagcaggac

SEQ ID NO: 4184554 - RNA, 59 nt, Human
gucccucacccagaugcucccagaaccuguucuaaagaaauauuagggagaacagggac

SEQ ID NO: 4184555 - RNA, 82 nt, Human
gucccucaguuucuuccauuaggguucucagguuggcaugugcuuucaucucaggaggacccugaugcuguguuucaggggc

SEQ ID NO: 4184556 - RNA, 78 nt, Human
gucccucccucaagggcucccugccugagguggcagaaaggccauucccacccagccagaugcaggaagcccaggggc

SEQ ID NO: 4184557 - RNA, 87 nt, Human
gucccucgcgggccgggcguccccucagccacccauggggcacccuucgccucccucgggggaugggggaucggcuugcguccggac

SEQ ID NO: 4184558 - RNA, 78 nt, Human
gucccugagugcugugaaaggccacgugccaagauuaaccugaauuuuucuuugcaaauggcuuugacucaaugggac

SEQ ID NO: 4184559 - RNA, 61 nt, Human
gucccugcaucaccacgggacuugggcuguuccaaugguccuggugaagaugaaaagggac

SEQ ID NO: 4184560 - RNA, 76 nt, Human
gucccuggccaggcuggcuggaugguugguucgcugucugacgagcagccagcccuccaccagcagcuccgggggc

SEQ ID NO: 4184561 - RNA, 63 nt, Human
gucccuggucuaccguggcuucaucuacccaaugcugccuggagggccagguggaccaggggc

SEQ ID NO: 4184562 - RNA, 64 nt, Human
gucccuucuucauguacuuuuccuuuuucagcuuuucugaauguguacauuuucaggaggggau

SEQ ID NO: 4184563 - RNA, 110 nt, Human
gucccuuucuuugugauuuaaaucuguauaauaugacuuagaaacaaagguguuuagcagcacuucuauuuuuuucaguggugugagcauaaaccacaaaguauccggau

SEQ ID NO: 4184564 - RNA, 69 nt, Human
guccgggaacccggcgucuccgccuccggcugcuccgcgcggagagccuguucggaggcgcccccgggc

SEQ ID NO: 4184565 - RNA, 60 nt, Human
guccgggucaccuaucaauuuugugcaugggugcacaggacaggauuugggaucuagggc

SEQ ID NO: 4184566 - RNA, 67 nt, Human
guccguugacagggcacuugacacuuuauaucauaguaguuuugugaacuugucagcuaccaaggau

SEQ ID NO: 4184567 - RNA, 92 nt, Human
guccuaaaaggccacuggcugccguggggcugaggcuggaguucugccgaggcucugcaaguccagccccuggcacaugguucugaugggac

SEQ ID NO: 4184568 - RNA, 78 nt, Human
guccuaauugaguucuguguaaagggguuaccauaugcuuuuuucagguggcaagcaguuacccaggauucguuggau

SEQ ID NO: 4184569 - RNA, 69 nt, Human
guccuacucugggcuuugauuuguuacagugaaagaauacaaaguaaaauuggcucagggcaaaggggc

SEQ ID NO: 4184570 - RNA, 108 nt, Human
guccuagagcagcugugcugacuguguuccuucuggauuagauucucagcaguucuaaucuucagcacuccagagacugggauauauaggcaccaggcuccucuggac

SEQ ID NO: 4184571 - RNA, 77 nt, Human
guccuagcacccaggguugguggcuuggaggcccagaagacaucccuuugcccuccccaugacccggugcugggugc

SEQ ID NO: 4184572 - RNA, 55 nt, Human
guccuagugccuggaagcugggacucacgaccguccagcugccugcacuuuggac

SEQ ID NO: 4184573 - RNA, 74 nt, Human
guccucccuagccucccuagcugcaccuucuacaggacccuuuggagggugcaggggaagcugcccuggagggc

SEQ ID NO: 4184574 - RNA, 55 nt, Human
guccucccugggagcuucugagugcagaggggacucagagaccccgggaagugac

SEQ ID NO: 4184575 - RNA, 74 nt, Human
guccuccuaaguuuucuaauacuagaauaauuuuauuagacccugucaguguuaggaaagagagagaaaaggac

SEQ ID NO: 4184576 - RNA, 63 nt, Human
guccucuagguuggucaucaucauccucauuuaagaggaaaacugagccaggcuaggaagggc

SEQ ID NO: 4184577 - RNA, 107 nt, Human
guccucucacccccagcaguugccaugggguuuccuuccagauucgaggauccuugccacuugaagccuggacucagggugcuccagcgcuggggaguggugagggc

SEQ ID NO: 4184578 - RNA, 75 nt, Human
guccucucuucacuuggauggcaguugagucucugaaagagauucaucccgaaggucuuuuaagugaagagaggc

SEQ ID NO: 4184579 - RNA, 73 nt, Human
guccucuggaagaugaguucuucucuugccuuuguuucuuuccaaaccugcguagcuuaccuuccagacgggc

SEQ ID NO: 4184580 - RNA, 71 nt, Human
guccucugucaagcuugucuuguccauagcaguggauacuguacagugucuugggcacagcuuuggagggc

SEQ ID NO: 4184581 - RNA, 61 nt, Human
guccucuuagccacuuaauuauacugacacucuagcauuaggacaugggggcugggggggc

SEQ ID NO: 4184582 - RNA, 64 nt, Human
guccucuucuaagcucauucaggguguuggccaaaucccauuucuuguugcuauaggacaggac

SEQ ID NO: 4184583 - RNA, 113 nt, Human
guccugagaguccaggccuccucucucugacuggaaagccuguccucagaguccagaccuccucucucugacuggaaagacuguccugagaguccaggccuccucucucugac

SEQ ID NO: 4184584 - RNA, 62 nt, Human
guccugagcuugauccuucugucucuaucucuguacaccugggacaccuugcaggcucagac

SEQ ID NO: 4184585 - RNA, 56 nt, Human
guccugaggugcucagccaggaagcgacuaugauugauuugcugugcacccagggc

SEQ ID NO: 4184586 - RNA, 62 nt, Human
guccugccugagugauguggcagccacaaguagaaaauguggucuguucaaucuaggcagac

SEQ ID NO: 4184587 - RNA, 78 nt, Human
guccugcggcugcaagggcuucaaguggccaagaggcacuccuggucuuaaggcccuugcucagaagugaugcaggcc

SEQ ID NO: 4184588 - RNA, 57 nt, Human
guccuggagcagcuggaagaugcugucauugcacuccaugauccaguguuccuggau

SEQ ID NO: 4184589 - RNA, 88 nt, Human
guccuggaggaagaucugcugugaugggcacuguuugagcacacaagagauauacuaaaccugaggccuccccagcagaccuccugau

SEQ ID NO: 4184590 - RNA, 55 nt, Human
guccuggggcucacuuuguacuucuuuucagugaagacaggaaaagcuccaggcc

SEQ ID NO: 4184591 - RNA, 57 nt, Human
guccugggugugauauucauagaggguaauggugccucuggggaagacaucuaggau

SEQ ID NO: 4184592 - RNA, 61 nt, Human
guccugugacaccaauauuuaauuuucucacugaggauauuucccauugugucagcagagc

SEQ ID NO: 4184593 - RNA, 74 nt, Human
guccugugcacuugaaacacuuaauccaacaguguauuauuuaucucuguggagcaguguguucauacagguac

SEQ ID NO: 4184594 - RNA, 79 nt, Human
guaguauuucaggauuuuaugagauaguuuguuuacuuuaaguagaaauuucucauuauuuuauaaacuuggauucuac

SEQ ID NO: 4184595 - RNA, 103 nt, Human
guagucaagcugucaaaguuucugucaucugaaugcuugaguggggcuggagaauccacuuccaaguuuauucaugugacuguggcuguuggcaggagacaac

SEQ ID NO: 4184596 - RNA, 64 nt, Human
guagucccagcuaccugggaggucaaggcagaagaaaugcauuagcccagguguuugaggcugc

SEQ ID NO: 4184597 - RNA, 75 nt, Human
guagucuauaaauauauaugccugauaaaagugauuagcaaucaggaaauacuuauuuauaaugugugagacuau

SEQ ID NO: 4184598 - RNA, 56 nt, Human
guagucuuggauuuuaaaaagugaccaggaagguauuuauuaaaauuuaagccuac

SEQ ID NO: 4184599 - RNA, 84 nt, Human
guagugauuaaaucauaauucaaauaagcuuaaauaaggagaaaacauuuauagcaugaaugaauugugaaaugugagcacuac

SEQ ID NO: 4184600 - RNA, 82 nt, Human
guagugccauuucacuauaauaugucaaaauacuuccuuugguaacagaguacaugacguaguuaaaguuuucuggcagugc

SEQ ID NO: 4184601 - RNA, 61 nt, Human
guaguggguggauuccagcaacgcugccuaauauccuacagugcuccaaacacacccacac

SEQ ID NO: 4184602 - RNA, 87 nt, Human
guaguguaggcauucagguuucuauuacuccaauauaguagucgcuuauuugaacugguaguuggaaaucugaauuugucugacuac

SEQ ID NO: 4184603 - RNA, 130 nt, Human
guagugucuggaacagucugauuugucuccauaucugcauugucccagaagugacuuuggcacuaaaaaguugaucauuaauuacuguuugggccaggugugguggcucaugccuguaauccuggcacuu

SEQ ID NO: 4184604 - RNA, 80 nt, Human
guagugugaccauccugguaaugaaucauggcagccuuucacuucagccaagaucucagugacuaugggugucaggcuau

SEQ ID NO: 4184605 - RNA, 105 nt, Human
guaguuaguagagaaugguuuuaaauauuccacagaggacuccgauugguuuuugagcuuggauaguuacugugcaguugagauagagccauucuaaaagacuac

SEQ ID NO: 4184606 - RNA, 55 nt, Human
guaguuaguuaagaugaguuuauuagggugggaccuaaacuccgugacuaauaac

SEQ ID NO: 4184607 - RNA, 64 nt, Human
guaguuauccauauucagacugugaauucuaaaccuggauucucucuagaauguggauuuuuac

SEQ ID NO: 4184608 - RNA, 88 nt, Human
guaguuauuagagcaagaauuguacaaacuggguggcacaaucaguuguaaacuucccgaguuuuggaacuuuuguuuuguucacugc

SEQ ID NO: 4184609 - RNA, 59 nt, Human
guaguugcuuagcacugaagcuuuagaaaaauuuaauccuuuagugaaaaggggcuaac

SEQ ID NO: 4184610 - RNA, 62 nt, Human
guaguuguugcuuagcuguaagcuggaaauuucaaggcagaaacagcagauaccacaacuau

SEQ ID NO: 4184611 - RNA, 89 nt, Human
guaguuucugacacacagagcaggugcugggaagaugcucaucaucauuuuccucccaugcacauuguucucuaaaacucagucacugc

SEQ ID NO: 4184612 - RNA, 114 nt, Human
guaguuugcagaguaucugcucccacccuuggcuuuccagaucagagugagucaggaggcuucuaggguugaggccacagggaggggguucuggaaaacuccuaugcauucuau

SEQ ID NO: 4184613 - RNA, 66 nt, Human
guaguuuucucuguguucugcuuacuauguuugaauaaugucuuaacugggguaggagaaggcuac

SEQ ID NO: 4184614 - RNA, 70 nt, Human
guauaaaacacaugcuucuuuugauuaugaggccccacuugaugacuaacaaagggaguaugaaguauac

SEQ ID NO: 4184615 - RNA, 130 nt, Human
guauaaacuuccuuuucuuuagaauggcauucagugcugcaggcaauagaaaaccugauuaacagugacuucucauauagggauuuuuguuugucaugcacaacaagugugggaaaaagaaguucaggac

SEQ ID NO: 4184616 - RNA, 115 nt, Human
guauaaaucucucucugcuuuucuuucaauaucucuaagaaugaggcuuccccaaggcccucagaagcuuggagauguguugaauuuguguaaagcaguaggguagcacugguac

SEQ ID NO: 4184617 - RNA, 72 nt, Human
guauaacuggauucugucuuuggaaaaaagaaucauugacuuuaccacagacagauuucaguaaauuugugc

SEQ ID NO: 4184618 - RNA, 82 nt, Human
guauaauauuucuagaauuuuuaaugcaguauaaaaugugguauuuaccaucaaggugcuuuauuaagagagaaauuugagc

SEQ ID NO: 4184619 - RNA, 65 nt, Human
guauaaugguaaucacuguguuagggauuaaguauacuucccacccuguguuuuugccauuguau

SEQ ID NO: 4184620 - RNA, 57 nt, Human
guauacagucauugugcugggaaaucuucucauuauccucacagugacuucugauac

SEQ ID NO: 4184621 - RNA, 104 nt, Human
guauacauucauuuaauaaacucuucagaauaauguguuagagaaguuaagucuucuccauuaacaaauuaguuuuuauaagaggaggaugguguaaaguauac

SEQ ID NO: 4184622 - RNA, 62 nt, Human
guauacauuuauugagcaccugcugaaugccagaugcugugugcuaggugccagugauauac

SEQ ID NO: 4184623 - RNA, 79 nt, Human
guauagcagcuggcuuugucaagggcagcaggaagcaugcgugacccugcuggccuugacaaaguagacagagucuuac

SEQ ID NO: 4184624 - RNA, 56 nt, Human
guauagguagccauauuugauaguauagaucuauaugugucugugguuaccuauau

SEQ ID NO: 4184625 - RNA, 94 nt, Human
guauagguguucaggaagucaaaauagaguucugucuucaagugaguuuggggaaaggagagcauuauuuuuccuuucuggagauuuccagugc

SEQ ID NO: 4184626 - RNA, 104 nt, Human
guauagugugcagaugguacacugaacaacucuaggugguaucauucacguaguucaugugguacaucuuuaaauuguucaguguacaaccuguacaacuguau

SEQ ID NO: 4184627 - RNA, 70 nt, Human
guauauacaguucgugcugcuaggagauguucccacugcaggggagcaaauucagaagcagaaugguuac

SEQ ID NO: 4184628 - RNA, 82 nt, Human
guauauauauacauauauaugaguauguguaugccuauauauguguacauauguaaacauguauaaaaauguguauauauac

SEQ ID NO: 4184629 - RNA, 59 nt, Human
guauauauuuauuucacaaauagguaucuuuuugauggcuuuugugaagaaaaugaugc

SEQ ID NO: 4184630 - RNA, 57 nt, Human
guauaucucuuacauacacacauaugcacacacacguguuuguuugugagagaguac

SEQ ID NO: 4184631 - RNA, 82 nt, Human
guauaugcaaugaacuuuuuuaaauggacauauucuuggcaaaaaugucaguaacaugucuguuaagaaaagucauuuaugc

SEQ ID NO: 4184632 - RNA, 71 nt, Human
guauauggaaaaauguaucuugucauggcucaaaagacacaacauuguuaagaugucaauuuuccacauau

SEQ ID NO: 4184633 - RNA, 61 nt, Human
guauauguucuugcacuggaaagaacugcagaauaauuuuuccuuuggaagaugcauauac

SEQ ID NO: 4184634 - RNA, 77 nt, Human
guauauucaaggaugccaauaaauguuaauaucuaaaauuggauugugauaauuguugcaaaacucugugaauauau

SEQ ID NO: 4184635 - RNA, 86 nt, Human
guauauucaucguguagaaauacucuuuuuugccuuuuacuuauuucuacauauagguuauugaguuuuucugcaugguucuguau

SEQ ID NO: 4184636 - RNA, 67 nt, Human
guauauugcaaguuaaaaauuauuagugcuacauuaagcaacugggaaauuaggggcuugcacugac

SEQ ID NO: 4184637 - RNA, 117 nt, Human
guauauuuaaaaauugcuaagggauuagauuguaaauguuuucaccauaaaaaauugauaaguauucgaggugauggauauguuacuaguuugauuuauuuauuucacaauguauac

SEQ ID NO: 4184638 - RNA, 80 nt, Human
guaucagagagcuuuguggcugggaagaagguaacuaaauaauuaguuucauuuauucagucauucauucguucugucac

SEQ ID NO: 4184639 - RNA, 58 nt, Human
guaucagugugcaucucugaaugauggugauugucuuuuaugggucaugcugaauugc

SEQ ID NO: 4184640 - RNA, 60 nt, Human
guaucauaguugaaggacuaucaugucauaucaugacaguguggaaagucaacuugaugc

SEQ ID NO: 4184641 - RNA, 85 nt, Human
guaucaugccuggcacagauuaguagcuguaauaacugggaauaaucccaguaguagcugaaauuauuaugugcaaaggagauau

SEQ ID NO: 4184642 - RNA, 81 nt, Human
guaucauuaagcugacuuuuaguuccauguucauguuagcucuaccaauaaaggcaggugcuaagagagguaaaaagauac

SEQ ID NO: 4184643 - RNA, 81 nt, Human
guaucccauucucugaucuucacauaccccuauucuuucauugcuugauuaaagguacgcgaaggucagagaauaggauac

SEQ ID NO: 4184644 - RNA, 65 nt, Human
guauccuauggcuauuuuauugacacaucccuucagcauguguauauuuggugucaauaggaugc

SEQ ID NO: 4184645 - RNA, 72 nt, Human
guaucgcccaggcuggagugccaguggagccaucucggcucacugcaagcaagcuccgccucccggguucac

SEQ ID NO: 4184646 - RNA, 80 nt, Human
guaucucauauaguaugauaggcuagacauuguuuagauuuguggauugacagguguggggcugugguacucgugugugc

SEQ ID NO: 4184647 - RNA, 65 nt, Human
guaucuuccaaaauuagucucaguuauaauuuuggaauguaacaugagaaucaguuuggggacac

SEQ ID NO: 4184648 - RNA, 65 nt, Human
guaucuucuaucccugguuuaggcaagagguguugagaguccgagcuagggcaaauaugagauac

SEQ ID NO: 4184649 - RNA, 62 nt, Human
guaucuucucaaaaaauguagguggcuccauagagggacccacaaaccauuugugaaggagc

SEQ ID NO: 4184650 - RNA, 72 nt, Human
guaucuuuguguguguguguguguguguguguguguguguguguguguauguguaugcaugcacuaagaugc

SEQ ID NO: 4184651 - RNA, 104 nt, Human
guaugaaccagucccaaguuugaucuugaucaaggcuaucaugaaagccaagauuucuuuucuccucagaggccuugguuaugguaugaugcagugguuuguac

SEQ ID NO: 4184652 - RNA, 57 nt, Human
guaugaacugagguccaccaggguacucagaagaugucccucacuccucauucaggc

SEQ ID NO: 4184653 - RNA, 62 nt, Human
guaugacugcagccuuugggcucauaaaugccaugcuuuacugucuggaggcuaggucagcc

SEQ ID NO: 4184654 - RNA, 63 nt, Human
guaugaggcagagaugaccagcugaugauugagaaguaucagacagggaguucuguguccuac

SEQ ID NO: 4184655 - RNA, 88 nt, Human
guaugaggggcugaucaaaaucuuuccuguuuuccagaauuggagacaaaaaccaauucugagaacaaaagguacucaguaccucugc

SEQ ID NO: 4184656 - RNA, 90 nt, Human
guaugaucauuauaaauuccagauaugauaggauuagcacaggguuccucaaauucuguagaacugacauuuuggacuggauaaucauac

SEQ ID NO: 4184657 - RNA, 80 nt, Human
guaugcagggcagcugugcuagaagccacgaacgcuauucucugucugggguucuaugccagccaccuucuacugccuac

SEQ ID NO: 4184658 - RNA, 83 nt, Human
guauggagaccauguuuacuaccaggagaauguacucacccuaagacaguacaguaaguccaggguaaauaaaucucccaugc

SEQ ID NO: 4184659 - RNA, 80 nt, Human
guauggaugaaucaugacguguugcugagugaaagaagccuuccacaaacauacaguacauuucauaugauucuacguac

SEQ ID NO: 4184660 - RNA, 56 nt, Human
guaugggcucucacccaacugugucggaacucugugcacugaggugcagcucaugc

SEQ ID NO: 4184661 - RNA, 55 nt, Human
guaugggcugaguggcugggucuaguuucuuagugaaauuccacugggcuuauac

SEQ ID NO: 4184662 - RNA, 64 nt, Human
guccauucuggagagaaaccuuacaaauauaaugagugugguaaggucuucacucagauuucac

SEQ ID NO: 4184663 - RNA, 65 nt, Human
gucccaaguuggaaggcagaguaacauguaaguuccuauucuaguucugccacuaauuaggugau

SEQ ID NO: 4184664 - RNA, 66 nt, Human
gucccacugggcaacuagaaaauuccuaagaaugaaggaguuauuugguucuugcuaagugaagac

SEQ ID NO: 4184665 - RNA, 89 nt, Human
gucccagcagauggcaaagaggugagaggagccuuugucuuggaccggccccagaggcuccgucaucccucuuugguuguuucuggugc

SEQ ID NO: 4184666 - RNA, 59 nt, Human
gucccagccacuugggagacugaggugggaggaucaccugagccuagggagguugaggc

SEQ ID NO: 4184667 - RNA, 56 nt, Human
gucccagccccagggggccaggguaaggccagggccuauguuccugggcuagggau

SEQ ID NO: 4184668 - RNA, 64 nt, Human
gucccaggugggcuccaccucugcccucugugauguggaguaggggcuggggcuccuuggguac

SEQ ID NO: 4184669 - RNA, 126 nt, Human
gucccaguuucuugaugucauuuuggugaaauucaacuugauuaaucccaugugaguaguucacaauuaucuacuucauuacguugaucacuuggucacuaauuaaucaaagucuaguacugggau

SEQ ID NO: 4184670 - RNA, 57 nt, Human
gucccauuucaagaaauucaugauguuauucuaagucaguguuucucaacauggggc

SEQ ID NO: 4184671 - RNA, 84 nt, Human
guccccagguccugcugcugcacauccucauugccuaaugaguaccuggugaggaaugcugagcagaggaagcaagauguggau

SEQ ID NO: 4184672 - RNA, 64 nt, Human
guccccagucccccagggccgccugugugcaguucccgccagcaucccucaggggccucuggac

SEQ ID NO: 4184673 - RNA, 74 nt, Human
gucccccagcauccucagacucuccgugggacugaaaguuucaauaagcuucuugacggauguucuggugggac

SEQ ID NO: 4184674 - RNA, 91 nt, Human
gucccccuccagccgcguacuguccagcuuggcuccuggggcuuggauguccaccuccaugcugggcagagacacguccagguugggggac

SEQ ID NO: 4184675 - RNA, 66 nt, Human
guccccgaucuugaccagccugucguuguccagcagcacguugcgcgcggcuaggucucgguggau

SEQ ID NO: 4184676 - RNA, 70 nt, Human
guccccgcgccuggagaggaggcgacgcguggccggcggcuuuguggcgcgcggguuccagcgcgggggc

SEQ ID NO: 4184677 - RNA, 83 nt, Human
guccccucagagaaggaaguugcacuguucaguuccuacugaggaaaagaaauuugcagaugcugcuccucucuagaauagau

SEQ ID NO: 4184678 - RNA, 83 nt, Human
gucccgucggcugcggccgcgcgcggcccggggucgccgugaguacucgccaggcuggccuguguggccgccaccacgggcac

SEQ ID NO: 4184679 - RNA, 79 nt, Human
gucccuaccagggcuuugccaaaguccagcucuuauauggaaccugaguuacuacuggugcugggcagggcucagggac

SEQ ID NO: 4184680 - RNA, 57 nt, Human
gucccuccuccaaagccaauuagguccaaccaggcccagugcauggagggagagggc

SEQ ID NO: 4184681 - RNA, 57 nt, Human
gucccucugcaaagccugugcugaaggagacaccagcucagagcaguucagagggau

SEQ ID NO: 4184682 - RNA, 67 nt, Human
gucccucugggccaucagguccaagccccuuggugcacagaaggggaaacugaggcccagagagggc

SEQ ID NO: 4184683 - RNA, 100 nt, Human
gucccugagcuguguuuugugagcuugcuccaugcccauccucagggugagacguaguccucaggauacaggagccacagaacgacauuccucaaugggc

SEQ ID NO: 4184684 - RNA, 65 nt, Human
gucccugccucagagcuacacacacgcaggcccuucgccugggcacugcagcucagggcaggggc

SEQ ID NO: 4184685 - RNA, 63 nt, Human
gucccugccucucagacuuccuuucaugcaaaucgcccugagugaggggugagggguagcaac

SEQ ID NO: 4184686 - RNA, 82 nt, Human
gucccugcuucuuccuuaguuauuugguccccuccuccucccagcaggauuaggguaggaacugaguggaagggcaggagac

SEQ ID NO: 4184687 - RNA, 57 nt, Human
gucccuggagcaggguacaggggucaacacacugccuucuguuuuuuguaccagggc

SEQ ID NO: 4184688 - RNA, 68 nt, Human
gucccuggaucugggacagcugcaugcaguagcgguucucugucuccgccagguugcccuccagggau

SEQ ID NO: 4184689 - RNA, 76 nt, Human
gucccuggcacugugccuucacacuggucacugugaaaagcagaucacacuggacucagaggccagaauccaggac

SEQ ID NO: 4184690 - RNA, 61 nt, Human
gucccugguuugcccaggaccaucccaguuuuagcacugaaaguccugggcaaacugggau

SEQ ID NO: 4184691 - RNA, 83 nt, Human
gucccuucucuccccacacuccccaagccccgcucucaguggguccuuaacaaacggggaaaagguggagagagaagcaggac

SEQ ID NO: 4184692 - RNA, 82 nt, Human
gucccuucucugugcuuccucugccaacacucugugcgguguuuccgggagucagaauggcaggguggucaagaguacggac

SEQ ID NO: 4184693 - RNA, 55 nt, Human
gucccuucuugaguuagaacagguggguggacuuguacaagcucaccaaguggac

SEQ ID NO: 4184694 - RNA, 115 nt, Human
gucccuuuugacaaugguaucuuaggggcuugaggguccaugaaucauccuuucaguccuggaggaggcccuagagcucuagagucaccaauuguuugucacuaaagggagggac

SEQ ID NO: 4184695 - RNA, 62 nt, Human
guccgguucuuagcaugaugcaaaauaauuucuuuucuuuuguauaaaugaagaugcuggac

SEQ ID NO: 4184696 - RNA, 61 nt, Human
guccuagaaacucucacgagugaaacagcaaccugugcugucuuugcuaguuucugagggc

SEQ ID NO: 4184697 - RNA, 65 nt, Human
guccucaccuuuucucugauugcuagccaaaggcccaagggagcagagggaggagaggugagggc

SEQ ID NO: 4184698 - RNA, 55 nt, Human
guccucacuggccgcacgcugagaacgagaagcucgggugggcagcagcgggggc

SEQ ID NO: 4184699 - RNA, 56 nt, Human
guccucagaugcugcugaaauguacacaucucauaguuuaugccagcguuuaggac

SEQ ID NO: 4184700 - RNA, 59 nt, Human
guccucagcuccaggcuugcucagccugcaccuuggcuggcggcguguggacugaggac

SEQ ID NO: 4184701 - RNA, 74 nt, Human
guccucauuuacacagaggacacugggcuggggacgugccccgagccugagucucuucuucugucaaauggggc

SEQ ID NO: 4184702 - RNA, 89 nt, Human
guccucccgguugauggguuguuuccugcaccgugugggcucugguggguaggggaggagaguaggaaggaggccaucuuggcggggac

SEQ ID NO: 4184703 - RNA, 61 nt, Human
guccucuacggaccucaucuccaggcaccacugagaugcuuuugguccaagaguccaugac

SEQ ID NO: 4184704 - RNA, 62 nt, Human
guccucugaaagaugaaccauggccuaugcauccuugggaaccagguuccuuuagaguuggc

SEQ ID NO: 4184705 - RNA, 58 nt, Human
guccucugagggggcugcacgcccugcccgcaggcucggggaagccaccucagaggac

SEQ ID NO: 4184706 - RNA, 58 nt, Human
guccucugcccaggucaagguuggaagaagaaaaccccagaaucugacccagagagac

SEQ ID NO: 4184707 - RNA, 78 nt, Human
guccucuguuccuggucucuggagcuucaauuugggaaagugacccauuagcuucugaggaccagggugagagagggc

SEQ ID NO: 4184708 - RNA, 68 nt, Human
guccugaacugccuucuuagugaccuguggcauguccugaauagccuuucugagcaggcagguaggau

SEQ ID NO: 4184709 - RNA, 58 nt, Human
guccugaggaugcagagauaaaugagacccagccuccaccucugcaggaccucagggc

SEQ ID NO: 4184710 - RNA, 59 nt, Human
guccugauauuuuucacuggccucugggauauaucugugaugucagugguaucaaagac

SEQ ID NO: 4184711 - RNA, 96 nt, Human
guccugccugcuggaacuugguguaucucuuagauacuguaucuaaugcuaucaagagucucuacauuaaucuuagcuucuccagucagguuagau

SEQ ID NO: 4184712 - RNA, 68 nt, Human
guccugcuucugcuccccacccuccuacucugugagcagaaucaggagcuagggggcaaugcuggggc

SEQ ID NO: 4184713 - RNA, 62 nt, Human
guccugcuucuuaguuccuucuuugugacaaaccaaaagaauaagaggauuuagaacaggac

SEQ ID NO: 4184714 - RNA, 55 nt, Human
guccugcuugcagcucucacuggcagccagggcugcauuugaguugggagcaggc

SEQ ID NO: 4184715 - RNA, 60 nt, Human
guccugcuuguuaggccuaguccauugucuauaguguauuaguggccagaaaagcaagau

SEQ ID NO: 4184716 - RNA, 97 nt, Human
guccugcuuuggguaacuuggcucagugugagggagaugugaguauaccugucccacgcgcugugcugcuuccggucugcccaucuugcccguggac

SEQ ID NO: 4184717 - RNA, 121 nt, Human
guccuggaggagcacuggauuaggaaucuggaggcccaguuucagcucugccuuugcacugacacuaggggcugaggcugagauuggucuugggaaucuuuaagcuccucucaguuuugac

SEQ ID NO: 4184718 - RNA, 61 nt, Human
guccuggaucugguucccugagccuuuauuaagaaugaauguuuucuugccaauccaugac

SEQ ID NO: 4184719 - RNA, 65 nt, Human
guccuggcagaaauggggcugugggccuagcaggacuacucucuccuuuuuucugcucuuaggau

SEQ ID NO: 4184720 - RNA, 60 nt, Human
guccuggcccacuggcaggcuggacaggcggccagcaggagagccaguggguccaggugc

SEQ ID NO: 4184721 - RNA, 73 nt, Human
guccuggccucuggggguauggugaugaacaacaacaaaacauaaaacagauucaugcccuuuuagagcugac

SEQ ID NO: 4184722 - RNA, 55 nt, Human
guccuggcuuaguucgcuguaacuucccuauaugacuccacugugcagccaggac

SEQ ID NO: 4184723 - RNA, 78 nt, Human
guccugggacuugaaagcuggcuucacauggaggaaggaacacuccuuguugcugcagucaccugaaaaucccagcac

SEQ ID NO: 4184724 - RNA, 111 nt, Human
guccugggauggaugaauucacaguggcugacaggcuggccguucuacagcugcaaaugucacugugagcuagaucugaucagcugagacuuugcugugaccggguaggau

SEQ ID NO: 4184725 - RNA, 63 nt, Human
guccugggccugcugaggcugagccaguggagcuggaugacagccuguaucagggaccaggau

SEQ ID NO: 4184726 - RNA, 57 nt, Human
guccugucccugggucccuggcuuugcccugugcuugucaggagccuaggacaugau

SEQ ID NO: 4184727 - RNA, 57 nt, Human
guccugucucucugcugcugggacccagggcuuuuucagcugcagaacccacuggac

SEQ ID NO: 4184728 - RNA, 62 nt, Human
guccuguugugagcugccuucccuaaccccucugcuaaagaacacagcugcaggcucaggac

SEQ ID NO: 4184729 - RNA, 71 nt, Human
guccuuaaaaguuccauaaaugaguucaggcugccaacccucaguuucauguguauggaacauuuuuugac

SEQ ID NO: 4184730 - RNA, 76 nt, Human
guccuuaaucauugcucuuugucauguccuuaacugucugagaagacaggcagggcauggaaaaagucuugagggc

SEQ ID NO: 4184731 - RNA, 56 nt, Human
guccuuagaccuggcaaauggggaggguccaggccgucacucgccggcuagguggc

SEQ ID NO: 4184732 - RNA, 73 nt, Human
guccuuagaggcccucucugcucagucuaggucuuaaagcugagaucaaagcacaaggggcaggacuagggau

SEQ ID NO: 4184733 - RNA, 55 nt, Human
guccuuaucacagggucacaacaguucccaucagauuuugccccugggugaggau

SEQ ID NO: 4184734 - RNA, 58 nt, Human
guccuucauggaguuacagccuaaguaaaugucagguugugcuaagugcuaugaaggc

SEQ ID NO: 4184735 - RNA, 68 nt, Human
gguauaugagucaaaggcaccaaggucacugccaguccacagcuggcccuacugccuugaucugcacc

SEQ ID NO: 4184736 - RNA, 71 nt, Human
gguauauuucuccuccagauggugguuguauauuuauagagcacaucugugaucugggggauuguaugucc

SEQ ID NO: 4184737 - RNA, 55 nt, Human
gguaucaaagaagggggugccagagaaagccaagggcgcccccuucuuugaugcc

SEQ ID NO: 4184738 - RNA, 67 nt, Human
gguaucagagagugcaaaauauagcuacuuaccuccaaaggaagcaauaugcauacuuucugaaucc

SEQ ID NO: 4184739 - RNA, 58 nt, Human
gguaucaggacuucauuccuuuuaauguuuagauaauagaggaggugauucuugagcu

SEQ ID NO: 4184740 - RNA, 58 nt, Human
gguaucauggguuaugacauucuucucugagagagaaggccagaauuucaauggugcc

SEQ ID NO: 4184741 - RNA, 56 nt, Human
gguauccugaaucucauaugcagucacaguucuggaaagucuggaggucaggagcu

SEQ ID NO: 4184742 - RNA, 76 nt, Human
gguaucuaugggcuaucaaauggagguauccagaagaaacuggauacauuagaaucugguacucaggagaaauauc

SEQ ID NO: 4184743 - RNA, 79 nt, Human
gguaucuggcaugugggcugcaacuguggaugaucgccucggugacaaugcauaccuagcagcucagaugucagauacu

SEQ ID NO: 4184744 - RNA, 88 nt, Human
gguaucuucuuucuaugaagcaacagcccuccuauuuggcaagaacaucccagccaaaggggagguucuucaaggaauugagauagcc

SEQ ID NO: 4184745 - RNA, 55 nt, Human
gguaugacuccucugagaaagagcuucuugcguuuucucagggaggagucaagcc

SEQ ID NO: 4184746 - RNA, 58 nt, Human
gguauggaggucacaucacuccuuugcccuuaggcuugaguggaacgcucuucacacc

SEQ ID NO: 4184747 - RNA, 84 nt, Human
gguaugggaaaguaaugcaggaggaggugagguagaacugugcuuugucauccacacgagccccgauuccuccuguucccaacc

SEQ ID NO: 4184748 - RNA, 55 nt, Human
gguauggucaggggcacaaagcccacacuaaucgcucacugacccuugaccagcc

SEQ ID NO: 4184749 - RNA, 63 nt, Human
gguauguaaagcccuuagaacaguaucuggcauuucauaacugaucaaggguuuaauuuuacu

SEQ ID NO: 4184750 - RNA, 59 nt, Human
gguaugucuuucauuucuuggaggcuagguugagcaacuaucuuccuggaagucauucc

SEQ ID NO: 4184751 - RNA, 84 nt, Human
gguaugugugcuuuugcucugcccaccugccucccacccuacccuucagugcaggucucggguucagcagugagugcucaugcu

SEQ ID NO: 4184752 - RNA, 80 nt, Human
gguauucccuuugguauggucaaagccuguguaauacuuaagcaugucucauacacggcuugaccauuuugauugaauuc

SEQ ID NO: 4184753 - RNA, 67 nt, Human
gguauucuuggcggcucucagggaagguuugggauuucggaaaggcuguucugagggugcgggagcu

SEQ ID NO: 4184754 - RNA, 67 nt, Human
gguauugguaggagaauauugaaauuuuaggcaauucuuaagagcucccuucuccuugcauuguacc

SEQ ID NO: 4184755 - RNA, 59 nt, Human
gguauuuaacaaaaauaucaggcaucacauguauugugggcuugucuauugucaaugcc

SEQ ID NO: 4184756 - RNA, 57 nt, Human
gguauuuauaugucugaagcugcucugagucuggccguccuagacaauguggauauu

SEQ ID NO: 4184757 - RNA, 76 nt, Human
gguauuucaggugguaaaaugugaaauggauuuuugaaggcaaaauguuuauuugguuuaucacuuguuuaugucc

SEQ ID NO: 4184758 - RNA, 86 nt, Human
gguauuugagaagagucugugaacuuggcagggaaaggcuauuaugcaauuuccuugaaugagucauggaaaaaccuuaaauugcc

SEQ ID NO: 4184759 - RNA, 113 nt, Human
gguauuuggccagcuucgagaaagccccaugcaugccuucaggaggguuccagacaagggcacccugucccaacccacuuguaggugcccuggccucaaaguuguaaaauccc

SEQ ID NO: 4184760 - RNA, 62 nt, Human
gguauuuuguuagggugugguauuuguuacagcacagcauauugaacccuacagacuguacc

SEQ ID NO: 4184761 - RNA, 91 nt, Human
ggucaacuaauuucuaaggauguucucuguugcaaggguuauugacucuucagucaaacacuguaacauggaaaaucuaaccuaguuggcc

SEQ ID NO: 4184762 - RNA, 71 nt, Human
ggucaacuuuguugagcuucuuagaaauagugauguauagugaauguuucuaucuggaucaauagaugacc

SEQ ID NO: 4184763 - RNA, 57 nt, Human
ggucaagacgggcucugcccuuugcuagcagugcaaacuugggcaaguugcuugacc

SEQ ID NO: 4184764 - RNA, 86 nt, Human
ggucaagcacaggugaguaacaaugggugaugaacuguagcagucaacaugcagaagugcuuucuggaaacacuuguguucugauc

SEQ ID NO: 4184765 - RNA, 65 nt, Human
ggucaagccggcugggccgaggcugcccacaccugggguccucgcggcgcgaagccagugcggcc

SEQ ID NO: 4184766 - RNA, 76 nt, Human
ggucaaggcgggcggaucaccugaggucaggaguucaagaccagccuggccaacauagugaaaccccgucucuacu

SEQ ID NO: 4184767 - RNA, 97 nt, Human
ggucaaggcuguggggcugccaggucaccaggcccuggacacucaagccgggucccuccggugggggcagggcaggggcugcgcccucagccugacu

SEQ ID NO: 4184768 - RNA, 130 nt, Human
ggucacacccuuggagcauaacaugccuccuaaauacagguuuuuaguuacuaaugguagcuuaacaggcuuagaacuguucuccacaguacaggaaaucuuguucaaaagguacuugaaaggugugacu

SEQ ID NO: 4184769 - RNA, 98 nt, Human
ggucacacggucacacagagcagaggucgggcauaugggcuccugguuggauucccgggaugccaguccuggcccugccugccuugugcuguguggcc

SEQ ID NO: 4184770 - RNA, 82 nt, Human
ggucacacugaucacaggugguaggaaaagaaacuuuaaugauuuccuuuucucauuaccacccgugcccuugguucuggcc

SEQ ID NO: 4184771 - RNA, 56 nt, Human
ggucacagggaagggcucucaacugugacccgccgagggcgcuucgauucgugacc

SEQ ID NO: 4184772 - RNA, 78 nt, Human
ggucaccaagccauucuccucaugccaaagaagcgguacaaauagaaaugccuuccagaggcuugaggaaaauugacc

SEQ ID NO: 4184773 - RNA, 77 nt, Human
ggucaccgagagaguugaggaagcaacacucgaggucccagccuuugcaggagcuagacuuagaucuuccgguggcc

SEQ ID NO: 4184774 - RNA, 62 nt, Human
ggucaccugacccaagcauggcgggcugaguccaggaggggucugcauguuggagguguacc

SEQ ID NO: 4184775 - RNA, 62 nt, Human
ggucacugaccacaaagauauucuguucccaaagagcaccauauucguggucaaguaaggcc

SEQ ID NO: 4184776 - RNA, 74 nt, Human
ggucacuggucagugaaacaguauuuccuaaguaugucugacuuccacaauacuugaauuucaugucaggggcc

SEQ ID NO: 4184777 - RNA, 55 nt, Human
ggucacugucugagguacuggagauuaggacuucaauauaccuuucugcagggcu

SEQ ID NO: 4184778 - RNA, 88 nt, Human
ggucacuuuuaaugucuucuuuuggguucagacaugauuacagagaaauuuggguuuuguccugauccaucagugagauaaaguggcc

SEQ ID NO: 4184779 - RNA, 122 nt, Human
ggucagaaaggcauauuaucugcauauuagcagccuauucuucucuuggagaauaucuaaguacgcaaggagauccaagagaagauggguuaucaggaugugaagaguaguuaccuguggcc

SEQ ID NO: 4184780 - RNA, 58 nt, Human
ggucagaacaaggguaaauaaaugaaauguugauuaauuuguuuauuauguucugauc

SEQ ID NO: 4184781 - RNA, 76 nt, Human
ggucagaauggugucugucaucugagauggagugggguuuccauuacccccucugggugacagacucuugguuacc

SEQ ID NO: 4184782 - RNA, 71 nt, Human
ggucagagcagcauuuuacaggaugauaaauuacccucguuuagcugaauccuagaagugcaugucugacc

SEQ ID NO: 4184783 - RNA, 59 nt, Human
ggucagagccauggagcaacuggcccaaaguuacccaguggcucuucugggcuuugacc

SEQ ID NO: 4184784 - RNA, 65 nt, Human
ggucagagggcguacugaaguaggaagaggagggcuugccugccagcugcuucaggcgccuugcc

SEQ ID NO: 4184785 - RNA, 68 nt, Human
ggucagaggggauuccuugggagagagaauugcaguaccagauugcaggccgagggcccugucugacc

SEQ ID NO: 4184786 - RNA, 61 nt, Human
ggucagcacaaauggccguguucaaagaagucucugacucuuugccaagucguuuggcacc

SEQ ID NO: 4184787 - RNA, 66 nt, Human
ggucagcaguguagcaucuucaaaagucugucucucugcuucugucacaauuugcuuacucugacu

SEQ ID NO: 4184788 - RNA, 60 nt, Human
ggucagcccugcggagguguauacugugguggcagccacuccucuucagcagggaaaacc

SEQ ID NO: 4184789 - RNA, 79 nt, Human
ggucagcucccuuucuugacaucucaagagcuggcuucagccccaggacacaguucuuagcaggugucuuugagcuacc

SEQ ID NO: 4184790 - RNA, 88 nt, Human
ggucagcucgucaaucuugugcuugcagcuggggagagugaguagacauuucgccugacguuugcugccagcauaaaaaugaguuacc

SEQ ID NO: 4184791 - RNA, 64 nt, Human
ggucagcuuucuauguugcuaaacaacaggggauucuggguucaguaacguugaaaggcaggcc

SEQ ID NO: 4184792 - RNA, 62 nt, Human
ggucaggaagaaggguggugaguccuauuauuuagucuccuuugguacccuuuuucaaaacc

SEQ ID NO: 4184793 - RNA, 57 nt, Human
ggucaggagcccuuggcccccucuccacccuugggcuggggcccaagcccucuugcc

SEQ ID NO: 4184794 - RNA, 79 nt, Human
ggucagguagguccagcugucuagcuuuguagagggagggcagguccuucccaaggcacagggcagggacuccuugacc

SEQ ID NO: 4184795 - RNA, 56 nt, Human
ggucagguccaguaaaaagaguccuccgguggaggagggugaggcuggaguuugcu

SEQ ID NO: 4184796 - RNA, 60 nt, Human
ggucaguccccuggcaggagggacgugcagaaaagcacggggcaggcagaggggcuggcc

SEQ ID NO: 4184797 - RNA, 88 nt, Human
ggucagucugguaaacugcaguuuuugguaaaagcacccuggcuggcugacacugccgaaacuguagaguuuucauuaccuacugacu

SEQ ID NO: 4184798 - RNA, 74 nt, Human
ggucauaauaaugauaaugguuauagcuaugagaaagacauuaaguacuauauacacauuaucuuguuguaucc

SEQ ID NO: 4184799 - RNA, 66 nt, Human
ggucauagcacuguucacacaauguucuggggagcccaggagcuccuugaaggcaguagcuggacc

SEQ ID NO: 4184800 - RNA, 71 nt, Human
ggucauaucuauuuucaagggagcaagaaagugcaguugcauugugugcuucagagaagaauggaaagauu

SEQ ID NO: 4184801 - RNA, 101 nt, Human
ggucauauuugaaaugguguuauuuuucaauagaaguucuucacgaaggcaucaucucuaaaaugugguuaucuuuuguuaggagaaaacaucaaaugacc

SEQ ID NO: 4184802 - RNA, 61 nt, Human
ggucauucagagucugcuagugccacggccugcccaauaggagcuggcagaauuuugaacc

SEQ ID NO: 4184803 - RNA, 62 nt, Human
ggucauuccugacugggaagguugcuugacaagucaggauugugccuccagucagaaggacc

SEQ ID NO: 4184804 - RNA, 85 nt, Human
ggucauucucugcaaaugccuacuaaagcaaauauaacucuugcaaguuagcuuuggauucuuuggggaauguagagaaacagcc

SEQ ID NO: 4184805 - RNA, 85 nt, Human
ggucauucugcacuuccuuugcuucccuuccaugaccagcuggaacccccaucccggagaggcaguauuuggggugacagaugcc

SEQ ID NO: 4184806 - RNA, 72 nt, Human
guaugguagaauacaaaauauauacuggagacuuguaaagucucuuagaaccuuguuuuggaacugccaugc

SEQ ID NO: 4184807 - RNA, 82 nt, Human
guaugguggcaaugguagaauuauguauuggcuuuuaaagcuucuucucaaaagucacaugcauuuucuucaauucacauau

SEQ ID NO: 4184808 - RNA, 101 nt, Human
guaugguuaucccuuggcuauuagguaugugguugcuaugacuaggguuuggaauaguaucacaacgucauauagcuauuuacaauagcaaaugggcauau

SEQ ID NO: 4184809 - RNA, 92 nt, Human
guauguauucauuccugauucacaaacaaugcuuuggaauuuauaguguauguaguuucaaauccuguuuggauacaugaggaguaucauac

SEQ ID NO: 4184810 - RNA, 62 nt, Human
guauguauuuauggaguccucacuauguaugucacacuggauuagguacuaugaauauauau

SEQ ID NO: 4184811 - RNA, 83 nt, Human
guaugucaacuacucaucaagacaaauacuaauggaagguuuccacaaauuagguuuugcuuguguaaugguaggaagacaac

SEQ ID NO: 4184812 - RNA, 60 nt, Human
guaugucaugagccuugugcgucaccucacuguggugcaugugcaagggcgugugcacgc

SEQ ID NO: 4184813 - RNA, 105 nt, Human
guaugugaauaauuucuauuaguucuauaagcagauagaguaugaccuacugguauuaccuguacugcuuuauggggcaaaccucuagaucaaaccucuacguau

SEQ ID NO: 4184814 - RNA, 59 nt, Human
guaugugacacuuagaacagugucuagcacauccuaagcacucaauaaaugucauaugc

SEQ ID NO: 4184815 - RNA, 65 nt, Human
guaugugcagguuaagucuacaguggaggugggaaacagccuuugcagaagaaaccuacaaauac

SEQ ID NO: 4184816 - RNA, 67 nt, Human
guauguggaagaaggugguguugguaggucacagaagggugggcccagccagccucuucccauaugc

SEQ ID NO: 4184817 - RNA, 103 nt, Human
guauguggauuuaagugcauguguguauaaaugcguguguguauaagugugugugcguauguauaaaugcauguguggauguguauauguaugaucuacaugc

SEQ ID NO: 4184818 - RNA, 89 nt, Human
guauguguauuguuguaucuaccugcagauauguaugucuuauuguaucuacauguagguauguauguauacuuuuaauguacacauau

SEQ ID NO: 4184819 - RNA, 61 nt, Human
guaugugucuuagaacuugggacuuagaacucuccccuucucccuggaaugagaugcauau

SEQ ID NO: 4184820 - RNA, 55 nt, Human
guauguguugaauucaggggucgugacuuacaccacucugaaguccagggcauac

SEQ ID NO: 4184821 - RNA, 62 nt, Human
guauuaggugguggaauuguagaugaaguuuucuuucuucaaauaauuucauuuacuuaugc

SEQ ID NO: 4184822 - RNA, 60 nt, Human
guauuagguuggugcaaaauugacaauggcaaaauacacaauuuugcaccaaccuaauau

SEQ ID NO: 4184823 - RNA, 59 nt, Human
guauuauuuacauacauguguguauaucuacuuguguaugugcauauguguaagaauac

SEQ ID NO: 4184824 - RNA, 90 nt, Human
guauuauuuuaucccuguuuugugagucaauguauugcagcaacuauugauuguuggcaagauguauugaucauuagggucuaauauggc

SEQ ID NO: 4184825 - RNA, 129 nt, Human
guauucaaaguaucaauaaccuuggaaaauacaaugcuuuuauuuaauaucuugcauguaauucccuauguggaagaaaguguguauguuuaauagaaugcauugguuuggaaagaauacuuugaguau

SEQ ID NO: 4184826 - RNA, 76 nt, Human
guauucacacacauuuagagcagaauuugauuccaauacucuaaucaaugaacaucuagcaaaguguggugaauau

SEQ ID NO: 4184827 - RNA, 69 nt, Human
guauucacuguugaccuggaagugggucgggucaauacuucccauggugacuauggucaacagcgguac

SEQ ID NO: 4184828 - RNA, 58 nt, Human
guauucagugacaggguauuaugagcucuuugugcacauaauuccauguuaugaaaac

SEQ ID NO: 4184829 - RNA, 70 nt, Human
guauucaugaacgaacauauguauaaauauaaacauucagguaauuauguguauguucauucaugcaugc

SEQ ID NO: 4184830 - RNA, 112 nt, Human
guauucaugggcagcuccaaugugagcaaucagcacugucuuuuauuugaaggauacuguccuuuaagcguaagucaugcugacauguaauaaauggaguaucuauguuugc

SEQ ID NO: 4184831 - RNA, 56 nt, Human
guauuccugcaaauagcagugaaauguuugcaaggcagugugguuuucaggaauau

SEQ ID NO: 4184832 - RNA, 81 nt, Human
guauuccuuuccucucugaguggguauuaacaagauuagcauuaaugggaauuaaauugguuuagagaggaacacauaugc

SEQ ID NO: 4184833 - RNA, 86 nt, Human
guauucgguuggugcaaagguaauugugguuucugccauugaaaguaaaggcaagaaccucaauuaccuuugcagcgaccuaauac

SEQ ID NO: 4184834 - RNA, 67 nt, Human
guauucugccuucagacaccacagccaguuugauaguugucccacaugcuguucugaagcagaaggc

SEQ ID NO: 4184835 - RNA, 74 nt, Human
guauuggcaguauacauagcacuacucaagaagccaaagaaacacuugugcagugcuaagugucacaugucugc

SEQ ID NO: 4184836 - RNA, 71 nt, Human
guauugucauagaggccuauauaauuuaggaaaacaaacucuggaaaauuuaugcuucucuguggaaauau

SEQ ID NO: 4184837 - RNA, 77 nt, Human
guauuucacauauggauaugcuauccauugauauuauaauagauaaauaaauuguagcauaucuuuguguggaauac

SEQ ID NO: 4184838 - RNA, 71 nt, Human
guauuucauccauucugauguauuuuguuuuguaccugauaaaaugaagauaaaaugggauggagagagac

SEQ ID NO: 4184839 - RNA, 120 nt, Human
guauuucuucaagcuauuuugcuuccuuuccccaaucauaucgaauguguuuuuaacuuaauauaaucaaagcaaccugguaaugacuggaaaaggggguaaagaaauugacugaaaugc

SEQ ID NO: 4184840 - RNA, 85 nt, Human
guauuugauacugaaaaacuggaugucccuguaugauucgucauaaauuaagcgaacacagcagggauaaccacucuucaaguac

SEQ ID NO: 4184841 - RNA, 67 nt, Human
guauuuggaaaggacauguaaguauaauuaucucaguaagaagcuuacaaauugucuuuuaaaauac

SEQ ID NO: 4184842 - RNA, 56 nt, Human
guauuuggucuauuuggcauccauuuaucacagggccaaaucacagggccaaaagc

SEQ ID NO: 4184843 - RNA, 75 nt, Human
guauuuguugaauaccccugucuuuguuugugcugcuauaacacaguaccugagacuggguaauuuacaaagaac

SEQ ID NO: 4184844 - RNA, 74 nt, Human
guauuuuacugaaauuccauuucagccacagaaaugccgaaugccugccggugaaauguaauuucuugaaguau

SEQ ID NO: 4184845 - RNA, 103 nt, Human
guauuuucagagacagcacaggaagugggccuucacaaugucaggauacaggaagcuaucggacuauugaaggccacuuccugugagcuggucauucacauac

SEQ ID NO: 4184846 - RNA, 61 nt, Human
guauuuucaugauuucagaccacugggucacuguggugauuauuggagugauggcagguac

SEQ ID NO: 4184847 - RNA, 106 nt, Human
guauuuucauuuauacugguaugaaaugauuccauguuauauuacuuaguuagcaaaaugguaugcauaguaugguuucauuugaguaaaauauaaaaaagaauac

SEQ ID NO: 4184848 - RNA, 73 nt, Human
guauuuucucuuuaguuucauuaguauucuaauauugauauuagugguaaggaugaaauuucaggguaaauau

SEQ ID NO: 4184849 - RNA, 130 nt, Human
gucaaaaucuuuuuguguauauauguuuuuuucaguugauacacaauggaacaauguucaugaaccugacauuugcuuuguaguguuaagagaauguaauggcaucuauauucagugaaagcguuuugau

SEQ ID NO: 4184850 - RNA, 77 nt, Human
gucaaaauuacaagccaucuccuucgcucucccauggugaauuggggagcugugggauugguugaguguaugcugac

SEQ ID NO: 4184851 - RNA, 94 nt, Human
gucaaaauuucaaauuugagaaggaggcaagagucuugucgugcaaggcacugguccauuuucugcagcagguuugguucaauuaauuucugac

SEQ ID NO: 4184852 - RNA, 73 nt, Human
gucaaacauccgggauuaugugugauauaaaauuuuuugaauuauauguauguccuuuaaaaggagccaugac

SEQ ID NO: 4184853 - RNA, 66 nt, Human
gucaaacuugauuguaugaaguuauuuuuagccaugguuugaaauaucuuuagcaaucaagaagac

SEQ ID NO: 4184854 - RNA, 72 nt, Human
gucaaagccagguuucuuuagcugucauggaaagaagagagcuuaguggcaguuggaaaaacgguuuguaac

SEQ ID NO: 4184855 - RNA, 57 nt, Human
gucaacuccccaugcacugucccuggauucggaagguacaggcgcuggggagauggc

SEQ ID NO: 4184856 - RNA, 77 nt, Human
gucaagagggcacugcuuuuaccuaggugagagacagugguggcuuggaccagggugggagcaguagaauucuugac

SEQ ID NO: 4184857 - RNA, 57 nt, Human
gucaaguuuauccgcucauucaucauucacaccucagaugaagcggguuuccuugau

SEQ ID NO: 4184858 - RNA, 91 nt, Human
gucaauacugcuggacugaaacugguaagaaugugaugauuauacaucauuguguccuaacaucuaguuaaaguucugaggcacuauugac

SEQ ID NO: 4184859 - RNA, 59 nt, Human
gucaauauagaucaaugcacaguauacaauagaaugaauuguauugaucuaauauuggc

SEQ ID NO: 4184860 - RNA, 70 nt, Human
gucaauauuuuugguuuuccuuugggucaaacuggguaccguugcagagguugagcaaaaaugauaugac

SEQ ID NO: 4184861 - RNA, 112 nt, Human
gucacaaggguguggggucagugucugcuggugagcuguauauuguuuuaauauuacuuauauugagaccagugcuugcuuagcuaccagagaaaaauaaacauauuguggc

SEQ ID NO: 4184862 - RNA, 64 nt, Human
gucacaauguaggcugaaaaagcuuugugaacguuccacaaagcaucaacacuauauugaugac

SEQ ID NO: 4184863 - RNA, 64 nt, Human
gucacacaaccucucugggccugcuuccugaugauuagauuagaaugccuagagagagugcgau

SEQ ID NO: 4184864 - RNA, 59 nt, Human
gucacacagagcccugugcucagguggacccugagcuuggauuaaugcucugcugucac

SEQ ID NO: 4184865 - RNA, 65 nt, Human
gucacacagcaguuuagaggacagccaagucugggcugccuggcugccuccagcugcugccugau

SEQ ID NO: 4184866 - RNA, 77 nt, Human
gucacacagucaaguguaguggugucaggucuaucugaccuaaaguccaugaucuuccuucauuaugcucuguugac

SEQ ID NO: 4184867 - RNA, 81 nt, Human
gucacacuaaagcagcacaguaauauugguguuuaauauauauuucacuacgccaauauuuacgugcugcuagaguggaac

SEQ ID NO: 4184868 - RNA, 57 nt, Human
gucacacucuucccuccacaugcccugcagggcuacucuuggaggcagaguucuggc

SEQ ID NO: 4184869 - RNA, 94 nt, Human
gucacacuuugagaagcaugguucuaaaggacuauacagauuaaagucauuaaucucugugggcuuuggacuugaaguuucagcagccuuugac

SEQ ID NO: 4184870 - RNA, 59 nt, Human
gucacagaguuauuaauuguguuagucuucuuaaugcaccaauguuugacuuuguugac

SEQ ID NO: 4184871 - RNA, 68 nt, Human
gucacauaggcccuuggacucaugcucgaaccggaaggucggguugaucaacaagggcucagugagac

SEQ ID NO: 4184872 - RNA, 117 nt, Human
gucacauauguacuuucugguaugauucuacauuuaaaaggaaaaucugggcuguagauauagauuuggcaauguuuuagcauguagauaauauuuaaagacauaaaacugguuggc

SEQ ID NO: 4184873 - RNA, 79 nt, Human
gucacauauguuuauacuuugauguacucaugcaaaacacauggcaaaaauggguuuauuaaugugaacuguauaagac

SEQ ID NO: 4184874 - RNA, 62 nt, Human
guccuucugagugcccaggcaggccgggcccugugcugagcacugggcacauagcugagagc

SEQ ID NO: 4184875 - RNA, 125 nt, Human
guccuugagcaaccuggauucugguagugagugguguuuugggggugcuaggauccuggggacaauugggagcuccccaagauguugggugccuccggaauaaccugaagacaagguuggaggau

SEQ ID NO: 4184876 - RNA, 64 nt, Human
guccuugaugagauauuuacucugugaccauuucuuucucugagaguguuuuucugucaaggac

SEQ ID NO: 4184877 - RNA, 82 nt, Human
guccuugcuauugugaauggugccgcaauaaacauacgagugcaugugucuuuauagcagcaugauuuauaaucguuugggc

SEQ ID NO: 4184878 - RNA, 67 nt, Human
guccuugugcugaggguguugcuagcaugugcuuuacucagugagcagcagugacucagcacagggc

SEQ ID NO: 4184879 - RNA, 79 nt, Human
guccuugugggacacgggucuccccuucuccgggcucgcgggggacugguccaggagggggagccgugccggcaggggc

SEQ ID NO: 4184880 - RNA, 98 nt, Human
guccuuguuuuaacuuuccagcucuguugcccuggaaacguggugaagguggaaugucagcuguguuaccaggcaguauugcuuauaguagaaaugac

SEQ ID NO: 4184881 - RNA, 74 nt, Human
guccuuuggagaagaaugcauccuuaauagauguucaagacauauuugaagauugcuuuuuuuaaaaaaguggc

SEQ ID NO: 4184882 - RNA, 79 nt, Human
guccuuugggauaaagggggaccaaaugacuccuagcuagaagcugggagcuuggguguaccccaguacuugaaaggau

SEQ ID NO: 4184883 - RNA, 81 nt, Human
guccuuuugaaaugacaacuuuaauggguuucagcucuuuuaucuagagcuugagauaauucaagcugaguuuuucagggc

SEQ ID NO: 4184884 - RNA, 120 nt, Human
gucgaaagugaaugucuucaggaacggggugagacauguuaggggugcugcuuuccuaaacaacacgguagcaccacuucaugcuuucaguuaugugcauacugaacuuucauuaaaaac

SEQ ID NO: 4184885 - RNA, 84 nt, Human
gucgaccuuuucagaaggcaacuuaaaaagagaaugguggaauguuuguaucauugaauauaagugcuauuuuugaaaagugac

SEQ ID NO: 4184886 - RNA, 66 nt, Human
gucgagaagaaggacuuggaguuggauaaggaagcccccagcacuuuccaggccuuguucucagau

SEQ ID NO: 4184887 - RNA, 81 nt, Human
gucgaucgagcaucucugacaccaucucaugacagcccuacgggguauguagaagcugcucaaagaagaauuugaaucgac

SEQ ID NO: 4184888 - RNA, 68 nt, Human
gucgaucugagccuauggucagcauuugccaauaguguguacaugcagauuauagcuaaugauuugau

SEQ ID NO: 4184889 - RNA, 71 nt, Human
gucgcauggagaagguaguccauucuaagccauuucauauaaacuuauugggcaucuccucugugccaggc

SEQ ID NO: 4184890 - RNA, 81 nt, Human
gucgcuguagggcaggcugaagggguagaggggucuguaacgugaguccugccagagcagcuuguccuccaggaaggcgac

SEQ ID NO: 4184891 - RNA, 79 nt, Human
gucggaggaucugaaguccggguguugagcagccaucaggggaaguggcuguucuuucagcccagggcuugccuccggc

SEQ ID NO: 4184892 - RNA, 92 nt, Human
gucggccggggccccgcuguucuuugggagcuaaaaucugccauuucgcuuagcagagaccccaguucacaauagaagagguggccgccgac

SEQ ID NO: 4184893 - RNA, 106 nt, Human
gugagaacuuguuagaaaugcaauucuugggauccaucccaaaucuacucaaucagcagcuuuggagauagggccuagcaauuuaugucuuucugguaauucugac

SEQ ID NO: 4184894 - RNA, 55 nt, Human
gugagacacgugugugaccugguggcagccugugggaugugcauguguaacucau

SEQ ID NO: 4184895 - RNA, 83 nt, Human
gugagacagcccaugugauuuccugggaguaagcuccacacauaggucugcugcccacaaugauuacauggaugaugacuuac

SEQ ID NO: 4184896 - RNA, 61 nt, Human
gugagacugggggcuuggccuuuucuccagcaaggacaaaaaccauugucuucagucucac

SEQ ID NO: 4184897 - RNA, 68 nt, Human
gugagagguaugguauauuggaagaagaucccuaauucuucuauacucugaauaucuauaucuuuuac

SEQ ID NO: 4184898 - RNA, 81 nt, Human
gugagaggugaguuacaggaggagguccagacccugaccuuggaucucuuuguaauuaacuuaaugaccaugagcccucac

SEQ ID NO: 4184899 - RNA, 102 nt, Human
gugagaguauuuugacagcaacugucagcaaggugcaagcggcugccaucgccuccgauuggcugcagacaccuauggcaggaugcugaauaauauuccagc

SEQ ID NO: 4184900 - RNA, 124 nt, Human
gugagaugagaauccuuagagucugguucacuaugacugggauuguuccuguaugggggaagagcuauucccaagcuuagggcucucaguuacagugaauuaucucacaaggaucuuuaauuac

SEQ ID NO: 4184901 - RNA, 78 nt, Human
gucuuacaacugucauggcacuagaguggggucuugggaaccucuggcaucuuuccuuuaguugcugaguugagaggc

SEQ ID NO: 4184902 - RNA, 82 nt, Human
gucuuagcauccugcagcucuuacggagggcggggcagucucuggacuccugccuucggaggaacugcuauaagcgcaaggc

SEQ ID NO: 4184903 - RNA, 68 nt, Human
gucuuagcauuacaucuuugaugcaguaugucagaggacauagagcauucauagcauguaagaaggau

SEQ ID NO: 4184904 - RNA, 69 nt, Human
gucuuagcugaaugccuuggauuuuuacugcuucuguaacaaauuuccauuaauuuaguggcuuaagac

SEQ ID NO: 4184905 - RNA, 69 nt, Human
gucuuaguuuugaagaauuaacagcuguggaugagagucuuugcacacagcgauucuucucuuuaggau

SEQ ID NO: 4184906 - RNA, 80 nt, Human
gucuuauaggugguauuuaaaauuauuuggcucuuucaaauaaaaaggggagugaauaaucuuggguauuaauaaaaggc

SEQ ID NO: 4184907 - RNA, 70 nt, Human
gucuuauccuucaggaaaccauccucaguaauucacguuggugagcggggcuccugguaggaguacagau

SEQ ID NO: 4184908 - RNA, 76 nt, Human
gucuuauuuuccuuacuuauaaaauagugauaauauuccuuugcuuucuggauuauguguaagugaagauuaagac

SEQ ID NO: 4184909 - RNA, 60 nt, Human
gucuucagccaagagaagguacgaccuacuccugaguucuuggcuucucuggcagaagau

SEQ ID NO: 4184910 - RNA, 77 nt, Human
gucuucaggcuuaugccaucuuccagagaccugcagcaguucugucagucccuuaaagguggcagcagcuugaaggc

SEQ ID NO: 4184911 - RNA, 62 nt, Human
gucuucaguggcaaauggaucugucaacaggcuccauugccugggguuguugcugcugagau

SEQ ID NO: 4184912 - RNA, 60 nt, Human
gucuucaucugcgcacuuggggaaauacaggcaucuaucccugagggugguugugaagau

SEQ ID NO: 4184913 - RNA, 114 nt, Human
gucuucaugguaauaagaacuucuuuuuagguuucguauguggacaugcauucuuaucucauugggugcaauacauacuuagacccagagaacauguucagauugucauaagac

SEQ ID NO: 4184914 - RNA, 90 nt, Human
gucuucccacccggggcgcauuucuguucaucaucuggacacaugcggcucgcagauguguuuccuggugaacaucugggguggggcggc

SEQ ID NO: 4184915 - RNA, 59 nt, Human
gucuucuagaagcucgaaaaggaaaggaggcaguuucuuccuuagaguuuccagaaagc

SEQ ID NO: 4184916 - RNA, 92 nt, Human
gucuucucaaaauggguucagauugacccagugggucuauuuauaaauguaaccaaugaaaggucaauucuauaggucauaauuugagaagc

SEQ ID NO: 4184917 - RNA, 68 nt, Human
gucuucucuucagcucugcuucucccauucauuuagguaauuacuggagggagccagcuguggaaggc

SEQ ID NO: 4184918 - RNA, 67 nt, Human
gucuucugcccaggaggucccauggggcaugaaauauugauuuaggaauuugcugggcaugaaugac

SEQ ID NO: 4184919 - RNA, 64 nt, Human
gucuucugccuccauuagaguugcuucuggagaugucaaaauauuucuaauguuggcagcaggc

SEQ ID NO: 4184920 - RNA, 63 nt, Human
gucuucugcucuccauacuuccgcaccuggacccuggggugagggugggguggggcaugaggc

SEQ ID NO: 4184921 - RNA, 62 nt, Human
gucuucuggccaacuugcuuguuggcauaaccugucgacuugucuguguggcccaugagggc

SEQ ID NO: 4184922 - RNA, 60 nt, Human
gucuucuguuuacuuugaaguuguccauccugauaaugaucaccugguaaagagagagau

SEQ ID NO: 4184923 - RNA, 55 nt, Human
gucuucuuuucagucugcuuguucacuaacacgagcgcagacaaugugaggagac

SEQ ID NO: 4184924 - RNA, 67 nt, Human
gucuucuuuuguccgggugcugggguuggugggcaaauguccucagaguccaguuuggcaggaagac

SEQ ID NO: 4184925 - RNA, 84 nt, Human
gucuugaguuugaacuucaugccaagcauguucagaagucuuugcagagauucaagcugugguguggggugcaggugauaagau

SEQ ID NO: 4184926 - RNA, 83 nt, Human
gucuugaucacauauuuccagaacagaauccagagaaaggaggggugcuacuggagcugaggggaaugcugagagcuuggggc

SEQ ID NO: 4184927 - RNA, 78 nt, Human
gucuugauugaauucaaaugcaaucuucguucagcuaaaaaauaaugagccagguuuauuuagaauuucaguuaugac

SEQ ID NO: 4184928 - RNA, 69 nt, Human
gucuugcaggaauagcuacagagcugguaugucacugaggucccagauucuucuguauuuuugcuuugc

SEQ ID NO: 4184929 - RNA, 68 nt, Human
gucuuggccgugcagaugaagaacugggaaccauuuguguugaguccagcauuugccauggacaagau

SEQ ID NO: 4184930 - RNA, 63 nt, Human
gucuugggcaccuuucuauauucaguggcucagaauaccuagcucacagagggugcuuaauac

SEQ ID NO: 4184931 - RNA, 74 nt, Human
gucuugggccccucauuucuccaaugccagaugccugggcagcagggcuggaaccagagugaggcaggugaggc

SEQ ID NO: 4184932 - RNA, 62 nt, Human
gucuugguguugucccugcccaaucuagcugaaaaggcaggcagauggcugcaccaaacggc

SEQ ID NO: 4184933 - RNA, 64 nt, Human
gucuuguauggcgacagcagguaauuaaaacaauaauuguuuucugauguugcuucugcagaac

SEQ ID NO: 4184934 - RNA, 55 nt, Human
gucuuuaaaaauaggcucaucacucugcuggagggggugucugggcuuuagagac

SEQ ID NO: 4184935 - RNA, 57 nt, Human
gucuuucaaguguuccaggcauugguauguucuaguguucucagcuacuagagagac

SEQ ID NO: 4184936 - RNA, 93 nt, Human
gucuuucucacuagacuaucucuagcucucucaccugcucucucucucugauugaagccagcugccaaguugugagaugcucucuggaaaggc

SEQ ID NO: 4184937 - RNA, 83 nt, Human
gucuuucucagccuguuguucucuuguuagcccuuugauguuucaaagcugacgaggucagcaucuuccaggcugcaggaaac

SEQ ID NO: 4184938 - RNA, 79 nt, Human
gucuuucuucuuuuuaaaaaccaaaggaauggagaacuugguaaguaccaccaacuaauccuuugaaaagaagaccgau

SEQ ID NO: 4184939 - RNA, 61 nt, Human
gucuuugcccucucugcaagcuagacucgcuacuggcccuucccagagugggccaagagac

SEQ ID NO: 4184940 - RNA, 82 nt, Human
gucuuugcuauugugaauagugcugcaauaaacauacaugugcaugugucuuuauagcagcaugauuuauaauccuuugggc

SEQ ID NO: 4184941 - RNA, 56 nt, Human
gucuuuggcuccccugggcagccgagagggaggaccgucugagggagcacgaaggc

SEQ ID NO: 4184942 - RNA, 60 nt, Human
gucuuuggcuugucuccucaguugcuuacaaaguuguaucugggagucaaucucaaaugc

SEQ ID NO: 4184943 - RNA, 62 nt, Human
gucuuuguuucuacucuggggcuguggauuccaacaaggucccuggaggaagaaacaauggc

SEQ ID NO: 4184944 - RNA, 71 nt, Human
gucuuuuuauuuaauauaaaacagcaacagcaacaagaaauuacgaugcuguaugauguuaaguggaaagc

SEQ ID NO: 4184945 - RNA, 77 nt, Human
gugaaaaccacaaugugcucuccaaggaaaaaaguagguuucccuauugcuuauucuugagagucaaauaguuucau

SEQ ID NO: 4184946 - RNA, 75 nt, Human
gugaaaagcggacuucaggaauucucuacaccuggacaucucccuugcucugguuccugauagauuccuuuugac

SEQ ID NO: 4184947 - RNA, 65 nt, Human
gugaaaaggaguccuuguuuucauuugaucuuauuaaauaugaaugaaauuggauaucuuuucac

SEQ ID NO: 4184948 - RNA, 76 nt, Human
gugaaaauguguagucauugaucaagaaaucccauuuauaggaaucccuucuugagaaauaauuaaacaugagcac

SEQ ID NO: 4184949 - RNA, 58 nt, Human
gugaaacaguagucuguggguuucaaaucagaggccauuaagcaaacugcuguuuggc

SEQ ID NO: 4184950 - RNA, 70 nt, Human
gugaaagcacuuaacuggaaaagaauuuucauccacaggaagaaaaaaccuucuguaguugugcuuuuac

SEQ ID NO: 4184951 - RNA, 56 nt, Human
gugaaagcaucugacugugccaguucugauuuugguacauaaauggauguuuucau

SEQ ID NO: 4184952 - RNA, 80 nt, Human
gugaaagugacugacaaguagaugaucuuucugcauagacucuaugccaaauaagaaggucuacagucauaaacauuuau

SEQ ID NO: 4184953 - RNA, 88 nt, Human
gugaaauaccuagcuuaguuuugagcaucugccugaguacuacugccugaguacuuccaguugucauaaagcuaggcuguuuauccac

SEQ ID NO: 4184954 - RNA, 86 nt, Human
gugaaauggugauaauaccuaacauugugcagagguuucugauuucagacucgaaggcccucucuacauguuagacgcuguuucau

SEQ ID NO: 4184955 - RNA, 75 nt, Human
gugaacccgcuucucuggguuagucuugucguuguacaaaugggaaaacugaggcucccgagggugugggucugc

SEQ ID NO: 4184956 - RNA, 98 nt, Human
gugaagaaggaacuguuaacuggcagcucgaugacuucugcauuccuuguggugaagccaugcaggauuguuggguucuguggcacuuucuccuuugc

SEQ ID NO: 4184957 - RNA, 73 nt, Human
gugaagaccaguccacgucaagaagagguuaagacuaugaucucacuucugucauguggcacaagcuuuucau

SEQ ID NO: 4184958 - RNA, 77 nt, Human
gugaagagcaagaugcuuagaagcagauuaucugguuugaaaacccagaucugaguaugauuugccugaaucuucau

SEQ ID NO: 4184959 - RNA, 130 nt, Human
gugaagagccacacugcgggucauuguguaccugaguagggaguucagaggcugguuugcaggcuccugccacaggccugacccugagcuucacaccuuauugaguuuucacuaaugccgauggcugucc

SEQ ID NO: 4184960 - RNA, 88 nt, Human
gugaagaggaacagaaagcaguagagggguagauguucuuaggaugauccacaucuguucuucucuugucccugugcuuccuggucac

SEQ ID NO: 4184961 - RNA, 57 nt, Human
gugaagccgucaaguagaucagcauucuugccuguuuucuuugcugaugagcaucau

SEQ ID NO: 4184962 - RNA, 64 nt, Human
gugaagccucugcugauuaguauaugacagauauaauaccauagccuauuagcuugggcaucau

SEQ ID NO: 4184963 - RNA, 97 nt, Human
gugaagcuucugcucuguauuuucaucuaagagucuuacauuuaauccacuuugaguuaauuuuuguauaugacguuaaguaaggguucaguuucau

SEQ ID NO: 4184964 - RNA, 55 nt, Human
gugaaggccaguaggguccuggccucacccaggccugccucuacuuaccucucau

SEQ ID NO: 4184965 - RNA, 90 nt, Human
gugaaggcugucucccacucaaggugucagcucauucauucuuccaacugaccugcagaggagagucuggcgcugagaugacaccuucac

SEQ ID NO: 4184966 - RNA, 58 nt, Human
gugaaggcuugacgucaucaggcagcauuagcaucaccugggacuuuucaagccucac

SEQ ID NO: 4184967 - RNA, 127 nt, Human
gugaaggcuuugcagggcuaguuuugggaaaucuuagguuuggcuucaucugacuccucuacuggagcgaggcgugcagccaagccugcuuagaccuccccaggccacgggcccgcggcagcccagc

SEQ ID NO: 4184968 - RNA, 55 nt, Human
gugaagggaaacgcucagcugguauaucaugucccagccacgaagcucccuucau

SEQ ID NO: 4184969 - RNA, 89 nt, Human
gugaaggucagcuggcuggucagugcacaacggcugugagacccaccucucauuuucuauugugggcugagucaugucacuaaagucac

SEQ ID NO: 4184970 - RNA, 76 nt, Human
gugaaggucuguuucucuucacucuagacugauaaggauccuuaaucagcaagacuaggggaauacuuaucuucac

SEQ ID NO: 4184971 - RNA, 60 nt, Human
ggugaugcaaaccuuacauggaccuuggggugacagggccuccuuggauuuuguauccuc

SEQ ID NO: 4184972 - RNA, 62 nt, Human
ggugaugccucagagaaaacuucuuccacaaauggccagaagaugucacugcagacagcacc

SEQ ID NO: 4184973 - RNA, 117 nt, Human
ggugauggugaauacaagaaaaccuauuaauuuuccagugauuuacagugcacuacauaacauaaugcauuguugauuuggagugugaaagcuguuaauuuguucuauuuagucacu

SEQ ID NO: 4184974 - RNA, 75 nt, Human
ggugauguuaugaagaugaauguacaacuuauaugcagguauguaauauaaacacaaugucaucauaaugucacc

SEQ ID NO: 4184975 - RNA, 72 nt, Human
ggugauguuccgagucuccaagggguugucgugagugcagucgggagagcgagucuggggcucggauucgcc

SEQ ID NO: 4184976 - RNA, 59 nt, Human
ggugauguugauggugcagacacauuguccaggcaagugcuagaaccccagcaacagcc

SEQ ID NO: 4184977 - RNA, 77 nt, Human
ggugauuuccuggagccaagccuaggccccccacacugguggggugagggucuggagcuuggcuaagggauugcacc

SEQ ID NO: 4184978 - RNA, 85 nt, Human
ggugcaaagagucccuuucugugugagugagcacugcugugucuucuccaccagagcuuaaaacuccauggaaagggacuucauc

SEQ ID NO: 4184979 - RNA, 72 nt, Human
ggugcaaccugagcgcguugcuuucuaagucucuuuuacaucucuuagaagguagacguguucaugggaauc

SEQ ID NO: 4184980 - RNA, 77 nt, Human
ggugcaagggcgcaggccacaguggagucucugggucuuccccgggugacuuugcuguuggcucugggccccacacu

SEQ ID NO: 4184981 - RNA, 57 nt, Human
ggugcagaaggaagggagcuggggaagauacucucauucucccucuacccucugacc

SEQ ID NO: 4184982 - RNA, 62 nt, Human
ggugcagauuugaaacauaauauuccuuuaagaaaaggaagcuuagauuuccagaucucucc

SEQ ID NO: 4184983 - RNA, 56 nt, Human
ggugcagccuccccagugacagccccaggucuuugccacuggagagcuggaaaacc

SEQ ID NO: 4184984 - RNA, 67 nt, Human
ggugcaggacgaaguggggguucgcaaauaccacaauauaaagcagacucugccagucuccugcacu

SEQ ID NO: 4184985 - RNA, 57 nt, Human
ggugcaggcgguggggcaaguaacggcuuuugguagccccgccccuccgacccgccc

SEQ ID NO: 4184986 - RNA, 61 nt, Human
ggugcagucagccauagccucuccuggcugccagccagugcaggcugagggugauuguguc

SEQ ID NO: 4184987 - RNA, 59 nt, Human
ggugcagugcaggguaauuauacacugugguauaauuuguuauaacuugggcugaggcc

SEQ ID NO: 4184988 - RNA, 80 nt, Human
ggugcaugaggccagaaugagucucuggggcucacagcagacagaccccagcugaacucuucuggacugacaaugcuucc

SEQ ID NO: 4184989 - RNA, 83 nt, Human
ggugcaugccgggaagcagcauccugggcagaccuugaaaagagacacuaggucggccggggaggcugcuggcaucugaaacc

SEQ ID NO: 4184990 - RNA, 55 nt, Human
ggugcaugguggaggugacccuggagagguuggcagggccagacgcuagagcacu

SEQ ID NO: 4184991 - RNA, 71 nt, Human
ggugcauuuucugcuucuuauuucauaaaaaaguuacaugugggcuuuagauugcagaggauuugggcacc

SEQ ID NO: 4184992 - RNA, 111 nt, Human
ggugccacauaugcacuugaguauuugggcauguggagggugcuuaaguuguguuucuccccaaagagguuaggccaauugcuccccacuccccaaccagguguaugcauc

SEQ ID NO: 4184993 - RNA, 58 nt, Human
ggugccacgagucaccuuccaggcaaggagucccagcugauggagacuuguggccucc

SEQ ID NO: 4184994 - RNA, 55 nt, Human
ggugccagaagauuuggugucuggugaggacucacucaccacuucuuuuugcauc

SEQ ID NO: 4184995 - RNA, 73 nt, Human
ggugccaggaggggguggaguuucgccggcccgcggacagaggcugccggaucucccgacccccuccagcacc

SEQ ID NO: 4184996 - RNA, 74 nt, Human
ggugccagggcuccauugcucauccuugagccacagaaagggccaaguucaggaauugccuggggccugggauc

SEQ ID NO: 4184997 - RNA, 61 nt, Human
ggugccaucugggguggacuuuaagcaaagggugacacuuagcagguggugacucgaagcc

SEQ ID NO: 4184998 - RNA, 79 nt, Human
ggugcccacugccaucgggggccccacugccagagucuggggcaguugggcagauggcccccgguaguucuggugcacc

SEQ ID NO: 4184999 - RNA, 68 nt, Human
ggugcccagguaccuugagccguugcugaugagaaugcucucccgaauggucagggugcaguaauacc

SEQ ID NO: 4185000 - RNA, 74 nt, Human
ggugcccucaggcagggagucuuucacccucugucauuugauaggagaaaguuugccucucucuugagccagcc

SEQ ID NO: 4185001 - RNA, 62 nt, Human
ggugcccugagccccucacuguccuuccaagacauggcaggcagagagcauggcuggggccc

SEQ ID NO: 4185002 - RNA, 65 nt, Human
ggugccggucuuaagcugacugugaccacguuaaauuaaggauucauaggaaggaaggcgguguc

SEQ ID NO: 4185003 - RNA, 79 nt, Human
ggugccucaacuuuuaaauuugauaaagugauuuccacucauugaugucaccagauuuguuacauuaaaaaguaggucc

SEQ ID NO: 4185004 - RNA, 113 nt, Human
ggugccuuaaugucucuagcaucaguuuccuuagcugugaaaugagaauuauuauaauuccuacauacaaggcuaaaauuagcugauauagauaaggcauuuagaaaggugcc

SEQ ID NO: 4185005 - RNA, 64 nt, Human
ggugccuuaucugcacccucccccuccuguccccugaggagggacagagugcagaggggccucc

SEQ ID NO: 4185006 - RNA, 79 nt, Human
ggugcgcaugcaguggggcugcaguuggucccuggagggaagcagagcuggagcagccccacuggccagugucgauacu

SEQ ID NO: 4185007 - RNA, 57 nt, Human
ggugcgggagcagggugcuucugaguuagcgguggcucuggugcccuggcucccacc

SEQ ID NO: 4185008 - RNA, 65 nt, Human
ggugcguuuauguggcucaucuuugggaaguaaauauguaagaauuuauagucaauaaacguacc

SEQ ID NO: 4185009 - RNA, 89 nt, Human
ggugcuacaagucaugguuuauuucucugaaagguuaucugaaaauuaaaaaucaaugaaucuuagaauaaauacugacuuugaguauc

SEQ ID NO: 4185010 - RNA, 62 nt, Human
ggugcuaggaggguuauggcaagaucuggccucacagaugaagucauuauccuuuugguuuc

SEQ ID NO: 4185011 - RNA, 78 nt, Human
ggugcuaucaggugauagaaucagauaaaaggauuuccuauaaggcauucugcugguaacucuauaaaagguggcauu

SEQ ID NO: 4185012 - RNA, 101 nt, Human
ggugcucaggaagaucaaaucaaacugauuuguuauuuuuauagagugcuguauguauguguguaugacagacagagaaagagagaucuuccuugggcacc

SEQ ID NO: 4185013 - RNA, 110 nt, Human
ggugcucugauguggccagcggcgugggcuggacccuccugcucccuccucccucccggccuggggcaggguuuguccccaggagccccgcgucgcaucccuaggguacc

SEQ ID NO: 4185014 - RNA, 109 nt, Human
ggugcucugcuucucgaaacugggcucugcaucacucuuacuggcuuuugauugggauuauaucaauucucuguggugaugcugguggcccugugcugaauugggcacu

SEQ ID NO: 4185015 - RNA, 85 nt, Human
ggugcucuguucacugaaugauauaagaucuuucuaaauugagcuuuuagaaauaguuugguauuuucaugaaaaaaauaguacu

SEQ ID NO: 4185016 - RNA, 70 nt, Human
ggugcugauguuauugaugcugcagauuucaugagguggagacacucacuuuagcucagucgacagcccc

SEQ ID NO: 4185017 - RNA, 67 nt, Human
ggugcuggcuacaaguguguuuaguuugugacaauucaucaaacuguauauuuauggcaugugcgcu

SEQ ID NO: 4185018 - RNA, 60 nt, Human
ggugcuggguuccaugagagaccuacugggucagaaucucucagauggggcacuaguauu

SEQ ID NO: 4185019 - RNA, 72 nt, Human
ggugcugguuacacaagugugugcaguuuguaaaaacucaaugagcuguacauuuguguacacuugucugcu

SEQ ID NO: 4185020 - RNA, 56 nt, Human
ggugcuugguugaggucucuugguugagagacagaaaggggcaaacccaggacacc

SEQ ID NO: 4185021 - RNA, 100 nt, Human
ggugcuuuuccuagcuuaaggcaaguaagugaugggaggcuucaagagaaacucacaauggagcagcaucacuuugagcugccuuugcaagaaggauacc

SEQ ID NO: 4185022 - RNA, 65 nt, Human
ggugcuuuuguugugguuuuaguaucagcacuauagaacagauacacugacugggacagaagacc

SEQ ID NO: 4185023 - RNA, 75 nt, Human
gguggaaagccaggccagacucacacccuugcucuucucuugcaguuggggaauggguuuuucugucugucuguc

SEQ ID NO: 4185024 - RNA, 127 nt, Human
gguggaacaggaaggugcaagacuucggcuucauguuugaguggcggaggaagcaugucacccugaaggcaguuggcagccacuuugcaaccaagagagaagccaaccuuggaguaaaccugauacc

SEQ ID NO: 4185025 - RNA, 95 nt, Human
gguggaagaauugcuugaacuugggaggcagagguugcagugagccaagauugugccacugcacucaagccuuggccacagagcaagacuccauc

SEQ ID NO: 4185026 - RNA, 113 nt, Human
gguggaagcuuacagaaagaagggcaucuucacauauuuccaaugauuauucaggaaaagucuuuuggugacuugugggauguuaaauuuaacuuucuucuuauguuuuggcu

SEQ ID NO: 4185027 - RNA, 76 nt, Human
gguggaaggggcaaugggcuuuucuguaagggcacuaauccccuucaugagacuccacugccaugaccuuaucacc

SEQ ID NO: 4185028 - RNA, 95 nt, Human
gguggaauuucuucuuccuuguagggcuggggagugaauaagggacuccuugucuugucucuuaaaggucuucagcugacuggaugaggcccacc

SEQ ID NO: 4185029 - RNA, 59 nt, Human
gguggacagugcugcaucuccaugccagccaagugugugacaggagagucacuucugcc

SEQ ID NO: 4185030 - RNA, 61 nt, Human
gguggacgucaaucagugucaguccaagcaaacuggaggucugcccauuugugaugucccc

SEQ ID NO: 4185031 - RNA, 80 nt, Human
gguggagaagggaagaaacaguucuugagccccuacuguuuggugaauguucacauguguuaucuucuuuaauccccacc

SEQ ID NO: 4185032 - RNA, 64 nt, Human
gguggagacuagaccagaggugagugaucuuuggggauaucuuuggccuugucuggucuucucc

SEQ ID NO: 4185033 - RNA, 64 nt, Human
gguggagagaugcugcccgcagacgugacccccgguugguuugcuccgggcaauauuuugcacc

SEQ ID NO: 4185034 - RNA, 64 nt, Human
gguggagagcaggcuagagggaggcuggcgagaugggccaggucaccauggcaugcuccacacu

SEQ ID NO: 4185035 - RNA, 62 nt, Human
gguggaggagccgggggcugaggaagggaugaagccauccccuagucuuccgcguccccacc

SEQ ID NO: 4185036 - RNA, 83 nt, Human
gguggaggcuaugcaugugugagagcaagagguauauggaauuucucuguaccuuccucuuaauuucgcugugaaccuaaacc

SEQ ID NO: 4185037 - RNA, 91 nt, Human
gguggauaacagcccccucuucugucccuugggucacaacucugaggugcuuucuacacagcugcucagaggggaccuagcagagucuacc

SEQ ID NO: 4185038 - RNA, 61 nt, Human
gguggauugaacuaagaugguagcaacagauagggagcuaugguaauguucaguauccacu

SEQ ID NO: 4185039 - RNA, 61 nt, Human
gguggauuuaugcugagaaacaggcaaccuaagccuucauuaucaaugcaugaaaucagcc

SEQ ID NO: 4185040 - RNA, 68 nt, Human
gguggcacaguggcagcugcagcucgagucuccuaguguggaguccagggucccugcccucugucauc

SEQ ID NO: 4185041 - RNA, 79 nt, Human
gucauauacugagagcaaauacauucuuccuagacauaaaaguuuauaaacguuuggaugugugcucauauauauagau

SEQ ID NO: 4185042 - RNA, 63 nt, Human
gucaucacaugccuaucaugagcuggcucugugauucagucaguguugauuuguaucugagau

SEQ ID NO: 4185043 - RNA, 59 nt, Human
gucaucauccacuggagccggcagggaaugugccccugugggucacaugggugacugac

SEQ ID NO: 4185044 - RNA, 63 nt, Human
gucaucugaaggcuaaaauggacugaaauccaagaugguucacucacguggcuuacaguugac

SEQ ID NO: 4185045 - RNA, 61 nt, Human
gucaucugcaucucuuauaaaugaugcaaauauguuucucuuaggucagagaucagauguc

SEQ ID NO: 4185046 - RNA, 61 nt, Human
gucaucugugcuuuugguaggaaaugugcugaccauguccugcauuuuaaaaggcaguugc

SEQ ID NO: 4185047 - RNA, 100 nt, Human
gucaucuugauccauggccccugcuauccugcaccaugaaugcagggagcccagaaucccagcagcaaggugaggguggaggugguugggugggggagac

SEQ ID NO: 4185048 - RNA, 112 nt, Human
gucaugaagccugagcuguccugggaacaggcacuaccucucucugagggagagcagcuugaccuaguuccucuucucagggccaugcuguaguuuucccugcuuuugugac

SEQ ID NO: 4185049 - RNA, 112 nt, Human
gucaugacccuacaagaaaaaguugaauugauugauauguacuguagauuaaggucuguaccuguaguugcaggccauuucagacauucaauucaucuuguaaacagaugau

SEQ ID NO: 4185050 - RNA, 59 nt, Human
gucaugccuuuaagagauacugaggacuguuuuugcagcuuaagucuguaaaggaugac

SEQ ID NO: 4185051 - RNA, 81 nt, Human
gucaugcugagccacccuugcuucccugcaggccuccugagucgcagccuaggaauguagcaagaggugagccaguguggc

SEQ ID NO: 4185052 - RNA, 69 nt, Human
gucaugcuuuggcccuccaccuggcugugcuccucuuacuggggcaaggagacuguagggccaagggac

SEQ ID NO: 4185053 - RNA, 78 nt, Human
gucauggaaauaagugguaccaagcucagugaagagauuuucuuuauguacuuacuauuacuauauuuaaaacgugau

SEQ ID NO: 4185054 - RNA, 86 nt, Human
gucauggauaacaaaggauucugggcaguuuauucaguucugucaaaacgaucacugaacuucuagcuugcucaggccuuccaugc

SEQ ID NO: 4185055 - RNA, 87 nt, Human
gucauggggagaacuugaacuuuuccucugaagaagaugggagccauggaaaucugagcagaagggugcacgugcugaccucaugau

SEQ ID NO: 4185056 - RNA, 78 nt, Human
gucauguacuaguuauuaauagagaggugggcuaaaaagcguuuuuauuccaguaaucucuguaauacaaagaacagc

SEQ ID NO: 4185057 - RNA, 84 nt, Human
gucauguccauucuuuuacguauugucgagggcugcuuggugcuccacuggcagaauugaauaguugugaagagcccacauggc

SEQ ID NO: 4185058 - RNA, 73 nt, Human
gucaugucucaucucuuaaccccacucacucucagagaguagagacagugguuuugaaagaggaagacagaac

SEQ ID NO: 4185059 - RNA, 77 nt, Human
gucauguucagcagccuagaagcucuaccaaccccauccuuuggauuuuuauggaggcuucauugcauagacaugau

SEQ ID NO: 4185060 - RNA, 65 nt, Human
gucauguuccugguggcuuugccaacuguagcaccuagcucaugguggcagaaguagcagaugac

SEQ ID NO: 4185061 - RNA, 104 nt, Human
gucauuagugaugcguuugggcagcuuugcccucacuguccucagucacaagaaaggauggacaugagcagaggacccuguagaaaaaggcagacauacaugac

SEQ ID NO: 4185062 - RNA, 74 nt, Human
gucauuaguugcuguuaagccacaauuagaucacuuuuugacaugacauaaaauuaguuuggcauaacugaugc

SEQ ID NO: 4185063 - RNA, 61 nt, Human
gucauuccucccuuggaguaagacacguacauaaauaauuauaauaugaggcaggagugau

SEQ ID NO: 4185064 - RNA, 57 nt, Human
gucauugacuagaauuccaaagcucaagguacacuuauggaaguugaagucagugac

SEQ ID NO: 4185065 - RNA, 118 nt, Human
gucauugcuguaauuguuaggaucauauuaccuuggaaaugcuagaguaacuuaaacagagaaaguguauuuuaguuccggguaaaacaaaucuaauagacccauuuaacucagugau

SEQ ID NO: 4185066 - RNA, 57 nt, Human
gucauuuaaagaccauugugggcuagagaguagggccuacagaggagagggaaaggc

SEQ ID NO: 4185067 - RNA, 99 nt, Human
gucauuuaaagaggagauggccacuuuugugaaauugaaagaaggaaauagugaccucuucauacucaucacauagguaucauucccuguuuaaacugc

SEQ ID NO: 4185068 - RNA, 58 nt, Human
gucauuucccucucaucucuauuauuacccaggugaaaggagaucaaagggagagaac

SEQ ID NO: 4185069 - RNA, 57 nt, Human
gucauuugagucagcaacaggauaaucugaaucugaggccaaaaugacucaaaugac

SEQ ID NO: 4185070 - RNA, 72 nt, Human
gucauuuuaucagcacacgucacuagcuucucaagugagacuacucugaagugaucuguguuugaagaaugc

SEQ ID NO: 4185071 - RNA, 65 nt, Human
gucauuuuucaggagaguuucggguaacugcagaagccuguguuuacuguuuucugauaaguggc

SEQ ID NO: 4185072 - RNA, 71 nt, Human
guccaaaauagaauuccaaguccagccaggccaaagaucccuggugccuggcuggacuuggugucugggac

SEQ ID NO: 4185073 - RNA, 93 nt, Human
guccaaagguaaaaaagagaacauaaggaauagaaauuguuaagcugcaaagaaacaucucuguauuuuauagacuaacuuuucugcuugggc

SEQ ID NO: 4185074 - RNA, 67 nt, Human
guccaacuuccuccuaaaacccaguccugucucucuaugcacagcuuuguguagaaggaggauggau

SEQ ID NO: 4185075 - RNA, 55 nt, Human
guccaagagggagcuacagagcaaaaauuguccugugcugggucccaucuugggc

SEQ ID NO: 4185076 - RNA, 69 nt, Human
guccaaggucacagggcuuauacuaauugucugacucuacuugacaauacaggcuucuggacuuaagac

SEQ ID NO: 4185077 - RNA, 85 nt, Human
guccacaauuagcaggcacuucugcugcuugucuuucucaggucaggagaugggccacaggagaggcugucagcuggaggugggc

SEQ ID NO: 4185078 - RNA, 58 nt, Human
guccacagagaaaguuccucucaggccacagaggccugcuggcaauuuuccugaagac

SEQ ID NO: 4185079 - RNA, 66 nt, Human
guccacagagggcugggcaggcgccuacucaggguagugugggccgaggcuuagcccaucugggac

SEQ ID NO: 4185080 - RNA, 75 nt, Human
guccaccugugguuguaaacaucgaaagagugacugcuucucuuuacauuuuuuuguagcaagcgcagauaggac

SEQ ID NO: 4185081 - RNA, 74 nt, Human
guccacuccuggguucuaaauuugaaauguucucucuuaaucaaugaacucuuggaacagcaccugguguggau

SEQ ID NO: 4185082 - RNA, 91 nt, Human
guccacuggauuuccuucauggagagagcuguuuuacucagaaacauaucuucagguuuguuuacaaaaaucaggucuuugggggauggau

SEQ ID NO: 4185083 - RNA, 67 nt, Human
guccacuucccuuggugaccagcuuggggugcccuaguauucacaggcuggucuccgaggacuggau

SEQ ID NO: 4185084 - RNA, 55 nt, Human
guccagagggucaaguuucuuggguccuuucccaagggaguugagucucaugggc

SEQ ID NO: 4185085 - RNA, 80 nt, Human
guccagccuauaguugacuuuggcuuaagcagcaguuguuggaacaaucuguuguggccaagaucauaaggucucaggac

SEQ ID NO: 4185086 - RNA, 70 nt, Human
guccaggacugcuccagacaccugcaggggcagauaaaauucugcugcaggugcugugagcaggugggac

SEQ ID NO: 4185087 - RNA, 101 nt, Human
guccaggcucccagcucccagucuguguccuuuacagugcaccacccucaugccuugugcaagaagccagcaccaaugggaauugucacaggaggcuagac

SEQ ID NO: 4185088 - RNA, 56 nt, Human
guccagggccccgagcaccaggcccagcagggcugucagugauuccggcucaggac

SEQ ID NO: 4185089 - RNA, 83 nt, Human
guccagggugagggcucagagcaggcccacugcccucccaguccagggugagggcucagggcuggcuuauccucacaacagac

SEQ ID NO: 4185090 - RNA, 60 nt, Human
guccaguaacacuaagaaucuaaauuuaaauuuugguuuaguuugggauuggugcuggau

SEQ ID NO: 4185091 - RNA, 67 nt, Human
guccagugacaaguagcuggccaugugaaaacagaagugcaggcauaaucugcugugucgucugggc

SEQ ID NO: 4185092 - RNA, 88 nt, Human
guccagugugaggugcagcugguggagucugggggaggugugguacggccuggggggucccugagacucuccugugcagccucuggau

SEQ ID NO: 4185093 - RNA, 64 nt, Human
guccauacucaaauauuaguucaaggagccaauuucuagcuccuuagaacuuuucaguauggau

SEQ ID NO: 4185094 - RNA, 86 nt, Human
guccauccauuuguaucaacaugcauguuauuuaucaguauggaguauuauaaagaacaugugugugggaaucagaucaaugugac

SEQ ID NO: 4185095 - RNA, 55 nt, Human
guccaugcccucaccuggugggugaaacaacucaaaggucagacuuaggcugggc

SEQ ID NO: 4185096 - RNA, 103 nt, Human
guccauucugccuacucuaccuccaucagcacucagccuuccuucuccuugaggagaaugcagauggcugguguaugacugagaaggguauaggauaaggggc

SEQ ID NO: 4185097 - RNA, 55 nt, Human
gucccacauuacccugacugacaacuaagcaauugcuagacugugugagugggac

SEQ ID NO: 4185098 - RNA, 64 nt, Human
gucccacuguccucgcaggggaugggaucaggugucagcaccuccccauggaguacaguugggc

SEQ ID NO: 4185099 - RNA, 72 nt, Human
gucccagagagcacuaguccaucugcauguuaaacagauaggacacagugguucugugaguaaguuugggac

SEQ ID NO: 4185100 - RNA, 70 nt, Human
gucccagagccuccacagaugcaaagggcaguuauggucaauggccugagcucuggggaggcaagggggc

SEQ ID NO: 4185101 - RNA, 67 nt, Human
gucccagcugggagcggccauauuguuuucugaaaccauggaaaccauucccgacucuccuggguac

SEQ ID NO: 4185102 - RNA, 55 nt, Human
gucccaggaguugcugggccuugagggacagacacaggccuagcuuuuuuggggc

SEQ ID NO: 4185103 - RNA, 55 nt, Human
gucccagggcaaggcuguuucuggacaauaaagcauagccuucaggcccugaggc

SEQ ID NO: 4185104 - RNA, 78 nt, Human
gucccaggggacaagaagggaaagaguguguguuccccaggcugggguccagcucucacacccuccucccacuggggc

SEQ ID NO: 4185105 - RNA, 56 nt, Human
gucccaggugcccagugggcagccagaagcagcccacacuccugcacaccugggac

SEQ ID NO: 4185106 - RNA, 72 nt, Human
gucccaucuaugccuggcauucuggaagggucuaagagagugggcugcaaagaggccaggcugcagagggau

SEQ ID NO: 4185107 - RNA, 68 nt, Human
gucccaugagcaaacacucagcauccucugcaccauagaacacaugcuucuguguauguuucagguac

SEQ ID NO: 4185108 - RNA, 76 nt, Human
gucccauuccaucuugcauuugcuaaaaugcauuuggaaucacauuauuauagauuaugcaagauuggaagacggc

SEQ ID NO: 4185109 - RNA, 55 nt, Human
guccccacucagcucccaggacagagguaacucauggaagucuugaguagggggc

SEQ ID NO: 4185110 - RNA, 58 nt, Human
guccccagagcugguggugguuucucagcucugcauuuccaccucauugcucuggggc

SEQ ID NO: 4185111 - RNA, 94 nt, Human
guccccaggcagggcucagccugccucccugcugcugaggccccuaccaaauuggaacccgaguagcaccagggaagcagggccugcaggggau

SEQ ID NO: 4185112 - RNA, 62 nt, Human
gugaagucacugcaggcuaguggaggggucccaggcagaauccaggccugcaaugacaaagc

SEQ ID NO: 4185113 - RNA, 77 nt, Human
gugaagucccuugagggaguacuguuugagcagacuaaaggauaaagagccagaugugccuccagggugacauccac

SEQ ID NO: 4185114 - RNA, 88 nt, Human
gugaagucuaaauaauuacuuuuccuggaaccacugcuacuggguuauacauuaugcuucagggaaaggugauggcaagaguauucac

SEQ ID NO: 4185115 - RNA, 59 nt, Human
gugaagucucauuugaugcucugaacagggaaaguuuagagugaagguugacacuucac

SEQ ID NO: 4185116 - RNA, 67 nt, Human
gugaagugauuuguacaaaaugucguaguguaauuuauugagugucaugugguauuaaucgcaacau

SEQ ID NO: 4185117 - RNA, 72 nt, Human
gugaaguuuaggaaacgcugcuauugacuuugaugcugguucuucacagucgauucuguuucuuaauuuuac

SEQ ID NO: 4185118 - RNA, 56 nt, Human
gugaauaaagggaguuuucaaauuaugaauauaugauacuccaaaacuuuguucau

SEQ ID NO: 4185119 - RNA, 83 nt, Human
gugaauaagcaauguuuuggugagaaaguuuaucuggcaaaagauaggauagacauuugaaugugaaaugauugcuuauucac

SEQ ID NO: 4185120 - RNA, 70 nt, Human
gugaauagagcagccaagauagguauacaggaaaugcaaauguaauacacaagggccagcucuuguucac

SEQ ID NO: 4185121 - RNA, 70 nt, Human
gugaauagaugaauagaacaaugauugaaaggauaaauaacauaucuuaaucuguuuuaucauuuguuac

SEQ ID NO: 4185122 - RNA, 130 nt, Human
gugaauagguuaugugagaggugacuggguuauuugggaggugacugguuuaucuggcagugacuggguuaucugguaggggugacuguuaucggggggugaguugguuuaucuggggugccuggguugu

SEQ ID NO: 4185123 - RNA, 79 nt, Human
gugaauaugugaauaaacuugaucugauuaccgauaucuuuuuuaaaaagucucuuuagguauucauuuacauguucac

SEQ ID NO: 4185124 - RNA, 69 nt, Human
gugaauauugcauugggagagcugaaaaaguuuauguacuuucagacaucucauaauguauuauguagc

SEQ ID NO: 4185125 - RNA, 75 nt, Human
gugaaugaagcaaaaugucugcacauauucuuaguuaccuaaagguaugauguuagauuguuuuucuucacucau

SEQ ID NO: 4185126 - RNA, 59 nt, Human
gugaaugcaaacuguuucugauccucuuuccugauugggcuuaaauagaaugcauucac

SEQ ID NO: 4185127 - RNA, 66 nt, Human
gugaauggauaaauacuuggugguauauucacacaguggaauacuacauacuauguaaacauuuac

SEQ ID NO: 4185128 - RNA, 75 nt, Human
gugaauguacuuaagguggcugaauuauauacuuaaaaugguuaaaaugguaaauuuuaccuuauguauauuuac

SEQ ID NO: 4185129 - RNA, 81 nt, Human
gugaaugucaacaggcuuucuaaggcaaaagugguauuugaaucugguuuucuguuuuaugaugucguuguugguauuuau

SEQ ID NO: 4185130 - RNA, 58 nt, Human
gugaauuauauauuaagguccuuuagcacaguguugcaggacauuaguuaugaauuac

SEQ ID NO: 4185131 - RNA, 69 nt, Human
gugaauuccuucuagagcuuguuuaggugcuccuuggcuccuuggugcugggcucuggcaggauacagc

SEQ ID NO: 4185132 - RNA, 67 nt, Human
gugacaaaagcuuugcagcuaagcacaguaauuuauguugauaaauugcagcugucagaguguucac

SEQ ID NO: 4185133 - RNA, 59 nt, Human
gugacaaaggucaagcuuuugagcauggucaccauguaauaaagucuggacuauuucac

SEQ ID NO: 4185134 - RNA, 70 nt, Human
gugacaagagucucaagagaaauauuaacaaugauuuuggggguucagaggucucuggggacacuuucac

SEQ ID NO: 4185135 - RNA, 63 nt, Human
gugacaaggaaaggauuuuguaagacauuaguguacaaguugagcaauguugguuccugucac

SEQ ID NO: 4185136 - RNA, 77 nt, Human
gugacaauuauguuuauauaauaguuucauaaaggcuuguuugagccuaugugaaucucuuauuacuacgcugucac

SEQ ID NO: 4185137 - RNA, 95 nt, Human
gugacaauugauggaucguagggaccacaguucauuaacucuauaugccuaucucuugucaguggacuuuuaguauccuuauuuuccauuugcac

SEQ ID NO: 4185138 - RNA, 64 nt, Human
gugacacaguuguguuauuggcagugauaagacagaauugcacagaaacaggcaacgugugcac

SEQ ID NO: 4185139 - RNA, 65 nt, Human
gugacaccugccaagccucuaauucuucaccccgggaagagagaacacccucggcaugggcucac

SEQ ID NO: 4185140 - RNA, 77 nt, Human
gugacagagugaaaagcuagagcaguagcaucaagauauaaaccaaggcucauugucucucuuuucauauauauuac

SEQ ID NO: 4185141 - RNA, 58 nt, Human
gugacagccucuugggagguugaggccccagccccuuaucucuucaaggcugauuuac

SEQ ID NO: 4185142 - RNA, 67 nt, Human
gugacagccugcagccccaggucgcuggaggacaugcucagcagacucugugguugcagagcugugc

SEQ ID NO: 4185143 - RNA, 88 nt, Human
gugacagcuggagaauauguguccacaaacaacacaaagcauuauuuguguguuuuacaaauucucuuaaacgauaucacgcuuuuac

SEQ ID NO: 4185144 - RNA, 60 nt, Human
gugacagucaaagacaugacuugaugcggagaugugaagugugacuuuuuugacugucac

SEQ ID NO: 4185145 - RNA, 73 nt, Human
gugacagugcacaggagaggaaccuaaccuaguauaggaguaauggaaggcuucuucucuauguacaagugac

SEQ ID NO: 4185146 - RNA, 71 nt, Human
gugacauuucgugacgugagaacuaggacagcaaguauucauagaacacuucucacugggacaaaugucgc

SEQ ID NO: 4185147 - RNA, 75 nt, Human
gugacauuuuuccuuuuaaauaaaugucuuuacauuuuuaaaagugaauugauuuaaggggaaaaaagaguucac

SEQ ID NO: 4185148 - RNA, 91 nt, Human
gugaccaagcaaaaucuguuuaugcaucguuaauaccaaugggacucauuucaucaugguccaauuauugaugcaauaaacugugggucau

SEQ ID NO: 4185149 - RNA, 104 nt, Human
gugaccaccuaccagaaagacuuagagccaggagccucggggcucuucgcacccaggucuuuagagcuccuggcaucucagcaguguucuuucuaguaacgcac

SEQ ID NO: 4185150 - RNA, 98 nt, Human
gugaccagggcggggccuggaauaguggccucaggggcagaaaccacuucccuccccucaccaaggccuccuggcuccaggccuugcuauggugucac

SEQ ID NO: 4185151 - RNA, 62 nt, Human
gugacccaugcagugguuuuggacaaugaaauauauacagaaguaccuggcauaggagucgc

SEQ ID NO: 4185152 - RNA, 129 nt, Human
gugacccucagucagugccuagcagguuucuugggcucucucccagcacagaggaaggcaacaucucacuucuagguggcucuuucugucugggauccugauuucucuagucuugacugcuugggcagc

SEQ ID NO: 4185153 - RNA, 73 nt, Human
gugaccggguucuuguucuaggauguggagggagcagggacuuugaaacaaacugggauaggauccuguuuau

SEQ ID NO: 4185154 - RNA, 76 nt, Human
gugaccgguggcggguucggaugcagaggaggcuucucagugcgguuccuccucaucucggaaccugccaccccac

SEQ ID NO: 4185155 - RNA, 56 nt, Human
gugaccguccguucagguugguccucagccuugggcaagccuggagggcuggucac

SEQ ID NO: 4185156 - RNA, 81 nt, Human
gugaccucgucugucucagguucaugaacaugaaggugagagcagcucuuccucacagcaugaccaggcagugacaaacac

SEQ ID NO: 4185157 - RNA, 82 nt, Human
gugaccugccuauggagccacauggaaaaggccugagaauggccucuaggagguggccaguggcuaucaaggaaagggacac

SEQ ID NO: 4185158 - RNA, 56 nt, Human
gugaccuggccgccuaaacccagggcagugccugauuauaaguggacacaggucac

SEQ ID NO: 4185159 - RNA, 55 nt, Human
gugaccuuauuuggaaauagggucauguagacaugauuagcucaggugaggucau

SEQ ID NO: 4185160 - RNA, 66 nt, Human
gugaccuugggaaggagguaagaucgcucacugcuucuuuuacuuuaucugcuuuuuaaggcucac

SEQ ID NO: 4185161 - RNA, 63 nt, Human
gugacgccaggaguggagccagggugugcaggacacugcagcaccuauggacacuugugucgc

SEQ ID NO: 4185162 - RNA, 60 nt, Human
gugacuaagauucuuugauaugaauuuaggucauccugaaauauaauaaauuuugguuac

SEQ ID NO: 4185163 - RNA, 130 nt, Human
gugacuauguaucagaaaugcagaugcuccaccuacagaaauuccaaaucaacuagucuaggguggugcccaggcaucgguguuugggauuuuugguuguuguugcugcugcuguuguugaucuuguugu

SEQ ID NO: 4185164 - RNA, 59 nt, Human
gugacuauuucacauagucuuucugaauugucaguaauaggcuuggguaaaaaggucau

SEQ ID NO: 4185165 - RNA, 60 nt, Human
gugacucagcaacccacacacggucucagcagcugagaccguguguggguugcggugcac

SEQ ID NO: 4185166 - RNA, 70 nt, Human
gugacuccaaagggaagaguggaagugacuggauuguuuuaaaagucaguuucaauuugccuugagucau

SEQ ID NO: 4185167 - RNA, 74 nt, Human
gugacucggcuuguugacgacuugacuuucucaacuauaaaauggggaucaugcaucaucacauuccguuucac

SEQ ID NO: 4185168 - RNA, 62 nt, Human
gugacucuauaguaggaucaguccauguguuauuauuggaaaugauuucuauuauuaguuac

SEQ ID NO: 4185169 - RNA, 88 nt, Human
gugacucuccccuuucuuuauuuggacuuggcuauaucuggaugugauaccggagcuacuacuaccaaacuaaagaggaaagugucac

SEQ ID NO: 4185170 - RNA, 95 nt, Human
gugacucuugagagaugaauucaagauacucacaauguucuuuaaagagagguggucaaggugugaauaccuugaauucaucacucaagagucac

SEQ ID NO: 4185171 - RNA, 55 nt, Human
gugacugagcgucuggggaagaaggugauaaacagcuucucagagcuugcagcac

SEQ ID NO: 4185172 - RNA, 82 nt, Human
gugacugggcccaggccucuuccggcuccaguaccccccggggcgauucuggcaacucagccagaggaagccuggcccucgc

SEQ ID NO: 4185173 - RNA, 80 nt, Human
gugacugguugaaaccauuaaguccccaagucuuuguugugcuguccucagcaugguggauuugugauucagcuuagcac

SEQ ID NO: 4185174 - RNA, 58 nt, Human
gugacugugcacuuuuguucucagugaacuccagagcccaggaugguguauggcucac

SEQ ID NO: 4185175 - RNA, 56 nt, Human
gugacuguuguuugcuacgugcuagacaguaugccaagcaugacacagugguacac

SEQ ID NO: 4185176 - RNA, 96 nt, Human
gugacuugcuaacugaugagaacagaacagaggccuuauguuucagaaacuaaugggaauuauggucacuguuccuggggggcuuaagcaaguccc

SEQ ID NO: 4185177 - RNA, 69 nt, Human
gugacuuuuagaacauuuaguggguuauguagccaucacuauaauccuguuuuagaacauuuuugucac

SEQ ID NO: 4185178 - RNA, 79 nt, Human
gugagaaaggucugaugcaucacuaaauagugccgugggcagaacacgcuaacaguggcugcauccgcacuuuuguuac

SEQ ID NO: 4185179 - RNA, 77 nt, Human
gugagaaccaaccagcuccucaccccauugugcucuguagacuagcugggacagggcggggguugggggugucucac

SEQ ID NO: 4185180 - RNA, 55 nt, Human
gugagaaucuacuuccgagcucacaaaugugguuguuggcaguuaagaaucuuac

SEQ ID NO: 4185181 - RNA, 59 nt, Human
gugagacacugacuccaaaaauaaagaauucucagaauuugagucuguggugucuacac

SEQ ID NO: 4185182 - RNA, 77 nt, Human
gguggcagaagugcccucgugcccagggccucucauaucacuggaggacuugggguggagggugcugggugcucagc

SEQ ID NO: 4185183 - RNA, 67 nt, Human
gguggcagcggugugcaaggagggccugaugggucaagauccucuuugcccaccgcccugcaucacc

SEQ ID NO: 4185184 - RNA, 69 nt, Human
gguggcaucuggagaacuugcaagaggauguaacagacacauccuaauugcacagcuuuuaauguugcc

SEQ ID NO: 4185185 - RNA, 87 nt, Human
gguggcaugugaccauguuugaccaucaaagcuucacauucccuugacugcagugauuggaucagagauggauaaugacaggccacc

SEQ ID NO: 4185186 - RNA, 61 nt, Human
gguggcaugugccuguaaucucagcuacucaggaggcugaggcaggagaaucacaugaacc

SEQ ID NO: 4185187 - RNA, 90 nt, Human
gguggcauuagccacauguggcuauuuuaauguuaauuguauuuaauuauaauuaauuuaaacuuaaauagccacaugugguuagcuauu

SEQ ID NO: 4185188 - RNA, 123 nt, Human
gguggccaacaagucaugcaaaggaagcuaugagacccugauaggaguagaagaauauagcuccuguugccuucuuguaccuuacagaggagcaucccaagcugaauggcuauggcagccauc

SEQ ID NO: 4185189 - RNA, 58 nt, Human
gguggccaggccagcucuggcccugugggguuccugagaaggcuggcccuggguggcc

SEQ ID NO: 4185190 - RNA, 128 nt, Human
gguggccagggguggaggggcagcuguggucacuggcccagugggagggagcuaggccacuaggaaccggucaggccagcaccaucccuauccccaugcuagccaccacacccaccagcucugccacc

SEQ ID NO: 4185191 - RNA, 62 nt, Human
gguggccuaugggugggcuguccuggagucaggugcuagcuucaguccaaucagaggccacc

SEQ ID NO: 4185192 - RNA, 78 nt, Human
gguggccucugguguccuuuagaauuuaagcucagcauuuacuuuggacacaugauuuuugaaggacauggaggugcc

SEQ ID NO: 4185193 - RNA, 67 nt, Human
gguggccuggucaggugugagcuugcaccagcagugcaggcucugugugugccuggcacagcacacc

SEQ ID NO: 4185194 - RNA, 66 nt, Human
gguggccuuuuaugagcaggguggccuuaaacaaggcuuauaaacuagacuucaucgaagguuacc

SEQ ID NO: 4185195 - RNA, 109 nt, Human
gguggcgaauaggaagacugggaggaugucuuguuuaaugaacugcuaaaacuuuuggaaaauuuuaagcuagugaagucccucaacacgguauuuccauuugaaaacc

SEQ ID NO: 4185196 - RNA, 55 nt, Human
gguggcucacgccuguaagcccaggacuuugggaggcagaggcaggugggucacc

SEQ ID NO: 4185197 - RNA, 55 nt, Human
gguggcucacgccuguaaucccagcacuuugggaggccaaggcaggcggaucacc

SEQ ID NO: 4185198 - RNA, 55 nt, Human
gguggcucaugccuguaaucccagcacuuugggaggccaaggcaggcagaucacc

SEQ ID NO: 4185199 - RNA, 56 nt, Human
gguggcucaugccuguaaucccagcacuuugggaggcugagguagggcagaucacc

SEQ ID NO: 4185200 - RNA, 122 nt, Human
gguggcuccugggcacccacaggccugugcccccuucagagcuugcuugccaugucaccagagaagaggaagcuggcggcucaggaggggcaguucacagagccacguccugaggagccacc

SEQ ID NO: 4185201 - RNA, 60 nt, Human
gguggcucguuuuucuugaaaggcuaaguaacuaaugccuuuuauugaugaauggccacu

SEQ ID NO: 4185202 - RNA, 73 nt, Human
gguggcugaggggcccagaggaacagggaucuggcuagaaagcaccuguucuuaacaaggguccccagcagcc

SEQ ID NO: 4185203 - RNA, 80 nt, Human
gguggcugcaaaugaugcugcugugcuuuguuguagguuucuauauaacgcugggcauggugccuuauuuaacaguuccc

SEQ ID NO: 4185204 - RNA, 80 nt, Human
gguggcugggugugggaugcucagggccuggagccauaccagcauggucaggacucugacccgucccgaacccagcuccc

SEQ ID NO: 4185205 - RNA, 61 nt, Human
gguggcuuugugcugguagcaagcucuguaucacugggcugcaagcaugcacagauacacu

SEQ ID NO: 4185206 - RNA, 83 nt, Human
ggugggaaaccacuguaauguuuuaaagcagaggaggaacaugaucugauuuaggcuuuaaaaugauuauucuggcuucuauc

SEQ ID NO: 4185207 - RNA, 85 nt, Human
ggugggaccagcgcuguccuggggccccgagccagaagcggggaacccgacuaucugccaggucccagggcgcgccugggccccc

SEQ ID NO: 4185208 - RNA, 62 nt, Human
ggugggaccaucacuugagcccaggaguucaagaccagccuggaccacauagugaggccccc

SEQ ID NO: 4185209 - RNA, 60 nt, Human
ggugggagagcucugucuccagagcuguagcaguagaugggauaguggucucuccuuauc

SEQ ID NO: 4185210 - RNA, 91 nt, Human
ggugggaggagaggagugggaagcagugcaacccauccuuuucuguccuuguuuggguucagaauuccuauuucaucucucugucuccacc

SEQ ID NO: 4185211 - RNA, 56 nt, Human
ggugggaugccauugcuguucuagagggucauccauggagcucccugcaucccacu

SEQ ID NO: 4185212 - RNA, 57 nt, Human
ggugggauggaggaucuuagacccuccacuggccccugagacgaccccaucccgacc

SEQ ID NO: 4185213 - RNA, 82 nt, Human
ggugggcagcccaccccaguguggcuugagacagggagagcugcugcccugcucggggugcagugggcucggggugcccacu

SEQ ID NO: 4185214 - RNA, 62 nt, Human
ggugggcauuaucagaaaagcaguguuacagcuuucuaguucccucuggaauguaucccacc

SEQ ID NO: 4185215 - RNA, 80 nt, Human
ggugggccaacgggagaaugcagcuggggccgccccacuuccugcccccguggaggggccucucauucucccuggucccu

SEQ ID NO: 4185216 - RNA, 71 nt, Human
gguggggacagcucucacauggcucggcagaguggcugggcgccucaccauggggagcagugcuccugacc

SEQ ID NO: 4185217 - RNA, 77 nt, Human
gguggggagaagagcucagcacuaaaaucauguguuccauuuggggcacaucgagucugaguugcuaugagaccacc

SEQ ID NO: 4185218 - RNA, 60 nt, Human
ggugggggagagaggcauucuuucuguuccuaggcagggaucaagugcccuuccccugcc

SEQ ID NO: 4185219 - RNA, 59 nt, Human
ggugggggcggagcacgugaccacgccucuuaaaggggcugucgcaggucgccccaccc

SEQ ID NO: 4185220 - RNA, 78 nt, Human
ggugggggcucuguagcccaagccuggcuggcgaugucgcugcguguccauguccaggugggcccuggggccuccucc

SEQ ID NO: 4185221 - RNA, 59 nt, Human
ggugggggcuggcucguccugugcccaaggcugggugggagagcacugcagccccggcc

SEQ ID NO: 4185222 - RNA, 62 nt, Human
ggugggggcugugcacaggcucacugagacuuauuucagaagaaccagaacagccccccacc

SEQ ID NO: 4185223 - RNA, 60 nt, Human
gguggggggaggaggcagggaacaguagaagaaagcaaugcuaugucccuuucccccauu

SEQ ID NO: 4185224 - RNA, 67 nt, Human
gguggggggaugucguggguggcagcugggguccuggccagggccagccgcagcauccacacccacc

SEQ ID NO: 4185225 - RNA, 68 nt, Human
gguggggggcuugggggaauggcugugaucagugcugccaauucccagcugccgggcugcacuccacc

SEQ ID NO: 4185226 - RNA, 74 nt, Human
gguggggggucaggcuccccuagaaugaagacgggccucuuggggccugcagggccugggccuacccccucauc

SEQ ID NO: 4185227 - RNA, 55 nt, Human
ggugggggugguuuuucagguuaaguuugcucuacagaaacuggcuacucucucc

SEQ ID NO: 4185228 - RNA, 59 nt, Human
ggugggguauuggguaguuguucugugaagguacagaagagcacauuuaguauguuacc

SEQ ID NO: 4185229 - RNA, 55 nt, Human
ggugggguauuugguacuuguacugugaacagaagaguaccuuuuguauguuacc

SEQ ID NO: 4185230 - RNA, 90 nt, Human
ggugggguguucauuuacucugaccuggccuuggugggccauuuucuucuaaaucguucuccuuccagcucagggaaaugcuauucuacu

SEQ ID NO: 4185231 - RNA, 99 nt, Human
ggugggucaucugaggacaacaugauucuagguaguguccaaaugccucauuucuuaacauuuacauuguccagaaauuauuguccauccacucccacu

SEQ ID NO: 4185232 - RNA, 61 nt, Human
ggugggugcugggaacgaggaauucaggacaugcccuggccuacccugcucagcacccauc

SEQ ID NO: 4185233 - RNA, 66 nt, Human
gguggguggaaacagcauguaccuugccauuggagaagcuggguuuaugcugugauucacccagcc

SEQ ID NO: 4185234 - RNA, 76 nt, Human
ggugguacauuuguacgugcuuuguaaccuguaaagcccuuuacuguacacgugucauuuacagcucuguaucacc

SEQ ID NO: 4185235 - RNA, 70 nt, Human
ggugguacugcuggcuggaucagagauuggcauccuuacugccauguccuaugaccgcuaugcugccauc

SEQ ID NO: 4185236 - RNA, 64 nt, Human
ggugguagucggccucgguggcuccccgggugacccaggaggcccggcgcaggcggacuuugcc

SEQ ID NO: 4185237 - RNA, 69 nt, Human
gguggucacuucuuucaucgaaacuccuuguccccucggagucugguguaugaaagugaauucuccacc

SEQ ID NO: 4185238 - RNA, 65 nt, Human
gguggucaggggcuguggcuauggcuuuccaggagcacguggcuucccuuauggccccugucccc

SEQ ID NO: 4185239 - RNA, 62 nt, Human
gguggugaggaucacagcucacugcagccucaagugagccaggcucaagugauccucccacc

SEQ ID NO: 4185240 - RNA, 86 nt, Human
gguggugauggugguagugguggugguagauguugaaucccuguuucaggcucuuaacucucccuccuuacaucccccuuuccucc

SEQ ID NO: 4185241 - RNA, 111 nt, Human
gguggugcacgccuguaaucccaguuacucaggaggccgagguugcagugagcugagaucacgccacugcacuccagcacuccagccugggugacagggcgagacuccacc

SEQ ID NO: 4185242 - RNA, 60 nt, Human
ggugguggguaaaagcccgggucugucuggcuccagaguccaggcuguugcucaucuucc

SEQ ID NO: 4185243 - RNA, 58 nt, Human
gguggugguccagggcagggcugaaccacgagggaaggcaguguuccagaccuucacc

SEQ ID NO: 4185244 - RNA, 71 nt, Human
gguggugucugcugcccuggagccuggaggacuccaguccugugcaccagagcagggcagcagggcucacc

SEQ ID NO: 4185245 - RNA, 61 nt, Human
ggugguguugggagcaagugguauauauuucuaagcuauuuguaagagccccacaccugcc

SEQ ID NO: 4185246 - RNA, 55 nt, Human
ggugguucacgccuauaaucccagcaauuugggaugcugaagagggcagaucacc

SEQ ID NO: 4185247 - RNA, 55 nt, Human
ggugguucacgccuauaaucccagcacuuugggaggcugagguagguggaucacu

SEQ ID NO: 4185248 - RNA, 80 nt, Human
ggugguuuucagcagauggguuguguuggcaugugguaugcccgggauaaacauuuauugauuaaaaaauaagaaccacc

SEQ ID NO: 4185249 - RNA, 82 nt, Human
gguguaaagcaauacaaguggucauugagcuuugauuuuccuauucagaacagguuaaucuacuuguaaauugaguuauucu

SEQ ID NO: 4185250 - RNA, 74 nt, Human
gguguaacugggccgaaauggacagaauagacauuauaguaaagguucuuuuugcuuugguuucaaguugcacu

SEQ ID NO: 4185251 - RNA, 76 nt, Human
gguguaauuacaggcaguuggaauagaucaaugaaacaaaauugauagucuagaaauuuugccuuguauuuaugcu

SEQ ID NO: 4185252 - RNA, 57 nt, Human
gguguaccugaugaccuguggcugaaaagagagacucaggggugaucgggugacacu

SEQ ID NO: 4185253 - RNA, 70 nt, Human
gguguacgugcuguagucaugaugcugcagguucuuguagguaguguugucaaacggcucagcaggcacu

SEQ ID NO: 4185254 - RNA, 67 nt, Human
gugagaccuccuugggcugacucugucccucuaccuaagaucacagcuccuguaagguggucgucac

SEQ ID NO: 4185255 - RNA, 69 nt, Human
gugagagaacaaagauuacguaguccugcuuccuaguuaagguuauuaaaguguauuuuugugccucau

SEQ ID NO: 4185256 - RNA, 59 nt, Human
gugagaggaaagauauauacuucuggguuugcaauuuuaaagauguuucuuuuccucac

SEQ ID NO: 4185257 - RNA, 86 nt, Human
gugagaggcaagacagcugaacaggugggauaaggccuuuguuuugugguuguuuuuguugucauugcuguuuguucaguucucac

SEQ ID NO: 4185258 - RNA, 90 nt, Human
gugagagggaugugccggugcugagauuuccuucaaggcucugaaagcuggaagcgagacagagaucuccugcagagcaucucuccucac

SEQ ID NO: 4185259 - RNA, 62 nt, Human
gugagagguacggaaagagcgugggaagcaucagagauuccacauuaauuccuaacuuuugc

SEQ ID NO: 4185260 - RNA, 66 nt, Human
gugagaggucuuaagaucuagacugcaccugggaagugaggucaugucugagaauaaggccgacac

SEQ ID NO: 4185261 - RNA, 80 nt, Human
gugagaggucuugugaaggacugugcccucagccugugaagucugccuaacucuggcuaguccaucgcaagucacugcac

SEQ ID NO: 4185262 - RNA, 69 nt, Human
gugagagugagaagcacagucugggucgguaggacaaucuaguugucuaucugugcuuuaaacuccuau

SEQ ID NO: 4185263 - RNA, 60 nt, Human
gugagagugguuuauguccauguagaaaaucuugacuacugaacauaaauaacucuuuac

SEQ ID NO: 4185264 - RNA, 82 nt, Human
gugagaguuagcauuuucugggcugaaauaaagguucugaaguuauaacccuccguuuccccugggaaggugcuuugcuggc

SEQ ID NO: 4185265 - RNA, 84 nt, Human
gugagaguuaggaaaaaauauggauuguugauuuggaaggagacuaauaaacuaucccugccauaauuuuuuuucauuuuacac

SEQ ID NO: 4185266 - RNA, 62 nt, Human
gugagaguucaguguuucuaguagugaagaaauucucuacuucccaagucauuuaacaucac

SEQ ID NO: 4185267 - RNA, 59 nt, Human
gugagauaacucuaggucuucgagaugucaucaaagguggccuugauggaguuguccau

SEQ ID NO: 4185268 - RNA, 61 nt, Human
gugagauauaucagcuacaguuccacugagcaugcaugugcucacuacuguagcuucucac

SEQ ID NO: 4185269 - RNA, 84 nt, Human
gugagaugcagccuggauugcagaaugcuauaucuuuauuuuaaucaccagagcuugguuuuaauaaucacaugcugcacuaac

SEQ ID NO: 4185270 - RNA, 68 nt, Human
gugagauuuuuuguuccuuucuuauuagagucacagagagucagaagggaacucagagaugauuuuac

SEQ ID NO: 4185271 - RNA, 77 nt, Human
gugagcaaugaccaucaugcccugcagugagugcgucugccgggagcagagcucagagcagggcacucuugacucgc

SEQ ID NO: 4185272 - RNA, 58 nt, Human
gugagcacugagcauucgucuucccaacugucccuauaaggccauguucuaugcuuac

SEQ ID NO: 4185273 - RNA, 67 nt, Human
gugagcagauagagaagagcccuggugcuggccacugugagcaucagccucuguccuggaggcucac

SEQ ID NO: 4185274 - RNA, 67 nt, Human
gugagcagcauggagaaguagcuagaaacaggggcuugggcucuggcuaugcgcuccggcuucuugc

SEQ ID NO: 4185275 - RNA, 88 nt, Human
gugagcaguucccuuuacagauggauaauuguuuguguaagaccaaccagauaaaguccaaacuguguagaacacacgugugccucac

SEQ ID NO: 4185276 - RNA, 57 nt, Human
gugagccaggcugcaguuggcuggcuguggagcccacuggcuggagugcugguccau

SEQ ID NO: 4185277 - RNA, 74 nt, Human
gugagcccugcugaguccggcucagaugaucagaagcauccugccagcccacagacucaugagcaguacuacac

SEQ ID NO: 4185278 - RNA, 63 nt, Human
gugagcccuggcccggcugugcuuuggagccaaccacuagagccaggccaggccggggcacac

SEQ ID NO: 4185279 - RNA, 105 nt, Human
gugagccuggaaaaaguagguagugacacuuugugacucugagaaaauauuaagaaaggaaaucaauaugcuucuguuuaaagagucacaaccuuggaggcucac

SEQ ID NO: 4185280 - RNA, 87 nt, Human
gugagcucucugcagugcacuggggugggccugguagagcagcugcagugcugcuuggcacuguacccaguggaguguggagcucau

SEQ ID NO: 4185281 - RNA, 55 nt, Human
gugagcugaugucugccugugcacugauauguuguauggcuuuacuaagcugcac

SEQ ID NO: 4185282 - RNA, 75 nt, Human
gugaggagggaggagggagggaggagggagggagggaucgcguccccccucucccucacuuaucaaucaccccac

SEQ ID NO: 4185283 - RNA, 83 nt, Human
gugaggaguagugaaaggagccugagacugggcaccaggagaccugggucuugguucaugcucuguuccaccugaccucucac

SEQ ID NO: 4185284 - RNA, 106 nt, Human
gugaggaguuugaaaaaaauaccaauaccuguguccugcgucaagccaauuaaaaaucaugaucuauugggguggugucagggccaggguauuuuaaucuuuucau

SEQ ID NO: 4185285 - RNA, 97 nt, Human
gugaggauagacuugugcuugccuggcauuucuggggcccaggccuccccauucugugcccauguggcucuagaaaggccaaagccaccuccucuac

SEQ ID NO: 4185286 - RNA, 58 nt, Human
gugaggaugcauaugauggcaagaaaauggcagcucugccuggaugugcuggccucac

SEQ ID NO: 4185287 - RNA, 85 nt, Human
gugaggauguagaccagggcagcaaugcagcugcugcugaugaaggccaggagcaugucauuguugaacguccugcgcacuucau

SEQ ID NO: 4185288 - RNA, 59 nt, Human
gugaggcaggugagccaguuguaaggggacaugacaaaauggcuuuagacgugccuuau

SEQ ID NO: 4185289 - RNA, 57 nt, Human
gugaggcccagagagggccacagcaccaaagccagagaaggccuucucugcccucac

SEQ ID NO: 4185290 - RNA, 57 nt, Human
gugaggcuggcugacuucugaagcaucgaauugugcauuggaaacucagcagcacac

SEQ ID NO: 4185291 - RNA, 78 nt, Human
gugagggcggggagggagaggacaguucuauaagguggaccuuggguggagcuuuuaucuccuucuuuaugcccauac

SEQ ID NO: 4185292 - RNA, 68 nt, Human
gugagggguggcugagcaguuugcauauauuaggucaauuccccaagcugcuggccucauucauucac

SEQ ID NO: 4185293 - RNA, 76 nt, Human
gugaggguggugugagcuugaggcccaugaggggauggccaaggugggcgugggccccagccacucccucccucac

SEQ ID NO: 4185294 - RNA, 72 nt, Human
gugagguaggaguuuucauuccaguuuuauuucauuuacagaugaggaaauugagaaucagaauaaugucac

SEQ ID NO: 4185295 - RNA, 92 nt, Human
gugagguagggaaggcugguauuaugauccaugguuuauagauuagggaauuaaaucucagauaugaauuagcuuucccaaaauauccucac

SEQ ID NO: 4185296 - RNA, 78 nt, Human
gugaggucaagggcaugaagcaguggacagcacauucuuugugaucauacugcuccuccugccccacgguggccugac

SEQ ID NO: 4185297 - RNA, 78 nt, Human
gugaggugggaaagaagaagagccauuuuacaaugagcuuuguggagauguguagugcuuuuggccauuggggaucac

SEQ ID NO: 4185298 - RNA, 90 nt, Human
gugagguugugguugauuuuucccccuuuccuuuuaguuuccuaaauauagaauuaauggguuguagggaaagucaacaauuguucuuac

SEQ ID NO: 4185299 - RNA, 60 nt, Human
gugaguacauauugaguggugauauuucuuuugaaauauucaaacuagauauguauaugc

SEQ ID NO: 4185300 - RNA, 80 nt, Human
gugaguaguccuugugaagacgcuggacuucuuccugcagacaaggggagcugccagcaaguuucaaacagggcacuuau

SEQ ID NO: 4185301 - RNA, 71 nt, Human
gugagucuaaaguguguuuugaugaaauauauuaggaaacuuguuuucaaguaagauacauuucagaaagc

SEQ ID NO: 4185302 - RNA, 55 nt, Human
gugagucucauucuaguguaucaaaucauguuugaacauuucugggagaacucac

SEQ ID NO: 4185303 - RNA, 86 nt, Human
gugagucugaagcccugaacacauaaggcuuuccuguauuuuacauauggagaaaaccauuguguuauauaugggaucagacugac

SEQ ID NO: 4185304 - RNA, 62 nt, Human
gugagucuuuggagacaguucaguauaagcaggauuaucucuggauuguauagaagguucac

SEQ ID NO: 4185305 - RNA, 63 nt, Human
gugagugccuuacuugaugaucugagggaacaggccccuuaucuucacagacagagcaaucac

SEQ ID NO: 4185306 - RNA, 57 nt, Human
gugaguggaaguguguauauuugugugcaaguguguacucauauacuuccaccuuac

SEQ ID NO: 4185307 - RNA, 66 nt, Human
gugaguuauuugguuugcaugcagaauaguugaauaaauucauugauguaaacacagguaauguau

SEQ ID NO: 4185308 - RNA, 64 nt, Human
gugaguucaagacugcuuuaggauguucagaugcagauguccucagcauggaaucuggacuugc

SEQ ID NO: 4185309 - RNA, 80 nt, Human
gugaguuggauuuguugcuagcagcacugauccauuuguauguauguuugucagugggcguggcgacaucgcuuacucac

SEQ ID NO: 4185310 - RNA, 62 nt, Human
gugaguuggcauauggcuuuuaaauuguuuacuuaguuauaggucaugcuaugucaaaucgc

SEQ ID NO: 4185311 - RNA, 78 nt, Human
gugaguuggucaguuuccuucaggccauugaucuaaguagaagagauuuaauggccuguauggaaagugaaaguuuau

SEQ ID NO: 4185312 - RNA, 67 nt, Human
gugaguuuagugauaagaauuaugaaaaugacuuucauuuucauauuguaguuugucuuacccuuau

SEQ ID NO: 4185313 - RNA, 68 nt, Human
gugauaacaggguaguaauuuaauacaaguguuuuaauuuguauuucaaggcacucucagguuuuuac

SEQ ID NO: 4185314 - RNA, 124 nt, Human
gugauaauuguaggcuccugucaaaggucaucaauggcuuaugguaaauauuucugucuuguucuuaauagcaaggaaaggaagccaagccugacacucaacaggguuugcuuuaaaaugucac

SEQ ID NO: 4185315 - RNA, 70 nt, Human
gugauagaucugaaauauauuuugaguguuauuuccuuuaugguaaugcucaaaauguuucaucuaccau

SEQ ID NO: 4185316 - RNA, 59 nt, Human
gugauaguucuuacuccaaagugccauuucuuagugauccuugaguucagagcugucau

SEQ ID NO: 4185317 - RNA, 55 nt, Human
gugauaucuuacaauucucuuuuaggacagaguccagacaggagagaagagucac

SEQ ID NO: 4185318 - RNA, 71 nt, Human
gugauaugauagagaguaacuguggucacuuuacgauugggaggccaggaggaucucucuaaagauguuac

SEQ ID NO: 4185319 - RNA, 83 nt, Human
gugauauucgaaagucuuaggcauuuuauuucucaguuuagagauuuaaaaauggccagacuauuuaaagauugaauacuuac

SEQ ID NO: 4185320 - RNA, 66 nt, Human
gugaucacaguauuuuagaugugucucuucugauuguaagacacauacccacaaggucugugaagc

SEQ ID NO: 4185321 - RNA, 74 nt, Human
gugauccuuaccuccaugugggcccuucaccagcuugggccucaucucugguguccagcauguguggaagucac

SEQ ID NO: 4185322 - RNA, 70 nt, Human
gugaucuuauaaaaaugaugucgaaaaguaagcucuguguucuagaguuuguuuucauuauaaagauuac

SEQ ID NO: 4185323 - RNA, 72 nt, Human
gugaugaaaucaaaggaguuuaaguuacuggauuuacuaaauucaauuuaagguacuacuuugggauaucac

SEQ ID NO: 4185324 - RNA, 92 nt, Human
gugaugaagugccaagcccagagggcaugagagccacaagaccagccugccuuuccaggcucucucugccccugggacucugccucacucac

SEQ ID NO: 4185325 - RNA, 68 nt, Human
gugagauugaaaggucuuuaaauugguaguauuguaucacugcaaauuuaaugguuuuugagaaucau

SEQ ID NO: 4185326 - RNA, 61 nt, Human
gugagcacaguugcauugcaagugagugauucuuucauuuuguuaaugucaccgugcuugc

SEQ ID NO: 4185327 - RNA, 72 nt, Human
gugagcagacaucaaaggcugcucaguggacagggccuggaugacaacagcuuugauucuuucugccaucac

SEQ ID NO: 4185328 - RNA, 76 nt, Human
gugagcagagaccaguguuuucauccucccuuggguaccaugaaccccucaagggcaggagccuguuuugccucau

SEQ ID NO: 4185329 - RNA, 75 nt, Human
gugagcaggauaggggcucccuucccuauacagucugggagggaacaugugccucugucuaaaacaccuccucac

SEQ ID NO: 4185330 - RNA, 76 nt, Human
gugagccaagagagaggcacucauaucuguuccaccuguuugugaacagaaucuuggguucuuuucacuugaucau

SEQ ID NO: 4185331 - RNA, 60 nt, Human
gugagccaaguucacaccauugcacuccagucuggaugacagagugagaccuugucuuac

SEQ ID NO: 4185332 - RNA, 74 nt, Human
gugagccaauaguuaaacuguuaggaauuuugugaucuggguugaccacagguuagcagcuugaaacuggccac

SEQ ID NO: 4185333 - RNA, 55 nt, Human
gugagccaccucugcuccacacagcacagaauuguggcacagcaagugggcucau

SEQ ID NO: 4185334 - RNA, 79 nt, Human
gugagccaugccuaaguauuucuggccugugaaaggaacacaguuucagagccagggcagaaaaaccaugugugcucac

SEQ ID NO: 4185335 - RNA, 128 nt, Human
gugagccaugggacucagugccacugcucaaggucuccauggcugagccugggggcucuuacaacaggcuccaugcccaagguggcaguuguggaaccaucagagagggcacagagcucaugguuuau

SEQ ID NO: 4185336 - RNA, 65 nt, Human
gugagcgagccgcaccugggcgccuacaucaacgccugcgaggagcucagguagggcucgcccgc

SEQ ID NO: 4185337 - RNA, 55 nt, Human
gugagcuguuggaguggcagagcuguucaacaucacucagcuaaacaacacugac

SEQ ID NO: 4185338 - RNA, 60 nt, Human
gugaggaaaaaauaagaagcaguuccucaauggagacuuuauaaaucuuaauuuccucac

SEQ ID NO: 4185339 - RNA, 83 nt, Human
gugaggaaaauaaaugauaauaaugcuaguguuuauugaauguuuaacuugugcuguuuuaaguguucuuaucauuuccucau

SEQ ID NO: 4185340 - RNA, 81 nt, Human
gugaggaaacugaggcccagagcgaguggcucagcuacggucagaaugcugguauccugcuucugggccugguguucccau

SEQ ID NO: 4185341 - RNA, 70 nt, Human
gugaggaauccuguuuuagauaagcuuauacuaaaaaaguauacagaaaaugaugcagaguuuuucucau

SEQ ID NO: 4185342 - RNA, 129 nt, Human
gugaggagaaacaguggggugagggugucagcgagggugauuacaggcugaggaugauugcaucauggaaaaacuccagagaucuggcacguucuccagcuacccuuuuaguuuguaucccucccucac

SEQ ID NO: 4185343 - RNA, 60 nt, Human
gugaggagcucuuugacucacgaggccuuguuaccacuugugucugcacugaguccucac

SEQ ID NO: 4185344 - RNA, 70 nt, Human
gugaggcaguuuccagacauuauugauauacuuucaaguauaucaguagaacaauggacauugagugcac

SEQ ID NO: 4185345 - RNA, 60 nt, Human
gugaggcauucuuuugcugcauguccaacauucuugauggcacagaggaccaugcuuugc

SEQ ID NO: 4185346 - RNA, 77 nt, Human
gugaggccgaucaacacugaaggaauggggcuuuuugggggaagagcagccuccagggguggaggagcaggccucac

SEQ ID NO: 4185347 - RNA, 55 nt, Human
gugaggccuaccccccuguguuuucuucugagaguuuuauaguuuuaggccuuau

SEQ ID NO: 4185348 - RNA, 83 nt, Human
gugaggcuagaggcgggcugucuuuccuuuuggcauuuuugauggucucagacuaaaagaaggaagcuaccuucuggccuuau

SEQ ID NO: 4185349 - RNA, 55 nt, Human
gugaggcuugucucagauggggggcucaucucuuccugacuacacggcacugcac

SEQ ID NO: 4185350 - RNA, 129 nt, Human
gugagggaauugaccgaucuacaggugaagaaaacaaagggccacauuugggucccugguuugacaaagccagaggcucagauggcccuggcacuuuaacuaagguagcucaaggugaguuucugucac

SEQ ID NO: 4185351 - RNA, 58 nt, Human
gugagggaucugcuuccccucuaacucacaugguuuuugggaggcauuggucccucac

SEQ ID NO: 4185352 - RNA, 58 nt, Human
gugagggcagcuuggucagugugaguuuaaaacagcaugaccucugagcucccguugc

SEQ ID NO: 4185353 - RNA, 65 nt, Human
gugagggcuaaauuguggcagguacuguaauugauuggcuagguacucaugucauauguuuucac

SEQ ID NO: 4185354 - RNA, 77 nt, Human
gugaggggcuguuucuugaggcuacuccugguaccaauucgcgcauugccaggggcccagcaggagacagaaggcac

SEQ ID NO: 4185355 - RNA, 112 nt, Human
gugaggggugggggacagggagagaagagacagggagggcaggcagggcagggacaggccccugccucagucuaaagucucucacucuuuuuccuguggccgcccucuucac

SEQ ID NO: 4185356 - RNA, 78 nt, Human
gugaggucuguggccugugaggagcgggcagggaugcaggugugccugaccuagcccugcuccucucugcagucccac

SEQ ID NO: 4185357 - RNA, 74 nt, Human
gugaggugagggugcacccagagcagauucguucccgaugcaccagggccugugcuggguguuccgcacuugac

SEQ ID NO: 4185358 - RNA, 72 nt, Human
gugaguaccaccguggaggcacccuggccacaagaguguacaaaaugucuccauggaugauggagaacucac

SEQ ID NO: 4185359 - RNA, 67 nt, Human
gugaguccuaugggacugucugugugagauggagaagacacacagagggucugggcacaggacacac

SEQ ID NO: 4185360 - RNA, 62 nt, Human
gugaguccuuucacguggaaggagauugaaaaagauaagcuuucacauagaaagugauuuac

SEQ ID NO: 4185361 - RNA, 120 nt, Human
gugagucuugcacgaacugcaggaagagaaccagaggaaaguauuucuggaagcagguagaucuccuguuucugcuaaucuuuuacugaguuuguggcugccuagucagugcagguucac

SEQ ID NO: 4185362 - RNA, 91 nt, Human
gugagucuuuuuuuaaaguguucauuuucauuuguucuguuucuuuugucacucagaaaacaugauauugaggcugggcacgguggcucac

SEQ ID NO: 4185363 - RNA, 63 nt, Human
gugagugaagcaggccuuaguccaaagacuugcuaguggucugaagcugccugcauuccucac

SEQ ID NO: 4185364 - RNA, 80 nt, Human
gugagugauacugauuccuuugaggcuugcauuaaacauuuuuuagggugagucugaaguagucuuuaguguuaauuuau

SEQ ID NO: 4185365 - RNA, 76 nt, Human
gugagugcauguaugugugcauauguguggcuggauucaugcagcuacauucauaugugugcauacauguguccau

SEQ ID NO: 4185366 - RNA, 68 nt, Human
gugagugugcauucaugccugugugagcucaugucugugugaguucauaucuaugagugugcauucau

SEQ ID NO: 4185367 - RNA, 95 nt, Human
gugaguguggauggggguacgcacuuugucuuuuuguccaaaauuguuagaauuccaagauggacaggcuccuagggguucccccacccacuuac

SEQ ID NO: 4185368 - RNA, 87 nt, Human
gugaguugcugagaguaaauuuuuguuaacagccucuaaugugcuuacaagcugauuuuuaaaaaauguauuauucuagagacucuc

SEQ ID NO: 4185369 - RNA, 76 nt, Human
gugaguuguuaaguuacauauucuugggcuauaaaaagacaacugcuauggucugaaugugugcuccaaaauucau

SEQ ID NO: 4185370 - RNA, 92 nt, Human
gugaguuguuucaagggcagagauuaauuaagacagccuguaucauucaggcuuuguggacuuuuucuuuguucuucucgaagccuauucau

SEQ ID NO: 4185371 - RNA, 90 nt, Human
gugauacauuugcagaaggggugggaauguggcuuuguccguauuuccaaauguaaaacaggucucccauccccucuguuugguuguggc

SEQ ID NO: 4185372 - RNA, 81 nt, Human
gugauacucuucagaacuauaaaaaguacuguaaaauacuuuuucauacauaguacuuuuugugggcugaaacuguauuac

SEQ ID NO: 4185373 - RNA, 86 nt, Human
gugauauguucuacauucauuugcacuggauuacuggggugcuuuuuagcaugugccaagaaauugagucauaaugaagcauaucc

SEQ ID NO: 4185374 - RNA, 58 nt, Human
gugauauuuuuaaagauuaaggaguaugacaucaauuaacagucuuuaaagauguuac

SEQ ID NO: 4185375 - RNA, 68 nt, Human
gugaucaauggucuacagccagagaccugcagaggcagcaggugacccucaguguggacuuagagcac

SEQ ID NO: 4185376 - RNA, 78 nt, Human
gugaucagacccuggucaaagaccaggaaaugcuucucaacagagguaggccuugaucuuuggagggguucugaugac

SEQ ID NO: 4185377 - RNA, 63 nt, Human
gugaucagcagcggugugggccuuccucacagcacuucucacacacauuugcugucugauuac

SEQ ID NO: 4185378 - RNA, 68 nt, Human
gugaucaguguuuugugcauucuugaaagggcaaggguugucauaagaaagagcagaaagcacuucau

SEQ ID NO: 4185379 - RNA, 60 nt, Human
gugauccuguuagaucccauuagauuuaagaugucuacauguuccuucugacagggacac

SEQ ID NO: 4185380 - RNA, 117 nt, Human
gugaucugugaagaggaaaaagaauaaagcaaccagagauuguggccuuuggguuucugccugcugagaaaugacagauagaaucccagccagcuggaagcucugauucacagaaac

SEQ ID NO: 4185381 - RNA, 96 nt, Human
gugaugaauaggcugugguauauguaaaacugucuaaugguauauugugugucaacauauguacauuuguaguaauaucacaggcauuuuuauugc

SEQ ID NO: 4185382 - RNA, 77 nt, Human
gugaugacagcuggacuucccugggcugaaagcugaguguggcugcuccagcucuguucuggggaagcuguugucau

SEQ ID NO: 4185383 - RNA, 69 nt, Human
gugaugagcaagauggaaagagaugaggugugggccacgacagcaucuguucuauccacguugcuucac

SEQ ID NO: 4185384 - RNA, 77 nt, Human
gugaugagcguggcuggggaggucagccagccccugguggggugggcguaacuagcuccuagggccacgcccagcac

SEQ ID NO: 4185385 - RNA, 64 nt, Human
gugaugauaggaacccuggaacgaaaagcaucucccguugucuccuuguucguuccugacaggc

SEQ ID NO: 4185386 - RNA, 87 nt, Human
gugaugaugcauuuccccuacauuccaaaaacuagcagauaucugcaauaucugcuagcuuuuggaacguagggaaaaugcagucac

SEQ ID NO: 4185387 - RNA, 79 nt, Human
gugaugauuucaaaagacuaagaagaguauuauuccuuguucuuuggagguuuugcuuuucagucucaauaucugucac

SEQ ID NO: 4185388 - RNA, 76 nt, Human
gugauggcacaacaguuaggugggcuaaucuguuugugcaaaugaccuuugcugcagacgaagcccaugccaacac

SEQ ID NO: 4185389 - RNA, 59 nt, Human
gugauggcuccagacagaaggggccaaaauccuauuuuuaacucugucuugacugucac

SEQ ID NO: 4185390 - RNA, 67 nt, Human
gugaugggagcucauagcaagacagucagacccagccugucugaguguauggaauuagcucccuugc

SEQ ID NO: 4185391 - RNA, 91 nt, Human
gugauggggacaagcuggcguggagcggggggcaggcagccuugagcagaucagggcucaguucugcuucaugcugauugaauuuauccac

SEQ ID NO: 4185392 - RNA, 70 nt, Human
gugauggggcugguauucagaugcauacagaaaauuuucucaugccuggaauuaucauuauucuugucac

SEQ ID NO: 4185393 - RNA, 100 nt, Human
gucccccaauuagcauuauccaagcacagcagagccuugcuugaagaaagaagcuuuaggcagaauucauugugcugcugaggauugugagaggggugac

SEQ ID NO: 4185394 - RNA, 56 nt, Human
gucccccacacuuccaugucacacgacugugauuuacauaugcaggugugaggggc

SEQ ID NO: 4185395 - RNA, 79 nt, Human
gucccccgcauggccaguuuguuuacugaugguuuucauuuggcagaaucaggaagacagccuggcuugaugucaugac

SEQ ID NO: 4185396 - RNA, 106 nt, Human
gucccccuucaaaccugaagugcugucuccuucccccgggggccuacuugccgcuuuggggcgcaccccgugggagagacacgcacccugggugcaagccagggac

SEQ ID NO: 4185397 - RNA, 76 nt, Human
guccccgacguuuggcuugaugaaacauuuucuugauauuuuucaacaguuaucagcgugcaaaucuuuggaggac

SEQ ID NO: 4185398 - RNA, 83 nt, Human
guccccuccuagccucaagagauucagggacagaucaccaguccuguccucugggagccuugagccuuuugaaggaggcagac

SEQ ID NO: 4185399 - RNA, 81 nt, Human
guccccugacgaggacuggggcucuagccaggccuggggcggagccuggggucuggacggcugcaggaagcgggagggggc

SEQ ID NO: 4185400 - RNA, 59 nt, Human
guccccugcuguggaucuguggcuaguaacagccugggagcagcagacagacaggggac

SEQ ID NO: 4185401 - RNA, 57 nt, Human
gucccggggcucgaaggcagaggcuccccuaggugugcccugccugaccccggcuac

SEQ ID NO: 4185402 - RNA, 62 nt, Human
gucccuacccucacgagacuucaagucuacugggacuugaguaaguugaagggaaggaagac

SEQ ID NO: 4185403 - RNA, 70 nt, Human
gucccuaggccagguuccucaaucuugacaguauuuacuuuugagguuggauaauuuguuguaggggggc

SEQ ID NO: 4185404 - RNA, 57 nt, Human
gucccuauaacuaaacagaaacacagucaucuguccaucugugcaguuuaggaaggc

SEQ ID NO: 4185405 - RNA, 58 nt, Human
gucccucccaccuuucacugucacucauggggagggcagugcuggagauggguggaac

SEQ ID NO: 4185406 - RNA, 62 nt, Human
gucccucucaaauuuauaugcuggcucucaaauccgcaguguggcuguauuuggagauggac

SEQ ID NO: 4185407 - RNA, 81 nt, Human
gucccucuugcuucagcuucauguccagguacuguguuagaugcagaugcugugugaauguugggcaacaucagaggugau

SEQ ID NO: 4185408 - RNA, 57 nt, Human
gucccuggaaacuuguaacuggacacacuguaauuuguccagcugucuuucagagac

SEQ ID NO: 4185409 - RNA, 61 nt, Human
gucccuggggaaucagcuggaggcaggcaggcaucagucucuucugcuuuugcuuagggac

SEQ ID NO: 4185410 - RNA, 77 nt, Human
gucccugguagcccuucaagagcucuguccuaugaacaagagagggcagaaaccaccuugauggagcaaguggggau

SEQ ID NO: 4185411 - RNA, 106 nt, Human
gucccuguguggagucaguucuuuaugggugccugcaggugccggcuucacaguaagaaaacugucagcuucgccugagguaugggcacagaggugacgcagggau

SEQ ID NO: 4185412 - RNA, 79 nt, Human
gucccuucuagcuccuacuguugcagacaguaaaaaugauacuaaugaugaccugugcagcagcagcuguggagaugac

SEQ ID NO: 4185413 - RNA, 69 nt, Human
gucccuugaccccugcaggacugugacaugggaagggacacucuauucugaguccaugggggcagggau

SEQ ID NO: 4185414 - RNA, 61 nt, Human
gucccuuuacagaaaugucugcuacuccuuucaaagagucacagaaauuuguaaaagggau

SEQ ID NO: 4185415 - RNA, 63 nt, Human
guccgcauuguuuaagugggugggguuuaugguacuagagucuacaacgcaagcaacauggau

SEQ ID NO: 4185416 - RNA, 97 nt, Human
guccggcagguaccgguccuuccaguggucgaggaagaccauguccaguguguccacaucauacuucuucuucagcugggggaugauguccugggac

SEQ ID NO: 4185417 - RNA, 93 nt, Human
guccggguugagucggcagcgucggggccguccgucuuggcagaugcagagcuggcagucggccuugaugcguugcccaggccaguagcgggc

SEQ ID NO: 4185418 - RNA, 67 nt, Human
guccguaugccuccaagauucuuacguugggaccuaaucccaaugugaugguauuuggaggugggac

SEQ ID NO: 4185419 - RNA, 115 nt, Human
guccuaaaaucaaggugucagcaggacugcauuccuucuggaggcucuaagggacaaucuguuuccuugucuuucccagcuucuagaggcugccugcauucuuugguuuguagac

SEQ ID NO: 4185420 - RNA, 73 nt, Human
guccuaauucuaacaggguaggagggcaugaaucaucagauucucucuuccacaaaccacugaagauugggac

SEQ ID NO: 4185421 - RNA, 57 nt, Human
guccuacaguuagggaacugggccccgaguuuggccauggcucucacccugugcgau

SEQ ID NO: 4185422 - RNA, 76 nt, Human
guccuacauucuuuaggcaagaacucacugagaauguuuuuagucucacauucugccaaagagaaaguggcaggac

SEQ ID NO: 4185423 - RNA, 121 nt, Human
guccuagccaagaggguaugcuugagugagggcuagaguugagauggggagcuugcaaggaaaagcugcuuuauucaggguuuacccccagcacacucaauaccaguuucagggcagagau

SEQ ID NO: 4185424 - RNA, 84 nt, Human
guccuaguaguaccaaagugcucauagugcagguaguuuuggcaugacucuacuguaguaugggcacuuccaguacucuuggau

SEQ ID NO: 4185425 - RNA, 64 nt, Human
guccucagggagggaggaaaauuugcucagcuaccauuugagacgaguugcaucuccccaggau

SEQ ID NO: 4185426 - RNA, 63 nt, Human
guccucccauuggccaggacuugccgucugaaaggggccucuauccuggucauguggcugggc

SEQ ID NO: 4185427 - RNA, 64 nt, Human
guccucucuucaaauauagucacauuagggguuagaguuucaaugcauuaauuugggagaguac

SEQ ID NO: 4185428 - RNA, 94 nt, Human
guccucuugagguaccugaauuaccaaaagcuuuauguauucugaaguuauugaaaauaagagcuuuugggaauucagguaguucaggagugac

SEQ ID NO: 4185429 - RNA, 70 nt, Human
guccugaauauuagaugaugaguccuucauauuuugagugguuucagcaucuacauauuuagaaagugac

SEQ ID NO: 4185430 - RNA, 75 nt, Human
guccugaaugcaaagugaggugaguggccuuugcaaaugccagcuggaaaugcugcucugcuguguaagcaggac

SEQ ID NO: 4185431 - RNA, 59 nt, Human
guccugagggcgauucagcagguuugauuauaugccaaguaccugugaauaccccaggc

SEQ ID NO: 4185432 - RNA, 82 nt, Human
guccugaggguuacugcuucugcuugagaagucacaugccagaacucaauccaagucucagccagaaagugauuuucaggac

SEQ ID NO: 4185433 - RNA, 87 nt, Human
guccugauagcaggcauggcuuuaggcaggcguccccagguccgagaaggagagcccccauccuagccagccugcggaacucgggac

SEQ ID NO: 4185434 - RNA, 68 nt, Human
guccugcagccacugcaggcagaggaggcccugcuucccugacccaucugccugcggcugcagguggc

SEQ ID NO: 4185435 - RNA, 66 nt, Human
guccugccucucaaaugucauuccucuaugauucucuaucacagagaugcccauuuggguucaggc

SEQ ID NO: 4185436 - RNA, 130 nt, Human
guccuggagaguaguauuucggaugucugggcugugggaugugggaggaaugucacugagccauuccucagguggcacaugccauuccugccccguccccacauaggaaugcgggccacuucucacaggc

SEQ ID NO: 4185437 - RNA, 66 nt, Human
guccuggcccacuaugccagcaucugccagcagaauggcauugugcucaucguggagccugaggau

SEQ ID NO: 4185438 - RNA, 73 nt, Human
guccuggcuacucaccugaggguguagcucgcaaaggugggaaucuggugcuggcuuuuccuucaggcaggau

SEQ ID NO: 4185439 - RNA, 112 nt, Human
guccuggcucauggagacggugcagaugggcaugcuggagcgggcgcaguacagaaggcaugugcccagcagcagcguccccguccaugccuggcacucgggccugugggac

SEQ ID NO: 4185440 - RNA, 63 nt, Human
guccugggcuuugagggcaggauggaugagaaugcaccaccaugcagaaggauccccauaggc

SEQ ID NO: 4185441 - RNA, 59 nt, Human
guccuggggaauacagaagccgccucgaaugaauggucggacucaccuuuucccaggac

SEQ ID NO: 4185442 - RNA, 82 nt, Human
guccugguuucaguucucuuggaaguuaugugaggaucuggucucacaccuuaccccgagagagcccugaagggcccaggau

SEQ ID NO: 4185443 - RNA, 56 nt, Human
guccugguuuucacagaccuuuccaauuaaauggcguuguucuugaaaagcaggac

SEQ ID NO: 4185444 - RNA, 70 nt, Human
guccugucugucauuagccuugacuguagcuuucuaaaguggucuacagaauagaauagggacaggggac

SEQ ID NO: 4185445 - RNA, 97 nt, Human
guccugugaccaacacggcagggcuucgcuccuggugcaccaugcuccgcgcggucaggcggccacaagccaugcuguaacugucaguccauaggau

SEQ ID NO: 4185446 - RNA, 60 nt, Human
guccugugccgaggugggaagccagugccccucucuaaagucuucagccuggagcaggac

SEQ ID NO: 4185447 - RNA, 72 nt, Human
guccuguuaagaugcagaguccauaaccgcuccauagaggagcagggggaggcguuuguguugugaugggau

SEQ ID NO: 4185448 - RNA, 73 nt, Human
guccuuagcccagugcugagggugcugcugguccugagaccuaagccauacuccacucugagcucugggaggc

SEQ ID NO: 4185449 - RNA, 71 nt, Human
guccuucugauauauuuuccauggucugcaguauucaacucacugagacugagggaaauauucugccagac

SEQ ID NO: 4185450 - RNA, 66 nt, Human
guccuucugauucugugguaguuaaugccucaggcauagucuguccagugcagagaacagaggggc

SEQ ID NO: 4185451 - RNA, 81 nt, Human
guccuugacuuuggcuugcacuggcaccaaccucagcccucgcugguugggagcucucagcugcaguccauagucacugac

SEQ ID NO: 4185452 - RNA, 55 nt, Human
guccuuggagguguggaaucugacuguguaaaguaagugguuacccacccaaggc

SEQ ID NO: 4185453 - RNA, 57 nt, Human
guccuuggagucaggcaaggcugcgcaguggugggcagaccagccugguuucaagac

SEQ ID NO: 4185454 - RNA, 58 nt, Human
guccuuggcacccaugugauucugacauccagaagggauaugagauggugcuagagac

SEQ ID NO: 4185455 - RNA, 58 nt, Human
guccuugguaugacaugcaaaaugugugcugggcacugcaccuguguaccaagaugac

SEQ ID NO: 4185456 - RNA, 83 nt, Human
guccuuguagucuccugccacuucuugcuauggagugcuguaccaaggucucugcuaguuucuaguuggcuugacauaaugac

SEQ ID NO: 4185457 - RNA, 58 nt, Human
guccuuguggggugcgaggagacguccagacacaaguguuuacuucaacucccagggc

SEQ ID NO: 4185458 - RNA, 123 nt, Human
guccuuuaacccuucaagcaauuaaaauugugguuuuagcuucaguucuagcuucuuucuaccacaaggucuggggaguauccucaacugaaaaaccauauuuaguucccuucuuuaaaggau

SEQ ID NO: 4185459 - RNA, 55 nt, Human
guccuuucgagggugagugaaagcacaugcuguccuuuacaugcuugaggcggac

SEQ ID NO: 4185460 - RNA, 117 nt, Human
guccuuuuagccuuggcagggcaccuaaguaaacuugccaagagcuuugcuagccgugggcaggccgagcucauuggaggaggugcuaggaacgcccugcucucuggcuuucaggac

SEQ ID NO: 4185461 - RNA, 120 nt, Human
gucgacacaauuaugggaauagcuaaaauucaccaguagaccuaguggguucaauucaacaagauuauugagagccuguuuugugggagaugcuauugcucauaugcuagugaaacagac

SEQ ID NO: 4185462 - RNA, 64 nt, Human
gguguacguucuucugaacuuugaacgacacuuuucaaguggugcugauuaagaacuguauacc

SEQ ID NO: 4185463 - RNA, 64 nt, Human
gguguagcaguguaggaaugugaauccuggagauaaauuucagggcacguuucugcaaugcucc

SEQ ID NO: 4185464 - RNA, 70 nt, Human
gguguagguguggcccaggugucugcagcucugaagguggaggugcagcccagguguagcucuuugaacc

SEQ ID NO: 4185465 - RNA, 67 nt, Human
gguguauuagcuguuagcuacaucagaaugacuuagcguaacccugaucagcuaacgcuuguaucuc

SEQ ID NO: 4185466 - RNA, 61 nt, Human
ggugucaacaucagaaaaugcuccaucacacagcucguagaagcacagccugauggacacc

SEQ ID NO: 4185467 - RNA, 85 nt, Human
ggugucaaucucagacaaauggguacccgugauugcaacagcgccugcagcagcuccagguuacccucagucucagaaggacauc

SEQ ID NO: 4185468 - RNA, 74 nt, Human
ggugucagaccuggagggaaguucugacuugggcccuuaugcaccaagucaggugagacucucugggccucacu

SEQ ID NO: 4185469 - RNA, 63 nt, Human
ggugucagaggaggcugaguaggaaggagggacuuuaccccugcccccuaauccugugauauc

SEQ ID NO: 4185470 - RNA, 101 nt, Human
ggugucagccagggcugugauuucaucugaggccaggagcccucuuccaagcucacugguuguuggcugaauucaauucauugcaguuuuagggcugaccc

SEQ ID NO: 4185471 - RNA, 68 nt, Human
ggugucccuggaauggacucugcgcuguguccaguccgggacgcgcagagcccucuucuguggacgcc

SEQ ID NO: 4185472 - RNA, 58 nt, Human
gguguccgcgcuguagaaggucagcaucugcuuggugaucagggauggguuggacacc

SEQ ID NO: 4185473 - RNA, 110 nt, Human
gguguccucucugucacagguguccuuucucucacuagcugugugcagucaccaaaaacgcagccagugggaugagaaagaaggcccagaaccagacagacaggugcacc

SEQ ID NO: 4185474 - RNA, 85 nt, Human
gguguccugggagacagaagaccuggauuccaggcuuagcucugugcugggugcccuggguaggucaguuccccucccuggaccc

SEQ ID NO: 4185475 - RNA, 79 nt, Human
gguguccugggauucaugaaaagauucuuuccacaauuacugauuuguuaagaaaauuuauucauguuaguucuauacc

SEQ ID NO: 4185476 - RNA, 61 nt, Human
gguguccuuaugcauaccagaguguaagucuucauacauucugaugccauaaugaggacuc

SEQ ID NO: 4185477 - RNA, 64 nt, Human
ggugucguaaaagggccgcaguggcagcguccuggccgacggcuaguagcccauuuuggauacc

SEQ ID NO: 4185478 - RNA, 73 nt, Human
ggugucuaaagaagcagagcuguggguguuuggagaggcccaaucccaaaugccacuucagcuucaggcaacc

SEQ ID NO: 4185479 - RNA, 60 nt, Human
ggugucugauuccaaggccacacuccuccuauugcacaggugugcuuucaaccagacacu

SEQ ID NO: 4185480 - RNA, 77 nt, Human
ggugugagagaaucaauugaaguggaacugaagaacagccuucuagauaguaaacauguaauuguucauuucacauu

SEQ ID NO: 4185481 - RNA, 73 nt, Human
ggugugaggguuuuaagggaaugaaauaguaacauuaaauuugcaacaguuauucugcaaaaucuucaaaucc

SEQ ID NO: 4185482 - RNA, 86 nt, Human
ggugugcuuuaaugacuaagaccuaaaauugugaauauuuauacauaaacauuccaguuguaagguuuuucauaagaaaguugacu

SEQ ID NO: 4185483 - RNA, 56 nt, Human
gguguggcagggcgugacauuuggcccaggucagugucuggauccugcucaguucc

SEQ ID NO: 4185484 - RNA, 60 nt, Human
gguguggcaguggaccugugaagagggagaaucuagccuucagccuguccaguguuaacc

SEQ ID NO: 4185485 - RNA, 86 nt, Human
ggugugggauggcagcagcgggugugggcagcaacuauggugccagcaccugggcucagucugcaccugcggguucuaauugcacc

SEQ ID NO: 4185486 - RNA, 56 nt, Human
gguguggggagguucugcuucucugaguaguggagacaguggagcccacucacagc

SEQ ID NO: 4185487 - RNA, 74 nt, Human
gguguggggcaagggugggauuggaggaagcugccugggcaagcgagguccuccucacgcuguugcuugucacc

SEQ ID NO: 4185488 - RNA, 73 nt, Human
gguguggguaggagugcagagaauaaaucugggccuguuuuguucauuuguucaucugcucuucucuccuccc

SEQ ID NO: 4185489 - RNA, 77 nt, Human
ggugugggucagcuuuauuaauggaucuucaugguaagauggaaccagccagaaaugaugagguguugaacuauacc

SEQ ID NO: 4185490 - RNA, 60 nt, Human
gguguggguccuugugcuugcuuuuggcaaguuucugagcuacacagggccuccauuacc

SEQ ID NO: 4185491 - RNA, 82 nt, Human
ggugugguuaggguauuuguugaguuguuaugucuucuaucauaaguagacauggaaguuuaauauauuuuuuaaacacauc

SEQ ID NO: 4185492 - RNA, 97 nt, Human
ggugugugauuucugugaauuggcugagauuugaauaguaacuauggucauucaaaaauggcuguucacaucuggaccauuucucaaaauaagcauc

SEQ ID NO: 4185493 - RNA, 56 nt, Human
gguguguuuuagugacaucucucguucuugcuuuagauguuuuggagacacuaacc

SEQ ID NO: 4185494 - RNA, 103 nt, Human
gguguuaaauguaaugcaguggaccaagaguucaagagugaaccacuuuaauccugcuuccagagauggugugcucuguaaccuugggcaauauauuuaaccc

SEQ ID NO: 4185495 - RNA, 102 nt, Human
gugcuugauacaugguguacauugauguuuauugagugaaugagcaugaagccacaauuuuuaugacaguucuuuagagauguauuuuguacccacaggcac

SEQ ID NO: 4185496 - RNA, 63 nt, Human
gugcuugcuugaggcgagacauuuggaaugcuaguuuagaauguuuuauagcucaagcaauau

SEQ ID NO: 4185497 - RNA, 63 nt, Human
gugcuuggguuucaacagacagacaugagcccagaggcuuccuggcagggaacuugucagcac

SEQ ID NO: 4185498 - RNA, 112 nt, Human
gugcuuggugcuucuucuaauucuuugcugcccuccuuugcuucuccuaguucuugaagguauuaggaagggcaaaagagauggagaugauucagcaauuggaaccgagcac

SEQ ID NO: 4185499 - RNA, 111 nt, Human
gugcuuugggaugcaaaaauaaaucacacauggauucugcaucaguacuuuccauuccaguauaggaaugaagauacaggcagggccaugugaauaaaguccuaguuucac

SEQ ID NO: 4185500 - RNA, 63 nt, Human
gugcuuuuaucuaucagauugguuccugcuuagggaagcagcauguaugagggugaacggcac

SEQ ID NO: 4185501 - RNA, 130 nt, Human
guggaaaaauagcaacuuaguaugauggagagagagagcagacaggccuggguucaaauuugggcucucuaguuugucagguuugcaaccucgggcaaauucucuagcuucccugaacuugaauuucccc

SEQ ID NO: 4185502 - RNA, 89 nt, Human
guggaaaaucaugaaguagguucaggagauauugcacaguccacguggucaugggcugugcgggaagccagagcacugcuuuaugccac

SEQ ID NO: 4185503 - RNA, 65 nt, Human
guggaaacaccuuggucugauucagagcauuaccuuguaauggcacuaggaccagggguugccau

SEQ ID NO: 4185504 - RNA, 64 nt, Human
guggaaagagacuggaaacuagggucacauacuucucugugacagugagugccaguuuaccuac

SEQ ID NO: 4185505 - RNA, 66 nt, Human
guggaaaggggagggauauuagaggauagaugugacaguucuucugggaagcugguccuguucuau

SEQ ID NO: 4185506 - RNA, 79 nt, Human
guggaacaagcaagcacugcaugucuuucauucagaguucucugaggaaccaccuuggguaggcuuuuguuugucacac

SEQ ID NO: 4185507 - RNA, 61 nt, Human
guggaaggaauuaacagacuagaucucuuuucacucuggucuccucuuaauugccuacuac

SEQ ID NO: 4185508 - RNA, 56 nt, Human
guggaaggcauuuuccagccucagggccaugcuucugagagaacaaugccuccuau

SEQ ID NO: 4185509 - RNA, 65 nt, Human
guggaagucauguaguaguauuuuuguuugccuuuauggcuauuaugugauuauaugacuuuuac

SEQ ID NO: 4185510 - RNA, 86 nt, Human
guggaagugugggggugggaggaggacacucugcuucagccccuaggccuguuccauguguccuuguucccauuccagacacccac

SEQ ID NO: 4185511 - RNA, 67 nt, Human
guggaaugaaaaguacuucagaaugacugaagcuuacaauggcuaaaggaguucuaggccauuccac

SEQ ID NO: 4185512 - RNA, 70 nt, Human
guggaaugaauagauuugcauuggagguacacaacaaugccauuggugaugaagauauucacguuucuau

SEQ ID NO: 4185513 - RNA, 87 nt, Human
guggaaugaccaagccauaugguagguauauguuuaauguuuuaagaaaaugcugaacuguucuccagcauggcuguaccauuuuac

SEQ ID NO: 4185514 - RNA, 96 nt, Human
guggaaugucacccuuaccucaacuagagcaaacuccuggaguucugcaaguccaaggacauuguucuaguugccuacagggcccuggcaucucac

SEQ ID NO: 4185515 - RNA, 64 nt, Human
guggaauucaguccagugcuaacagguugagguuuccuuuacuacaagcuacuggucuuugcac

SEQ ID NO: 4185516 - RNA, 61 nt, Human
guggaauuuggagcuuuguuucuagaaacauuuucucaugacuagugcuccagccuuccau

SEQ ID NO: 4185517 - RNA, 74 nt, Human
guggacaaaaagacuuccaacucaggagggacuagaaggcauuucucugcuguguuagcagguuuaguguucac

SEQ ID NO: 4185518 - RNA, 77 nt, Human
guggacaaaacaggcaucacucagcaaagcugaaucaggaaagagcuuuccaggcugaguuugcuugcaguguccau

SEQ ID NO: 4185519 - RNA, 57 nt, Human
guggacacagggcaaccucugggagacugucaagggcuccuaugaugcucugcccac

SEQ ID NO: 4185520 - RNA, 67 nt, Human
guggacauaccgugccccaaugcggaaucgggguuccuggaggugcuggaguggcacuguguggcac

SEQ ID NO: 4185521 - RNA, 72 nt, Human
guggaccauacaaaaauaggugauuggcagaauuuggcuugccggcuguaguuuaccaaucccuugguuuac

SEQ ID NO: 4185522 - RNA, 60 nt, Human
guggaccugcguaggugcugggccgcgguucccguucugcccgcccggggcgcagggcgc

SEQ ID NO: 4185523 - RNA, 116 nt, Human
guggacgcagcauccuuuuuagguuaucaauguuucauauuucuuugaaacuuuggacaagcaauuuuugaaaggguuaugagacugaauaccagguacugaauucuuguuuccau

SEQ ID NO: 4185524 - RNA, 87 nt, Human
guggacugaacucugugaccccuccauugaaaaggcaaaacuguaucacuguguuuucaugcaagcaggcacugggaagcaguucgc

SEQ ID NO: 4185525 - RNA, 76 nt, Human
guggacuuggggaaggcacaguuaucucuuauaugaaucuccacaaaagcuuccuaacuggcuuuccucauuccac

SEQ ID NO: 4185526 - RNA, 73 nt, Human
guggagaagcucacaguaggacaccagcagccacggccaacagaagggcugccaauccagcugugggagccac

SEQ ID NO: 4185527 - RNA, 88 nt, Human
guggagaaggagaagagugggagggaggcuguagauagcuuguagguuugggcuguacaggguuauccuuucccauggccuuuuugau

SEQ ID NO: 4185528 - RNA, 83 nt, Human
guggagacuuacaggcuuacaggcugcaaguaucuaaucaucuuccaugcuuucauguuuguugccuuuagcaucacuuccau

SEQ ID NO: 4185529 - RNA, 96 nt, Human
guggagauaaguugggcagugaugagcucaggugugcaaaauaaaacuuacuuuauuucuacauuacugaggucaacucagcucauaagaucccau

SEQ ID NO: 4185530 - RNA, 73 nt, Human
guggagcagcaagcacucaaaggcucacuugggugggacuucuuagcagucuuuccugcuugacuguucuuac

SEQ ID NO: 4185531 - RNA, 63 nt, Human
guggagcauuagugaugcuagucagaaggugcggcuguuugauuacacaccacagugcuccau

SEQ ID NO: 4185532 - RNA, 74 nt, Human
guggagcugaaggggugggcucagcggccagaugggccgguucgauucugggcuccacuacuugcuaacuccac

SEQ ID NO: 4185533 - RNA, 98 nt, Human
guggaggauaguuacaugggugcuggguagcaaccaaaaaaugucaaguacugugcaccccuuuggcuacucaacauguacucauaccuaucuuccac

SEQ ID NO: 4185534 - RNA, 64 nt, Human
guggaggauucagcgaggcagccuggaugaucaagaaugauuuccucuccccgcugguucccau

SEQ ID NO: 4185535 - RNA, 99 nt, Human
guggagggauuaggaaaaggucauuuuuuccucuguuggugagaauguugucagcugcaggaacaaaaaugugucgucuuaccuaauaaaacuuucuac

SEQ ID NO: 4185536 - RNA, 80 nt, Human
guggagggcccaguccagggagcccaggcuuuggggagcaguuucaagccugugcaggccccuggcucgggugcccccgc

SEQ ID NO: 4185537 - RNA, 57 nt, Human
guggaggguguagugcuguggcucggccccgccgcgcacagcuccgcuuccucacac

SEQ ID NO: 4185538 - RNA, 118 nt, Human
guggagguaauauuggagcaguggauuauucucagugcuauaaguagagaagccacuuaaaagucauucugccuuagcaauugucaagggugauucuguuccauuguuacuguuccac

SEQ ID NO: 4185539 - RNA, 63 nt, Human
guggaggucccgggcaggagcagacaaagccccucguaggcagcaccaggccuggcucuccac

SEQ ID NO: 4185540 - RNA, 58 nt, Human
guggagucauacagaacaagacuguuucuuccuaacagugcuucugauaugaugccau

SEQ ID NO: 4185541 - RNA, 55 nt, Human
guggagugccucgggguugcagggucaggcaauccagcugcccagagcauuucau

SEQ ID NO: 4185542 - RNA, 59 nt, Human
guggaguggguuguacucagggaguguaguuggaagcacuugccuggcaccagcuccac

SEQ ID NO: 4185543 - RNA, 83 nt, Human
guggaucaaaaauuugaauaggacucagcagugaucaucugucugugaucugugauggucuugaucaucaagauuugauccau

SEQ ID NO: 4185544 - RNA, 74 nt, Human
guggauccugggguggugaccucgucccaaauggucagggacaaccagggaggcuuuacugccucaggacucac

SEQ ID NO: 4185545 - RNA, 63 nt, Human
guggaucuacuguaugggauaggaaugugucauuuuuuucuaucaacaaacacagggauucau

SEQ ID NO: 4185546 - RNA, 67 nt, Human
guggaugccuggucccaccucuagguaucuagauucaguaaaucuggagugggacacagaaaucugc

SEQ ID NO: 4185547 - RNA, 71 nt, Human
guggauggcuaguugagaagggccacagacaaucuccuguacuacugaacucuuccuagccagcucuccau

SEQ ID NO: 4185548 - RNA, 129 nt, Human
guggauguguagacuacauagugguuuuuucaacccaggaacauaacaguauaauggaggauaggaaggcagaagauguuuaaaggguugagaaauaaugguauauguauaauggucaguaagcagaac

SEQ ID NO: 4185549 - RNA, 70 nt, Human
guggauuauuguacuuucaauaagguuagaacaucuuugauuguagguacaauguuuuacccuuguccau

SEQ ID NO: 4185550 - RNA, 56 nt, Human
guggauugaagcaauuguuccuagcugccaugcaguggagaugccucucaguccau

SEQ ID NO: 4185551 - RNA, 115 nt, Human
guggauuugggucuaugucguacuaccucaaaacgucuccagucucuggcuguuugugacuucccaggagcucaugaaaauagaucagaaauuguagaacauuagacugagccac

SEQ ID NO: 4185552 - RNA, 63 nt, Human
guggauuuuaaaaguagagaugaucauuauuauuuuaugauccuuuaaguuaauaaaauucac

SEQ ID NO: 4185553 - RNA, 59 nt, Human
guggcaaaaccccaucucuucuaaaaauacaaaaauuagcugagugcgguggugcacac

SEQ ID NO: 4185554 - RNA, 93 nt, Human
guggcaagaaguaaacaaagacauuuaugaaaagugcugugugccuggcacagaauagacgcuccaaaaaugucucuuugcuguuuuagucau

SEQ ID NO: 4185555 - RNA, 59 nt, Human
guggcaagcuguuggcagauagcucugcagaaauaccagggccaggcagcagcugucac

SEQ ID NO: 4185556 - RNA, 56 nt, Human
guggcaaguguuccaagaggcgauuuauucuuucugcugauggacacacuugccau

SEQ ID NO: 4185557 - RNA, 58 nt, Human
guggcaauucccuuggucaacagaggguaagaaugcuaccuagauuauggaaugcugc

SEQ ID NO: 4185558 - RNA, 62 nt, Human
guggcacauggugcuucuggauguggguucauauuugcagcuagagggaugcugugugaaac

SEQ ID NO: 4185559 - RNA, 56 nt, Human
guggcagaaacuggcagaggaggaugcuggcagcaccaccgggcuuguuucuccac

SEQ ID NO: 4185560 - RNA, 90 nt, Human
gucuuagauugaucuucuaaacuuuguuuauacucugaguuaucuuugaguagauuagggaagagcaaagcuuacaaagguagcuaagau

SEQ ID NO: 4185561 - RNA, 60 nt, Human
gucuuauagcucaaaggaagaguucacauuuaauggaagcucuucuucaggcucaaggau

SEQ ID NO: 4185562 - RNA, 55 nt, Human
gucuuauucugaguuggccacccagaaagcuggaccuggcaggcccaggauggac

SEQ ID NO: 4185563 - RNA, 70 nt, Human
gucuuauucuguguaucuccaaaggcacucauuguuagagucugggagugaagcaacagauggaugagau

SEQ ID NO: 4185564 - RNA, 128 nt, Human
gucuuauuugcauggcagggcuggaggcuacacugugacuuggcauucaugggacaacaaaaugaccagucauucuguguuccauggaggccagucagagcagguuccuugguggugugcucagggac

SEQ ID NO: 4185565 - RNA, 58 nt, Human
gucuuauuuuaagucaguuuggguuagggaaagcuggccauugaugugaaaguaagac

SEQ ID NO: 4185566 - RNA, 60 nt, Human
gucuucaacaauaacuaccacuuuguuguccucgaagugacaagguaguuaguuggaugc

SEQ ID NO: 4185567 - RNA, 74 nt, Human
gucuucagaaugcuauuucugaaaugcuaccuuugaguugguucagcccucauuugagaaaguauuuuuaagac

SEQ ID NO: 4185568 - RNA, 78 nt, Human
gucuuccaaaguggcuguacuauuuuuucauuccuaucagcaaugaaugagacuuccugguacugucaguuuggggau

SEQ ID NO: 4185569 - RNA, 78 nt, Human
gucuuccacuuuucuacccacugugacaaugaucuucccaggauucuaagucaacccggugagguaagcaggggagac

SEQ ID NO: 4185570 - RNA, 74 nt, Human
gucuucccuguugaaaaccuuuauuugguacuauucuacaaaggguaauagcaaacaaaagguacaucgaggau

SEQ ID NO: 4185571 - RNA, 55 nt, Human
gucuuccuuucaccucugcgaagaaugccuugaguucguccaggugcuggaagau

SEQ ID NO: 4185572 - RNA, 67 nt, Human
gucuucgucagguguggguguuuggugccugcauggguggccuugcacagagcaguuaggggaagau

SEQ ID NO: 4185573 - RNA, 70 nt, Human
gucuucucuggagaccucuccugagagugcugucuccaugugcacuuacacaagagucuccaucucaggc

SEQ ID NO: 4185574 - RNA, 66 nt, Human
gucuucuggaagagagccagcuaaugaauuaccagaugaacagcuuuuggcucacuuaucaaggac

SEQ ID NO: 4185575 - RNA, 94 nt, Human
gucuucuguguacuugcuuccaaaugcuuucuuucauauaaccauauaucagguuaagauauaaaguguuuugugagcagucuggauggaagau

SEQ ID NO: 4185576 - RNA, 58 nt, Human
gucuucuuaggccuugaguguuaauaagucauuucuacacuccagguggcaugaggac

SEQ ID NO: 4185577 - RNA, 62 nt, Human
gucuugaaagggagcauggcugcagggaauuaacaaaaauccaugcaucuccuuuuagagac

SEQ ID NO: 4185578 - RNA, 75 nt, Human
gucuugaacuccugaccuugugauccacccgccuuggccucccaaagugcugggauuacaagcgugaggcacggc

SEQ ID NO: 4185579 - RNA, 130 nt, Human
gucuugaagacuuucuaacuagaauuagaauugaugaguuuugggggauguuagauaagguauguuugguuuauaucucuaauacugcuguaauuuaaacacuaagauguagcaaugaaguugccaagau

SEQ ID NO: 4185580 - RNA, 57 nt, Human
gucuugaaucucucugagauucaguuucuuuagcugugaaacggagacgaucaugac

SEQ ID NO: 4185581 - RNA, 65 nt, Human
gucuugacuuugaugaagcuggaucuaaauuacaaauuugagaaucagcugcacagagguaagau

SEQ ID NO: 4185582 - RNA, 58 nt, Human
gucuugauaucucauggucuuacuugcaaaggcuacaguguuccaugacuauuuggau

SEQ ID NO: 4185583 - RNA, 61 nt, Human
gucuugcaaaguagcugagagguucuaaccaaaaggaugaaugucaaagugcuuugcaaac

SEQ ID NO: 4185584 - RNA, 58 nt, Human
gucuugccccucugcccaguccucagagcacugggagccaggcauaucggggcacgau

SEQ ID NO: 4185585 - RNA, 130 nt, Human
gucuugccuuauguuuucaacauaaugggaauguuuucuacggagaaaaauguuuucaauauuucccuccagggaaagcuuacaguucuccaacaugaucuaugacucaacagguaagucuaacuaauuc

SEQ ID NO: 4185586 - RNA, 72 nt, Human
gucuugccuucacugcacuugaggauuuuccacagccaugcauggggauguucucguguaagagggucagac

SEQ ID NO: 4185587 - RNA, 85 nt, Human
gucuugcucacaaaacuauuuuuggagcuaacucucuuauagaaaaucaucaaaaaggguuuuauccaaaauguuucaguaggau

SEQ ID NO: 4185588 - RNA, 102 nt, Human
gucuuggagacacagaacacauuggaggggcagaaagcaggagguggcaggugauaggccuccuauugcugccauuuuccaauguaaaucuuugcucgagac

SEQ ID NO: 4185589 - RNA, 65 nt, Human
gucuuggccagucagagucacaguaauuuguucaagggaauauacuaugcuucugauccaaugac

SEQ ID NO: 4185590 - RNA, 83 nt, Human
gucuuggugcagugaugaagucaguuagugggaaaacgggauuugguuucgcaacuuuuccagagcugucucuugcauaagau

SEQ ID NO: 4185591 - RNA, 68 nt, Human
gucuugguuuuaugaagguaacuggcauuggcagagcugcuggcugccugccugcauagucccacgac

SEQ ID NO: 4185592 - RNA, 59 nt, Human
gucuuguaauuuagcuuugaggcuucuaccugagaugaccacagaacaaauugcaggac

SEQ ID NO: 4185593 - RNA, 69 nt, Human
gucuugucuacggcugguuuuguucuauaauggcagaauugaagagauaugaguaguugugacagagac

SEQ ID NO: 4185594 - RNA, 59 nt, Human
gucuuuacucgugacaauguccuugaguugauuuuucucagaacauguuugaguaagac

SEQ ID NO: 4185595 - RNA, 125 nt, Human
gucuuuagcuaaggcuuagcagaaaagccuucuccuauggggagaacuuucugugagguuccauauggucccugcugacucuuccuggagugaagaaggcuuuuccaagccccuugauggaagac

SEQ ID NO: 4185596 - RNA, 71 nt, Human
gucuuuauuacaaauccuuuucauaacccacaaaggaugugguucagaaagaugguguaauaaugugagac

SEQ ID NO: 4185597 - RNA, 97 nt, Human
gucuuucaaauuauugaauuaaaguagaggagaacacaaauuauagguugucuuggugugugaguuuucucuuguuauucauuaaucugauuaugac

SEQ ID NO: 4185598 - RNA, 68 nt, Human
gucuuucauaauucagcacauugaaccaauuacuuugccaauuggcucaccucugaagugugaaaguc

SEQ ID NO: 4185599 - RNA, 56 nt, Human
gucuuucugccaugugaagagacaaagggaaguuggcucuuugcaaugcagaagac

SEQ ID NO: 4185600 - RNA, 60 nt, Human
gucuuugagauagguauuaucauccccuuucuauaaauggugaaauagauacucagagau

SEQ ID NO: 4185601 - RNA, 65 nt, Human
gucuuugcaaaugcucugcagagcuggcccuucucgcaggagugguguggauuauuugcaaaaac

SEQ ID NO: 4185602 - RNA, 72 nt, Human
gucuuuguaacugucuauugagacagacaauuuacauauguuaagucuccguagauaguaaaugcaaacgac

SEQ ID NO: 4185603 - RNA, 79 nt, Human
gucuuuguaugcucauauacuggauguuugcuuuuugcaagacaccauuugacaguggcagugggcaugguacaaagac

SEQ ID NO: 4185604 - RNA, 74 nt, Human
gucuuugucuuuguguuguugguguauuugccucuuuuccugugccagauacaaagcuacucgagggcagggau

SEQ ID NO: 4185605 - RNA, 86 nt, Human
gucuuuugccaggacaucuacauguugauuuaaagaaguagauuaggcuucugcuuugaguuaggauguagaauaaugcaaaagac

SEQ ID NO: 4185606 - RNA, 78 nt, Human
gugaaaaaguagacugcucagaguaaguauggaggaucauacuucugcauacacugaauguaguuguuucuuuuccac

SEQ ID NO: 4185607 - RNA, 96 nt, Human
gugaaaagaaguuuccuguuuuguauuuagaguguuuuaauucgaucuuaaagcauuuaagcuucugcaaagcauuaauuuuggcauucuuuucau

SEQ ID NO: 4185608 - RNA, 103 nt, Human
gugaaaaguaugguaauggacucagaucucaacagcuggagucauugaucaguuaugcuccccacagcagaagaucugagagcaacauuuucauugcugccac

SEQ ID NO: 4185609 - RNA, 59 nt, Human
gugaaaauuuaugggaguuuuucauucuacucaaugagagauugcuguauguuuugcac

SEQ ID NO: 4185610 - RNA, 72 nt, Human
gugaaacaggcccagugaggauuaagguaaaccugagcggguugcccugucuuaagcuggcaaauguuucac

SEQ ID NO: 4185611 - RNA, 89 nt, Human
gugaaacaucgggauugguggugguugccaaauguaggaaauacguugaugauacguggacagauaggaaaucgcuauuaaccuaacac

SEQ ID NO: 4185612 - RNA, 82 nt, Human
gugaaagggcauugagcuguagugcuuugggauuagauagauuugcucuucaauccaguuucugucagcuacucucuguuac

SEQ ID NO: 4185613 - RNA, 83 nt, Human
gugaaagguuuacaggaggcaguggguguugucuagaaggaaauccagaacugcuucacuguuucugagacugaacuuuuuac

SEQ ID NO: 4185614 - RNA, 117 nt, Human
gugaaaguauaugcaucaaaaauuaacagcaguuaugaguagaauaguugagagcuuccaaaauauauauugcuuuugcuugcugaugugcuuguuuacauuauguuuugcuuuuau

SEQ ID NO: 4185615 - RNA, 72 nt, Human
gugaaauacacuggacaucauugcauuuugauagaagggucugaguuuuugaugaagucuaguguacuuuac

SEQ ID NO: 4185616 - RNA, 82 nt, Human
gugaaauuuaggcccagaaauguuagaagguguuguaaauucugugacuacacuccaauuuucuagguugcugaccuuucac

SEQ ID NO: 4185617 - RNA, 90 nt, Human
gugaaauuucuuuugauuaaaacaggugucagcaaacuauggcucaugggccaaagcugcccagcugccuguuuuuggaauaagcuuuau

SEQ ID NO: 4185618 - RNA, 59 nt, Human
gugaacaaggagacuacaacuucagcaagaaagaucauggagaugcagucaauguucac

SEQ ID NO: 4185619 - RNA, 129 nt, Human
gugaacauuauaugauuuuuaguauauugagucagaaacuagauguauuagagauucauguuaaauaugauacaaaucugauaaaacauaaaguuuccuuaagaugcuuaucauucaucaccuaaaaac

SEQ ID NO: 4185620 - RNA, 81 nt, Human
gugaacauuuguucucuuggcuauaauuuguaaauagguggaagggaagcugcuuguuaaaauuggagccgagagauucgc

SEQ ID NO: 4185621 - RNA, 77 nt, Human
gugaagaaagucauugguagcuugauagggauggcauugaaucucuaaauuacuuugggcaguauggccauuuucac

SEQ ID NO: 4185622 - RNA, 83 nt, Human
gugaagaaauccaguggugagguggggcuucagggacguaucguccaguugcucuggcuccauuucccuauguuugucuuuac

SEQ ID NO: 4185623 - RNA, 108 nt, Human
gugaagaacgcugggucuggaaucagaagccucaggucuuaguucugucaucaacuauuuugcgaccuuggacaaaagacuugaucacucacagucccaguuucccac

SEQ ID NO: 4185624 - RNA, 78 nt, Human
gugaagacuuugauuguuagagaucucuuuccuguggcuguuaugguuacagagggcuucucugaacuucagucucau

SEQ ID NO: 4185625 - RNA, 66 nt, Human
gugaagaucaggguccuagaguaacuuaauauuuuguacauugguuauuugacuccucauuuuuau

SEQ ID NO: 4185626 - RNA, 64 nt, Human
gugaagauuuaagcacaauagucuggauccagaucuccagagauaugcugccuaaauuuauaac

SEQ ID NO: 4185627 - RNA, 60 nt, Human
gugaagcaguugcguggguuccagugacagagauccuggguuucauuuguaucugcucac

SEQ ID NO: 4185628 - RNA, 113 nt, Human
gguuggagauuaagagguggcaaauuuacuuuaagacauaccaaguugugugauuuaucacacaaaccuggauucuuaugagugugaaaagugccacugucaauaauuuugcc

SEQ ID NO: 4185629 - RNA, 101 nt, Human
gguuggagucuaagcugguuuccucuauuccugucuuacucaagggaaauuccuaccccuggccaagacagaaauaggagaaaccagcuuaaaauccaucc

SEQ ID NO: 4185630 - RNA, 66 nt, Human
gguuggauuuccuaauggugccuuagucauucauacacauuauucuggggccaaaggguuccaauc

SEQ ID NO: 4185631 - RNA, 58 nt, Human
gguuggcaagaaaugaggagagcugagacuggcuuggaaucccucagucugccaggcc

SEQ ID NO: 4185632 - RNA, 65 nt, Human
gguuggcacaaaaguaauugccauuccuuuuaauggcaaacaccccaauugcuuuuguaccaacc

SEQ ID NO: 4185633 - RNA, 60 nt, Human
gguuggccaggcuggugucacaacucuugaccucaagugaucuaccacccuuggccuccc

SEQ ID NO: 4185634 - RNA, 69 nt, Human
gguuggccucaggagguuuccugucuaggcugggucuuguccuugcgcuggcuuccuccuggggccacu

SEQ ID NO: 4185635 - RNA, 65 nt, Human
gguuggcucccggcacuuggcaugucaugguucuaucaugcuaauuccauaugccggagcucauu

SEQ ID NO: 4185636 - RNA, 112 nt, Human
gguugggccucuagaucuaaugaagauaagcaaaugcguuuagaggaaacaugucaccacaugcaucuccaggcucauuucaugcccccucuuucuagaucuuggucccucu

SEQ ID NO: 4185637 - RNA, 62 nt, Human
gguugggggcagucagggugucagagaagcucgagggcgguccucugggcugcacccucgcc

SEQ ID NO: 4185638 - RNA, 65 nt, Human
gguuggugagugagugcguuccugaggcuuagcugggcaaaggaaaacgucucagcuugcugacu

SEQ ID NO: 4185639 - RNA, 98 nt, Human
gguugguggguaacucagggcaggaagggcuguuucuccaagagguccuccuggagccaggacccuuccccgcccugcccagucauucccacccugcu

SEQ ID NO: 4185640 - RNA, 88 nt, Human
gguuguaaauuacccuuuuaauucucuccucuucagaggucuccagacugagccucucuuggggaaagagaagaauguggcaugcacc

SEQ ID NO: 4185641 - RNA, 63 nt, Human
gguugugacauggguagcagggacauaugucuagugacauagauuugcuaugcauaucugacc

SEQ ID NO: 4185642 - RNA, 60 nt, Human
gguugugcaugacugugaauagcugugaauaugcaugguugcacauggcugugcauggcu

SEQ ID NO: 4185643 - RNA, 71 nt, Human
gguugugcuucaccagcugccaagggcuacacugacucuggucgagugcuccugaagcuugaggcaucacc

SEQ ID NO: 4185644 - RNA, 75 nt, Human
gguuguggacucaccuugaguuagccaccgucgguguuuucagacacagucccuggccucaagaaguucaaaacc

SEQ ID NO: 4185645 - RNA, 101 nt, Human
gguugugugacaaggaccugguuuuagcugaacuaaggagcaaaguucucaacaccuuugccuccugaguagcugggauugcaggcuuaugucacuauacc

SEQ ID NO: 4185646 - RNA, 109 nt, Human
gguugugugggagccaucaauguaaggacauuagaaaugaugcuagccagcuuuccuggggcauuacuaggugcuuacccugggccaaugcucugaagugcacaggacc

SEQ ID NO: 4185647 - RNA, 62 nt, Human
gguuguuacuaaaauaaugcacauuguucgcuucaaaagugccuucuauuuuagugacaguc

SEQ ID NO: 4185648 - RNA, 58 nt, Human
gguuguucuguccuuggaccacagucaccagcacugacagugccagccacaggacgcc

SEQ ID NO: 4185649 - RNA, 67 nt, Human
gguuuaaaauuucauuucugugggcagguucuuaaagucucuguauauauuaaugaaauucuaaacc

SEQ ID NO: 4185650 - RNA, 62 nt, Human
gguuuaaagcaaccaucaauuuggaaguugcuuuugaagcuccuuauaguugucuuugaacc

SEQ ID NO: 4185651 - RNA, 130 nt, Human
gguuuaacauguaugcaucauaaaaggcugcuguaauguguuaagucacuuaaaucaaguaguauaagaauuucuuggcuggcugacaauguagcaguaaccucuguaugagaaaaauauuucccuugcc

SEQ ID NO: 4185652 - RNA, 80 nt, Human
gguuuaaccugggaagcagcugagcuucaggaauggggggcugggcccagagucuggaguugaaguucuucccccagacc

SEQ ID NO: 4185653 - RNA, 72 nt, Human
gguuuacacugaaagagaggauugaagggcaaaugaggaaccauuuaggaauauuuucuuucagguuugauc

SEQ ID NO: 4185654 - RNA, 58 nt, Human
gguuuaccugauacaggugaugauuuuaaugaucauacagccuuuguuaguguauccc

SEQ ID NO: 4185655 - RNA, 99 nt, Human
gguuuaggaagaaguuauaucuucuuuauuuugugaggugcuuagaaauaaauauuugaugaugaugauaaaguuuccauaggauuucuucucuacucc

SEQ ID NO: 4185656 - RNA, 66 nt, Human
gguuuaguggucuggcucaggagcuagccuuuugugguucaucuccuggcucugccacuuacuacc

SEQ ID NO: 4185657 - RNA, 85 nt, Human
gguuuaguuuaauaauaauguuguaagaguguaaguaccaguagcuucauguacauucuacaacccaauaauaauuaugcugacc

SEQ ID NO: 4185658 - RNA, 74 nt, Human
gguuuauacaguuggugaugaggcuaguaggggguuauucaacucuccugugguuugcacuaauuguauugauc

SEQ ID NO: 4185659 - RNA, 84 nt, Human
gguuuauagucucuccacauuguuauaaaggaauguaauagaucauguuuccuuauaugacauugggacaguuuguuaggaacc

SEQ ID NO: 4185660 - RNA, 66 nt, Human
gguuuauaguugcuaggauguguuuauuaaccuuuguuaauuucaaauuucuuagcgugcugugcu

SEQ ID NO: 4185661 - RNA, 91 nt, Human
gguuuaucaaagaucagauaguuguagauauguggcauuauuucugagggcucuguucuguuccauuggucuauaucucuguuuugguacc

SEQ ID NO: 4185662 - RNA, 77 nt, Human
gguuuauggaaaggcuguggaaacuuaacgcuaucaucacaguauguuaagaaugacaaccauaccauuuccaugcc

SEQ ID NO: 4185663 - RNA, 63 nt, Human
gguuuauguagggcauuuccuagagggcauccucuuuaggaaauacuguccuaugaaaggacc

SEQ ID NO: 4185664 - RNA, 93 nt, Human
gguuuauugggcucaagaguucugcaggcuacacaggaagcauggcgcuggcaucugcucggcuucuggugaggccucaggaaguuuacaacc

SEQ ID NO: 4185665 - RNA, 63 nt, Human
gguuucaacucagcuaguaaggacuguccucuuaacagaacuuugccaauagccaguuaagcc

SEQ ID NO: 4185666 - RNA, 62 nt, Human
gguuucacaacucagcaaggagagcuauucucuaaauaaguucacuuucuguaguggaagcc

SEQ ID NO: 4185667 - RNA, 93 nt, Human
gguuucaccagguggcacgcaaugucaacuuaucucuuuaucuguggguucacguucaugauuugauuaggaugaugugcgccuggucucacc

SEQ ID NO: 4185668 - RNA, 64 nt, Human
gguuucaggccccagagccagggcuuucugacagaugcaucaccuggcugaggggccaaggacc

SEQ ID NO: 4185669 - RNA, 57 nt, Human
gguuucaguucagaagucaagaguaacagcuaaugcuuuuacuucaggagugaaauu

SEQ ID NO: 4185670 - RNA, 57 nt, Human
gguuuccuaugaauaaauauugagcuauaacacuagcuauagaauuucauagagacc

SEQ ID NO: 4185671 - RNA, 127 nt, Human
gguuucucccugaguugccuacugguguaucucuggugucucuaucuaugccugaaguuacucaauaaauacauuuuuuauggguggggauaacugauucuuacaacaguccuauaagguagaugcu

SEQ ID NO: 4185672 - RNA, 82 nt, Human
gguuucugcaucuucuccuaaggucagaauugccacuagccuauguggcacauuugcacacauuagaagacggugcauuucc

SEQ ID NO: 4185673 - RNA, 62 nt, Human
gguuucugccaaagaaguaaauggaaucuccaaauuccauuauuuccauggccaguuugacu

SEQ ID NO: 4185674 - RNA, 67 nt, Human
gguuugaacagcuuuggagaagucugguucuaguugguuucaguucucuccagaugccguuugaauc

SEQ ID NO: 4185675 - RNA, 67 nt, Human
gguuugaauaaaccuguguuuaccgccaucuguuuccuuggugguuucacagaugguguucauaucc

SEQ ID NO: 4185676 - RNA, 63 nt, Human
gguuugaccaagaaaaguucuaaaauuuuauccuugaaugucuucagaacacuugguuagauc

SEQ ID NO: 4185677 - RNA, 76 nt, Human
gguuugacuguccuacccauuugucugcuggucauuuagggugacaggcaggacagagguguguggagucgauacc

SEQ ID NO: 4185678 - RNA, 57 nt, Human
gguuugauuccugcuucugugcucacagcaugugaccugaggcaaggaguuuaagcc

SEQ ID NO: 4185679 - RNA, 93 nt, Human
gguuugcaaccuaggcugggccaguuaugucucaucucaguguccaaaguggcagauucaagagaagggacauaucuucaagccaggcaaauc

SEQ ID NO: 4185680 - RNA, 74 nt, Human
gguuugcauuaacucaacauucuccuaguuucaccauuucaagaacugaagaacugaaaguugaugcacagucc

SEQ ID NO: 4185681 - RNA, 56 nt, Human
gguuugccaggaagcacagaauaauggaguucaguguuacucaaggggcagucacc

SEQ ID NO: 4185682 - RNA, 76 nt, Human
gguuugccagggcaggagguggaagggagccccauuuacagugguaacuuccuuucccuuuccauccuggcaggcu

SEQ ID NO: 4185683 - RNA, 67 nt, Human
gguuugcuuugggagguugucugggagauugcugaacuuuugauauacacaccuccaaagcaggacc

SEQ ID NO: 4185684 - RNA, 67 nt, Human
gguuugcuuugggagguugucugggagauugcugaaguuuugauauacacaccuccaaagcaggacc

SEQ ID NO: 4185685 - RNA, 58 nt, Human
gguuugggagguuugauuuggacacaaucugagaggagccaggacagacuucaaagcc

SEQ ID NO: 4185686 - RNA, 57 nt, Human
gguuuggugaauuggaaauuguggcuauuaacuaauauuuaccaacucaccaguauc

SEQ ID NO: 4185687 - RNA, 88 nt, Human
gguuuguauguaugacugaaggacuagauugauuaauacuuaauaguugguaagcauuuauuuccugcaguuauuuaaaugugcuucc

SEQ ID NO: 4185688 - RNA, 90 nt, Human
gguuugucccggccccuguuggagucauuccuuccaggccugaaggcuguggacugaaagaaccggcaguuaggggcgguuagaaaaacu

SEQ ID NO: 4185689 - RNA, 75 nt, Human
gguuuguccuggaucaugccucugaauuuagucucugauuuuuauccaggggugauuuuugacuuguauaaaacc

SEQ ID NO: 4185690 - RNA, 99 nt, Human
gguuuguggcuucacuguuccuguagggugcaugacaagaucccuucucuugaggaaggacaaaauugaucacccuagcagcagugaugcauagaaacc

SEQ ID NO: 4185691 - RNA, 116 nt, Human
gguuuguuucuggggcucguuuucauucagcccaucagcuuucuaugauuguaaauggaggaaucgggggacaguguggggugagauggaacuagcaccagucuuggagacagacu

SEQ ID NO: 4185692 - RNA, 102 nt, Human
gguuuuaaaaguuguauagucaugaauggacacuuuuuaauaccaucuaugagaaauucaauggcaaaguguuuucauacccauaugcuaacugcugaugcu

SEQ ID NO: 4185693 - RNA, 77 nt, Human
gguuuuaaggcgugugguuuuugcuguuguuguuuuuucaauuagcagcauuaauuccauuugcaaccuuaauugcc

SEQ ID NO: 4185694 - RNA, 76 nt, Human
gguuuuacaaggauauuauuauuuucuuucagagugcuaagcuauucuuaaaggcacauagugucuaugauaaauc

SEQ ID NO: 4185695 - RNA, 80 nt, Human
gguuuucaagucuguuccaugucuugcucugauugcucauaaguggugcaauccagcacauggacacagucuuccagacc

SEQ ID NO: 4185696 - RNA, 104 nt, Human
guggcagaaaugcaacggccucacuccuggacagauccccaucauccaacaggguggguguagaagcugccagccugugguaggagccagcauucacuucccac

SEQ ID NO: 4185697 - RNA, 62 nt, Human
guggcagagggugagcuggacuaggaauuagcagaccuggguuccaguuccagcuuugccac

SEQ ID NO: 4185698 - RNA, 58 nt, Human
guggcagagugcgguucugacccugcuuguccuagucuuugagcugcuauucugcuac

SEQ ID NO: 4185699 - RNA, 58 nt, Human
guggcagcagguacucacgcacguccagcucuggggugcaggugccaucgcugcucau

SEQ ID NO: 4185700 - RNA, 68 nt, Human
guggcagccaugagaauauaacacucagaucuccagaugugugaaguuacuacuucuuaugcuaucac

SEQ ID NO: 4185701 - RNA, 65 nt, Human
guggcagccucagguuccgguguaucuuccagcacuuagaaggaacacaacuuccugagagccac

SEQ ID NO: 4185702 - RNA, 98 nt, Human
guggcagcuuggagacuguaggugggaggaaaaggaauugccaguucaguaaacuuugucaaugcauuauucucccacuucagacuuccgagggccac

SEQ ID NO: 4185703 - RNA, 57 nt, Human
guggcaggauuacagucaugagccacugcauccagcucauguguaacuuuugaccac

SEQ ID NO: 4185704 - RNA, 67 nt, Human
guggcaggauugggcugaaggagugggauggagcauucugugcuauucuguuaaccgaaccuuucau

SEQ ID NO: 4185705 - RNA, 57 nt, Human
guggcagucucaucuguggcucuccuugggacugggacacucaaugagaccugcagc

SEQ ID NO: 4185706 - RNA, 79 nt, Human
guggcaguugauuggaagaggaaggagacucuuggggaucacaguuuaacucccuucuuucccuuccagcagcucccac

SEQ ID NO: 4185707 - RNA, 62 nt, Human
guggcauccagauacccugagggcguguaacacuccaacuuuccccauaugucuggagcuau

SEQ ID NO: 4185708 - RNA, 88 nt, Human
guggcaugauugagggcccuggcuucuugcuggcuguuggcuggagucuacucucaguuccuagaggccacucucagcuccuugccau

SEQ ID NO: 4185709 - RNA, 76 nt, Human
guggcauugccuucugcaggaagcccuccccgagcugcaaaacccucuccgcucucacugcacuagguaaugccac

SEQ ID NO: 4185710 - RNA, 68 nt, Human
guggccaaaucaugucaaaggcacacacuuccaaaggaguccuuccuguugacguugaccuuggccac

SEQ ID NO: 4185711 - RNA, 69 nt, Human
guggccacccucggcacacacagauuuccagagggcacccaggcccugugucugcugaaggcuggucac

SEQ ID NO: 4185712 - RNA, 60 nt, Human
guggccagaggucccauguguccacaugcugcaugucccacacugaggaaccucugccac

SEQ ID NO: 4185713 - RNA, 75 nt, Human
guggccagccagagagagucccugggccuggaggccagauggcagccaggaaugcagggcucucccuggggcugc

SEQ ID NO: 4185714 - RNA, 57 nt, Human
guggccaggagaccuugggcauuccaccccccuaccaugccaagauucccucuccac

SEQ ID NO: 4185715 - RNA, 71 nt, Human
guggccaguuacagagccaguuagagaaacugcccaguuuccucuugaauugguaucuuugacuaggcugc

SEQ ID NO: 4185716 - RNA, 56 nt, Human
guggccaugugcuugcaggguaucgcauagcccggaugcccaugccccuuggccac

SEQ ID NO: 4185717 - RNA, 66 nt, Human
guggccccagcaucagcacccaaggagcagcccaaaaugggcugggagggguuauuuugggguugc

SEQ ID NO: 4185718 - RNA, 64 nt, Human
guggcccugccgugggugucauggcccauaggagaugcuuugggcccagcacccacagccccuc

SEQ ID NO: 4185719 - RNA, 69 nt, Human
guggcccugcugacccaguccaggcagggugugacaggucugcccagcccugaggucacagcugucugc

SEQ ID NO: 4185720 - RNA, 56 nt, Human
guggccggccuguuugcacucacagcauagcacuuagugcagccaagcugagccgc

SEQ ID NO: 4185721 - RNA, 79 nt, Human
guggccuaaggagguagccaggccuggaggacugaguguagcgaguggagaccucaggcugggcugccccuggggccac

SEQ ID NO: 4185722 - RNA, 108 nt, Human
guggccucaagaggauuaauuauaaaaugauuuaaguuaaccugacaugcugaaggguccuguaacuuugcccuuuauaugguugacuaugaguuacuugaaggcuau

SEQ ID NO: 4185723 - RNA, 89 nt, Human
guggccuggaagcucaaacuggguggaguccaccacagcucaaagaggccugcuugccucuguagacuccaccuuugagggcagggcau

SEQ ID NO: 4185724 - RNA, 56 nt, Human
guggccuuaagaaacaaacaacaacaacaaaaguaauguguguuuaaagaggccau

SEQ ID NO: 4185725 - RNA, 58 nt, Human
guggccuuuccugaagaaaugagggaugcuuuucucucacaacuucauggcaggccac

SEQ ID NO: 4185726 - RNA, 55 nt, Human
guggccuuuguccaggcgaaacucaaaccagguaccuggacuaaaaccaggccac

SEQ ID NO: 4185727 - RNA, 83 nt, Human
guggcgagaucuuugggaggucauaaaucuguucuugacaugaauacaaagggcuugauugaugacuccucagauuaacauac

SEQ ID NO: 4185728 - RNA, 60 nt, Human
guggcgcagaggguggcagagagguccccggugccaucacuguuaucucacucuggcugc

SEQ ID NO: 4185729 - RNA, 70 nt, Human
guggcggugucauuucuacgguuggcuuuucuugcuacagguugggccaagguggagaaggcacugguau

SEQ ID NO: 4185730 - RNA, 118 nt, Human
guggcgguuuccaaagugcgggggacaagguguggcaugcagggagugcuccuauuaucgugauuauugugguuuuuccugcaucuuuuccugcccuuuccucccauccuacucccac

SEQ ID NO: 4185731 - RNA, 106 nt, Human
guggcgugcccggcuucucuccuuggccaccuccaugaucuccuggaaggaggcauuguccucacucguguagcggcucaggaagacaucuaggcugggcagcggc

SEQ ID NO: 4185732 - RNA, 93 nt, Human
guggcucagccagagcuggauggucaagauggccucacucccauuucugucaacucugaggcucucuuccguguggucucuccaacaggcuac

SEQ ID NO: 4185733 - RNA, 61 nt, Human
guggcucauauugagugauuucuuugggaaaagcuaaaggaaagacauuacugugggcuau

SEQ ID NO: 4185734 - RNA, 124 nt, Human
guggcuccaucuggaugcaaaagaaaggauggguugggggagggagugagcagcccugggaaaugucccuggcucagcagcucuuucucagcaacaauucugcaguguagaacaggaagcaugc

SEQ ID NO: 4185735 - RNA, 59 nt, Human
guggcucuaggugagcauggagcgcuuuaacucuuccgcgcaugcucagccuuagccau

SEQ ID NO: 4185736 - RNA, 65 nt, Human
guggcucucaggaaguuguguuccuucuaagugcuggaagauacaccggaaccugaggcugccac

SEQ ID NO: 4185737 - RNA, 104 nt, Human
guggcucucgguggaaggggagcuggaaaggggaucgagugggaagaaggugaucuuucccugaagcccagccugucuccagccaggcuccccucugaagccgc

SEQ ID NO: 4185738 - RNA, 61 nt, Human
guggcugagccugauagcugucuccuguaucaugcagcugagaaaggcaggcucaccccgc

SEQ ID NO: 4185739 - RNA, 82 nt, Human
guggcugauggagagugugauuugggcguaggucuuauuugcaaaccugcucauguucuaagcuuucuucagguaguaccac

SEQ ID NO: 4185740 - RNA, 85 nt, Human
guggcugcagcaagaagucccugugggguggaggcuguuuggagccagcagaagccucuacacccagcaggugcuuaggagccac

SEQ ID NO: 4185741 - RNA, 85 nt, Human
guggcugcaggggcugucagucauaaucccuguccuuucacacaauaugcagccgugggaaggcuauaugacucagcccugccac

SEQ ID NO: 4185742 - RNA, 61 nt, Human
guggcuggaauggagcugagccuguggggucccugcaggcucacagugcuaguccacccgc

SEQ ID NO: 4185743 - RNA, 58 nt, Human
guggcuggcccuggacccuaaggccugacugagcuagggggucccuccggccugcuau

SEQ ID NO: 4185744 - RNA, 82 nt, Human
guggcugggguaucuguucuccugagacugugccuggcaugagcacaggugcuccucggggagcuggggaugucccagcuac

SEQ ID NO: 4185745 - RNA, 76 nt, Human
guggcugggugggagcauggucccagugcccaggagaaagagcugagcuggcaggaggggcccucccccuggccac

SEQ ID NO: 4185746 - RNA, 92 nt, Human
guggcugucucaggccgacugcccacagauaugugcagucugcucucaggaucaggcacacgacuuugggggucagguacaagaguagccac

SEQ ID NO: 4185747 - RNA, 59 nt, Human
guggcugucugcagaugugucuguugcuggauguggacacaaggguaacugccagccau

SEQ ID NO: 4185748 - RNA, 92 nt, Human
guggcugugguagaacugccaucauaggaguuggugaauuacccuuccaucuucuuccagcuucucucugaugcagcucucccauuuuccau

SEQ ID NO: 4185749 - RNA, 57 nt, Human
guggcuugagcaggggcagagguugugaugcuauuucuguugacuccuagcagccau

SEQ ID NO: 4185750 - RNA, 68 nt, Human
guggcuuggauccuuguggagugucagaggcaguacucugagcuuacucagggauacauuuuagucau

SEQ ID NO: 4185751 - RNA, 58 nt, Human
guggcuuuggaauuguagacucguccagaagcuggacagauaacgugaccgaggccac

SEQ ID NO: 4185752 - RNA, 55 nt, Human
gugggaagaacuucaaguggcuuucuacaugaguaacuugaagagaacuucccac

SEQ ID NO: 4185753 - RNA, 84 nt, Human
gugggaagguauuagaaccuccugggagcuuucuccagguacaccugaccaagcuuuuccucaggagagucuuauaucuccuac

SEQ ID NO: 4185754 - RNA, 67 nt, Human
gugggaauggagugguucuugcccucugagcuuacagacuaagaaggcagaaaagcuuuacaacuac

SEQ ID NO: 4185755 - RNA, 69 nt, Human
gugggacagguguuuauuuagcuuuauugagcagcuaugauaugccaacagcuuuagaaacacuuucac

SEQ ID NO: 4185756 - RNA, 89 nt, Human
gugggaccuggggcuaguagagucuuccucaggaagcccgucuuggcccgugcuugucugaaucuggagcucucuuguccuugucuugc

SEQ ID NO: 4185757 - RNA, 77 nt, Human
gugggagaaggaagccaggagggugcagagggugcaggcagaauucccugcaucagcugugcuucuugacuccccac

SEQ ID NO: 4185758 - RNA, 55 nt, Human
gugggagacuaucucagggacccacacuucccaguggcacccuggccacucccac

SEQ ID NO: 4185759 - RNA, 55 nt, Human
gugggagcaggcugaugauagguaagaaucauguaucuagaaucucucuccccac

SEQ ID NO: 4185760 - RNA, 63 nt, Human
gugggagcccucagggaggugcaagcuggagaggaucgggucaccugccugcaggggcuccac

SEQ ID NO: 4185761 - RNA, 60 nt, Human
gugggagggagauaacugggggauuggagucugucucauucuccccauucuuauucccau

SEQ ID NO: 4185762 - RNA, 60 nt, Human
gugggaguggggcaugugaaccuggaugugcgccacagccagggagcgggucucagccac

SEQ ID NO: 4185763 - RNA, 80 nt, Human
gugggaucucauauucuggauccuaugcacuggacuccaaggagucaacguuuacagaaucuuggacuaaugggacccac

SEQ ID NO: 4185764 - RNA, 114 nt, Human
gugggaugauaaauugagggaguugaauuuucuucauauuuugaaaauagggcccaacugaaaauaccucaaacauugaugggaaguuuaauauuucauuuuuaucuuucccac

SEQ ID NO: 4185765 - RNA, 68 nt, Human
gugggaugggaggagagacugaccugggagccacuucagaacauccuuccuccuuuucucccacccac

SEQ ID NO: 4185766 - RNA, 82 nt, Human
gugggaugucucaggggcagucugugugcguggacaguggaaguucugcuugcguucugcucccucccaucuuugucccuac

SEQ ID NO: 4185767 - RNA, 69 nt, Human
gugaagcuucccccccaggcuuucgcugccucucccaccuuguggggaccugccugggagaaguuucac

SEQ ID NO: 4185768 - RNA, 57 nt, Human
gugaaggaaggaauugaucaugcgcuccccuggagcggggauccgguucuccuucau

SEQ ID NO: 4185769 - RNA, 56 nt, Human
gugaaggaggggccacagauauucaaaauaauugugucugcuggccaaaacuucac

SEQ ID NO: 4185770 - RNA, 113 nt, Human
gugaaguacaguaauuaauuuuagcuaaagccuuuuaugaucaguuaaugauauaucuuuauuugauuuauaaauggcaggauagauuaagguuaauaaacuauucauuucau

SEQ ID NO: 4185771 - RNA, 67 nt, Human
gugaagugguagagagagcauaagcuuugaagucagacccagggucaguccucccucugccacucac

SEQ ID NO: 4185772 - RNA, 84 nt, Human
gugaaguuugauugaccugcauacuaaguaaaucugccaccuuagccucacuaguaucauguuggaauuaaucaaacuguccac

SEQ ID NO: 4185773 - RNA, 77 nt, Human
gugaauaggucuguaucaguguguuaucagugcuaggugagaugauacacuggccuuugcagagcccuacccuucau

SEQ ID NO: 4185774 - RNA, 84 nt, Human
gugaaucgugucuuaaacagaaagcagauguacuuaucuacuuagaguuauucuagaguauuucuguuuccuguucacauuuau

SEQ ID NO: 4185775 - RNA, 65 nt, Human
gugaaugacuggaugugauggggagaugacggcaaguugcauccaaaccauucaucagccaucac

SEQ ID NO: 4185776 - RNA, 91 nt, Human
gugaaugcagaggacucugaggugccacccaagagccuuuuaaaauaaauagaaguuuuuaaaaaugcuacuuaagagucacugcagaagc

SEQ ID NO: 4185777 - RNA, 77 nt, Human
gugaaugcauuggacaaaaaucagccaucucuauacuuaaccauuuggauuugugcauuuuugugcauguaauuuau

SEQ ID NO: 4185778 - RNA, 70 nt, Human
gugaauggcaaaaauuaacagaucaaccaaccuacacuugguuauauuagaauguauuuuugccauuugc

SEQ ID NO: 4185779 - RNA, 130 nt, Human
gugaauggcagaauucguggauccagagcuccuucugugaagagcagaaccauguccaaaagugaaaguggaaaaggguggucuugucuucauggcagaauggccuggccuaguucaggcugcgguuuac

SEQ ID NO: 4185780 - RNA, 82 nt, Human
gugaaugguacaaguguguguuugagcaggaggugaauaugccagggaaacaaaucuguucacacacuuguacucuccucac

SEQ ID NO: 4185781 - RNA, 58 nt, Human
gugaauuaggcuauggcagagguagguggauaaugugucugugaaguagccugaucac

SEQ ID NO: 4185782 - RNA, 78 nt, Human
gugaauuagggugguccuugaccuacugucucuuuaaaccaguggccuuuuuuccaaggaaucccauuucuaacucac

SEQ ID NO: 4185783 - RNA, 71 nt, Human
gugaauuuaagacugacuucaccaguggcauuauucuguacuggacagguucaugguuuuaauuuagucac

SEQ ID NO: 4185784 - RNA, 79 nt, Human
gugaauuucuuuugaggauauuaguguuucccuauuguaucuagcuuuaaaacauuggauauuuauuaaaaggauuugc

SEQ ID NO: 4185785 - RNA, 63 nt, Human
gugacaaauauuguucuugguaaaaucaaaacugaauuugcaugaugagaacaauaugcuuac

SEQ ID NO: 4185786 - RNA, 59 nt, Human
gugacaaaugcaaauugggcugcuucguccaaacaugucagccuauuuagcaggugcau

SEQ ID NO: 4185787 - RNA, 71 nt, Human
gugacaaggggcuuaccuggggaggucaguuugauuugaaauuauccaagaguaagaggacucuuugugac

SEQ ID NO: 4185788 - RNA, 77 nt, Human
gugacaauaagacagcaauaugggagacggagggcuuuguccccugcccuuccuauuccuguguguuguuguuucac

SEQ ID NO: 4185789 - RNA, 66 nt, Human
gugacaauauuagcucaggggccuucugggaucaauaauugguugucuuugaguuaaaauucucac

SEQ ID NO: 4185790 - RNA, 79 nt, Human
gugacacauuuccuugcuucuuuguauuauucuuaaaauuaugguacaacuguauuaggcaaaggagggcaggugucau

SEQ ID NO: 4185791 - RNA, 69 nt, Human
gugacaccuuugugaagugaugauguauuuguauaagaaaauucauuuuagucacaacaggggaauuac

SEQ ID NO: 4185792 - RNA, 59 nt, Human
gugacacuggguaaauuugaggcugagccuuaaaaggucugcagcuucaccugugucau

SEQ ID NO: 4185793 - RNA, 82 nt, Human
gugacagcaucuaguaaacaguguagguggccaggcaaugcagauuccaggcacuauauauacuuuuuauucaucaugucau

SEQ ID NO: 4185794 - RNA, 72 nt, Human
gugacauucaagucugcccagagucagcagccaagcagcgugcucucugaucuacagauuugcauuguucac

SEQ ID NO: 4185795 - RNA, 103 nt, Human
gugaccaaccucuaggacacauggcagggccugagggcugucuauccuucuuguuaguagagccuccuggcucucaggccugcugcguugucaggauguuugc

SEQ ID NO: 4185796 - RNA, 59 nt, Human
gugaccagugaucuacugggauuuugagaggaaaaagaguccccccagaauacuggcac

SEQ ID NO: 4185797 - RNA, 63 nt, Human
gugaccaguuggcaggggugggugggcuccccgcacaccacagcaccaccugcaaacucucac

SEQ ID NO: 4185798 - RNA, 72 nt, Human
gugaccccagaaaggguucucugaggugcugcggucccuacccagcagccaggggcucugucuggaaguggc

SEQ ID NO: 4185799 - RNA, 74 nt, Human
gugacccgggaaacagucccacggagaagccaggacccugggccuucucccugggggcucuuuaugcaggucac

SEQ ID NO: 4185800 - RNA, 67 nt, Human
gugacccucuagauggaagcacugucuguugucuaagaaaagaucgugcaucccuuuagaguguuac

SEQ ID NO: 4185801 - RNA, 79 nt, Human
gugacccuugcuuguuuugaagaaagaugacagauuuccugcagcucuuucuacaagcaggcagcugcggaaacaucac

SEQ ID NO: 4185802 - RNA, 79 nt, Human
gugaccggugagcggcugcucuuuucagaucccacucuucccaagguggacugcaaacuugacagcucgucaccuccac

SEQ ID NO: 4185803 - RNA, 66 nt, Human
gugaccucuguccugcagucuggaaacugccuucaagcaguaaguuagggcagugauagggcccac

SEQ ID NO: 4185804 - RNA, 99 nt, Human
gugaccuggguggcccugucccuggccgucuguccacagacacugggugugcuucauuugacuggccacgggcgggcaaggacagccucccaaggucac

SEQ ID NO: 4185805 - RNA, 64 nt, Human
gugaccuucugcuauacuuaugaauacauauaucuguguaucuguguauguguaaagggcuugc

SEQ ID NO: 4185806 - RNA, 66 nt, Human
gugacgaccgucuccgguccuguccuucaucccaagaugagcagacuccauugagugagucguggc

SEQ ID NO: 4185807 - RNA, 86 nt, Human
gugacguaccuaugaucugcagguaguuguagaauuaguacauugcuguuuauuaaaacauacauugccucauugguaagggucac

SEQ ID NO: 4185808 - RNA, 79 nt, Human
gugacuauaaacagccugcccaaauuggcuuaaucagaugcagccuugaucuugccaagggaaggauguauaugaucac

SEQ ID NO: 4185809 - RNA, 60 nt, Human
gugacucugccuguugaaacugucugcuagcuggcccagcaucuccaggcauggccucac

SEQ ID NO: 4185810 - RNA, 68 nt, Human
gugacucugggaggugucggacgagcccccugaggucugucugugggcaacgccucccaaagugucau

SEQ ID NO: 4185811 - RNA, 55 nt, Human
gugacugagaaagaccacauggagacucaagucuucucaugucugucucauucau

SEQ ID NO: 4185812 - RNA, 92 nt, Human
gugacuggcuguauuccauacuggaguccacaguucacugucuggugcucagcugggaugaguggacccaguuggaauguaggaagacucac

SEQ ID NO: 4185813 - RNA, 72 nt, Human
gugacuggcuuccuuguuuccacauuaugucugugaaauucaucccucuuguggcagacaggaggagcucac

SEQ ID NO: 4185814 - RNA, 62 nt, Human
gugacuuaugaagaauacuuagcuguuuuuuuaacccagucugagucuuuuaauaggugcac

SEQ ID NO: 4185815 - RNA, 93 nt, Human
gugacuucauugcuucgugucagaucagagguuccucgcucugaagggaaaggcaaacacuuuugaucugacuaugggaggcggggagaauac

SEQ ID NO: 4185816 - RNA, 87 nt, Human
gugagaagauacuuugcaugcaugaagugccauauaaugaccuuccuuuuguguucagcucauuccauguguauuuugagucuucac

SEQ ID NO: 4185817 - RNA, 93 nt, Human
gugagaaucuauccuaaauaucugaagaauucucaacauaguaaugaugcucuguauauaguguagagaaaucuuggaacggguagaacucac

SEQ ID NO: 4185818 - RNA, 86 nt, Human
gugagaguuaaaugaaaugguauguacgaugugcuucacagaauuccuggcauauaacacaugcucauuaaauauuagcuauucau

SEQ ID NO: 4185819 - RNA, 58 nt, Human
gugagauauuuaccuuauuuuuugacacuaaguguuggaaauccaguguguauuuuac

SEQ ID NO: 4185820 - RNA, 57 nt, Human
gugagaucaucuugggaaacaaagauguggccccacauuacaucccuggugauacau

SEQ ID NO: 4185821 - RNA, 123 nt, Human
gugagaucugaccuauaauuacuaggagcccucucauaaggcaaagcacucugcaguuguguucugauuucauaaauguaccuucugccuuacuggcuuauaguuuuacugggcauaucucau

SEQ ID NO: 4185822 - RNA, 83 nt, Human
gugagaugauguguguguguuguuuuaagcugcuaaauuugggaguaauuuguuauaaagcaauauauauaaaaauauagcac

SEQ ID NO: 4185823 - RNA, 65 nt, Human
gugagaugccuggcacccagcaaggaguuauuaaauguuagcuguuugugguuguuagcucuggc

SEQ ID NO: 4185824 - RNA, 83 nt, Human
gugagaugggaguugagacauuuugccccagauacauuaauuuagucauaacaaguaacagggcacaguccagccccauccac

SEQ ID NO: 4185825 - RNA, 57 nt, Human
gugagauuuucuccagguucagaagcaaagaauggacacuacagggagaagacucac

SEQ ID NO: 4185826 - RNA, 74 nt, Human
gugagcaacagugggcaggcccuaggcgauuugggaagagcgggugucagaaagccugggguuuggccagccac

SEQ ID NO: 4185827 - RNA, 76 nt, Human
gugagcaucuauuacaugaggggaaaagacauaucaucuugaacugucauuuucuaaucuguugucagugacucac

SEQ ID NO: 4185828 - RNA, 62 nt, Human
gugagcauuugaugaguaaauuauuuugauaagcaagugguuugcccacucgagugauuuau

SEQ ID NO: 4185829 - RNA, 92 nt, Human
gugagccugguggaggcuccaugagcuccugcacaaggcacugggagacuugguuauacugcugggguucuggauuccucccacagggucac

SEQ ID NO: 4185830 - RNA, 59 nt, Human
gugagcucucccauagggcaagaucaucauaacacaaugucaccccagggagugcccac

SEQ ID NO: 4185831 - RNA, 77 nt, Human
gugagcugcuaacaucucucuccauugugccagcgggagcagcugguggaagugaugcugaggugacggcugcugac

SEQ ID NO: 4185832 - RNA, 70 nt, Human
gugagcuuaauagucaugcuuucuacccuucacaagcuuacacuggagaagaggcaggcauuaaguacac

SEQ ID NO: 4185833 - RNA, 57 nt, Human
gugagcuuccugagugguggccacuuggcaaagugaguccaucgcagggaagugggc

SEQ ID NO: 4185834 - RNA, 60 nt, Human
gugagcuuuaggagaaggaggucaaacagcauauuaguuugccuauuauuuuaagcuuac

SEQ ID NO: 4185835 - RNA, 69 nt, Human
gugaggaccuucuugcuguguccuaacaugauggaagguggaagggcaaaagagaugaacuauccuuac

SEQ ID NO: 4185836 - RNA, 63 nt, Human
gugaggagccugggccgcuggaggcuggcugugcagcaggcgugcuuccaggcccagcugagc

SEQ ID NO: 4185837 - RNA, 59 nt, Human
gguuuuccuaguaggccuauuagaaucacaggauucuaguaaugagaggcaggagaauc

SEQ ID NO: 4185838 - RNA, 84 nt, Human
gguuuucugccaaaaauaucagcuuguagacugcuuaucugaaaggagagcugcugcccauaggugacauauggcuugaggacc

SEQ ID NO: 4185839 - RNA, 64 nt, Human
gguuuugaccucuccaaauccuaaacauuugcaauguguagagguauuuuugauggucauuacu

SEQ ID NO: 4185840 - RNA, 79 nt, Human
gguuuugguuguuuaccuaaucuaguuguacuuuucuuaaacagaggaaaguuaucuuugauuagaaauaagcaaaacu

SEQ ID NO: 4185841 - RNA, 69 nt, Human
gguuuuguugauugagccaagauacuccaaguuugcaguuggcuguguaaggugaaaucaacaaaugcc

SEQ ID NO: 4185842 - RNA, 88 nt, Human
gguuuuuacuccaaguuauuuucacagcagugugcugcuuuuguuguugacaaaaguaguugcugcucugaaagaggcaugaaagacc

SEQ ID NO: 4185843 - RNA, 73 nt, Human
gguuuuuauaauaguuuacaaaaaugaugcauuuaguaaaauauuguuuugguaagcuucauguguugaaacc

SEQ ID NO: 4185844 - RNA, 68 nt, Human
gguuuuucagcauucuuuacaaggaugaggauguauggucuucucuuuguccaaauguaucaagaauc

SEQ ID NO: 4185845 - RNA, 89 nt, Human
gguuuuuccuacacaugaaugcgagaaauggcugauaagcacaguaauuuaagauugcguauucauguagugagauuuagucauuaacc

SEQ ID NO: 4185846 - RNA, 79 nt, Human
gguuuuucuuguuugcuaaaucccuauaauauuccuuuucccaucaaggggauauguguggguuugugcuagaaucacu

SEQ ID NO: 4185847 - RNA, 66 nt, Human
gguuuuugcacuuaacuuauuugaaauugauugcaauuuaaagaugcaguuaugugcucucuaacc

SEQ ID NO: 4185848 - RNA, 81 nt, Human
guaaaaaacagggccuuucaggguaaaaggucagaaaggacacuuuauauucuaagacggccuaaaaauuagaauuuuuac

SEQ ID NO: 4185849 - RNA, 88 nt, Human
guaaaaaguuauacauagaucuuugacugcguguggggucagcaccccuaaccccuguguuguucaagggucaacugugcucuuuugc

SEQ ID NO: 4185850 - RNA, 81 nt, Human
guaaaaaugcuuccaauuuuacgucuguauaaaaagugaauuuuuuaaaaagccaaugugaaguaucugagagcauugcac

SEQ ID NO: 4185851 - RNA, 77 nt, Human
guaaaacuggguaaauauagauagcuggauuguauuaauaucaauauccuggcuguaacauuuugccauaguuuugc

SEQ ID NO: 4185852 - RNA, 107 nt, Human
guaaaagaggugaggaaaagagacagguuauugaaucaaagugguggaguccccaagcaaucuuuuccgcucccuaguagccugccuauuucucaaacucugucgac

SEQ ID NO: 4185853 - RNA, 73 nt, Human
guaaaagaugacaauggacauaguuaaaacagaacaaaucuaguuuuaauauuuucuaguugucagcaauuac

SEQ ID NO: 4185854 - RNA, 91 nt, Human
guaaaauaaagugacauuuguaugacacuuuaaagucuuugcagaaaaaauagauuuuaaaguggugguacauuuaugauauuugugauac

SEQ ID NO: 4185855 - RNA, 85 nt, Human
guaaaauaaguuuaguguuuauugaggauuuacuauuacuauugcauaguagaauagauggauacuauuguaaacuauguauuac

SEQ ID NO: 4185856 - RNA, 94 nt, Human
guaaagaaaguccguuucccuuguuuacacagugaauuuacucaaggagcacugucuucauggguaaaacacugguggcuuuacugcucuuuac

SEQ ID NO: 4185857 - RNA, 130 nt, Human
guaaagaacugaccaugcuuccacugaaauguuacagucaccuagaaugaccaagaguguuuuauaugaagccucuuggagucuaucauucuguuuggagugacagcugaaguuuuauauuuauuuuucc

SEQ ID NO: 4185858 - RNA, 79 nt, Human
guaaagaagaaacuucaaggauuugcaaaucuuuuucaucuuaaaaguuuuguggccuccugugagguuguaguuuuau

SEQ ID NO: 4185859 - RNA, 108 nt, Human
guaaagaauacuaguuccugucuuccagaauuuucucuauagucaaaugaaagcuugaucuuucacauuuguuuuaagaaguugggcugacacugguuuucucuuuac

SEQ ID NO: 4185860 - RNA, 57 nt, Human
guaaagagcuaguuuauaacuugucuucagaauuuuggauacaagacuagcauuuac

SEQ ID NO: 4185861 - RNA, 59 nt, Human
guaaagauaauguucuagcugucagcagaugucugacacuugauggagcguaucauuac

SEQ ID NO: 4185862 - RNA, 67 nt, Human
guaaaggcccauucaaacagcuagguguucagcacacauaucuucugccuaguuugggucuguuugc

SEQ ID NO: 4185863 - RNA, 67 nt, Human
guaaaggcuuuuagugaugguaauggccaggcuucauagcauuagccaucacuugcaaaaccuugac

SEQ ID NO: 4185864 - RNA, 83 nt, Human
guaaaguucacaagaugugguggggaggaaaugaccacuguaacucugugguccaguucccacacccauauugugauuuuugc

SEQ ID NO: 4185865 - RNA, 77 nt, Human
guaaauaacaguuguucccagcaaugaaaguugaauguuguugccccuuuguuuucacaugcugggcaauaguuugc

SEQ ID NO: 4185866 - RNA, 59 nt, Human
guaaauagaugguuacugagugucuccccuacuccuucacccaguaacuauguuguuac

SEQ ID NO: 4185867 - RNA, 72 nt, Human
guaaauauccuguuuugcacaauuauauugcaucauauuguuaauuguugugugcuaaaacaguuuguuuau

SEQ ID NO: 4185868 - RNA, 79 nt, Human
guaaauaugagucagcaccugaguaauaagcuuguuucuauuauaauuaauaauauugcuggggugggccauguucugc

SEQ ID NO: 4185869 - RNA, 60 nt, Human
guaaauauguugaugugcuggcuaguagagcuuuugguagauagcacacugacaucugac

SEQ ID NO: 4185870 - RNA, 80 nt, Human
guaaaugagguaaaauguguacaguaagugaaucuagguaaaacauauguagaugauauuuguaccauuuuuauucuugc

SEQ ID NO: 4185871 - RNA, 77 nt, Human
guaaaugagucaaaugggggaagaccaugaggcacacugggaaaucugccuuuucagucccucguuucuucagcugc

SEQ ID NO: 4185872 - RNA, 78 nt, Human
guaaaugcucaauaaauguugcuguuauuuuuaaaagaauacauaaaaaggaaaaggauauauuuauugaguaucuac

SEQ ID NO: 4185873 - RNA, 69 nt, Human
guaaauuagacauuaaaugccauuuaaucagucagauaaugauuaauguuagaguaauguuugaugggc

SEQ ID NO: 4185874 - RNA, 75 nt, Human
guaaauuccagugaccauagaguauggauuguugaccauucuugacaugccauuggucauggugauggacauugc

SEQ ID NO: 4185875 - RNA, 109 nt, Human
guaacaaauggccuaugugaacugaacugagcuggugaauaucaguuaagaaaaggcagucacuguguguuugucuagcacaggcagcauguaggacccuguagguuau

SEQ ID NO: 4185876 - RNA, 103 nt, Human
guaacaagaauuuauuaucuuacaguucuggaagguagcagucccaguccaagauguuggcaggguugauuccuucugagggcugggagggagauucuguuuc

SEQ ID NO: 4185877 - RNA, 77 nt, Human
guaacagagcugaguggcuccaugcagaagucuguguucaacaucugucaugcuggagaucauuaauguucaauugc

SEQ ID NO: 4185878 - RNA, 82 nt, Human
guaacagggacuacucaguuaucacauucagagcccugcuccuuaagaacucugagaacuccggguuagauccuuaaguuac

SEQ ID NO: 4185879 - RNA, 55 nt, Human
guaacagucucccuggagucaacuuucugucaggugggccucaggcagcugugac

SEQ ID NO: 4185880 - RNA, 58 nt, Human
guaacauccagauauguaacauuuguaacauccagauauguaacaaucuggauguugc

SEQ ID NO: 4185881 - RNA, 70 nt, Human
guaacccuuacuagagacaccaguaccauucugcaaauaguagauggaaauugcuuucugagagggcuac

SEQ ID NO: 4185882 - RNA, 95 nt, Human
guaaccgacugcuccacuuugcccagaacugucccaguuuuagcagugaaaguccccugucccucaguucugggcaaaccaggaugguuggucac

SEQ ID NO: 4185883 - RNA, 113 nt, Human
guaacguaaugacuaccauaugguaaggcuucuuggaauacugcaggguagacuuuuccugcaacauccaaugacgccucaucauuuuuggaauuuuucauuuuuuccauuac

SEQ ID NO: 4185884 - RNA, 64 nt, Human
guaacuaagaggaagcuaguuagaugaaugaauggucugucugaaauaggcuucuuuuggugac

SEQ ID NO: 4185885 - RNA, 62 nt, Human
guaacuaguugacuuuuucauuuuguuagagguauuuucgcugaacaaggucaauugguuac

SEQ ID NO: 4185886 - RNA, 81 nt, Human
guaacuauuauguuuuauaggcuguugcuauaugguaacaauuuuauaugguaaaucuaauuguggauaaauaauaauugc

SEQ ID NO: 4185887 - RNA, 78 nt, Human
guaacucaugacauuuuaaaaagaacaucauguuugucauucacauaauguucuuguucaaaugucaguugaggugac

SEQ ID NO: 4185888 - RNA, 95 nt, Human
guaacucugcgugauuuaagaguacuuaacuccaaauaggaucuuaggacauacgagaucucucauaagaugaguacuuaaagacguugaagugc

SEQ ID NO: 4185889 - RNA, 72 nt, Human
guaacugacauguggaggcuauuugcaauggaacuuagacuaucuagucuuuuguagcuaacacauucauac

SEQ ID NO: 4185890 - RNA, 110 nt, Human
guaacugcuagcuauuuuacuuaucaucuccaaggccaugauuacuugaaggaaaggagaauauguuuucuuucucacucuuuaggaagucauaguggaggagcaggaac

SEQ ID NO: 4185891 - RNA, 75 nt, Human
guaacuggugagauaaauuauuuaauccuuaauuucugaugauuuaauagaugaucuguuucaugccauaguuac

SEQ ID NO: 4185892 - RNA, 66 nt, Human
guaacuuuggauuuaggguaccauugaaauugauuuccuuagaggugugcuagaggcaaaguuugc

SEQ ID NO: 4185893 - RNA, 101 nt, Human
guaagaagaaauccucagacucuuauuuugaaguaauaauugaaaauuuaguaucaaauaauacaugugaugagaauuuggacuggauuuacugaacuuac

SEQ ID NO: 4185894 - RNA, 99 nt, Human
guaagaauacuaggaagccaucggagggguuugaacagaggagggacauaauuugacuuguauuuugugaggaucacucuggcuuugguguggguagac

SEQ ID NO: 4185895 - RNA, 69 nt, Human
guaagaauguuauccccaaaacaaaagcuuaaaguccucuaagcuuuucagugggcaaugaugugauac

SEQ ID NO: 4185896 - RNA, 77 nt, Human
guaagagaccuggacugaguuagauggccugggcuccagucauaccuugcuaucucuuuaguacuagauuuuuuuac

SEQ ID NO: 4185897 - RNA, 78 nt, Human
guaagagcacagaaguaguucucaggacgucaagguuauagauuacccuuggcaauuccaagaacuuuggauuuuuac

SEQ ID NO: 4185898 - RNA, 72 nt, Human
guaagaucuacaggauaguuuaauauugaggaauagagauuuuaaauguucuaaagguccugaaggauuuac

SEQ ID NO: 4185899 - RNA, 119 nt, Human
guaagauuggaggaucuaacaagguucagaaaauggaacugggcuacuagguauuuggagagcaacuaccuucuuucaguuucguuuucuucccaaauuuuucaaauucucccccuugc

SEQ ID NO: 4185900 - RNA, 63 nt, Human
guaagcaaacagcaaaugauuuuuuauaaccaaauagagauuuuaguuuugcuauuugcuugc

SEQ ID NO: 4185901 - RNA, 90 nt, Human
guaagcacucuaguuuuacugauacauugggaaauggaguaguagaauaagagaccagucaugcagugugucaguugaaagagauuuuac

SEQ ID NO: 4185902 - RNA, 85 nt, Human
guaagcaguugcuuugcucccaagggcauaugguaucuuugcuccacagugccugggacacagcagauacucaauaaaugcuugc

SEQ ID NO: 4185903 - RNA, 57 nt, Human
guggagccuuauuuggaucuucuguggggucccagacagaagaaagggagguuuugc

SEQ ID NO: 4185904 - RNA, 58 nt, Human
guggagcuggcccaagaagcugcauuucuaacaagcucuuuuguggagcagcugccac

SEQ ID NO: 4185905 - RNA, 80 nt, Human
guggagggccagugagucgggagagcugcuaaucuuuuucuugacuucagggacaguuccuuguccucauuucccuccau

SEQ ID NO: 4185906 - RNA, 67 nt, Human
guggagguucuauguguaggaggucccaggauagugaguccucuuccuucucacuguggaaaagaac

SEQ ID NO: 4185907 - RNA, 66 nt, Human
guggagguugugagcauuuuggugagcuuuuccucuaggaaaguucuuucagcuuagagcccccau

SEQ ID NO: 4185908 - RNA, 73 nt, Human
guggagugcaggguauguggaagcagacaguugaggccucagcacugcccuuacaugcccugcaugcucccac

SEQ ID NO: 4185909 - RNA, 95 nt, Human
guggagugccgucucgcacaugaaggcuggggucgugaccaccuuguuuuucugguccacgugagcuucgugugcagaguuacggaaaaagccac

SEQ ID NO: 4185910 - RNA, 63 nt, Human
guggaguggccuggcccugagaacccacgaaauccauugucuggcuaggaggggcuauuccac

SEQ ID NO: 4185911 - RNA, 80 nt, Human
guggaguggcugugcagugugggguaggccugggcccaggcaggagcaaggccgccuccgccugcccacccuccucucac

SEQ ID NO: 4185912 - RNA, 93 nt, Human
guggaguggggagacaaggagaaccaaagaaaugccuugcaagcaaguuuuuggucugucuccuguccaaccaccccuaauccccaccuccau

SEQ ID NO: 4185913 - RNA, 77 nt, Human
guggauaacaguguggacuugagaucugccaccgaagccacugggcaaguuauucaaccucacugucacuguucuac

SEQ ID NO: 4185914 - RNA, 70 nt, Human
guggauaagaggccccuguagaugauacagcgggacagagcacaguccagcucagaugcagggaucacac

SEQ ID NO: 4185915 - RNA, 70 nt, Human
guggauaauggccaaaucucuauuuuucugaguagccaaacuuagcggucagcauuuagccuuuauccac

SEQ ID NO: 4185916 - RNA, 71 nt, Human
guggauagaauuuacagggaauauuuuggcuucuuaugaagaagcacucccaaguaaauggacuuauccac

SEQ ID NO: 4185917 - RNA, 58 nt, Human
guggauauagcacauuuuguucaugcauucaucuguugaacauuuggguuguuucuac

SEQ ID NO: 4185918 - RNA, 76 nt, Human
guggaucuccaccuaauugagaagggcuuugaggcuuuggacucuggcuuuuauucaguuggcaguggggaaccau

SEQ ID NO: 4185919 - RNA, 113 nt, Human
guggaugagaaugauguauaaauuugaguacuuuugauuaaaauaugaaguuauuguugguucaacaaaugcaaguuuuaugucaaaggaaaugaaaacaauguuugcuccac

SEQ ID NO: 4185920 - RNA, 72 nt, Human
guggaugaggucgagucacuuguugccuuuggcuaaugcauaggggcacgaguagagcucuagaaucaccau

SEQ ID NO: 4185921 - RNA, 62 nt, Human
guggauggauuuugaggaaugguagagauucuaaagagugaguccacaucagaguuuaccac

SEQ ID NO: 4185922 - RNA, 91 nt, Human
guggaugggcagcuccauccuggccuugcuguccaccuuccagcagaugugggucagcaagccaggaguaugaugagucuggccucuccau

SEQ ID NO: 4185923 - RNA, 78 nt, Human
guggauggguauccuguuucuuaaucagucuugacaggcuuagggcuugucuugacuuuagagccaggaauauuccac

SEQ ID NO: 4185924 - RNA, 70 nt, Human
guggauggguuaucucuacaggaauauaaucaauaagguguguauucaggucgagcuaacugcuugucac

SEQ ID NO: 4185925 - RNA, 67 nt, Human
guggauggugguccaguaucauauucugaagauccaaucaacuaugcaugcuguucuaccagucuac

SEQ ID NO: 4185926 - RNA, 68 nt, Human
guggaugucuauguguauuuguaaacauuacguguuuuaacuuaaaauacauagauguguuuuuccau

SEQ ID NO: 4185927 - RNA, 60 nt, Human
guggauucugagacaguuuagugggcagaaaguuuauuagagagaaccaucaggaucuac

SEQ ID NO: 4185928 - RNA, 76 nt, Human
guggcaaaugcccugucucucugcuaggccuccagugauaccaucaaugguagcuaugggaguuagggcaucucac

SEQ ID NO: 4185929 - RNA, 80 nt, Human
guggcaaccacucaacucugccuuuugcaguguaaaagcaccccugagcaaugcauaacagagugggccugguugcacgc

SEQ ID NO: 4185930 - RNA, 69 nt, Human
guggcaaggagcaugaaaaguccauaaacagaaugauuauauaccacugcuucaugcccaauuugcuac

SEQ ID NO: 4185931 - RNA, 79 nt, Human
guggcaaguuagggagcaguuaaaaugauuccuuguuaccacagggcugacauauuuggugcucuaaugacuuagcugu

SEQ ID NO: 4185932 - RNA, 65 nt, Human
guggcaaguugaauuugauguuguuugaccugaaugucaaacauaggcacacauucaggggauac

SEQ ID NO: 4185933 - RNA, 66 nt, Human
guggcaaugucugaaaaucagacugcaguaaaagucuuggugcaucugauucucaggcagaaauac

SEQ ID NO: 4185934 - RNA, 62 nt, Human
guggcacacaggagagagcucaaggcgccugcugccagccgcacucacagcugugugaccgc

SEQ ID NO: 4185935 - RNA, 72 nt, Human
guggcacuaaauacagcauuucagggaagcaaauaaauaugcuuuauaaagaaaacagcuguauuuuuccac

SEQ ID NO: 4185936 - RNA, 64 nt, Human
guggcagagaaguugucuuucuuguuuguaacugagugcucagagccugaaagacuucuggcac

SEQ ID NO: 4185937 - RNA, 59 nt, Human
guggcagagccaaggcuggagcuaugggccucccccuccucccccacuguuucugcuac

SEQ ID NO: 4185938 - RNA, 60 nt, Human
guggcagagccaggcuuugaacacaggcagacuggauccagagucugagcucuuaaccac

SEQ ID NO: 4185939 - RNA, 60 nt, Human
guggcagagguuccucagugugggacaugcagcauguggacacaugggaccucuggccac

SEQ ID NO: 4185940 - RNA, 56 nt, Human
guggcagcauggcuuuuagcugggaauugcccuccagccuaagagcuagcugucac

SEQ ID NO: 4185941 - RNA, 61 nt, Human
guggcagcuacauuuaaugcaauucuuguuuuaaaaauuuuuauugauauguagcuguugu

SEQ ID NO: 4185942 - RNA, 55 nt, Human
guggcagcucauguuguuuuaauaaucacaaauugcaagccaccacugcugccac

SEQ ID NO: 4185943 - RNA, 60 nt, Human
guggcagugaggcaggagcagucggcgcccacacgccggaucugccgcacccgcugccac

SEQ ID NO: 4185944 - RNA, 68 nt, Human
guggcagugggacagucagaagugagcagggaguuuuaaguccugccacccucaauuucucuugccau

SEQ ID NO: 4185945 - RNA, 84 nt, Human
guggcaguguugucaagggcaaugugaggaacaccccuugccuuggaguguccugcgagugcgcuuuuggucagcaguggccau

SEQ ID NO: 4185946 - RNA, 65 nt, Human
guggcaguugaauuuuguucagaacacauugaauuugaggugucuuuggaauauuuagcugaagc

SEQ ID NO: 4185947 - RNA, 67 nt, Human
guggcaucauagccaaggugcuuugccuaaaaucacucaucucuucaaagucccuggcaugagcuac

SEQ ID NO: 4185948 - RNA, 80 nt, Human
guggcaucuccuccccugcccaugaggaggguggugcugaguaaagguagccucugcgggcaggagauggcagggaccau

SEQ ID NO: 4185949 - RNA, 93 nt, Human
guggcaugaauggcccccagauuccuggccugaucucuggaugggcgaagaagaggggaggcagaggagcuggaaacauggggcaggguccac

SEQ ID NO: 4185950 - RNA, 69 nt, Human
guggcaugacucuuugggcugcccaauuuaaagagaauuacauugaacagaaaaacucagagagcccac

SEQ ID NO: 4185951 - RNA, 116 nt, Human
guggcauuucacuguauugguaagaaacuucauuaguagugagacugugcuucaggugaugucaauuucaacagcugauaagaagacauuuuaaagauaagaucagcaauugucau

SEQ ID NO: 4185952 - RNA, 79 nt, Human
guggccaacagcgaugauugcagcccuacagcugucacaacaacccauugaccacugugugcaaugcugugcuugccac

SEQ ID NO: 4185953 - RNA, 65 nt, Human
guggccacccagaguagcuuuuccuuggcgaauuugccacagagcugaaccugggucauagucau

SEQ ID NO: 4185954 - RNA, 64 nt, Human
guggccagaugucccucucagguuuguuuucucuaaaauaauccugucuugaccaucaggcuac

SEQ ID NO: 4185955 - RNA, 64 nt, Human
guggccaucaaagaaaaagagagaaacucuggggaaccagccauuguccugguucuguggccac

SEQ ID NO: 4185956 - RNA, 82 nt, Human
guggccaucccaacuguggccagcagguggcuguguguucacacagaccucacugcaggcccccugcagggugggagggcac

SEQ ID NO: 4185957 - RNA, 78 nt, Human
guggcccacacagacagcaucuaauaaugggaguggagaggaaagggaaaggcacucagaugcauguuggugggugac

SEQ ID NO: 4185958 - RNA, 55 nt, Human
guggcccaggcacccugaugacuuccuguuucucagaaaaguaagcuugggcagc

SEQ ID NO: 4185959 - RNA, 65 nt, Human
guggcccaggcuggagugcaguggcacaaucucggcucacugcaagcuccgccucugggguucac

SEQ ID NO: 4185960 - RNA, 93 nt, Human
guggcccaguugcggucucuucacuugcuggaugguggcucagccugacagguuucacagguauccacgggucugaguccagagcugccccac

SEQ ID NO: 4185961 - RNA, 55 nt, Human
guggccccuugggggcuccaggcaggaaagaaagcagagcccucuccauggccac

SEQ ID NO: 4185962 - RNA, 60 nt, Human
guggcccggggggugcggggcaaccuggcaaaguugcccaaguccuccaccgagguccgc

SEQ ID NO: 4185963 - RNA, 71 nt, Human
guggcccguccugacgccgcgcccagcuccgccagccggccgaccugcgcagcaaucagagaggagcacac

SEQ ID NO: 4185964 - RNA, 123 nt, Human
guggcccucgggcggcucugaggugcaggguugagccugggcuuucggcggcuuccuccguuuuucggagcgaagggcacgccaaggcuuguuugccucugucuugagugucgcccaggucac

SEQ ID NO: 4185965 - RNA, 103 nt, Human
guggcccuggccuguggcccucacugagggcaccgacagaguggagggucucugcugauucucucuuguccuuaagggccugcuucaggccauguggggucac

SEQ ID NO: 4185966 - RNA, 57 nt, Human
guggcccuugagcuauaguuuggugaccgcugcccuagacugccaucuuugggccac

SEQ ID NO: 4185967 - RNA, 80 nt, Human
guggccgccaacugugccgugggcaggggcucugcagcagagcggaauggccguaaugacccuggccugguggcggaaac

SEQ ID NO: 4185968 - RNA, 56 nt, Human
guggccuagagaagccaaaagauuggaccccccgaucuagaucuucuuuaggccau

SEQ ID NO: 4185969 - RNA, 57 nt, Human
guggccugccgugugguauggggcuaggggacgccaucaugcggcaugucaggccuc

SEQ ID NO: 4185970 - RNA, 85 nt, Human
guggccuggaacugauggaagaugugguuagagggagucagucugccucugagucaugcgcauaggacuucagucagcaagcugc

SEQ ID NO: 4185971 - RNA, 64 nt, Human
guggccuggggaccugugagaccuugcggcugaucaugggucucucggcguuucccacgggcac

SEQ ID NO: 4185972 - RNA, 61 nt, Human
guggccuugcucacauguccagacguuggcuggcuguuggcaaugguggugacagggucau

SEQ ID NO: 4185973 - RNA, 74 nt, Human
guggcgaugguguuccugugcuggauggucagugguuguugacauguaguuagaaaauagguagcaaguuccac

SEQ ID NO: 4185974 - RNA, 98 nt, Human
gugggcaauuugauuauagaggagggcuuuguugauguuaaaauaaugagcucuggaugacauugguugcaagguacucacuuccuccaaaugcuuac

SEQ ID NO: 4185975 - RNA, 68 nt, Human
gugggcacauaguuuuauggucagaauccuaguuauguggauuuuuauuucuugucuauguagccaac

SEQ ID NO: 4185976 - RNA, 58 nt, Human
gugggcagccccuucaaggccaaggucacuggugagugccgguuugggggagguccac

SEQ ID NO: 4185977 - RNA, 80 nt, Human
gugggcaugcugcuggcaucuaggggguggaggccagggaugcugccaacuauccuaaaaugcacaggacagccguccac

SEQ ID NO: 4185978 - RNA, 95 nt, Human
gugggcauuuauaggagucugaguccucauagacaaggacaagcggaccaguguuuuaaugagggccauuuauuaaacggcuaaugaaauccuac

SEQ ID NO: 4185979 - RNA, 60 nt, Human
gugggccaggccggagugcagaugggcaaugccugcugggagcuguacugccuggagcac

SEQ ID NO: 4185980 - RNA, 60 nt, Human
gugggccaggucugcggucauuuccaggcuugacuggaggagguccgcuuccaggcuuau

SEQ ID NO: 4185981 - RNA, 70 nt, Human
gugggcccugggccaagaugccagggucucauccaguugucagugaccuggcucugggcaccguguccac

SEQ ID NO: 4185982 - RNA, 68 nt, Human
gugggccuccccagccuggaguucccagccaugguuuggaaagccaucuggcugcugggagaguuaau

SEQ ID NO: 4185983 - RNA, 63 nt, Human
gugggcuaaaguggggcagggcagacacuggccagcuguccacccaacccauuuccaguucau

SEQ ID NO: 4185984 - RNA, 68 nt, Human
gugggcugcaggaacgacggaggggcggcccuucuccugccccugaugucacugcuucugccucccuc

SEQ ID NO: 4185985 - RNA, 74 nt, Human
gugggcugcuuccuccuuccacccuugcucagauucccagugacaggaagcucggggaagccaggucagcccac

SEQ ID NO: 4185986 - RNA, 83 nt, Human
gugggcugucggugguauuuuggguauagagggcauauuauguuaggauggaaaauucccagcaugcacgcugacacuccuac

SEQ ID NO: 4185987 - RNA, 69 nt, Human
gugggcuuaccaggucccaagggcuacacagcucuguucaagcagcaugcccagggaccugagcuccau

SEQ ID NO: 4185988 - RNA, 62 nt, Human
gugggcuuaugggcagcagcuuagcaaccauuucaaggcacucagcugucucaugggucugu

SEQ ID NO: 4185989 - RNA, 65 nt, Human
gugggcuuccuggaugccugggccaauccuaagagaggacugcacacacagaauuuaggguccac

SEQ ID NO: 4185990 - RNA, 65 nt, Human
gugggcuuguuuugaugagaucaaugagaagcaaaaucuuuagaucucacaagaaauaagagcau

SEQ ID NO: 4185991 - RNA, 78 nt, Human
guggggaaaggaaagaguaugcaccuuguuuuuaauuuuaggaaacaaggguuuuggauuuguugcuuuauuccucau

SEQ ID NO: 4185992 - RNA, 78 nt, Human
guggggaagacagacaauuuuuuuuaagcacuacgucugugccauaacagaggaacagaugagguguuuggagagcac

SEQ ID NO: 4185993 - RNA, 60 nt, Human
guggggaaggaagugcagacuuuaaaacaauuaaugguuuugguaacuauucuucucugc

SEQ ID NO: 4185994 - RNA, 115 nt, Human
guggggaccagguuuggggaggccgcugcugcugccgccgcaacugccgcuccuacuccuaauguuguggcuguuguuccgggagcugcagccucgccauugcugguuaucccac

SEQ ID NO: 4185995 - RNA, 60 nt, Human
guggggagcaauugcccccuuagauaggcacagcuucucuaggucuuuguaguuccccau

SEQ ID NO: 4185996 - RNA, 65 nt, Human
guggggagcaggccuggggugaggccugggaaccagggucuucaucuacccugcagggcccccac

SEQ ID NO: 4185997 - RNA, 105 nt, Human
guggggagcuccaagcaggugggcaggacccaggggccuggugaccaggacagacccccacuguccaucaacuuuccuggcccuguccucugcuaaacuucccac

SEQ ID NO: 4185998 - RNA, 56 nt, Human
guggggaggccuaagcaaguuguguuuugagcacaggugcuuuagugauuccccau

SEQ ID NO: 4185999 - RNA, 124 nt, Human
guggggauuaggugaauaauagaugggaaacucugcauccaggguugagcacgggagccagaagagggcuccuccuguuucucaggccugggugucagggugcccagcagaagcgaguccuugc

SEQ ID NO: 4186000 - RNA, 67 nt, Human
guggggcaggagcaccugggccaucccuggauccucuaggcuggcuuggcucuccuguggaccccau

SEQ ID NO: 4186001 - RNA, 58 nt, Human
guggggccacacaucucuuucuaacuccuuguugaguaguaucauguuguggcuugac

SEQ ID NO: 4186002 - RNA, 76 nt, Human
guggggccagguaugcagcacacuccagguacugcccagcagcagcugcuucugcuuuacuugguucauuucccac

SEQ ID NO: 4186003 - RNA, 59 nt, Human
guggggcuaaaaacugugcaguuagacaagggucucucucugauggguguuggccucac

SEQ ID NO: 4186004 - RNA, 55 nt, Human
guggggcucucggcgcggcaggcgcuucccggcccugucuggccgcgggcuccgc

SEQ ID NO: 4186005 - RNA, 104 nt, Human
guggggcuggacccuggccucacucuuccuggaggggcagacugaggagaucacaggguucugcagaauucgaggaagaaaaggcccuggccuuucagugcuac

SEQ ID NO: 4186006 - RNA, 56 nt, Human
guggggcuguggccacugcagagcagcccaggggaccuugcugugcacagcccuau

SEQ ID NO: 4186007 - RNA, 84 nt, Human
gugggggcaacguguagcccuugaugcugcggccagugcggacgcggcugcugagcacguaguuaggguccaggucgucuccac

SEQ ID NO: 4186008 - RNA, 85 nt, Human
gugggggugucgucugggcccuuccugcucucuuagcugccugagugacugggcagggcagggccugggccacugacacccccuc

SEQ ID NO: 4186009 - RNA, 102 nt, Human
gugggguacugggucccauguagggaacuaaauucacugcagccaaugaaaaguacuguacagugagguggaguaguucccaagacaggaugcaugcuuggc

SEQ ID NO: 4186010 - RNA, 57 nt, Human
guggggucacccuucccuuccaugagucccuaucaugaagacccgugguguccccac

SEQ ID NO: 4186011 - RNA, 63 nt, Human
gugggguguccagcagcgagcuaggcaauucucugcauucaguuccaaagcugggcaguucac

SEQ ID NO: 4186012 - RNA, 61 nt, Human
guggggugugcucagagcagggggccugaagaauggcuccucuguuuacaacacacccaac

SEQ ID NO: 4186013 - RNA, 72 nt, Human
gugggguugcagguuccagaguacuuacauccuuaaaggacauaaacaucuguagccuucagucacccccac

SEQ ID NO: 4186014 - RNA, 63 nt, Human
gugggguuggcagaggucucguuguggcugaaucacagcccaacuucuucugcccaauccugc

SEQ ID NO: 4186015 - RNA, 90 nt, Human
gugggguuuccaggcccacucgguggggcucguuuacuuggacgagggcagggcagagagcaccgaccagagugccucaaaauaacucac

SEQ ID NO: 4186016 - RNA, 62 nt, Human
gugggucagaaauuuaggcuggacuuggcugggaaccucugcuacuggaugagcuugcccac

SEQ ID NO: 4186017 - RNA, 58 nt, Human
gugggucauaauucuugguuugugauaauauuuaguuacaucagaaauccugacccac

SEQ ID NO: 4186018 - RNA, 90 nt, Human
guggguccaagcugccuuggcugaggagggagcugaggaggugugagccccugccaggaacccccugcccagaccauguacuuggcccac

SEQ ID NO: 4186019 - RNA, 63 nt, Human
gugggucgcuggguguauuuuaaucugugacauuccacacuuuguguacucaccagcacauac

SEQ ID NO: 4186020 - RNA, 56 nt, Human
gugggucuggcuuugagggucagcagaauucagguugcuggcagggacaggcugau

SEQ ID NO: 4186021 - RNA, 76 nt, Human
gugggugaggcuuccuguuaagucguucugagaacugcaguuuucagagcuuuggagaccaggaaugccugccaac

SEQ ID NO: 4186022 - RNA, 62 nt, Human
gugggugagggaguggaacgaggugccgggacucccagcccaggguucugcucugcaccagc

SEQ ID NO: 4186023 - RNA, 78 nt, Human
gugggugaucagcaggucucagcagcuccuuggcuccuauacuccuagaggagcuggugauaccgugggaugcccugc

SEQ ID NO: 4186024 - RNA, 82 nt, Human
gugggugcaauaaauaggagagguuucuuuucaucuuuaauuuucaaugacugagaaacuucagcuauucuuuugcuuacau

SEQ ID NO: 4186025 - RNA, 58 nt, Human
gugggugcccacgaggccaggcugguccggagaggaugcucugggcugugggaccugc

SEQ ID NO: 4186026 - RNA, 73 nt, Human
guggguggcagagccaguaaguggcugagacagaacucacucuaggaucugcuggcuccaaccuggcaucuau

SEQ ID NO: 4186027 - RNA, 66 nt, Human
guggguggguagaggugauagaagcaguguauuugagagagcucacaacugucaccgccaccacac

SEQ ID NO: 4186028 - RNA, 63 nt, Human
guggguguaagagaagcuaaccagaggaagugaaucacuuccuguggucauucuucugcccac

SEQ ID NO: 4186029 - RNA, 63 nt, Human
gugggugucaguaucuuuaacggccuucauucuugguugugagauuuuauuugauaugcccac

SEQ ID NO: 4186030 - RNA, 55 nt, Human
gugggugugagugacggcguccugguggccggccggcccgucaccuucuacccgc

SEQ ID NO: 4186031 - RNA, 69 nt, Human
guggguucuuggcuaggcccuggggaugcaauggucaauaaguuauccuccagcccucuaggaaaaugc

SEQ ID NO: 4186032 - RNA, 56 nt, Human
guggguugcugaagaaccuacuagaggcauucugagaggugaauucagcaaaccau

SEQ ID NO: 4186033 - RNA, 56 nt, Human
gugguaaagcugauugaauugaaguuuugcaagucuuugaaaucagcuguugccau

SEQ ID NO: 4186034 - RNA, 78 nt, Human
gugguaagaacuggaaccauucacugaacaguucaacugacuauucacuugaccacugaaugguucugaacuugcaac

SEQ ID NO: 4186035 - RNA, 81 nt, Human
gugguaagaauuaaaaccuaggaagcaguuucaacagccacaaacgcauacaaacacuucuuaggucuuaagucaguucac

SEQ ID NO: 4186036 - RNA, 56 nt, Human
gugguaaugugugcguguguguauaaauauuuauacacauauauacacguuuaagc

SEQ ID NO: 4186037 - RNA, 59 nt, Human
gugguacagcugaaaggcuugcucauuguaccacugcaaaucugauaggauuguaccac

SEQ ID NO: 4186038 - RNA, 117 nt, Human
gugguagaaacaggaaaagaaaagguggagggaagauugaagggcacuccaguggucauuguuuccuaaggaggcccaguagugcugccuuuauauaacuuucuauuugauuaccau

SEQ ID NO: 4186039 - RNA, 102 nt, Human
gugguagagcuggguaaacugacagggugaccagagcuccaagucacuccuuucuggcugugaguggcugcuucugguugcuccaguguucugaucuaccau

SEQ ID NO: 4186040 - RNA, 57 nt, Human
gugguagagucuggaacccacucuggaacccaggcagucugacuagacucugcucac

SEQ ID NO: 4186041 - RNA, 60 nt, Human
gugguaguacugggucaaagggugagauuguucacaaggcucuugauucauauuaaccau

SEQ ID NO: 4186042 - RNA, 79 nt, Human
gugguaguggccauacccaggccccuucccauggaaggccuuaucuucuguucccuaggaccuggggaggccuuaucac

SEQ ID NO: 4186043 - RNA, 86 nt, Human
gugguauauaguauuuagcauagugguuagugcuuaguaagcacgugauggauguuagcuaguacugcaggugcuauggaaaucau

SEQ ID NO: 4186044 - RNA, 57 nt, Human
gugguaucugucucccccacuggagugugagcuccugugggcaaggccgauguccau

SEQ ID NO: 4186045 - RNA, 82 nt, Human
gugaggaugcaugagggggguuaggaaguuggagaaguaagaugaucaaauguccuaaauugccuccacuuuaaugccuuau

SEQ ID NO: 4186046 - RNA, 98 nt, Human
gugaggcagagagugggaaaacgcagggaaugugggcacuuaugucgguuaaggugucaaauuuuacaugucuggguuuuguuuccaccaggcuccac

SEQ ID NO: 4186047 - RNA, 64 nt, Human
gugaggcaggcacuguuaucagcaccauuccuacugagaauugugcaggacaugucugccuuau

SEQ ID NO: 4186048 - RNA, 86 nt, Human
gugaggcccugccuggugcugauucacugacuucuguucagucucugcaccagagcguccagugaauuccaggccccgcgucucac

SEQ ID NO: 4186049 - RNA, 75 nt, Human
gugaggccugcccuggggaaguucgucacccaagaacagcagaggaugaagggaacagccggggcuggcacucac

SEQ ID NO: 4186050 - RNA, 56 nt, Human
gugaggcugggggcaauggucagagugucuguagauacucacccucccccucucac

SEQ ID NO: 4186051 - RNA, 83 nt, Human
gugaggcuguguggggauaggaggguuggagaccaugucucuaucucaugcaucaacucuucauccuucaaucaucuccucau

SEQ ID NO: 4186052 - RNA, 68 nt, Human
gugagggagggaaaguuuaacacuccccaaccccaaggauaucagagugauaguuucccuccagucac

SEQ ID NO: 4186053 - RNA, 56 nt, Human
gugaggggcucugacacccugugugggccccgcacugggaagaaugagccugucau

SEQ ID NO: 4186054 - RNA, 76 nt, Human
gugaggggcuggggguaaacgggaaaggaggugggugcaggaaacaccuucucugaguucuccuccagccccacgc

SEQ ID NO: 4186055 - RNA, 78 nt, Human
gugagggugcaauccucauagaacucauugcugggaagauguggccagugaugaguuccgugaggacugaauccucac

SEQ ID NO: 4186056 - RNA, 77 nt, Human
gugagggugucugcguaacuggcaucggaaucgaaaggccccgccucccccaugcacgggugcgcgcacacacucac

SEQ ID NO: 4186057 - RNA, 64 nt, Human
gugaggguugcuuucuuucggggucuccgugcuuggugacgcucuggagaauaguagcuuuugc

SEQ ID NO: 4186058 - RNA, 64 nt, Human
gugaggucaugcaaaauugaaucagguauuuggaguuuuguuccugauucuaccacugacucac

SEQ ID NO: 4186059 - RNA, 57 nt, Human
gugagguccucccugcugggagaguuccauggauguucuuggggaggagggcugcac

SEQ ID NO: 4186060 - RNA, 125 nt, Human
gugagguuccaggcuuucuuccuagaugcagucccugacacccggguggaggcggggagguaaagaaugccugccucacccugucuggcagggcagaucuagaauuaaaggucuucaagauucac

SEQ ID NO: 4186061 - RNA, 79 nt, Human
gugaguauaguguaguucuucuggugggaaaauuauauaacguuaaaucauccuucuucaugaagauauauguauucau

SEQ ID NO: 4186062 - RNA, 98 nt, Human
gugaguauccuuucugcuuuuuaaaaugcuuggguuuucuuucuaugaauuuccauuaaugagcaucuuuaggaagagaaagauucugcuuuauucau

SEQ ID NO: 4186063 - RNA, 76 nt, Human
gugaguaugaguguauguacauaaaauacauauuuuaacggaaucugaauauuuauguguauucauauaugcacac

SEQ ID NO: 4186064 - RNA, 80 nt, Human
gugagucccuaguggaaagacaugaucuaaauggcaaacaucuuucuucaaaaugacugugcuuucucuggaggcaucau

SEQ ID NO: 4186065 - RNA, 65 nt, Human
gugaguccugugggcccaccaugagccaggcucugggcuggggcucagguggcucagggacugau

SEQ ID NO: 4186066 - RNA, 76 nt, Human
gugagucuuggccagggggucagcaggcacuuggcuccagccaacuuuuguccgaucuccuggaauccagacuuac

SEQ ID NO: 4186067 - RNA, 101 nt, Human
gugagugaaaaggcauggauuugaagauuuguccacagagugaugaauggcuguacucucaguuucuaucugugugaaaaucuacucguccucacagucac

SEQ ID NO: 4186068 - RNA, 71 nt, Human
gugagugggaccugcgugugucaucccuucccucagcuuggagguguuugaccucacaggucccaucugau

SEQ ID NO: 4186069 - RNA, 92 nt, Human
gugagugggcagggccccuggaucccagcacugaccucaguuacaugaagagucugaguccauggcaggaucugggcccacagucuucucac

SEQ ID NO: 4186070 - RNA, 65 nt, Human
gugagugugaagaggggugugugucaacccaaggcuauucuuaguugaucccuucucauaagaac

SEQ ID NO: 4186071 - RNA, 91 nt, Human
gugaguuaccacuuuacccccacuaggaugguuaaagucuaaaagacaguaauaaguguuggugaggauguggagaaauuggaacccuuau

SEQ ID NO: 4186072 - RNA, 130 nt, Human
gugaguuaugauugccaccacugcacuccaccuggugacagagcaagaugcuguauuguuguuguuguuuugagauggagucucacucuuguugcccaggcuggagugcaauggcacaaucucggcucac

SEQ ID NO: 4186073 - RNA, 92 nt, Human
gugaguuccuccgugugauagcauuacaucucuaggcuaggaauuuuuuauucuuaagcguaugauaaugaaauuuucauauggaaagucac

SEQ ID NO: 4186074 - RNA, 65 nt, Human
gugaguuguuucaaaaugaugcuguaacuuggcaaggacugcagaacuauuuugaaaaauuucac

SEQ ID NO: 4186075 - RNA, 65 nt, Human
gugaguuguuuucacaaacccaugauggauaauggcuaauggguaguacugugguaacaaagcac

SEQ ID NO: 4186076 - RNA, 60 nt, Human
gugauaaaauucaaauagcucugacucccuggagaacaagaggauauuggauuuuuucau

SEQ ID NO: 4186077 - RNA, 66 nt, Human
gugauaagcuuuggugacugugauugcauugguuggcagcagauggcagugaucaaaagcuuacau

SEQ ID NO: 4186078 - RNA, 81 nt, Human
gugauaggggagaaggagucaagaggaacuugucauauuaucugaagcugacuagucauuugcauuccgucuccaaaucac

SEQ ID NO: 4186079 - RNA, 89 nt, Human
gugauauagcuuauaugagauagacuaugucauacagguuauaugauauagguuaugugauauaggcuauuugauauagguuauaugau

SEQ ID NO: 4186080 - RNA, 67 nt, Human
gugauauuugggaaagggauuaugaguagauauuggguguuuacuacaauauuucuuucuauauuau

SEQ ID NO: 4186081 - RNA, 130 nt, Human
gugaucaccuaaaugaguucucaccucugggacuaauugcuuucuugugcugagaagugaggaugacuguugauuuaguacaagagauuaauuacuuucagagcuccuucagagaucauuuguacuccau

SEQ ID NO: 4186082 - RNA, 78 nt, Human
gugaucagcugcuucaagaugaagcugaucuucccagccacaggcugccaggagcucauugaaguggaugaugaacac

SEQ ID NO: 4186083 - RNA, 128 nt, Human
gugauccagagcacgcgacggaggcgccgggcaucccaggaggccaauuugcugacccuggcccagaaggcuguggagcuggccucacugcagaaugcaaaggugagaguggcaugcaguggagccac

SEQ ID NO: 4186084 - RNA, 55 nt, Human
gugauccuccugccucagccucccaaagugcuggcauuacaggagagaaccucac

SEQ ID NO: 4186085 - RNA, 67 nt, Human
gugaucgugguggggauauuuuacaggagaucugcuagcagagucuugggaucucuucaccaccuac

SEQ ID NO: 4186086 - RNA, 86 nt, Human
gugaucuggugguuucuuuggcugccuucaccccuggccacaucuggguguguucuuugggcuaaggcaguaaaucaccaguucau

SEQ ID NO: 4186087 - RNA, 81 nt, Human
gugaucuguaaacuuucagcccuagaaagucuaagcagaacauuuucuuagucuuuuagaggcugcuguggggccagacau

SEQ ID NO: 4186088 - RNA, 58 nt, Human
gugaucuuuuaggucacacagcuaaugcuuuguaaagcauuuccuaaauccagaucgc

SEQ ID NO: 4186089 - RNA, 89 nt, Human
gugucccuuagagcuuaggcuagccauucagucuuuuccuuuucuagguaacuaacaguggcuggacuauggcuuugaauaugggucac

SEQ ID NO: 4186090 - RNA, 69 nt, Human
guguccgaaaguuuucucacacaguaauguaaucaaccccauuuuguggcuguggaaauugucaggcac

SEQ ID NO: 4186091 - RNA, 55 nt, Human
guguccucuaauuggccucuugcacaggaguguguagggaaucuuuugggggcac

SEQ ID NO: 4186092 - RNA, 66 nt, Human
guguccugcuuacugcuuuggacguguggaauauguuguaagugccagggccaguaagauuggcau

SEQ ID NO: 4186093 - RNA, 55 nt, Human
guguccugggcacugacuagacuugcuggguguguaagaaggccugcccagacac

SEQ ID NO: 4186094 - RNA, 61 nt, Human
guguccuucuuccucaucucauuugcuuugugagcaauucaugggcugaggaaggggucac

SEQ ID NO: 4186095 - RNA, 57 nt, Human
guguccuuuccgggccuggaggcuuggccccuccucucccaagccuggcaggggcac

SEQ ID NO: 4186096 - RNA, 67 nt, Human
guguccuuuggcucuggagcuccugggcccggguuccgcauccgggaggagaaaggagcgagcgcgc

SEQ ID NO: 4186097 - RNA, 84 nt, Human
gugucucagcuuggaauaucuuguaucugaccucauaaaauugauccugauuuugugggugguaaaauacaaugauagaggugc

SEQ ID NO: 4186098 - RNA, 80 nt, Human
gugucuccagcacuguauaggugucuggaauugagauaagaaucaauuucaauacaaaauacauuuuuugcuuaaagcac

SEQ ID NO: 4186099 - RNA, 77 nt, Human
gugucuccgccugcucauguuggcugcuauagacccccucccagauuuuucuucacagccaacaugggcacacacac

SEQ ID NO: 4186100 - RNA, 84 nt, Human
gugucucgaaguuucugaugcaaagcauuugaaugggcuugacuacuugcucagaacaaaugcaugagaaauaagagggaauac

SEQ ID NO: 4186101 - RNA, 66 nt, Human
gugucucuuggcucuaucacuuauuaguuguguuugugacuuuaaguuccaugagagcagagacac

SEQ ID NO: 4186102 - RNA, 57 nt, Human
gugucugagcccagugagucucgcagggccucccugccuccaccgagggccaggcau

SEQ ID NO: 4186103 - RNA, 112 nt, Human
gugucugaugcaauucuugugcccuuccuugauuuuaacuggauagucuggaccauuugugucuuaaaggcaguguuccagcagaaaagagguagggaugagacaugcacac

SEQ ID NO: 4186104 - RNA, 55 nt, Human
gugucugccacccacugacggucaguauugauuuugcugccuuggauggcuacac

SEQ ID NO: 4186105 - RNA, 57 nt, Human
gugucugccuucuauuuagaaagaaaguuaaucuuuuugaaucugauauggcagcau

SEQ ID NO: 4186106 - RNA, 58 nt, Human
gugucugcuugcugagcauuuaauugggugcaaauguuaagugcaaagagacagauac

SEQ ID NO: 4186107 - RNA, 105 nt, Human
gugucuggaggcuucuguauuagacagugcaggucucaacaauuacuucaacuagaacaaaaaguagaauugaguuucacuguucccuugcaaauuuccagaagc

SEQ ID NO: 4186108 - RNA, 56 nt, Human
gugucuuaggguugcacagagucucccucacuggagggaguguaacuaugagccau

SEQ ID NO: 4186109 - RNA, 112 nt, Human
gugucuuauacccacauuccaccagccagaaguuagucauugaagccccaccucaaugcaagguggggcucuaugacuaacuucuggcugguggaauguggguagaggacac

SEQ ID NO: 4186110 - RNA, 65 nt, Human
gugucuuauugauguuggcacucccuaacauguacauaggauaguguucagcauguaguaaauac

SEQ ID NO: 4186111 - RNA, 82 nt, Human
gugucuuccagcgagccggcggcuuguuaucaagaauccguuuagaauguuugaacucagccucugggggagcugggagcac

SEQ ID NO: 4186112 - RNA, 79 nt, Human
gugucuugcaccacucuguuguuccacugcuguagcaauauauuuaagugguaaugaacacgcugguggugcaagaaac

SEQ ID NO: 4186113 - RNA, 60 nt, Human
gugucuuguguggagcucuaugucuagccucuagcauaauuccugacacacaagaaguac

SEQ ID NO: 4186114 - RNA, 70 nt, Human
gugucuuuaacaaggacuaaggaacagcugauucauucaugcauugaacuguuuuuaaguccuaagaugc

SEQ ID NO: 4186115 - RNA, 67 nt, Human
gugugaaaaugugcacaauaugguucaauugauggaaguauguuguauaaucauguuuuggucacac

SEQ ID NO: 4186116 - RNA, 73 nt, Human
gugugaagcaaucucuggggguggagcugaggaaucugcauuauuaacaguuuccugggagauucuuacacac

SEQ ID NO: 4186117 - RNA, 72 nt, Human
gugugacaggugaaauguccuuauuaaaaauaguaauaguaaugacaauuuuuaucuguuaauauuuagcac

SEQ ID NO: 4186118 - RNA, 73 nt, Human
gugugacuuuggacuagugauuuaauaaccuugaacuucagcuucuuuccuuaaacacuaguucgaguagcau

SEQ ID NO: 4186119 - RNA, 64 nt, Human
gugugagcaagauucagagauuccagcucucagacuuuaagcuggaagucagacuuucucacac

SEQ ID NO: 4186120 - RNA, 65 nt, Human
gugugagcagaguuguuucuccugaggccccucuccuuggccugcagauggcugcugccucacau

SEQ ID NO: 4186121 - RNA, 95 nt, Human
gugugagccacugugcccaucuauaagucuuuauuaguguuuuuuguacuugagcauauagacacccagugauugagacuugcccagggccacac

SEQ ID NO: 4186122 - RNA, 82 nt, Human
gugugagccaugauguguccagagcuccccacauaggaucgaguuaccucugggaggauaugguacauaauauggcauccac

SEQ ID NO: 4186123 - RNA, 65 nt, Human
gugugagcugguggauuaugcuguacaggaauuugucaaagccugaaucacauagacaaacacac

SEQ ID NO: 4186124 - RNA, 88 nt, Human
gugugaggaaaaaccuaguguuuuaaagacauuuguugaucuaaugucuaaugaauuaauuaauuacuagguuguauuuuuccuacac

SEQ ID NO: 4186125 - RNA, 58 nt, Human
gugugagugggacagugugggacuacugggaagauaagucugauaaaaacuacuccau

SEQ ID NO: 4186126 - RNA, 95 nt, Human
gugugcaauccugggucccugggccggggcauggacauugcucaccaggcagccuucccaugaccccuggcauccaggguccccagggcugccac

SEQ ID NO: 4186127 - RNA, 79 nt, Human
gugugcacaugugugugcgagcguguguguguguggacuugcucacgcgggcacauaugcuguaagcacauguguucau

SEQ ID NO: 4186128 - RNA, 84 nt, Human
gugugcaccaucucaaccuuuguucaagcuacugauagcuucuguacacuauacaguaucuuuugaaggcagaaugugacauau

SEQ ID NO: 4186129 - RNA, 61 nt, Human
gugugcagaggcaggaggugcugagcuguugguauaagcagacuucccuucucuggcacac

SEQ ID NO: 4186130 - RNA, 56 nt, Human
gugugcaggggcuugguggagcuguggaaguggguaccagccaaagcagggcgcau

SEQ ID NO: 4186131 - RNA, 68 nt, Human
gugugcaguguuuguccaguguccagcuucaucccgucaugggcagacugguuauacacgggcaacac

SEQ ID NO: 4186132 - RNA, 87 nt, Human
gugugcaucugugcccauguaugugcacguguguuugugugugugcaugcacacaugugucugcaugcagugucucagauccuacau

SEQ ID NO: 4186133 - RNA, 58 nt, Human
gugugcccgggggaagcagguguguuucagugugugccgugccuccccguggguacac

SEQ ID NO: 4186134 - RNA, 59 nt, Human
gugugccuaugaguggugaacauuauaccaguaaucacaauauugcuacauaggaacau

SEQ ID NO: 4186135 - RNA, 64 nt, Human
gugugccucgccaagcugucggcaugaugaacagcuucccuuggcugagcagauaacaguacac

SEQ ID NO: 4186136 - RNA, 72 nt, Human
gugugccucuauagaugugugcaucuauuuuucugugcaucuauagauguguacaucugugagcuugcaugu

SEQ ID NO: 4186137 - RNA, 65 nt, Human
gugugccuuuuggugaaguuguugagaauuuuaaugcauuuuaguucucauucaucacggccuau

SEQ ID NO: 4186138 - RNA, 67 nt, Human
gugugcggguuccugagggcugggacucccagggccccaugggaaaguguagccugcaggcccauac

SEQ ID NO: 4186139 - RNA, 61 nt, Human
gugugcucagcucauuuggauaagcacguggaauaccuuaguucagauggaaagaguaugc

SEQ ID NO: 4186140 - RNA, 74 nt, Human
gugugcucagugggccuugcagggugcagggggcucuggugcgccucugcaucccagcaggcuccggagcucgc

SEQ ID NO: 4186141 - RNA, 64 nt, Human
gugugcugggaauggaggcauaacauaauauucauguuuuaaaugugucuaauuccaggagcac

SEQ ID NO: 4186142 - RNA, 123 nt, Human
gugugcugggcccagcagaguaguucuucuagacuaggcugggcucccucaugugucugcagucagcugccaagucacuggaagccugaauagucuaagauaaccucagcugggauggcacau

SEQ ID NO: 4186143 - RNA, 84 nt, Human
gugugcuuccauaucugucuuugugaguucacuuuaaauacaugcauaagauuguagugaauuuaaaacacugaggagguccac

SEQ ID NO: 4186144 - RNA, 70 nt, Human
guaggcacuuucugggcccugggggcauaguccugaaugagagaacaugucucugccccagagagcuuac

SEQ ID NO: 4186145 - RNA, 63 nt, Human
guaggcagccagcaucaguugggucaauagcaauaggugauacucacugauguugccugucac

SEQ ID NO: 4186146 - RNA, 61 nt, Human
guaggccagugugaaaccugguaggagccacagaacagugugagguuuuacauuggccuac

SEQ ID NO: 4186147 - RNA, 67 nt, Human
guaggcuugguuuauagaaguaaucacuaaaagcaauugugauaaucugacaaagacuuaagcuuac

SEQ ID NO: 4186148 - RNA, 91 nt, Human
guaggggcagcucuggguguagaaagaacccucuggggucgugucaaagauggaccagagggagagucuggaggccgggagaagcuggugc

SEQ ID NO: 4186149 - RNA, 62 nt, Human
guaggggguggaaucuuuagauggcuccaaguuccuggcccucugauguucacacccuguau

SEQ ID NO: 4186150 - RNA, 72 nt, Human
guagggguuuggaaaucaaggggacaaauugugggguguuaaaaaccacaaacuuauuuccaaaccuauggc

SEQ ID NO: 4186151 - RNA, 76 nt, Human
guaggguaaaagcuuuuguuuucguaacuguuucugugccacacacuccaccagauagaaugcaagaccucucuac

SEQ ID NO: 4186152 - RNA, 77 nt, Human
guagguaacauugaagaaaauauguaagacuuguaguauuugacugacaaguacauaauuucauguucuaagccugc

SEQ ID NO: 4186153 - RNA, 68 nt, Human
guagguaauggcaacaguccagaaguguggaugccaaaaauucacauucuuuauuugccauccuuuac

SEQ ID NO: 4186154 - RNA, 91 nt, Human
guagguagcucuuuggaggcccagcuugaagugggaaggguuuccuauugaacccucucccuugggugggcuuuggucugugacuaucugc

SEQ ID NO: 4186155 - RNA, 90 nt, Human
guagguauugacuuggugucuuuuuuauacauguugucauuucauagacacuggcugaaaguaaagaacaccaauaaaguccuuauuuac

SEQ ID NO: 4186156 - RNA, 59 nt, Human
guaggucuagggcgaaauccagaaacucguuuuugucaagcagauguccucuggacuac

SEQ ID NO: 4186157 - RNA, 56 nt, Human
guaggugagugggagaagaggcugccgacccagguaucuguccccucugauccugc

SEQ ID NO: 4186158 - RNA, 98 nt, Human
guaggugccagccuaggggagcuuccaaggaggggaaggcaaagcccuggccccugccuguguccccuucuuggcauguuccacaugcucgguccugc

SEQ ID NO: 4186159 - RNA, 66 nt, Human
guagguggcagcaggagauguggaaacuuggccauugaaaaguuccuauuuccugaugcaacccac

SEQ ID NO: 4186160 - RNA, 83 nt, Human
guagguucucugcagggcccaaggucaacggaacauuccaggccgacuuuccucugggcccugccacccacggaggaaccuac

SEQ ID NO: 4186161 - RNA, 83 nt, Human
guagguucucugcagggcccaaggucaacggaacauuccaggcugacuuuccucugggcccugccacccacggaggaaccuac

SEQ ID NO: 4186162 - RNA, 80 nt, Human
guagguuuaugaauguguauaugaacauacagguguguguaugugcaaguuugugugaaggugugugcauguguuucuac

SEQ ID NO: 4186163 - RNA, 55 nt, Human
guaguaguggucauaauagagaaguuauuuagacucuugugugcugcccugcuac

SEQ ID NO: 4186164 - RNA, 87 nt, Human
guagucaagagaucauaugcaguaaugaacucuauggaagaggauuaaauaugacauucauuugguaaaugauuucuguaugauuau

SEQ ID NO: 4186165 - RNA, 60 nt, Human
guagucacuuaugugcagcugcugaacucuccaaacaaacagcugggcaauuaugacuau

SEQ ID NO: 4186166 - RNA, 91 nt, Human
guagugauaggucagaaugaaauagccuguuggauguguaauauguagagucuacauuauuuaggccuauuguauucuuaucuguauauac

SEQ ID NO: 4186167 - RNA, 67 nt, Human
guaguggcagagccagguuucugauucauauuuuucugauuccagagccuaagaucugauccucugc

SEQ ID NO: 4186168 - RNA, 57 nt, Human
guaguggccagaccaugggucaggucuguccgguuuggauccagcucugccacuuac

SEQ ID NO: 4186169 - RNA, 85 nt, Human
guagugggugggguaucaguuauggaauggcaccuccuuccagaggacugaucaugucauuuucagcuuaugcuucccuuuaugc

SEQ ID NO: 4186170 - RNA, 68 nt, Human
guaguguaucuucuuucucucugcuaaugcugaaagggauaguacaagggaagagugaaggucaauac

SEQ ID NO: 4186171 - RNA, 59 nt, Human
guagugucccaggcagcguucucccgugugcaaaggguuaaaugugcuugggagacugc

SEQ ID NO: 4186172 - RNA, 68 nt, Human
guaguguguuuguggguugacauuugaagcuucuuauuacaagaggaauuggcucaugcaacaccuac

SEQ ID NO: 4186173 - RNA, 75 nt, Human
guaguuaaaugguuaagcugggguuaaaugcagggagucuaccuccuggguguguccucuuaacuauuaugcugu

SEQ ID NO: 4186174 - RNA, 56 nt, Human
guaguucucugaagauguagggugacauccuagccaaucauccucagacucucugc

SEQ ID NO: 4186175 - RNA, 91 nt, Human
guaguugaugcuuuugagcugcuucuuauaaugugucucuuguguuaaggugcaucuagugcaguuagugaagcagcuuagaaucuacugc

SEQ ID NO: 4186176 - RNA, 92 nt, Human
guaguugucuacacuuuguuuuccuagguuagcuuuuugggcccucauuagcagaagauggcagccaggaggguguaguuuuccacaauuac

SEQ ID NO: 4186177 - RNA, 77 nt, Human
guaguuguucguagcacguaguuucuuaucagugaguaggacugagaguucaaguggcugcugcaaaugagcacuau

SEQ ID NO: 4186178 - RNA, 78 nt, Human
guaguuuacuaguugagaguuuggauucugagccagccacacuggagucagaauucuagcucuucccuuauuagcuau

SEQ ID NO: 4186179 - RNA, 130 nt, Human
guaguuucaugauaacaaaauuguuaacucugcuuauaguuuguccacagucaugcauauaaaaguuuaaaggacauugcauggauacagcugauagcaggauuugacucacucuuuuuucuaauacugc

SEQ ID NO: 4186180 - RNA, 81 nt, Human
guaguuuggaagaagggaaggccauugaucuuccaguccugguguggcaggcagugcagaguccucuucuuccagcacugc

SEQ ID NO: 4186181 - RNA, 87 nt, Human
guauaaaacgaaagcucaauguguauauauaaaauccaccaagaggccugauaaugcaccuuugaguauggcugcuuuuguuuuugc

SEQ ID NO: 4186182 - RNA, 97 nt, Human
guauaaccuaaggagaugguuaaaaugcagauuaugacucaguaggucuggauugaggccagaaagucugcauuucuaacaagcucucacguaaugc

SEQ ID NO: 4186183 - RNA, 78 nt, Human
guauaauuaacaaacaguuaaguguggaugguaaaacuucccuagguccuaucuagaacugaaacucuguaauuauau

SEQ ID NO: 4186184 - RNA, 86 nt, Human
guauaauuaagagucaauuaagggccauuauggaugggugcuuaaagcaucaagugaagggcucuugaagguugcuuuguuugugc

SEQ ID NO: 4186185 - RNA, 81 nt, Human
guauaauuagcauguuguguuguuaaaaucucagugauaaacuugcauauuagcaacagagcucuuguuuccacauuauac

SEQ ID NO: 4186186 - RNA, 125 nt, Human
guauacaaauuuagaauuaaaauguuuucuauuuuuuucaugauuaacuuagugaauaacuuaaauccuuaauccucguagugguuagaaagaugaggagacuuuuuugacuuacauuuguaaau

SEQ ID NO: 4186187 - RNA, 65 nt, Human
guauacaugaaacugccugcuuucuaucuguuuauuggaaaacucuaacaggcagacauguaagc

SEQ ID NO: 4186188 - RNA, 100 nt, Human
guauaccaccgauauccugguguucucagcaacaaaacugaugggaggaauguccauucuguguguacugagaugggcuuggauguguguguggcaauac

SEQ ID NO: 4186189 - RNA, 75 nt, Human
guauaccugaugaucaucuguaaaguuagaguauaucuuuuugcuuucuuuggaguuaguguuauuccaggauau

SEQ ID NO: 4186190 - RNA, 90 nt, Human
guauaccuuuuguauuucugaagcuugauaaacuauaaagccuugaguauucagguucauggcaagguuuagauggauggggagguauac

SEQ ID NO: 4186191 - RNA, 91 nt, Human
guauagaaugcauuuauucuuuauguuaaugaaucuauuugaaauauuuuguggaaucuuaaaugugaaggguaauuguuuauuugauuac

SEQ ID NO: 4186192 - RNA, 58 nt, Human
guauagaugaggaaccugaugguauggucuuucuaccacucucccaccauaucuguau

SEQ ID NO: 4186193 - RNA, 104 nt, Human
guauagcgugguuccguaaauuaagguugauauguaucuagggauuuuauuuauugauguucugacaugugagauuuuguuuguugcugaaucaaaaccuauau

SEQ ID NO: 4186194 - RNA, 103 nt, Human
guauaguauagcuggguuugugggcagcacuaugacauuuaauucuuuaaaaaugacuaaaugaguaaaacagugguguugcauagcuuuccaugauacaugc

SEQ ID NO: 4186195 - RNA, 74 nt, Human
guauaguuguucacagaauaucuaaugucagagcgauucauuauguugacguuuuauagucuuuccaauuauac

SEQ ID NO: 4186196 - RNA, 114 nt, Human
guauauaacucguuuucccauuuaguugcaagacacuuggaagcacagaccaaggcuuacauuuguguuuuaauguuuuucuuguaaaugcuuuaugccuaaauguuucuguac

SEQ ID NO: 4186197 - RNA, 73 nt, Human
guauaugcuuauaaugggaguacagaaaaauagguuuggcuuccuauuuagugaaacccauaaagcauuauac

SEQ ID NO: 4186198 - RNA, 57 nt, Human
guauauucacaaaaugagguccucagggugaccuugagugagugcuguggguguuac

SEQ ID NO: 4186199 - RNA, 81 nt, Human
guauauucuggaaugggagucagacagagaaaugugaucaccucaccaggcuuuagucugcucucacucgcagaagaagac

SEQ ID NO: 4186200 - RNA, 78 nt, Human
guauauucuguauugguuaguaaauaaacauaauuuuaugucuuguguuugcuaaucuuauggugaagcagaaaauac

SEQ ID NO: 4186201 - RNA, 87 nt, Human
guauauuguugccuggacuaaaaucuuuucuuacuuuauuacuagguaagaaaagaagaguaguuaucauuuaggcaguuaaggugc

SEQ ID NO: 4186202 - RNA, 61 nt, Human
guauauuguuguguguaugcgagcaugcaagaacguguguguacaaacuaacaacauaugc

SEQ ID NO: 4186203 - RNA, 117 nt, Human
guauauuuagacaaacuucucauuucucugcaguguucggaauucaucaugccuguaugacaagguuguguuugagaacaaaaggggaccugugugacauguuuuauuucaauauac

SEQ ID NO: 4186204 - RNA, 83 nt, Human
guaucaaaaucaaccaggaggugcuggaagaaagcgggcaaguuguggccugguuguacaaaugcuccugagugaugugaugc

SEQ ID NO: 4186205 - RNA, 62 nt, Human
guaucaagcccuuuucaagauacaacaauacugaaggguucucgaagaggguuaauauauac

SEQ ID NO: 4186206 - RNA, 55 nt, Human
guaucacauauuuacugaguagccugccuggaccuauacaguaauuaagugguau

SEQ ID NO: 4186207 - RNA, 80 nt, Human
guaucagcaucaucugggagcuuguuagaaauguagaaucugcauuuaaccagauccccaggugaaugaaucacugguac

SEQ ID NO: 4186208 - RNA, 71 nt, Human
guaucaucaggaucucucuggaaugccucucacucucugccacugaggauuuauauauuccuugaugauau

SEQ ID NO: 4186209 - RNA, 66 nt, Human
guauccacuagguugauuguuagucagggugagaaggaccuuggccaaauccuccaugguggcugc

SEQ ID NO: 4186210 - RNA, 100 nt, Human
guauccauuuucagagccuuugauuagcaccugaggaaaaaaggguacauggaaagcuauguaauuugcccucaaguuaauuuguuggucugaagaguac

SEQ ID NO: 4186211 - RNA, 59 nt, Human
gugcccacucuuuugauuuguguuucugccuagacagugcacagcaugaguguuggcau

SEQ ID NO: 4186212 - RNA, 74 nt, Human
gugccccaagaggguugcccgcuucagagggaggacacgaagcccccagcucccucgagcagcgaccccuccac

SEQ ID NO: 4186213 - RNA, 78 nt, Human
gugccccagauggagcugaugguagaagaaugacuguucuuuaacucuucuuuccucaucaaguacaucugagcccac

SEQ ID NO: 4186214 - RNA, 68 nt, Human
gugcccccaaaguaacugccuuuccaauuuguuccuaauucaaacuggaaaggcaguuauuucugcau

SEQ ID NO: 4186215 - RNA, 66 nt, Human
gugcccccggcucugccugucucauccugcaagggcgcugaccuuggacaaggccagagccagcac

SEQ ID NO: 4186216 - RNA, 94 nt, Human
gugccccucuuaagagcuuuuguaggugauauagucucucacuuccaaacaugaguucuucacauuaccuacgguggcacuggggguggagcac

SEQ ID NO: 4186217 - RNA, 71 nt, Human
gugcccugcaugccccggguaugccccgugucccagagggaaacguuuacuugcucggcgcugcuggucac

SEQ ID NO: 4186218 - RNA, 61 nt, Human
gugcccugguccccagcauauaaaaugacgauuguacaauuccaguguugagggacuguac

SEQ ID NO: 4186219 - RNA, 69 nt, Human
gugcccuguuuacuggagaagaugaccuguggguaguuccauauuuaagcuagugaaaagaauugguac

SEQ ID NO: 4186220 - RNA, 78 nt, Human
gugcccuguuuugaaacuugcauagagaggaaaugagaugaagagucaaugugcaaucauauuuuaaaauguggguac

SEQ ID NO: 4186221 - RNA, 89 nt, Human
gugcccuuacaacagaguggacguaugugcuucauuuucugauauauuaguaaaucugagaaauauuguccagguuguauaggauguac

SEQ ID NO: 4186222 - RNA, 59 nt, Human
gugcccuuauaaaggaggccugagggagcuuucuuacccuuuccauuuugugagggcac

SEQ ID NO: 4186223 - RNA, 59 nt, Human
gugccgugugauuggcugaggcugucugugccauaggaaagcagaaaucacaccagcac

SEQ ID NO: 4186224 - RNA, 72 nt, Human
gugccuaaagguagucugcugguguacuuuuacaaauagcaccauuaacagaauuuuacaugcuuaggucac

SEQ ID NO: 4186225 - RNA, 87 nt, Human
gugccuaacgauuugcccugccuuggacagccaguccucuucagguggugggcugcugguagggguaggaagcaaggccuggggcac

SEQ ID NO: 4186226 - RNA, 71 nt, Human
gugccuaugucugagugcauaugugcugggggggcucuguugaaucagcacuggcgcugggcagguggcac

SEQ ID NO: 4186227 - RNA, 55 nt, Human
gugccuccaggcucgacuagucccuagcacucgacaacugggucucugaggucac

SEQ ID NO: 4186228 - RNA, 88 nt, Human
gugccuucuuauauauugccagcuuaguggauucugugaugugagcauuaaaaaaaugaauuuacaaguugaauaacaaggaaaccac

SEQ ID NO: 4186229 - RNA, 58 nt, Human
gugccuuugagaaguuucucugaagcuuaaucggaaugggaaaauuucagaaugguac

SEQ ID NO: 4186230 - RNA, 96 nt, Human
gugcgaaaguucagucaaaugguugcacagauuacuugggacugcgccugugauucagcugugcagugauuuguacaauuagaacagcuuucucgc

SEQ ID NO: 4186231 - RNA, 76 nt, Human
gugcgacugcagugcaggccccaggccaggccgcuguuggcccagaggcuuggcaggugcccugcgcaaguugcac

SEQ ID NO: 4186232 - RNA, 58 nt, Human
gugcggagaccuaauuaguauccagggaacacuaggcuugaucacauaggucucccau

SEQ ID NO: 4186233 - RNA, 122 nt, Human
gugcggggcgggacagggagaggggccuccucgggaggagcugagugugugugcgcacguguuugcgcagauggagacgagguuccgccgaggcccgucugucugggagcgccugucugcgc

SEQ ID NO: 4186234 - RNA, 63 nt, Human
gugcgugguucuagauccugucgucccuccgcuugggggcacaacgggcugggacccaugcac

SEQ ID NO: 4186235 - RNA, 87 nt, Human
gugcgugucaucuuugcucugaugggguggacauagcagaaaaucuaacucugucuguagccccauacagaaugccagggugagcac

SEQ ID NO: 4186236 - RNA, 77 nt, Human
gugcuaaacugaaaucuuuauggaaauaacaaaaugagaauuuauauugauuauucagcaaagguuuuauugagcau

SEQ ID NO: 4186237 - RNA, 76 nt, Human
gugcuacacauagauugcucaaugcccaacagaaaauaccacugucagaacaugaagguuaauuugucuggagcac

SEQ ID NO: 4186238 - RNA, 76 nt, Human
gugcuacuggcaucuagugcguugaggucagagaugcugcuaaacagccuacaacgcacaagacagccucuaccac

SEQ ID NO: 4186239 - RNA, 87 nt, Human
gugcucaaggcuuguccuucugguugucuuugcgugggagggagaggagcgcaggacguaacccaggacagccuuccagaaagcagc

SEQ ID NO: 4186240 - RNA, 112 nt, Human
gugcucagggucccguugacguagacuuucaggcccuccuuggauuuccauguaaauaggacaugaguccaauaggggccuggaaaagagugaagaucgccauucugaguac

SEQ ID NO: 4186241 - RNA, 59 nt, Human
gugcucauagaugaugcucuuuuccuguuagcuggcacaugagcuccaucugucagcau

SEQ ID NO: 4186242 - RNA, 58 nt, Human
gugcucccuccagaccacaggcacaauuucagccugaugguauauuguugggagucac

SEQ ID NO: 4186243 - RNA, 67 nt, Human
gugcucccuccagaggcuccaaagggagauuccauuccuugggucuuccagcuucugguggcuccac

SEQ ID NO: 4186244 - RNA, 83 nt, Human
gugcuccguccauacggguuguuaaaaaaucaugaauaucuccuucgguguaauaaugauuauagcaauuuuguagauggcac

SEQ ID NO: 4186245 - RNA, 79 nt, Human
gugcucgggagugugucucagcaccgcugcgcgugcgggggcacaucccugugugcaggugcuggguaccuacgugcau

SEQ ID NO: 4186246 - RNA, 56 nt, Human
gugcucuggguaaagacccacuaccuugauaguuguucaucuggaacccagagcgc

SEQ ID NO: 4186247 - RNA, 61 nt, Human
gugcucugugaggcccuugagaucugggcucauuacuccaagaccucuucccuucaugcac

SEQ ID NO: 4186248 - RNA, 77 nt, Human
gugcucuuccuuaagacuauaaagaaggcugagagaagaaaaagcaaaucaaguggucuuaggugaagaaaaugcau

SEQ ID NO: 4186249 - RNA, 73 nt, Human
gugcucuuguuuauccccugagcaacaaacugaauaccacuauguggcagggauugugcagggggcuagagau

SEQ ID NO: 4186250 - RNA, 130 nt, Human
gugcugaauuagaaucucaaaggcugggguuucggaaguuuucugguugauacucuuaugcagucaaguuuguaaaucacugaacuaaaugagcuuuaaggccuuucucacagaucuaauauuuagugac

SEQ ID NO: 4186251 - RNA, 69 nt, Human
gugcugagauuggagugagcagaacugcauaucucauuccagcugcagcucacuccaauaguuuaguau

SEQ ID NO: 4186252 - RNA, 61 nt, Human
gugcugagcacagcugcccaggcagaagaggaaggaacccagggcuccuguggcugcagcc

SEQ ID NO: 4186253 - RNA, 57 nt, Human
gugcugagcugcagaugcgcucugacaagcacguagagugcagauguccuuucacac

SEQ ID NO: 4186254 - RNA, 68 nt, Human
gugcugaggauacagcugugaacaagagagacaagggcucugcauucacagagaguauauucuaguac

SEQ ID NO: 4186255 - RNA, 57 nt, Human
gugcugaguagaaugaaugccuuuggucccaaagguuuuguuacuagauucagaugc

SEQ ID NO: 4186256 - RNA, 60 nt, Human
gugcugauggccaccccuguuccucccacagacacggccauggagcaggcacgucagcac

SEQ ID NO: 4186257 - RNA, 72 nt, Human
gugcugcagggccuccugcaccuggagcccacccuccgcuccagccagcugcucugggaggcccuggagagc

SEQ ID NO: 4186258 - RNA, 65 nt, Human
gugcugccaggucuugcuguccauccuuaauuaaauggugggugggcgaggcaggaguggagcac

SEQ ID NO: 4186259 - RNA, 81 nt, Human
gugcugcugccuuuggcaauaauuguaauucaauuuaugcauccacaaaauuauccaauccuguugccuaugcagugucac

SEQ ID NO: 4186260 - RNA, 56 nt, Human
gugcugcuugggggcagagcaguuucuggucacagaagaaagcccucaggcgacac

SEQ ID NO: 4186261 - RNA, 65 nt, Human
gugcuggaaggugggugaagugcagauacuccuuuuuguguguggcuguggaugcuuuccagcac

SEQ ID NO: 4186262 - RNA, 74 nt, Human
gugcuggaggccaugaggcucuaggugcuaagaaaacagaaagcgcuuggggacggggcuccaggugacagcac

SEQ ID NO: 4186263 - RNA, 70 nt, Human
gugcuggcaguggcagugaugguagcaguccuggugcuguuagugguggccguuugucugcugcuagcac

SEQ ID NO: 4186264 - RNA, 55 nt, Human
gugcuggcccaguauggacugcagguuugacuuuugcaggauuccaggucaguau

SEQ ID NO: 4186265 - RNA, 126 nt, Human
gugcuggcugguaggguggugugggcagaggagcucuguguagccugaggguuccugagggagacaggcaggcuucggccagagcaguucugagaauggauuccaguaguauaauggcagcagcau

SEQ ID NO: 4186266 - RNA, 61 nt, Human
gugcuggugcccuacacauuuccaguuuuccaagcaaauguucacggggagcauagagcau

SEQ ID NO: 4186267 - RNA, 69 nt, Human
gugcuguauugagacaaggucguauuucaaucugugagagaaaauaaucccauugucuggaagcagcau

SEQ ID NO: 4186268 - RNA, 67 nt, Human
gugcugucuuugucuugguaucccuagugcagugcccauccucaggccuggcccaggaugauggcgc

SEQ ID NO: 4186269 - RNA, 77 nt, Human
gugcugugcuugcccagugucuacugucauugcuguggauacugcagugucagugccugggugguuccacacaucgc

SEQ ID NO: 4186270 - RNA, 63 nt, Human
gugcuguguccuggcugauguucgcugagaguccagcacucuaaaucauccugggucaugcac

SEQ ID NO: 4186271 - RNA, 83 nt, Human
gugcuguuucuauucauauuggauaugguauucuaugguauuggcuauagauacauacauuuuaaaauguuauuuaacagcau

SEQ ID NO: 4186272 - RNA, 82 nt, Human
gugcuuagaaccauucaguuaccacugauggccuucacacaaggccacaagugguccugaguccucacaaggaucagagcac

SEQ ID NO: 4186273 - RNA, 60 nt, Human
gugcuucugccaacuaauuaacaccuccuuugcaagcuguaaauuggacggcagaugcgc

SEQ ID NO: 4186274 - RNA, 104 nt, Human
gugcuuguuuguuaucugucugucugcuguccgaguauauucucacagauaaaauggggaagagcuccaaaaacagugagagaagguauucacagauaaagcau

SEQ ID NO: 4186275 - RNA, 73 nt, Human
gugcuuuaauaagauuucacuuucauuucccugaguagcuauguucuggggccugugaaucuucuuggagcau

SEQ ID NO: 4186276 - RNA, 58 nt, Human
gugcuuuacaaacuauaaagugcgguacaaauaucguucuugucaguuuauaaagugc

SEQ ID NO: 4186277 - RNA, 55 nt, Human
gugcuuuccauccucccugcugccacugcucaggagggcagaagugcagaggcac

SEQ ID NO: 4186278 - RNA, 76 nt, Human
gugcuuuuucaguaauuagguuccaucuuugaucaagagaaaaucaaagugaggacuugaguacugugggagucac

SEQ ID NO: 4186279 - RNA, 64 nt, Human
gugcuuuuugauaugguuuauguauaugcccaacuccuaaugcacaaaccuguuaguagagcac

SEQ ID NO: 4186280 - RNA, 59 nt, Human
guggaaaagaugggaugcaggagugggagauaacuuuucacuguaugucuuuuuuugau

SEQ ID NO: 4186281 - RNA, 60 nt, Human
guggaaaagcuagguuuugaaucugaguuuguuuuucuucaaagcuuaagcucuuuccac

SEQ ID NO: 4186282 - RNA, 58 nt, Human
gugugcuuccuguauugauuccaugacucacggagcaugagcuaagcagaaagcacac

SEQ ID NO: 4186283 - RNA, 55 nt, Human
gugugcuuguuuuguuuuacuaucaggauaggaauguaaagcauucuuggcauac

SEQ ID NO: 4186284 - RNA, 66 nt, Human
guguggacuauuguuaguaauagucuacacagggcuguguggacuauuguuaguaauaguccacac

SEQ ID NO: 4186285 - RNA, 96 nt, Human
guguggagagcucugucacccgagcaggcgagaacuacuuagcugauuaauuagcaaagcugagaaaucucaauugugggugaggagcacacacac

SEQ ID NO: 4186286 - RNA, 71 nt, Human
guguggcacucuggguucuucuccuuugcugggccccugggcaggcauggugagaacucagccugucaugu

SEQ ID NO: 4186287 - RNA, 104 nt, Human
guguggccauuaauaguauacuggaacaguagguguaaccaaacaagcugauacacauuuaccuauagcuugcuaacccuacuucaguaauagauguccuaugc

SEQ ID NO: 4186288 - RNA, 60 nt, Human
guguggcccugcguccugagucucccugcuagagcaggcuugggcaggagcagggagcac

SEQ ID NO: 4186289 - RNA, 80 nt, Human
guguggccuggccgguaucccaccuccugcgucagccuccgagugaagaagggguucagguacuuggcguccagccacac

SEQ ID NO: 4186290 - RNA, 56 nt, Human
guguggcucagaacuacuucuaguugcuaagcaacccacaagcagcuguagcccac

SEQ ID NO: 4186291 - RNA, 56 nt, Human
guguggcugugggagauguucaugcuauacaaaaugcccaaaugcccaugccacac

SEQ ID NO: 4186292 - RNA, 64 nt, Human
guguggcuguuuagugacuuucccagugugcuuugcuggaaauaaagagacaaauggcauauac

SEQ ID NO: 4186293 - RNA, 130 nt, Human
gugugggaagcagacuggagcucuguuacugaucguugaaauuggguguggcugucauggagaucacucuggaucccugguccauuaucccgcuuuccagaaaagacagguuccaguucaaauccuuggc

SEQ ID NO: 4186294 - RNA, 74 nt, Human
gugugggacauagggauuuauggguacugcucacucuuuuggcacauuuuccacaucucuugauguaccuacau

SEQ ID NO: 4186295 - RNA, 87 nt, Human
gugugggaggggagaaauguacacuuugcaucuugauguuaaagcacauaucaguaucaauagcgucacaaucauucccuuugacac

SEQ ID NO: 4186296 - RNA, 55 nt, Human
gugugggcuaugugcgugggcauguaugaaugcauguguauguccaaugcccuac

SEQ ID NO: 4186297 - RNA, 78 nt, Human
gugugguagggucaggcuuuucuucccucagugccugccuggaaccaguggggguaagagccuggucuuacaccuugc

SEQ ID NO: 4186298 - RNA, 120 nt, Human
gugugguccuggaggcaggucuaauuaucuugugcagaugaaagaauuaggaugucauaaccugacucauggaaaaucugcauacuagauuugauugcuucugcucuucuauguuuauac

SEQ ID NO: 4186299 - RNA, 95 nt, Human
guguggugagagaaaugaacggcguacagcuguaacugauaaugacaguccucagaaauagcucuaagcuccuuuucaaacucuuuuaccacuac

SEQ ID NO: 4186300 - RNA, 69 nt, Human
guguggugaggggccugugcacacaggagcugaccugggugcugacuggggccugaaaaucucccacau

SEQ ID NO: 4186301 - RNA, 62 nt, Human
gugugguggcagagaacaaggagaggugcuagucaccauucaacucuucuuugucccuucac

SEQ ID NO: 4186302 - RNA, 65 nt, Human
gugugguuggggucagauagggaggaccguacacaaggcaucaucucuagcuuccuuaggaacac

SEQ ID NO: 4186303 - RNA, 130 nt, Human
gugugguugggucugugguccugugcucugcuauugcucagagaaggagaugucccaggaugccccaguggcacauuggucacugaagaaugagagacaugcauaggagaccugaacucaacugguggcc

SEQ ID NO: 4186304 - RNA, 62 nt, Human
guguguaaaccuccaaucuggggcauaauguagaaauugggugggcagugguuugcgcgguc

SEQ ID NO: 4186305 - RNA, 61 nt, Human
guguguacguauauauacugugcaugcauauuuguguguguguacauacauauguacacac

SEQ ID NO: 4186306 - RNA, 81 nt, Human
guguguagagcauggccucucuccuggaauggcaucuuauacauauaacccauuggagccaagaguuuuaccuuuacaugc

SEQ ID NO: 4186307 - RNA, 81 nt, Human
guguguagccgugcuuacucaucucugagccuaccccagaaggcagauguaaggaacagaagagcaaugcaggcaacacac

SEQ ID NO: 4186308 - RNA, 56 nt, Human
guguguaucucuuguuggcaugaauaugucuguuuguacaacaaguagagacauac

SEQ ID NO: 4186309 - RNA, 69 nt, Human
guguguauugaaugucuggcagaaacugaguaauagcugaacagaacagucagggauucaagugcucac

SEQ ID NO: 4186310 - RNA, 84 nt, Human
gugugugagcugaacgugcuucugcagcauguacucggucacguacuucuugucgcacacggagcacguccacugcuugcccac

SEQ ID NO: 4186311 - RNA, 96 nt, Human
gugugugauaggucaagaaaauugagaauugugaguuuggagaauuauagcaaucuuuauuaggguuucaucaaggcucuugacaaguuuacacac

SEQ ID NO: 4186312 - RNA, 66 nt, Human
gugugugcgugcaugugugugugugugugugugugugggcauguacacaugcaugcaugugcaugc

SEQ ID NO: 4186313 - RNA, 72 nt, Human
gugugugcucguauguaugugugcagcuacguaucuauguggaaacacccacgcaugcauaugugugugcau

SEQ ID NO: 4186314 - RNA, 121 nt, Human
guguguggagaaaagcaugaaccaagagccauguaauccuggggagaugaagguggacagucgagccacguuuuaucccucugguuuccaugaggucugacuaugcuucccuaccacguac

SEQ ID NO: 4186315 - RNA, 81 nt, Human
guguguggcagugcugauauccuuuaaccuggaccgggcguguugguguuucagggaggaugugaaaagcugugcacagac

SEQ ID NO: 4186316 - RNA, 111 nt, Human
guguguguacacauaggaucuagaaugacaugcaagaguauacacuuaaaaauaugaugcuuuaauauucuuauuuugcuuuuccuguguuuuucaauucuuuauacacac

SEQ ID NO: 4186317 - RNA, 76 nt, Human
guguguguagucaguagauccaaacuuuugagaaaugaaugaaucaaggggcaaguuuuguugacugaauucacac

SEQ ID NO: 4186318 - RNA, 56 nt, Human
gugugugugaacaugugugugugcgugugugugugcacgugugugugcacgcgcgc

SEQ ID NO: 4186319 - RNA, 70 nt, Human
gugugugugcaucucuuuuauucuaaaaucaggauuuuuaucauggauucaaaggaguauguucauaugc

SEQ ID NO: 4186320 - RNA, 114 nt, Human
gugugugugcauguaaaugcccaucugugcagcuaaguguaagugccaggugcccuuuggugcacucuccuguucauuuguauuugucuuugcuaaguuuacauucaugcacau

SEQ ID NO: 4186321 - RNA, 59 nt, Human
guguguguguguguggggaggguuugucuccagggucagaagucacauacauaugauac

SEQ ID NO: 4186322 - RNA, 60 nt, Human
gugugugugugugugugcaugugugugagcgagagcaggcuugcacaugcacgcacgugc

SEQ ID NO: 4186323 - RNA, 74 nt, Human
gugugugugugugugugugcacgugcaugugugugugcacauguguguaugucuguaugcacacauauuuucac

SEQ ID NO: 4186324 - RNA, 91 nt, Human
gugugugugugugugugugcaugcacacacacguagagaaaagaacauucuuucucuguguguguguguguguauauauauacacacacac

SEQ ID NO: 4186325 - RNA, 66 nt, Human
guguguguguguguguguguguacuacauugaaaaaaaaugcagugccaaacaguacauaacauau

SEQ ID NO: 4186326 - RNA, 83 nt, Human
guguguguguguguguguguguggugcugugugcagagugcagugagcguguacagggugcagcgagcggacacaguguaugc

SEQ ID NO: 4186327 - RNA, 60 nt, Human
guguguguguguguguguguguguguguguguguguguguauacaugugugcauacgugu

SEQ ID NO: 4186328 - RNA, 62 nt, Human
guguguguguguguguguguguguguguguguguguguguguaugcaugcaugcacaugcac

SEQ ID NO: 4186329 - RNA, 81 nt, Human
guguguugccugcauugcucuucuguuccuuacaucugccuucugggguaggcucagagaugaguaagcacggcuacacac

SEQ ID NO: 4186330 - RNA, 60 nt, Human
guguguugggagugaaauggguggauuuggaucaugcccucagaauugcucccugcacac

SEQ ID NO: 4186331 - RNA, 122 nt, Human
guguguugucaaaacuauuuucaucguaaugggaaauugcuaguugcuuuuuucacuguauugacauuugcauugaggaugcauagcaauuuuggguuaaaacugcuggugccuuagcacac

SEQ ID NO: 4186332 - RNA, 114 nt, Human
guguguuguguucuaaaacuugaugaggugguaauuggcauuccagaugcuuuucucagauacuaaucuaugcuagaugaguaaauggagucuucccucuaggacagaauaugc

SEQ ID NO: 4186333 - RNA, 63 nt, Human
guguguuucuugucagcucggaugguucuguucccauggcuucccacccugcuaagaauacac

SEQ ID NO: 4186334 - RNA, 57 nt, Human
guguuaaaugcaaucacaugcauccuuguaagagggaggcagaaggagauuugacac

SEQ ID NO: 4186335 - RNA, 72 nt, Human
guguuaacacggacuagcugaacaaccuugggcaaauuacuucucuccgagcaucagugucccuguuaauau

SEQ ID NO: 4186336 - RNA, 81 nt, Human
guguuacauguuuucaaucauaguggucaacaauauauaacgcuguuauuaaccagguccuuugaaaacaauuugugacau

SEQ ID NO: 4186337 - RNA, 82 nt, Human
guguuaccauuugauuuugccagagaccuaguaagaauguccauguucucuugcuuuacauguucugguaaauugguaaugc

SEQ ID NO: 4186338 - RNA, 70 nt, Human
guguuagagcaugcccuugcuacuauguugauucagauuuaccauagggcaguggcaucucuuaaaacau

SEQ ID NO: 4186339 - RNA, 59 nt, Human
guguuagccuuggguucaagguagguugcugccuuagcaguggguaccagggcuuuuac

SEQ ID NO: 4186340 - RNA, 77 nt, Human
guguuauaaucuccgcuguauuucugucugccaugaugauugaucuuuggcuaacaaaucagcuuggauggcagcac

SEQ ID NO: 4186341 - RNA, 64 nt, Human
guguuaugcucuacaaucuaaggggccucuuggggccgggcucugagggagugggcaguggcac

SEQ ID NO: 4186342 - RNA, 116 nt, Human
guguuauuugcauauaaaaaaagagaaaggcauguugucccucaucuuuuccaggaaagagugcugagcugcucuaauccuaugguggggagggaggagggccguguagaggacgc

SEQ ID NO: 4186343 - RNA, 82 nt, Human
guguucaaggcugucuuuccucuuugugacacagcugaugaacuuaggugugauucgaagagcaaagugcagguguguuuac

SEQ ID NO: 4186344 - RNA, 58 nt, Human
guguucaauuaugcgauguuaaucaagagcccuauugaggauauccaauaaugaacac

SEQ ID NO: 4186345 - RNA, 57 nt, Human
guguucauugcuagugaggugugucacucuucccaggcccucagagcuagugaacau

SEQ ID NO: 4186346 - RNA, 87 nt, Human
guguuccagaguccaugggcagauacacaaaagucuagugagggcggacucugccucagaauuugugugcugucuugaagagaacac

SEQ ID NO: 4186347 - RNA, 63 nt, Human
guguucccugguaaacugacucccaaccgugacuaggauaucggagggcuuauuagggagggc

SEQ ID NO: 4186348 - RNA, 123 nt, Human
guguucccuuuguucagaugaguggucuuuauuugagauugucauuuaauaugcugucauggaagaaaugacuaaaucugaagauagggccaaauccaauuguauuagaugaagaggcugcac

SEQ ID NO: 4186349 - RNA, 130 nt, Human
guguucugaugaucuccugcuccauaacaaaucacccccaaaacuuggugacuuccaucaauaguuuaugauggacuuuacccuuuggguaguguuugugucucaguuucaagguaguuacuggaauuac

SEQ ID NO: 4186350 - RNA, 75 nt, Human
guguucugcaaugcugccuccuuugaggaagugucugacagccuccacuucuagcaaggggcagcugcagaaaau

SEQ ID NO: 4186351 - RNA, 70 nt, Human
guguucugcccugcccaucuacccuguccgauucaccuaaagguaggccaggcaggacgggcagggccac

SEQ ID NO: 4186352 - RNA, 59 nt, Human
guguucugggaacaaaguggagugggaaagccuauugcuuuugugugcucccaggguac

SEQ ID NO: 4186353 - RNA, 77 nt, Human
guguucuguugucucagaaaaaggagaaacugguaguuagcuaaccacuaucucucuuuacugugauaauuuugcac

SEQ ID NO: 4186354 - RNA, 73 nt, Human
guguucuuaacuggaaaaugucagagcccuuuuuauacauucggggucuucugucagggccauuaaugagcac

SEQ ID NO: 4186355 - RNA, 74 nt, Human
guguucuucuuugagcucagugacucgacuuuaucaacaguaaaauguagucuaauugagcuaugugauaauau

SEQ ID NO: 4186356 - RNA, 80 nt, Human
guguucuuuuuguucccagagaauuuguuuucuuaaucuuaauccugaaaacagaaauucugggacagaaaauugaagac

SEQ ID NO: 4186357 - RNA, 87 nt, Human
guguugauguuugaaaaaaggacucagacugaagggagaggaaugaugucaucucuugaagcaggggccaguucuuaaacuuaacac

SEQ ID NO: 4186358 - RNA, 84 nt, Human
guguugcauguaugcacgguguuaggaugucucugcauguguguagguaugcuuguccaaguacauguguguacauguuuguau

SEQ ID NO: 4186359 - RNA, 64 nt, Human
guguugcugcacgauaaauaauuucuaggaagcuuuuaggaacauuugcuuuugcagccaacau

SEQ ID NO: 4186360 - RNA, 58 nt, Human
guguugcuuucucuaaugccaccuggucauccagccaggacaugggaggaaguauggc

SEQ ID NO: 4186361 - RNA, 65 nt, Human
guguuggauccuguuaugaaugcuuuauuaucucaaauuuugcagcauuccuaggagguaagcau

SEQ ID NO: 4186362 - RNA, 117 nt, Human
guguugggauucugcagcuagcaagugacagaguucggauugaguuugaggucgucuaagugccuaauccaggcucuuuccacucuggugcauuugcuucucaagugcucccaagac

SEQ ID NO: 4186363 - RNA, 101 nt, Human
guguugggucagcccucacagauguaguagcuuuauugcacauuuuagauuguuuguaggcuaggucuacuacacauauuuggaaggcaguaucccaauac

SEQ ID NO: 4186364 - RNA, 87 nt, Human
guguuguaaagcaaggagcagcaagcuacgggucugcaggccaaauuuagccugcugcuuguuuuguaaauaaaguuuuaccggcac

SEQ ID NO: 4186365 - RNA, 57 nt, Human
guguuguggagcuugucaggggcauuucaaugucaccugugaagggcucacagcuac

SEQ ID NO: 4186366 - RNA, 62 nt, Human
guguuguuuuguguuuucacagcaaucugacugugugcacgugaggauacuuaagagaacac

SEQ ID NO: 4186367 - RNA, 84 nt, Human
guguuuaaaaguuauugaugcaggacaacuuugcauaucaauacacaagcauuuauuugauuuguuuuaauagcugugaaauau

SEQ ID NO: 4186368 - RNA, 82 nt, Human
guguuuaauauagugucuggcauauuguuggaacauacuuaugacauaugcaaacaauagacccaugacacauaccuaacac

SEQ ID NO: 4186369 - RNA, 82 nt, Human
guguuuaauucuguauggaaacauccuccagcagcucauuugcuucugauauucucugaggauuuccauagauucugaucac

SEQ ID NO: 4186370 - RNA, 98 nt, Human
guguuuacauagcuuugacucuaugauaguuuuucaguagugccagacacauugguauguacucaucaacuauugaauugaaaacuuuauguagauac

SEQ ID NO: 4186371 - RNA, 123 nt, Human
guguuuaggcucgauuucauagacacuggacagguugaguaggaggagaccggauuagcuuuaauugacucuucauuuucgaccugcucacaggcuuuuaaaacauaaaucaacccucagcac

SEQ ID NO: 4186372 - RNA, 59 nt, Human
guguuuaucacguuucauuuguguguuauacuauauagaacacagaaauguguggccac

SEQ ID NO: 4186373 - RNA, 60 nt, Human
guguuucaaacagcaggucuuucauagcugggaaaaccccaagcuagaccugcuggacac

SEQ ID NO: 4186374 - RNA, 90 nt, Human
guguuucaggcuggccacagcaaugcugugaugucacguuccaguuccugugacucauggaggcugcugggcuccaggacuugaaaaugc

SEQ ID NO: 4186375 - RNA, 70 nt, Human
guguuucugaugcuauuuuaaccacuuauaguuaccauugugagaggagaaaugcauuaacaagaaacac

SEQ ID NO: 4186376 - RNA, 100 nt, Human
guguuucugcuaguuggauuggagucugcuuuugugaagagcugauugugggguaagagucugcucaacauuuguaggauaaguucacuggaggagaugc

SEQ ID NO: 4186377 - RNA, 66 nt, Human
guguuucuucacaagcugggucccaacaauuacugcugaugccagaugaacccagagagggagcgc

SEQ ID NO: 4186378 - RNA, 107 nt, Human
guguuugacauucuugugggcucucuaaagucuuagaucacuccagccuuguaugcuaacuuuggagacugauaaaggcuauuggugccuaaaaggcugugaaaugu

SEQ ID NO: 4186379 - RNA, 75 nt, Human
guguuugacgugaggaauugauacagaguugaugccuucuauggggacagcugguacucaguucuugucaagcac

SEQ ID NO: 4186380 - RNA, 81 nt, Human
guguuugauggaagaggaguaacagcuacuagcccuuaaaugaauaagacauaagccagucacucacuaugccauagacac

SEQ ID NO: 4186381 - RNA, 68 nt, Human
guguuuggaauuggcauucuauucuauggucauaauuuacagaguuguuuagugguaguucuaaaugu

SEQ ID NO: 4186382 - RNA, 74 nt, Human
guguuugucuuggccaagguucugaaugaauaaaaauauucccucaaaauuagugaccaaaggcauguuagcac

SEQ ID NO: 4186383 - RNA, 55 nt, Human
guguuugugagcuaggugacaugacgcaggcucugccacuugcuccacgauacac

SEQ ID NO: 4186384 - RNA, 58 nt, Human
guguuuuaagaaagaagcucagcuuuggaaacaaaacagugggagcuuuuuaggauac

SEQ ID NO: 4186385 - RNA, 84 nt, Human
guguuuuaccuucuuggagcuuaugugcuuaauaaacaucauuaagaauacaaacuuaaggcuuuacagaaauaggcaaaauau

SEQ ID NO: 4186386 - RNA, 62 nt, Human
guguuuuagugcugcugagcugagugugaaccgcuccuuguuucagcaagcacucuggacac

SEQ ID NO: 4186387 - RNA, 58 nt, Human
guguuuuauggagucauaacguguccaauucucccacacuuugcggcucacagagcac

SEQ ID NO: 4186388 - RNA, 62 nt, Human
guguuuugagguuguaaagaugauauuacuucaagguguuuuaucugaaaaccucaaaauau

SEQ ID NO: 4186389 - RNA, 72 nt, Human
guguuuuguacucuuuuauguuauggugagucagguauggcuacaagagacaccagggaggcucagaaacac

SEQ ID NO: 4186390 - RNA, 103 nt, Human
guguuuuucuacaagaacuuucucagagagguuggugauaagaauaucuuauuaguauuuuuauacucugcuacucuaguggaaaaucuauucugaaaaacau

SEQ ID NO: 4186391 - RNA, 61 nt, Human
guguuuuugcuuuuuacaaaagggucaggaauuuugaucccaaagguccgagcgggaauau

SEQ ID NO: 4186392 - RNA, 73 nt, Human
guuaaaaaugcagaucccugaaucucaccccaaacuuuuaaauaugggugggccuggacaucuguauuuuaac

SEQ ID NO: 4186393 - RNA, 86 nt, Human
guuaaaacaaguucauccacauuuacuggaugcucaggcuccacguggaccacccuggcuuccaguaggugcgauguggcugugac

SEQ ID NO: 4186394 - RNA, 70 nt, Human
guuaaacggaccuuccuaagugcaagaagcuauuaacuuuuugcauuugaucuuggguucucauuuuaac

SEQ ID NO: 4186395 - RNA, 89 nt, Human
guuaaagcacagauucugaggucacacugcuuggguccaaguccugcuuuacuccugccuagcaggugaccuauaguaaguuauuuaac

SEQ ID NO: 4186396 - RNA, 83 nt, Human
guuaaagggcaggcuccuggguguggccgccagagauccugauucugugaguuaccacgacacccgggagucugcaguucaac

SEQ ID NO: 4186397 - RNA, 56 nt, Human
guuaacaaccaaacagaaguucccaaucagugaugaauggaagcuuggugguuaau

SEQ ID NO: 4186398 - RNA, 60 nt, Human
guuaacauauguaaaguggauagugacugauuuucaaaacauuauucauacaugugugac

SEQ ID NO: 4186399 - RNA, 69 nt, Human
guuaacaucacaccacaggcauuuucuaucagcauacucgagauacuguguggugugguucuaauuaac

SEQ ID NO: 4186400 - RNA, 69 nt, Human
guuaacccuggaaaguuaaagagaauuagaaguuuucaauguaacauuuccaggcaggaaaguguuagc

SEQ ID NO: 4186401 - RNA, 62 nt, Human
guuaacucugcaacuuuugaggcuggggaccuagcugucagugaguuaguugcaaguauaac

SEQ ID NO: 4186402 - RNA, 75 nt, Human
guuaagaauguuuugcuggauguuggcuaaaaucaaaacuguucuuggucaauuaaacagagaucauucccagac

SEQ ID NO: 4186403 - RNA, 62 nt, Human
guuaagacagcauugcugagggcuuccugaggaacagugaaguucagcuagguuggagcaac

SEQ ID NO: 4186404 - RNA, 82 nt, Human
guuaagaccaucacagagacacuugcauagcagaguuuaguuaauuccaugaagaaucaguguguuucauguagguccuaau

SEQ ID NO: 4186405 - RNA, 87 nt, Human
guuaagagggaaaugcuuuauccaauaacaaaaucuuuugaaaacuucaaaaauguuuuauauugguagguaggaauuccucauugc

SEQ ID NO: 4186406 - RNA, 100 nt, Human
guuaagaguaugcauacuuuagagcuagauugccugaguucaaauaccagcucugcuaauuccugggcaaucuacugaaguauuuuguguaucuguuugc

SEQ ID NO: 4186407 - RNA, 66 nt, Human
guuaaggacucuccagcuagcaaauacauuaccauuauuguauuugccagaaggugggucauuagc

SEQ ID NO: 4186408 - RNA, 55 nt, Human
guuaaggaucuugagaugaggagaaccucuugacuuaucucaguuuguccuaaac

SEQ ID NO: 4186409 - RNA, 55 nt, Human
guuaaggcaaccagggccaggcuggauuuuucagagggcacaugguuuccucagc

SEQ ID NO: 4186410 - RNA, 80 nt, Human
guuaagggugguguaggagaucaaauaaauuauccuuuaacauccagacuauaagauuuugacuucuaccuacccaaagc

SEQ ID NO: 4186411 - RNA, 96 nt, Human
guuaaguauuaggcugaugccaaaguaacugaggccuuugccacuacuuuuaaauggcaaaacucgcaauuacuuuugcaccaaccuaauaauaac

SEQ ID NO: 4186412 - RNA, 129 nt, Human
guuaauaggcagugauucuucaaugcuccuucagugaaguuacagucugcuugcugacugcuaauuaaaacaaguuugcucucuaagacugugacuaaaagguagcaaggucaucuuauuuaaugcaau

SEQ ID NO: 4186413 - RNA, 78 nt, Human
guuaauccuucuugcaacuuaguggcagcucuggcccccacagucuacuugagcuuguauaauucaugaaguuuugac

SEQ ID NO: 4186414 - RNA, 69 nt, Human
guuaaucuaucuagugaaauaguccacuaaugucuuuaaagugguacauuucucaucuaguagaguagc

SEQ ID NO: 4186415 - RNA, 81 nt, Human
guuaaugcuuucauuuuccccagcauuggacagcaagccaaaagcaguauccugcuggaauggaaaaugaaggaaacauac

SEQ ID NO: 4186416 - RNA, 79 nt, Human
guuaauuaaaaacaguguuuuaucaguagguauugucauaaaauuaaaccuuuugagacuuccacuguguauaauugau

SEQ ID NO: 4186417 - RNA, 63 nt, Human
guaucccagcuacucgggaggcugaggcaggagaaucacuugaacccgggaggcugagguugc

SEQ ID NO: 4186418 - RNA, 58 nt, Human
guaucccggcaucuaugucuuccagaacuuggguucuguggcauagugcuugggaaac

SEQ ID NO: 4186419 - RNA, 94 nt, Human
guauccucuuccgagucauauuuagcuuguggaauugcagaacuguccccaguuauuucagucauuccaggagcuaacuguggucucaguuuac

SEQ ID NO: 4186420 - RNA, 84 nt, Human
guauccuuucuugaaauuugauuagcuguguaauuuuuucaucagagaaaugguuacagucugauuaaguuauauaggagauac

SEQ ID NO: 4186421 - RNA, 67 nt, Human
guaucuaucucuuggcugcuagcaggggucaaaugacuugugauauguaaagcacuaaggauaauac

SEQ ID NO: 4186422 - RNA, 123 nt, Human
guaucuccccuguuguuucauuuaguauccuuucucuguccuccucuugguguauauauuuucuaggaaauaagggacaagacaaagggcaaauaguuaagaaaaaaacaccagaugagauau

SEQ ID NO: 4186423 - RNA, 76 nt, Human
guaucucuuggcugaaugcccuggcuggaucugccguugggccuggcucuccagcuggcuucggaaguggagguau

SEQ ID NO: 4186424 - RNA, 56 nt, Human
guaucugaguggguaugggauccuggggucaggcccauguucacuugcucaggagc

SEQ ID NO: 4186425 - RNA, 84 nt, Human
guaucugcauauaaaaucaaggcuagagguuaaaauuuuaaugauaggagauuaaaacuaaaaugccugauuugugcagcuugc

SEQ ID NO: 4186426 - RNA, 88 nt, Human
guaucuggcucaaaguaagcacacaauaaauguugccuuuuaauaguguaguuauuuauuauugugguuacuucuggguaccagauac

SEQ ID NO: 4186427 - RNA, 91 nt, Human
guaucugucuacauguacuuggagugguuacucaagcaaaucuccagugugauugggaugcuggggaccaaucucuguuuuggauagcuac

SEQ ID NO: 4186428 - RNA, 59 nt, Human
guaucuugacuccaugccucaguuucucuaauuaaaugaggacaaaagguuaaugauac

SEQ ID NO: 4186429 - RNA, 99 nt, Human
guaugaaauacaguugcagucauguauacuccaucuccaaagaauggauucauucuucaugucaugguauauugacuauaauuuucuguuuuuaauuac

SEQ ID NO: 4186430 - RNA, 81 nt, Human
guaugaaggcaguucuucucggcugucagauaguuugaccagugucaggcuaucccgacgagagcagcauaccuucauugc

SEQ ID NO: 4186431 - RNA, 56 nt, Human
guaugaggcaggauauuaacuuuuacaagcaaagagggaauguauugccucagcac

SEQ ID NO: 4186432 - RNA, 92 nt, Human
guaugauguacauuuagagcucaauagaacaggacuucuggaauuuuaacaacauaaugagggucuucuuuuuggcuuucuguacaucaagc

SEQ ID NO: 4186433 - RNA, 63 nt, Human
guaugcacaauaugaucuauuuggguuuuuuuccuaaguguaugugaaggugugugugugugc

SEQ ID NO: 4186434 - RNA, 121 nt, Human
guaugcaugaguuuuguauauuccuauguggcuuguuuccacugugugaagcauuuuguguucacccuguguuucauguggacauaguuguacauaagaaaaucucaaaucugugcuauac

SEQ ID NO: 4186435 - RNA, 56 nt, Human
guaugcaugcauguguauguacgcaugugugugcauguguauuuguauguguguac

SEQ ID NO: 4186436 - RNA, 64 nt, Human
guaugcauuuacgguacaacagcaggccacuagaaaagacagcuuguugccucugagaucauac

SEQ ID NO: 4186437 - RNA, 70 nt, Human
guaugcugcaggucaucccugugcuucucugccagcaucugcagauccucauacuugaucuggugcaugc

SEQ ID NO: 4186438 - RNA, 71 nt, Human
guaugcuuugaaucaauuauccaggcuguuggaacuugugguccugcaaucuccaugcuugauuuucaugc

SEQ ID NO: 4186439 - RNA, 56 nt, Human
guauggauggaugaagcaucuuaggacaucuaaagaaagagaucacuccuccauac

SEQ ID NO: 4186440 - RNA, 64 nt, Human
guauggggacucacugacuaucuugagauccagucaucaugugguauugugagauccacuauau

SEQ ID NO: 4186441 - RNA, 75 nt, Human
guauggguguuaauuauuggugaauagaauucaaagucagaaucuuuucuguuaaauauugauagauauucauac

SEQ ID NO: 4186442 - RNA, 76 nt, Human
guaugguuacuacagagagagcuccagugaccuggaguggucuagcuggggaccagcugucucugaguaggcauau

SEQ ID NO: 4186443 - RNA, 59 nt, Human
guaugguucagaggccaugauuaauuaggcaauauccugaauggcucugggaucacugc

SEQ ID NO: 4186444 - RNA, 58 nt, Human
guauguaccuagaugcaaauccugaauaucaugucgcaauuagugcaucuggacaugc

SEQ ID NO: 4186445 - RNA, 68 nt, Human
guauguagggaaugugagauggccuuuagauaucauugccaacuuauugaacauucucgaauucauac

SEQ ID NO: 4186446 - RNA, 74 nt, Human
guauguauguauauguuuaagagaaauuacugaggaaacucugagggccauaucuuuaauauguaaauacauac

SEQ ID NO: 4186447 - RNA, 57 nt, Human
guaugucaccucuccuaagcacagcauuaaaugauugggagaggaaaaugagcauau

SEQ ID NO: 4186448 - RNA, 84 nt, Human
guauguguauauguuggcauguaugugcauuuuuguauguuuauauguauauauaaguguauauauaugaaauauauaauauau

SEQ ID NO: 4186449 - RNA, 71 nt, Human
guauuaaaucucauuuugguuucuacuuaguaucaggugcagcuaauugggaaaugaaugagacaagaugc

SEQ ID NO: 4186450 - RNA, 95 nt, Human
guauuaaauuuuuuuaaagguagaguggaauguccuugaucauaagaacauuaauguuuugauauuuauuugcuuuuauuauuaaaauguaauau

SEQ ID NO: 4186451 - RNA, 59 nt, Human
guauuagaaugcagccaugcucauuauaaaaaauguauugucuauggcuguguuugugc

SEQ ID NO: 4186452 - RNA, 63 nt, Human
guauuagcuagguuaccugggucagaaccagaaaguaggcucccagcagugacccagugauac

SEQ ID NO: 4186453 - RNA, 80 nt, Human
guauuagguuggugcaaaaguaauugcaguacuugccauuaauggcaacaacugcaauuacuuuugcaccagccuaauac

SEQ ID NO: 4186454 - RNA, 84 nt, Human
guauuagguuggugcaaauguaauugcuauuuugguccuacuuuaauggcaaaaacugcaauuacuuuugcaccaaccuaauac

SEQ ID NO: 4186455 - RNA, 61 nt, Human
guauuagguuggugcaacaguaauggcaaaaaccacaguuacuuuugcaccaaccuaauau

SEQ ID NO: 4186456 - RNA, 60 nt, Human
guauuaguuaucuacugcuguguaacaaacuaucccaaaccuaguaguagaaaacaauac

SEQ ID NO: 4186457 - RNA, 74 nt, Human
guauuauaggcacguuguuuaucagaagggcauaaauacauauuauuacuuugaaagcaaugggucuauaguau

SEQ ID NO: 4186458 - RNA, 61 nt, Human
guggagucaggcuugcugagccugguacacggugucagagagcucagagccugaacuucau

SEQ ID NO: 4186459 - RNA, 55 nt, Human
guggagugcaacgguuggaguuuggguaugaauucaaauacuagcucuacuccau

SEQ ID NO: 4186460 - RNA, 58 nt, Human
guggauagaauaagugacugcuucucugagguuugggaggcaauaaaguuuugucuac

SEQ ID NO: 4186461 - RNA, 79 nt, Human
guggauagccaagagcucaccggagagcauuugcagagcuuucuguaaaucuuccaauugggccucuuuuacuguucau

SEQ ID NO: 4186462 - RNA, 82 nt, Human
guggaucaucuugcacaagcucugggaugcagacaucccaaucuggagauucccauccucagcagcagcaucugggauccac

SEQ ID NO: 4186463 - RNA, 93 nt, Human
guggaugagaguaugaaagauugaucaugaauugacaauuguugaaauugugcgauggguacaugagaguuuauuauauaguguucuaucuau

SEQ ID NO: 4186464 - RNA, 80 nt, Human
guggaugaggcagaggaaaugggaauagaugguaugggcagaaucacaugauacaucuuguuuauuucaauucucaccac

SEQ ID NO: 4186465 - RNA, 92 nt, Human
guggauggaugcauguggucccuuaggaaguguguccagaagcggccacuuugcuucuguuucauugaucuuagcuacaugccugcacccac

SEQ ID NO: 4186466 - RNA, 98 nt, Human
guggaugucacauacccuccuggugcaugcuacugucuagaggaggcacuggggccucucaggucacaggauggccaggaauagaugcugucagacac

SEQ ID NO: 4186467 - RNA, 76 nt, Human
guggauguuggaugaccuuguaauuauaauuuuuaggugugauaauagcauuagguuuaugcagcaaaauauccau

SEQ ID NO: 4186468 - RNA, 61 nt, Human
guggauguugugucuacucaugagccaauuguggagcuaugagaacaagaacaaucuccau

SEQ ID NO: 4186469 - RNA, 56 nt, Human
guggauuagcuuuuguucuugacuuggagccaguccuguaucugagcugaguccac

SEQ ID NO: 4186470 - RNA, 119 nt, Human
guggauuauguuguuuuuccucuggauauuuuaguacuugaauuucuuacauaacaaauuguuuauggagcaaggaaacuauggagagauccuaaacuaggggcuacaaagcuguccac

SEQ ID NO: 4186471 - RNA, 129 nt, Human
guggauuauucucuggcauuuuaccuuauuuaccuuagcuguugaauguagauccauaaaaaucagcaugacaauaagccagcagaaagguagagacaaucaggggaaaauguacagagauuuuucaac

SEQ ID NO: 4186472 - RNA, 62 nt, Human
guggauugaaacaguagcucauagaccaaugcuggucugagaacugauuuucacucaucugc

SEQ ID NO: 4186473 - RNA, 97 nt, Human
guggauuuuaauagaauuuuaagaugcauucauggcaguuuaauaagugguuacaguguaaccaucaaauuaggucuguaugaaguuaaaacuccac

SEQ ID NO: 4186474 - RNA, 58 nt, Human
guggcaaauugcaagcaagcuuuuagaauuuuuuauauggaagucuuggaauuuccac

SEQ ID NO: 4186475 - RNA, 73 nt, Human
guggcaaauugugugcugagcugggauccaggaguucuggaccuucaucuuggcucugccacuaauuagcugu

SEQ ID NO: 4186476 - RNA, 67 nt, Human
guggcaauucaguugugucugaccucgaugccccaguguuuaggccaggauagcuuaauuaauccau

SEQ ID NO: 4186477 - RNA, 92 nt, Human
guggcacaaauaaauguguguaacaccaaacugaacagaaucugggguuuuugaagaaaaaaucuuucaguuacaguuacacacagggccac

SEQ ID NO: 4186478 - RNA, 63 nt, Human
guggcacagagauggggcaugaacacccugcagaggggacucccagccucuucucuugcauac

SEQ ID NO: 4186479 - RNA, 59 nt, Human
guggcacuugcuucagaugauguccccaggcaccaugacauagcugcagaagaugccau

SEQ ID NO: 4186480 - RNA, 65 nt, Human
guggcagacgcccccacacacgcucccuucuagaugaauaugaagaaagcagggcauuuugccau

SEQ ID NO: 4186481 - RNA, 56 nt, Human
guggcagagcaggagacaggaccaggcauccuggcguuugucugaacuccugccac

SEQ ID NO: 4186482 - RNA, 82 nt, Human
guguuccucagucuuuuugauaucaugaugaacagauuaaguugauguguucaucaugauaucagguaagcuggccgaagac

SEQ ID NO: 4186483 - RNA, 96 nt, Human
guguuccugacuuucucugugcuuauuguucagauagagaugauuauaauuucauuuguauuuaacgguaagucuuccacucucuagucugaacau

SEQ ID NO: 4186484 - RNA, 119 nt, Human
guguucuaaaggagguugcccagaugucucuaugacagugggucuugcaaagagagaaauguucuauguucagggccacauuguugcaugauggaaaaccaacucuuuccuugacucac

SEQ ID NO: 4186485 - RNA, 84 nt, Human
guguucuaauagaaggagguagugaaaugauaacagagcaguaggggauauuccuacucauuucaguuucuucucauagaucau

SEQ ID NO: 4186486 - RNA, 68 nt, Human
guguucugucugagcaccacaggauaucauaugugaguggcuuccaguggguugcugagggaggggac

SEQ ID NO: 4186487 - RNA, 64 nt, Human
guguucuugccaaggccaacauuuucauguucacucuguuaaaugcugugucuagcaggaacac

SEQ ID NO: 4186488 - RNA, 87 nt, Human
guguugacaggaaaaaguuuaggaugaaacacuguguucaguacauaacacuacaguugcagucuugucacuaauucuuguaaauac

SEQ ID NO: 4186489 - RNA, 106 nt, Human
guguugaggaggaaaauggguaguuccuggcgacugacugcagcugcagaagggaaagaacuggagucuccccaggagcgugacugugacccgcuccucucaauuc

SEQ ID NO: 4186490 - RNA, 66 nt, Human
guguugauagagacauucaaccucagauuaccaauucugucacaaccgaauguuuguauucagcgc

SEQ ID NO: 4186491 - RNA, 62 nt, Human
guguugcugaaaacaggucaucaggaacuguuguuuuccuggccauuugaacuucagaccac

SEQ ID NO: 4186492 - RNA, 66 nt, Human
guguuggauaugcaucuuugaauaguuguacggauacacacaaauuuuaauuugcauguaugacgc

SEQ ID NO: 4186493 - RNA, 55 nt, Human
guguuggccaccuuauggcuauuggauuaggucuggcucauaggaaggccauugc

SEQ ID NO: 4186494 - RNA, 62 nt, Human
guguuggcuuugguuuuuauugccaggaauggucauggccacauuggaccgaagcuuaaggc

SEQ ID NO: 4186495 - RNA, 114 nt, Human
guguuguagguccaaaguuguauuggagaccagcuguauacaagucguguaaacuuuauugucugaggacuucaucaccuguauaaaggcccucacaguacggacugccaacac

SEQ ID NO: 4186496 - RNA, 59 nt, Human
guguuguguuucccuugcauauucccauucuuaaggagggguuuuugggagcauaacac

SEQ ID NO: 4186497 - RNA, 78 nt, Human
guguuguuugaagcaauuaaguuugugaucuguuauagccacaguagaucaaaaacuuaauggcuuuauaccugacau

SEQ ID NO: 4186498 - RNA, 95 nt, Human
guguuuaaucuaugcccagcacaguguuagguaauuugaugaaaguauuucauuuaaucaccaagugacccugugaaggauguauuauuaaacac

SEQ ID NO: 4186499 - RNA, 74 nt, Human
guguuuaauuugcuuguccuggugacuguccguugacucuaagagcagacagagaucagaggcauaagcagcau

SEQ ID NO: 4186500 - RNA, 72 nt, Human
guguuucauugaaguuuuacauccucuccaaaacuuaagguguuuuaguuaguggggcugucagucuagcac

SEQ ID NO: 4186501 - RNA, 67 nt, Human
guguuucuggcauugcuuuggugcaguggcuuuccaauugaugaccacagcccacaguaagaaauac

SEQ ID NO: 4186502 - RNA, 116 nt, Human
guguuugaauuuauggguugggcuagugacaguugacagagccuuccuauagagacacaggauucuccaucaccacuggcacuuugccccuaggaccacaaugaguaucaaaccac

SEQ ID NO: 4186503 - RNA, 58 nt, Human
guguuugaugcccugugguuuuucucucacagagaccacaguccagucaucauggcac

SEQ ID NO: 4186504 - RNA, 76 nt, Human
guguuugcaagaacaggcaguugguuggauuuggcccacaagccguaguucacugaccccuguuuuagauaaauac

SEQ ID NO: 4186505 - RNA, 76 nt, Human
guguuugcaggggcuggcucuguuucuggcuuugccuauuggcuucauccuaaacaggcuauuucuuuacaaacac

SEQ ID NO: 4186506 - RNA, 55 nt, Human
guguuugcuguucagguugcaugaagggcaaucuuuagcaaccugucagagaugc

SEQ ID NO: 4186507 - RNA, 75 nt, Human
guguuuggguguacacguggccaucuuuacacauauggggucuuggugugaaaaugucacugugcagaucaaagc

SEQ ID NO: 4186508 - RNA, 63 nt, Human
guguuuguggggagggagggaaucuuugagacacugucaguucucaguccugcccagggaggc

SEQ ID NO: 4186509 - RNA, 80 nt, Human
guguuugugucugugcacacgugcccaacaguuauauaagguguacauaaacuacuguagcacauugcauauauaaacau

SEQ ID NO: 4186510 - RNA, 59 nt, Human
guguuuguuggaaaagguguccugcccauacugaggugagacccuaauuuagcaagugu

SEQ ID NO: 4186511 - RNA, 61 nt, Human
guguuuuacccauguugagaauaggcagacaauaugacaucugggcuuggguagaaaucac

SEQ ID NO: 4186512 - RNA, 69 nt, Human
guguuuucacauguguggcagugcaaguaaauaacacauuauuugacugaaucaggcaugauacugcac

SEQ ID NO: 4186513 - RNA, 70 nt, Human
guguuuugcaagaggaauucuagaagcaaucucuuuaaugaaugcuauuuggcacuuuugaccugggcac

SEQ ID NO: 4186514 - RNA, 82 nt, Human
guguuuugcaguagagcuuuaaaucaauccagugagaggacuguucuacuuauaagaucugauugaaaugcuuuccuaacau

SEQ ID NO: 4186515 - RNA, 81 nt, Human
guguuuugcucuguugugcaugugggauacaggauaaggauuauaguaccugcaauuccauagaaauuacagaagaaagac

SEQ ID NO: 4186516 - RNA, 84 nt, Human
guuaaaaagggauuaauaacaggguugauuugcaauagaguccaaacucacauugcuuugacucuuuguucuuauucugauaac

SEQ ID NO: 4186517 - RNA, 86 nt, Human
guuaaaaauuugaagagaaaugcacacauuugguacugaaaaugaacuuauuuuuaaagaccaguuugcacuuuuuagacaagagc

SEQ ID NO: 4186518 - RNA, 84 nt, Human
guuaaaaugcauauuuccaggccccacucuagaccuguugaauucaaaucucugaggaugaggcccuggaaucagcauuuuagc

SEQ ID NO: 4186519 - RNA, 78 nt, Human
guuaaauacuuuacaggaugucucagacccuugcuuaaguuuauuuucauugguggagacuccuuggggcuauuucac

SEQ ID NO: 4186520 - RNA, 60 nt, Human
guuaaauggggaugaguagauggaacuauuugaaagugccaauauuuaacccgauuuuac

SEQ ID NO: 4186521 - RNA, 72 nt, Human
guuaaauuacaacuguucccacugucuguaaauaauugcuuaggacagaaaauacaguccuguauuauugau

SEQ ID NO: 4186522 - RNA, 79 nt, Human
guuaaauugcuauggcuuuuaaggagaucugauaaaaaggaaguuagauuauuuaaacuggccaaacguaagaauuagc

SEQ ID NO: 4186523 - RNA, 75 nt, Human
guuaacaugggugcacuuuguugucauugaugccuuagguuaguaucacugagacaacuguguuucuaacuggac

SEQ ID NO: 4186524 - RNA, 66 nt, Human
guuaagaaucaagacuuaucuuuggggucuuuaaauguaugccaagauucaucuuguauuuuuaau

SEQ ID NO: 4186525 - RNA, 89 nt, Human
guuaagaaucuauucaggcagagugcagcagguaaaucucuaagacaaauaacagugcugucuccuggccugaauaucaauuucuugau

SEQ ID NO: 4186526 - RNA, 61 nt, Human
guuaaggagaaggcaucauucaaguguccacagcagugaaaagaugcauuucucugagaac

SEQ ID NO: 4186527 - RNA, 103 nt, Human
guuaaggcaagaaccagccauuuucacuucuuuugugauucuucacuugcuucaggccaucuggauguauacgugcaggucacaggggauauguugucuuagc

SEQ ID NO: 4186528 - RNA, 88 nt, Human
guuaaggcuauuuucacuuguggaucuucaguugcuucaggccaucuggauguauacgugcaggucacaggggauaugauggcuuagc

SEQ ID NO: 4186529 - RNA, 67 nt, Human
guuaagugguuuucucauugaacaaauguuaagcacugacauaaaccagugagcaaaacugcuuggc

SEQ ID NO: 4186530 - RNA, 67 nt, Human
guuaauauuagguacaugucugaaguaucuccaaucauggaaauucuccagaccuugugacuaugac

SEQ ID NO: 4186531 - RNA, 61 nt, Human
guuaaugagaggcuugacuaggacugaaugauccaguuuagacauggcuugcucacuuggc

SEQ ID NO: 4186532 - RNA, 78 nt, Human
guuaaugagugaguccaagguucauggcacagauggugccuucacgcucuugucagaagccucgaaauauguauuaau

SEQ ID NO: 4186533 - RNA, 62 nt, Human
guuaaugcuuugucagccuaagggcauucuuuaaugcacugaaaggaaaccagagcauaaac

SEQ ID NO: 4186534 - RNA, 66 nt, Human
guuaauguaagggcuuuggguuuuacucugcaaaagaauggagcucuggaaguucuaagcagaggc

SEQ ID NO: 4186535 - RNA, 126 nt, Human
guuaauuacuggacccaaggaaguaccaaaaauuguggggcugaauacucuggcugcugugacucaaauuccuuggaauucacccuuaauuuucuuggauuuuucuuuugguuaaaaaaaauugac

SEQ ID NO: 4186536 - RNA, 77 nt, Human
guuaauuaguuccuuuuuaagucguugugguaaauuuggcuguaugcaucuuacguuuugaaagggaugggauuaac

SEQ ID NO: 4186537 - RNA, 67 nt, Human
guuaauuguuacacuguaagaacuccacaaacuugaucagagaggugaguagcagugugacauugac

SEQ ID NO: 4186538 - RNA, 67 nt, Human
guuacaaaggcuucaucucagagcagggggcaggcucugcucauuguucuggagagguguuugggac

SEQ ID NO: 4186539 - RNA, 61 nt, Human
guuacaaauguaaauucuggggccucacuuaggccuauugaauuagagucugcauuuuaac

SEQ ID NO: 4186540 - RNA, 100 nt, Human
guuacaauaaucaaaaguacucugaagagcuaaaacuggugauuugaauguuuguagacucuagauuaacaguuuuguugaagagugugguuccaguagc

SEQ ID NO: 4186541 - RNA, 81 nt, Human
guuacaccagaaucucuguggggacucccugggggcauccccagguuuuaaaugcuuccugaggugauucuaauguguagc

SEQ ID NO: 4186542 - RNA, 69 nt, Human
guuacagacaggaaguucagaagaaaugagccagucccuuuuauuucuucuuccucuuuugucucuaac

SEQ ID NO: 4186543 - RNA, 96 nt, Human
guuacauaaccuauagagaaauuucagggagucauuuacacacuccaaaauauggaaugucuaaaaaacuccuaggagagagauguggggugugau

SEQ ID NO: 4186544 - RNA, 75 nt, Human
guuacauauagacaguuacucuagugaagcaaauuaggaaagcuauugucuugguguagcuuguuuauaugugac

SEQ ID NO: 4186545 - RNA, 59 nt, Human
guuaccagcagccuuucccgcacagcacagcgcucagccuuugaagggcugcagggcac

SEQ ID NO: 4186546 - RNA, 84 nt, Human
guuaccuccugcaugguugugcuauugcccccagacuucucccuggcccucaaucuuguucauaaucaugcaguagagaguugc

SEQ ID NO: 4186547 - RNA, 78 nt, Human
guuaccuucccuaguacugaacuuaaaaauccccugggaaaguuaggauggaaauuuacaucagugggggaaggagac

SEQ ID NO: 4186548 - RNA, 76 nt, Human
guuacuaaguuguguuuuguguucaaaauaguauauauaaauacauguuuuguguacagaauauuuaaacagugau

SEQ ID NO: 4186549 - RNA, 64 nt, Human
guuacucaggcuggagugcaguggcuauucacaggugagauccuggugcacuacagccuggaac

SEQ ID NO: 4186550 - RNA, 86 nt, Human
guuacugucuucccugucuuugugcaccccugggggguuacccaaguucauuucuagcagguggauuuagacgggaguuacuuaac

SEQ ID NO: 4186551 - RNA, 59 nt, Human
guuacuguguguauauccucaucuguaagaaauugagacauaggauuccacauagcaac

SEQ ID NO: 4186552 - RNA, 80 nt, Human
guuacuguuaagauuuauuauagcauguguagauaaauauauuucaguuuucacaucuauaacuuagauaacacgguagc

SEQ ID NO: 4186553 - RNA, 80 nt, Human
guuacuucugaguuguuuugcuuuuuuuggacauggacuuucaacuucuaauucauaaugacaaacauacucagugugau

SEQ ID NO: 4186554 - RNA, 57 nt, Human
guuacuugggacagaaagaaugacccagagcccuggaacaaacugggucccaaugau

SEQ ID NO: 4186555 - RNA, 62 nt, Human
guuagaaacgcaggcucuccggguuuguccuggaccuauugagcuggagugugcauuuuaac

SEQ ID NO: 4186556 - RNA, 60 nt, Human
guuagaaaugcagaaacuugaccccaccccaaauggcugagucaaaaucugcauuuuaac

SEQ ID NO: 4186557 - RNA, 67 nt, Human
guuagaagauuggcagcuuaacuguccauuuuuaucaguuaggaaacaaaccugccucuucuuuagc

SEQ ID NO: 4186558 - RNA, 96 nt, Human
guuagaaguccagcaguggucucucucugggcuaaaaucaaggugucggcaaggcugcauuccuucuggagcccggggagcccacaguuuccuagc

SEQ ID NO: 4186559 - RNA, 84 nt, Human
guuagaauggcgacacagauaauuuaguuaaaacguaucuuuaaccuuuuuuuugcaugcgugauuaaucugugagucucugau

SEQ ID NO: 4186560 - RNA, 88 nt, Human
guuagaauggggaucgagauuuauccaagggagcugacaaucuguauaguaccuuugcauggauuuuuuaaaaggccccucucuggac

SEQ ID NO: 4186561 - RNA, 81 nt, Human
guuagacuucuagaaacggcaaccgugcagaugucugggaacccagaaaucagcaaaaaugccuucagaacuccacuuaac

SEQ ID NO: 4186562 - RNA, 67 nt, Human
guuagagauacauuuguagcuugaagaguugcuuauuugauaaguuaucggaguguguuucaaagac

SEQ ID NO: 4186563 - RNA, 69 nt, Human
guuagagggccugcugcuaugacuuccuggggaagccuuccacagggaauccagcaggagguugcugac

SEQ ID NO: 4186564 - RNA, 65 nt, Human
guuagagggcugccuuuuguuuaaauaagaauaaaaauaauaauuggcuaccucagcccacugac

SEQ ID NO: 4186565 - RNA, 58 nt, Human
guuagaggugucaggagcacagguuucagagucaggcugcuuguguucauaccuuagc

SEQ ID NO: 4186566 - RNA, 61 nt, Human
guuagauaagaguaggccguaugauccuaucuagaagacggcaugccugcugguaucuggc

SEQ ID NO: 4186567 - RNA, 91 nt, Human
guuagauauguacauuucugggcucuucccagauccagagaugucugaaguucuggguuugaaguagagcccaagaaucuuuguguuuaau

SEQ ID NO: 4186568 - RNA, 61 nt, Human
guuagaucacauguagaguagggggcucauuucuaaccacuacuuuacagagaagacugac

SEQ ID NO: 4186569 - RNA, 74 nt, Human
guuagcagaguccagaaaacagugugcucccugaugaaaaggccacggucacugucuucugggcucugccuggc

SEQ ID NO: 4186570 - RNA, 94 nt, Human
guuagcaugggccuaaagucgacaaauuucuaagccuuuggauauguaguugcuaaauuguuuucuagaaguuguaauaauuuaggcuccuggc

SEQ ID NO: 4186571 - RNA, 59 nt, Human
guuagcaugguguagugugauuuaguguggugucugcaugguguuugcaugguguuaac

SEQ ID NO: 4186572 - RNA, 68 nt, Human
guuagcgggaggccucaguaccuugcuuugugauucucuccauagggcugcugggguauccucauggc

SEQ ID NO: 4186573 - RNA, 78 nt, Human
guuagcugccaaaauuauuccugauuuuaaaagaagaggugaaagcuuaaauaauuugaaacaggugauucagcuaau

SEQ ID NO: 4186574 - RNA, 80 nt, Human
guuaggaagauuuuucuuaaugcuccgagugggaggugaagauagacccaacuggaacaguauugggagagaucucuaau

SEQ ID NO: 4186575 - RNA, 89 nt, Human
guuaggauacauagaucuuugcagggugcugacuagguggaagagccguuccuuuggccaaauacacaccuuuugagaauguaucagac

SEQ ID NO: 4186576 - RNA, 60 nt, Human
guuagggaaggcugcugucagcuuugugguuuagaguagacaggaaucuccuuucugaac

SEQ ID NO: 4186577 - RNA, 66 nt, Human
guuaggguuagguguagucuagggaaggaaacaaggauuccgugagagcugccacgugaccaugac

SEQ ID NO: 4186578 - RNA, 57 nt, Human
guuagguagaggcacauuucagauuuagacuaaggugcaaauggcuuucuacuuaau

SEQ ID NO: 4186579 - RNA, 130 nt, Human
guuagugacuuuuuuaagagcacauuaaaugcagagguaauauagaauaaugggaaguucuggauugacagauagacauauauucugauuccaucugugucauuaauugcuguugggaaugucacuuaac

SEQ ID NO: 4186580 - RNA, 91 nt, Human
guuaguggcuaugcuuaugggcuugcugauuugggcaggauuacuguucagucccuccuucauggguaggcccacuuuggcuugccaagac

SEQ ID NO: 4186581 - RNA, 60 nt, Human
guuaguggcuccuauuggguuuugagccaccccaggcuuuccucaccuggaggugcugau

SEQ ID NO: 4186582 - RNA, 95 nt, Human
guuaguguugcugugcauaugucuugaggucucaucugaaguaaguuuguguaugaucgaagauuucaauggauauugcaagguaacuaauuaac

SEQ ID NO: 4186583 - RNA, 94 nt, Human
guuaguuaggccaacaguacauagaucucuacccucagaucuauuccuucuacaucuaucuuaggguagcuuauauugcucuugugucugugac

SEQ ID NO: 4186584 - RNA, 67 nt, Human
guuauaacgagaaauuugucuguuccauggguacacuugcccaugcaguaaauguucuaguuuguac

SEQ ID NO: 4186585 - RNA, 67 nt, Human
guuauaaugauaaugaugggcacuaguggaauaucugccagaaggucauuacaauuaucauuuuaau

SEQ ID NO: 4186586 - RNA, 87 nt, Human
guuauacaaaacaaccacuucaucucuacagaaucuuauuauuggaauauaugauuguaaguuucuauagagggugggaaguauaac

SEQ ID NO: 4186587 - RNA, 90 nt, Human
guuauacaaaucgcacucacuugcuuucuuccuguugcacagcauacaacuggcaggaucuuugagagugaagugagguaucaguguaac

SEQ ID NO: 4186588 - RNA, 78 nt, Human
guuauacuggaaagcucuggaauggaaauaugucauaucuacuuuauguucucuuaauccggugcuuucugugguugc

SEQ ID NO: 4186589 - RNA, 86 nt, Human
guuauagcuaaggaaaguaauguucaaacaaguuaaugccacauagcuagugucagcaucagguugucugaauucacagcuagagc

SEQ ID NO: 4186590 - RNA, 91 nt, Human
guuauaucuggccugucuagcuuucccaauguucucugauuacuauuucugagaacauugggaaagcuaugguagcuuuaagguagguaac

SEQ ID NO: 4186591 - RNA, 124 nt, Human
guuauauuuaaaauaaucucuagugcuuuucuaaucaaguugagagucuuuuugcaauuuuauaaaagugauuuggcaauuugacaaaguaggucaucaaagcucuguuuccaaaauauguagc

SEQ ID NO: 4186592 - RNA, 80 nt, Human
guuaucaaaugguaccaugagaugccacuaaugucgaguaaacaauuggaaauggaucucaugcugugcccuugugggac

SEQ ID NO: 4186593 - RNA, 66 nt, Human
guuaucauagcuagauaccuuauggaaaugagugaagcauuucuaaguguauugagcuuggaagau

SEQ ID NO: 4186594 - RNA, 76 nt, Human
guuauccagucugugcaguaaagagggugcuggggcccagaccccagcccugaacccugcugcauggacuccuggc

SEQ ID NO: 4186595 - RNA, 78 nt, Human
guuaucccuugaauaccuagugggaugauagauuucuuuauuaggaauaaaucaauccuauugguagucagucaugac

SEQ ID NO: 4186596 - RNA, 82 nt, Human
guuaucucaaaucccacucagaaacugccauugucaugcaacaauaggccacaauauuuugguaggaaaauuagagauguac

SEQ ID NO: 4186597 - RNA, 83 nt, Human
guuaucuuccuuuucagacacccaguucagguacuccgaucauaaaaugugaguucugaagaacugucuagagaaccaauagc

SEQ ID NO: 4186598 - RNA, 58 nt, Human
guuaugaacucugggaacugcgcugugccagaaaagugcuucccaagguuucaugugc

SEQ ID NO: 4186599 - RNA, 68 nt, Human
guuauggcuucucagucaugaaaagcucaguuauuuggggucuacauuuucucacugagagccuugau

SEQ ID NO: 4186600 - RNA, 57 nt, Human
guuaugguuuuaguugaaugauaagugucauaaucuugucuaaacuagucccauaac

SEQ ID NO: 4186601 - RNA, 92 nt, Human
guuauguaguugcuugucucagcagaggcaguauucaguaguggcuaagagcauaggcuaauucuguuucugccacuuaguagcuauguaac

SEQ ID NO: 4186602 - RNA, 67 nt, Human
guuauguauugagaaccugcagcauuaugucugauacugugauaaaugcuggaaauucaggcaugau

SEQ ID NO: 4186603 - RNA, 79 nt, Human
guuauguggcaaggcugugggggcagagcugcuaugaaaacagaagucucuggaguucucucucagccugcugugucac

SEQ ID NO: 4186604 - RNA, 129 nt, Human
aaaaugacucuauuuuauaucuugaaaugugugcagcagagaauccaguuagugugugaaauuuguauuuuuaaauacuaaaacuacuaauuguauaguugauguaauuuuaagaaaaucagucauuuu

SEQ ID NO: 4186605 - RNA, 69 nt, Human
aaaaugaggccagaucaugcagagagggcccuggcggccaagagauuuuugauaguuuggauuuauuuu

SEQ ID NO: 4186606 - RNA, 87 nt, Human
aaaaugagguuauccacuuuccaaaggacaaguuucagaauaagacuugaggccacaugaauucuuggacaguauuuuacuucuuuu

SEQ ID NO: 4186607 - RNA, 87 nt, Human
aaaaugcuucauguauaaggaauuuagaauagggaaaauauauuagguauucguugugcucauuuuccggcaguacagaagcauuuu

SEQ ID NO: 4186608 - RNA, 70 nt, Human
aaaaugggccaggcugcugacugcuaaagaaaaacacaaauuggguacauagcaggauuugguuuauuuu

SEQ ID NO: 4186609 - RNA, 84 nt, Human
aaaaugucccauuugucaaacaaauuaccaaacuggagguacaugagccugcagauauauuuuauuuggucaaugguuuguuuu

SEQ ID NO: 4186610 - RNA, 60 nt, Human
aaaauguuaggcaucuucugguuucauuugccagagauuucuuuugaugccugucuuuuu

SEQ ID NO: 4186611 - RNA, 93 nt, Human
aaaauuauaacauuuccugauauagaagucuagaacaagagacaugaacuaugaaacuuauucaguuucuacccuuggaagugucauuauuuu

SEQ ID NO: 4186612 - RNA, 58 nt, Human
aaaauuauuaccuugggagguuguguucauuagaacauucucauuuggugaucauuuu

SEQ ID NO: 4186613 - RNA, 89 nt, Human
aaaauucuuagagcacaguauaauggucuuagauagugaucgaauuuacacuguuaucaauugaucauuuacuuguucuggacuauuuu

SEQ ID NO: 4186614 - RNA, 61 nt, Human
aaaauugcuacuguaccaucuccauauugguagaagucaauuagaggcagcuagcaauuuu

SEQ ID NO: 4186615 - RNA, 60 nt, Human
aaacaacucaacuucuaguuguuaacuguguguuaauuaguggaauaaguuaaguuguuu

SEQ ID NO: 4186616 - RNA, 98 nt, Human
aaacaaguccugaaugcuagaggauguucuaggcacucaugaggucuucccuuaugacucauguuugucccugacauccucucccauuuaucuuguuu

SEQ ID NO: 4186617 - RNA, 61 nt, Human
aaacacagcauguccuuggggaaggagugaacagaccacaucucuaacacagcuuguguuu

SEQ ID NO: 4186618 - RNA, 98 nt, Human
aaacagaaugcuaaaggaaggaauguggccacuuuuuucugggcauacaauuagucuagucaauagaggucacacuggaccaagcauuugagauguuu

SEQ ID NO: 4186619 - RNA, 109 nt, Human
aaacagagaaggaggcaaucagugugagaggaguuacuauuuccgaggccuggccuuuggcgcucgggucuccuccucuuauacccuuuugcugcuuugaaaucuguuu

SEQ ID NO: 4186620 - RNA, 69 nt, Human
aaacaguaggaagagcuugcuuguuuuaacagaacauuuauuuguacacauuaagcucuuuagauguuu

SEQ ID NO: 4186621 - RNA, 71 nt, Human
aaacagugauguugaguguaaaagcuugcacuugaaauaagcacaugaaaaaaugcucaacaucauuauuu

SEQ ID NO: 4186622 - RNA, 64 nt, Human
aaacauaaggcuguuccaggguuuaugcuucccccaagguagcuguuucacaacagccguguuu

SEQ ID NO: 4186623 - RNA, 94 nt, Human
aaacaucacaucugacauuugaguugagacucuuuggguaaaguuaauuaauucauuuagguauucacuuacuugucagguauagauuaaguuu

SEQ ID NO: 4186624 - RNA, 60 nt, Human
aaacaucuugguucaauuucuucauuuucacgaugaugaaacuaggaacuagagaaguuu

SEQ ID NO: 4186625 - RNA, 67 nt, Human
aaacauguagugcaugaggaucuuccugugcucuuuauaaucugagauucugauguuucuauuguuu

SEQ ID NO: 4186626 - RNA, 64 nt, Human
aaacauuugcaacucgguuuggggguuucaacaaagugccacuuaaacuugacaggcaaaguuu

SEQ ID NO: 4186627 - RNA, 77 nt, Human
aaaccuccaucacacauucuguccucaucugccccaaggguacccccuggaaggagaugggacauguacaaggguuu

SEQ ID NO: 4186628 - RNA, 58 nt, Human
aaacgcccgugguugccaagguagcacuuucuuguucuuuucauuuccucggguguuu

SEQ ID NO: 4186629 - RNA, 66 nt, Human
aaacgugaugggaggguggaaaggcucugagcacucacucagcgucucggccgucuccaggcguuu

SEQ ID NO: 4186630 - RNA, 74 nt, Human
aaacuauuucugguguguuagagcucagggcagcauuugccaaugaugcuuugauauguacuggcaauauguuu

SEQ ID NO: 4186631 - RNA, 78 nt, Human
aaacucuaguccuugcagcucuguaugcugauuauuugaccucagaggaucuaggaaacagggcugaaacucagguuu

SEQ ID NO: 4186632 - RNA, 91 nt, Human
aaacugcacguucccagcgcuuuccuccccgccccuuuccuggguuuucuguuuacugggauguggagaggaagugcaaacucuguaguuu

SEQ ID NO: 4186633 - RNA, 63 nt, Human
aaacuuaguagucauugcuuugaccuucaacacugguugucagguuacagugauuauagguuu

SEQ ID NO: 4186634 - RNA, 90 nt, Human
aaacuugaggagaaaguuaucacaaaauugagacuugccaagaauguaccuuauuuguuguaauuuuugaaagauuuuugcuucagguuu

SEQ ID NO: 4186635 - RNA, 94 nt, Human
aaacuugcaaaacaauuauauauaaaaucagauauggauauaugugugcauugugcauugacaauguauuuguaucuguauaaguggcagguuu

SEQ ID NO: 4186636 - RNA, 56 nt, Human
aaacuugcuggcacguguauggaugagcauucucacuccugcaaaaggacaaguuu

SEQ ID NO: 4186637 - RNA, 60 nt, Human
aaacuuuguucgucugauguggaaaauuaugcaguuucccaaggcaggggaucaaaguuu

SEQ ID NO: 4186638 - RNA, 57 nt, Human
aaagaaaacuguuuaggcugcacucaaaggaucagguguggucaacaggauuucuuu

SEQ ID NO: 4186639 - RNA, 130 nt, Human
aaagaaaacuucuccuuaucuacuauuuaguuauuuaagauuuguagagaaaaagcaaaacaaauguugggcucuuucuauuuugcacugguuuucaaaacaauaaguugguuaggagaugauguucuuu

SEQ ID NO: 4186640 - RNA, 60 nt, Human
aaagaaaaucugugaaagugugucuuaucauggacgggacaggcuuuuacggauaucuuu

SEQ ID NO: 4186641 - RNA, 59 nt, Human
aaagaaagugggcuucugucccaaacuggcugccaacaggacaauuguucauuuucuuu

SEQ ID NO: 4186642 - RNA, 99 nt, Human
aaagaaaugaaggaaaugaagucuauuaacugauuucuuaacccaaaaaagagagaagaguuagaaaugguuuauaguuuaauauccuacagucucuuu

SEQ ID NO: 4186643 - RNA, 78 nt, Human
aaagaagaggguaugggaggggugccuggaugaggagagaucagaauucucagcugguguuucuucuccuucuuuuuu

SEQ ID NO: 4186644 - RNA, 77 nt, Human
aaagaaggcugaagaagauccguuuucuguuugauaggcucaaaccaucauggcagggcuucuguuuaguuuuguuu

SEQ ID NO: 4186645 - RNA, 74 nt, Human
aaagaaugcuacuugacucagcucauuggucaaauuagaauguaacccagcuggaugaguuuguagcauuuuuu

SEQ ID NO: 4186646 - RNA, 73 nt, Human
aaagaauuucauaucccuguuuucggugugcugugucacuguuugccauggguaaagguauaugaaucucuuu

SEQ ID NO: 4186647 - RNA, 71 nt, Human
aaagacaauuacauuagcaaacaucuugguguucuuuuuucagaacacuaagauggcuguuguuuguuuuu

SEQ ID NO: 4186648 - RNA, 91 nt, Human
aaagacaggcuggaacucuuaggcacaggcagaaguugcaguucacaggugaaauuuguucuuuauccuggaagccugggcucugcucuuu

SEQ ID NO: 4186649 - RNA, 96 nt, Human
aaagacauuuucacaguguagaaaauuugagguugauagauguguuaauuaauuaauuaaauucuacaacuucaaagauguuauuugaaugucuuu

SEQ ID NO: 4186650 - RNA, 80 nt, Human
aaagaccaucacaagaacaacugcuuuaaaagcaccgccuuuggugcuguugacuuuguuguucuuaucaagauguuuuu

SEQ ID NO: 4186651 - RNA, 74 nt, Human
aaagacucugcugacuaguugacuaucugaaaugcacucagaaagaaaauauagaacuauuagcaauaguuuuu

SEQ ID NO: 4186652 - RNA, 129 nt, Human
aaagagaaugugcaaaguaugauggcgagaaagcaaauguuauauucagggauacuuguucugugaacuuaguaguuugagauuuuccuaaauauaauguuuacaguguuuuuauauuaaugauuuuuu

SEQ ID NO: 4186653 - RNA, 57 nt, Human
aaagagacaccaaagacucuagccucuagggaaauaggucuguugggguggcuuuuu

SEQ ID NO: 4186654 - RNA, 110 nt, Human
aaagagaggauaccgugcaauagaggaaggcugagagcaacgugucagagagccaaagaaaaauuuugccaucuuacuuuaggcuggucuuuugcauauauucauuuuuu

SEQ ID NO: 4186655 - RNA, 73 nt, Human
aaagagaugcacauacgucaguggcugucauccaaauggaaauaugaacacaucugcgugugucucucucuuu

SEQ ID NO: 4186656 - RNA, 58 nt, Human
aaagagcaagcuguuccugagaauucauuuauuugcuuccaggaugcugcugcuuuuu

SEQ ID NO: 4186657 - RNA, 85 nt, Human
aaagagccugauucucuucauauggcaaaggcacauauucguauuuaugaaucuuaccauuuggggcagagcuucagggcucuuu

SEQ ID NO: 4186658 - RNA, 56 nt, Human
aaagaggauggaguagucagcuccuguuuugcugucagcaacuuuuccaccuuuuu

SEQ ID NO: 4186659 - RNA, 110 nt, Human
aaagaggaugggcuuugcaaacagaagggguuugcacacagccagugaguggcaaauucuacuuuugccgcucacuagcuguguggcuuggagcaaguuacagucucuuu

SEQ ID NO: 4186660 - RNA, 91 nt, Human
aaagaggugguguacagaaaggccacugcaagggaagguuggcuuauuuuaaacuucucugaagugaccuguucauggauucauucucuuu

SEQ ID NO: 4186661 - RNA, 55 nt, Human
aaagagucuggcguuuuaauggagagguucuacucaccaaccuugccaguucuuu

SEQ ID NO: 4186662 - RNA, 130 nt, Human
aaagauaacaguaugcaccuuuuuuuguguguguggguuuuaguguggaccgggaccuuugcuacacacuuuacucucauuaucuuacuagaaccucacaacaauccuaugauguaccuguugauuuuuu

SEQ ID NO: 4186663 - RNA, 64 nt, Human
aaagauacacaucuauuuaagagacagagcauuaaacuuuguaauugaucauguguguauuuuu

SEQ ID NO: 4186664 - RNA, 107 nt, Human
aaagaucuugaggucacagaaaaggucaaaauggaggcacagcugaaucaauccacuuauucaacccaaguucuccauuuuccuccaauuucuggaccuaauuuuuu

SEQ ID NO: 4186665 - RNA, 88 nt, Human
aaagaugacuuugaauuaacgacacaagugaauaucugaauucaauuugaguuuguaauucuuccaaguaaaacagaguuuaaucuuu

SEQ ID NO: 4186666 - RNA, 130 nt, Human
aaagaugaugaggcaggaauuaauaaagaaaugaagucguguguguuugguugccugucagagggcacacaauuucauaaacaccaugccuggacaauuugauauuaauauuuaacaccucugcaucuuu

SEQ ID NO: 4186667 - RNA, 69 nt, Human
aaagauuuugacaccagacuuuaaucauagcugauagguccaugacaguacuggugacaauacauuuuu

SEQ ID NO: 4186668 - RNA, 58 nt, Human
aaagcaauagcaacaacuuuacaggccuuugggcaaugucauaguagugcuauucuuu

SEQ ID NO: 4186669 - RNA, 66 nt, Human
aaagcacuauagccaaauagccccaggaaccucuccuucuuugauucaauugguuguggaugcuuu

SEQ ID NO: 4186670 - RNA, 57 nt, Human
aaagcacucuauccuuuguagaauggcauauccugauuuucuaaaggaaagugcuuu

SEQ ID NO: 4186671 - RNA, 77 nt, Human
aaagcacuuuuauuuugaauuaagggcuaauagaauuguccucuuaaaugagcacuugcaagauuaaaaguugcuuu

SEQ ID NO: 4186672 - RNA, 60 nt, Human
aaagcaguauaguggaagggcuggggcuauaacguugacguccuaacacuaguacucuuu

SEQ ID NO: 4186673 - RNA, 121 nt, Human
aaagcagucauaauacagagcauguuuucuuugaaaguguuuacuugggaacuguacuaaucuauuaacuugaacuguucuuuguucuuucuagagggaacacuucuuauuuuucuuuuuu

SEQ ID NO: 4186674 - RNA, 94 nt, Human
aaagcauuaggucagucccauggguccuugcuggcuucaaaggaguggccucuauuugaucagugagggcagagguacagaaccuaaguucuuu

SEQ ID NO: 4186675 - RNA, 129 nt, Human
aaccagauguagucccuguaccacacuguugaggacgagauguggccuccugcaugcuaucauucuaguccuuauggucugcuucguguucugacuauccugcauucaucaauauccaucucuaaaguu

SEQ ID NO: 4186676 - RNA, 66 nt, Human
aaccaggaaaaacacauugaagagggggaaucauaaucaucccacuucaacaguuauuucuuaguu

SEQ ID NO: 4186677 - RNA, 92 nt, Human
aaccaguaggaaggugcccagcuauuccuuucuuaguuaagucuauccuccugcuucuccugaggguggaguacugggugccgcugcugguu

SEQ ID NO: 4186678 - RNA, 116 nt, Human
aaccaguuauuggacuuguccacacuuuucaaguacauguuguucaaaagccacauguucucgucuaugaggucaagagcagcaugagcuaugaacuggugcagacagugacgguu

SEQ ID NO: 4186679 - RNA, 58 nt, Human
aacccacuuguuugauuauugccugaggagacauuccucuauauggaauagguggguu

SEQ ID NO: 4186680 - RNA, 63 nt, Human
aaccccaugcugugggaugagcaaggggacugccccauugcugguccccugcagccugugguu

SEQ ID NO: 4186681 - RNA, 100 nt, Human
aacccccaacuugcgugggucugcaauuuuuuagcacaaggagagccuuuuaaagaccugguucuucaaggaaagaaugcagguagugugguuggggguu

SEQ ID NO: 4186682 - RNA, 78 nt, Human
aacccucugaaguuauucagugggcugacauacaauuugcaaaguauugccucacaugaauaauuucucuccaggguu

SEQ ID NO: 4186683 - RNA, 67 nt, Human
aacccugagagcuacaggucucguccucgccauuuuacaggugggaaaacugaggcucucagcaguu

SEQ ID NO: 4186684 - RNA, 69 nt, Human
aacccuuccgggcagcuggcuuauagguuugugguaaaagcgaaggugugggucaggcuguuggggguu

SEQ ID NO: 4186685 - RNA, 65 nt, Human
aacccuuuucaucugcuugaaguugugggaugucauucacauaaauuuaccagaugauacagguu

SEQ ID NO: 4186686 - RNA, 58 nt, Human
aaccuaaucaccuugugaaggcccugccucuccacaucauuacaauggugauuagguu

SEQ ID NO: 4186687 - RNA, 71 nt, Human
aaccuacauuaacaggcaaauaauguggcuaacauuuuaauaucacagagcaaauugacuguuaauggguu

SEQ ID NO: 4186688 - RNA, 64 nt, Human
aaccuaggaaucaucaaaacagauaugagacaagaacuuguaccucaugcagguguucuagguu

SEQ ID NO: 4186689 - RNA, 128 nt, Human
aaccugaaaccucuuccuuuaugcucgcgauuuucuaugacuugcuuagaaccaggcuggcuuggcuggacuuagagguggaaaagagagugagcaucugucucuccuuggaggaugagcuuuggguu

SEQ ID NO: 4186690 - RNA, 69 nt, Human
aaccugaaauuugaauggcuuaacacaacgaaaguuuccuuuuugugugcauaaauucugauguagguu

SEQ ID NO: 4186691 - RNA, 62 nt, Human
aaccugaccuggaaauacaagaaguaugucauugacauaucuuuaugauauucaagcagguu

SEQ ID NO: 4186692 - RNA, 69 nt, Human
aaccuggcccuaaucccaguaggaugagguuacucuuugccucuguauuugcuucuuagggcuaugguu

SEQ ID NO: 4186693 - RNA, 66 nt, Human
aaccugucaauuaugccauugcaauauuucagaagcuuuaacugaagugucauauagugucagguu

SEQ ID NO: 4186694 - RNA, 81 nt, Human
aaccuguucucuaguuuugacgaggauuaguuuaaguguuaucuuaagaaaagucuuugccaagucucugagaccaguguu

SEQ ID NO: 4186695 - RNA, 79 nt, Human
aaccuuuggucaauuaaauuucucacuuaggguauuugaacgcaaaaagcuuaaaugagcaguucuugguggcuggguu

SEQ ID NO: 4186696 - RNA, 58 nt, Human
aaccuuuguuguuuauagugguugaaauuaucuucucgaauacuguggaucagggguu

SEQ ID NO: 4186697 - RNA, 89 nt, Human
aaaucucucugcugcugagacuggcuuugugucccuucuucauacacagggcacaauggaccgugugcucugcucuguuuuagagauuu

SEQ ID NO: 4186698 - RNA, 81 nt, Human
aaaugaaaaaaugucgaauuugccucuagccuuuccugacaaccuuagaaagcacugaggaaaaauuugauagauucauuu

SEQ ID NO: 4186699 - RNA, 59 nt, Human
aaaugaaagguuuuaggacagcaauuuaacacucagcaauucccaggaaccuuuuauuu

SEQ ID NO: 4186700 - RNA, 129 nt, Human
aaaugaagcaaaguauuaucaaccaaauuuacagcaauaggaaauacuugcaacuguguguuauguaagauuugcuauguguugucacagauuuaugacaccagcaacuuaauacugugaaaguuuccu

SEQ ID NO: 4186701 - RNA, 84 nt, Human
aaaugaaugauggccccuucuaaacguaaacggagcugcucauccuucagggcuguuuauaaauagaggggaguccauuuguuu

SEQ ID NO: 4186702 - RNA, 83 nt, Human
aaaugacuaagcaguaaguuaguuccuguguuaguuuuuuacauaggacugacaaugagauugauuuaaaugaccugucauuu

SEQ ID NO: 4186703 - RNA, 65 nt, Human
aaaugagggagcauggucaaaagccuuugguaaauuuuaaagugcuuuacaaaugucuguuguuu

SEQ ID NO: 4186704 - RNA, 106 nt, Human
aaaugauuacaagaaauacaguguggguuugggaggaguagauauuaaagugguguuucuucuauuucuuuauauacuuacaugcuauuuuuuuaaaacuuuguuu

SEQ ID NO: 4186705 - RNA, 91 nt, Human
aaaugauuggagaagggaguugugcucacauuuagaauuaggguguuuuguccugucuacugcugacacuaacaguacuauccauuuauuu

SEQ ID NO: 4186706 - RNA, 80 nt, Human
aaaugauuuuuuucugugggacuucaaugcaaugagguagaaaugacuaccguauuaggauucacagacuucuuucauuu

SEQ ID NO: 4186707 - RNA, 67 nt, Human
aaaugccauucaaugaggcaucuggaaauuuguaugagcauuuuguugucacauguggaugguauuu

SEQ ID NO: 4186708 - RNA, 77 nt, Human
aaaugccucugcuguacacaaucuucacaacucuaaaaaugacauugucauggccauuguuagcagcaaaggcauuu

SEQ ID NO: 4186709 - RNA, 88 nt, Human
aaaugccugucaguguguacacuuuccaagaaacacaccaggauguaccaggauagugaugucacacccuugauagaagcuagcauuu

SEQ ID NO: 4186710 - RNA, 73 nt, Human
aaaugcuggcacaaaagaaaacugccaaacaccagcuggucugguagucaacauuuaugagcucuuggcauuu

SEQ ID NO: 4186711 - RNA, 123 nt, Human
aaaugcuucucccaccaaaauauaauaugcuugguugacagaaugguugugugguuaaaacgcagaagaggaagccaaucuuugacuauauguguauuaucuuuauggauccaacuagcauuu

SEQ ID NO: 4186712 - RNA, 92 nt, Human
aaauggaaguuucucuguccuaugcuugauagaaccaugucgguugagacacguuucuaucaugcauagggcaggguauaagaaaucuguuu

SEQ ID NO: 4186713 - RNA, 62 nt, Human
aaauggagggccuggucaucucaggaucugauuuguccuugaaagauuuggccucuguguuu

SEQ ID NO: 4186714 - RNA, 60 nt, Human
aaauggauggguuucuagaugugauaauaaaugcuaacguuuagagaauacucacuauuu

SEQ ID NO: 4186715 - RNA, 129 nt, Human
aaaugggcgguggagaaugcucugugcuggaggacagagccuccuggagguauaggcugcaaggugcagggccaggaagccugugucucuggacaucagggaacagcucucccacaacuggucauucau

SEQ ID NO: 4186716 - RNA, 58 nt, Human
aaauggucacuauguaaggugaugaauauauuaauuaucaugauuguggugacuauuu

SEQ ID NO: 4186717 - RNA, 103 nt, Human
aaaugguuuuaacacagguaucagcaucaguauuguuuaggaauauaaaagaguaauauuucaggagcuuuugcugguuuugccuuacuaaguggcaccauuu

SEQ ID NO: 4186718 - RNA, 63 nt, Human
aaauguacaacauccauauauaaauauaaauaauaugugugguuucugugguguuguacauuu

SEQ ID NO: 4186719 - RNA, 59 nt, Human
aaauguagaucucccuucuggaccuaaucuaaggacuuauaggaaggaagaaugcauuu

SEQ ID NO: 4186720 - RNA, 88 nt, Human
aaauguaggugcuaugaauauuucucuccuguagaaguaauguagcuaugucaauaccaacuucagagacuuuaugguccaagcauuu

SEQ ID NO: 4186721 - RNA, 107 nt, Human
aaauguuuacuaaaauguagcuucuuuguuuaucagacgaacugugguaacagcaguuaugaaacuuaucacaguucaucugauaaacuacauuuuaguaaacauuu

SEQ ID NO: 4186722 - RNA, 72 nt, Human
aaauuagucauguuguauuacuucuuuuuauggcaaugcucugaaagucugcaaaugucagcauguuaauuu

SEQ ID NO: 4186723 - RNA, 59 nt, Human
aaauuauauuugaaagguuggaagucauauuuggcugagcuuuauaucaaauguaauuu

SEQ ID NO: 4186724 - RNA, 59 nt, Human
aaauuaugaauacgagcaacuagcaucuaggcaacugggucugcucuguuuaaugauuu

SEQ ID NO: 4186725 - RNA, 86 nt, Human
aaauuccuuuuagucucuugaguaaugcaagccuuuguauuacauguuaauuaaagaguuuauuacuuguaagacuaguuguguuu

SEQ ID NO: 4186726 - RNA, 93 nt, Human
aaauucuacucuaaauugguauguauucugaaaacugauuggaaaguaagauaaucccccacuuuuugaguauaacuaauuagacugguauuu

SEQ ID NO: 4186727 - RNA, 55 nt, Human
aaauucucuucagaggaaccagguggguaucugaacuuccuuugaaguaggauuu

SEQ ID NO: 4186728 - RNA, 64 nt, Human
aaauucuugggcaccagcccagaccuacugaaucagaaguucugggaguggcgcccuacaauuu

SEQ ID NO: 4186729 - RNA, 108 nt, Human
aaauugccuuuucuuggagaaaaaaauacuuacagauuguggcuguggucuauuaugcucaaguaaaucacaucgaaaucuggguguguuuuauccaaaagacaauuu

SEQ ID NO: 4186730 - RNA, 70 nt, Human
aaauugcugugacugugcagcuagagccucucaauauuuucaaugcucuagaacuccaguuaggcaauuu

SEQ ID NO: 4186731 - RNA, 56 nt, Human
aaauugugcuuugacuccugccuguuuaggucccuggaaaauucagagugcaauuu

SEQ ID NO: 4186732 - RNA, 94 nt, Human
aaauuuagaacugaaauaauaucuggaucaaucccuuaguuuaacagcuaaggacacugugggacaauccagcuauuauuucaguucuaaauuu

SEQ ID NO: 4186733 - RNA, 63 nt, Human
aaauuuaggaagcacucauuuaaaggagccacagcucugagaaugaguguuuucuuaugauuu

SEQ ID NO: 4186734 - RNA, 56 nt, Human
aaauuugaagugccaauuuugugcuaaacguagguagaaaauggcguuuuagauuu

SEQ ID NO: 4186735 - RNA, 128 nt, Human
aaauuugguaaauuuguauaaacacuguagcauaugguuaggugagaugauauuauaaucacauacucaucacucugauagauaagcuaacuauauuagucuuuuguacaaaauacacuacugaguuu

SEQ ID NO: 4186736 - RNA, 105 nt, Human
aaauuuucugggucagcugagauacucaguguaauugaugaccaaggcuagaagguccaaguugcugauuaacacuuugagugcucagugcauucuagaauuuuu

SEQ ID NO: 4186737 - RNA, 129 nt, Human
aaauuuugugguaauucaguuuugaauagucagaacagcuaggagaaaagguguuuucguuuauucuuaaaaaggaacauuuaaauucuuauuugaucauuugaaagcuauuuuuauaccauaaaacuu

SEQ ID NO: 4186738 - RNA, 104 nt, Human
aacaaaaaagagaauauauaauuuuuuggccacauccuuuugaguauuggcuuuuaaaauuuagaacuuuguuugccaauuuacuaauauauuaauauuuuguu

SEQ ID NO: 4186739 - RNA, 76 nt, Human
aacaaacuacagggcucuuccggagcagggagaguaucacacucaucuuuguauccccagggucugguacaguguu

SEQ ID NO: 4186740 - RNA, 67 nt, Human
aacaaacuguguucuuugcuuuuagggaauugcuuuccccccaaaguuagucagaaccagccauguu

SEQ ID NO: 4186741 - RNA, 65 nt, Human
aacaaagaugcauuuuguugccugcuaagucuccuuaaaauuuggcacagcaggugugcuuuguu

SEQ ID NO: 4186742 - RNA, 61 nt, Human
aacaaauguuauguuuuuguguccagcuauucagcugggaugucuauagaacacuuuuguu

SEQ ID NO: 4186743 - RNA, 84 nt, Human
aacaaauuaaagaacacugugagguaaugaccuaagacgauauucgucugucuuuuccaugccuuuuaugauucucugaauguu

SEQ ID NO: 4186744 - RNA, 130 nt, Human
aacaacuauuagcauacaauugguuaaauccauuucaaagauaauuaccaaacauaaaguaaaacuuuauuuggaaaugcaucucuugagaugguuggggcuguuauuuuucuguuugcuccugguucuu

SEQ ID NO: 4186745 - RNA, 62 nt, Human
aaauugugcucacacugauauuguaacuacuguugcuuaucaucuguauguggcuauaauuu

SEQ ID NO: 4186746 - RNA, 70 nt, Human
aaauuucacauucuucugaaucuacaucuguuuuucagucucaggacaguagaugaagaguguguaauuu

SEQ ID NO: 4186747 - RNA, 78 nt, Human
aaauuugaaagugcagucagacaaggcagucacuuaaaagcaacuaaacugugauuugcuugacuuaguuucucauuu

SEQ ID NO: 4186748 - RNA, 125 nt, Human
aaauuuggaagaaagaucaaaauugacuuuuuaaugggguggcuagaaugagugucaguuacagugcuagacacuagggauuuaguacugaggaaaguuggucguggucuuuauaacucaguguu

SEQ ID NO: 4186749 - RNA, 94 nt, Human
aaauuuguuuaauucaagaauguaaagcucaggucaggagauuuuauuauagauucaagcuucuagcuuuguauuuuaaaaauuuaauaaauuu

SEQ ID NO: 4186750 - RNA, 83 nt, Human
aaauuuuuaccacauggauagauagggacauagcuauaaauauguagauacagaugugucuuauuugauuccacaaaagauuu

SEQ ID NO: 4186751 - RNA, 77 nt, Human
aacaaaaacucccuugacuccucagauggccuauguagacccaugauguccuugaguaagucauggugguuccuguu

SEQ ID NO: 4186752 - RNA, 63 nt, Human
aacaaaccuggguggagaaaggacgcccucccugaacugguccuuucugugcccaggucuguu

SEQ ID NO: 4186753 - RNA, 63 nt, Human
aacaaagaagacugguuauuuuuggucccacagaaaauccgagaauagcuuaucaaucuuguu

SEQ ID NO: 4186754 - RNA, 128 nt, Human
aacaaaguguauuuacauugaaugcaucucacuugucccauggacacaacuucuucuaaaaacuuggaaaggauuuauugccuguggaacaugagguguuauguuuaauuuugcacauacauuuuguu

SEQ ID NO: 4186755 - RNA, 84 nt, Human
aacaaauagcuuugcccaguauuaaagcaucacacuauuaauuaguucucugcuaggugugguguuucuugauaguuauuuguu

SEQ ID NO: 4186756 - RNA, 75 nt, Human
aacaaauuaacuguagagaaucugagaaaaaggauaguuuaucauuuugucucauuagguuuucuuugauuuguu

SEQ ID NO: 4186757 - RNA, 59 nt, Human
aacguaagucucucaagagggucagcauuuacuugcuguccugaaagggagauuggguu

SEQ ID NO: 4186758 - RNA, 76 nt, Human
aacgugcucccuccuuguuacucucucuaaaugcuuuacaguagccagggaaggauaacaagaagaacagcguguu

SEQ ID NO: 4186759 - RNA, 93 nt, Human
aacuaacuccucucccugccugcucuauccaggccugcuuaccuuggccccuggagccucccagagcagaggcugggacuuggacaauuaguu

SEQ ID NO: 4186760 - RNA, 62 nt, Human
aacuaacugcucauuugagaguaugcuggugacggcaggcaucugggaaugaggcagaaguu

SEQ ID NO: 4186761 - RNA, 62 nt, Human
aacuaaggcccuugcagucauugggcaucaccuugccuuguuccuucauguggucauugguu

SEQ ID NO: 4186762 - RNA, 66 nt, Human
aacuacaaccauagacauauacuaggcaguacugcaagagccuaaacagugcauauggguguuguu

SEQ ID NO: 4186763 - RNA, 87 nt, Human
aacuacaucuaaccucaguuauuggguugugggaguaaaauaauuuaagguuuacauguaaucuaaaauaauugaggaucuauaguu

SEQ ID NO: 4186764 - RNA, 63 nt, Human
aacuacuuuucauaaugaagcagcauauuuucuugaugugucuuuuuaccugugaugaguguu

SEQ ID NO: 4186765 - RNA, 66 nt, Human
aacuaugccauuauucauuucagugggggcauguaaccucaaagaauguuaugaggguagcucguu

SEQ ID NO: 4186766 - RNA, 94 nt, Human
aacuauggcauaauuaaggaggcucaauacaagguuguaugaaaacaauugcauaaacaauaaguauugggcuuuugaggauuguuacaaaguu

SEQ ID NO: 4186767 - RNA, 130 nt, Human
aacuauguaguuaucgcugaaggucuuuuccaucaaguuauucugacuuauuuguccuugguguccauaagccauguuggccacaggaauaagucaaacuucacucugggaaagcgaaugauuuauaguu

SEQ ID NO: 4186768 - RNA, 93 nt, Human
aacuauucuuagcucauaggacaaacuaaaacauggaugagcuagauuuggcuugugcaucauaguuugccaauuccuguucuaaaguauguu

SEQ ID NO: 4186769 - RNA, 58 nt, Human
aacucacagaugagcugaauagcuuuaacaauagcagcuguacuuucaucuguuuguu

SEQ ID NO: 4186770 - RNA, 85 nt, Human
aacuccagcuauguaaacuguagggaucugucuuagucagcucaagcuguuacuaacaaaauaccauagauuggguagcuuaguu

SEQ ID NO: 4186771 - RNA, 78 nt, Human
aacuccccuuuccugagucccuucccugagucccuuggagguccaggccugggcuucggggcugagggaaggggaguu

SEQ ID NO: 4186772 - RNA, 61 nt, Human
aacucucuugggaguaccuggaguaagacaauaagcuccugcuauucaacaagaggaaguu

SEQ ID NO: 4186773 - RNA, 87 nt, Human
aacucugagaagcacugccauaauucagaccuuucauuuucucuguguguauguguguuuuaauuguggggugcucauaguggaguu

SEQ ID NO: 4186774 - RNA, 60 nt, Human
aacucuuaauuuucaugaaaugagguaaacuuucucagggacaugaaaauauaaugaguu

SEQ ID NO: 4186775 - RNA, 103 nt, Human
aacugaggcuucagaagguuaaauaaauugcugagagucaccuagugaguaaaugguagagcucagcuuugaucucaggcaaucuaccuccaaaguccauguu

SEQ ID NO: 4186776 - RNA, 76 nt, Human
aacugaguagcaaucuacaaaaacugucucaggaaucaagaaucgguuugugcuauauuuauggguugccuugguu

SEQ ID NO: 4186777 - RNA, 55 nt, Human
aacugauagauucauguaacuguucagcucaucgaacauggaucaaaugucaguu

SEQ ID NO: 4186778 - RNA, 57 nt, Human
aacugcagagaacaucuggguuagcucaccguuucuagacccagaaauuugucaguu

SEQ ID NO: 4186779 - RNA, 78 nt, Human
aacugcagcagaagcauguccuuaaggcacagaucacucaugauauuguuuguggcuuaagaaugccuuuaagcaguu

SEQ ID NO: 4186780 - RNA, 61 nt, Human
aacugccuggccaggcugcaacagcuucccauuucacguugcaguuuaacuuugagcaguu

SEQ ID NO: 4186781 - RNA, 121 nt, Human
aacugcuauuugacuaguagacaaggcugacaaagacaauacagaaagggacaugcauuugguaauuccagaaagcuuuuguggcugucuucauuguccuuacuucaaaugguuagcaguu

SEQ ID NO: 4186782 - RNA, 58 nt, Human
aacugcugaucgaaucagucacccucauggacagagggacagagcacaucagcauguu

SEQ ID NO: 4186783 - RNA, 55 nt, Human
aacugcuucuuacugcugggcaccacauaggcuggugcccagcaagagugcaguu

SEQ ID NO: 4186784 - RNA, 59 nt, Human
aacugguauuucccaugaauuuguaugguauaguacaaguaacagggauaauagcaguu

SEQ ID NO: 4186785 - RNA, 109 nt, Human
aacugguccaagaacuugagguaggccugacgcuggggugcagcugcuggaaugaaguggccaccagagugggugagggugauggcuccgggaaauuggcuggccaguu

SEQ ID NO: 4186786 - RNA, 61 nt, Human
aacugucaguguuuggcuuucaucagacugaacauuuugguguacacuugaacugacgguu

SEQ ID NO: 4186787 - RNA, 61 nt, Human
aacugucuacucuagcuaugagcuuggugaagguuguucugcaacucagucuggagcaguu

SEQ ID NO: 4186788 - RNA, 87 nt, Human
aacugugcccagucugugccaguguauuccugugacauugcucauugauggucauggugaggacacuggagcaggaguggcaugguu

SEQ ID NO: 4186789 - RNA, 57 nt, Human
aacuguggacuugagacugaugaaauccgaguuuuauuucugucucugccacuaguu

SEQ ID NO: 4186790 - RNA, 60 nt, Human
aacuguuuuccuggguuccaugagcuguucuagcaaauguucaaaccugaggagggaguu

SEQ ID NO: 4186791 - RNA, 85 nt, Human
aacuuacaucaguaucucaaagugguuuauggcccuaaaacuuggaguuauaagaaauaccugggguuacuccugauguguuguu

SEQ ID NO: 4186792 - RNA, 67 nt, Human
aacuucaagauauuucuagaaucagauuguucaucuccauucuugguucuguuauuauuuggaaguu

SEQ ID NO: 4186793 - RNA, 56 nt, Human
aacuucagggggcacauucaagcagacugcaaugagaauggugcccccuggaaguu

SEQ ID NO: 4186794 - RNA, 68 nt, Human
aacuucaugcaucccacucccuccacuuuauuuagaguuuuuugugcagggagcuuuagguagaaguu

SEQ ID NO: 4186795 - RNA, 62 nt, Human
aacuuuaauuauuuuucacuuagagaucauacaguucuagaguagugugaguaauuggaguu

SEQ ID NO: 4186796 - RNA, 78 nt, Human
aacuuucaugugucuaaagaucauuuaguaugcuuauuccaaaugcagauaaauugcugauuuuagaugcuuugaguu

SEQ ID NO: 4186797 - RNA, 62 nt, Human
aacuuuggcagguggucuaugugauaagucaccuuaucauuuaacagaaucauugcuagguu

SEQ ID NO: 4186798 - RNA, 88 nt, Human
aagaaaaacacugaauuaagcauuacauacauuccucucuggaugagaacuggguguauggauucuuggguucaugauugaaauucuu

SEQ ID NO: 4186799 - RNA, 66 nt, Human
aagaaaagcaucuuuguaguagugcuggaaaacuauucagaauauacagauaaaaaugcuguucuu

SEQ ID NO: 4186800 - RNA, 78 nt, Human
aagaaaaggcagcaucccaggccacauucugggaggugcaguauucccucucuggcuggggugcggagccugguucuu

SEQ ID NO: 4186801 - RNA, 98 nt, Human
aagaaacuugucaucuggaaacaggaaaaaucacaugaaguaauuuuauuuguaucauggcuuuuucacuguucgcuacauuugugacagcugauuuu

SEQ ID NO: 4186802 - RNA, 83 nt, Human
aagaaagugcggucuguagugaauucuaauaaaaggaauuagauuacccauccccaucuuauuguuuacuacagcacuuucuu

SEQ ID NO: 4186803 - RNA, 129 nt, Human
aagaaaguguguggguuuagcuguuuggugaaacaggaugagaagggcucuuacguuacucaucaacugagaaacauauuuccaucuauuuauacuaacacaucaaucuggaugcauacacugugacuu

SEQ ID NO: 4186804 - RNA, 118 nt, Human
aagaaauaggagagagaaauggaugaggagaggaaaagcgaggcuauuauugaauaguaaaauggaagccauuguugucuucaucuucagcccauccccaacacuccuuucauuuuuu

SEQ ID NO: 4186805 - RNA, 63 nt, Human
aagaaaugcagaaaugugcuggaagacaauucucugugggacucuaguauuucugcaugucuu

SEQ ID NO: 4186806 - RNA, 92 nt, Human
aagaacaugaaaguuauuacugaugaugucccgcaaucugaucaaacacuuaagggacagccgucacguuaugauuuuaccgcacuguucuu

SEQ ID NO: 4186807 - RNA, 63 nt, Human
aagaacggacagauuuugcuuacauaaaaauuauacaguaaaaugcaucauuugucucuucuu

SEQ ID NO: 4186808 - RNA, 65 nt, Human
aagaagagaacugccaaacacuuaagcaaacagaaacagcugaagaagagguagugucuuuucuu

SEQ ID NO: 4186809 - RNA, 56 nt, Human
aagaagauaaugcaacuaacauugcccaacagugcaagauuaggggcuuucuucuu

SEQ ID NO: 4186810 - RNA, 70 nt, Human
aagaagcauaauguuguaacacauagaggacugggguaguuugcauccagguuuuggcaauauucuucuu

SEQ ID NO: 4186811 - RNA, 75 nt, Human
aagaagccuguuuagacucaaaauugaaaggcaaagaguuggcauuuuuaauaggucuagacacaguuauuucuu

SEQ ID NO: 4186812 - RNA, 72 nt, Human
aagaagucaacacugugugucaggcugccuuuugaagcaugguuccugacccuuuccaguguuggcagucuu

SEQ ID NO: 4186813 - RNA, 130 nt, Human
aagaagucaaguuuuuugaagauuggaguuaguuauauuagggaaugcugaauuuaguauuuaugugaaauucuauguaaguuuucuuguauuuuuaauguguuuucucuuguuaccaguuuuugugugu

SEQ ID NO: 4186814 - RNA, 96 nt, Human
aagaagucaucauggaagaaucuuauacugcagcauagauuuaaaguuggagauccauggcuaaguauauagagcuugauucgagauugauuuuuu

SEQ ID NO: 4186815 - RNA, 68 nt, Human
aagaagucugauuuuuagagguggccugcuauaaaauaaacacaaugcuucuggcaaacagaguucuu

SEQ ID NO: 4186816 - RNA, 85 nt, Human
aagaagugggaggguggggugcauggcuuagaaacuaucagacaccagagauuaaguucuaacuccacuucccacucccaaucuu

SEQ ID NO: 4186817 - RNA, 60 nt, Human
aaccugcuuucucagagaagggaaaaauagcucccuaacaaagcacugaaaaguaugguu

SEQ ID NO: 4186818 - RNA, 81 nt, Human
aaccuguaaauccaaacaaucucacaguuaugaaauggaaaauuuguggggaaaaacaaaugcuuugguuauuacaguguu

SEQ ID NO: 4186819 - RNA, 76 nt, Human
aaccuuuccugugaauuuauaacaucauagagucuuagaaccugagaucauuugacuuuauaaggcuuuaaagguu

SEQ ID NO: 4186820 - RNA, 90 nt, Human
aacgcuaaauuuauaauaacucuaauggauacaaaagagaaaacacuccucauuacuuguacugcuugguguuguuguaucuuuauuguu

SEQ ID NO: 4186821 - RNA, 67 nt, Human
aaaguucauucagagucuuggcaauagguuacucucccuugucacuuaaugccagcucuuguccuuu

SEQ ID NO: 4186822 - RNA, 63 nt, Human
aaaguucuuugcaucuuugcucuacacuagaaugcuccuaggccagggaugguaaaugacuuu

SEQ ID NO: 4186823 - RNA, 70 nt, Human
aaaguugagguggauacauuaaauaaugcucacuuuauuugagcaagauuuaagagucagccuugacuuu

SEQ ID NO: 4186824 - RNA, 79 nt, Human
aaaguuggaagcacauugauuuauuuuggagcaguccgaacaguuucuuugauaauaaauucaaucugcgcucaacuuu

SEQ ID NO: 4186825 - RNA, 64 nt, Human
aaaguuggggugggaauaccagguuucuguucaagaaaccuuucaauuauccucaucuuacuuu

SEQ ID NO: 4186826 - RNA, 57 nt, Human
aaaguuuccugcuaagugcuauaaaggaagauauccauaauguacaguggaggcuuu

SEQ ID NO: 4186827 - RNA, 58 nt, Human
aaauaaaaggcagaggaaggaagaauuccccccccuuuuuuuuccugccucauuguuu

SEQ ID NO: 4186828 - RNA, 82 nt, Human
aaauaaagcaggcagcuacuugcacuguuucagguuuuucuuuaaauccuguaaacugaggguagcugauuggauuuuauuu

SEQ ID NO: 4186829 - RNA, 87 nt, Human
aaauaaaucuacacaauuaguugcaaagugaaugguauagauaaucugaucacuucuuggaaaugaacaugugagauagauuuguuu

SEQ ID NO: 4186830 - RNA, 72 nt, Human
aaauaaauguauaggcacuaaaccucaaggugguuacuaagaccuccagauuuagugccuauacauuuauuu

SEQ ID NO: 4186831 - RNA, 58 nt, Human
aaauaacagucagggacaacauugauccuacacuuguaugugccugugcugugcauuu

SEQ ID NO: 4186832 - RNA, 78 nt, Human
aaauaagcuaguuaaagcuacacauuauuaauccagauuaccuggguucuaugccuggcuuugccacuaaauuuguuu

SEQ ID NO: 4186833 - RNA, 81 nt, Human
aaauaauuaggucauuuuuuuaagagcuuuguuugaaugggaaaauauuuacauggauguaaaaaaguuauuuaguuauuu

SEQ ID NO: 4186834 - RNA, 83 nt, Human
aaauaauuugaaagacaauauggccaaagaauuuuaucuggaccuuucuuacaggacuuugucauuuugucucucaguuauuu

SEQ ID NO: 4186835 - RNA, 87 nt, Human
aaauacuaaggcaagguauugcauuauuacaagguaagacuagagggacuagagacuuacuuuugaugcaugagugucuuauuguuu

SEQ ID NO: 4186836 - RNA, 60 nt, Human
aaauacuagaauucagaguugacuuguuuuucagguuaucugaaauauuuuuuaguguuu

SEQ ID NO: 4186837 - RNA, 95 nt, Human
aaauacuauuagagcacaauggaaaaggcagugugucuauguguaauauggcguaauagacauggucuuuugucauugaaauaauaauacuguuu

SEQ ID NO: 4186838 - RNA, 92 nt, Human
aaauacuuuuguuagcauuuuguacaacuuugcuggaaaauuggagcacaguaaugugagcguuggacagugcuaggugcuaagaaagauuu

SEQ ID NO: 4186839 - RNA, 65 nt, Human
aaauagaacaaaaucaaaggagugauucaguuuaucacuguccugcuuugauuuuguauguauuu

SEQ ID NO: 4186840 - RNA, 81 nt, Human
aaauagaguccuugggaaaagcuugauuucaugcucucaaguggaaaacauaaagcuuuuccuucaggcacaacccuguuu

SEQ ID NO: 4186841 - RNA, 126 nt, Human
aaauagaugccucuuauagauaacaaagcucucauugcauuuauucacuggcaguauuuauucauuuagcuccaacugugugugaggcacugacaaugcuggguauggggcuggcuggcacuauuu

SEQ ID NO: 4186842 - RNA, 100 nt, Human
aaauagcuguaucauuuguaccagcaauguaugaguguuugaguuuuuccauaucuucaccaacacucaguauuguuagucuuuuugauuauagacauuu

SEQ ID NO: 4186843 - RNA, 65 nt, Human
aaauagggccaguuagggaagcuuugcaaucgugcaaaaugucugccccuugcuguauccucuuu

SEQ ID NO: 4186844 - RNA, 105 nt, Human
aaauauaaauauaugguugaugacuuguugcuuccaguuuuugaugguuugaugaaaaugcacgcuggaaagcacuuauuggaaugaauuuuauagacuauauuu

SEQ ID NO: 4186845 - RNA, 125 nt, Human
aaauaucauugguuuccuuucucuuuuuagauucaaagugaagaacuuaaaugucuauggaaaaugacaaauucuuaauacguucugaacuuuacugaagggagaaagauuuccaggugcuguuu

SEQ ID NO: 4186846 - RNA, 88 nt, Human
aaauaugagacauaccucuuaauuguacuccuucagcaaguugacuauguauuuguugucucuucaguuaagagaaggucuuauuuuu

SEQ ID NO: 4186847 - RNA, 56 nt, Human
aaauaugcuguacuagguguagcauaacauuguuacugccuuguucauguguauuu

SEQ ID NO: 4186848 - RNA, 75 nt, Human
aaauauguagauauuaagucuuuugcugucauagguguuuaaaauauauguguauguagauguaucuguauauuu

SEQ ID NO: 4186849 - RNA, 91 nt, Human
aaauauuuuggaguuuguaugccauuugcuuaguugucuuuuacauguaaaauccacaauuccacauggcaugcagguuuucuguguguuu

SEQ ID NO: 4186850 - RNA, 57 nt, Human
aaaucaaccaaccacuccagcuagcacuggcuaggcagaguuuaaugguuaagauuu

SEQ ID NO: 4186851 - RNA, 92 nt, Human
aaaucaggaggcaagcagcuauggugacaaggucagguccagggucucuacuguucuccuggccuuuucucaugcuggcuacuucaggauuu

SEQ ID NO: 4186852 - RNA, 66 nt, Human
aaauccuaccaagaaauucccucuuuccuuuaugggauuugcuugguggauuugcuugguggauuu

SEQ ID NO: 4186853 - RNA, 86 nt, Human
aaaucucccucagacacacuauguccuugccugccaaccauggucacucacauugaggacugaggagguaagguuugaagagauuu

SEQ ID NO: 4186854 - RNA, 60 nt, Human
aaaucucuugugguccacacuguuggcuggcuaagccagcaucuguucccaacgagauuu

SEQ ID NO: 4186855 - RNA, 58 nt, Human
aaaucuguauuguuaacaaguaaucaccuccuggugauccuuguuaucaagcagguuu

SEQ ID NO: 4186856 - RNA, 119 nt, Human
aaaucuguggucuuccuauguacauguguguguacaugcuuaaaaugcaauguuauaguuaaauguaauucauuaaaaguauguaacuccaguggcuacuuaguuuggcuacuugguuu

SEQ ID NO: 4186857 - RNA, 71 nt, Human
aaaugaaaaucccuuuagaaaacugccagacauucagcccuggccaaauggauuugaaaggauuguuauuu

SEQ ID NO: 4186858 - RNA, 81 nt, Human
aaaugaaaugguuugucuuaaaugaaaguguaucugugguagcauaguuauauccagucuuuaaaauggaucauuucauuu

SEQ ID NO: 4186859 - RNA, 90 nt, Human
aaaugagaaugucuuccauuuggcacuucacugaggcaucccaagguaccuuagggcacuuccaguggaguaaauggacaauuaguauuu

SEQ ID NO: 4186860 - RNA, 89 nt, Human
aaaugagcccaaagcauccauuuuuucagaaugcucucagggaaugcaugccugaucuguagaagguggcugcauagaugguaucauuu

SEQ ID NO: 4186861 - RNA, 56 nt, Human
aaaugauaguauggaacuaggauggagacuccauccauacucuaaacauguuauuu

SEQ ID NO: 4186862 - RNA, 91 nt, Human
aaaugaugugcacaugugaaauuuagaaauuucuuuucauaaggccuucuucccuuaaggaguuucaaagcuuccauguguuaucucauuu

SEQ ID NO: 4186863 - RNA, 66 nt, Human
aaaugcaaauugcuggauccuacucccagagauuuguaaauuccuggggucagauaauuugcauuu

SEQ ID NO: 4186864 - RNA, 61 nt, Human
aaaugcaagaucaaaucuaacacaaauugugauggcacguguuuggugugaucuugcauuu

SEQ ID NO: 4186865 - RNA, 57 nt, Human
aaaugcagagauuuggauucaaacuuggucugggaugaggcucacaaaucugcauuu

SEQ ID NO: 4186866 - RNA, 57 nt, Human
aaaugcauuuuuaauuagacccagcagaucugggcuaggagucugaaauuugcauuu

SEQ ID NO: 4186867 - RNA, 74 nt, Human
aaaugcucagcaggaugggaagaacucaagaagaucuucaguuuauuucuuguuccacauucuguuaacuauuu

SEQ ID NO: 4186868 - RNA, 57 nt, Human
aaaugcugcagcuaguguguuuuuuaaaaauagacauuuuauuacacugcagcguuu

SEQ ID NO: 4186869 - RNA, 80 nt, Human
aaauggacuuugcauaaauaugucuuuguccaugugcagucuuugggcgcacgucaacaagggcagcaaggcagccauuu

SEQ ID NO: 4186870 - RNA, 86 nt, Human
aaauggagacauaagacaauaaucaaggagguaauuuucauuagcacaguuauugccugucauuauugaaucauaugugccuauuu

SEQ ID NO: 4186871 - RNA, 62 nt, Human
aaauggagcugcauuuagggagccuuuuuacaguggaguguaaggcugcuauguaucuauuu

SEQ ID NO: 4186872 - RNA, 98 nt, Human
aaauggccaaaggaagggaaauagugaugucgcuuugugcaacuuuuagaguaguuuguuucaugccagacauuacuuuuauccuuucugccccauuu

SEQ ID NO: 4186873 - RNA, 57 nt, Human
aaauggcuaagcagggguucugacucagaucugucagcaucuacagcuuugcuauuu

SEQ ID NO: 4186874 - RNA, 76 nt, Human
aaauggguuccacuggguuacaguccaagugccugagggugguauccuuuccgaaggcaguaagccaaauccauuu

SEQ ID NO: 4186875 - RNA, 71 nt, Human
aaauguaacuuauuuaaguuguuuauccuuuggcuuuguaggucgaagguuaguuuucaauaauuacauuu

SEQ ID NO: 4186876 - RNA, 75 nt, Human
aaauguaagaagggauaaaagcagauuucacagauucuucagcgcuuugaaaauaggcugcaucuccuuccguuu

SEQ ID NO: 4186877 - RNA, 67 nt, Human
aaauguaauaugcuuuuagugcuaccucugcaagaauuuugugagcauugaaccagauguuacauuu

SEQ ID NO: 4186878 - RNA, 119 nt, Human
aaauguagacaugcuaagagcaggaauuaaacucaaguuucuuaaugucagaucugauacucuugacacuugcccuuagaaacauguaguugauuauuuuuguuuuucauguuauauuu

SEQ ID NO: 4186879 - RNA, 77 nt, Human
aaauguaugugcgaagcuggcucugaugucagaaugaaccauuuucacaggauugggucagcucccacucaacauuu

SEQ ID NO: 4186880 - RNA, 84 nt, Human
aaauguggaggaaaaauguauacaugugugucugggaagcauauacacuuguacauuuuuuaauacucugauucuguaacauuu

SEQ ID NO: 4186881 - RNA, 59 nt, Human
aaauuaagacuccaugcugggcuaauucauuagauuagcagcuguggaguuuugcauuu

SEQ ID NO: 4186882 - RNA, 130 nt, Human
aaauuaaguggaaaaugaguauauuuggauugcccuuaaugacuguaccaaggcuucaugugcuaaacagaguggcuggucuuguggggucaccugggccuuguuuuucagccucccuuucuuauaacuu

SEQ ID NO: 4186883 - RNA, 75 nt, Human
aaauuacaauaauacaugcucauuguaaaauauucugaguauaggaguagaaaauaaguguguauuaugugguuu

SEQ ID NO: 4186884 - RNA, 68 nt, Human
aaauuagaaauacuuucaaagcuaccucacauacuaaugguagaguuguuugaguauuuaggugauuu

SEQ ID NO: 4186885 - RNA, 79 nt, Human
aaauuaucauguuggugguuucgguaaguguguaauauuuuaaacauuacauguauagaggccaccaacaugaaaauuu

SEQ ID NO: 4186886 - RNA, 81 nt, Human
aaauuaugcugggcuucacagagccuuuaauauguuagucuacauuguaaagcuucgggaggagagauaauagcauaauuu

SEQ ID NO: 4186887 - RNA, 63 nt, Human
aaauuauuauaggcagagcugaauuuaaguguucagaagaaucuuucucugucucuagaauuu

SEQ ID NO: 4186888 - RNA, 85 nt, Human
aaauucaccuagauucauuaucuucuuuguacagaaaaaacucgaccauggccacagaguuuaauggguacuagaggugguauuu

SEQ ID NO: 4186889 - RNA, 72 nt, Human
aagacgacaccugcucccucaguuccagcagccccuaacacugcgcugacauuuagguaguagcagcguuuu

SEQ ID NO: 4186890 - RNA, 57 nt, Human
aagagggagagccaggaguggcuacucccagcuguggccugccugcgugacccucuu

SEQ ID NO: 4186891 - RNA, 66 nt, Human
aagagggaggugcgggugcagacuggguucuaaaccccagaguucauauucugcuucucuucucuu

SEQ ID NO: 4186892 - RNA, 97 nt, Human
aagagggaugccaucaugauuauuugauucugcagaguucaaugucaacuuggccucuguuuuucaauaguucuugaaaugucuguguauuccucuu

SEQ ID NO: 4186893 - RNA, 58 nt, Human
aagagguacgugccccaaacaagaaaauuauuuuuuggcuccagugguuugugcccuu

SEQ ID NO: 4186894 - RNA, 71 nt, Human
aagagguuccucaugguuuuacccccuuguauuuucuaaagccuggaaguagaaacaugagagaaacucuu

SEQ ID NO: 4186895 - RNA, 71 nt, Human
aagaguaagguuuuaaaaaucaaauacagggcuucaaauuugggguuucugauguuuaauacuaugcuuuu

SEQ ID NO: 4186896 - RNA, 81 nt, Human
aagaguacucuggguaaagaaggcaaccugguuauguuaucuuaaauauggauuccuacugccuucuguuacucguaccuu

SEQ ID NO: 4186897 - RNA, 129 nt, Human
aagaguggaauuauuaaaucuuacaguagguguagguauaauauuuugaagaaaccgacaaacuguuuugcaaagugguuguacuauuuuacauucccucccagcaauauacauguguuccacuuccuu

SEQ ID NO: 4186898 - RNA, 114 nt, Human
aagaguggagaggcuccauuugguuugaauuugaaccauuauuuggaguauucaaccaacugaguacuucaaacaaugguacaaacugaaaccaaauggagccucucaacucuu

SEQ ID NO: 4186899 - RNA, 106 nt, Human
aagagugggcauccagcacuuauuucccagggcccucauaguugccacaauaccauacaugggaagcugaaaaguuuuguggaaaaagauguuuaaaccuauucuu

SEQ ID NO: 4186900 - RNA, 91 nt, Human
aagaguggggagaggaauuugaaugauuggguaguuuucauuauauaguagccuuuuaaaaaauccuuuaacuuucuucuuuuuuucucuu

SEQ ID NO: 4186901 - RNA, 76 nt, Human
aagaguuguaggaaagguaaaagugagagaaacagguaacuucugugcuaaguucaaugccuuucucuaagcucuu

SEQ ID NO: 4186902 - RNA, 71 nt, Human
aagauaaacaaaggagagacuuugguuucucauucagcaugaaagaagcuuggaagucuuccuuucaucuu

SEQ ID NO: 4186903 - RNA, 73 nt, Human
aagauaaacauguaugcuuuccuucuuucuggcuaggccuagcuugcaagcugagaaacagagcauaugucuu

SEQ ID NO: 4186904 - RNA, 63 nt, Human
aagauaacaggaggaguuuguauagcagaagaaaauagguaaggcucucuucuucugugucuu

SEQ ID NO: 4186905 - RNA, 57 nt, Human
aagauaguagaucugaacagguuuaagcggggguaugaugugucagauuugcuccuu

SEQ ID NO: 4186906 - RNA, 81 nt, Human
aagauauuucauauacagauaaugaagaccaagcuaguggcugcacuguaggucugcugcuuauuuguauuuguugugcuu

SEQ ID NO: 4186907 - RNA, 66 nt, Human
aaggugacaaaaauucugaaugguucgaaagagguagaauauauuucuagaauccuugucuacuuu

SEQ ID NO: 4186908 - RNA, 78 nt, Human
aaggugacugaacaagaggaaggguaggugaaauagaggucauaaaaucauuacaggaaccagauuguucagcaucuu

SEQ ID NO: 4186909 - RNA, 60 nt, Human
aaggugagccucaagugaccuuugcccacuugggaucggguuuccuucuggcuccuccuu

SEQ ID NO: 4186910 - RNA, 80 nt, Human
aagguggauauauggagagagaacuuuguaaaggcuuccugaagcccaauaugaacaucucauuucccuugaucuaucuu

SEQ ID NO: 4186911 - RNA, 61 nt, Human
aagguggauguaagcggcaauguuugggugccaaauauuacugcugcccuaagaccaccuu

SEQ ID NO: 4186912 - RNA, 62 nt, Human
aagguggcagacuacggaacacauucauagaguguguuacaaaucaccugugcugucacuuu

SEQ ID NO: 4186913 - RNA, 58 nt, Human
aagguugcuguuuugcuucaaaucuuauuuuagauaccagaagcugaauauuaacuuu

SEQ ID NO: 4186914 - RNA, 75 nt, Human
aagguuuguuugauuucccucaucauaacagaagucuucugcuuuuguuccuuaggggagauguucuugaacuuu

SEQ ID NO: 4186915 - RNA, 90 nt, Human
aagguuuuugauaccaagcaggugcguccucagcagcaucuaaagacauggcugcugcugaggaugcaccugcuugguaucaagaaccuu

SEQ ID NO: 4186916 - RNA, 87 nt, Human
aaguaaaaaauccuguucucauaguggaaaauaggucaaauaucuuguuuugaaccugugcccccuauagaauagaggcacauacuu

SEQ ID NO: 4186917 - RNA, 66 nt, Human
aaguaaaaaguucagauuagacucaagagcucugguuugcucuugauucuucugucacuucugcuu

SEQ ID NO: 4186918 - RNA, 62 nt, Human
aaguaacacauguuacuucugccuacauuucagugguuauagcaagucacauggucaugcuu

SEQ ID NO: 4186919 - RNA, 74 nt, Human
aaguaauaucuguuggcuuuggaaauaauauuauauuuaguauuauauuuaauggaaguuagcagauuuagcuu

SEQ ID NO: 4186920 - RNA, 74 nt, Human
aaguacaccagcagcugacuccaagagagccuauguuaucugugcucaaggccuuuucagcucuuguuguacuu

SEQ ID NO: 4186921 - RNA, 63 nt, Human
aaguacagaaggagcgaacaauuggugcuuagcaggagcccuaccuuccuccucucuguaguu

SEQ ID NO: 4186922 - RNA, 61 nt, Human
aaguacagauuccuagugagauauuggaucuacugacuugaaaucuuuagggauguggcuu

SEQ ID NO: 4186923 - RNA, 130 nt, Human
aaguacagccacauccccucugauccuuuuggauucucacaguguaauauugaacccaaccuuuggaacuggguuaucagauguugucaucagugugucuuccaggauuuuaaacucugcuggcuugccu

SEQ ID NO: 4186924 - RNA, 70 nt, Human
aaguacagggguagaguugcuuuguggaguccccuuguuggcuuccuggagaauccugccaccuguccuu

SEQ ID NO: 4186925 - RNA, 61 nt, Human
aaguagacagucaucuacuuugggaagacuaauagguccuuagguaacggcucuucugcuu

SEQ ID NO: 4186926 - RNA, 81 nt, Human
aaguagcagagaaaauuagagauugguugacagauuugggaauuuuaauuucuucuuaguuuuuaacuuucaucuuugcuu

SEQ ID NO: 4186927 - RNA, 129 nt, Human
aaguagcuuagaacagcagauauuuguugucuuacaguucuggaggcuccacaucugagaucaagaugucuguaggguugguuccuucugagggcugugggagagaaucgcuuuugugcuuuugcucuu

SEQ ID NO: 4186928 - RNA, 84 nt, Human
aaguaguauacauucauggguuuuacauuauaagggcuguuuaacagacaaauaaaauguaaaugcccgugaucuaaauuacuu

SEQ ID NO: 4186929 - RNA, 96 nt, Human
aaguaguccucgggaauuauaugcaauuugcagauucugucagguuucucaggaagacgugcucaauuuguaaauuuaugugaccagggaauauuu

SEQ ID NO: 4186930 - RNA, 55 nt, Human
aaguaguuggaaauaagacagagucucaguaccugacuccuaguccaacaugcuu

SEQ ID NO: 4186931 - RNA, 90 nt, Human
aaguaugugugcccuagcauuuauaaucauguguucauucacaugaucauaaguggacacaugaccauaaaugcuaaagcacacuuacuu

SEQ ID NO: 4186932 - RNA, 100 nt, Human
aaguauguuuauuuugccaugcauuuuaaguuuacuguugauauuuagucuacauaugguauauggacuuaaaauuugaugugggcauaaaaauauauuu

SEQ ID NO: 4186933 - RNA, 57 nt, Human
aaguauuagacagccugugggcguaagaucuuguagcccacuguuguccuaguacuu

SEQ ID NO: 4186934 - RNA, 106 nt, Human
aaguauuuuuaccucugagucacauacuauguaauagaguuauagacagguuaaugacuauuucaaucuguguaaagugugcaaugaucaugccuaaaagucacuu

SEQ ID NO: 4186935 - RNA, 108 nt, Human
aagucacagcguaucugucccgugaaacaaauaugugauaucuaggaauuuaaaauaaagauguuacauuucucuuucuuggacaaugaacagaaauuucugugacuu

SEQ ID NO: 4186936 - RNA, 69 nt, Human
aagucacauggcagagagaaguuaugaauuacgaaucaggggcaauaaucuacucugccacugugguuu

SEQ ID NO: 4186937 - RNA, 81 nt, Human
aagucagaagcauuuguggcugaacacuccugucugucugugccaaaggaauuuuccaagcuacagugcuuuuguuagcuu

SEQ ID NO: 4186938 - RNA, 57 nt, Human
aagucagacagcugagcugccuaccagcugugcagcuuugggcaaguugccuggcuu

SEQ ID NO: 4186939 - RNA, 56 nt, Human
aagucaggagaaaauaucaggaagugggggcucugcauuuccucuuucucuuacuu

SEQ ID NO: 4186940 - RNA, 59 nt, Human
aagucauagggaaauggguauacacagcuaaauaagaguauccaucauguccaugacuu

SEQ ID NO: 4186941 - RNA, 55 nt, Human
aagucauuccugcuuguugcccauucaaaauuagggagugagcuggacuugucuu

SEQ ID NO: 4186942 - RNA, 60 nt, Human
aaguccagaacuccugugauagcagagccuucuccaccugcucccaucaggaacuggcuu

SEQ ID NO: 4186943 - RNA, 56 nt, Human
aaguccagggaucaaaguaggcaaaaauauaaugcccaacuuuauuuccuugauuu

SEQ ID NO: 4186944 - RNA, 65 nt, Human
aaguccaguaugagaaaccugccuucuggggauuucuucauauagcuguucuuucagcuggucuu

SEQ ID NO: 4186945 - RNA, 71 nt, Human
aagucccucccaagaguagccauuuaguuguguguuuuggaacacagcucagacaucacugcucuggacuu

SEQ ID NO: 4186946 - RNA, 77 nt, Human
aaguccuuuaaagcuuucaaucagacugggaggaacuggucuuucccagggcugcagauggaggcuaacugggaguu

SEQ ID NO: 4186947 - RNA, 57 nt, Human
aagucggagugguacagagcgaugcauccucuuacacaauuacucacuccuggacuu

SEQ ID NO: 4186948 - RNA, 83 nt, Human
aagucgugcucugcugcccacuguauuucuccaugcucguguccuggagugaacgcugcagugauggcagcacagaaccacuu

SEQ ID NO: 4186949 - RNA, 82 nt, Human
aagucuauggucaaagauaaagugaucuuagaaccaagccuuuaaacuacugagaucacugaaauacuuugcccuccuucuu

SEQ ID NO: 4186950 - RNA, 106 nt, Human
aagucucauuugauguuuuuccucucaaggaauuuaguuuaguaaagcacaaauacuuugcgauauuguuuuucuucagaggguaaaugaguaaauaaugaggcuu

SEQ ID NO: 4186951 - RNA, 75 nt, Human
aagucucuuuuaugagagguuucgucagaggaagagcucaagugauucuaucugacggcuucuuuuucuaggcuu

SEQ ID NO: 4186952 - RNA, 78 nt, Human
aagucuguggcucauucuuuagaauauacuuauuacugacaaauucaagauugcugaagaaagugagugauaaggcuu

SEQ ID NO: 4186953 - RNA, 67 nt, Human
aagucuuugcuacugugaauagugccacaauaaacauacgugugcaugauuuauaguagcaugauuu

SEQ ID NO: 4186954 - RNA, 70 nt, Human
aagucuuugcuacugugaauagugccacaauaaacauaugugugcaugugucuuuauaguacaaugauuu

SEQ ID NO: 4186955 - RNA, 70 nt, Human
aagucuuugcuauugugaguagugccacaauaaacauacgugugcaugugucuuuauagcagcaugauuu

SEQ ID NO: 4186956 - RNA, 70 nt, Human
aagucuuugcuauugugaguagugccgcaaaaaacauaugugugcacgugucuuuauagcagcaugauuu

SEQ ID NO: 4186957 - RNA, 70 nt, Human
aagugaaauuacagccuuggguagcuucuuacuugggaggcuaggaacagcccggcccugugcaucacuu

SEQ ID NO: 4186958 - RNA, 81 nt, Human
aagugaacugucugaggccugaagcagcagaguggcuugaccagagcagccugcagagggagggccuuauuuaguucacuu

SEQ ID NO: 4186959 - RNA, 56 nt, Human
aagugaccucaugguuucuccugauacgaaacacugggaagggcaccaugucacuu

SEQ ID NO: 4186960 - RNA, 102 nt, Human
aagugacguggaaggauuugagugugguuucuauguggcaagaucaaaaauuguuuuugauaaacauuuuaggaacuaacaagaugaugcuuuuacuugcuu

SEQ ID NO: 4186961 - RNA, 62 nt, Human
aagugacucguugcugacacauggcauuucuugagcagccauuaauuagcaaaauagcacuu

SEQ ID NO: 4186962 - RNA, 80 nt, Human
aagugagaugugaggacguggaggcaguggcuauuggcccaucuaccaagagcuucugcucuucauggaaacauguacuu

SEQ ID NO: 4186963 - RNA, 123 nt, Human
aagugagcugggucaaccaucaguuuggcuuucucucuauccugugguuuuuuuccccaucucagcaggaaguagaguuggccagccaugaugauaaacaaagaaggauucagcauuuuacuu

SEQ ID NO: 4186964 - RNA, 60 nt, Human
aagccgggccugagaaaugacagcagcuuccuccugcgguuuauucuuccugccuugcuu

SEQ ID NO: 4186965 - RNA, 71 nt, Human
aagccuaaagcuguuuucugccacccaagggauauuuuuuucucuucacugugcuucaagcagcuggguuu

SEQ ID NO: 4186966 - RNA, 129 nt, Human
aagccucaccacuguauccccagcgaggucucucuuacaugcaagcuggaaggaggcuugcuaaugucagucucugaauucugaugcaagugagaggcagcccauagugauauagguggaaacagacuu

SEQ ID NO: 4186967 - RNA, 67 nt, Human
aagcaggagauagaauugaggaaguuccuggcuaguuccuucuccuugcucagucugucuccagcuu

SEQ ID NO: 4186968 - RNA, 109 nt, Human
aagcaguaaaaugauauggacuguuagaauguaaaauauaugaaauaagucauuauauguuagugcugcucugacauagggacguauuauugagaaucaacuuuugcuu

SEQ ID NO: 4186969 - RNA, 83 nt, Human
aagcagugacauugugugcauuuaaaguuucauauguggcucucauguguggcuugaauacaaaugcucacaguguuucccuu

SEQ ID NO: 4186970 - RNA, 62 nt, Human
aagcagugccuggauagcaacaugagugaugcucacuucauguggucuggccgguacuucuu

SEQ ID NO: 4186971 - RNA, 71 nt, Human
aagcaugaaauuugaccaauuauuuacugauagaguuauggaaagaugaagcuguggcagauuucaaguuu

SEQ ID NO: 4186972 - RNA, 56 nt, Human
aagcaugcaaucugugauaaggaugauuuccuuccugcaucaacggagugguguuu

SEQ ID NO: 4186973 - RNA, 73 nt, Human
aagcauuuaaguccuucuuuauaucugcucacauuccaaguaaauuguagagaucgcuuuguguagagugcuu

SEQ ID NO: 4186974 - RNA, 67 nt, Human
aagccagaacuauugggaaauuacaguuugcuggagcaaacugcuguggccuaguacuuacugccuu

SEQ ID NO: 4186975 - RNA, 72 nt, Human
aagccaggacagcaagaagcgagcagaaccaggaacgccugucugacccguggcucugccuccaaguggcuu

SEQ ID NO: 4186976 - RNA, 92 nt, Human
aagccaucagagguguccuguuuaucugugugacucggcccucuuugggucacaaaggccagaugauccagcagcuaccuggagggugguuu

SEQ ID NO: 4186977 - RNA, 124 nt, Human
aagcccaccauucauuauacugcucuuucuuuuucucacugaggcaucccauuacugcuuguuuucaucaguaagauucuucugaaaaauuacaaggaaagguagccagugacauuuauggcuu

SEQ ID NO: 4186978 - RNA, 61 nt, Human
aagcccgguugggaacgugguguccgagaccgucugggauccccgcgcgcacggccggcuu

SEQ ID NO: 4186979 - RNA, 129 nt, Human
aagcccuaugugcuucuccuucagccaaccuguuucaacucacacuagucuauccauuagcugguaaacacugagcaccggcuggguacagggcagugugcugggcaugaugggugggugauaugcacu

SEQ ID NO: 4186980 - RNA, 85 nt, Human
aagccggggaucauuuuugaccauggguaggaucagggagauuaaccuuguuuuacaggugaaaaaugaagauccagagaggcuu

SEQ ID NO: 4186981 - RNA, 81 nt, Human
aagccuaguuuuggaaaucauuucuugccaagugaaaaggugcuaagcuucucagcaagaagucauuuguagcacaggcuu

SEQ ID NO: 4186982 - RNA, 76 nt, Human
aagccucaacgacuacuuagauucgaagagaaaugcuuucccaagguucuucuucauuucugacgaugaguugcuu

SEQ ID NO: 4186983 - RNA, 64 nt, Human
aagccucuggaaauggccauagucauccuuuugggugauaaguuaugggauuucuguucggcuu

SEQ ID NO: 4186984 - RNA, 73 nt, Human
aagccuuugucagacaaauuggucguuuggagcagucauuauaucuccaaaugccaggaaucucugaagguuu

SEQ ID NO: 4186985 - RNA, 57 nt, Human
aagcuaagacuuagugacuuagugucuuuccaggaaguacaagcuaagacuuagcuu

SEQ ID NO: 4186986 - RNA, 127 nt, Human
aagcuaaguagucuuaaaauagacaaaauagaaaagcuauuugcucaccugaucauguuucucaauauggugucaggaugacaagugcuuucaugcaucucauuugaguuuuaaguugucucagcuu

SEQ ID NO: 4186987 - RNA, 57 nt, Human
aagcuacugagcagauguucgccccugaagccugggagagacagagcucaguggguu

SEQ ID NO: 4186988 - RNA, 60 nt, Human
aagcuagggcuccuucccacucugccaacauuguaggagugcuggagaagcuucuggcuu

SEQ ID NO: 4186989 - RNA, 73 nt, Human
aagcuauuuuaaaacagagccaguuuuugcaaacagggguacuguuuacaaaaccgugguacugggguaguuu

SEQ ID NO: 4186990 - RNA, 71 nt, Human
aagcucagcagccaggcccugucaauagcugugaauaacugacuucugggcauucagcugcacaugagcuu

SEQ ID NO: 4186991 - RNA, 61 nt, Human
aagcucaugggugcuguacuuucugaguuccugagaauauuugccuguugccuuugggcuu

SEQ ID NO: 4186992 - RNA, 72 nt, Human
aagcucugacacuaaaguauaggguaucucgccauucagcuaauugcuaggcggcuguacuuuugagaguuu

SEQ ID NO: 4186993 - RNA, 62 nt, Human
aagcucugcucagcagacuaggcagcaggaaagagucaagcaucugucucugagcuagacuu

SEQ ID NO: 4186994 - RNA, 66 nt, Human
aagcugauuucaggaacuacgaggggguuaugaugguucuaccucagaauaguccucagaucacuu

SEQ ID NO: 4186995 - RNA, 74 nt, Human
aagcugggccauauacccacugucuccauuucccguuguuugggaagcaugcacggggcauaugggacaggcuu

SEQ ID NO: 4186996 - RNA, 74 nt, Human
aagcugugagggcagggaccagagguuagggguccucucucccugguugugcccuccccagccccucacagcuu

SEQ ID NO: 4186997 - RNA, 55 nt, Human
aagcugugcugcuuaguagcuguguaagugacaagacugcacugagccacaguuu

SEQ ID NO: 4186998 - RNA, 100 nt, Human
aagcuuagauguacuggaguauugacuuaauggggaaaaaagcaucacuugaagcaagacaugcaguuuguuccauucaccaaugcucugcccacagcuu

SEQ ID NO: 4186999 - RNA, 84 nt, Human
aagcuuagugauuaaauggcuuggccuuugcuguuaaaaagucuugauuucacaucagagcccggcaauuuauuuguuauguuu

SEQ ID NO: 4187000 - RNA, 62 nt, Human
aagcuuauuuuggcaggaugugcaaaaacacaaacuacaugccuggccaaucugauaggguu

SEQ ID NO: 4187001 - RNA, 79 nt, Human
aagcuucugcccgauucucaugucuugcuucaccugcuauugcaaacucagaggucucaaguugagaaggcagagccuu

SEQ ID NO: 4187002 - RNA, 57 nt, Human
aagcuuucagagcagaaugugagcacucugcacccagucacuuugugcuccagguuu

SEQ ID NO: 4187003 - RNA, 60 nt, Human
aagcuuugauaauuggauuacucacacacucugugaguagcucuuagaagucagcaguuu

SEQ ID NO: 4187004 - RNA, 62 nt, Human
aagcuuuuuggauuugcuucagaucuuuauuuccaagcucaguagcaaacuccugaaagcuu

SEQ ID NO: 4187005 - RNA, 59 nt, Human
aaggaaaggaugagcaugcauucuuauuaccuaugagaaugaagugccuuccuagucuu

SEQ ID NO: 4187006 - RNA, 56 nt, Human
aaggaaccauuugugugcaugggcauaguaugagccauaguaucaguugguuucuu

SEQ ID NO: 4187007 - RNA, 62 nt, Human
aaggaaguuaguucuuggcaaaggcauuucaugcaguguacuuugucauucuaaccuuccuu

SEQ ID NO: 4187008 - RNA, 73 nt, Human
aaggaauaagaauguggauaagugaaacaaaguaccaguuuggaacuacaguacuauaucuauaggcuuccuu

SEQ ID NO: 4187009 - RNA, 56 nt, Human
aaggaaucacuucuuuaaaugaaaccuggguggcauuugagagacauguauuccuu

SEQ ID NO: 4187010 - RNA, 102 nt, Human
aaggaaugcuguauggaugacaucuaacugguuuggcucagggucucauugcagcuuugugagaacuucagcaaaaccaguuagguuguacccagaauccuu

SEQ ID NO: 4187011 - RNA, 71 nt, Human
aaggacugcgcuugaucauguaccuaauacuucuccucacucggaaguugauagaguacaugauuguucuu

SEQ ID NO: 4187012 - RNA, 59 nt, Human
aaggagaaacgucagcaauaagaguaaagucuauaaacuuggcuggcuuguauuuccuu

SEQ ID NO: 4187013 - RNA, 62 nt, Human
aaggagaggggguuggggcagugggcucaguggggcaggcagccacgauucccuugauccuu

SEQ ID NO: 4187014 - RNA, 61 nt, Human
aaggagauugguuguuuagugugaauuagaugcaguuuuguacuuugcaauguaucuccuu

SEQ ID NO: 4187015 - RNA, 72 nt, Human
aaggagcagauugguaagaucauugccucugggaaguuaguggggaaaaaaauggucuuaugaaacuaccuu

SEQ ID NO: 4187016 - RNA, 105 nt, Human
aaggagcucugucaaggauccuuaaacacuacacauuuauuucuugugagaaaaugcuuuaacucauugaagcacaggggaaauaaguuguugauagaccuucuu

SEQ ID NO: 4187017 - RNA, 126 nt, Human
aaggagggauaagcgucagaggaaauggaaaaggggaaauagaaaagaggaaguaugguccaugcugcccaaaccgcugcuucuuauuaauccuucucuguccccucagcaguuuuucucuaucuu

SEQ ID NO: 4187018 - RNA, 62 nt, Human
aaggaggguucccagguccuggaggcaccaguggccccugcagcuccugggaucucauucuu

SEQ ID NO: 4187019 - RNA, 99 nt, Human
aaggaguccauuuguguuguauuggcuucuaguuugaggaaaaacccaaggugcuucucuggcuggaaacuugaaacaucacaacuaguggcauugcuu

SEQ ID NO: 4187020 - RNA, 76 nt, Human
aaggauaaaacucaggaguuucagguguaagugaacugaaacaacgcggcccauuuauucucagauccuuguccuu

SEQ ID NO: 4187021 - RNA, 92 nt, Human
aaggauaguucuaagucauaggauguuuguuugaagacauaaaauguaacuugauuguuagaaaacaggcgcuuacuaagaaaaauauccuu

SEQ ID NO: 4187022 - RNA, 74 nt, Human
aaggauguauuauuauggaacauuagaaccagaagaaagguuauauaguccuacuguccauaaaguauaacuuu

SEQ ID NO: 4187023 - RNA, 61 nt, Human
aaggauguggcauuuuucauauauucaguacaaaauuaauaugauagugaccgucaucuuu

SEQ ID NO: 4187024 - RNA, 69 nt, Human
aaggauuugaucuuuauaauaguuuugaucuuuauuuaggguuaggauuagguuaagguuuugaucuuu

SEQ ID NO: 4187025 - RNA, 91 nt, Human
aaggauuuuugcagaaaucacauuuaacccuuucaauguguaguaugaaggaagguuuuguaaaaaugaaaugauuaacugauagauccuu

SEQ ID NO: 4187026 - RNA, 61 nt, Human
aaggcaaugggauggaucauguaacaaaguugguuugggacuccacauccuccucuuccuu

SEQ ID NO: 4187027 - RNA, 58 nt, Human
aaggcacaacacaagagggugacacaugacugugacacucuuugucugcugugcacuu

SEQ ID NO: 4187028 - RNA, 66 nt, Human
aaggcacacuuucacaccgcucacauugugcauuacauuuuggaguccuuguuggaagugaacuuu

SEQ ID NO: 4187029 - RNA, 74 nt, Human
aaggcaccaguagauuugguaaacuaggaagcggugagggcccacuuccugguuuauagacugauggcugucuu

SEQ ID NO: 4187030 - RNA, 58 nt, Human
aaggcacuguacuaguuaguuauugcuauauaacaacugccgcuaaacauagugccuu

SEQ ID NO: 4187031 - RNA, 79 nt, Human
aaggcagaauguccuuccaccuguuuuaugcuguaagacaaacuuccaagugcgaggcaguguggagggcuguugccuu

SEQ ID NO: 4187032 - RNA, 77 nt, Human
aaggcagccugguuuaguagucgcauaucaucuauaagaccuguaggcuuuugugagauuaagcuacucaugaccuu

SEQ ID NO: 4187033 - RNA, 75 nt, Human
aaggcagcuggucaauaaucauguaguacaauggcuuggaauuguaaccacuaugguuauugauuguccuguguu

SEQ ID NO: 4187034 - RNA, 59 nt, Human
aaggcaguccuccuagguuauggaauuuccccacuuucucaucuuuggcaggacuccuu

SEQ ID NO: 4187035 - RNA, 71 nt, Human
aaggccaaaaagacaaugugccaguuucaauuuauguuauuaaggggcuuuuauauuuucucuuuggccuu

SEQ ID NO: 4187036 - RNA, 86 nt, Human
aaggccagagcacagauugauuuaaaauauuugcuacuuauuguuuucuaaaagcuuuuauguuuauauuaauuuguugcugucuu

SEQ ID NO: 4187037 - RNA, 74 nt, Human
aagcugacagaauuagguaaguucaucugaaauucagggcagaauucagaacuauaguaguuucaugucaguuu

SEQ ID NO: 4187038 - RNA, 70 nt, Human
aagcugacaucuggagucugggcuguugcuaaguaguucagcacagcaugcccacuuucagaguuagguu

SEQ ID NO: 4187039 - RNA, 66 nt, Human
aaguggugguaugaaccgagggaaaaggcguccaaagaggccacgacuugcuuucaaacuccacuu

SEQ ID NO: 4187040 - RNA, 76 nt, Human
aagugucaccucagagauacaaaccauggcuauuccaacuagagaagccaggguuggucucucugaggucacgcuu

SEQ ID NO: 4187041 - RNA, 89 nt, Human
aagugucagauuugauaaaguagauuuguucuagaagaaaacacucccuuucuauuuucuaguauacaucuguuugccagagugcauuu

SEQ ID NO: 4187042 - RNA, 61 nt, Human
aagugugaagucaaucaauacauuggggcaagcaguuuauuucaauguuaauuucacauuu

SEQ ID NO: 4187043 - RNA, 128 nt, Human
aagugugagcuccuguggucaugcaagucuuucuucagccccagggcccuggacagcuacagucuggagggcugucuuuguaguccagagcccuguuucuggaggaagguuccauggagcucacacuu

SEQ ID NO: 4187044 - RNA, 59 nt, Human
aaguguguauuuuucuucagugguucacuguugccuucugggugaauaauacagcauuu

SEQ ID NO: 4187045 - RNA, 60 nt, Human
aaguuaacucugaggaggcagaaaacaugauuuguuaacugcuggccucaagggugacuu

SEQ ID NO: 4187046 - RNA, 103 nt, Human
aaguuacagacuucaacugcagaauugcuuaucuaucuuuaaguccuuucuuccaaggauuucuaagcauucgaugggcaccauaauaguuuguuauugacuu

SEQ ID NO: 4187047 - RNA, 95 nt, Human
aaguuagcuaggugagaugauagaugugcuaauuaaauagauggugguaaccauuuuguaaucguauguguaucaaaucaucacauuguagacuu

SEQ ID NO: 4187048 - RNA, 91 nt, Human
aaguucaaucaccuaaucccauggcagagaagaaccaggcccaggagaaaagcucaagccccuucuucucucauagauuaagguugagcuu

SEQ ID NO: 4187049 - RNA, 76 nt, Human
aaguucauugcaucaugaucauauggguugcuuaauuauuacucuuuaguggugaugaugcuauucacauggacuu

SEQ ID NO: 4187050 - RNA, 59 nt, Human
aaguuccuaaagcaucugggcaaagccaggaaacaggcagggcucagcuaugggagguu

SEQ ID NO: 4187051 - RNA, 103 nt, Human
aaguuccuauggcaccugucccauauuagccuccacugggacaccuaacccacuggguaguuucuaguuugagaguuauuuuggauggugcuucucugaacuu

SEQ ID NO: 4187052 - RNA, 76 nt, Human
aaguucuaaaccauuuuugacagaaggccuaaauaaugauuuuuaugucuucaggucagaaauucuaggggagcuu

SEQ ID NO: 4187053 - RNA, 56 nt, Human
aaguugauagcauguuaagcucucaagugccuuuggguuuuaugugcuuucaauuu

SEQ ID NO: 4187054 - RNA, 56 nt, Human
aaguuggauuugaugacugauacgguuuggcuguguccccacccaaaucucaucuu

SEQ ID NO: 4187055 - RNA, 79 nt, Human
aaguuguauuauuuucuguuguuggugucuggcuccuuuuggggguaggaguauuuugcagcagugugauaauuaauuu

SEQ ID NO: 4187056 - RNA, 75 nt, Human
aaguuuauguucuuugaaggcaggguccguaugauucaucuuaguaccuagauuaugccuuagagauaaaggcuu

SEQ ID NO: 4187057 - RNA, 67 nt, Human
aaguuucuguaugcucuucuguaaaacuuugaagugcuuguuccuagaagacuaugcaggagugcuu

SEQ ID NO: 4187058 - RNA, 55 nt, Human
aaguuugagagccuuuaguauagugguuaggauaguaaucuuuggcuccaaacuu

SEQ ID NO: 4187059 - RNA, 57 nt, Human
aaguuuggaaugauagagaccugaguucaagcucuggcucugccacuuaccagauuu

SEQ ID NO: 4187060 - RNA, 66 nt, Human
aaguuugggaaguucuaggguaaacaaagcaaagcuaguuucugugcugcccaacuucucaaacuu

SEQ ID NO: 4187061 - RNA, 106 nt, Human
aaguuuuguucuggagacccuguguauugcaaaggucccauucaagaagaggacuuccucucuuuuggagagcaccugugcaguaaaggguuaaccuagcaagcuu

SEQ ID NO: 4187062 - RNA, 80 nt, Human
aauaaaaugucuuagaaauauggugcugccgccguauguaaggugcaggguggcagcaccauguuuccaagauuaguauu

SEQ ID NO: 4187063 - RNA, 130 nt, Human
aauaaacugccuuaucuuuuguucauucacuuuaugaacauacaauuauuaagaaccaacuauuuuuggcauuccauaaauguuuguggauaaauguguggaugaauggauauuauaugcaagucagagu

SEQ ID NO: 4187064 - RNA, 125 nt, Human
aauaaacuuauuugggaaguuugcaaacauggagaugucuugggcucuagaguuucugacuuaguaagucuggaguagagccuagaaaucugaauuuuuauaaaauuuccuaaaguuauucuguu

SEQ ID NO: 4187065 - RNA, 71 nt, Human
aauaaagcaugaggcauuuaucauuucaugagucaucuugacauaaaaggauaaaugccucaugcuuuauu

SEQ ID NO: 4187066 - RNA, 92 nt, Human
aauaaagcuguacuuaucuaugaauguuaguauguguggguguacacauauacacccauacacacauauuuaugugauaaguaugccuuauu

SEQ ID NO: 4187067 - RNA, 71 nt, Human
aauaaagggagggcaccagaagagccagaugaguuacucaugagcucuuuucguggcuucuaaucuuuauu

SEQ ID NO: 4187068 - RNA, 83 nt, Human
aauaaagugucagcaucagaagacugucuuuuccauguuaacaucaacauggguaagacucuuuugcccaagacaaucauauu

SEQ ID NO: 4187069 - RNA, 80 nt, Human
aauaaccacaaaauugugugugugcauguguguguguguguguguguguguguguguuuacaguuucucauguggcuauu

SEQ ID NO: 4187070 - RNA, 70 nt, Human
aauaaccacaaaauugugugugugcauguguguguguguguguguguuuacaguuucucauguggcuauu

SEQ ID NO: 4187071 - RNA, 108 nt, Human
aauaagaaacgccugugaaauuaucuuaguaccaaccuaaaaacaacauauaucacaucaggugauucacucauauuuuacguuuacuuuucacauucaauuucuauu

SEQ ID NO: 4187072 - RNA, 84 nt, Human
aauaagaaagcaaugcuuguggaauguacagugcauauuggcagcacaugccucauuacgauucaccagcuugcuucuccuguu

SEQ ID NO: 4187073 - RNA, 121 nt, Human
aauaagagcaaacaauaaaauuggaccugaauaguuugaauuuaucagaugucaaugaauaauuucacuuaauagcacuggugaaaguuuaauuguuccuuucuagccuuuggcuuuuauu

SEQ ID NO: 4187074 - RNA, 83 nt, Human
aauaagcuugauaguaaagguggcuuacuugauaguccacagaaagauagccaagucaagcaugcccuuauuuauggcuuauu

SEQ ID NO: 4187075 - RNA, 55 nt, Human
aauaaguacuuggggauaacuugggcaucacccaaguuauauacuaguauuuauu

SEQ ID NO: 4187076 - RNA, 87 nt, Human
aauaaguuauuaucaucucagcuuugauucaccaggcaauugaaucauaucuugaugagucagaacugaaggaauaauauauuuguu

SEQ ID NO: 4187077 - RNA, 69 nt, Human
aauaaucaauuccacgccagugacgagacaggaggugauucagcuagcuggcuggcaguaaagguuguu

SEQ ID NO: 4187078 - RNA, 83 nt, Human
aauaaugggaaaaguuuaaaguaagauuucaugguuuuuuauuaugcaguaaaaagcagcugagauuuucuauuucuauuauu

SEQ ID NO: 4187079 - RNA, 99 nt, Human
aauaauguugauauguaaaauccauuuauucuguguaauccugagagaaauucuuacacauguauugcagaagaaaugaaugaauauauccauauuguu

SEQ ID NO: 4187080 - RNA, 83 nt, Human
aauacaacaguuuuuucaacauuggaauguaauuucuguuuaaugucaagcuaauacauuuaaugucgagcuauuguaguguu

SEQ ID NO: 4187081 - RNA, 63 nt, Human
aauacaccuuaaucauaugugucugguauauuaugugccaagcauauaguguuaagguguauu

SEQ ID NO: 4187082 - RNA, 129 nt, Human
aauacagcaucaucauugauuacugccgcauguuagagcaaacauauuuauuucucuuuuuuucucccaaagaaauaaaaucuuuaugugcucugcacguggguuagggaagcuaauaauggucugauu

SEQ ID NO: 4187083 - RNA, 74 nt, Human
aauacaugcccaggggaguagucaauuuauuuuuauucuuguuguuaugaguugacuauucugggugcaguauu

SEQ ID NO: 4187084 - RNA, 100 nt, Human
aauacaugcuugcuaugacauaauugugaugauugaaauacugugugugacaugacuagcacagugcuuggcacacaguaauaacauagcugccaguauu

SEQ ID NO: 4187085 - RNA, 86 nt, Human
aauacuacagaaaaacuggcauugaagacaguaggugugcaagccacuuaccuccuugccuucagcgucgauuucuguccuguguu

SEQ ID NO: 4187086 - RNA, 71 nt, Human
aauacucuccccauuccuugggcugccuuauuauggccauucuauccaaauuggcaguucagggaauuauu

SEQ ID NO: 4187087 - RNA, 86 nt, Human
aauacuucacgaugaugcauccguuaauaaaaagacaguguguaugaagcaaacuguuauugugaacgggcaauggugagagaauu

SEQ ID NO: 4187088 - RNA, 61 nt, Human
aauacuuccagggauacuuuuguaccugaaaguccuaagguaauaaagagcuuggaguguu

SEQ ID NO: 4187089 - RNA, 75 nt, Human
aauagcccauuuguugauggcccacaaguacuuucucguaacuagaaagaugugcuaucaacuggagaagcuauu

SEQ ID NO: 4187090 - RNA, 68 nt, Human
aauagcugcauaaaguauagaaggcuauaaagaauugccuggacuaucauaucucugugcagacuauu

SEQ ID NO: 4187091 - RNA, 78 nt, Human
aauaggucacacaugauaagaaaguuuaaaccagagcacagaaaagcuugauuuuaaaauugucguuguguauuuauu

SEQ ID NO: 4187092 - RNA, 98 nt, Human
aauaggucauuuuuugauguacauauuguuuuguaaaguguggagauuauuuaauugauaagucacauucugaaauccauguggguagaugauguauu

SEQ ID NO: 4187093 - RNA, 82 nt, Human
aauaguaaaauuguaacuacauugagaacauguuaaggaaauggucauauuucuguuccuagaaagauacauaguugcuauu

SEQ ID NO: 4187094 - RNA, 99 nt, Human
aauaguaaugauuaucauuugcaaagugcuugcagaguauuaagcauuugcuaagugcuuuacauacagcaaccuuuggagcugauuucuauuauuauu

SEQ ID NO: 4187095 - RNA, 121 nt, Human
aauagucauuagucaacuuuuguugugucauugaaauucuaaacggcuucacaggaauuuaacaaauuuaauuugagucuuggaaguuuuuuacaacaaggaugaaaaaagauugauuguu

SEQ ID NO: 4187096 - RNA, 117 nt, Human
aauauaaacauuaagagguuggggaauuuugucuguuuuuguucacugcugaaucccuaguguccaggacagugcgagacacaguaacccagagugggcaccuaaugaauguauauu

SEQ ID NO: 4187097 - RNA, 79 nt, Human
aagccucccuggagcaggucguucaggugcuggcaucucagggagcaccugagggcgccgagcucccaggaggaggcuu

SEQ ID NO: 4187098 - RNA, 74 nt, Human
aagccugcauucuuacaacuuucaaugguuuucaaucccuuuccauauuaaggucuguaaggggucaugggcuu

SEQ ID NO: 4187099 - RNA, 76 nt, Human
aagccuggcauauuugguauaacuuaagcaccagguaaaaucuggugcuuaaguuguaccaaguauagccaaguuu

SEQ ID NO: 4187100 - RNA, 62 nt, Human
aagccuucccuuuuugagcucagguccaaaaaagcaguuuuggcauuaaagagaaaagguuu

SEQ ID NO: 4187101 - RNA, 72 nt, Human
aagcguaguagggcaauauuucccagaaaaaucuaugaagugauuuguuuuguccugcccuuucugcaguuu

SEQ ID NO: 4187102 - RNA, 55 nt, Human
aagcuaagauuacagauuugggucaaugguuaucccaaaucugcaaucuuggcuu

SEQ ID NO: 4187103 - RNA, 63 nt, Human
aagcuacgugaauucucccaguaacagaugaggaaauugaggcucagagauguucaguagcuu

SEQ ID NO: 4187104 - RNA, 84 nt, Human
aagcuacuagaauuaucuaguucacaguuuuucagccucuaugcuauuaacacuuugggcuggauaauuauuuauuuguggguu

SEQ ID NO: 4187105 - RNA, 64 nt, Human
aagcuaggccucaguuuccugagugcaaaaaugaguggcagaaaugaacugaggucugaggcuu

SEQ ID NO: 4187106 - RNA, 129 nt, Human
aagcuauuacagaacugaauacgaauaaaauucugccugguuuaugaagauuuuaagagaaguucacauuuaaauuucuacgugauccaggggaccuauuguaaacagaaaaaaaugccacaauagcuu

SEQ ID NO: 4187107 - RNA, 59 nt, Human
aagcucugggaccacgugacucugcuggacacagcaggggaaggcagugguccaggcuu

SEQ ID NO: 4187108 - RNA, 57 nt, Human
aagcugaggucaaguagcuaguaaguaguagauuuacuagcuacugaaucuuaacuu

SEQ ID NO: 4187109 - RNA, 82 nt, Human
aaggggauugaggccagugguucucugugucccagaggugucccugggagauguagugucacuggacuagagauucauccuu

SEQ ID NO: 4187110 - RNA, 107 nt, Human
aaggggccgauuuagcugguaggacuggcagaacgugaugcggguguggcagaacuugggcuggaacgucuugcacaucuucacuguuagacuugagcuaguuccuu

SEQ ID NO: 4187111 - RNA, 73 nt, Human
aagggggagaauaugugaagggggcuuccaugggaggcuucgauggcccacccacccuuccauucuuccucuu

SEQ ID NO: 4187112 - RNA, 73 nt, Human
aagggggguaggagggacuucaagucuacuuaauacagacuccuggggauccauuccuuuauaagacccacuu

SEQ ID NO: 4187113 - RNA, 63 nt, Human
aaggggucaguguuggucuaaauuucugacuggucacacauucaguagcagcacuggccgcuu

SEQ ID NO: 4187114 - RNA, 69 nt, Human
aagggucagggaauaaaauuguaaauuguagcaauagcagagaaauacaauuuugucccagcuucccuu

SEQ ID NO: 4187115 - RNA, 86 nt, Human
aagggugcuggacuggcuggcgggugacacaccugggguuccugggccccuccuggccacacugucagugggccucaagcucccuu

SEQ ID NO: 4187116 - RNA, 56 nt, Human
aagggugcugugagugaauuccagggccaauuuguugacuuuacaucagcacucuu

SEQ ID NO: 4187117 - RNA, 77 nt, Human
aaggguucuguuugauuuuuaaaaagguacuuucuuuuguaauuaggugcaaaaaggaaagcacagaaaggacucuu

SEQ ID NO: 4187118 - RNA, 62 nt, Human
aaggguugguucugaaacccagcuuccuccccuagcugaaaacacuucugagccacuuccuu

SEQ ID NO: 4187119 - RNA, 103 nt, Human
aagguaauggauuguuucacaaguaaaguccuaaguguucagcuauuucagcucuucuuugccauuuggggcuucuuacuuguuaggugauuucuccggccuu

SEQ ID NO: 4187120 - RNA, 78 nt, Human
aagguacagauaauccaaguaguuuucaagguuguagagaaugccauuugaguaauuuuuugguuuuauuucuaccuu

SEQ ID NO: 4187121 - RNA, 61 nt, Human
aagguaguuuucuuuaaugcuggaauuucaggcaauggcagcccaaagagagagcuacuuu

SEQ ID NO: 4187122 - RNA, 122 nt, Human
aagguauaucuggaguuauuuugaauucuauggucaucuguaauucuguuccuuuuucuucuacuaaaggaggauauuagaaugcaggugaauaagagcaacuucacucuaggaacauccuu

SEQ ID NO: 4187123 - RNA, 58 nt, Human
aagguauaucuuuaaaagugaaugcaauuuuauuugcuuuuuauuugagacaugccuu

SEQ ID NO: 4187124 - RNA, 86 nt, Human
aagguaugaguugaagaagaaccagcacagcagaggaagcagauaugaagucugagccaccugccagugcuguuuacucauuccuu

SEQ ID NO: 4187125 - RNA, 90 nt, Human
aagguccccaggaauuacagagcucauuucuaaggggcucaaaauuagcaaagagacuuuuggagauguuuucugagcuuuagggaucuu

SEQ ID NO: 4187126 - RNA, 64 nt, Human
aaggucucaaguuuuccaaagugugagagaggcaccaugaauuaguggagaaaacugggacuuu

SEQ ID NO: 4187127 - RNA, 58 nt, Human
aaggucuuauggugucuuaguuuugguuugccuggaagcagggcaugaauaaggguuu

SEQ ID NO: 4187128 - RNA, 86 nt, Human
aaggugaaaaauaagcuuuuaggagaaaaacuugaaauuccuuuucuaggauuucuguaacuuaugaaaguucacuguuuucccuu

SEQ ID NO: 4187129 - RNA, 84 nt, Human
aaggugcaacucagcaggcugcuggcguugaagucguucauucgauagaguucagugugugguagaaucugaaugaggcacuuu

SEQ ID NO: 4187130 - RNA, 106 nt, Human
aaggugccuaccuagguccuggggagugguggucaggccauggcugaaaaauuggucuugguuugagggccaccacauuuuucuaaggguuugugucaucaaccuu

SEQ ID NO: 4187131 - RNA, 60 nt, Human
aagguggaguugggaagugacuuucuauuuagucacuugaccucuugaacuccuuaccuu

SEQ ID NO: 4187132 - RNA, 67 nt, Human
aagguggcagcagggcugugcuccuuccgaucauuuggaacaaucacauccuugcuucuuccaccuu

SEQ ID NO: 4187133 - RNA, 106 nt, Human
aagguggcuaccuuggauucccagucucauuggugguuuucaaggucucugaugaagaucuuggaagccucaagauacucuuuggaagggaaucucucaacaccuu

SEQ ID NO: 4187134 - RNA, 91 nt, Human
aaggugguuauuucuguacuguggccuuuaagaaacaggaaugaugccuggaauaacuuuaguagcuacaguuagaagguagcagagccuu

SEQ ID NO: 4187135 - RNA, 60 nt, Human
aaggugucggcagagccgcuucccucgggggcucggggggagcgugcacuccaggcccuu

SEQ ID NO: 4187136 - RNA, 57 nt, Human
aagguguggaguggugcgacuggcauuuccauuccagagugcaucacuucaaaccuu

SEQ ID NO: 4187137 - RNA, 89 nt, Human
aagguuaccuagaaaguagguggaggaggagggauuugaaauccagagcccuugcccucagucacccugacuuuauccugguuaaccuu

SEQ ID NO: 4187138 - RNA, 129 nt, Human
aagguuuugacuuuuauuuuccuguauuuaaguguguauuucuuguacuuccuugucuauaauuuauugugauucuggaguuaaggaugccuuacuuuaauauuuuuggaaaauuuuaagacauuauuu

SEQ ID NO: 4187139 - RNA, 58 nt, Human
aaguaaacucaguggucauucaguuuaaccauuuuuggucugaaauacuggguuucuu

SEQ ID NO: 4187140 - RNA, 66 nt, Human
aaguaaagcaaggcgucggggagcuauucuuagauagaugcucacacuccugagcccugcuuacuu

SEQ ID NO: 4187141 - RNA, 95 nt, Human
aaguaaauaggaagcaaaaauggaguaauauuaacauguuaggucuauguggcaaguaacuuguguuacauuacucuuuguauuuuaaaauacuu

SEQ ID NO: 4187142 - RNA, 107 nt, Human
aaguaagcuacuuuguggcuaucuuuguaugcaccauuguauuaccuuguucaacaaggaagagcccgggugacauaacaaaauaaauagacacgaugcugcugcuu

SEQ ID NO: 4187143 - RNA, 71 nt, Human
aaguaauaggaauuagauaauguagagauaugagcucauggaguuuauggaauaguuauuuuucauuacuu

SEQ ID NO: 4187144 - RNA, 98 nt, Human
aaguaauauguauaaaacuaaaagauagcugugaggcuugaaguaauuccaacagaucuuguaugcuuccuguccuuacuuagauuaaugcauugcuu

SEQ ID NO: 4187145 - RNA, 61 nt, Human
aaguacuucuagauggauaaucaccaaauagaaauggugcaaaauauucagaggaguauuu

SEQ ID NO: 4187146 - RNA, 74 nt, Human
aaguaguaagagaacagggaguacggcacauuuagucaaaggcuaggcuggcugaaaaacacccuugacuacuu

SEQ ID NO: 4187147 - RNA, 62 nt, Human
aaguaguguuggugucuguuucauaugauuuauuauuuuugugacagugacaauacugacuu

SEQ ID NO: 4187148 - RNA, 63 nt, Human
aaguaguugucccugaggaacgagacuugaaauggggaaggaugaacccagggaccacugcuu

SEQ ID NO: 4187149 - RNA, 94 nt, Human
aaguauaaugugguauaccuggcuuuaagagacuuucagucuagagaguaggcagaauguauucucauaaagccacugguauuacaguguauuu

SEQ ID NO: 4187150 - RNA, 74 nt, Human
aaguauauauauguacuggcuaaagaccuauccaaaagaggaaauauuucuagaaaguucauguguuuauacuu

SEQ ID NO: 4187151 - RNA, 80 nt, Human
aaguauccuuauagcaaugcuccauuucuuggcaccaauuuucuguguuagucucuuugcauugccauaaaggaauacuu

SEQ ID NO: 4187152 - RNA, 80 nt, Human
aaguauuuccuccuagcuuuguuuuguuuuguuuuguuuuccuuaagacaucuugccuugggaaagugggaggagaacuu

SEQ ID NO: 4187153 - RNA, 80 nt, Human
aagucaaagguugccauccuggcuuugguuuuaaauuguauuccccagaaauccagcuacggggcaacaugaaaugacuu

SEQ ID NO: 4187154 - RNA, 73 nt, Human
aagucaacuggaaagaucaguaggaagagacugagccagaccuucucaugcugaucuucuccaccaaacacuu

SEQ ID NO: 4187155 - RNA, 104 nt, Human
aagucaauugguucuguuuuauuugacuuugcaaaauaaugcugauuugagaaaagucaucacaauugccuaaaguucugugaaauaaugaugugguguggcuu

SEQ ID NO: 4187156 - RNA, 57 nt, Human
aagucacagcagggucccuccacgaugacaaaguugggagccacucagcugagaguu

SEQ ID NO: 4187157 - RNA, 57 nt, Human
aagucacccacaggcagcagaaacuaaugcaaugugucugcagcuauuuugugacuu

SEQ ID NO: 4187158 - RNA, 73 nt, Human
aagucacugguuuuuuuguagagcauuaguuagcagcugccguacaauaaaucaugccaaaauccaguggcuu

SEQ ID NO: 4187159 - RNA, 73 nt, Human
aagucagaugcauuaacuugagaagcagagucauucuggugaaugggaauuuucauguuggcaugacugacuu

SEQ ID NO: 4187160 - RNA, 67 nt, Human
aaggcagcaggauuuggugacugaaguggcugaguaggaggcaagaaaucaccaaacuccuggcuuu

SEQ ID NO: 4187161 - RNA, 60 nt, Human
aaggcagcuuuguaguaaagcuagucaauuuuuguaugguuggugcucaaagcaugccuu

SEQ ID NO: 4187162 - RNA, 66 nt, Human
aaggcaggaugggaaaagauuuacagcuguugaaggguuaaauuaauuaguucacguccugugcuu

SEQ ID NO: 4187163 - RNA, 67 nt, Human
aaggcauugagcaguuacaguaaagggcagacaucaggccucugccaguauguaccugcugugccuu

SEQ ID NO: 4187164 - RNA, 72 nt, Human
aaggccaaaaaagaucugguagcucuugguggaccucacagaacgugagucagccagagcugccauggcuuu

SEQ ID NO: 4187165 - RNA, 60 nt, Human
aaggcccagggauuggaggucaccccucagucaugggcagaacuugaucccgugggccuu

SEQ ID NO: 4187166 - RNA, 55 nt, Human
aaggcccaucugucccguccuggcccaggcuggugcagggacagcaguggguuuu

SEQ ID NO: 4187167 - RNA, 63 nt, Human
aaggccuucccuuugagccgcagguauggcacacacaacucugcagcucugggcaagugccuu

SEQ ID NO: 4187168 - RNA, 58 nt, Human
aaggccuugaagaaaaauccaaugagcuaugagacgucacucagggaaucuuggccuu

SEQ ID NO: 4187169 - RNA, 74 nt, Human
aaggcuaagguuuuucagguuguuaauuccaaagucaaauaauuugaaacaaauuuggaaaaucuaacagcuuu

SEQ ID NO: 4187170 - RNA, 74 nt, Human
aaggcuagggaccugccagaacucaggcuaacugugauguugagcacaggaguggcagguucugacuuggccuu

SEQ ID NO: 4187171 - RNA, 73 nt, Human
aaggcucaauaguagcaugcaauauuauagagaugguuuuacaucuguuuugcauaauguucuuuugguccuu

SEQ ID NO: 4187172 - RNA, 68 nt, Human
aaggcucagagguggaugccuuguggggugccucagcacaugccaagggccauccuaucacuugccuu

SEQ ID NO: 4187173 - RNA, 72 nt, Human
aaggcugaguauuucuucauaugauuacuagucauacaaguuaucccuugcaggaaugccuuuucaugccuu

SEQ ID NO: 4187174 - RNA, 67 nt, Human
aaggcuucuaugagaugauaggcguucuaacaggugaacugacucccuggacaucacucuaagccuu

SEQ ID NO: 4187175 - RNA, 55 nt, Human
aaggcuuguugucacgcucuuguauagccagaaugggaggugagaauuuggcuuu

SEQ ID NO: 4187176 - RNA, 120 nt, Human
aagggaaaucauuuucaugaaauuuuauuugaaucuggcuagagaaaaugcucaccuucuuccuuguguuuugcuuauuugauuaaaugucuuugauuucugugaugugugaagucccuu

SEQ ID NO: 4187177 - RNA, 84 nt, Human
aagggaaauguccuauuuuguaaagagcagcauuucuacauuuuaaaaaucagauguucucaguggggagcaggguuuucucuu

SEQ ID NO: 4187178 - RNA, 57 nt, Human
aagggagagaggucaagguggggacucccgcaagcccacccuggccgacugccccuu

SEQ ID NO: 4187179 - RNA, 75 nt, Human
aagggagguggaggggaaaaauagauaagaauuuuaagaccuugauaaaaauuuguuuaucuucuagcuucucuu

SEQ ID NO: 4187180 - RNA, 80 nt, Human
aagggagguuauuacuacaacaguucaugaaaugaaagcuaccugcuuuuacccagggagcucuugaaaauaacccucuu

SEQ ID NO: 4187181 - RNA, 122 nt, Human
aagggcaaagaggagggguggagagaggggugggagcaggaugggagcuggggccagggaucuggccugaggcgucccagcuguggcugacuccugguccccacuugcuccucccugccuuu

SEQ ID NO: 4187182 - RNA, 84 nt, Human
aaugucaugggaauuuauucauauuucaaagcaaauucagaggaaauauguagaauagcuuccuuuuuuccaaagggugacauu

SEQ ID NO: 4187183 - RNA, 87 nt, Human
aaugucccagccuucucuugccagagaugagacucuggggaagguaacgagagaguccauaugugggaggaguggcuuaaaaacguu

SEQ ID NO: 4187184 - RNA, 127 nt, Human
aauguccucacuuucauuuucugagcuuaguuauuugugucuucucuuuuuuuggucaguguagcuaaauguugguccguuuuugaagacaguggcugagcauggagauaccaaguggcagggcauu

SEQ ID NO: 4187185 - RNA, 79 nt, Human
aauguccugugguuucauucuuacaauguuagaaauucuuuaauuaguuacagguguugaaugaugucacaugggcauu

SEQ ID NO: 4187186 - RNA, 55 nt, Human
aauguccuuuaugaaaugguguuuucaaaacacauugaauuucauaggggaaauu

SEQ ID NO: 4187187 - RNA, 106 nt, Human
aaugucuaagaaucaauguuugaauuacagaugaauuuauggauggaacacuuuuguuuucaaacauaucuucauuacuaguuaugagcuagaggucuggggcauu

SEQ ID NO: 4187188 - RNA, 94 nt, Human
aaugucugagccaggucuuccaugacugaagcaggggcggguaugagcagaguccugcccugugugagugcaugggugcuguggcuuggggguu

SEQ ID NO: 4187189 - RNA, 61 nt, Human
aaugucuuggauacagagguuggggacaauguuugauucaccacuguaucuccagcacauu

SEQ ID NO: 4187190 - RNA, 58 nt, Human
aaugucuuuucccuuacuuuccacuaaaacauuuacgaagguaaugggagaaaauguu

SEQ ID NO: 4187191 - RNA, 65 nt, Human
aaugugaugcuggaggcgccccucguuauagccgcgaggaggucauuggcuccugugaucacauu

SEQ ID NO: 4187192 - RNA, 55 nt, Human
aaugugcccugagagugaggaggacagcugcaucuucuggacucuaagguauauu

SEQ ID NO: 4187193 - RNA, 66 nt, Human
aaugugggcauuuaggaucuuuaguugaccaauccuucuugcuuaucuaaccuagaugucuguguu

SEQ ID NO: 4187194 - RNA, 70 nt, Human
aauguggguaaaucucuuuucauggcuuucagcucugaaggccgucagccccgauuugccacuccacauu

SEQ ID NO: 4187195 - RNA, 101 nt, Human
aauguguuuauuuaauuaugcugugcuagauacaauauucagcuguucccaacacaucuguagaaugauuauauagucaguuauaguaauagaaacacauu

SEQ ID NO: 4187196 - RNA, 91 nt, Human
aauguuaagugagcauaguaauaucuaucuuuuagauuuggggaggauaaaacuacugaaagauaaaucaguuagcaugcauacuaacauu

SEQ ID NO: 4187197 - RNA, 61 nt, Human
aauguuauuuccucucugugaguuauuuucuaaucuagaacucagagaagggacugagauu

SEQ ID NO: 4187198 - RNA, 88 nt, Human
aauguucauccccugcugaauguggccugcaaagcgggugaaugaagcaauucaaaguaaggcagcauccagaggagaaugaagcauu

SEQ ID NO: 4187199 - RNA, 77 nt, Human
aauguugucccuggccaaucuagggcuguuaugagauugcucauaacaguugcuacuuaaauuagcuagaaugcauu

SEQ ID NO: 4187200 - RNA, 84 nt, Human
aauguuguuuugccccagcugguuaaaauagagaaaugagugcaguuuuuguauucuggcaagcuguaugggcaucaugguauu

SEQ ID NO: 4187201 - RNA, 59 nt, Human
aauguuugcucuguagguucauggcaggaaaaccuuuagacaugaucuuagcaaauauu

SEQ ID NO: 4187202 - RNA, 85 nt, Human
aauguuuuggaacuggauagcaguggugguggcacagugcugugaauggacuaaacaccacugaauuguucacuuucaaaugguu

SEQ ID NO: 4187203 - RNA, 67 nt, Human
aauuacauagaacuucgaugucuuuuguuucaucaucauugggcauuuuaguugcuauggaauaauu

SEQ ID NO: 4187204 - RNA, 82 nt, Human
aauuacucuugaacuuacauugaggaauucuuacuuuuucauuuucuugaauagaaauccugauggagucugaagaggaauu

SEQ ID NO: 4187205 - RNA, 69 nt, Human
aauuagggagagguagcuaggugguauggcgaggccaagacaaggacaccuuaucucaagucccugauu

SEQ ID NO: 4187206 - RNA, 76 nt, Human
aauuaguuaugcccagagcugaugaccugcaaaaacuucuacuuauuuagcuguuacaguuugggcuugauucauu

SEQ ID NO: 4187207 - RNA, 83 nt, Human
aauuauggaagaaucaggagagcugcgaacguugcaaaauuccaugcuaucaaugaaauguaguuucugaucuucgcacaauu

SEQ ID NO: 4187208 - RNA, 104 nt, Human
aauuauuguugcuguuguguugcuguugguaguagcagugauguuguuaucucaaauauaauacauuccuacugacuagcuagauaauagugcauuugauaauu

SEQ ID NO: 4187209 - RNA, 84 nt, Human
aauuauuuccuuugaaagcugaggacaggagggucaaauaacuuguaucauuucccaaagucuugcagcugauaagugaugguu

SEQ ID NO: 4187210 - RNA, 103 nt, Human
aauucaauagagucuuuuuaaaagguucugguuuuguuuggcauauagauuuugcagucuggaauaggacaaaaccaaaauuucaaaggaaguuuaaugaguu

SEQ ID NO: 4187211 - RNA, 65 nt, Human
aauucaaucugcauuuaguuaguguagcuuuuuucugaguuacacuuaggguuugucagagaauu

SEQ ID NO: 4187212 - RNA, 69 nt, Human
aauucaccuaauugaagucaggaguaaaugcacuauuagcuccugauaacuuuagguuuggguugaauu

SEQ ID NO: 4187213 - RNA, 67 nt, Human
aauucacuugugcacgcuauggagguucucggggagagaucuuugcaccuaagucugucaaggaauu

SEQ ID NO: 4187214 - RNA, 65 nt, Human
aauucagaaagaaguaaggcugaccagcaagacuugggagggcacaaauuacauccuucugaauu

SEQ ID NO: 4187215 - RNA, 89 nt, Human
aauuccagcuucagcucuuggauagugaggucauugaauacagaagagaaauugagaaaauuauucugagaguugaaguaaugugaauu

SEQ ID NO: 4187216 - RNA, 82 nt, Human
aauuccaguggcacacaguggcaucacucuugacgauccacccuacaucaccugcuuugauguccuggugcuucuugggauu

SEQ ID NO: 4187217 - RNA, 59 nt, Human
aauucccucuuuugcuugcaucuccccaauuagacugaauucuguaaaggcagggaauu

SEQ ID NO: 4187218 - RNA, 61 nt, Human
aauuccuaaguaacuuuccuagugagcucaucuugcuucacugaaaguaauucuagugauu

SEQ ID NO: 4187219 - RNA, 60 nt, Human
aauucuccucucaccccuacgauaugaagaauaucuuauaggcucagugaguagggaguu

SEQ ID NO: 4187220 - RNA, 58 nt, Human
aauucugaggccauuuauuuccucucuuaaagagaaucugcaaaugguccuagggauu

SEQ ID NO: 4187221 - RNA, 57 nt, Human
aauucugauuagaugccuuuguuccagaaaacuuggugaaaggcuuuaauuaaaauu

SEQ ID NO: 4187222 - RNA, 55 nt, Human
aauucugcauaagguggcucugauuucagauaaaguugcauaccuugguagaauu

SEQ ID NO: 4187223 - RNA, 80 nt, Human
aauucugccauggguuauaucaucagcugaacucauaguggguuugaaaaaggccuuugguauguucucaggccugaauu

SEQ ID NO: 4187224 - RNA, 56 nt, Human
aauucuguaaagcuugucaugcuagaugucuuugugugacauagcuuugcagaguu

SEQ ID NO: 4187225 - RNA, 67 nt, Human
aauucugucuuuuguaugcaugucagaguuauaaaauuauagcuaaacauggauauaggacugaauu

SEQ ID NO: 4187226 - RNA, 89 nt, Human
aauugaauaaggcaacauauauguaaaguacuuuguaugguaugaacuacacauugagugcuccauaaaucauagcccuuguuauaauu

SEQ ID NO: 4187227 - RNA, 97 nt, Human
aauugcagaguuccaggaaugaaauguagauaaaugugucuucaauaauagugacaauauuuuguaguauauuuaacauuugugaacaucugcaauu

SEQ ID NO: 4187228 - RNA, 101 nt, Human
aauugccuuuguccaagaacauuccugaaugggcacauuuacuuaugaaagugaagucaccuggguucuggcuggauggcuuugagauagaaaaaucaauu

SEQ ID NO: 4187229 - RNA, 90 nt, Human
aauugcuacggggagcggggaggaagugggcgcugcuucugcguuaucuggaaggagcagcccacuccuguccugggcucuguggugauu

SEQ ID NO: 4187230 - RNA, 61 nt, Human
aauugcuagucagcucaagguaguugugaauaacuugcuacugcugugaucugauguaauu

SEQ ID NO: 4187231 - RNA, 71 nt, Human
aauugcugggaauauuuagcccauguccagaccaaguacuguuuucucuggguuaaauacuuccaguucuu

SEQ ID NO: 4187232 - RNA, 59 nt, Human
aauugcuuugaagaagggagcgccuugacucuugcgcaccggccauuuucacagcaguu

SEQ ID NO: 4187233 - RNA, 59 nt, Human
aauuguacaagccuugugccauaguuaccagcuuugugcaugucugggccuguaagauu

SEQ ID NO: 4187234 - RNA, 87 nt, Human
aauugugaugauagcagcucacuaacucugcguuuguggugugaugagcagcuaguguagaguagcugaaugcuaauaauuaugguu

SEQ ID NO: 4187235 - RNA, 69 nt, Human
aauuguucaugguuguaaguuugaacccauuuaaucauucagguucauauucuuaaccacugagcaauu

SEQ ID NO: 4187236 - RNA, 73 nt, Human
aauuguuuaauaucgugaaguacuugggacuguuacugaaauguaguaaguacuauaaaaguguuaaauaguu

SEQ ID NO: 4187237 - RNA, 90 nt, Human
aauuuaacagaugcuuacuaugguuguauguguagauguguacaugugagcauacccauuuguuucaggagcacaaauuucuauuaaauu

SEQ ID NO: 4187238 - RNA, 95 nt, Human
aauuuacucauucacauugugcagauuauggucgcucuucucucacaauuauuuugcaaccuuguuuagcauaugugacugauaguggguaaauu

SEQ ID NO: 4187239 - RNA, 95 nt, Human
aauuuacucauucacauugugcagauuauggucgcucuucucucacaauuauuuugcaaccuuguuuagcauaugugacugauagugggugaauu

SEQ ID NO: 4187240 - RNA, 64 nt, Human
aauuuacugagguguaacacaaauacagaguacuccguaucccacguguacagcucagugaauu

SEQ ID NO: 4187241 - RNA, 76 nt, Human
aauuuagagaaacgggauuuugaugguagugcuacuaauuaugcuucaucacuaucuagauuucuuucucuguguu

SEQ ID NO: 4187242 - RNA, 81 nt, Human
aauuuagauuguggugauaguugcacaauucugugaaaauacuaacaauuuuuaaugggcgacuauuauggcaugugaauu

SEQ ID NO: 4187243 - RNA, 79 nt, Human
aauuuauaagcuuguuuuacaguagucuggaagaggcuuugaggccaauuuuguagaacuguagaacaaugcaugaguu

SEQ ID NO: 4187244 - RNA, 62 nt, Human
aauuuauauuguuuuccagagagaauguacuucuugcugcucucagagugacaaugagaauu

SEQ ID NO: 4187245 - RNA, 67 nt, Human
aauuuaucuuuaguaagcuucuacuuaacuagaggaaagaguaucuggccauacuagagaauagauu

SEQ ID NO: 4187246 - RNA, 64 nt, Human
aauaauaaugaaagccacugugugacuaugaggacacagaagcaugguggcucucaugauuauu

SEQ ID NO: 4187247 - RNA, 63 nt, Human
aauaauagcagaguuuacaaucacugaagcuaggagacuggccacggagacucguuacuuguu

SEQ ID NO: 4187248 - RNA, 88 nt, Human
aauaauucuggggauaauauugucaaaauggauuccacugcaaacaggcaguaggauuuacuuugacaauauucuccccagaauuauu

SEQ ID NO: 4187249 - RNA, 129 nt, Human
aauaauuuccuuucuuguugcaauuuuuaaaauuaagcauguguaaauuuuaauaugcugucagagagcguaggcucaguauuuggaauauagcuaagucuuaagaaauguguuggauggauagauguu

SEQ ID NO: 4187250 - RNA, 59 nt, Human
aauacaauaguauguauaaauaccuagaccuuugcuggguauauaggaaauauuguguu

SEQ ID NO: 4187251 - RNA, 59 nt, Human
aauacacuuggaaauggaccauauaaggagaaugcuuuauaaauauuuucagguguguu

SEQ ID NO: 4187252 - RNA, 55 nt, Human
aauacagacauuuaauaaaugcugagcaaaugcucagagcauagagucuuguguu

SEQ ID NO: 4187253 - RNA, 68 nt, Human
aauacaguaaacaugugagugugcauauauguguaaauaugugugacacauugauaugugcauguguu

SEQ ID NO: 4187254 - RNA, 90 nt, Human
aauacagucaugugucacuuaaugacaggauaggcucugagaaauauaucauuaggcaauuuugucauugugugaaccucagaguguguu

SEQ ID NO: 4187255 - RNA, 69 nt, Human
aauacaucuagccuuacaauuauuuuggcuuguaaauggguuucaguaagaagugaggcaagauauguu

SEQ ID NO: 4187256 - RNA, 74 nt, Human
aaugagcucugaaggaaggaucuggacaugugccacuauaucuaccacauuacucuauccaacuaucgcucauu

SEQ ID NO: 4187257 - RNA, 87 nt, Human
aaugaggcuacuaggagucaggaguggcuuuaguuuugcuuugccuuugcaggcaggcagagucaauuugauccaaguagccuuauu

SEQ ID NO: 4187258 - RNA, 74 nt, Human
aaugagguucacuuccugaaauagcucuugaacacaggagugaaugggcuguggauucagguggaauauuuauu

SEQ ID NO: 4187259 - RNA, 67 nt, Human
aaugauggcucagcagguuagaaacuaugacaucaucuugguucaaaaauaaccuucugaguucauu

SEQ ID NO: 4187260 - RNA, 62 nt, Human
aaugcaaaugaacauguugcuaguuccauaaaucugguacaagaauauuuuauauuugcauu

SEQ ID NO: 4187261 - RNA, 64 nt, Human
aaugcaagucaaugcuauacccagagauguucuaucagucccugauguaguuuggcuaugcguu

SEQ ID NO: 4187262 - RNA, 59 nt, Human
aaugcacaggucucguaaugaguagcccauugucccaggcuacuugggacuuuugcauu

SEQ ID NO: 4187263 - RNA, 68 nt, Human
aaugcaccuaccuugauucugcagcuuauauccucugcagaauucggcauuuaagguaggauugcauu

SEQ ID NO: 4187264 - RNA, 75 nt, Human
aaugcauauuuccuagcuuauugcuacuuaguacuaaauuuagaaccuggaguuaaggccuaagaaauaggcauu

SEQ ID NO: 4187265 - RNA, 92 nt, Human
aaugcauucuggaggugguguuuaaaagcuauuagaguuuccuggccucuuuuuggcuggcccuguauuuuuuaagaauaucucuauguauu

SEQ ID NO: 4187266 - RNA, 69 nt, Human
aaugcauuuuugaguaugaaugagucaucuguuucucugggugcuucauuuuuaguuauaaagugcguu

SEQ ID NO: 4187267 - RNA, 86 nt, Human
aaugccaccgugugccaggcacaguaguaggggguuacaaaaacuagcucauuuccugcacaggccaggcaucugagguuggcauu

SEQ ID NO: 4187268 - RNA, 62 nt, Human
aaugccauuccaucacacaccucaguaaauauguaacggugugugaaagcucugggagcauu

SEQ ID NO: 4187269 - RNA, 60 nt, Human
aaugccuucccauuuauacuuucauucaguccugaaagugcacuggaaaugaaggacauu

SEQ ID NO: 4187270 - RNA, 83 nt, Human
aaugcuaggugcuccucccuaauucaucaaucaguuaaguuucuccuuuuuucugcgggagguuggggagaagcacuaguguu

SEQ ID NO: 4187271 - RNA, 60 nt, Human
aaugcugcauaacaacaaugcaaucccacacaauugcaguaguguacaguuaugagcauu

SEQ ID NO: 4187272 - RNA, 60 nt, Human
aaugcuugaagucagggcaauggagguaaauacaguccauuugugcuucuucaaagcauu

SEQ ID NO: 4187273 - RNA, 130 nt, Human
aaugcuuugaaaugugaccugcaggauaaguacugaaagaggcuagauuucuuuucagugugaacucaaaccaucauugccucaggccuuucuucagagcuucaaaguucugcaagucacuaucacaucu

SEQ ID NO: 4187274 - RNA, 61 nt, Human
aauggagugggcugacagagauaugauccuuuucuccccuuaucuccugcuaccacccauu

SEQ ID NO: 4187275 - RNA, 129 nt, Human
aauggauauuuugcuaugaaauugauauucccugauaagaauugcaagugcuagcuaaaauauuuguucuaaauguucuuuaaacuucaguuccuuugcugagugucuuauaaaccaaauaucaucauu

SEQ ID NO: 4187276 - RNA, 69 nt, Human
aauggaugaaggcauuuuuguugccugcgucucaucccucugcacuuuccaagauugccuuguuccauu

SEQ ID NO: 4187277 - RNA, 76 nt, Human
aauggaugcuaacuucucucaaagccaaugcucaguuacaacaaagcugagcugguguuucagggucacauucauu

SEQ ID NO: 4187278 - RNA, 81 nt, Human
aauggcaaaauuacugaucugaaggacaugggacccacacuaugauuucuguaacacuucagauauugauauauguccauu

SEQ ID NO: 4187279 - RNA, 55 nt, Human
aauggcauauucuguagggugauuuauuuuaauugucacucugggaccuguuauu

SEQ ID NO: 4187280 - RNA, 64 nt, Human
aauggcauguuaaaguaguauuaaaaggcugacuuaccauuagcaugcuauuuaaugugucauu

SEQ ID NO: 4187281 - RNA, 65 nt, Human
aauggccacagauguuaguaucugaaguuaauaauuuucaaaagagaaaaauaucugggcacauu

SEQ ID NO: 4187282 - RNA, 58 nt, Human
aauggccuggagggaauacagauacauacauugaaguuuuugccuucccuuggucauu

SEQ ID NO: 4187283 - RNA, 89 nt, Human
aauggcuaacaaucaccuuccccaugcugccuucucagugcuucuuauaaccaggaggccucaggcgugggaagggugugggggcuauu

SEQ ID NO: 4187284 - RNA, 81 nt, Human
aauggcuacauuuguuuuucauugugagacugugccguaauuuauuuaaucagugccauauugaaagacauuuggaucguu

SEQ ID NO: 4187285 - RNA, 57 nt, Human
aauggcugaggcuggagguggcagcuguuuucacgguuccuaccuuccucuguuauu

SEQ ID NO: 4187286 - RNA, 60 nt, Human
aauggcuguucucugugauugggcauagaagguuuguaaguuuuagagacugcagcuguu

SEQ ID NO: 4187287 - RNA, 129 nt, Human
aaugggagggcuguguguuauuguugauuguguuuugcagcgaaacaugaguuuaauguuauagagaacauaaauuuauaauuguuuccuguuaaagagucugagaauaagaaaugaguucuuuccauu

SEQ ID NO: 4187288 - RNA, 74 nt, Human
aaugggcaccuuaaaacauguguuugaaugagggucucugaacucugacuccuuauucauucauguagcccauu

SEQ ID NO: 4187289 - RNA, 92 nt, Human
aauggggaacucauaauaaaacugguaauaaaauggauuauucaggugaugcuguuuuauuacagucucauuaugauuauauaauccuuauu

SEQ ID NO: 4187290 - RNA, 66 nt, Human
aaugggguaagggaccccaagugaacaauaagucuccucuuagaacuugguuggucucacccuguu

SEQ ID NO: 4187291 - RNA, 129 nt, Human
aauggguguuacauuaagaugcuaauuuugugguaauuuguuacacagcaauauaaaauauaguguauuaguuuguuaggccugcuguaacaaagugccacaaaaugggugguuuaaacaacauaaagu

SEQ ID NO: 4187292 - RNA, 60 nt, Human
aauggucugaagguggauuugagacucaagaaagguaucuacuccucuuucagaugcguu

SEQ ID NO: 4187293 - RNA, 68 nt, Human
aauggugaauguggacaucuuugccuuguuucugauuuuagggagaaagcacucugucuuuuaccauu

SEQ ID NO: 4187294 - RNA, 130 nt, Human
aauggugggaugcuagaagugaugguaguaagaguuauauaauguguaguucauuggacaauaguguaugagcaguauaacuaugcauuuauauaauuauauuauuuuugaaacauagcguccuauugau

SEQ ID NO: 4187295 - RNA, 71 nt, Human
aaugguguagucacuuugaaaaaacguuuggcgguuccucacaaagguaaaacuagaguuacuacaugauu

SEQ ID NO: 4187296 - RNA, 58 nt, Human
aaugguguagugaccaggaacuccagaaaucuggggaucagcaagccacugcaccauu

SEQ ID NO: 4187297 - RNA, 125 nt, Human
aauguaaauuauuuugugagcuagaacucccuacauuucagagcuccucucugagucuugguguggauguggagaaggacagccugagaaaauaagauaagggacucuaguucuucuuuuacauu

SEQ ID NO: 4187298 - RNA, 63 nt, Human
aauguaaauuuuagaugagccauuuucugccacgauuguggauuugaaucuaagaugugcauu

SEQ ID NO: 4187299 - RNA, 81 nt, Human
aauguacacauaguuaggcaugaguguguauuaaggaauaauauguccuugagagcaaaauuguguuuagguagguauauu

SEQ ID NO: 4187300 - RNA, 89 nt, Human
aauguagcuauaauggugaagagcauggauuuccaaauuggauagccccacgauugaauucuggcuccaccuccuuuacuagcuguguu

SEQ ID NO: 4187301 - RNA, 66 nt, Human
aauguaggucaaaaucaggcagggaaguuccuugaauuucaagcuuagaaauuuugacauuauauu

SEQ ID NO: 4187302 - RNA, 76 nt, Human
aauguaguugccagaucuuccacauggcuguaucaaugggcuugacucuggagccuuagauuugggcaagaacauu

SEQ ID NO: 4187303 - RNA, 57 nt, Human
aauguaugacaguucuaguggugccacaucuuuggcaacacuugguucucauacguu

SEQ ID NO: 4187304 - RNA, 95 nt, Human
aauguccuuaguauguuuggaaggugaggcaugaaggagcccagcuuauuugggggccugugggucauuuuaucaggugcaguacaagguauauu

SEQ ID NO: 4187305 - RNA, 79 nt, Human
acaagauguuaaaccaguuuugcaucauagggauaaauuccuuugaucaugguguguaacugguuuuguuuuguuuugu

SEQ ID NO: 4187306 - RNA, 59 nt, Human
acaagcugcucuccaagaacacgugcuaggaaaagugcuugaucagagugucagcuugu

SEQ ID NO: 4187307 - RNA, 88 nt, Human
acaaggcucaacccaguuuaggcaggggcuauuucuuuuaaaaauagaggagacagacaaaauuccugccugaaucuguuaguccugu

SEQ ID NO: 4187308 - RNA, 81 nt, Human
acaaggguggagacgggacagaagcuaacucacugcuacuggguuuuguuuguuguuuccugucccuugcucuauuucugu

SEQ ID NO: 4187309 - RNA, 93 nt, Human
acaaggucauuuuaauucauaguuuccuuaaaagaacuaucucuucugagcuuucauauuuuguucagaaaggucgucucuuuuaagccuugu

SEQ ID NO: 4187310 - RNA, 61 nt, Human
acaaguaccaaaugcucaaguauaucugacaugaugcauuugaagcauuuuguaucuuagu

SEQ ID NO: 4187311 - RNA, 62 nt, Human
acaaguauguaagaucaguaggauuccugccuggagucagauggauucauuacaugacuugu

SEQ ID NO: 4187312 - RNA, 59 nt, Human
acaaguccuucaaguaaccugggacccauuuuggccccagugaauuuggguggaacugu

SEQ ID NO: 4187313 - RNA, 57 nt, Human
acaagugacaaggcaauagaugcuguuaucacaugccaugaguucccuuucacuugu

SEQ ID NO: 4187314 - RNA, 56 nt, Human
acaaguggccgagagucaucucuacuuuggaguuagucaagaugcuggccacaugu

SEQ ID NO: 4187315 - RNA, 88 nt, Human
acaagugguuauugagcaguuaaaaugugcuauaagaaacugaauuuuuaauguuauuuaaguaauuuaaauguaaauagccauuugu

SEQ ID NO: 4187316 - RNA, 78 nt, Human
acaauagcaguuuucuauucuccuugggauauucugcaacauccuaaguuuagcuugagauggaaagccugugugugu

SEQ ID NO: 4187317 - RNA, 81 nt, Human
acaauaucugcauauaugcaaguccucagggcauuugugcacacaacugcuggcaugcauauacaaagcucuuauauuugu

SEQ ID NO: 4187318 - RNA, 89 nt, Human
acaauauguuugggauuaacaaguuucauuuauagaaugaaccacaugguuuggagguagaauuugaauuuguuucauucacguauugu

SEQ ID NO: 4187319 - RNA, 82 nt, Human
acaaucagauuuuuauuucaaauggaucccucagccuguaaucuggugggaagacagggacagaccauugagaugugauugu

SEQ ID NO: 4187320 - RNA, 74 nt, Human
acaauccacucucauugaaaugugacugagugaaauauuuucacugugcuaagucacugagauuuuggaauugu

SEQ ID NO: 4187321 - RNA, 90 nt, Human
acaaugauuucuaaacagaaccaugcaucugaguggucaauuauuuuauaagaaggcacucugaugguuucuguucaauaaucuucuugu

SEQ ID NO: 4187322 - RNA, 80 nt, Human
acaauggccucuaguucuauccaugucgcuacaaaagagauuauuucauucuuuuuuauagcugaauaguauuccauugu

SEQ ID NO: 4187323 - RNA, 79 nt, Human
acaaugggggaggcuccagggagcuguggagguuuccagaaccggagcacagccuuggaacucagccacacccuacugu

SEQ ID NO: 4187324 - RNA, 85 nt, Human
acaaugguuugacuuaugguuuuucaacuuuauaauggggcaaaagcaauacacauucaguuaaaaacuguacuucaaauuuugu

SEQ ID NO: 4187325 - RNA, 74 nt, Human
acaauguagcccagcaugagcagagcugguuaccuacaaauaaaccugcuuuugcuuuuuugggugucaccugu

SEQ ID NO: 4187326 - RNA, 119 nt, Human
acaaugucaaguauaucaugaccucugaaaucaauaauuggugauugguaauuauaaugguacagcacuuaauaacaguagcuaaauuauuuucauggugagugcacuacuagacuugu

SEQ ID NO: 4187327 - RNA, 98 nt, Human
acaaugucuuagacaucuuucugaaucaggacacauagaucuaucucacucuuuuuaauggcugugugguaauuuaguguaugaaugugucuucaugu

SEQ ID NO: 4187328 - RNA, 62 nt, Human
aauuguucaagugugugugugugucuacaguggggagggauuuaccacuuauuugaauaauu

SEQ ID NO: 4187329 - RNA, 58 nt, Human
aauuguucuggaccuuuugggucuuucuauauuaagaccgaaggaaacuggaaccguu

SEQ ID NO: 4187330 - RNA, 88 nt, Human
aauuuaacucuucuuccagcaggugaggagaaacagaacauuacuuucucaucuuuccuuccccuagcugagaaacaagacagaaauu

SEQ ID NO: 4187331 - RNA, 65 nt, Human
aauuuacauuucuagagcucacuuuuggguuguuuccaaaacagcuuguuucaggaaagugaauu

SEQ ID NO: 4187332 - RNA, 125 nt, Human
aauuuagcagcauaugacaaugaaugaacuuauuuauauaauagugaacaucaucaugacuucauuaaaugacaaaaggaugaguuaacuaaacugugaguaaaucugucucaucuuucuaaauu

SEQ ID NO: 4187333 - RNA, 73 nt, Human
aauuuagguaagauguuugaugugcgucaguggaauuauuuugaauuuuuacauagaauauuucacuuaaauu

SEQ ID NO: 4187334 - RNA, 79 nt, Human
aauuuauauguugaaauccuaacccccuaguaccucaaaaugugauguauuuggagguaggacuuuaaagaauuaaguu

SEQ ID NO: 4187335 - RNA, 59 nt, Human
aauuucagggugaauggacugauucagcuccugaguucacugcuacucagccugagauu

SEQ ID NO: 4187336 - RNA, 82 nt, Human
aauuuccuacuuaaagauuugugguuuaggaacaugagaucacaauucaaggugacugaacuauaaacuaucuguggaaauu

SEQ ID NO: 4187337 - RNA, 64 nt, Human
aauuucugcagcuaaggggguuaaggaaccagcggugccugcccacuauguugucauggggauu

SEQ ID NO: 4187338 - RNA, 62 nt, Human
aauuucugggauuuuuuaaaaaagggaugccaaucucugagugggaaggaaugucagaaguu

SEQ ID NO: 4187339 - RNA, 77 nt, Human
aauuucuuuccgcaagaguuugcugcccucugguggguguuauugccauauugcacaaacuuuuccuggaaaagauu

SEQ ID NO: 4187340 - RNA, 90 nt, Human
aauuugaaacaacguuuuaucgugugcucuucccauaaaaagaguugaaacagguuaugaagagcauaugaagagcauaugaaacagguu

SEQ ID NO: 4187341 - RNA, 75 nt, Human
aauuugaguuggcuucccauagcuugcuaguaaaauaauuugaacaauacagcgacacagggcaagccucaaauu

SEQ ID NO: 4187342 - RNA, 59 nt, Human
aauuugauaggcuauaauuuaaaguaugacuuuaaguucaaauuggggccugugaaauu

SEQ ID NO: 4187343 - RNA, 73 nt, Human
aauuugcuuuccuucugggccucaguuucucuaucugcacaaugaaggagcuggccuagaaaggagacggauu

SEQ ID NO: 4187344 - RNA, 99 nt, Human
aauuuguauuguucugaaaauugggucauacuuacucugcaaguggcuuuucuuaauaugucauagguauaacucagucuuuagauauaaagucaaauu

SEQ ID NO: 4187345 - RNA, 88 nt, Human
aauuuuaugccaagauccaacaggacaaagaaaggacauguuagcccacauuuccuuugcucuugguuggauuuauagguguucuauu

SEQ ID NO: 4187346 - RNA, 89 nt, Human
aauuuuuaaauuuuuuuucauguuaggaagacaggcuuuguagguauaaccuuuguaacauuuucuuggcaucaugaaaaauuaaaauu

SEQ ID NO: 4187347 - RNA, 64 nt, Human
aauuuuuccauugcucagccaguaucgugucuaucacaaaauaaaggcagaguagggaggaauu

SEQ ID NO: 4187348 - RNA, 87 nt, Human
acaaaaaucgaggagagagaugcuguggguagaggcauguggguugccccugcauguguucugagcaguuuccuccucgcuuuuagu

SEQ ID NO: 4187349 - RNA, 77 nt, Human
acaaaaccacacagagccaggcucccauggggcagcauucaauguuucccuacuuuuggcugcuuagugguucuugu

SEQ ID NO: 4187350 - RNA, 67 nt, Human
acaaaaggcccagugccauuaguuuuggucauacacuggccuauggugcuauacugggcugcuaugu

SEQ ID NO: 4187351 - RNA, 129 nt, Human
acaaaauaacccagccguccuccacugcagccucuggggaccggggacacggcaguuuuauuuguugacuuccaacuucaguccugagcggugggcuuuagaacgagccuggcugucuuuuauucuugu

SEQ ID NO: 4187352 - RNA, 114 nt, Human
acaaaauauuagcuugguguggugacaugugccuauagucccagcuaguccggaggcugaggcggaaggauugcuagagcacaggaguucaagccugcagugagcuaugauugu

SEQ ID NO: 4187353 - RNA, 62 nt, Human
acaaaaucacuuucuguugcaguagaucaaagaucuagcugugcccagggaaguuguucugu

SEQ ID NO: 4187354 - RNA, 70 nt, Human
acaaaauccaagaggucaaucacuuagaagggaaaaacaaauuucugggucuuaguuuucuugauuuugu

SEQ ID NO: 4187355 - RNA, 81 nt, Human
acaaaaugccaccuuguguauuuuuugauacuaacuugccuuguaaguacacacuauguauuguacacaguggcgugaugu

SEQ ID NO: 4187356 - RNA, 93 nt, Human
acaaaauggugccagacuacuugccuuugaaucccagcucugccacuuaauuaauugcagggugacuuugggcaaguuacuuaaauuauuugu

SEQ ID NO: 4187357 - RNA, 56 nt, Human
acaaacaucuugaccucagauuucuagucuuuagaacugaggcaauggauuuuugu

SEQ ID NO: 4187358 - RNA, 80 nt, Human
acaaagauuucccacucuacuacaugcuuguuccaugcugggaguuaaucagaguaggaggaauauggaguggccuuugu

SEQ ID NO: 4187359 - RNA, 69 nt, Human
acaaagccaaaguccuagaaauucaacagaggcaaauccauguaguauuauuaaggacauggacuuugu

SEQ ID NO: 4187360 - RNA, 61 nt, Human
acaaagcccggacucacaggcaggcuguauguggcugugucugagugugccugggcauugu

SEQ ID NO: 4187361 - RNA, 105 nt, Human
acaaaggcccggaugagccuuggcagccaggacccgccuggaaagcggccacccuugccaguagcagccggccaggcgcccugggcuccauccccugcuuuaugu

SEQ ID NO: 4187362 - RNA, 63 nt, Human
acaaaguacaaugcaccuauuuuaaaacuuggagccagguuucaaagguguuuuguguauugu

SEQ ID NO: 4187363 - RNA, 62 nt, Human
acaaaguaggaagauuagcugagugaugcuuaaaaucucuucuaguuauaucucuucuuugu

SEQ ID NO: 4187364 - RNA, 113 nt, Human
acaaaguucuuugauuaugacacaaagccacugcauguguaguauucaucuggacucaguacaaacaagaugcucaugcugcgugcugugcugugaguaauaaaguccuuugu

SEQ ID NO: 4187365 - RNA, 130 nt, Human
acaaauaagauaguuuauaaguagagugguuaucaggcucuguguuuugcccaggagaguccuaguuuaucccuacuguccuaggccaaacaugaauaguaaccucuuucacuuucagaagugucuuggu

SEQ ID NO: 4187366 - RNA, 63 nt, Human
aaugugaaucuuccuuuuugaucuugcaguaaucaagguuuaaaaaguauuaggguucagauu

SEQ ID NO: 4187367 - RNA, 68 nt, Human
aaugugcauaaaaauccucauccuccuugaaauauuugaggaguuaggauguuuauauguugcccauu

SEQ ID NO: 4187368 - RNA, 101 nt, Human
aauguguuauuugacuuugcaucuggcuagcuuauggaaauuaaauguauuaucucugaaguacauguaauuuucauaguaagcuaguagcuuaauauauu

SEQ ID NO: 4187369 - RNA, 63 nt, Human
aauguguucaguuaaaugaacuugauuugaauggaaugagaguucaaugaaacuguauauauu

SEQ ID NO: 4187370 - RNA, 56 nt, Human
aauguuccaccaacauuugggaagaaucguauucuguuuauguuggguggaauguu

SEQ ID NO: 4187371 - RNA, 80 nt, Human
aauguuccccaggugauucucauggcccuuguauauugcugcuuuccaagccaugggcaucguccuagguaaugggcauu

SEQ ID NO: 4187372 - RNA, 63 nt, Human
aauguucuguggcuuguagaugcaucacuccaaaaaucucuaucuacaacaucacauggcauu

SEQ ID NO: 4187373 - RNA, 79 nt, Human
aauguuguucucacaagucaguggaauuaauauuauacuuaguauccugguuacuggucuugcacagggacaucacauu

SEQ ID NO: 4187374 - RNA, 59 nt, Human
aauguuguuggcucuucaugauuuaguuucuucuuugguaaaauaaggccaauaacauu

SEQ ID NO: 4187375 - RNA, 83 nt, Human
aauguuuaacagcucaucagaggcaggguaacuugaacuucauuugguaaugcuuuugcucuacccugaucaguuaaaacauu

SEQ ID NO: 4187376 - RNA, 64 nt, Human
aauguuucauucuugcccauugcuccuauucccuguuaagaaucaaggguaagagugguauguu

SEQ ID NO: 4187377 - RNA, 129 nt, Human
aauuaaaagaacugauuagugugaacaucuuuguggcuaguucaaauuguuguguugucauuuuagugaaccacaugcaaagugaauaacacagccugaaucuguuuauaaaacaugguucauuugauu

SEQ ID NO: 4187378 - RNA, 86 nt, Human
aauuaaguuuagguuugacaaugauuagguagcuucucaucucuuguagaaaaguauuucaaucauuuguguuccugagaguaauu

SEQ ID NO: 4187379 - RNA, 60 nt, Human
aauuaauagcaacacaugcugcagggugcauacccaccaguacuuaguguagcguuaauu

SEQ ID NO: 4187380 - RNA, 56 nt, Human
aauuaauuugguuuggaggcacuguguuaaugguggcagccagacgggauucaguu

SEQ ID NO: 4187381 - RNA, 95 nt, Human
aauuacaauuucacuaaagcauucucagauuuugcuacccuuucaaaugguuagaaaagucuagaagaggaauguugcuuuuuaaaaaaugaauu

SEQ ID NO: 4187382 - RNA, 66 nt, Human
aauuacagaucaguuauuuuguagacugucccucaauuuaggguugucugauaacugguugugauu

SEQ ID NO: 4187383 - RNA, 107 nt, Human
aauuacuuagucugugguauuuuguuacagcagcagggacagacuaagauaccauguguauuaguauccuguggcugccauaacaaauuacuacaaacuugguaguu

SEQ ID NO: 4187384 - RNA, 67 nt, Human
aauuagcuuuccgccaucacacaauuaugcaguuccauccaucaaggguguggugggaaaguggauu

SEQ ID NO: 4187385 - RNA, 58 nt, Human
aauuaggggaggacguaucauaccugcuuuaucaggcaugauuuuucucuuacugguu

SEQ ID NO: 4187386 - RNA, 74 nt, Human
aauuaguguguuguugugggcgauggugcuguugguaaaacaugucuccagauauccuacacaacaaacaaauu

SEQ ID NO: 4187387 - RNA, 82 nt, Human
aauuaucgccucuuguuuaaugccucauacaucuuuacuaccauuaaagauggcgugcaggcuagacaaaggggacagaauu

SEQ ID NO: 4187388 - RNA, 130 nt, Human
aauuaucucuuucugucucuaaaacuaugaugauguuuagaguuagcuauguaacaaguaucucucuguucuucggaacacagaguaucuuuugccuaguuuucaagauccuaauguuuugcccgacauu

SEQ ID NO: 4187389 - RNA, 92 nt, Human
aauuauuaucauuguguguuauuuauagucaccuuuuuguagcagauggcucucucccauuuccacaaggcuggcucacaauaaugaugguu

SEQ ID NO: 4187390 - RNA, 65 nt, Human
aauucaagccauugaggguuuucccugagaaaaggaauuagaggagagcccuuagguuuagaguu

SEQ ID NO: 4187391 - RNA, 75 nt, Human
aauucaauacugcagccaggaaauauuugcugaaaggggauucuaugcagucauauuucuucugcaacuugaauu

SEQ ID NO: 4187392 - RNA, 69 nt, Human
aauucacaaaaccagauugcuuuaucaguuuauuucaagauaagcacacaguucugguauuguagaguu

SEQ ID NO: 4187393 - RNA, 64 nt, Human
aauucagacagugugaucagucucugcaauucaaugagagcuauaacagcacuguacaugaguu

SEQ ID NO: 4187394 - RNA, 66 nt, Human
aauucagcaauucugcuagcuuaagcugcuagccucaggcagcuagagaaugacagagucugaauu

SEQ ID NO: 4187395 - RNA, 62 nt, Human
aauucagggggaacacaggguugccaggacaccuggaguccagcccugcuuccccgcuaguu

SEQ ID NO: 4187396 - RNA, 64 nt, Human
aauucagucaaaccacuggucauucggucacacauucagaucaaaugguuucuuugacugaauu

SEQ ID NO: 4187397 - RNA, 89 nt, Human
aauuccuugauacuaccagagacccuucucaguggccaugacucacuguggcugucccuggggaaggggccucuauguggacaggaguu

SEQ ID NO: 4187398 - RNA, 55 nt, Human
aauucgaugcuuuucacuuuguggcuugguuccacaaagugaauugcaucgaguu

SEQ ID NO: 4187399 - RNA, 61 nt, Human
aauucuacucugucuugagugacaguguggcuacauucuagugucaagagggaguguaauu

SEQ ID NO: 4187400 - RNA, 62 nt, Human
aauucucauggaacucugaugggaugauugguuaacacuguuagagugucugugugggaauu

SEQ ID NO: 4187401 - RNA, 60 nt, Human
acaucacuuacucagagauccgaggacaggagggagucugaacuuggcugaugggggugu

SEQ ID NO: 4187402 - RNA, 111 nt, Human
acaucagcaucaucauguaggauccuguuagaaauguagacucucaaaucccauccagaaccugcugaaucagacucugcauuuuaacgagauccccaggugaucugaugu

SEQ ID NO: 4187403 - RNA, 109 nt, Human
acauccccucuccccacugagugugcaucuucugcugggauaacgcauuaaugagcaagccauucauuauccaagcagaagcugcacacacaauggggagagggcaugu

SEQ ID NO: 4187404 - RNA, 59 nt, Human
acaucccucagucagacuguaaacugcaugaggcaggcugcaucugccuuggggacugu

SEQ ID NO: 4187405 - RNA, 124 nt, Human
acaucccuguuucuuguuuuucaugauucuuugcagcuggugguggccgugugaccuaguucuagacugugaaacauaggagcaaucagcuaggaaagaaaacauauggggcuucugggaaugu

SEQ ID NO: 4187406 - RNA, 82 nt, Human
acaucgccgcacucauccucgaugggcaggaagaucucagggaccacgaugaggauccugcgcuuugggggaggcgcgaugu

SEQ ID NO: 4187407 - RNA, 60 nt, Human
acaucuauauuucucaaguauaagaugucacugagugcucacuugagagauauuagaagu

SEQ ID NO: 4187408 - RNA, 78 nt, Human
acaucucgauggaauuggaaagaggaauguuagacguuuuccuaguuuucaucguuuuucuuccauuccaugaagugu

SEQ ID NO: 4187409 - RNA, 88 nt, Human
acaucuggaacucagcuggucuucugugagcucacgccaauuucauauugaguccaguuguucacagaggcuuuucaguccuagaugu

SEQ ID NO: 4187410 - RNA, 57 nt, Human
acaucuuccuuguuccaauuugggcuuauucaaccaaggaguagagcaggaagcugu

SEQ ID NO: 4187411 - RNA, 84 nt, Human
acaucuuggcauccacaugcuguugaauaugacauuguaccuucugcauggcacagugcucuccucacagaugggcccaggugu

SEQ ID NO: 4187412 - RNA, 116 nt, Human
acaucuuuaugccuugcccacuuuucugucuucugaauaguucuauuuuaaaggaaugcugguuccuuaaacugggcauucagagaacugaagacuagucuccauggcacugaugu

SEQ ID NO: 4187413 - RNA, 76 nt, Human
acaucuuugaaaugagagcacagaauaaaaggugucaaugccuuuuauugugcauuucauuucauuuggaagaugu

SEQ ID NO: 4187414 - RNA, 67 nt, Human
acaugaaacuguugcauuagaacaucuuuaaggucuuugccaauucuagacuuguauaguuucaugu

SEQ ID NO: 4187415 - RNA, 71 nt, Human
acaugaacaccaggcaugaacaaacauuuuuuacuuucaaguuuggccaucauuuagccuggucuuuaugu

SEQ ID NO: 4187416 - RNA, 63 nt, Human
acaugaacauuauaucagcaagucauuuaauuucuuuuugucuuguagauaagaaguugaugu

SEQ ID NO: 4187417 - RNA, 128 nt, Human
acaugaaucuuugaggauaagaaaaagcguuuaaaacacaggucucaaacuggcacccugugggccccaucuggccagcagauguguuuuguuuggaccaugcuuuguuuuucuaacucugaauuagu

SEQ ID NO: 4187418 - RNA, 102 nt, Human
acaugacagugcauacacagaaaauaaaguuucuacgcaugauggauucuucccaguugauggagaauauuuuguauuuauaguggcacuaagacgucaugu

SEQ ID NO: 4187419 - RNA, 59 nt, Human
acaugaguuaguuucuugucuagaaaagagccauaucucaucagaaugacuacucaugu

SEQ ID NO: 4187420 - RNA, 61 nt, Human
acaugaucauacauacaugguccucagucacagagacaagagagguccaauguugagaugu

SEQ ID NO: 4187421 - RNA, 86 nt, Human
acaugcaauuaaauguacuugugagcacauauacacaggaucuuccuaggauguugugaugguucacugggcaugacuuugugugu

SEQ ID NO: 4187422 - RNA, 64 nt, Human
acaugcacugguugagggguuugucacagaggugucucucacagagcccuuccauuagucuugu

SEQ ID NO: 4187423 - RNA, 73 nt, Human
acaugcagcagaauaaugacuauaaaaccuuauaauuauacagcacuuggauagucaggaacuguuggugugu

SEQ ID NO: 4187424 - RNA, 59 nt, Human
acaugcaguuucucuaugcguagguuuucaauuuuuccuagggcuagacagacgcaugu

SEQ ID NO: 4187425 - RNA, 59 nt, Human
acaugcauaagccuagccaucaaugcaaugugugcgugugugugugugugugugugugu

SEQ ID NO: 4187426 - RNA, 60 nt, Human
acaugccuguggacuuacgagaauggucacuuuccuuuucauguggaccuagaggccugu

SEQ ID NO: 4187427 - RNA, 57 nt, Human
acaugcuuucuagguccuucugaguuuuaggauccugagggauuugguugguauugu

SEQ ID NO: 4187428 - RNA, 67 nt, Human
acaugcuuugacagagucacuaaauccuugucuguuuauuucuggaaugaucaugugaaagucaugu

SEQ ID NO: 4187429 - RNA, 76 nt, Human
acauggauuuuggggaaagugucuaauaauuugugcucacuuuaaaacagaauaaagauguucccaaaguucacgu

SEQ ID NO: 4187430 - RNA, 90 nt, Human
acauggcugccagaagucugggacuuacaaucaaccaccuuggagauccagcauccuggggaggaaugugaggucaggucugggccaugu

SEQ ID NO: 4187431 - RNA, 60 nt, Human
acaugguauagagccacauguauuguguauacuuagaguagaugauguuucuuugccugu

SEQ ID NO: 4187432 - RNA, 58 nt, Human
acauguacgugcugcucucuguguguccuugaacauucauagaaguauuauguaaugu

SEQ ID NO: 4187433 - RNA, 57 nt, Human
acaugucuuguggcuuugaucuaagccucuguguaugguucauaagccucagacagu

SEQ ID NO: 4187434 - RNA, 66 nt, Human
acauguggcauaaaauagguuacugugaauugguuaucacacaaaguguuagaugccacucuaugu

SEQ ID NO: 4187435 - RNA, 56 nt, Human
acauguguuggauauucuaggauacaauccacuguccugggaugcauaaaauaugu

SEQ ID NO: 4187436 - RNA, 55 nt, Human
acauguuugauaaauauuugggaguguuuauuaacuucauauuuaucguauaugu

SEQ ID NO: 4187437 - RNA, 61 nt, Human
acauuaacacuggugcugguguaauggaagcaugagcaguagcauaaauagugguaguagu

SEQ ID NO: 4187438 - RNA, 91 nt, Human
acauuaaccaggcauauguuuauuccaaauugcauuguuuuaaaacucucaguggcaaugaauaaauaauguuuagacaaaacguuauugu

SEQ ID NO: 4187439 - RNA, 130 nt, Human
acauuacaaagauguggaagcauauugccaaguaguucuccagaaaguacaugggauucauuuacccaaugacaggugccuguuucccuccauuuuuacuaacuugauguuuucauucuuucaauucuuu

SEQ ID NO: 4187440 - RNA, 59 nt, Human
acauuacauuuagcacaucugggauguguucacaugaagacauuggcuaaaaguagugu

SEQ ID NO: 4187441 - RNA, 130 nt, Human
acauuagaaucaccucggggagguuugugaaaaugcagauugcuggucuccacucccauccaauucaguagguccgagcugaagucugagaauuugcaauuguaacaaccucccagaugacacugcuggu

SEQ ID NO: 4187442 - RNA, 72 nt, Human
acauucaaggcagcacugaguguuggacaggacacauuaauuccuuacaugucucagguguuccuucagugu

SEQ ID NO: 4187443 - RNA, 75 nt, Human
acauucaagggcucaaacggugguugccucccacuagggagggcagggggccgccagagagagccuugauuaugu

SEQ ID NO: 4187444 - RNA, 72 nt, Human
acauuccacagcucuggggcagagugacuaaggcucaccuguaguccuuaaauggagagcaauuugggaugu

SEQ ID NO: 4187445 - RNA, 55 nt, Human
acauugaugaucccacuuacagugggacuaacuguaucccuuggguuauuugugu

SEQ ID NO: 4187446 - RNA, 55 nt, Human
acauugcaguuaucagauugccucugugaucccugcagucugguggcgugcaugu

SEQ ID NO: 4187447 - RNA, 63 nt, Human
acauugcucaaaggaaugcaauuaaaaccuaacugcuauugcauuuaauccauagaggaaugu

SEQ ID NO: 4187448 - RNA, 83 nt, Human
acauugcucuuuugugcucuuuaugcugugcauuuggacagaggucagaacugcagcagguaagagcauuuggcauuucaugu

SEQ ID NO: 4187449 - RNA, 92 nt, Human
acauuguacagugauaaucauggaaucugcuauguuauuucccacuuagguagggggaaaaauguaggcagaugauuaucuauuuaaaaugu

SEQ ID NO: 4187450 - RNA, 63 nt, Human
acauuguucuacuucuaguuagcuacagugagaaugcuagcuguucugugucuaggacaaugu

SEQ ID NO: 4187451 - RNA, 66 nt, Human
acauuguugacauuuugucauauugacauuuugugugugugugugaggagauguccugugcauugu

SEQ ID NO: 4187452 - RNA, 78 nt, Human
acauuuaagggcuggcaagggauugaaauuguuggagacuauuaugguuugaauugagugcccccagccccaauaugu

SEQ ID NO: 4187453 - RNA, 68 nt, Human
acauuuacagcccaagaaguuuauacguacggaugagucccuguagcuacauuuuugacuguguaugu

SEQ ID NO: 4187454 - RNA, 69 nt, Human
acauucugugagucauguuuuauuacuuuagggccuuuuguaaaauuucugagcugauuucacagaagu

SEQ ID NO: 4187455 - RNA, 64 nt, Human
acauucuucauuuacuguuacuugucauuuugcaaacugauuaguuaacuugaaugaggagugu

SEQ ID NO: 4187456 - RNA, 57 nt, Human
acauucuuucucuucaggaaacugggaagacaacacccaaagccagagaaagggugu

SEQ ID NO: 4187457 - RNA, 130 nt, Human
acauugagcaaauuuggcugcauuggggcauucacuugguuucuucaaagaugucuguuggagcuauucccauacccacugaaggaucuguagucuugucuucauucuauguagccauguucaaggaugu

SEQ ID NO: 4187458 - RNA, 56 nt, Human
acauugugacucugagcauuggggucugacuccugagugucucuggaagcacgugu

SEQ ID NO: 4187459 - RNA, 83 nt, Human
acauugugaucugcccaauucuaggaaauucauacgcacugccauaugaauggugcuuccuggaguugugcagugcacaacgu

SEQ ID NO: 4187460 - RNA, 65 nt, Human
acauuguuguuugcagcacagguacuaugcuggagcaguuaacuguguuacaaacugcuagaugu

SEQ ID NO: 4187461 - RNA, 61 nt, Human
acauuuaaugugcaaagagauagggcauuauaaaguuauaugucaugagcauauugaaugu

SEQ ID NO: 4187462 - RNA, 90 nt, Human
acauuuacuguaugagaaaauguauacuucauagccauauagacaaauauaucagugcagaauagugaugcauuugaauuagugaguagu

SEQ ID NO: 4187463 - RNA, 114 nt, Human
acauuuauuggcugugauguguccacugcaaucguguaugggugcuggccugaguagagagcacuugccaggucaccucacucauccagagacagccucaugguggaugagugu

SEQ ID NO: 4187464 - RNA, 72 nt, Human
acauuucacuccccuccccacugcacccuggcaacagcucugcaggacuggggagcggaaggugagugaugu

SEQ ID NO: 4187465 - RNA, 66 nt, Human
acauuucccaacaaggaaacguguaagauguaaacaguuuacaaaguuucacuguuccuuagaugu

SEQ ID NO: 4187466 - RNA, 63 nt, Human
acauuucuugcauauucucugaggcaggagagaccuucucuuauucuggauaugcagagaugu

SEQ ID NO: 4187467 - RNA, 83 nt, Human
acauuucuuuuguuagguacagcuaaaaauuaucugucuuuauagaaaggauucuugacugcuuuguugauuaaaggaaaugu

SEQ ID NO: 4187468 - RNA, 68 nt, Human
acauuugagucauauuugcuuagucuucucagacuucuucacgaggagagcaaaucugaccaaauagu

SEQ ID NO: 4187469 - RNA, 56 nt, Human
acauuugccuguauaaccuuguguguuaccacugccaagcaauauagugcaaaugu

SEQ ID NO: 4187470 - RNA, 66 nt, Human
acauuugucucugaaauauguggcuccaguggcccagcaggauagcagccuuucagagccagaugu

SEQ ID NO: 4187471 - RNA, 95 nt, Human
acauuuuaaaaguuaauauuguaaaauaggaauaauaggagcuaacauuucuauguuagccauuaauguccugugcacaauugcauuugagaugu

SEQ ID NO: 4187472 - RNA, 88 nt, Human
acauuuucauaauaauuuacagcccaugauuuguuauuuauauauaauuaauaugugaagaauuaaugugaaucauuauuuuaaaugu

SEQ ID NO: 4187473 - RNA, 82 nt, Human
acauuuuugguaagggugcuucauaggugaugcuguguauuucauacugcaucacagcaggaggcacauaauauuaguuugu

SEQ ID NO: 4187474 - RNA, 99 nt, Human
accaaaaacauggggaaaauguaaggugcucauguauuucuauguuuguuuuauucuauaaaggaauuucuaacuuuuauuuuccucaugguauguggu

SEQ ID NO: 4187475 - RNA, 70 nt, Human
acagaugauuuucuguguuagaagaugcuaucggcucaccuggccucuuagugacagagaaauccuuugu

SEQ ID NO: 4187476 - RNA, 63 nt, Human
acagaugcugaagguuauagcaugaaggcagacauuucugccuucaccaggccuucagccugu

SEQ ID NO: 4187477 - RNA, 59 nt, Human
acagaugguacuaaacccauauaacuuauauaacuguuaucauggggucaagccgcugu

SEQ ID NO: 4187478 - RNA, 79 nt, Human
acagauggucccacugcccccacucugagaaaagcccucuggcuguuuggaugagggugguggcgaugaggacauuugu

SEQ ID NO: 4187479 - RNA, 92 nt, Human
acagauguauuccugaaugaguugaucacaaucugaauuuuuguaaaccaugccagaguugcgauucacaacauuucugggaauacuacugu

SEQ ID NO: 4187480 - RNA, 58 nt, Human
acagauguuagcaaugaugaugauguuuaaaaacacacaggucauugcaacauacugu

SEQ ID NO: 4187481 - RNA, 106 nt, Human
acagauuccacaguuucucauaaugauaaugcaaauggcaaugagugaccuuaaacugaggugccauuaauaguuguggugauugugaguuuuugugguauuuugu

SEQ ID NO: 4187482 - RNA, 81 nt, Human
acagauuuuccuggaaaacaugggaaucacacugauuauuucacauaugugucaaauuguuuuacacaggaagaggucugu

SEQ ID NO: 4187483 - RNA, 59 nt, Human
acagcaaagaagacacaggcuucaucaucaagcagaccuggaccuguccuucucgcugu

SEQ ID NO: 4187484 - RNA, 74 nt, Human
acagcaaucagauaccaagcuccagaauaugcuccacacuguuauuuucuggcugaaaguuuauuugaagcugu

SEQ ID NO: 4187485 - RNA, 68 nt, Human
acagcagagggcuguccaccuaccaugccggcggugcccugccgagcggcucuggacagcacugcugu

SEQ ID NO: 4187486 - RNA, 66 nt, Human
acagcagaugacaacuauuuauguggagaguacuuuaauccggguaaugagucagcaucuaucugu

SEQ ID NO: 4187487 - RNA, 69 nt, Human
acagcagauuuggagccguggaagaacagcgagaaaucucuucacaugaccuucaugucuuccuccugu

SEQ ID NO: 4187488 - RNA, 64 nt, Human
acagcagcccucagaugggaaaggaggggcuuggggcucugagcuucccucugaggcaggcugu

SEQ ID NO: 4187489 - RNA, 91 nt, Human
acagcaggaaucgccuaaaccagugaaacaccaggcaagugcucuucuuuaugcuucuuagucuugaguguuugcacuaauuucugucugu

SEQ ID NO: 4187490 - RNA, 60 nt, Human
acagcaggauuuggcgauguuggcacuguugacauuuuggacucguuaauucuuuguugu

SEQ ID NO: 4187491 - RNA, 57 nt, Human
acagcagggcaugagaggcaggcaagugagcauuacugccugagcucugccuccugu

SEQ ID NO: 4187492 - RNA, 92 nt, Human
acagcaguuauuuuccauuccauuugccugcugagugagcuuccagggacuaaugccuacuucagcaaggcagaagggagguaagcugcugu

SEQ ID NO: 4187493 - RNA, 58 nt, Human
acagcauccuucuaaaguagcugucucagugaaaaaucacuuuagggaagguugcugu

SEQ ID NO: 4187494 - RNA, 61 nt, Human
acagcaugcccagacugagcuaaauggaaaaagacuacuuggaaagugugugugugugugu

SEQ ID NO: 4187495 - RNA, 79 nt, Human
acagcaugugcagacagggaccagccugcccagggcuagagcauggcuggagcccuggggcuggucuuggaaaugcugu

SEQ ID NO: 4187496 - RNA, 90 nt, Human
acagccaguuggaaggagucuuuaacacccaugaccuugauggucaacaaauuggaguuuuagugcauacuucuaccacaaauuaacugu

SEQ ID NO: 4187497 - RNA, 128 nt, Human
acagcccuauccuccucagcuuuaagaaguuaccauuaaucuauguucugucuguacagauuugccuguucaggacauuucguaugaacggaaucauacaauaguguggcauuuugggacuggucugu

SEQ ID NO: 4187498 - RNA, 59 nt, Human
acagcccuucuuuucuguagugauugcagauuugagcgcauuucaguaaggaagccugu

SEQ ID NO: 4187499 - RNA, 80 nt, Human
acagcccuugcuuggcugugcagucagaugggugagaagaaggauccacagaagcaaagacucaggcaagcccaggcugu

SEQ ID NO: 4187500 - RNA, 83 nt, Human
acagccgugcucacagagccucugugucuucaucgcuagaauggggaugggaguugcuuugagacugcaguauugaagguugu

SEQ ID NO: 4187501 - RNA, 79 nt, Human
acagcgaggugacagagauuaauagcuugguauugacugagcaacuucgaguuccuuaucucugucaagucaaggcugu

SEQ ID NO: 4187502 - RNA, 90 nt, Human
acagcguaguuaaauuuuaguggauauuugguuuuuuaaaaauguuauuuccaauaugucgcuacaucauuagauuuuaaacaauguugu

SEQ ID NO: 4187503 - RNA, 72 nt, Human
acagcuaagaagugcagagcugcaauguaaacacaacugugcuuuauuccaaagcuugcacuuuugcgcugu

SEQ ID NO: 4187504 - RNA, 56 nt, Human
acagcucagcuuguggugaugguauuagcuucacaacuccaaacaaguuaagcugu

SEQ ID NO: 4187505 - RNA, 55 nt, Human
acagcucucccucagagaaaugcgcacauuuucuacacagaaagggcgaagcugu

SEQ ID NO: 4187506 - RNA, 81 nt, Human
acagcucugcccuccggaggcuuggcagacacugagcagcugcuccuggggccaggcaccucuggcugugccagcagcugu

SEQ ID NO: 4187507 - RNA, 65 nt, Human
acagcucuuaggcagaaccaacccugcugaaagguugauuuuggguuucuagccuccagagcugu

SEQ ID NO: 4187508 - RNA, 69 nt, Human
acagcugcuuugucuggugauuuuguguguuucuauaaaaugcgcacaaaguuggacaacgcacccugu

SEQ ID NO: 4187509 - RNA, 56 nt, Human
acagcuggacaggggagaguuuaaguaaacagacacucauccacugcuggggcugu

SEQ ID NO: 4187510 - RNA, 59 nt, Human
acagcuggaggggcugcagagggagcagaucccuuaguggaggcagccccagcagcugu

SEQ ID NO: 4187511 - RNA, 55 nt, Human
acagcuggccgaggcucagggauagagacggcugcuccagcuaaaggucaguugu

SEQ ID NO: 4187512 - RNA, 86 nt, Human
acagcugggaagugauggagccaggauuuaauuccagacaaugaggcuuugggauccuggagcuccaucacuauuucaucugcugu

SEQ ID NO: 4187513 - RNA, 60 nt, Human
acagcuguggggacucuugcccaugguuugguguuugcaggguuauucucggcaugcugu

SEQ ID NO: 4187514 - RNA, 95 nt, Human
acagcuucuguguuuuucaguauuuuuuucuaguucuaaacuaagagaauguccuuaaggagcuuagaagugugcugagaggauacuuuuacugu

SEQ ID NO: 4187515 - RNA, 56 nt, Human
acagcuucuuagucuuuccuuguuuauucaugagcuuggcagucuugaggaguugu

SEQ ID NO: 4187516 - RNA, 63 nt, Human
acagcuucuuggcuugggcucuugaaaucuagaagucuuugggacugaaagcgaagaauuugu

SEQ ID NO: 4187517 - RNA, 62 nt, Human
acaggaaaugaaaugguaucuaaaauaaacaagcugugguaugaugauuauucauuuucugu

SEQ ID NO: 4187518 - RNA, 97 nt, Human
acaggaacgcuguuugugcauuuaugcaucccagcaugugacaaagcguuugucacacauuguugcuuaaguugcauauauuuccagucccaccugu

SEQ ID NO: 4187519 - RNA, 67 nt, Human
acagagcauauaaagugcuuugcauagacuuuguacaaugucuguauuaagcaguuuauauauuugu

SEQ ID NO: 4187520 - RNA, 75 nt, Human
acagagcauuuucugggccugcaggagauggucagucagacuuuucacaggaauacccggcuuucuaauuucugu

SEQ ID NO: 4187521 - RNA, 60 nt, Human
acagagccacuuuggugccuaccccuccacaaguagguaggcacauccagguagcucugu

SEQ ID NO: 4187522 - RNA, 60 nt, Human
acagagcuagaaaaaggcagaauugggaccuauacccagaauuucuaacucuagcucugu

SEQ ID NO: 4187523 - RNA, 122 nt, Human
acagaggacauuucccagagacagguucagggugccaggucucgggucugcucguggccuuguguuuucuggccaggggacuggagaaccucacagccagggacuuuggggaaauccucugu

SEQ ID NO: 4187524 - RNA, 71 nt, Human
acagaggcucagaguuaggacccauguagcagagaucagcuuuacugggaaaaacugcuuugaggcucugu

SEQ ID NO: 4187525 - RNA, 55 nt, Human
acagagguaggacaugagauaucuauaucauguaucucagugaauguaucucugu

SEQ ID NO: 4187526 - RNA, 68 nt, Human
acagaggucucaguuauguuuaaaauguguuaccaauggugacuaucauuuaggcauuacucuuuugu

SEQ ID NO: 4187527 - RNA, 73 nt, Human
acagaguaggugcugucgacuggcuuccugacuacucacagaccacagucuugccaguaccaaugccaucugu

SEQ ID NO: 4187528 - RNA, 67 nt, Human
acagauauaacugguccagaggucgguagucaucaugaguacuaagaccuagauacuaggggucugu

SEQ ID NO: 4187529 - RNA, 55 nt, Human
acagaucucaaagccuggaccccaccagagggagguguuggcuggccagaucugu

SEQ ID NO: 4187530 - RNA, 76 nt, Human
acagauggcacuuuuuaggacucaaauuggacacaauuucuucuaguuguaaaauccuuaacaagauggcauuugu

SEQ ID NO: 4187531 - RNA, 62 nt, Human
acagauggcagucagcuuagacuguagugugaagcccuacaggcugacuuccugccaugugu

SEQ ID NO: 4187532 - RNA, 96 nt, Human
acagauuuuugugaccagacuucauagcacaauauuaccuuuaugcuaguguuguacuauaaugguaacauugugcuacgugguauaauagucugu

SEQ ID NO: 4187533 - RNA, 57 nt, Human
acagcagacagucggcuuccugggaucaagggaauuuucugagccugcucugcuagu

SEQ ID NO: 4187534 - RNA, 83 nt, Human
acagcagcaaauauguggguggcuauuuggcugcagcucuauguagcuauagaggcuguaccuuugcauugugcccgugcugu

SEQ ID NO: 4187535 - RNA, 76 nt, Human
acagcaggccucucuggccccauggcugagcuggccucucaguuggccaauguggccagguuuaggccaccccugu

SEQ ID NO: 4187536 - RNA, 94 nt, Human
acagcaggguguggccgaugugagcuggcaggagaccauacccuacugagaagauggugguuugaccucccgcuagggcucaucacccugaugu

SEQ ID NO: 4187537 - RNA, 58 nt, Human
acagcagguagcuuugugccucugcaaugcucccuugagguugcaagauuccugcugu

SEQ ID NO: 4187538 - RNA, 106 nt, Human
acagcaguucuuggugauguuaauagcacaauugugaagaccaacauaagagcuagaguugauuucacaguacugugacuauugacagggacagugaugaugaugu

SEQ ID NO: 4187539 - RNA, 130 nt, Human
acagcaugcagcauuggguuuugauguuugugcuauaguguucuguccuguagguuuauuugugucugagaaugacauauuucaauccaagacgugauuagcauuaagaugagccuugugcugcuacugu

SEQ ID NO: 4187540 - RNA, 59 nt, Human
acagcauucaauaaauaauaacuacuuucacuaugacuguuauuaugugugguugcugu

SEQ ID NO: 4187541 - RNA, 63 nt, Human
acagcauugcuccaucucaagaccucacagaaaaucucucucugagaggaauguaauguaugu

SEQ ID NO: 4187542 - RNA, 78 nt, Human
acagccaaugagcuagaaaaccauguggacuccuaugaagccauucuaagucaccugguccuauagcugaaggacugu

SEQ ID NO: 4187543 - RNA, 63 nt, Human
acagccacuguggucuagcugcacugucuggcagucagcuccagaguugcacagugacccugu

SEQ ID NO: 4187544 - RNA, 64 nt, Human
acagcccaggacuccagugggcuugcgucgccauaacaacagacggcuccgagucuugggcugu

SEQ ID NO: 4187545 - RNA, 80 nt, Human
acagccccaccgugucaguagauuauuacaauaaaggcccacaucucacucuuguugcuggugaugugcuauuggguugu

SEQ ID NO: 4187546 - RNA, 61 nt, Human
acagccuguuugaucuggugcuuguuggcuuuaacauccacaaugaauacaagcauguugu

SEQ ID NO: 4187547 - RNA, 59 nt, Human
acagcgagaaggacagguccaguucugcuugaugaugaagccugugucuucucugcugu

SEQ ID NO: 4187548 - RNA, 67 nt, Human
acagcucugcauggcaguuauuucaucaauuacuuaccaagcaaugaaacggcugcuuugggguugu

SEQ ID NO: 4187549 - RNA, 87 nt, Human
acagcucugcgauuauacuaaaacgcauugaauugucuucagacaagcaguguauauaguaugugaauucugucucaguauagcugu

SEQ ID NO: 4187550 - RNA, 78 nt, Human
acagcucuuagcaauguaugauuaaaauagguuuaagcuugauaucuuaguauaugcauagcauaggaaaaaugcugu

SEQ ID NO: 4187551 - RNA, 64 nt, Human
accagccuggccaacauggcaaaacucaucucuacuaaauaugcaaaaauuggccaggcauggu

SEQ ID NO: 4187552 - RNA, 69 nt, Human
accagccugggaguggugacagcucucgguggaugguaaccuccagggugcugcaccaucccucauggu

SEQ ID NO: 4187553 - RNA, 61 nt, Human
accagcugauuuaagaauaaagagagcacuuaaacucagauuuccuuucuugucagcuggu

SEQ ID NO: 4187554 - RNA, 55 nt, Human
accaggagacaugaccaaugagacuagagagaguuuggugucauuuccuccuggu

SEQ ID NO: 4187555 - RNA, 87 nt, Human
accaggcaagaggugugaaaauaggaccuggagccaggaacguccagugucucaaguuccagcccuguggcuuccacccuuccuggu

SEQ ID NO: 4187556 - RNA, 70 nt, Human
accaggcacaggaaugucauccagugccauucgcaagaacagaggacuggggaucguuccaaguguccgu

SEQ ID NO: 4187557 - RNA, 79 nt, Human
accaggcaccccucugugggccugugcuuuaguccuuuuucacucuagacccugguacuacugagguggcuugcguggu

SEQ ID NO: 4187558 - RNA, 64 nt, Human
accaggcaguauggugcugcaaaaggugcuucaggcgcugcaugcagacaccaauuuccugagu

SEQ ID NO: 4187559 - RNA, 70 nt, Human
accaggccucuagcucuuagacuagcugugcuccauggcagaucugagccaagcucgauguugcucuggu

SEQ ID NO: 4187560 - RNA, 62 nt, Human
accagggcugacaaucugauggcauaggcugacagagccauauugguuggucagcccauggu

SEQ ID NO: 4187561 - RNA, 68 nt, Human
accaguaacuuucuaauuuuggcugagcuuuccauggaguucugccaacaaggagagcauguacuggu

SEQ ID NO: 4187562 - RNA, 55 nt, Human
accaguaagauccuguacauacuguacauacuccagguccaggguacuuccuggu

SEQ ID NO: 4187563 - RNA, 93 nt, Human
accaguaauugacagagcugcaacuugaacauaaaucuggauaauaauaaagucuguguuuauucuaacuugcugcucuaguggaauacuugu

SEQ ID NO: 4187564 - RNA, 63 nt, Human
accagucauagaaagcaguggugcccaagagcauggcacucacgucucugucuauaaacuggu

SEQ ID NO: 4187565 - RNA, 72 nt, Human
accauacauacugaguggacugauaaauguuuaauuuuaaugcagcaaauuggcuauugagugugugcuggu

SEQ ID NO: 4187566 - RNA, 72 nt, Human
accauagacugugaggcuuacaaagaaucgacaucuauuucucacaguucuggagccugggaagucuaaggu

SEQ ID NO: 4187567 - RNA, 77 nt, Human
accauagucaaggcacguuaguagguauuauuagugaaaggcacuuuauuuacugugcagcugugcuuugggguggu

SEQ ID NO: 4187568 - RNA, 76 nt, Human
accaucaaguaagugccagagaaugaaaaucagauuuuugacuaaaaauuugauaugcuuuucacuauaccguggu

SEQ ID NO: 4187569 - RNA, 64 nt, Human
accaucuaagagagagagcaugucuuggcuagcuuaaacaagcauugucacucucuuggcaggu

SEQ ID NO: 4187570 - RNA, 68 nt, Human
accaucugagccugcaaccauagaaccguguacaaggggcacaggagcuguggggcaguguaugaggu

SEQ ID NO: 4187571 - RNA, 58 nt, Human
accaugacacaugacaagcucaugaacucuuaaaugaguuuuaaaugauggugguggu

SEQ ID NO: 4187572 - RNA, 86 nt, Human
accaugaccucaagaacaguauuuccaggaauccccaucuuagcaucuaagggauuccugggaaaacuggaccgugaggacaaggu

SEQ ID NO: 4187573 - RNA, 63 nt, Human
accaugcuggcaccuugaucucagaaaauaaaugucuguuguauaagccauccagccuguggu

SEQ ID NO: 4187574 - RNA, 60 nt, Human
accaugguauugcaacaacugucauucaauaugaagauaucucuguccugguacuguggu

SEQ ID NO: 4187575 - RNA, 58 nt, Human
accauguccugugcuuugugccaccuguuuaccuuuguacauggcauucccacguggu

SEQ ID NO: 4187576 - RNA, 56 nt, Human
accauucugaguacauuuccucagcugugaaagaggaagagcugacucacaguggu

SEQ ID NO: 4187577 - RNA, 63 nt, Human
accauuuacuuuggaaaagcauaccaaggagaaagcuucauccuuugucuuugcauagauggu

SEQ ID NO: 4187578 - RNA, 100 nt, Human
accauuugaucggggaggucugagcuccuuccucugaacgcugugucuucaggccuuguguauucagaggagggacucagacccaggauugggcaggggu

SEQ ID NO: 4187579 - RNA, 92 nt, Human
acccaaaaccagucacuggaacaguguuggagcuugauuuuuugaucuuugaaucaaaguauuuuaacuguauccaccugaccuggcugggu

SEQ ID NO: 4187580 - RNA, 67 nt, Human
acaggaagugcuggcacuuacacaggcuggagugaagaugucaaaugaggaugucagcauuuuuggu

SEQ ID NO: 4187581 - RNA, 126 nt, Human
acaggacucaagccaagacaaugagaauagagaacagaaauuggaaaaguagcuuccuugcuuuucugagaaugcuucuggaaucacuuuucuuugucucucucugucauggacaaggacuucugu

SEQ ID NO: 4187582 - RNA, 68 nt, Human
acaggagcucuagggacagcacagugaggggucuacuccggagcagugcgagcucuaucugcuccugu

SEQ ID NO: 4187583 - RNA, 62 nt, Human
acaggaggaacaagagguucugguugccacucuucaaugaguucuucuuuuuccuugacugu

SEQ ID NO: 4187584 - RNA, 65 nt, Human
acaggaguggcucuaccagacccaaagggaauuuaauuucuucaaucugucuuugcuacucuugu

SEQ ID NO: 4187585 - RNA, 70 nt, Human
acaggagugugcauuccucuccucaggucucucucuuuugggggucugaaugucuagugcugauuccugu

SEQ ID NO: 4187586 - RNA, 58 nt, Human
acaggauaguuuuuaaucuuccauguaguucugaugcccugguugaaaucuguucugu

SEQ ID NO: 4187587 - RNA, 123 nt, Human
acaggauccuuauggucuuuauucucuuuucugggggcuaugauuuucuacaaauuauuggggaagauucucacugcucaacuuucagaggagcuagaaugcccacuuacuagcaucuccugu

SEQ ID NO: 4187588 - RNA, 71 nt, Human
acaggcaaagggucaguagcagggcaggaguaagauaagucucaggccgggugugguggcucaaagccugu

SEQ ID NO: 4187589 - RNA, 55 nt, Human
acaggcauugggauggagguuguggugcccaagugccaugcgucacaaugcuugu

SEQ ID NO: 4187590 - RNA, 129 nt, Human
acaggccaagggaaccagugcaaguuagaacauuuggacaugggcucucugagcuccagggcacacagcucaccccugagguacccugagccuguguccacaugcacuugaagauggcggcucuucugu

SEQ ID NO: 4187591 - RNA, 57 nt, Human
acaggccuagcuaaugcuuuccuuuccauacagaauugcagucuagccaggcucugu

SEQ ID NO: 4187592 - RNA, 58 nt, Human
acaggccugauguuauccuauuuacuucccauugaguuggaauauccgucuggccugu

SEQ ID NO: 4187593 - RNA, 83 nt, Human
acaggcgggaugggaggcaggcucagaaccggaaacuuccaaguuccuguucccucacugucuccugucuaacuacacaaugu

SEQ ID NO: 4187594 - RNA, 65 nt, Human
acaggcgguggcuccuggcugagugcaacauucuccgaggugcucaccaagcgccgccgcugugu

SEQ ID NO: 4187595 - RNA, 68 nt, Human
acaggcuccaggagggccuuggccaucccugagggcaggaggcuuggccggggugcugcugagcaagu

SEQ ID NO: 4187596 - RNA, 55 nt, Human
acaggcuuuuuuagaaugacauuugguucuuaaagucugucuacuuaaagucugu

SEQ ID NO: 4187597 - RNA, 55 nt, Human
acagggaacaggaauauacaaaaguaaaagaagguuuuuguaauguguucucugu

SEQ ID NO: 4187598 - RNA, 59 nt, Human
acagggaaggacaugacuuggcagugguccaaccagguggacagucugucuuuccuugu

SEQ ID NO: 4187599 - RNA, 114 nt, Human
acagggaggcaucaugcaggguauguauaccaggggauggaaauguuggggccaucuuggacuccucucuaacccacuggagcacaagcccauugccauucugccuggcucugu

SEQ ID NO: 4187600 - RNA, 79 nt, Human
acagggagucacccuuucuccagaacugucugaagcuuuagugagcucgggcagaggauggaaaaggaauggucccugu

SEQ ID NO: 4187601 - RNA, 65 nt, Human
acagggcagagggcaguugguagccacaagacgccagguagcccccaugcuccccucuuuucugu

SEQ ID NO: 4187602 - RNA, 63 nt, Human
acagggcccuugccagcacaaggucuagggaaagagcaaugcuggagguguggcaaggucugu

SEQ ID NO: 4187603 - RNA, 69 nt, Human
acagggccuggcucaauaaauauuagcugcuggcuucugcucacuuacuguuuauugacuggcuacugu

SEQ ID NO: 4187604 - RNA, 121 nt, Human
acaggggcaugaugacuggacuuggucacuccuggcuugaagagcugggucugcagucaucucugcaagaaagccucaaucuucaggccuaggaugcaaucuaguuucauucugccccugu

SEQ ID NO: 4187605 - RNA, 68 nt, Human
acaggguaaagggaaucugcucuggagucauacuugagcucaauuccuggcacaacccuuuaccaggu

SEQ ID NO: 4187606 - RNA, 60 nt, Human
acagggucacuguagacucugaucuuacuccccaaggaucuagaaaccugaugacucugu

SEQ ID NO: 4187607 - RNA, 62 nt, Human
acaggguuuggagaucaucagagguugauuccaaauuuaccucugccacuuucuaacucugu

SEQ ID NO: 4187608 - RNA, 61 nt, Human
acagguagguuaaaaugugucaagauccaaugacagggaacacuauuuaaaucuaaccugu

SEQ ID NO: 4187609 - RNA, 57 nt, Human
acaggucagauaaaggcuggugguuuucuccaacaggccucauuauacugaucaugu

SEQ ID NO: 4187610 - RNA, 63 nt, Human
acaggugagacaucuugggaagugaugugagagcaauuauucuuuuuaaaauguuuugucugu

SEQ ID NO: 4187611 - RNA, 81 nt, Human
acaggugccuguaucacaugacucugcacuaggcuaugguuucccuucuuacaggagcugcucugugauacuuguauuugu

SEQ ID NO: 4187612 - RNA, 65 nt, Human
acaggugguagaguggaaagaggcuagccagagugggucugaauucugucuccucuacuuucugu

SEQ ID NO: 4187613 - RNA, 130 nt, Human
acagguugaucauaccaaauacaaaaaucccagaauccaaaacguuuugaguacccacauaaugcuaaaaggaaaugcucauuggagcauuuuggauuuuggauuuucucauuugggauguucaacccgu

SEQ ID NO: 4187614 - RNA, 65 nt, Human
acagguuggcugugagggguugcacaggccucaguuggcccugugguaaugcgcacagucacugu

SEQ ID NO: 4187615 - RNA, 73 nt, Human
acagguuguauagucuucugugcucaaaacuuuccaagaaagcaauucuuugagaagcauggcuguauucugu

SEQ ID NO: 4187616 - RNA, 101 nt, Human
acagguuuaagcugcaaaacauugucaauugaaugaaugaggaggcauuggcucccauuguuucugcuuuauuuagggcuuguguuuagcuuguacucugu

SEQ ID NO: 4187617 - RNA, 91 nt, Human
acaguaaaauggccaagcaggauauucugugucaggaucagcugguucuucccuggcauucuggugcuugcuucuuccauuaauguauugu

SEQ ID NO: 4187618 - RNA, 89 nt, Human
acaguaaguuauuuuuggguuguugaaagcugugucucuguucuaaauuugagcgcagaaaucaugccacuuacaaaauaaugcuuugu

SEQ ID NO: 4187619 - RNA, 57 nt, Human
acaguaauuguguacgaggacacauuuccaaugggguuuuuguucagcaggugcugu

SEQ ID NO: 4187620 - RNA, 68 nt, Human
acaguauuagcaagguucaugagaagacaguaggccagugccucggaugugucaaucuuggugacugu

SEQ ID NO: 4187621 - RNA, 67 nt, Human
acaguauugucagccagauuggcuguaaccauuauuauaaccuuuacuauaucugcugacauucugu

SEQ ID NO: 4187622 - RNA, 69 nt, Human
acagucacggguugcuuaacaaugggaacauguuguaagacaugcauugucaggcaauuucaucauugu

SEQ ID NO: 4187623 - RNA, 75 nt, Human
acagucagucagccaaguacucucaccaaagcuuguuggggcaagauuggucuucaguauugcugcccagacugu

SEQ ID NO: 4187624 - RNA, 102 nt, Human
acaguccacgucccgggaagggguagacacagcuaugagcagccuagcuugccgaagcagcagggcuucugugccugugcaccucugucaugccuggaaugu

SEQ ID NO: 4187625 - RNA, 62 nt, Human
acaguccuugauccaauagugggagaaagaaguaucuuccauuauaaaauucagggaucugu

SEQ ID NO: 4187626 - RNA, 61 nt, Human
acagucugcaggcaaguucuacacuccugccucuuauggcccugagcuuccugagacaugu

SEQ ID NO: 4187627 - RNA, 76 nt, Human
accucacuaaaauuucguaucugauacaacagaauaacauuugcagaauguaauauuguagugacaguacugaggu

SEQ ID NO: 4187628 - RNA, 93 nt, Human
accucacuuuuagaaguauuucaaggcuauuaauauaaaugcuuuuuaaagguugcaucuauuagcucugaaaauuucauugacuugugaggu

SEQ ID NO: 4187629 - RNA, 69 nt, Human
accucaggauguggacacagaaauccuuggccuuuuuguugugcccugaugucccaagcauucgcaggu

SEQ ID NO: 4187630 - RNA, 83 nt, Human
accucaggggaccaaaauguccugccuacaaggcuuaugguauuaaggccacaaggggaggaauuuuggucuguuuuaucggu

SEQ ID NO: 4187631 - RNA, 63 nt, Human
accucauggggcugaaguuacuuugccaagacuuuucuguaauugacucagcucuguucaggu

SEQ ID NO: 4187632 - RNA, 79 nt, Human
accuccauguggcucaguuaacuuccauguagcugccugguuauaaauugaggauaacugugguauuccacucgggggu

SEQ ID NO: 4187633 - RNA, 95 nt, Human
accucccaaaaggcaagagguggccaugggcgcuggaacugggacacagcccccgccuccgcccugcccuggcuacacucaccugccaaggaggu

SEQ ID NO: 4187634 - RNA, 91 nt, Human
accucccaaauuauuuauccucuuggucuauaaaccaaggucucaaucucagaugguccagggaggaggugaauauuucugcugaggaggu

SEQ ID NO: 4187635 - RNA, 81 nt, Human
accucccaagccuuguccccagcagguugguuuuguuuucuugaagcuugucugaaggagauaagucugcaccugggaggu

SEQ ID NO: 4187636 - RNA, 62 nt, Human
accucccagcacgucugcuguuucuguuagucacauagaggaacggggauggugugggaggu

SEQ ID NO: 4187637 - RNA, 59 nt, Human
accucccaguauuucagcgguguuguuuacaagggugucccgguggcuugcagggaggu

SEQ ID NO: 4187638 - RNA, 55 nt, Human
accuccggggccugaugaauuuccaaauucagaacauuugggacuuugggaaggu

SEQ ID NO: 4187639 - RNA, 61 nt, Human
accuccuggugcccaaguguuugaggugagaaaaacugaaacaugaaaagcccagagaggu

SEQ ID NO: 4187640 - RNA, 57 nt, Human
accuccuucuuucuguugugaucagcauuuguugcaucuagaggcaaugaaggaggu

SEQ ID NO: 4187641 - RNA, 77 nt, Human
accucuccaguuuucuuuucuuuucuguggaggagaauauucucugguaacucagaagaaaggaaugaagaugaggu

SEQ ID NO: 4187642 - RNA, 113 nt, Human
accucucccuucuacuugaauccacaaugaccugggaggcuacaguuuugccguacaucaggcacacaauuccaagagcuuccuaagugauucaguggggggaguuaucaggu

SEQ ID NO: 4187643 - RNA, 97 nt, Human
accucucuacugaucacugaagaaccuauagcaugagugagaaauaaaccuuauuguuucaaaccacugagguucugagguuguuuguuagguaggu

SEQ ID NO: 4187644 - RNA, 77 nt, Human
accugaauugcacaucuaauaaugcuagauaaagacugucucaagcuuguugguauguuuacacugcuugauuaggu

SEQ ID NO: 4187645 - RNA, 57 nt, Human
accugaauuuuggaugagcuguccaagcagacaguauguaauaucuagaguugaggu

SEQ ID NO: 4187646 - RNA, 60 nt, Human
accugagaauuuucuaguaguuucauccauuuuggaagauaacuaauuaaauuccugggu

SEQ ID NO: 4187647 - RNA, 59 nt, Human
accugagcucugcacuuuuuagagccaguuucuaaggccugcaaagaguuuggacaggu

SEQ ID NO: 4187648 - RNA, 57 nt, Human
accugagggaaggcagucaguugguuugugucuaucguggccugccaucccuucggu

SEQ ID NO: 4187649 - RNA, 77 nt, Human
accugaugugggccagcuuuucuccugggugugugacugaauccuucuucccagagcaugugcugccuuuguuaggu

SEQ ID NO: 4187650 - RNA, 56 nt, Human
accugauuacuugucuucccagguggucucugggcucuaucaggaacaagccaggu

SEQ ID NO: 4187651 - RNA, 76 nt, Human
accugcccucauggcacuuagugucucaaaaguaauuuugccaauuacauuugggaugagugucaugaggaagggu

SEQ ID NO: 4187652 - RNA, 99 nt, Human
accugcuauggcucuguuggcaucccugggcgggucuccaagcuuguggucgcaugccugcccuggagauuggccuggcuugccaacaggaaggcaggu

SEQ ID NO: 4187653 - RNA, 69 nt, Human
accugcugcuuugacagugggaacaguggaaacauccuuugcuccaggcuaucagaaagggcaucaggu

SEQ ID NO: 4187654 - RNA, 57 nt, Human
accugcugucuugggggaaugcgccuccugaaaaaagccauuuccacggacggaggu

SEQ ID NO: 4187655 - RNA, 86 nt, Human
accuggaggauauuguuaaaaugcagaaauaauugaggaacucuggauggggccuaagauucugcauuucuaauaaguucccaggu

SEQ ID NO: 4187656 - RNA, 110 nt, Human
accuggcaccagcuggauguccugucaaugcuugcugacucccugucugaauccaugggcaaaugaguggguguguuguauggcgucccaaagcacuagugugccuaggu

SEQ ID NO: 4187657 - RNA, 73 nt, Human
accuggccucgcugcaggaacagguggcugugcucaccagacagaaccaggaacugauggagaagguccaggu

SEQ ID NO: 4187658 - RNA, 66 nt, Human
accuggcuggccaugcagcgccagcuguggguacauaccuaggcgcugggcaaggccaguagaggu

SEQ ID NO: 4187659 - RNA, 85 nt, Human
accugggcaucaguuaaaaugcagauucuuauucuguaggucugaguggggccucagagucugcauuucugucagccucccaggu

SEQ ID NO: 4187660 - RNA, 101 nt, Human
accugggguggcauuuggaaaguacagauuccuggccagguucugacucagaaaguuugguagauugcccagaaaucuguauaccuuuaaaguccccaggu

SEQ ID NO: 4187661 - RNA, 129 nt, Human
accuggguacacccuucagaagugggcaccugccucuaagcagcagguggggucagagggaaagucaguucucaaagguuguugagagugcaggguucuagccucacuucucagggauugcuuguuggu

SEQ ID NO: 4187662 - RNA, 70 nt, Human
accugguagcuugcaguuccugcuccaugcucugcccugggcaaugagcuguggaaggcagggaccaggu

SEQ ID NO: 4187663 - RNA, 87 nt, Human
acuccaaaggccaguggccagcuggaugugggugacgggaagacucucacucagguuucuagcuugggaaacuuggcgagugguggu

SEQ ID NO: 4187664 - RNA, 56 nt, Human
acuccagcucugugcagcagggggacugguguuuauucccuguuacacacuggggu

SEQ ID NO: 4187665 - RNA, 122 nt, Human
acuccauccaaaaaugcugauuucacugacauaaauguugagucuagaugauccuaggaauauaucaauauauucccuccaggguaucuaugcucauuuaggggugacaguguauauggagu

SEQ ID NO: 4187666 - RNA, 56 nt, Human
acuccaucugcuccugaagccauguagaaugucggucuugcaggaguggguagagu

SEQ ID NO: 4187667 - RNA, 86 nt, Human
acuccauggguuagcuugagugguuccucaguugacuguuuuuacaauuacacagggaucacuuuuuaaaacuaaacugugagagu

SEQ ID NO: 4187668 - RNA, 60 nt, Human
acucccacuccuggcucaccacagaggacgaguugcugguaucaucagggguggcggagu

SEQ ID NO: 4187669 - RNA, 71 nt, Human
acucccagcaucccagugggcagcagguagggaccugcugccaugcugcccccaacagggaaguugugagu

SEQ ID NO: 4187670 - RNA, 55 nt, Human
acuccccaaaacuaaccaugcauauuggcaaagugugguuuaacuuuuggugggu

SEQ ID NO: 4187671 - RNA, 89 nt, Human
acuccccaaacaguaaacagcagugauucauuagcauaagggcguagaaaaacagaacugugugaauggauuauucuauugcugggagu

SEQ ID NO: 4187672 - RNA, 63 nt, Human
acucccugaaaucuccucuuuauauaucucagcguuuuaugcuuuugaugugaggaagggggu

SEQ ID NO: 4187673 - RNA, 74 nt, Human
acucccugcaggguugccaugccaaaaccaacaacuccacggugaacauggcuggucacaccacugcagggugu

SEQ ID NO: 4187674 - RNA, 57 nt, Human
acucccuggcaggucuuuaucugacaucguuuggaaauggugaucugccaguggagu

SEQ ID NO: 4187675 - RNA, 62 nt, Human
acucccuugugaacucauucuuggugcaucucuagcuuccauacacugugggcacagggagu

SEQ ID NO: 4187676 - RNA, 129 nt, Human
acuccucaguccgacacaggcccuuggaccauggugggugugguaguguguggccuguggucacuucuuggcuggccucuucugcucauacuuucacuggucuggguucuugugcugcuaguaucgagu

SEQ ID NO: 4187677 - RNA, 66 nt, Human
acuccucccucacuacggccuagcaggguggggaccccaaugcagggcaguggagguugagugagu

SEQ ID NO: 4187678 - RNA, 130 nt, Human
acuccuggguucuaucugaagucaaauaccaaggagaaggugcaagcuucgccuucuggaauaaauucagugaacugccaagcuuccauucucucuccuugguacuugacuucagacaggacccgggagu

SEQ ID NO: 4187679 - RNA, 59 nt, Human
acuccugugggcauggcacccccuggaguugugcaagguggcaacccugcccauggagu

SEQ ID NO: 4187680 - RNA, 64 nt, Human
acuccuguuguuugcuaguguacucucauuaagcaaugaggguauaaagagcaagcagaagagu

SEQ ID NO: 4187681 - RNA, 57 nt, Human
acuccuucaagauugcuguugacaaguuaaguuuuaaacaguucucuuugaaggugu

SEQ ID NO: 4187682 - RNA, 124 nt, Human
acuccuuggugcacuguuucuacuuugggugcugaucuggagugguugcuauguuuugugcucgccuguccuccaggugcagaaggacucaggguggaauuugaccggcagugcuccucagagu

SEQ ID NO: 4187683 - RNA, 88 nt, Human
acucuaauaccugacaauagcuccauggagaauucacagccagcaaaccucuacuguguugucuucagcuguagucauuguucacagu

SEQ ID NO: 4187684 - RNA, 124 nt, Human
acucuaccauuuuugcugcaucuacuagaaaaugucuauggaauuuccacacaaccauaagggauggguugaaauuccagagaagaaacauagcuaauacauacagaucccuucuuggcagagu

SEQ ID NO: 4187685 - RNA, 65 nt, Human
acucuacugcuggacagugaaugagucuuuguauuccagguucauucacugcccagcaguguagu

SEQ ID NO: 4187686 - RNA, 101 nt, Human
acucuaggauggagaauaaagagucuuagugccagguuuucaguuccugauuccaaaucaccugaaacucaacuuuaucuccugcccccuauccuaugagu

SEQ ID NO: 4187687 - RNA, 81 nt, Human
acucuauguguuuccuguggcugccauaacaaauaccacaaacuggguggcucaaguaacaaaaauauaucaucucagagu

SEQ ID NO: 4187688 - RNA, 130 nt, Human
acucuauuauuuguaucucugaagaauauugauuguugcauguuaauuuuaaauccuggcaccuuacugaauuuuguuaauagugaaggcagcaugcacacuagugaauugaaugcaauguuaccuggau

SEQ ID NO: 4187689 - RNA, 77 nt, Human
acucuccuucuuggcacaagcuguaauagcuucuacauucgguagcaaauggcuuuugaugcuaagccaaggaaagu

SEQ ID NO: 4187690 - RNA, 58 nt, Human
acucucuguaugaaucauauggagugaaaauugcuacucagugaagcaaacagauagu

SEQ ID NO: 4187691 - RNA, 85 nt, Human
acucugaggagguggcauguggggcauggccuaaaauuguuggggcuacaguuuaggcaggcuccuaugguagaccuuggauggu

SEQ ID NO: 4187692 - RNA, 64 nt, Human
acucugagggguauguuccuauguaaauccccauacaucaagauaaaaauauacuucucagugu

SEQ ID NO: 4187693 - RNA, 83 nt, Human
acucugcaucagcuucuguccuagaaacugggcuuacauccaugaacaaggccguuuuugcucacacgaagcuucaucauugu

SEQ ID NO: 4187694 - RNA, 56 nt, Human
acucugcauucacaauaucuuggcccauuagcagcuaggacuuguuugggcagagu

SEQ ID NO: 4187695 - RNA, 60 nt, Human
acucugcgaggccagagagacguguugcaauuuacaaugugcuuugcucguucccagagu

SEQ ID NO: 4187696 - RNA, 65 nt, Human
acucuggcacuggguaccucagggagcaugcaauauuguuuucuggagguacucaggcacagagu

SEQ ID NO: 4187697 - RNA, 55 nt, Human
acucuggcuauucacuauaauacugcuucuuaucagacaugugcguggccggagu

SEQ ID NO: 4187698 - RNA, 123 nt, Human
acucuguaagguucagcaggaauacaaaacaagggaagaaucacugggauguuuaucuuaacugagaaauaauauuuuguuccuuccacaugauuuguuaagauuguaucugcccuuaaaugu

SEQ ID NO: 4187699 - RNA, 60 nt, Human
acugggaagauggaggcaagcaguggguagaaaauggugacuuucccccauguuccuggu

SEQ ID NO: 4187700 - RNA, 107 nt, Human
acugggacacugcggcgagcaggggcauggagcagcagaaggggcuuggucaccguucauggcucugugucuguggcuccgguggucucagauuccgagugcccggu

SEQ ID NO: 4187701 - RNA, 56 nt, Human
acugggauuuaauuagugaauugccuccuucagugcaguucucuuagauuuccagu

SEQ ID NO: 4187702 - RNA, 119 nt, Human
acuggggggugcacauguggcaccugcaaugcaggguuccuccaguuccuagagccauaaacaccugagcuauuaggaagguggaggcauucaggaccaaacauuuccuccaccccagu

SEQ ID NO: 4187703 - RNA, 85 nt, Human
acuggggucuucuuggcuuaccgcuucugauauggaaccaucaccccacaagcuguggugggacaagagugaucagggcccuagu

SEQ ID NO: 4187704 - RNA, 119 nt, Human
acugggucuuacgaaagacaauaauagauuucauaagugacaauccugggccuaaaugucucagagauuuugggaauaauugcacagauuucucaccuuguuguuuuucucuuccuagu

SEQ ID NO: 4187705 - RNA, 65 nt, Human
acugguaacaauggaagcuucuauggauaucaugucucuacucaaaagagucuauugauaucagu

SEQ ID NO: 4187706 - RNA, 74 nt, Human
acugguccagacgucuuagauucucuaggggcggccagccuggccucuacccaggagacugagcuguaaccagu

SEQ ID NO: 4187707 - RNA, 60 nt, Human
acugguucaucgcggccacuuaugaaucagcuggcucugccugucaugccgcgaaccagu

SEQ ID NO: 4187708 - RNA, 102 nt, Human
acugguugcuuugaggaggagcugcuuugauaugcaaggaacugucuuguuuagcaaguuguuaaugccuacauauuaagcaucuuucuuuuuuuuuccagu

SEQ ID NO: 4187709 - RNA, 74 nt, Human
acuguacauccugguuucagacuuuguugugaacacagauuucauuucaaguucugacagcuaguaaacucagu

SEQ ID NO: 4187710 - RNA, 70 nt, Human
acuguaggccuagcuacuugggaagcugagguggaagcaucucuugaauccaagaguucaaggcuacagu

SEQ ID NO: 4187711 - RNA, 69 nt, Human
acugucucccaguaagccugagaaacaccaccuccccagcuuggacggucacaggcauauugguguagu

SEQ ID NO: 4187712 - RNA, 121 nt, Human
acugucucgggcccaaauucagagcuuccuuccugaaccguggcuggccucucuguuccucugcugguucagcuguccagcccuuguucaccuucuggaaaaaggaaugugucugcgaagu

SEQ ID NO: 4187713 - RNA, 60 nt, Human
acugucuguagacauuuuugguugucacaacugggugggaggcaaggugcuacagacagu

SEQ ID NO: 4187714 - RNA, 56 nt, Human
acugucugugccagaugcugggcuggcucaugugcaaaguucuugcaaagacuagu

SEQ ID NO: 4187715 - RNA, 65 nt, Human
acugucuuucaucuuucaugcaggguaaaagaagacaccuuggcuacagcaagaggaaagaaggu

SEQ ID NO: 4187716 - RNA, 65 nt, Human
acugugagagggguguccuugcuuuguuauuauuaauggcagcaguagccaccccagcuuacugu

SEQ ID NO: 4187717 - RNA, 59 nt, Human
acugugauguucucuaucuuggcuccuuccagaagaagaagaagagaaguuaucucagu

SEQ ID NO: 4187718 - RNA, 68 nt, Human
acugugcaucauguuuguauaggacaguucagguuuauaucaauugucuuggugcaaucaugaauagu

SEQ ID NO: 4187719 - RNA, 81 nt, Human
acuguggcugguacugugggccuuuccuuugacccugccauggaagcaaggucaaguauuuuggccccagcagugagcggu

SEQ ID NO: 4187720 - RNA, 77 nt, Human
acuguguaagaaggaaaggccucagcagaaaccagucucuugaucucuaggucucuguagucuuuccuccucacagu

SEQ ID NO: 4187721 - RNA, 78 nt, Human
acccacagacauuuagaagucuaauggccagaacgaaauaaccgagguugguuuucggggcuguugaguguugugggu

SEQ ID NO: 4187722 - RNA, 64 nt, Human
acccacauuuugggguggcagaaagcucauugagaaagaaagcagcugucccuuaacaucaggu

SEQ ID NO: 4187723 - RNA, 61 nt, Human
acccaccacaguggcuggcacauaguagaugcucaauugaugauggucauguuauuugggu

SEQ ID NO: 4187724 - RNA, 81 nt, Human
acccacucucaggagacugaacuuuugcaccacugagagucauaagaaugggcucagaagauaguuuccaaagaggagggu

SEQ ID NO: 4187725 - RNA, 68 nt, Human
acccacucuggcucccuucuaguuugagcaaaggcccugguucuuauugaaggaguaccagagugggu

SEQ ID NO: 4187726 - RNA, 92 nt, Human
acccagacaucuuuucuagaaaccaagauauuguuugcuuccuugaauugucuuuagaagugcagaauuuaggaauuaggaaagugaugggu

SEQ ID NO: 4187727 - RNA, 75 nt, Human
acccagcauuugggcauuuuauuucuucggauuccagaucaucagaaguuaugucaauggucaugcuggcugggu

SEQ ID NO: 4187728 - RNA, 70 nt, Human
acccagccugcccuggaagcccagccugcaccccaccugcggguuuuagacugacccagggcugcugggu

SEQ ID NO: 4187729 - RNA, 60 nt, Human
acccaggacacagagaugacccaugagucaaagaucaagagaucaucuacugguccaggu

SEQ ID NO: 4187730 - RNA, 59 nt, Human
acccaggaggcggagguugcagugagccgagaucgcgccacugcacuccagcucugggu

SEQ ID NO: 4187731 - RNA, 59 nt, Human
acccaggcgggagugcagugucaugaucucggcucaccugcaaccucugccucccgggu

SEQ ID NO: 4187732 - RNA, 58 nt, Human
acccaggcuagggugcaguggcacgaucuuggcucacugcagccuccgccugccgggu

SEQ ID NO: 4187733 - RNA, 58 nt, Human
acccaggcuggagugcagugaugccaucucggcucacugcaacuccugucucccgggu

SEQ ID NO: 4187734 - RNA, 58 nt, Human
acccaggcuggagugcagugaugggaucucggcucacugcaagcuccgccucccgggu

SEQ ID NO: 4187735 - RNA, 59 nt, Human
acccaggcuggagugcaguggcgccaucuccggcucacugcaagcuccaccucccgggu

SEQ ID NO: 4187736 - RNA, 58 nt, Human
acccaggcuggagugcaguggcguguucucagcucacugcaaccuccgccucccgggu

SEQ ID NO: 4187737 - RNA, 58 nt, Human
acccaggcuggagugcaguggggccaucucggcucacugcaagcuccgccucccgggu

SEQ ID NO: 4187738 - RNA, 58 nt, Human
acccaggcuggagugcaguggguccaucucggcucacugcaagcuccgccucccgggu

SEQ ID NO: 4187739 - RNA, 58 nt, Human
acccaggcuggagugcagugucuugaucucagcucacugcaaccucugccucccgggu

SEQ ID NO: 4187740 - RNA, 58 nt, Human
acccaggcuggcgugcaguggcaugaucuuggcgcacugcaaccuccgccuccugggu

SEQ ID NO: 4187741 - RNA, 62 nt, Human
acccaguggugggugugucaguagggucuuggcaaggaucagauggaacacucaaacugggu

SEQ ID NO: 4187742 - RNA, 63 nt, Human
acccaugaguguaucuuuaaaaaacucuugaacuuauuuaagagaggaagcauuacauggugu

SEQ ID NO: 4187743 - RNA, 63 nt, Human
accccaugguuaaccaagccugagaagagagcccaguuuuuaaggauggaaaggacuaggggu

SEQ ID NO: 4187744 - RNA, 86 nt, Human
acccccaacccuaagacagucugucaagccagcuuucaaguaucagagaaagcugcagauucuaucuagaaggugaaaugggaggu

SEQ ID NO: 4187745 - RNA, 57 nt, Human
acccccaacucuuacacugccaaggcaacuuccuggcagccaucugagggugggggu

SEQ ID NO: 4187746 - RNA, 66 nt, Human
acccccacauuuuugagucuucauccuuuauguuaaacauuggggugaagaauaaggagugggggu

SEQ ID NO: 4187747 - RNA, 70 nt, Human
acccccagcacagccuaggcugggacugccacccacugcgcacuccagaggcagcugugcugaguugggu

SEQ ID NO: 4187748 - RNA, 108 nt, Human
acccccucaggucccguugccuccugguccuuucagggauuccugguccuuccuucccacacuagccucccugggguaucgcugaggcagccuggccugcacccaggu

SEQ ID NO: 4187749 - RNA, 73 nt, Human
accccgacccuacagacagugcugagcugccucugaagaccuggggcuuggcuuugggaaguaggggggaggu

SEQ ID NO: 4187750 - RNA, 78 nt, Human
acccuaaaauuauaccaaaaaauuaaugugauuaggaugauaauucacagucacauaguguuuuggaaucuuuguggu

SEQ ID NO: 4187751 - RNA, 81 nt, Human
acccuaagguauuauugucaugaaauaauauuucucuaguacuugggcuauauuaacauuuuaugaaaauaaacuuggggu

SEQ ID NO: 4187752 - RNA, 78 nt, Human
acccuaugccuauuuugcucacuucccuauucuggugcuuugguugguccuuugagcaagauccccggggcuaagggu

SEQ ID NO: 4187753 - RNA, 73 nt, Human
acccuccuacacucacugaaaugucuucagccccuaaccucuagaagagcugaggacaucauggaaggaaggu

SEQ ID NO: 4187754 - RNA, 61 nt, Human
acccuccuggugacaaggcaaagccacacccuugagcuuuguuugaucauacaggcagugu

SEQ ID NO: 4187755 - RNA, 59 nt, Human
acccuccuuagcaggcagaaaggagaaaggguuuucuucuuuucauggcuugggaaggu

SEQ ID NO: 4187756 - RNA, 57 nt, Human
acccugagaugccacagcaugacuugaaggugacccagacugaccacaucucggggu

SEQ ID NO: 4187757 - RNA, 67 nt, Human
acccugauauagguccaagagcaaugagguaggucucugaaacucaagguucuuucuauucaugggu

SEQ ID NO: 4187758 - RNA, 56 nt, Human
acccuggacaucuugucauagcagacaacaaagacgcuauuacaggcuacuagggu

SEQ ID NO: 4187759 - RNA, 58 nt, Human
acccuggcaggcucucuggucgguuuccagcaaaguaaacggacucgguuugcugggu

SEQ ID NO: 4187760 - RNA, 69 nt, Human
acccugggcuugguagcagagacuccguuggguagcccuuaugaagucuauuuaccuaagcuucggagu

SEQ ID NO: 4187761 - RNA, 126 nt, Human
acccuuccuucugggucuuuguuucgaguauuauucucuggaggaaagauucugagauagagauaaccaggcaggauauuuucgcagggagaauucuuaggauaagcaucugagaaagggaggugu

SEQ ID NO: 4187762 - RNA, 58 nt, Human
acccuuugacaacaaggauccugccuggccccaaaggccacagcuugucuguuagggu

SEQ ID NO: 4187763 - RNA, 105 nt, Human
accgagaauauagaaagcugccuuugacuuacagugaaaggcccauuuggugaauaagaaaccuucaacuaacuuuucauaagggcaaauuuauauguucuuagu

SEQ ID NO: 4187764 - RNA, 72 nt, Human
accgaggaguaaaugguuuuuuauaugcugccaaguuuacuuuggcaauguaaauugaacuagaacuagggu

SEQ ID NO: 4187765 - RNA, 82 nt, Human
accgaggauguuuagcuuuugagaaugauuucuguacaaaaugguuaaaagaaaacaaagcaauaagucaaaacauuuuggu

SEQ ID NO: 4187766 - RNA, 58 nt, Human
accgcccugccgccugcauaugggaugaguccucucaaauagcagaagcagagggggu

SEQ ID NO: 4187767 - RNA, 83 nt, Human
accgggcugugcggaccaaaugcuuuuuaauugaaaauuuuuuuaauucaaaaaggauuugcuguuuguucgcaagugcaggu

SEQ ID NO: 4187768 - RNA, 87 nt, Human
accgucugccuggcagcuggggccacacuuaggcagcugccccagcaugcacuaaaauuagguggcccauuagacccaggacauggu

SEQ ID NO: 4187769 - RNA, 61 nt, Human
accgugguugccaaaacagggcucuggguguaccaagcucagagcugguagguagguaggu

SEQ ID NO: 4187770 - RNA, 79 nt, Human
accuaaaaucuucucucugcugcuccagcagcaccaaccugcucuccccaguggcacagcagagagcagaccuuugugu

SEQ ID NO: 4187771 - RNA, 97 nt, Human
accuaaacuauucaggauuuuccauugaucuugugauaguucaacuuuuucuagguguguaucuucacgagauggauggacauccaaauaauaaggu

SEQ ID NO: 4187772 - RNA, 56 nt, Human
accuaaccaucauugugcugguauuaggaggugagaccagugggaagugauuaggu

SEQ ID NO: 4187773 - RNA, 77 nt, Human
accuaauugggcaggcuggcagacugcuguucaaagacagaugaauuacagcagcuaucauuuugucccuuuuaggu

SEQ ID NO: 4187774 - RNA, 76 nt, Human
accuacagcuuuugaaaaauuacuggcagcuuuucuuucaucacagccaguucuuucagcagaguugagucagggu

SEQ ID NO: 4187775 - RNA, 66 nt, Human
acuuuucugggcaucuccaugauauccucauucagagauugagacaauucagagguacagaaaagu

SEQ ID NO: 4187776 - RNA, 68 nt, Human
acuuuugaacaaacuccucugucuuggauacauuuuucuuaaaaccaagcaguuguaaauucagaagu

SEQ ID NO: 4187777 - RNA, 67 nt, Human
acuuuuggcagacugacaaucuguuuuaccaaaucuauguaaugcauuuugaaggucuguuuagagu

SEQ ID NO: 4187778 - RNA, 64 nt, Human
acuuuugguucuguaacugugauucuuuacugcagucuucuacagcuuuuacagaauuaauggu

SEQ ID NO: 4187779 - RNA, 57 nt, Human
acuuuuuacaggguguauaccaccugcuggaagaugaggagguagccaccaagaagu

SEQ ID NO: 4187780 - RNA, 83 nt, Human
acuuuuucugggauauacagguguucgcucaguuagacacaugcgugaguucauuugagugaacacuuccugagagcuuaagu

SEQ ID NO: 4187781 - RNA, 129 nt, Human
acuuuuuuuuuuuuucccgagauggaguuucgcucuuguugccaggcuggagugcaauggugcaaucuuggcucacugcacuccagccugggugacaaaguaagacuccaucucaaaaaaaaaaaaggu

SEQ ID NO: 4187782 - RNA, 76 nt, Human
agaaaaacagugaagauuuauaaggaccuuauuaguauagugagauuaaccuuuggaucucuuacucuguuuuucu

SEQ ID NO: 4187783 - RNA, 74 nt, Human
agaaaaagaggaaauugacccaauaucuugugaugaggaaagucauuagauaauuaugucaauuucuugcuucu

SEQ ID NO: 4187784 - RNA, 72 nt, Human
agaaaaauaugucugcagaaaccugcagcauuagaaaaccuauucuuugcugcagauugcagauuaacuucu

SEQ ID NO: 4187785 - RNA, 66 nt, Human
agaaaaaugcugggaaaguuggaauuccagauuaggaacaaguucacaugcucucaugcuuuuucu

SEQ ID NO: 4187786 - RNA, 75 nt, Human
agaaaaauuuuugagguauugauaaaacauuuauguuuaugcaugggugcauguguguauacucaaaaacuuucu

SEQ ID NO: 4187787 - RNA, 83 nt, Human
agaaaagagagaccuggagccagaagagccaguucaaguuccaccuuggccacuacuuacuuggcuucauucccuuguuuucu

SEQ ID NO: 4187788 - RNA, 56 nt, Human
agaaaagaggcugugauccuuucuauagugaugaggaagagagagugccucuuucu

SEQ ID NO: 4187789 - RNA, 58 nt, Human
agaaaagaggcuuucuaagcauuccuuccucugcaggauauuugggauccucuuuucu

SEQ ID NO: 4187790 - RNA, 71 nt, Human
agaaaagguugaaaguaggauuauugccuuacccacagucuagcuugugucuuuccuuucacacuuuuucu

SEQ ID NO: 4187791 - RNA, 77 nt, Human
agaaaauagccuggagcugucgacccaccgaggcaaggaggacuguuuccagaggggagguggcagcccaggugucu

SEQ ID NO: 4187792 - RNA, 67 nt, Human
agaaaauauuugaaugguguaagaugguggaaggaaagccaucccacaccccuacaacauauguucu

SEQ ID NO: 4187793 - RNA, 129 nt, Human
agaaaaucaucuuauuuucauaacacuaaauguaucauguuugucuuugugugagggcaauuagcaaaacuagugcaacuucacguagaguacaauuauauggaacauuugaaaauaaugucucuuucu

SEQ ID NO: 4187794 - RNA, 64 nt, Human
agaaaauguguguguguuuguguauguguguguacaugugugcauaaacagauacuucaugucu

SEQ ID NO: 4187795 - RNA, 121 nt, Human
agaaaauuuuaaauaacauugcauuuacuuuuauaugcuuugaugguugucaccaaguauaguacagcuguuacucugaguaaauggcaaaguaaauuaguaauauuuauugaaacuuuuu

SEQ ID NO: 4187796 - RNA, 125 nt, Human
agaaacaccaagaaaaugcuacgauauauuacaguucgaguuucuaggcacugugaugacauuaucuguaagcucuggcauuuggaccacugugauacuauaggguaguguugagaauaacgucu

SEQ ID NO: 4187797 - RNA, 58 nt, Human
agaaacacugggguaggcccuggagagcaguacucuuaacaagcuccucagugcuucu

SEQ ID NO: 4187798 - RNA, 64 nt, Human
agaaaccacaguacccaggaaaauuuaauuuauuuuauggcauuuuccaaaggacuggguuucu

SEQ ID NO: 4187799 - RNA, 67 nt, Human
agaaaccguggucuccucuccucgaucccguucacagccauugaucuccagaggagucauggucucu

SEQ ID NO: 4187800 - RNA, 61 nt, Human
agaaacuucucuagcaugugauaagcauaccagucugcucaacauguacagacagguuucu

SEQ ID NO: 4187801 - RNA, 62 nt, Human
agaaagaacgcacuugugcugcagaaaccuugaaacaaucaaaggcacaaaugccucuuuuu

SEQ ID NO: 4187802 - RNA, 83 nt, Human
agaaagaucugaauucaaagacuagaauuuugccaccuugacuggguucuguaaagaaguuuuugaaugcaugggaccuuuuu

SEQ ID NO: 4187803 - RNA, 67 nt, Human
agaaagauuaaaggggagacaagcucaguuauuugagucuuuccagcugccccaauuucauccuucu

SEQ ID NO: 4187804 - RNA, 64 nt, Human
agaaagauuuagcaggaugauuaguccuacagaaaauccucaccuagcauucuguaaucuuucu

SEQ ID NO: 4187805 - RNA, 65 nt, Human
agaaagccaugggucuuuggcauauuuaucuuaugauuagcuauguuucuggacucauuauuucu

SEQ ID NO: 4187806 - RNA, 59 nt, Human
agaaagcccaguguaaauggaacucaacuuuaauuugagcagagaugacugggcauuuu

SEQ ID NO: 4187807 - RNA, 107 nt, Human
agaaagcuguccuauuauaaaucuuugcauacaugagaaugucuuuguuauuuuaacaugcaaaagacaauuuugaguaugcacacaauuugagggccacaauuucu

SEQ ID NO: 4187808 - RNA, 76 nt, Human
agaaaggacaucucccuuuaaggcuuaguaggagaaaauaccuguuuucuguucuauagagaguugugucuuuucu

SEQ ID NO: 4187809 - RNA, 64 nt, Human
agaaaggagaaggguuucccaccaaagccgggccaucugugcugccagaauccuucucuguucu

SEQ ID NO: 4187810 - RNA, 61 nt, Human
agaaaggauauggcaggaucuguuguucauuuguguuuauuagaaugcuauugucuuuucu

SEQ ID NO: 4187811 - RNA, 64 nt, Human
agaauggaggcaucugcaaauaaggagggacuucccaagacaccaauugcagguaccucuaucu

SEQ ID NO: 4187812 - RNA, 130 nt, Human
agaaugugaguuuucuuguuuuaaaucagcacuuuguguguuugauguauugcauagauuuaguauaaauauguguacucguuaaauauuuauuaaaauguaaaggauuaugaaucaauacccauauugu

SEQ ID NO: 4187813 - RNA, 79 nt, Human
agaaugugcauuugaguuaggguauauauuugcaaucgauucccauucaaaguuugucacuuggcuagaauuacauuuu

SEQ ID NO: 4187814 - RNA, 74 nt, Human
agaauguucaaauccaucaaaucuucuagaacuuuacacacagguacugaaagagugguggacucuggcauuuu

SEQ ID NO: 4187815 - RNA, 107 nt, Human
agaauuagauuaagcuauguguuaugggagaaaugagugauucacuuuucaucaaaugaagaaaucauaucauuucuugguucaaaacauucagugauucccauucu

SEQ ID NO: 4187816 - RNA, 76 nt, Human
agaauugccagccuauucaucugaucuugaaaguguacaaacuuaccuucaaacaguguagaauauaugcaauucu

SEQ ID NO: 4187817 - RNA, 84 nt, Human
agaauugcuugaacacaggaggcggagguugcagugaacugagauugcaccacuacacuccagccugggugacaaagugagacu

SEQ ID NO: 4187818 - RNA, 57 nt, Human
agaauugggaguguccugauaucccgauaucuugagaacagaagcauuccuaauuuu

SEQ ID NO: 4187819 - RNA, 107 nt, Human
agaauuguuauuggucuuuugccagucuaauguuuguaaaaucauaacucauuguuggauuaguuguucacacguuccugacugguagagauuuuaagccuuuuucu

SEQ ID NO: 4187820 - RNA, 57 nt, Human
agaauuguucuguagcuuggcugagacacaaucacacucugggcuggagaacauucu

SEQ ID NO: 4187821 - RNA, 79 nt, Human
agaauuugaauggauauaacaacaguguagacugacuuggguugcgagcacugagcauuguuauuuccagcaagucucu

SEQ ID NO: 4187822 - RNA, 56 nt, Human
agaauuugagugcuuucugugugcugaguacacagaaguuaaagaauuuaaaaucu

SEQ ID NO: 4187823 - RNA, 76 nt, Human
agacaaaaggaacaaaggccguuaauaaccaccuugucuaguagguggugaaaauagccuuugaaccauuuuaucu

SEQ ID NO: 4187824 - RNA, 72 nt, Human
agacaacagaacuccugggauuuuucuuuaaccauuuuuuaucauggaaacauuuccggccuuuuguucucu

SEQ ID NO: 4187825 - RNA, 69 nt, Human
agacaagagaggcaacauggggaacagauaugggugugucagcauuuuacaugugucaucugcaggucu

SEQ ID NO: 4187826 - RNA, 61 nt, Human
agacaagagaugcuuuacaucggauggcgguucugcugauccauaggacauuucauuguuu

SEQ ID NO: 4187827 - RNA, 64 nt, Human
agacaauaacacaaaagaauaugugugucuaacuucaggaaacauuguucuuuguguuaaugcu

SEQ ID NO: 4187828 - RNA, 74 nt, Human
agacacagacacauuagugcucugucucauauuuuuuuccaugguuugugaauacacaaauguguuuagugucu

SEQ ID NO: 4187829 - RNA, 57 nt, Human
agacacagguguaauuucugcuuaguuguuucaugauguagcucagugucugugucu

SEQ ID NO: 4187830 - RNA, 56 nt, Human
agacacaucuuagguugucagguggcagggaguugguugacagguuuuauguguuu

SEQ ID NO: 4187831 - RNA, 88 nt, Human
agacacucagugcagugguaggagccugagucacagugccuggguucacauccagcaccaucggguucuugcuuugggaugggugucu

SEQ ID NO: 4187832 - RNA, 59 nt, Human
agacacugaauguuugguggucuuuuugugauacuagcaaccacugacggucauugucu

SEQ ID NO: 4187833 - RNA, 75 nt, Human
agacacuguaaauugagugcgugaagcugugagaauaaacccaucucauuagucauugugucaauuauaguaucu

SEQ ID NO: 4187834 - RNA, 59 nt, Human
agacacuuggaaggcuggccugagcucuccgagaggcgguggucagcaguuuagggucu

SEQ ID NO: 4187835 - RNA, 56 nt, Human
agacacuuggcagagagcuguuggagcaggccagcggugagaucauucgcgugucu

SEQ ID NO: 4187836 - RNA, 76 nt, Human
agacagaaccccgaccucagagaagauggaugagguaccaccgugucuguccaucugucugggacugguuuugucu

SEQ ID NO: 4187837 - RNA, 89 nt, Human
agacagaagaaugugcaaaggcuaguggauucauugauuccagaacuucacuggaacacacugucuuaugccauuuaccucauuugucu

SEQ ID NO: 4187838 - RNA, 75 nt, Human
agacagaaguggcucugaagcaaucagcccagguaaucuucaggggcugagcuguucugaguuuaagcuuuugcu

SEQ ID NO: 4187839 - RNA, 88 nt, Human
agacagacaggaagagggcccaggagcaggagcuggacagagcagagcugcuccuguccugaggcuccaggcccauuccuuucugucu

SEQ ID NO: 4187840 - RNA, 102 nt, Human
agacagacaguagacuuguagccucagcugucuuuuccgaggugacugaauuaaucauuuggauauuucaguugauagcuacaugguauauuuuucaagucu

SEQ ID NO: 4187841 - RNA, 68 nt, Human
agacagaggugucccugacccuuugcaacacuucugaaucauugugguuacucgggacaccuguguuu

SEQ ID NO: 4187842 - RNA, 57 nt, Human
agacagccagggacauacaaugguacccaauccuguaccauuaacacccagguuucu

SEQ ID NO: 4187843 - RNA, 60 nt, Human
agacagcugaaccuuucccuggagcugcgcuguugcucaaggcgaauguucaaugcguuu

SEQ ID NO: 4187844 - RNA, 90 nt, Human
agacagcuugccuucuacaacgugguacuaugaacagcaaagaacaugacugcccucugaccuguuggcauguugagaggcaagauuucu

SEQ ID NO: 4187845 - RNA, 74 nt, Human
agacaucaucuugaaugacugugauuuucuugaacugaucaccaggcuauuauagucucucaagaaugauaucu

SEQ ID NO: 4187846 - RNA, 67 nt, Human
agacaucauguuacagauuaagacaucaggcacucuguccuggguaauugguuuguaauuugacucu

SEQ ID NO: 4187847 - RNA, 73 nt, Human
agacaugauuuuuugagaagaguuugagguauuaguucaacaaauaucuaucaagucuuuuugucuuauguuu

SEQ ID NO: 4187848 - RNA, 100 nt, Human
agacaugcacacgacagggggucucccuguauuuucaggaagacgauggcuucuccauauuccugaaaauacagggagagacccuggcgugugcaugucu

SEQ ID NO: 4187849 - RNA, 66 nt, Human
acugaaauuuuuauucuuugccuuucgugccagggagggcacagguuugacaaggauaaaaucggu

SEQ ID NO: 4187850 - RNA, 68 nt, Human
acugaagcacauuugccaugaaaauaacuguuauugcuguugccacucaauggucaaugccuuacagu

SEQ ID NO: 4187851 - RNA, 88 nt, Human
acugaauacucaucugaacagucauauauuuuguuugugcaugagacugugugugacagugugugugagugugugugugggugugugu

SEQ ID NO: 4187852 - RNA, 78 nt, Human
acugacucugucucaggucucagcuucaguuuaaaguucugguaaagaaggcuagaucugauaucagacaaugugggu

SEQ ID NO: 4187853 - RNA, 66 nt, Human
acugagaaggucacauggugcaucacugccgcucagucuccccaagcccagugauuucuucacagu

SEQ ID NO: 4187854 - RNA, 77 nt, Human
acugagaguagcuggagaacauuuguaaugguaagaaauaguuccauagugagucauuuacccagcuacuuuccagu

SEQ ID NO: 4187855 - RNA, 63 nt, Human
acugagcagcaggaucuucugguauauuuuacuuauuauaucaagagccuuugcuggcugggu

SEQ ID NO: 4187856 - RNA, 57 nt, Human
acugagcuuggauagggcaaagccaucaucuuugaugagcugccugucuuagccagu

SEQ ID NO: 4187857 - RNA, 77 nt, Human
acugaggaauguagaggaguuucuggucugaggguaggcuuuucagaucuccaaggugaagcauccuguagcucagu

SEQ ID NO: 4187858 - RNA, 61 nt, Human
acugaggcaugucuuauucucaguacuuaguauaguaccuggcacagaguaugcucucagu

SEQ ID NO: 4187859 - RNA, 120 nt, Human
acugaggccuauuuuugacuucugaucuccagaacuguacgauaauaaauuuguguugauguaagccacuaaguuuaugacaguuuauaguagcaauaggaaaucaauauagguaauagu

SEQ ID NO: 4187860 - RNA, 59 nt, Human
acugauauacagagcauucuuugauguuaaaacaucaaaaaauggcauuguauuauugu

SEQ ID NO: 4187861 - RNA, 110 nt, Human
acugaucugugugcuggagcagaugguuaaguguucuccaugaguuccgcccacuaggggcuugggcuguggggaagauagaaccgacacaugugaagcagacaucaugu

SEQ ID NO: 4187862 - RNA, 64 nt, Human
acugcaaaaguugagggggauucuuacaucuucagaagccaacuaauuaaacaacuuuugcugu

SEQ ID NO: 4187863 - RNA, 81 nt, Human
acugcaaacaaacuuuggacaauuuauuacuguuuugucuuuguuagauuacaguccuguugucaaagcaauguugacagu

SEQ ID NO: 4187864 - RNA, 88 nt, Human
acugcaagaacaauaaggauuuuuaggggcauuaugacugagucagaaaacacagcugccccugaaagucccucauuuuucuugcugu

SEQ ID NO: 4187865 - RNA, 108 nt, Human
acugcacaggaacagugucaacaauuguuagccuugggagggauuuccauuaucuucaaaaauaaugagacacucucgggcacauuugaggacauuuucauuguuagu

SEQ ID NO: 4187866 - RNA, 68 nt, Human
acugcagacacucacagagcacccacucugaggcaggcuacagcagaggcacgucugugaauggcagu

SEQ ID NO: 4187867 - RNA, 74 nt, Human
acugcaggcucaugacaaaauaaauggucucugucuuacgccgcuaaguuuagaguguuuuguuaggcagcagu

SEQ ID NO: 4187868 - RNA, 62 nt, Human
acugcaucugaacugugaauggacugugaauacuuuuuaagaugucauaguucuggagcagu

SEQ ID NO: 4187869 - RNA, 69 nt, Human
acugcaugcuuuacaugacauggcacagcuuccacgccagcagcuucaaucauguaaagcgaaugcagu

SEQ ID NO: 4187870 - RNA, 64 nt, Human
acugcauuggagagcaugaauuuuuucaaaccuauuugacacaggucuuuguuuuucaaguagu

SEQ ID NO: 4187871 - RNA, 63 nt, Human
acugcauuugguaaagucaagaacaaaauaaagauggcccucuugcuguuuucccaaugcagu

SEQ ID NO: 4187872 - RNA, 99 nt, Human
acugccaacucaguuaagaagaacacauagagaaguuuuaucagcagccucuguucccaauggaagucucuguuaaguuucucuggcugaggacuuagu

SEQ ID NO: 4187873 - RNA, 69 nt, Human
acugccagaagagaacaccaguucaaaaaaaaccuagcuaauucugaaauuuggggcuuuucuaguagu

SEQ ID NO: 4187874 - RNA, 61 nt, Human
acugcaugcugagccaacagugacaggcaaguacuggcucaauguuuaacccagcaucagu

SEQ ID NO: 4187875 - RNA, 55 nt, Human
acugcauuuaguuaugagaaaaaccccuuuaggguuguauuugccugaaugcagu

SEQ ID NO: 4187876 - RNA, 72 nt, Human
acugcccagaacuuggcaaagccgacugacguuuuggaugacgcagagggcuuggggucaggugggggcugu

SEQ ID NO: 4187877 - RNA, 55 nt, Human
acugcccagcucugcaaacauucuguggagagaagguggagaagagaugggcagu

SEQ ID NO: 4187878 - RNA, 72 nt, Human
acugccccuugaaggcagggaguccugaggcuguuucuagcaugacccaggccaggccuuccagggggaagu

SEQ ID NO: 4187879 - RNA, 60 nt, Human
acugccuugauugccaguuucccuuuccugaaauaggggaauugcauaaauaugaggagu

SEQ ID NO: 4187880 - RNA, 64 nt, Human
acugcggcuuugagucaguaauuccugcuccccuuucugcagggucuaggcugggggcuguagu

SEQ ID NO: 4187881 - RNA, 77 nt, Human
acugcuccggggccacagaucucuugcucucugucauuccuuucugggacaggagacccugcugguucuggaggagu

SEQ ID NO: 4187882 - RNA, 62 nt, Human
acugcucuuuuauugcuguuuuccuauuuacaugugagaaauaacagcucuggaagaguugu

SEQ ID NO: 4187883 - RNA, 77 nt, Human
acugcugauuagcauuucuggaaucacaagaaguuaguaaaagcuguuugccauuaaagaaagaccuuuuuagcagu

SEQ ID NO: 4187884 - RNA, 76 nt, Human
acugcugcaacgguuucuugauguuuuacaggcagccacuguaaggccaccguuauagaaccaccguuuccuaagu

SEQ ID NO: 4187885 - RNA, 68 nt, Human
acugcuuauuauuaugcauagcaugaaauaugcaaguguauaugcauaugcauaauggaugugcaagu

SEQ ID NO: 4187886 - RNA, 72 nt, Human
acugcuucacugcgucuuaucuuuccaugccuguucuugcuaaacagauuuaagauaagagcaacuggcagu

SEQ ID NO: 4187887 - RNA, 66 nt, Human
acugcuuuagaccuagagcucuugccucacacucacuggcuaaaguugagcuuucucuaaaguagu

SEQ ID NO: 4187888 - RNA, 56 nt, Human
acuggaaauugagaggucacugcuuugugaggaagguagucacuucaguuuucagu

SEQ ID NO: 4187889 - RNA, 61 nt, Human
acuggaagaagcaggaauucuuuggcuucauggucagggaaccucuccuguuucucacagu

SEQ ID NO: 4187890 - RNA, 65 nt, Human
acuggaagaauauggcucucagcaauauuccuuugaguauuacucuagaaauauauuuauucagu

SEQ ID NO: 4187891 - RNA, 58 nt, Human
acuggaguacaguggcgugaacacggcucacugcagccucaaccuacugugcucaagu

SEQ ID NO: 4187892 - RNA, 55 nt, Human
acuggaguuauuauuugcagcucuuguuaacuagggcgugaaaaugcauaccagu

SEQ ID NO: 4187893 - RNA, 60 nt, Human
acuggaguucuaugugcuugugaccauucuugguuucuccgaauauccuagaacuuuggu

SEQ ID NO: 4187894 - RNA, 87 nt, Human
acuggcccuaauacuucauucaaguucgcuauaguuuuggccccucaaucccagacauaugcauaauuggauaaguagaagggaagu

SEQ ID NO: 4187895 - RNA, 81 nt, Human
acuggcucagcuagcagggauugggcacugggauaaagccucccauuuucugcuuucuuugcuauucuucucugaguuggu

SEQ ID NO: 4187896 - RNA, 65 nt, Human
acugggaaggagcaggaucugugcagagcagccucuccugaccucagcccagcuucuuccccagu

SEQ ID NO: 4187897 - RNA, 63 nt, Human
acugggaggcuucauacaacagaaguuuauucucuuacugcucuggagauggagccuugaggu

SEQ ID NO: 4187898 - RNA, 58 nt, Human
acugggcagggaaggagaccgaugaaaaaguugagucagucucucucucucucucagu

SEQ ID NO: 4187899 - RNA, 70 nt, Human
acugggcaguaaggugccgcuaagagucagaaaaaauugacaaagcuuuggcauccuuaccaagccgagu

SEQ ID NO: 4187900 - RNA, 75 nt, Human
acugggccuggaaacacaugaugaugaacuguccucuugauuauaguuucaaaauaugucuccaguuuccccagu

SEQ ID NO: 4187901 - RNA, 85 nt, Human
acuggguaggaaauuauuccaucauacgguauuauucaagcaauuagaaaucacauuguguggugaaugaucagcucuucuuggu

SEQ ID NO: 4187902 - RNA, 77 nt, Human
acuggguuagucacaaauagcuauauuaaggauguuuuucacauuuuuuaaacacuagcaauuuggacccacccagu

SEQ ID NO: 4187903 - RNA, 66 nt, Human
acuggguuuaggccaggcaggcccaggccugguuuuuggccuggcgccgggcugccugucuuuggu

SEQ ID NO: 4187904 - RNA, 72 nt, Human
acuggucccuccgagaagcauaaagcaggaaugccgucauuuuuauuuauguuuguuuguuuacuaacuagu

SEQ ID NO: 4187905 - RNA, 70 nt, Human
acuggugcccacccuucagagugacauugaucuguuaaccgucauucucuggugugguuguuuaaccagu

SEQ ID NO: 4187906 - RNA, 79 nt, Human
acugguggauuuagagaaggaguagaaugccgggagaguagaauuucacccagcagcugcuucugcuuguaauaugagu

SEQ ID NO: 4187907 - RNA, 129 nt, Human
acugguggccagggcaugucucccccagcccugagucuccgcaguggugaccagggcaugucucccccagcccugagucucccggcaguggaggcagcgugggcacaggguuugucacagccuguaagu

SEQ ID NO: 4187908 - RNA, 74 nt, Human
acuguaaaauuuucauguaaauuguacugacacacgcccaguaguguuuguugugcagguuuauuaaguacagu

SEQ ID NO: 4187909 - RNA, 63 nt, Human
acuguacuaaugcauuuaacuaacacagauauggagacacuguguugaugccagaguaucugu

SEQ ID NO: 4187910 - RNA, 55 nt, Human
acuguagccaucacgucucuauugaguagcagaguagaaaugugaaaggcugagu

SEQ ID NO: 4187911 - RNA, 62 nt, Human
acugucaauagugcugagcuugaaaaaccugguagagagcaaggggccaagcacgugacagu

SEQ ID NO: 4187912 - RNA, 95 nt, Human
acugucaaugaaggaggaugucagcagaguggaacauugucauagauaaagaucagugaaaaugugcucuggcugagguaggguuuucuggaagu

SEQ ID NO: 4187913 - RNA, 90 nt, Human
acugucagguagaguaggugcuuuaguaaauaauuuuuguguaguugaaaugauaaaguguuuacauauaaggcccuuuccccugacagu

SEQ ID NO: 4187914 - RNA, 75 nt, Human
acugucauguauggcuauagaaauuuguuuaacuaccccaaaguguacacuuuguuguggcauauacgcuucagu

SEQ ID NO: 4187915 - RNA, 67 nt, Human
acuguccuuccagggagcaggcagugugcacucucaggcugugcauuuuggagggccuguucgcagu

SEQ ID NO: 4187916 - RNA, 62 nt, Human
acugugaauggguuauuuuuagggaaagcuauuaagcuguucucuaagccacccauuuuggu

SEQ ID NO: 4187917 - RNA, 72 nt, Human
acugugagcuccuggaggauagugacugggagaggacgaccccucccaacuacucucaggcagcuuugcagu

SEQ ID NO: 4187918 - RNA, 58 nt, Human
acugugauguuugugaucaucuccuaggugccugguaguuugaucaagauaguacagu

SEQ ID NO: 4187919 - RNA, 59 nt, Human
acuguggaauagauuuucaacaaauaaauuuugggagacacaaacauuuauuccacagu

SEQ ID NO: 4187920 - RNA, 57 nt, Human
acuguggggacccaugccaugggcaguaggcugcugugugugcaugguugccaccgu

SEQ ID NO: 4187921 - RNA, 57 nt, Human
acuguggguuaacuucuuucccaucuguaaaaugggcaugauauuaguaccuagggu

SEQ ID NO: 4187922 - RNA, 72 nt, Human
acuguguauaagugagaaugcuguuuuaguuuuuuaaaagacaguccuaagauaauugucucuugauacagu

SEQ ID NO: 4187923 - RNA, 56 nt, Human
acugugugugugugugugugugugugugugcguacacguguguguacauagauagu

SEQ ID NO: 4187924 - RNA, 89 nt, Human
acuguguuaguccguuuucacacugcuauaaagaauaccaccugagacuggguaauuuauaaagaaaggaaguuuaauugacucacagu

SEQ ID NO: 4187925 - RNA, 85 nt, Human
acuguuaaaaaguuggguuauauaccaaaguuuauaauauguuaauaaugugucuaaacuguggaauguucucuuuuuuaauagu

SEQ ID NO: 4187926 - RNA, 67 nt, Human
agaaggcccugguugcucacccuuccagcaaaggcuuuugcuaggagaggcagcacagcggccaucu

SEQ ID NO: 4187927 - RNA, 62 nt, Human
agaagggcagagggaaucccacauggacugguggaucaugugugugcauuucucucccuucu

SEQ ID NO: 4187928 - RNA, 119 nt, Human
agaagguccaaaauuugugugucuuuuuaguggaauuguuauuguuuguugugucacaacaaacaaaugauaccaguucucaaauauuaagauuauauugcuucaaauagugacuuucu

SEQ ID NO: 4187929 - RNA, 58 nt, Human
agaaggugaugaguuccagcauuuuuucagacuuggaucuggcuuucauuccccuucu

SEQ ID NO: 4187930 - RNA, 90 nt, Human
agaagguguacuaaggguucauuccauguacagaaguuaaccuaaugcuuuguuuugauaaggaaaugaaacucuaauauuaugcuuuuu

SEQ ID NO: 4187931 - RNA, 56 nt, Human
agaaguaggcagggcuguaucaucaucaccuugauagaugcagccagguuuauucu

SEQ ID NO: 4187932 - RNA, 78 nt, Human
agaaguauguacaguuuauugcacagguaaccagaacacauuucugcgucccacaagccauaaauaauauauaguucu

SEQ ID NO: 4187933 - RNA, 83 nt, Human
agaagucugauaugagagauuuaguagaugcagcauuauuugcagucucacugcaagcauucugcucauuucaucaaacuuuu

SEQ ID NO: 4187934 - RNA, 61 nt, Human
agaagugaucugacacauauucaugggaaauuacauuuuauauguguauggauuucuaucu

SEQ ID NO: 4187935 - RNA, 56 nt, Human
agaaguggaaugagaugccuggguccgccccugccuuagcaagucuacccauuucu

SEQ ID NO: 4187936 - RNA, 112 nt, Human
acuuagugauccacccgccucggccucccaaagugcugggauuacaggcuugagccaucgcucccggcugaguugcagcauuuucuugccuagggugggcagacucacaagu

SEQ ID NO: 4187937 - RNA, 60 nt, Human
acuuauacguucuccaucaaggauauacgauuucuguuaggagauggaaaguguaugagu

SEQ ID NO: 4187938 - RNA, 67 nt, Human
acuuauagcaagcaggacagucucagaaagagcacacuccauauguuagacucugugugcuaugugu

SEQ ID NO: 4187939 - RNA, 75 nt, Human
acuuauauuuguguggaaaaugcuucuuaauugaacaaagauuaauuaccaggauuuuucaguaugaagauaggu

SEQ ID NO: 4187940 - RNA, 97 nt, Human
acuuaucacuaaaacauccucuauaguucauugaccuguuagacauuugauacaaauuugcugaaucaaugaauuuuaggauguuuggaauguaagu

SEQ ID NO: 4187941 - RNA, 81 nt, Human
acuuaugccccuuuuagugauucauuuagaaaaauauauuuuuaagacauuuuucagaauacuaagggaggguuuuuaggu

SEQ ID NO: 4187942 - RNA, 59 nt, Human
acuuaugggaauaaucaccaaggcccacaaaggagaccugggccuuggggucccaaagu

SEQ ID NO: 4187943 - RNA, 73 nt, Human
acuuauuccagcagucugccccgcuauaacuggucaaaguaaagcuguggcagcacuuuggaguuuaugaagu

SEQ ID NO: 4187944 - RNA, 81 nt, Human
acuuauugcgauuacucacaacuuaguccucuauuuauagaacugcacagaggauuaaguugugaauaauccagucacagu

SEQ ID NO: 4187945 - RNA, 62 nt, Human
acuucaaaaugaguuuccugguuuacaacaagcauuaaugucaggaaagucaauuaagaggu

SEQ ID NO: 4187946 - RNA, 63 nt, Human
acuucacagguuuucauaaaaccccaaauacaacugauggaauauguaugaaagcuguggagu

SEQ ID NO: 4187947 - RNA, 62 nt, Human
acuucacuggaagacagccuacuuugggaugcuaaagaaggcugugaacucuaugcugaagu

SEQ ID NO: 4187948 - RNA, 80 nt, Human
acuucagacacagugagaaauggaacuucauacgcuugcacuguaauugaauaugguuccauuucuccaauaucuauagu

SEQ ID NO: 4187949 - RNA, 66 nt, Human
acuucauuacuaauuugccaauugaauaucccauaagauauuggaaggcauuagugaauauagagu

SEQ ID NO: 4187950 - RNA, 102 nt, Human
acuucauuuauaaacagcacaguaggcacuggucuaccccuuaguuauacccagugacaagcaucaguauccacugccuaggcugugaguaauuacugaagu

SEQ ID NO: 4187951 - RNA, 64 nt, Human
acuuccagagaucucucuucccugugacaggauaacuggcaguacugaagaugggucucuaagu

SEQ ID NO: 4187952 - RNA, 61 nt, Human
acuuccagcugauuggcauccaggauggguaccuaucacugcuccaggacagcggggaggu

SEQ ID NO: 4187953 - RNA, 84 nt, Human
acuuccagcugcuguucagaugcgauucaggaaugugacuuccccaagguuccaaaugacaucggacaguaaugggcugggggu

SEQ ID NO: 4187954 - RNA, 130 nt, Human
acuucccuggucacuccagccucuaggggcuuaagggccagaguggcaaaagccugaacagucauuaaauaacugaccauuaacuggugucacucugaggcccucagcccaacagugaccaucuaacagu

SEQ ID NO: 4187955 - RNA, 63 nt, Human
acuuccguuauguaccauagggaaauuuugguuuugguuucuuuguaguagcauaaucauagu

SEQ ID NO: 4187956 - RNA, 74 nt, Human
acuuccucauugcucugugguugguggugguggucagcaggcugcaggcgucacugccacggguaucuggaggu

SEQ ID NO: 4187957 - RNA, 57 nt, Human
acuuccugacuucuggguuggaaguuauucugccaacuuucuccaaguacaagaagu

SEQ ID NO: 4187958 - RNA, 59 nt, Human
acuuccugguuuucuggcggugcuucacauuggcugaagccaucaggaagccagcaggu

SEQ ID NO: 4187959 - RNA, 79 nt, Human
acuuccuuuuagcuuuaccucauagauuuguuuagaaccucaaauaaugagcacguuugugcuuuguaaacugugaagu

SEQ ID NO: 4187960 - RNA, 70 nt, Human
acuucgcaccuagcagaacagaggugcuggccuaguugugccaggccuugaaccuugcugggugugcagu

SEQ ID NO: 4187961 - RNA, 55 nt, Human
acuucuauguguccguuggguggggugggucccaccagagcagacuacuggaggu

SEQ ID NO: 4187962 - RNA, 100 nt, Human
acuucucuccucuugauuuugccauuaaaacauguuaucuccucauaauaaaucacuggagagguuguuagaauaguggaggaaaacaagggagaguggu

SEQ ID NO: 4187963 - RNA, 61 nt, Human
acuucugcaggcccugucugaccgugacucagagucaggucgaucagucaucugcagcugu

SEQ ID NO: 4187964 - RNA, 57 nt, Human
acuucugcuuuguuuucugggaaaaucaacugagcucucucugaguugagcaggagu

SEQ ID NO: 4187965 - RNA, 57 nt, Human
acuucuugggacccuggcaccgauccacuguccuuggugguugggguucagagaagu

SEQ ID NO: 4187966 - RNA, 97 nt, Human
acuugaacauuguacaugugaugugggcauagauaguauauauguauuuauaauauacauacauguaugcacauacaugcauguacacacacagagu

SEQ ID NO: 4187967 - RNA, 102 nt, Human
acuugagcaagaaaaucaauauuuuugcauuucagcuauuuauuugcaaaacaguauagugaaaugaaucuggaaauauuguaagacuaaugcaaauuaagu

SEQ ID NO: 4187968 - RNA, 69 nt, Human
acuugagcccagguugaggcugcagugagcuacaaucgugccacugcacuccagcccgggugauagagu

SEQ ID NO: 4187969 - RNA, 87 nt, Human
acuugaguucuaaguaggucacucugccaaaggauaguaaaauuaccauguuccucugaguacagugauggauuuggaaaaucaagu

SEQ ID NO: 4187970 - RNA, 116 nt, Human
acuugauaaucauauuggagcauuuaugacuaauguaaaaugcagaaaauacacaaaggaguaaagcaugauauuugacaugaaguagcuuauaaaugcauaauaauuagucaagu

SEQ ID NO: 4187971 - RNA, 80 nt, Human
acuugauggccucaagcaacagaacugugagaccucgcuuagauuuggucagcuaugucuguuguugagguggaccaagu

SEQ ID NO: 4187972 - RNA, 63 nt, Human
acuugcaggagggcaagaauuguucugaaaacugauaugagaacacaggccagccugugcagu

SEQ ID NO: 4187973 - RNA, 77 nt, Human
acuugcaguuggugucagaaguaaggccaaucuuagguacuauguccuugagccucacaguuuggcuaacugugggu

SEQ ID NO: 4187974 - RNA, 64 nt, Human
acuugccaguccucuggucccagaacuggggugagcugaaggugaccagagacuggggacaagu

SEQ ID NO: 4187975 - RNA, 114 nt, Human
acuugcuucucaccaauagaauagggcaaugguggcaggauguaugugauuauacauacauguuuacauuacauaagauuguaaccuagucuugcuagcuuugagaaagcaagu

SEQ ID NO: 4187976 - RNA, 58 nt, Human
acuugcuugggccaucucgcuuggcagcgucaaggcugauaucugggcccaggcaggu

SEQ ID NO: 4187977 - RNA, 77 nt, Human
acuugcuuuugucuacuagucuucugcuauucccugguuuccaaauaacacugaugagacaguaguauaaugcaagu

SEQ ID NO: 4187978 - RNA, 61 nt, Human
acuuggaauguugucauuuacauuauuucuaaagaagcaguguguuuggauaacacacagu

SEQ ID NO: 4187979 - RNA, 92 nt, Human
acuuggaguuaauuuaaggugagccuccuucaagcaguaaaaauaacaggguuuuuauauugagugagaguucccauggaaccacucugagu

SEQ ID NO: 4187980 - RNA, 72 nt, Human
acuuggauccguuuauacugaguuugaugaaguggauaggcauugagaaguaugaauggauuuuuuaaaagu

SEQ ID NO: 4187981 - RNA, 63 nt, Human
acuuggaucucaauuucaguggagaccuuacuguuuuugucugcccugaucuugaucuauugu

SEQ ID NO: 4187982 - RNA, 55 nt, Human
acuuggcuuuaguaguaacugaaaaugguuuggagagcugaauuuagagcuaagu

SEQ ID NO: 4187983 - RNA, 79 nt, Human
acuugucacaugccccugccugauuccaggauggcuggggaguguauugagcuguaugugcaggcggguaagaacaggu

SEQ ID NO: 4187984 - RNA, 89 nt, Human
acuugucagcuuccuguaugaggaucagacuggacgacuucaaccugcuuagcccgucuucugaggccucacccuaguaguuggcaagu

SEQ ID NO: 4187985 - RNA, 79 nt, Human
acuuguccacaguaaugcauacaaguuagugaguggaccaagaucugcugcuaauuaguuugcauuacuuuagacaagu

SEQ ID NO: 4187986 - RNA, 63 nt, Human
acuugucuuuaauccgaauguaacagaaauguacacgacguuauauuaggauuagagaggagu

SEQ ID NO: 4187987 - RNA, 79 nt, Human
acuugucuuucugcacuuaguggggcuucauuuuauuuagaaagcccgaugacauuacuauuuguacuuugaagaaagu

SEQ ID NO: 4187988 - RNA, 76 nt, Human
acuugugcaaaaucagugucucaagggauauucugcuauuuggauucuggacaaugagaaacuggugggaacaagu

SEQ ID NO: 4187989 - RNA, 57 nt, Human
acuuuacaagcuuauagccuaggaacaauaggcuauaccaucuagguuuguguaagu

SEQ ID NO: 4187990 - RNA, 118 nt, Human
acuuuacuaaaaauuuauacuauacugcuuacuacugcauguguuugaugauggcugggaacauuauucucauguacugcaguaaaagcagagcuuccguaagauuaauuucaaaagu

SEQ ID NO: 4187991 - RNA, 130 nt, Human
acuuuacugauacuccaaaacacauuucaaaccaauuaugacugucuuuugaauaaaaaugguaauaaugugcuauaauuuaacaugagggcauuuuucuugauugagguguuuuuguuuguuuguuuuu

SEQ ID NO: 4187992 - RNA, 105 nt, Human
acuuuagugaagacuucauccugcgcauucuuauuuuaaaaguugauuaauuuuuuuagaauuagcuuccuauaguaaggggaugggguggaguaauugcuuugu

SEQ ID NO: 4187993 - RNA, 126 nt, Human
acuuuauacuguguguggaggaguucaguuguaacugguggugccuaauaauucuauugcaauaauuaaaguucauggagagcuguuagguuauuaguucauagaagcugcuucagaaaacggagu

SEQ ID NO: 4187994 - RNA, 61 nt, Human
acuuuaugacacccuuuagugauggauuucuacgcuuucagugauuugggugucagaaagu

SEQ ID NO: 4187995 - RNA, 60 nt, Human
acuuuauggauaugcaacauuuuguuuaucgauugacaaacugaaguauauuuagaaggu

SEQ ID NO: 4187996 - RNA, 79 nt, Human
acuuucaacacugagcuauuacgguggaauuaaaauuuccauguagaaguauuagugcagaauuacaaaauugaaaagu

SEQ ID NO: 4187997 - RNA, 77 nt, Human
acuuucauugccuuuggaaggucuuagucagcaucuugccucugcucaaagacucaaaccaagagugcgaugagggu

SEQ ID NO: 4187998 - RNA, 66 nt, Human
acuuucauuguugaaaacuaccuauauauacggacagcuggguauuagguagauuuuacugauugu

SEQ ID NO: 4187999 - RNA, 70 nt, Human
agaacucuuaggaaugacagguuucuucugguuuugaccagaaaguaagugccuuuuauucuuauguucu

SEQ ID NO: 4188000 - RNA, 79 nt, Human
agaacugcaaagcccccacgcaggcucccgcugcuucuaggagccuggagcccaguguggggcucugcaaauguguucu

SEQ ID NO: 4188001 - RNA, 92 nt, Human
agaacuuaagagcaucacuacuaaagucagacugcauugauuucaugcugacuuucaauuaauuagaugacuuugggcaugauguuuagucu

SEQ ID NO: 4188002 - RNA, 70 nt, Human
agaacuugcuucccaguuuagcucuggcauaaauccagaguccauauauugauuuguugagcaauguuuu

SEQ ID NO: 4188003 - RNA, 64 nt, Human
agaacuuggguguggggguguggccugggguguuagaccccucccagguuccgacgccucuucu

SEQ ID NO: 4188004 - RNA, 80 nt, Human
agaacuuuauaucaggauagucuguaaauugucuuggaaagcuuucauuucaauaaguugcagacauccugagaaguacu

SEQ ID NO: 4188005 - RNA, 74 nt, Human
agaagaaaccaugacaaaccauagacaugaugcuuuaaaauaauggcccugcugguuugaucguugauacuucu

SEQ ID NO: 4188006 - RNA, 56 nt, Human
agaagaaagauugaagguuccuuuucagcaugaggucauucuuccuccuuucuuuu

SEQ ID NO: 4188007 - RNA, 83 nt, Human
agaagaaagccaagaauccugaugaaguuagaagagaagcuuaacaauuugccuccaccuucugcauuggagucuauucuucu

SEQ ID NO: 4188008 - RNA, 66 nt, Human
agaagaaguugaggcuuccccaagggcugagggccccauagcucugggaaguccuuuaccauaucu

SEQ ID NO: 4188009 - RNA, 73 nt, Human
agaagaauuagcuauaggugcauccuguuguugugcaaacaaaacuacagguggcuuauuggcugauuuuccu

SEQ ID NO: 4188010 - RNA, 65 nt, Human
agaagaggggacaugugagcugggucuuagaaaaggcaggaaguagcuuaaaaucucuagauucu

SEQ ID NO: 4188011 - RNA, 78 nt, Human
agaagaggugagggucuuuugggggucucuuuuauccuauuccugagggcucugcccccuugaccuaaucaccuuucu

SEQ ID NO: 4188012 - RNA, 63 nt, Human
agaagagucucuuccaccugcucauuccagaggacccgcucagguggcaaggggcgccucucu

SEQ ID NO: 4188013 - RNA, 59 nt, Human
agaagauaagaaaguuugugauaauacuuaugcagguaugaguggucuuucugucuucu

SEQ ID NO: 4188014 - RNA, 84 nt, Human
agaagcacugcugggagcugucaggagcguguuucagaaguaaagggacuuggcaggcaguugcaguuuucuagagugguuucu

SEQ ID NO: 4188015 - RNA, 77 nt, Human
agaagcacuguguuuucugugcagcuuaaugagagggagcauaucauuucaggacucucacaggaugcaguguuacu

SEQ ID NO: 4188016 - RNA, 76 nt, Human
agaagcaguagauuccuacucauuccugacucuuuuagccacuugucguauggcaugagcaggugucuuaacuucu

SEQ ID NO: 4188017 - RNA, 83 nt, Human
agaagcauaggcacuuuccuccuccuuggauauaagaggagacugaagcugaagaagaggaggggauaggccuguggacuucu

SEQ ID NO: 4188018 - RNA, 86 nt, Human
agaagccacaacccagccccagcacaggcuccucagauuuaucuggagcaaggauuuagggacacuguucugggggugaggcuucu

SEQ ID NO: 4188019 - RNA, 106 nt, Human
agaagccucuggaaauucaaucagauaugugacauauuugucugaaucaucaaagcuaagaaaauguaauaaauauggucacuugauugaaggacaguugcauucu

SEQ ID NO: 4188020 - RNA, 68 nt, Human
agaagcuaaugagauaaaugccaucacaggcuuaauucauuguaggugguaacuaguccuuaguuucu

SEQ ID NO: 4188021 - RNA, 55 nt, Human
agaagcugaaugugggcuuuggagcuggucagaucggagcuggcauccagccucu

SEQ ID NO: 4188022 - RNA, 61 nt, Human
agaagcuguugcauuccuggcgcucugucuuugagcuggagcuuaccugcggcagcucucu

SEQ ID NO: 4188023 - RNA, 128 nt, Human
agaaggaaacgucaccacccacugaaggauuauuguuggcaugaugacugaggcguggcgccugugcacauggcagugucaguugccuugucauaaguggcaguaaugcuaggggauacuuuucuucu

SEQ ID NO: 4188024 - RNA, 69 nt, Human
agaaguggacacucucuuccucucuucacgucccagaguucugaagcaguggaccucagugcuauuucu

SEQ ID NO: 4188025 - RNA, 61 nt, Human
agaaguucuggagacggaagugucagcaggguuggcugacacuuccgucuccaggauuucu

SEQ ID NO: 4188026 - RNA, 90 nt, Human
agaaguucugguuuugaauucuucugucuuuaacugaccccaguggcuuccuucugguuucaucaaagucaaagaaugacuacuacuucu

SEQ ID NO: 4188027 - RNA, 58 nt, Human
agaaguuugguccuauaaacucacaguaaaauuaggccuugaaaaggaccaaacuucu

SEQ ID NO: 4188028 - RNA, 66 nt, Human
agaauaacagcaaguuugcaggcaaguuggaaaagagaucagaagcccucagcuugauguuguucu

SEQ ID NO: 4188029 - RNA, 61 nt, Human
agaauacgacauucuuucagucugcucauguccuuggguuaaauggcagagugucuguucu

SEQ ID NO: 4188030 - RNA, 59 nt, Human
agaauagcuagaacaaaagaauugauggcauggucaauuccaguuaaggaagcuauucu

SEQ ID NO: 4188031 - RNA, 60 nt, Human
agaauaucugggagugggaagcuauauacuuguauuuucauaaaguccccagaugauucu

SEQ ID NO: 4188032 - RNA, 79 nt, Human
agaauauucaucuguauucuuauccccauuuucguacuuacuuuacccgacugcugggaguagaagcagguaaaauucu

SEQ ID NO: 4188033 - RNA, 85 nt, Human
agaaucacuugaacccagaggcggagguugcagugaguugagaucgcaccacugcacuccagccugggugacagagcaagauucu

SEQ ID NO: 4188034 - RNA, 87 nt, Human
agaaucacuugaaccugagagguggagguugcagugagcagagauugugccacugcagcacuccagccugggcgacagagugacucu

SEQ ID NO: 4188035 - RNA, 112 nt, Human
agaaucacuuggaagguuuguuaagcuguagauuccuaggccucaccucagaaucaaaaccucuaggaacaguccuagaaaucuguauuuuaaccagcacccaguugauucu

SEQ ID NO: 4188036 - RNA, 86 nt, Human
agaaucccuugaucccaggaggcugagguugcagugagcugagaucacgccacuguacuccagccugggugauggagugagauucu

SEQ ID NO: 4188037 - RNA, 81 nt, Human
agaaucucaucaggcacacauccgugagagaucacaugaccuucgcgucagaugugugugcuguguggaaaagaagauucu

SEQ ID NO: 4188038 - RNA, 78 nt, Human
agaaucuggggauguuuguuacagcacuuaaccuuuuuugacauaagaagccaaaugccagugaccucucuacauucu

SEQ ID NO: 4188039 - RNA, 80 nt, Human
agaaugaagcuuaggucuguuuauaaaacagucaucagaucaugugcuuccacugcuuauagacagaucaugcucauucu

SEQ ID NO: 4188040 - RNA, 63 nt, Human
agaaugaauuaaucaacuggaagacaagauucaggaagucuuccagaggaagaagucaugacu

SEQ ID NO: 4188041 - RNA, 68 nt, Human
agaaugacuugcuuucugaguaaacauagccuagggaaauguuuuccugggagagcacucuccauucu

SEQ ID NO: 4188042 - RNA, 57 nt, Human
agaaugauggacucuccuugaguuuuguuuuagcucacacaggaguuucuucuuucu

SEQ ID NO: 4188043 - RNA, 93 nt, Human
agaaugccauuuguauucuacuuaaauuggcaucacugggaguuuaaaaagagggugagagaaugcuuauuuagguagauauuaauggcuucu

SEQ ID NO: 4188044 - RNA, 69 nt, Human
agaaugcuacagagcucugugaagagaccacuuugugugucuguuuuaaaaucaggcucuguuuugucu

SEQ ID NO: 4188045 - RNA, 93 nt, Human
agaaugcuguagaaucccccaguucuggaguuucauucuuuagcagccaugaggagaaggggcuucagagccaggcuucuggguucagauucu

SEQ ID NO: 4188046 - RNA, 88 nt, Human
agaaugguguucaauauagcacauauucaguucauacaaaugccaacauuuauaugaaauagugugugcccuuuugaagcaugauuuu

SEQ ID NO: 4188047 - RNA, 67 nt, Human
agaauuaaggauguccauuagaaggucaaggucagcauccaggccagaguugauggcaucuuggucu

SEQ ID NO: 4188048 - RNA, 82 nt, Human
agaauuauuucaauagauccagaaaauuuauuauugaucucaguugccugaggugguaccuuucuggguuugaagagauucu

SEQ ID NO: 4188049 - RNA, 69 nt, Human
agaauuccauaaucaccuuauucuuuguuaggacccuucagagagucagggaaggugguguggacaucu

SEQ ID NO: 4188050 - RNA, 86 nt, Human
agaauucugaaaucaagguguuggcagggccaggcucucucuguagccucuaggagaggauccuuccuugccccuucccagcuucu

SEQ ID NO: 4188051 - RNA, 88 nt, Human
agaauugaagugaauggcuuuuauuagaagaaaauccauauugcuuuuaaagauaaugugccgauaauuucuagcccacuuacaaucu

SEQ ID NO: 4188052 - RNA, 55 nt, Human
agaauugugauuauggaauuaggcugaaacagugucuacauuccacacaaucucu

SEQ ID NO: 4188053 - RNA, 63 nt, Human
agaauuguugggguaauaaaagaggugaauagauuuucauucauuuuaauucucaggaguuuu

SEQ ID NO: 4188054 - RNA, 56 nt, Human
agaauuuuaucuaaagggaguacaaaggccaugaugccuuuuccagguaaaauucu

SEQ ID NO: 4188055 - RNA, 59 nt, Human
agacaaauaagugcugggauuucugagucucaauuccaaaucuuagggcuuauuagucu

SEQ ID NO: 4188056 - RNA, 59 nt, Human
agacaauggagggaaauacuucagcucccuuuugcugucuuuuguuuucauucauugcu

SEQ ID NO: 4188057 - RNA, 67 nt, Human
agacaaugugagccaaugcccgugggagccacaccaccaaccuccaccaagccggggccacuucucu

SEQ ID NO: 4188058 - RNA, 72 nt, Human
agacacaaauggaaaggcuuaaaggacauggcauacguuuuuggacccaaguccaguuuuuccagguggucu

SEQ ID NO: 4188059 - RNA, 70 nt, Human
agacacacagggagaaagaaagccugcuuggaggggaugagguuuaggagcuauuagucuuugugugucu

SEQ ID NO: 4188060 - RNA, 73 nt, Human
agacacggugaaaugucauccuuuagccauuuauuuccuaaaaggccucaaaagaucauguuuccauguguuu

SEQ ID NO: 4188061 - RNA, 56 nt, Human
agacacugaaucagagggacaucagccugcagcaugcugucccagacuccgugucu

SEQ ID NO: 4188062 - RNA, 73 nt, Human
agacagaaacacuuugggcacagugaggccaggagggaccccacuuggcgcugcaaauggucagagucugucu

SEQ ID NO: 4188063 - RNA, 85 nt, Human
agacagaaugcccaggcugcugccuagaaugacaggaagcuggacugcccuuucaguuuauacaugcaauggccugggacugucu

SEQ ID NO: 4188064 - RNA, 101 nt, Human
agacagaauuguuuacuucugaguggcucaguugggucucuuguuuuucccaguaaccaagucuagcuuggucacuuggagccccaugcaguccuuuguuu

SEQ ID NO: 4188065 - RNA, 55 nt, Human
agacagaggcugguguggguuccauguuuggggcccaggagaccuagaucuguuu

SEQ ID NO: 4188066 - RNA, 65 nt, Human
agacagcuaaauuccaccagaaucaguaaugcccagcagcugguuaaggguggaguuaagugucu

SEQ ID NO: 4188067 - RNA, 55 nt, Human
agacaggaauuuccuaauauucgaagacauuugaggcuuugggaaauucucugcu

SEQ ID NO: 4188068 - RNA, 71 nt, Human
agacaggaugacccuuguggcagaaaacaguuucagggagauugacucugaacugaaggguaaagauguuu

SEQ ID NO: 4188069 - RNA, 67 nt, Human
agacaggcaugaggcuggauugaaugucuaccucuuacuagcugugucuuucagccucaguuucuuu

SEQ ID NO: 4188070 - RNA, 58 nt, Human
agacaggcuuggaaaaaaccuccccuucccaccacuggcagagcccaagcagcugucu

SEQ ID NO: 4188071 - RNA, 80 nt, Human
agacauagggaggcauauaaauauuuugaccuucaaugauaaaauggguagcugaucuuuuaagugucauuuuuauguuu

SEQ ID NO: 4188072 - RNA, 115 nt, Human
agacaucuuugccugguuuugguaucagaauaauauuggucucauagaauggguggagaacaacucugucacuagaacuaguauuauuucuuccuucaauguuugguagaauucu

SEQ ID NO: 4188073 - RNA, 57 nt, Human
agacaugcuuggaggagaaggaaacuguguugguugauauuuuuccucaaaguugcu

SEQ ID NO: 4188074 - RNA, 99 nt, Human
agauaauauggacauuuaugaaggagauaugcaagggcacagcaagccaugugcuuucaguauuuaagcauccuccuacaugacauguugaauacuucu

SEQ ID NO: 4188075 - RNA, 68 nt, Human
agauaauuuuucgggcacacacuugacagguuccaaaggaguggcauaugugccugugaaugaugucu

SEQ ID NO: 4188076 - RNA, 56 nt, Human
agauacaaaggccuacagagcaaugcccacugcccugugaauggggccuuuguucu

SEQ ID NO: 4188077 - RNA, 59 nt, Human
agauacacagcccugccaucaccuugauuucaguccagugaaacacagguuguguuucu

SEQ ID NO: 4188078 - RNA, 59 nt, Human
agauacagaaguuuuucccuauuaggcaguaggcuuccugggggcaggguucugucucu

SEQ ID NO: 4188079 - RNA, 67 nt, Human
agauacauucugaauaguuucuucugaccugucuuccaagucacaguguaucucuucagcuguaucu

SEQ ID NO: 4188080 - RNA, 62 nt, Human
agauacucugguaaugugcacguggucaccaaaagacauguacaaggaugcucagagugccu

SEQ ID NO: 4188081 - RNA, 74 nt, Human
agauagagcugccugacaagugcugcucauggugauuagccauguaaaugaguacagucaggaagcugcugucu

SEQ ID NO: 4188082 - RNA, 129 nt, Human
agauaggacuuugauauauucuucauucugugacuugauggguagccuuucaauagcaguuuuaauacaagguacuguuaauauauuuucugccauuagguugagguggagaguucuaugguucuguuu

SEQ ID NO: 4188083 - RNA, 76 nt, Human
agauauaaacucuugaauucccuugaagagaaggaaaacguaccaaucuacaugggggauuuaauuguggaugucu

SEQ ID NO: 4188084 - RNA, 101 nt, Human
agauauaacuuugaguguuaaauacuguaucacuugugagugaaauggaauuuaaauauuuuauuacagaaugcauguauuuaguaaucgaguuuauauuu

SEQ ID NO: 4188085 - RNA, 61 nt, Human
agauaucaauugcagucuacguuuacaucauugaggauguacacauaguguaguuauauuu

SEQ ID NO: 4188086 - RNA, 104 nt, Human
agauaugaaaguguuggccucauauugcuuuagaaagaaaaauauaauauuuauucaguguauuuuuacaauuugaaacaaaaggugggcaaauuuuacauucu

SEQ ID NO: 4188087 - RNA, 123 nt, Human
agaucaaagugcgagcuuuccuuaauuugcuaacuguauggugguuauguaagagaauauccuuguucuuaggaaauauauacuaaacuauuaauagguaaaggaacaugguauacgugaucu

SEQ ID NO: 4188088 - RNA, 92 nt, Human
agcacaggggagaaugguaggagaugaggucagaggggugugugugggaggagacaacaugucuccacccaucuuaaagauuucugugugcu

SEQ ID NO: 4188089 - RNA, 56 nt, Human
agcacagguacggagaugcuacccucuucuagguggucaucuggagaagcugugcu

SEQ ID NO: 4188090 - RNA, 63 nt, Human
agcacagugcugucuaucucacuaagccacauguuccaggagggguaggcaguauguuaugcu

SEQ ID NO: 4188091 - RNA, 57 nt, Human
agcacaucuuuugggaccccugaggcucuaaucaggcaucucagaauuaagagugcu

SEQ ID NO: 4188092 - RNA, 116 nt, Human
agcacauucaucugaaaaggcucggguugaugaauauuuuccgcuguccgguaaccauggcaauagggucagcagauaugauacuuaauuuaaucuuccagcugccucagugugcu

SEQ ID NO: 4188093 - RNA, 61 nt, Human
agcacauucuugccuuaaccuccaagucagaucucuccaugguaacgcaggaauguuugcu

SEQ ID NO: 4188094 - RNA, 75 nt, Human
agcacauuucucagguaagucauuucucuucccaaggggaggauugaaugaguuuauggugagaggcugaaagcu

SEQ ID NO: 4188095 - RNA, 88 nt, Human
agcaccauuuugcaggacacgucuaauaacuuucagucauuuaucacuauucccaaaugccaggauuauuagaggcaaaucagguguu

SEQ ID NO: 4188096 - RNA, 77 nt, Human
agcacccaguaggucuguggaugggagaaggugacagaaaguugcaccaggcagucaccguccaggacccggcugcu

SEQ ID NO: 4188097 - RNA, 70 nt, Human
agcacccccucacagucuaggagcagcuucucucucccccacauuuugagcuguuccccuugagguugcu

SEQ ID NO: 4188098 - RNA, 66 nt, Human
agcaccuucuuggaguuuacaugcugguaauuaugccagacaguaauaaaauagguaagaacggcu

SEQ ID NO: 4188099 - RNA, 72 nt, Human
agcacgcugaggccagagugggccucuuccuauuucaggcucugaaaguggcccagucuugcccugggugcu

SEQ ID NO: 4188100 - RNA, 129 nt, Human
agcacguucgcgucccagguuucuguccgcuggguuuuccuccgccucacucgccuucuccccagcggcgcgcggaggagcugggcugagagggucgcggggagccgggucggccgcggcugggacgcu

SEQ ID NO: 4188101 - RNA, 67 nt, Human
agcacuaaaaagacauggcaagagauggggcucucaagagccagaaaaugaucuugcaugcugugcu

SEQ ID NO: 4188102 - RNA, 83 nt, Human
agcacucagagcacagcagaucucugaugggggccccccaaaucucuuccucccugagucagaucaggcugugacaugguguu

SEQ ID NO: 4188103 - RNA, 57 nt, Human
agcacuccugucuuuccccuuugaaacauaaaagguaaagacugcaaggagaaugcu

SEQ ID NO: 4188104 - RNA, 66 nt, Human
agcacugcugaccuucagggcugcuuccaucccuggugggggccguccuggggauuauagaguguu

SEQ ID NO: 4188105 - RNA, 69 nt, Human
agcacuguccauucacucauauucaggcauugaaguguaugcaugaaggugauuaugaauguauaggcu

SEQ ID NO: 4188106 - RNA, 62 nt, Human
agcacuuaugugauuaggacagguccacuagauaaucucccugucuuaaaaucaucugugcu

SEQ ID NO: 4188107 - RNA, 84 nt, Human
agcacuugucaagcuuuuuuggagaauguuuuggucagaaugacaagauaauuugugacugaggcuccaagcuagagaaguguu

SEQ ID NO: 4188108 - RNA, 108 nt, Human
agcacuuuuggcauuucuauuaaagacacaggcugucuggaacagaugacuuuaccauaaauacuugucucugagccguauggcuuggcuaguggcuuggcaagugcu

SEQ ID NO: 4188109 - RNA, 62 nt, Human
agcagaaaacuuucaugcucugaacccugaagagaaagaauuugccuaugaggguuccugcu

SEQ ID NO: 4188110 - RNA, 57 nt, Human
agcagaaacagccagucuggacucuucuccguccccgagccagauggccagucugcu

SEQ ID NO: 4188111 - RNA, 72 nt, Human
agcagaaagcccggucccaggugccccggugacgccccugcuugugucuggcuccaggaccgggcacaugcu

SEQ ID NO: 4188112 - RNA, 61 nt, Human
agcagaacugaugagacuugagggaaggguccagggccuguauucagucagagucacugcu

SEQ ID NO: 4188113 - RNA, 59 nt, Human
agcagacauaucucaugucacaucuuuuuagaccaggcugagcuuauauaugugcugcu

SEQ ID NO: 4188114 - RNA, 60 nt, Human
agcagagcagcaaauggaaaggaaggaaaauuacuauccuccuccuucuguugcuuuucu

SEQ ID NO: 4188115 - RNA, 58 nt, Human
agcagagcccagguccuggagagggaggugccucccguccccauucuuggguuccccu

SEQ ID NO: 4188116 - RNA, 81 nt, Human
agcagagcguuucuaagcacaugugaguguuucuaccuguggaauggcacacuuuauguagccuuggaguuuagauuugcu

SEQ ID NO: 4188117 - RNA, 91 nt, Human
agcagauaaccacacuuuauggaaaacuccagagaguagaugauucuuuaucuauucucuucagggacuuugcuauuagugucuuacugcu

SEQ ID NO: 4188118 - RNA, 75 nt, Human
agcagaugucuuugcuuuuuaaaaaccucucagacauuuguagugagggugcaaaagcaaggacaguaaacugcu

SEQ ID NO: 4188119 - RNA, 75 nt, Human
agcagauuugugucuaugguuugagcauccccugccuagaaagaagcaaaagaucucaaaucagggacaucugcu

SEQ ID NO: 4188120 - RNA, 55 nt, Human
agcagcaaagaauaggcccucugcuaauuaccccaggggccagcuuucugcugcu

SEQ ID NO: 4188121 - RNA, 65 nt, Human
agcagcaagggauaaacaaggacguugcuucaugaauggcagaguuguccugaguucuagcuguu

SEQ ID NO: 4188122 - RNA, 71 nt, Human
agcagcagccucugggcacgcaggaagagccauauggccagcuccauccagcugcaaggggcacagcuguu

SEQ ID NO: 4188123 - RNA, 57 nt, Human
agcagcagggacaaaggaacagguaacuucauagccuuguucacaguaguugcugcu

SEQ ID NO: 4188124 - RNA, 62 nt, Human
agcagcaguguucuggaauucuaugugagugacaaacacucagaacccagcagcacuguucu

SEQ ID NO: 4188125 - RNA, 81 nt, Human
agcagcaucuucuguucuccgccuuagagagauucacuuaaaaucccgaagucccagauguggacgacaauggaagcuguu

SEQ ID NO: 4188126 - RNA, 57 nt, Human
agcagccagagaaugaugcaguaugauuaacuguuggagaagaucucucuagcugcu

SEQ ID NO: 4188127 - RNA, 59 nt, Human
agcagccuuugaucaucugggaagucauugacuuugauccuuauccuaucaggggcucu

SEQ ID NO: 4188128 - RNA, 57 nt, Human
agcagcuauugccaggcaugagcaaaacacagacucaugugcagcaagcagcaugcu

SEQ ID NO: 4188129 - RNA, 66 nt, Human
agcagcucuggcacuguagcauuucuguggucagggaagaguuugcacaguguccauacagguguu

SEQ ID NO: 4188130 - RNA, 61 nt, Human
agcagcugagaaucuuccccaguguuguguagcacuugguaggacuucagugaaaugugcu

SEQ ID NO: 4188131 - RNA, 56 nt, Human
agcagcugauggggaaggaguugcuauuagcuuaaccuuucgggacuggagcugcu

SEQ ID NO: 4188132 - RNA, 59 nt, Human
agcagcugccacuggaauaggagccuucagacguugguuuuaagccuaguucagcuguu

SEQ ID NO: 4188133 - RNA, 56 nt, Human
agcagcugcuuuucuucauugguaaguuagaaagcauuaaaagaagaguauuugcu

SEQ ID NO: 4188134 - RNA, 57 nt, Human
agcagcuuucugggacagaaaggaaucaaagcuucuucucugagcuaggaaugcucu

SEQ ID NO: 4188135 - RNA, 76 nt, Human
agcaggaacagauuucaucagcaccuugaucuuggacuucccagacuuuuagaauggugaggaauaaauuucuguu

SEQ ID NO: 4188136 - RNA, 91 nt, Human
agcaggacgguuaagguuucaagggaacuguuuugguuaccugaaaggcaaccccccagauaaucccuugaggugucuuugcuguuuugcu

SEQ ID NO: 4188137 - RNA, 64 nt, Human
agcaggacugauguuccuccagcccccuuggcccauuugguggcugcaaaacuucaguccuacu

SEQ ID NO: 4188138 - RNA, 58 nt, Human
agcaggagaacacuguggcucucggauccaggagaggcaggccacgagggcuccugcu

SEQ ID NO: 4188139 - RNA, 56 nt, Human
agcaggagcauuuccaugauucuuaauuaaauccaguaguuuuuggaaauccugcu

SEQ ID NO: 4188140 - RNA, 70 nt, Human
agcaggaggcauauuuaaauccaaugguauuuuuuaccuccguuguauuguuauucugugcucuuuuguu

SEQ ID NO: 4188141 - RNA, 56 nt, Human
agcaggaggccagguaugcuuuaucccugugggugcaagcccgucugccaccugcu

SEQ ID NO: 4188142 - RNA, 73 nt, Human
agcaggcugcagaggacagggauuuagauugggaaacucuuuguauucuaucaagcugucuucuuuacuggcu

SEQ ID NO: 4188143 - RNA, 66 nt, Human
agcagggaccagggccagauccaucuucgagucugucagaacaaugggcaagucuuguucccugcu

SEQ ID NO: 4188144 - RNA, 58 nt, Human
agcagggacuagccguaggauggaaaagcacucaggccuuucugucucuguccuugcu

SEQ ID NO: 4188145 - RNA, 93 nt, Human
agcagggagcaaaguugcagaaaauuaauauuugccacaaagaaguccuuuucuuccugugccuuaugaauucuuucuguacaagcaccuguu

SEQ ID NO: 4188146 - RNA, 98 nt, Human
agcagggagggggugacaaauauuugaagaggcuguccagauacaggcguuucccuaaauuucagucagccuguuuguuuaucgcugccucuaaagcu

SEQ ID NO: 4188147 - RNA, 69 nt, Human
agcagggccagggaaacgaucagcagaacuggugggaaagaucugggcuaaugguccuggccucaggcu

SEQ ID NO: 4188148 - RNA, 55 nt, Human
agcagggcucacauuaguggauaaaagcaggugugcgguugacuauggccuggcu

SEQ ID NO: 4188149 - RNA, 63 nt, Human
agcaggggcagcagcacugacugguccgcuaauuccucucgaccuuggcugcugcuuccugcu

SEQ ID NO: 4188150 - RNA, 88 nt, Human
agcaggggcagccugagcagugacuggagcaugagaagaaacucacaauaucuucucucucugcucuauuacucuuugugcaucugcu

SEQ ID NO: 4188151 - RNA, 89 nt, Human
agaaggagaagcacacaccaguuuguaaccuguuuucaucuaaaugauaugguagacauuucuacauagcuuuuguaauucucucuucu

SEQ ID NO: 4188152 - RNA, 66 nt, Human
agaaggcaacuguaaaacaugcacaauuucacaauguaccuggcauuuuuuaguauagugccuucu

SEQ ID NO: 4188153 - RNA, 59 nt, Human
agaaggcagaugggacggagcagguggagagacgagagcuuggauucguccagccuucu

SEQ ID NO: 4188154 - RNA, 60 nt, Human
agaaggcucacuaagagugacugcauuagcauaaauucagguaugguuauugggccuucu

SEQ ID NO: 4188155 - RNA, 62 nt, Human
agaaggcuccagugaaugcuggcacguucagccaggaugccuccgugaagcuggagaccucu

SEQ ID NO: 4188156 - RNA, 57 nt, Human
agaaggcuuuucuaccagaucuuuacauggcaggauccuccuuagaaaagaccuuuu

SEQ ID NO: 4188157 - RNA, 76 nt, Human
agaagggaaauguaguauguugcauguaucaaacuaccuugucugauuuauguccaaaauacuuauuuaccucucu

SEQ ID NO: 4188158 - RNA, 65 nt, Human
agaagguauagcuaauugagcccugaaugcauauagacugggguuuacuuuagaaauugccuuuu

SEQ ID NO: 4188159 - RNA, 98 nt, Human
agaaggugcaacuuuucuuaaguauuucagagacugaugauuuaucagcuucgccuucauuagauuuauaugguacauaggauuuguuugucacuucu

SEQ ID NO: 4188160 - RNA, 65 nt, Human
agaaggugcacacagccccacggugagcaaagggaaaccucagagcuccuaagggcugauuuucu

SEQ ID NO: 4188161 - RNA, 65 nt, Human
agaaguagaaagccucguaaauauuuugucugcuaaucauguguuuacagggugauuuuaccucu

SEQ ID NO: 4188162 - RNA, 73 nt, Human
agaaguagugggagguaagcuggaaaaguuggugcccuucugugaacuuccccagcauccucagcucacuucu

SEQ ID NO: 4188163 - RNA, 63 nt, Human
agaagucaauuagcuaaaauuugguaaucauguuuuugauaucaugugcgcuuauugauuuuu

SEQ ID NO: 4188164 - RNA, 57 nt, Human
agaagugagacucaguugaugaacugaaauaaaagagaaaauugagucucaacuucu

SEQ ID NO: 4188165 - RNA, 59 nt, Human
agaaguggggaaaacaugcuguguaguuaauuaggcccagcagaguaauucucaccucu

SEQ ID NO: 4188166 - RNA, 71 nt, Human
agaaguuugaaauauuucuacaaugaaaacaccagaccaugugguuuuuauuggagugauaccaagcuuuu

SEQ ID NO: 4188167 - RNA, 58 nt, Human
agaaguuugguccuuuucaaggccuaauuuuacugugaguuuauaggaccaaacuucu

SEQ ID NO: 4188168 - RNA, 90 nt, Human
agaauaacaugcuccaccacagucuacuaaacaucaucagcgaucacgucccugagagguaagcagcgcaguggugaagagguuaacucu

SEQ ID NO: 4188169 - RNA, 64 nt, Human
agaauacaguaggagccugggcaucuguugacuuuuucugccuugcucacuuucacuguauuuu

SEQ ID NO: 4188170 - RNA, 83 nt, Human
agaauauaucucagaguuuugggaagccauaaggauacuuaacaugcccuuucaucuggcuucuggcuggugagaaauguucu

SEQ ID NO: 4188171 - RNA, 79 nt, Human
agaauauccacacugaggagauugauauucgaaugauuaacuuucuuuaaaauguuaaaaccuucagugcuuaguaucu

SEQ ID NO: 4188172 - RNA, 86 nt, Human
agaauauuccauagacuuuccuuuucucuaguaagcuuuauauuguggagccuagaaagagaaaagacucuaaguuuguauauucu

SEQ ID NO: 4188173 - RNA, 102 nt, Human
agaauauugucuaaaaauuagauucaauggaguauuuuucaagcuguauuaugaaacugauuucuauuguuaaaacuccauugguuuggaaagauuuauucu

SEQ ID NO: 4188174 - RNA, 130 nt, Human
agaaucaccuggcagcuuucaaaaaacucugaugucugccccucaccuccucuugccgagguccacagaaucuccaagguggggcccuggaaucagcauuguuagagguuccagugugaugccgaagucu

SEQ ID NO: 4188175 - RNA, 74 nt, Human
agaaucauguacuucuuaaauuaggaucaaaaguuuuacuucuuuggaccugaagaauaggaaguauucguuuu

SEQ ID NO: 4188176 - RNA, 79 nt, Human
agaauccaagccucaucugugcccaugcuggcauucagauauaucuggacauggcuaugguauugauggguuuguuucu

SEQ ID NO: 4188177 - RNA, 83 nt, Human
agaaucgcuugaacccuggaggcggauguugcagugaccgagaucgcgccacugcacuccagccugggugacagagcgagacu

SEQ ID NO: 4188178 - RNA, 79 nt, Human
agaaucuauugaacacucacaaucuugccuuauaaacagauuguaaacaugcugaggcuggagaugaucaugugauucu

SEQ ID NO: 4188179 - RNA, 97 nt, Human
agaaucucaguuucucuuccagcuaacucacaucccuuccccuuccucggaucuaagaagaaaugcugauguuggaugggugggaaccuggguuucu

SEQ ID NO: 4188180 - RNA, 60 nt, Human
agaaucucuggggauggaccugggagauguauauuuuuuaacaaguccccuagagguucu

SEQ ID NO: 4188181 - RNA, 79 nt, Human
agaaucuugcucugaggcuggagugcaguggugcuaccuuggcucccugcaaccucugccuccugguucaagugauucu

SEQ ID NO: 4188182 - RNA, 71 nt, Human
agaaucuuuccgagaaacugcuuugugauuagugcauuuaucucacagaguuaaaaguuucuuuggauucu

SEQ ID NO: 4188183 - RNA, 62 nt, Human
agaaucuuucugaaugacuguguuucccuucaagguggguuggauagcaugcagaagaaucu

SEQ ID NO: 4188184 - RNA, 58 nt, Human
agaaugcagaagcaccaggauucaagacuagaauaucugaccucguuugcuguguucu

SEQ ID NO: 4188185 - RNA, 60 nt, Human
agaaugcaguuugaaauaagguagcguggaauugggcuauuuuccuuuuaacuguguucu

SEQ ID NO: 4188186 - RNA, 59 nt, Human
agaaugcuuguaccuuuguuuuguuggggaauucacugaagagggagguacaagauuuu

SEQ ID NO: 4188187 - RNA, 76 nt, Human
agaaugggguagugggcagccuggcaggcagggugccaggcacagaggccgaaacccaggcagccugcuccauucu

SEQ ID NO: 4188188 - RNA, 56 nt, Human
agaaugucaacagccucucaagcuggguccugcguugauugcuuuugugacauucu

SEQ ID NO: 4188189 - RNA, 110 nt, Human
agaaugucuuagguggagguuaaguagucuuugaaagugauggggaagauggauuugugcugaaccucuucuaccauuuacauuuuguguuuuaaccucacagauauuuu

SEQ ID NO: 4188190 - RNA, 89 nt, Human
agaaugugggugaaaagacugagaguaauuuucuacuugaagcagagucuucacugaaaaccauacuucuuucugcaugcccacacucu

SEQ ID NO: 4188191 - RNA, 60 nt, Human
agaauguugaaaagggagauggugacacugcagacaaacuuuucucucugauaacauuuu

SEQ ID NO: 4188192 - RNA, 116 nt, Human
agaauguuugguaaauguuuggaaaaugcagacuuccaaagaagugauuacagagccuuaugcuuggauggugucuuuuuucugggagcgucuucaagcauuuuacaaacuuaucu

SEQ ID NO: 4188193 - RNA, 73 nt, Human
agaauuagauucuguggauuacagauuuguaaguaggaaacugacaaaucuguuuuauagacuuuuaaugucu

SEQ ID NO: 4188194 - RNA, 57 nt, Human
agaauuagcagagaaggugucuucgaauucccagaggagcuucuucugucuaauuuu

SEQ ID NO: 4188195 - RNA, 118 nt, Human
agaauuagcuggaacauuugguaaagguuuagaucucagacccaacaccaggcugaauuagugggucuggaguagggucugggaauugauauuuuuagcagauguuccaggugauuuu

SEQ ID NO: 4188196 - RNA, 69 nt, Human
agaauuccacacagugcuguuuguaaagagaaaugaaucauuuuuucccauuuaggcauugggaauuuu

SEQ ID NO: 4188197 - RNA, 100 nt, Human
agaauugaauacaggcagccuuugcuuugcacagugcuguguuaacugaaacucauuuguaucagaagugugcaaagcaagggcugcuguaugcuuuucu

SEQ ID NO: 4188198 - RNA, 60 nt, Human
agaauuggcugaggcugccaggcuggcaucacagcuuggcuucucccucugccugauucu

SEQ ID NO: 4188199 - RNA, 98 nt, Human
agaauugggaaaaugaucauacagagcccugguaacagucaucaucaucauccauugcuguuuacaaaggagacucuguauuuaaccacccaggaucu

SEQ ID NO: 4188200 - RNA, 94 nt, Human
agaauugguguauaucacaucucuggcuuggauuaugguuggaaguggcccagugccugucaaaccucaucucucacugaauauaacaccaucu

SEQ ID NO: 4188201 - RNA, 87 nt, Human
agaauuucugccuuggucaaaaacucucaguggacuguagcccaggccuuuggucugcugagaguuucugacugaggcggaaaggcu

SEQ ID NO: 4188202 - RNA, 59 nt, Human
agaauuugacaaauauuuauuggcacauauuuuaagugccaggccuauuguuaaacucu

SEQ ID NO: 4188203 - RNA, 79 nt, Human
agaauuuugucagaaauguaagcugaugacugcuauaugauuacagugaagucaucauuuauaucaagucuguuauuuu

SEQ ID NO: 4188204 - RNA, 130 nt, Human
agacaaagccuuacuagcuuuaggaucuuggcuauaaaugguaaauuaguaguagcuuuugaaauccuugggcauucaaguuggcuaauuuuuucauuuuauaagaggaagguugggacagcugauaucu

SEQ ID NO: 4188205 - RNA, 72 nt, Human
agacaaaggagauguuugacauaaacacuuugguagcagaauuuacaguguuuauuagauuucccuuuguuu

SEQ ID NO: 4188206 - RNA, 71 nt, Human
agacaaaucagauaaaaaauugaggcauuaacugguaguuagguguguccaguuuuuucucugcuguguuu

SEQ ID NO: 4188207 - RNA, 79 nt, Human
agacaagagcugaggacauauucuagcccccaagaagugcuggaguauucccacuccucagcaauuuuuacuuuugucu

SEQ ID NO: 4188208 - RNA, 56 nt, Human
agacaaugcaagcagggaguggggaaaauuauccuucccuucuccugcauuggucu

SEQ ID NO: 4188209 - RNA, 66 nt, Human
agacacacacauacauaugacaacuuuccuguaaagguacagcuguguguguaugauaucuugucu

SEQ ID NO: 4188210 - RNA, 85 nt, Human
agacacagcucugagcuaaaauguguuuuucucagccuuaggucaucgggcucaguugcauauuuuguguucucugucuuguucu

SEQ ID NO: 4188211 - RNA, 67 nt, Human
agacacaggcucagaagccaguggagccuuucaggguggggaccucacugguuuuagggucacgucu

SEQ ID NO: 4188212 - RNA, 63 nt, Human
agacacaggcugccacuugcauccaaaacguuugggugccuuaagugagugccucacuugucu

SEQ ID NO: 4188213 - RNA, 78 nt, Human
agacacugauuucagggaugagaagaaacaggugucuuagaaacacgguacucuccacucauccucuggaauccuucu

SEQ ID NO: 4188214 - RNA, 112 nt, Human
agacagacgcaggaacagcauggcccuaagguaugugcuggguguucucuuagccugcggcagacauccuggggagggcaaugccugggggagcugaugccugggugagucu

SEQ ID NO: 4188215 - RNA, 110 nt, Human
agacagauacucagugggcuggggucagccagcauuaccccugacuugaacuguggaacaauucagccaagugauguggcugcacccuggcaucacccuaaccuuugucu

SEQ ID NO: 4188216 - RNA, 68 nt, Human
agacagcauggauaacaaggcacuacacauuugcccaaggauguugaguguucccuguucaugcugcu

SEQ ID NO: 4188217 - RNA, 59 nt, Human
agacaggccaaaauucaggcauucuggggucccacaugugcuuguuuuggcccuuguuu

SEQ ID NO: 4188218 - RNA, 87 nt, Human
agaucaacagaucguggguagaaagauggaacguugaagccaggcaaccaaacuugaauuuucuucuucuugccagaugugugaucu

SEQ ID NO: 4188219 - RNA, 63 nt, Human
agaucaacucagaauccugcugauaugguuugaauaccuggauccaguugagacugaagaucu

SEQ ID NO: 4188220 - RNA, 58 nt, Human
agaucaaggacaugaagaggcugagugccuccaugagcuucauuauuuuccaugaucu

SEQ ID NO: 4188221 - RNA, 58 nt, Human
agaucacagagccaagauuccacuugaggcagcauggcuauggcuggcucugucaucu

SEQ ID NO: 4188222 - RNA, 61 nt, Human
agaucaugcagcuaauccaauucaguaguuaagaaaauugaaaagaccagcugugugguuu

SEQ ID NO: 4188223 - RNA, 108 nt, Human
agaucaugcuuaagcaacauguagcagcaacuuauuuuucuuaucuuuauauagauuuacugaaggguagguuguuugaaaauggauguagcuuuggggcacaagucu

SEQ ID NO: 4188224 - RNA, 127 nt, Human
agauuuagaaggaaccugguaguguuccugggagacagaagacagaguguucaucuuugccauaugcagagugucucuugcaguuuucucuuuaccucacuggcacugcugaaauccuucuuagacu

SEQ ID NO: 4188225 - RNA, 105 nt, Human
agauuuauuuucauuauuuuuuuaagucagggaguaagaccuuuaccagaaauuauccccccagcagacuuuuucugggucuauuccuacugugaaucaagauuu

SEQ ID NO: 4188226 - RNA, 69 nt, Human
agauuucacaugcaggagccaauguacauguauuuacuuugcuguauucuguuuuuuugugugguuuuu

SEQ ID NO: 4188227 - RNA, 87 nt, Human
agauuucagaaguuuuguguacaguauguucuugaauuugggcuuaagcucagacugacauauaguauuucaucacuaaugugaucu

SEQ ID NO: 4188228 - RNA, 75 nt, Human
agauuucagggcuacugcugugacaacaggguagggcagaaaggguacugcucugggauucagcagccuggaucu

SEQ ID NO: 4188229 - RNA, 58 nt, Human
agauuucuuugaauuagagagguuacuuuucagugaguuuuuuaauucaggcagaccu

SEQ ID NO: 4188230 - RNA, 66 nt, Human
agauuugccgacugcuuugccucacucugaaauccuuaggcagugcaugcaaaggucggugaauuu

SEQ ID NO: 4188231 - RNA, 57 nt, Human
agauuugcggcuuuacuuugcacgcaugcugcguagaggggaauuugcugcggguuu

SEQ ID NO: 4188232 - RNA, 98 nt, Human
agauuuuccaaugugugcuuacaggccaguggcaucauccucagucacagguuaaagggcagcuagggcuggccugcugggcaccaccgugagaaucu

SEQ ID NO: 4188233 - RNA, 83 nt, Human
agauuuugccucggguuuuuaaagauguuuuauaaguuaugggucucuuuaaaauuuuuaaucaucuuaaugagguauaauuu

SEQ ID NO: 4188234 - RNA, 80 nt, Human
agauuuuguugguuauguugaggaccgguacacaaacauuucaauuuguacacaauucuuaacauacauaugaaaaaucu

SEQ ID NO: 4188235 - RNA, 89 nt, Human
agauuuuuauugguuuaauuuauuuggaaauuuucauccagacauguaauuuaugucuauuaauuccacauaaaauaacuuuaaaaucu

SEQ ID NO: 4188236 - RNA, 66 nt, Human
agauuuuuuccguuugguguuccgcuagucuuugaacccugguggcauggaccuuggaagaauucu

SEQ ID NO: 4188237 - RNA, 55 nt, Human
agcuuugcaaccugaggccaguuacuuuccucucuuggcuucaguuuagcaggcu

SEQ ID NO: 4188238 - RNA, 61 nt, Human
agcuuugcucugugaauaaaagagguuguuccucaugcugcuuuauucacagagaagaguu

SEQ ID NO: 4188239 - RNA, 60 nt, Human
agcuuuuaaagacuuugaauccagggaaaugucacuucugggcauggagcuucagaggcu

SEQ ID NO: 4188240 - RNA, 78 nt, Human
agcuuuucccaggcaguagaaagaagaggaagauggccuauguuuugcccaaggccucauucuuucugugccgaagcu

SEQ ID NO: 4188241 - RNA, 56 nt, Human
agcuuuucuauggucuuaggaaagggcacaugugacuccugagaccugggaagguu

SEQ ID NO: 4188242 - RNA, 86 nt, Human
agcuuuuguuugucugggaaagucuuuauuucucuuucauguuugaaggauauuuuuaccagauauacuauuacaggauaaaaguu

SEQ ID NO: 4188243 - RNA, 84 nt, Human
agcuuuuugaaauaaaguagcguuuaaggugcacagauuuauccuuucuuuggggcaucuuaaggucuacugauaucaaaugcu

SEQ ID NO: 4188244 - RNA, 88 nt, Human
aggaaaaagauagaaauaaagguacuaagggaauauagauaggaaguuguaucuuucuguacuuuuaugauugacuacauuuucuccu

SEQ ID NO: 4188245 - RNA, 70 nt, Human
aggaaaacugaggcauuaaagggaaucuucuuuggagacagaaaguguuccuuugauccuuauccuuccu

SEQ ID NO: 4188246 - RNA, 56 nt, Human
aggaaaaggugccuuuugcuaauucauacaaagacuagcagagaucauuuucuccu

SEQ ID NO: 4188247 - RNA, 89 nt, Human
aggaaacaugagcucuaguccugauaucacuguugaguaggcccaugagguuuuuccagugaauuagucuguuuuggcuucauuuuccu

SEQ ID NO: 4188248 - RNA, 62 nt, Human
aggaaaccaggacugcaccgucuccuucaaaaacagcagacccgugccacucguggcuuccu

SEQ ID NO: 4188249 - RNA, 86 nt, Human
aggaaacuaagacugagagacuaagugcuuugcccaagcucaccuggugugccaugcagcugccacuugcucucggcucccuuccu

SEQ ID NO: 4188250 - RNA, 59 nt, Human
aggaaacuguccccucauccuaggaguuggaaacugugaugaugaggaacagucauccu

SEQ ID NO: 4188251 - RNA, 75 nt, Human
aggaaagagcccagaguuaggagguggaauguggggucccacagcugcccccucucuaacucccugcuuccuccu

SEQ ID NO: 4188252 - RNA, 82 nt, Human
aggaaaggaagaggaaggucccaucagaauuugggcaaaggcucauguguuuugguggaucauucaagcaagucuguuuccu

SEQ ID NO: 4188253 - RNA, 119 nt, Human
aggaaaggggacauauguuuggcuuccuucaaggcaguauucaaagaagccuguaggcagugaguuacaggaguuuaagaaauauuuccuaagggaaacuaugaaggucuuuauuuccu

SEQ ID NO: 4188254 - RNA, 72 nt, Human
aggaaaggggcaacaaggagggaaaggggguaagauuuauuaccuucaauuauuuuuguuccaaacuuuccu

SEQ ID NO: 4188255 - RNA, 56 nt, Human
aggaaaguagauuguaguacuaguacuacugcuaguacuacguuuucuacuaucuu

SEQ ID NO: 4188256 - RNA, 68 nt, Human
aggaaauaagcuggagcuauauugagcacguagagccugcuccguuuggaaagccagcuugaaguccu

SEQ ID NO: 4188257 - RNA, 55 nt, Human
aggaaauauugucauggugauuuuuacaagccagucaccugcaguaauaauuccu

SEQ ID NO: 4188258 - RNA, 65 nt, Human
aggaaaucacauuguucuuaguuuaccuucccuuuaaaggaaagcuggggaauauguuaaauccu

SEQ ID NO: 4188259 - RNA, 60 nt, Human
aggaaaugcaggcaaauacucuuccuugaguuaaaucugaugucuguuuccugcuuuccu

SEQ ID NO: 4188260 - RNA, 81 nt, Human
aggaaaugugugacaacuaaauauagucaaaucaaggcagcagcagugaguucuauuuuggcugauucaucaugugaaccu

SEQ ID NO: 4188261 - RNA, 60 nt, Human
aggaaauguuuagcauccacuuuuaaaagcaugaggagaggggagagcuaagcaauuccu

SEQ ID NO: 4188262 - RNA, 68 nt, Human
aggaacaacugauucagucaacccauaucaucuugggucaggauuggugcugauucauuuugauuccu

SEQ ID NO: 4188263 - RNA, 90 nt, Human
aggaacacagccauacuuacuuauucacauauugucgguuguugcuuugaggcugcaguagcagagcugaguaguuguggcaaagacccu

SEQ ID NO: 4188264 - RNA, 82 nt, Human
aggaacacaggccaaacuuucugucugagcugcagaguauugaaacuuagauugugagcugggcaggaauuccuguggcccu

SEQ ID NO: 4188265 - RNA, 67 nt, Human
aggaacacaucuuuguagcagggcugcagagcaugcagccuggccuagaccgcaaggauggagucuu

SEQ ID NO: 4188266 - RNA, 62 nt, Human
aggaacacccccuuccuaccagcaucuccccucaggcugauaggugggagagguggugcccu

SEQ ID NO: 4188267 - RNA, 67 nt, Human
aggaacagccaggggcuggcguguugaugguagaaaccauuacagaguucgcaccugguggguaacu

SEQ ID NO: 4188268 - RNA, 70 nt, Human
aggaacauguaaauaucauuguacugggcuuugcauucuggcugaacagcacaguggcuuacguguuccu

SEQ ID NO: 4188269 - RNA, 60 nt, Human
aggaaccagacagaacugaauggagaaagcagaacaagacgcaugguucgugugguuucu

SEQ ID NO: 4188270 - RNA, 66 nt, Human
aggaacggacaaaccuuguaaaugccaaacuaguugaucccaaagcuagcuacuagguuuccuccu

SEQ ID NO: 4188271 - RNA, 82 nt, Human
aggaacugugagacugaguccccaacuaugauguauuucaaaugcauuccacacccauagagauuuugaucucaucaguccu

SEQ ID NO: 4188272 - RNA, 83 nt, Human
aggaagaaauaucgcauuuguuaaagcauguuggcacugcauucaacaucauugauuaguaaauugugaucauuuucucuccu

SEQ ID NO: 4188273 - RNA, 79 nt, Human
aggaagaagcugaaggaggcucugguacuacucaacauuguacuccagguagaaccaccuucuccuuuaccaccuuccu

SEQ ID NO: 4188274 - RNA, 62 nt, Human
aggaagaauguuuacauaucaaaguggauaacauuucaugcugguggaaggcgcuucuuccu

SEQ ID NO: 4188275 - RNA, 129 nt, Human
aggaagagaaggguuuguggaaguaaaucuguccugugacagugggaggaccagccagcugaccuggucaccguuucuucuguucuagagacaugcugaucuagauuuuaucagguacccuucucuccu

SEQ ID NO: 4188276 - RNA, 66 nt, Human
aggaagagagguauagaagcaacacacuuuucugaggaagaaaagucucuuuacaugucucuuccu

SEQ ID NO: 4188277 - RNA, 55 nt, Human
aggaagagcaucuuugggucugcauaaauuuacacaggccauggugaccuuuccu

SEQ ID NO: 4188278 - RNA, 56 nt, Human
aggaagagguagcugucaaggggaaaggacaagguccuugaagauacaaguuucuu

SEQ ID NO: 4188279 - RNA, 96 nt, Human
aggaagauuaucuauguggauuucaccugaucuugucaucuuacuauuuaauaggagagguccccuugugaaaugggcauaguuuuggguuucccu

SEQ ID NO: 4188280 - RNA, 65 nt, Human
aggaagcccagagucaagcuuaccauuaaauuuuuguguaacgguaauaaagacuuugcuuuccu

SEQ ID NO: 4188281 - RNA, 65 nt, Human
aggaagccucaccuuuuagaagcuacucagguaaaucuguacaugguaguagggugagguuucuu

SEQ ID NO: 4188282 - RNA, 81 nt, Human
aggaagcugggaaacugacauugauauuuauacaauccaucaaucuuuuucauguuucaccaguuuuauaagaacgguccu

SEQ ID NO: 4188283 - RNA, 72 nt, Human
aggaaggaaaggaaguguuaccuguaaaaucuucacgauuucaacagcauaaucacuucuuucuuaaauucu

SEQ ID NO: 4188284 - RNA, 120 nt, Human
aggaaggacagaguguuuccagacuccauacuaucagccacuugugaugcuggggaaguuccucuacacaaguuccccuggugccacgaucugcuucacgagucugggcauguccugacu

SEQ ID NO: 4188285 - RNA, 81 nt, Human
aggaaggaggccaggcccucaagccugagguuggaaggaaggggcagcguugaguagggugagggucuggccuugaguucu

SEQ ID NO: 4188286 - RNA, 99 nt, Human
aggaaggauugggucauuagcuuggccuuucacacucccaaauuguuggguuaggcaaggacuggcagugugaggggucagaccacagcaauuucuccu

SEQ ID NO: 4188287 - RNA, 56 nt, Human
aggaaggcaugagguguucacagugggcuucgugaguuuugcuucaucccgauccu

SEQ ID NO: 4188288 - RNA, 59 nt, Human
aggaagggaagagggcuuuggaguuugaagaacgacauuccaagcucaacucccuuccu

SEQ ID NO: 4188289 - RNA, 62 nt, Human
aggaaggggcuuaugaagacgugagguccuugggcccuugaaagucacaugcagcccugccu

SEQ ID NO: 4188290 - RNA, 81 nt, Human
aggaagguaagcagagagaagaaagccaugguccuugucacaguugugcuuaguacccuuuuauuuuauguauacauuucu

SEQ ID NO: 4188291 - RNA, 59 nt, Human
aggaaggugacaguguccaccuacccauuccccaguagcuggccacauugugccguccu

SEQ ID NO: 4188292 - RNA, 61 nt, Human
aggaaguaaggcagguagaugacuacggagaaagucaguagaaaggaucuggcuucuucuu

SEQ ID NO: 4188293 - RNA, 77 nt, Human
aggaaguacuuggaaaaaugcccacuccaguuguuauuuguaaaauguccaguuggcauuuuauuuaaguauauucu

SEQ ID NO: 4188294 - RNA, 107 nt, Human
aggaaguauggaggcugcucugugacucccucuuccucucuuccccgcucuaugugugggaaugacgaggaagaggaaaggaguaagaggccuggcucauucuuccu

SEQ ID NO: 4188295 - RNA, 67 nt, Human
aggaagucucucaaaacuggaagggaaagguguuuucuccacaucaauccaguuuuggagacauucu

SEQ ID NO: 4188296 - RNA, 67 nt, Human
aggaagugcggaaggucagaggccgggcucagcugaccgccuggucccuggaccucccuggaccccu

SEQ ID NO: 4188297 - RNA, 76 nt, Human
aggaaguuggcaaggaggcagugggacuugaauauccgagaaaagccgguuucuccucuguuaccuugcaaauccu

SEQ ID NO: 4188298 - RNA, 106 nt, Human
aggaauaagaucaucggaaauuaucauagaaucuuuguaaaacacuuggaaaauccaugguguuuuacugggugcucagaugaugcucaauauucauuaaguuccu

SEQ ID NO: 4188299 - RNA, 130 nt, Human
agccuuagaagcaccuguagagcuuggagauggaagggggugcuacuuccagaguuucugacuuuaguaggucugggaugaggaccugagaaucuguauuuccuacaaguuucuaggugaugaugauaau

SEQ ID NO: 4188300 - RNA, 83 nt, Human
agccuucacuuuacauuugaucucucuaaaguuuuugaagguuucgagauguucuuuauuuggggagaaaugaaaugaagucu

SEQ ID NO: 4188301 - RNA, 61 nt, Human
agccuucagcaguucaggugccuggugguagauggggcugacuggaugauugagaaaggcu

SEQ ID NO: 4188302 - RNA, 63 nt, Human
agcaaaagccaauguuuaacuuaguggcaaagguuacgaagcuauuaguuaaggcucuuugcu

SEQ ID NO: 4188303 - RNA, 85 nt, Human
agcaaaaguggauucugggagaguucuauacucuauaggucuaucaagauuuaguuucuguuuaaguucucccagaauucaugcu

SEQ ID NO: 4188304 - RNA, 89 nt, Human
agcaaacauuuuacaaguagcuuauuagggauaauagugaaggaagucacuuaaacuagaaaauuccuagaaacuauguguuguuugcu

SEQ ID NO: 4188305 - RNA, 87 nt, Human
agcaaagaccacccagccaacacacagcauugagagcuaaauuuaaaaguaauuguuuuaagccacaaaguuguggggugguuugcu

SEQ ID NO: 4188306 - RNA, 55 nt, Human
agcaaagcugauuaagagcacagacuuuggaaaaggcaguuuugguggcuuugcu

SEQ ID NO: 4188307 - RNA, 76 nt, Human
agcaaagggauguuaguugugagcucaguuccccaccgggccugguguuuccaaauagcccgucacugucccugcu

SEQ ID NO: 4188308 - RNA, 80 nt, Human
agcaaaguuagcuucagcuuaaucucuuagcaaauuaaugaagguuuuuuccuuuaagagauucuaaagcuacugguguu

SEQ ID NO: 4188309 - RNA, 64 nt, Human
agcaaaucaguuaagcuugaauguuggggaagugauuucucuucucccaacuugacuauuuucu

SEQ ID NO: 4188310 - RNA, 79 nt, Human
agcaaaugggccgccagccugugcuuggccaggcggacaugacgagccgccuguggggcugaggcugccuggcccugcu

SEQ ID NO: 4188311 - RNA, 59 nt, Human
agcaaauguugggugaacggcuguuuccucuuauucaagccaugcaccuuacucuugcu

SEQ ID NO: 4188312 - RNA, 95 nt, Human
agcaacauacgaaaacuguucuucauuuucaguauguaucagacacccaaaauacauacugccaaugggguggggaaaggggagcauauguugcu

SEQ ID NO: 4188313 - RNA, 98 nt, Human
agcaaccauuugaucccggcuucauuucaggcugaagaauaauuucuucugguuguuuuucuucggugcuggguugauccuggggccgaguggcugcu

SEQ ID NO: 4188314 - RNA, 65 nt, Human
agcaagaaaauagcuauggaaugucacuucucuuguggaaguuacaagcuauuuuacuuaaugcu

SEQ ID NO: 4188315 - RNA, 127 nt, Human
agcaagaaagcuaccagauaccccucacagcaucuguguguugaguucucagcucugaguaauugucuaaagaauuaagcaaugcuagggcuagauauauaaugucuaaauauguagaguagcugcu

SEQ ID NO: 4188316 - RNA, 61 nt, Human
agcaagagcugcccaaggugaacaguccaacacuugggcuuccccuugggaagcucuugcu

SEQ ID NO: 4188317 - RNA, 130 nt, Human
agcaagaggaauagcagccacaagacucuacucauguacauguaagucagaaaaagaaucccaguucauauuucugugccuacauuugggauuugagaaguaacaagagucaugugcucaaccccuuguu

SEQ ID NO: 4188318 - RNA, 78 nt, Human
agcaagagugagcucgcaugcaugugauuuaggugacguuggugacagaauauuuggcaugcgucuccuacaucuguu

SEQ ID NO: 4188319 - RNA, 55 nt, Human
agcaagauuuuccuugaauguuauuaaugguguucuuauuuaggaaaauguugcu

SEQ ID NO: 4188320 - RNA, 80 nt, Human
agcaagcaaguggcugagcagagauuugaacucgaaagucuagcuccaaagcucaugcucuuagccauguuacguuuccu

SEQ ID NO: 4188321 - RNA, 75 nt, Human
agcaagcauuuugaucagucauaaauuggauccuuuuacaaaaaaggcuuagauugacacugaucucacuuugcu

SEQ ID NO: 4188322 - RNA, 78 nt, Human
agcaagguuaacaugguuguuuacgaaauaaauacaaacuucaguuaguauuucaucuugaaaaccaguuuaagugcu

SEQ ID NO: 4188323 - RNA, 89 nt, Human
agcaaguuguagcugaacugcauuguacuaaacuugucguuaaaauauugauaacaggcaauguaguuguguuauagcuauauuuuguu

SEQ ID NO: 4188324 - RNA, 65 nt, Human
agcaauagacacaagauggauaauauauaaacuucauucguguccuacuuuugugaucuauuguu

SEQ ID NO: 4188325 - RNA, 94 nt, Human
agcaauagcaagaagcccucuuaaugccgagauuguaguuuuucuaaguagaauuucaaacuaauaggaaccaggacuucuuggacaaauagcu

SEQ ID NO: 4188326 - RNA, 80 nt, Human
agcaaucacuuaguauaugacgcuuucaagggccuuucuuggaauuuuccaagucacaaagugcuguacaugggauugcu

SEQ ID NO: 4188327 - RNA, 56 nt, Human
agcaaugaacauauaaagagaucuugaacacaaaagauugaaauuauguucaugcu

SEQ ID NO: 4188328 - RNA, 57 nt, Human
agcaauggccagccacuccugauggcagcccaagcccagccccaguggcugccagcu

SEQ ID NO: 4188329 - RNA, 56 nt, Human
agcacaauauaaagugaacgcacauuucucaaugugcguucacuuuuuauugugcu

SEQ ID NO: 4188330 - RNA, 129 nt, Human
agcacacaguaaagacccuaagcgugaauugguuugcuuggagucagaaggcuugucaauagcuucucuaugauuaaguuuccagauuguaaguccacuacucuuuccucucucuaccuuaugcugccu

SEQ ID NO: 4188331 - RNA, 67 nt, Human
agcacacagugacauuagugagaaaacuagggcugucaguuuucucuauauugucugugaaguugcu

SEQ ID NO: 4188332 - RNA, 70 nt, Human
agcacacgacuuuuguggagucugcggagcaaauagaaaaaugauuccacagcuucgaggucuuuuugcu

SEQ ID NO: 4188333 - RNA, 65 nt, Human
agcacagagcucggggaauggaagaaaggaaggaauauuccaugacaucgccaggcucugcugcu

SEQ ID NO: 4188334 - RNA, 59 nt, Human
agcacagcauuuaaagaaaaugaacucaucuagucauuaaagguuuuaaaugcucuguu

SEQ ID NO: 4188335 - RNA, 55 nt, Human
agcacagcuuagcaccuggcaccucacgggugcuugugaaacugcagcugauguu

SEQ ID NO: 4188336 - RNA, 78 nt, Human
agcacagucugcagggugaacaugugacauccaugcauuaacuaugauuuucaaaugcucauugaugcuacuguaguu

SEQ ID NO: 4188337 - RNA, 67 nt, Human
agcacaguuugggucuccggggcauugagaaagaauuagaaaguguguggggagcuagacuggagcu

SEQ ID NO: 4188338 - RNA, 58 nt, Human
agcacauguauucuccuugaauuauuguuucaggcaaaacaggaagaauacaauggcu

SEQ ID NO: 4188339 - RNA, 56 nt, Human
agcaccaagcaggcucaagcacggcugaaccaagcacugugacccuguuggguguu

SEQ ID NO: 4188340 - RNA, 55 nt, Human
agcaccaggcaguauaucaaaggguggucuacuuauuguguuauuuucugguguu

SEQ ID NO: 4188341 - RNA, 70 nt, Human
agcaccuccaagaagcuuucccugcuugcaccugccccaggcugcauuaggaauugcuccaugaggugcu

SEQ ID NO: 4188342 - RNA, 58 nt, Human
agcaccuggauuugauagucagugagccuugguucuugucugugcuuuuccaguugcu

SEQ ID NO: 4188343 - RNA, 58 nt, Human
agcaccuuguuguagguacaaaagagaacauuucuauuauauuuacacgagaguugcu

SEQ ID NO: 4188344 - RNA, 103 nt, Human
agcacuauaccaacaaauggaaggauuuccaagguaauuuugaguauaaacaauguuugcuuuacucaucgacuuugaaauccuaacaccugggugaaaugcu

SEQ ID NO: 4188345 - RNA, 94 nt, Human
agcacuauuuguuuuccugucuggaacauggccuguucuguugacccgauuuggguuaugauucauguuauagagagucagacaaauaaguguu

SEQ ID NO: 4188346 - RNA, 57 nt, Human
agcacucuuaauucugagaugccugauuagagccucaggggucccaaaagaugugcu

SEQ ID NO: 4188347 - RNA, 57 nt, Human
agcacucuuucagagccagggcuauuuuuuaaaaagcauuuggcacucugaaguguu

SEQ ID NO: 4188348 - RNA, 61 nt, Human
agcacugaaagaaccuuccuguugcuucacauuuuuacaagcauuugguuuugucaaugcu

SEQ ID NO: 4188349 - RNA, 108 nt, Human
agcacugaucaauuagggaaauuguuuuaaugagggagguugauuuugucauguaugcguuaucuuucucuuuucuugaccacauuauccucugggaaucagaaugcu

SEQ ID NO: 4188350 - RNA, 60 nt, Human
agcacugcuuuagagccucugcgugucuggcuguggccucaggggucuagcagcagugcu

SEQ ID NO: 4188351 - RNA, 67 nt, Human
agcacuguauauaaauugucaguuguguauuauauuuaucacuaauggcauccuuuaucugcaggcu

SEQ ID NO: 4188352 - RNA, 85 nt, Human
agcagaaucugaguaaggacauggagaaggaucaucugguuagcacugauucauucugcaguucucagcucagacgucaccugcu

SEQ ID NO: 4188353 - RNA, 69 nt, Human
agcagacaauuuauuagcagauucuguaggcugcaggguugucauuugcuguuauagugauugucuguu

SEQ ID NO: 4188354 - RNA, 94 nt, Human
agcagagccucagauucauauaaauucagaacucagaaaucuuggagaacaucaaggcacugauucucagaguuacugucgugaggaaacuguu

SEQ ID NO: 4188355 - RNA, 60 nt, Human
agcagaggcacaguuuucuacauaugcucccauggagucaaguaggaccuguucuaggcu

SEQ ID NO: 4188356 - RNA, 64 nt, Human
agcagaggcaggcaggagcuggaacacaaucccagcauuuuagcuccugaggccagccucuccu

SEQ ID NO: 4188357 - RNA, 62 nt, Human
agcagagggagccagcagcccgcgguuggcgcugaggcccggcuucugaaaucccaucuguu

SEQ ID NO: 4188358 - RNA, 86 nt, Human
agcagagugauaccgucacauuuaaugauccuacugugaauucaagaauucacgaugaaaguuggauugagcgguauuuugguguu

SEQ ID NO: 4188359 - RNA, 78 nt, Human
agcagcaaauggcuggauuugauccaugggcuguaguuuccugaccccugguauaaaccauuauuuuuugugcaugcu

SEQ ID NO: 4188360 - RNA, 59 nt, Human
agcagcaccuggcuaucugaucccaucuuauggggucaaguaacaaaucaggagcuguu

SEQ ID NO: 4188361 - RNA, 69 nt, Human
agcagcacgggccagucuucuagaaagauugucuuuccgacgcuuccuguaggcagguccaaggcuguu

SEQ ID NO: 4188362 - RNA, 58 nt, Human
agcagcagcucuguugcccuacuccugggguacacuuauuugcagagccuuuguugcu

SEQ ID NO: 4188363 - RNA, 58 nt, Human
agcagcaggaggccauugucuuuaaaagagaaaugaauggcccaggccuccuguggcu

SEQ ID NO: 4188364 - RNA, 58 nt, Human
agcagcagguccagcuuaggcuccagagccuccugcuccucaagugccuccugcugcu

SEQ ID NO: 4188365 - RNA, 66 nt, Human
agcagcaugauuggcauacuuucuauauucaaugcauauugcauugauauguauaauuauauugcu

SEQ ID NO: 4188366 - RNA, 55 nt, Human
agcagccccucggcgggugcgcccggcaaaacccaccagcccgccgggggcuacu

SEQ ID NO: 4188367 - RNA, 69 nt, Human
agcagcccucauggaguucuuuaaauucacagagcucugugccaccugagggacucuagacuugcugcu

SEQ ID NO: 4188368 - RNA, 68 nt, Human
agcagcgggucugcaagccuucccuggggccugcagagcuagaaagggaggcccagcagacuggcgcu

SEQ ID NO: 4188369 - RNA, 61 nt, Human
agcagcuacacaucugugcucugcuagcaagcaugugggcucuguggaugugagagcugcu

SEQ ID NO: 4188370 - RNA, 62 nt, Human
agcagcucacaggauuccugaagauguaacaauuggcucuagggcgccugugcaugcugacu

SEQ ID NO: 4188371 - RNA, 74 nt, Human
agcagcucaggucuucagcagaagcagggagguucucccagugguuuuccuugacugugaggaacuagccugcu

SEQ ID NO: 4188372 - RNA, 77 nt, Human
agcagcuuuaaacccuccagccucagaugacgguacugguacuuugguauugaagcaucuugguggauuaagguucu

SEQ ID NO: 4188373 - RNA, 82 nt, Human
aggaauuuuuaucuggaagaguaauauaaauuagcuuugacugccaguuuccacugauuauuacuuuccaggcggaauuccu

SEQ ID NO: 4188374 - RNA, 70 nt, Human
aggacaaagcccuggaaagaugaagauggauucucagcccggcucugucauccucccagggcugugaccu

SEQ ID NO: 4188375 - RNA, 118 nt, Human
agcgacucuuggggacccuccaccuggggucacacacagccuggcuucaagucuuggccacggcuuaccagcugugugaccuggggugagauagcugggcuuuucagccugagucucu

SEQ ID NO: 4188376 - RNA, 127 nt, Human
agcgagaagcauuuaguacagaauuuaagguggcacucacucucagagucugcaaaugccauccuacucucuugcaagacccugagagugagugacuccuuaaauuuucuguauuuggccucucacu

SEQ ID NO: 4188377 - RNA, 59 nt, Human
agcgagagagagccagcagccaagugcauccccuguaucccagcuggcuucuccuugcu

SEQ ID NO: 4188378 - RNA, 101 nt, Human
agcgagaggccaucucuuccugccuuuguaugggcccucacagagccaaucucccagggccaccagagcagggcaguaagacagcacgaggccgguaggcu

SEQ ID NO: 4188379 - RNA, 101 nt, Human
agcgagucucaugagaucugaugguuuuaaaaaacgggaguuugccugcgcaagcgcucucucucuuugccugcugccauccauguaagaugugacuugcu

SEQ ID NO: 4188380 - RNA, 100 nt, Human
agcgauucuccugccucagccuccugaguagcuggaauuaaaggcacucaccaccaugccuugcuaauuuuuguauuuuuaguagagacaggguuucgcu

SEQ ID NO: 4188381 - RNA, 86 nt, Human
agcggaaagauguuaaauugggggcauuuuaugcuucuugugaaauggcacgaaugauguucucauuuuaaaacaaaguuccugcu

SEQ ID NO: 4188382 - RNA, 93 nt, Human
agcggaugggcuagauauuggcuuucuggcugaauugggcugggccucucuaauaauagcucucagagggaaaggccaauuugcucuccugcu

SEQ ID NO: 4188383 - RNA, 88 nt, Human
agcgguagugaucuggcuugaaggggcaguaacaagacaugcccagguacugggccugcuucucagucagcuuggucaacuucauguu

SEQ ID NO: 4188384 - RNA, 123 nt, Human
agcguaggauaaaauuauacugcuguagguacuuuggaaugacagauaucaauaacaauuuagauaaugaaguguauuccagcuuuauuucaauuuucuccagcuguaaaauucuuguaugcu

SEQ ID NO: 4188385 - RNA, 81 nt, Human
agcguccagucagggcaggagccugguauaggccacugaccacaggacacagccaggucuccugacucacgggaaggcgcu

SEQ ID NO: 4188386 - RNA, 73 nt, Human
agcguuaaggguucacuguaggaaauuuagaaaccucuauucccacuacccagagugaaucucuuaagaugcu

SEQ ID NO: 4188387 - RNA, 68 nt, Human
agcguuagagagcucuagggguggaacugagcaccugcucaugacagccagagcucugaccucgugcu

SEQ ID NO: 4188388 - RNA, 64 nt, Human
agcguugagaauaaauuagcagacauaguaaaaauccaucuacugucugugcuuuuuuagggcu

SEQ ID NO: 4188389 - RNA, 62 nt, Human
agcuaaacauguuggugcuuuaaauugggaaacccaauuuuaaagcauuacaaguuugaguu

SEQ ID NO: 4188390 - RNA, 71 nt, Human
agcuaacugaaagcccugagugccuguguaagaauacuggauuugaacaucacuguagggugaucaggccu

SEQ ID NO: 4188391 - RNA, 68 nt, Human
agcuaagaaacuauugucucugaacuguguuggcucuccacguucagugagacacugguucuauuguu

SEQ ID NO: 4188392 - RNA, 71 nt, Human
agcuaaggaugacuaguacuucugagaaaacagccuagacucaaucagaagaaaaugggcauucauuaguu

SEQ ID NO: 4188393 - RNA, 64 nt, Human
agcuacacugucuuagaaaggggcaugcucaugggcauuuuguucaaaugaagauuguguaguu

SEQ ID NO: 4188394 - RNA, 70 nt, Human
agcuacccgaggacaggcuaaggagugaucauaguuaggagcagcccaauagcacugucaucuggcagcu

SEQ ID NO: 4188395 - RNA, 71 nt, Human
agcuagaaagaucaugcagguuucuccuuucugaaugaacagagugagagaaucugaugcauccauuagcu

SEQ ID NO: 4188396 - RNA, 67 nt, Human
agcuagaacuagggagugaauauuaaaggcaguuggcauuugaauuuaccuugccuauauuuuaguu

SEQ ID NO: 4188397 - RNA, 56 nt, Human
agcuagccagauucuugggcuaaagaguuauguuuagcccaggagucuggcugguu

SEQ ID NO: 4188398 - RNA, 63 nt, Human
agcuaggaaguagaagcuucuggacuugaaaccagauuuugacuggcuuuaacucuuguagcu

SEQ ID NO: 4188399 - RNA, 68 nt, Human
agcuagggaguggcagagcugggauucaaacccagguagucuggucccagagccucugccacucugcu

SEQ ID NO: 4188400 - RNA, 71 nt, Human
agcuaguguuuauggagugcuuaccugccagacacuguucuaauaagcauuuuauguggauucacucagcu

SEQ ID NO: 4188401 - RNA, 57 nt, Human
agcuaucuccuuuucucacccuauaaucacgggcaucaaagggaaguggagaaagcu

SEQ ID NO: 4188402 - RNA, 64 nt, Human
agcuauuguaaggauguuuauuguuauaucacuguggccuuaaucuguaauuuuugcaauagcu

SEQ ID NO: 4188403 - RNA, 84 nt, Human
agcuauuuggucauguucaguguagacagagcauugcauuaagacacaaguuaaugguacugccuggagaugaaucaauuugcu

SEQ ID NO: 4188404 - RNA, 57 nt, Human
agcucaaaccuuuggcacuauuaaauccuaaaagucaucugccaggagguuugagcu

SEQ ID NO: 4188405 - RNA, 60 nt, Human
agcucaaacuucagcuaugccuugaaaggcauuaaggcauaaggaagauuuggauaggcu

SEQ ID NO: 4188406 - RNA, 83 nt, Human
agcucaaacuugaagacauguuuuuaauauguaaauguguaugaauggauacauacaagauguguuuaaaaucuguuugagcu

SEQ ID NO: 4188407 - RNA, 55 nt, Human
agcucagaacugcagacaugugcgugcucauguuuaugucaguagccuuuguucu

SEQ ID NO: 4188408 - RNA, 84 nt, Human
agcucagaacugcaggguggagcggaagcggagacaaugcugacuguucucugucaucucaccuccaaucccugccccugugcu

SEQ ID NO: 4188409 - RNA, 62 nt, Human
agcucagccacuucccucuggucagaggcuuggcuacugaccagaccccaggaggcugagcu

SEQ ID NO: 4188410 - RNA, 64 nt, Human
agcucagguuuaagcgacuggaaucauuccaacaugauuccugguggcagaaacaugacaagcu

SEQ ID NO: 4188411 - RNA, 64 nt, Human
agcucauuaaggcuggacaaggcuuggggacuguauuaagcugcagguuugucuagucugggcu

SEQ ID NO: 4188412 - RNA, 71 nt, Human
agcucauuuuaccuucuuguacaagaaagaagugcauuucuacaucugaagagcuuugcaagagggaaguu

SEQ ID NO: 4188413 - RNA, 56 nt, Human
agcuccagaagccugcaagguacuuggcccgaguaccguggcaaacucugugggcu

SEQ ID NO: 4188414 - RNA, 73 nt, Human
agcucccaaacuauaaacaaguguccuuuucacagucuacuuaaaaguggcacgcuuuuuggaguuuugagcu

SEQ ID NO: 4188415 - RNA, 74 nt, Human
agcucccaggaccaaggugcacagaacucugucuccuagagcacagacugagucaucuucuuaaaccuuaggcu

SEQ ID NO: 4188416 - RNA, 58 nt, Human
agcucccggguagaagccacucaugagacacagcaguguggccuuuuggcuuggagcu

SEQ ID NO: 4188417 - RNA, 91 nt, Human
agcucccugcuuggcccugcuguaucaucugcuucuuugggggguaguaaagauggugcagugggcuggaauaucagcuggaaguagagcu

SEQ ID NO: 4188418 - RNA, 66 nt, Human
agcuccuagguagcaggaauaaaaauguacccaguuuccugacucagggguuccugauugccugcu

SEQ ID NO: 4188419 - RNA, 61 nt, Human
agcuccugucucuguuaccacauuugugcacaugcaugugugugugcaggagagagaggcu

SEQ ID NO: 4188420 - RNA, 60 nt, Human
agcuccuugguuggcccugcaugaaggacaguggccuucggugggguaccuaagguagcu

SEQ ID NO: 4188421 - RNA, 56 nt, Human
agcucgauggccugaauagggggucuaacucucccccugcuuucaaccuucuagcu

SEQ ID NO: 4188422 - RNA, 90 nt, Human
agcucggugaugauaauuagcuauaguaugucugcuuuucgcauagugaacgcauccauuucuaaugguuccuaauuauugugacaugcu

SEQ ID NO: 4188423 - RNA, 58 nt, Human
agcucuagaccuguucccuaaagaaaacuaaguucacagggacacacaggauggggcu

SEQ ID NO: 4188424 - RNA, 58 nt, Human
agcucugagaaaguuagaaaguguagggaaauacacuuucuaacuuugcucuuaggcu

SEQ ID NO: 4188425 - RNA, 125 nt, Human
agcucuggcauccaggagccucaagggccuuuuaagccacuucccagugauugaacaucccugggcauacagcacaggaugaggcacugggggaagcugguccuggcccaggccacaaaagagcu

SEQ ID NO: 4188426 - RNA, 67 nt, Human
agcucuggggccugucccacauuaggugauauccagacauccccagugggagggagcccccagugcu

SEQ ID NO: 4188427 - RNA, 56 nt, Human
agcucuguguccagugcucgcuccccacagcgccccgcaacucacccacagcagcu

SEQ ID NO: 4188428 - RNA, 71 nt, Human
agcucuuguuuuauuugccuauuacuuugaaccauuucuguaucaaagucauggcuaguaaugaaagagcu

SEQ ID NO: 4188429 - RNA, 120 nt, Human
agcugaacagggaaggagaaguagccuagcaagauuauaacuucaggcacaguuucagaacauguagcuucagucugaucucauaggagauuucuggauuuugccucaucccagucugcu

SEQ ID NO: 4188430 - RNA, 63 nt, Human
agcugaccauauuguguuguaacuguguaggccaauauagcaaggacauaauaugcuacaguu

SEQ ID NO: 4188431 - RNA, 57 nt, Human
agcugacugaugaagaggccuucaggagaacuugauagaauucuauucauguuaguu

SEQ ID NO: 4188432 - RNA, 63 nt, Human
agcugagacacggagaggcugugugauuuuuggcugaucacacagccucucugugucucugcu

SEQ ID NO: 4188433 - RNA, 95 nt, Human
agauaguguguugguggaaaaguaauugugguucuugccauuagguaaugguaaaaacuguaauaacucuugccccaaucuaauagauacagucu

SEQ ID NO: 4188434 - RNA, 69 nt, Human
agauaguuuuauugagcagcagugcuucuagaggcaucacaggauccucugauaauuguuaaauuauuu

SEQ ID NO: 4188435 - RNA, 80 nt, Human
agauaguuuuuacuuaguguggccccaagaggaucugggggacccuucaggaacccugcgccauacuuugaggccuaucu

SEQ ID NO: 4188436 - RNA, 70 nt, Human
agauauauuugucaagagagggggauagaacauauguaauaucacuuagcucucuugauugaugaugucu

SEQ ID NO: 4188437 - RNA, 72 nt, Human
agauaugcagagugaggaagaacugcaugaauacugaucauuggugccgaggacgucuuuacucuggaaucu

SEQ ID NO: 4188438 - RNA, 67 nt, Human
agauauuacuugugaaauaguaucugagugcuugcuguaugccagggacuguuucaccagauuguuu

SEQ ID NO: 4188439 - RNA, 56 nt, Human
agauauuccucagacccucauugugagugcuugcugagugucuguggugaaugucu

SEQ ID NO: 4188440 - RNA, 78 nt, Human
agaucaaggacaaauuggguaugagcuaagaaggccgugggugaucucagcaaauaccuaguuuggccucuguggucu

SEQ ID NO: 4188441 - RNA, 57 nt, Human
agaucagaaauguaauggcagugccuucaaagaacauagugccguauauucuguucu

SEQ ID NO: 4188442 - RNA, 57 nt, Human
agaucagugcuucauagcccugguagcacauuacagucaccaggggaagccugauuu

SEQ ID NO: 4188443 - RNA, 98 nt, Human
agaucaucucuacuucagguuuuaccauguaaugggcacucucaaguuuauuccugcccuaaaaaugcaugcagcuggugauaagaagagacugauuu

SEQ ID NO: 4188444 - RNA, 123 nt, Human
agaucaugguucaguuucuugcagauaaauauuugaguucuaguggcugcagauugaaggaauaccauucauacuuaucaaauguaauuuuuagaaagaucucaaguauuaucuaccacaucu

SEQ ID NO: 4188445 - RNA, 58 nt, Human
agaucauuaaccaccuguucugccugggagcugauggcagcagcagcuggguugaucu

SEQ ID NO: 4188446 - RNA, 130 nt, Human
agaucauugcugcugauugggauuugcaucauguggggcuuaccagagugaugugauagaaaguuuuuguucuagagcuguucacaugcuacugagccagaccuugcagcccccgaggcaguuuccaucu

SEQ ID NO: 4188447 - RNA, 60 nt, Human
agauccacucgaauccaggaauguguauuuuauuauuaaucuuuggucuugagugcaucu

SEQ ID NO: 4188448 - RNA, 72 nt, Human
agaucccaagagcuacucaauggaaucagcuaguuaccuguuuuuccgaguguggccuuauggcaaagaucu

SEQ ID NO: 4188449 - RNA, 57 nt, Human
agcaucagcagacucucagcuaaaagauaccauuuaaguugaaaguaauaugaugcu

SEQ ID NO: 4188450 - RNA, 62 nt, Human
agcaucagucucagcaccuagucacauguguuuuucguguuuucguggaugaggcugguucu

SEQ ID NO: 4188451 - RNA, 82 nt, Human
agcauccucaggaguuuuaaaucuagcauggcauucuguauccccuucuagcaaaucaacauaaagaacuucugagauugcu

SEQ ID NO: 4188452 - RNA, 67 nt, Human
agcaucuauauauacguguccaguagaagauauaucuucugcauccuaugaucgcauauguagagcu

SEQ ID NO: 4188453 - RNA, 97 nt, Human
agcaucuggaaaauaccuagauuuuggugggacuggguggggcccuaggugggcucccagcccccgagugucuggaaaugaugguaugagggaagcu

SEQ ID NO: 4188454 - RNA, 75 nt, Human
agcaugaaacaaugugaaguugcugagauggguaacuagucuuuuuuauguuguuuauuguuucacuccccugcu

SEQ ID NO: 4188455 - RNA, 69 nt, Human
agcaugaugaaguggaaauccacggauugaaggaauucucuuuucuuccuggauuccuacuucagugcu

SEQ ID NO: 4188456 - RNA, 59 nt, Human
agcaugcaauuaugguauuagauaaagcauacaguuuggucuaaaaccaagaugcagcu

SEQ ID NO: 4188457 - RNA, 57 nt, Human
agcauggacaguggcagcaguggcaacugugauggcugcugauguucgcugcaugcu

SEQ ID NO: 4188458 - RNA, 55 nt, Human
agcauggcauggggucuguggaugcauacggugcaguagacucuaauguuaagcu

SEQ ID NO: 4188459 - RNA, 61 nt, Human
agcauggggcagguggggggcugcagccccagggaucugagcuuccucccugcauccaucu

SEQ ID NO: 4188460 - RNA, 56 nt, Human
agcauguaaagcucuuagcaccaagcuugguguauggugugugcuccaugcaugcu

SEQ ID NO: 4188461 - RNA, 65 nt, Human
agcauguaacagaguucuuaggguggaauauguuuuguuuaauaccuugaucucucuugucugcu

SEQ ID NO: 4188462 - RNA, 82 nt, Human
agcaugugaaagcacagguugaggauuauucuggaauuuucuucaggucuuuguuguuugcuugguugcuuguuugcuugcu

SEQ ID NO: 4188463 - RNA, 93 nt, Human
agcauuaauaguggcuugcuauggguauaaacagguccuaaauccuuuaaacaaaugguuacaaucugauugucucaucuacuuauuggugcu

SEQ ID NO: 4188464 - RNA, 61 nt, Human
agcauuccacacugaagucugcuuuucuugaagcaaaaauucuaguguccuuggacuugcu

SEQ ID NO: 4188465 - RNA, 72 nt, Human
agcauucccuucugggaaaagggagccuuauguaguucacaaaaguccuuuauccuaaaagguccaaaggcu

SEQ ID NO: 4188466 - RNA, 62 nt, Human
agcauucucgucugaaucuggaaggggucuucuuuauccccagauuugccacgagagaggcu

SEQ ID NO: 4188467 - RNA, 57 nt, Human
agcauugguggccagagugccugguuccaaguguggcucugcugucuaccagcuguu

SEQ ID NO: 4188468 - RNA, 60 nt, Human
agcauuguccauaauuugaaagguaaaccuaguuguugaguacuuucagauggauaugcu

SEQ ID NO: 4188469 - RNA, 56 nt, Human
agcauugugagcucaagaguacccaagaaagauguggccucuaagcucacgaagcu

SEQ ID NO: 4188470 - RNA, 70 nt, Human
agcauuuagcagcccaguuucuggccaaugugugugcaaguugguuuuguagugacugggcuguuaagcu

SEQ ID NO: 4188471 - RNA, 56 nt, Human
agcauuuagucuuuauugcagcucaaggaaauuuucugcugugguuaggccaugcu

SEQ ID NO: 4188472 - RNA, 62 nt, Human
agcauuucuacugugucagaaauucucaaacuuuagaguguaacugaaacacagagagggcu

SEQ ID NO: 4188473 - RNA, 55 nt, Human
agcauuuucugagaguauagaucucaugaaucagauuugcugugcagaugaugcu

SEQ ID NO: 4188474 - RNA, 77 nt, Human
agccaaaacacagagauguaaaguuaggcgauuauguuagguuguccuauguguuauauuaguaucuguauuugucu

SEQ ID NO: 4188475 - RNA, 56 nt, Human
agccaacauaaaaagcuuucaauuuuccuugaagauucuaagugcuuguggugguu

SEQ ID NO: 4188476 - RNA, 59 nt, Human
agccaacuuggaaagucagauuuaauucuucugugguuauuugacuuuccagguuuacu

SEQ ID NO: 4188477 - RNA, 130 nt, Human
agccaagcaggccggacuuuucccuggcaacccucucgccucaauucuggcagcccugugcgcuagagugaaccaagugugggcuggggagucagguuuaauuucuaguuuuuuaccaucuauguagcau

SEQ ID NO: 4188478 - RNA, 61 nt, Human
agccaaggcagcuagagcucugcagagcacgugccuucuugcucucagcugccugcugguu

SEQ ID NO: 4188479 - RNA, 60 nt, Human
agccaaugccagagcccaaguauuuccaguucagauguguuuuuauucuggcaugugguu

SEQ ID NO: 4188480 - RNA, 69 nt, Human
agccacagauuuggaggccucaccccagacugaacagucucugaggguggagcuccagaaucuggaguu

SEQ ID NO: 4188481 - RNA, 60 nt, Human
agccacuugugaugcuggggaaguuccucuacacaaguuccccuggugccacgaucugcu

SEQ ID NO: 4188482 - RNA, 88 nt, Human
agccagagauaccauugcuaaaauuuugggcauauaucacauccuucuagaguuuugcuauuuguauuuuuaaaaauuaaagggggcu

SEQ ID NO: 4188483 - RNA, 71 nt, Human
agccagagugcccuucaugaagcaagaggucaauagcuuuugguugaaugaaugaagugguaccuauggcu

SEQ ID NO: 4188484 - RNA, 107 nt, Human
agccagcaagaaagcgucuucuggaaucagccugagcacaaggccaggcuuuauugcuucuggcugugcggccucgggcagagcuucaguuucuugccaucauggcu

SEQ ID NO: 4188485 - RNA, 106 nt, Human
agccaggagggcugacagugcuggaguggaccaguccgcggagcuccgggggucugaaugcuccagggguguguggauggcaauggccaggauggcccuccugguu

SEQ ID NO: 4188486 - RNA, 55 nt, Human
agccaggaucacccggggcugucugcauacagacuucucaggggaguucucagcu

SEQ ID NO: 4188487 - RNA, 57 nt, Human
agccaggauuggcugagccuuagccaggauaccaccuggcauucagccacaucggcu

SEQ ID NO: 4188488 - RNA, 57 nt, Human
agccaggucaggaaaggucccagggcgcagggguggcugcuuuuccucaucauggcu

SEQ ID NO: 4188489 - RNA, 58 nt, Human
agccagucagaggcucccccaagccccuuuuucuucuuuggggccuguuucugugguu

SEQ ID NO: 4188490 - RNA, 82 nt, Human
agccaguucugaggcuccugcuguccuuugaagccucugcagggcaguagcagggaggagggcaggcagagcaggccugguu

SEQ ID NO: 4188491 - RNA, 129 nt, Human
agccaucaucuuagaaaguaagacuggaaaaacggagucagaacugggaaugcugucccaucagagcuuguuggggggcacucacgugcucuguuuugccuguggagacugcugguaggaaugaugauu

SEQ ID NO: 4188492 - RNA, 92 nt, Human
agccaucuaacugcaaaggcaucugggaagguucuuugaugccaaugaagaaaacuaaauacgcuuugccucaugucuuuagcguuauggcu

SEQ ID NO: 4188493 - RNA, 77 nt, Human
agccaugaaaacagcuguauacuguagcuguaaauaguguuuacaguuauauacauguagcuguuuguaacauggcu

SEQ ID NO: 4188494 - RNA, 93 nt, Human
agccaugcaagguaugggauugaaggagagaaaggcaauucuggcuucauggacuuucaaaugcaugucuuuccucaggccuugaacguggcu

SEQ ID NO: 4188495 - RNA, 65 nt, Human
agccaugccuuuuguaaaagcuggaucucuuauuaagaagaucauagcacaaaagugacagggcu

SEQ ID NO: 4188496 - RNA, 56 nt, Human
agccauggugggaguguuuacaugacagaaaucaguaaacacuacaaaucaaggcu

SEQ ID NO: 4188497 - RNA, 103 nt, Human
agccauguguuuuccuuugauauccuuauucauuaggguagugggaagauccagcccagaaaugaaaggaugauuuuuuaaaguuaccagacucaaccuggcu

SEQ ID NO: 4188498 - RNA, 82 nt, Human
aggagugagggccuuggagcccagcaggccuggaguggaaucccugcuugguuacugcauagcuccaaguugcccccauccu

SEQ ID NO: 4188499 - RNA, 55 nt, Human
aggaguggguggcaggguuguagugcuaagugcaccauucuuuacacuuauuucu

SEQ ID NO: 4188500 - RNA, 78 nt, Human
aggaguugaagcuugaggugggccuugaaaaauggugaguacauuuguuauucucugccuacaagucuacaaccuccu

SEQ ID NO: 4188501 - RNA, 59 nt, Human
aggaguuuagucacuugugccugagggguggcacagcccucccugggugacgggcuccu

SEQ ID NO: 4188502 - RNA, 65 nt, Human
aggauaaaggucauuauucccauuuuacagcugaagaaauuuauaagggagaaaaucuuuauccu

SEQ ID NO: 4188503 - RNA, 87 nt, Human
aggauaacagguguauagucacuguuuucucagagcuggucacaugaaaggagaaagcagugaugcauacagcuguauuuauauccu

SEQ ID NO: 4188504 - RNA, 130 nt, Human
aggauagaugaaauuuuuuaguagcuuguuucaagcaauauuuuagaaagguaucuguggaagucaagaaaacagauuuaccauugaaugaauaugcugauuaaucugcuguuuaauuauauauagacuu

SEQ ID NO: 4188505 - RNA, 84 nt, Human
aggauagcuguuggagagaacagugucugaaagcguuaagagaauaugccaugagaaaaugcucauuuaagaauuaguuauccu

SEQ ID NO: 4188506 - RNA, 60 nt, Human
aggauauaaaguagucuugcugcuuaagcaaaugaggcauuaaggcuguuuuguauuccu

SEQ ID NO: 4188507 - RNA, 74 nt, Human
aggauauuuugggggguugaggaguagauaguagucuaaauaugcuuacuaauuggcuuacccaaaggaaaccu

SEQ ID NO: 4188508 - RNA, 84 nt, Human
aggaucacuugagcccaggaguuggaagcugccaugagcuguggucacaccauugcacuccagucugggccauagagugagacu

SEQ ID NO: 4188509 - RNA, 58 nt, Human
aggauccagccaaaauguaccagaagaagcuggcagagcaugugugggacuggauccu

SEQ ID NO: 4188510 - RNA, 69 nt, Human
aggaucuucaaguaaguugugguuuccuucaaaauuaauuuagaaaucacaaacgaauugauggaaccu

SEQ ID NO: 4188511 - RNA, 66 nt, Human
aggaugacuggccacucagggaugcaggaaguggcuuuucugcauggccugccuggugagucaccu

SEQ ID NO: 4188512 - RNA, 65 nt, Human
aggaugaggauggggcguggugugccucugggcgaggauggcagcccaccagcccacgucuaccu

SEQ ID NO: 4188513 - RNA, 62 nt, Human
aggaugauaaaauuauggcacuuugaauggugacagacacugagguuucauuuuaucgcucu

SEQ ID NO: 4188514 - RNA, 57 nt, Human
aggaugaugucaaaacagucacagaaaagaugucaguggaaauauuggcagcauccu

SEQ ID NO: 4188515 - RNA, 59 nt, Human
aggaugauuggaugccugcucaaacacauguuucucugucugcacccaaucaauauccu

SEQ ID NO: 4188516 - RNA, 60 nt, Human
aggaugcaguugugguuuuaucucuagaaagggcaugugucccucagucugugcaauccu

SEQ ID NO: 4188517 - RNA, 58 nt, Human
aggaugcugggcauagucugauucuggcuuguagaagcacgguuuugucuagcacacu

SEQ ID NO: 4188518 - RNA, 86 nt, Human
aggauggacagagggcagugauggggaucucacuggccagagacaucucucuagugcucuaugcugacuugacucuguuccaaacu

SEQ ID NO: 4188519 - RNA, 58 nt, Human
aggauggccagucugacuaguuuccucauaaaaagaaagcagucugacugguccuccu

SEQ ID NO: 4188520 - RNA, 87 nt, Human
aggaugggugaugggcuggggagaaagcaugccugugaccugcagcuucacaaguucucacuuuagccuugaccaccgagacauccu

SEQ ID NO: 4188521 - RNA, 60 nt, Human
aggauguauaaguuuuaugagagacuuugcuaaaagccuugcugaaaucuaugacauccu

SEQ ID NO: 4188522 - RNA, 119 nt, Human
aggauguauugauguuucauguuguaagugcuuucagugugcucuuuuaacauuacuuaguuuaaaaugaaaagauaaaaugaaaagauacugcaaacauaguaaucaaguuaacuccu

SEQ ID NO: 4188523 - RNA, 84 nt, Human
aggauguugaguaucaaugcuuuaacagaaaucaccaccugcaugaggaaaagguaugacaugaagcauggauaacucacaccu

SEQ ID NO: 4188524 - RNA, 57 nt, Human
aggauguugcuauuggcagucuagcgaguagaggccggggaugccacugaacauccu

SEQ ID NO: 4188525 - RNA, 81 nt, Human
aggauucagcucaggcucuccaugcuccaaaaccuucccaaggacaggggcccuggauggggagcccuccucugugauccu

SEQ ID NO: 4188526 - RNA, 96 nt, Human
agggcccuguccugccuacuccuguucccgccaggcacucgagcgagagcucuguggcugagcagcagagagcuggguuggacuucaaggggcucu

SEQ ID NO: 4188527 - RNA, 67 nt, Human
agggccguguugggugucuuugugucaucccaugaauaauaucacagcuacaccccuuuacaguccu

SEQ ID NO: 4188528 - RNA, 74 nt, Human
agggccugcaggccuuauguaaacacucaggugccugucuguacaaauguggggccucgacaccggcaggcucu

SEQ ID NO: 4188529 - RNA, 55 nt, Human
agggccugggaagaggaacccugacugagcaacaggaauccauuccuaaggcccu

SEQ ID NO: 4188530 - RNA, 79 nt, Human
agggcggcaggaacucagagucuagucucuuggcucgggcgagacacagagaccccuucuggggcccagucuguccccu

SEQ ID NO: 4188531 - RNA, 57 nt, Human
agggcuacuuuccugagucccuguucacaaaaucgcccggacccaggaaagaguccu

SEQ ID NO: 4188532 - RNA, 55 nt, Human
agggcuaggaauggaacuggagugccgaacgacagcugucauacucuuagcuccu

SEQ ID NO: 4188533 - RNA, 57 nt, Human
agggcucagcaucucauucuguuuagcaacaguugagagacaugggaucuggguucu

SEQ ID NO: 4188534 - RNA, 55 nt, Human
agggcucauaauuccugacuucaaaggcuacaggaagcaggacauaugaugcccu

SEQ ID NO: 4188535 - RNA, 80 nt, Human
agggcuccagagccuuuccacccacuuggcuuacaggaaccgcaacugggagaaagaggugccagggguuuuguagcucu

SEQ ID NO: 4188536 - RNA, 60 nt, Human
agggcucuggggccuccucccuugggcagcccaggggauacuuggcugccccauggcccu

SEQ ID NO: 4188537 - RNA, 57 nt, Human
agggcucuuuaggccgaggccaggcuccugucugcuggccucaagucugagggccuu

SEQ ID NO: 4188538 - RNA, 72 nt, Human
agggcugagggagccgccacagacugggacccaaucccacguuuguugcgugcucucaacuuuuuagccucu

SEQ ID NO: 4188539 - RNA, 65 nt, Human
agggcuggaggguacuaguuuaugcucuuuuuucuuauguuaaauuuuuuuugcccuucugccuu

SEQ ID NO: 4188540 - RNA, 55 nt, Human
agggcuggaugcucuggucuucuaaaagaaagcugggcagggcaucaacagcucu

SEQ ID NO: 4188541 - RNA, 130 nt, Human
agggcugggaagcaccucccugagaugcaggcucccacccuccugcagcugcaguaccugaugagcaggauggcagugucaugcugcagggggugggcgucucccuucauguugaugcuuuucugccacu

SEQ ID NO: 4188542 - RNA, 57 nt, Human
agggcugggaauguguuaggagaaacuguccuggagacucuguaacacucuagccuu

SEQ ID NO: 4188543 - RNA, 86 nt, Human
agggcuggucugaggcgggcaauggggauccugaugagcagaauaagagcuuagcagcaugaucccaguugauugcccauagcccu

SEQ ID NO: 4188544 - RNA, 62 nt, Human
agggcuguggaaaugaaauaggucugggugacaccugaggucaugcauuuccaacaaguccu

SEQ ID NO: 4188545 - RNA, 59 nt, Human
agggcuuguuuccuguuucauagaaggugucacaugguggaaggggcaaacaagcuccu

SEQ ID NO: 4188546 - RNA, 76 nt, Human
agggcuuuuuguuuaugaacucuauuuacccuacuaaaccacagguuggguagucuaaucuagaguuaaacaccuu

SEQ ID NO: 4188547 - RNA, 80 nt, Human
aggggaaaaguaagcuggggcaagacaacguuucucaucccugauugaaauguuccuauuuacccccuaacuuauaccuu

SEQ ID NO: 4188548 - RNA, 117 nt, Human
aggggaacagguuaggaucccgcuugauggccucagcauggagcuucggggauuccaguugcaguuccuccagagcuuccugcugggcuucuagcauagcccugauggugucccucu

SEQ ID NO: 4188549 - RNA, 73 nt, Human
aggggaagcugcucucacaacacuguuaauguuucauuaccaagacagaugugggugacagcagcauucucuu

SEQ ID NO: 4188550 - RNA, 88 nt, Human
aggggaauugcuugaacccaggaggcagagguugcagugagcugagaucaugcuacugcacuccagccugccaacagagcaagacccu

SEQ ID NO: 4188551 - RNA, 65 nt, Human
aggggaccuuugucucaugucacauuaaaugucuugcuuggugguccaucaugcagagcuccccu

SEQ ID NO: 4188552 - RNA, 59 nt, Human
aggggaggguguucucccaagaacacaggcauccugguucugaaaaagcagccuucccu

SEQ ID NO: 4188553 - RNA, 70 nt, Human
aggggauccuugggcuggcagagguggucuuuggauaugcaacggcuacgugcuggccuacagagccccu

SEQ ID NO: 4188554 - RNA, 73 nt, Human
aggggaucgaaggacaagcuuaguccacugguccagagggaaucaguacagcuuagucuucucaaaacccccu

SEQ ID NO: 4188555 - RNA, 57 nt, Human
aggggcacgcgcguuucuuggcuuagaguugugagaucuaagauggcaagugucucu

SEQ ID NO: 4188556 - RNA, 59 nt, Human
aggggcacuggcagucggggacgcugggggucagcuccuggcguccugccccugccccu

SEQ ID NO: 4188557 - RNA, 65 nt, Human
aggggcauguggcagcauggugggaugcuuugguaaugaguucaccacugaggccacguggcuuu

SEQ ID NO: 4188558 - RNA, 58 nt, Human
aggggccauguaaguguaucacauccaacauaaaagaugcguaccugcaugugccuuu

SEQ ID NO: 4188559 - RNA, 71 nt, Human
aggggccauuuguccagggaauagaauuaaaaucaauaauuauuccuuucaccuggcacaugugagccucu

SEQ ID NO: 4188560 - RNA, 84 nt, Human
aggggcccccucuacuuuaacauggaggcacuugcugugacaugacaaaaauaagugcuuccauguuugaguguggugguuccu

SEQ ID NO: 4188561 - RNA, 56 nt, Human
aggggccucuuuguugcccagguuaguacugaacuccugguucaagugaugccccu

SEQ ID NO: 4188562 - RNA, 89 nt, Human
aggggccuucuguuuuccacaccucagucacccuacuaggaguagacaaaacuucucaguguguugagaggucuggagaaauggccuuu

SEQ ID NO: 4188563 - RNA, 61 nt, Human
aggggcggccugccugaagcagagcuccaaaauuggcaaccuaggccucgcagccgccuuu

SEQ ID NO: 4188564 - RNA, 80 nt, Human
aggggcuaagaaucaagaaauagggaucaaaacaauaccaggaauuugaaauuccuugaaaaucuugguuuagagucccu

SEQ ID NO: 4188565 - RNA, 80 nt, Human
aggggcuacagaaaggcauaggacaaaucagugauguugaaccacaucuuacuaagaugcuuugcuugcuguggcacucu

SEQ ID NO: 4188566 - RNA, 96 nt, Human
aggggcuacuucugugucauguuucugagucugguuagaguggugauuaaucaccuggcucuggggcggacagcuggcauuugaauccuggcuccu

SEQ ID NO: 4188567 - RNA, 69 nt, Human
aggggcuaggagugacacaauggggcagagccaguaggcuguguccccagcacucacucuccagugucu

SEQ ID NO: 4188568 - RNA, 62 nt, Human
aggggcugccuggcuuggcacucucggggccgaggggaaaguacagcagccagggggccccu

SEQ ID NO: 4188569 - RNA, 123 nt, Human
aggggcuggccuccagcuggugcaauacagaugcucugaugucugggugcuuugauaaaauggagaggcaugccagaauugucagugcaucuggacuagguauugguaaacuauugggccccu

SEQ ID NO: 4188570 - RNA, 55 nt, Human
aggggcuucccuuccuggguagcaagggaaagacuagccaggaggaggggucccu

SEQ ID NO: 4188571 - RNA, 121 nt, Human
agggggaaaaugcaaauaauuggaaauaaauguucggugcucuaaauucaggagaggcuucuuccaccacuuaauugugcccgugacauuucauuucgaaugcagaauuuauuuucucucu

SEQ ID NO: 4188572 - RNA, 85 nt, Human
agggggaaauuucucuagaggugggacucaggaauuuugaaaucucccuucacaaagucucaucuuuaaaugaaaauuuccucuu

SEQ ID NO: 4188573 - RNA, 60 nt, Human
agggggcauuaugaggcuuuuccacaccaucuaugugccugagcacuugugguccucccu

SEQ ID NO: 4188574 - RNA, 56 nt, Human
agggggcuggagacaccuccucagggaagcuuuccuucuggugucccacacucccu

SEQ ID NO: 4188575 - RNA, 69 nt, Human
aggggggagcuaggagggaggucucuucugucucccuaugaccucuucaucucuccuggccaccccucu

SEQ ID NO: 4188576 - RNA, 130 nt, Human
aggggggcuauuccugggguucugggcccagaugggcaaaugggucuguaaggcagacuuuuccaggaggagggugcagacccuuugcaaguuguuuggggacagagcuuaguuugcaucuggccuucuu

SEQ ID NO: 4188577 - RNA, 75 nt, Human
agggguaaagagggcugaaguguuuuaugaguuagcccauuccuugauaacuucagcuuuuaaguuuugccagcu

SEQ ID NO: 4188578 - RNA, 61 nt, Human
agggguauugaaaguucacagggcccuuccucuauucuuccuguauuaacuuuugcaccuu

SEQ ID NO: 4188579 - RNA, 67 nt, Human
aggggucaagcucagaauccuagaaugccauaccuggggauugucuaggcauuugaguuugccaccu

SEQ ID NO: 4188580 - RNA, 78 nt, Human
agggguccauuuuuauauguuacucccucuagcaagguugaauaaauaugccagugaaacauggaagaauggauuuuu

SEQ ID NO: 4188581 - RNA, 83 nt, Human
aggggucgguccaugaguauuuucccuaucaaugucacuggucuccaaggaacaauaggugaaugugcuugaaaggcuccccu

SEQ ID NO: 4188582 - RNA, 127 nt, Human
aggggugaaagcuacucagagucagcccaggauccuaggaggcuggcucuugcgacucagcuuggcugccauuaaggccaaggagaaaggccagacucacuaaggaccugcuggcaguaccauccuu

SEQ ID NO: 4188583 - RNA, 63 nt, Human
aggggugagcucucuggguccucuuuuauaggggcacuacucccacucaugaggguucccccu

SEQ ID NO: 4188584 - RNA, 130 nt, Human
aggggugaggcaagugaggugcuuagccuauaaaauuuaagguagcacucacucucagcuguggacccugcacuuguaggacccugagagugagugccaccuuaaacugugucccagaugcuuugcuccu

SEQ ID NO: 4188585 - RNA, 61 nt, Human
aggggugagugucaggccgggauuccucuguacucagggcuccuggcuuuaugcuaccucu

SEQ ID NO: 4188586 - RNA, 58 nt, Human
agggguggccugccuuacucccugaggagcuaccaugggcugggcaggacccaccccu

SEQ ID NO: 4188587 - RNA, 109 nt, Human
agcugauuaucauagauaaaugugucuaauuagucucauuugcugacacacaagccuuuaauugcaaguugaauaauuagacauaucugcauauguaaaugauacaguu

SEQ ID NO: 4188588 - RNA, 65 nt, Human
agcugauucugcuuugauccuugugcuuguugucaaagcgcuugggauugaagagacuguuggcu

SEQ ID NO: 4188589 - RNA, 61 nt, Human
agcugcagagaaaagaggcuggguuuaaugcuccaggucuccucauauucugccucuagcu

SEQ ID NO: 4188590 - RNA, 58 nt, Human
agcugcagagacagcugccgaugcuccgggggcagguaucaguguugucucugcaacu

SEQ ID NO: 4188591 - RNA, 58 nt, Human
agcugcagcccuccugcauggcugccugucacuccagcuaagcagaggagcugccguu

SEQ ID NO: 4188592 - RNA, 58 nt, Human
agcugcaggagucgccuaggauauggcccgucacgucuggggaugacccugcacugcu

SEQ ID NO: 4188593 - RNA, 66 nt, Human
agcugcaggccagggagaauaugaagccacagauggcucaucccaccccugcccuggccgauggcu

SEQ ID NO: 4188594 - RNA, 70 nt, Human
agcugcaggcgccggggccgauccgacuucccgcuuccguccggcuugcggccccucgccuugcccggcu

SEQ ID NO: 4188595 - RNA, 55 nt, Human
agcugcauuuuccuuuuaaucacagcuuaccuccaggcagagggaaaaugcgguu

SEQ ID NO: 4188596 - RNA, 55 nt, Human
agcugcccagguucauugggccauaucacuuuggccaugagugacugaggcagcu

SEQ ID NO: 4188597 - RNA, 111 nt, Human
agcugccggaggccacacagcaugucugaggcauacccaggcccccuaaucaguuucucucuccugcaggggacaggcaaagguaugcuucagucaugaacucaagcaguu

SEQ ID NO: 4188598 - RNA, 82 nt, Human
agcugccucgugaaauggugacagagaggggcuugguauugauuuugcugccuguuccugaucauucuauuaggaggugguu

SEQ ID NO: 4188599 - RNA, 59 nt, Human
agcugccugaagaauuguguugcaaaagauuguauuugcaaucccaguuuugggcagcu

SEQ ID NO: 4188600 - RNA, 61 nt, Human
agcugccuuuugagaaagcucaauuacuuuugaacaaccuaaucauuuccaaagggcagcu

SEQ ID NO: 4188601 - RNA, 65 nt, Human
aggaguuugcaaguuuaacaagccacccaauuauccuggugcaggugguccauuugggaacuucu

SEQ ID NO: 4188602 - RNA, 83 nt, Human
aggauaaauguacuccugucuccacuggcugaaaccaucuggaugguaucacauugucuguagaauaaauaugaguacuuccu

SEQ ID NO: 4188603 - RNA, 63 nt, Human
aggauaaccuaggauuuggaacagugcuguuguuagacagacagugugaguucaggguggccu

SEQ ID NO: 4188604 - RNA, 83 nt, Human
aggauaagagaugauuagaaguacagccuguuuguaaugauaauacucaccagcugugugacuuuuaaugagccucuugaccu

SEQ ID NO: 4188605 - RNA, 113 nt, Human
aggauaauauccaaauuuuacccauguuuaagucuccagaaacugaccuauaguugacccccacuaaauguuucuggagugacuauaacugguagauuuuggcuuaaaauuuu

SEQ ID NO: 4188606 - RNA, 63 nt, Human
aggauaccugcuuaacauugccaugacauuuguaaagugucauggugcuguugggagugucuu

SEQ ID NO: 4188607 - RNA, 61 nt, Human
aggauauaaagguuagaaaaauuggcaaagggcacacuuuguuucauaacuuuuauauccu

SEQ ID NO: 4188608 - RNA, 79 nt, Human
aggauaugugaauacagcaugugcuucuucgcaugugcgugcucauacaaguagaugcacaugcuuauucacguguuuu

SEQ ID NO: 4188609 - RNA, 58 nt, Human
aggaucaagaggcggccggaacccucccugagccgaggguccagaacugcccuggccu

SEQ ID NO: 4188610 - RNA, 69 nt, Human
aggaucaagcagcaacauauaugaaacugugcuucagcaggggaaauacaguuauguuccugggucacu

SEQ ID NO: 4188611 - RNA, 67 nt, Human
aggauccugacuauugaucaucacucaaacaugagccaugcaggagagugagucaguaggguguccu

SEQ ID NO: 4188612 - RNA, 63 nt, Human
aggaugaauauuuagugggauagauggauggauguccuugaccuacccgugaauguuuauucu

SEQ ID NO: 4188613 - RNA, 67 nt, Human
aggaugacuccugagauuucuggcaauugguauuuauucagcagaucagagacuguaggagcagccu

SEQ ID NO: 4188614 - RNA, 56 nt, Human
aggaugaggcuggcaggucuugcagcaaccuugcaagccaggaccaaacucauccu

SEQ ID NO: 4188615 - RNA, 76 nt, Human
aggaugaucuuuccuaacugaauauucuuucaccaacaacagaggaaggagaucagcuuagggaagguuuauuccu

SEQ ID NO: 4188616 - RNA, 59 nt, Human
aggaugcugaagccugggaagugagguacuuauuuggaaauauggcuucuggcaggucu

SEQ ID NO: 4188617 - RNA, 65 nt, Human
aggaugcugcucuagcccauuuccugcuugccacgggguauguggauggggcuggaggucauucu

SEQ ID NO: 4188618 - RNA, 56 nt, Human
aggaugggggaggaaaagagaaaauaaacagaagucgcucucacucgccacauccu

SEQ ID NO: 4188619 - RNA, 64 nt, Human
aggauguaaugcacucccaaagauccaagggaagcccuuggaauaugcaauugcauuucauucu

SEQ ID NO: 4188620 - RNA, 92 nt, Human
aggauguccgagaauggcugugaugccaggcuucuggcagguuccagacuccaucacaagcccagcaucccugcaccagaucugacaucgcu

SEQ ID NO: 4188621 - RNA, 113 nt, Human
aggaugugggugugcuggggaaccugaguucccacuguggauucaucugccaaguggcaggguuugaacgcagguccacauggcucagagcuuuccuccacgccacaaugccu

SEQ ID NO: 4188622 - RNA, 79 nt, Human
aggauuagaauuguagacugauuguugguccuuuaaguaugcuuggaagaaaauucaaucgaguuucaaggcuuuuucu

SEQ ID NO: 4188623 - RNA, 84 nt, Human
aggauuuagggaauaggacuuugguccuagcucuguuaucagcuagcugagcuggacacuaaaggucccuggucuucaaauucu

SEQ ID NO: 4188624 - RNA, 84 nt, Human
aggauuucucuccugcucagaacagccucacaguugugcgaagucagacgugagccuggggccugggcagcggucaucaauccu

SEQ ID NO: 4188625 - RNA, 59 nt, Human
aggauuugaaccuaggcaaucaugagaauggaaguccaugaagccaggaucacgauucu

SEQ ID NO: 4188626 - RNA, 58 nt, Human
aggauuuggaagaccgggucacaagguuuuugcuuugugacuaauaauccacaauccu

SEQ ID NO: 4188627 - RNA, 112 nt, Human
aggcaaacauaguuucacuguucuacugcauuucauaaauuacaauaauuuaugauuuacaaugugcuuaugaaggcagugaucuuuagaagagcuggcuguuauauugccu

SEQ ID NO: 4188628 - RNA, 76 nt, Human
aggcaaauaaguaaauaguucugucaaucucaggggacccuagggugugauuauauuguaguacauuauagugucu

SEQ ID NO: 4188629 - RNA, 68 nt, Human
aggcaaauccuuggcacaguggaauucaacagucaguugacauccugucugaguucaaggugaugccu

SEQ ID NO: 4188630 - RNA, 93 nt, Human
aggcaaaugagaggggcauggggagagaagggcugagcugggcggcagugcacuggggccuccuccaugcucugucuucuguaguguuugccu

SEQ ID NO: 4188631 - RNA, 58 nt, Human
aggcaacaugacucacuugcacaaaucuacaagauaaguuuauuugauuuaugugccu

SEQ ID NO: 4188632 - RNA, 69 nt, Human
aggcaacauuucauaggaucaugggcuuuuugagcuggaagggacccuggaucaaauggaccgaugcuu

SEQ ID NO: 4188633 - RNA, 102 nt, Human
aggcaagagagguaguaaagugcaaauuuaagaaggcauacuugcaugaccuugggagugagugccuccuuaaauucugcaccuagacaaccucuccugcuu

SEQ ID NO: 4188634 - RNA, 92 nt, Human
aggcaaggcaggauagccagaggucaugagcacaggucuuagagucaaauugccuguauuugcaucuggccucucagccuccugucuuuacu

SEQ ID NO: 4188635 - RNA, 68 nt, Human
aggcaaggccauuucuguuuccugccuuucuccucccaggggcaugagaggcucagaggccugguccu

SEQ ID NO: 4188636 - RNA, 65 nt, Human
aggcaauccucuuacagaugggggagaggcucaggcccacccaucagagucuagaggaagugccu

SEQ ID NO: 4188637 - RNA, 119 nt, Human
aggcaaugggcgcggggguggcgcgggggcggcgcagaccucagugugagccaggaggcaguagcuguggaguuuguggcgcugacugggcgccgggugcccuguugcguccucugccu

SEQ ID NO: 4188638 - RNA, 66 nt, Human
aggcacaauucagauggaagauucuggcuguccaaggccaacuguaaguuuaacugaauccugccu

SEQ ID NO: 4188639 - RNA, 79 nt, Human
aggcacagauuuggggaaagcaaugaaucaucugacuacgacuucuaauuggauuuggaguguuauuccguuugugccu

SEQ ID NO: 4188640 - RNA, 97 nt, Human
aggcacagcacacacagugggagagagagugggagccggcccccuccucgccuuggccucugcccucacuccugucugcagugcacccucugugccu

SEQ ID NO: 4188641 - RNA, 68 nt, Human
aggcaccucauagccagcccccacuacaucucucucccugaugucucucuggcuguggggaaaugcuu

SEQ ID NO: 4188642 - RNA, 57 nt, Human
aggcacugaaagguggccagagccugaacauaaauggccuggcaccuugaggggccu

SEQ ID NO: 4188643 - RNA, 69 nt, Human
aggcacugagggcagguacaagaugcuucuucgacugugaagaagagaaaugugcugcuggccaggccu

SEQ ID NO: 4188644 - RNA, 111 nt, Human
aggcacugcugccuguugguauccaggauaucccagaguucaaugggaagguccagcagaagagcuucccaggagaaucagggaauucgggauaauaucacaaguaugccu

SEQ ID NO: 4188645 - RNA, 57 nt, Human
aggcacuguucucagagcauuagauacauuauauuggucuaaucaugagaacaaccu

SEQ ID NO: 4188646 - RNA, 67 nt, Human
aggcacuuuuugcauuuuagaaaugacuguaacccccuaagucgguuuugaaauuuguaaaaagccu

SEQ ID NO: 4188647 - RNA, 63 nt, Human
agcccugccuucuuggccuuuaaagacuuugcuuuggcuuugacuuuaggagggacaggagcu

SEQ ID NO: 4188648 - RNA, 96 nt, Human
agcccugcugcccugggugagcugaagcagucaguucagcuuggagcugccgguuccagcugaguucagugacuucagugacucaggcguuggguu

SEQ ID NO: 4188649 - RNA, 66 nt, Human
agcccugguugagaaccacugguauagaauuuacuccuccaggaagguguuuaacuagagauggcu

SEQ ID NO: 4188650 - RNA, 59 nt, Human
agcccuugaguguaucucaaauaucuuucauuguuaaugagccaaauucuccaagggcu

SEQ ID NO: 4188651 - RNA, 78 nt, Human
agcccuuggaggccacuuggcagauggcagcuggcccauagcugcaaagaucugucagucaugaggcaccucagggcu

SEQ ID NO: 4188652 - RNA, 81 nt, Human
agcccuuuagauaaccauggaacucaguaaauuauagguagucaaauguaugauuuuagguuuagugaaggcuggagggcu

SEQ ID NO: 4188653 - RNA, 68 nt, Human
agcccuuucuucuucuggacuggaacagagggcacccccugcauugcuguacaggugaggagggggcu

SEQ ID NO: 4188654 - RNA, 64 nt, Human
agccgagauugguaccuuuucaggaagccaucgcauugguuuccugcgugugccacucauggcu

SEQ ID NO: 4188655 - RNA, 57 nt, Human
agccggggaccucuaucgcuuguauuuuaaugcgcugcaguuuauguguuccugguu

SEQ ID NO: 4188656 - RNA, 57 nt, Human
agccguguccagcuuuucccaccaaguacuaacugggguuuaggccugggcaaagcu

SEQ ID NO: 4188657 - RNA, 74 nt, Human
agccuacauguuuacuccaagucaggguuucucaagcuugacaccacugacuugcgaauggauaauuguuugcu

SEQ ID NO: 4188658 - RNA, 76 nt, Human
agccuaguucucgcuucucuagagcuggggaucaggaaguguuucucaguccaaaugagagguugagggccuggcu

SEQ ID NO: 4188659 - RNA, 78 nt, Human
agccuaugaugaaaacuguauuccauccucaucaacauaguuauggguucagauauggaaacaggacucacguagguu

SEQ ID NO: 4188660 - RNA, 74 nt, Human
agccuaugcugaacugagauguaacuuuucucauugcuagaaaaagucauguaaaccaguuugcucccaaggcu

SEQ ID NO: 4188661 - RNA, 74 nt, Human
agccucaggaugccuucaucaccuugcagcuccucuaaugagagagcuacagucggaaggacagacugcaggcu

SEQ ID NO: 4188662 - RNA, 68 nt, Human
agccuccagagucccuguucucggccuccacauauuuggcuuugcagguggagaaaggacuuugggcu

SEQ ID NO: 4188663 - RNA, 129 nt, Human
agccucccaaggacaguaaaauccuuuugaaaaaauccuuagccgagugagguggcuacaggcgugagccaccacacucggugaaggguuuuuucaaaaggacuuuacugugauuuuuuuggcagugcu

SEQ ID NO: 4188664 - RNA, 92 nt, Human
agccucccuaaggggcucagagagagugggguguggauuuggcuggugaaugggagucccccacuccauuucucacuuugccuggggaggcu

SEQ ID NO: 4188665 - RNA, 74 nt, Human
agccucccuugucucaagguuacucuaugaugccauuuacaucccagagcuccccaugggaucaggcugaggcu

SEQ ID NO: 4188666 - RNA, 62 nt, Human
agccuccucaggaagccacagugccugagcccggaaggugcgagugguuuucugaggagucu

SEQ ID NO: 4188667 - RNA, 66 nt, Human
agccucgguaucuucauguguaucugccucuuaaaguuguggaggcucagugaggaaauggaaguu

SEQ ID NO: 4188668 - RNA, 67 nt, Human
agccucucagagugcugggauuacaggugugagccaccacacccggcccaaaaguucugagauggcu

SEQ ID NO: 4188669 - RNA, 64 nt, Human
agccucucaggugccacucggagggaagcgcuggcugcuuccuccuggaggucacucaaaggcu

SEQ ID NO: 4188670 - RNA, 61 nt, Human
agccucugucaagcuuuucaaagacacccacaaacugucaccaagagcuuguacagggguu

SEQ ID NO: 4188671 - RNA, 85 nt, Human
agccucuguuugcugucugugaggagccacugagaucaagcaggucuagucuccacccaugacaguacacagcacuucauaggcu

SEQ ID NO: 4188672 - RNA, 56 nt, Human
agccugagcccugugacugcuuugaggagguccucuggcuguuugcagcucaagcu

SEQ ID NO: 4188673 - RNA, 107 nt, Human
agccugcagcaucuccgcagcucuucuggcuuguguccuuccuugcuagggguccuuucuuggggaaggguggacacaacgugggaacagaaggggaaaagcagguu

SEQ ID NO: 4188674 - RNA, 65 nt, Human
agccugcauuucaaggucucauauuguagauggaauacugcugcaagucauggcuuuugcagguu

SEQ ID NO: 4188675 - RNA, 60 nt, Human
agccugccaggagcuggugcugcaacucugucuuagugcccaucauucuccugguuggcu

SEQ ID NO: 4188676 - RNA, 78 nt, Human
agguaaaugaaacaagguccuucugugacauugaaagaagcaaugaccuucacagagggagccugugcgaauuuaccu

SEQ ID NO: 4188677 - RNA, 67 nt, Human
agguaagaguugauguugcagucuugaggagaauuccuucuccuucagaaaaccucagucuuugccu

SEQ ID NO: 4188678 - RNA, 102 nt, Human
agguaagcacagggggcaucaggaaaggaauguuccugaacacaagaucaccuuggagcugccaucuguguguucaggaaguccuggggcucccuccuuccu

SEQ ID NO: 4188679 - RNA, 58 nt, Human
agguaagugucugcuggcucuacccuaaguacaagggcuacaacuggcuggcacuccu

SEQ ID NO: 4188680 - RNA, 64 nt, Human
agguaaguguuauuauucucacuuucuacauaaggaaagcucagaagaaauaagcaacuugccu

SEQ ID NO: 4188681 - RNA, 56 nt, Human
agguaauacagaugagcuucugccucccacaagagagcaaccacaucuguuuuccu

SEQ ID NO: 4188682 - RNA, 72 nt, Human
agguaauagaauauuaauacugaaaggaguaucagcuaauacauagagauaaaaaucaguaguauucugccu

SEQ ID NO: 4188683 - RNA, 55 nt, Human
agguacauaggaaaguggagcuggaaguuucccacagcuuuguuccauauugccu

SEQ ID NO: 4188684 - RNA, 85 nt, Human
agguacauguauuuguauuaggcccuagggaguuucaagacaagcugaauuuccuucaguguuuaauacuucauaaauaaagccu

SEQ ID NO: 4188685 - RNA, 55 nt, Human
agguaccauaugcgggagcaaccuuagaaugccaggugugcccgcaucaggaucu

SEQ ID NO: 4188686 - RNA, 103 nt, Human
agguaccuggggccuuacugaaaugcuuguauauuucuugguccuugugaggaugaaagagcaggacaaugcauagacuuugggggcguccaggucaggaccu

SEQ ID NO: 4188687 - RNA, 96 nt, Human
agguacuggacacaguggaaaaacacuuccuguaacaugacaguggucugacuuaacccuuccaaguucccaggagauguacacguguauguaucu

SEQ ID NO: 4188688 - RNA, 80 nt, Human
agguagagagccaagcaaaauggacccugggcugaaaauggagauucuguaaggcaccuguccaggcugggcuucugccu

SEQ ID NO: 4188689 - RNA, 59 nt, Human
agguagagcaccuggcugcccaauggauaaccucaguugcugccuggaggccucuaccu

SEQ ID NO: 4188690 - RNA, 56 nt, Human
agguagagccacugucagcaucaugauugaaguacuggccaguguggcucugaucu

SEQ ID NO: 4188691 - RNA, 130 nt, Human
agguagcccugagacacuucagaggcaaauuucacugggagcggcugucacugguuugcuuucaccauccgcaaaucugcccuuucccagugguuuuucucaucuacaaucccaugucucaaaguugcuu

SEQ ID NO: 4188692 - RNA, 57 nt, Human
agguaggaaagucuccuuguauugaccagcgacaggcgcaagaggauguucuggccu

SEQ ID NO: 4188693 - RNA, 61 nt, Human
agguagggaaaagacuucacuguuuauauguuaagugaacauuaguuucuuuucccuggcu

SEQ ID NO: 4188694 - RNA, 70 nt, Human
agguagugcguguggaaugagaguguggagagguuggcugugucacacuucagcuccacaaacauuaguu

SEQ ID NO: 4188695 - RNA, 77 nt, Human
agguaguuuccugugcuuauucuucucugaugcuccuagcagcccucugaggcagaaaaagcaaggguuguuaaccu

SEQ ID NO: 4188696 - RNA, 79 nt, Human
agguauaacccacuucaauuaacuucagcauuacaguaaugagugauuacaaagaugauugagggggcaaaacguacuu

SEQ ID NO: 4188697 - RNA, 58 nt, Human
agguauaagucucauuucuguuaccuugaccaaguuauuuaacaugggucuuauaccu

SEQ ID NO: 4188698 - RNA, 61 nt, Human
agguaugacaaagagaggcccaugcaguguuuucuaaccuugcacucucuuugguauaucu

SEQ ID NO: 4188699 - RNA, 76 nt, Human
agguauggcaaaagcaaagucccugaaugugucauuagaagugaugguaaguguggguacucuugcuuccacuccu

SEQ ID NO: 4188700 - RNA, 73 nt, Human
agguauuagcacaaagcaagguauuaacagggcccaaucucuaccaaauaccaaguuucuuugucuacuaccu

SEQ ID NO: 4188701 - RNA, 75 nt, Human
agguauuuauagcagcacaaauggacuaugacagaaauugauacugagaaugggauguugcuauaacuaauaccu

SEQ ID NO: 4188702 - RNA, 95 nt, Human
aggucacagagucagagagucagagaguuaggcugaauccuggguucugccagcacagucuguguaccuuuggccuucuaccauuuuuguaacuu

SEQ ID NO: 4188703 - RNA, 95 nt, Human
aggucacugucagcugggagacccucagaguaggcacugcugggcagaucucccagugccuaucuccucugggaacuucccggacugaucgaccu

SEQ ID NO: 4188704 - RNA, 61 nt, Human
aggucagauggcuuauuggggguuccagaauccauuuuauaucuuccaagccagcuugccu

SEQ ID NO: 4188705 - RNA, 84 nt, Human
aggucagcuggauccacagugggcuuuguaugaucaaaaaauaagcuuuuaauuauguuaagccacugagauuugguugugcuu

SEQ ID NO: 4188706 - RNA, 67 nt, Human
aggucaggauccaagucugugcuugcagcuguuucucuguccagcuacuugaccuugggcuuggcuu

SEQ ID NO: 4188707 - RNA, 60 nt, Human
aggucauuuccuuagaggcagaaaucacaacuuauuuuucuuucauucagggccugaccu

SEQ ID NO: 4188708 - RNA, 93 nt, Human
agguccaagcagucugagggguucaggggcccaaggucaccagaaagaaagagaacccaggguuccugggucccagugugcuguucugcaccu

SEQ ID NO: 4188709 - RNA, 56 nt, Human
agguccaucguggaugaacugcuccccaagaaaagugacagaaacacgcugggcuu

SEQ ID NO: 4188710 - RNA, 64 nt, Human
aggucccauauacuuuuucugguccaugugcagaguaaugguccaaaccagugcuguggucccu

SEQ ID NO: 4188711 - RNA, 59 nt, Human
aggucccauauauguuuauauuggaaaaaauaauacuuucuaaagcaaaagugggaucu

SEQ ID NO: 4188712 - RNA, 119 nt, Human
aggacuucaauauuuacagguguauuaggauguuccuaugcacauuaaaaacagaaaaccauugcucuaggaaccaugcacauaggaacauccuaauaugccuguaaauauugaagccu

SEQ ID NO: 4188713 - RNA, 60 nt, Human
aggacuuuaucuucuagaccucauuuagcaugaggauagagaaacacagauaaaugucuu

SEQ ID NO: 4188714 - RNA, 81 nt, Human
aggacuuucauuaagaaaugaggaguccccaaagugaacugcugcagagugguggaucuuuauauuucuuauggggugccu

SEQ ID NO: 4188715 - RNA, 61 nt, Human
aggagaaagucaaguuggucuucauucucaguccugaggcagacaacugugacuauucccu

SEQ ID NO: 4188716 - RNA, 59 nt, Human
aggagaaauccaucgagaaugggccguuugcuaguucauucguuuggugacuuuuuccu

SEQ ID NO: 4188717 - RNA, 86 nt, Human
aggagaaggacaggagcaagugggcugcauguuuacuauucagaaucuggacauuggcuaaugggccccuuugacugucaucuuuu

SEQ ID NO: 4188718 - RNA, 62 nt, Human
aggagaagggcugaaagaccuugggcaacauagcuaaccugucuaagccucagucuuucccu

SEQ ID NO: 4188719 - RNA, 56 nt, Human
aggagaaguagaagagcccuggacuuggacugacaaguccugcuuucuacucugcu

SEQ ID NO: 4188720 - RNA, 57 nt, Human
aggagacaguuuggacguguagaauauaaauuucuacuuuggcuagaguugucucuu

SEQ ID NO: 4188721 - RNA, 63 nt, Human
aggagacauaacuaugaugagagagucccuugaggccaaggguaauuucaagguagagucccu

SEQ ID NO: 4188722 - RNA, 84 nt, Human
aggagacccugaggccguuggugggccuuaccugcugccuucucucccugccagggucaggccaguccuauugccucuucuccu

SEQ ID NO: 4188723 - RNA, 70 nt, Human
aggagagcuggggugcugcuuguugaaguagaaaaacgaggugcuggacaugcaaaaaucacagucuccu

SEQ ID NO: 4188724 - RNA, 58 nt, Human
aggagaggcaucaagaaaaucgcuaaaggaaaugugaugagcuugagggcuuuuuccu

SEQ ID NO: 4188725 - RNA, 92 nt, Human
aggagagucuugcucuauugcccaggcuggagugcaguagcacaaucuuggcugacuacaaccuccaccucccggguucaagcaauuguccu

SEQ ID NO: 4188726 - RNA, 81 nt, Human
aggagaguuguauguguuuaucugagcugaaauaggagcacuugucuacccaguuuauauauaagcacauugcucuugccu

SEQ ID NO: 4188727 - RNA, 77 nt, Human
aggagaucauguagcaaaagcagccacucucucugccucagcccaaggcuagggaggaugggcuuuaucuggucccu

SEQ ID NO: 4188728 - RNA, 66 nt, Human
aggagauggaggagcuauaggcaauaucauugcaagagcacugcugaagagcuucugcccuuucuu

SEQ ID NO: 4188729 - RNA, 61 nt, Human
aggagauggggucagcugggacauugauaggcuuucagaguuuggagggaccuuaucaccu

SEQ ID NO: 4188730 - RNA, 64 nt, Human
aggagcaaggaagcuacaguuuacuggaagccucagccccagucuuuguggguucauuguuucu

SEQ ID NO: 4188731 - RNA, 61 nt, Human
aggagcaggcuugacagccugggcaccugcaccugccacagcuaccugcaugccugcugcu

SEQ ID NO: 4188732 - RNA, 56 nt, Human
aggagccagaugcuauugcuggaaagaaaauuuucucagcucagcaucugggucuu

SEQ ID NO: 4188733 - RNA, 62 nt, Human
aggagccugacuccacacuaagggcgagaagucccaggcccagagugaguggggaaggcccu

SEQ ID NO: 4188734 - RNA, 68 nt, Human
aggagcgagggcucuuaauucucaaguaacaaucccauugucccagaggauagaagccccauguucuu

SEQ ID NO: 4188735 - RNA, 85 nt, Human
aggagcucccucagggaaugggcccagucccuuacaaaucaagccugggcuugggguucagggacuggcucucugagcaggccuu

SEQ ID NO: 4188736 - RNA, 70 nt, Human
aggagcucuaucugggaguucuuuguagucaauacaaggaggaaagaaggcccccagcagaugugcuccu

SEQ ID NO: 4188737 - RNA, 80 nt, Human
aggagcucugaggacaggguccaaaggcaggggaggcagauucuccaccgucucccuggccuugccuucaggggccuccu

SEQ ID NO: 4188738 - RNA, 65 nt, Human
aggagcugcucuucuagguggaucuucaggagugaaaggaagaaggaacacacugagcaacuccu

SEQ ID NO: 4188739 - RNA, 72 nt, Human
aggagcugguggcuccaggacccaguggcuccaggacccagucuacagccacggucuauggaggcggcucuu

SEQ ID NO: 4188740 - RNA, 62 nt, Human
aggagcuucugcuuagauaggaaugcugagaaccaucagaaucuuuucucugcaggauuccu

SEQ ID NO: 4188741 - RNA, 69 nt, Human
aggaggaaaugacagaugagaauaauccauuuaugagauggaaacauauucugaugugcauucaauccu

SEQ ID NO: 4188742 - RNA, 64 nt, Human
aggaggaagcagagugggguaguggggaauccaggcccagaaccccaggcaucgcauuccucuu

SEQ ID NO: 4188743 - RNA, 56 nt, Human
aggaggaaguauuugaaaagaggacugacccauauucucuucaaauauuuuauucu

SEQ ID NO: 4188744 - RNA, 55 nt, Human
aggaggagcaguuuugggaauggcacaacaagcucagaaguugaaggcucuuuuu

SEQ ID NO: 4188745 - RNA, 74 nt, Human
aggaggagguguggaugcuuaaugacccaacaggagaugugaccccuugggaggcuuccagaccuugcuuuccu

SEQ ID NO: 4188746 - RNA, 117 nt, Human
aggaggcagugaaccucuccugcccuuuccuuccaucuccaucaccuugagcaucuucugggcagcugaggugaccgcagaugggaaggaagggcgcagagaugagcauuuucuucu

SEQ ID NO: 4188747 - RNA, 67 nt, Human
aggaggcauucugacaguaaucaguuugcugcuaagcagcacugguuuuuggcggaaguauucuccu

SEQ ID NO: 4188748 - RNA, 65 nt, Human
aggaggcuccgccggcucccagcaucccagcauccuccgugccaugugggccgugcggguguccu

SEQ ID NO: 4188749 - RNA, 61 nt, Human
aggaggcugugggcaucgggauccuguuuguucuugcuggcacugccuggcccggcuuccu

SEQ ID NO: 4188750 - RNA, 62 nt, Human
aggagggaggaaugcaacuuauuuagcuaucggauuaguuauuaugccauuaccucccugcu

SEQ ID NO: 4188751 - RNA, 56 nt, Human
aggagggcugcuugcuguguggugucagagacugaacaggauaggacaguguuccu

SEQ ID NO: 4188752 - RNA, 65 nt, Human
aggaggggcaggcuuggaaauaaccuggggggucuguucccagugagguccuggcugucuccccu

SEQ ID NO: 4188753 - RNA, 78 nt, Human
agggaaaauuacaaguuucaguguuuugcaagguguaacggcauauuuuauggcaauacugagauuauuguacucccu

SEQ ID NO: 4188754 - RNA, 77 nt, Human
agggaaacguggccagacacaugcagaccuggaaugagcuuguucaguuagcaaugaaaucuggaugcuguuucuuu

SEQ ID NO: 4188755 - RNA, 129 nt, Human
agggaaagccuagaaacagaggagccuaagcagaagaaaaggcagaaauucaacuacuggucagcaaaaccuggaacugagaauuccaguauaaggauacuucugucuucucugcuuccucuuuccacu

SEQ ID NO: 4188756 - RNA, 79 nt, Human
agggaacacuauaagacagauacagcacauguagauuuugagucuuuugcgaguguuuguacuuguagacauuuugccu

SEQ ID NO: 4188757 - RNA, 92 nt, Human
agggaacugcgucuuauagucuuacacuuaccuguccauugaauguagacuuccccaggaagggagugugaucuuggauaagccaguucucu

SEQ ID NO: 4188758 - RNA, 57 nt, Human
agggaagagccaauguugcagaugaauuccaagggccaucugcuggcagaauucccu

SEQ ID NO: 4188759 - RNA, 55 nt, Human
agggaagaguaacuagcccaugugcaccuagacgcacaguguuagguuuuuccuu

SEQ ID NO: 4188760 - RNA, 55 nt, Human
agggaagcaaugauuauuauucauuuguacuauaaauauggauuguugcugcccu

SEQ ID NO: 4188761 - RNA, 68 nt, Human
agggaagggaaaugaaggaagcuauuguucaguaguuuacacuuuugauucuuauuguuuuccucucu

SEQ ID NO: 4188762 - RNA, 78 nt, Human
agggaaguauuugaacaggcuggccuugaagcagugguagacacuguugaagugccagcuugauugagucauuuaccu

SEQ ID NO: 4188763 - RNA, 125 nt, Human
agggaauauuuggauugguguggccuauugauguuauuuauugaaacacuuuggaacaaauucuauaggcugaguugauaauuuugaugugaguaugccaaaggggcaucaguuacuauuucccu

SEQ ID NO: 4188764 - RNA, 60 nt, Human
agggaauguagcaagaugccaacuccuaaugacggagcuuggguggguuggugguucccu

SEQ ID NO: 4188765 - RNA, 74 nt, Human
agggaauuaaaauccaguguugguggauagagcuauuucuguggcguucucuugccuuuggauuucaguuuccu

SEQ ID NO: 4188766 - RNA, 55 nt, Human
agggacacuggacccaguguccaccugacucaggugauauggggcuaguguucuu

SEQ ID NO: 4188767 - RNA, 66 nt, Human
agggacagcaguggugcacugagccaaggguggguaccugggcagugccuaccauggcugaucccu

SEQ ID NO: 4188768 - RNA, 68 nt, Human
agggacagucuacuguucacugaauguaugcuuacaaaaagugacaugugguaggcauaguuguccuu

SEQ ID NO: 4188769 - RNA, 60 nt, Human
agggacaugauuucagggaauucucacugggguccauugugaaauuugaggucagugcuu

SEQ ID NO: 4188770 - RNA, 55 nt, Human
agggaccugcucacugccuggcuucagccaccugaggccagguaccagguacccu

SEQ ID NO: 4188771 - RNA, 69 nt, Human
agggaccuguugaggccaugacacuuuagaaaacaauauuucaaaucacuuuggagcuuaaugggcccu

SEQ ID NO: 4188772 - RNA, 76 nt, Human
agggacuagaccugccaggacaagagugaggucugaucagauuaagacucccagguugccuggcaggcaaguuucu

SEQ ID NO: 4188773 - RNA, 60 nt, Human
agggacuaucauucaaucucuucccugcaaaggguaaggccagcccuaaugaugcucucu

SEQ ID NO: 4188774 - RNA, 128 nt, Human
agggacucuguuuuuauucacaaugaauuuuauucauuaaguucccaugccuaaaacauuguucuaguaggugcucaggaaauaguuuaguguuaagugaaugccuuuugugagauuacacuguuuuu

SEQ ID NO: 4188775 - RNA, 55 nt, Human
agggacugagcuaggaucuagugacugcauugucucugagaugccuuccagcccu

SEQ ID NO: 4188776 - RNA, 56 nt, Human
agggagacaaaagcagcugccauggagucuucuaugauucagaggcuauucuccuu

SEQ ID NO: 4188777 - RNA, 69 nt, Human
agggagaccacaguuucauucaugcaggugcuuucuauagauuuguaguuuaaauuguggauucuuucu

SEQ ID NO: 4188778 - RNA, 63 nt, Human
agggagagaacaagucauauuuuuauuagucuauguggagaaucuggcugauguuuuuucucu

SEQ ID NO: 4188779 - RNA, 83 nt, Human
agggagagguggggugagcugcagacuacacccacauggcuauaaauggggagccucuggcugcugcucacucagccucccuu

SEQ ID NO: 4188780 - RNA, 68 nt, Human
agggagcgaaaggaugaaugagugggccgaucacuugccgguggcuccagaucugucuccuguucccu

SEQ ID NO: 4188781 - RNA, 128 nt, Human
agggagcggggugagacagggccuagaagcagaaaggcccccaguggaugauuuggcugcuagggggugggcgccccuggggccucaucccacugcucugcagaggccguuaaaucaccccacucccu

SEQ ID NO: 4188782 - RNA, 86 nt, Human
agggagggccggaggaggacugggaggcaccgcgucgugcucgcgagagaacagaaaugcgcuucccccagcuuuggcgccuugcu

SEQ ID NO: 4188783 - RNA, 94 nt, Human
agggaggucucagcuguuggaguaugggugcuucuaguuuuaaagaggugugggcucugcuaaaguuuccgucuuucauucagucacacucccu

SEQ ID NO: 4188784 - RNA, 71 nt, Human
agggagguguggcaggagugcaaaaggcucuguuuuuaucuugugcugaccccuccuggccacacuaccuu

SEQ ID NO: 4188785 - RNA, 69 nt, Human
agggagucaaggguucacuguuaucuaugagauguacaugauauggguagaaguggcccaagcuucccu

SEQ ID NO: 4188786 - RNA, 64 nt, Human
agggagugcucggguugucugaagcugguaguggcagccagcaaagauguccggggcaagcuuu

SEQ ID NO: 4188787 - RNA, 80 nt, Human
agggagugggcucccugucuggaacuggacuccaaugguuggagguggauuuaaaaucagaugggaguuggcugcucccu

SEQ ID NO: 4188788 - RNA, 62 nt, Human
agggauaaugucuuagcccacaaaaauucacuuuuuugacaggauauaaagacauaaucucu

SEQ ID NO: 4188789 - RNA, 100 nt, Human
agggauagggaaggcauuguuuuugagaauguucugggaguggcugaaggacuguacuggcagagcacccaaggagcauuuggacugucuucucaucucu

SEQ ID NO: 4188790 - RNA, 63 nt, Human
agggauccacagaacaaccuccccagcuauugucugggcccaggcugccucugcaggaucccu

SEQ ID NO: 4188791 - RNA, 69 nt, Human
agggaucucagggauggagcugggccucagguuaaggaauccugggcucucgucccugcagaagucucu

SEQ ID NO: 4188792 - RNA, 75 nt, Human
agggaugagcugcacgcagcauccaagagagcagcccagcucuuaaagcaccuccuuggauguguggggcucccu

SEQ ID NO: 4188793 - RNA, 72 nt, Human
agggaugcuucaaaauaagcacuuaacuguaucaucuugaugggagguucuuuggugcuuguagcaauuucu

SEQ ID NO: 4188794 - RNA, 58 nt, Human
agggauggaucuuggcccuggaagcuccuggauuuaagcuucugcccugccauucacu

SEQ ID NO: 4188795 - RNA, 71 nt, Human
agggauggguauuggcagaagagggcaaggcuuagccgcaaagcuacucucgccacauacacaccaugucu

SEQ ID NO: 4188796 - RNA, 114 nt, Human
agggaugugguuugagauucugcguuucuaucuggcuuucagaaaaugugaggcugcugguuagagacccacacuuugaguagcaagauucaaauguggcuuuaacccaucccu

SEQ ID NO: 4188797 - RNA, 75 nt, Human
agggauguguugaaagagaacacacauguaaaaugcuuaauuuguaacauuguaaauaccuuuaucaccaucccu

SEQ ID NO: 4188798 - RNA, 83 nt, Human
agggauugauaacagaaucagcagugaguggcuuucauggugguagugauggaagccacucauucuggcucuuuuuuaacccu

SEQ ID NO: 4188799 - RNA, 84 nt, Human
aggcuagucagugaggauaugagagcuuuuuggagcacuagcagcaucagauuggagugugaugagaagcugcugacuuagccu

SEQ ID NO: 4188800 - RNA, 104 nt, Human
aggcucaauugcugccuuuguguacagauugaucauggagaggggagguuuuuucaaguggauuuucuaaugaaaucuguacaguagggacagaaguuaagucu

SEQ ID NO: 4188801 - RNA, 62 nt, Human
aggcucagauccuuguguccugccacaagaccagguuggggcgggaaggagguucugacccu

SEQ ID NO: 4188802 - RNA, 61 nt, Human
aggcucagcagcuuaucuuggagaggcaauuagauugcccuugagaaagaugcuucagcuu

SEQ ID NO: 4188803 - RNA, 56 nt, Human
aggcucaucugagcagaaaccugagcuaacagcaaagagaacugucuugauggccu

SEQ ID NO: 4188804 - RNA, 85 nt, Human
aggcuccagggcagggguguaagaauggugguggggccagcagguuacagccucagggcugacugcuacucuccccugcuagccu

SEQ ID NO: 4188805 - RNA, 58 nt, Human
aggcucccugaaucgcccguucccagagcuaccaggcagacacggcauucaagggccu

SEQ ID NO: 4188806 - RNA, 56 nt, Human
aggcucccuugccauucccaggagggcaagccgcagccuggguggcuagggaguuu

SEQ ID NO: 4188807 - RNA, 74 nt, Human
aggcuccucgcuauuuaaagagcuugcaaaagucuaaggaaagccaguuucuuaaguaggaagaaaaggagucu

SEQ ID NO: 4188808 - RNA, 59 nt, Human
aggcuccuggaaacuucagggaauaaaagaguauauguuacauuuucugaagugagccu

SEQ ID NO: 4188809 - RNA, 88 nt, Human
aggcucgaguaggaauguucugccaucuugggaagaccacuggucccacuagugaaguagauggcagaugcuuccuggcuuccagucu

SEQ ID NO: 4188810 - RNA, 61 nt, Human
aggcucuauaccgcugggaguuggaacacaaaagaugucuuugcucccaugucuggagucu

SEQ ID NO: 4188811 - RNA, 61 nt, Human
aggcucuccagagagcugcuuuucugcacauauuuuauaagaaucagcucucuaagagucu

SEQ ID NO: 4188812 - RNA, 60 nt, Human
aggcucuggaguuagccaggcauugucccaacccaaguucugucacuuuuuccugagccu

SEQ ID NO: 4188813 - RNA, 55 nt, Human
aggcucugggcucuagauuuuggggacaccccugccaucguggagguuacagucu

SEQ ID NO: 4188814 - RNA, 61 nt, Human
aggcucuguaauccguacauuauucugaacuuuuccagagacagagaaaacggaagagucu

SEQ ID NO: 4188815 - RNA, 56 nt, Human
aggcucuugugagguagcugcaaccaaaaaagagcugcaagccaagcugagagccu

SEQ ID NO: 4188816 - RNA, 84 nt, Human
aggcucuuuccuagaggguaaaacaagaucaagugguauuugauugaaaauaaggccagaaacaaaaacucuaagaaacagccu

SEQ ID NO: 4188817 - RNA, 70 nt, Human
aggcucuuuggggucacugaagugucauuuggaaaaugacuucccaaugcauaaugauccccuaaagccu

SEQ ID NO: 4188818 - RNA, 81 nt, Human
aggcugaacauucuugaacaucuguccaaaagacucuccuccacauguguaccaggacacauguucaagaauguucagcuu

SEQ ID NO: 4188819 - RNA, 62 nt, Human
aggcugaagacaauggaauugacugugccaggcacacuucucaccagacugucucaucgccu

SEQ ID NO: 4188820 - RNA, 129 nt, Human
aggcugaagugggaggaucgcuugaccccaggagguugaggcugcagugggcugagaucacaccacugcacuucagccugggugacagcaagacccugucucaaaaaaaaaaaaaaaaaacuuuaguuu

SEQ ID NO: 4188821 - RNA, 71 nt, Human
aggcugaaguuaucuuuuuguucaucauucacuaaaguuugaccugaaacaugaguuaaaaguaacugccu

SEQ ID NO: 4188822 - RNA, 61 nt, Human
aggcugagcaggagggcaaaauucagucuggguacaaucugggcugcuccuguggcagccu

SEQ ID NO: 4188823 - RNA, 60 nt, Human
aggcugagggccgaggagcuguggguugguugcagggacccugguaucuggcucucuccu

SEQ ID NO: 4188824 - RNA, 62 nt, Human
aggcugauugagauauucaagaggaccaaaucuuuauuuggucauuuuuauuucaguugcuu

SEQ ID NO: 4188825 - RNA, 92 nt, Human
aggcugccaggggacgcuggggcaaggcuggguaaccuguccacugccugaugucagaguggcagagaccccagccagcccucucuggcccu

SEQ ID NO: 4188826 - RNA, 58 nt, Human
aggcugcccugccgccagugggccucccaagcggcccugcccacagcagggauagucu

SEQ ID NO: 4188827 - RNA, 76 nt, Human
aggcugccugcacagagcugcuuuuuaaucacaagauguucaacuaaaagugcagccguguugucagcgcaugucu

SEQ ID NO: 4188828 - RNA, 129 nt, Human
aggagggaaagcagugugaauguagauggagauucuggcaaaauccuggcuuuuaaccuacaaagacugggaaugaaguuauauuuuguccuagacuuuuuauucuuuauguugaaauuuccauauccu

SEQ ID NO: 4188829 - RNA, 65 nt, Human
aggagggaaggaguugaauggccugcuccugucuuucaggaaguccugaaacuucuuucugaacu

SEQ ID NO: 4188830 - RNA, 65 nt, Human
aggagggaagucagggacuggaauuagaauaacaauggguucuucuuucuacuuuguuucccccu

SEQ ID NO: 4188831 - RNA, 98 nt, Human
aggagggauucuccccaagaggcucagagggagcauggucuggccaacaccuugacuuugcaauucuagccucuugaacucugggagaauaaaugucu

SEQ ID NO: 4188832 - RNA, 83 nt, Human
aggagggccagagguaggguuggcccaggaauaccauucccugugauccucuuggccccaacccucuauuuuuggcuucuucu

SEQ ID NO: 4188833 - RNA, 59 nt, Human
aggagggucuguuuaccaccucuuucagaaaaugaaccugagagaccacagagcugccu

SEQ ID NO: 4188834 - RNA, 56 nt, Human
aggaggugauuuucaaaagaacuuuccagugugaagauuuuuaaaaauccccuccu

SEQ ID NO: 4188835 - RNA, 56 nt, Human
aggagguguagauuuccugucacuguuccuuaucaacagagaaagagcagccuccu

SEQ ID NO: 4188836 - RNA, 76 nt, Human
aggagguugggacguggaauacugagugacuagagaaauagacugaagucauacacuguucugacaccaauauucu

SEQ ID NO: 4188837 - RNA, 69 nt, Human
aggagucugccagagaucugggcagaguuuauacacagaaucuggggcucuuuucucuggcucucuccu

SEQ ID NO: 4188838 - RNA, 123 nt, Human
aggagugcgcauugaguuuuaaccaaggaaagauauuuucacacaaggugauaaguucagcacaggcuguaaggacucuggaacucuugguaagagaauguuacaggucucaggcccauucuu

SEQ ID NO: 4188839 - RNA, 58 nt, Human
aggaguuaagguucaauuaaaguuacuuaaaugugacuaaaauaggacauuaacuuuu

SEQ ID NO: 4188840 - RNA, 92 nt, Human
aggauaacgcccagcccuccccuugcccccuguggcugccuccccuuuccgucuguugagagaggaagccaggggguguugggugcaacccu

SEQ ID NO: 4188841 - RNA, 56 nt, Human
aggauaaggucaaaggcuaggcaaggguagaccauguagagcuuagguuuuauucu

SEQ ID NO: 4188842 - RNA, 58 nt, Human
aggauaguucuggacuauguuagcaggauauuacgucuaacaaucuagaagcuauucu

SEQ ID NO: 4188843 - RNA, 56 nt, Human
aggauaugaagucagacaaacugggauucaaucccagcucuaugcuucaauauccu

SEQ ID NO: 4188844 - RNA, 82 nt, Human
aggaucagaggcuuuaaauggcuugcccaagucagaaaacuaaguggcugaggcaagauuugaacccaggcaaucugguccu

SEQ ID NO: 4188845 - RNA, 57 nt, Human
aggaucuuagcacaagacgugcucauuguuacuagcgugucauuguuucuaggaccu

SEQ ID NO: 4188846 - RNA, 55 nt, Human
aggaucuugcuauguuggccaggcuagucucagauuccuggccucaagcaguccu

SEQ ID NO: 4188847 - RNA, 76 nt, Human
aggaugaaugaugaugaccgccaacguuuagguguccgcagauuuuacagaagccuuuggccauuugacuucuccu

SEQ ID NO: 4188848 - RNA, 77 nt, Human
aggaugcuugaaguuuaagguuagauaaguaucaagaagcugaaugcuuaucuggaaacuuugaacuuucagugccu

SEQ ID NO: 4188849 - RNA, 82 nt, Human
aggaugggggaugcacagggagggggccagcuccauucugccuugagaggccugugcuuucuucccuccugccaccccaccu

SEQ ID NO: 4188850 - RNA, 86 nt, Human
aggaugguagagauacgagaggcagggguuuggagaaugucccuuagcagcaacuuuacagccccacuuccgggcucugcuguccu

SEQ ID NO: 4188851 - RNA, 67 nt, Human
aggauguuugcucugcucugcauuucagaacauuuaaucugaaauucacaguugagucauucauccu

SEQ ID NO: 4188852 - RNA, 65 nt, Human
aggauuacuugauuuuaguuuuaucuagaacacucuggaaagcaguucuuagaaucgggaauccu

SEQ ID NO: 4188853 - RNA, 65 nt, Human
aggauuccuagaucuccccuuuagagauucugauuccacaggucuggagugaggucugggagccu

SEQ ID NO: 4188854 - RNA, 56 nt, Human
aggauuggcuuuggaggcggcgguccucacucagaccugugccuccugcuaguccu

SEQ ID NO: 4188855 - RNA, 70 nt, Human
aggauugggcuugggccugggucuuugcugccagguggcccugcgguaaucauccaggccucccaugccu

SEQ ID NO: 4188856 - RNA, 76 nt, Human
aggauuugaauguuucagaguccacaacuuuuaacuauuauccagagagcuagucucugaacaacauacgaaucuu

SEQ ID NO: 4188857 - RNA, 59 nt, Human
aggauuuggaguuuaacaacuugaagauggugaaaauuuuaaagugcugcuccuauccu

SEQ ID NO: 4188858 - RNA, 113 nt, Human
aggauuuguuggugaauggaauguaaagcgugugauaaaggauaguuacagcauugucuuauagcaauuuuaucauccagcuuguuauuuuauccaucucaccagcccagccu

SEQ ID NO: 4188859 - RNA, 107 nt, Human
aggcaaaccaguaaggcccggcuaacagauauuuucagaacauucauucacuucaaaaucagaucagugaaagguugagaauauucucugggaaaucuggucugccu

SEQ ID NO: 4188860 - RNA, 65 nt, Human
agggaagaggcaagguuuauggaacacuggauucuuuccagagacccaacuuggcacucuuuccu

SEQ ID NO: 4188861 - RNA, 69 nt, Human
agggaagauugcuuaacuaauuaauuauagauuuguuaauugcaguuaaagaguuuggcuuucuucccu

SEQ ID NO: 4188862 - RNA, 69 nt, Human
agggaagcagaauuuaauagaaaggucuggcuaacaaugugcuacauuuggaccagauucugcuacccu

SEQ ID NO: 4188863 - RNA, 88 nt, Human
agggaaggugggauuugaguauucacagaucacucuguaggggauaccauuuauagaaccuguugugaaauucaguccagcucuccuu

SEQ ID NO: 4188864 - RNA, 60 nt, Human
agggaaguuuaucauauccucacagagacgugagcauauugucuuuggugucucuuccuu

SEQ ID NO: 4188865 - RNA, 67 nt, Human
agggaauaaaugggggaauccuguuuugguauuuggcuaggccagagagaccucaugaaauuucccu

SEQ ID NO: 4188866 - RNA, 113 nt, Human
agggaaucggauaaagaacaccaauuucuguaggaauaguuggccagggugcaauagcccaagccugcuguuaacugcaggaauucauugugccuugggucaaauuuuucccu

SEQ ID NO: 4188867 - RNA, 99 nt, Human
agggaauggcucauggagucugauggccaggguuugaaaacuggcuuugccauuugugaacuuaggcaauuagguaaccucccugugccuggauuuccu

SEQ ID NO: 4188868 - RNA, 71 nt, Human
agggacauugucaauggugguagauuucagacaguccugcucauuuuuuuacaacuauuugccauguuguu

SEQ ID NO: 4188869 - RNA, 57 nt, Human
agggacucccugggccgacacgggccagccuuucccuguguuggcucugggaucccu

SEQ ID NO: 4188870 - RNA, 98 nt, Human
agggacuccuuggacaaaauuucaagucuugaagaaguagguuuacucaagcaaaacuaaccuccuuuccaagucuggaauagguaugagauguccuu

SEQ ID NO: 4188871 - RNA, 81 nt, Human
agggacugacuuaccgaagcugcuuuugcauguguugaagggcugcaugcaggaagggcuuggggacguucacagauuucu

SEQ ID NO: 4188872 - RNA, 86 nt, Human
agggacuggggacagugaauagucguguuguguuagggcucagaccgagacacuucaugcauucuucacucucaccucguguuccu

SEQ ID NO: 4188873 - RNA, 84 nt, Human
agggacuucaucuuucugagccucaguucccucaucugugaaaugggguuaaucagaaggcugacaagauauggguuagucccu

SEQ ID NO: 4188874 - RNA, 82 nt, Human
agggagagacuucuuaauggcaaaggauuuuauguuuaucuuuaucaugaaaaacuuuaauccauaaaguagaauguuccuu

SEQ ID NO: 4188875 - RNA, 65 nt, Human
agggagagagggaugucaggggaccuuggcuggguguccgcucaauguccacauccccucugccu

SEQ ID NO: 4188876 - RNA, 77 nt, Human
agggagagcaacuagucccagaugacccagcuacuaauugacaaagcagaaaacuggagucugggacuuucuacccu

SEQ ID NO: 4188877 - RNA, 62 nt, Human
agggagagccuggccuccaaaggacuucguuauuaucuguuuuauaggcugggguuugcuuu

SEQ ID NO: 4188878 - RNA, 69 nt, Human
agggagcacaguaaguuagucucccaagauggugccauuuaauucagacuguacuuucugcagcucucu

SEQ ID NO: 4188879 - RNA, 66 nt, Human
agggagcaugccaggaacaaacaguggugcccacucacugggcccauuucuugaguucagcucuuu

SEQ ID NO: 4188880 - RNA, 59 nt, Human
agggagcuucuacuucaaggcauuuacauuggcuguugccuuagcuuagaacgcucuuu

SEQ ID NO: 4188881 - RNA, 102 nt, Human
agggaggaacaaaggcagucauguauggagcucugccugccccaggccuggaucagggcaguagcuucguaggcaucaguuuucuuucccuguuccugcccu

SEQ ID NO: 4188882 - RNA, 75 nt, Human
agggaggcacagggccgcccucugugcugaggccguggaggaagccaggaggaggguggcuugcuuugcuuccuu

SEQ ID NO: 4188883 - RNA, 55 nt, Human
agggaggcauuagcuacugcgauuuaauucguaucgcuggguguaaugccccucu

SEQ ID NO: 4188884 - RNA, 55 nt, Human
agggagggagaaaggagauaaagggcagguauuuuauuucuuugacucucucccu

SEQ ID NO: 4188885 - RNA, 71 nt, Human
agggagggccucugugggugcucacccuuggagagggucugucaaaaaaaggccccagggaggcucucccu

SEQ ID NO: 4188886 - RNA, 79 nt, Human
agggaguaauguuuccuggaauuuuugacuuuucagauaaauaagcuuagaauguguuaggaaagcuauuugacucucu

SEQ ID NO: 4188887 - RNA, 93 nt, Human
agggaguagcggggcagaagccgcaggaagucagugcaggacgccggaggccacuccuaauugcuucauguguuguugccgugcugaugaccu

SEQ ID NO: 4188888 - RNA, 65 nt, Human
agggaguggaaggcacuuaaacuaagaugcaguuuuggaugaagucuagcuuuagucuauucccu

SEQ ID NO: 4188889 - RNA, 84 nt, Human
agggaguggccaaagauguauagauagaaaggcaccaaaaucaaaccuuguuacauuucuaaacauaacuuugugugauuuccu

SEQ ID NO: 4188890 - RNA, 65 nt, Human
agggagugguuaagaaggugcagagaaaagcgugucugacauugauaaggugcuuaacccucucu

SEQ ID NO: 4188891 - RNA, 60 nt, Human
agggaguuccuguugcucuagggugccaccugcaauaccugggcucuaggaaccauuccu

SEQ ID NO: 4188892 - RNA, 77 nt, Human
agggauagagccagagagccccagguucuacugccagcucugucgcuguaugugugaccuugggccucaguuuccuu

SEQ ID NO: 4188893 - RNA, 58 nt, Human
agggauauguaugcauauguauaugcauguguauguauacauaugugugcauaucuuu

SEQ ID NO: 4188894 - RNA, 57 nt, Human
agggaucacgguggacuuggauaaccuucuccucaaaggguccugacuuggucuccu

SEQ ID NO: 4188895 - RNA, 55 nt, Human
agggaugaucaggguagaggcucaauccugaugaugggccauucagauucucccu

SEQ ID NO: 4188896 - RNA, 80 nt, Human
agggaugcugcuguguuugaguaauacagaugcugccccauucccaacucagcagcugcuaugacaacaccagccucucu

SEQ ID NO: 4188897 - RNA, 60 nt, Human
agggauguagacuuuguaacucaggaacucuuuuggguaaacaauguuugccuaaucucu

SEQ ID NO: 4188898 - RNA, 88 nt, Human
agggaugugugcuaaagguagauggacagagggugggaagucccuuauuauuuccacuuuuuucuccaucucugacucugccaucucu

SEQ ID NO: 4188899 - RNA, 68 nt, Human
agggauugcuguauaaauaaugaccucugcuuguauuuucugaguaguuccaauuuuacccagucccu

SEQ ID NO: 4188900 - RNA, 93 nt, Human
agggauuucaggacucacuaugcccauugguugucauggcaggagggucagagauccuguugucagagaccagucaugacccugaaucucccu

SEQ ID NO: 4188901 - RNA, 102 nt, Human
agggcacaaaagauuugaauaagcagacaucccauacuuuugggugggaacaucuaauaguauaaggauguugaugcucccccaaauaaccuaaaacacccu

SEQ ID NO: 4188902 - RNA, 93 nt, Human
agggcagggcuucaagaauggggaaaacguguuuucaauucaaauuaaacaaggaguaacaggcaccgcuccucaguccagaggccuggcccu

SEQ ID NO: 4188903 - RNA, 86 nt, Human
agguguuucuauuuucagguucccagggaaggacuuauuaaacaacuaugucagcagagccugcaggccugaaaaagugaaugcuu

SEQ ID NO: 4188904 - RNA, 91 nt, Human
agguguuuggaaugaagaaugcuauucauuaagccuacuuugugugaggcauuaaguaggcuuuuuagauacauucuuauugaauuugccu

SEQ ID NO: 4188905 - RNA, 58 nt, Human
agguguuuuuccccacugaguccugauccuagguccagauucacaggcacaaaacccu

SEQ ID NO: 4188906 - RNA, 79 nt, Human
agguuaaaacuugguaguucuuaaaaggugauaauaagaaagugaucauuagagaaauguugccaagauuuaguuuccu

SEQ ID NO: 4188907 - RNA, 56 nt, Human
agguuacagucaucucagaaucacuagcacaugugcuuuuagagagacauuagccu

SEQ ID NO: 4188908 - RNA, 76 nt, Human
agguuacucaccugugugagaugcaacccaaggaaagagcacucacuccuuggagcucuccaagggauggugacuu

SEQ ID NO: 4188909 - RNA, 56 nt, Human
agguuauauuguuaaguggcagagccaguguacugaacugucauaauauaucaccu

SEQ ID NO: 4188910 - RNA, 83 nt, Human
agguuaugacagaaaacugcugacaggauggaaauguaccaaagauguguuucuucuguuuguaguuacacugucauuuuucu

SEQ ID NO: 4188911 - RNA, 62 nt, Human
agguuauugacuucugcucugagcugagccuacaggggcccaggagacauauagaaggaccu

SEQ ID NO: 4188912 - RNA, 66 nt, Human
agguucaacuauggauggugugauggguuuaauuguguccuuccaaaauuuauauguugaaauccu

SEQ ID NO: 4188913 - RNA, 70 nt, Human
agguucacaauggcaaauguaauuuuacugugaauggcaaauguaauuuugcugugaccauugaaaaccu

SEQ ID NO: 4188914 - RNA, 61 nt, Human
agguuccagccguuccgugacucacccaggucacugaggagcaccuggagggcugggaccu

SEQ ID NO: 4188915 - RNA, 58 nt, Human
agguucccaggaucugucugggcuggggcagccuggagaggacagauugugggguucu

SEQ ID NO: 4188916 - RNA, 60 nt, Human
agguucuugacucuaccuuccaguaaaauauuccuauggaaacugaagagacaggaacuu

SEQ ID NO: 4188917 - RNA, 90 nt, Human
agguucuugcuguaaacacugggcagaguagcucagaagaagacugugguucuuggaugcccucaugccuuuguuccagugcaggugccu

SEQ ID NO: 4188918 - RNA, 57 nt, Human
agguugaccaggcuggucuugaacuccuggccucaagccauccucccaccucagccu

SEQ ID NO: 4188919 - RNA, 129 nt, Human
agguugagagguaacagauauucuuuugguuuguaguaaagaaguuagguguaacaauaugaucucuuaauacuuucauuugcugaguauugauuucuuucuugcgaguauccucauuccucucucucu

SEQ ID NO: 4188920 - RNA, 71 nt, Human
agguugggcugugggguaccccugagucugcaaguuggcccaggccaggugugucaccauugcccaggccu

SEQ ID NO: 4188921 - RNA, 74 nt, Human
agguuguaggugagcucauagucugaauucacaaacagaauauuuucaggcuugaggucuguaugugucagcuu

SEQ ID NO: 4188922 - RNA, 56 nt, Human
agguuguccugguggaaggagaaaccauggaccaggaccuuugaaucaggacacuu

SEQ ID NO: 4188923 - RNA, 99 nt, Human
agguugucguugcaagucaaguuucccuagaaagcagacuuugucauggaaacugcauguaugaaguuuacuggggagaucaccugggaucaacaaccu

SEQ ID NO: 4188924 - RNA, 75 nt, Human
agguuguguggaggggcagcccaaagcgacugauucucuuuugucuuaucagucuggguccccgacacgcuaccu

SEQ ID NO: 4188925 - RNA, 57 nt, Human
agguuguuuugccucauuauccaaggaauucuguggacagaggggcagugacaaccu

SEQ ID NO: 4188926 - RNA, 129 nt, Human
agguuuaauuuuccauggguugccuauuuuaaaacuaugcagacaagauuaacuuguggauuuuuuccaaaagaagcugcaaaaaauuucugucucauggaagaaucaucccugaaaaguuucuugccu

SEQ ID NO: 4188927 - RNA, 55 nt, Human
agguuuaucugaacccggggaaugcuuuggucagcaaaacuggacagaaaaaccu

SEQ ID NO: 4188928 - RNA, 108 nt, Human
agguuuauguccgagacuaaacugugcaugaaccgaaacaaaaagcaaguucauaccgcugcauucuguucucuuguucugacgguuaauucacuggacaucaaauuu

SEQ ID NO: 4188929 - RNA, 105 nt, Human
agguuugagacauuugagguaaacagcuuugagcaguucuguaucaacuaugcaaaugaaaagcuccagcagcaguucaacucgguaggcuugguuucuagaccu

SEQ ID NO: 4188930 - RNA, 80 nt, Human
agguuuggacacaccuggagagcucgggccaggcagggccacaccugugagccugagcucauccaacaccgcccggagcu

SEQ ID NO: 4188931 - RNA, 84 nt, Human
agguuuucagcacuguagcagccauagucccuggggucucugcagaauccaggcacuuguuugccaggcagaccugaaauaacu

SEQ ID NO: 4188932 - RNA, 85 nt, Human
agguuuugagcagaggugacauaauaaucugaccuagauuuuaaaaggaucacuuuaguuacuauguugccacuagccugaaccu

SEQ ID NO: 4188933 - RNA, 64 nt, Human
agguuuuggaauauuaaaaugucucacugcaucggcacuguuacuuugauugguauucuaaccu

SEQ ID NO: 4188934 - RNA, 66 nt, Human
agguuuuggcucugcagguuugcacccagcucugugguguaugcccucacaggucacccaggaccu

SEQ ID NO: 4188935 - RNA, 71 nt, Human
agguuuuggggguuguuuguuacaguaguuagccuaugcugacuaauacauuaccuaaccucucugaaccu

SEQ ID NO: 4188936 - RNA, 85 nt, Human
aguaaaacaucuucaaguucaacauuuuuucaaguagacuuaccuacuagugaagaagauuugacugaaauggaugugguuugcu

SEQ ID NO: 4188937 - RNA, 101 nt, Human
aguaaaaugacuccuaauaaaagcucuguauauugagugcuuacuauguuccaugcauccugguaagcacuucauguacaugaucuaauuuagcacuuacu

SEQ ID NO: 4188938 - RNA, 70 nt, Human
aguaaaauuggagggguugcuauaggaacacacaaagugaugcagagcaauaaccacucuaauuuauacu

SEQ ID NO: 4188939 - RNA, 58 nt, Human
aguaaacaguaucuuuagugucugagcaaauuuuuugugguaacagaugcuguuugcu

SEQ ID NO: 4188940 - RNA, 82 nt, Human
aguaaaguaaauucaaggaucuguuaaaucugguaaaaguagaucaaaucagagaucgacagccuguggagagugcugaacu

SEQ ID NO: 4188941 - RNA, 79 nt, Human
aguaaauacccagugagacugucuuggugaauggauaauaguagcuaacauuuaugaagcucucacugugugucaggcu

SEQ ID NO: 4188942 - RNA, 60 nt, Human
aguaaauauuuuaggcuuuccaggcuguaauauuacagucugugccugaacuauuucacu

SEQ ID NO: 4188943 - RNA, 129 nt, Human
aguaaauguaacuuuucuuuagacuaacaccaguuuauuuagugcuuucuguagccauugcucccauaugugaaauguggugguaaugagccagaugauggauauggugguggaauuguuuugguuacu

SEQ ID NO: 4188944 - RNA, 59 nt, Human
aguaacauuuagcuucucacugaagaggguccccuuuggaaggcuuggcuagauuuacu

SEQ ID NO: 4188945 - RNA, 57 nt, Human
aguaacuuaggagauacaugggugaaaaauccauuaagcucuuaucucuagguuacu

SEQ ID NO: 4188946 - RNA, 77 nt, Human
aguaagauaguuaaagagauccacauuccagagcuguuuaacuuugggcaaguuacuuaaucucucugacccuuacu

SEQ ID NO: 4188947 - RNA, 90 nt, Human
aguaagguuuggugcgguacagugauuugcccacagucccccagcccaugacugacagggccaugcugcacugcccucgaccucuagacu

SEQ ID NO: 4188948 - RNA, 90 nt, Human
aguaaguauuugaaaaauugauuaauguuagggucugaguuuauguaucauauucagaauucuacaauagaucagguaacaaauacugcu

SEQ ID NO: 4188949 - RNA, 56 nt, Human
aggucugggauugaagacaucaagggggccuccucgcugucccccaaccccagccu

SEQ ID NO: 4188950 - RNA, 56 nt, Human
aggucuggugggcuuuagauuggggucacagggagacccaaagcccacuagcgccu

SEQ ID NO: 4188951 - RNA, 61 nt, Human
aggucugucuggccccaugaaucuuuuggugagauaaaugcaagggaaaggcaagagaccu

SEQ ID NO: 4188952 - RNA, 56 nt, Human
aggucugugugugucucuccucaagcuacucaagcugaggcuuugugugcaugccu

SEQ ID NO: 4188953 - RNA, 70 nt, Human
aggucuuuuuccaccuggggcucuguuguucuaaaucccagacgucuagucucaagcuggagaauuaccu

SEQ ID NO: 4188954 - RNA, 74 nt, Human
aggugaaaguguuuugcguacugaagaaugcaauuguauuuauugcauucaucuucaugaaagcacauucauuu

SEQ ID NO: 4188955 - RNA, 76 nt, Human
aggugaacuggacacuagaaugaaucuggaagauuuuaauugcucuaggaauuucaucuaguucucacagugacuu

SEQ ID NO: 4188956 - RNA, 74 nt, Human
aggugaaggcccacuaaucuccagaaagaauuuuuguuugcuucuucuaggcuucucagggggcacuuucaccu

SEQ ID NO: 4188957 - RNA, 67 nt, Human
aggugaauaccgacaguguaaggugcucuuccucaggccaugccguuugcugucguguuuucugcuu

SEQ ID NO: 4188958 - RNA, 60 nt, Human
aggugaauugauugacucuggguuauauuacugagcacugggaauacaaguuauucaccu

SEQ ID NO: 4188959 - RNA, 72 nt, Human
aggugacugcacagaaaugucuacacauguguuuucacauacauaugucuacccaugccuguguggacacuu

SEQ ID NO: 4188960 - RNA, 101 nt, Human
aggugagaaaaauguaccugguccuuacgucauugcuuuaugucaaauugaaaugagaaguaaaacgcuaaggaaacuaaguaaacaucagaaagucaucu

SEQ ID NO: 4188961 - RNA, 100 nt, Human
aggugagagggucgcuugagcccaggaguuuaaggcugcagugagccaugaucucaccauugcacuccauccugggcaacagagcuagacccugucucuu

SEQ ID NO: 4188962 - RNA, 67 nt, Human
aggugagcaccucuccagcuggaacaugaaguuaguuaaacauuuccaguagggagucugcuuacuu

SEQ ID NO: 4188963 - RNA, 68 nt, Human
aggugagcuucucagaacauuauucaaguuucugcccuugaacacaguucugaugagcuuaauuaccu

SEQ ID NO: 4188964 - RNA, 85 nt, Human
aggugaggcugggaaguccaagaccaagaugccacagauucaguucuuggugagggccuucuucccaguuugcagauggacaccu

SEQ ID NO: 4188965 - RNA, 64 nt, Human
aggugagucaugcuaaagugagagucaggauucugucugguuuucacaauagcuggcaucaucu

SEQ ID NO: 4188966 - RNA, 64 nt, Human
aggugauaaaauauguugugugacaugggaaaugccuaugauacauugcaaaauuuuaaaaucu

SEQ ID NO: 4188967 - RNA, 105 nt, Human
aggugaucggacucccacaugcuggaauuguggcaucaggcugguagcugcugacccugagcagcugggagcagagccacagccuggugggaaagaugaguaccu

SEQ ID NO: 4188968 - RNA, 66 nt, Human
aggugaucucauggcuuguaggaggugagaaguagcucucuuucagaaaggccagugauaucuccu

SEQ ID NO: 4188969 - RNA, 76 nt, Human
aggugauuaagucauucccacucagaagccacuucaugugagcauuagaguuacuggguggaaggcacuuucaccu

SEQ ID NO: 4188970 - RNA, 60 nt, Human
aggugcagugguguggcaaagggcuucacaacuagguuuauuugugacaccauuguuucu

SEQ ID NO: 4188971 - RNA, 71 nt, Human
aggugcugaguucagcugccaggacacccuggggacaagugucccugauccacuggaccccuucagcauuu

SEQ ID NO: 4188972 - RNA, 84 nt, Human
aggugcuuggaauaauggucaaaaagauacguaaagcaucuauguguauauuuuguguaucuuauugcaguauuuuuugucccu

SEQ ID NO: 4188973 - RNA, 119 nt, Human
agguggaaaggcaaaaggaagacaggccagcuaguucccuccugcccuuuuguaagacacgaaucccauccaugaggacagagcccugguggccuaaucaucuccuaaaggcuccaccu

SEQ ID NO: 4188974 - RNA, 128 nt, Human
agguggagacugagaaaggaaguccucagcagugucaguucccagagcuuuggaagaaggaccagcagcucugucccugggaaccaucaaaaaaugcuguugauguuuucugugucugucugucaccu

SEQ ID NO: 4188975 - RNA, 55 nt, Human
agguggcagagugacaggcugauaugaauuacauuaagguuucuggcugccaucu

SEQ ID NO: 4188976 - RNA, 70 nt, Human
auaugcaaaguuuggcucucaugacauuuuggugaccuuaaguugaugucagagaucaggcuuaauuuau

SEQ ID NO: 4188977 - RNA, 70 nt, Human
auaugcaacuauaugauguggcauaguuuuaggcuuuccugaauauggcaacucuuguaacuauguaugu

SEQ ID NO: 4188978 - RNA, 82 nt, Human
auaugcauggauacacguauaugugugggccugcauauccuggauauccaggauagucacaagugugugugugagugcaugu

SEQ ID NO: 4188979 - RNA, 74 nt, Human
auaugggcugaggaagcuccugaggauagagaacacuaucaaguagaaagacucaggaagccaucagccuauau

SEQ ID NO: 4188980 - RNA, 84 nt, Human
auauggguccacuuuguuccuuucacaaagaaaauggucugcauugagguuucuuuucaagaggggcaaggaggaaucucguau

SEQ ID NO: 4188981 - RNA, 104 nt, Human
auauguaagagaaaguaguuguucauuaaauguuuguugugccaggggaaacaaucaaucaaaacauucucuuuuuaaacauucuaacauuuucuuaagcauau

SEQ ID NO: 4188982 - RNA, 63 nt, Human
auauguacacugugacaaucaugacagcuccuuaagcugaugaauaaaaacaguaguauauau

SEQ ID NO: 4188983 - RNA, 107 nt, Human
auauguguguuucugauuuuguaauuugauacucauuguggugcucagauguuaacuggguggauuaggauaggguauuuuaauuugguggauugggauacauguau

SEQ ID NO: 4188984 - RNA, 67 nt, Human
auauguuauguguauagguaugcacacguguguaugcagguguguauauaugugcacauguauguau

SEQ ID NO: 4188985 - RNA, 77 nt, Human
auauguuguuucugggagauucauaugaaaaaggauuuuuuuucaucuccguuuuuauguuguccucaguguuauau

SEQ ID NO: 4188986 - RNA, 65 nt, Human
auauguuuuucacagguuuaagcuaaaauauuguuuuagaaggcaaauaaaccugagaagcgugu

SEQ ID NO: 4188987 - RNA, 95 nt, Human
auauuaaaauggauguguaaaguuagaugucugauaaauaguauuuuuuuagauagaguuuuuuggcuuaauacauauucagcaguuuuuaauau

SEQ ID NO: 4188988 - RNA, 57 nt, Human
auauuacuugcauuuauugaauguacuucauguggcaggcauugaugcgaguucugu

SEQ ID NO: 4188989 - RNA, 56 nt, Human
auauuauauucaaagaaagagaggagacagagccucucuaguauuaaauauagugu

SEQ ID NO: 4188990 - RNA, 130 nt, Human
auauucagccuccagaauaaugauguauugauuggauaaggacaagaaaaugguauauuugcaaggaaguagccuagucaggcaauuacuuucagaugugcuguaaaacaguuaaugugaggcaagaugu

SEQ ID NO: 4188991 - RNA, 80 nt, Human
auauucuuaggauuucucucuucaggucucuaucugaauaccuagagcuaugaugacaagggaggguccugcuagaauau

SEQ ID NO: 4188992 - RNA, 99 nt, Human
auauugauaucaaaggagaaguaacucaggaaaugaagacugguuauggacucauggccuggcuuuccuggugguucucuaaacuuugaagauuuuugu

SEQ ID NO: 4188993 - RNA, 69 nt, Human
auauuggauccagcagcuccaaagaauagccagaaaacugauacucuaaugggcugcugcacacgguau

SEQ ID NO: 4188994 - RNA, 71 nt, Human
auauugguuccaauauuucucacauauggaaaaugucauuuucccugggaauuaauauuuggaacuggugu

SEQ ID NO: 4188995 - RNA, 58 nt, Human
auauugugaugguuuaguaucauuguuaauugcaucuugguaucaaacuauacaauau

SEQ ID NO: 4188996 - RNA, 64 nt, Human
auauuguuagugcaauguuuggugaacagcaaaauguucaacagauguuagcucuaauuuuuau

SEQ ID NO: 4188997 - RNA, 126 nt, Human
auauuuaauuucucaaucuguuguugucuuguaauuacaugaguacuguaagcuuagggaagcuacaccuaguuuuaugguuacauauauuuaacauuauaauaaaauucaggaagaauucaaugu

SEQ ID NO: 4188998 - RNA, 88 nt, Human
auauuuagugagaaaaaggcugguaguauuuagucacagcauguagacacugcuggugacugacuacuucaguccagaacacaaauau

SEQ ID NO: 4188999 - RNA, 130 nt, Human
auauuucuugguauuuuucacugcucucuccccagcaccaggcacauaguaggcacucaguagauaguuguccagugaauggauguguacuggauguuugggacugugcugagucccuuauaggggauau

SEQ ID NO: 4189000 - RNA, 64 nt, Human
auauuugauuauauuaacuauguuccuuaacuagugugaggaacuggugaaguguagugaauau

SEQ ID NO: 4189001 - RNA, 127 nt, Human
auauuugggaauaaauuccagaucauugcugcuguugcagcugcuguuccucaugguagacaaaucuuuccaaggcagagggagggcagcugaggguagcaccucugguaagaaaguuuuaaaaugu

SEQ ID NO: 4189002 - RNA, 79 nt, Human
auauuuuugugacuaaaugcuuugugcaugcagccauugagugaaaggguguguguguguguguguuuaguugaaauau

SEQ ID NO: 4189003 - RNA, 110 nt, Human
auauuuuuuuguaucaccccuuauauauguauacaaaugcauagauacauauucuuugcacguauguguguguuuaugugugugcauauauauauugauuagagaagugu

SEQ ID NO: 4189004 - RNA, 79 nt, Human
aucaaacuggcuuuaaacacugaaauugcauguaacuggaaaaugccagauguagagcagucuuuggguuaggcuugau

SEQ ID NO: 4189005 - RNA, 62 nt, Human
aucaaagagugagauuuuuacugguuauuuaggaucuaggcauccaguaaucuccuguugau

SEQ ID NO: 4189006 - RNA, 59 nt, Human
aucaaagguaucuaugcugucugauguacaaucaguuacauagccgcagugccauugau

SEQ ID NO: 4189007 - RNA, 86 nt, Human
aucaaaggucugauuuuuuauucccagacugagauauuauaauaugaaaguacaggugaauuggggauaaagaaugaagacaggau

SEQ ID NO: 4189008 - RNA, 65 nt, Human
aucaaaguugaccacccaguauaaacaccacuuuuuaggcuugugcaaaggggguuaaucaugau

SEQ ID NO: 4189009 - RNA, 71 nt, Human
aucaaaucaucgcaaguuacauuacacuuuugaagaaggaaguguuucuuggaauguugcgauuauaggau

SEQ ID NO: 4189010 - RNA, 55 nt, Human
aucaacauagccacuccuuagagcagagugauugguucagggaugaauaugugau

SEQ ID NO: 4189011 - RNA, 86 nt, Human
aucaacugcucagaguggugacagggacgaggcuucaggcauuggaaggaggugcuggcuuucugucccuggcauuugauagugau

SEQ ID NO: 4189012 - RNA, 77 nt, Human
aggcuuggcucuaggaaccaaagugauuuguucuuguuccaaccugggcuuugugacuuugguuagugccacuaccu

SEQ ID NO: 4189013 - RNA, 55 nt, Human
aggcuuugugguaguggcauuguuccuaaagagugcaugaaagcauacaaggccu

SEQ ID NO: 4189014 - RNA, 118 nt, Human
agggaaaaauggaaccagccagaggccuuggcaugaagucagcagcugggaggaaggggccuccacaaaguugcugaguuucugaaaucccaggcacuccauggugcaauuuuuuucu

SEQ ID NO: 4189015 - RNA, 60 nt, Human
agggaaacuagacugccuuucuguuccuucuaagugaggccuucucagugugguuuccuu

SEQ ID NO: 4189016 - RNA, 55 nt, Human
agggaaagaggugaauguuggaaggagccagcuguucacauccugcuuuuucccu

SEQ ID NO: 4189017 - RNA, 97 nt, Human
agggaaaguguuaaaauuaggucuggguuuuagacuggcgaguuuuaaguguaaacauguugauuagagagcuuagagucuaacccacgcugucccu

SEQ ID NO: 4189018 - RNA, 60 nt, Human
agggaacagagguagcgccagagcuggagcccacaccagccccgcccugccugcugcccu

SEQ ID NO: 4189019 - RNA, 72 nt, Human
agggaagacguaucucuuuuaaagaacugagaaaugcuccuuagaaggcuuugagagauacuugacuucccu

SEQ ID NO: 4189020 - RNA, 77 nt, Human
agggaagaugaugaauguguccagaagacuugaggugacuaaggaacacuuguggaaacauucgcugacacuuuccu

SEQ ID NO: 4189021 - RNA, 80 nt, Human
agggaagcucugacuuggugcuaccagccagaguuucaaacauuuuucuuuacuuuguugggcccaauuagacuuucccu

SEQ ID NO: 4189022 - RNA, 62 nt, Human
agggaaggcuuuuacuauuuguuaacucacuugagggacauaaacugucaaaagccagcccu

SEQ ID NO: 4189023 - RNA, 64 nt, Human
agggaagggcacaggcuggcaggaucuggcuucaaauccaggaccuguccccuggcccacuccu

SEQ ID NO: 4189024 - RNA, 116 nt, Human
agggaaggggcaggggagcagcagcagcugucuaggccccuaaagcaucuccuggcucuucagcaggaggagcuggccgccucauucagcucccugcugaccuacggccucucccu

SEQ ID NO: 4189025 - RNA, 74 nt, Human
agggaaguuuaaaaacuuugugaaauaugauaccaggcaaagguucacagguucuuuuuaaggcugacuucccu

SEQ ID NO: 4189026 - RNA, 61 nt, Human
agggaauugggcaguauggaugaccucgaguuccgccuucucuuuccugcccaguugcccu

SEQ ID NO: 4189027 - RNA, 83 nt, Human
agggaauuguggaaggcacuagcaagcugccuggcccagagugggcaucugguaaucagcggcugcugcugcuacuguucucu

SEQ ID NO: 4189028 - RNA, 72 nt, Human
agggacaaguaauuuaugcaaacggaccagaauauuauaucaucuacuucuuuugcacugaugcaucucccu

SEQ ID NO: 4189029 - RNA, 58 nt, Human
agggacaccauuauggcaguggcugugcccucuacccacagccacagcugggugccuu

SEQ ID NO: 4189030 - RNA, 63 nt, Human
agggacacuugcuuucaggcccaacacauaguccuuccaaggcccaucuugagagaagacccu

SEQ ID NO: 4189031 - RNA, 61 nt, Human
agggacagcugaaaccagggaucuggguggccccugggcucuguguuucaguuucuucucu

SEQ ID NO: 4189032 - RNA, 88 nt, Human
agggacauuaaagauaauuaauuuuguucauucagucaguucucauacuaggauugaguaauauaaaguucaugaucauugauuccuu

SEQ ID NO: 4189033 - RNA, 81 nt, Human
agggaccaauuagugucaacugugaugucaacacuugccugucaaguccugcauccaguuacaucuuccuaaugaagcccu

SEQ ID NO: 4189034 - RNA, 78 nt, Human
agggaccugacugauucacaugaccaugauggaacuugaggaaaacuauuuugcuggucugaauuacuuucagccccu

SEQ ID NO: 4189035 - RNA, 55 nt, Human
agggacugccugccuuccuccuaggcaaaggccacgaagagucacaggcagcccu

SEQ ID NO: 4189036 - RNA, 89 nt, Human
agggacuguagagcaccaagcuagaggugagcugugauucaaacuccaaguccucgcuucuagcugugucccagugcaggcaguccacu

SEQ ID NO: 4189037 - RNA, 61 nt, Human
agggagacacaugaggaagucauuuaacauccuugagucccacuuucucgguuucucaccu

SEQ ID NO: 4189038 - RNA, 79 nt, Human
agggagaggagggucuuguugaacuugaaaaaacuaaauaagcaaaguugauacauaaggacacccuucucuuuacccu

SEQ ID NO: 4189039 - RNA, 65 nt, Human
agggagagucaauucugcuguguggccaaaccucuccaccacgcuccauggcacagucuuucccu

SEQ ID NO: 4189040 - RNA, 67 nt, Human
agggagauauguccugagacauugacaacuccccaaagucuugaauaugucuaugacauauuuccuu

SEQ ID NO: 4189041 - RNA, 70 nt, Human
agggagaugagcuaaguucucacagcaagucagugacagaucugcugcuggaucuuacucaucuuacccu

SEQ ID NO: 4189042 - RNA, 66 nt, Human
agggagaugccagaccauccaguugggacuugcugagaauggucccucacugguucugcauccccu

SEQ ID NO: 4189043 - RNA, 112 nt, Human
agggagauggguagagauugauggcaccaggcucugagaggaaugugagaucugguuucguguuuaacuccagagaccugcugacccagcauuguccugaggaauucucccu

SEQ ID NO: 4189044 - RNA, 75 nt, Human
agggagauuaaauuauagcugucguaguacaaaauucuaguaccagguaccacacagaugcuauuuagucucucu

SEQ ID NO: 4189045 - RNA, 108 nt, Human
agggagcaaagguccucucuggugagggcagggaguguggggagcagcuguccaagaacagcccuggcaccucguugcccagccacagcccaggauuccauguuuccu

SEQ ID NO: 4189046 - RNA, 75 nt, Human
agggagcagugccaaagaauuugcggacauguuucaaaacauacagccccugcucuguggacacugauuauccuu

SEQ ID NO: 4189047 - RNA, 66 nt, Human
agggagccagagauccaggauggcucauucgucucacuuuugaccgcccugcuucucuaguuuucu

SEQ ID NO: 4189048 - RNA, 56 nt, Human
aguacuuuaaaguuucagaagcaagaugcugucuugcugcugaucauuuauagucu

SEQ ID NO: 4189049 - RNA, 63 nt, Human
aguacuuuguccauuugcaggcagauguuaaauacagcaguuggcucguguggauacaguacu

SEQ ID NO: 4189050 - RNA, 80 nt, Human
aguagaaauuuucugagcuuugccuaaaacuagaaucuguguugagguuuuucaaaauuaaguaacgccagagacauacu

SEQ ID NO: 4189051 - RNA, 113 nt, Human
aguagaaccaccagcuaugauuuucaaauguuacggguuaucuuuuauugaugcauuuucaagugucagucucauuucuguacaugaguugagaaucauguuaguuauuuacu

SEQ ID NO: 4189052 - RNA, 58 nt, Human
aguagagcugcauaaaacucugaccuaaccagccuuaccaucagagagcagcuuuauu

SEQ ID NO: 4189053 - RNA, 77 nt, Human
aguagaggaaagugguaggaagagagcacugaguuugggaaagaaccaguaagcuguauuuacucacccccuuuacu

SEQ ID NO: 4189054 - RNA, 79 nt, Human
aguagaggaagcugcuggaguagugugccaggaccacucugagcuccaacugaucucacagcagaaagcuuucuuugcu

SEQ ID NO: 4189055 - RNA, 57 nt, Human
aguagagggcucaaagccaguacuaccuuucucaaguacauuugaguaucaucuacu

SEQ ID NO: 4189056 - RNA, 122 nt, Human
aguagauauaaccugagaugauagauuuaaacaggauauuuacguucugcuacaauugacugauaacacuugaaguguagucugaacaguaauuuuguuaaucauuucaacaaguauuugcu

SEQ ID NO: 4189057 - RNA, 72 nt, Human
aguagaucccacauggagaaauguaccacugaaccuguguaguuugcugaguacucuccuguguaguuugcu

SEQ ID NO: 4189058 - RNA, 56 nt, Human
aguagcaauguuugagaagcacugacauacagcaaggcuucucaaagggugcuccu

SEQ ID NO: 4189059 - RNA, 78 nt, Human
aguagcgcgccacguagauuccuccaugcgcaguucacaguaggguuugugcuccuaugagaaucuaaugccgcugcu

SEQ ID NO: 4189060 - RNA, 72 nt, Human
aguagcugcucucuagcuaaccuguagcauuggcauucagcuccagugcauagauccugaggccuagcugcu

SEQ ID NO: 4189061 - RNA, 128 nt, Human
aguaggacuuucagugucuuccucccaaaaacuucuaagcugauuccacuuuuuccccagagcugcugcagugcgguguggguggagggagggaucaggagguacagaaggaaacagugaccccugcu

SEQ ID NO: 4189062 - RNA, 61 nt, Human
aguaggagcucauggggccaggaggguugugggaugcccucugggcucugucagcaccucu

SEQ ID NO: 4189063 - RNA, 87 nt, Human
aguagggcagaaacauguagcucugccagguauggagcacauggcccgucccugggcaccaggccugguaaacagccugcuccugcu

SEQ ID NO: 4189064 - RNA, 102 nt, Human
aguagggguaaauucugugugcuguuagggagcugcccugacaacccaggcuguagcuagacuccagacaagaccacauccugccagaauucuucccuugcu

SEQ ID NO: 4189065 - RNA, 56 nt, Human
aguaggguuuuucagccucaauauuaucaacauuuggggcuggauaauucuuugcu

SEQ ID NO: 4189066 - RNA, 77 nt, Human
aguagguagaauugaguuggaaguuuaagaaaacccaaucaaggucaucaaugagcaguucgacuucuuccccaacu

SEQ ID NO: 4189067 - RNA, 63 nt, Human
aguagguuuucagccaacaaguugacaucggaaccugugaggcgguuggcacugaaaauggcu

SEQ ID NO: 4189068 - RNA, 82 nt, Human
aguaguaaauauuucaaaaggaaacacaguuuauuaccuaggaaaauauucugguuguguuuucuuauggcauaaaauuauu

SEQ ID NO: 4189069 - RNA, 59 nt, Human
aguagucucaguuucucuagguggguccccuaccuccugcccaggacuuugcagacacu

SEQ ID NO: 4189070 - RNA, 73 nt, Human
aguagugauugguugaaaguagaauacuauauuaacauuuuagucaauucuuuucaacucaagcaaaacuacu

SEQ ID NO: 4189071 - RNA, 55 nt, Human
agggcaggagcuggggugggcaggcccugaggucagccaguaccauucugccacu

SEQ ID NO: 4189072 - RNA, 55 nt, Human
agggcaguguggugggacugacucaacagacauaguuucaucuccacccugcccu

SEQ ID NO: 4189073 - RNA, 58 nt, Human
agggcaguguuaggacugucuggcucugaaguccaaauuccuucuaaaacgcugcccu

SEQ ID NO: 4189074 - RNA, 57 nt, Human
agggcaguugcaguggugggcagcaccccccaugcccacaugagcuggcaaugcccu

SEQ ID NO: 4189075 - RNA, 126 nt, Human
agggcauacuuugccacagaggacagucuuggaccucaguuauucuaucauaguucaugaccccauuauaaucagaauacacugggagugcuggcuguaucuuuuguuuguggcuuuauuugcuuu

SEQ ID NO: 4189076 - RNA, 62 nt, Human
agggcauagcagaaagagcucuggacugaaagucaauaaacuugaguuuaucuccuagcccu

SEQ ID NO: 4189077 - RNA, 57 nt, Human
agggcaugcuggaggagagacagggcacuagcccugccucuauuccugccugcuccu

SEQ ID NO: 4189078 - RNA, 59 nt, Human
agggcauggaaggaaaaagucaggaggcaagauuucucuuuauuuccaguccagguccu

SEQ ID NO: 4189079 - RNA, 59 nt, Human
agggccacaugacuagguucuagcuaagacaauguaagcagaacuguuguuuggguccu

SEQ ID NO: 4189080 - RNA, 92 nt, Human
agggccacgccuuacacaaggugacaugaaaaauguugagguguagcaguuuauucccuuagguuaaucaugaaccuuucuguuaggccccu

SEQ ID NO: 4189081 - RNA, 68 nt, Human
agggccacuguguuucauucucucugaauggccccuggagcugagcagggaggagauacuguguaucu

SEQ ID NO: 4189082 - RNA, 55 nt, Human
agggccacuuugaggugaaauggcuuuuuuacauacucagcaucaauuugguccu

SEQ ID NO: 4189083 - RNA, 63 nt, Human
agggccagaugaagccacaagccuccuccaccuugagcacugauggcagaucagcugggcccu

SEQ ID NO: 4189084 - RNA, 76 nt, Human
agggccaggugaccacagguaugggcuuggcagggagaaccagccugcuaggcagagggcuguggagcugagcccu

SEQ ID NO: 4189085 - RNA, 75 nt, Human
agggcccaagcaacauucucuguggcauuagugccugaaacggcagcaaguaaaagcaggugugcugggcgcccu

SEQ ID NO: 4189086 - RNA, 60 nt, Human
agggcccacaguuccuauggccguuaccucucucagaagccaggcagagcugugaguucu

SEQ ID NO: 4189087 - RNA, 73 nt, Human
agggcccaugugaggaggcccagguuggggcugugaggaggaagagccccccaagggccuucucuuggauucu

SEQ ID NO: 4189088 - RNA, 59 nt, Human
agggccccaguaagauuacaugcucaacaaaagccuacuguauuucuggcuggggcuuu

SEQ ID NO: 4189089 - RNA, 80 nt, Human
agggcccccaggcccggcccucugcccucagaacucagcccagugugaucuggugacacgaggagcugggauggggcccu

SEQ ID NO: 4189090 - RNA, 107 nt, Human
agggcccugugggcacauuucugcaucucagagcuagguggucuccauggucucuuuagcucuguggaucuuuuuaagcugaaacccugugauaacccuagggccuu

SEQ ID NO: 4189091 - RNA, 76 nt, Human
agggccucccguaguuuucucaguuugcuguaagaagaaugaaaagaaagcagagguguuuauuaugggagguacu

SEQ ID NO: 4189092 - RNA, 107 nt, Human
agggccucucgcuggggucaaacuaagcuggaaucucuuuggggacugaagaucguuuccuccccuagagagguuugcuccauugugcuuccaggggaugcugcccu

SEQ ID NO: 4189093 - RNA, 78 nt, Human
agggccucugccugggccucugaggaaggccuggcuccgcuccccccuugccuuucucuacccccagcucaagguccu

SEQ ID NO: 4189094 - RNA, 78 nt, Human
agggccuugcugucugaagcuggaaaugaaaucaacaacacaacaacauccuuggguucuaagggacagccaggcccu

SEQ ID NO: 4189095 - RNA, 62 nt, Human
agggcggaggcguuaccaugauguccgcguaguccgugggcaucuggaucugcuucuccccu

SEQ ID NO: 4189096 - RNA, 55 nt, Human
agggcuagaguuugagaaaggguucugaacuggaaucaguuuaaauccuggcuuu

SEQ ID NO: 4189097 - RNA, 68 nt, Human
agggcuagcccagcuuucuucaucaagugccacgucccgugaugucccgggaugaagaagggcucccu

SEQ ID NO: 4189098 - RNA, 62 nt, Human
agggcuaguuggaaggcaaaaauacaguuggaauuuguaaccaacugcuuucuuccugcccu

SEQ ID NO: 4189099 - RNA, 75 nt, Human
agggcuauaauucagguuuucuggcacagugguuuugauccugaauguguuugagggccugggucacagagcucu

SEQ ID NO: 4189100 - RNA, 88 nt, Human
agggcuccaaggccauguucuuggccaccagaucucacugccccauaaacagagcaggagaggugaggccaggcaaggccugggcccu

SEQ ID NO: 4189101 - RNA, 56 nt, Human
agggcucccgugaggugacugcagccaguuucuuguacauaucaugguagaguccu

SEQ ID NO: 4189102 - RNA, 55 nt, Human
agggcugacacaccuuauccuccagaaagauuuggaccauuuggugagucacccu

SEQ ID NO: 4189103 - RNA, 78 nt, Human
agggcugauaauccauuacaacaguuacuaaauccucuuugggaauuagcuaauuaauuguagcccuauacagcaccu

SEQ ID NO: 4189104 - RNA, 57 nt, Human
agggcuggagauuacccuggagcccuccggcuucaucugaccaggucuccuugcuuu

SEQ ID NO: 4189105 - RNA, 56 nt, Human
agggcuguugugaggguuauagagcuaaugcuuguaaaaugcuuaggacagugccu

SEQ ID NO: 4189106 - RNA, 105 nt, Human
agggcuucuuuugagggccacuggccaggaucuaagacauuaauucugggaugucucaaacccucgacauuucuuagaaauuccccaguggcugaaggauucucu

SEQ ID NO: 4189107 - RNA, 115 nt, Human
agggcuuugugaaaucagguauugcuggcugcaguagcaagagacuccuaauccucacugcaggacugccucuaaaaucugcucacgucugugucugccugguuuucacucaccu

SEQ ID NO: 4189108 - RNA, 77 nt, Human
agggcuuuugacauuuguuccaugauguaauagaggauuuaaccaucaaauuaugugucaaagcauauucaggcccu

SEQ ID NO: 4189109 - RNA, 62 nt, Human
agggcuuuuuccuucacugauguggggcccacuuggcuccaucuggguggggagaaggaucu

SEQ ID NO: 4189110 - RNA, 73 nt, Human
aggggaaaaagaauguuuucuauagaagaacaguugauagaauuaacugucuaaggagaauaugaaauacccu

SEQ ID NO: 4189111 - RNA, 88 nt, Human
aggggaaaaauggacucuuuccagcucuucuguccuuuagagaggaccucagggugacagcuccuugguuagaugccguuuuuacucu

SEQ ID NO: 4189112 - RNA, 55 nt, Human
aggggaaaguaguuuaauaugggaguucugcugauucucacaggggcuuuucucu

SEQ ID NO: 4189113 - RNA, 67 nt, Human
aggggaaaugccuuggugguaccaugguccaugaaaaccaagaggucucaggagggcgguuccaccu

SEQ ID NO: 4189114 - RNA, 72 nt, Human
aggggaagaggaaggaguacccagcaacucgcucucacaguggcccaugcuccuggcuccuucccuaaccuu

SEQ ID NO: 4189115 - RNA, 71 nt, Human
aggggaaggaagaggcugguagugcccguggcccuggcgggacuggcuuugccucugccucucaguucccu

SEQ ID NO: 4189116 - RNA, 77 nt, Human
aggggaauuccaggaggaaaguuuggguguuuagcgucucaugucugccuggagcuuuuccauccuggaaaccugcu

SEQ ID NO: 4189117 - RNA, 89 nt, Human
aggggagaauauaugacugcaagacuaaacaggccagugaaggaagccaugaaauagguucuugcuguaccauaccauuauuuuucccu

SEQ ID NO: 4189118 - RNA, 56 nt, Human
aggggagccgaggggcaucugucggcccaagucagccacagcccucugcucugccu

SEQ ID NO: 4189119 - RNA, 75 nt, Human
aggggauaaagggggacuuccuggugcuggcuagaaagggugaugcucuucagccaggcagcccccugguccucu

SEQ ID NO: 4189120 - RNA, 83 nt, Human
aggggauagugcuaauguuguuguaccucaagcagaggauggguacauuucuugauuacaaauaacaucauaaccuguuuccu

SEQ ID NO: 4189121 - RNA, 79 nt, Human
aggggauuaggaaggaacaaacccugugugguggcucaauuucuuugccucaaucacaccaguuuccuuucaauucuuu

SEQ ID NO: 4189122 - RNA, 124 nt, Human
aggggauuucaugcgacggucagggaccagagcuggugcauauucagaaaaugcaggcaaauucucuguuaguuucuucauaugucaggaguacuccuuccucuuauguuuguuuuuuuccccu

SEQ ID NO: 4189123 - RNA, 62 nt, Human
aggugacggaagucuuguuccgggggcccacuuguucccauucauccucgcuuccuucaccu

SEQ ID NO: 4189124 - RNA, 111 nt, Human
aggugaggaaagaguaugccugcaggugagugaccugcucaaggccacacaggccaggccaggccuaggccuuggacucggguggacucacagccaggucuuucucucccu

SEQ ID NO: 4189125 - RNA, 77 nt, Human
aggugaguaaguucugaugucuguugccagcccuucucccucgggcuugucucucauucaugagaacacacucauuu

SEQ ID NO: 4189126 - RNA, 58 nt, Human
aggugauccucccgccucagccucccaaagcgcugggauuacaggcgaagguucauuu

SEQ ID NO: 4189127 - RNA, 87 nt, Human
aggugauccuuagacuuagaacaggcagaauuccaaagagcaucaaagcauuuggggaaguuugguuuaagaagauaaggacucccu

SEQ ID NO: 4189128 - RNA, 99 nt, Human
aggugauguacucaaaaaacagggcuuguugaaagcggagacaggaugggauuccagcugcucugcucaccagccaugugauuuuugaacaagucacuu

SEQ ID NO: 4189129 - RNA, 102 nt, Human
aggugauuagcaaaguuaaucagaauucugaagggcacaaaaaacaauaugaauguaauagaauuguacuuugugcuacucagaucagaugugcugucaccu

SEQ ID NO: 4189130 - RNA, 58 nt, Human
aggugauuucucaaagcacucagagcacaauaucugacuuugcaaaaggaaaucaccu

SEQ ID NO: 4189131 - RNA, 59 nt, Human
aggugcagcuacaccucagugcuguggguacagacccacugccuucaguugcuucaccu

SEQ ID NO: 4189132 - RNA, 100 nt, Human
aggugccuguucucuaugugccuauguuuccucuucuauaaaguggucugaauaauaccuacuucacagaauugacaugggaaucagagagauggcacuu

SEQ ID NO: 4189133 - RNA, 60 nt, Human
aggugcggagggagcagucggcugugggcgcucggaccacaggcugcccgcuccccaccu

SEQ ID NO: 4189134 - RNA, 74 nt, Human
agguggaugagauuaaagugagguucccucuggaaauauucuaauguaaccauccagccuccuuccucuccccu

SEQ ID NO: 4189135 - RNA, 79 nt, Human
agguggauuuaauugacaaacucuguugagauaauauuuucuuugaaagaauuaagcucagggguucacaauuucacuu

SEQ ID NO: 4189136 - RNA, 55 nt, Human
agguggcagacuaacagaaggauguguguaucccacugcuuugcucugcucaccu

SEQ ID NO: 4189137 - RNA, 70 nt, Human
agguggccacaagguggcuggccaggguuagagcugaacuucaggaagacaagccaugguugugacaccu

SEQ ID NO: 4189138 - RNA, 122 nt, Human
agguggcugucuucaaggaacucacagucuguuggguguuucagucaugugaacaaauaaauuguaauacaagacacuacauguaaaagacccaugggauuucaaagagagacaaucuaccu

SEQ ID NO: 4189139 - RNA, 63 nt, Human
agguggcuguggcuucccuuguuugcaagaucucuagcaggggagauugcauagcccucuccu

SEQ ID NO: 4189140 - RNA, 62 nt, Human
aggugggaguccaagguuuuuauaguucuucucucgaauuagugccugcagacucuacagcu

SEQ ID NO: 4189141 - RNA, 99 nt, Human
agguggggagaugagugagguagcugguacauguuuaggugugaguuuuguguacuacuuaggcuugguucagcuagauacaguuucccauauucaccu

SEQ ID NO: 4189142 - RNA, 79 nt, Human
aggugggggcuccugauggaauguuggccugucuuucauccggcaaggucacuuccugucuggauaagccaucccaccu

SEQ ID NO: 4189143 - RNA, 66 nt, Human
aggugggugcauuauuugaggucaggaguucaagaccagccugaccaacguggugaaaccccaucu

SEQ ID NO: 4189144 - RNA, 70 nt, Human
aggugguacaagaggcuuaauguuggcaaacaugcagcugauugcuaacgcucacccuuugccaccaccu

SEQ ID NO: 4189145 - RNA, 66 nt, Human
aggugguauuauucuggaggaagcaaaugggugauaucuaugcuuaccucuauggauaccucacuu

SEQ ID NO: 4189146 - RNA, 75 nt, Human
agguggugggcuggauuugcuugcagaucacaguuugcugaugucugcaagucuaaacuagccaugucaauuccu

SEQ ID NO: 4189147 - RNA, 94 nt, Human
agguggugugugcgccuguagucccagcuauuucugaggcaggaagaucacuugagcccaggaguuugaguucagcaugggcaacaugagaccu

SEQ ID NO: 4189148 - RNA, 72 nt, Human
aggugguuaguggcagagcaggugcuggaacucaggccucugcauuuccagcucucuccgccucccccaucu

SEQ ID NO: 4189149 - RNA, 57 nt, Human
aggugguucacgccuguaaucccagcacuuugggaggccgagguggguggaucaccu

SEQ ID NO: 4189150 - RNA, 86 nt, Human
aggugugagaacauuugcagggagaguagugcuggauaaaggucauugcaccaugaaagccuuccuuuauaugucuccagcuaccu

SEQ ID NO: 4189151 - RNA, 64 nt, Human
aggugugaguaucugcuauuccagauuaaaauagaaaucguuggcaauggcagaugccauaucu

SEQ ID NO: 4189152 - RNA, 87 nt, Human
agguguucguccuuggaaagucuaaucucuaagcacugcucagaauauagcuucagagaugguauuuauccauuggggugaccacuu

SEQ ID NO: 4189153 - RNA, 77 nt, Human
agguguuuacaguaggauuuucagggucuucaaucugucauauugcuagacauagacuuucuacugugucaucacuu

SEQ ID NO: 4189154 - RNA, 78 nt, Human
agguguuuucucuucuccaaacucagacuaaguauccuuccauuggcaaaugcuugguuuguuggguccuuuacacuu

SEQ ID NO: 4189155 - RNA, 78 nt, Human
agguuaagggggcucagcaggcucuggaugaucaugacagcugugaugccuccgauacugcuggcccugccauagccu

SEQ ID NO: 4189156 - RNA, 78 nt, Human
agguuaauggggcucagcaggcucugguugaccauuacagcagugaugacuuccaugccgcuggccccaccauagccu

SEQ ID NO: 4189157 - RNA, 76 nt, Human
agguuacauagcugguagugguucagccagauuuggaacccaaacagucugaugccaucugccaugugcuuaaccu

SEQ ID NO: 4189158 - RNA, 60 nt, Human
agguuagauuguauguggucauucuuuuaauaagaauggauaagaacaaauaucugaccu

SEQ ID NO: 4189159 - RNA, 70 nt, Human
agguuaggaaaauggaguccuuuuaucauguuacauaaugcaaagucaaaagaaacaccauguuccuccu

SEQ ID NO: 4189160 - RNA, 57 nt, Human
aguguuuuguuguuaccagugccuugacugaauggcuuaggaacaguguaagacacu

SEQ ID NO: 4189161 - RNA, 129 nt, Human
aguuaaauguucugcuuaaggcuacuuauugauuggaaggcaggguauagucuuggggagcccugagcuccuagaaugcaccucugcugucacaagcuauagccauguggucugugaauauuauguccu

SEQ ID NO: 4189162 - RNA, 75 nt, Human
aguuaagagaucuuucuggagaagaaccccugaaaugauucaggguuucggcucaacagaauuggauuauuggcu

SEQ ID NO: 4189163 - RNA, 70 nt, Human
aguuaaggaggugggaacauaguccuguucgaaguacauuucuuacaugauuggacuccuuccccuugcu

SEQ ID NO: 4189164 - RNA, 67 nt, Human
aguuaaggggguucaucuguaagagacauuugucuauuaucucuuauagcaauaauauccuuuaauu

SEQ ID NO: 4189165 - RNA, 64 nt, Human
aguuacauaaaaguucacguaggcuggaaaaagggggaaccagccuaccugaacuuuauggauu

SEQ ID NO: 4189166 - RNA, 89 nt, Human
aguuacauuugcuaccugggcaccuuggacuucuuccacccagggaacagcaggcaauaaaaggugucaccagauuggcagggguaauu

SEQ ID NO: 4189167 - RNA, 71 nt, Human
aguuacuauucagcaugaaaggauuugagugcaauuugcaugucucuuucacauuguuguuuuaguaaacu

SEQ ID NO: 4189168 - RNA, 61 nt, Human
aguuacucaaccucucugagcuucaguuuucuucauuagugugucagagagaauaguaauu

SEQ ID NO: 4189169 - RNA, 60 nt, Human
aguuacuugcugagaugcaauuccucauucacacagaaaaccaaauugucagcaguagcu

SEQ ID NO: 4189170 - RNA, 77 nt, Human
aguuagaccaagaaagggguguuuagagacuuccaagcaaucaugaaacauuccauuucuauguaagccguuugacu

SEQ ID NO: 4189171 - RNA, 63 nt, Human
aguuaggaaaagauauguagucauuggaagauauccagaauacaucaaucuauuuucugcacu

SEQ ID NO: 4189172 - RNA, 129 nt, Human
aguuaggaagccagugugguauaaauggacuaguucacuauagaagacaguguuuaaggaacugaauugauuggcauugugaaacuguaggugaguuccuuagucuuucuagccugugguuucuuuacu

SEQ ID NO: 4189173 - RNA, 81 nt, Human
aguuagggaguuagggaggaugaguggcaucuguugaacacaccagagugcuaaaaucuuaucuuugcugauuuccuaacu

SEQ ID NO: 4189174 - RNA, 129 nt, Human
aguuaggggaugaucugaaauucaaccugugcccugugugcaguggagcacagaggucuggucacuacccuguacugccucugccuccauuguuagucuaucugcuuugaagccugguuguccccugcu

SEQ ID NO: 4189175 - RNA, 68 nt, Human
aguuaguaaucagagguaaacuuuaauaguacaagguaagaacuaaagccuuauccugauugguagcu

SEQ ID NO: 4189176 - RNA, 96 nt, Human
aguuagugagacuuguguugaaagaaguaguuuuaugugucuaaaauguagacucauagacaagccucuuuuaaaccaaaugugcauacacuaauu

SEQ ID NO: 4189177 - RNA, 91 nt, Human
aguuaucuuugaguuacaauguccuuacaugaaaacugugaauaauaauugaccuuuccugcuaggaacauuguauuagugaagguagacu

SEQ ID NO: 4189178 - RNA, 81 nt, Human
aguuaugaaggguugagacaaggguuucuaugcagagcugacuuuguauauugccugagucuuuccucuaauucuuuagcu

SEQ ID NO: 4189179 - RNA, 67 nt, Human
aguuauggacauuuugugagaaaguugaagcaucuguucuuuccucuuuuucugauguuccaugauu

SEQ ID NO: 4189180 - RNA, 63 nt, Human
aguuauguaaucuaacacucaguuuaccaaguuagaaacugaggauggauaggucauaugauu

SEQ ID NO: 4189181 - RNA, 61 nt, Human
aguuauuucacagcuaagagcuaaguaacgacuucguuacugaguuagguuggauaucacu

SEQ ID NO: 4189182 - RNA, 93 nt, Human
aguuauuuuguagacgugcauuuuucaucccucuuggguaaauauuuacaaguaggauuuuugggucauggauaaguacguguauguuuaacu

SEQ ID NO: 4189183 - RNA, 95 nt, Human
aguucaaagcccaaaaugacgauucauagagcagcucacugaauacauguuacauggagauuuauacugagcagcucauggucagggaaagaauu

SEQ ID NO: 4189184 - RNA, 82 nt, Human
aguucaacaguuuugaaucugauggacuuggaaaugcauggugccaucacagagaaaagcuaucacaaagcacaguuggauu

SEQ ID NO: 4189185 - RNA, 60 nt, Human
aguucaaccuuuggaccuggggcuuaccaucacuccagaauccacaacagaaguugaacu

SEQ ID NO: 4189186 - RNA, 60 nt, Human
aguucaaccuuuggaucuggggcuuaccaucacuccagaauccaugacagacguugaacu

SEQ ID NO: 4189187 - RNA, 76 nt, Human
aguucaagaguaacuaauuucaggucuggcaggauccagagucugaaauaaugucacuaagguuuaacuugucacu

SEQ ID NO: 4189188 - RNA, 77 nt, Human
aguucaaggauguguguaagaaugugugugugugugugugcguguguguacucuguauauaaauaaaccuaugggcu

SEQ ID NO: 4189189 - RNA, 98 nt, Human
aguucagauuagcuguggaagcuucagccauuucugcauggagaugcaucugugaaaccuguggcuaggcuccaagagcuggaauacuacucuguacu

SEQ ID NO: 4189190 - RNA, 57 nt, Human
aguucagugcuuacagguuucuuuggaaccuuuucagaagaaucuacagucugaacu

SEQ ID NO: 4189191 - RNA, 76 nt, Human
aguuccagcugacauguccucccucugauguuucugcaguguuaccucuuugaggauggaggugugagcuaugacu

SEQ ID NO: 4189192 - RNA, 77 nt, Human
aguucccaaacagaaauuccagagaugucuuaaacauuguggucaucauugagauagguggaaucucuuuggugacu

SEQ ID NO: 4189193 - RNA, 68 nt, Human
aguucccaagugcacagcaggaguagugauguccucacuggcuucucauuugcauuaaacugugagcu

SEQ ID NO: 4189194 - RNA, 82 nt, Human
aguucgccaccccuaccgggcagcucugccccugccagggauuggccggcagguggcacugcugcucccucugguggccgcu

SEQ ID NO: 4189195 - RNA, 57 nt, Human
aguucguauuuauugagucccugcugugagcccagcagaugcgucugagugggagcu

SEQ ID NO: 4189196 - RNA, 85 nt, Human
aguuuuucaccuggaaauggauccagaugguuuaggaaaauuucuauuggaucugaaaguaucuggaucuuuuuggcaaagagcu

SEQ ID NO: 4189197 - RNA, 59 nt, Human
aguuuuucuuaacuuuaguuuacucaucuauauugagguccugauguuccagagaagcu

SEQ ID NO: 4189198 - RNA, 82 nt, Human
aguuuuugaugaucuucugcuaucauuuuugcuauguuaucugaauagccauccagaucuguaguaaaagaucucguuagcu

SEQ ID NO: 4189199 - RNA, 56 nt, Human
aguuuuugcugauagcaugcuuacgugguaguguagcuuacugggcaguaaagauu

SEQ ID NO: 4189200 - RNA, 64 nt, Human
aguuuuuuaggaugaucuuguagagagaucagcuugcugggguuaccaaggucauucugugacu

SEQ ID NO: 4189201 - RNA, 55 nt, Human
auaaacucaugcugaaaacccaggagaguacccuggguuuuuagcaugaguuugu

SEQ ID NO: 4189202 - RNA, 72 nt, Human
auaaagauauugagaugaggauauuaaccugaauuauccagguuggcccuagauaaucucaaggauacuuau

SEQ ID NO: 4189203 - RNA, 56 nt, Human
auaaaguagaagaguuaagcaggcuucuuuaaagccugcuuuaugcuauacuuugu

SEQ ID NO: 4189204 - RNA, 130 nt, Human
auaaagugaaaugucccaugugaaauguagacuagcuagagaauggcaaagauuagauuugggucuguuucuaauaccuguucuuaagaaccuagcuguauuucucuccauaauuguuuuucauuuauau

SEQ ID NO: 4189205 - RNA, 126 nt, Human
auaaauaacaaaaugugccucugcaucugcuaacucaugcuuuuugacaacaagcugugcugaaagacagucaguugauauugcagacaagcacugugggcugagcaguugcaauuuguuuauugu

SEQ ID NO: 4189206 - RNA, 112 nt, Human
auaaauaauccaaacuaacccuaaaauuauaccaaaaaauuaaugugauuaggaugauaauucacagucacauaguguuuuggaaucuuuguggugaaaauaaauuguuugu

SEQ ID NO: 4189207 - RNA, 76 nt, Human
auaaauacaaagaaauggcuucaucugaguaacugauacuuccaagacuuggccauugcagucuuuuguagauuau

SEQ ID NO: 4189208 - RNA, 69 nt, Human
auaaaucaacuugugacguuagguacuuuaucagguaguacagcaccagauguuucaagcauuguuugu

SEQ ID NO: 4189209 - RNA, 58 nt, Human
auaaaugggccucuuucuuauuccucuaccuggaaugaggcaaucaugguccaguuau

SEQ ID NO: 4189210 - RNA, 100 nt, Human
auaaauuaggcuuguucuaaauguuugccuaauucuuuuagaauauuagaauuuaacuuauuagcuguauguuggguaagcauugcaagaguuaacuugu

SEQ ID NO: 4189211 - RNA, 63 nt, Human
auaacaaacaucagcgcauuuacagucucagcugcagggcggcuggugcucuaugucuguuau

SEQ ID NO: 4189212 - RNA, 81 nt, Human
auaacaacaaaauccuaagcagaggaauuuacuauccuugggcuaauaaagguaaguuccuccuguugggucuuguuuuau

SEQ ID NO: 4189213 - RNA, 130 nt, Human
auaacacacuuagcaaacugauacagaugcacucaguccugugaagugaccucugcagaucucaaggaagaggcugcagaggucacuuuauaggacugaacgcuucugcauuccuuugcuauggcacuau

SEQ ID NO: 4189214 - RNA, 129 nt, Human
auaacagcauuuuguaauacuauuuuuuauuggaagaauauaaagauaauucuguuuuccucuagaggggccgauugauacuuuuuuguguuuuugauaauaauaaauauauagacauacucucuguuu

SEQ ID NO: 4189215 - RNA, 89 nt, Human
augaugguuacauucaaaggcauguccuauuuugcucucaaacacagcaaaauagcaaaauagaacaugccuuugaacauaagcaucau

SEQ ID NO: 4189216 - RNA, 57 nt, Human
augauguaacauaaagaugucuguggauuuugcuauagaacucuuuuguuaggucau

SEQ ID NO: 4189217 - RNA, 67 nt, Human
augaugucaugaauauauuagucuuacucccccuauucacuauggagacuguguaaacaugauucau

SEQ ID NO: 4189218 - RNA, 90 nt, Human
augauucuacuauuucauacauuuccaagaagucaacagguaguaacagaugcagccugauugauuucuggaagggaaaugacagagcau

SEQ ID NO: 4189219 - RNA, 57 nt, Human
augauucuuucauucucuuacuuuaugacaagacaugauggagagugacagagucgu

SEQ ID NO: 4189220 - RNA, 83 nt, Human
augauugguaaaguugcuguugaagacacugccuguuauguucuucaauaacaaaggcagagaauucaacauuuucuuuucau

SEQ ID NO: 4189221 - RNA, 61 nt, Human
augauuuauguguaaccuugugauuuauugagagacaguggauuauuugacacauuaucau

SEQ ID NO: 4189222 - RNA, 127 nt, Human
augcaaauagacuuugauccaugacuuuucuuccacuggccaugaccugugauuaaauuccagcauaaaagggcauagcacaauaucaugucugugaggaguaaagccaugcauuaaagggcugcau

SEQ ID NO: 4189223 - RNA, 78 nt, Human
augcaaauauuucucuugcuauucuguggccccaaauuuugcuggaccagaugagggugucucagaauggauuugcau

SEQ ID NO: 4189224 - RNA, 67 nt, Human
augcaaauuccacagaugucuaucugucugggaaccugggauagaaaugggcuugugggaguaaaau

SEQ ID NO: 4189225 - RNA, 74 nt, Human
augcaaauuuccagaccccauccacagagauuuugauuuugagagggucugagguguggucugggaguauguau

SEQ ID NO: 4189226 - RNA, 75 nt, Human
augcaagcuuuagcaaagcccaaagugacugaaaagagaguuauaauaauguggccuuuguugauagcuaugcau

SEQ ID NO: 4189227 - RNA, 55 nt, Human
augcaauauaugacaauggagcaaagcuccacuguacuuacgcauauacaggcau

SEQ ID NO: 4189228 - RNA, 58 nt, Human
augcacaaguguguguguguaugugaauuuauguauucauacacacacaccuguguau

SEQ ID NO: 4189229 - RNA, 56 nt, Human
augcacagaacaauuuuaagagugguacugaacuguucuucagguuguuugugcau

SEQ ID NO: 4189230 - RNA, 94 nt, Human
augcacauauacauacaaacacuuacacauugcagaucaaaaugagcugucuacauuuaucugacagauggucugugugucuguacguguguau

SEQ ID NO: 4189231 - RNA, 85 nt, Human
augcaccuuccugggcucccacccauagggcgaguccauacuucccuuggacucgcccugugggugggaggccagaaaggagcau

SEQ ID NO: 4189232 - RNA, 61 nt, Human
augcacuguaggugccaucugcaccauauauuauaauacagaguuuagcaccaucgugcau

SEQ ID NO: 4189233 - RNA, 64 nt, Human
augcacuuauuucuuuuguguagauacccaguaguggaauugcugggucagagggaaaguguau

SEQ ID NO: 4189234 - RNA, 77 nt, Human
augcagaguccuaggcccugcuccagaucuauggaaucagaaucugcacuuaagcgaggccugcaggggaucugugu

SEQ ID NO: 4189235 - RNA, 60 nt, Human
augcagaugaaucauugaggcugaaucauguuaacaauaagcguucaaugauuaaugcau

SEQ ID NO: 4189236 - RNA, 71 nt, Human
augcagcacucaugcaagaagauagauuaaaugcaauguugcaggaauaagcugacuguugcaggcugcau

SEQ ID NO: 4189237 - RNA, 130 nt, Human
augcagccauacuucucuagacagccccaugaaugaacauagagaggacauuccagccacaguaggguugugacuucuuuuugaguucaagaaugaauccaugcaagccaauuagaaaaauggcucccau

SEQ ID NO: 4189238 - RNA, 88 nt, Human
augcagccuuguagaccauuuuaaggguuguuuuuaaauucuagaaucaaugggaaguccuugaaauguucucacugggguacagcau

SEQ ID NO: 4189239 - RNA, 63 nt, Human
augcagcucauuuguuuaaaaguucauucgcuucagugugauuuagacagaugugaggugggu

SEQ ID NO: 4189240 - RNA, 55 nt, Human
augcagcuguaacagaggccucagacuuuccuaugagacaguucugcagcugggu

SEQ ID NO: 4189241 - RNA, 88 nt, Human
augcagggaggauggagcacacgccaucacauacuguugugguuacaguaguggguaacaagccugugccauagaucuucuccuguau

SEQ ID NO: 4189242 - RNA, 57 nt, Human
augcagggagguaagaggugccauaagaggcuuuacucauugcuaccucugugucau

SEQ ID NO: 4189243 - RNA, 55 nt, Human
augcaggguuauuucaaaaauaacagcucuucugcuaucaccagugacucugcau

SEQ ID NO: 4189244 - RNA, 55 nt, Human
augcaguccaagcucuagaguuuuacauuaaaauaauagaacugaggacuugcau

SEQ ID NO: 4189245 - RNA, 70 nt, Human
augcaguuagugugacugaggaaugcaguuuccacuuuuacugaauugcaauuaguuuuacuaacuauau

SEQ ID NO: 4189246 - RNA, 56 nt, Human
augcaguuggucauacuacauaccccaugguugcaguuuugacagaccaaaugcau

SEQ ID NO: 4189247 - RNA, 82 nt, Human
augcauauuccccccacauuucugucacguucuuuuauuuccacaauauuuuggggcuacagaaaauucagggaaugcgcau

SEQ ID NO: 4189248 - RNA, 56 nt, Human
augcauauuucuuggagcaccugguaacauuccuguauuucuacagaaauaugcau

SEQ ID NO: 4189249 - RNA, 111 nt, Human
augcaucccuacauuuucaugggcagcaagguggcggaaaugaguaauguagcaauugaaugggcagauaauuuuuucggccaucuguugugcauaugucuagcggaucau

SEQ ID NO: 4189250 - RNA, 67 nt, Human
augcaugcacacacugcauugcacccuugguuuuuauuuaguuccaguaauguaggauggccuguau

SEQ ID NO: 4189251 - RNA, 58 nt, Human
augcaugugccugguaagggggaagaggaccuguucacuccuguuucuaagccagcau

SEQ ID NO: 4189252 - RNA, 74 nt, Human
augcauuugcuugauuuaaugcuaguugucuucuacuucuuagacugagcuaaccagcaugaaaucugcagcau

SEQ ID NO: 4189253 - RNA, 78 nt, Human
augccaaacugcauuagcuaacgugaguugucccccguuuucguaggagggucguguugcuaguuuaguuuccggcau

SEQ ID NO: 4189254 - RNA, 64 nt, Human
augccaagugcaguuggcugaaggaagagcagauccccuuccaucucaccugcacucugcgcau

SEQ ID NO: 4189255 - RNA, 66 nt, Human
augccaagugccaagggguagacaaccuggcuguuuaaucugcauucuacacuuggcaccuggcau

SEQ ID NO: 4189256 - RNA, 80 nt, Human
augccagguacagggguaggguaugggcauuagaauaaacacauaaaugaaaauacacgauuccuuccucauguacgcau

SEQ ID NO: 4189257 - RNA, 64 nt, Human
augccaguaaaaauguugucaaggcaugagaugaaugcaagauauuaucuuugcugcuaugcau

SEQ ID NO: 4189258 - RNA, 99 nt, Human
augcccagcccguggguguuacuuuauucaaaguaccuucauugccacuguaucuucaggccaugauuguccuugaaaaauguuauauuuuggcuucau

SEQ ID NO: 4189259 - RNA, 66 nt, Human
augcccaucccagaauuguuugcaugccuccaaauacaaaauacaugagaacaauaggauguguau

SEQ ID NO: 4189260 - RNA, 66 nt, Human
augccgugugcucccucugucgucauaacucaggaauaaaugcugugauuauuugggaacuggcau

SEQ ID NO: 4189261 - RNA, 81 nt, Human
augccuaaacuauauagcuaauguagugaguggagcucacgcuucgaaggcugugcccuuucgcugcacuguguaaugcau

SEQ ID NO: 4189262 - RNA, 122 nt, Human
augccugucuuguuggugaaaucauuaggaagcaaugcauuauuaaagaguuuuucagacacagaggguuuggaauugcuauugauaacaaauguugcuaauguuuuccugcaaaauugcau

SEQ ID NO: 4189263 - RNA, 72 nt, Human
augcuaaguccuuugcugaacugucacauuucaaauuauccuauaauguuuuaaagggaaagggcuaugcau

SEQ ID NO: 4189264 - RNA, 70 nt, Human
augcuacuauccuucugcuuaaacugcucacauucuagacuacacagaccaaagcacaaggugguugcgu

SEQ ID NO: 4189265 - RNA, 99 nt, Human
augcuagggccuucaggcaggaggugguguggaaguaacauuuuguaacauuuaucugggacucuauaaagauaccucaauugugugaaacucuggcau

SEQ ID NO: 4189266 - RNA, 64 nt, Human
augcuccacuaggaaucugcucuucucugugaggcacugcugaagagcauuccuaaaggaccau

SEQ ID NO: 4189267 - RNA, 64 nt, Human
augcucuccugggauuuugauaugugaguaaagugacacaaggauggaaaaacagguagagcau

SEQ ID NO: 4189268 - RNA, 76 nt, Human
augcucuuaccauuagaagagcuggaagaaggcugagggagaugccuucuuccagcccuucuaaugguaggagcau

SEQ ID NO: 4189269 - RNA, 130 nt, Human
auagagucacucagggagcuauugagaaacaggauucuagggcccccuguaccugagguuuggauuaaauaggucugggggaaagcucaggagccuguauuuucuaaaaguccucuguugauacugaaau

SEQ ID NO: 4189270 - RNA, 81 nt, Human
auagagugacagugaaguguuuaaaggcaugguuucuaggaucagacuucuugagcuggcacuucuccauacugacucugu

SEQ ID NO: 4189271 - RNA, 90 nt, Human
auagauagaugaaaauuauagguccaaugcuugagaaugaugguaucauguuaaaagaaaacauugcacuucugcuuuuccucugucuau

SEQ ID NO: 4189272 - RNA, 78 nt, Human
auagauaucacuguuaucuagaagcacauuaauaugauuuuaaaaaaugguuugguuucuagauauauagugaacuau

SEQ ID NO: 4189273 - RNA, 85 nt, Human
auagaucaaggaacugcagcuuucuaauagggccucaaggagauuuugacaaucccuguuagaagugaacaguuuguugaggugu

SEQ ID NO: 4189274 - RNA, 112 nt, Human
auagaugaguaaagaaauuguguuguguauauauguguguguauauacguauauauguguguauauguauguacgcacauauucucuacauaguagaauaauacucagcuau

SEQ ID NO: 4189275 - RNA, 65 nt, Human
aguguccuuucuguuccagccacacugagcuccuugugguugguucccuuagcaagccaugcacu

SEQ ID NO: 4189276 - RNA, 61 nt, Human
agugucugccugggaggagcauaucucauacccacagggagaguuucucaaggcugacauu

SEQ ID NO: 4189277 - RNA, 58 nt, Human
agugucuggugagggcucucucuuuugguucacagacagagccucuucacugcauacu

SEQ ID NO: 4189278 - RNA, 63 nt, Human
agugucuguccuuguuugguaucagguuuauauuaauuugacaaaacauuuugggagagcauu

SEQ ID NO: 4189279 - RNA, 65 nt, Human
agugucuucaucucagauuaacaggauucaaugaaauuauuauguccugaaucuagaaggaugcu

SEQ ID NO: 4189280 - RNA, 86 nt, Human
agugucuugcucuguggcccaggcuggagugcaguggugugaucauagcucaccacagccuccaucuccugggcucaagugacccu

SEQ ID NO: 4189281 - RNA, 60 nt, Human
agugugacaaaucuauggcucaaaaaugaaauagggagcuagccaagagauuuguuaacu

SEQ ID NO: 4189282 - RNA, 119 nt, Human
agugugacaugugcaggugggaggggcagagggacaagaccagcagggagggugcuccuggggacaguauccuccccgcuggccuucacuucuuggccuugcccugggcagccacagcu

SEQ ID NO: 4189283 - RNA, 63 nt, Human
agugugaccuuauuuggaaacagggucuuugaagaugugaucaaguucagaugaggucauacu

SEQ ID NO: 4189284 - RNA, 67 nt, Human
agugugcugacuucuguaauauuuuugcugcucgaagaaaacaaagaauuucaaaguccagcacauu

SEQ ID NO: 4189285 - RNA, 63 nt, Human
aguguggaccgugacauugguggaagaaaugaaaaccccacuagggaaaguuauguucacacu

SEQ ID NO: 4189286 - RNA, 55 nt, Human
aguguggccaaugaggaugggcgaaggguugcugccaucuugaaccaugcccacu

SEQ ID NO: 4189287 - RNA, 80 nt, Human
aguguguaauguugucagcaucaucacacaaaaccucaauuuauuuggaugaugacuuauguuuacaaauguuacagucu

SEQ ID NO: 4189288 - RNA, 88 nt, Human
aguguguccauguuaaaugcagauuccuaggccccauugacuagcccaggauguggguggaccugggaaucugcauccuuagcacgcu

SEQ ID NO: 4189289 - RNA, 69 nt, Human
aguguguguguguguguguguguguguguguguguauuuaugcagaugauguagacagacagugacacu

SEQ ID NO: 4189290 - RNA, 56 nt, Human
aguguguguugaagcagugucuguugcaagaaaacagugucugcugcaagauaucu

SEQ ID NO: 4189291 - RNA, 71 nt, Human
aguguuacacaggacuguauccuuggagaaaacucucaguucuuucuucaauucacagucccuuguauauu

SEQ ID NO: 4189292 - RNA, 96 nt, Human
aguguuccauguugcuuaaacaggaaagagccaggucauccugcuacuugggguaaauuugguguguuuuuucuuguguugccgauauuagucauu

SEQ ID NO: 4189293 - RNA, 70 nt, Human
aguguugaucaguguacuucuuaccagaacuugggccucucuaaggugguaauagugcaggauuaucacu

SEQ ID NO: 4189294 - RNA, 65 nt, Human
aguguugugugcuuugguaguagaagugugcaaaaaacacaaaguuagcaaagcaaacacaugcu

SEQ ID NO: 4189295 - RNA, 59 nt, Human
aguguuguuuacauauuaugcaugggucacugacaaucaaugugucuguaaacaacucu

SEQ ID NO: 4189296 - RNA, 130 nt, Human
aguguuucacaaugcucgauguagacacaccccuaauguccuuguuuucuccacugcaucuuauuuccuaaugaggucuaggcaggaaacucuggauguggagguccaucgcuuggugguugagaauacu

SEQ ID NO: 4189297 - RNA, 57 nt, Human
aguguuucuucucacacaaacucaccuggaugugaguccuguaggauggagagcauu

SEQ ID NO: 4189298 - RNA, 67 nt, Human
aguguuugagacacauuucacuuaucucugaauacuaaguaaaaaagaagugaggugguuugacauu

SEQ ID NO: 4189299 - RNA, 102 nt, Human
aguguuuggaagguggugcuuaaucuggagccuuguugauauaaauuuaucugaacuucagggcuugguuggaaccacccaaauaagaaacuccuuagcacu

SEQ ID NO: 4189300 - RNA, 72 nt, Human
aguguuuucuguuaggcaucauuuuaacugagacucuuucuugaaaauuugguguuggcagaaaagaacacu

SEQ ID NO: 4189301 - RNA, 66 nt, Human
aguuaaaacacaugaguagcuaguaccaaaaugucccacaucgugcuguacuucuguguugaagcu

SEQ ID NO: 4189302 - RNA, 90 nt, Human
aguuaaagugaagauuaaguuacaguuauuauuuaaaauguagauaucauuuuagguagucauuucugaauggaaucacacugaugagcu

SEQ ID NO: 4189303 - RNA, 57 nt, Human
aguuaaaucauggccauuggaagcacuacgguguuucuuacuucucugauuugcacu

SEQ ID NO: 4189304 - RNA, 126 nt, Human
aguuaacuauaagccauaaaaguaucuaggagcagaccugagugaagcacguguucaguuaguuauugaaacaaaaguauguagcuugucucaaguuccugguaacuacuucagggcugauugacu

SEQ ID NO: 4189305 - RNA, 63 nt, Human
aguuaagggaauccuagguaggcuguauguuuugcuucccuuucuggugacuucucuggugcu

SEQ ID NO: 4189306 - RNA, 82 nt, Human
aguuaauggggccuuggcuauaugaaagcuuccuauuuuagccucuuaaaauuggaugcacauuuagaaaaggcucuuagcu

SEQ ID NO: 4189307 - RNA, 73 nt, Human
aguuaauuuccuuagguucagcuuccacugccuauaaaaauaggggugggguugaaaucucuggaacuggacu

SEQ ID NO: 4189308 - RNA, 56 nt, Human
aguuacaaacacuaucaguucugauggacuucaguaaugggaauagugucugugcu

SEQ ID NO: 4189309 - RNA, 81 nt, Human
aguuacaagagguauuuuaaaugucaguggguuuauuguucuauaccauagaaccaugaguuugaguaucuagacuugacu

SEQ ID NO: 4189310 - RNA, 62 nt, Human
aguuaccgagaacaugacuggaauucaggaaaugcuaaagguccugucuuaucucuguaacu

SEQ ID NO: 4189311 - RNA, 72 nt, Human
aguuaccguuacagcuugacccauaaugucucacaaauagauguugccguuaaguuguguaggcaggaugcu

SEQ ID NO: 4189312 - RNA, 71 nt, Human
aguuaccuguuuuaaagcuaaaaggggucaugacuaucuauaauuaucuauuuuaucuaagauaggugacu

SEQ ID NO: 4189313 - RNA, 61 nt, Human
aguuagucauuuagaaugcagaguucauuuucaugaacaaucaaguuucuaaaugacagcu

SEQ ID NO: 4189314 - RNA, 74 nt, Human
aguuagucccugagccuggcauuucccccuaaguaagaggucgggggaaacagcccaggcucaggggcuucucu

SEQ ID NO: 4189315 - RNA, 89 nt, Human
aguuauaauauaucuucucaaaguauuuguuuaaauaugguaagaaauuuucacaaggaggaggugcuagagaagauguuguucuggcu

SEQ ID NO: 4189316 - RNA, 95 nt, Human
aguuauuagguuggugcaaaagucauuguaguuuuuguaauaauuaguugguacaaaaguaauugcgugauaacuuuugcaccaaccuaaauacu

SEQ ID NO: 4189317 - RNA, 55 nt, Human
aguuauucauuucuucuaaugggaugguuugcuaucucagaggaauguaguuacu

SEQ ID NO: 4189318 - RNA, 75 nt, Human
aguuauuuacuccuuugucucugaguugaucggaucuauuuccaagagcagauuuuauaggggaaacagauggcu

SEQ ID NO: 4189319 - RNA, 58 nt, Human
aguuauuuuugguuguuucuaggucuggaggccaggaaaaugucaauggaaagcagcu

SEQ ID NO: 4189320 - RNA, 66 nt, Human
aguucaacaaggggucugcuucauagacauuuucugugguuuugaggcaauauuccauguggaacu

SEQ ID NO: 4189321 - RNA, 56 nt, Human
aguucaagacaagaucuaagcaugcugaucacagcugggaggauuuguuuuguucu

SEQ ID NO: 4189322 - RNA, 78 nt, Human
aguucacgugaccacucccauaauuccaugcaccuggcccucaggaugcaggaggucggggagcacucacccugagcu

SEQ ID NO: 4189323 - RNA, 93 nt, Human
aguucaggaagaguuuagagauauccuugcuguccccagucucagacuagguugcacugggcuccaggaaggaggcuacacauuuauugagcu

SEQ ID NO: 4189324 - RNA, 93 nt, Human
aguucaugcagccagugaguaguggaggcgggguaagaacucaggcaguuugauucccagaguuuccugugucccaaaugcuuugugugugcu

SEQ ID NO: 4189325 - RNA, 117 nt, Human
aguuccaucaugaauguuauuuugcaucuaugaccacuauguagaauuuagaaccauucugauguagaaaguucauagaugcgauauagaaagauaauuguuuauguugauagaauu

SEQ ID NO: 4189326 - RNA, 70 nt, Human
aguuccucccgugccugcugcagagucgcuguggggacagggccucgaaggcagagggauggagugagcu

SEQ ID NO: 4189327 - RNA, 65 nt, Human
aguucgcacaggcacagacacugggaugaugagggguaccaucccacugucuucucgugcucgcu

SEQ ID NO: 4189328 - RNA, 82 nt, Human
aguucuaaacugaguuuucugaaccccacuccagauauacugaaucaaugcuuugggggcagaggauucaggaaugaggacu

SEQ ID NO: 4189329 - RNA, 82 nt, Human
aguucuaggguacauaugcacaacaugcagguuuguuacauauguauacaugugccauguuggugugcugcacccauuaacu

SEQ ID NO: 4189330 - RNA, 82 nt, Human
aguucuaggguacaugugcacaacgugcagguuuguuacauauguauacaugcgccauguuggugugcugcacccauuaacu

SEQ ID NO: 4189331 - RNA, 82 nt, Human
aguucuaggguaccuaugcacaacaugcagguuuguuacauacauauacaugugccauguuggugugcugcacccauuaacu

SEQ ID NO: 4189332 - RNA, 57 nt, Human
aguucuaugccgauagggaaguugaucaauucuuucauuuccacuuggguuagaauu

SEQ ID NO: 4189333 - RNA, 80 nt, Human
aguucuauucaguuucuucauccaaaaaauggagcuaauuauaccuccuucauaaucuuuuggggaggaauuauagaacu

SEQ ID NO: 4189334 - RNA, 78 nt, Human
aguucuauugauuuucuguaugugaaauuugccuuaauuuuuguuucaguuucucauguggauaugaauuguagaacu

SEQ ID NO: 4189335 - RNA, 66 nt, Human
aguucucuauucacuuauguuucaggcuccaaaugacaugguauugaaauacugagugaaagaauu

SEQ ID NO: 4189336 - RNA, 106 nt, Human
aguucuggaaggaauaacugagagucaguagcagcagcagcaucagcagcauccuaauccuauuagcagcugcuguugacggacuggcugcucccugccaggcacu

SEQ ID NO: 4189337 - RNA, 66 nt, Human
aguucuggcuuugaccaaguucaaguuccuguuccuuaagccccuagaacuguccaagucugagcu

SEQ ID NO: 4189338 - RNA, 81 nt, Human
aguucuuccuccugaggucagccauucuugcccuugggugauccugcccugguaaugagccuugaucucaggaggugagcu

SEQ ID NO: 4189339 - RNA, 70 nt, Human
aguucuugacaacuauacuacuuacugggaaaauaucugcgcugugagcuuuaugguuaucuaaagaacu

SEQ ID NO: 4189340 - RNA, 94 nt, Human
aguucuuuagaaacuauccugaguagcaaaucucaaucccgaucaacuguuugcucucuuuaaugucuuaggcauaguuucuucaaauugaacu

SEQ ID NO: 4189341 - RNA, 62 nt, Human
aguucuuuguaaaaggucucuaagagccuuucaccucucugaaagugccuuuuaucaagacu

SEQ ID NO: 4189342 - RNA, 59 nt, Human
auccaggcuggguguggcuacuauuuaauacaaaauguggaaguauauugaaccuggau

SEQ ID NO: 4189343 - RNA, 129 nt, Human
auccaugugauguuggcugggauaauuggagauggaggaugcacuuucaaaaugacuucuuuacucucauguuugacaccucaguguuucuuuuccucucucuguauggauccucacaaaucguggucu

SEQ ID NO: 4189344 - RNA, 81 nt, Human
auccauucaguaauucagucaguuaacaacuauuuauugagcaccuguuaugugcuaaguguugaucugagugcuaaggau

SEQ ID NO: 4189345 - RNA, 105 nt, Human
auccauuuauauaaaaaauguuuucgcaccucucuuggauguggaugggugcccagggguaacacuuucuagacaagggaauaaguguggacacagacauuggau

SEQ ID NO: 4189346 - RNA, 76 nt, Human
aucccagcacaucauguuaauucauuacagagacagaacuucucaagcauacucuguaagcaugugagcuugggau

SEQ ID NO: 4189347 - RNA, 81 nt, Human
aucccaggggagauguguccccagaggauugaaggggagaugguccaauuuaccuguguaagggauuacuuacucugggau

SEQ ID NO: 4189348 - RNA, 65 nt, Human
auccccaaccucucuccccugugaagagcguacguaagcaucuacaucucaguggguugguggau

SEQ ID NO: 4189349 - RNA, 56 nt, Human
auccccgucaugggugaaagcuuuagcaacugcugcucucuuuccauguggaggau

SEQ ID NO: 4189350 - RNA, 130 nt, Human
auccccuguggagucucccugaggcuguccuccccugcagacauggcauucuguuccugaggguggggaggagaaagcagugauuuguggguacagggguucuagccaggggggauuauggggaggggau

SEQ ID NO: 4189351 - RNA, 114 nt, Human
auccccuucuugguagccauuacuuugauugugcuuugucuucaggaucauaccaguaaagcuguguuucaucuccuaucacaauccuucaaagaaaagcuuuaagaccuugau

SEQ ID NO: 4189352 - RNA, 78 nt, Human
aucccucaucuaagacaaugagugagacucaugaaaggcuuuuuauguggcaugggcuccucaucuaagaugauggau

SEQ ID NO: 4189353 - RNA, 129 nt, Human
aucccugauggcuguguguccugggggaauguuaaugcugauggggugggcaaggaguggugaccacuggcuucuagagcccauccuuccucuuuaccucuccccucagaccccauacccuccagggau

SEQ ID NO: 4189354 - RNA, 69 nt, Human
aucccuggggugguggcaggaagucuugaagaaagaagccaguggacugcugcccagccacugagggau

SEQ ID NO: 4189355 - RNA, 80 nt, Human
auccuacagggcuggcaucucuaaugcugaaaguacaacaaagugcagugguagucacugaguguucagccaugcugggu

SEQ ID NO: 4189356 - RNA, 78 nt, Human
auccuagaagccuuuauacuaaaggaaucugcugacauaaauagugucaauucaacggguagaagggucuuggaggau

SEQ ID NO: 4189357 - RNA, 79 nt, Human
auccuagcuuccuucuuuaauucaugauauguaguaaggaaauucacaguaucuagaaaugaggguggacacuggagau

SEQ ID NO: 4189358 - RNA, 55 nt, Human
auccucacaaauuguuaaacagggaaauagacucuggcaauggauuuuugaggau

SEQ ID NO: 4189359 - RNA, 70 nt, Human
auccucauaugcuagcguuuuuauuucuguaagauagauucccaggaaagagacugcuggguugaaggau

SEQ ID NO: 4189360 - RNA, 67 nt, Human
auccucucucccauaccagucuugccuucuaggcaccaccauuggaucuguagggacuucagaggau

SEQ ID NO: 4189361 - RNA, 59 nt, Human
auccugggaggcggagguugcagugaguggagauugcaccacugcacuccagccugggu

SEQ ID NO: 4189362 - RNA, 71 nt, Human
auccuggugcucuguggcugaaucuggauggcucaguggccuaacagaaacagacaugacgcaguaaggau

SEQ ID NO: 4189363 - RNA, 56 nt, Human
auccuggugguggggucuguggguggaggggucuccagguguccacguggcagggu

SEQ ID NO: 4189364 - RNA, 62 nt, Human
agugauagcacagauauaccuauacugugguucaaaucauguauagcaaauauuuguucacu

SEQ ID NO: 4189365 - RNA, 98 nt, Human
agugaucaauuaaauggaaacuauuauuagcaaaagguggaucuggcagccuauguuaauccauguagcuauaauacaaucauccaaacugacucauu

SEQ ID NO: 4189366 - RNA, 58 nt, Human
agugauccuccugccuuagccucccaaagugcagaaauuacaggcaugaggcaucacu

SEQ ID NO: 4189367 - RNA, 66 nt, Human
agugaugaggccuucaacggacacacuaucaagaagcucaggauguccuuuuugaggccuccuccu

SEQ ID NO: 4189368 - RNA, 58 nt, Human
agugauggcauauauagaugugggccugggaggaauagucuguaauuaugccaucacu

SEQ ID NO: 4189369 - RNA, 75 nt, Human
agugauguaaaucaagcagugcugguuuuguccagaugcuuucgcgucagccggcacugcugauuucaaauagcu

SEQ ID NO: 4189370 - RNA, 58 nt, Human
agugauuucuagucuuggcuccgcagaugugaccugugguacucagaucaagucagcu

SEQ ID NO: 4189371 - RNA, 59 nt, Human
agugcaaagcagccuguacaccauccucucgggcaacgagggacaggccugcuugcacu

SEQ ID NO: 4189372 - RNA, 63 nt, Human
agugcaaagccgagguuucuugggccucucacaucagcaccucccagaccucgguucuguauu

SEQ ID NO: 4189373 - RNA, 74 nt, Human
agugcacaaguccugcagucuacccaaugugugcugaccggcuuacuggggcacuaguugaaacaggauguacu

SEQ ID NO: 4189374 - RNA, 83 nt, Human
agugcagaagacuuuuaaggcagugaaacuauucuguaugcuaguacaauagucaaugcacgucauuaaugucuuuacgcauu

SEQ ID NO: 4189375 - RNA, 60 nt, Human
agugcaggaagaucggacucauuagaacuacaaaccugcugaacucuggucaucuucauu

SEQ ID NO: 4189376 - RNA, 57 nt, Human
agugcagggggaaagggugucuuaucagcaagggacaacaguuuucucaucugggcu

SEQ ID NO: 4189377 - RNA, 55 nt, Human
agugcaugcgcuugggaggggucggccugcccacuccaaaccaagugugugcccu

SEQ ID NO: 4189378 - RNA, 87 nt, Human
agugccagguggugccuccaggcugguuaucagcuggacugcaagaaagugccagguggugccuccaggcugguuaucagcuggacu

SEQ ID NO: 4189379 - RNA, 55 nt, Human
agugccagugagacacuuucagaaacaugucugaggguuacuuuauuaggcagcu

SEQ ID NO: 4189380 - RNA, 61 nt, Human
agugccauggaggaacagaugccaaagaaagcuuauucaaguccuuuccuccauggcgacu

SEQ ID NO: 4189381 - RNA, 58 nt, Human
agugcccuggaugacuuuggucuguaacaacaaacaguaccucauggcgccggggccu

SEQ ID NO: 4189382 - RNA, 90 nt, Human
agugccgcaugcccccagauuacauuuguggagugaaggcuuugaucucugcuuccuacaugugucugcgaggauugguacuaugguacu

SEQ ID NO: 4189383 - RNA, 80 nt, Human
agugccucacugucaccucauuuaaucccacucaacccuccaagguggguggugguccacaaauggguacacugaggccu

SEQ ID NO: 4189384 - RNA, 72 nt, Human
agugccugccucauaggcuuaucgugggcuuaaaugagucaacauguauaagcgcuaggagugccuggcacu

SEQ ID NO: 4189385 - RNA, 77 nt, Human
agugcuaucgaguucuaaugcuggcucuccuuauuucacaguggcaauuagcacagcuuuuagguggaaauggcacu

SEQ ID NO: 4189386 - RNA, 69 nt, Human
agugcuccaggagcccugccacaaugguuucuuugugagaucaucuuugcagcgguuuccugaagcucu

SEQ ID NO: 4189387 - RNA, 65 nt, Human
agugcucugauucagugcauuuuaguaaguuuuuaaacaauacaugaauuugagucagaggaacu

SEQ ID NO: 4189388 - RNA, 112 nt, Human
agugcugaugaugcaacaaguaauuaacuuucugugacgcaaagcugggaaggcagcuguggcuauuuuccaguuguucuagaaagcuagcgccuaggccuuugucagcgcu

SEQ ID NO: 4189389 - RNA, 74 nt, Human
agugcuggaggugguacuggaauccaggcaucuggcucuagagccuggcucccagcuaccguguccuuaggccu

SEQ ID NO: 4189390 - RNA, 65 nt, Human
agugcuggauaaauggugucuuuucucauccucuuggaguauuagaaacaucauuguuugguauu

SEQ ID NO: 4189391 - RNA, 63 nt, Human
agugcuggauccaaggggccuggggccaaggugugugccaggcaggacccuagaaccagaacu

SEQ ID NO: 4189392 - RNA, 95 nt, Human
agugcugucugaagggcuuuauauagacacucaaucuuuacaacaaucugaagaagcagguauuugucucagauuggguuccuucgaaacagacu

SEQ ID NO: 4189393 - RNA, 62 nt, Human
agugcuucuuaaaccuuucuacuuauauuccccuuaaaaguagaagacaagaggaaggcauu

SEQ ID NO: 4189394 - RNA, 62 nt, Human
agugcuugcuuugccaccagaagucuaugcuguagcuauaacuucgugggcaaaugcacacu

SEQ ID NO: 4189395 - RNA, 76 nt, Human
agugcuuggagagaccaugacauguaaugacaugaaaguaauuucggugucacaauuuauuucucuugaauucacu

SEQ ID NO: 4189396 - RNA, 73 nt, Human
aguggaauugaggcagacugccggcagaacugcuuaaauucaacugucacaucacccugcucuuaauucuguu

SEQ ID NO: 4189397 - RNA, 57 nt, Human
aguggaggaaacagaggugcaagaauucaaccaacuugcaguucaagucaaucuacu

SEQ ID NO: 4189398 - RNA, 90 nt, Human
aguggagucacucuguugcucaggcuggagugcaguggggcgaucucggcucacugcaaccucugccuccccaguucaagugauucuccu

SEQ ID NO: 4189399 - RNA, 124 nt, Human
aguggauaauuucucccauaacacuuaccauaacuuuugcugagugcugaucuuuugaugaaggaccaugaagaggacaguauucaauaugaguucucacuugucuuaauccuuuuauccugcu

SEQ ID NO: 4189400 - RNA, 56 nt, Human
aguggcagacagagacaguaccuggacucuaaggagcugggcuccagucugccgcu

SEQ ID NO: 4189401 - RNA, 65 nt, Human
aguggcagagccaagauaugauccuggauguguaaauccaaggccuguauucuuugcucuccacu

SEQ ID NO: 4189402 - RNA, 55 nt, Human
aguggcagugugaggauccugcuuuagaagacuacagcguuuucaaugcuccacu

SEQ ID NO: 4189403 - RNA, 67 nt, Human
aguggcaguugugagguucauauuuucuuuuauaguaggaaaaguauaugcuauuacuacuguuauu

SEQ ID NO: 4189404 - RNA, 88 nt, Human
aguggcauuacauccggguccucugucucauuuucauucacagaucccugugggcugagcacugaggaaggaauucauuaaugccgcu

SEQ ID NO: 4189405 - RNA, 55 nt, Human
aguggcucaugccuguaaccccagcacuuugggaggccaaggcaggcagaucauu

SEQ ID NO: 4189406 - RNA, 58 nt, Human
aguggcucuugggucacugggccauuauuaagguuucuguccaucuccagaguacacu

SEQ ID NO: 4189407 - RNA, 80 nt, Human
aguggcuggaauugcaggugcgcccuaacacaugaggcuucugcagggcauggcgagugcaccuguaaauuccggcuacu

SEQ ID NO: 4189408 - RNA, 83 nt, Human
aguggcuuagaauuaaaccauuugaauuauuacugaaacauuucaaguggugacauuaaaugcuuuguuugaaauuagccauu

SEQ ID NO: 4189409 - RNA, 59 nt, Human
agugggaaauuucuggacuccugcacugcccaggguuaaguguccacagauucuucacu

SEQ ID NO: 4189410 - RNA, 63 nt, Human
agugggcagaaaucaguaucagauugucaacuugcaaauauuuggugaaauugcugaccuacu

SEQ ID NO: 4189411 - RNA, 71 nt, Human
agugggcccaguguugccagaccugaaauauaccucauguggguguuugucucugguacucuggguucauu

SEQ ID NO: 4189412 - RNA, 80 nt, Human
agugggcuuggaagguggugaucaucuugaaggcuguuaaauucacccugaagaugguugauccccuugaaggcuauccu

SEQ ID NO: 4189413 - RNA, 57 nt, Human
agugggcuuuuuuccguuccauguacuucauauggaaaagaauucaaaggcuccucu

SEQ ID NO: 4189414 - RNA, 95 nt, Human
agugguaaagggauuauagugaggucauauagcgaacuccagaaggaacacaggcaucuggacuccugucuggcuuucuuugagacugaacugcu

SEQ ID NO: 4189415 - RNA, 71 nt, Human
agugguaagagcacagugcaggauccccgugguggcuggcuaugcuggagaacugcucuguguucaucacu

SEQ ID NO: 4189416 - RNA, 77 nt, Human
aguggucagcuguguucagugcuacugaguugucaaauaagaugaagaaugaagagcccacugaauuuagcaacacu

SEQ ID NO: 4189417 - RNA, 83 nt, Human
aucuuaaauaagucacuugauucuccugagcucuguuucuuccucugaaaauaaagccauugaauuauggugguuugaaagau

SEQ ID NO: 4189418 - RNA, 126 nt, Human
aucuuauuuuuacucauauaucuuaccugauaaaggaagccauuagcugcaagauuccuauccugaaaauuagcagugauaacuuuacucuuuuuaggugcucauauuuguauaaaaagcauagau

SEQ ID NO: 4189419 - RNA, 59 nt, Human
aucuucaacugccuggaacuuuccugauuucaaaaugguaaguuucaugcucuggggau

SEQ ID NO: 4189420 - RNA, 88 nt, Human
aucuucagggaguuacaauccaggguguggccuuuccacaacacguaugugagugcaaacugcccacuacugggaaacuccugagggu

SEQ ID NO: 4189421 - RNA, 78 nt, Human
aucuucagucuggagagaauguggaaugauuugucucuuuuaauaagauuuccagaccaauuucucaagcugauagau

SEQ ID NO: 4189422 - RNA, 69 nt, Human
aucuucccacaacagcauccagagaaagagaaacaggcacucuuccucucagugugguugugggaagau

SEQ ID NO: 4189423 - RNA, 70 nt, Human
aucuuccugaguucuuauuuccagucagggaaacacauuuucuccucauuuaauuuggaacucagaggau

SEQ ID NO: 4189424 - RNA, 69 nt, Human
aucuuccuuugccaugggauaguguuuuuaaaaaaaucccuggagccugccccaauuauaaaagaagau

SEQ ID NO: 4189425 - RNA, 63 nt, Human
auuacugucuuugaggagauuuugauaagcauacagucuuuuagacaauccucaaaagguaau

SEQ ID NO: 4189426 - RNA, 87 nt, Human
auuacuuaaguuuaugaugaaaaucuugagaugucgacuuaaaaauggguaaagagguuacauggguuuucaaacuccuuaagugau

SEQ ID NO: 4189427 - RNA, 57 nt, Human
auuagaacuaggcuaaguaaaacgagauuucuuggucugauuguguguaguucugau

SEQ ID NO: 4189428 - RNA, 130 nt, Human
auuagaaucacuuguggagauuuauaaaaauugcugccugaaugaaccuuguucuuggagauucagauggaauuggccuggguggggucuagacagcaguaguuuuuaaaacucuccaggugaaucuaau

SEQ ID NO: 4189429 - RNA, 80 nt, Human
auuagagucagaguggucuuuaagauuuaauuaucucuccaauuagagauaacagacuuagaguuacaagggaccuugau

SEQ ID NO: 4189430 - RNA, 62 nt, Human
auuagauauuugcuguuggauuugguauauuuaggcaaauccuucuucugcuagugucuaau

SEQ ID NO: 4189431 - RNA, 127 nt, Human
auuagcgucaauggccccaucaggcucuagguuaguaggagaacauucucaagcauuucagagaguauaagggacgucucuucuaauuaggguccaugauguagucauacuuucuuauugaucuaau

SEQ ID NO: 4189432 - RNA, 103 nt, Human
auuaggagauugucuugggguaguuaucaguaugacaccagaggcaaagacacuagaagcuguuggaauuaaaaggagaacuucucaugagcaauauccuaau

SEQ ID NO: 4189433 - RNA, 63 nt, Human
auuagguugagguacucagagcucccccaucaugaggcugagcucuagguccuugcauuuaau

SEQ ID NO: 4189434 - RNA, 57 nt, Human
auuagguuggugcaaaaguaauuacaguuuuugcaauuacuuuugcaccaaccuaau

SEQ ID NO: 4189435 - RNA, 80 nt, Human
auuagguuggugcaaaaguaauuacaguuuuugccauagaaaguaauggcaaaaacugauuucuuuugcaccaaccuaau

SEQ ID NO: 4189436 - RNA, 106 nt, Human
auuaguacaagauuacuaacuggagcccuuuuccuagauacuguuacuuauaaauuguagguauaugguacguuagaagaagggguccuaguauucuugaccugau

SEQ ID NO: 4189437 - RNA, 68 nt, Human
auuaguugauacuaucuguacaggguuacaaauuaaccacuuucaaguuucagaggauaugaacuagu

SEQ ID NO: 4189438 - RNA, 82 nt, Human
auuaguuuauggauuaguuccucugggguuggauagcuucucuuggcucaaucagccaugucaggggaaugacauugcuaau

SEQ ID NO: 4189439 - RNA, 104 nt, Human
auuauaauacagucucuuuucuucuuaguaucucuccaagcccuuguuuuaaagguuuucacaggaaguauguuagagagaaaucagacuggaauuguuaugau

SEQ ID NO: 4189440 - RNA, 130 nt, Human
auuauaaugaaaucauguuaucagggaguaugucauccaaggauuuuauugcauauuuuauuauuagggagaaugacaauauagcuuugauuuuauacuuacagugcuugauauauagugauauuauaau

SEQ ID NO: 4189441 - RNA, 81 nt, Human
auuauacaagguuguacuuucucucuaagcaugaaggauuucccauggaaaaagaguucagaaagugcagguuuguguugu

SEQ ID NO: 4189442 - RNA, 96 nt, Human
auuauagacauuuucccuacccucauggggguugcaauuagcagcagggacauggugggguguacaauuaaaugggaaauuaggaugucaugugau

SEQ ID NO: 4189443 - RNA, 72 nt, Human
auuauauuaaauuaaguggcuaauuuauccaagugaauuaucugcauagauagccacuggagcuuaaguagu

SEQ ID NO: 4189444 - RNA, 68 nt, Human
auuaucauuauaaugguauaguugugcaguuauaauaauaauuacagucuuaugguuaugaugauagu

SEQ ID NO: 4189445 - RNA, 70 nt, Human
auuauccuggaugauccaugucauggaacauugagcugcguauccuuucauuuccaucauucagggugau

SEQ ID NO: 4189446 - RNA, 89 nt, Human
auuaucucuuagaaacuccagaagcuacugggauauuaauuaguucaguaguuaauaucaaggaaguuuagagaguugugaguuuuaau

SEQ ID NO: 4189447 - RNA, 87 nt, Human
auuaucuguuauccauagaauaagucaucuuaccuaccuuccgcaguagggaucuuuugaugaccauucauguggggcacaaauaau

SEQ ID NO: 4189448 - RNA, 55 nt, Human
auuaucuugauaaaauggcagugacacgcacucugccugccacaauuagggugau

SEQ ID NO: 4189449 - RNA, 72 nt, Human
auuaucuuugaugauuuuggugggggguuggggggugcucguugaauuuguuucagagucaucaaagauggu

SEQ ID NO: 4189450 - RNA, 65 nt, Human
auuaugcuuucuucuuuuuugaugcuuaggcauuugaaaggcaauucuuggagaagaagcauaau

SEQ ID NO: 4189451 - RNA, 116 nt, Human
auuauguucaagauuuauuguuuugguuuuaguuuucuucaucagugaagugacuugaauuagucucacguaacugucaaggaaacaaaauuacaggcccuaaugaccaacauaau

SEQ ID NO: 4189452 - RNA, 83 nt, Human
auuauucauugcuauauccccagcaucuagaauagucccugccacauaguagguggccaauaaauguuggaggaaugaauaau

SEQ ID NO: 4189453 - RNA, 106 nt, Human
auuauuguauuuauuuuuagguuguuaaauuauuuauguuaacagucgagagacuucucuguuuuuuaacuaaugaauguugacuucucuaaguaagguuaguagu

SEQ ID NO: 4189454 - RNA, 94 nt, Human
auuauuuaggacauuuagaacagaguauuuuuauguaaaaaauuuggcaaacauauuuuguuuucagguaccuugugaaaguguuuugaauaau

SEQ ID NO: 4189455 - RNA, 78 nt, Human
auuauuuauccauacuguaauaccuaaaugaacgcuaugacagaguucaguaagugauuacagugucaggauuauagu

SEQ ID NO: 4189456 - RNA, 128 nt, Human
auuauuuguuuacacaucugccuuccuuaugagaccaugggcucugaagagcaggaaucauguccuuguuuugcaaucucagguccuagcauagggcuccaggcauagcagaugcuuaauaaaaugau

SEQ ID NO: 4189457 - RNA, 67 nt, Human
auuauuuucaaaacaucugcuguguugguuguuuucccaaaaccaaugugggauuuuugaaaauaau

SEQ ID NO: 4189458 - RNA, 70 nt, Human
auuauuuuggcucugucuguaucuuugcucuauuccuauuugagcaaagacagagagaagccagaacaau

SEQ ID NO: 4189459 - RNA, 82 nt, Human
auuauuuuucuucuaccugcuguccaauacugaauaguaucaguuauuuuaagauuugccaguaggagcuaggaaaagugau

SEQ ID NO: 4189460 - RNA, 96 nt, Human
auucaaaaugugucuaauaagugagcuggugagacugaagguuugccccucaauuauccuaguccauugauuagcucauuuaaacauguguggaau

SEQ ID NO: 4189461 - RNA, 106 nt, Human
auucaagugauuuuguuugcaaaguuuuuaagcaagacccuuuuuuuaaagaaagguucuguuuuuaagaaagacccuuuguuuugaaugcaacucuuacucgaau

SEQ ID NO: 4189462 - RNA, 94 nt, Human
auucaauagaucuggguugggaccuaagagucuggguuucuaaccugcucacagaugaugccucugcucuugguccucagaccacacuuggagu

SEQ ID NO: 4189463 - RNA, 73 nt, Human
auucaauaucugguucugcaaauuugucccuaaagauuuuagggcuucauucaggcagaauuucauauugagu

SEQ ID NO: 4189464 - RNA, 55 nt, Human
auucacacacagcuuccuauugucuaugcuaauggagguaaaggcuggugugaau

SEQ ID NO: 4189465 - RNA, 62 nt, Human
auucacaguucauuagcuguaaguagccauaugccccagauagcugaaaggagcuggagagu

SEQ ID NO: 4189466 - RNA, 111 nt, Human
auucacucuuggaguccugagccaccaucuacaaugucuggcugcacugagaucaucaugcugcacaagccacauguaggugcucugcucaaccaacccuccuaaguggau

SEQ ID NO: 4189467 - RNA, 63 nt, Human
auucagaaaguugucauauuugaauuguuuuccuuuucagaggagggaugugcaauacugaau

SEQ ID NO: 4189468 - RNA, 69 nt, Human
auucagaagggcucucugcauugaaauugcaacuuuuucucaccuggcugcaaagagaacccacugagu

SEQ ID NO: 4189469 - RNA, 65 nt, Human
auucagcaggcaccggaaguguuuuugggacuucuugggaaaugcuucauaggaugcugaugagu

SEQ ID NO: 4189470 - RNA, 65 nt, Human
auucagcuaagugcuucaugcugugauuucuucagagaaagggcuuaaugaacacugagcugaau

SEQ ID NO: 4189471 - RNA, 62 nt, Human
auucagcucugaaucagcagacucucauuucucugagucaguuccucaugaucaggcugagu

SEQ ID NO: 4189472 - RNA, 70 nt, Human
auucaguacucuccuuuuccuaauucaucucauucauucaaggugaauuaggaaaugagaguauuugaau

SEQ ID NO: 4189473 - RNA, 94 nt, Human
auucaguggaaguaaccaguagcuauguauaaauaggccacuguagucaaagcucaguguaucuagguaucuauaguucuuuccagacuugaau

SEQ ID NO: 4189474 - RNA, 71 nt, Human
auucaguuauuggaaaagggcuguaauugaguaggguaguaaauacuaauugcuuguuucuuuaacugaau

SEQ ID NO: 4189475 - RNA, 68 nt, Human
auucaugcauucagcaaacauuuauuaucuguuaugagcuagauaguaugugaugcugauaaaugaau

SEQ ID NO: 4189476 - RNA, 79 nt, Human
auuccaaccgacuugugaggagaggcagcaucuuuccgagggaagagcagcacguuguccccacauagugggcaggagu

SEQ ID NO: 4189477 - RNA, 66 nt, Human
auuccaacucgaugcucucuuggguguggggaagccccaagcaggauggagguugaguuacagaau

SEQ ID NO: 4189478 - RNA, 81 nt, Human
auuccaagacaaaacacagcuuucaucaugacacaucucuguucagacuucuugacuggcuuugcuuuuuguguugugaau

SEQ ID NO: 4189479 - RNA, 100 nt, Human
auuccacaccaaggcucucagcaggcaggaaucuaacccaaggagaagauacagccuucagccaaggucagauuuuuguucacugugccaggugaugaau

SEQ ID NO: 4189480 - RNA, 65 nt, Human
auuccacaggacuaccaaugugcaauccucucuccuugagauuuucaacuuggaguucuuggagu

SEQ ID NO: 4189481 - RNA, 61 nt, Human
auuccacagugccuuccgugaacacugcacacagcagcucaucuguaaguaucuguggagu

SEQ ID NO: 4189482 - RNA, 61 nt, Human
auuccacaugaaaggagcugaagcuaauagcccaucuccagucucucuuaguuuguggaau

SEQ ID NO: 4189483 - RNA, 57 nt, Human
auuccacaugcucuuguuacaguguugcaucaacaugccuccauugagcuguggggu

SEQ ID NO: 4189484 - RNA, 57 nt, Human
auuccacuguuauaaaauguccagaacaagccaauuucuggagauaaauaguggaau

SEQ ID NO: 4189485 - RNA, 58 nt, Human
auuccaggcacaucccaacuccagggcuuuggcucuucuggguugcugugcuuggaau

SEQ ID NO: 4189486 - RNA, 56 nt, Human
auuccaggcaugcaggaacaaggggaaagaugaccccuccuuccaguuccuggggu

SEQ ID NO: 4189487 - RNA, 82 nt, Human
auuccaucuguacugagcuccuacugugugccaggcaccaugccaggcucaggacacagugguuuagagaaacagauggggu

SEQ ID NO: 4189488 - RNA, 69 nt, Human
agugucuuaguccauuugggcuacuauaaaaauaccauaaaaugaguggcuuauuggcaacaaagaacu

SEQ ID NO: 4189489 - RNA, 60 nt, Human
agugucuuugucaaauuacaggagccaaacgcugcuaucugagacugugacagagccauu

SEQ ID NO: 4189490 - RNA, 61 nt, Human
agugucuuugucucucaagcacucgcauaaguuccagagugcuucguugaagaauggcgcu

SEQ ID NO: 4189491 - RNA, 73 nt, Human
agugugaggugaggagagaagcauauuuagaccucugaucuuuuuccugugcuucucuuucucacuuaaaucu

SEQ ID NO: 4189492 - RNA, 71 nt, Human
agugugauuauccccguuguucuuugcuugauugggcacagaccucagagcagccugugaugaugcacgcu

SEQ ID NO: 4189493 - RNA, 119 nt, Human
aguguggcaccagugaccagagcgggagauuggggggguguccccuauggcccaggcacaggccuguuaagggggucaucucucuugcccgcugccacaagcacuguuguaaacacacu

SEQ ID NO: 4189494 - RNA, 65 nt, Human
agugugggccacgcagcugagcaaggacacauggugacauggcugaguguugcugaggcccagcu

SEQ ID NO: 4189495 - RNA, 96 nt, Human
aguguggguauugaggcuuaaagcaaauuuuauuugaaucuugauuccggcacuuguguauuccaguaaugugacuuugagccagguauuuacacu

SEQ ID NO: 4189496 - RNA, 91 nt, Human
aguguggugguuacaugaaugcauacauuugucaagacucaucaaaguguaugcuucagaucugugcauuuucuuacauguaaauuauacu

SEQ ID NO: 4189497 - RNA, 76 nt, Human
agugugucaggaggcccaaagggcgcagagacaaaagcacugggaauuugucuccucugggucugaugauaccacu

SEQ ID NO: 4189498 - RNA, 86 nt, Human
agugugucuucuuggccuuccuauggaauguaaucauguggugguuuuccaaccuuaugugauauauucauuccaggaugcccacu

SEQ ID NO: 4189499 - RNA, 71 nt, Human
aguguuaaaaccguuuuaccauuuguaacucuaaucugauuuggaagugugcaguuuaaaauguuaacacu

SEQ ID NO: 4189500 - RNA, 61 nt, Human
aguguuaggaauuaauguagggcacccucuuauugggaaugucacuguaauugccuacauu

SEQ ID NO: 4189501 - RNA, 63 nt, Human
aguguucccaggcguugccaaauguccucuggaaggcaaaaaucaccccugguucagaacacu

SEQ ID NO: 4189502 - RNA, 67 nt, Human
aguguucugggugucagcgugucccaggggauccuaagguccugggcuguugcaucauccuuaaacu

SEQ ID NO: 4189503 - RNA, 123 nt, Human
aguguuggugucuauaucugggcccuggauguacaggcauguuggguuguucaagaauaaugcagugcuucauaugccuguaauagcaacccagggcuggucuuuguuguucacacccacacu

SEQ ID NO: 4189504 - RNA, 66 nt, Human
aguguuucuggaaucaguguuuggccccaaagucucugguuugugcagagauucauagaaaagacu

SEQ ID NO: 4189505 - RNA, 60 nt, Human
aguguuuguaaacuacagaucugagguauuaccugggaauauguauuguuaacaaacacu

SEQ ID NO: 4189506 - RNA, 69 nt, Human
aguguuuuauugucguuguuuuugcuguuguuaaugaaccuacucagagagcaaugagauguaaacacu

SEQ ID NO: 4189507 - RNA, 67 nt, Human
aguguuuuggaggaaaaggaaggauaagguguauaucaugucuuguggauucuauuucccagaaccu

SEQ ID NO: 4189508 - RNA, 71 nt, Human
aguuaaacaucgauggauagagcuugcuuaguuguuuaucauuagcgaaauuuuucaucugaauguuuacu

SEQ ID NO: 4189509 - RNA, 76 nt, Human
aguuaaggaauuuauugccuauguaacuuuauauuuugggauagcacuaagaucagacauggcuggauucaaggcu

SEQ ID NO: 4189510 - RNA, 95 nt, Human
aguuaaggcuauuuucacuucuuuuguggcucuucaguugcuucaggccaccuggauguauacgugcaggucacaggcgauaugauggcuuagcu

SEQ ID NO: 4189511 - RNA, 62 nt, Human
aguuaauaauggaaagacacaugacauaucuaccacagauuauugugucaguccauucagcu

SEQ ID NO: 4189512 - RNA, 129 nt, Human
aguuaauagauagcaugaauauagugauuaaacacauggauugcuuagcuggacugcuuugauuuaaauauaagcucugcuauuuucuaucugugugacauugaucagguuacuuaucucucugugacu

SEQ ID NO: 4189513 - RNA, 82 nt, Human
aguuaauagugauuuucugaggcauagaggaugagacucagugucucuucccuguagccacggguuuuacuuucagaugacu

SEQ ID NO: 4189514 - RNA, 67 nt, Human
aguuacaaguacaggcuuuggaauugggcagauaguauuaaaaccccaacucugccacuuaguagcu

SEQ ID NO: 4189515 - RNA, 76 nt, Human
aguuacauuucaguuucaaugagcagagcauagucugaaaacaacuuauuguuaggcuuuuggaauuuuugugauu

SEQ ID NO: 4189516 - RNA, 60 nt, Human
aguuacugcaugguggaguggagcuuggcagggaacggguuuuaugccaucaugcaagcu

SEQ ID NO: 4189517 - RNA, 88 nt, Human
aguuacugugggauuauugcuaucaaauacaaagggcauaaggcuuagcugagugaauuaugcuuguauuuuauucccuucacuaauu

SEQ ID NO: 4189518 - RNA, 65 nt, Human
aguuacuguuauauuccaggcaaucugcuagguauugaagauaaaaacuggauuaagacagugcu

SEQ ID NO: 4189519 - RNA, 58 nt, Human
aguuacuguuucccgugauacucugucuggacugaauucaucuugggaaaugguaacu

SEQ ID NO: 4189520 - RNA, 125 nt, Human
aguuagccuaaguuuuaaugauauauuuuacuagaaauguucugcaacuguuuucauccuaauguuuuuugaagaggauauugugagagcccucugccucuaaauguauauuacccugguuugcu

SEQ ID NO: 4189521 - RNA, 72 nt, Human
aguuagggaaaauuagcaucaaauaaagcucauuaauaaacuuugauauuugguggcugauuaucuuugauu

SEQ ID NO: 4189522 - RNA, 69 nt, Human
aguuagggucucaggccccauacagcaucuguguuuagcacagugugggcauggugccugcuccuggcu

SEQ ID NO: 4189523 - RNA, 75 nt, Human
aguuauaaacacagcgucccagaagccugccccgggcccgcgcaccccgcuucugggugccugugaguguucacu

SEQ ID NO: 4189524 - RNA, 95 nt, Human
aguuauaagaagcucuggcuaaagagcaagaagauggaucagcugacuucucagaccacuacuauuguuacuuuucuagaauauuuuuauuuacu

SEQ ID NO: 4189525 - RNA, 71 nt, Human
aguuauagaaccagguccucacucugcacaaaaaaauuaccucccagagguggaacugacuuucuaaagcu

SEQ ID NO: 4189526 - RNA, 60 nt, Human
aguuauagccauauucuaagauugucauuucuugcuaagacuuuggaaaaggcuaugauu

SEQ ID NO: 4189527 - RNA, 62 nt, Human
aguuaucagagcuaguacuugcaggugagucucucuuuacuucaggagcagucucuggaacu

SEQ ID NO: 4189528 - RNA, 55 nt, Human
aguuauggagcagaguuuguguuucauaagaaaacauaggcagagcuuuaaagcu

SEQ ID NO: 4189529 - RNA, 73 nt, Human
aguuaugguagcuuaauuugccuggugauauugauuuucugcugccagcugugcuguauuaagcucuauaccu

SEQ ID NO: 4189530 - RNA, 70 nt, Human
aguuauuaguuuaggaucuuuuuugugccagguauugugcuaggcacuggaaauaccuagaugaauagcu

SEQ ID NO: 4189531 - RNA, 111 nt, Human
aguuauuuaguuuuucugcaguggaaugugaauauccaugauuaguaggauaaagucuacaaguagcuucacauuaguuuggaucaaauuuugccauuaaauuaguuaacu

SEQ ID NO: 4189532 - RNA, 62 nt, Human
aguucacauuccgagguacuggggguaaggacuucaacauacuuuccuuggaguguacaacu

SEQ ID NO: 4189533 - RNA, 67 nt, Human
aguucagaacaauuccuuuauaacaaaagucuugaccauuuguugugagguugaauuguguuggccu

SEQ ID NO: 4189534 - RNA, 57 nt, Human
aguucagcaaauaaaacauaguucagagucgaguuaugugguaaaaaugcaugaacu

SEQ ID NO: 4189535 - RNA, 79 nt, Human
aguucagccccucagaguucaguaucaggucacauuuguagguggucuggccccaucuggagucugaguucuuguaacu

SEQ ID NO: 4189536 - RNA, 130 nt, Human
aguucaucccuaaccaacaguuuuccuugaaauuagcuguuagagaagaguguagacagaauaacauuuugcuuuauucccuucugauguguaagaggaggaaaucagggcuuuacaaugauugauuacu

SEQ ID NO: 4189537 - RNA, 58 nt, Human
aguucauggaccaguuguguucuauuaauuuccagaggacauccuggugacuagaacu

SEQ ID NO: 4189538 - RNA, 56 nt, Human
aguucauggagaggagaccgggaacuaacaguccagacuucagcaucuccggagcu

SEQ ID NO: 4189539 - RNA, 81 nt, Human
aguucauuacauuguugcauagguuuugaaaacauuauuaauauuaaacaagucaacccuugugcaacagugaugagaacu

SEQ ID NO: 4189540 - RNA, 97 nt, Human
aguucauucaacuagguaaguggcagagcugggcugcgacccaggugugucugagacugagcccaugcucuuucuacgauauuugcugguauggauu

SEQ ID NO: 4189541 - RNA, 96 nt, Human
aguuccaucaccaaaaagcucagagauauguuuugugaucaaagguacuaauuauaugagccuaagguaauaaucucccuuuuuguaugugugacu

SEQ ID NO: 4189542 - RNA, 90 nt, Human
aguuccucaagauguguuaauuagaaauaaaaugcagcaugguuaucggcugcagagcuuucugaaugaagcagacucugaagagggacu

SEQ ID NO: 4189543 - RNA, 59 nt, Human
aguuccugaaagaugaguaauuaauugugugcugaacugauugcugaauuuuaggaacu

SEQ ID NO: 4189544 - RNA, 57 nt, Human
aguuccugaacuucuuaaugacuuaaguuuucuugaacauuaagguauucagugacu

SEQ ID NO: 4189545 - RNA, 88 nt, Human
aguuccugucgcaguguugagugguggcugaaacaauggcagccacuaauguugauagcuaagcacuuacacuggaaggguagggacu

SEQ ID NO: 4189546 - RNA, 80 nt, Human
aguucgauaacacucucuguugguaaggcuguaaggcagcagaacuuuuacccauugcuagagagagugugaaucgcucu

SEQ ID NO: 4189547 - RNA, 60 nt, Human
aguucggugucuccucaaugagcucguguuuucacugaaguucucuugggggccugagcu

SEQ ID NO: 4189548 - RNA, 66 nt, Human
aguucuaaagguauuuugcagagauaguuacucugacugguaucugcaaguuuaucacuugggauu

SEQ ID NO: 4189549 - RNA, 64 nt, Human
aguucuacucucacucacugaagacgcccugugugcaagucccugaacaggugagaguaggauu

SEQ ID NO: 4189550 - RNA, 82 nt, Human
aguucuaggguacauaugcacaacaugcagguuuguuacauacguauacaugugccguguuggugugcugcacccauuaacu

SEQ ID NO: 4189551 - RNA, 82 nt, Human
aguucuaggguacauguucacaacgugcagguuuguuacauauguauacaugugcuauguugguguacugcacccauuaacu

SEQ ID NO: 4189552 - RNA, 82 nt, Human
aguucuaggguacuggcgcacaaugugcagguuuguuacauauguauacaugugccauguuggugugcuacacccauuaacu

SEQ ID NO: 4189553 - RNA, 89 nt, Human
aguucucauacccuugguuccuucucuguggggaaggcaggaggaagaugccccuccucgcccagagcagggaucagaaugugggaccu

SEQ ID NO: 4189554 - RNA, 59 nt, Human
aguucucuuuagcucauaugguuuucuuuaaaaauuagugauaucagcuaaauggaacu

SEQ ID NO: 4189555 - RNA, 73 nt, Human
aucuacaaauaguggaaaauauuauaaauggcaguaaaugaaguaaaugggaguuuccacuguaauguaugau

SEQ ID NO: 4189556 - RNA, 64 nt, Human
aucuacagcagugccagguagccuuaaguaaaaaaggaacauauuuuaggcacaguugcaggau

SEQ ID NO: 4189557 - RNA, 59 nt, Human
aucuacaggcugaggugggaggaucaacugggucucuccaguuaccuaggucugaaggu

SEQ ID NO: 4189558 - RNA, 57 nt, Human
aucuaccaacuccucucuggccaccaccagccuagguaggccacauggguuggagau

SEQ ID NO: 4189559 - RNA, 75 nt, Human
aucuaccuacuuacauuucuguaaucggcucuucaguuuuaagaagccgaacacauaaaugagagaagcauagau

SEQ ID NO: 4189560 - RNA, 77 nt, Human
aucuacuggcgacucuggucauuuggaagagcauguuuugaaaagaugagcuuuuugauggcuguauucggguagau

SEQ ID NO: 4189561 - RNA, 68 nt, Human
aucuacuucaacagcuuccaaaguguguuccuuggaauacuaguuuuaugggauguuguuaauuagau

SEQ ID NO: 4189562 - RNA, 99 nt, Human
auauauauuucacuauaucacacuucaaacuuuuguuuacuguuucccuucuccuacucuauuauaaaccuuugaggguggggacugugaguuauuuau

SEQ ID NO: 4189563 - RNA, 68 nt, Human
auauauguacacacacaugcauguaaauauauauagauguacaugcauacuuguguguguauauguau

SEQ ID NO: 4189564 - RNA, 61 nt, Human
auauauguguaacacacacacacaaacacacauauauauguguguguguuuauauauguau

SEQ ID NO: 4189565 - RNA, 63 nt, Human
auauauguucagaagaagaauggggaaaaaucuuccucuuuuauuuauucugaaagcauuuau

SEQ ID NO: 4189566 - RNA, 119 nt, Human
auauauuauauauaauauauauauauauaugcauuaacauuguaggaggaguaacuugaaccuuucuaacauagaugcaaguuugugcauauguguuuauguguguaaauaaaauauau

SEQ ID NO: 4189567 - RNA, 83 nt, Human
auauauuuagauuuauaugugagaaugggcaucuuacauauuuuaauacauguauacucauauucacagaugccuaaguguau

SEQ ID NO: 4189568 - RNA, 85 nt, Human
auaucaaagcuucuuaaaguauugguuuaaccaaaucuuuugauuuuuaggaccauuuuacuuguaggugagaauacuuugauau

SEQ ID NO: 4189569 - RNA, 70 nt, Human
auaucacagaugcagaaagagaaagagcuugaaaugggcuugaacacaguucuuucugaaucugaaguau

SEQ ID NO: 4189570 - RNA, 89 nt, Human
auaucacugcuccauggagagugaaagucucucuaguuuucaugccuaccaaacuaguagagauccagcuuuccuuccagaaguaauau

SEQ ID NO: 4189571 - RNA, 71 nt, Human
auaucaggcaaaccgaggagcagaauuauaguauuauaugauaaaaauacuucacuucugggugccgauau

SEQ ID NO: 4189572 - RNA, 73 nt, Human
caaaaaucagcuuucagugguggauugcuguuagaguuguuuaaguaauaccuugcucauagggcugaugcug

SEQ ID NO: 4189573 - RNA, 91 nt, Human
caaaaaugauuaaagugagcuguguagcccuguaaccauggaacagauuuccuguacaauguucauagcuuuggcaaaguaauuauuauug

SEQ ID NO: 4189574 - RNA, 70 nt, Human
caaaacaaugcacauacuacaaucucuguuaacuuggguuaucagagauuguaguaugugcauuguuuug

SEQ ID NO: 4189575 - RNA, 78 nt, Human
caaaacaggacaucacucgccgccugucucgaaguggugagcgccaccacaucgggcggacacugggguccuggugug

SEQ ID NO: 4189576 - RNA, 75 nt, Human
caaaacuuaugccaggucccauccccagagauccugauuuaaugggucuggggugcagccuggacauaagguuug

SEQ ID NO: 4189577 - RNA, 79 nt, Human
caaaagaaaagauccaguguuuugagaagggcacguccacugagcugcucuuugaaggacacuuucaaguuuucuucug

SEQ ID NO: 4189578 - RNA, 76 nt, Human
caaaagcucacuucugaagguaguuggcaggacuucaaggaauggucuugcacugcuuugcaaagcugagacaaug

SEQ ID NO: 4189579 - RNA, 77 nt, Human
caaaaggaucuuaaggcuuggucuagucaugccaggaguccugagugacuguggagcaagcugagaggucugcuuug

SEQ ID NO: 4189580 - RNA, 78 nt, Human
caaaaggcaguucaugcccagagcaguaaauuaggguuugucuuuccuagguuauuggguuuggguuugggucuuuug

SEQ ID NO: 4189581 - RNA, 56 nt, Human
caaaaggccaguacuuuguuugacauauuuggaaacugagguagcuggcucuuuug

SEQ ID NO: 4189582 - RNA, 103 nt, Human
caaaaggcuuuguuauuuggcuuuggggugaagacuguuauucucuuggccugaggaaacuuucuuuugcuucauagucaaaagaaugaucaaaguagcuuug

SEQ ID NO: 4189583 - RNA, 60 nt, Human
caaaagggaguucucuggaagggaaauaauucugucccuaccccugauugcuccuauuug

SEQ ID NO: 4189584 - RNA, 61 nt, Human
caaaagucccaaagucacucugcuugcauccacacugcauucuccugccuuuggacuuuug

SEQ ID NO: 4189585 - RNA, 62 nt, Human
caaaagucuuccuauucucuuaucauuccauaccuuggagccagaguagagguagauuuaug

SEQ ID NO: 4189586 - RNA, 69 nt, Human
caaaagugaagugacauggaucuaucagaaguugcaauuuugcaaaacuugucaguguacuuucuuuug

SEQ ID NO: 4189587 - RNA, 91 nt, Human
caaaauaaaagacaucacaggcaaaauuccuucucucucucccucuuuuuaacuagggaaggaaaucuugcuugugagcagcugaauuuug

SEQ ID NO: 4189588 - RNA, 57 nt, Human
caaaauaauugaguuaguuuucagggugggugcucauuagacagcucuauuauuuug

SEQ ID NO: 4189589 - RNA, 97 nt, Human
caaaaucaagcaacaauuuaacagcuacaucaaacucagaaguggguguuccugacuucuaccuuaguguuuagauguggcauugagcuucuuuuug

SEQ ID NO: 4189590 - RNA, 89 nt, Human
caaaaugggauucaauagaguguuuagcaugaaguucauuagguaguaccuuucuccuaauaaugcugggcauucuggaagucauuuug

SEQ ID NO: 4189591 - RNA, 118 nt, Human
caaaaugguuuaagacagaggucauagcaagcuucaguuuuuacuuuuuccccuugcaucugaacaauugcaagcagaaagaacaacugagugcuuuauuucugcaaccaccaugcug

SEQ ID NO: 4189592 - RNA, 64 nt, Human
caaaauuaguacauugcaaaguccaugcuuaaauccagggccccuggcaagagugcugagcuug

SEQ ID NO: 4189593 - RNA, 66 nt, Human
caaaauugaugaauguaugauuugaaaagaaaccucaaacuuaagauuaugcaagcaucaauauug

SEQ ID NO: 4189594 - RNA, 94 nt, Human
caaacaaauccacaugcuaugaugcaguguggacuaucuuuggucaccuacaugucaaagguggucuuaaacugcucugguuugguaaauguug

SEQ ID NO: 4189595 - RNA, 74 nt, Human
caaacauucccagaaguccagccaugggccugagagacuucuacuggacauggugacuuuuggggacuaauuug

SEQ ID NO: 4189596 - RNA, 56 nt, Human
caaacauuuguuggaaccccugaagcauauccuaggguuccuuggaacacuguuug

SEQ ID NO: 4189597 - RNA, 83 nt, Human
caaacccuaggucugcugacuccuaguccagggcucgugauggcuggugggcccugaacgaggggucuggaggccuggguuug

SEQ ID NO: 4189598 - RNA, 61 nt, Human
caaaccuugcagaacugggcagccaacuaauuaauuguugcaucaauaaagccaggguuug

SEQ ID NO: 4189599 - RNA, 97 nt, Human
caaacucugaugcauagccagcuaagggaagcaugauucuagcaacaaauuccuauccauguaucuuacuucucauuagcugcacagucagagggug

SEQ ID NO: 4189600 - RNA, 84 nt, Human
caaacuggcuuaucaacuuuggucagagaaauugugugggucaaaacuuguauuuuacaugauccagaguuguugcuauguuug

SEQ ID NO: 4189601 - RNA, 66 nt, Human
caaacuucuuuguaagacauguaagucccuucacaacugggggcuugccuugcuuuaaaaaauuug

SEQ ID NO: 4189602 - RNA, 85 nt, Human
caaagaaagucuaaaaguauuuugucaaugggaauuuguuuuagcacuuccaagauguuauuccauugucuuuugacuuucauug

SEQ ID NO: 4189603 - RNA, 60 nt, Human
caaagaaccaggccaauggagagaauucaguggaaguuucagacauagccugauucugug

SEQ ID NO: 4189604 - RNA, 80 nt, Human
caaagaauagcauggcauuuguuuuccaaauggccauuucaauuauuuaaugguuaauuuaaauuccaugcaauucuuug

SEQ ID NO: 4189605 - RNA, 73 nt, Human
caaagagaaaagucaacguacaguaagcaaauguauagcuuaauguggaaucauggacuuuauuauuucuuug

SEQ ID NO: 4189606 - RNA, 78 nt, Human
caaagagccuccuccuggugugccgauuauuaguugccacaauaauucuuuggaaaauaucugaggagaaaaucuuug

SEQ ID NO: 4189607 - RNA, 71 nt, Human
caaagauguuaauagcaccauuuccugucacuaaccuucaagccaagaaaggaaaaguuguuacauuuuug

SEQ ID NO: 4189608 - RNA, 98 nt, Human
caaagcaaugaaucaggaaucugaggcuuugaaauucaaucugcuucugauuuaccaugcagaaaggucacuuagccucagcuuccuuaucugcuaug

SEQ ID NO: 4189609 - RNA, 88 nt, Human
caaagcaccagggaaacggggcuggccuucccgggaggugacacccuccuggcacuuugggggcucgcccucuguugcccuagcuuug

SEQ ID NO: 4189610 - RNA, 116 nt, Human
caaagccaaaauguagguuaagguggcaaccggguaggugucaacucugauuuaagaccagugcagagugaagacaucaccccauagcuccuuaccugacucuaccccaagcuuug

SEQ ID NO: 4189611 - RNA, 61 nt, Human
caaagcuauaaauucagacagaaggauaccaagcucuggguuauucugaauuuauacuuug

SEQ ID NO: 4189612 - RNA, 130 nt, Human
caaagcuuuuauuucauguaacaugggcuguuguuaaguaccagauugucugaagccauucguuuuauguuuagagugcucuggucacuaaugccaucucaaaauguuccagggagauacggagugugug

SEQ ID NO: 4189613 - RNA, 76 nt, Human
caaaggaggcacugcugggccccuguauaagcacucguaggcguucaaagugcagaggcccagcgguucuucauug

SEQ ID NO: 4189614 - RNA, 94 nt, Human
caaaggaucuuuaaaguccuuucucuugagcaagagcuguguauuuauuaacaguguuuucuuaaggagaaaaaugggcaacugugaacuuuug

SEQ ID NO: 4189615 - RNA, 66 nt, Human
caaaggauggguuugagauguuuggguugguugagugggcauuuagacaacaagccuucuccuuug

SEQ ID NO: 4189616 - RNA, 93 nt, Human
caaaggcaacuuccuccuucucaugguguugcuguuugcucuugacaucaggguauucuuaggcuggcagugugagagagggaugugccugug

SEQ ID NO: 4189617 - RNA, 72 nt, Human
caaagggaaaagccaugugggccaaaguguaguagaaagcaggcacaagcucccacgugucuucucccuaug

SEQ ID NO: 4189618 - RNA, 107 nt, Human
caaagguuauguguagaaaaauucuuauuuguguggauggaaggcaguagggcuguggaugcuguguguuuccucuauagaaaaauauaucuauacucauuccuuug

SEQ ID NO: 4189619 - RNA, 77 nt, Human
caaagucaaucaaagccagauguccuuccucacaccucaccgugucugcagagggccauguggcuuuucugaaguug

SEQ ID NO: 4189620 - RNA, 69 nt, Human
caaagucauucuacacaacaugaugauggagccauucuucauuuuuucacuggucuggaaaagacuuug

SEQ ID NO: 4189621 - RNA, 63 nt, Human
caaaguccuggagaagugaagucugucugcagcugcuucucagccuucauucuucagcuuuug

SEQ ID NO: 4189622 - RNA, 74 nt, Human
caaagucuucaguugauucugauauauccaguuuuuggacuuacuguuugccuugagagucaauaggggcuuug

SEQ ID NO: 4189623 - RNA, 126 nt, Human
caaagugagaaaguguucuuugauuugacaauguguuuaugugugggccuuacuauagcuucuuugugaauguuugugcauaaauauguuuugaauauacuguuuaaauauuuccuuaauucuuug

SEQ ID NO: 4189624 - RNA, 55 nt, Human
caaagugcagaaggaacugggugugguggcucaccccuguaaucccagcacuuug

SEQ ID NO: 4189625 - RNA, 58 nt, Human
caaagugcuaggauuacaggcgugagccacugcgucuggccgccuggccuacauuuug

SEQ ID NO: 4189626 - RNA, 56 nt, Human
caaagugcugggauuacaggcuuaagccaccacgccuggccaaucuaugcauuuug

SEQ ID NO: 4189627 - RNA, 95 nt, Human
caaagugugauucaaguuccauaucacagcagacgaagagucauucagcuccaguuuacggacugcugggguauuuuacacuugagugcauuuug

SEQ ID NO: 4189628 - RNA, 74 nt, Human
caaauaaucacugcucgauaacaugauuaugagacaaauaaucauaaggcagaaauaugagcagggauuauaug

SEQ ID NO: 4189629 - RNA, 55 nt, Human
caaauacguuuggcuggagcacccugaagucucugcuaccauccaagcugguuug

SEQ ID NO: 4189630 - RNA, 104 nt, Human
caaauacugcucuacacugaauuacaguuauauacugauuucuguuguaaauucuuagagaagacagacauagaaauuaguaacuugagucaguagcggcuuug

SEQ ID NO: 4189631 - RNA, 80 nt, Human
caaauacuguugccuacauuauaugauugugcuuuaaaagucucaucguuacaguauacauugauuaggaccaguauuug

SEQ ID NO: 4189632 - RNA, 130 nt, Human
caaauagaugccaguacaguagccccucggaucacaggagguauuuuuggugcuggaagccagccacacuuuggcaggcuuucagcaucaagucuguucccuuuagaggcgggggguggcaagcuaucag

SEQ ID NO: 4189633 - RNA, 68 nt, Human
caaaugagccaucauggaaucagaucagcccaaguuaaaccuucagcuucuuggugauggcuuaccug

SEQ ID NO: 4189634 - RNA, 55 nt, Human
caaaugauugccauguagaugagauagaagucauccaugcuuaaguaaucauuug

SEQ ID NO: 4189635 - RNA, 98 nt, Human
caaaugcuaagaucugagaaaaaaaugaaucacauucaggcuuggaauaaauccacaugaauauguauuucuuauuuacuuggaaagucuuguauuug

SEQ ID NO: 4189636 - RNA, 56 nt, Human
caaaugcuauuuuagauggguggcuagggaaggccucucuuuuuaggugguguuug

SEQ ID NO: 4189637 - RNA, 59 nt, Human
caaauggcuggcauccuucuacaaagagaagauuaacagggaggguuugccauuauuug

SEQ ID NO: 4189638 - RNA, 64 nt, Human
caaaugugaacucuguacucucugacagucgcaaggaagacugucaaaucagguaucacuauug

SEQ ID NO: 4189639 - RNA, 82 nt, Human
caaauguuaaucugaagagcuggaauccagucugguguuuguaauaccacccaugugacuaccucaugcagauaugcauuug

SEQ ID NO: 4189640 - RNA, 73 nt, Human
caaauguuaggaacuguuaauucuagauggugaguguuugaugcacuuaucuuuuaacuuuuccauauguuug

SEQ ID NO: 4189641 - RNA, 58 nt, Human
caaauguuagugcccaucccucugcagagcauaaguagcauucuggggguagcguuug

SEQ ID NO: 4189642 - RNA, 55 nt, Human
caaauguugcuguaauguuugugaagcagacguuuuuccuccacaggagcauuug

SEQ ID NO: 4189643 - RNA, 55 nt, Human
caaauguuugguggcauuuuguucacaaaaggauagagugugugcaucauauuug

SEQ ID NO: 4189644 - RNA, 96 nt, Human
caaauuacguagcugauccugaggacagggacuguuucuaacuugguuuuauaaacuuugucuuccaggcacaguucuuuauacacaguagguuug

SEQ ID NO: 4189645 - RNA, 78 nt, Human
caaauucugccaaaaauuagcaaauauauuucauuuuuaauaauagacaugacagauaguugcuagcugguagguuug

SEQ ID NO: 4189646 - RNA, 82 nt, Human
caaauugaauucaucuuuguucuguaaacuuuucaaaucuguuaugaggaugaaaagacauaacaaauguggcagcaauuug

SEQ ID NO: 4189647 - RNA, 69 nt, Human
caaauugcgaauucugagauucacugagagucauccaagcucucaguggaucucagaauuuuugcucug

SEQ ID NO: 4189648 - RNA, 78 nt, Human
caacaagauguuuugauauauguguauauuaggggaugauuaaaucaagcuaauuaacauauucaucaccucauguug

SEQ ID NO: 4189649 - RNA, 69 nt, Human
caacaaugucauauagauauuagacaggguuuguuuuuacauguuuguugauucuauaugauuuuguug

SEQ ID NO: 4189650 - RNA, 57 nt, Human
caacacauuccauagacugcugugaguuggugccaacucaacagcagggaaguguug

SEQ ID NO: 4189651 - RNA, 60 nt, Human
caacagacagcucacagcucaguucugccucaacccauguuuagcuugggcugccuguug

SEQ ID NO: 4189652 - RNA, 64 nt, Human
caacagagacucuugggcuuuagagcuagacacaucccaguucaaacucugaguaguucugcug

SEQ ID NO: 4189653 - RNA, 88 nt, Human
caacagcugacaguauuuagaggaauugggagaacguuucuagguuuggaacacuuuuaagacuuuaaugaacacuuuguuguuguug

SEQ ID NO: 4189654 - RNA, 70 nt, Human
caacagcugggcaaaggugaaaggguggugcccugccccaaauuccuuauaccuuugcuccgcuucauug

SEQ ID NO: 4189655 - RNA, 57 nt, Human
caacaggcuggcccugggggcccaggguuauugggguuccaggaacacagccugaug

SEQ ID NO: 4189656 - RNA, 65 nt, Human
caacaguggacggggcacguugggaggaggcccugaaccucuggcucucauacucgccaguguug

SEQ ID NO: 4189657 - RNA, 84 nt, Human
caacauauauaaggauuuacuaucugaaaauagagaccauauaaauguuucuugaggucuccuuggggauuuuuauacuuguug

SEQ ID NO: 4189658 - RNA, 71 nt, Human
caacaucaauccucagaaacuaguacuccauggaauacauuuugagaaaugcuagcuuaggaaucauguug

SEQ ID NO: 4189659 - RNA, 60 nt, Human
caacauugcugaaagcugggacaggccucaggcuugugaauggcacuuuucgcaguguug

SEQ ID NO: 4189660 - RNA, 63 nt, Human
caacauuuggcagugacccagggagauggcucuugacauaaaccucaggauacugcaaaguug

SEQ ID NO: 4189661 - RNA, 130 nt, Human
caaccacaguaacuuccacggagguuucagcaguggcaucuggggcuggggucgcggccguggacagcaccggagccgggaccaaggccacggagcuugcagaggcaaggccgaggauaaggaguggaug

SEQ ID NO: 4189662 - RNA, 58 nt, Human
caaccacccaaggugaggguguccugugguccauagucaagcugccugagggugguug

SEQ ID NO: 4189663 - RNA, 57 nt, Human
caaccaccuccuucuccuguaugccaaggauaaaggugcugaggagcagugugguug

SEQ ID NO: 4189664 - RNA, 68 nt, Human
caaccagagucuaugaguccucauuguuuuucuaccccaagcauagaggacuccaugaauuuucuaug

SEQ ID NO: 4189665 - RNA, 66 nt, Human
caaccggagugauucccaccucuaccacagggcauacugggcagugucuggaggcauucuugguug

SEQ ID NO: 4189666 - RNA, 85 nt, Human
caaccuagaaauuucuuuggagucgauguuauguuauaaaacuguaugugaauuuugcauuuagcuuuaaaauauuucuguguug

SEQ ID NO: 4189667 - RNA, 68 nt, Human
caaccugagauuuauugacuuaacaguauuuuaaauagauuuguuaagaaaaauaaauaggcagguug

SEQ ID NO: 4189668 - RNA, 68 nt, Human
caaccuggugcuuugcucauuugauaugcccaauaaguguuuccugagugauaaggcaucaaaaauug

SEQ ID NO: 4189669 - RNA, 78 nt, Human
caaccuuagccaauagguuucuaauugggccauuuaucuggaaauaagugugacauaagagcccuggaggguggguug

SEQ ID NO: 4189670 - RNA, 70 nt, Human
caacgcacugugcugacuuccuugugaaacggguuguuucugagugugcagggaaguggcgggaggcuug

SEQ ID NO: 4189671 - RNA, 75 nt, Human
caacuaugucuuaucuuuucaaagcucugcugcuuguguuuccaacaaaaucagugcucauuugaaaggaaguug

SEQ ID NO: 4189672 - RNA, 63 nt, Human
caacuauuuguggccucuaggaguugaggauagucuccagcugaagagccaacaaaaagcuug

SEQ ID NO: 4189673 - RNA, 80 nt, Human
caacucauuuggacagauggucuguauuaaacagaugaugacuauuuggcauguacagcuauuccauacaauuugaguug

SEQ ID NO: 4189674 - RNA, 75 nt, Human
caacuccugagcauagcacagauuucucaaaugcauuucuucuaaucuuugagaauuuuuugucaugcauuguug

SEQ ID NO: 4189675 - RNA, 60 nt, Human
caacugcugacaccaucacuccagcagacucugacagcuggagaauugaguuaguuguug

SEQ ID NO: 4189676 - RNA, 76 nt, Human
caacuguuuguccguuucuuccuggcaaagcaaucagagccccaugucgggccuccaggaggaaauggaacacuug

SEQ ID NO: 4189677 - RNA, 82 nt, Human
caacuucauauucaacguuaauauuuuuugccuucucucagcuugacagagauucaggcugcaguggcaaaagacgugguug

SEQ ID NO: 4189678 - RNA, 77 nt, Human
caacuugagcaauugcacagagccugguaccgagaaggguccucugcuugguuuuauguucugcuguugccaucuug

SEQ ID NO: 4189679 - RNA, 76 nt, Human
caacuugccaccuagagaacuacugaucuguuuaggaauagacuuuaucagcaguagucucuguggcuuuagguug

SEQ ID NO: 4189680 - RNA, 115 nt, Human
caagaagcagucaaauucauccucaacagguuaguaaggucuacauaacuucaaaggacacaagagguuagugugugauagacagccgaaggauucauggagcaggcugcacuug

SEQ ID NO: 4189681 - RNA, 87 nt, Human
caagaaguucagagauuggcaguccaggauuaauauagcagcuucucgauguuaucagucaacaacaugccagcucugccuugcuug

SEQ ID NO: 4189682 - RNA, 71 nt, Human
caagaauaacuuaaugggucaugcucuggacucgauuaaagggccaaagcucaaguucuuuaagauucuug

SEQ ID NO: 4189683 - RNA, 59 nt, Human
caagaauauauauggaguggagaauugagcuuuagaaaugccauuucauauguauugug

SEQ ID NO: 4189684 - RNA, 64 nt, Human
caagaaugccuguguagugcuggagcaguuccucuucacugagcucccucugcucaggcacuug

SEQ ID NO: 4189685 - RNA, 72 nt, Human
caagaccaaagcaagauuacagaggcauagccccauggcgagguguaugcuguagcuaaaagcugggauuug

SEQ ID NO: 4189686 - RNA, 84 nt, Human
caagagacagcagagccagauggagccguguguugaaggcuuggugccuaugcggggagcuaugggcagccugccugucucaug

SEQ ID NO: 4189687 - RNA, 82 nt, Human
caagagaccuagcagaagcugcaaugccuuuuauagccugccauuagaagucacacacugucaguucugcugugcucuuuug

SEQ ID NO: 4189688 - RNA, 62 nt, Human
caagaggaggggagaggagaggagagugguagcuugcauucuucuugucugcccucacauug

SEQ ID NO: 4189689 - RNA, 56 nt, Human
caagagggaaccuaagauguaugccaauucacauacagaauuaggagauccucuug

SEQ ID NO: 4189690 - RNA, 69 nt, Human
caagagguuucaugauuuucuuacuauuuggaaagaauaauuuaggacugcaauggugauggccuuuug

SEQ ID NO: 4189691 - RNA, 57 nt, Human
caagagucaguuguuuauggaaaguacuuuuugguucuguaaacaauaguguucuug

SEQ ID NO: 4189692 - RNA, 121 nt, Human
caagaguugcuugagacagcauggugggagaggaucaggguagugguuaugugcaaaagcucugaagucagcuuccagaguucaaagccugcugggaucccuuaccagcugugugaccuug

SEQ ID NO: 4189693 - RNA, 67 nt, Human
caagaugacaagauuuagagucugcuaaauugcaaagcuugguaggauuuucucaaucuuauucuug

SEQ ID NO: 4189694 - RNA, 91 nt, Human
caagauugaaggccaacuggucuguuagguuacugguucugugagcagaucaaagaagauggagaccugacuaucagugggggcaguuuug

SEQ ID NO: 4189695 - RNA, 62 nt, Human
caagcaaugcuauacucauuaugcucauggaaaauuaugagacaaugagcuuaagcagcuug

SEQ ID NO: 4189696 - RNA, 81 nt, Human
caagcaauuuugguugaugugagggugauaggccacauuggcuucagugaccugacaugaauuaaaaacuuauuugucuug

SEQ ID NO: 4189697 - RNA, 58 nt, Human
caagcacuacugacucuuaguaaacauacaagucaacuguuggugcagaagugccuug

SEQ ID NO: 4189698 - RNA, 62 nt, Human
caagcagguggaguaguaacucucugaaacagccagagacugguuuuuaacuucaccucuug

SEQ ID NO: 4189699 - RNA, 83 nt, Human
caagcagugagugaauccuccugggugccagguauugggcuaggaacuucagcccugggcagccaaggaagcaugcuggauug

SEQ ID NO: 4189700 - RNA, 57 nt, Human
augcccucuguagccguucucagccuacaaccgcaaggcugaggccagagugggcau

SEQ ID NO: 4189701 - RNA, 69 nt, Human
augccuacuuguaaaucacaagauuugggucuuucaaauuaagccaacuucugauuagcaaguuuguau

SEQ ID NO: 4189702 - RNA, 106 nt, Human
augccucaaacaccuucacagucaucaucugcccucacuggggaugcaagacaccuggggaccucaguaaaggggaggugaugggaaugggaggagucuggaguau

SEQ ID NO: 4189703 - RNA, 68 nt, Human
augccuccauguuucagcaucuacgucaggggcuugguccuggagucgauuaaaaacaauggaggugu

SEQ ID NO: 4189704 - RNA, 55 nt, Human
augccuggacugacaugcacugcucacaagcugaagcacugucuucuucagggau

SEQ ID NO: 4189705 - RNA, 58 nt, Human
augccuggacuguaucccagaucauuaaaucagaaucucugggaguguauccaggcau

SEQ ID NO: 4189706 - RNA, 91 nt, Human
augccuugguuucuuuaccuguaaaacugcgauauaauaauaauaccuguaaacagcagacuuacaggugcauaggaaaucccauaugcau

SEQ ID NO: 4189707 - RNA, 69 nt, Human
augccuuuuguccuuccucccuccuccugccuggaacauggaugugagaccaggaaguacagcagccau

SEQ ID NO: 4189708 - RNA, 84 nt, Human
augcggaggguguuuucuaggaggaacuuuggaaggagcuauuuucagagucagcuccucucuauaaagccagaccaaucguau

SEQ ID NO: 4189709 - RNA, 66 nt, Human
augggagcuuaaauggcuaaauauaauuuguuuuucagcuuuguguuuuuagguuuggguuccuau

SEQ ID NO: 4189710 - RNA, 76 nt, Human
augggccacacugugagaaguuccugagucagcuuccauuguuagugcucagaaacuugcucauuuucuccuccau

SEQ ID NO: 4189711 - RNA, 78 nt, Human
augggcucugcacauuuuaccaauacucuggggcccaguuuggucauuuguaaaaugugaauaauucuuaguacccau

SEQ ID NO: 4189712 - RNA, 88 nt, Human
augggcuggugaccagcuuggugugauauaauagaacacuccagagacccgaguucuagucacaaccuucaaguugucacugccacau

SEQ ID NO: 4189713 - RNA, 76 nt, Human
auggggaugaagauauuuuugugcaaaguuuaucauuugucauaaaguucaagcucugccuaaaaucagcucccau

SEQ ID NO: 4189714 - RNA, 73 nt, Human
augggggaaauauucugaaauaggaaagcaaauggugauuuaucauguuccagauaucagauuuuuaccccgu

SEQ ID NO: 4189715 - RNA, 56 nt, Human
augggggcuauaaauagucagcacaccuugcuuuugugcugcugcuucacccccau

SEQ ID NO: 4189716 - RNA, 90 nt, Human
augggguacuguucaaugcauauagauauagaaauccagucguacaagaugaaaaguucuagauaucuaguguauaacauuguggcuuau

SEQ ID NO: 4189717 - RNA, 58 nt, Human
augggguuaugcagagaagucugugacuucacaguauacgacuaacgcaugaccuugu

SEQ ID NO: 4189718 - RNA, 57 nt, Human
augggucuccaguaucuuuccaaugaauuuguuuugccuaauuuagcuggaguccau

SEQ ID NO: 4189719 - RNA, 71 nt, Human
augggucuucuuuaaccuacuaaagccuaucaaaauauaguggguucaguauuaaugagaugauuucccau

SEQ ID NO: 4189720 - RNA, 59 nt, Human
augggugaugaggucaguaauugaucauuuuuaaaauaaugaauugucucuucacuuau

SEQ ID NO: 4189721 - RNA, 110 nt, Human
augggugucaccaauggguuaucaauuucagaugucauaaauauaaaggguuucacauaccucuaguauauuuaguguaucaugaaaauuagaugccucugguaccccau

SEQ ID NO: 4189722 - RNA, 60 nt, Human
auggguucaagugauucuccugcuucagucucccaaguagcuggaauuacaggagcccau

SEQ ID NO: 4189723 - RNA, 71 nt, Human
auggguuuauagguggacuuuuucuuuacaguuacuuuuaucaguaaagcaaaucacacauauaaaucugu

SEQ ID NO: 4189724 - RNA, 100 nt, Human
augguaaggcaagauugugcccugaaggauguguggugggaguggguaagcugggcucccaccuuaaccuucacaugagcauuuuccuuuccuucaccau

SEQ ID NO: 4189725 - RNA, 114 nt, Human
augguacaacccgcaaaccuugguagcauuuggacauugucaccuuuugauucuaggacacaggaggaaaaauguuccaaaauguuucucugggucuuagaggguguuaaucau

SEQ ID NO: 4189726 - RNA, 73 nt, Human
augguacuuuucuuuaucucugguguuaaaacucacaaaacuaugcuaccagaacagaaguaaaauuuaccau

SEQ ID NO: 4189727 - RNA, 91 nt, Human
augguaguacaggaacuguuaucucagauguugaagaagaugcuggggaaaugagcagagacaguaucugggaacuuuccugugaaacugu

SEQ ID NO: 4189728 - RNA, 74 nt, Human
augguauacuguuuuaaaagguacuugucuaaaacuuuaaguuggagaagcaucuuggaagucauuagauccau

SEQ ID NO: 4189729 - RNA, 63 nt, Human
augguauaucauacugcaguugcauuuuaacacccuuugcauugucaaaagugguaugaccau

SEQ ID NO: 4189730 - RNA, 86 nt, Human
augguauuacacugccugagccgcggggcagugcucugacuguagcuuccugcuucugacauguucuugguugguaguguugcugu

SEQ ID NO: 4189731 - RNA, 61 nt, Human
auggucaagauccucuaguuuagaacuuuuugcuaaacugcuaagcgggucuuacaaccau

SEQ ID NO: 4189732 - RNA, 74 nt, Human
auggucagcuucccaggcugggggccugaaguuccugggaggagguuuggaaggcacgguguggggcugggggu

SEQ ID NO: 4189733 - RNA, 130 nt, Human
auggucauacaugucggugcauccccauguuagggcacaugaucacgugugucggugugugcccaugguagggcauaugaucacgugugucggugugugcccguuauggcauaugaucaugugugucagu

SEQ ID NO: 4189734 - RNA, 72 nt, Human
augguccuugugucuuguaucuguauuuaaaauugcugggaggauacacaagaucaguauaauaaggaccau

SEQ ID NO: 4189735 - RNA, 86 nt, Human
auggucgccccacuggccucagaggcugucaggcagcagggauugugucccgagagccugcagccucaagggcugagcugcgccau

SEQ ID NO: 4189736 - RNA, 75 nt, Human
auggucucugagccuuccuguggccaccagcacauucugugcagccccaggaccacaugggaggcucauggccau

SEQ ID NO: 4189737 - RNA, 82 nt, Human
auggucuugaucuccucaccuugugauccucuugccuugggcucccaaagugcugggauuacaggccugagucaagacacau

SEQ ID NO: 4189738 - RNA, 56 nt, Human
auggugaugugacucuacguuaugauuaauggggcuguuggaaucauugucaccau

SEQ ID NO: 4189739 - RNA, 57 nt, Human
auggugccugucucacucccugugcacuccaaguauuucuugaggccauggcaccau

SEQ ID NO: 4189740 - RNA, 89 nt, Human
augguggcucauugacuagaaccaguccacagaauuugggauguuuuauuuugggcuuguguuccucaguuugucaaagacuccaccau

SEQ ID NO: 4189741 - RNA, 77 nt, Human
auggugggaaaguagccuuaagugugccuugacacaagcuaucuuggucauuuggggcugcuauaacaaaacaccau

SEQ ID NO: 4189742 - RNA, 75 nt, Human
auggugguuugggagaaaaagcagaucccauugacagccaguauuaugcuguguuuucuccccagagaccaucau

SEQ ID NO: 4189743 - RNA, 97 nt, Human
auggugugaauuuugacccuuggcuggaacuccugagaaagggaagcuccucuuuugcugggguggcuagcuuagcacugccgaaauucaucacugu

SEQ ID NO: 4189744 - RNA, 71 nt, Human
augguuaauaagaauacaguucaguaauggauagguuguacccaauccauccacugauguuucugaaucau

SEQ ID NO: 4189745 - RNA, 75 nt, Human
augguucggccaugcaugccugugguugacagacaucccaacauacaucacaaaaauguccagugacuggaccau

SEQ ID NO: 4189746 - RNA, 62 nt, Human
augguucugcuggguaaugcauucugaguuccaacucauuaugcaaaauaaggcagaaacau

SEQ ID NO: 4189747 - RNA, 125 nt, Human
augguucuuugugaucucccugauauagaaauacagguaugcaaggacaugugcacucauaaagagucuaucuuccuucuuugcauuccugugugcuuuagccagaagagauguuuuaggauggu

SEQ ID NO: 4189748 - RNA, 86 nt, Human
augguugcaccuguggucccagcuacucaggaggcugaggugggaggauugcuugagcccaggaguuggagaccgcagugagcuau

SEQ ID NO: 4189749 - RNA, 114 nt, Human
augguuguaaggcuuguaggggcuaaggcuaucugaguuuaugugauugcucacagagagcauauagauugagauggcaucuagaguggaaacuuuacaaguaugcagagccgu

SEQ ID NO: 4189750 - RNA, 77 nt, Human
augguuguacuuugaggcucuguaugaagguuugggucagaacugccuacuccaugcggaagucugagugccuucgu

SEQ ID NO: 4189751 - RNA, 93 nt, Human
augguuuuaaacaacaguauucaguuugggcagcaguuuuaagucuaacuagcuuaaaccaaucugaauaagucuggacaguuuuccuaccau

SEQ ID NO: 4189752 - RNA, 93 nt, Human
augguuuuugcucaagguguuccauguuuuuggcuguggaaucgacuagaacuucagcagucguccaggaaaagccugcagggcaaggacugu

SEQ ID NO: 4189753 - RNA, 110 nt, Human
auguaaaucugaacuugucagaccuuucaggauccccaccgcguuuaggauauaaucgcaaauccucccaauagccuaagagccuggcaaggucgaccucagcuuuaugu

SEQ ID NO: 4189754 - RNA, 127 nt, Human
auguaaccuucacacugcugguuuguugauuggccuauuuuggaagacuucuuagccaagguccaguugccagaauggccaagucuucauaucugaauuagcauuuguauucucccauaggucacau

SEQ ID NO: 4189755 - RNA, 89 nt, Human
auguaaguaagaccuuccuaaugucuaauacaaacugggcuccagcaaguggcccuauuuuuauuaggguuuugaagguuugugugugu

SEQ ID NO: 4189756 - RNA, 80 nt, Human
caagcaugcucugggucaacauaggccucagugaggcucucuggccucggcuucuguauugauaaaaggggauucgauug

SEQ ID NO: 4189757 - RNA, 86 nt, Human
caagccaaccuuuugucagcuucccuuugguuuauuaauacuacuuuuauuguugaacuaaaacagaggcuuuuuauggguguuug

SEQ ID NO: 4189758 - RNA, 57 nt, Human
caagccaggugaacauaacaaguagagaacauucuuguuguucaagaagcugguuug

SEQ ID NO: 4189759 - RNA, 66 nt, Human
caagccaucucuggccucacugcccuccccuuuagaaaugugggaaugaggcucagagagguugag

SEQ ID NO: 4189760 - RNA, 62 nt, Human
caagccauuagucauuuuagaauauaaauggaauuucauguuccuaugacugauuggucuug

SEQ ID NO: 4189761 - RNA, 86 nt, Human
caagcccuagacaaaaugauaaugucagcauaguuuauuuuugacucuuguuaauaaauagauuucugacgugcaugucuuucuug

SEQ ID NO: 4189762 - RNA, 83 nt, Human
caagcgugauuauaugugggauagaauuuauuaauuuguauuuaaaacguauuuuugccucucagauaaaauaaguaugcuug

SEQ ID NO: 4189763 - RNA, 73 nt, Human
caagcucaggggugcuuccucagggaaguguuuucuguuuccaaaggcacugaggagcccccucucagcauug

SEQ ID NO: 4189764 - RNA, 129 nt, Human
caagcucuagaaaguaacgggcaaagaguuuaggaaucugggcccaacugugccgagauaaucaaagccacagaggccuaagauucaaacaagacauuuugcagggauacuuuguauuaguuuuuaggg

SEQ ID NO: 4189765 - RNA, 109 nt, Human
caagcuggcuccugagugggcaacuugcuggggcucugaccacuccacuggcaagcagcugaauguggcuucuugguuagaccucugcugaccauuuaggaccaggaug

SEQ ID NO: 4189766 - RNA, 63 nt, Human
caagcugggugcgggcaguauagggacaaagacucugcccuugggaugccaaccauccacuug

SEQ ID NO: 4189767 - RNA, 59 nt, Human
caagcuuagugguaggacugauuuaguuuaaaggagauuucucaauccuaguacuauug

SEQ ID NO: 4189768 - RNA, 78 nt, Human
caagcuucuuguguacguuccacuccccuggguucacguucucagggagaaaauuggaugcacaaagaauggaguuug

SEQ ID NO: 4189769 - RNA, 81 nt, Human
caagcuuuuggugugggggacaucuuagcugaaguggucaaggaaggcacuuccaggaggugucacugaagcugagauuug

SEQ ID NO: 4189770 - RNA, 77 nt, Human
caaggaaaggaauauauucugcagaccuauggacauuaaaaguuacucugcuuuaauggaaaguguuuuuuucucug

SEQ ID NO: 4189771 - RNA, 56 nt, Human
caaggagccugugggccaagaggcugaacacuuagggaaauggcuuggguuucaug

SEQ ID NO: 4189772 - RNA, 69 nt, Human
caaggaggccugcgagaaggggccugggcacaggaaggcugcuccucugccagcugcagggcuuccuug

SEQ ID NO: 4189773 - RNA, 120 nt, Human
caaggauacaugugcagauuuguaacauagguauacugcaugacauugggguuugggcaauuaauaaucccauugcccagguaguguacauuauacaugauaaguacuuuuuaacccuug

SEQ ID NO: 4189774 - RNA, 71 nt, Human
caaggauguggaaaaagaggaacucuuauauacuguuggcagggauguaaauucuucuucuuaacuucuug

SEQ ID NO: 4189775 - RNA, 65 nt, Human
caaggauucucacuagacuagaaagcaguucucugcaacuggugggguugggugaagagucugug

SEQ ID NO: 4189776 - RNA, 85 nt, Human
caaggcagcagggcucagguggcugguugcuggcuacggcugugccuucagucuggcccaagccaucuggguauccugugcuuug

SEQ ID NO: 4189777 - RNA, 80 nt, Human
caaggcagcauauuugguuuauggguaguuuguguccuuagacagaacuuucugauccugagccuaaauuugccuucuug

SEQ ID NO: 4189778 - RNA, 59 nt, Human
caaggcauuguguaagcacuugauauccaugaucauguuuaauccuuaccauugccuug

SEQ ID NO: 4189779 - RNA, 58 nt, Human
caaggccagggaauuuuucuggaaucucagauucaaaagagaucaccugggaucuuug

SEQ ID NO: 4189780 - RNA, 83 nt, Human
auuagugugauaugauuugucuugcagcugcuucaaauuaagaacagguguagaaaacagauuaugcaaauacucauauuaau

SEQ ID NO: 4189781 - RNA, 69 nt, Human
auuauaaauucagcauccaguguccuaaaggaaaucuguuucuucugacacugaugcuguaaggauagu

SEQ ID NO: 4189782 - RNA, 80 nt, Human
auuauacacauaccucguguuuguauugcagcuucccccagggagcucaaagcacuuugcaaauaugaauugcgaauaau

SEQ ID NO: 4189783 - RNA, 70 nt, Human
auuauaucuguucauggaaaaauaguugggaaggugauuccagaguagaaugccugaacauugguauaau

SEQ ID NO: 4189784 - RNA, 70 nt, Human
auuaucaguaucaggcuggaauuaagucauaaaagauuauugacugauucauuagggcugaugcuguaau

SEQ ID NO: 4189785 - RNA, 56 nt, Human
auuauccauuaggucuauggucaacuauugguguggccaguucauuagugggaggu

SEQ ID NO: 4189786 - RNA, 89 nt, Human
auuaugauuugcuagggaagaccaauaaucacacaaauaaaagucgaauuugcaaaugugguuagggcuuugaaggggaggaccauagu

SEQ ID NO: 4189787 - RNA, 77 nt, Human
auuaugcucauagaugaagcuugcuuccaaauaaagaacauccuagagaaaugggacaggcugcaucugagcaugau

SEQ ID NO: 4189788 - RNA, 73 nt, Human
auuauggcucaguaaaagauggaaauagaauaagaaauaccguuuucucauucucucuucugcugcccgugau

SEQ ID NO: 4189789 - RNA, 69 nt, Human
auuauguguuuuuucgauauccacauuuguguauguguacaaaugucuaugaaaugaaagggacauagu

SEQ ID NO: 4189790 - RNA, 55 nt, Human
auuauuaggacuacugggguuggugguagguucugcuuuaccagguucugaugau

SEQ ID NO: 4189791 - RNA, 87 nt, Human
auuauuaguuugaacuauaaaaaguugugacguuguagaucaaaugcagucuaauauugacaauuucuuauaguucaauucaguagu

SEQ ID NO: 4189792 - RNA, 79 nt, Human
auuauucaacacuugagaaauugagaacaaggauucaaaucccaaagacuuaaaguuucuuguaaaaguguugagugau

SEQ ID NO: 4189793 - RNA, 75 nt, Human
auuauugugauacaguauggaaaauguauaguuccuuagagaauaauugcauuuugugcugcuuauggcuauggu

SEQ ID NO: 4189794 - RNA, 76 nt, Human
auuauuucucacauuugguucgguauaaaaagggauauuuacucaaauauauagaaaagcagauguuggagguaau

SEQ ID NO: 4189795 - RNA, 58 nt, Human
auuauuugaagggccgugaaagggaagaguuaguuccuaaucaugucucacaggugau

SEQ ID NO: 4189796 - RNA, 61 nt, Human
auucaaagaacaaauuagcuguuuuauacaaauguuuaauguggcugaguuguucuagaau

SEQ ID NO: 4189797 - RNA, 62 nt, Human
auucaaagauuuucccaaagcucaccuaaaucuuuaggaagggcucugacugaauauugaau

SEQ ID NO: 4189798 - RNA, 73 nt, Human
auucaacaaauguucccugagcacuuucuuugugcugaacacuguucuaagugcuagggauacaguggugaau

SEQ ID NO: 4189799 - RNA, 62 nt, Human
auucaagagaugcgaauuaaaauuuugcuuugauuucaagauauugauucaauuucuugagu

SEQ ID NO: 4189800 - RNA, 69 nt, Human
auucaagcugaauggugacagaucugugcaguauuaaguacaauuuucuguccuuucacucacaugaau

SEQ ID NO: 4189801 - RNA, 65 nt, Human
auucaaguacaguuuucuucuuugcugggagucauuguacacaugcuugaaaacucugcuuggau

SEQ ID NO: 4189802 - RNA, 58 nt, Human
auucaaguuuuuaaaggcaguuaccuugagagguguuguuuuauacaagaacuugggu

SEQ ID NO: 4189803 - RNA, 129 nt, Human
auucacuacuucuuaaaauauuguucuuaaauguguacuugaggggguuagcaguagauaaggaugugacuccgacucugagucuacauuaucaauuuugggaaaaaugauuuuuaagaaaaagaaggu

SEQ ID NO: 4189804 - RNA, 79 nt, Human
auucacugaacauugcauucucuaugagauggcauuugcaaaucucauaaauucagagaacacaauuaugucagugaau

SEQ ID NO: 4189805 - RNA, 110 nt, Human
auucagaaauacacauuuuguuccggaaaucaguuguuauauuaaagagccauuuuaaaugguuuuugauggugcauuugaauuucuggggccugauuuuuuucaugagu

SEQ ID NO: 4189806 - RNA, 59 nt, Human
auucagacucuugagcagucccguucuacauugaaugugacugauccugugauuugaau

SEQ ID NO: 4189807 - RNA, 59 nt, Human
auucagaugaaauucuuuggagacaacuuuguuuucaaaguaaggauuuucaucagaau

SEQ ID NO: 4189808 - RNA, 78 nt, Human
auucagauuauuuuauaguagugccuuuauugauagcagauaauucuuauuaauaagugacuacuagcugguuugagu

SEQ ID NO: 4189809 - RNA, 65 nt, Human
auucagcacugaaauucuucacauauuaauugaucaaacgaugcauguaguaucagugcuugagu

SEQ ID NO: 4189810 - RNA, 63 nt, Human
auucaggagugugccaggaaggguggggcaauucccacaggacuccuggggcacacucugagu

SEQ ID NO: 4189811 - RNA, 74 nt, Human
auucagguauugccuaaggagauaaaguggaaaacaguuaauuaccuccuuugacuucugggcagcacaugaau

SEQ ID NO: 4189812 - RNA, 63 nt, Human
auucaguggggucauggguaguuugcagugugaauggcagauggacuguaugaccugaagaau

SEQ ID NO: 4189813 - RNA, 76 nt, Human
auucaucccacagauuuccuaagcaucaaucuugggccaagcacugauugaugcuggggaacucuguggaaugaau

SEQ ID NO: 4189814 - RNA, 81 nt, Human
auucaucccuucuacaaauauuuacuguuccccuccccugcacugggcucaggaguagguacugaauauuugaugaugaau

SEQ ID NO: 4189815 - RNA, 72 nt, Human
auucaucucuguguccccagagcuuguucugugucaaacauuguccuggguucugaggacaacagagggaau

SEQ ID NO: 4189816 - RNA, 64 nt, Human
auucaugcaggauugucuccaauucuggauugaccauccacuggaagcaaucacuguagugaau

SEQ ID NO: 4189817 - RNA, 75 nt, Human
auucauucuuuaguuauuaguuuagaagaugcuucaucuuggaagccuucucugaucuugcuagacugagugaau

SEQ ID NO: 4189818 - RNA, 60 nt, Human
auucauugucugcauauaugaggaaguaaauggcuuuccuuauaucuucagagaagcagu

SEQ ID NO: 4189819 - RNA, 76 nt, Human
auucauuuaaucauucacaggauagcuauugcacgucauuugugucaggccuuaucgguggcuggagauaaugaau

SEQ ID NO: 4189820 - RNA, 74 nt, Human
auucauuucucauaauauuagcacuuguguuuuaagagcacauagcaaggagcuauuguuagagaagccaggau

SEQ ID NO: 4189821 - RNA, 58 nt, Human
auuccaaacgccucgcggacuuuucccuuuuacagcaagggccgcgaggcgugagaau

SEQ ID NO: 4189822 - RNA, 64 nt, Human
auuccaaaggcuggccuggaggaacuucugcacagaauuuauaauuagcccagcuuuguggaau

SEQ ID NO: 4189823 - RNA, 104 nt, Human
auuccaaagugaaaaauugggaaacuuuucuaguuguaguucucuuugaaacaaaagaguaaaugucuaauuaggaugguggucaggagguuaagcuuuggagu

SEQ ID NO: 4189824 - RNA, 83 nt, Human
auuccaagcaugcuucuggguucagggaaauuuccauguguuuccagccuggagacacuuucccuucccagaugcucuggagu

SEQ ID NO: 4189825 - RNA, 57 nt, Human
auuccacuuuaugucuguaugaauuugaugcuucuagguaccagauauaaguggaau

SEQ ID NO: 4189826 - RNA, 68 nt, Human
auuccagucagcucauugggauacaugguggcauguaccacagugugacuucugagcugccaugggau

SEQ ID NO: 4189827 - RNA, 56 nt, Human
auuccaguucacaucgaucucccagugcuggcgggcuccaacggugagcauggaau

SEQ ID NO: 4189828 - RNA, 78 nt, Human
auucccacuauauugccagagggccagaaauucacuucgugcacuggcauauuuaucuuugguaaauaaaguggggau

SEQ ID NO: 4189829 - RNA, 57 nt, Human
auucccagauuuauauugauagggacuagauuucuggaaaaccauaucacugggaau

SEQ ID NO: 4189830 - RNA, 130 nt, Human
auuccccagccuaacaugguguuuggcucacuguagaugcucaagaauugguuguuggauuggguaccccauucagcaacauuuguugagugccuagaaugcgcuuugcacugugcuggagucuggugau

SEQ ID NO: 4189831 - RNA, 69 nt, Human
auuccccucacuuaauauuaaauaguguuugacauaaaugucuugguuuguacauugaggaggcagaau

SEQ ID NO: 4189832 - RNA, 130 nt, Human
auuccccuguaucagugagaauggauuuuaaaaguucaagacuuguguggauauuaucucacugucuuccuucgggcagaugaaguauuacagacauuucuuugaaucuugucuauuggaauuagggagu

SEQ ID NO: 4189833 - RNA, 67 nt, Human
auucccuauggggauuuuuagcauucaucuucuuuugcucggauuuagugcugaaaucccugggaau

SEQ ID NO: 4189834 - RNA, 58 nt, Human
auuccuagggaacccugugcugugcuaaugaaaugagcaauagggcacccuaaggagu

SEQ ID NO: 4189835 - RNA, 80 nt, Human
auuccucccccucauucuuuccugggccccugguucagagcagucucaguuagaaggccagaaaagaagaggauaggaau

SEQ ID NO: 4189836 - RNA, 59 nt, Human
auuccugggucuccuuccuaaaauucuaauucauugagucagaagugcagcccaggaau

SEQ ID NO: 4189837 - RNA, 77 nt, Human
auuccuguuuucuugaacuuuggguauaauuguuagaaauucucuaaaguuguuguucacagguuauagauagggau

SEQ ID NO: 4189838 - RNA, 87 nt, Human
auuccuuuccugaauuugauccaaacuaugacuaguguucucaacagagggcaaguagggauguuugggaacgagugauggaggaau

SEQ ID NO: 4189839 - RNA, 68 nt, Human
auucuaagagcuguucagguacccaucugggugagcagaugauuuaaaacugaauuagcuuuuugaau

SEQ ID NO: 4189840 - RNA, 67 nt, Human
auucuaaugacauuuagaaguuagauucaaccggauugguggagugauaaacuaaguggauuagagu

SEQ ID NO: 4189841 - RNA, 72 nt, Human
auucuacuucugacacuguuuguaaacugguccagcuaacaucuagagauaagcaggagucaggggaggagu

SEQ ID NO: 4189842 - RNA, 99 nt, Human
augcauuaggaaaaagcaauaguaaugguaauagcuaaaguuaauugaacacuuaccguuuguuagcuaugcugugucuuacaagcacuuuauaugcau

SEQ ID NO: 4189843 - RNA, 57 nt, Human
augcauuuuaccugugauaaaucaccuugacuaggucacagaagaaguagauugcau

SEQ ID NO: 4189844 - RNA, 55 nt, Human
augccaaagggagcacuuugggcucagaagcagcucauuugcauucucuuugcau

SEQ ID NO: 4189845 - RNA, 66 nt, Human
augccacaggugccaucucuucauggaauauuggcaagggucuagaagagcaggcauuuggaaaau

SEQ ID NO: 4189846 - RNA, 78 nt, Human
augccagaaacuaacaaggcaaaaauuguuuugucaccaaucagugauguuucaauuucagcuuaaguuguuugguau

SEQ ID NO: 4189847 - RNA, 76 nt, Human
augccagacacacaagcaaucuaaguuccuggguaaauauuaaccaagugcuuaggucuuguugcaaucuaggugu

SEQ ID NO: 4189848 - RNA, 56 nt, Human
augccagcuauagacuuguuauuaguuauaaaaacauggacuguagagcugugcau

SEQ ID NO: 4189849 - RNA, 57 nt, Human
augccaguguuccacucagagauucacauuuaacuaaucuagagggggccugggcau

SEQ ID NO: 4189850 - RNA, 73 nt, Human
augccauuggaauagggacucaaugcucucaggacucuuucucucccuccauuuucucugcuucucuuggcau

SEQ ID NO: 4189851 - RNA, 68 nt, Human
augccauuggccucacucaucaucaugucaaggaccuggcaugcccauugagaagggccucugugcau

SEQ ID NO: 4189852 - RNA, 93 nt, Human
augcccccauucuaucuguaaacagacauauuuuuaauaugcuucucccuugugagucuugcaucauuugaaaaugucugugcagaguggcau

SEQ ID NO: 4189853 - RNA, 55 nt, Human
augccccuucuuacuuucuugaugcuuuuuugcauggcagagagaaaagggccau

SEQ ID NO: 4189854 - RNA, 72 nt, Human
augcccugggcguuuacacacaugguacaacaaacuaaccuuagagguacuugugugucaugugcagagcau

SEQ ID NO: 4189855 - RNA, 122 nt, Human
augccgcccaaggcucgcugagaaaucuggcuccacacagugggagaacccagggucaggcuuacugugagugaggccggcccagucuuucccgagccuuccucagggagaccuggggguau

SEQ ID NO: 4189856 - RNA, 64 nt, Human
cacagcauugccuuccaaaaggaggagcugaggccuauccgccuuuugcggcaggugugccgug

SEQ ID NO: 4189857 - RNA, 101 nt, Human
cacagccccacagggcacccgcgaggccagccccuccauccuguucaggaaaccuuggaaagaagguggccuggcacgggggugccagguggcuggcugug

SEQ ID NO: 4189858 - RNA, 55 nt, Human
cacagcccccuugacacucuggggcuuuccagagcagauggccagggggccugug

SEQ ID NO: 4189859 - RNA, 57 nt, Human
cacagccccucccucaggcaggugaaacaucugguucaucuagcauguggggcugug

SEQ ID NO: 4189860 - RNA, 80 nt, Human
cacagccuugugggaaaugugcacugugcuacgaguugcugagaugucauuacagugugugcuuucccuuacggccugug

SEQ ID NO: 4189861 - RNA, 72 nt, Human
cacagcgaaugugcccccucaggagccagcuaagaccuucugggggcuucuccuggaaguacagagucugug

SEQ ID NO: 4189862 - RNA, 76 nt, Human
cacagcgccuccacagagggcccuuauagggagauccaucuguaucuucuucagugccccucuaguagaggcugug

SEQ ID NO: 4189863 - RNA, 65 nt, Human
cacagcuauggggcuguagccucucugagcagagccaagugaggcuccagucuccucuggcagug

SEQ ID NO: 4189864 - RNA, 87 nt, Human
cacagcuauuuuuaagugucgucuuugcgagccauuugugugugcccacaggcauucuauacaaugggugcaaagaugugagcugug

SEQ ID NO: 4189865 - RNA, 63 nt, Human
cacagcugcacuugaagcagguugaauaaaaaccggacucagccccuuuaaguccggcugaug

SEQ ID NO: 4189866 - RNA, 66 nt, Human
cacagcugcagcacuccaguagccgccuccaucuccacauggcuccucccugugugugcgucugug

SEQ ID NO: 4189867 - RNA, 55 nt, Human
cacagcugccaugcagucagugcugaggaaaacagccuagacucagcagacugug

SEQ ID NO: 4189868 - RNA, 61 nt, Human
cacagcuggggaagcugaggccguguggcucacaguccuggccuugguggcuuugcugaug

SEQ ID NO: 4189869 - RNA, 58 nt, Human
cacagcuuagaaaagaagccauuccugcaguucaugcccauggcucugauuuaaugug

SEQ ID NO: 4189870 - RNA, 55 nt, Human
cacagcuugggcucugacaauaugaauucaguugugcugccagggccgaacuaug

SEQ ID NO: 4189871 - RNA, 61 nt, Human
cacaggaagagguauacaauucugcuagugcuguaaagagggaaaugugaccucuucugug

SEQ ID NO: 4189872 - RNA, 65 nt, Human
cacaggaccaauucacauuccagauuugcugcaaccugggauauggggauuucauugguucugug

SEQ ID NO: 4189873 - RNA, 67 nt, Human
cacaggagagccuuugaagggaagugaaaugauuggauuugaauuccuaaauaacggcugcccugug

SEQ ID NO: 4189874 - RNA, 64 nt, Human
cacaggcauuagaggccaaaauacccggcgacuucaccuugcagggccuuggcuucuuccuaug

SEQ ID NO: 4189875 - RNA, 65 nt, Human
cacagggaaaagagaaguuggaaaaagcaacaugauuuuuaauuuuucuaacuacucucccuuug

SEQ ID NO: 4189876 - RNA, 78 nt, Human
cacagggucugaugcauuuuaggaauugccuuacuuuggguuuccccagaagcagauucuaaagcaaggacucaagug

SEQ ID NO: 4189877 - RNA, 69 nt, Human
cacagggugcucucugacuuguguuuauaaauuucguaaaaauacauuagacggagaguuacaaugaug

SEQ ID NO: 4189878 - RNA, 59 nt, Human
cacagguauauguguauauacuguaaacauacagguuacguacuauacauauaucugug

SEQ ID NO: 4189879 - RNA, 97 nt, Human
cacaggugcuaaccuuucacuguuuggaugccauggucaaggaggcaaucaauucuuugaauauacuucaaacaaagaaauaagguuuaauucugug

SEQ ID NO: 4189880 - RNA, 104 nt, Human
cacagguuacucaauagcccagaggaggaaaugguuguucaggugggccggggaaggcuucccggaggaagcuguuucugugcuggguuccugaaggacaagug

SEQ ID NO: 4189881 - RNA, 80 nt, Human
cacagucuucaauuaucccugcaacugagcauaugauuaugaaauauggcccagaggugaaggaggugggagguacugug

SEQ ID NO: 4189882 - RNA, 101 nt, Human
cacagugagcaggcagucaccuacaagccaggaagagaggccucaccagaaaccaacucugguggcaccuugaucuuggacuucuagcuucuagaacugug

SEQ ID NO: 4189883 - RNA, 69 nt, Human
cacagugccugcagauuuggugucuggugagggcccacuuccuucauagauggacaucugcucacugug

SEQ ID NO: 4189884 - RNA, 89 nt, Human
cacagugucccucguucccugcccugcuugaugacagcgagcuggaagagucgcugaagcagugugcaggccaagcgaacgccacugug

SEQ ID NO: 4189885 - RNA, 91 nt, Human
cacaguucugauggcuggaaguccaagaucaagguuugguuuccccugaggccucucuccuuggcuugcacacggccaccuuauugcugug

SEQ ID NO: 4189886 - RNA, 55 nt, Human
cacaguugcugccaacuuggccuaaacacagagcccaguggugcuggcaucugug

SEQ ID NO: 4189887 - RNA, 103 nt, Human
cacaguuugcagcucagacguuguagguaugccaauuaggucaaguagcuuauaucuuuauuuuuguugguguguuauucuauaaauuacugagacaagugug

SEQ ID NO: 4189888 - RNA, 57 nt, Human
cacaguuugguuuugcuguaaucucagaauuaaagagcacaggcagaauugggugug

SEQ ID NO: 4189889 - RNA, 58 nt, Human
cacaguuuugcccagggcuucucuugauaucuaagaagagcaguguggggagacugug

SEQ ID NO: 4189890 - RNA, 87 nt, Human
cacauaacucuucaggaauaugucagucaagauccucuggaaguuuaagugcaggggcuggugacuguuccuggaggaaggagugug

SEQ ID NO: 4189891 - RNA, 101 nt, Human
cacauaauggcaugauaacaagcacaaaguucuaacaucuacguggaaugucaauuuuaaauaagagugaggacauggguguguuugugcauguguaugug

SEQ ID NO: 4189892 - RNA, 55 nt, Human
cacauacaaggcacacuggagggaauaaaaaagccuuucaugguggucagaugug

SEQ ID NO: 4189893 - RNA, 82 nt, Human
cacauagcaggauuugaagaagaucucauguagcauaaggagguagguuuauguaagaucuuugcaaauaccuugaaaugug

SEQ ID NO: 4189894 - RNA, 76 nt, Human
cacauagccacuuggaucuggguuuagagagagaaagugacucuggagucuaaagaaccaaaaaugugugugugug

SEQ ID NO: 4189895 - RNA, 59 nt, Human
cacauauaugggccccugaggguguaugggcucugggggucugcagcccagaaugugug

SEQ ID NO: 4189896 - RNA, 72 nt, Human
cacauauucacaggcacgaaauauugcauauacuuuuuuguguguuugguguauugugugugugaaugucug

SEQ ID NO: 4189897 - RNA, 71 nt, Human
cacaucuauuucuccugguaagcuuucucuagaaucaccuucucugaguuuauucaggaaauagccaugug

SEQ ID NO: 4189898 - RNA, 101 nt, Human
cacaucucuagcacuggcccuggucacuggucucauccagcaucucaugaugggugggcuuggucagguccaguagccacgggcuagugugcagaggggug

SEQ ID NO: 4189899 - RNA, 101 nt, Human
cacaucugucguugauggucuaaauauuugcauguuugcagguccagcgauggcacaaugccuagcagcagaagguuugcacccacugugcgacaugagug

SEQ ID NO: 4189900 - RNA, 65 nt, Human
cacaucuuuuuaucuguuuggaacauugggggcuucuuuggugauggugggggaggagagaugug

SEQ ID NO: 4189901 - RNA, 91 nt, Human
cacaugccagaggggcugacacccuuggccacacugaagaaugaucagcagcgccaacagcugggugcaugucccucugcacccagaugug

SEQ ID NO: 4189902 - RNA, 81 nt, Human
cacaugcucgaaaugcuuuagggugugcugucuguccuucuguucugcgcggacauacuucuuuagcauauugaacacgug

SEQ ID NO: 4189903 - RNA, 57 nt, Human
auucuacuuucuguuucucuggaguugacuacuuuagauacugcauauagguggaau

SEQ ID NO: 4189904 - RNA, 61 nt, Human
auucuagacaucugcaguuguuucuuagugggaaugguugcuuuaugucucucuacagaau

SEQ ID NO: 4189905 - RNA, 56 nt, Human
auucuaggcaggccuucaggaaauugugccugucaucuccugaaaacuucuggaau

SEQ ID NO: 4189906 - RNA, 87 nt, Human
auucuaguacaucuaacagcaacaccagaauaagauuugaccuacuaagugcucuguuacauuggaguuguuuagauucaccagagu

SEQ ID NO: 4189907 - RNA, 130 nt, Human
auucuauaauuuguaucuuuaucuuuaaugucuaucauaguagcugaaauguggaaugguuuaaauacuccacaugcuuuaacuuauuuugauuuggagacuuuaaggcauggagauuuuuucucugaau

SEQ ID NO: 4189908 - RNA, 129 nt, Human
auucuaucaauaccuuuccaucuggcagaggucugugguggugugggcaaggaaaagaaaauucuauucaucuucuuuuccuguccaggcaauuauugaccuucuuucaguccuucucuuugaugguau

SEQ ID NO: 4189909 - RNA, 70 nt, Human
auucuaucuuugguagcuuuccuaagaauggcaccacuuuagaaaaguuucaaagaguuguauuuagaau

SEQ ID NO: 4189910 - RNA, 58 nt, Human
auucucaauggcuacuuucauaccauaauggcacaguugaguaguugccacagagaau

SEQ ID NO: 4189911 - RNA, 60 nt, Human
auucucuagucucuuccauaaagugaaaucaggaagcuuugaaagaaggugguagagaau

SEQ ID NO: 4189912 - RNA, 59 nt, Human
auucucugaguaugguuccaggaucuguagcaucaguguccagggaacuucucaggaau

SEQ ID NO: 4189913 - RNA, 77 nt, Human
auucucuguuuauucagcauuuagaggaaggauuaaaaaugcucacuucuucauuuaaaugcuaaggauucaggaau

SEQ ID NO: 4189914 - RNA, 75 nt, Human
auucucuuccuuccuuucagggcuaugccuaggcagaaaagaagcaggcagaagccgagggggagguuucaggau

SEQ ID NO: 4189915 - RNA, 117 nt, Human
auucugauucccagagucucaaguuaugcagccagggagcaaagaguugagauccccuuucuucuuauuuuuauguuuccuggucuguguuggcccacggacucuccuuaucaggau

SEQ ID NO: 4189916 - RNA, 71 nt, Human
auucugcaguuauauuccauagauucagaaguaugauuccauaugucuaagucugugaauauaaacagagu

SEQ ID NO: 4189917 - RNA, 61 nt, Human
auucuggagaacagaggagagcuggguuugauagcuacuucagcuccuuuguguccaggau

SEQ ID NO: 4189918 - RNA, 106 nt, Human
auucuggguaaauguaaagaaaggucuggagaguggccaacucuggagaccugcuuuugcaggcugaguuucucauucucgcuccugucuuaucuuuacuaugaau

SEQ ID NO: 4189919 - RNA, 106 nt, Human
auucuguaucuuuaaccaguuauaggugacauugcuaggaacagauuuugacagcagacuugugcaagggaucuguuugccuagagauuuacuuaaaagguagaau

SEQ ID NO: 4189920 - RNA, 55 nt, Human
auucuuacaaaugaaacugcaaucacuggugauguguggguguaugugugagagu

SEQ ID NO: 4189921 - RNA, 68 nt, Human
auucuuacuccauagaaugaauacaaaaaagaagauguaugugaagaguuuucuguggaguuaagagu

SEQ ID NO: 4189922 - RNA, 79 nt, Human
auucuuaugguuucacauuguagauuaaagucuuuaauccauccuggguugauuuuuauauaaagugagaaacgagaau

SEQ ID NO: 4189923 - RNA, 111 nt, Human
auucuucaacagcuuuucaguuuggaguuaggauuuaauaaaagaauagauguacagcucuugacaauguauucuaaauacaucuuaccuuugguucagacuuuggaggau

SEQ ID NO: 4189924 - RNA, 64 nt, Human
auucuucucuggguuggguucagagacugacaguaagcuggacagcaguuacccagaaaggaau

SEQ ID NO: 4189925 - RNA, 67 nt, Human
auucuucuuuuacucauauguuuuauuccagggacugagaaaauagcagugaguaaacagauaggau

SEQ ID NO: 4189926 - RNA, 56 nt, Human
auucuugguccaguugaagaugcagacacauuuuagucuagacagggcacaggaau

SEQ ID NO: 4189927 - RNA, 60 nt, Human
auucuuguuuaauuugcauccccuauccccaaauuuaggacaguguggucaggcaagaau

SEQ ID NO: 4189928 - RNA, 77 nt, Human
auucuuuaucuuuguuuuguuuucuggcuuuugcaaagaauugugcaaaagguaguugccaaauaaggguaauuaau

SEQ ID NO: 4189929 - RNA, 55 nt, Human
auucuuuauugcugaugguuauugcauuagaugaugacccuuagcuauuaagagu

SEQ ID NO: 4189930 - RNA, 96 nt, Human
cacccacugauauauaaccugcuggaagguguuaucuguaucagucuucccauagagaccccauaccucagcagguauaauucaugagugaaggug

SEQ ID NO: 4189931 - RNA, 61 nt, Human
cacccagcacagagggaggcgaguccacaaccccucucccuccccuucccacagcugggug

SEQ ID NO: 4189932 - RNA, 71 nt, Human
cacccaggacaugggcacccgugacgauguccccgaagguaaggggcaccaugggaggccugcugcuggug

SEQ ID NO: 4189933 - RNA, 56 nt, Human
cacccaggcuggaaugcaguggugccaucucggcucacugcaagcuccgccuugug

SEQ ID NO: 4189934 - RNA, 60 nt, Human
cacccaggcuggagugcauuggcacaaucucggaucacugcaaccuccaccuccugggug

SEQ ID NO: 4189935 - RNA, 67 nt, Human
cacccccacgccccgacuuaaaugcaucagggaauuccugaggucuagagucagggugucuugggug

SEQ ID NO: 4189936 - RNA, 78 nt, Human
cacccccuggugcuguucugugguuuccaaguuuucugcauugagcaacuguuacaagaacaacacaagggccaggug

SEQ ID NO: 4189937 - RNA, 57 nt, Human
cacccccuucgcacacucuuucaccuugggaaggguaugggaaugaagaaaggagug

SEQ ID NO: 4189938 - RNA, 89 nt, Human
cacccgacagcuuguuagcaaugcagaaucuugggucucuucccugaccuccugaaccagaaucugcauuuuaacaagauauccaggug

SEQ ID NO: 4189939 - RNA, 76 nt, Human
cacccgauguuggugcucuaguaucugugauagcuccuuuugauccacaaguauuaguugcaaaacauugacugug

SEQ ID NO: 4189940 - RNA, 64 nt, Human
cacccuacucugaugugcuuuauuggccggaaaucuucuuuccauaaacugcaucaaguuggug

SEQ ID NO: 4189941 - RNA, 68 nt, Human
cacccuagcguagugugcugagacuguaauaguaaugauuauuacacucauauugcacuuaccgggug

SEQ ID NO: 4189942 - RNA, 77 nt, Human
cacccucucucagcacagcuggcucuggaagccacucuuggcccaacgagcagagcuggguucaagauggaagggug

SEQ ID NO: 4189943 - RNA, 60 nt, Human
cacccuggcaguucaucaaauggcagugccaaggcucugccucaguggaaugugagggug

SEQ ID NO: 4189944 - RNA, 61 nt, Human
cacccuguauguccccagcaaaccucucucccuguggucagcgcugugggacagcagggug

SEQ ID NO: 4189945 - RNA, 58 nt, Human
cacccugugaaauccauuaguagccucacuuuauauacuaggaaaucgaggcagggug

SEQ ID NO: 4189946 - RNA, 57 nt, Human
cacccuuaaggcuccugaaauacaaucauguauuuuagacuaauuccuaaagggcug

SEQ ID NO: 4189947 - RNA, 90 nt, Human
cacccuucucccaggacaugggcucugcucaccuaaccuuacacagccaugaggcacuuuuugggcagugccuuucugggugagagggug

SEQ ID NO: 4189948 - RNA, 81 nt, Human
cacccuugauuguuuuuucacacuugcagacuuugccugguuacacuccuaaccaagcagucuauggagugucgagaggug

SEQ ID NO: 4189949 - RNA, 59 nt, Human
cacccuuguguuuucaauccccauggacagcucuucagaacucaugaagacauaaggug

SEQ ID NO: 4189950 - RNA, 97 nt, Human
cacccuuuguggacacugcuucccagccuuccaggggcuucacggagacugcguucaugcaagggcuuagggggcugugcagugccacaaaaaugug

SEQ ID NO: 4189951 - RNA, 66 nt, Human
caccgaacuuugcaaaugcaauuuuaaaaaucccucccccuauugcaaaauuugcagaguucgaug

SEQ ID NO: 4189952 - RNA, 55 nt, Human
caccgagagccacuuccggaacaagcgucgcguuucugaggagaaacucuuggug

SEQ ID NO: 4189953 - RNA, 102 nt, Human
caccgcagcccucccuggaccacaaggagccaagggcaggcaagaaagcuucaggcucccucuggcuguuguuagguuccugggucaaaggcugaguuugug

SEQ ID NO: 4189954 - RNA, 80 nt, Human
caccgggaaggagccuggcaaugcugcguccuucuugacacugggucaccuugggguggauuucaggcuccucaccugug

SEQ ID NO: 4189955 - RNA, 68 nt, Human
caccgggaugcaggaggguguugucaguggguuucccucccucuuacacagauuccucuagcugggug

SEQ ID NO: 4189956 - RNA, 64 nt, Human
caccgugagcugcagaguaaccuuugcaguuacuaguuuaucuguaauuuugcagcucaaagug

SEQ ID NO: 4189957 - RNA, 96 nt, Human
caccguuacuagaagugguguguggccgagcuugugcagaauaucauaucaggacauaccugcaacaguuagucuaggccagaucuuuugacugug

SEQ ID NO: 4189958 - RNA, 75 nt, Human
caccuaacuauuccauuccauaguagaaaaugggacaccauuccauaguagaaaaugggacaggcuaguuuggug

SEQ ID NO: 4189959 - RNA, 75 nt, Human
caccuaacuuuccuuaauaccugguuaccacugguuaccaauuacagugcaaauaagcuauuauggaauagggug

SEQ ID NO: 4189960 - RNA, 57 nt, Human
caccuagccuucuugugccucuugauuggggcagcagguguauauaaggcugaggug

SEQ ID NO: 4189961 - RNA, 71 nt, Human
caccuaugccagguaugaggacacugacagcagaauugaaucagcugucaguuugucuugcugacaaggug

SEQ ID NO: 4189962 - RNA, 101 nt, Human
caccuauguggcuguuuguuuauggaguuuucgguggccuacuuuaccugucauuguagcccaugcauaaaccguuacuuguacuauauuauuugugggug

SEQ ID NO: 4189963 - RNA, 77 nt, Human
caccucaggucuccugcccccggugcuugggcucucucuguccaagcacagggguuaggggcauguggucuggggug

SEQ ID NO: 4189964 - RNA, 129 nt, Human
caccucauaaaauauguagcugcaauguuugugagaacuugaucauuagcaugcacuggaguguuucaggccugcuguaugauggaucugauuauauaacaauaugcuugcaauauuaaguaugaauug

SEQ ID NO: 4189965 - RNA, 79 nt, Human
caccucaugcugaaacaaguauguucuacugaccuacuugacccaaaggugagcagggcagcuuuuuucagaaguggug

SEQ ID NO: 4189966 - RNA, 55 nt, Human
caccucauuaagaccagaagcaaacucugagcaaaagcugagugaugauggggug

SEQ ID NO: 4189967 - RNA, 85 nt, Human
auggauucaguuucaagacauugauuuuguacagauuagaauguuuuauuuugguacauuuucaaguagucuagaaacaguucau

SEQ ID NO: 4189968 - RNA, 84 nt, Human
auggcaaugcagguuuauuucacucuccggauacugucacaaaaaucugguugugggugggauggggaaaaaaccaaaggccau

SEQ ID NO: 4189969 - RNA, 70 nt, Human
auggcacguguguggccaggacugcagcucacaaccuccgugugcagaacagggccaugucaccugccgu

SEQ ID NO: 4189970 - RNA, 80 nt, Human
auggcaggaggcccaggcccugcuuuccagagcucauccaggugggggugagagauguggagcagggccccuugugcugu

SEQ ID NO: 4189971 - RNA, 95 nt, Human
auggcaguguuuuaguuuucuccaacucaaaggaaaggucaacuuuuagugaccuuuccuuuauuuuggaagauaauuuggucaagcauuaccau

SEQ ID NO: 4189972 - RNA, 57 nt, Human
auggccaccauuuaaugaagcucacuuugugcccaaagccauccugaauggugccau

SEQ ID NO: 4189973 - RNA, 84 nt, Human
auggccaugucaguguaguauaagguuaaaaccuugcaugcgucaaugcucaguagguaccaauacugaaugacuaguggccau

SEQ ID NO: 4189974 - RNA, 55 nt, Human
auggcccaaaaccuccucccucaauagugucuugagugcggagucugugggcugu

SEQ ID NO: 4189975 - RNA, 65 nt, Human
auggccccucuagaaguuuauguuagguuuuuaaggccagaccagacugacuugagcccagccgu

SEQ ID NO: 4189976 - RNA, 63 nt, Human
auggccuaugaccguuauguugcuauaugcaaaccucuccacuacaugacagucaugagccgu

SEQ ID NO: 4189977 - RNA, 99 nt, Human
auggccuugaccgaccucacguuuaagggccugugcacaguucuguuaccuggaguaggugaucugugacaccggccuuugguugcuguguuuggccau

SEQ ID NO: 4189978 - RNA, 101 nt, Human
auggcgaaagaaaagaacaaacuuuaaaaaugucuuuuaaauguugaggugauuucauugaagauuaugucuaaaagauaaaguuuaacuuuggcguccau

SEQ ID NO: 4189979 - RNA, 64 nt, Human
auggcgacaaagcucucccaccuucuucuuaccugcuggaagacagaggugggggaggucccau

SEQ ID NO: 4189980 - RNA, 57 nt, Human
auggcgucgucggcggagugacaggggucccucugggccggagccgacggcaguggu

SEQ ID NO: 4189981 - RNA, 70 nt, Human
auggcuagggcucgcaagggcuggagcuguaggaucuggcuagcuccauaccuaccugagcucugguugu

SEQ ID NO: 4189982 - RNA, 68 nt, Human
auggcuccccacugcccucaugagaaaggccucaacacaaagccagccuucuccagugcgguagccau

SEQ ID NO: 4189983 - RNA, 71 nt, Human
auggcugauuucaugcuaucaauguuguaucacugaaugcagaguugagcagaaguacaggaacauaccau

SEQ ID NO: 4189984 - RNA, 58 nt, Human
auggcugugguaucagacgcagcugggaccugauccaguucugccacuguccagcuau

SEQ ID NO: 4189985 - RNA, 79 nt, Human
auggcuuaaaguaacugccacauucauuuugcucacuaaucugcaguuuggaagagcuggaaagaagguggcagcccau

SEQ ID NO: 4189986 - RNA, 63 nt, Human
auggcuuccucuggauuggauuucccuuggcuucccugagggcaaucccccgaggaagcacau

SEQ ID NO: 4189987 - RNA, 87 nt, Human
auggcuuuuagcuuaauggacuuuuuaacugauaggagcuaaaaggcugagcuccuacuaaugaaucuaugagcuaaugacagcuau

SEQ ID NO: 4189988 - RNA, 65 nt, Human
augggaaaugguccauuugaugguuuuauugauaacuaaaccauuugaaggaaucauugacucau

SEQ ID NO: 4189989 - RNA, 85 nt, Human
augggaagaaggcuggggccuucucaucucccuuuggcaaauguggcugacagguguggacugagaggagccuccaaccuccuau

SEQ ID NO: 4189990 - RNA, 60 nt, Human
augggaagguuuugagagcgggucaguucagggccggcagacuuuuuaaaauccucccgu

SEQ ID NO: 4189991 - RNA, 78 nt, Human
augggaagugaagucagggaggaggaagaugucacugauaacaccugaaaauucuaaucuuccgacuugauuucucau

SEQ ID NO: 4189992 - RNA, 60 nt, Human
augggaauagaacaagauagagauuuggggucccaugucugcuucuguauuuuuucccau

SEQ ID NO: 4189993 - RNA, 62 nt, Human
augggagaggguaggaauuacuuugcaguuccuggugcacuuaaaaucauacucuuucuuau

SEQ ID NO: 4189994 - RNA, 82 nt, Human
augggaggaauccugcucgaaucaaagcaguuuuaaaugggaagcaccaaaaacugaaguagauucugaaauuuccuccuau

SEQ ID NO: 4189995 - RNA, 115 nt, Human
augggagggaauuuuaacugggugugaauauugggaggugugguuaguugggggcuaucacuguaucucccacaggcugcuacuucucucuuaauaucucuuguccucuucccgu

SEQ ID NO: 4189996 - RNA, 116 nt, Human
augggcacuauccacacauugggaggauggcaacuaccaaauuucacaaaugagacagcagcugucaucagugcccuuggggaugccaugcuaacaauaguaaauaaggugcccau

SEQ ID NO: 4189997 - RNA, 56 nt, Human
augggcugagaaucaagaauauuccugguggccaccaggccugguucucaguccau

SEQ ID NO: 4189998 - RNA, 88 nt, Human
auggggcauuacacaguggaaguccaggauccccucauucuguuuacuugaacuguugguuuggauucuacuauguccucauccccau

SEQ ID NO: 4189999 - RNA, 56 nt, Human
augggggagcgacagacauaauucacacccugugaucaugccaucugcucccccgu

SEQ ID NO: 4190000 - RNA, 116 nt, Human
auggggucucaucuucuguuggcuuuucuuagguguaugucauuagggaacacuuuacaacaaggccuggaauccccuaauagaucauauacaacaaguagagccuuuggcccuau

SEQ ID NO: 4190001 - RNA, 122 nt, Human
augggguuucaccauguuggccaggcugcugugaccucaggugauccaacugccucagccucccaaaguguuggaauuacaggugugagccaccgcaccuggccccuccugugaagucuugu

SEQ ID NO: 4190002 - RNA, 68 nt, Human
auggguacaagaaggugcaaggaaguucccaaaucuagaaaugcagagcugauugcccacuuguucau

SEQ ID NO: 4190003 - RNA, 115 nt, Human
augggugccagcaguacaugugccaggugaggcaguucuuacuuguauuugucauaaacugauaccugccaagcugcacucaggcccuuggggcuguagcuuugcuggcauccau

SEQ ID NO: 4190004 - RNA, 128 nt, Human
cagaagccucagagggacgccugugacugugccuguaagguuuaacgcccugucucggaugaucauccgggccuacagagguauaaacugcacuguccaauaugguagcccccauucacaggcugcug

SEQ ID NO: 4190005 - RNA, 67 nt, Human
cagaaggcaccauugucaacgguaaaguccuaggagggacccauugccggugaggugaggcuuucug

SEQ ID NO: 4190006 - RNA, 71 nt, Human
cagaaggggucugucugagccagaccagggaaagcucagauccaugcgauggcguagacaaaucccucuug

SEQ ID NO: 4190007 - RNA, 92 nt, Human
cagaaggucaguaaauuauggauuaacauguuuaugguacuucuuguugaguugcagugauuaaaguguuaaauucuuuauugucccuucug

SEQ ID NO: 4190008 - RNA, 66 nt, Human
cagaagguuuacacuggacuguagugagaauagauaaaguaauaaggauccagugugaaguuuuug

SEQ ID NO: 4190009 - RNA, 64 nt, Human
cagaagucauuuuguggaaauugcuuuuuaguacuuuaagagcaucugcuuaauggcuuaacug

SEQ ID NO: 4190010 - RNA, 65 nt, Human
cagaagugagcaugugaccuaguucuuuuauuugagcuaaagaaaagcaugcuugguggcuucug

SEQ ID NO: 4190011 - RNA, 55 nt, Human
cagaaguggcaucauucaagagcuggaagaccgguauaggaaucagucacaucug

SEQ ID NO: 4190012 - RNA, 62 nt, Human
cagaauaaacagaaacguagcuguguaaagguaucacuuagaacuacguuucguuaguucug

SEQ ID NO: 4190013 - RNA, 63 nt, Human
cagaauaagccugugcaugggcagauggugcuuuauuccuaauuugcagggcauguacaucug

SEQ ID NO: 4190014 - RNA, 81 nt, Human
cagaauacgcuccaugugcacacugaggcugggggagaagguggcucccaccucccuggguuaucggggcaggggcgucug

SEQ ID NO: 4190015 - RNA, 82 nt, Human
cagaauaucugcaagcugaggcuccccugagggauucuguuccacuccaggucucuaggggagccccguuuguacaggccug

SEQ ID NO: 4190016 - RNA, 59 nt, Human
cagaauaugacucgggcacuacauuucaauuuacaggucuugcucugaguuacuuuuug

SEQ ID NO: 4190017 - RNA, 129 nt, Human
cagaaucaccuauagagcuuuuacaaaauucaaaugacuggucuccuaccugggaguucugguuuacaaaucagggaaaggggagagucauuuagauugauuuuuuuuaauguuccccaaaugauucug

SEQ ID NO: 4190018 - RNA, 55 nt, Human
cagaaucagugacacauguauaagaauguuuguaccauauauguuacugacucug

SEQ ID NO: 4190019 - RNA, 83 nt, Human
cagaaucugccccaggaccucuucuggagaaaaucccgucucuuguuccacuucucugaaugucucuguuggggcaaauucug

SEQ ID NO: 4190020 - RNA, 97 nt, Human
cagaaucugucccaugguuaagccaagaccaucucuuauugauuaaaggucaacaagaauguagauuaguuaagcuaugaagagaccuaacauucug

SEQ ID NO: 4190021 - RNA, 60 nt, Human
cagaaucuucuuaauuggcacagaucccuaaagggaacaaaugugacaauuagaagucug

SEQ ID NO: 4190022 - RNA, 92 nt, Human
cagaaugaaguggggucccaggaaggagcaguguucuuuuugugacccugucauuacaugcacucuucaccuggaaugcucugcuucuuuug

SEQ ID NO: 4190023 - RNA, 102 nt, Human
cagaaugugaauaguauuugccuucuugaauaugguucuuugaaaauacagacaggccucaaagacacuggacagugggagggauaaagcuauuucagucug

SEQ ID NO: 4190024 - RNA, 112 nt, Human
cagaauguuauaucaggcauuauaaauaauuccuaggcaauauuuagaauggcugcaagccauuuuuagaauuggcugagaauuauuuacaauacccugcucccacauuuug

SEQ ID NO: 4190025 - RNA, 76 nt, Human
cagaauuaaaaguagggaaaguucuauuuaccuuggaaguaagcaagaagugguccuuuucuuucuucauauucug

SEQ ID NO: 4190026 - RNA, 72 nt, Human
cagaauucugaguggcauuggaauuuguguugcaugaccagcucugugauacuugaauguguuagacuucug

SEQ ID NO: 4190027 - RNA, 98 nt, Human
cagacaaaaauaagugacuucauguuguuuacaacuuaggggagauugacaauaaucaaguaaguuauguaggauaucagaggaucauaagugucuug

SEQ ID NO: 4190028 - RNA, 82 nt, Human
cagacaauagagacucaaacagauggccaagugcaugggcugaaagagaguccaaacuaccuucugagguuucuuaugccug

SEQ ID NO: 4190029 - RNA, 89 nt, Human
cagacaaucaguuucuguuguauaaucaccucacucucagacaugcuguuucuguuggaauucuuuauuauggauggaaauugauucug

SEQ ID NO: 4190030 - RNA, 85 nt, Human
cagacacauccuguuucugugcagcaugaguuauucagcauuauuaguagacacauugcugcuuccaggcacaggagcauuucug

SEQ ID NO: 4190031 - RNA, 78 nt, Human
cagacaccaggcucagacucccaggcccucugucugccccgcacgccugccaugucugagcucuugagcaugggucug

SEQ ID NO: 4190032 - RNA, 81 nt, Human
cagacaccugcagggaugggaacuccuccagcagcuccaggaacguggggcuguuggugaacuuccacuugcuguacucug

SEQ ID NO: 4190033 - RNA, 60 nt, Human
cagacacugcagcagucucccagaucugccuucugggaacccgaauugcccgguagucug

SEQ ID NO: 4190034 - RNA, 71 nt, Human
cagacagaagugucuuuuucauucauuuucccuuuuaaagagugucaaugaaggaaagugccuacugucug

SEQ ID NO: 4190035 - RNA, 72 nt, Human
cagacagagugagggggcacugagacggcacuggauuugaucagauaccuucucugcaccccacuuuugcug

SEQ ID NO: 4190036 - RNA, 76 nt, Human
cagacagcgaggggccugggccagcagggccguucuccuccgugccagcucagugccaggccccucuggcugccug

SEQ ID NO: 4190037 - RNA, 60 nt, Human
cagacagcugcuuucuugcuguauccucacaugguagacagagagaaagcaaguucucug

SEQ ID NO: 4190038 - RNA, 57 nt, Human
cagacaggguccuguccgucacuguauauuucauggugccuaauggugcuuugucug

SEQ ID NO: 4190039 - RNA, 96 nt, Human
cagacagucuuaggcuguaagagagggcagagugcccuggaacacacacaagggaaggagcgcugcucucucuuggggucugugggaggcuuucug

SEQ ID NO: 4190040 - RNA, 95 nt, Human
cagacaucacagggaagguugguuuguucaccaucaagcaguucaaagucagccccucuguuuuugaaaugaacgaacuugccucucaccgucug

SEQ ID NO: 4190041 - RNA, 75 nt, Human
cagacaucuccucuagcuguuuuuagagcuauuuuuuucauggagaaaugccuacgagauagggagaguugugug

SEQ ID NO: 4190042 - RNA, 71 nt, Human
cagacauuuauuucugguaggucuggaggcugggaaguccaagaucaaggagcuggcagauauggugucug

SEQ ID NO: 4190043 - RNA, 74 nt, Human
cagaccacagcaccacugguccuuaagcauuccuccuaaaacauguugucacaucaggugguggcuguucacug

SEQ ID NO: 4190044 - RNA, 83 nt, Human
cagaccauacuuuuccagggcuggcugagccugggcuguucaugagcagacacuccugagccguccuggaaaagggagaucug

SEQ ID NO: 4190045 - RNA, 67 nt, Human
cagaccaucuugaagcaaacugcaugugccacauuuaaaagggaggcaugcuuccagggugugucug

SEQ ID NO: 4190046 - RNA, 69 nt, Human
cagaccccagccucugcgugcuguggcuucacucaacauuugggaccacugagaagggguuggggucug

SEQ ID NO: 4190047 - RNA, 79 nt, Human
cagacccucugcaacuccagagugcucacugaucuggagacacaugcacucugugaucugcagagccuacgaaggucug

SEQ ID NO: 4190048 - RNA, 63 nt, Human
cagacccugcauuuuccaggguuuccauaauggcuggaaauaaaaauggcagcagggaaucug

SEQ ID NO: 4190049 - RNA, 77 nt, Human
cagacccuggguccaguuuugucauaaagcacaugcuuuaaaauguugcuguagauggacuggcauccauuugucug

SEQ ID NO: 4190050 - RNA, 61 nt, Human
cagaccgugaagcugcagcagggccauggcggguaaagcauggcucugagccucauggcug

SEQ ID NO: 4190051 - RNA, 56 nt, Human
cagaccucaguccucaguaggaagaggauggaaacgcuauggggacuggaggccug

SEQ ID NO: 4190052 - RNA, 59 nt, Human
cagaccuucuguuggaggcauuuaggcaauucuggaagccuuucuggcagaaguguaug

SEQ ID NO: 4190053 - RNA, 82 nt, Human
cagacuacauggaugccccgaaggcggcccccugagcaugcccuggccucucuggcugccacuuggucaugucaugugugug

SEQ ID NO: 4190054 - RNA, 78 nt, Human
caacaaaagacuagaagagccauacaaguaaaagcaaaauaaaacauuuugcauguuuguagguucuucuaaauguug

SEQ ID NO: 4190055 - RNA, 60 nt, Human
caacaaauuucuauuugguuuugugugauuucacaucuaacuguuucagaaauauuguug

SEQ ID NO: 4190056 - RNA, 73 nt, Human
caacacaaaaccuaaacagacuguccaauaacuccugcuaccuggauccuuggagguguuuggcuuuuuguug

SEQ ID NO: 4190057 - RNA, 129 nt, Human
caacacucagaguuauguacaauaacacauauauuggugucagaaagaguucaccauacucguacgugguuaaugcagauuuucugggccagauaaaauuguggguuuuguaaagcaucuguaauguug

SEQ ID NO: 4190058 - RNA, 59 nt, Human
caacacuguugugaggauuaaaugagcuacuucauguaaaacacucagaacagugcuug

SEQ ID NO: 4190059 - RNA, 125 nt, Human
caacagaucuuaacaucucuugcugcaaauuuuccaguguguucuggucuaccuugguaucuuaaaaccaggcucacugacuaccacaugagaaaugacaguggggugucuuaaaugaucuguug

SEQ ID NO: 4190060 - RNA, 62 nt, Human
caacagcagcaugacagcuggguacagggcuccuaacccucgccugccccauguuucuguug

SEQ ID NO: 4190061 - RNA, 86 nt, Human
caacaggcauuccccaucaccugucuugucagucuggcacacugugcuuggagacaagacuaggcaguuguuggguaugaauguug

SEQ ID NO: 4190062 - RNA, 66 nt, Human
caacaggggagaugcugcaaggagaugucuggggauggaauucuccugagaggaucucuguuguug

SEQ ID NO: 4190063 - RNA, 56 nt, Human
caacagucucuauagcuccuuguccuguuucugacaaugguguuauaggaugguug

SEQ ID NO: 4190064 - RNA, 79 nt, Human
caacaguuuacugacccaucuucucuugaaccuccuuugccccaaaggugaaggguggaggcaagagagggaacuguug

SEQ ID NO: 4190065 - RNA, 66 nt, Human
caacauggugaaaccccgucucuacuaaaaauacaaaaauuagccaggcgugguggcgcacaguug

SEQ ID NO: 4190066 - RNA, 63 nt, Human
caacauugaauucaaaauuacugaauucaacaaucuggaaucaguuuuggcuguucaguguug

SEQ ID NO: 4190067 - RNA, 129 nt, Human
caaccccaaccaacccucaaguuccuucccagagcccucggcccuuggcucccuccccuguggcauuacacaggauggagagugaggggucacugccucuagggaggaaacagaaugucuggggaaaag

SEQ ID NO: 4190068 - RNA, 73 nt, Human
caacccuaguuggcuguuacuauguucuuaauuacgaaaaguaaugaagaugguucaacuggccuuuggguug

SEQ ID NO: 4190069 - RNA, 73 nt, Human
caacccucagcugcugcgggaaccucucagguaugcuccccuguagaccugggugcccugugcuuugggguug

SEQ ID NO: 4190070 - RNA, 55 nt, Human
caaccggguaguuucuuuuuagagaagcagaaaacugaagaggaggagcagguug

SEQ ID NO: 4190071 - RNA, 86 nt, Human
caaccugaaagggugauucucaauuuuagcuauaaggcugugaauucaguuugaagcagaugguuaagcuugaucauuacagguug

SEQ ID NO: 4190072 - RNA, 69 nt, Human
caaccuuauuuggaauggggucuuugcagauauagucaaguuaaaaagaggucauaccagauaagggug

SEQ ID NO: 4190073 - RNA, 82 nt, Human
caaccuucuucuauaaguauccugguaaaugcuuaggaguuuaaguguguauuguuuaugcugcaagaagcauaugagguug

SEQ ID NO: 4190074 - RNA, 69 nt, Human
caacgauccucuacugaccuccgggcuuaaugcuucgaguucgucuccaaggucaguagaaugauuuug

SEQ ID NO: 4190075 - RNA, 86 nt, Human
caacguauuuggcagucuuuguucccauuacugagcuccucuuuggagcugccaggcuuuggucaaaggcugcaggggguacuuug

SEQ ID NO: 4190076 - RNA, 56 nt, Human
caacguugacaguuguuuucagcaaauggcugcuuuacucuguacugucaauguug

SEQ ID NO: 4190077 - RNA, 67 nt, Human
auucagugggugcucagcacaaucucucucucuuaaaagacugucuuuauagagcauucauuuggau

SEQ ID NO: 4190078 - RNA, 62 nt, Human
auucagugugagguuuucaaguagaacacuuuaguuaguauugaaaacauuuauauuagaau

SEQ ID NO: 4190079 - RNA, 83 nt, Human
auucauacaguccaaaacucagaagguacagaagggaggugucuccaggcacccuguuacucucuccugaguuuuuuaugaau

SEQ ID NO: 4190080 - RNA, 110 nt, Human
auucauccaaguuguuacauggagcaaugaugcauucuuuuucauugugcuauacucauaugaugaaaugcuaugcaacaauguauuuauguauuuuacugcugaugaau

SEQ ID NO: 4190081 - RNA, 58 nt, Human
auucaucuaugacucuaaugugcuauggaaacaccacagcaacauucauguggugaau

SEQ ID NO: 4190082 - RNA, 60 nt, Human
auucaucuguacuucaauaucuaguuuccauagcaacugagaugcaguuugcaggugggu

SEQ ID NO: 4190083 - RNA, 70 nt, Human
auucaucuuaaauuaaagcuuaaggaaucuaccuuuaccuuguuucuuuugcugcauguuuuaggugacu

SEQ ID NO: 4190084 - RNA, 79 nt, Human
auucaucuuguaaucaugcauauuacuagcacagcaucuugcacaugguaagugcuuaauacguauuugcuggaugaau

SEQ ID NO: 4190085 - RNA, 70 nt, Human
auucaugaaacaaaccucuauggagucuuugcucuuuguaagggacuuuccguguguuuguucaugcaau

SEQ ID NO: 4190086 - RNA, 56 nt, Human
auucauguucggggccacguuguuguauguauugauguacagccuugaaugugaau

SEQ ID NO: 4190087 - RNA, 87 nt, Human
auucauugaauagggcaaguaucagaggguuuuaagcagaaagauguaauaauggaagaucacuuugaugcuaccuggagaaugaau

SEQ ID NO: 4190088 - RNA, 64 nt, Human
auucauugcuuacagcuauuucuguaugugucugauauaguagaaagaacgcugaaguaggaau

SEQ ID NO: 4190089 - RNA, 65 nt, Human
auuccaaguauacauguuuuacauaagugauuuauagauaagugacuuguauaugugacugggau

SEQ ID NO: 4190090 - RNA, 77 nt, Human
auuccacagugcugucaguuuuauagauacacaugugccugaaaaggaggaaugucauagugugguagcaguggagu

SEQ ID NO: 4190091 - RNA, 61 nt, Human
auuccacauuucuucacuugucccaguguuuuauugggaaaguguugaggugucuugggau

SEQ ID NO: 4190092 - RNA, 57 nt, Human
auuccaccuucuaccugggagagaggacauacuauaucgcagcaguggaaguggaau

SEQ ID NO: 4190093 - RNA, 56 nt, Human
auuccaggcagaccagagagaugcaauucaaagaaucauacuggaaugacuggaau

SEQ ID NO: 4190094 - RNA, 74 nt, Human
auuccagugauuaucuuaagagguuguaugcagcagaaauaaccauacuuccuugucaggugcaucauuguaau

SEQ ID NO: 4190095 - RNA, 110 nt, Human
auuccauguauuucuagggccuucaggaucacuaaacccuccaccaagagaaugcaauagaaguggcgguuaugaaaguuucuggaaguggcccaguaguacagaagaau

SEQ ID NO: 4190096 - RNA, 69 nt, Human
auuccccaagguuuacuuuaugauccaggccaaguuaggucaggaucaugcugaaucuggcacaggaau

SEQ ID NO: 4190097 - RNA, 77 nt, Human
auucccccaaucccccauggccaggcccagggcccaggagacugagcacugaggcaggccugagauugggauggagu

SEQ ID NO: 4190098 - RNA, 81 nt, Human
auucccucuucaccaguuuggcagucucaucuucagagcaaaagauacggugugaggcugaaacuggcgauagagugggau

SEQ ID NO: 4190099 - RNA, 64 nt, Human
auuccggauauguaaaucaugaaacgucagucacacuacaacucauugaauacauauuugggau

SEQ ID NO: 4190100 - RNA, 76 nt, Human
auuccucucaggugugagauauuuccuaugaaacaguccacuggcaggcuggagauaucuuacacuuugaaguuau

SEQ ID NO: 4190101 - RNA, 76 nt, Human
auuccugaaaugugagcuccggcagguggaagucuuugugugacuuacccuguaagguguucccagacuccggaau

SEQ ID NO: 4190102 - RNA, 74 nt, Human
auuccugaaggugcagaacugagugaacagaucauccuuuuuaaacucacucaggcugauuucuuuugagggau

SEQ ID NO: 4190103 - RNA, 59 nt, Human
auuccugacaauggcggagauagucgugggguguccaccgcuuugccacugauaggagu

SEQ ID NO: 4190104 - RNA, 55 nt, Human
auuccugacugcuagucauucagccucacugugaaugaccccaguagaaaggagu

SEQ ID NO: 4190105 - RNA, 62 nt, Human
auuccugcagggaaucgaggcagaagcauggaugcuuucuucauagaccuugucuugggagu

SEQ ID NO: 4190106 - RNA, 58 nt, Human
auuccuguuuugguuauccuugcaauuugaguacuaggcaaaccuauaaaauaggaau

SEQ ID NO: 4190107 - RNA, 57 nt, Human
auuccuuggaacagaugcgaaggauucauagugccuuucagcucugcuucagggaau

SEQ ID NO: 4190108 - RNA, 94 nt, Human
auuccuuucuugugauaauugaaaucauuucaauucauuuccuucuugguuggacagaaacauguuuucaguagugagcaaaucuugagggaau

SEQ ID NO: 4190109 - RNA, 70 nt, Human
auucgaagcuucuuagaaugcaugugccaaacaucuuauggaccaguguugcuaggaagcugcuuugggu

SEQ ID NO: 4190110 - RNA, 80 nt, Human
auucgucuaaacuuuggcccagauuucuuguguugaauggaguacacauugcaaauaguaggcuagguuuagaguugagu

SEQ ID NO: 4190111 - RNA, 55 nt, Human
auucuaagucuuguucacauucucucuucauagggaagcauugaaugcuuagaau

SEQ ID NO: 4190112 - RNA, 63 nt, Human
auucuaaucaguuuggauuguuccuccuuugaggcacaaauaaaaugcaaauagauuuggaau

SEQ ID NO: 4190113 - RNA, 56 nt, Human
auucuacagaugaaagcggcugaggcacagagcagugcagcagcucaucugagagu

SEQ ID NO: 4190114 - RNA, 63 nt, Human
auucuagaauuaggcuacauggacuggacuaccagcuauaugacauuggccaaguucuguaau

SEQ ID NO: 4190115 - RNA, 71 nt, Human
auucuagauaccuaggggauuuguccagauuucagauauauacuggaacacacuucuaagucauuuggaau

SEQ ID NO: 4190116 - RNA, 65 nt, Human
auucuauggggaauuuggaugcugauaugguuugucuguguccccacccaaaucucaucuugaau

SEQ ID NO: 4190117 - RNA, 105 nt, Human
auucucauguaugugccauggauguuaauagcugcauugauuuuaauagugaaaaauuggaaacaauguagauuaccauuuauauaugacauauuauguaagagu

SEQ ID NO: 4190118 - RNA, 65 nt, Human
auucucauuagagcaguguauuaugauacgacugucccagucuauuuaggcugcuguaauagagu

SEQ ID NO: 4190119 - RNA, 73 nt, Human
auucucuccugcugugagugguucuugccuuugcuaaggguuugaauaugcauucaaagugaaaggaguggau

SEQ ID NO: 4190120 - RNA, 81 nt, Human
caagccauuugaauuguucugugggaaauaaacucucuuccaaaacuggcugucucauuuccccagguuagaugcguucug

SEQ ID NO: 4190121 - RNA, 55 nt, Human
caagcccacguugaaccgcuuacagaugcccgcaucgugcagcagcugaggcuug

SEQ ID NO: 4190122 - RNA, 58 nt, Human
caagcccaggauuccccaguuacaucaguaccuacagguggccauguucuguggcuug

SEQ ID NO: 4190123 - RNA, 67 nt, Human
caagccccaaacaccaggauuacuguuuacagggguuccuguuuacaguaguuuagcacaggguuug

SEQ ID NO: 4190124 - RNA, 98 nt, Human
caagcccuuggcacuuucuucugccccuugccugacaguguuugccuuucuuuggaugauggagcagugagaucauccaggugccccccaggggcuug

SEQ ID NO: 4190125 - RNA, 98 nt, Human
caagccguuuuaaaaauguguuugauaggaauauuauagcuuagaauucguaauguagguaaauuucuguuauaauuuauuuuuggaaaaaugguuug

SEQ ID NO: 4190126 - RNA, 82 nt, Human
caagcuauaauugagaaacugucaagagauucaaauucauggaaaaccaugaaagaauaauguuugcauguuucagagcuug

SEQ ID NO: 4190127 - RNA, 96 nt, Human
caagcucaugaaaaguaugcuaaagaagagagaauguagaauagcaaaaccagcugggagccugucuacacuuucucugcauauuucauagauuug

SEQ ID NO: 4190128 - RNA, 69 nt, Human
caagcucucuuggugacuuaaaauguucccauuucucauaugaaacacagaagugccaagagccaauug

SEQ ID NO: 4190129 - RNA, 65 nt, Human
caagcuggcagaaggcaauuagagacugggaaaggacuuaggaaugaaaguguuuugaaagcuug

SEQ ID NO: 4190130 - RNA, 84 nt, Human
caagcuguguccuuuuaguuuaagaaucaccagagacuacauaauuuuaguuuuuacagagagagaacuggacuggcuaguuug

SEQ ID NO: 4190131 - RNA, 57 nt, Human
caaggaaaagaaguauuucagaagcauccugcuuuuuaaaugcuagaauuuucuuug

SEQ ID NO: 4190132 - RNA, 85 nt, Human
caaggaauaccuguccacugggggacuggcugaauuuugcaaggcaucugcagaacuagcccuuggugagaacagcgaagucuug

SEQ ID NO: 4190133 - RNA, 63 nt, Human
caaggagaguaauugaaugagaggcccugacauugcagaaagucuaaauuaauucuuuucuug

SEQ ID NO: 4190134 - RNA, 109 nt, Human
caaggagcaagcacggaaggggaaggccagccuguagagcuugcagccgucucuccugcuucgccacagcaccgcugccaguccccuucuuggguggggaagcuccuug

SEQ ID NO: 4190135 - RNA, 76 nt, Human
caaggaugcccauaagguuugaccugauauuuacauaguugcagaagaauuuaaacuaaccauaugggcaucuuug

SEQ ID NO: 4190136 - RNA, 80 nt, Human
caaggauguccauagacagguguuggcauagaaccugccuuacaaaggccucugccccagccacaccuggacucuccuug

SEQ ID NO: 4190137 - RNA, 62 nt, Human
caaggauuuucaguggcccgcacccagauagaaauuuggcugguggcugguucuggaccuug

SEQ ID NO: 4190138 - RNA, 82 nt, Human
caaggcacacaauauuaccaaugcuuggaaaaauuagauuugaauuucaaaagcguacguagugaaguggcucuaugccuug

SEQ ID NO: 4190139 - RNA, 74 nt, Human
caaggccaguuucuccuagucaaaaccaaauguaacaaguaacucaauuuuucacugggggacaauuuguuuug

SEQ ID NO: 4190140 - RNA, 63 nt, Human
caaggccauggguaaggcccaggucaaauguauaacccuugccugucuguuugcccauucuug

SEQ ID NO: 4190141 - RNA, 58 nt, Human
caaggcugggagaaagaacccugagugagguagaaaugaccuucuuuucugagccuug

SEQ ID NO: 4190142 - RNA, 85 nt, Human
caaggcugugguccugggguuuuauauuuuggaucagauugucugugagccuggauuagaauggauagauccccagagcucuuug

SEQ ID NO: 4190143 - RNA, 67 nt, Human
caaggcuguguuagcugcccuccucugagcuugcacaguuuccagggcaucugcuauuacagcacug

SEQ ID NO: 4190144 - RNA, 57 nt, Human
caaggcuuucucauuauccuuuaggcuacagagaaacaaggagacgggagagccuug

SEQ ID NO: 4190145 - RNA, 57 nt, Human
caagggagaaggaugcuuggucauuuugagugucauaguguccuugaucuugccuug

SEQ ID NO: 4190146 - RNA, 77 nt, Human
caagggagccuaacaaguggugugcuucuuucuuacaaguaggcagugaaagaugcagcaaacuacuuuuuacuuug

SEQ ID NO: 4190147 - RNA, 58 nt, Human
caagggagcugucaacccacauggucauccaauuucuguggcagagagagcuuccuug

SEQ ID NO: 4190148 - RNA, 83 nt, Human
caagggauuuuacaguuacccuggaaagaaaugaugugucccuagcaauggcauuuaaucuggguaauuuguaggucuucaug

SEQ ID NO: 4190149 - RNA, 68 nt, Human
caagggcaggagaggauggaugucucagcucaagcagagaaaacaaacucacccuuucucugccuuug

SEQ ID NO: 4190150 - RNA, 83 nt, Human
caaggguaugugaagcgaaguugcaccaagccagcaacugcaguugccgcuguucuagcuucaguuucgcgaugcuucccuug

SEQ ID NO: 4190151 - RNA, 77 nt, Human
caaggucacacaggugguacuuaaagucagaacucaaacccagguuuuuugacucccaaguauagcuaagacucuug

SEQ ID NO: 4190152 - RNA, 55 nt, Human
caaggucugguuccucugggugccuguuugcacggccagaggcugacagacuuug

SEQ ID NO: 4190153 - RNA, 73 nt, Human
caaggugacagaccacugcaacucugugcugguacaccucaucucuacacacagagacaaugguuucaucuug

SEQ ID NO: 4190154 - RNA, 56 nt, Human
cacaacccgaucuuaguuccucaucaguaaaaagaggaguguugaguuggguuuug

SEQ ID NO: 4190155 - RNA, 118 nt, Human
cacaagcaauucccaugacagcccaugcucuccaaacccuguggcuuugguuuucucauccagaauguuauacauuuggagacugugucagcucucucuuggaugggguuugcuugug

SEQ ID NO: 4190156 - RNA, 58 nt, Human
cacaaggagguccugaggaagcacgcuuccuugcugguguuucuuagguuuccuagug

SEQ ID NO: 4190157 - RNA, 70 nt, Human
cacaaggccaagucucugugaagacugcugauguuagagauauauuuauauagagauuugugcaugugug

SEQ ID NO: 4190158 - RNA, 57 nt, Human
cacaagggagcuuagaaaacaugugucacuuacuacuuucucaguaaguccuuugug

SEQ ID NO: 4190159 - RNA, 56 nt, Human
cacaagguuuacauuuauauuuuccugauuuucuaggaaaauuagauggaccugug

SEQ ID NO: 4190160 - RNA, 58 nt, Human
cacaaguaccagggauugccggaaccuucaggaggacuuugggcuuuuacuggacgug

SEQ ID NO: 4190161 - RNA, 93 nt, Human
cacaagugcauuugucauugaauguguacacgauuguuugaggaaaguauuugguuuaacgaauugugcauaauuccacuguuugcacuugug

SEQ ID NO: 4190162 - RNA, 78 nt, Human
cacaauagggucagagucaggugcaguauuauaacccagaaacagugcuucaaggacacugacuuuuuauucccagug

SEQ ID NO: 4190163 - RNA, 128 nt, Human
cacaauauauggaauauuuguuaauauaucaucuguguaucugugcuuagaugcugauacccaguugcucugaaauaacugaugccagaucaugucauguaauuaucuaguaggggccauauggagug

SEQ ID NO: 4190164 - RNA, 77 nt, Human
cacaaucaguuguauccugccaugguccaucuucauauguggagggaaccuuggcuggauuggacagaaugauugug

SEQ ID NO: 4190165 - RNA, 61 nt, Human
cacaaucucuggugcuucugagagcaacaugaaauuguucucuacuucacaagggauggug

SEQ ID NO: 4190166 - RNA, 69 nt, Human
cacaaugggaugguaccacugaggauuuuauaaaauugggggagagacacuggaaccauccacauagug

SEQ ID NO: 4190167 - RNA, 82 nt, Human
cacaaugugguugaaagagcauggacuugaaauucaggcuggucugguucaagucuuggcuuugccaccuacuaaccaugug

SEQ ID NO: 4190168 - RNA, 72 nt, Human
cacaauugcuacuucguguauaaggcaggcuaugauaaugauauaauugaaacauauacaaaguggugugug

SEQ ID NO: 4190169 - RNA, 57 nt, Human
cacacaagcugcagcuggucacuaaaacccauuugugacuugucaaagaaaugugug

SEQ ID NO: 4190170 - RNA, 67 nt, Human
cacacacacaaaggaaugucauaucagcagucagacucccugggugucaacacuuccugguggugug

SEQ ID NO: 4190171 - RNA, 61 nt, Human
cacacacacagacauuugcucacacgauuguauauugagaauacauuuguuauugugugug

SEQ ID NO: 4190172 - RNA, 80 nt, Human
cacacacagauagagcucucagggcaagcucggcgggccaggucgagaaggcugauccuuggaguuuuccugcuguugug

SEQ ID NO: 4190173 - RNA, 64 nt, Human
cacacacaguuuuguauucuguugguuuaaccucucauacccaugggaauauuucccuguggug

SEQ ID NO: 4190174 - RNA, 74 nt, Human
cacacaccagaaagccugggacaaagccugggcuagagcccucaggauucauucucaggcuuccuggugcugug

SEQ ID NO: 4190175 - RNA, 55 nt, Human
cacacacucauuauauguguauaaugcaaauguauaugcauauauguggugucug

SEQ ID NO: 4190176 - RNA, 56 nt, Human
cacacagcuagugacaggagaaugcuagaaaguugauucaugcagugguugcugug

SEQ ID NO: 4190177 - RNA, 77 nt, Human
cacacagcuggaggcagcaccccaaaggggccgagggacauccucccuuggggaugcugugucuggaagggcuggug

SEQ ID NO: 4190178 - RNA, 58 nt, Human
cacacauaugagacguuuguuugcuuucaaagugaaaaagugaacauucauaugagug

SEQ ID NO: 4190179 - RNA, 61 nt, Human
cacacaucuuaucccaguuauucaaacacugaauaguuuaagucaggggauucggugugug

SEQ ID NO: 4190180 - RNA, 58 nt, Human
cacacauggguggggagcuaagugaugagagauuuauuccaacucugcauguauggug

SEQ ID NO: 4190181 - RNA, 88 nt, Human
cacacccugcauucacguugcuuccuuucuguuacacuauugauucuuucucuuggcagcugaggggaggcuuugauguggggaugug

SEQ ID NO: 4190182 - RNA, 59 nt, Human
cagacugaaaaucccugguaguaccuguaguuuccuuccaggacacgauuuuuagucug

SEQ ID NO: 4190183 - RNA, 117 nt, Human
cagacugcgaaacugaaugcuaagguccacguagaggacucaauguaacacaagagcuuacauuuccuugacuccucaacaccaguggccuugccuucuuauccuccccugcagcug

SEQ ID NO: 4190184 - RNA, 78 nt, Human
cagacuggaaaaucucugcaggcaaaugugaugucacugaggaaaucacacacuuacccguagagauucuacagucug

SEQ ID NO: 4190185 - RNA, 67 nt, Human
cagacuggagagcgcugagcugcuaugggaagccucacccccauacagcacaaagggccuuuaccug

SEQ ID NO: 4190186 - RNA, 58 nt, Human
cagacuguggcgucaggaagaaauuacccugguacauuaauuacuggcccauggaaug

SEQ ID NO: 4190187 - RNA, 61 nt, Human
cagacuguuauaguuugcacugguaauuaauaauuaauacauuucagacuguuauaguuug

SEQ ID NO: 4190188 - RNA, 78 nt, Human
cagacuuaaagagguuaaauuucucaggggcauaguacgaauaacuggcccaaagagcuuugaucucagccuugucug

SEQ ID NO: 4190189 - RNA, 72 nt, Human
cagagaaagcucuauguuaugcagaauuaagugcuugcuuaagaccuugaaguugcaaaacauuaaucucug

SEQ ID NO: 4190190 - RNA, 71 nt, Human
cagagaacaaagcugaggguuuaagccaaucuauuguuaucagcucacaauaaacuccagucuguuuugug

SEQ ID NO: 4190191 - RNA, 77 nt, Human
cagagaaccaaaaccugcuacuaaaggaucagcaggaacugcgccugguuccuuuguuaaggagguuuguuuggcug

SEQ ID NO: 4190192 - RNA, 106 nt, Human
cagagaagcaccguugaagauaaagcacauucuuuguuguaaguagcaaaagacugauacauucagcaaaagaaugguucauagaauuuuuaaaggguuucauuug

SEQ ID NO: 4190193 - RNA, 75 nt, Human
cagagaagucugagugagggugugagauaucuuugcaaaauucauaucuauauauuuuuauucuauacaucuuug

SEQ ID NO: 4190194 - RNA, 56 nt, Human
cagagacacuuaacaggaauggucuuggaucaugugacuauucuuugaugucucug

SEQ ID NO: 4190195 - RNA, 58 nt, Human
cagagacagcaaguugauuuccuggagcaauaccuagggaauuauucuuuuggcucug

SEQ ID NO: 4190196 - RNA, 63 nt, Human
cagagacagcacaguugguaaaauuguuauaguugacaaguuggaaagcagugcaugucucug

SEQ ID NO: 4190197 - RNA, 58 nt, Human
cagagacaggcuugcccuccaccaaaaagguggagacuccaggcacagccuuucccug

SEQ ID NO: 4190198 - RNA, 63 nt, Human
cagagagugggccucagagauccauuuguucaugccagauuucaaucucaacccuacucucug

SEQ ID NO: 4190199 - RNA, 81 nt, Human
cagagaucuaauuuaccauuuacuuuuuaaugacaaugguaaguuuuucugucauguaaagaguaaauggugacuuuucug

SEQ ID NO: 4190200 - RNA, 62 nt, Human
cagagauucuaauauaaggaugggggugauuuuuccccauaccugcaugugagaauuuagug

SEQ ID NO: 4190201 - RNA, 110 nt, Human
cagagcaaaugucaccuugucccugcaucagcuccagaaagguacacacagugggaauuacuccuuuguugcaugcuuuuggagggggcagagggacuauuacugagcug

SEQ ID NO: 4190202 - RNA, 59 nt, Human
cagagcacagagcuugggacaaggccaacaguucauacuugucucuuaccugaguucug

SEQ ID NO: 4190203 - RNA, 69 nt, Human
cagagcacucuuccuaggaagucagacuucccaggaaucccuuggugcugagagccuaggagggcucug

SEQ ID NO: 4190204 - RNA, 64 nt, Human
cagagcacugcuuggaggauuugcagcuuacucaucuguuuaucaguucuucaguagugugcug

SEQ ID NO: 4190205 - RNA, 55 nt, Human
cagagcagaagguccaagccugacaaccuguccuggcacuucuggaccugcucug

SEQ ID NO: 4190206 - RNA, 63 nt, Human
cagagcagauggagcuggaagaggggaagacaggcaacagacucugccaguauuaucugucug

SEQ ID NO: 4190207 - RNA, 56 nt, Human
cagagcagauuucuaaguauuggguguauuucucuauauacaugagucuguuucug

SEQ ID NO: 4190208 - RNA, 56 nt, Human
cagagcagcagagcuuccauggacagccaagacaccccugcaggcacugcugccug

SEQ ID NO: 4190209 - RNA, 95 nt, Human
cagagcagccagagugauucaaugaaacuuauaagaauaugaauuaaucauuuuaggucauaaugcaaguucauaaaugugugcucucuuuucug

SEQ ID NO: 4190210 - RNA, 61 nt, Human
cagagccacugcauuuuacagccucccuuacaguuggguguagcaacaugccugaguucug

SEQ ID NO: 4190211 - RNA, 59 nt, Human
cagagccaggccugcccucuuuuaaaguuacaagcaaccagaggggcagucggcuucug

SEQ ID NO: 4190212 - RNA, 68 nt, Human
cagagcccaauauagucagugucuauaucguuguuaaguucucaauagauauuugcugacugccucug

SEQ ID NO: 4190213 - RNA, 63 nt, Human
cagagcccagguguucuuugucccuguucaugcaguuccuaugaauaugcaugcaccucucug

SEQ ID NO: 4190214 - RNA, 94 nt, Human
cagagcccauggcuggggccacaggccuugcccgcagagcgucuccacccucauacacuccuggggucuccugugccuuucaaagccaccucug

SEQ ID NO: 4190215 - RNA, 64 nt, Human
cagagccccucgucuccaccaccagcuucugcuccacggcaggguaauaggcgcggggcuucug

SEQ ID NO: 4190216 - RNA, 98 nt, Human
cagagccuacucccugggguuacuugagggcagagcacuggggagccuccccgaguggggcccccacucuucccuuugccccggaugaguguucucug

SEQ ID NO: 4190217 - RNA, 60 nt, Human
cagagccucaucauccacuccacagagagcccaucacaguggcuggauagaugggaacug

SEQ ID NO: 4190218 - RNA, 79 nt, Human
cagagccuggcaccuuaccagggcuuugaagggucugcucccagcugcacuucagguucuggcagggcgucaaguugug

SEQ ID NO: 4190219 - RNA, 68 nt, Human
cagagccugguguggggcugcagaggagccuggcucaccaggccucugcuuuccacugccaggguuug

SEQ ID NO: 4190220 - RNA, 66 nt, Human
cagagccuucaucgcagccuuguucaguuuuaccugcucaacaggggcugguugaaagagcaucug

SEQ ID NO: 4190221 - RNA, 77 nt, Human
cagagcuauuccagacguucuccaaugggccaggcuucauuccugccucagggccuuugcaguuguuuuucucucug

SEQ ID NO: 4190222 - RNA, 76 nt, Human
cagagcucccagcagaccgcugugauggccgcagugcuuucugaggccuaauuucagucucugcuguaugucucug

SEQ ID NO: 4190223 - RNA, 70 nt, Human
cagagcucucccucagugcccuccguugugguuguaucacccucccaccagcugaguaggggagggccug

SEQ ID NO: 4190224 - RNA, 60 nt, Human
cagagcucugacagcuacagcccugaacuaaaggcccacucuucagcugcagagccccug

SEQ ID NO: 4190225 - RNA, 125 nt, Human
cagagcucuggcaguguccuacugguuggugguuggguuucuuugcccugccaugcuuuaagguaaguguuggcagugccaggaaaggauccuaacucugacuucuucgaaccugucagguccug

SEQ ID NO: 4190226 - RNA, 60 nt, Human
cagagcuggacgucugagcccuaaggacggcuuuugggaucucaaauccagcuaugccug

SEQ ID NO: 4190227 - RNA, 76 nt, Human
cagagcuggugaguaggugggaaaggcagcugugcgguuggaaguagggcuccuucaagccugucacuggguucug

SEQ ID NO: 4190228 - RNA, 84 nt, Human
cagagcuguaauuugcuaaucauauuucaucacucaugacaaugacugcacagaauuaugguuggugaaauuguuaagcgucug

SEQ ID NO: 4190229 - RNA, 79 nt, Human
cagaggaaacacagagguggccacucuuuuuugccaaccacccuggaugaagaaaguggaaucucuguuuuuauagcug

SEQ ID NO: 4190230 - RNA, 92 nt, Human
cagaggaaaguauuagaucaaaaucaagauuagagagaccaaguaguuuucauuuaauuuguguauuaaccguugaucauaccaguucuuug

SEQ ID NO: 4190231 - RNA, 79 nt, Human
cacuaaguaauuuccacuccuacguauuuugauauagagauguugcuauuuuucuauuuacagugcuagguacauagug

SEQ ID NO: 4190232 - RNA, 86 nt, Human
cacuaauauaaaugaaggagguuggagacuagagcaucucuaaguggcuuuuccaacuuuaaaauucauucuauggcucuuuagug

SEQ ID NO: 4190233 - RNA, 129 nt, Human
cacuacaggcccucuuugcagaacaucucauuuuagggugccuccaagccccccagggcccauaaggagugcugaggaaggcugggggcaucccaguggaggggucagcuaggcagaggucagaggacg

SEQ ID NO: 4190234 - RNA, 89 nt, Human
cacuacagucccuuacagccacacagggucuuagagaucaccugagucacucuacaguuaaggaaacuggggcccugcugggggaagug

SEQ ID NO: 4190235 - RNA, 61 nt, Human
cacuacccagggccugcuccccucugaccuuggaaaucggcugugcagccucuugguagug

SEQ ID NO: 4190236 - RNA, 130 nt, Human
cacuagacuguaauuuauaguaugguaguggauguaggaaaaguauacaaauacauuauguugucuucaugugccguuuacucuugcuacacaacugugccagauuugagaauuaauuguugucucagug

SEQ ID NO: 4190237 - RNA, 76 nt, Human
cacuagaguacacuguacacacaauugacuuaaaaaugguggugugaauauguuuguguguaugugugugugugug

SEQ ID NO: 4190238 - RNA, 60 nt, Human
cacuagauaguggcugcuuggaguaccacaugaaacaugauccagaggccacauccagug

SEQ ID NO: 4190239 - RNA, 90 nt, Human
cacuaggcacuauucucgguuguggguacagcagggaacagcacagaccaaaaucuuugccuucacugagcuuaugggauagugcuggug

SEQ ID NO: 4190240 - RNA, 70 nt, Human
cacuagguugaccaggcuggucuugaacuccuggccucaagccauccucccaccucagccucccaaagug

SEQ ID NO: 4190241 - RNA, 77 nt, Human
cacuauauucaugccugguuaugaaacaacaaacaaaugguauguucauauucuaaguaacuggcauucugauagug

SEQ ID NO: 4190242 - RNA, 84 nt, Human
cacuauggagcuguucauuggcaaggaaauuaguucuccugccguaaccagcaaggaacugaagcucuugcuaacagcuaugug

SEQ ID NO: 4190243 - RNA, 58 nt, Human
cacucagccugcaacggucucugucaugccagguuagaggaaccaggcaggcugagug

SEQ ID NO: 4190244 - RNA, 73 nt, Human
cacucagcuccuuucugaaaguguccucccuuaggccucuagaaacgccauggacuuuaggaagggccaagug

SEQ ID NO: 4190245 - RNA, 65 nt, Human
cacucaggaauggggcugggacuccucugauguucgaggugacagucugggcucuguucugguug

SEQ ID NO: 4190246 - RNA, 71 nt, Human
cacucauacacaagagcauguaacaauaguaaggacucucugagugccuguugcuguuauugugaugauug

SEQ ID NO: 4190247 - RNA, 74 nt, Human
cacucauccaaaauagauguuaaccuggaaauggucugaauucucuaagacugacaacuauuuggggaugugug

SEQ ID NO: 4190248 - RNA, 92 nt, Human
cacucccaugaaggcagccaagggugcucccgcagcuugaagagggguaccuggcucaggcuugggaggcccagggcuugccagagggagug

SEQ ID NO: 4190249 - RNA, 75 nt, Human
cacuccuucuuugaugugguuaauuaugaccucuugggguacauaccaaccuuaucaaaauccaucuggguagug

SEQ ID NO: 4190250 - RNA, 79 nt, Human
cacucgauuuauucuccagauggcgagacugugccgcccugccgcgagggaccaccucuuccacuggaguguaaaagug

SEQ ID NO: 4190251 - RNA, 84 nt, Human
cacucuaucuuuugagcaaggagaccuacauuuuauauaaucaaaauguguuuagaugguuuauugcuuguuuaggauguugug

SEQ ID NO: 4190252 - RNA, 66 nt, Human
cacucugaccaauaaauucaguguuuagagaaagauaauucacaugauguauguagggccggagug

SEQ ID NO: 4190253 - RNA, 79 nt, Human
cacucuggagggaguuaggacccggagccuauuuuucucugugugcccuuaauucugggccucacuuuuuucaucugug

SEQ ID NO: 4190254 - RNA, 58 nt, Human
cacucuugcucucugaggugcguguuauauuccaguacauuucccagucccaggagug

SEQ ID NO: 4190255 - RNA, 62 nt, Human
cacucuuggcggacuuuggaucacauguuugucccccuaaugcugaagagcugucaaaagug

SEQ ID NO: 4190256 - RNA, 92 nt, Human
cacugaaaguacaaagcagugguuauucagucacuacagagacaguucugcaaaagugauaaugugguaauuauuuaagacugugcuaagug

SEQ ID NO: 4190257 - RNA, 62 nt, Human
cacugaacuccuuguuuguccucuaacgccacaaaaccaaggcuaaagaaaggggcacagug

SEQ ID NO: 4190258 - RNA, 80 nt, Human
cacugaagauugaggccuuuguucauuguuuuuccgauggaaaagaaaagaaaccugaggcuuugcaagauuuuucagug

SEQ ID NO: 4190259 - RNA, 55 nt, Human
cacugaaggacaguaggaagggagauaccuuccccagccuuacugcccuucagug

SEQ ID NO: 4190260 - RNA, 61 nt, Human
cacugaaugcagguaagugacucacaugcuuugaaaaguuccuugacucacccugucagug

SEQ ID NO: 4190261 - RNA, 62 nt, Human
cacugacuuucugacacccucugugcuaugaugaaaaaagcgagggucagagagcgugagug

SEQ ID NO: 4190262 - RNA, 83 nt, Human
cacugagcuuuuccugcacccgcugaugccaggccuggagcuggccauggaaggcccuguggugaugggagaggcucacagug

SEQ ID NO: 4190263 - RNA, 82 nt, Human
cacugaggcccaggaagguggucuguggcucguguguuguugcuggcuguugagcuaggccugcuuuccugcccccucagug

SEQ ID NO: 4190264 - RNA, 55 nt, Human
cacugaguugggcuuuguuuugcuuaccuagcauugggacagucucagccucaug

SEQ ID NO: 4190265 - RNA, 104 nt, Human
cacugauaauaauaaucauagcaaucauuugucauauauaauacucuuccauguccuauagaggaguuaugguauugguugaugcaugaauauuauuuucagug

SEQ ID NO: 4190266 - RNA, 130 nt, Human
caaccaacaaaacuaaacaaaaccuccugaaaacuaaagagucuuuaugauugucaaaguaguaaaucuuucuuagaguuauuugagaugcuuugacagauauagaggggcuaccauuucagucugggug

SEQ ID NO: 4190267 - RNA, 68 nt, Human
caaccagauugugagauaacaugguguggugguguacagccacauuuaaaaaauccacgaucuuguug

SEQ ID NO: 4190268 - RNA, 58 nt, Human
caaccaguuggcaaccagcaguuggacugccaauuguggaaauuuuguggacugucug

SEQ ID NO: 4190269 - RNA, 94 nt, Human
caacccauuuugaggacuucuuaaugggaaaugaaugguuucaaagaguauuguccaucuccacauuaaugcugauuuaucaaaaugucaguug

SEQ ID NO: 4190270 - RNA, 60 nt, Human
caaccccaggcuggaggagucucuguggacaccagagaccauugcuaggcuggcggauug

SEQ ID NO: 4190271 - RNA, 64 nt, Human
caaccuaguacuccuagcccugaagggcaggggaugccacaucagcagcagaagugcugggaug

SEQ ID NO: 4190272 - RNA, 62 nt, Human
caaccucauuugaacuuaauuuaggaccauguaacuugguucuggccaguagauguggguug

SEQ ID NO: 4190273 - RNA, 79 nt, Human
caaccuucccagggcaauaggaaccagaucugucucccaagcuccagacaaguccauccuacugccuucuggaugguug

SEQ ID NO: 4190274 - RNA, 92 nt, Human
caacucagggaaagugaaaauuccagccaaucaacuauuguuuggucgaagacaagccaaacaauggcucuggcugauuucucccagaauug

SEQ ID NO: 4190275 - RNA, 67 nt, Human
caacuccuuuggccugucauccuggcugucagauugggcuaggagcugucagagugccagaggguug

SEQ ID NO: 4190276 - RNA, 61 nt, Human
caacucucaguaaauuucugccccaggcuccuugagaauggguuggauauugaggauguug

SEQ ID NO: 4190277 - RNA, 73 nt, Human
caacucucuauagaaagcuugaaguguugcgccacaaauauuuccaggcuguuuugugaauguucgaguguug

SEQ ID NO: 4190278 - RNA, 64 nt, Human
caacucugccuauagaagcuguucccagagaaaaucugggacugcagugaaggcacauggguug

SEQ ID NO: 4190279 - RNA, 70 nt, Human
caacugcaaagauuuucagugccuaaaacaagcucaccugucuugguucuucugaaacacguagcaguug

SEQ ID NO: 4190280 - RNA, 61 nt, Human
caacugccuggguccaauucuggcuuguuuacuuacuggacaagugacccugggcaaguug

SEQ ID NO: 4190281 - RNA, 87 nt, Human
caacuggacauugaguauuucuuuucucugauauauggauugugaaaaucacagagagaaauaacaugagucuuaauguguauguug

SEQ ID NO: 4190282 - RNA, 93 nt, Human
caacugugggcacaucuuuuguguggugcuccucuuugucucugccagugacuagcagggauauuauauaagcagcaaaugugcucucuguug

SEQ ID NO: 4190283 - RNA, 55 nt, Human
caacuucacugugccucuaguuccuaugauuugaacaggagaaacagggaaauug

SEQ ID NO: 4190284 - RNA, 62 nt, Human
caacuucagcccaauggccuugaccucuggacccagaggucacagggcacuggcugggguug

SEQ ID NO: 4190285 - RNA, 87 nt, Human
caacuugaaacugccaguauucacguuccugccguucaacaaaacuugagacuuuucaggccugaguguggaagucuuuuuagguug

SEQ ID NO: 4190286 - RNA, 70 nt, Human
caacuugguugaaugcucucuugaaauucugaauaauucuagaacagggagccccagcauuuccauuuug

SEQ ID NO: 4190287 - RNA, 57 nt, Human
caacuuguucuugguagaucuauggugccccaguggucccugacagcgggcaaguug

SEQ ID NO: 4190288 - RNA, 67 nt, Human
caagaacgguacuguuaguccugcucacagcugcagccccagcacuuaggacagcagcugccacuug

SEQ ID NO: 4190289 - RNA, 66 nt, Human
caagaagaaaaauuaccugugauucuccucuggucagaaucuucagaugauuugucacucuuuuug

SEQ ID NO: 4190290 - RNA, 59 nt, Human
caagaagaagcuuccuuaagucuagaugucacugguggagugaggcaagcuuuuucuug

SEQ ID NO: 4190291 - RNA, 61 nt, Human
caagaagaugccccuguagcucuuggcuuaaggaggaugagagauacauggagcaaguuug

SEQ ID NO: 4190292 - RNA, 59 nt, Human
caagaagcagggucuuagacuuucuguguaaccagaaacaggcuuauauuuugcucuug

SEQ ID NO: 4190293 - RNA, 76 nt, Human
caagaagugcugaaacugagguuggagaaggcagugagaggcaaauucagagucuuaacuauucagagucuucuug

SEQ ID NO: 4190294 - RNA, 70 nt, Human
caagaauguauuugguaggaugguacaugguuaaugguauuguguaaucaccugcacaaauguguuccug

SEQ ID NO: 4190295 - RNA, 55 nt, Human
caagaccucaaaaugagagggggggacauaaugcuucucaauuucauagguuuug

SEQ ID NO: 4190296 - RNA, 69 nt, Human
caagacgcagcgaggugaaggguacaagcucauucauaccagggcuuuccccucuucucgugguccuug

SEQ ID NO: 4190297 - RNA, 78 nt, Human
caagagaggaagugacagccugaggucacucugggggucgucuagacaagacaccaggucuguuguccuccaaccuug

SEQ ID NO: 4190298 - RNA, 64 nt, Human
caagagcaggugcugcuuccaugaaucuggcgaagaauuuugagauauaguggccuaguuuuug

SEQ ID NO: 4190299 - RNA, 59 nt, Human
caagaggugguaggugcaggauucaaacuuaggggucuggcucccagccugcucucaug

SEQ ID NO: 4190300 - RNA, 93 nt, Human
caagaguaugugucaaauaaaugaaugggaauagauggauauuucuugugucuauuuuaacccucuuauauauaccaaggaacacaauuugug

SEQ ID NO: 4190301 - RNA, 76 nt, Human
caagaguugaaaagccagaggaacuugaugacuguaaaugcauuagaaucaucuucuuuuggguuuaguauccuug

SEQ ID NO: 4190302 - RNA, 104 nt, Human
caagaguuggugacuuuucauguuggcagauugucuaggguugcgcgguaaauggcagagccagauccgaacccaggccugccuaacccaaaagcccaagcuug

SEQ ID NO: 4190303 - RNA, 73 nt, Human
caagaugugcaguucauggcaggauuugcaggucaccauguucuaccucccauggagcucuguccauuucuug

SEQ ID NO: 4190304 - RNA, 71 nt, Human
caagauuacaugcagugccucuggauucuugcugguccuuacagcagaaaucuugucugugugucuccuug

SEQ ID NO: 4190305 - RNA, 65 nt, Human
caagauucauuuuguccuugucccuuugcaguuaaaugagggccacacauuggacauggaucuug

SEQ ID NO: 4190306 - RNA, 71 nt, Human
caauuacuuagcaaggcugccuggagaaucaugucuaccuuagcuuacuucuccggcuuuguagguuuuug

SEQ ID NO: 4190307 - RNA, 64 nt, Human
caauuaguucagagaccuuucauucccugcucagaggaaugaaacacuucugauucucaaguug

SEQ ID NO: 4190308 - RNA, 72 nt, Human
caauucaggcuucacagcuuggagccuauggaagccaggagggucacaaugugugaauugggccugguguug

SEQ ID NO: 4190309 - RNA, 76 nt, Human
caauucgcuggguucaggacuggggcccuugugucccccuuguggggcaugaggucauucuuggauuacagaguug

SEQ ID NO: 4190310 - RNA, 73 nt, Human
caauugaaauguuguccugucucuugaaguauaggauuuugugucaaaugaggcugaugaauguggucaguug

SEQ ID NO: 4190311 - RNA, 99 nt, Human
caauuuaaguaaaacaucuuuuaaagguagaaaaaucaauuuauugcccugcaaagggcaauaaaugacuucugcauugaggauaaaguacugaaauug

SEQ ID NO: 4190312 - RNA, 86 nt, Human
caauuuacaguuguucauugcugguauauaggaaagcaauugaccuuuguauguuauucuuguauacuacaaucuuucuguaauug

SEQ ID NO: 4190313 - RNA, 77 nt, Human
caauuuggguaaacaagugauacaucuagucuauaaacauauguugaugguguugguggucacuuuuaagaaaauug

SEQ ID NO: 4190314 - RNA, 96 nt, Human
caauuuguuuaugccacuuuggugucugaaaauaacaguaaaaauaaauuuaaaguauuuuugacaggcauuaccagagaaucauuaauaaguaug

SEQ ID NO: 4190315 - RNA, 71 nt, Human
caauuuuguugcucuauuaccauucuagauucaccagcuguuucuugauugguuguauagcuacuagauug

SEQ ID NO: 4190316 - RNA, 60 nt, Human
caauuuuuacauuggcguaucauaaugaauaucuaaauauuaugauacaggugaaaauug

SEQ ID NO: 4190317 - RNA, 111 nt, Human
caauuuuugauaucacuucaugucauuuuagagaguaaguuuuccuguuuuauuaauguuuauauuuaagcugaauuuucuaaaagaauugugaguguuuuuauucuauug

SEQ ID NO: 4190318 - RNA, 55 nt, Human
cacaaaccuucugcagccuguacugcuacagcacgaggcugcagaaucaguugug

SEQ ID NO: 4190319 - RNA, 110 nt, Human
cacaaagaaauauagcuccugucaagaaaaugccugcuggugucuucaagguuuugguugcagaagaauugggcaaauuucaaggacgcuggaaacuuugugacuuugug

SEQ ID NO: 4190320 - RNA, 129 nt, Human
cacaaagugauggauaaccccuggacugugauuugagggauucuggaaagaguaucuugaucaaaauaauaccaucugcccuaugucaggauguccaaaauccagccauugggguuauaguccuuuggg

SEQ ID NO: 4190321 - RNA, 65 nt, Human
cacaaauagauuuugaaaaguugcuuccaaaauuuuuagaagcacugcauuucaagaucagugug

SEQ ID NO: 4190322 - RNA, 61 nt, Human
cacaacuucagggaaacaugaagcauugcauucugugcuaacggugcccccuggaguugug

SEQ ID NO: 4190323 - RNA, 75 nt, Human
cacaagcauuuagugcaauucagagaacaauagauucuuucugauguaaaauucuugguugucauguugcuagug

SEQ ID NO: 4190324 - RNA, 95 nt, Human
cacaaggaaaaugauucuagaauuuaaauuugccaaguuaagcuaagcuaugugcaaauuaaguagauuuuccuguguauauuauuuuccaugug

SEQ ID NO: 4190325 - RNA, 66 nt, Human
cacaaggcauccaugguggucgcugaguacuugcuggucucagacucccacauggagccaucggug

SEQ ID NO: 4190326 - RNA, 83 nt, Human
cacugauggcaauuguaauuuuguaaagauuuaugaguuguaauuuuguaaagauuuaugaaguucaauuagagccaucacug

SEQ ID NO: 4190327 - RNA, 56 nt, Human
cacugauucccugugaagcagggcagcgcuucagcucucaugcaguggggggugug

SEQ ID NO: 4190328 - RNA, 104 nt, Human
cacugccuguggccccuucucuggagggcugcccggccagcagcaaccaacugacccggggccauguggcacccuccccggaggccaaggggccacagccagug

SEQ ID NO: 4190329 - RNA, 59 nt, Human
cacugcugggcagaggcugcaugacaauauggguaacacgcaggaucugccuagcauug

SEQ ID NO: 4190330 - RNA, 89 nt, Human
cacuggaugcuggcaggauuuauuggugggaaguuauggcaaacaucuugauggcuuuaaaucuguauucauagcuaguaucuuuugug

SEQ ID NO: 4190331 - RNA, 81 nt, Human
cacuggauuaggaguuggugagcaccaggcuuuuccacagacuagauggagacccugggcacaccauuuccccucacugug

SEQ ID NO: 4190332 - RNA, 60 nt, Human
cacuggauuuaggacuaguccaagaucuugaucuagauuuugaccuaggccuagacugug

SEQ ID NO: 4190333 - RNA, 80 nt, Human
cacuggcccuuuaggcugaaaggagaggugaaggacgugagucucccucccucucucuuuuugcugccagggguuuagug

SEQ ID NO: 4190334 - RNA, 85 nt, Human
cacuggccuguucugguuuugcauucacagaauuauuuucauggauuugauucuacaaucauguagauccuaguuuagguaggug

SEQ ID NO: 4190335 - RNA, 55 nt, Human
cacuggcuaaagauaagcucaauagaucugugggagcacagcuuuaagccaugug

SEQ ID NO: 4190336 - RNA, 129 nt, Human
cacuggcugucugcagugguaacaaccauggccuaguuccaggggcagcagugauggugcuggggcagcaucugaaguguugucaccuggguuugggcuaaugcuucaccacccaguguucagccucug

SEQ ID NO: 4190337 - RNA, 123 nt, Human
cacugggaacguuggaacuuuucagaaagcauuuuuguguaagauucugcaaggcagaucuuuagagaggugucauaaucaguuuugcauguguuuuguuugagucaaccaacguuauuugug

SEQ ID NO: 4190338 - RNA, 56 nt, Human
cacugggaauaucaaccauugagacuuucuccuuucuuuguggauaaucuccagug

SEQ ID NO: 4190339 - RNA, 61 nt, Human
cacugggcaggauacuucaugggacucugcuagcucaaguccugaagagcccugcucugug

SEQ ID NO: 4190340 - RNA, 130 nt, Human
cacugguuagagaaaggaaacguggcuggagguuaugguuauccucaaaagaggaaaggugaacuucuucuacaaaugagggucaucauaaaacauuuccagcggagcguuucuuuuuucuucuuccaug

SEQ ID NO: 4190341 - RNA, 83 nt, Human
cacugguugaacugagggguuggagagugaggugaaaggcagaucuuccacgcuuucauaccucuugaauuuugaaccaugug

SEQ ID NO: 4190342 - RNA, 73 nt, Human
cacuguaauucuuggggcugcucugacaauuaacaaacacaaauguccacguagcaccuuagcauuucuagug

SEQ ID NO: 4190343 - RNA, 69 nt, Human
cacugucacaccucuguggacaacucccagugaugucacugagcauggcucacagagaguggacuugug

SEQ ID NO: 4190344 - RNA, 72 nt, Human
cacugucccugccucacccuaggccaacuaauacaaaucucagggcagccaggguggggcaggcccacugug

SEQ ID NO: 4190345 - RNA, 125 nt, Human
cacuguccugucacagguuucauggguuuugagaggugaggcaugaggcauccauuuugcucaugcauguggucacggugccacagccucaugauuuuagaguccugguuguggcaguggcagug

SEQ ID NO: 4190346 - RNA, 76 nt, Human
cacugucugggucuacauccucuguucuggcuuuuaucacugugacuguggcuacucagagggucccuagauagug

SEQ ID NO: 4190347 - RNA, 62 nt, Human
cacugugauguggguuuuauuauuuccaguacagaugaggaagacugaggccugcaucagug

SEQ ID NO: 4190348 - RNA, 82 nt, Human
cacugugauuaucuacuggcuugacucucucccgucuagacucuaagcuccuagagagaagggccuguauguaaucacccug

SEQ ID NO: 4190349 - RNA, 67 nt, Human
cacugugucuggagugagcuggguuuuucuucugcuguuggccuggcucacucaugcagccgcagug

SEQ ID NO: 4190350 - RNA, 56 nt, Human
cacuguguguguacuuacaaagggcaugcuuuggagugcagaauagacaugcagug

SEQ ID NO: 4190351 - RNA, 72 nt, Human
cacuguguucuauuuaucuauuucugaaugaccaaagaccaccgguugacccaguuguaaaagagcucagug

SEQ ID NO: 4190352 - RNA, 103 nt, Human
cacuguuauuuuucuaugugucuuugagacucugcuacagugaaacaugaaacagaacaaauuagcaggcaucucagagauaauuaaugguuugaaugaugug

SEQ ID NO: 4190353 - RNA, 56 nt, Human
cacuguucaucaaaacugcucuuaaggaaauuaaccuggcaggaagaugaagggug

SEQ ID NO: 4190354 - RNA, 69 nt, Human
cacuuacaugcuggugacuguagacaaggcuucccuccugucuagcgcuggucuccugugugucaagug

SEQ ID NO: 4190355 - RNA, 57 nt, Human
cacuuagugcccuggcccuuacaccuauaaaaugagugucaugcuggggcaugggug

SEQ ID NO: 4190356 - RNA, 81 nt, Human
cacuuauguguuccaguauuuuuuauucugugguauauaauguaugucaaaguuaagaaauagggauaaaaacacugagug

SEQ ID NO: 4190357 - RNA, 83 nt, Human
cacuucaacaccuggugcauucaugugccggcacaaucagugauugguggguuaaugagugacugcgugagacugacuuagug

SEQ ID NO: 4190358 - RNA, 90 nt, Human
cacuucauucauucagucagucaaucaagguagucuagagccuuuauuuuguuccagacacaguguugaaggcuagugaaauaaacagug

SEQ ID NO: 4190359 - RNA, 119 nt, Human
cacuucucagauguuuguugaauuaaacauguugacaucuuaccuccuuuuuugauuucuaguuucucaaagauaggguaugugcacaugguuuaaaaaaaaaugaaaaucugaaagug

SEQ ID NO: 4190360 - RNA, 91 nt, Human
cacuucugggggaguugcauccuguucuagguuugggacacuggaguucuaauauuuuuaaggacacaaaagaugacucuucuagcaugug

SEQ ID NO: 4190361 - RNA, 91 nt, Human
cacuucuugaauaguccuguccauuucagugucuugugaugaagagauuuuauuugaagacuagugaaaauauagcgaaauucauucagug

SEQ ID NO: 4190362 - RNA, 80 nt, Human
cacuugaggaccuuauuaaagaccggacacuucuuuuugcuaggaaguuuagucuugucuuaguaaaucugucuccggug

SEQ ID NO: 4190363 - RNA, 64 nt, Human
cacuugauguugucacuauugccaugugacacuuugguuagucuaauagugacucaugaagcug

SEQ ID NO: 4190364 - RNA, 66 nt, Human
cacuugggugcaagcaaguggcacagaguccauuggcacucaggcagcuaguuuugcaccucugug

SEQ ID NO: 4190365 - RNA, 70 nt, Human
cacuugguuccaagagucagcugaucccaggcggacuucaaugucuagaggaagcuucaucuuucaagug

SEQ ID NO: 4190366 - RNA, 61 nt, Human
cacuuguauacaguguacacauugauguucaucaauggauaaacaaauugugguauaggug

SEQ ID NO: 4190367 - RNA, 71 nt, Human
cacuuucacagcugugcuuaugaugcuaaugccaaggugcuucagagaucaugagacacauuauggaaaug

SEQ ID NO: 4190368 - RNA, 63 nt, Human
cacuuucacuguacgccaggcucuccuuggagcacccgcuggucccugcaguucuagaaggug

SEQ ID NO: 4190369 - RNA, 107 nt, Human
cacuuuccaguccaugguuaaauacaguauaaugacugaccagcuguaucuugacuuuuacagcaggaauuaacauauaagcguguuuggcuauaccugagaaauug

SEQ ID NO: 4190370 - RNA, 57 nt, Human
cacuuugcaggguggugggaggcuaaauuauuccaccucucucacugcuguggggug

SEQ ID NO: 4190371 - RNA, 81 nt, Human
cacuuuguauuuauaaacaguaccacggugcuuaccauaaaguuggcaccccucagcuuguuuacuaaaugaauaugggug

SEQ ID NO: 4190372 - RNA, 70 nt, Human
cacuuugugaggccaaggugggcagaucacuugagaucaggaguuugagaccagccuggccaacauggug

SEQ ID NO: 4190373 - RNA, 61 nt, Human
cacuuuguuaauuugguaugguggugccacacauuaucacuguacagcauuaacaaggcug

SEQ ID NO: 4190374 - RNA, 86 nt, Human
cacuuuuauguuucuugcuguuuucuacccucaagaaguaccacuuauaauuugggggucggagggggcaaugaaaacugaaaaug

SEQ ID NO: 4190375 - RNA, 79 nt, Human
cagaaaaagauuugcuugugcuaugaaaguuggagaacucacuguuuugaauauucauuugcagaagaaguauuuuuug

SEQ ID NO: 4190376 - RNA, 57 nt, Human
cagaaaacaaaccuauccugagacccaagcuguguccuaggaugaaagugguuucug

SEQ ID NO: 4190377 - RNA, 67 nt, Human
cagaaaacuagucacaugaucacaggaucgugaagucucuugauccagaaauuauguaacuguacug

SEQ ID NO: 4190378 - RNA, 88 nt, Human
cagauguagagaaugaaauggauggaauugacauuuacaucugcggauguagagaacgggauuccauccguucuauccucugcaucug

SEQ ID NO: 4190379 - RNA, 65 nt, Human
cagauguugagugaugggccagucuguguuauugucagacuagaacugcccaccaguuaacgcug

SEQ ID NO: 4190380 - RNA, 110 nt, Human
cagauguuguaaagauacucuuucaaguuuccugugcacuaggaaucugcagauguacguuggcagggcuacagucagagugcagcgggaggcugggguuuacacaucug

SEQ ID NO: 4190381 - RNA, 65 nt, Human
cagauuacugggccucauccccagaguuucauauugaauaggucugaagugggcccacaaaucug

SEQ ID NO: 4190382 - RNA, 115 nt, Human
cagauuauuucuucuugcucauuaacauccuuuucuuucugacuggauaacuccuuuuaccaauucuuguaggacaggucugguguugaugaauuccucagguuuuguuugucug

SEQ ID NO: 4190383 - RNA, 63 nt, Human
cagauuggagauggaagaaaagucaguaagccuggacucugauuugagaaauuuuucaaucug

SEQ ID NO: 4190384 - RNA, 103 nt, Human
cagauuguaagucuuuaguaaaugucuuugucacguugggcugccauaacuaaauaucacagaugguggcgugaacaacagacauuuauuucuuauaguucug

SEQ ID NO: 4190385 - RNA, 60 nt, Human
cagauuuacucccugcuuccgcccaguggcaauaauuggguacugcagagggugagucug

SEQ ID NO: 4190386 - RNA, 74 nt, Human
cagauuucagcucauauauuaucuuugaucugcugcucuugccuuccagaagugauauauugagaaggauucug

SEQ ID NO: 4190387 - RNA, 68 nt, Human
cagauuucaucucucuaaaagacaguccaaagauagaauaggaaucuugaagagaguagugaagauug

SEQ ID NO: 4190388 - RNA, 87 nt, Human
cagauuucugaguaucaguuuaguaggugauaucaauugcaacuucgcagaauuaucacaaguauuaaauaaaggacuuaguaucug

SEQ ID NO: 4190389 - RNA, 69 nt, Human
cagauuuggcccaugggccacaguucaccaaucccugcuuuaggaauuuccuuuguggccccaaauuug

SEQ ID NO: 4190390 - RNA, 96 nt, Human
cagauuuugaaauuguauauuccucauauucagugguugaaugcaccugaaucccugcuguuccuugaccacugcauaaugaguuuucaagagcug

SEQ ID NO: 4190391 - RNA, 90 nt, Human
cagauuuuuaaauucuguauuuucuaugaggaugggcaaucauaauauagggaguguaaacuguagaaaauacuuucuuuugaagaauug

SEQ ID NO: 4190392 - RNA, 108 nt, Human
cagcaaaaugaaagagcagagccuacauggguuccuaggacaggaccuggcuucugaaccgugaaggaggcacaggaacuuacuggccacuuguggccugcgaugcug

SEQ ID NO: 4190393 - RNA, 65 nt, Human
cagcaaagguagaagcacaggacucaauauaaugguugccugaauaaaugcuuccacuuuuacug

SEQ ID NO: 4190394 - RNA, 92 nt, Human
cagcaaauguuuagugagaaauguaggcauaauuauuuuacugaaauauuuuacaaagaaaaaugugcuacuuuugugcuauuuuugugcug

SEQ ID NO: 4190395 - RNA, 130 nt, Human
cagcaacagaagaucagagcagagauguggcuaaacaguagcagguaugaaaagacuuagagguucugguuucuguaagcuucaaauaucugugaugcuugugccaaaacagcuuaaguagacuguauug

SEQ ID NO: 4190396 - RNA, 62 nt, Human
cagcaacccgggggaccuuucuucuccuuguuggccuugaccccaaguguucccgggugcug

SEQ ID NO: 4190397 - RNA, 57 nt, Human
cagcaacuggucauugcucuccugaaggcacagccauauggguaauggccacugcug

SEQ ID NO: 4190398 - RNA, 63 nt, Human
cagcaagagagcagcgugcaagggaaauacacagaucaacccuuggagcuguaaucuugucug

SEQ ID NO: 4190399 - RNA, 63 nt, Human
cagcaaggacugggcaugugaaaugccaaugguuuggcuaaucaacacgccacagcuuagcug

SEQ ID NO: 4190400 - RNA, 90 nt, Human
cagcaagugaauaacacagcuagugaguggcagagcugggcuuucaacucaggcucugggucccacgucauugcugucuaugcuaugcug

SEQ ID NO: 4190401 - RNA, 82 nt, Human
cagcaauaacaacuugauuguguagcacaauccuggagccugaacagccaaggauaugcacauucaaaaauugcuaaugcug

SEQ ID NO: 4190402 - RNA, 57 nt, Human
cagcaauaagguaagcuucuccuuauaaccuuuuuaggaagaagucccuuugugcug

SEQ ID NO: 4190403 - RNA, 57 nt, Human
cagcaauauacacagucuaugggagacauuuucucuauggguuaaaguaaguuguug

SEQ ID NO: 4190404 - RNA, 71 nt, Human
cagcaaugugauguuucccuauguuucuacaggccccgguaaaggucagggaaauucaagggagauugcug

SEQ ID NO: 4190405 - RNA, 61 nt, Human
cagcacaguacaaggcacggaugcggaaccggcucccaaaccccgugccucacugucccug

SEQ ID NO: 4190406 - RNA, 61 nt, Human
cagcacaguguaguaaguuuggaacaagacacaccugaaaucaaaucccugcucugugcug

SEQ ID NO: 4190407 - RNA, 66 nt, Human
cagcacauaaucagugauugugacuccaguccagguccacucaauacccacuuaucauaugugcug

SEQ ID NO: 4190408 - RNA, 90 nt, Human
cagcacaugaacguggaauccucacauuggcccagccaaggcauucucucacccuggcugcagugcuugagaugucacguucacacucug

SEQ ID NO: 4190409 - RNA, 57 nt, Human
cagcacccagggguccugcgcaggagaaaccgcugugcugugcucuuuaaggugcug

SEQ ID NO: 4190410 - RNA, 59 nt, Human
cagcacccucggaggcugccgugggccccccuggccacaaggcaguggaaagggugcug

SEQ ID NO: 4190411 - RNA, 60 nt, Human
cagcaccugcucuuagacacggagaucaaaugacaaacccuuggguuaggagcagggcug

SEQ ID NO: 4190412 - RNA, 84 nt, Human
cagcacgugcuacuggaagaauaaugggccuuagagcuagcaaaacugaguucaaauccugcuuaugcuaccaguugugugcug

SEQ ID NO: 4190413 - RNA, 70 nt, Human
cagcacguugugggagcuuugcuauuagauaucgucaacagcaucuggcaaaggcaaccacaguucuuug

SEQ ID NO: 4190414 - RNA, 64 nt, Human
cagcacucuggcuucguuaaguuguggguguuaugugguucgcguuuggaagcagaggguguug

SEQ ID NO: 4190415 - RNA, 79 nt, Human
cagcacuggggucaccaggauugggcuguaggccugcauggacgaugcgccgcguggcagucuuggugacugggugcug

SEQ ID NO: 4190416 - RNA, 68 nt, Human
cagcacuuaggaagcaggccuaaaauuuggcaauauauuaucaaaagagcucugcuuccuaggaaaug

SEQ ID NO: 4190417 - RNA, 62 nt, Human
cagcagacuguggcuucuuggagggcaggaacugauugccuuuuuccuuggccaaagugcug

SEQ ID NO: 4190418 - RNA, 78 nt, Human
caggaucuucuccugcuucaacugauggacacgcucaaugugucuaagagguguucagugcuguuggaggagacucug

SEQ ID NO: 4190419 - RNA, 78 nt, Human
caggaugagucugcucaugcuaccgcgggccgcccagcaaggaagcaggcugcccgccaggcuggcacgcgccucuug

SEQ ID NO: 4190420 - RNA, 96 nt, Human
caggaugccucuauguuuuccuaagaugaccuuauaaagagcauuuaaucugacugggaugcaaucuucucaucuggaaaacaaagugacaaucug

SEQ ID NO: 4190421 - RNA, 56 nt, Human
caggaugggauguagugggcccuucccagagaugccuagaacuaacccauguccug

SEQ ID NO: 4190422 - RNA, 106 nt, Human
caggauguagaucauugaucccuaccauugcugagacauugcuaaucugauauuuauccagagcgcacugucugcaggcaaauuaggguuuuaauucaccaucuug

SEQ ID NO: 4190423 - RNA, 84 nt, Human
caggauuaaggugaggggaguaaagccauguuacacagauacaaaaaacauucaguaaucgcaaugguucccucaccucaccug

SEQ ID NO: 4190424 - RNA, 72 nt, Human
caggauucuaauuaguucuacauguuucuuagaccccacugucucaaacauggcugcgcuauggaauaccug

SEQ ID NO: 4190425 - RNA, 69 nt, Human
caggauugagaaugaagggacauuuuggagcccuuguggugguacaguucuuuuuauaucuagaucuug

SEQ ID NO: 4190426 - RNA, 81 nt, Human
caggauugcuugauuuggcaguguauucauaaggacuuggguucuuuaugcccgaaugcacugccauuucagugauugcug

SEQ ID NO: 4190427 - RNA, 66 nt, Human
caggauugguuucauaggcaugugaccuauguuguugcauagguacccguacuuagaaagauccug

SEQ ID NO: 4190428 - RNA, 66 nt, Human
caggauuuuuuaaagucccuagacuggugaccugaaccacuaauuagagaugauuaaaaaaucuug

SEQ ID NO: 4190429 - RNA, 58 nt, Human
caggcacaagaucggcuagauaucauaucuagguguuuagcucugacuaugugaucug

SEQ ID NO: 4190430 - RNA, 76 nt, Human
caggcaccaagagaaucacuaauuuauucaaagaugauuuucauuuacgaauagauaagugacuauuuggaaacug

SEQ ID NO: 4190431 - RNA, 55 nt, Human
caggcacccucugaggggaagccaguccugggcaggguauccccaggguggccug

SEQ ID NO: 4190432 - RNA, 68 nt, Human
caggcaccuuugugcaugggcaccugcuaggugcggcggugagaguguaugugcauaguagguguuug

SEQ ID NO: 4190433 - RNA, 57 nt, Human
caggcagaagaaguggaaggacuugacuugcugagucuuccagccuucaucucucug

SEQ ID NO: 4190434 - RNA, 73 nt, Human
caggcagagcgguggccagcagugaaaggcagacccacggugggguugguccucuggccgcagcucagcucug

SEQ ID NO: 4190435 - RNA, 72 nt, Human
caggcagaguuagagcaacuggcucaucgcuucauucuaguguauaucauguugcauuuaguuaucugucug

SEQ ID NO: 4190436 - RNA, 56 nt, Human
caggcagcagccacucugguauuuguguguuucgcaguccuacaguguguuuccug

SEQ ID NO: 4190437 - RNA, 67 nt, Human
caggcagcugugccuugcugcacgguggcugcaccuggccccugcagugcuccgccagccccgccug

SEQ ID NO: 4190438 - RNA, 70 nt, Human
caggcaggagccagggauuccaggaauuuguaaccuucuguguguccuggccugcucugguucuuucuug

SEQ ID NO: 4190439 - RNA, 70 nt, Human
caggcaggcugcuuuuuguucaagguaaacaaaaauauuaaaauuguuuaacaucgagcuagucugccug

SEQ ID NO: 4190440 - RNA, 62 nt, Human
caggcaguggcucacagcaacccaugugauuccgugauacuugcaaggagccacucugccug

SEQ ID NO: 4190441 - RNA, 55 nt, Human
caggccagaagccagaaaugcuuuaauguugccaacaaaguaugcuuuuggcuug

SEQ ID NO: 4190442 - RNA, 78 nt, Human
caggccagagagggcucacugagaaagcaguucuugagcaaagacaugaaugugugcucuugagccuucacaugucug

SEQ ID NO: 4190443 - RNA, 56 nt, Human
caggccagcuggaggggcagcugcugccgacugaggagcuggcccccgguggccug

SEQ ID NO: 4190444 - RNA, 94 nt, Human
caggcccaucucuguguccagggccacacggaagggaacauucgcaucugcaugcugcccauguugccuucgcuguggucagagauguggauug

SEQ ID NO: 4190445 - RNA, 64 nt, Human
caggcccauucuaggcuugcuaaaauuaauccuugagcagcuugaaauauuaggagauggccug

SEQ ID NO: 4190446 - RNA, 62 nt, Human
caggcccucugaguagcugcaaacauucucaaaauguugaaacagaacucucaaagguccug

SEQ ID NO: 4190447 - RNA, 129 nt, Human
caggcccuggguaccuggucucugauggcauggggucugugcaggaggugagcagugggcagcaggcugaaguggcuuccugcauggauccucugaugggccagggcugagaccugccucuguggccug

SEQ ID NO: 4190448 - RNA, 101 nt, Human
caggccgggcccgggggccaggcaguuguccucuguggagccuuaucggggcccacaggcccugcugccuugaccccacccgggccccaaaacucggccug

SEQ ID NO: 4190449 - RNA, 66 nt, Human
caggccguccucucagaaguauuuccucacugccucgaaaauaacccucuggauaggacaggccug

SEQ ID NO: 4190450 - RNA, 78 nt, Human
caggccuaaucacaugcagggccuccacccaggaugcugggagccuggccuggcucuguguguucugguuagguucug

SEQ ID NO: 4190451 - RNA, 55 nt, Human
caggccucaggggcucaggcugggcacucccugcccugcccugcccuggguccug

SEQ ID NO: 4190452 - RNA, 72 nt, Human
caggccugcagguugcagaggcggaagcgcuuccgcuuacccacacaguaucugccuuuguaucugggccug

SEQ ID NO: 4190453 - RNA, 62 nt, Human
cacuuauagaauaugggcugguuuuuaauuuuugagaauugaguaccuccagauucauagug

SEQ ID NO: 4190454 - RNA, 73 nt, Human
cacuuaucugcccauauuuaacuaugaagcacuaaaaguugauuaggagcucuguguauguggcaggugcuug

SEQ ID NO: 4190455 - RNA, 63 nt, Human
cacuucaaauaagcucuucucagcguauacuaccccccugaggagaguauguucugugaagug

SEQ ID NO: 4190456 - RNA, 79 nt, Human
cacuucacacuccgcuaccugcuaauuuugauggaaauugcuuuugacaugugcaguugguggccaggagcuuggggug

SEQ ID NO: 4190457 - RNA, 129 nt, Human
cacuucagccuucugacuagcugggacuacaggcauguaucacuacaccuggcuaauuaaaaacgauuuuuugaaggccgggcaugguggcucacgccuguaaucccagcacuuugggaggccgaggug

SEQ ID NO: 4190458 - RNA, 57 nt, Human
cacuuccuuuccagaaacgaaccagaaauauuuuguucauuuguggugaaugaagug

SEQ ID NO: 4190459 - RNA, 81 nt, Human
cacuucuuuaaauuuauagauuuauuugcaaaaaugggguauuuucaauaucccaagauacgcuguaagaagaaaaaagug

SEQ ID NO: 4190460 - RNA, 97 nt, Human
cacuugaaagauauuaaagugaaguucucagaugcuugccagcccaugaguuuugucuuagaauuucacuuugaagacaaugaauauuuuacaaaug

SEQ ID NO: 4190461 - RNA, 66 nt, Human
cacuugauugaauuuugaaaaucuagucucaauaggaauagaggauggaucaagauuaaaucugug

SEQ ID NO: 4190462 - RNA, 65 nt, Human
cacuugcagggagcaugccucccaucccuuugcaaaaggaggcuucagugugggacugcagcgug

SEQ ID NO: 4190463 - RNA, 75 nt, Human
cacuugcucugcuggguccuggugcugaguucuccacgggaggugacagcagaggggcccaauugccagcuugug

SEQ ID NO: 4190464 - RNA, 130 nt, Human
cacuuggaacaaucacuacagcagaggaauaaagccaacacugaagccguuaaaccuugcaucguuucuuguguguugacucuuggacuucaaggguguaugguacuucucagcugaaucagucagggug

SEQ ID NO: 4190465 - RNA, 97 nt, Human
cacuuggaauuuaugacuuauuucaucaguucucccuuagacccuccuuuagaaagauggucaauaagacacuggugaagaaaucaggucccaggug

SEQ ID NO: 4190466 - RNA, 76 nt, Human
cacuugguuugggaguacauaacauuuuuuaauuaaauuuguguuauuauuguacuuacacucaaagggccaggug

SEQ ID NO: 4190467 - RNA, 78 nt, Human
cacuuuauagaaugcauugauugcuggaaauaucaucuuacucauuccauguguuucuagauuucaguuuucuaagug

SEQ ID NO: 4190468 - RNA, 96 nt, Human
cacuuucaggugucuuuagagcaaugcucuacuccuugguaccaauuuucuguauuaguaaguucucgcauuguuauaaagaaauaccugagacug

SEQ ID NO: 4190469 - RNA, 91 nt, Human
cacuuuccgcccagaaucgugccuuaguccuaaguccuggucaccuccuacugcuggaugguauuggaguaggacuugcauguggacagug

SEQ ID NO: 4190470 - RNA, 72 nt, Human
cacuuucuggaucuucagagaucaccagauugauguuuaccauacugagaucaaaaucugaagauaaaagug

SEQ ID NO: 4190471 - RNA, 56 nt, Human
cacuuuuccuuuucucacggggauccagcugauuuggaaggagacugggaagugug

SEQ ID NO: 4190472 - RNA, 74 nt, Human
cacuuuucuaacagaugacaagaguguucagggagagguguuucuucaccuuuuuuuuacucuucucaaaagug

SEQ ID NO: 4190473 - RNA, 70 nt, Human
cagaaaacauuugcuuaugaagagaagagcuuauauucugugagagcuucacuggagagcacauuuucug

SEQ ID NO: 4190474 - RNA, 80 nt, Human
cagaaaauggggcaaaggccacacagagcagggagccaaccaagugggguuucuuuugcccuguggguuaguguccccug

SEQ ID NO: 4190475 - RNA, 90 nt, Human
cagaaaauguuggcugaaggaauaaauggauggaucuagguuuaugugucuguuugcucacuuauuuauucauucagcucaugcuugcug

SEQ ID NO: 4190476 - RNA, 81 nt, Human
cagaaacguauuuagaaggcugcugaaaagacuggcaagucguuugauauuuuuaagugcaaucugaaugcgggaaaucug

SEQ ID NO: 4190477 - RNA, 67 nt, Human
cagauaagacacgcaaauagguacggccucucuuucucuuuucugucucucucugugugucuuucug

SEQ ID NO: 4190478 - RNA, 85 nt, Human
cagauaaggaaacugagguuacgggacuuaaccaugugacuuugggcaaguugcugaacaguucugugcuccguuuccucaucug

SEQ ID NO: 4190479 - RNA, 70 nt, Human
cagauauaccauccaugggaaucucuguauuuucacaaucuaacccagggcuucgauggauggauggaug

SEQ ID NO: 4190480 - RNA, 67 nt, Human
cagauauagaacaaguuauuuaugcucaguucucuaggaaaaggauggaggcuuguucugagaugug

SEQ ID NO: 4190481 - RNA, 90 nt, Human
cagaucaucacauaagagucagggcuguucgcuggggccuguggcguuggcagcaguguccucagccagcagcuacuguguacauggcug

SEQ ID NO: 4190482 - RNA, 109 nt, Human
cagaucaucaggcauuagauucucauaggcacacaaccuagaacccucgcaugcucaguucacaacaggguuugugcuccuaugagaaucuaaugcugcugcugaucug

SEQ ID NO: 4190483 - RNA, 129 nt, Human
cagauccgauaccgcaaggaccgugugguggcgcgacgugcccccugcuucccgacggugaccagccuccaggaccuggccaguggggccgcgcuggccgccaccauccacugcuauuguccccagcug

SEQ ID NO: 4190484 - RNA, 57 nt, Human
cagauccugccaggcugaguugcucccacugcuucuccagccacucagcagggauug

SEQ ID NO: 4190485 - RNA, 64 nt, Human
cagaucuggguaggcuccgcugccggggaguccuuccccagccagcaggaccucugagaagaug

SEQ ID NO: 4190486 - RNA, 130 nt, Human
cagaugacccucaggccucggguggccacuuucugggggagcccuccaucccuugcggcagcuuuuccgagagucggaguggaggcgcggggcuggagggcucuccggagccgcccaccaggguccucug

SEQ ID NO: 4190487 - RNA, 84 nt, Human
cagaugcccuccaguuguuuguauuaacucuuucccacaaucaccagguauaagaugauagaaacaaaauggaauauggcucug

SEQ ID NO: 4190488 - RNA, 85 nt, Human
cagaugcgucucuccuucuugugccaagugacccugcuccuuccccgcaaggagcaccuggucuccuggcgcuggaggaggucug

SEQ ID NO: 4190489 - RNA, 98 nt, Human
cagaugcucuccuuuaggaauucccuggguuaccuuucaaggucucugcuuaccaaugccccaagccagaccugguaacucuccaggggagagugcug

SEQ ID NO: 4190490 - RNA, 104 nt, Human
cagaugugcucucagaaauaaugaauucuuuugcaaaguccauugaaguuaugggagaugguugccuuaaugaugaacacuuggaagaacugggaggaauacug

SEQ ID NO: 4190491 - RNA, 62 nt, Human
cagauguguguguguguguguguguguguaguuguauguguaugcacacauguaugcaugug

SEQ ID NO: 4190492 - RNA, 58 nt, Human
cagauguuggagauaggccaucccagccugggauuacuuauuuguacuaauaaaucug

SEQ ID NO: 4190493 - RNA, 63 nt, Human
cagauguuugucuauaugcuuucuuguuuauuaacaacugggaguaaauuagacaaagcagug

SEQ ID NO: 4190494 - RNA, 57 nt, Human
cagauuaguugugcuauggccuguucauuucaccuucuauagauacagcucaaucug

SEQ ID NO: 4190495 - RNA, 91 nt, Human
cagauuaugaaccaagcaguuauauuacucucagguaagcuaagguauaaguuuacugaggguuuuuauacucuuuguucuauguaacaug

SEQ ID NO: 4190496 - RNA, 92 nt, Human
cagauucuuaguuacaucuucgaguuggcuuuauuaaacugagaaaaauugaaguuaugaugcagcugcuugauuucaaguaacagaaacug

SEQ ID NO: 4190497 - RNA, 59 nt, Human
cagauugagucugggaaaaggcucucaaaugucccccagcccccaccaugcucaaacug

SEQ ID NO: 4190498 - RNA, 74 nt, Human
cagauugaucccauggucuauauagaggcacacacacugcagugauguuuuugacaagacccaugguugauuug

SEQ ID NO: 4190499 - RNA, 55 nt, Human
cagauugcagcaguuuaaugcaggguuucuuagccuuguugcuguugacauuuug

SEQ ID NO: 4190500 - RNA, 129 nt, Human
cagauugcuauugcagaacacuagucuagauauauuuuuaauggaggggacaguguuuaacaaaauaauugcuuaauaaauacuuucugaccaauuaauugauagugucuauguuuucuauaauauuug

SEQ ID NO: 4190501 - RNA, 73 nt, Human
cagauuugcuaauugcugaacuacuaucccucagaagaugagagaaagaacacacagcuauuaguaagggcug

SEQ ID NO: 4190502 - RNA, 60 nt, Human
cagauuuuucaagucagccaugguucgaaacccagcuucaacaccuggcugugugagcug

SEQ ID NO: 4190503 - RNA, 99 nt, Human
cagcaaaugcaggccucugcaggugguuuuggcugacagcaauaucuagcauuggugcacaggugguccaucugcacccugagacccugcagugugcug

SEQ ID NO: 4190504 - RNA, 67 nt, Human
cagcaacaaugggcuguccauugcuggcugguuuauccccaugugugacaguccauuugcauugcug

SEQ ID NO: 4190505 - RNA, 81 nt, Human
cagcaacauuauacacaguaugcaucuagaaauuaugccuggguauaaucaguuaaauauugaguacaaaugugagugcug

SEQ ID NO: 4190506 - RNA, 83 nt, Human
cagcaagguucuguggagguuuggaacauuuuggccuugaccaggucacaaugcuccuauaaaucuuuaacaaaacauaguug

SEQ ID NO: 4190507 - RNA, 75 nt, Human
cagcaaguccugaggcaggauggguuucagaguugguuaauucagaggcucaguuaugucaucagggucuuaaug

SEQ ID NO: 4190508 - RNA, 83 nt, Human
cagcaagucucuucugagcucccuggugugcccaccuccaugugaacuucaguaagggggauacaaagggggaagagauucug

SEQ ID NO: 4190509 - RNA, 73 nt, Human
cagcaauagauguuuuugcuuaccaguccuugauuuggugaccuagucuuggcagaacgcauuucuauugcug

SEQ ID NO: 4190510 - RNA, 61 nt, Human
cagcacagaguauuuuauugaugccguucaaaaucauaggcauccagugagaaauguguug

SEQ ID NO: 4190511 - RNA, 67 nt, Human
cagcacaggaacaaagaagacaauuugugauugauuucaagaguugucaaaagguucugugaugcug

SEQ ID NO: 4190512 - RNA, 73 nt, Human
cagcacagggcagggccacacccccugcuucccccuccaggagagucaggacaugcuggccgcugcuccgcug

SEQ ID NO: 4190513 - RNA, 59 nt, Human
cagcacaguccuuugcuuacugaaagucaaggcuucuggaaaagccgaggcugaagcug

SEQ ID NO: 4190514 - RNA, 85 nt, Human
cagcacaugcgucgacagaaaagcggucaggacccucauuggggccacugaggagaucagcuuuucuggaacacauggugagcug

SEQ ID NO: 4190515 - RNA, 55 nt, Human
cagcaccaggcagaccuggagcucaucgagagugcacacagguacccuggcgcug

SEQ ID NO: 4190516 - RNA, 59 nt, Human
cagcacccuuuccacugccuuguggccaggggggcccacggcagccuccgagggugcug

SEQ ID NO: 4190517 - RNA, 76 nt, Human
cagcaccugggccuucucaaugcacuggaugcucaaggucuccagggauacaggugagagugaugguccgggguug

SEQ ID NO: 4190518 - RNA, 66 nt, Human
cagcaccuguagaaagcauguagccuguauccauagguggguaccacaauauguuuacugagucug

SEQ ID NO: 4190519 - RNA, 76 nt, Human
cagcacggauaugacuuauucuauguaacaauaccucagcgacuggauagucagcaugaaauaagcagcuguguug

SEQ ID NO: 4190520 - RNA, 87 nt, Human
cagcacucagaccgcaggcuggcucccugaagguucaccucacagcggcucuccuggaucuucagccagcaggugcccuuggugcug

SEQ ID NO: 4190521 - RNA, 56 nt, Human
cagcacuggcacagaccucgacugugcccuucacagugaugguucuuuccggguug

SEQ ID NO: 4190522 - RNA, 70 nt, Human
cagcacuuuagcggaggcaucaucacuucauuucagcuccagggaaggagucuugcuuucugaaguucug

SEQ ID NO: 4190523 - RNA, 93 nt, Human
cagcacuuuugugaaaucguagcuugaaucacugguagcauuugguaagcuucacagagcugauuugauuacagugcugacaucacugugcug

SEQ ID NO: 4190524 - RNA, 88 nt, Human
cagcagaauuuuggaagggaaagaaaguacuucucauuuuagagaagcaaguucucuacuuucuuaaguuuccucuuagguuuuacug

SEQ ID NO: 4190525 - RNA, 69 nt, Human
caguagggauggcaauuauuauggcagcggaggugaaguaugcuagugugucuaugucuguuccuacug

SEQ ID NO: 4190526 - RNA, 61 nt, Human
caguaucauucuuaggagaggcaucucaauguuucugagccgcuuucuaugagauggacug

SEQ ID NO: 4190527 - RNA, 118 nt, Human
caguauccuucuuagagaaacaaugucucaguagaauaucacauuuuuuacuggacuuaaggaaauagcuuuaauuuagagggggauguggaggaagaguuucucagaaggaaggcug

SEQ ID NO: 4190528 - RNA, 113 nt, Human
caguaugagggcaaggcucagugucucauucauuauguauccuuaugacuuagcucagagccuggcacaucagagguacuuaaugaauggauaugcaacccaagccuuugcug

SEQ ID NO: 4190529 - RNA, 91 nt, Human
caguaugcugcucaauuuuuauuccacuuccacuaguuucucuucaaagagggcucugucuggaagggaacccuggguuggugcauuucug

SEQ ID NO: 4190530 - RNA, 66 nt, Human
caguaugucuuuugcuugcaaauagauugcucauugccaacugcuuccaagaaagagauagggcug

SEQ ID NO: 4190531 - RNA, 58 nt, Human
caguauucugaguacuuguucuuuuuguuagagagaugaacauuaguuucagauauug

SEQ ID NO: 4190532 - RNA, 71 nt, Human
caguauucugguuuuucaggugguagggagaagaucugauuguaguaccuuuacuugggcucagaaugcug

SEQ ID NO: 4190533 - RNA, 83 nt, Human
caguauuuuaucaaugugguuaaaauuugguugucuguguuuauucagaaaacucaguaguggcaacagccagaaaaauagug

SEQ ID NO: 4190534 - RNA, 58 nt, Human
cagucaacagagagcccgucaggugcucuaagagaguagggcagaccuuuggugauug

SEQ ID NO: 4190535 - RNA, 57 nt, Human
cagcagagaccaagugauuugagugucauuaaauucauuauguggcuuuuucuguug

SEQ ID NO: 4190536 - RNA, 79 nt, Human
cagcagaggcccuggggggugcccuggcgaggugggcaugcucccucuccccagcugagcugcccuuggccucuugcug

SEQ ID NO: 4190537 - RNA, 57 nt, Human
cagcagaguauggcacucaacuacuaaugucuucuucauuagugccauauuguguug

SEQ ID NO: 4190538 - RNA, 64 nt, Human
cagcagaugccaaguuguagucuugagugaggugaacucggacucacaaagcaggaucauguug

SEQ ID NO: 4190539 - RNA, 99 nt, Human
cagcagcagacuggcagggacauguuugccugcaggcuuagugguaacccucuggggcugccaggcaaccaagaaaccaaggcugugggucugcuucug

SEQ ID NO: 4190540 - RNA, 56 nt, Human
cagcagcaguggcugcagaacagcagauauugguguacugcaaaugcugcugccug

SEQ ID NO: 4190541 - RNA, 56 nt, Human
cagcagcaucaggucugugguuaaaaaaugaccucaacagauacccugugcuggug

SEQ ID NO: 4190542 - RNA, 61 nt, Human
cagcagccacuagagggcucacgaagcugcagccgcgggcugcccucuagcggcggugcug

SEQ ID NO: 4190543 - RNA, 55 nt, Human
cagcagcccacgcgugcuguccagccgucccugggcaucccgcaugugguugcug

SEQ ID NO: 4190544 - RNA, 79 nt, Human
cagcagccccguuaccacugcucgggccaguagagcugcccaacugcccagcgagcagagguggacgaagguccugcag

SEQ ID NO: 4190545 - RNA, 61 nt, Human
cagcagcuccucugcggcuaugcauucgccauucuucccugugucagccguggugcuguug

SEQ ID NO: 4190546 - RNA, 130 nt, Human
cagcaggauguuguucaaaauauguuucuaaagaacaugaguuaugaugauuucacacuugccaaaaagaauuauaauuccuguuugaaagcuacuggaagcucaaauguuucugacugugucagaucug

SEQ ID NO: 4190547 - RNA, 55 nt, Human
cagcaggccaauagcagccaauacucucagccucuuggccuggcuaucccugcug

SEQ ID NO: 4190548 - RNA, 65 nt, Human
cagcaggcccaggugcuggugaggggcccucauuuuuguuccugcagcuggagccaacgaugcug

SEQ ID NO: 4190549 - RNA, 62 nt, Human
cagcaggccuuccuguuguguccaccguacuaaugaugcacuaaggcagggaggcaagacug

SEQ ID NO: 4190550 - RNA, 60 nt, Human
cagcaggcucugaguggcugccagcccagccugcuggcugccuccaaagcaggccugcug

SEQ ID NO: 4190551 - RNA, 57 nt, Human
cagcagggauuauugaggagcuuguuuuauuuaagagcuucuucauuaacccuacug

SEQ ID NO: 4190552 - RNA, 106 nt, Human
cagcagggucuucaugauaaguuuucacauaaauauuaugccuagaaauaucuuguggcuggaguagauuuguugaaggaauuauuuugcuggacagaacuuggug

SEQ ID NO: 4190553 - RNA, 55 nt, Human
cagcaggguuaagugacucaccugagggcacacaguggagucuuuguuacugcug

SEQ ID NO: 4190554 - RNA, 94 nt, Human
cagcaggugagaucggcacuggcuccaaggaagagguuuuccaugcagauguggaaacugccaaaagaccuuggaugugagcugccaccugcug

SEQ ID NO: 4190555 - RNA, 75 nt, Human
cagcaggugcugagauggugcuggagauggcacaccugcccuaucagcucaguuucccacccucucucauugcug

SEQ ID NO: 4190556 - RNA, 89 nt, Human
cagcagguguuauuuuggucuucagcuuugcaugucuucaaguuuagcacgaugccuugcacaguuugagcacugacauacaucuguug

SEQ ID NO: 4190557 - RNA, 96 nt, Human
cagcagucaauuuguccauguuggucagaauuaggucuagaguagcaauuucccggcuuacuuccucuauuuucugagaaacaaaauugccugcug

SEQ ID NO: 4190558 - RNA, 77 nt, Human
cagcagucuuuaaugugagucccuuucaaggccaacaggaugagccuugugaaggucuuuagcauucagagcccuug

SEQ ID NO: 4190559 - RNA, 78 nt, Human
cagcaguuugaauucuccuuuguaauucucauccaggcaagucacucuuuuuuccugguauaaaugaucagaucgcug

SEQ ID NO: 4190560 - RNA, 63 nt, Human
cagcauagccagccuuucuucaagccuguguguaccccaucugaagaaaaacugguacugcug

SEQ ID NO: 4190561 - RNA, 60 nt, Human
cagcaucucccaggcauuugccccuuccugccaggaacagggcagaggcggaggugacug

SEQ ID NO: 4190562 - RNA, 76 nt, Human
cagcaucuccugggagaggcugccaucuugcauagcccuugcugcugccuggaggcuucuucucucuaaacugcug

SEQ ID NO: 4190563 - RNA, 57 nt, Human
cagcauggacagggguggcguucucuaugguguugggaccccgccuuugcccugcug

SEQ ID NO: 4190564 - RNA, 58 nt, Human
cagcauggggcugcaagcugcaaucccuggguccaggcugcugcuuugccacuaguug

SEQ ID NO: 4190565 - RNA, 62 nt, Human
cagcauucaugcaaagccaauuccagcuacagacugcagcuugggguugucuucugcagcug

SEQ ID NO: 4190566 - RNA, 79 nt, Human
cagcauuugaaugagauugcuguaacuucuagucccuaacuuggugcuuuggauuuuacagggaucccauaaaugucug

SEQ ID NO: 4190567 - RNA, 105 nt, Human
cagccaacgagaaguugaguugucaauugccucuuaauuauaguuacuuggagaagucuggaagaugacccugagggcaauuggaaacacagauuuucuuugcug

SEQ ID NO: 4190568 - RNA, 67 nt, Human
cagccaagcccugggguugcacaaggccacuuuguggcauaaugcccuggcucuaagaguaagguug

SEQ ID NO: 4190569 - RNA, 70 nt, Human
cagccaaggcaacguuggugucaggaugcagcacccaggcggccuggccaucauuuugccauaugugcug

SEQ ID NO: 4190570 - RNA, 72 nt, Human
cagccaaugagguuaaugcugauagauaauguccuauggauauuuuagaagacaguauugauccauugucug

SEQ ID NO: 4190571 - RNA, 72 nt, Human
cagccaccagaccugauagagaaggaacacugauugaaccaaaaugguggagcuauacgggauggcuggcug

SEQ ID NO: 4190572 - RNA, 78 nt, Human
cagccacuggacucuggagguuucguauuucuacugagaccauuucucaaccuaugagcuuccaguguugcaugguug

SEQ ID NO: 4190573 - RNA, 104 nt, Human
cagccacuugguguccucuuugauuccaggcacauguuugaacaaauaggaaguugucaaaaauauguugauugguagguuugaauggcuaccaagagaggcug

SEQ ID NO: 4190574 - RNA, 61 nt, Human
cagccagauuuuuuuagcuagcauuguucuucaaugaacagcaguugaaauaauuuguuug

SEQ ID NO: 4190575 - RNA, 63 nt, Human
cagccagccucucaaccaugcagagccaauuacuucaacaugggcccgugagaggcagggcug

SEQ ID NO: 4190576 - RNA, 116 nt, Human
cagccaggcugcaggggcuggaagaaauuggacaccagcaaggcugugaggagggaugacucucccauagaccugcguggugggcccucucggccagccgcucccagcucugguug

SEQ ID NO: 4190577 - RNA, 78 nt, Human
cagccaggggcacccugcccagaaaagccuggcguggucccgcguccucaggcggugaggaggggccaccugcagcug

SEQ ID NO: 4190578 - RNA, 70 nt, Human
cagccagugcuccuccuccaugccacacugcaccuccuagcccuggcaguggauaggggagcgguugcug

SEQ ID NO: 4190579 - RNA, 82 nt, Human
cagccaugcccauuuguuuauauacugucuaaggcugcuuuugccauggaacaguacaguugaguaguuguggcagagacug

SEQ ID NO: 4190580 - RNA, 60 nt, Human
cagccauucuaacacugccagugcagaggggccucagacgcuggaguguagcaguggcug

SEQ ID NO: 4190581 - RNA, 91 nt, Human
cagcccacaccgaaaaccuugagcccugaucugcuuccaaccaaugggguggccaggggagcugucuggggacucuggguggugcagguug

SEQ ID NO: 4190582 - RNA, 62 nt, Human
cagcccagaacucacgucuccaguacuccacgcccuccaucuggacuggugaguuuaggcug

SEQ ID NO: 4190583 - RNA, 60 nt, Human
cagcccagcacugggggcccagcccacaaacgaagggaaccccuggaaggugcuggggug

SEQ ID NO: 4190584 - RNA, 90 nt, Human
cagcccagcucaacauagccuugugcugcccaucccugcuacuaaggcuugggauccauccgugcagcagagggaaugaggcugugggug

SEQ ID NO: 4190585 - RNA, 69 nt, Human
cagcccagcuccaggugaauccucucacccuuuguggggucggaggcccugccuuggagcaucuggcug

SEQ ID NO: 4190586 - RNA, 68 nt, Human
cagccccagagcccugugcccaaggauggucccgaacuaguggacagcaggggccagaggcggggcug

SEQ ID NO: 4190587 - RNA, 130 nt, Human
cagcccccggcggcccuugccgauggccaggcggggccgaccgcgguucaggccguccaggagggagcaggccuggcagagcgcgcggcuggccagcgccccacagcgggggcaggcgccggggcgcggg

SEQ ID NO: 4190588 - RNA, 77 nt, Human
cagccccggcccuguccuggcugucuccgggccuuuguuguucgaguuucgccuuaggacugaaggggccuuuguug

SEQ ID NO: 4190589 - RNA, 89 nt, Human
cagccccuaagggaguaauuacagauagacuuugaagcugcuuaauaacuggcagcaucauagauuuuuuguaaucaccugagaagcug

SEQ ID NO: 4190590 - RNA, 61 nt, Human
cagcccugcugccuuagugccugccugaaucucuugcuccaggcgccuggccucauggcug

SEQ ID NO: 4190591 - RNA, 80 nt, Human
cagcccuuccuuugcuuaggaguuucaggcucucaacugggauagguggguucuggucucuugaggugaggaagaagcug

SEQ ID NO: 4190592 - RNA, 69 nt, Human
cagccgccucuucugcauccugucaacucugauuaguuagaguuuaggcucaaaagaguugguggacug

SEQ ID NO: 4190593 - RNA, 117 nt, Human
cagccgcuuuccccucaggcccucuguuucauggccuuccugccgugguucucccuggggggccuuccaggucccagacugggcagcaggccuguagcacugacagacaggcggcug

SEQ ID NO: 4190594 - RNA, 74 nt, Human
cagccucccaaagugcuaggauuacaggcgugagccaccaugccuggcuccuacggguauuuugccagcagcug

SEQ ID NO: 4190595 - RNA, 75 nt, Human
cagccucccaaagugcugggauuacaggugugaaccaccgcgccuggccuaauuccagcauuuaaaaacaaucug

SEQ ID NO: 4190596 - RNA, 90 nt, Human
cagccuccuccaugagggacagaccuuauuucucuauuaauauaaggaaaauagagcacaaauuaguuggucuuuuagagaaacaggcug

SEQ ID NO: 4190597 - RNA, 73 nt, Human
cagccuccuuucuuccagcucuggccucuccuacacaccccagguagcucugccaagcuggaugaagagguug

SEQ ID NO: 4190598 - RNA, 61 nt, Human
cagccucuccacaauguguccugagaagagcuaggggaacuggacagaguggacgaggcug

SEQ ID NO: 4190599 - RNA, 56 nt, Human
cagggcaguaacgggaacaucuguguccucuccacagauccaccgugggcgcccug

SEQ ID NO: 4190600 - RNA, 60 nt, Human
cagggccacacagaaccuccuggugggacagggcccagacccaggcuucuguggucacug

SEQ ID NO: 4190601 - RNA, 68 nt, Human
cagggccaggggccgucacucaguccauggggcagacccauuggcaaggcugcggugucuguccccug

SEQ ID NO: 4190602 - RNA, 60 nt, Human
cagggccauuggcguggcugucugccagcuggcaggagcagcauguuaaaugccguccug

SEQ ID NO: 4190603 - RNA, 55 nt, Human
cagggcccaagacacaaugaggacguuuguuucugauguguaucuuagggcccug

SEQ ID NO: 4190604 - RNA, 63 nt, Human
cagggcccaggccacuggguuggcuucucuacacucuccccacaaccugccugaugggccuug

SEQ ID NO: 4190605 - RNA, 56 nt, Human
cagggccccagaaucccccagcaccuaccccugugggaaccugccccaggccucug

SEQ ID NO: 4190606 - RNA, 66 nt, Human
cagggccccagggaugucugcugaagugagaacaaggacagagaugcccccugggguuuccuccug

SEQ ID NO: 4190607 - RNA, 79 nt, Human
cagggcccugcgcuuagaagggcucugagcuugguuuaacuaugugaaacuguucauccuuuuugaacaaagggcccug

SEQ ID NO: 4190608 - RNA, 58 nt, Human
cagggccguguuacauguaacaaucuuucaagauucagugcuguaauacgcuaaacug

SEQ ID NO: 4190609 - RNA, 86 nt, Human
cagggccuuccauugcucuuuucuaggugggcagccuauaggaaaggggauuuacaacaguggaaaggagcaguaaaagugcugug

SEQ ID NO: 4190610 - RNA, 119 nt, Human
cagggcuaaccaaaaugauuugaaugcuagaucccguaaagcauggguuaugcuuuggcucuggucuuuagcaccaucacagcuguaugucucuguucugcauucagauuuuauuccug

SEQ ID NO: 4190611 - RNA, 62 nt, Human
cagggcuagugacaccccagucaaggugguccagagcaucaggagucgugucacaggcccug

SEQ ID NO: 4190612 - RNA, 58 nt, Human
cagggcucccaaauaucucuucuuuauacaauucaaggaccagaugacagggguucug

SEQ ID NO: 4190613 - RNA, 57 nt, Human
cagggcugcuguguggauucaauggcuuaucuauguaaguguccagcacaguaucug

SEQ ID NO: 4190614 - RNA, 57 nt, Human
cagggcuugaucugcauccugcuaguccgugcccucccauaugcaaaugaagcccug

SEQ ID NO: 4190615 - RNA, 98 nt, Human
caggggaagcggagggagccucgugcugggccugcuucuugggucuuucuucugggaggugugcacagcgugcugacagccuccuucaaacaucccug

SEQ ID NO: 4190616 - RNA, 56 nt, Human
caggggagugagucccucucugugacuccucagagcugguugacagcauuccuuug

SEQ ID NO: 4190617 - RNA, 55 nt, Human
caggggcaggugugagaucaucuuguaagaaaacaagcuucucccuugucaccug

SEQ ID NO: 4190618 - RNA, 64 nt, Human
caggggcgcuuggaaagcagcgugggccgucgucaguccugggcugugcagccaagugccucug

SEQ ID NO: 4190619 - RNA, 68 nt, Human
caggggcugcugcaguccagcauuugugccagcgaccgaggcugcagagaccccgcagugaggcccug

SEQ ID NO: 4190620 - RNA, 65 nt, Human
cagggggauuuuaugggcucacauuuggaaggcauuuugaaggucauccaggccaugaaccucug

SEQ ID NO: 4190621 - RNA, 75 nt, Human
cagggggcguuaugaaaggugcuaacagaugcggauuucagcuuugucauuaaaaugcuucucaaacgccaccug

SEQ ID NO: 4190622 - RNA, 70 nt, Human
caggggggaccucuccaggguacagcaggcuccauguuugggauccaucccuggagaggacucaccccug

SEQ ID NO: 4190623 - RNA, 56 nt, Human
cagggguauucaagguaguuuaccucaucaaguugugaauuaucuucugaccgcug

SEQ ID NO: 4190624 - RNA, 59 nt, Human
caggggucacugagugagccuccucugccccucaugggagagcuccucgugacucacug

SEQ ID NO: 4190625 - RNA, 82 nt, Human
caggggugagcugggguccagggguuugccggugaguggguggaugaagguggaacccgagggccccaggcucgggccgcug

SEQ ID NO: 4190626 - RNA, 76 nt, Human
caucaagccuguguuucugcuagucucaugugccacaagguaacaggccaggcuuggaagaacaguggcaucgaug

SEQ ID NO: 4190627 - RNA, 108 nt, Human
caucaaggcccucuaucacaggccuccaguguguguccagcugcugucagcuacacccugcuacucauagcuggagaucuacuguggguuuugcccgccugcuuuaug

SEQ ID NO: 4190628 - RNA, 90 nt, Human
caucaauugauuaguaguggcuuccuggagugcugacuugacaagaagucaugcugcguuggcaggaaagcacacuaugauugguuagug

SEQ ID NO: 4190629 - RNA, 73 nt, Human
caucacagaagagauauugacagagguuugugcauuacaagcacaucugauucuauugaugucuucugagaug

SEQ ID NO: 4190630 - RNA, 90 nt, Human
caucacaggauucagcuucugagcaguaauagauuuuauuacucuuauuauaaugcauauuuagaagcugaaagagaaaagcugaugaug

SEQ ID NO: 4190631 - RNA, 75 nt, Human
caucacaucccucccagagcaagccauugaaauagauauuuuaaagaagcuguggcucugggagguggaguaaug

SEQ ID NO: 4190632 - RNA, 56 nt, Human
caucacuggcaucaugggagggcucccauauggggugcugccaucaugcagagaug

SEQ ID NO: 4190633 - RNA, 85 nt, Human
caucagaaaccuggacaggaagaauugggagccugauccaauguagcaagacccauuaggcucugaucugugccagguuugugug

SEQ ID NO: 4190634 - RNA, 89 nt, Human
caucagaagacagcagguccaauugcgcuaaaaucuaaagucaaguuuagagcagcggggccguggacccaucagcugcugaucuggug

SEQ ID NO: 4190635 - RNA, 128 nt, Human
caucagaaucaccuuaugggcuugguuaaauacaaauugcugggucccacccaagauguuugauucaaugguugugagguggggccugauaauugacuauucuaacacauuuucaggugaaguugaug

SEQ ID NO: 4190636 - RNA, 121 nt, Human
caucagaaucacguggaagucuuguuaaaacacagauugcuugauccaugcccaagguuucugauucaguaggucuggaauggggcuuggauuuuuagcaaauuuccaggugaugcugaug

SEQ ID NO: 4190637 - RNA, 129 nt, Human
caucagagucaccuagaggacuuguuaaaacauggacugcugggccuaacccacagcguuuccgauuagaugggucuggggugaggcccgggauuugcauuucuaacaagcucccuggugacgcccaug

SEQ ID NO: 4190638 - RNA, 82 nt, Human
caucagccagcacuuuuaggagcuaccagggaagcaaaaugcuacgcuuugcuuuguggugguucuuccaagucuggaaaug

SEQ ID NO: 4190639 - RNA, 64 nt, Human
caucagccuuucuguuuccuaaggucagcugugugacaucuaaaccugggcacagagagagaug

SEQ ID NO: 4190640 - RNA, 127 nt, Human
caucagcgucaccaggagggcuuguuacaauacagauugcugggccucagccucuagucuuauuuagcuggucugagguggggcccaccaauuugcauuucuaacaagcuugugggugaugcugaug

SEQ ID NO: 4190641 - RNA, 104 nt, Human
caucaggugggagccagaaaugggguucuguggcuggcucagcuggugaccauuuggagguccuugagcaggucaagacuccagcuucagcuuuuucauuugug

SEQ ID NO: 4190642 - RNA, 130 nt, Human
caucaguaucacuugguaauuuguuagaaaugcaaauucuuggcccucaccccaagccugguaaaucagaagcucuggagguugagcccagcaagcuguaguuugauaaaaccuucaagugauucugaug

SEQ ID NO: 4190643 - RNA, 65 nt, Human
caucaguguugauccaccagcaauuuucaggaagcagauuuugcaaaggagaucaacucugugug

SEQ ID NO: 4190644 - RNA, 63 nt, Human
caucauaauggaaagacaugguaaugcugccugcagcuuuauauguuguuucuccauagggug

SEQ ID NO: 4190645 - RNA, 79 nt, Human
caucauacugugacagaguacuuaaacuaucuuaacuugggcaguuuggaagugcuugugauaggaaauauuuguguug

SEQ ID NO: 4190646 - RNA, 79 nt, Human
caucauauaugggaaauaauagaggcucuuuaugaugauacuguucuguagagaggauuuguuuuucuccucucugaug

SEQ ID NO: 4190647 - RNA, 64 nt, Human
caucaucugugcuggagagccuugaguauaucacuuuacuacggagauuccagccagguugaug

SEQ ID NO: 4190648 - RNA, 57 nt, Human
caucaugcaggcagccuuuaguaagcgucacaugcuaccuaaagugguuugcguaug

SEQ ID NO: 4190649 - RNA, 98 nt, Human
caucauuuaguugaaugcaauaaaaaaugcagcuaguaugagaaagucuugauucuuguguggaacugcuuuucuaggugcuuuaaaauugacugaug

SEQ ID NO: 4190650 - RNA, 64 nt, Human
caucauuuggcuuuagggccugugcucugaaacaugcaaaccccuugagacacagccaaagaug

SEQ ID NO: 4190651 - RNA, 69 nt, Human
cauccaauuacuaugauuugaucauuacacacugcauaacguguaaugaugucugagaaguauggggug

SEQ ID NO: 4190652 - RNA, 63 nt, Human
cauccagauggcugugaaggucacacccuacuccuucugggagaggacucacggccauugaug

SEQ ID NO: 4190653 - RNA, 59 nt, Human
cauccaggcugguucucucaguucacucaagccuaugucaugcuguggccaccuggaug

SEQ ID NO: 4190654 - RNA, 76 nt, Human
cauccaugaagagcugagucugcagucgccaugggggugaacuaggaaacugcagucucaguugaguccugagaug

SEQ ID NO: 4190655 - RNA, 86 nt, Human
cauccauguguguauguguaaaaucugauuaauacucaaaguuaaugaguauauggggaauugcauaaucucauaugccacugaug

SEQ ID NO: 4190656 - RNA, 62 nt, Human
cauccauuucuaucuugcugaggacgaaguacugugucucagcuagaauagacaauggcuug

SEQ ID NO: 4190657 - RNA, 69 nt, Human
caucccaaggcuuagguggcucccugucuuggacacuccagcaggagcaaugcuuugguccuggagaug

SEQ ID NO: 4190658 - RNA, 96 nt, Human
caucccaccuggccagagauguggccugggcugagccugggcugugucugcucacaugcacggcugcacagccaggcccuggggccaggaaaggug

SEQ ID NO: 4190659 - RNA, 85 nt, Human
cauccccccaaccuggagaagcagcuuagaaucuacccgccaccucuuaggugacucuggggcgcuacuccaacuuggggcugug

SEQ ID NO: 4190660 - RNA, 90 nt, Human
caucccccugcccuuuucuuuucuaccaauaggauucacguaacaagaaugccuuagaggauagugaagccacaaaagggaaggggucug

SEQ ID NO: 4190661 - RNA, 61 nt, Human
caucccugccugacucugacguacaaagguguaauuagaacaguguggagcaggcaggaug

SEQ ID NO: 4190662 - RNA, 85 nt, Human
caucccugggcccugccugucaucgccugcgcccgccucuucccuugaagucgguguccagauacggagcgguggcuuggugaug

SEQ ID NO: 4190663 - RNA, 62 nt, Human
cauccguauuuccauguuguauaauuuuccuuaacauuucuuauaguguggauaugcugaug

SEQ ID NO: 4190664 - RNA, 125 nt, Human
cauccuauccauuucauuucaugauuccauuacaucauuucacuuagaugaagugauaagguuacuugagaugagaugaaaugaugagaugaaaugaugaaaugaugagaugaaaugaugagaug

SEQ ID NO: 4190665 - RNA, 77 nt, Human
cauccugaacagauccaucucucagaaagagacucauauuuucugagcucaugagacugauguauuaaauuaggaug

SEQ ID NO: 4190666 - RNA, 61 nt, Human
cauccugcacauuaaacuucacgcuaaaauuggcuuuggaggaccuaugugcaauagggug

SEQ ID NO: 4190667 - RNA, 60 nt, Human
cauccugcuauuaaauugaugugguguccuucccaguaucacaucagagggcauaggaug

SEQ ID NO: 4190668 - RNA, 68 nt, Human
cauccugguuaccccauagucaugccaaucuaaguuuauggcacugacugacaguggugccaaggaug

SEQ ID NO: 4190669 - RNA, 77 nt, Human
cauccuuaguuaucacuaacuuuauuacagcuaauuuucaauauauuaucaggaggaaguuaguguaaugcagggug

SEQ ID NO: 4190670 - RNA, 60 nt, Human
cauccuucauacgacugacccuggagcugaaggccagguuuugcaguggucugagguaug

SEQ ID NO: 4190671 - RNA, 62 nt, Human
caucguggucaucauuaguauuauuacuauuuuggugaguugaucaaugaugcuacuggaug

SEQ ID NO: 4190672 - RNA, 66 nt, Human
caucuaaauuugacuccaaggagcaccagcacuauuaucaacucccacugcaguuaaauuaagaug

SEQ ID NO: 4190673 - RNA, 65 nt, Human
cagccucugaaagaguuuaguauuauagaauucuugagaaauaaucugagcuauuucaugagcug

SEQ ID NO: 4190674 - RNA, 77 nt, Human
cagccucugcaacuccgccuuggugcccccgcacguuccaggggcagccacacugauggauugcucagaacgggcug

SEQ ID NO: 4190675 - RNA, 86 nt, Human
cagccucuucucuguguaggauuuccuggagccuuccaguaagcuggugggcucauuaaagaaguccugcguugagcuagagucug

SEQ ID NO: 4190676 - RNA, 57 nt, Human
cagccugaaucacuucugagcccuuuggggauggggaucagcccugaguccaggcug

SEQ ID NO: 4190677 - RNA, 76 nt, Human
cagccugccaaagugcuaggauuacaggcaugggccaccaaacccggccaggucugucuucuuagcucacagguug

SEQ ID NO: 4190678 - RNA, 59 nt, Human
cagccuggcacccuucuucagagcuccucccaggagcccuggccuuggggcacaggcug

SEQ ID NO: 4190679 - RNA, 90 nt, Human
cagccuggcucaguucucugguaaccuguugagugacagcaucuuuauaugcucauuagacagguauacuuuauacaacgcagccggcug

SEQ ID NO: 4190680 - RNA, 55 nt, Human
cagccuggcuguaaccucauggucacaaagauggcugccguaacagcuaaggcug

SEQ ID NO: 4190681 - RNA, 61 nt, Human
cagccuggugggcaguccgacacguucgguaauguaccaagcucugccgccuuucaggcug

SEQ ID NO: 4190682 - RNA, 91 nt, Human
cagccugugugugucaugcccagcacaaacccucccgggcugaagccaguucccagaggcaaagucuggauguggaaaaugcaccaggcug

SEQ ID NO: 4190683 - RNA, 55 nt, Human
caggaacccaaugggccaggccuugcucugccaggccauccugcaugggguccug

SEQ ID NO: 4190684 - RNA, 85 nt, Human
caggaacuagggaucagcauguccuacccagugaagcccuccugggggucuucucugcccauaggaaaugccuccuucuauccug

SEQ ID NO: 4190685 - RNA, 64 nt, Human
caggaagcacagugaggagaccgcgcggcagagucggccccaucuguguucuccuggcuucgug

SEQ ID NO: 4190686 - RNA, 59 nt, Human
caggaagcaccagcccggccccaucccaccaucugcucugggugcccuucuggguccug

SEQ ID NO: 4190687 - RNA, 77 nt, Human
caggaagcuagauuuuguugcuuaacaaauagcucacaaaucucuaugucuuaaagcagcaaaaauuuaucuuucug

SEQ ID NO: 4190688 - RNA, 65 nt, Human
caggaagcucaggccagcaucugugauuuaugcugcaccagucuggaauuuggccugagcacuug

SEQ ID NO: 4190689 - RNA, 108 nt, Human
caggaagcuuuuauuuuagcagcuaaaaggaagagaaagauuuacuagcauaauagcuucuggacgagcuacuauuaauaguagauuugauuccugcugucuguccug

SEQ ID NO: 4190690 - RNA, 66 nt, Human
caggaaggcagguuggggccuggcuacaguacccacauagucaguggcuccgagccugguucucug

SEQ ID NO: 4190691 - RNA, 89 nt, Human
caggaagucccugugucucuuuguccuagagcucucauagaacuccagacggaucuggcugcugggucaugaugcagaaugcuaaccug

SEQ ID NO: 4190692 - RNA, 55 nt, Human
caggaaguggggucauggaguagggaucccuugccaguccagcccacauuuucug

SEQ ID NO: 4190693 - RNA, 67 nt, Human
caggaagugguguucuuauugggacuaauauguguuauggcccuagaaccagcagaagccacuccug

SEQ ID NO: 4190694 - RNA, 62 nt, Human
caggaaguuguguguucgaggcacccagcacaucagaauugccucccacaaauaccuuccug

SEQ ID NO: 4190695 - RNA, 60 nt, Human
caggaaucugggaaguagauaguuugucuccaguugccugccugcuuccuucccucacug

SEQ ID NO: 4190696 - RNA, 70 nt, Human
caggaauguacaaaguuaaaccuauauacacaccagguguaugcggucagggguacgcuuuguuuaccug

SEQ ID NO: 4190697 - RNA, 82 nt, Human
caggacauauuuguugggucaagaagcuaugcccuuggaaggaucaaaucaugcaggcuccuuaucuuacaacuuuguuuug

SEQ ID NO: 4190698 - RNA, 75 nt, Human
caggaccagaagcaguuauuuuuugcacauuauaacuggcuaaugucacaaaaaucaguaauugcugaaaucuug

SEQ ID NO: 4190699 - RNA, 89 nt, Human
caggaccauuuugucacccaggcuggagugcaguggcgcgaucucggcucacugcaagcucagccucccagguucacaccauucuccug

SEQ ID NO: 4190700 - RNA, 114 nt, Human
caggacgggucugcaguugggcagggagcuggaaccacacacccucucuccagacuucuuggucaagugaucuguggccuccuacucugcuccagcugcugauccugugucuug

SEQ ID NO: 4190701 - RNA, 79 nt, Human
caggacugagggauucagcguggccucaggcacuuugcuuccaguugguguaagaugucagcugagcaccuugguucug

SEQ ID NO: 4190702 - RNA, 71 nt, Human
caggacuggugggaggaugggcaucagccagggcugaacacugagucuaccucccucugggacacagccug

SEQ ID NO: 4190703 - RNA, 77 nt, Human
caggacuuguccaagggauaagggugggacacugagagcaucagcugcaauacccuucuuccuuccacagaggacug

SEQ ID NO: 4190704 - RNA, 86 nt, Human
caggagaaaguugugaugcagauaugcaaacuguaguuugacaaaguuauuaaaauugaguugcaaauuugggugcuaucuuccug

SEQ ID NO: 4190705 - RNA, 70 nt, Human
caggagaagaugcccagccaguuuagagaaaguggucccaacucaaggcuggcucggcuuuucuguccug

SEQ ID NO: 4190706 - RNA, 72 nt, Human
caggagaauaaaaccagcucugcaaaaugucaucuuauaggagcauacuguuugagcuggucuguucacuug

SEQ ID NO: 4190707 - RNA, 60 nt, Human
caggagacaaguuagcagcugauggggcagauauguuuguuuagcuagcgcuugguccug

SEQ ID NO: 4190708 - RNA, 90 nt, Human
caggagacuuggggauuuaucucacagccugagaagcacgugggaaaaauagcuacucaaaacuuugugaagaaaauuccuaauuugcug

SEQ ID NO: 4190709 - RNA, 77 nt, Human
caggagagaaaggcugguggugucauuuggccauggaguggcaggaacacagauggugccggcguuucagacuccug

SEQ ID NO: 4190710 - RNA, 82 nt, Human
caggagagaaaguguauauauuuucauggggaacacuuacuuuccuuauuacaugcuguguauuuuacucuuucuacuucug

SEQ ID NO: 4190711 - RNA, 71 nt, Human
caggagagaggggcugaggucccgaggcuggaacccacacuucugccuggaccggcagcccuccuuucuug

SEQ ID NO: 4190712 - RNA, 55 nt, Human
caggagagggguuccagacaaguugacaaggaaaccuggagaaagccucucccug

SEQ ID NO: 4190713 - RNA, 56 nt, Human
caggagcaguuagaagcccacugcacgguccacaaaggugcugcugacugcuucug

SEQ ID NO: 4190714 - RNA, 82 nt, Human
caggagcuggggcuggaacuucuucuggcauuugcuguucauucacaacugccauauuaggagcuucagccaucaguuguug

SEQ ID NO: 4190715 - RNA, 67 nt, Human
caggaggaaagagggagagagggggcccaucuguucaugguguccugccucuugccuucuucaccug

SEQ ID NO: 4190716 - RNA, 129 nt, Human
caggaggacuggaaguguuugucuaauuaucauuuacaauugagucuauuguaugccguguaaauuuaauuuucuuugcuuuuugugucagaugagaccaacugaaaagugauuacuucaguaaccuug

SEQ ID NO: 4190717 - RNA, 59 nt, Human
caggaggccaacugugggacuugagcauacaaagauuuuaguacccaccuggguuccug

SEQ ID NO: 4190718 - RNA, 121 nt, Human
caggaggccuuccugucccuccuccucugaaggcugagacgugcggccuugccucggcuuugccugcuuguaagacacaguccgcacucucuaccuccaaggaaccccgggguuccuccug

SEQ ID NO: 4190719 - RNA, 64 nt, Human
caggaggggcaguagugauggcuccgaggaacgucuugucugccagagcugccugcccuugcug

SEQ ID NO: 4190720 - RNA, 56 nt, Human
caggagguggagcucaagugguaaugcucacuugccugcccacuguucaccucuug

SEQ ID NO: 4190721 - RNA, 56 nt, Human
caggagguuguaagagcaggcccuacauuuguucgcugggcucuuggaggcucuug

SEQ ID NO: 4190722 - RNA, 77 nt, Human
caggaguagaaccauuaagcugguccagacaaguuggacuccaccauuucaacuuccagcuuucugucuaaugccug

SEQ ID NO: 4190723 - RNA, 55 nt, Human
caggaguccagagugucauuuucugaagccacaaauucccacuguggagcucuug

SEQ ID NO: 4190724 - RNA, 59 nt, Human
caggagucccugggaugcccuucuggggacacagcccugaaagguaaucugagggccug

SEQ ID NO: 4190725 - RNA, 68 nt, Human
caggagucugccauccucaccagagcagcuuccuuguagucuguuuuauguguuugguuuccucauug

SEQ ID NO: 4190726 - RNA, 68 nt, Human
caggaguguuccauccaagcccugcccaguucccaagggggcaggaagcucggagagggcaaauccug

SEQ ID NO: 4190727 - RNA, 99 nt, Human
caggaguuuagaccaguguuuuagaugguggugucugcccugguagcuguaaaguagcccucgugcauccaucauuuagaauauuuacuuuugcuccug

SEQ ID NO: 4190728 - RNA, 65 nt, Human
caggaguuuccucuggccuauaagccuuuuucuacuaccugguuauggcagugagaagacuccug

SEQ ID NO: 4190729 - RNA, 85 nt, Human
caggauagaaggaggcauuuccuaugggcagagaagacccccaggagggcuucacuggguaggacaugcugaucccuaguuccug

SEQ ID NO: 4190730 - RNA, 74 nt, Human
caggauauaaugaaugcagaaaaggaugagcauuuuacagugggagcuuccuuuuucugcaugacauaucacug

SEQ ID NO: 4190731 - RNA, 60 nt, Human
caggaugagcaugugacucaaaccaagcuaaucaggucuagcuagaguuaauguucccug

SEQ ID NO: 4190732 - RNA, 65 nt, Human
caggaugcuguggaaaugccuaacaugagguucuaaucucauccaagggcucugaggcaagacug

SEQ ID NO: 4190733 - RNA, 80 nt, Human
caggauggaagauguaccagguauuacaggagcagguaagagggcuauguaaccauauacugggugcaaugucuaaacug

SEQ ID NO: 4190734 - RNA, 118 nt, Human
caggauggcaaauugaaaaacacguaaccauguucuacagauggaaaggggugcuugguuauuaugaaggcccccucgcaagcgugugggacauggguguguucucuggguuguacug

SEQ ID NO: 4190735 - RNA, 98 nt, Human
caggauggccauguuggugcagaugggaugccccuugggccugcuuccaaggccuucuguggucuggcaucuguccaucucuccagcauuaucuccug

SEQ ID NO: 4190736 - RNA, 82 nt, Human
caggauucaggguauuuacacuaugagcacagaaaaggccuuuccuugguuccuggcucacaggugagaugcaugaaaccug

SEQ ID NO: 4190737 - RNA, 129 nt, Human
caggauuuccuaccauuuuucucuuucugaugaaauuaacuucccauaguuggucagcaggauaaucuaauuuuagccaaucagcuugggagcugcuguugaccucacaaagggagagaaagguaucug

SEQ ID NO: 4190738 - RNA, 86 nt, Human
caggcaaaggagaaguaggccgggccacugugggucucccucugggccaugccugacucuggccaggccagcucugacuuagccug

SEQ ID NO: 4190739 - RNA, 61 nt, Human
caggcaacauggugaaacccugucucuacaaaaaaugagccaggcuugaggaaugugccug

SEQ ID NO: 4190740 - RNA, 64 nt, Human
caggcacacagcuugcauaaauccugaacacauuccucaaggcuuuaugaugugugugugugug

SEQ ID NO: 4190741 - RNA, 59 nt, Human
caggcacagagagaauaccuuuugucuuuuccuccagaaguugaguuuuugugugucug

SEQ ID NO: 4190742 - RNA, 91 nt, Human
caggcaccaugccaccacgcugggcuaauuuguguauuuuuuauuagagacgggguuucacaauauuggccgggcuggucucgaacuccug

SEQ ID NO: 4190743 - RNA, 56 nt, Human
caggcacuuuggugagccacgugacccugcgccugcugaagccagaguguguccug

SEQ ID NO: 4190744 - RNA, 76 nt, Human
caggcagaagcaaucacagaguccagcagaugaaaaccgucaacugcuuuauucuagugauauagauguauaccug

SEQ ID NO: 4190745 - RNA, 61 nt, Human
caggcagacauuuuugacauaguugcauagcuagaaauacauaacagauaaugucugcuug

SEQ ID NO: 4190746 - RNA, 65 nt, Human
caggcagagacccucuccuaaaauagaagcaggaaauuaucuuagguguagguguuugcugucug

SEQ ID NO: 4190747 - RNA, 97 nt, Human
caggcagagaguuguagggaguguuacauaauggguucugcaaguggccacaaacuuauuuaaguaaacacuuacuggaauuaauauuuauugccug

SEQ ID NO: 4190748 - RNA, 84 nt, Human
cauggaaaagugccacgacacucauugggaaagugcucucuggggugccugagaaagcuccccaugagaugaugccacuccaug

SEQ ID NO: 4190749 - RNA, 93 nt, Human
cauggaaacagguuuagcucuuaguagucacugcagggauauuccucaaagaaggacuuauuuagguuugaccuguuaauauuuuaauacaug

SEQ ID NO: 4190750 - RNA, 56 nt, Human
cauggaacugugcugaaaaguguuuauuuaaacuucuccuucagcaucguugcaug

SEQ ID NO: 4190751 - RNA, 70 nt, Human
cauggaagcugaggaaugguucuuuugguuguacugucuguagcagacaauggaccaagcaccuuccaug

SEQ ID NO: 4190752 - RNA, 129 nt, Human
cauggaaugucaucuuggcauccacuacuguuaauauaggaggaugagugguuuuacggaaggaacugucuuuguuuaggaaauucucuugcuaaguuacuaguggggaagcgagggcucaggccaaug

SEQ ID NO: 4190753 - RNA, 55 nt, Human
cauggaggacccucagggagcucccuucuaauacagcucccuccguguccauaug

SEQ ID NO: 4190754 - RNA, 74 nt, Human
cauggagugugucauucugcccaguacacccagcacagaacacauggugucugaaacuuaugauauacuccaug

SEQ ID NO: 4190755 - RNA, 118 nt, Human
cauggauuuaugaaauaugagaauucuauugugugcuguguguguagauaaaaaaaguaagugccuacaaauuagaugugcagcaaaauagaaucuuuuaaguuuucuauaauugaug

SEQ ID NO: 4190756 - RNA, 59 nt, Human
cauggcagagaaggggaacuggcucagaaucucccugcuauucuccuuccugugucaug

SEQ ID NO: 4190757 - RNA, 69 nt, Human
cauggcauugugagucuguauauuauuaugccccaugccuuggcauaaagacaugcuuacuugcccaug

SEQ ID NO: 4190758 - RNA, 68 nt, Human
cauggccacauuuaguaacugguuugcaaacauucugaaaaaguagcaauuggcucuugugggccaug

SEQ ID NO: 4190759 - RNA, 80 nt, Human
cauggccccaggcgugucaggcuaauuugcaccugaggcucuucauacuuggcagacagccagacugcacuggggacaug

SEQ ID NO: 4190760 - RNA, 60 nt, Human
cauggccccuggucacuauggccuccuguccccauggccgcuggucaccauggcguccug

SEQ ID NO: 4190761 - RNA, 64 nt, Human
cauggcccucuucuggagcaauggguucaugagguuuacucuuaauuaucuagaaagggcuaug

SEQ ID NO: 4190762 - RNA, 58 nt, Human
cauggcggucaggauguaggugcuggugaacugacuauuggcauccauggccgugaug

SEQ ID NO: 4190763 - RNA, 61 nt, Human
cauggcucggggacaggagguaaaucauugcuuacccaaacaugcccuccuggggucuaug

SEQ ID NO: 4190764 - RNA, 57 nt, Human
cauggcuucgucacagagggcagcaggcgccagugcccggcccguguggagaccaug

SEQ ID NO: 4190765 - RNA, 109 nt, Human
cauggcuuggggauauggggcucaguucccuuggggcucuuugccaggcccagauaagggcuguucagggcacucaugggcugauggaguucuuucauccccaggucug

SEQ ID NO: 4190766 - RNA, 77 nt, Human
caugggacuagaagagcggguggaaucacuugcaaaacgcuaauaaaucugcaggcccagcuguuccucguccgaug

SEQ ID NO: 4190767 - RNA, 81 nt, Human
caugggaggacuggggagugagggugaggaagauagccuaacucucugcuucauuuugacuuagccagugcuuuucccaug

SEQ ID NO: 4190768 - RNA, 129 nt, Human
caugggcugugauauaaauuuugacagcaauacaguagguuuauuggugagacaaugagugaaauugcauugaauggcuucuguguugcucgugaaaugugaggugugagugacaguugagaggaaggg

SEQ ID NO: 4190769 - RNA, 57 nt, Human
caugggggcugaggcugcuguagcccucuuuuauugcuagucugccuccccaccgug

SEQ ID NO: 4190770 - RNA, 98 nt, Human
caugggguuuuuggggcaccauucuagucaaucuccaggauuucaacaaaaaucucugcagcuaagaaauuaauuggaaaugggagccuuaauccaug

SEQ ID NO: 4190771 - RNA, 63 nt, Human
cauggguaggauuuacucagauguuagacugauuuagagacaaauguaguguguccaccccug

SEQ ID NO: 4190772 - RNA, 56 nt, Human
cauggguaucauccccagagcuuuaugcuuuuuaaguucuuagguugauacuaaug

SEQ ID NO: 4190773 - RNA, 72 nt, Human
caugggucauauugccuguauaucacucucuucugcagucuaccaagcguuauaaacagcaugugauccaug

SEQ ID NO: 4190774 - RNA, 81 nt, Human
caugggugggcuuggugcacuugugauguggugccuccuguuaauucaccugucaucccggcugcaccgucaacgcucaug

SEQ ID NO: 4190775 - RNA, 106 nt, Human
caugguaacucuuccugguuggagaaugucauuuaaaauaauucugucuuuaaaacugugggaugaggggaaggaaaaugucaccuccaaccagguccucaccaug

SEQ ID NO: 4190776 - RNA, 61 nt, Human
cauggucaccaggccagccuggggcacgccagcagcuccgaugcuggcagauguggccgug

SEQ ID NO: 4190777 - RNA, 60 nt, Human
cauggucuacaauuucauuuuaugaugucuuuaaaugagagggagauugcaaagacuaug

SEQ ID NO: 4190778 - RNA, 74 nt, Human
caugguggauuaucuuucugauaugcuguugaaguugguuagcuaguauuucauugaggauuuuuccaucuaug

SEQ ID NO: 4190779 - RNA, 58 nt, Human
caugguucugacagacuuuuucagcuucuaaagugcucaggaggucaaauggaaucug

SEQ ID NO: 4190780 - RNA, 74 nt, Human
caugguugagaaggaaauagagaaguagccugguggcuguuucugguucuguuccuacaaguaacuggacuaug

SEQ ID NO: 4190781 - RNA, 76 nt, Human
caugguuuguaacccaauacuccccagcuuguccuucagaacaugggcaauuuggaguucuggguuaauaaaagug

SEQ ID NO: 4190782 - RNA, 111 nt, Human
cauguaaacuaagauacauacuuuaucagcgucaaagguacuucuccucuaaacagaguaggagauaacaauaccuuugacguugauaaagcacguaucuuaguugauaug

SEQ ID NO: 4190783 - RNA, 68 nt, Human
cauguacauagaucuugaaaauuagcuggacuuaaguaggcauuuaguuuucaagcuuuaguuuagug

SEQ ID NO: 4190784 - RNA, 75 nt, Human
cauguaccuaauuaugguaaaguuaauauguaaaauuacauauuugucuuuguacuguucggauuaaggugagug

SEQ ID NO: 4190785 - RNA, 92 nt, Human
cauguaggauuuuugagaagaauuuugcuuuuaugucaaguggaaugagggccacugaugaucugggaguagagugacuaugauccgacaug

SEQ ID NO: 4190786 - RNA, 62 nt, Human
cauguaugacaguaagagugucuggguuccaauuuuggcuacccacuuucuaacuguggcug

SEQ ID NO: 4190787 - RNA, 96 nt, Human
cauguaugguugagggcaacagucaguaguugacguguaagcaauccauaagauuguuagcaugauuccugcucauuguugucuugucaccaagug

SEQ ID NO: 4190788 - RNA, 74 nt, Human
cauguauucuuaaggauugagcaaacugcaggcugcuugcugccuuuuagguuugcuagucccugaucuacuug

SEQ ID NO: 4190789 - RNA, 75 nt, Human
caugucacaagcuuuccauuacacacauuccuucuccugaaaaccuggugaguguggggagggcuggugaauuug

SEQ ID NO: 4190790 - RNA, 56 nt, Human
caugucagucacaaaguucuaaagcuucugcuuuggaauguuucuuguacugaaug

SEQ ID NO: 4190791 - RNA, 77 nt, Human
cauguccuacucauuuuucucucacacuuaccagugcuggcacuggaaggaaagaaugaaaacugagugaccacaug

SEQ ID NO: 4190792 - RNA, 69 nt, Human
caugucuguacauuuuuagagggcuucagcagggcauugaggaggugcucuguguaugcauagaauuug

SEQ ID NO: 4190793 - RNA, 75 nt, Human
caugucugucuuugcucaucauugcagugggguggugagcccaucccuuguccugugggaagagcucagugcaug

SEQ ID NO: 4190794 - RNA, 78 nt, Human
caugugaugacuugggcucaguuggauggccuaucagugaugggccacuaccuucucuggauccccucuuaucauuug

SEQ ID NO: 4190795 - RNA, 58 nt, Human
caugugcaacuucagcagaaaggaaagaucagcuauucuaaugcuguauuuguaccug

SEQ ID NO: 4190796 - RNA, 61 nt, Human
caugugcauagacuuucaccaccucccuaugaaguggacaagauucugugcuuuaaacaug

SEQ ID NO: 4190797 - RNA, 85 nt, Human
caugugcucaaaauuuccaccauucugaggagaguggaugguugauacagcacauccuucuucaaagagggaaaaggagcaggug

SEQ ID NO: 4190798 - RNA, 66 nt, Human
caugugcuuggggaacgucaaggccagagucagcaugccuggagcagacgugucccggggucaaug

SEQ ID NO: 4190799 - RNA, 86 nt, Human
caugugggaaucaggaucaugcugggugggaaaaacaaccuucucauuuguguuaucccugugccuauaugugcugauucuccaug

SEQ ID NO: 4190800 - RNA, 74 nt, Human
caugugguuacuacauuaugaggaaagaguggaauuaaugcuaacuuguauauucucauauguacacauacaug

SEQ ID NO: 4190801 - RNA, 66 nt, Human
cauguguaccagcuguucuuugcccagcuuccuugggcuagaaacauauucagugaguaauacaug

SEQ ID NO: 4190802 - RNA, 59 nt, Human
caugugucugguuauugacaugcuguuggccagagagacaggaguucccaggccacaug

SEQ ID NO: 4190803 - RNA, 71 nt, Human
caugugugaagaggccgugugcaggugaggucuauuaaagaacaucgaugaaguccacguggcuucacaug

SEQ ID NO: 4190804 - RNA, 59 nt, Human
caugugugacaaacugccugcauaagucacagugccaguggcagagauuuguaaccaug

SEQ ID NO: 4190805 - RNA, 62 nt, Human
cauguguguacacacgugacucugcaggugcucugcgugucccaaaauuguguacacacgug

SEQ ID NO: 4190806 - RNA, 105 nt, Human
cauguuaaugaaaccagguaaaauuuggucauuugagcagcugaccaggcuugugaaugcugggacucuguacaaaagaaaguuccuauuugggucauugauuug

SEQ ID NO: 4190807 - RNA, 71 nt, Human
cauguuaugguugauaucaguaauauuauggaaauguccauugcuuuauuacucugucugccucugaccug

SEQ ID NO: 4190808 - RNA, 60 nt, Human
cauguuccaugaagcauuauguuauuuacuuagacauuuuaaaaugcauuuauggagaug

SEQ ID NO: 4190809 - RNA, 130 nt, Human
cauguuccauuaaaaacagcucguuagucccuuuacaacugguaaucuccacggucaaaucagcaugaaguauucguugugugacugagauuucagaaagggagcuuugagucugguacugauggaacug

SEQ ID NO: 4190810 - RNA, 93 nt, Human
cagccuuaaaugacauuuauuaucuuacaguucuagagaucagaagucugaaaugggucucacuggggugaaauuggagugucagcagggcug

SEQ ID NO: 4190811 - RNA, 60 nt, Human
cagccuucugaaugaacguacuggauuccgaaagcaguguggaguuacaugugaaggcug

SEQ ID NO: 4190812 - RNA, 77 nt, Human
cagccuucuugucuuuuuugguuuugcuuucuuuuaacacaugaggaaacuaaagcccagagagggaaagggaccug

SEQ ID NO: 4190813 - RNA, 68 nt, Human
cagccuuguugcuaccagaugcccauaugugauucaugcccauggcuucugaguggacaauaaaccug

SEQ ID NO: 4190814 - RNA, 56 nt, Human
cagccuuugggauugggauugagaugggcaaucccucuuccuuucccuugagggug

SEQ ID NO: 4190815 - RNA, 56 nt, Human
cagcgagaagaaaauggucuguggagucagacauuacagauuuuauaucucugcug

SEQ ID NO: 4190816 - RNA, 81 nt, Human
cagcgagcgguggaagggggauugggaagcagguggggugcccccacacuccugcuggcucuguugcucggccaccugcug

SEQ ID NO: 4190817 - RNA, 116 nt, Human
cagcggccgccacccuucguugccccuggagccgccggggaggccagugucggagccagccaugcggcggcuccucucuggccgcucccgcggggccggggcuucggcggcugcug

SEQ ID NO: 4190818 - RNA, 74 nt, Human
cagcggggcggcggggccugucugugcugagcauccccagcuccagggcaggugcugggcucugagccccacug

SEQ ID NO: 4190819 - RNA, 72 nt, Human
cagcgguuauuggagcagaacaggccgggugggaagacagcuuauucccaaagccacucugccucccugcug

SEQ ID NO: 4190820 - RNA, 61 nt, Human
cagcgucuucugccgacagcaucugccaaacgaggggaauugcaggcaggcagagaugcug

SEQ ID NO: 4190821 - RNA, 78 nt, Human
cagcgugaggggcggcgcauucaucuucucaagcaccacgugcgugugagcacugugaugcuguucccuccuacacug

SEQ ID NO: 4190822 - RNA, 88 nt, Human
cauuuuggauuuggguggacucuggcagagccugccccagggcuucugcacuaggcucugcagauucaucccuucacccagcaaaaug

SEQ ID NO: 4190823 - RNA, 55 nt, Human
cauuuugggugaguuugaggcacauaguagucugggaccuguuugcccacagaug

SEQ ID NO: 4190824 - RNA, 87 nt, Human
cauuuugucaggcaauuaaaguacugugaaugaguaauagcaauagauccucauauuaaggucauuuuguguguguguauaaaaaug

SEQ ID NO: 4190825 - RNA, 86 nt, Human
cauuuugucuuguucuagugcuuuugucauugaaucuugcuuucauauggguaaguuuagauauagguauucugauaugaaacaug

SEQ ID NO: 4190826 - RNA, 85 nt, Human
cauuuuuaaaauauuacaaauuagguauuuucuggacagggcccuagcuauggucucuuccuugaccuauuguaauagaagaaug

SEQ ID NO: 4190827 - RNA, 71 nt, Human
cauuuuuauauggggcuuggcauuuuaacaucuggaaaaguugugaaaucaauuagcugcagauaaagaug

SEQ ID NO: 4190828 - RNA, 60 nt, Human
cagugcagccaaggacaggcacccgcugcugggcuccgccugccgccuggcugagaacug

SEQ ID NO: 4190829 - RNA, 99 nt, Human
cagugcagggaggcuggggguccuggaggccagcuggagcagguaucgcccagucacccccuccuacuuccuuccacuccccacgccugagccucgcug

SEQ ID NO: 4190830 - RNA, 67 nt, Human
cagugccaagccacagaucacugcuaauuccaaggcagagcuuacuugauuugugcccauggcauug

SEQ ID NO: 4190831 - RNA, 93 nt, Human
cagugccccagagcccuucuguucaggccuggcaucccacagagguggcauucugcucaggagcuuagagcacagacgaagaggcaggcauug

SEQ ID NO: 4190832 - RNA, 66 nt, Human
cagugccuagcaugguauaggagcuuaauaaauacaggguagcuccucaguauauaaaggcagaug

SEQ ID NO: 4190833 - RNA, 78 nt, Human
cagugccuguuggccaaagcucaccagugcugugggaucagacucaggcagcgggcucaaguggccagcagggcacug

SEQ ID NO: 4190834 - RNA, 76 nt, Human
cagugcuccuggaguccuuuccuauucuuguauggggggaaggaagggauuugaggaaaggguaaaaaagguacug

SEQ ID NO: 4190835 - RNA, 59 nt, Human
cagugcuuugggaggcugaggagggagggagcccuugagcccagaaguucaaggcacug

SEQ ID NO: 4190836 - RNA, 59 nt, Human
cagugcuuuucaaaguucuaugugcacauaaaugcuugaggauuuuguugaaguuucug

SEQ ID NO: 4190837 - RNA, 64 nt, Human
caguggaaggucaggggacagugaaguggggucacucccaggugcugagcucuggcagccacug

SEQ ID NO: 4190838 - RNA, 73 nt, Human
caguggaaguuccugcuaucugacucuagcuuuguaagucuuaguucaaaaugucagagaaggagcuuuccug

SEQ ID NO: 4190839 - RNA, 86 nt, Human
caguggagacgcagugucaccaggcgagucucccaauuuaucagaggugauaauggagcagucuggugauacucagcucucgccug

SEQ ID NO: 4190840 - RNA, 57 nt, Human
caguggagggcaggggaguccguccgcuucuugaggacaguccgggguccuccacug

SEQ ID NO: 4190841 - RNA, 71 nt, Human
caguggcaagguuagcagcaaagggaggugagcucauuacuucucugacagucuguuucaccuagacacug

SEQ ID NO: 4190842 - RNA, 76 nt, Human
caguggccuuugucauuuucagcugggccccuuacucugagugggcugacucugcacugagccaugauauacacug

SEQ ID NO: 4190843 - RNA, 68 nt, Human
caguggcugcugggggaacaguuaaaauuacuacagugugauuacuguggaugccagcagcaugacug

SEQ ID NO: 4190844 - RNA, 84 nt, Human
caguggcugucuccuauuuccugcuaaggcuugcaacauauauggcacacauccaguauggagguaggaauaaagacaucacug

SEQ ID NO: 4190845 - RNA, 61 nt, Human
cagugggaaccugccugcacagugugguugaagcugcuuggcugggucagcagguccucug

SEQ ID NO: 4190846 - RNA, 56 nt, Human
cagugggaccggugcuauuccaggugcuaaucaaugcccuggaacugcucuuacug

SEQ ID NO: 4190847 - RNA, 65 nt, Human
cagugggaggaggcauuugauaggcuuauaauggcuuaagagccuggguuaggguucuuccccug

SEQ ID NO: 4190848 - RNA, 83 nt, Human
cagugggcacuaaaauacugucuuucacagauauuucgccuuggaaauuucauggaaaguuaguagagugaugcuaccaacug

SEQ ID NO: 4190849 - RNA, 86 nt, Human
cagugggcuggagccccacaguggccacccacugagacagggcauuaguuuccuguucaccauggucacgugcucccagcucagug

SEQ ID NO: 4190850 - RNA, 86 nt, Human
cagugggcuuccuggaccugcagcaucagcaucuccugggaacuaacuagacaugcagauucucaggccccaccacagaccuacug

SEQ ID NO: 4190851 - RNA, 67 nt, Human
caguggguggauuuauuuaaggaccucucuauuacugaaaauagaguccuucaagaguccccuacug

SEQ ID NO: 4190852 - RNA, 59 nt, Human
cagugguagaagccaaguagaucauuauuccacaaacauuuacaauuggcuuuccauug

SEQ ID NO: 4190853 - RNA, 89 nt, Human
cagugguagcagcgggaccucugcaccugccuccucuggccugcaaggaaaggggagacacgggugcugaggaccccucaaucucccug

SEQ ID NO: 4190854 - RNA, 64 nt, Human
caguggugaagagcaggggcucugggcccagaccaucuggguacaaauccuggcucugccacug

SEQ ID NO: 4190855 - RNA, 74 nt, Human
caguggugcgggggccaaggugaacugcugcaucuuaacuagcaucgguguccuuguccuuugguacccagcug

SEQ ID NO: 4190856 - RNA, 99 nt, Human
caguggugcugggcuguccauccacaggcaagucucuuggcagauucauacagucaccaucuccuucagaaccugugauggaaaaguccaguaccagug

SEQ ID NO: 4190857 - RNA, 90 nt, Human
cagugguggacuucauuauccagaaugcucgauucuccuguagcaaaaugaauccauugugauaguuauuuuggaaaaugagucauccug

SEQ ID NO: 4190858 - RNA, 85 nt, Human
caguggugggggcugugcggaaauagauagcuccucaccaucucaaaggaggagcugcuacugcucugccagaggaauacuguug

SEQ ID NO: 4190859 - RNA, 56 nt, Human
cagugguucucaaucaggaaugguuuugaauauugcagguuaggugggaaucacug

SEQ ID NO: 4190860 - RNA, 89 nt, Human
caguguaaaaauccucauucacauucuucuuacuguuauauucauuuucuggguucaggcaccgggguggagugugaggagaggcagug

SEQ ID NO: 4190861 - RNA, 111 nt, Human
caguguacaggauuucacacgacuuucaccagcagcucacuagucacauggaggcagcuagcaaacaugggcacugacagugagcguuagugaaugaacgcacugcaccug

SEQ ID NO: 4190862 - RNA, 58 nt, Human
caguguaucuuuuuuuaaccuuuaaaaaaaucuuuaaagguaguuuuaaaggugcuug

SEQ ID NO: 4190863 - RNA, 84 nt, Human
cagugucagugguccaggcagggcugacucagccacccucgguguccaagggcuugagacagaccgccacacucaccugcacug

SEQ ID NO: 4190864 - RNA, 66 nt, Human
cagugucaguuuggcucuaaaguuucaagggauacugaaagggaauauuggaaccaaaugaaucug

SEQ ID NO: 4190865 - RNA, 82 nt, Human
cagugucaucauagauuugugcaagaagggauuccagaugcuauuuuagaacaaucuucucauuguacagaugaugaaacug

SEQ ID NO: 4190866 - RNA, 83 nt, Human
caguguccugugagggcuauagggcagggcccugccccagcggaugggcucgggagggggcucccugaagccaguggacacug

SEQ ID NO: 4190867 - RNA, 100 nt, Human
cagugucuaccuugguucucuacuagggaaaguggacauggcuugucuuaggagucaaagggaagucuguuucauugucccuggauguuggauuauacug

SEQ ID NO: 4190868 - RNA, 67 nt, Human
cagugucugcucagacagcuacagcugcccaaauugccuuucuguaucuaccugucuagcaacacug

SEQ ID NO: 4190869 - RNA, 56 nt, Human
cagugucuuauuuguagcucagagagacaaccuucuggcuacagugguaagaacug

SEQ ID NO: 4190870 - RNA, 97 nt, Human
cagugugaagguuuuuauacuucugccagaggacaacguaauaugaaacaccgaguuuuauuugucucuacagagaguaguagugucuuucaggcug

SEQ ID NO: 4190871 - RNA, 62 nt, Human
cagugugcaggucuccccugcuggggccuagacagcagccaggaggugacagccugcaucug

SEQ ID NO: 4190872 - RNA, 64 nt, Human
caguguggagcaucgagggcagaggagagcugagccgaccccacccucugccccagccgcacug

SEQ ID NO: 4190873 - RNA, 77 nt, Human
cagugugggacggugauuggggccacagguuguggaaucugaccugguucccagccaggcucuaccacuugacgcug

SEQ ID NO: 4190874 - RNA, 78 nt, Human
cagugugucccugaugguggggcucugggguguuuccuuagcagcagccuagagucucucugcaggaguuucacucug

SEQ ID NO: 4190875 - RNA, 59 nt, Human
cagugugucucuuguccuggcuaggcauagggucccaagccagaguuggggacaagcug

SEQ ID NO: 4190876 - RNA, 58 nt, Human
cagugugucuugacugccuuuugaaagaccauuggaaaggcaggccuaggacauauug

SEQ ID NO: 4190877 - RNA, 68 nt, Human
cagugugucuuuauaagaagagggagagauaccagagaucuccuucucuaccaugugaggaaacagug

SEQ ID NO: 4190878 - RNA, 65 nt, Human
cagugugugacucuggggguacagcaaaacagcaugcucuuuacucucuuggaguucacauucug

SEQ ID NO: 4190879 - RNA, 85 nt, Human
cagugugugauugugggaggaauuagaaugggauaagauaucaacacaucauauucuuuuccuucuuucccccuagucauuuuug

SEQ ID NO: 4190880 - RNA, 77 nt, Human
caguguugaucuucaucgaaauauugugucaugucauugugggacgcgugauacauuuugauuuggaaaucaaucug

SEQ ID NO: 4190881 - RNA, 74 nt, Human
caguguuggcacagggaggcagccaugcucccgaguccugggagugggcagcacugcccugugggucugcacug

SEQ ID NO: 4190882 - RNA, 77 nt, Human
caguguuguauaauuccagggcguguugucuacaagggguacaaugugaagagugcucccuagaguugugcaaccug

SEQ ID NO: 4190883 - RNA, 74 nt, Human
caguguuuaaacagggcagugucuugaaaaaugacuuuguucucuagaucacucacggugcuggccugacacug

SEQ ID NO: 4190884 - RNA, 71 nt, Human
caguguuugcauugcaguguugccuggggccuuuaacaaaugcucaagguaacacugcaguugucaagcug

SEQ ID NO: 4190885 - RNA, 59 nt, Human
caguguuuuuacaagcacucugggugauucugauaaauccagaaauuugagaaccacug

SEQ ID NO: 4190886 - RNA, 55 nt, Human
caguuaaaugaugugcccuagaucacauaaugugugucucacauuagcuugacug

SEQ ID NO: 4190887 - RNA, 55 nt, Human
caguuaaucuugccauuauauccaauuuaaacauuggguguucaaagauuaacug

SEQ ID NO: 4190888 - RNA, 70 nt, Human
caguuaauucagucaggguucagggucuaaacaggaaguaaaaucugaccugagccuugaggagugacug

SEQ ID NO: 4190889 - RNA, 88 nt, Human
caguuacuucaggccaucugggcauauaugugcaagucacaggggaugcgauggcuuggcuugggcucagaggccugacacagugcug

SEQ ID NO: 4190890 - RNA, 56 nt, Human
caguuagagggcuccugggccacccccaaauaucuggcuugcccacaucugcacug

SEQ ID NO: 4190891 - RNA, 93 nt, Human
caguuaggagugcagcccagcagguacuuugcuuugggccuuacacgaggccuugugagaagcagagaacccaguugagccaaccuguaacug

SEQ ID NO: 4190892 - RNA, 67 nt, Human
caguuagugucauguuaacaaagcucugggacauaucuucaggccaagguagacaugacugaggcug

SEQ ID NO: 4190893 - RNA, 61 nt, Human
caguuaguguguuccugucuucuagacuuaucuacagggaucagaaacauagcccugacug

SEQ ID NO: 4190894 - RNA, 83 nt, Human
caguuaucauuugaagccacuguuuuggagugcuuuguuaugcagcaguaguuacccagaacacuggaaguaagggauggcug

SEQ ID NO: 4190895 - RNA, 56 nt, Human
caguuaugagguguuucuggcagcuuccuggacucagaauaauaaccuaguaacug

SEQ ID NO: 4190896 - RNA, 98 nt, Human
caguuauuuaagaaaaugugcagagccauuauggagacuugcagguugacuuacaaaguaggucuccauaaggcagaaacauuuuuaaaaucugacug

SEQ ID NO: 4190897 - RNA, 91 nt, Human
ccaaaaaauuuguguuagggaagguugcccuaggguuuguugccuuuaauagcaucuuuauauucugggcaagccuucuuauacauuuugg

SEQ ID NO: 4190898 - RNA, 60 nt, Human
ccaaaacaguaagagauguuuuaucuuguaggggauauuauugaauuuuuucuguuuugg

SEQ ID NO: 4190899 - RNA, 108 nt, Human
ccaaaaugcccuucggugacuuuccagcgaguaaaaucuuaagcacagugggauguccaaugucuuuugaagguuuuggcugagagagacaacauucuuggaauaugg

SEQ ID NO: 4190900 - RNA, 86 nt, Human
ccaaacccugcuauuuguucaaaaucaagauuaaaagcauuucuacaacacuacaacuuucuucuugauuuaaacagggaguuugg

SEQ ID NO: 4190901 - RNA, 55 nt, Human
ccaaacuacaauuccuaggcuucuauuucuagacaugccacaggaugaaguuugg

SEQ ID NO: 4190902 - RNA, 65 nt, Human
ccaaacuuugugcaacaucagggaauguauauugaagaagauuccugcaaauguaaugaguuugg

SEQ ID NO: 4190903 - RNA, 58 nt, Human
ccaaagcaugccucauggauggcuguuuggcccuuguaguccugggcguugacuuugg

SEQ ID NO: 4190904 - RNA, 67 nt, Human
ccaaaggcuugcugugcuggcuucuaaaauugacccgaauuaucagcagcccaauggcaagcucugg

SEQ ID NO: 4190905 - RNA, 55 nt, Human
ccaaagguaaaacgcaugcccagucaucauuauggguauucugugucaccuuugg

SEQ ID NO: 4190906 - RNA, 100 nt, Human
ccaaaguaacucuguaguaagugguggaguguggucuugaaccaugaaauauugaagacuuugcucuuaaccacagcacuauauuaagacuaagcuuugg

SEQ ID NO: 4190907 - RNA, 59 nt, Human
ccaaaguccacaguuuacauuacuguucacucuuagugguguacauucuauggguuugg

SEQ ID NO: 4190908 - RNA, 59 nt, Human
ccaaaguccauaguuuacauuaggguucauuuaugguguuguacacacuaugguuuugg

SEQ ID NO: 4190909 - RNA, 60 nt, Human
ccaaaguccauaguuuacuuuaagggucacucuuggugauguauauucuauggauuuugg

SEQ ID NO: 4190910 - RNA, 63 nt, Human
ccaaagucuauuaagaaacuuucaaagauagguggaccugggaaagacucuugaugucuuugg

SEQ ID NO: 4190911 - RNA, 58 nt, Human
ccaaagugcuaggauuacaggcaugaaccaccaugccuggccuccacuguauucuugg

SEQ ID NO: 4190912 - RNA, 102 nt, Human
ccaaagugucuaaauucuagcauugugaaaauauuccaaaaaacaggcagccauauuauuccuuugucuauauuuuggcaaaugucuagauggauacuuugg

SEQ ID NO: 4190913 - RNA, 77 nt, Human
ccaaauccuuagcccacuaauacuuauugagucucuauuuuuaucuauuaaugggaaauucuuuggguuaggguugg

SEQ ID NO: 4190914 - RNA, 129 nt, Human
ccaaaucugcaaacuucaccauugauaaucuauaaaagguauuauuugcaaucauuuguacuucugucugguuuauguacacaugggaaaugauaucucauuuauagauggagaaaauaaaauucgaag

SEQ ID NO: 4190915 - RNA, 79 nt, Human
ccaaauguauuacuccucugaugccuacaauuccacuauaauagucuggugggcuucuguuagggaggcuuauacaugg

SEQ ID NO: 4190916 - RNA, 75 nt, Human
ccaaauguccuuuauagccucuguggcuucuuucucaagcccaggauccaguccagggcuguguguuacauuugg

SEQ ID NO: 4190917 - RNA, 78 nt, Human
ccaaauguuuaggucuuagauacaguagaaagacucugugggccacagacagagugcuguaucugagaaagcaacugg

SEQ ID NO: 4190918 - RNA, 66 nt, Human
ccaaauucucacccuguuugauugguguauguuaucucuaccgaaguucacccagagagaauuagg

SEQ ID NO: 4190919 - RNA, 85 nt, Human
ccaaauugucagcaacccaucacucccaggcaaaauccaaacugcugggcuguccccuuggacugauuugugugcuggcuuuugg

SEQ ID NO: 4190920 - RNA, 94 nt, Human
ccaacaucuucuucaugauugacagcuucgaggaggugagcucugcacagggccucucuccuuagcuuccccuucucgugagauggguguuagg

SEQ ID NO: 4190921 - RNA, 116 nt, Human
ccaaccucaggugauccaccagccucagccucccaaagugcuaggauuacaggugugagccacugcaccuggcaguuuuuuguauuuuuaguagagaugggguuucaccauguugg

SEQ ID NO: 4190922 - RNA, 60 nt, Human
ccaacgcccagccuugaucaaaugauuuuuaaaucagaucaaacaaaauggguuaguggg

SEQ ID NO: 4190923 - RNA, 64 nt, Human
ccaacggaguccaagcuagagccacucauggugugguccauggguggcagcuucagcauguugg

SEQ ID NO: 4190924 - RNA, 76 nt, Human
ccaacuaaacuuuuucguuucuauucugaugauauaagaaaaauauauauuacaagaaagggcaugaauuaguugg

SEQ ID NO: 4190925 - RNA, 73 nt, Human
ccaacugcagugcguucuuguucucauuguucuggacagagagaagcaaucagcagccacccacugcagcugg

SEQ ID NO: 4190926 - RNA, 74 nt, Human
ccaacuggagcugagacuugagguuagguucaaguguaagcuuccuuucccucacagccucggagccuucuugg

SEQ ID NO: 4190927 - RNA, 62 nt, Human
ccaacuuagugagccacucuugcauccuaugucaguugggguguaaguuucaucugaauugg

SEQ ID NO: 4190928 - RNA, 58 nt, Human
ccaacuucacguucaguccaguugcuuuucaggcaaucucuugggaggaaugaauugg

SEQ ID NO: 4190929 - RNA, 116 nt, Human
ccaacuucugccauaucuaucucguguauuacuauaugcguggcaggugcuuccaccauaagacauccgaggcccucuugcagguggugcaccaugagaggucccugcaggguugg

SEQ ID NO: 4190930 - RNA, 62 nt, Human
ccaagaaagccuccuuggagcacccuggacuggccugggaucaguuaaggagaguuuuacgg

SEQ ID NO: 4190931 - RNA, 55 nt, Human
ccaagagcuucccauagcuucuuguggccauuuccagaacuaaggggagcucugg

SEQ ID NO: 4190932 - RNA, 68 nt, Human
ccaagaggggcagagggcugcaggcacucucuccccacccagcugccccauguuucagccccuccugg

SEQ ID NO: 4190933 - RNA, 55 nt, Human
ccaagagguaucuugccauaaagaucuuccucccgugguuucaaguugccucugg

SEQ ID NO: 4190934 - RNA, 75 nt, Human
ccaagagguugugaggcaggcaaaagagauauaggauuucuuccuccacuucaugcgcugcuuggaucuauuugg

SEQ ID NO: 4190935 - RNA, 91 nt, Human
ccaagaguguguuucucagaauuaauaaccacaaggcccuuuucuuacagaggucuuguagguacugguuugcugugaaaugcacuuuugg

SEQ ID NO: 4190936 - RNA, 59 nt, Human
ccaagauaaucugugaaaaaucaaguauuuuaaaauagauuuugucaaaauugucuugg

SEQ ID NO: 4190937 - RNA, 89 nt, Human
ccaagaugguaccuucacagggccacuggcaggaggccucaguuccuuaccaugugggcucuccauaggcccugguguccucauguugg

SEQ ID NO: 4190938 - RNA, 67 nt, Human
ccaagauuuuaucuccguuucuguaauucucccuaaagauuuagagauggcagauugaaucaaaugg

SEQ ID NO: 4190939 - RNA, 80 nt, Human
ccaagccaugaaggggaucggugaguggguguuggcagccuugccaccucugcucaagaccccuccgcucacagcccugg

SEQ ID NO: 4190940 - RNA, 56 nt, Human
ccaagccucacuucccuuuucauuggcaaauacauuugucaugagguagaggcugg

SEQ ID NO: 4190941 - RNA, 70 nt, Human
ccaagcuuguuucuccugggggugcucuuucgaggauauuugggcugccuccggagucacagugucuugg

SEQ ID NO: 4190942 - RNA, 64 nt, Human
ccaagcuuuuguguagauuuuucccugucuggaguaggcagguguuuuuauauuaaagaucugg

SEQ ID NO: 4190943 - RNA, 69 nt, Human
ccaaggaaaacuuguacuacgguugcuacaucaagggaugaggaccuuggaauaacaaauucucuuugg

SEQ ID NO: 4190944 - RNA, 67 nt, Human
ccaagggagacugugagaccucuaaggccaaguaaaaagacuuuucuggaauuacuuucuccuuugg

SEQ ID NO: 4190945 - RNA, 118 nt, Human
ccaagguguuaggccaacuccugaugcucugaaauaguaguaaaaaacuaugcaauuauaaugguguguuuguuagacuaauguuacaggaacaaucaugagguuggggacacagugg

SEQ ID NO: 4190946 - RNA, 105 nt, Human
ccaagguuccuguggcacagugauuaagagccagucuuagggagucugaaugaaggaccuggacuugaauccugacuuugccacccccuggcuuagggacguugg

SEQ ID NO: 4190947 - RNA, 82 nt, Human
ccaagguugucagcugccuuuccagacauugauaggcaccuugccucuuaggguuaaaugucuguagaugugcugaaccugg

SEQ ID NO: 4190948 - RNA, 93 nt, Human
ccaaguagaauagguauuuauguugccucuauguuugccuucauauauauuauaaacauauugagcucuaaaaguacauggcuuucugccugg

SEQ ID NO: 4190949 - RNA, 71 nt, Human
ccaagucuguggaauugaugcuuagugucaaaacaguccagaucacuuugguaccaauucagcgucgcugg

SEQ ID NO: 4190950 - RNA, 56 nt, Human
ccaagugccugagucagaaacgugacauuuuucaacauccuggccaguguacuugg

SEQ ID NO: 4190951 - RNA, 64 nt, Human
ccaaguggaucuuacugaucucugauacacgugcauggaacaaaggcucaguaaaucuuugugg

SEQ ID NO: 4190952 - RNA, 55 nt, Human
ccaagugucuucaaaggcuaaaacaccacuauuguuucaagcauaaggcacuugg

SEQ ID NO: 4190953 - RNA, 72 nt, Human
ccaaguguggcccuucugagcacagggcccuguguggcugcacaggucucgugcccacgaagccagcacugg

SEQ ID NO: 4190954 - RNA, 73 nt, Human
ccaaguucauuguagcauuauugacaauagccaaauauggaaucaaguuaagugucuauaaguggauuaaugg

SEQ ID NO: 4190955 - RNA, 97 nt, Human
ccaaguugccccgagacucauuggaauucagcuugcuuauaaacaccuggagguuuugagauuaggcugaggucuggggcucggggauuuugcuugg

SEQ ID NO: 4190956 - RNA, 77 nt, Human
ccaaguuggucaauccacagacuauuaagugaucuacacaugcaaguaggcuuuuaaaagcuucuguacuaauuugg

SEQ ID NO: 4190957 - RNA, 60 nt, Human
ccaauacuguaaauggagcagccaaucccagauucuugcugcuguccacacaguaagagg

SEQ ID NO: 4190958 - RNA, 76 nt, Human
ccaauagcuaggucauauuuugcaaggucagcuauaucccuguguagaucuguccucaguguagauucuagagugg

SEQ ID NO: 4190959 - RNA, 69 nt, Human
ccaauaugccucuccccacuuuuguuaagcugggcccugugugaccagugugggcagcaggcauacugg

SEQ ID NO: 4190960 - RNA, 61 nt, Human
ccaaucagagacauccauguuaguugggaugucaacugccccaaugcacauggucucuugg

SEQ ID NO: 4190961 - RNA, 69 nt, Human
ccaaugccugcuuuaagaaugaguguaagacuucaucccagcaaacagucuugaagcaaagucuguugg

SEQ ID NO: 4190962 - RNA, 87 nt, Human
ccaaugccugguuuguuaucauugucgcagucuaauuuauuuucauguaaaugaagcuuagaagaugacuggcaaacauguuccugg

SEQ ID NO: 4190963 - RNA, 88 nt, Human
caucuugcaaaggggaauaaagcaauuugguggguuugacugguguucugauuguccuuuacuuccucuucucugauaaugcauggug

SEQ ID NO: 4190964 - RNA, 68 nt, Human
caugaaaauauucaccauggcauuuaaagucuccccuuuaaaaggcaucauaggugaauaugauuaug

SEQ ID NO: 4190965 - RNA, 97 nt, Human
caugaaagaugcucaucuauccuaauuguuaggugucugaugugcuugaaugguccacaucagacaauuaauuauuaauuuuuggucauuuuauaug

SEQ ID NO: 4190966 - RNA, 129 nt, Human
caugaaagcauggcuuuauucaguaggugcagagucacugcccuugaagacagaccaaggagaaugaauaagucuuucccucuguuuucaguggaugcucaccuuaugaauggagccauauuuaaggag

SEQ ID NO: 4190967 - RNA, 60 nt, Human
caugaagcuugaagcaguccacgcagcuacugaggagcuacuuggacugguuucaaggug

SEQ ID NO: 4190968 - RNA, 104 nt, Human
caugaauaccuugccuuguuauaguauuucaguuccucuugugaccagugucauagcauggguuuauaaguuaacuggaguuagggaugcuaucuuuggucaug

SEQ ID NO: 4190969 - RNA, 72 nt, Human
caugaauaugguacaauuuucauuuguggaggucuucuuuaauggcuuucaauaauguuuugugauuuuaug

SEQ ID NO: 4190970 - RNA, 56 nt, Human
caugaaugcuggguucauguaaacugcacagcagaucugacuccccaggguucgug

SEQ ID NO: 4190971 - RNA, 56 nt, Human
caugucuuccauuagacucucagauucccauuacucugaaaaggucaggagacaug

SEQ ID NO: 4190972 - RNA, 71 nt, Human
caugugaaggacauuuguccaugauugggucaaagugucaugguucaugaguguccuuugaagucagcaug

SEQ ID NO: 4190973 - RNA, 72 nt, Human
caugugaaucugaacuguuucugauccucuuuccugauuguguuaggacagaacacauuuucagagucaaug

SEQ ID NO: 4190974 - RNA, 70 nt, Human
caugugauccguuccaccagucuuuauucgguauaguuucugaauagaugcuguucaauggaguuauaug

SEQ ID NO: 4190975 - RNA, 69 nt, Human
caugugauuucagguuuuucauacugaaaacauugagauuucaguuggaagacacccugaaaucuuaug

SEQ ID NO: 4190976 - RNA, 56 nt, Human
caugugcagacggugggcuggacuuuauccucaccauagcacucaguuuguacaug

SEQ ID NO: 4190977 - RNA, 109 nt, Human
caugugcuaaauaugugacuaggcaguguucuucuaagggcaacuugagugcuuaaacuguaaaauuccacugacuuuaaagcucacucuuuuucacaaguaguccaug

SEQ ID NO: 4190978 - RNA, 57 nt, Human
cauguggacaaauacucuguuguacccugcugcacagagcuguacaugugccaugug

SEQ ID NO: 4190979 - RNA, 81 nt, Human
cauguggcaaguggcagacacaaugugggcacuaggcaaguggcaagucccuuguauugagucuuauuugucuauucagug

SEQ ID NO: 4190980 - RNA, 117 nt, Human
cauguggcuccuguccugcaugcagggccuccagugucugccaacugcaugguccgucucuuccuggacuuuagaugacaagacacaagugaggacugaugaaaaaggagaaaaaug

SEQ ID NO: 4190981 - RNA, 89 nt, Human
cauguggggaaggagcagaccuaccaccgcgauguguugacggggagcccggagcauaggcggugguaggaccccucguucuucacgug

SEQ ID NO: 4190982 - RNA, 62 nt, Human
cauguguaacugugcuaaaaggcaagugccucuguggggaggcggcagacacaguugacaug

SEQ ID NO: 4190983 - RNA, 124 nt, Human
cauguguauacauuccauguguguguauuccauguguauacauuccauguguguguauuccguguguauacauuccauguguguguauuccguguguauacauuccauguguguguauuccgug

SEQ ID NO: 4190984 - RNA, 83 nt, Human
cauguguaugagucgacagccagugccuuuaaccacucccuacccuacaugugugccaggcaugugcuguuugucuccacaug

SEQ ID NO: 4190985 - RNA, 65 nt, Human
cauguguauuauucuuguggaauauuaguucaccagaugauagcccacaauucuaguuacauaug

SEQ ID NO: 4190986 - RNA, 60 nt, Human
caugugucgucaggucugagagccguggauucaaaucccacucuggagcugaugcaggug

SEQ ID NO: 4190987 - RNA, 57 nt, Human
caugugugaagacugcgggccaggugagaaggaacagggcccgcuguguguaucgug

SEQ ID NO: 4190988 - RNA, 55 nt, Human
cauguguugaguauaggcuucguauguuauuacgaauaaaucuauuucacacaug

SEQ ID NO: 4190989 - RNA, 115 nt, Human
cauguguuuccugucccuuauucuaaaucgauugggccauuugucuaauuuaaacacucuauaaauuauacacauccuccaaagauagggaugagguagaggcccuugauguaug

SEQ ID NO: 4190990 - RNA, 77 nt, Human
cauguguuugucucuuggccuaccucucguucugaaaugaagaugagcaagaugugaaagcuugagagaggcaacug

SEQ ID NO: 4190991 - RNA, 55 nt, Human
cauguguuuucuuuaagccaguugguuugggacuuuuggcuucuggcaacagaug

SEQ ID NO: 4190992 - RNA, 74 nt, Human
cauguuagaagggccaguuguuucucaaaaggugauagucuacagugaggaagcagcugugcuugggugaggug

SEQ ID NO: 4190993 - RNA, 76 nt, Human
cauguucagcucagaagccggaagugcuccucaacuagaggccagauacucucuucugcaacucacagccaacaug

SEQ ID NO: 4190994 - RNA, 80 nt, Human
cauguucucugggcaccaaaucugagcuacuuaugacuuccugaucuaggacaggagcaggcugagaguccaagaaggug

SEQ ID NO: 4190995 - RNA, 67 nt, Human
cauguucuuucaguccagaucccuguauuuuauuagaaucacaggcaaagaagauugguggaaugug

SEQ ID NO: 4190996 - RNA, 105 nt, Human
cauguuggccaggcuggucucgaacuccugaccuugugauccacccgccuuggccucccaaagugcuaggauuacaagcgugagccaccaugccuggccaagaug

SEQ ID NO: 4190997 - RNA, 104 nt, Human
cauguuuacuauuuccuguugucuuugccugaaaguguuuuaacaaaaauuaggguagagcauacaaacauuugaggcaggggaugaaaggaguuguuauuaug

SEQ ID NO: 4190998 - RNA, 96 nt, Human
cauguuuguuuuucuagugacugcuuauauguuaaagauaccuuuauguuuacacgugucucucaacguauaaucagugucuccuggaacaaauug

SEQ ID NO: 4190999 - RNA, 67 nt, Human
cauguuuucauuuaaauaauugccuucagggacauaaucugaagaaguuaauaauggugagaaaaug

SEQ ID NO: 4191000 - RNA, 81 nt, Human
cauuaaaagcaagaguuuuuucucucuugaaaaacacaaaccuaagagcuguucaaguugaaagacuuuuugaggguaaug

SEQ ID NO: 4191001 - RNA, 115 nt, Human
cauuaacauuauuagaacauaauccaaugcugguaauacauguauuccagagaguugagauuuuuaauuaaucugagugacauguauuuggaaugaucugcaugaugugacaaug

SEQ ID NO: 4191002 - RNA, 95 nt, Human
cauuaacuuuuucauaugugucgugcuacugcccauaaaguuaauuaaccacauggguaccucaaguaggaaauacaugcuaugaaaaaaaaaug

SEQ ID NO: 4191003 - RNA, 64 nt, Human
cauuaagcugucagugucaggcuaaaagaaacuuuuccuuuaucugagcugauagauaguagug

SEQ ID NO: 4191004 - RNA, 124 nt, Human
cauuacggaauuuccaguuauagaaacuguggggcuuugguugauaauaauuaguucuuggacucauuugcaugccacgggagagaauuauugccagacccuuguauuuauagcuucccaggug

SEQ ID NO: 4191005 - RNA, 71 nt, Human
cauuacuaugaauagccagauagugaacagaaccuggacaauucucugcucguuaggcucauucauuaaug

SEQ ID NO: 4191006 - RNA, 127 nt, Human
cauuagaauugccuaaaagacuuguuaaagcacaaauugcuaggucacagcaccagaguuugugauucaauaggucugguguugggccugaaaauuaaaguuuuuaacaaguuugcagguguuaaug

SEQ ID NO: 4191007 - RNA, 123 nt, Human
cauuagacagugcauucggguaaggugaugguucccuaggucucuuuggaguugauuacuauagaaaugggcaucugguggagccucagguugccaauugcauuacucuucauuuuacugaug

SEQ ID NO: 4191008 - RNA, 83 nt, Human
cauuagauuucaaaucauggaaacaaugcggaaaaauauuguguguguguuuuugccaucuccgugaguucugacaucuaaug

SEQ ID NO: 4191009 - RNA, 62 nt, Human
cauuagcagucauuacugugcucugauggacugacacagcagcaaagccgagacagccagug

SEQ ID NO: 4191010 - RNA, 81 nt, Human
cauuagcccaggcccaguugcaaggcaggcccucgucuagcaaggcaggcccuccucuagcaaggcaggccuucaguggug

SEQ ID NO: 4191011 - RNA, 100 nt, Human
cauuagccuccugaagccccuuuguguggguuguaguguccucugugagggugauaaauagaaggcaccguggccaauauuugggggaaggagccuugug

SEQ ID NO: 4191012 - RNA, 61 nt, Human
cauuagcuaacuacacucaauguucccgacauaugggguaaguguaggucauuagcuguug

SEQ ID NO: 4191013 - RNA, 58 nt, Human
cauuagggacugaggaauaagguauagaccuuacauucaaggaacucauucucuaaug

SEQ ID NO: 4191014 - RNA, 128 nt, Human
cauuaguaaggagcaaucagaaaucagauccaagaaagacuguaucucuauucaguucuaagucagagagcuagcaggaagcaguuuaguuuugcuuuguuugguuuguuuuaaugugguuucuagug

SEQ ID NO: 4191015 - RNA, 72 nt, Human
cauuaguccugaaugccuuuaggcagaaaguggugagaauucuuugaauaauauuaggcagaucagguggug

SEQ ID NO: 4191016 - RNA, 77 nt, Human
cauuaucuuugggaauuuuggucaguguauauuuauauuuauaauauacauugaguauuauuuagccauagcuaaug

SEQ ID NO: 4191017 - RNA, 81 nt, Human
cauuauguacauucaugucccacuucuagcaguguggugcugcugagaaaugcagacaugcuggaggaaaugagcaggaug

SEQ ID NO: 4191018 - RNA, 56 nt, Human
cauuaugucugaguuccaauaauggggggaaggaccagaaggaggaaggcauagug

SEQ ID NO: 4191019 - RNA, 59 nt, Human
ccaauggaaugucuugauauagagguuauuggugaccuuggccagggcaguuccagugg

SEQ ID NO: 4191020 - RNA, 61 nt, Human
ccaauggggaagcugcuccugguuuuacaguuuaguuugaaaucagaugcuuccuaguugg

SEQ ID NO: 4191021 - RNA, 56 nt, Human
ccaauguggaugucucuaguauauauuuuuauuuauuuacuaaacaugcauauugg

SEQ ID NO: 4191022 - RNA, 77 nt, Human
ccaauucaguuccuugugcgaauuccaagcugaaggcauuuagaaaaggagagagcgagaggagagaaauugaaugg

SEQ ID NO: 4191023 - RNA, 59 nt, Human
ccaauuggggaccagguggucugaucuaaacagaucagagccuuaugcuucucauaugg

SEQ ID NO: 4191024 - RNA, 84 nt, Human
ccacaacccagaggagggauggagggagaugggguuagagacaacuggaagcuuuaacuucaagcuucgucccuucgagugugg

SEQ ID NO: 4191025 - RNA, 57 nt, Human
ccacaagacucugucagcauaauccacagaacgacuuguguugaagauuauuugugg

SEQ ID NO: 4191026 - RNA, 85 nt, Human
ccacaaguguuugguuguuacucagcaguuguuuugugugcaguagcacugauggcuugcuuagugacagcaacaucccacaugg

SEQ ID NO: 4191027 - RNA, 67 nt, Human
ccacaauaaaugcugggcguggccauuguguucuaacauccaugccucugcagcuguuuauuagugg

SEQ ID NO: 4191028 - RNA, 77 nt, Human
ccacacagagacagaagcacuuaugaguaauaauucuacccugacucacacagagaugcuguguccuccugagcugg

SEQ ID NO: 4191029 - RNA, 84 nt, Human
ccacacagccaaagagggcagcuggauguuucaguggggguguuggcuggggucuaguuccagccuugccacuuuucugugugg

SEQ ID NO: 4191030 - RNA, 96 nt, Human
ccacacagccuucacuuaaugagaaaugggucugcugaagacguguccuuugugugccaccucccagagacaucauuucuccgggggagcuguggg

SEQ ID NO: 4191031 - RNA, 64 nt, Human
ccacaccagccugcaguuuccucuucuaggcuguggcuuggaggucugcaaggcgcuggagugg

SEQ ID NO: 4191032 - RNA, 80 nt, Human
ccacaccuuggggcuugcuguuguagccuguguggucacuaggcaugucugggcuaaggacgggcaagucccacaagugg

SEQ ID NO: 4191033 - RNA, 60 nt, Human
ccacacucaaguccugcauagcaucugugucacugacagauggugagauacugggugugg

SEQ ID NO: 4191034 - RNA, 84 nt, Human
ccacacugggcaauaugcacuguaauuuuuaacaaauaauaggaaacuguuaauguguucacaggaaauacaguuuugucuugg

SEQ ID NO: 4191035 - RNA, 64 nt, Human
ccacagaaagccugggaaguggaaacagacaggagccuguuggagcucuuggagcuuugugugg

SEQ ID NO: 4191036 - RNA, 115 nt, Human
ccacagacaaccguaaugcaagguguaccuugugcucaggaagcuguuccugcuaagggggcugggggucagggaagguuuccugggggagggccaccugugcuguguuucgugg

SEQ ID NO: 4191037 - RNA, 91 nt, Human
ccacagaugugugauuaaguacacauaaacuuugaguuugucuucugaggcucacagcauugaguguacuagauccuacacuucucaaugg

SEQ ID NO: 4191038 - RNA, 58 nt, Human
ccacagcuggaaugggguaccugcugggggauucucacagagcagcguucugcugugg

SEQ ID NO: 4191039 - RNA, 59 nt, Human
ccacagcuucugucugacccauguuucugccacugagcugguuccagaauugccugugg

SEQ ID NO: 4191040 - RNA, 66 nt, Human
ccacaggaagugaggccuaggcacugggugggauacugcuacucagucccagcucucacucauggg

SEQ ID NO: 4191041 - RNA, 100 nt, Human
ccacaggacccagauaucugacagaaucauuaagaccauuccuugaagugggaguguugguaaugguuuuaauauuuuaucaccuggcagcguccugugg

SEQ ID NO: 4191042 - RNA, 58 nt, Human
ccacagggacuguuaaaacccugggccuaucccggaguuucugauucagucugugugg

SEQ ID NO: 4191043 - RNA, 64 nt, Human
cauggcucacugcugagcucguucaaguguccagagaagagcaccuccgugcagcguggccaug

SEQ ID NO: 4191044 - RNA, 59 nt, Human
cauggcuccaaguuuccugugguuacugcccagccuucaggauuaauuuggggccuaug

SEQ ID NO: 4191045 - RNA, 60 nt, Human
cauggcugugcagagauugggaaaggcuauaucugccuucccacaucuuccacagcuaug

SEQ ID NO: 4191046 - RNA, 69 nt, Human
cauggcuuuugcuuuugcccauaagaagcauacuauuacuccuucaauaaggcaagcacaaaagcuuug

SEQ ID NO: 4191047 - RNA, 92 nt, Human
caugggagcucacugcugccuuuugcuccucccaccuuccccccagggagguggggagggagugaggcagcacguaagugccaccucccaug

SEQ ID NO: 4191048 - RNA, 70 nt, Human
cauggggcccacccucacccucucccugucaucuaauagucccagggggagcugggaggugaguuaccug

SEQ ID NO: 4191049 - RNA, 62 nt, Human
caugggguugaauaggggauugagguuaauuugagggccugaaucaauuaugggauucaaug

SEQ ID NO: 4191050 - RNA, 99 nt, Human
cauggguacacuuguugucagaaaacaucuugcucugauugguauuucucauggcuugaacugccgucuaggucucaggauguaucaauaagcuucaug

SEQ ID NO: 4191051 - RNA, 82 nt, Human
cauggguaucagccauauuagacacagggcucagggcugugugcaaccugcaucagugacugaauaugagugacaacccaug

SEQ ID NO: 4191052 - RNA, 77 nt, Human
caugguagcccaguugcuccacgcugcauuuuaguggagacagaaacugcugcgagagcacagggcccuaagccgag

SEQ ID NO: 4191053 - RNA, 63 nt, Human
cauggucagaggcagcaaggacugacauggauuucaguuugccacuguggacucuagaucaug

SEQ ID NO: 4191054 - RNA, 112 nt, Human
cauggucauccagaugcaggcucuucccuggggcacuauagcagagagggcucucuuccagucuauugcagauggaugcccucgugagcugaguuuugaugaacaucccaug

SEQ ID NO: 4191055 - RNA, 56 nt, Human
cauggucauuucccaucagugugaacucucugagggugucugaggggagugcugug

SEQ ID NO: 4191056 - RNA, 70 nt, Human
cauggugagcagggcaggacuggggaggggacagucucuauuccuuuaucucugcuuugccucugccaug

SEQ ID NO: 4191057 - RNA, 57 nt, Human
cauggugagcggccgcacacaauucugccccuagagggcaguggcugcacacacaug

SEQ ID NO: 4191058 - RNA, 77 nt, Human
caugguucugcaggcuguacaagaagcauggcaccagcaucugcuucuggugaggccucaggaagcuuacaaucaug

SEQ ID NO: 4191059 - RNA, 64 nt, Human
caugguuguacagcauuccauauagguguacuucauuuguuuucauugcuguacaauauucaug

SEQ ID NO: 4191060 - RNA, 76 nt, Human
caugguuguaguuuuguuauuuugucaggugagcugguugcagaaacucauccuggagaugacccuaauugccaug

SEQ ID NO: 4191061 - RNA, 69 nt, Human
cauguagaugggaauggaaggcauuuuuuguagcuguaacaauuauuugaauuccuucugauguauaug

SEQ ID NO: 4191062 - RNA, 119 nt, Human
cauguagguguucugagcagaguuucagcauaggcaaucuagacuucauggaaguggugacauuuaaugaaagugaagguuuacuaagcacuuacuuuguauaagcauugugcugcaug

SEQ ID NO: 4191063 - RNA, 130 nt, Human
cauguaguuauauuaaagaauguugaaucacugugauuacucauugaacuuguuuucaaagacuucagagaguccaguaugcaguuucauuccccauucucacacuuuuuuuuuguuaauggcacugcag

SEQ ID NO: 4191064 - RNA, 80 nt, Human
cauguauaguaugagcucauacacuuguguuaacucauauaauuaacucaacucaaacgcaugaguucauacugcauaug

SEQ ID NO: 4191065 - RNA, 76 nt, Human
cauguaucuuuaaguagguuuccucagugucuuuaauaugcuaauggacaaugugaaacuacaagaggagaauaug

SEQ ID NO: 4191066 - RNA, 130 nt, Human
cauguauuugugcuuuacagacucuucccuguguugguuguuuugucuguuuugucuuugucccucauaaagucauggcagcuagaauugaagaucgcauuucgggaguguucugaccagcacaaaucag

SEQ ID NO: 4191067 - RNA, 71 nt, Human
caugucacaauaugauuagauguuuucugaugauuuuaaguucuucugaggcauuuaauuaugaccccaug

SEQ ID NO: 4191068 - RNA, 87 nt, Human
caugucauucuuuucuucaugagcagaagggagggguuuugugaauuaaaaacucaaaugcuaaugccauggaaaaauuaugacuug

SEQ ID NO: 4191069 - RNA, 73 nt, Human
caugucucuagauauugccagauguccccggaagaacaaaaauuucugacacaaaauaaugacuaaagacaug

SEQ ID NO: 4191070 - RNA, 61 nt, Human
caugucugggcuuagggacauggcagagcgaaguguaugcaccugcccugugcccaugcug

SEQ ID NO: 4191071 - RNA, 64 nt, Human
caugugcaugcuguucugccagaaagauggagccacaccaaacuuucugcagaaggcauacaug

SEQ ID NO: 4191072 - RNA, 64 nt, Human
caugugccccagccgcugcuccuaagggaaccuuaguguucccagcuguggcgaggggaacaug

SEQ ID NO: 4191073 - RNA, 130 nt, Human
cauguggaggaaggaggcccagcccaggaggcaggacucugugcuggggaccucaucacccacgugaauggggagccugugcauggcauggugcauccugaggucguggagcugauccuuaaggugagug

SEQ ID NO: 4191074 - RNA, 63 nt, Human
caugugggcuaggagaaggcccccagguguccgagcccagggccucuguguucugcccacaug

SEQ ID NO: 4191075 - RNA, 130 nt, Human
caugugguccacaugguuuguugccuuuuucuuaguauuuauaguaauuacagauauuauacacugguaccugcuuauguuguuugugguuauaauaaguauuauuaguaacaaaaaauucgauuacgug

SEQ ID NO: 4191076 - RNA, 86 nt, Human
cauguguacaagggauaggggaccaguuaauccaggaguuagauggugacugagacuccaggaauuuccccuuuccuguaaacaug

SEQ ID NO: 4191077 - RNA, 61 nt, Human
cauguguacacagauaguaauggcaauguaauaguagccauuauucacugaguacuuaaug

SEQ ID NO: 4191078 - RNA, 58 nt, Human
cauguguaccugaaugccuccuccaggcagccuggagaacucagacgcaggucaugug

SEQ ID NO: 4191079 - RNA, 82 nt, Human
caugugucacuucugggcagaaguuuugagaaccagccuacaguuugcucugucucguuuccuucugccacagaucaccaug

SEQ ID NO: 4191080 - RNA, 65 nt, Human
cauguguccauucacugcaacacuugaacaagugaguaucaaguggagccaauguggaucucaug

SEQ ID NO: 4191081 - RNA, 95 nt, Human
caugugucuagcuuuguggagauauguuuuacuuaagaucccagggcagauuucuuagaaguaaagcauugucuucagagucagaccuauauaug

SEQ ID NO: 4191082 - RNA, 99 nt, Human
caugugugagaagcccuggccuagauggcaagggggcccauggugucugcuauguugacucaggucacccugcuguuuguccauuccuucucccacuug

SEQ ID NO: 4191083 - RNA, 61 nt, Human
caugugugagugagcagucuucccucagucugagaggagagaaaguuuugugcuauauaug

SEQ ID NO: 4191084 - RNA, 113 nt, Human
caugugugggagagagauugggcauauguauggcauaucugggagacucuauugguauggaguagagaaucuagaauguuuauaccaaagccagcaucuaaaaauccacuaug

SEQ ID NO: 4191085 - RNA, 59 nt, Human
cauguguggucuguggcuaucuugucucacaggcugcugaugccacacgaucucacaug

SEQ ID NO: 4191086 - RNA, 61 nt, Human
cauguguguccuaauuuggggaggaauauuuaaguaauguucucaacaaaaggaagcacug

SEQ ID NO: 4191087 - RNA, 69 nt, Human
cauguugaacuuacaaauuaaaagacuuauuuaaauuugaguggcuuuuucauuguagguaaaaauaug

SEQ ID NO: 4191088 - RNA, 100 nt, Human
cauguuggagaaccaccucugcaacccuggaaugggauauaugacauuugagcucccgauaucgugggucagaggagaaaaaaacuggguuuccuacaug

SEQ ID NO: 4191089 - RNA, 56 nt, Human
cauguuggcacugucucugccugagucuucccaagcagcacgcuuugccaacaaug

SEQ ID NO: 4191090 - RNA, 65 nt, Human
cauguuggccaggcuggucucaaacuccugaccucaggugauccaccagccucggccucccaaug

SEQ ID NO: 4191091 - RNA, 129 nt, Human
cauuaaaaucaccuaggagcuuauuaaaaauauaaauuccugggcccagcacuagaccuaaugaaucagcauuuccaagcguggguccaagaaucugugauuuaaauaaguaccccuagauaauugaug

SEQ ID NO: 4191092 - RNA, 99 nt, Human
cauuaacaaaagcaccaaaaggaauguuuuccagaccuagaugguuugagaagcaucuagguuuggaagauagaguccuuccuuuagcuguaguugaug

SEQ ID NO: 4191093 - RNA, 60 nt, Human
cauuacagugucagaggaacuguggcaaaaaauugagaggaaccuaucugaggcugaaug

SEQ ID NO: 4191094 - RNA, 86 nt, Human
cauuacuguauuauuggcuuccaggaucucagcagggcacgagggagguuuagccugucugaauuuuggaaucaaguuuggugaug

SEQ ID NO: 4191095 - RNA, 72 nt, Human
cauuacuuaacugcuaacugguuugauacuuuuuucaggucucguagguaucaguaguagaaaaguagcaug

SEQ ID NO: 4191096 - RNA, 82 nt, Human
cauuacuucauauaugaaaggcuuaauguuguuguaauguucugguuauuacaaaagauuuaagaucugaaaugaaguaaug

SEQ ID NO: 4191097 - RNA, 130 nt, Human
cauuagaaucaccuggggauauuaagagacacucauaccuaggcuucacuuccaguuauucugauuuaauuaauccggagcaagucccaggcacuaguauguuguuuacgcuuccuaggugauuccaaug

SEQ ID NO: 4191098 - RNA, 86 nt, Human
cauuagagacaguacaucacaguaguuaagccagacagccuauggccaaauucuaguucuaccacuuacugaucucgucuuuggug

SEQ ID NO: 4191099 - RNA, 62 nt, Human
cauuagcacugucugguuaucuugcuucaguugagggauucgggacaauagcagugcugaug

SEQ ID NO: 4191100 - RNA, 66 nt, Human
cauuagccaugugggaaaaacagccagagaaagcauucccaggcuaguccucccauguagccaaug

SEQ ID NO: 4191101 - RNA, 83 nt, Human
cauuagggaauuuuaucuucacuuauaucuuucuuugguugcaaaauugaagagacuaaucagggagaaacuauuauuugaug

SEQ ID NO: 4191102 - RNA, 85 nt, Human
cauuagguucucauaaggagcacaaaccuaggucccuuacaugcacaguucacaguaggguuugugcuccuaugagaaucuaaug

SEQ ID NO: 4191103 - RNA, 129 nt, Human
cauuaucagagucguggggaggguggaccuugauucuuccucucuguccccugaguccagacucucuagggaagaaucagacaggagacuggaucauggaccagcucccucaaaacuggccugaugaug

SEQ ID NO: 4191104 - RNA, 59 nt, Human
ccacaggucuguauuaacagaggguugggaaacuccugaucaucuugacagaugcuggg

SEQ ID NO: 4191105 - RNA, 68 nt, Human
ccacagguuucugauuucaguguuacuauaacagaaccuagaaguuagaguaucauucaaguaugugg

SEQ ID NO: 4191106 - RNA, 56 nt, Human
ccacaguaacuguuuuguaccgaggccagcuguacucgggagcaggaaagcugugg

SEQ ID NO: 4191107 - RNA, 68 nt, Human
ccacaguggcccaguugagaaugaaugaugcccuucaaugcacagucaggccgagaugggccuugugg

SEQ ID NO: 4191108 - RNA, 60 nt, Human
ccacagugguucucaaccaggggugauuuugcugguugcauuaacugagaggggcugugg

SEQ ID NO: 4191109 - RNA, 67 nt, Human
ccacaguguaucauuagugugaugaguuuaucucuuuaaagccucacaaccugcugauaugcugugg

SEQ ID NO: 4191110 - RNA, 55 nt, Human
ccacaguuuaggaagucacucuagguuaucacuguguggguuaucuauuuugugg

SEQ ID NO: 4191111 - RNA, 79 nt, Human
ccacauauauauuaguuuccuuucugccaacaaguugucaccaaaauuuauuggaaagaccgaauuccuguuugugugg

SEQ ID NO: 4191112 - RNA, 92 nt, Human
ccacaucaaugauaaagaacauuucuuccuugacuuaaauuguucccuaccauagcaguguggaacacucauggaagaguuuuuguuugugg

SEQ ID NO: 4191113 - RNA, 71 nt, Human
ccacaucagaaauguuuacucagugacuguuccuugaucugcugcugacucuaacaugacaucugaagugg

SEQ ID NO: 4191114 - RNA, 78 nt, Human
ccacaucuugccagaugggucucacagccccuggucaucuauuguccaggaagcugugagauuccaauaagauaaugg

SEQ ID NO: 4191115 - RNA, 109 nt, Human
ccaggcauaaaagaucacauauuguaugauucuauuuacaugaaauaucuauuagaggaugaaaaaauucauauagagggcauacaaauggugguuuccagggcccugg

SEQ ID NO: 4191116 - RNA, 68 nt, Human
ccaggccagaggaguugaggcuuuggguagcaccccgcaggcccagcaguagagcucauauggccugg

SEQ ID NO: 4191117 - RNA, 62 nt, Human
ccaggcccaggguacugaccaaacccuuaugauggccagucauuuucacccaugaggucugg

SEQ ID NO: 4191118 - RNA, 76 nt, Human
ccaggcccaggugucgauguuccucccaaggaaugauuggguggaugaaugaacacugagauguaccugggugugg

SEQ ID NO: 4191119 - RNA, 59 nt, Human
ccaggccucauaguagaccugcccuuaggaaagcagggguuaccaauacuugagccugg

SEQ ID NO: 4191120 - RNA, 89 nt, Human
ccaggccugcagcagggagcaggacacacgggcccagcaacuccagccagcagcuccagcccugcuuccugccucagcugcuggcuugg

SEQ ID NO: 4191121 - RNA, 72 nt, Human
ccaggccuggagcggccaucucauuugcaugccgcaagguuguggcucaggcggcuucuccugggggccugg

SEQ ID NO: 4191122 - RNA, 60 nt, Human
ccaggccuuccaguacgcagaagagcacgcggaaguuugucccgcuggcuggaagccugg

SEQ ID NO: 4191123 - RNA, 56 nt, Human
ccaggcucugcgcuggacauggggcaguugcucgugucuuuguguugagaggcugg

SEQ ID NO: 4191124 - RNA, 55 nt, Human
ccaggcucugucuggucagaagucacacauccucuccuugcucaacaaagccugg

SEQ ID NO: 4191125 - RNA, 56 nt, Human
ccaggcugcagucaaggggcauugggcuaacccaccacccuggcaggcaagccugg

SEQ ID NO: 4191126 - RNA, 91 nt, Human
ccaggcuggucccaaacuccugggcucaagcaguucucccgccgcugucuggcagguagcuggggcuacaggcguguaccaccaugccugg

SEQ ID NO: 4191127 - RNA, 76 nt, Human
ccaggcugugcuuuuaaaggcaauuaguagguuuacaaauucuauuuuuacauuuuguauuaaaaguauaguuugg

SEQ ID NO: 4191128 - RNA, 64 nt, Human
ccaggcugugcuuuucauaaauaagauucauguucuuuauucuggaaccuagcacugugccugg

SEQ ID NO: 4191129 - RNA, 61 nt, Human
ccaggcuugaagggaagaaugguuugagcaccgaggacaagaauuaauuccccaggccugg

SEQ ID NO: 4191130 - RNA, 64 nt, Human
ccaggcuuuguucugcacacacagacaggugcaaguaggcaugucauguauagacggggccugg

SEQ ID NO: 4191131 - RNA, 66 nt, Human
ccagggaauuugacuucagccuguacuuguaacuacuguucucuauggguagaagucaaaaaaugg

SEQ ID NO: 4191132 - RNA, 85 nt, Human
ccagggagcuaauaaagacucagaggcccaggcucauggaaguaggagagggccugggcuuuugcauuuuuacaaaguucccugg

SEQ ID NO: 4191133 - RNA, 64 nt, Human
ccagggcaauuauuuggaggguuaaacgaauuuaugcaaacaaaacccucugaauaguaucugg

SEQ ID NO: 4191134 - RNA, 66 nt, Human
ccagggcacguugggacaguacuuuuuucugcuuauaucuaaggauuuuuacuucagcuguucugg

SEQ ID NO: 4191135 - RNA, 70 nt, Human
ccagggcuccuuugccuucuggcuugcauuuggguucaaccaauagaaggcacagauagguaauagaugg

SEQ ID NO: 4191136 - RNA, 85 nt, Human
ccagggcugcccaaggccuggccugccugccgguugucgguggccccgaugggccagggcaggaggccugcuguggagggccugg

SEQ ID NO: 4191137 - RNA, 59 nt, Human
ccagggcugcugugggacuccaagggcuaacucaaggagagucccuaacacaggccugg

SEQ ID NO: 4191138 - RNA, 76 nt, Human
ccagggcuggcagcacagacuggucccaggucuccugaauucaggaacccgggcaaagcugugcccauucccaugg

SEQ ID NO: 4191139 - RNA, 56 nt, Human
ccagggcuucccacgugcccuggcugaccuugccuggggaugucggcagguccugg

SEQ ID NO: 4191140 - RNA, 60 nt, Human
ccaggggaacagauuagcagagacaucucauaggacugggaggugcuucuguauugcugg

SEQ ID NO: 4191141 - RNA, 70 nt, Human
ccaggggagcuguagaaagcccugggcugggaaggagaccucagguccagcuguugcagccuccccaugg

SEQ ID NO: 4191142 - RNA, 56 nt, Human
ccaggggcucugagugggccaggagggggcaguccuggacuggcucagcacccugg

SEQ ID NO: 4191143 - RNA, 82 nt, Human
ccagggggcgcugagaaccaccagggggugcucaggacaugaccggcccucaggaccaccaggggauuuucagaacaccagg

SEQ ID NO: 4191144 - RNA, 75 nt, Human
ccagggguauagugaugcauuaaucauaagacauuuuauuuguauugucuucuuuuggcacucacuuaucauugg

SEQ ID NO: 4191145 - RNA, 56 nt, Human
ccaggggucugcucggcuuaugggcacugugcuugcccaaggacacuggcuccugg

SEQ ID NO: 4191146 - RNA, 56 nt, Human
ccaggguccccgggucgcuggcaaguuuguggaagggccaggccugcgggcguugg

SEQ ID NO: 4191147 - RNA, 84 nt, Human
ccagggugagcagcagggugccagcuuugcaccugcaagacccugagagcaaguguccugagugccuugcuagucucacccugg

SEQ ID NO: 4191148 - RNA, 72 nt, Human
ccagggugccaaagaacaaauauggcaacuuuccccccaaguucuugcaauguuugcaguaacccauccugg

SEQ ID NO: 4191149 - RNA, 75 nt, Human
ccagggugggaauuucagaucagagaccauucuucucuaugagugauccauagauuaagauuccuuuuaucuugg

SEQ ID NO: 4191150 - RNA, 86 nt, Human
ccaggguguucuugggcaaacguaggggucagguagggacucugcuccagagacccagacugaucauugcucuaagguuacccugg

SEQ ID NO: 4191151 - RNA, 78 nt, Human
ccagguaccugggggagggucugcugacgaugcccaauguucaauggcccaagcaacccguccuugggggacuucugg

SEQ ID NO: 4191152 - RNA, 57 nt, Human
ccagguagccaaggggucugggagagggauaacuucauccagcaccauggcaucugg

SEQ ID NO: 4191153 - RNA, 117 nt, Human
ccagguagugugccuuccuuucauugugggagccuccacauuagugguggguccuggagaaggcagaccauagacuggaggaucuccuguuuugggugggggcagacacuacucugg

SEQ ID NO: 4191154 - RNA, 70 nt, Human
ccagguccagcugggccagggcacucaucccagucuauggggagaguccaccuuggcuccagcuggcagg

SEQ ID NO: 4191155 - RNA, 64 nt, Human
ccagguccuguuuucaccacagggucaccuccacccuucacugugcuggcaucucaggcuuugg

SEQ ID NO: 4191156 - RNA, 61 nt, Human
ccaggucugucagcagcaaagcgggauaaaaauaguuucuccugucugcucacagagcugg

SEQ ID NO: 4191157 - RNA, 74 nt, Human
ccaggugcucccgcucugucauagcacugaucagugacaacuuacaggaauguagcagcgauggaauuaccugg

SEQ ID NO: 4191158 - RNA, 55 nt, Human
ccaggugcuuguaccucugagcuucuauagccuucugagcauaugcagcaccugg

SEQ ID NO: 4191159 - RNA, 90 nt, Human
ccagguggaaggaacugcccugcagaaaggguccccaggagcccuguuaaugggaauuuauucagcaggucaggcagcaauuuucccugg

SEQ ID NO: 4191160 - RNA, 83 nt, Human
ccagguggcucugcugaucagggcaaagcaaagcuuaucagcugggcuguuaauaugucuggaucagcuaugaacugaccugg

SEQ ID NO: 4191161 - RNA, 56 nt, Human
ccagguguggccacauggcuggccugaaaucaugcagcuauuucgggcugaccugg

SEQ ID NO: 4191162 - RNA, 64 nt, Human
ccagguguucucugacauggcaaaucagaagaaaaaucauugcauugggagugaggagaccugg

SEQ ID NO: 4191163 - RNA, 103 nt, Human
ccagguucugcauccaggcccuagacuccuugccuaaucccagcuccccgcgaagaugcagccagcaggaacgucuagguuuugcagcuaccaaccaaccagg

SEQ ID NO: 4191164 - RNA, 62 nt, Human
ccaguaauguaaacacagagacagaacauugagaugugccuaguucuguauuuacaguuugg

SEQ ID NO: 4191165 - RNA, 91 nt, Human
ccaguacuauuauuaucucuccuuuaucaaggagccuuagagagguuaaguaauuuuucugaagucacaugauuggaaagaguagagcugg

SEQ ID NO: 4191166 - RNA, 111 nt, Human
ccaguagaaauggaaaggagaggacacacaugaaagacauuaaggugagaaaauuagcuauuuucacuaauauuucccuuuagugcauucuuuacuuuaauaaucagcugg

SEQ ID NO: 4191167 - RNA, 75 nt, Human
ccaguaguggacauucacucugcugcccgagggcugggguagccugccccggcccgcggacgcagcagggucugg

SEQ ID NO: 4191168 - RNA, 67 nt, Human
ccagucagugucaacaggaaguagcugguaggacaaaugcuauuuuuuaugucucuuuggugacugg

SEQ ID NO: 4191169 - RNA, 109 nt, Human
ccagucccugaccugaagcugccccuggggcugaggagccucacucugucccugggccagggucccgggcuccccagccuguggagugagagccgcagggcagggaugg

SEQ ID NO: 4191170 - RNA, 66 nt, Human
ccagucuggagacccuggugcugauuggcuauucuugggcacaaggcccugggucaccacaucugg

SEQ ID NO: 4191171 - RNA, 66 nt, Human
cauacauuuugagaggccaguuuucugaaaaauaagccaggaaagcuuagcauuuucaaaaugaug

SEQ ID NO: 4191172 - RNA, 107 nt, Human
cauaccagagacuccccuaauuugcauacugguguauauucaaguguugauuucaaagcagccuaacacuuaagcaugaaguauaaaauuaaugaguugaaccugug

SEQ ID NO: 4191173 - RNA, 59 nt, Human
cauaccaggaggcucugacuggacccuuggucacuggggaccaggcccuuccugguuug

SEQ ID NO: 4191174 - RNA, 57 nt, Human
cauaccucagauugcugccuugggcacaguuuuguuuccuagcauuuuugggguaug

SEQ ID NO: 4191175 - RNA, 130 nt, Human
cauacgccgaacuuuuagcuaucaauguugccuucuguuuuguauaauuagaagugcauccaaagccagucacuuuacuaucuauaaaauaaggauaacaaggaugcuaagucccucugagaagggugug

SEQ ID NO: 4191176 - RNA, 81 nt, Human
cauacuacaucagaaacucuggaaguggggccaaccgauuugugauugcauaggcucuccaggugacucugauguaucuug

SEQ ID NO: 4191177 - RNA, 57 nt, Human
cauacucacuguuguaucuucggugucaaacauagcaccugguacacaguaaguaug

SEQ ID NO: 4191178 - RNA, 80 nt, Human
cauacucuuacauaccauacauggugagaugaaauccuauuucaggaucauagccguauggccagauguaagaaaguaug

SEQ ID NO: 4191179 - RNA, 110 nt, Human
cauacugaagaucaaauaucauaauguagaaauuugggaaauaauuaaugugaagucaggucuugaucacucuguaaauucucuaucugugaguauuguuucguuguaug

SEQ ID NO: 4191180 - RNA, 57 nt, Human
cauacuuacuguguaccaggugcuauguuugacaccgaagauacaacagugaguaug

SEQ ID NO: 4191181 - RNA, 75 nt, Human
cauacuuagaggagacagacaaacuuuggaagccauguauugacuauuaaggaacuugucuuucucuuagagaug

SEQ ID NO: 4191182 - RNA, 103 nt, Human
cauacuucuacucucuccuacugaaauggagguuaacacuaaugcuacucagugacagcaugacauguucagcccucuauuaaucaguaaguuagauucuaug

SEQ ID NO: 4191183 - RNA, 68 nt, Human
cauacuugugcuccagggaguacauuuaucauaaaagaugguauagugguaaucucuggauuagugug

SEQ ID NO: 4191184 - RNA, 55 nt, Human
cauagaaaagaguagguaauguaaggcaaacccaacacauccuaucuuuacuaug

SEQ ID NO: 4191185 - RNA, 57 nt, Human
cauagaaacuugcagcaagcacgcuuucuuccuguguguuugucugcaccuuccaug

SEQ ID NO: 4191186 - RNA, 67 nt, Human
cauagaaugaagaauaagauagauggagcccccuugggcuuucauugcauuuauacuuauagcuaug

SEQ ID NO: 4191187 - RNA, 88 nt, Human
cauagacuuacuagaggaacaguuucagguuuugaugcuaaucaguguuguguccuaaaguuguccuuugugccuuuaaaaaguuuug

SEQ ID NO: 4191188 - RNA, 103 nt, Human
cauagacuugaaaacuguguagaaacagaaaacuguaauaguauggacaugguguaauauuguuaauuaagaguuuuuuguauuuauacuguuuauaacugug

SEQ ID NO: 4191189 - RNA, 86 nt, Human
cauagauaaaguguuucaauaauuuggaccuuauuuccuaaacuguaaaauguggcuaaaguucuguugguuacuuuaccucuaug

SEQ ID NO: 4191190 - RNA, 69 nt, Human
ccagagggcguccucaguuuguaggggcugcugaaaucuauuccuggguccugggaagcccugcccugg

SEQ ID NO: 4191191 - RNA, 59 nt, Human
ccagaggggaauuugucuuugaauaccauugccuguguucuuggcauuuucccauuugg

SEQ ID NO: 4191192 - RNA, 65 nt, Human
ccagaggggcugagcaggucacugccgggucccugugaggugaugacucuguguggccucucugg

SEQ ID NO: 4191193 - RNA, 56 nt, Human
ccagagguggcuuucaauauaguugcuuuauguagacaacaugacagccacucugg

SEQ ID NO: 4191194 - RNA, 129 nt, Human
ccagaguaaaccauuccccauugagguauucagggaacgccaggaugaagccuuguccaucagcaagugaugacagcaguccuggaguucccaggcagcuuuuauauucagaggaaaggcuugcuaagg

SEQ ID NO: 4191195 - RNA, 96 nt, Human
ccagaguagaauagagaggcacagcagaguuuggcuucuaaugguaucuagcccuccuucccauuaucuugccaacacuguccccuuuaucucugg

SEQ ID NO: 4191196 - RNA, 66 nt, Human
ccagagucaauuacuauuuuguauuuaccucucaguagauaauaagucugguaauaaugaguuugg

SEQ ID NO: 4191197 - RNA, 82 nt, Human
ccagagucacaagaagucacaucuaggaguggauagcaacccuuccaggcccgaggagaggauucuguuuuguguucuuugg

SEQ ID NO: 4191198 - RNA, 60 nt, Human
ccagagucugugugugucauccucauaaugauuugcuugaaaugaaacacaguggccugg

SEQ ID NO: 4191199 - RNA, 65 nt, Human
ccagaguguggcaucuuccaacuacauccaggguguuaaguuugguuuugaaugccacacugugg

SEQ ID NO: 4191200 - RNA, 86 nt, Human
ccagaguucccagaauggauccuggaggacuugucccagugaugcuccaugaagaggagccuccauggucacauucgcacucuugg

SEQ ID NO: 4191201 - RNA, 56 nt, Human
ccagaguucugucugccacacgaaagagaauauuugcuuacuugauagaacuuugg

SEQ ID NO: 4191202 - RNA, 58 nt, Human
ccagauaucuuuccauaagaaugucuaaauuuuggcuuguuauaagaagacugucugg

SEQ ID NO: 4191203 - RNA, 69 nt, Human
ccagauccuggagaggaacccgugacagcugggcagaaucuacugucugugccucuucucccagucugg

SEQ ID NO: 4191204 - RNA, 78 nt, Human
ccagaugaaggguggcucucaggcuucucggaugauauuucucuggguaaucagggcugggagcccaaacguaucugg

SEQ ID NO: 4191205 - RNA, 60 nt, Human
ccagauggaaaaacuaaagcacugccaucuuuaauuccguguuuaaguacuccuuucugg

SEQ ID NO: 4191206 - RNA, 65 nt, Human
ccagauggaguugccuggaaagcuuauacacaugaaaagacagucuccagguaacaucucucugg

SEQ ID NO: 4191207 - RNA, 57 nt, Human
ccagauggugccugucagaagguguugacuuuuuagacaacugggacuguuuccugg

SEQ ID NO: 4191208 - RNA, 55 nt, Human
ccagaugugugucacucucuggcuucauucuucagccauucugggugcagucugg

SEQ ID NO: 4191209 - RNA, 77 nt, Human
ccagauuagggagagacuaggggacuuggggucuuucuaugugacucugagaaucccuggacuuucuuagagaaugg

SEQ ID NO: 4191210 - RNA, 55 nt, Human
ccagauugaagccggccucgaagcuucccuuggagaaagccggcuaugauccugg

SEQ ID NO: 4191211 - RNA, 84 nt, Human
ccagauugacaucccuggggacugcuguuuccuguuggugccugugcaaaugaaggcagcaagcagaaguucuauguuuucugg

SEQ ID NO: 4191212 - RNA, 79 nt, Human
ccagauugucuuuccuuggaggaguccuguugcuaucucggcuggucuccuccauggagaugguauguaucagucaugg

SEQ ID NO: 4191213 - RNA, 78 nt, Human
ccagcaauggaaaaauaauaggaacgaguggcccuucagcaagaacccaugaagaccagccuauguuuuccauuuugg

SEQ ID NO: 4191214 - RNA, 109 nt, Human
ccagcacaacauuuagaacccaguguuuuugucuugaguuuuguuuugucaauuaacaccaaagcaggcuaaauaauaauacauguuugguugugagacaguguguugg

SEQ ID NO: 4191215 - RNA, 57 nt, Human
ccagcacagacguccagugggacucggacaucacucccacuggcaguuucugcaugg

SEQ ID NO: 4191216 - RNA, 95 nt, Human
ccagcaccauuaggaagggauggauauuugcuugcuuuggauucaguauuuggcuguucuucaaaauauuccauccauuuccaaaugaguacugg

SEQ ID NO: 4191217 - RNA, 68 nt, Human
ccagcacggucugauccggaaauacggccucaauaagugcagccaguguuuccgucaguaugugaagg

SEQ ID NO: 4191218 - RNA, 82 nt, Human
ccagcagacagccugagggaggcagugcauguucugagccagggccucaggaggccugcagcugccauucugcuucuguugg

SEQ ID NO: 4191219 - RNA, 94 nt, Human
ccagcagagguuuagcugugagucaugggugugagcuuauuccauaaaaucucaggagcccaagacuguacaguuaaagacucccaucugcugg

SEQ ID NO: 4191220 - RNA, 130 nt, Human
ccagcagcuucuaaguggauaagcacagauagcaaaggcccuaauagagcacauauuauauauuggagggacagagugguucucuauuaggucuuuugcuaucugugcuuauccaguuagaagcuuuugg

SEQ ID NO: 4191221 - RNA, 59 nt, Human
ccagcaggacuuuggaaauaugacaugccuuguuuauguuacuaaucuguucugguugg

SEQ ID NO: 4191222 - RNA, 56 nt, Human
ccagcaggagaugccugugucuccagagacgcgagagaguggugucugccaguugg

SEQ ID NO: 4191223 - RNA, 85 nt, Human
ccagcauagcuaacucagcaggucuuggguagggguucagauuuugcauuucuaacaauuugccgggugaugcucaugaugcugg

SEQ ID NO: 4191224 - RNA, 72 nt, Human
ccagcauggaccauguguugcugacaggaaguuccuauuagcaguuguaugugucugauuaauaaaagcugg

SEQ ID NO: 4191225 - RNA, 82 nt, Human
ccagcauguuauugcucccaggacucuugagccaggucauguccucgguuuuuauguguugggagugaagauaauccacugg

SEQ ID NO: 4191226 - RNA, 58 nt, Human
ccagccacagcugggugccugacggggcugcuuuucccuuguuggcugcuguggcugg

SEQ ID NO: 4191227 - RNA, 79 nt, Human
ccagccccuugcuagcugugcacccaggggccagccaaucccuggcucugagcugcaaagcugcaauacagggauaugg

SEQ ID NO: 4191228 - RNA, 75 nt, Human
ccagcccucagggaccacugacuucacugugaaaucacccauguggagucccagugagcgccccuuaggaacugg

SEQ ID NO: 4191229 - RNA, 69 nt, Human
ccagcccugcaugugcuucugcugauccgucacuguguggucacaccccaaguacauucgauggggugg

SEQ ID NO: 4191230 - RNA, 56 nt, Human
ccagcccuggggguccuucccacuguuucacaacagccaguccucccacagggugg

SEQ ID NO: 4191231 - RNA, 98 nt, Human
ccagccucacucccgcagccacugcugcccaucuggccacacacaggaugccccugguagugucugcucuggugccagggcuguugggggcaggcugg

SEQ ID NO: 4191232 - RNA, 68 nt, Human
ccagccuccugggaugacucuuucuuuuaguacuguaauucaaggcccuuaucccaggagacugcugg

SEQ ID NO: 4191233 - RNA, 72 nt, Human
ccagccugaccugcuccaggaaagccugaggcccggaggucccugggaagggaguuucuuggagugggcugg

SEQ ID NO: 4191234 - RNA, 84 nt, Human
ccagccugggugugcgcagcgccugcucuguuuccauguggccuguguggucguagcuccauugcagggcucgcagcaggcugg

SEQ ID NO: 4191235 - RNA, 116 nt, Human
cauuaucuacugauuagcaggauaucuuuagggcucagaaagcagguuuucugucucuaccgauggcuuguuuucuggcugaagaaugaagguguuuugauacaaaguuauuauug

SEQ ID NO: 4191236 - RNA, 130 nt, Human
cauuaucuaucuguugcugaaaccucuguguuucccacaccccaccaguaacugagggucuucccagucccucugugugcugcuggggagggcucggcagagagggaagcaagaguuaaaauggauauug

SEQ ID NO: 4191237 - RNA, 89 nt, Human
cauuaucuguuuccuugugccuguagcauuuacuguaauuccuuagauuaaaaccacggccccuaauguuacaggacaaagauggagug

SEQ ID NO: 4191238 - RNA, 119 nt, Human
cauuauuaagucuucguaaauggcauuauuaauagcugcaugaguauaggauagagaaacaccagugucuucuuaguagccauuauauaauuuccaguauuuuaugauuauuauuaaug

SEQ ID NO: 4191239 - RNA, 59 nt, Human
cauuauuacagucccagggaguaggggagucccauccuggcccuggcucugugaucaug

SEQ ID NO: 4191240 - RNA, 63 nt, Human
cauuauucaauguuauuucagugcuuaccaagcugggcaggcacuggagaaguauugcugaug

SEQ ID NO: 4191241 - RNA, 72 nt, Human
cauuauucuccuguggugcguaccccuccauauaaacaagauggggauucguugccaugguaacagagugug

SEQ ID NO: 4191242 - RNA, 68 nt, Human
cauuauugccauccuggaaccuagaauuuuuuuaacuuguuaaugcugccuaggauggcaaaauaaug

SEQ ID NO: 4191243 - RNA, 73 nt, Human
cauuauuuuguuuccuuuggaguagagaaacgugaauucaugaugaaaucuaaagccuagaggaaagguaaug

SEQ ID NO: 4191244 - RNA, 60 nt, Human
cauucaagaguggacauaaugcucugcucccagaccacgucaaaguguccacucugggug

SEQ ID NO: 4191245 - RNA, 55 nt, Human
cauucacaauaguugaaagguggaaacaacuccaauguccaucaacaggugaaug

SEQ ID NO: 4191246 - RNA, 106 nt, Human
cauucacagggcagcagggagaagugggccagggccaggccuccaggacaugggaaccauccuggggaggguucuggcuccuucccccaguguuguauuguaagug

SEQ ID NO: 4191247 - RNA, 110 nt, Human
cauucagagauaauggaaaaauaauggauaagccgcuccuguccuucauccucccuagcuuccuggagagguuggugaggggacacgguguccccauuaugcuuagaaug

SEQ ID NO: 4191248 - RNA, 123 nt, Human
cauucagagcagaagcugcugauuuuauucucaggaaauuuauauugugcccaguuagggagaaagaaaccucuucuagcuauaguguuuucuuaguucuuagaaaaagagaucugaagaaug

SEQ ID NO: 4191249 - RNA, 60 nt, Human
cauucaguggaguauuauucagccacaaaaaggagugaaguacugauacacacugcaaug

SEQ ID NO: 4191250 - RNA, 59 nt, Human
cauucaguuuaauuccauuuauuauucuuuaaggauacauacauggagauaaagugaug

SEQ ID NO: 4191251 - RNA, 58 nt, Human
cauucauccacuguuggaaauuugaguugcuuccuccuuuucccuauuguggauaaug

SEQ ID NO: 4191252 - RNA, 75 nt, Human
cauucauuuauucuauaggcauuaagcaccugccaugcucugagaacagugcugugugcugggaauaaaagagug

SEQ ID NO: 4191253 - RNA, 58 nt, Human
cauuccaggcagagcacaagacucuccaucagaagggagauuagcaugcuugaggaug

SEQ ID NO: 4191254 - RNA, 75 nt, Human
cauuccauucuugcuuucuagaaggcacagccaccccaguaucugguccaggcacccuucuagaguaauggaaug

SEQ ID NO: 4191255 - RNA, 58 nt, Human
cauucccaagcauaaaugguaccuccauaugaucaaagaggugugccaaaugggaaug

SEQ ID NO: 4191256 - RNA, 68 nt, Human
cauucccacacuccauauaauucaggggggauaucaaauaguauuccugagcaggagucaugggaaug

SEQ ID NO: 4191257 - RNA, 65 nt, Human
cauucccucuuugaaacccugagagacaacugcuaaugcuauuggcuccaguguucaggggagug

SEQ ID NO: 4191258 - RNA, 66 nt, Human
cauuccuaguuuuggacauuccugcagccucugggaaauugccaaaauggccaaaagcuagagaug

SEQ ID NO: 4191259 - RNA, 72 nt, Human
cauuccuaugccaagaauccuguucuugaagauaaacuguuaucuuuggugcaugauacuuugucuagaaug

SEQ ID NO: 4191260 - RNA, 90 nt, Human
cauucuaauaucuaucucauaacucauuugaagacaccaaagagcuacaggcccuaagucuucaguuugagaguggaauacauuagagug

SEQ ID NO: 4191261 - RNA, 85 nt, Human
cauucuaguacacauuucaagcauugacuucuauguccaguggacaaauguaguugaaaaguuaagguguggauguauuagaaug

SEQ ID NO: 4191262 - RNA, 59 nt, Human
cauucucaaugagacauuacugggaacaaacucuaauuccaauaauguucaugagauug

SEQ ID NO: 4191263 - RNA, 57 nt, Human
cauucucacaucugcccugugcugggacagcgaguccucaccacacacuguggaaug

SEQ ID NO: 4191264 - RNA, 55 nt, Human
caugugggacaaucucagguaucaagucacugaugcagcugaugauacccccaug

SEQ ID NO: 4191265 - RNA, 63 nt, Human
cauguguagaccgugaccucauccgcugcucacagcagccccaugaagcaagggucacacgug

SEQ ID NO: 4191266 - RNA, 59 nt, Human
cauguguagugaaauaagcagugucuuuaaaugauaccuguuuguuuucauagcaugug

SEQ ID NO: 4191267 - RNA, 96 nt, Human
caugugucuguguguacccuugauuuacauguuugcacacauauguaagguaucugugcucaugcaugugaauuaugguucauguauggcacuaug

SEQ ID NO: 4191268 - RNA, 69 nt, Human
caugugucuguuauacagaggagacuccaaaauggccugggauaugucacuuaacuguaauaacacaug

SEQ ID NO: 4191269 - RNA, 82 nt, Human
caugugugagucaaggagugaacacauaaaagcaaagggugauuuaucauaucauuguuguugcuguguugacaucugcaug

SEQ ID NO: 4191270 - RNA, 80 nt, Human
cauguguuauucauagaaagugcuuagauuggugccugacacuuagcuaauauuuacugagcacuuccugugauauuaug

SEQ ID NO: 4191271 - RNA, 75 nt, Human
cauguguuuucugucucacacugugccaaauccuuucuaccuguggauucaggaaagccagugugcugacacaug

SEQ ID NO: 4191272 - RNA, 77 nt, Human
cauguuagucuucacucuucacuacuauucuauacccgagaugguggaauggggguuccaagagaugggggaacaug

SEQ ID NO: 4191273 - RNA, 128 nt, Human
cauguuauuuucauuuucguuacuugagcagcauugacaagccucagucuuuugcgguccgcagaucaugauucuuggcuaugcaaaccugaggcugaugcauccuccagcagcugaccacggacaug

SEQ ID NO: 4191274 - RNA, 59 nt, Human
cauguucaucagaucaauuguaaugaaauacaaauuuaugaaauugucuguugaauaug

SEQ ID NO: 4191275 - RNA, 69 nt, Human
cauguucuguuguugaucuuuggaggguacaucauccaguuccuauccaaaggaacaaucacagccaug

SEQ ID NO: 4191276 - RNA, 101 nt, Human
cauguuggucaggcuggucucgaacuccugaccuugugauccaccuguuuuggccucccaaagugcugggauuacaggcgugagccagccugacccauaug

SEQ ID NO: 4191277 - RNA, 64 nt, Human
cauguuuacccagauaauguaacaguuuuugugaaagaaaucuacuuagugucuggaugacaug

SEQ ID NO: 4191278 - RNA, 76 nt, Human
cauguuucagauuuucggaagguaacuuggcgcauaugccccauccuguguuacucuuccccggggucuggggcug

SEQ ID NO: 4191279 - RNA, 78 nt, Human
cauguuuccguguaucugguggaagaugugugucugcaggaugagugucucuuuugucgguguaucauggauugugug

SEQ ID NO: 4191280 - RNA, 55 nt, Human
cauguuuguccacaugguagacugcacuagccuucuccaauguaggauaaaugug

SEQ ID NO: 4191281 - RNA, 66 nt, Human
cauuaaauaauuuauuugaaauuuuguaaauggcauaugccauuccagacagguaaauuagguuug

SEQ ID NO: 4191282 - RNA, 57 nt, Human
cauuaacacuuuggauuuagacauauguagauuagcuauaagucagaaguguuaaug

SEQ ID NO: 4191283 - RNA, 100 nt, Human
cauuaagaagguuugagaccagaaaguuugagaacuguagauuggagggaacauuaucauaacaaagaucaaauuuuccuugacucucaauccugagaug

SEQ ID NO: 4191284 - RNA, 72 nt, Human
cauuaagguaaaugggggaaucaaaguaagaaaucaaaucuuucaaacuguacuuuccccuaggcguuaaug

SEQ ID NO: 4191285 - RNA, 76 nt, Human
cauuaaucucuauuuuucuuggaccagacagggcaaaaaaucugaauuccccagaagagauagacuagaauugaug

SEQ ID NO: 4191286 - RNA, 95 nt, Human
cauuaaugcaggugauuacuugaauucucagguaaaaguuaaguggaaguacuugaauuaggccuugagagaugaaaaggaucuaucuauuaaug

SEQ ID NO: 4191287 - RNA, 60 nt, Human
cauuaaugggaugagguggaaaguuggacacacuaccucacagucugccuuucccuugug

SEQ ID NO: 4191288 - RNA, 60 nt, Human
cauuacauuucaaaauguuuccugugauugcuucuaaaggaagcucuguguaauguagug

SEQ ID NO: 4191289 - RNA, 118 nt, Human
cauuaccccauugguugcagccaauaaaagugggaauaggacauuggaagguaguuaugcauuagacuauuuccuauuucuuguccccuacaguugcuguuuuuacugcacgguuuug

SEQ ID NO: 4191290 - RNA, 75 nt, Human
cauuacuuaacauccugcauuuuucuucagacuugauuuucaaagaaggagaaacgcaagaugcuaaguuaaaug

SEQ ID NO: 4191291 - RNA, 130 nt, Human
cauuagaaucuccuggaggguuuacuaagccacacuucccuuggcgcugcucccagagcuucugauguaguaggucugggauagggccagaacaugugcguuuugaacagguucccaggugauacugacg

SEQ ID NO: 4191292 - RNA, 129 nt, Human
cauuagaauugccuggagaggaaugcaaagcccagaugucugagccacacuccccagucauuugcagaaacuggucuggagugagggccaggcauugguguuuacaguguuucucagcugauucuaaug

SEQ ID NO: 4191293 - RNA, 71 nt, Human
cauuagagaaggagacagagcuuuuaaauuuuuaauugaaagggacaaaggcaauuucuucuuccugaaug

SEQ ID NO: 4191294 - RNA, 81 nt, Human
cauuagagaccuggugauagcuguccuacacagcuaauaaaagccacguggggcuacuacuauaaucaggagcugcugaug

SEQ ID NO: 4191295 - RNA, 86 nt, Human
cauuagauucucauaaggagcgcgaaaccuagaucccucacgugcaccguucacaauaggccuugugcuccuaugagaaucuaaug

SEQ ID NO: 4191296 - RNA, 60 nt, Human
cauuagcaggcacuaagaaggucagacuuguguuuuagaagggcccucuggcugcugaug

SEQ ID NO: 4191297 - RNA, 60 nt, Human
cauuagcugagucagauugcagucuuguguccacaagagaguucuuugauuagugaagug

SEQ ID NO: 4191298 - RNA, 55 nt, Human
cauuagguauuuaagcacacagagcaaggccugugugcucuuuuugaagccaaug

SEQ ID NO: 4191299 - RNA, 66 nt, Human
cauuagucaaaacuuugggcaggggcuaucuacuagaauuaauccuccucauaucuuugacuagug

SEQ ID NO: 4191300 - RNA, 66 nt, Human
cauuaguguacauauugagucugcugacaaucuucggugucagggaugacaguauaugccuugaug

SEQ ID NO: 4191301 - RNA, 82 nt, Human
cauuaucuccugugggucaccaauaggcacaaagaagcagucuguuacuaauugguagccuagugguuccaggaaguuaaug

SEQ ID NO: 4191302 - RNA, 83 nt, Human
cauuaugauaaauucuuguuccuuuguauucuuagcaauggcaggcuuggaauacuaaaggaagcaauugacuuaaaauagug

SEQ ID NO: 4191303 - RNA, 57 nt, Human
cauuaugcauuaguucuuguugguuguauaaccaugcaucaaagcuaauauaugaug

SEQ ID NO: 4191304 - RNA, 68 nt, Human
cauuauguaccucuuucugcuucauugcuuuguuuguuggccuuggagugaaguaaagaggacaagug

SEQ ID NO: 4191305 - RNA, 57 nt, Human
cauuauuaauucagcacaugcuuauagggugccugcuaugugccagaaauaguagug

SEQ ID NO: 4191306 - RNA, 80 nt, Human
cauuauucaggaugaaagugugcaacacuagauccuaccaucuaguuuuuuguccuaacauaauucauccaugagugcug

SEQ ID NO: 4191307 - RNA, 60 nt, Human
cauuauugucaccuuuauuuggauugcccuaaauguggcuagaguacaggugcagaaaug

SEQ ID NO: 4191308 - RNA, 97 nt, Human
cauuauuuaagagaagaguccucacaugaauaaggcuuuauugugcuuauccgaagcagcagggcuuugucucugugaaauguuucuacuuugaaug

SEQ ID NO: 4191309 - RNA, 100 nt, Human
cauucaaaaaaugugccaguuacaagugauucuugguguuuuauuacaauauaucucacugaacaccuauguggaaaucagcuuguaauuucacugaaug

SEQ ID NO: 4191310 - RNA, 58 nt, Human
cauucaaagcaagacacaauuccuagguaguuaaauuuaggagacucuguauugaaug

SEQ ID NO: 4191311 - RNA, 57 nt, Human
cauucaaagcaggaaaggccuuugucauggucaaauggcuuuaauguguuuugaaug

SEQ ID NO: 4191312 - RNA, 59 nt, Human
cauucaaaugugccacuguccucauuauggagcucagauggcugaggauauaguggaug

SEQ ID NO: 4191313 - RNA, 80 nt, Human
cauucagaccacuggcacucagguuaauggagguuuuacugucuuccagugaaacaugagguguggguggggaaagagug

SEQ ID NO: 4191314 - RNA, 71 nt, Human
cauucagauaguaugauuuucuuccuuagugguuacauuugacugccaggauuaaaguauauuuuugagug

SEQ ID NO: 4191315 - RNA, 109 nt, Human
cauucauauaauaaucuuuuucuuuccucuugguuacuuccugaaucuuccauguauauuucuaugugugugcauuggcaggaauaaugaaggacagcauguguggaug

SEQ ID NO: 4191316 - RNA, 122 nt, Human
cauucauccaucgagggacccuuagguuguuucuauaucuuaccuauuguaaauaaagcugcaaugaacaugugggugcagauauuuuuugagauacugauuuucuuuccuuuggauauaug

SEQ ID NO: 4191317 - RNA, 62 nt, Human
cauucaucuaucaaaugguaccaauggguugagaugaccaaggugcucgcugaugaggagug

SEQ ID NO: 4191318 - RNA, 79 nt, Human
cauuccaaguauauacaugauaugaguguauuuccugacucccuuuuugaugguaucaugugacuagguuuggccaaug

SEQ ID NO: 4191319 - RNA, 120 nt, Human
cauuccacaccagcauuuuagucccucagucuguugcauguugcauauauuguuucucauuacucaaguuuguagaaauguaaccaggagauagaagagaaaaagagcuuguggggaaug

SEQ ID NO: 4191320 - RNA, 57 nt, Human
cauuccacaguguguggugaggacucgcugucccagcacagggcagaugugagaaug

SEQ ID NO: 4191321 - RNA, 83 nt, Human
cauuccacuugucuuggugccuggcacaggaauuaggagguccaagacucaccugaaagaugccggugcccauaacagggaug

SEQ ID NO: 4191322 - RNA, 74 nt, Human
cauuccagaaagauuucacaucccaagccuaagguccaggggcagcaggcauugaggcggauguggcuggagug

SEQ ID NO: 4191323 - RNA, 68 nt, Human
cauuccagacugggcugguggaaagcuggaaaauagaucacuuucccaggcccagauuuuagguaaug

SEQ ID NO: 4191324 - RNA, 65 nt, Human
cauuccaguaugugucuuuuggcaaacagauguuugcauuucuuuugaguauaugccuaggaaug

SEQ ID NO: 4191325 - RNA, 58 nt, Human
cauuccauggaauaaauuccuuauugaagguaacuuucagaauuauuuuuaugggaug

SEQ ID NO: 4191326 - RNA, 67 nt, Human
cauucccaacuugcaggauuuugcugcuguagaauuuacgaugccacaaaccugcauuuaaggaaug

SEQ ID NO: 4191327 - RNA, 76 nt, Human
cauucccacggccacugcagcaccccaguagcuccaacagaaggaccccuggagucugugugugucuguaggaaug

SEQ ID NO: 4191328 - RNA, 76 nt, Human
cccaagaaucaacauuauuuaguggaaaaaaguaucaacuaguagaaauuauuaaguaauguuuggggggcuuggg

SEQ ID NO: 4191329 - RNA, 69 nt, Human
cccaagaggaccuugccagggcagugcuaggcagagucucucugccugccuaggucuggccuccuuggg

SEQ ID NO: 4191330 - RNA, 127 nt, Human
cccaagcccauuuccucuaccucccuccguagugacaucuggccucacguccccgggguucguccuuacagaaugggauggagguucucagaugcucauuagccaggaggauaauugagggcuuggg

SEQ ID NO: 4191331 - RNA, 62 nt, Human
cccaagccuuucaaaacucagacugccuaauugucagggcucuguuuugaagaggcucuggg

SEQ ID NO: 4191332 - RNA, 81 nt, Human
cccaagcuaagugcugagcaggugaugugagucuggaacagccuuuguucugggauuuaggcacuuucucaugagcuuggg

SEQ ID NO: 4191333 - RNA, 79 nt, Human
cccaagcugaagcugccugggaggaagggcugagcaugccuagcccagccccuucuuuggggagcugacugccuauggg

SEQ ID NO: 4191334 - RNA, 63 nt, Human
cccaaggcuggagggcuuauguaugcuggggugcuggggaaugcagggucuccuguacuuggg

SEQ ID NO: 4191335 - RNA, 72 nt, Human
cccaaggugaaguggcuggagccccaggcugggguacugucccaacucugccacuagccgcugagaccuggg

SEQ ID NO: 4191336 - RNA, 77 nt, Human
cccaagugaccuccuaggcaggagcucuguccaugagauuguccuuagcagggcucugccaugggcccggcacuggg

SEQ ID NO: 4191337 - RNA, 65 nt, Human
cccaaguuccaagaaguaaagggcucucuccacuuuuauccuuccaucuaucccuggagcuuggg

SEQ ID NO: 4191338 - RNA, 69 nt, Human
cccaaguuuggagugggcaauguaggcaagucgaugaauuuugcugccgacacccuuugagaucuuggg

SEQ ID NO: 4191339 - RNA, 61 nt, Human
cccaauauccugcuauacuccugccagagcuguucaggucagagaaaaguaggguguuagg

SEQ ID NO: 4191340 - RNA, 62 nt, Human
cccaaucacugccauccaagcagccaucucauauggcagcagggaggccaguguucccuggg

SEQ ID NO: 4191341 - RNA, 129 nt, Human
cccaaucaggaggcuccucgaugugacguggauccguguuuccucuucuucuuccuggugguuuacguaagagggagagcaauggggacgggcagggacagagcugcgggcugagguuccuccguucgg

SEQ ID NO: 4191342 - RNA, 57 nt, Human
cccaaucuuugcggaugguugugauacugcaauaguguuucaauccuagggguuggg

SEQ ID NO: 4191343 - RNA, 88 nt, Human
cccacacaugugcucggccaugccugugggugcaggcgccaugcgucugcacacacagugcaugggcuugugccagcacacacacagg

SEQ ID NO: 4191344 - RNA, 79 nt, Human
cccacacucuucaccuccuccucugugggcagcaggucccugccugaagccgacagacaggaagucggaucuguguagg

SEQ ID NO: 4191345 - RNA, 70 nt, Human
cccacagcgccccccacgcacuugguaagggccccugguccaggcugcuguacuuggggggugcuguugg

SEQ ID NO: 4191346 - RNA, 62 nt, Human
cccacagcucaagugucuacaccgcacugccauccaggcugugagccgcugcugagcauggg

SEQ ID NO: 4191347 - RNA, 74 nt, Human
cccacaggcaggcucacuguaaggucagcuccaucacaguggcagcuaggagauuuugugaggcuuccuguggg

SEQ ID NO: 4191348 - RNA, 69 nt, Human
cccacaugugguuugcacagcguugggggagucaccagccccuucagccugucugcagaccccuguggg

SEQ ID NO: 4191349 - RNA, 80 nt, Human
cccacauucaguuucaaauccugugaaguuuuagcacuuuaacuccacaaaauacacagggagagauuggaaacuuaggg

SEQ ID NO: 4191350 - RNA, 72 nt, Human
cccaccagccaagggcuguuuuuggcaccugggacagagucugugccuuuaagaagcucauggucugguggg

SEQ ID NO: 4191351 - RNA, 75 nt, Human
cccacccccgcccugcucggccaguuucaggauuccuggggccagagauggggcgcagauuuguuuugggguggg

SEQ ID NO: 4191352 - RNA, 90 nt, Human
cccacccucuuuguccugcagggugcugccacagauuuauagaaagagauggagcugagaagaugguaccuguggacacaggggguuggg

SEQ ID NO: 4191353 - RNA, 66 nt, Human
cccacccuguugucugcagcuuucaguucuuccucuuaacuucugcuguugugacguuaguuuggg

SEQ ID NO: 4191354 - RNA, 106 nt, Human
cccaccucccccaagcccugcaggcuugggcucagcaccguguggaccugacgggaguuucccaugauucugggcucaaaaugcugggugccugggagaggguggg

SEQ ID NO: 4191355 - RNA, 82 nt, Human
cccaccugcagcccuuagcuguguagacacucagagccagacaagacccugguccucagccuuguccacagcuacagguggg

SEQ ID NO: 4191356 - RNA, 59 nt, Human
cccacggccugaccugguguugacaggagcaccugcagagagugccgggcagccccggg

SEQ ID NO: 4191357 - RNA, 64 nt, Human
cccacgggcugcacgggcuuccguggccuggcugcuggccaccagccuccuagcugcuccuggg

SEQ ID NO: 4191358 - RNA, 61 nt, Human
cccacggucaccugaaggucagaggcugagaagcaggaacgaguucauggggaccuguggg

SEQ ID NO: 4191359 - RNA, 130 nt, Human
cccacuauguaaggucagauugggcagugaguguugaaagaugaaagcaggcuggugagcaggccgacugaggaagcccacacggccugccuuaaauucuagucccaccacuuuccagcugcgccucggg

SEQ ID NO: 4191360 - RNA, 76 nt, Human
cccacuccccuccguagaucccagaaagcagcaguguggggcaugauacuugacauuugcgaucaaggggagaggg

SEQ ID NO: 4191361 - RNA, 68 nt, Human
cccacucgugggaaggagcuggucuucgcagcuuugcgugaagcucugauacuuccuaccugagucgg

SEQ ID NO: 4191362 - RNA, 65 nt, Human
cccacugaccgccagagugggugccaccuucuucaggguggcgccagcccaggccgucguguggg

SEQ ID NO: 4191363 - RNA, 107 nt, Human
cccacugccuggcugcuuucugcuguuggugucugcuccaaucucagaaaaguuggggcaaaaccugggcaucaugaauggcagcagaaggcagauagguuccuggg

SEQ ID NO: 4191364 - RNA, 74 nt, Human
cccacuguagcuaguccugggucuggagaauggaauguaugcguugcauuccuuucuaggauagcugaucaggg

SEQ ID NO: 4191365 - RNA, 60 nt, Human
cccacuguggaagaaaggggaggucccacgguacuugccuuggccuuucuucccagaggg

SEQ ID NO: 4191366 - RNA, 65 nt, Human
cccacuuggcauaauauucaccacccuaucuccccaaauaccuaguggugucuuauuacaguggg

SEQ ID NO: 4191367 - RNA, 63 nt, Human
cccacuuugguugcacucugcccuguggggaccccugacugaaggagggcagcugagaguugg

SEQ ID NO: 4191368 - RNA, 79 nt, Human
cccacuuuucagaacugcugcuuuugcgggagaacaccuuuuuccagguguuguccuuaggguagcagggaagacuggg

SEQ ID NO: 4191369 - RNA, 78 nt, Human
cccagaaaauuuaaugacuuaccugugauuucagaccgagacacacagaaaugcagguauauuuuauuaaaguuuggg

SEQ ID NO: 4191370 - RNA, 55 nt, Human
cccagaacacagccucuauuuuccagccucuuuuggagcugaguguggucauggg

SEQ ID NO: 4191371 - RNA, 66 nt, Human
cccagaacuuaauccaggcgaaugcagaaggccuuugcugguuuucugguuuggguagucuuuggg

SEQ ID NO: 4191372 - RNA, 75 nt, Human
cccagacagaaucaucuccugggacugaccucaugcacaugcucuugucuagcuacacaggaggacucuucuggg

SEQ ID NO: 4191373 - RNA, 71 nt, Human
cccagacccccgacauggcaaagugcaggggaaggagaagggucuuugagcaagccugcggcgggaaaggg

SEQ ID NO: 4191374 - RNA, 122 nt, Human
cccagaggaacgcuggacaaagggcaaggucgucugcagaggguuugagcauccuggcagaaaggggcacugucaggcugucuuccucccucuugggcaucguucuuaccaguuuccuuggg

SEQ ID NO: 4191375 - RNA, 59 nt, Human
cccagaggcuggcagccagcugauaccggacaggguucacaggggccagcgcucugugg

SEQ ID NO: 4191376 - RNA, 62 nt, Human
cccagaguccuugcccagccccaucugugaaaugggcagaguugcugcagaguauucuuggg

SEQ ID NO: 4191377 - RNA, 91 nt, Human
cccagaguguugguaaaugcagauuccugagccuaccccagaauugcugagguggagcccaggaaucagcauuaacaauaaacccucuggg

SEQ ID NO: 4191378 - RNA, 104 nt, Human
cccagaugguccgugggcauucuguaguuacugccugccugcugaaguaagggguuaauuaacuucagggcguuguggcugacugaagcuaggcugacucuggg

SEQ ID NO: 4191379 - RNA, 88 nt, Human
cccagauuacaugaguuaaugaauaugaagauagguuuccccuuacuaggaaaucaguaaauguucauuaacuguauuuaaugcuugg

SEQ ID NO: 4191380 - RNA, 67 nt, Human
cccagauucacuaauagcuggccucaagauacaccagaucgaggaaggcugagaaguagauccuggg

SEQ ID NO: 4191381 - RNA, 130 nt, Human
cccagcaaaaaucuuguggcauuuuauuggcuguguuugggucacaugcccaccuuugaaccagucacugaggucagggguaugugauguccugauuggguuaggcuugggccaccugauucauccuggg

SEQ ID NO: 4191382 - RNA, 59 nt, Human
cccagcacaggcaauuccauacagacaagacgguagaugaguggaugccagaggcuggg

SEQ ID NO: 4191383 - RNA, 56 nt, Human
cccagcaggaggagguugcagugggccgagaucgugccacugcacucuagccuggg

SEQ ID NO: 4191384 - RNA, 80 nt, Human
cccagcaugcucaccuguguuuuuguuugacuccuucacaugccugcgggaagauacauaaagguagagucuauguuggg

SEQ ID NO: 4191385 - RNA, 59 nt, Human
cccagcaugcucagucuaaauuguauauauguauauaauagauagggagaguugcuggg

SEQ ID NO: 4191386 - RNA, 67 nt, Human
cccagcaugggagcuaucuccaucacucuaucauggccacuagugaaauaaagcugccuaugguggg

SEQ ID NO: 4191387 - RNA, 80 nt, Human
cccagccacaggacccccaggggcaggaagaguccagggucuccaggguuuccuauguccauugagggaguguuucuggg

SEQ ID NO: 4191388 - RNA, 92 nt, Human
cccagcccaucuggcucagcugcugugugagggcccagcgcuggugggcagccagaucgccuuacacugccuggggccacgguagagcuggg

SEQ ID NO: 4191389 - RNA, 72 nt, Human
cccagccccucagguacccgugcagcaggucccgagucccaccugucuguccccugccuugaggggaacggg

SEQ ID NO: 4191390 - RNA, 55 nt, Human
cccagccugguagagcccuuuggggaaagccucagagaguuuucacuaggguggg

SEQ ID NO: 4191391 - RNA, 81 nt, Human
cccagcucugcaaggugccagccuugccaguuucuggacuguggucgucagcaaggcuguugcugcugcaaggaagcuggg

SEQ ID NO: 4191392 - RNA, 84 nt, Human
ccacaagcuucuuggcucugaggcauuguccuggggagggccgagcaccucccuggaggcccagaccugggagugcauaagugg

SEQ ID NO: 4191393 - RNA, 64 nt, Human
ccacaaggggacucguuaaauguacucucacuggucuaauugcauuuaauuaagucccuugagg

SEQ ID NO: 4191394 - RNA, 66 nt, Human
ccacaaugggcugggaccaucaggucgucugccacaagugcccacagaaccucucccagccccugg

SEQ ID NO: 4191395 - RNA, 102 nt, Human
ccacacccuugcugucaugggauucaggccaggccuggacagccugagacaccucuguccuuacugcuucuggcuuaguccucaucccagagaaggcugugg

SEQ ID NO: 4191396 - RNA, 67 nt, Human
ccacacgcgcacacucaggucaaguauucugaaccaaaggcacagguugacucuugagagccguggg

SEQ ID NO: 4191397 - RNA, 124 nt, Human
ccacacuggguaaggagagcagcaaaugggugagagaacaacuugggguugcugugggaaggaugcaagggaaauccuucagccaugggcucuccacuuccucucgcccccaaaccucaguggg

SEQ ID NO: 4191398 - RNA, 62 nt, Human
ccacacugucuccauagaguagcuugauggcucugaccagucgggcacaggagcggcugugg

SEQ ID NO: 4191399 - RNA, 58 nt, Human
ccacacuucuucccuggcaucgcugacugaaaggcagaaugugagggguugaaguggg

SEQ ID NO: 4191400 - RNA, 57 nt, Human
ccacagagauggucuggcagguggagugcagcuccacacgggccguggacucugugg

SEQ ID NO: 4191401 - RNA, 72 nt, Human
ccacagaugucacauggccuguacuuuggacugugaugcauaccuaugcucgcuaugucacauucccugugg

SEQ ID NO: 4191402 - RNA, 67 nt, Human
ccacagcuagggcaaucugauugcccccaaaucuauuccuauacacucagucugccccaagcucugg

SEQ ID NO: 4191403 - RNA, 63 nt, Human
ccacagcuccugcccucuugcaauucccacacugguggggaacaaaugugcagagccaugugg

SEQ ID NO: 4191404 - RNA, 56 nt, Human
ccacaggaauuagcagccuaaaacagccuauauguauuagcucaugauuucggugg

SEQ ID NO: 4191405 - RNA, 89 nt, Human
ccacaggcagaggcuggccgagcuggugcucaggggcauggacucagaaguccugagcugccgcaucagcagcacagcggucugcgugg

SEQ ID NO: 4191406 - RNA, 130 nt, Human
ccacaggccacuuguccauucuugccaccuuucacauguucccuaguuaggccccugugguaucccccagccagcgcaguguagguggggggcguguguucaugucaguagauaugucuguggccgccag

SEQ ID NO: 4191407 - RNA, 60 nt, Human
ccacagggcacaaccacauuccacuuuucuaccugaaaggggugagguuuauguucuggg

SEQ ID NO: 4191408 - RNA, 63 nt, Human
ccacagggccuuuccugcuggccacaaaacccacuuggcccagggcaguagaaggcugugugg

SEQ ID NO: 4191409 - RNA, 73 nt, Human
ccacaguaagagauaguuuauguaccaacauuuggccccaaguuuuaucagauaaucuuuuacaagcaugugg

SEQ ID NO: 4191410 - RNA, 55 nt, Human
ccacaguagaauucaucucccuuaugacaugaauaggauagaugucacacugugg

SEQ ID NO: 4191411 - RNA, 82 nt, Human
cccaggggcugcauuuccauguuaucuugcagacuuguacaguucccaagcaguggcauggaaugagaauguggucuuaggg

SEQ ID NO: 4191412 - RNA, 78 nt, Human
cccaggugcagcugcaggagucagguccaggacccaugaggcccucagacacugcccuccaccugugcugugucuggg

SEQ ID NO: 4191413 - RNA, 78 nt, Human
cccagguuuagguggacgugcaggcuagcuggcucccaggugccauggccaguccuguggucccugucugugccuggg

SEQ ID NO: 4191414 - RNA, 74 nt, Human
cccagguuuccaacuaguaugaucaggugcuuaaaaauaaauaugugccuagguuuauaucuauggacauuggg

SEQ ID NO: 4191415 - RNA, 93 nt, Human
cccagguuuccaugacuucaaguuuuguguucuuuuucugcuacuucagcaagaguauuuagagacacaagacggccaaucauagaaucuggg

SEQ ID NO: 4191416 - RNA, 77 nt, Human
cccaguacuuguuuagcacagacagaauggucauacuucuucugaccuugugauaaaucuucugugcugaauuuggg

SEQ ID NO: 4191417 - RNA, 57 nt, Human
cccaguagacaggugugccuacagaugggauugacaaguagaaccaugugugcuggg

SEQ ID NO: 4191418 - RNA, 87 nt, Human
cccaguauauaugacaacuugcugguagcaaaugaaucuuagaauuaagacacugcuaaacaguaaagaugauuguucaguauuggg

SEQ ID NO: 4191419 - RNA, 59 nt, Human
cccagucauaccuaaaauuuuuacuuagagcugaguauuuggugugguauugaccuggg

SEQ ID NO: 4191420 - RNA, 70 nt, Human
cccagucucagguauuucuuuuagcugugugagaaugaacuaauacaaaaaauugauacugacgaguggg

SEQ ID NO: 4191421 - RNA, 61 nt, Human
cccagucugauacagagaccucagcccaaccucuacaauguguccuucagucagaucuggg

SEQ ID NO: 4191422 - RNA, 72 nt, Human
cccagugacgaaauuccacuuacauaugcaacugaaaaaaaggugaaaguugagguaggaauuuguauuggg

SEQ ID NO: 4191423 - RNA, 61 nt, Human
cccagugcucauucucaugccuguuuuaacaguggaggcuggacaugagcuuggcaguggg

SEQ ID NO: 4191424 - RNA, 74 nt, Human
cccagugggagaaauuuguuuugaauauuucaguugcugugaauaugaaacauucauacaaauaaauggcuggg

SEQ ID NO: 4191425 - RNA, 78 nt, Human
cccagugucuccuuguggaucucaaggaugugcuuccacauagcagcaucuucuucagauggacaaggagacacuggg

SEQ ID NO: 4191426 - RNA, 67 nt, Human
cccagugugacuguauuugagauagggccuuuuaagagacaauuaagguuaaguaaggucauauggg

SEQ ID NO: 4191427 - RNA, 88 nt, Human
cccaguguguccugguuccuuguggcugucccuggcaguuggagacacccacaugccccagccuucagucagcagacacaaacuuggg

SEQ ID NO: 4191428 - RNA, 68 nt, Human
cccaguuaugcaguuaaagugcuuaucacagaaauguucuucuggguaauuauaauuguaauuauggg

SEQ ID NO: 4191429 - RNA, 85 nt, Human
cccaguucaaaggccuuauuccagcuaagaguccugguccaagguauauuaggaccacagcuaccugcguggaagaggaacuggg

SEQ ID NO: 4191430 - RNA, 92 nt, Human
cccaguugcugcuucccuggccucccuuccccagcacaugaccucacccuuauccagucugguagaggaagaggccuggauaggagccaggg

SEQ ID NO: 4191431 - RNA, 62 nt, Human
cccaguuuaauucaaguccuugacuucgagauuaaugaggagaaaggcuuggcugagcuggg

SEQ ID NO: 4191432 - RNA, 89 nt, Human
cccaguuuauuccagggcugaccuaagcuccacuucuacccaccacucccuaaagaggugauagaguaggcagcaaggagggggcuggg

SEQ ID NO: 4191433 - RNA, 87 nt, Human
cccaguuuauuucucagauauuuacugagcauuuacugugugucauguaaacuucuagaugcuguaguggauagugagaauauuggg

SEQ ID NO: 4191434 - RNA, 70 nt, Human
cccauaaaaauucacuccugggauaaauaccaaccugaaauaacacucacuuggcucagauuuuuauggg

SEQ ID NO: 4191435 - RNA, 81 nt, Human
cccauaauuagucauguuaugcauaugaaguuuccaaaauaaauagagaaaaaugcacaacaguggcugccuugagcuggg

SEQ ID NO: 4191436 - RNA, 56 nt, Human
cccauaauucaaucaccucccacuggguuccucccaugaaaggugggaauuguggg

SEQ ID NO: 4191437 - RNA, 69 nt, Human
cccauaccagaguaauguguggaaauuaucuuaagaguuagugcuuuuugcaaguuauuuugggguggg

SEQ ID NO: 4191438 - RNA, 63 nt, Human
cccauaggauuacagauacugacaaagugaaagacuuucaggccugagaaaaauccuuuuggg

SEQ ID NO: 4191439 - RNA, 69 nt, Human
cccauauuuuaagagcucaguagccacaaguggcugaguggcugcuacauaggauagcucaaauauggg

SEQ ID NO: 4191440 - RNA, 88 nt, Human
cccauccaaacagaaacugcucaaggaucugguagggcucguaccgauguucucuacuucaaccugugagcaucaauuuugugauggg

SEQ ID NO: 4191441 - RNA, 79 nt, Human
cccaucccagggcacuuaggcccagcccacaccccaacgugagacucuggggcggacugggcaugggugcucugcaggg

SEQ ID NO: 4191442 - RNA, 100 nt, Human
cccauccccagguaggccaguggcagguuguguguggucagcuucuucuuguuucccucuuccccuacucaauagcuacuguugcugaccuggggcuggg

SEQ ID NO: 4191443 - RNA, 56 nt, Human
cccaucuaagaaagcacuucaggagcaauuaauugcaguguaugaaucuggauggg

SEQ ID NO: 4191444 - RNA, 84 nt, Human
cccaucucagccucccaaagugcuaggauuacaggcgugagccaucgcgcccggccuaauuuuuguauuuuuuguagagauggg

SEQ ID NO: 4191445 - RNA, 57 nt, Human
cccaucuccaaauacagucaucuugggaguaaggccucaacauaugacuuugguggg

SEQ ID NO: 4191446 - RNA, 71 nt, Human
cauuugaauagaggccccucagaaaauucacauuuccauauuuacugggggauuuuuguuuauuacaaaug

SEQ ID NO: 4191447 - RNA, 96 nt, Human
cauuugauaguuuuccauccauaucuuguugaggaaacccugaguuuauuugcuucauagagaugcuuggauuuucuuaggagaguucuaaaaaug

SEQ ID NO: 4191448 - RNA, 58 nt, Human
cauuugauccccaaaauuucaaaggaagaauuuuuuucauugacaguugggggaaaug

SEQ ID NO: 4191449 - RNA, 71 nt, Human
cauuugaugagugccucccaugcauugccuccuuuaauacucaaaaagcaaugucauuuauuuaucaaaug

SEQ ID NO: 4191450 - RNA, 95 nt, Human
cauuugauuucaguuuuauaggacuuggaaggagcucccagccugggauuuuguaaucugggcucucuacuuuggagccuggacugagaaaaaug

SEQ ID NO: 4191451 - RNA, 86 nt, Human
cauuugcaagcuaggaaacagauucaaccuaagacaaucuaguccucuggagauccaggcugagucuuucgauuuuuagcagaaug

SEQ ID NO: 4191452 - RNA, 69 nt, Human
cauuugcauggggaaggaguauuuggagaaaggguauccccguauuucaucuccuuucugcuguugaug

SEQ ID NO: 4191453 - RNA, 55 nt, Human
cauuugcuuaucuccacaguuguuucacuacagcucuaaugaaggugggcauaug

SEQ ID NO: 4191454 - RNA, 84 nt, Human
cauuuggaauuggagaguuagagugguauguuggaaagaaugcaaauuuggaaauaucauuuauaacuuuuaaaagaaagaaug

SEQ ID NO: 4191455 - RNA, 60 nt, Human
cauuuguaauacugacuugcagaagauucaaauagcuagcugcaaggaagcaggcaagug

SEQ ID NO: 4191456 - RNA, 82 nt, Human
cauuuguaaugcucuuugaauuugucagaaagaaagacccauuacauacugaagucugcauccccaaagagcauuacaaaug

SEQ ID NO: 4191457 - RNA, 67 nt, Human
cauuuguaggguuucugucuaguauggacucuccuauguucaguaaggccugaggaccagauaaaug

SEQ ID NO: 4191458 - RNA, 128 nt, Human
cauuugugauugugugugcaugcaugaccguguuuguauacaugcacaugaacaugugugagugugccuauuuacauguguguuuauguguauguaccuguuugugucugcuuaugugggucaagaug

SEQ ID NO: 4191459 - RNA, 70 nt, Human
cauuuguugguugcugucuuauccauggguauguucccuuuguuccugacucagcgaugcucagcaaaug

SEQ ID NO: 4191460 - RNA, 65 nt, Human
cauuuuaaaugauuuaagccaaugaaaggacacuccauuuguuugcucaauagucaauugaaaug

SEQ ID NO: 4191461 - RNA, 60 nt, Human
cauuuuagugacuguuggaggcacaugauccagcaugugugaauagcaguggcugguaug

SEQ ID NO: 4191462 - RNA, 55 nt, Human
cauuuuauuuuguggucaaauucaaaugcugaucuaauggcuucagaguaaaaug

SEQ ID NO: 4191463 - RNA, 84 nt, Human
cauuuucacagaugcaaaagcagauuggggauuuccauggcaguguuauaaagauauucaaaaucugcauguauaguuaaaaug

SEQ ID NO: 4191464 - RNA, 69 nt, Human
cauuuucaggccgcgugugaaggccagcuuugaucuacaccaaggacuggagcagugguccuggagaug

SEQ ID NO: 4191465 - RNA, 61 nt, Human
cauuuucaugggcugacaacucagacaauaucacgauucuguuggucauucucagaaaaug

SEQ ID NO: 4191466 - RNA, 93 nt, Human
cauuuucucugugucucuguguugcaggaaaaucuggguucuugucacaugaccagguuaauuuaggcacgcagacacuuugaagggugagug

SEQ ID NO: 4191467 - RNA, 60 nt, Human
cauuuucuuaagccagcuauucucaaggccucaaaauagcugccauugcuccaggaagug

SEQ ID NO: 4191468 - RNA, 77 nt, Human
cauuuugaauuuccaggagaggaaaccugauuggucacacuaguauccaguuuuccgucuuggauaaaucagcaaug

SEQ ID NO: 4191469 - RNA, 57 nt, Human
cauuuugauuuuuggucuguuacauagcccaugggggcuacagacaaaauggaaaug

SEQ ID NO: 4191470 - RNA, 82 nt, Human
cauuuuggucauacaguaaaaucuauggauuaaguuagaaaucaucuaucccauauauuuugcggucacguggcuucaagug

SEQ ID NO: 4191471 - RNA, 116 nt, Human
cauuuugguggucacaacugguuggaaggugcuacugucauuuaguggguggagccaacagaugcugcuaaacaauguacaguguauaggacaggacaguuuuccacaauaaaaug

SEQ ID NO: 4191472 - RNA, 78 nt, Human
cauuuuuauauccuuuacugugucacagacuuuggaaacccauaaauaucuguuggauggauaaaggauggauggaug

SEQ ID NO: 4191473 - RNA, 99 nt, Human
cauuuuuauccuauugcaaccugaaacuacauucuugauucugaccaaauacaaaaauugaauuacgagaaugaaguaucaggcagauagcuaucgaug

SEQ ID NO: 4191474 - RNA, 83 nt, Human
cauuuuuggcaguguagcaggacccuucaugaagggacucucuucauucaagggguuccugauugcaaacuguaucaagucug

SEQ ID NO: 4191475 - RNA, 81 nt, Human
cauuuuugguuguuacaguuggggguaggggauggggagggauacaugcuccugauaucuaauguguagaagccaaagaug

SEQ ID NO: 4191476 - RNA, 86 nt, Human
cauuuuuguguucaauagauuauuugcucauuacuucucccuuuaacagggucugagaaaugaaugaauaaaugaaugaaugaaug

SEQ ID NO: 4191477 - RNA, 69 nt, Human
cauuuuuucagagagcuuuuaugucccuguuaguagaaucuagugggcauaguuuaucuuucugaagug

SEQ ID NO: 4191478 - RNA, 70 nt, Human
cauuuuuugucucuauuuacuuggaaguagaugcuaaaugcugcuuccugguagauaggaguagaugaug

SEQ ID NO: 4191479 - RNA, 62 nt, Human
ccaaaacuguaagagaauaaacuaccacuaagcuugugguaauuuguuacuggugcaguagg

SEQ ID NO: 4191480 - RNA, 59 nt, Human
ccaaaauaacagcccaauucaccaagccgaguaacuuggggguuuuguguuuguuuugg

SEQ ID NO: 4191481 - RNA, 72 nt, Human
ccaaaaucauugauuaaacaggcauauucaacauuaaaguguguguguguguuuaauuaaaauugauuuugg

SEQ ID NO: 4191482 - RNA, 92 nt, Human
ccaaaauguaaaguaguggggcagggagguuaucgccgaggggcaggauuucggugauucucauuccuuuucuucuuuuccuuuucuuuugg

SEQ ID NO: 4191483 - RNA, 80 nt, Human
ccaaaaugucugggugcagauagguccagaccuggaggacagaaucccugccagcauggcuuaucuccccaguaauuagg

SEQ ID NO: 4191484 - RNA, 63 nt, Human
ccaaaauugggaauuuuccuuaagcaaguagugaguuccucauuacugaaguuacccaaaugg

SEQ ID NO: 4191485 - RNA, 65 nt, Human
ccagaagaacuuaauucaaaacuaauuuauuccucaggucaaaaguuuuggggugguuggucugg

SEQ ID NO: 4191486 - RNA, 86 nt, Human
ccagaagacugacaaguaaaauuggcaaaguguaggucauugcaggucauuggccuuacugagggcaauuuugauggagucucugg

SEQ ID NO: 4191487 - RNA, 127 nt, Human
ccagaagaucugauguccuggcaugggucugaugccucauguugcucgcaucugcauucagaucuuaugcgugugacugauagguggaacgaucaugugccugacccuugauggugcagauuccugg

SEQ ID NO: 4191488 - RNA, 81 nt, Human
ccagaagcaaacagcuguuuuugugggcaugugauugagguaccugagcagucuaugcuagaaggucaguugaagcucugg

SEQ ID NO: 4191489 - RNA, 126 nt, Human
ccagaaggcggugaacacuuggucccaggaacucuggagcacgcccuggcccaggaaauacuucaccaucgucccggcuggagugggcuccagaguuccugggaccagguguucaccgccuucugg

SEQ ID NO: 4191490 - RNA, 90 nt, Human
ccagaaguggggaccugaaugaaaucaaggacugaguaugguaacuacagccauuuaauuuuauuugaagucucccguaaaauguucugg

SEQ ID NO: 4191491 - RNA, 72 nt, Human
ccagaaugggagaaaguaggcagccagaagaguuugaaauguugaucauauggcucagcuuuccccaucugg

SEQ ID NO: 4191492 - RNA, 63 nt, Human
ccagacaaagugacauaaaaucucccaggauuauauaucaauccaagggaugccauuguuugg

SEQ ID NO: 4191493 - RNA, 80 nt, Human
ccagacacacagcagaucuguggcagugaugagucuucucugcacugagaggccuccugucuggguugcuuuuuguuugg

SEQ ID NO: 4191494 - RNA, 79 nt, Human
ccagacaugugcccuugaggaaggcauuuaacaucucaaagacuaugcuucucugucaaaugggcacaguuuccauugg

SEQ ID NO: 4191495 - RNA, 95 nt, Human
ccagaccaauguguuguuuuucuuuauuauuauuucuuaaagcuucccuugagagaauaaaugguaauggagagaacuacuuaacaagguccugg

SEQ ID NO: 4191496 - RNA, 129 nt, Human
ccagacccaauugcaaaggccaacugaaaucaccaucugugcuuuacuggcagugauguaaugugauugcaugcuuucagaaauagggcuacagaggaaaugaaccccaguucuucacaugggaaaugg

SEQ ID NO: 4191497 - RNA, 67 nt, Human
ccagacugugugugauauuccuugaccacagagacaagauuuagaacaugcacacgauucagucugg

SEQ ID NO: 4191498 - RNA, 78 nt, Human
ccagagauugcuaauagugagagggucccaaaagaugagaagaagguguccaaucacacucauuagucauuucucugg

SEQ ID NO: 4191499 - RNA, 57 nt, Human
ccagagccggauugugaagugccuguaugcaagguaggcauuuggauucugcucugg

SEQ ID NO: 4191500 - RNA, 60 nt, Human
ccagagccugaguccaacaggcugaccagugaggggcuaaguggaucagucaggaccugg

SEQ ID NO: 4191501 - RNA, 79 nt, Human
ccagagcugacuuugugguggugucagauuugcugucuggagcagugcugaucccauggcagagagagaagagcucugg

SEQ ID NO: 4191502 - RNA, 62 nt, Human
ccagagcugagaauguggcuuccuuggaguuaugagagauagggagggauuuugagcugugg

SEQ ID NO: 4191503 - RNA, 130 nt, Human
ccagagcugccagccugcaaggggguguucccaggacaggccacauggaaggugcagaucagaacccaguccuuccaucugucucugguagccaucccucaacaucaggcuggcccuccccucgcucugg

SEQ ID NO: 4191504 - RNA, 68 nt, Human
ccagaggaugcuggucagccucgccuaaccuaaucacuuaugggagaggagagacuggcuccaacugg

SEQ ID NO: 4191505 - RNA, 58 nt, Human
ccagaggccuaauugcuacccuuuggagcuccagaguuaguuuuucaagguuguuugg

SEQ ID NO: 4191506 - RNA, 62 nt, Human
ccagagguggucauagaaagcaagcccuuaguaugagagucugaaaucugaucauucucugg

SEQ ID NO: 4191507 - RNA, 66 nt, Human
ccagaguacugcugcuggguacugaguguuugucccucacauaggauuccagaacagugcugcugg

SEQ ID NO: 4191508 - RNA, 74 nt, Human
ccagagucaugaggguugggguggagcuucggggaacuccagaauucgaauaccccagccuucuguaguucugg

SEQ ID NO: 4191509 - RNA, 70 nt, Human
ccagagucauuuugagucauaacuugcuauccuuuguccuucuugcaggccuuacucuauguggcucugg

SEQ ID NO: 4191510 - RNA, 76 nt, Human
ccagagucugguguucucacacuaguuggcacauagcugaagcuccuauuauguguguggauacacagagagcugg

SEQ ID NO: 4191511 - RNA, 113 nt, Human
ccagaguggagaaugcaaguuugguacguaucagagagaugcaguaacuucuauugaaaaacuuaagucacaugaguuucucuuuaugguaggagaccauauucuccauacgg

SEQ ID NO: 4191512 - RNA, 56 nt, Human
ccagaguggcugucauguugucuacauaaagcaacuauauugaaagccaccucugg

SEQ ID NO: 4191513 - RNA, 76 nt, Human
ccagaguuguugaugaugaguuugugccaaggucuuagcagggccaugcccaaaacuaucaggcucaaagcucugg

SEQ ID NO: 4191514 - RNA, 62 nt, Human
ccagauaauaauaugacuucacugcugagguugaggggguguuagaaauauuauaguccugg

SEQ ID NO: 4191515 - RNA, 70 nt, Human
ccagauagaaugugauuagaauucagaauuacuuuggaguaguggugaaauucaaaacacauuugucugg

SEQ ID NO: 4191516 - RNA, 70 nt, Human
ccagauaguaaauguuuuagauuuugugagccauacggucucugucacaauuacucaacuuugcugcugg

SEQ ID NO: 4191517 - RNA, 106 nt, Human
ccagauccucaaaauaucuagguuuugauguggugcagggcagugcuuuccaaggaguguuucuggggcauucauaguuguuaccuaggugaaaaaaagagucugg

SEQ ID NO: 4191518 - RNA, 67 nt, Human
ccagaucugggucaguauguucuugggaucacauuuaaacucagggaccaccacucacccagccugg

SEQ ID NO: 4191519 - RNA, 66 nt, Human
ccagaugcagggaacuugagagaggugagccacacaggccucuucagcuaggaucccugcagcugg

SEQ ID NO: 4191520 - RNA, 103 nt, Human
ccagaugguucuuucuuauauaauggaauucuccauuagaugucaacaaaacaagaguguagauaucuuuucagagucaagugugagaagauacacaaucugg

SEQ ID NO: 4191521 - RNA, 61 nt, Human
ccagauguuucaguaauuuaucuugcaaccaagaagcaggaggaauuaaucaugaagcagg

SEQ ID NO: 4191522 - RNA, 63 nt, Human
ccagauuaggaaagaaagucagggcaagccuuggguuucaguuguccuguuaauagcaucugg

SEQ ID NO: 4191523 - RNA, 64 nt, Human
ccagauuucguggcuccugcagaccaucuggacauaugugugcaggucacagggguuauaaugg

SEQ ID NO: 4191524 - RNA, 73 nt, Human
ccagauuucuacaugucaauccaaaccaugaaauauaugacaugacugggucuacugauauuuaggagccugg

SEQ ID NO: 4191525 - RNA, 74 nt, Human
ccagauuuggccagguguccagcccagggccaauuaguucuggccagggccugggucaucuggcucaaacaugg

SEQ ID NO: 4191526 - RNA, 59 nt, Human
ccagcaauaaguagagccuugcaaagacugcaaacuugcuucaacuuauuucacguugg

SEQ ID NO: 4191527 - RNA, 57 nt, Human
ccagcacacagugggugcccagagaaugggucuugugugggcagcacugcuggcugg

SEQ ID NO: 4191528 - RNA, 112 nt, Human
ccagcacuccaggccuugacaaucaguaaucuguuuucugccucuaugaauuugccuauucuggacguuucagguaaauggaaucauacgauaugcagccuuuugugacugg

SEQ ID NO: 4191529 - RNA, 58 nt, Human
ccagcacucugucccagcuuccacuucaaaaagcuuuucggggaggcacgcaggcugg

SEQ ID NO: 4191530 - RNA, 56 nt, Human
ccagcagagggcgcuucacaccccucauggaaggggccgggagggcgcucuccugg

SEQ ID NO: 4191531 - RNA, 71 nt, Human
ccagcagagguuggaacaguucuuaguuauuaacaucuaauggcuguuuugugacuucucaagugcguugg

SEQ ID NO: 4191532 - RNA, 59 nt, Human
ccagcagccagagaaggaccucucaaaaucaccccugaccuccugcuccuucugcaugg

SEQ ID NO: 4191533 - RNA, 58 nt, Human
ccagcagcccaagccugagcauccucuccccagagagggugaguuggggcugucaagg

SEQ ID NO: 4191534 - RNA, 128 nt, Human
ccagguccaaagcgugggaacuggagaaaggccacuagucacucagcacugacaaauauaguaaacuccugcugucuuuguuagagugugggaggcuggggaagggaggagguugauacaggaugagg

SEQ ID NO: 4191535 - RNA, 68 nt, Human
ccaggucccgccccgggcugaccacagcagaccccagcuuugcagguugcacaaggggcccgaccugg

SEQ ID NO: 4191536 - RNA, 69 nt, Human
ccaggucugcgggcggcaggcagauagccuggccaggcccucacaugcccaccgccagcaccagccugg

SEQ ID NO: 4191537 - RNA, 59 nt, Human
ccaggucuggcacuggccaguccagccuagcccaugcugacacucagugccagggcugg

SEQ ID NO: 4191538 - RNA, 69 nt, Human
ccaggucuggugagagcaggugcuacugaguucuggccacagaaaaccagcugccugcucuggaccugg

SEQ ID NO: 4191539 - RNA, 76 nt, Human
ccaggugaagagggcaagucuuggggucaacagcaggugucagcuguggccauagcucagcuccuucauugccugg

SEQ ID NO: 4191540 - RNA, 57 nt, Human
ccaggugaggagaguggcagcauggcacgcacuccaccugcuauuuagaacgccugg

SEQ ID NO: 4191541 - RNA, 82 nt, Human
ccaggugauucuuauguacacuuaaguuugagaaauaucgccaauaguucucaacucugguugcauguugaaaaucacuugg

SEQ ID NO: 4191542 - RNA, 58 nt, Human
ccaggugcugaccggucagauuacaaaaacaggagaguaauuuguacuugucaccugg

SEQ ID NO: 4191543 - RNA, 61 nt, Human
ccaggugcuucugcucagcuuccuacugggaccaaugaagcaauggagcgaagguacaggg

SEQ ID NO: 4191544 - RNA, 58 nt, Human
ccagguguagcacugcucacaggucagauugccugcucugacguagugacucaguugg

SEQ ID NO: 4191545 - RNA, 55 nt, Human
ccagguguuucaaaugugaaacuaggcuaaaaccaaugguuuuuuauacaccugg

SEQ ID NO: 4191546 - RNA, 90 nt, Human
ccagguucuacaaaccacaugcugagagccauugguguaguagaaucagacugccuggguugacucuuagcuguaacacuuagagccugg

SEQ ID NO: 4191547 - RNA, 87 nt, Human
ccaguaacuaaugcauuccacugagauuuguauccugcagagaauuagcuccuggagcaauuacaguggcauguauuuccccacagg

SEQ ID NO: 4191548 - RNA, 71 nt, Human
ccaguaagaagagggccuacuggacaugucagcugugaccuggcugaaaccagggugcccuccugggcugg

SEQ ID NO: 4191549 - RNA, 61 nt, Human
ccaguaagugcauaauagguacaacauauuuuggaugagugaagguuucugcauuuauugg

SEQ ID NO: 4191550 - RNA, 62 nt, Human
ccaguaaugcggccucacugauagcagaaguucggagagcucuugucagagaggccagcugg

SEQ ID NO: 4191551 - RNA, 78 nt, Human
ccaguacccaggacucucuuccaguagccuacaguagauagagggcucugacuuaucggagaaguccugcuuggcugg

SEQ ID NO: 4191552 - RNA, 63 nt, Human
ccagucaagcacaccuggaaagaauaaaaugccuuucugggcuuuacacugugcuuagaaugg

SEQ ID NO: 4191553 - RNA, 70 nt, Human
ccagucagagaaaauguccacuccaucaggaugucaauuccacaaaagggauauugucuuuggauuuugg

SEQ ID NO: 4191554 - RNA, 60 nt, Human
ccagucaggaaugccuccuuccuucuggggaacugggggucagugaguucguuucucugg

SEQ ID NO: 4191555 - RNA, 108 nt, Human
ccaguccgucggagaagcgcucuuugauuggccaguggacagcgccguggcaugacgcgcuggggcgcuggccaaucgguugagagcugagcuggacuuggcgguggg

SEQ ID NO: 4191556 - RNA, 96 nt, Human
ccagucuaagguagaaacgaagaagcucucagggcaaauguucuauccaggacauuggcuggagcauuccuugucuuguaucauauuguggauugg

SEQ ID NO: 4191557 - RNA, 83 nt, Human
ccagucuagguuuacaguacucacuugcauuguaucuuauuucagaaaaugccagugcagauauuguggccguuagauguugg

SEQ ID NO: 4191558 - RNA, 57 nt, Human
ccagucuccacagaaagaagacccugguccucagacucuggucugcuguggaccugg

SEQ ID NO: 4191559 - RNA, 59 nt, Human
ccaugugcuauaccacauuggaaaugucagcaaauuccauaaaggugauaguauacagg

SEQ ID NO: 4191560 - RNA, 70 nt, Human
ccaugugcucuguuugauugcuuguugauaaugaauggugacaagugccaucauagcauggcugcuuugg

SEQ ID NO: 4191561 - RNA, 123 nt, Human
ccauguggaaaaauuucaaauguuuuaugaagaccuuccacucuuaaggagguagagcaugacuucucacuccuuaaguaugggcugugcauaaugacuugaauaugauuccagucuacaugg

SEQ ID NO: 4191562 - RNA, 58 nt, Human
ccauguggaaugcuccuaagugaauauuauuguuuacuagacuuauuccaucuuaugg

SEQ ID NO: 4191563 - RNA, 62 nt, Human
ccauguggcuagcgugccugcaagugcuccuucgcacucaguccagaagcuuggugauaugg

SEQ ID NO: 4191564 - RNA, 73 nt, Human
ccaugugugucccuuggaaccucagcucugacucgccacaggucacaugcugaggggucuauggcauagcugg

SEQ ID NO: 4191565 - RNA, 80 nt, Human
ccauguguguuccuccaagcaagcaggauggucaaacuauugaacuuuagaacaugaguguccucuuguggcaaauaugg

SEQ ID NO: 4191566 - RNA, 109 nt, Human
ccauguuagccaggauggucucaaucuccugaccucgugauccgcccuccuuggccucccaaaguggugggauuacaggcaugagccaccacgccuggccuagcauagg

SEQ ID NO: 4191567 - RNA, 62 nt, Human
ccauguuagucugcucuagcugccauaaaauaauaucacagacugaguggauuaaacaaugg

SEQ ID NO: 4191568 - RNA, 64 nt, Human
ccauguucuggaguguuauggucaagucagagauaucaugacuacauggacaguccagaacugg

SEQ ID NO: 4191569 - RNA, 78 nt, Human
ccauguugcacaacuuuaggaaccacauucacuuacauagaagacagugugaauggagaccucagacuuggcaccugg

SEQ ID NO: 4191570 - RNA, 72 nt, Human
ccauguuggggcugcuggagggcgcagacaggcuguaaacacagcgcaugggcaccaggagcaccggacagg

SEQ ID NO: 4191571 - RNA, 117 nt, Human
ccauguugugguguuuccuauugauguauacaauuuuauuuuccuaaccucacuguccaacaaaaggagaauggcugaguaaguugugauaugucuguacaauggauuacaauaugg

SEQ ID NO: 4191572 - RNA, 57 nt, Human
ccauguuugaaggauauccaggcuggcaggaaagccugugucucguuaaagcauugg

SEQ ID NO: 4191573 - RNA, 60 nt, Human
ccauuaaaauugugacauaggagaauguuuuccaaaaugcaagucacaauccauuaaugg

SEQ ID NO: 4191574 - RNA, 62 nt, Human
ccauuaagauugugcuuaagaagacauuuugccucaugucuucuuaaguaugaucuuaacgg

SEQ ID NO: 4191575 - RNA, 59 nt, Human
ccauuacacuaauagccacacuaaugauuugcagucaucuaucaacuguuagugagugg

SEQ ID NO: 4191576 - RNA, 83 nt, Human
ccauuaccaccauuggcuucuggcagucuggacggaauuaaacaacugucuacacaaaucaaagcuucacgugguggucaugg

SEQ ID NO: 4191577 - RNA, 59 nt, Human
ccauuauagcuggaaggagcuaugucaagguguuaaaaguggcucucucuaguaagugg

SEQ ID NO: 4191578 - RNA, 71 nt, Human
ccauuauaugagacuugagggccucaagucccauaaggcgggacuugcgguccugaucuuugaugauaagg

SEQ ID NO: 4191579 - RNA, 103 nt, Human
ccauuaucaguuuuguuugccagauuuucauguuccuuguuaagugaccaaccaggauauaaacaauuacauggacauugaagaguaaacacacugauaaugg

SEQ ID NO: 4191580 - RNA, 69 nt, Human
ccauucaaauuccagaaacucaguauauuagcaacauuaagagcuuaauaguaugagguggaggggugg

SEQ ID NO: 4191581 - RNA, 92 nt, Human
ccauuccacugacucugaaggcaggggaaucccaggagugcccugaaugugggaaggaccugggagagcuucaugccuucagguggaggugg

SEQ ID NO: 4191582 - RNA, 61 nt, Human
ccauuccuuucccacuccacagggguggcauacaauacaccaagagcugggagaaggaagg

SEQ ID NO: 4191583 - RNA, 72 nt, Human
ccauucucacagugaugucuuaugacagguacgcagcaaucugucaaccacuucauuaugagacuauuaugg

SEQ ID NO: 4191584 - RNA, 94 nt, Human
ccauucucauuucccucuguauccccagcugcuccugcugagccuugcacacaguucaugcuuaaaagacacuugaggaagggagaagagaagg

SEQ ID NO: 4191585 - RNA, 70 nt, Human
ccauugaaacagauguacccaugucuccuccuuucucucuugggguguaggucuuagcacuguuagaugg

SEQ ID NO: 4191586 - RNA, 57 nt, Human
ccauugaauccucagcugcuaguacaaaaccuggaagcagaggaggauuuaguuagg

SEQ ID NO: 4191587 - RNA, 59 nt, Human
ccauugaauuagaaggggaaggagauucaugucagguguuuugcuuuuugauuuaaugg

SEQ ID NO: 4191588 - RNA, 55 nt, Human
ccauugacaucaggcuuggccaagugacucacuucagccaacaggauguuagagg

SEQ ID NO: 4191589 - RNA, 78 nt, Human
ccagcagccucugcucccagccagcuguggugugaguaucaaccccuggcugcccugggaggcaagggugagggcugg

SEQ ID NO: 4191590 - RNA, 71 nt, Human
ccagcaggaagccuccacuugugauaugaaaaugcccuuucaauagcucaguguggaagcucagauguugg

SEQ ID NO: 4191591 - RNA, 65 nt, Human
ccagcaggagcagucagacuccuuaagccauccugaaggagugaaaacaggcugcucuugugugg

SEQ ID NO: 4191592 - RNA, 90 nt, Human
ccagcaggaugucugcaagugguugaagaaacauuguccgaaucaguaucagaucuacagugagucauucaaacagcaugacauaacugg

SEQ ID NO: 4191593 - RNA, 111 nt, Human
ccagcaggccuggauaaaauguuucuguucauuugccucggcucugagccaccagccucagaguggaaggaaaaagagcagauucuggggguguuuugucuggcuugcugg

SEQ ID NO: 4191594 - RNA, 90 nt, Human
ccagcaguccccaaccuucuuggccccagggacugguuucauggaagauaauucuuccaugaacuugcggccaguagggggauaguuugg

SEQ ID NO: 4191595 - RNA, 130 nt, Human
ccagcauaauuuaggagagaaauaccauuaucuuguuuaguuagcuguuguuuuagagauuccuguuacucacagcugaaucucauucuaacuaguaggcuacgucaauguuaaauguuuucuaaacugg

SEQ ID NO: 4191596 - RNA, 62 nt, Human
ccagcaugagacgaugaugaagcuuguccuggaagacccacugcuugugucucucaggcugg

SEQ ID NO: 4191597 - RNA, 88 nt, Human
ccagcaugagcugaaacuuuaguucugcaacaagaucuuuccuuuuuguguagucagucaauaaagagcuucuacucaugaaaucugg

SEQ ID NO: 4191598 - RNA, 71 nt, Human
ccagcauuauucaccaagaaugauuucagucacuacaacuuagugcacuaaaguguuggagaaugaggcgg

SEQ ID NO: 4191599 - RNA, 66 nt, Human
ccagcauuugagcacuugagcaguugauguggcaggaggcacacagcugaccacccugcucccugg

SEQ ID NO: 4191600 - RNA, 66 nt, Human
ccagccaagcucagacggauccgaugaucuuucugaaucagagcccucugagcuucagcaggcugg

SEQ ID NO: 4191601 - RNA, 70 nt, Human
ccagccacucuccuuuacugcagagagcgggaccgugucccccuucaucccccuagaacgguagggcugg

SEQ ID NO: 4191602 - RNA, 56 nt, Human
ccagccagaaguccgggcuucugagauagaggaauauccuugaccuuuggaaaugg

SEQ ID NO: 4191603 - RNA, 58 nt, Human
ccagccagccuugaucugaguaucaaagccccugugaccuagacuggggcugggcugg

SEQ ID NO: 4191604 - RNA, 88 nt, Human
ccagcccagccucagcacagcgugucccugcggaugccaaaggucaccagacgcaugcaggauagguugagcucugagccagggcugg

SEQ ID NO: 4191605 - RNA, 67 nt, Human
ccagccccccuggagucgcugggauggccuccgagagggagagcaggccugacuguagggggcaugg

SEQ ID NO: 4191606 - RNA, 79 nt, Human
ccagcccccgcaggccggcgcuucccaggaggccccgcgcgcggguuuccauggggacgcgccggcgcugcggcguugg

SEQ ID NO: 4191607 - RNA, 65 nt, Human
ccagcccccuccaugacgucuucagccgcgcgcccgacgucggcugagacggccauagacacugg

SEQ ID NO: 4191608 - RNA, 76 nt, Human
ccagccccggaaaucugggagucuuggcucugcugaugacugcaaggcaagcucaggccucaggugucggggcugg

SEQ ID NO: 4191609 - RNA, 55 nt, Human
ccagccccgggccuuaccgugcgcggggcagccccggcaggcccagucgggcugg

SEQ ID NO: 4191610 - RNA, 72 nt, Human
ccagccccugccucugcugcuguggcaucacagaagccaucagugagucacuuauugcugagcagguauugg

SEQ ID NO: 4191611 - RNA, 64 nt, Human
ccagcccuccagacuuuggccauccucuuguuacacauggggaaacugaggcuggguggguagg

SEQ ID NO: 4191612 - RNA, 62 nt, Human
ccagcccucucucaggcugacagccuuugcccuuugcucagguuggcuucagagguggaggg

SEQ ID NO: 4191613 - RNA, 84 nt, Human
ccagcccugcucucguguaucucauguucuucucuggaggaauccggagcuggccgggugaaugcaucagaggaccagucuugg

SEQ ID NO: 4191614 - RNA, 68 nt, Human
ccagcccuucagggggcugcaggcgcuuuuugcucugggcauuacgucuucuucagccccugggcugg

SEQ ID NO: 4191615 - RNA, 68 nt, Human
ccagcccuucaucaccuaacuugugauuuacagacacugagcacauugcagguugagaaggugcuugg

SEQ ID NO: 4191616 - RNA, 58 nt, Human
ccagccucaucauauuccugcuuacugauccacaucugcuggaauguggacaggcugg

SEQ ID NO: 4191617 - RNA, 90 nt, Human
ccagccugcugugguggcugaggguauagcugucccagaggccccuccaaaacugggucccugcuguacccucccaccaggcagggcugg

SEQ ID NO: 4191618 - RNA, 106 nt, Human
ccagccuggagguggcagagccaggucuccagcucaggguccagagugcacucagucaugccaccccugagcuggggacuucccccuuuuaacaucuccuggaagg

SEQ ID NO: 4191619 - RNA, 55 nt, Human
ccagccuggcugacguaacucagggcaucucugaggcacugucagcugaggcagg

SEQ ID NO: 4191620 - RNA, 130 nt, Human
ccagcggaugcaccaacaauggcaauccggauuucacugugacuggaaugcuguuuagagacuuaauuguguaaugagcaguggcaccaggucaccagguguaucugauugaagucuuugcuuccgcuag

SEQ ID NO: 4191621 - RNA, 66 nt, Human
ccagcuacacuucugggugugucaaugucccuguguuuuuagaucugggccacuccuggugacugg

SEQ ID NO: 4191622 - RNA, 56 nt, Human
ccagcuagcuccucgaucaaugcacacuucuuuaaagugcugcaggaugcugcugg

SEQ ID NO: 4191623 - RNA, 55 nt, Human
ccagcuaguuggguauuauaagcaaucacugacuuagaagacauggcauggcugg

SEQ ID NO: 4191624 - RNA, 107 nt, Human
ccagcucauucugaagggccagggggacuggaccguccugggugaccuacaguggccaaugacagucucaguucugccgugaugcccuugugcaaccuugagccugg

SEQ ID NO: 4191625 - RNA, 59 nt, Human
ccagcuccuucugucuguggagucucauagggagacuaggucgagguugaaguagcugg

SEQ ID NO: 4191626 - RNA, 61 nt, Human
ccagcucuagccccauguggcugggggccagcuauuuucauugugggguuagacucccugg

SEQ ID NO: 4191627 - RNA, 104 nt, Human
ccagcugaaguggaugugcaaucuuaaucaagccguccuccuuccugccgagcagauggcuggaaagaccugcuugcuuuugauagucaugucuuuguaacugg

SEQ ID NO: 4191628 - RNA, 69 nt, Human
ccagcugagcugccagacuacugccuuagagugaaaaugagcccagugucuuucagacucagaaacugg

SEQ ID NO: 4191629 - RNA, 117 nt, Human
ccagcugaugcuguguaccucccugugccuguggaaugggagugagaagaccucacggcugggucuucuuugugucuauuccuaggucuauauuuuacaggagcauggcucaggugg

SEQ ID NO: 4191630 - RNA, 66 nt, Human
ccagcugcagggauccuagcugaagaggccuguguggcucaccucucucaaguucccugcaucugg

SEQ ID NO: 4191631 - RNA, 56 nt, Human
ccagcugccuaagcaauccauaagggccuguucugcguggaugaucaguguagugg

SEQ ID NO: 4191632 - RNA, 57 nt, Human
ccagcugcgggcaucgagaguucagagcggcaccagacagucggcgcgugcaggugg

SEQ ID NO: 4191633 - RNA, 77 nt, Human
ccagcuggcacaccugcccccagagaaagacugauccuacugugccgucaagcucucaggcacugggugccaacugg

SEQ ID NO: 4191634 - RNA, 72 nt, Human
ccaugcucuagaacauuauuucguguuaaccauccuccuuggccacaucugaaaugaguguuggagaguagg

SEQ ID NO: 4191635 - RNA, 98 nt, Human
ccaugcugaucaguuuggccauauauuauggacugcagaaucucccaagcauucucauuuuaugugcauucacauaauuaugauccuggucagaaugg

SEQ ID NO: 4191636 - RNA, 74 nt, Human
ccaugcugcccagggccugccacuuagcaaguacucuguagauauguauuugaugagcaagggccugagcaugg

SEQ ID NO: 4191637 - RNA, 87 nt, Human
ccaugcuggagagggugcauguaggcaguugagugcuuggcuaaugguuagcagcaaugacuggcuauaugauuugcuccaccuugg

SEQ ID NO: 4191638 - RNA, 108 nt, Human
ccauggaacuugguaauuuggagggcagcagagggcaagggaaacucagcaaugagaucauuccuacauuugccucacuccccgcuucccuucaagccuuaccuaugg

SEQ ID NO: 4191639 - RNA, 58 nt, Human
ccauggaccuaaaugggcuucuagaccuggucuuucuaggagccauguggucugaugg

SEQ ID NO: 4191640 - RNA, 55 nt, Human
ccauggagcgggugagugagugugcaaaucaguggaaauucaucugcaccacugg

SEQ ID NO: 4191641 - RNA, 63 nt, Human
ccauggagggagaaaguacugcuuccgaaguccaagcuuggagcaggcaucuuucucucuugg

SEQ ID NO: 4191642 - RNA, 59 nt, Human
ccauggagugacugccuuuucaucagguauccaucccuggcagaaagaguuacaccugg

SEQ ID NO: 4191643 - RNA, 100 nt, Human
ccauggcacaaguguggcagcugauguggggugaggugugguaaugccgacccuacuggcaccaacauguccucacacagcccccacgcucacagccugg

SEQ ID NO: 4191644 - RNA, 58 nt, Human
ccauggcuuggaaagggaggugguguuuuccacaagacucuugugucagagccagagg

SEQ ID NO: 4191645 - RNA, 118 nt, Human
ccaugggacucagugccacugcucaaggucuccauggcugagccugggggcucuuacaacaggcuccaugcccaagguggcaguuguggaaccaucagagagggcacagagcucaugg

SEQ ID NO: 4191646 - RNA, 55 nt, Human
ccaugggcacuggguggagguaggcgcaaagacgucccucagcccacagcccugg

SEQ ID NO: 4191647 - RNA, 57 nt, Human
ccauguacaugaacacggcggcaccauaaaagagccccacuaccgugaugugcgagg

SEQ ID NO: 4191648 - RNA, 55 nt, Human
ccauguauugaauuguuuaagggggaauacccuagaaugucauucaaugauaugg

SEQ ID NO: 4191649 - RNA, 90 nt, Human
ccauguccaaccuugaugcugcgggugaccugcaggagaaacuggcacuaucuccugcagugugucuccugcacacacacuuggcccagg

SEQ ID NO: 4191650 - RNA, 84 nt, Human
ccauguccauguccagcagugugggcugcacgcuggggggcccagggcucuccggagugucuggccugcugggaggcgagaugg

SEQ ID NO: 4191651 - RNA, 79 nt, Human
ccaugucuugcacuuaccuaagaacuauaggaauucuccauguaccuccuacaguuuuucuagcaguguuggacaaugg

SEQ ID NO: 4191652 - RNA, 65 nt, Human
ccaugugggguagcaguuuccgugugggguagcaguuuccaugcgggguagcagauuccaugcgg

SEQ ID NO: 4191653 - RNA, 107 nt, Human
ccaugugguuacagaguagaacuggauauuucaguaugagcacuuagcucaauauugaugcaaauaguuacauacagaaauauuuacagauaaaugaagauacaugg

SEQ ID NO: 4191654 - RNA, 83 nt, Human
ccauguuaacaggcacgagcaauggccgaggagggaccgcccucccuccacuccuagcucagugcacuuuccaguuaccaugg

SEQ ID NO: 4191655 - RNA, 85 nt, Human
ccauguucccuuauucuguaggcauggaacagggagacgguugccuucaucucauacauguuugcagaaagaaagugggccaagg

SEQ ID NO: 4191656 - RNA, 82 nt, Human
ccauguucucuuucuuuggcugccagucuggagacaucagccugaguccuagagugggaugccguggggcagagaacacugg

SEQ ID NO: 4191657 - RNA, 74 nt, Human
ccauguucuugaucugaauggcuuaugugugcaucccaagauacagugccaggagacaagaucaggaggcaugg

SEQ ID NO: 4191658 - RNA, 79 nt, Human
ccauuaaaagaauaacagaauaagucauuaccgcuuuaaugcaaggcgguacauggaagauucucguuuucucuuaggg

SEQ ID NO: 4191659 - RNA, 60 nt, Human
ccauuagcuaugcagauauuugcauuauugaauuaaauuggaucugcauaguuugaaugg

SEQ ID NO: 4191660 - RNA, 116 nt, Human
ccauuagcuccuggugccagcccuaucucugcuccaucucucgugguuccagccggugcauucacagaccuucugccccgggggacgaggaggauuuauggggggagaggagaggg

SEQ ID NO: 4191661 - RNA, 83 nt, Human
ccauuagcuuaugaaaagggcugucaacacaaucauaaucuauuuaccuguguuucgcugacagauuuuuucugagcuaaugg

SEQ ID NO: 4191662 - RNA, 60 nt, Human
ccauuagcuucuuucugacguggucuggguucccuggagccugggggagggaguuggugg

SEQ ID NO: 4191663 - RNA, 55 nt, Human
ccauuaggcaguauuucugaaagcaggccuaccugacagcaauaaugccagaugg

SEQ ID NO: 4191664 - RNA, 60 nt, Human
ccauuauccacgggcuuccugacacagagcuuccagucaucaggaacuagaaggugaugg

SEQ ID NO: 4191665 - RNA, 58 nt, Human
ccauuauuaacuuuauggggaagugagaauauaauccagaauaaagugcuaauaaugg

SEQ ID NO: 4191666 - RNA, 62 nt, Human
ccauuccaaguuuuaucugcggguggacaacagugccuguguucaagugaagccugggaugg

SEQ ID NO: 4191667 - RNA, 99 nt, Human
ccauuccacaaaaggggcaguuuuuucccauuagaaaggguuauugggacguucuucccguugcuuuuucaaaugaaagcuggucugugcugcgggagg

SEQ ID NO: 4191668 - RNA, 62 nt, Human
ccauucucauagugguggauugugauccugagauagagcauagucugcgcaacugagagagg

SEQ ID NO: 4191669 - RNA, 101 nt, Human
ccauucucccgugugucguaggcccuggccugggagcugcuagcguggagcccaugcccucuguuucccaaggccguggcccuauggcacuaggcaaaugg

SEQ ID NO: 4191670 - RNA, 62 nt, Human
ccauucugucacagcccgcgucuccucuauuuccaguggggcugggaucugugacccuuugg

SEQ ID NO: 4191671 - RNA, 80 nt, Human
ccauugauaacuauaaaaggauaaaccagaaagaagcuaguauauuucuuuuugguuucccuucuuaugguuaucaaugg

SEQ ID NO: 4191672 - RNA, 61 nt, Human
ccauugggaagcugaggcccaaguggcagucauuacugccaguagcacaguuacccagugg

SEQ ID NO: 4191673 - RNA, 67 nt, Human
ccauugguuuaggaacuggcuuggagccgauguuuaauuggcuugcggcuaccuccucaaccaaugg

SEQ ID NO: 4191674 - RNA, 55 nt, Human
ccauugucuauucuagcugagacacaguacuucguccucagcaagauagaaaugg

SEQ ID NO: 4191675 - RNA, 117 nt, Human
ccauuguuucaauuuaguguuguuagcagaaauuuuguuucuuuucucuguuguaucuuuauauaagcaugaaaacaugaaacagcauugacuugacaacauuuuuuuaaaaggugg

SEQ ID NO: 4191676 - RNA, 100 nt, Human
ccauuuagaucuccucuucuuuguggcagcucucuugauuucccuaggcuccucaguuggaaguagaagggguuggaauuccacauaagggaucuccugg

SEQ ID NO: 4191677 - RNA, 69 nt, Human
ccuccagaugugccuccguuucgugccaguagacagaucuaaaagggagccagcagggugacacugagg

SEQ ID NO: 4191678 - RNA, 55 nt, Human
ccuccagccuuccugaagagccaggcugguucuccuacucacucaaggcuugagg

SEQ ID NO: 4191679 - RNA, 61 nt, Human
ccuccaggcaucgcugacuuugcauuguguaauucacugcagcucauugguguccuggugg

SEQ ID NO: 4191680 - RNA, 67 nt, Human
ccuccagggcugugccuggucucugagcgcagugcucagagagcuggugggcagaggaccugggagg

SEQ ID NO: 4191681 - RNA, 108 nt, Human
ccuccaguggaagauucuacuuuauucaggaaggcugguggcuugcaggggcuaggcuuacacaagccagccaagauugagaagguaggggagugcuuucaauggagg

SEQ ID NO: 4191682 - RNA, 98 nt, Human
ccuccauuuccuugccucccguucugucagcuggucucuaggaaugguuaggaauguaguuugaguagaaaccugggaggaagcagcaaaaugagagg

SEQ ID NO: 4191683 - RNA, 73 nt, Human
ccucccaaagugcuggaauuauaggggugagccaccgugcccugccccucaguuugcuaguauuuuguggagg

SEQ ID NO: 4191684 - RNA, 69 nt, Human
ccucccagcuuucugggugguuucuguccccuugaggcgauuuacaacccaaguccagagagcgagagg

SEQ ID NO: 4191685 - RNA, 71 nt, Human
ccuccccacgggcagccggcgcagaccuccaggauucgccagcagauugugcccagggacaguggggaagg

SEQ ID NO: 4191686 - RNA, 88 nt, Human
ccuccccagcuuggcuauucgaucacugccgaggaccuagacuuagagaagaaggcuucauuacagugguucaaccaggccuuggagg

SEQ ID NO: 4191687 - RNA, 113 nt, Human
ccuccccaggagccugggcugaagacuucaucugcuguaauuaacaagccaacugcagcugucuugcuccauuaauagcagaucagccugucgggcgagggcugacagggagg

SEQ ID NO: 4191688 - RNA, 70 nt, Human
ccuccccaguauaugugaaugguguuuguaaguuaccaauggaauuccccauucacauauaccagggagg

SEQ ID NO: 4191689 - RNA, 58 nt, Human
ccuccccgagagagguuguccgcgcugccaggcgcugggcagcaggcucuccgggugg

SEQ ID NO: 4191690 - RNA, 83 nt, Human
ccucccuacucccagauagucacucuucacacagcuaauauggcuguagcuggcaggugaagaugauuucaguaggucaaagg

SEQ ID NO: 4191691 - RNA, 64 nt, Human
ccucccucccugcaguacucuuccacuuucaaagcacaauggcaacacugcaggagaggugagg

SEQ ID NO: 4191692 - RNA, 60 nt, Human
ccucccugccggcuggacuagugggcacgccuccagagucccccucugagcccagggagg

SEQ ID NO: 4191693 - RNA, 97 nt, Human
ccucccuguuucuggcugaggagcugcagggggagucuagccggcagggcuggcuccugcccucgugagcuuuucuagggucauggugugggggagg

SEQ ID NO: 4191694 - RNA, 67 nt, Human
ccucccuuggcuuaccuucuguguggcugccuaccaacacggucacugaauuucaagcuaguggagg

SEQ ID NO: 4191695 - RNA, 58 nt, Human
ccuccggcgucucuuccacuuccuacuccaagguggggagugcaggcggggucagagg

SEQ ID NO: 4191696 - RNA, 63 nt, Human
ccuccguagccuguggcagugacggcugcucaagggccuuaacugccaggauggcacuagagg

SEQ ID NO: 4191697 - RNA, 76 nt, Human
ccuccuacacaucucaccucacaggcaugaacucagaaggugguucuucuaggagcugagaguguguacguggggg

SEQ ID NO: 4191698 - RNA, 58 nt, Human
ccuccucauuucucuccagguaauucauuacuguacuuuggcagucagaaaugugagg

SEQ ID NO: 4191699 - RNA, 75 nt, Human
ccuccuccuuuuccacagccacucacuggggccaccaaaacccagagauggcaggugugugggacagacuggagg

SEQ ID NO: 4191700 - RNA, 88 nt, Human
ccuccugaguagcugggacuacagaccacaaugcccagcuaauuuuuugcuguuguugauauguggucucguuauguugcccaggcug

SEQ ID NO: 4191701 - RNA, 55 nt, Human
ccuccugcaccuccaggaacuccagcucuugcugcagcuucugcgagcagagagg

SEQ ID NO: 4191702 - RNA, 68 nt, Human
ccuccuguauugccuucacuugccagauagguccaugugucugaggaguugggccagugcugcugagg

SEQ ID NO: 4191703 - RNA, 73 nt, Human
ccuccuguauugcuucagcuuccugggcugccuugguuucauggcaccugcaugaugucugaagcaagggagg

SEQ ID NO: 4191704 - RNA, 55 nt, Human
ccuccuuuuucucucuuacuaagguugacugagcuuuaaagaauaggaagggagg

SEQ ID NO: 4191705 - RNA, 68 nt, Human
ccucgauggccugaccacccuuggacaaggucauuugcagugaccuggugggugggcagacauugggg

SEQ ID NO: 4191706 - RNA, 79 nt, Human
ccucgccccucucagcccugcaaguugcgugguuguguuuacaaauucugccacaauugcaaaggaaauaggggugggg

SEQ ID NO: 4191707 - RNA, 60 nt, Human
ccucgccugccugugucucuccccaaaccccuuuagauggggagggaagaagaggagagg

SEQ ID NO: 4191708 - RNA, 63 nt, Human
cccaccucucagagagccuugcuugcagaccccuucaucugauggauucucccgagagguagg

SEQ ID NO: 4191709 - RNA, 72 nt, Human
cccacgggaggaauaacauuggaacccugaagagagggaccucuugagggucugaauguugguuccaguggg

SEQ ID NO: 4191710 - RNA, 86 nt, Human
cccacggggaaggcguauaguugggacucagggcugacucagagggccagcccuggccagcucaugucugaggucacauccgaggg

SEQ ID NO: 4191711 - RNA, 61 nt, Human
cccacuaaguauaauaaaucauacauuucacugcagaaauguuaauguguuugcuuauggg

SEQ ID NO: 4191712 - RNA, 77 nt, Human
cccacuccagcauucuugagguguggacucagagcccccaggcacucggguuugcaaucaacugugagauguuuggg

SEQ ID NO: 4191713 - RNA, 81 nt, Human
cccacuccuccucuccuacuuucagauggauuuauuccuuuuuuaaacaaugaacaucggaaaugagacuguggggugugg

SEQ ID NO: 4191714 - RNA, 77 nt, Human
cccacugacaagucugucuuacuucacugaaguuaacccuccaaacacagaugaggacagaugacugggcacguggg

SEQ ID NO: 4191715 - RNA, 61 nt, Human
cccacugagugagcagagcagggcccauuucugauaagcggucucucugucuccucuuggg

SEQ ID NO: 4191716 - RNA, 72 nt, Human
cccacugauucaucuagugccucuauguuguugaccuucaauaucauuagggucucucagcugaauauuggg

SEQ ID NO: 4191717 - RNA, 90 nt, Human
cccacugcagcucccccugggcccucccacauccugugaaccauccuccaggagagguagaggguuccagagguaggggcauagaguggg

SEQ ID NO: 4191718 - RNA, 61 nt, Human
cccacugccuugucaggcacagggccagauccugcacccugugacgagcacggccaguggg

SEQ ID NO: 4191719 - RNA, 63 nt, Human
cccacuucagaggggacucaaagucagcaucuauagucugauccugauccucugaggcaaggg

SEQ ID NO: 4191720 - RNA, 76 nt, Human
cccacuuccuggcugggugaccugggauaaauuauugaacuccugugagccccagauuccccagcugugaaauggg

SEQ ID NO: 4191721 - RNA, 76 nt, Human
cccacuuucaucagaagaaagacaaaugaugcaaaagucaaggaggcagauaaucguuuucuuucuuccugguggg

SEQ ID NO: 4191722 - RNA, 62 nt, Human
cccagaaugcuuuuccagcucacugcuauuuaaucuaagucagcuggugucagagcucuggg

SEQ ID NO: 4191723 - RNA, 130 nt, Human
cccagagauuugauauuuagaaaguagugaauuuaguuuguaagaaggcuuacuuuuagaugcucaaauagauagcuccgacuaccuucacauagacuaaggauuuauuuaauuuguuuauuuaauaugg

SEQ ID NO: 4191724 - RNA, 57 nt, Human
cccagagccgcuccccuacuucuccucaggggacauagauggggcagguggccuggg

SEQ ID NO: 4191725 - RNA, 67 nt, Human
cccagagccuugaguucaagugcuggcuaugcuccucauuagccaguugugggaucuuaaguauggg

SEQ ID NO: 4191726 - RNA, 104 nt, Human
cccagaggcaggguguacauugugagugucagugccuggcuuguuugccugugcggauguggcagccauggacacuggcuagcauauggacaccuugccugggg

SEQ ID NO: 4191727 - RNA, 67 nt, Human
cccagaggugacaucccauucucuaccuuccaacaaggguauucagugccaggaguuaaacccuggg

SEQ ID NO: 4191728 - RNA, 63 nt, Human
cccagaucggcuuugcagaccucauggggguccucaccaaagggguccgggaaguggaauggg

SEQ ID NO: 4191729 - RNA, 55 nt, Human
cccagaugcagguucaagaguacuuuuccugggauagagccuuccagcauguggg

SEQ ID NO: 4191730 - RNA, 79 nt, Human
cccagauucccaggccagagcuaagcaccagagaauaaaccugacgcuguggacauacuaggccuaggcugggucuggg

SEQ ID NO: 4191731 - RNA, 60 nt, Human
ccucgcucagggccacccuugucuggggcuccccaugcccuggggcuaccucugagcagg

SEQ ID NO: 4191732 - RNA, 71 nt, Human
ccucggaagccacaaugccaaccucuacuuggcaacucagcccagcagaguugggauugugaagauugggg

SEQ ID NO: 4191733 - RNA, 56 nt, Human
ccucggacuugggugggcuccuuucucuuaagcgagggcccaccuuggugcugagg

SEQ ID NO: 4191734 - RNA, 61 nt, Human
ccucggagcacgccggccgcccgcccgcccgccuggcgcugcugccaccgcgugcuccagg

SEQ ID NO: 4191735 - RNA, 60 nt, Human
ccucggagccgcuuccgccgcucauuggcugaaacacaggagcugggcgaggcuccgggg

SEQ ID NO: 4191736 - RNA, 56 nt, Human
ccucggcccuuucucgggugggagagcccugccuacccaggcuuagagggcugggg

SEQ ID NO: 4191737 - RNA, 55 nt, Human
ccucgggcacaagagauccuuacagcucaagugcagacccucucagugccugagg

SEQ ID NO: 4191738 - RNA, 95 nt, Human
ccucggguguucacaguauuuuguugcccauuuucuguuuagugacuacuuuucaggaucaagacagauggguaacuugguaugguggcuugggg

SEQ ID NO: 4191739 - RNA, 100 nt, Human
ccucgucuacugcuucuuaaaaauguguuuaugcauuucguauuuguacguccuugaguuaaugagcguuauacauuuugugggaaguaguacuaugagg

SEQ ID NO: 4191740 - RNA, 71 nt, Human
ccucguggugucagaccugugcaucuucaaggacauaaacagaugggauaagcagaugagacucacagagg

SEQ ID NO: 4191741 - RNA, 77 nt, Human
ccucuacuggaacacugauaggccaauggaacaggucagccuaauaccugggcugucaguuuuguuuuauuuugagg

SEQ ID NO: 4191742 - RNA, 67 nt, Human
ccucuauccaaagaaggucacauucaugguaccaggaguccauggaucuggaucuaucuuuuggggg

SEQ ID NO: 4191743 - RNA, 65 nt, Human
ccucuauuuugcugcaacagccaaaggccauucaucugccccucacuguagagcacaaguggagg

SEQ ID NO: 4191744 - RNA, 67 nt, Human
ccucucagcgugugccauuuuccacuucaguuuguggcaaaggggaccauguugaaauaauuugagg

SEQ ID NO: 4191745 - RNA, 70 nt, Human
ccucucaguaagcaggcuguaagucagcauggaagcaccugcugcagcuucuuguccugugauuuagagg

SEQ ID NO: 4191746 - RNA, 82 nt, Human
ccucucauggccuagaaagucuuuaggauguuguuaaacagugguuugggagcauuuagaaaagacguauggcccggagugg

SEQ ID NO: 4191747 - RNA, 119 nt, Human
ccucuccaaggagcagcagaauaccauaugaauauucugaguuaaaauuccagagguaacaaagaaaguguuaccuuuggaggacuagggucauagaagaauucuguucucuugacagg

SEQ ID NO: 4191748 - RNA, 79 nt, Human
ccucucccauuucuccagggcuaccagguuuuagcagcaacuuacaaccaggcugcccagcucuggaaggugggggagg

SEQ ID NO: 4191749 - RNA, 57 nt, Human
ccucuccucugggccuccccucugccuggcagcggguuggcagcaccagaggagggg

SEQ ID NO: 4191750 - RNA, 55 nt, Human
ccucucucuccugcacacacacaugcaugugcacaaaugugguaacagagacagg

SEQ ID NO: 4191751 - RNA, 75 nt, Human
ccucucugcugaggugguuuuagagaagacuuaguggacagucaauauuuucaacaucaccuagcaguucugagg

SEQ ID NO: 4191752 - RNA, 65 nt, Human
ccucucuguucuccucuguugcccacagcaaccucagcaguugguaccagcacagaguggagagg

SEQ ID NO: 4191753 - RNA, 62 nt, Human
ccucucuuacauauacgucauuuaguauauaaauguaaugugauguaguguaagaguacagg

SEQ ID NO: 4191754 - RNA, 70 nt, Human
ccucugcacccacagugagugucauacuuggagcaggacaugcccuggacucaggcugugggcacggagg

SEQ ID NO: 4191755 - RNA, 65 nt, Human
ccucugcacugcugaucccaggucuaugcugaaaagcuaaggcuuauuaggucugcagagugagg

SEQ ID NO: 4191756 - RNA, 64 nt, Human
ccucugcauccccaauuagcgcccagcuugaaggcaagcagguuucucuuuggagggugggagg

SEQ ID NO: 4191757 - RNA, 61 nt, Human
ccucugcaucuggcugcugcagacccucguccaccuccugcagcucggccaggucuggagg

SEQ ID NO: 4191758 - RNA, 69 nt, Human
ccucugccgggcagccaaagggccgcaguuugucgugcgacugcaggugccucuugagcuuguaagagg

SEQ ID NO: 4191759 - RNA, 59 nt, Human
ccucugcugagaaaagacugagggaagcaaccuuccuucaggccucauucucauacagg

SEQ ID NO: 4191760 - RNA, 57 nt, Human
ccucugcuugcagaaucucucagcagccggacuuuugcagaagcugcaggucagugg

SEQ ID NO: 4191761 - RNA, 57 nt, Human
ccucuggacagauguauuuuauguaaguucaagcacuagaaauauugaguucagagg

SEQ ID NO: 4191762 - RNA, 105 nt, Human
ccucugggacuaauuacccugaucugacuagacugguuguuagaucugaauuauagucaugaauaaguuagaucuuaauuaaagucauguaugggguccaagagg

SEQ ID NO: 4191763 - RNA, 78 nt, Human
ccucugggagccugacagugcccagcaugaagguggggccagugcuggggguuucuguaggucccacucccacagagg

SEQ ID NO: 4191764 - RNA, 58 nt, Human
ccucugggcagguagcagcagcuuuaaucauuuaggccagaugcuuccaucccggagg

SEQ ID NO: 4191765 - RNA, 62 nt, Human
ccucugggccagccuggacccugaagcuguuggcuuccuaguugagaccacugggccagagg

SEQ ID NO: 4191766 - RNA, 71 nt, Human
ccucugguaguguauccuccaaugacauaaauuuuucccuuacacucacaggcagagaacucagccagagg

SEQ ID NO: 4191767 - RNA, 82 nt, Human
ccucugguguugccguuaucauuuugguugguuuucuuccuggacuuucaaaguugggaauuguaauugucuauuccagggg

SEQ ID NO: 4191768 - RNA, 58 nt, Human
ccucugugaaugggucauuacuuuuaggaggggaagugaauagccuauuuacuagagg

SEQ ID NO: 4191769 - RNA, 77 nt, Human
ccucugugagugcugagagcccaggcccugcugugcuaacuuugcacucagagugggcugucagccaccagcagagg

SEQ ID NO: 4191770 - RNA, 79 nt, Human
ccucuguguccuccccuuggcucuuggcccucucaccuguggaaguggccaugcaggucagaggugggggacccagggg

SEQ ID NO: 4191771 - RNA, 61 nt, Human
ccucuguguccuggucauugaaugggcacuugagucacccagggccauuggaacaaagagg

SEQ ID NO: 4191772 - RNA, 99 nt, Human
ccucuucaacugaaauauuuaaaaagaaugauugcacgggaaugaaaaccucagaaguuauuacucuuuaacauauuugcaggaaguuaaaggaagagg

SEQ ID NO: 4191773 - RNA, 81 nt, Human
ccucuucccauuucuuccuuucuccuucaauguaugccacuccuaggcaucaugaagaugagaaagcauauguuaaagagg

SEQ ID NO: 4191774 - RNA, 59 nt, Human
ccucuucccuucccucaggugaaugacaacguacguuuaacaggaucucgggcaagagg

SEQ ID NO: 4191775 - RNA, 62 nt, Human
ccucuuccucaccaucuacaacagcaccacucaugagugccucagaagaggagagggagagg

SEQ ID NO: 4191776 - RNA, 89 nt, Human
ccucuucugaacuccugcagcugauaaauacagucuaguccuccauggucucaacagcuaguguuugccagcguagccuucuagagagg

SEQ ID NO: 4191777 - RNA, 61 nt, Human
ccucuugccccgaagucugagaagguuaaccuucuguguauacagaguuugcaggcagagg

SEQ ID NO: 4191778 - RNA, 117 nt, Human
ccucuugcuccccuuccugugcugagggagaggcugaaaucacaggagcuugucuugcgaguuuuucugacauucuaguuucuuccuuggagccagaacagagagggguuuuggagg

SEQ ID NO: 4191779 - RNA, 81 nt, Human
ccucuuuaacauaugcuuucucaucuucaugaugccuaggaguggcauacauugaaggagaaaggaagaaaugggaagagg

SEQ ID NO: 4191780 - RNA, 96 nt, Human
ccucuuuaccuucuucuacccgcaacccuccacaccagucuuauuuuagcaaaaccuagagaaggaggagguggagggauuuggaggguggagagg

SEQ ID NO: 4191781 - RNA, 74 nt, Human
ccucuuuuucucuuuucuguggcuuucccaacuugccauggaugcagaggagaaggccaagaaggaagcagagg

SEQ ID NO: 4191782 - RNA, 61 nt, Human
ccugaaaaaccucaguucugcucuuaaggcccuuaaacugcuugaauuggguuuacccagg

SEQ ID NO: 4191783 - RNA, 73 nt, Human
ccugaaauaugcaccccuuuuccagcugaaacucuccaccuuuauaaucagcucagaggugaaauguuuuggg

SEQ ID NO: 4191784 - RNA, 56 nt, Human
cccgggaggaggaaguugcagugagccgagaucaugccacugcacuccagccuggg

SEQ ID NO: 4191785 - RNA, 56 nt, Human
cccgggaggaggaaguugcagugagugaagaucaugccacugcacuccagccuggg

SEQ ID NO: 4191786 - RNA, 59 nt, Human
cccgggaggcgcccgcugcaccggccucuccggguggcgcagggaccgcgacuucuggg

SEQ ID NO: 4191787 - RNA, 59 nt, Human
cccggggaucccgucugggcgagcaccccucgacccucgcuuagaagggacauccuggg

SEQ ID NO: 4191788 - RNA, 96 nt, Human
cccggggccggaggagcgagagcgaagcagggagcugcccuguaaucuggggcagccguuuccagcccgcgacuuguucagacggcgauuccuggg

SEQ ID NO: 4191789 - RNA, 99 nt, Human
cccggggccggggcccggcugcaggcgccgugcccgcuccgcgccgcugccgcccggccgcggagcuccgcccggugcccaggccugucccggcccggg

SEQ ID NO: 4191790 - RNA, 95 nt, Human
cccggggccugcugccucccacagcgauggcuccucacguccucagagcccuguugcucccaggaugaggagccagggacaggaggaugcccggg

SEQ ID NO: 4191791 - RNA, 60 nt, Human
cccggggcugcccucucucugugggcuugccucaucaugucagcucugggcagccugggg

SEQ ID NO: 4191792 - RNA, 81 nt, Human
cccagcaaucuacagcuuccccccgggcuugagagggaggcggcacugaguccauguggaggggagguggggagagcuggg

SEQ ID NO: 4191793 - RNA, 56 nt, Human
cccagcacuuugaauaugucacccuacuuccuuuggccugcagaguuucugcuggg

SEQ ID NO: 4191794 - RNA, 62 nt, Human
cccagcaggcacaaauuucuagauaagguuuuccucugcacaaauuuaguguccccccuggg

SEQ ID NO: 4191795 - RNA, 84 nt, Human
cccagcaggguggcaagucuuucugcaacauuuuuggaauacaagcagaaagugauuugcuauuccacacaaaacaugauuggg

SEQ ID NO: 4191796 - RNA, 93 nt, Human
cccagcauuaugcauucauaugcuucaacuaccccaggcugcuuucaggacagcaguuuguaauuacugcagcaugguguauagugucugugg

SEQ ID NO: 4191797 - RNA, 82 nt, Human
cccagccaccuucucugcaccaggcccugccuugagggaccuggacccccagguggcuucuggccagguguggguggguggg

SEQ ID NO: 4191798 - RNA, 64 nt, Human
cccagccccagacacgcuguccugccucaggccgggcaggcacaugggcgggucugguggcggg

SEQ ID NO: 4191799 - RNA, 76 nt, Human
cccagcccuggacagugacggugacccauggagaaugcaucaugccugucaggguccuguugguucagcggcuggg

SEQ ID NO: 4191800 - RNA, 70 nt, Human
cccagccucagcuuuacuuccacagugccuagcucccaggaauucuaaaagaaguaagauugaggauggg

SEQ ID NO: 4191801 - RNA, 113 nt, Human
cccagccugucuuggggugaggaucgcugcccggaagcggggcacuggggccccaacacaggggguuugcagugucagcuucuguguucaccucuccccuuaucuuaacuggg

SEQ ID NO: 4191802 - RNA, 73 nt, Human
cccagcgucaucacggcaagcaucuccucacucaccagccuuggagucggacuuguuuuguggugggcugagg

SEQ ID NO: 4191803 - RNA, 69 nt, Human
cccagcucagugguggucacuugguggaagaauaugaucuaucaccaaggaguuacuacuuaguuuggg

SEQ ID NO: 4191804 - RNA, 63 nt, Human
cccagcucccacauggaauagcagggaagaccacugucuucccuggaggugcugggagcuggg

SEQ ID NO: 4191805 - RNA, 63 nt, Human
cccagcucuuugucauuuuaggugucugacaucugucagggaugugacauuacagaagcaggg

SEQ ID NO: 4191806 - RNA, 86 nt, Human
cccagcugggaagugguaguuagaaugcacacacauggagucaugacugacucuggaauggguguuucuaacaccaccuggcuugg

SEQ ID NO: 4191807 - RNA, 67 nt, Human
cccagcugugcuuagccaucacauucaaccugacugguaguugaaucuucuagcagagcaugcuggg

SEQ ID NO: 4191808 - RNA, 80 nt, Human
cccagcuguggcagaggccgggcacucacagggccggugguguuugauucuggccucugagaagcuccuccgacaguggg

SEQ ID NO: 4191809 - RNA, 62 nt, Human
cccaggacuaaugagcucuacgcugagggcaucucugaaggaacuggaacucgauggcuggg

SEQ ID NO: 4191810 - RNA, 57 nt, Human
cccaggacucuucacugcagccucauuuuaccagccugaauguugaggggucuaggg

SEQ ID NO: 4191811 - RNA, 87 nt, Human
cccaggagcuggcugggcccaccuggcaucccugcccagccccuggccgggccucgggacaccggguacgcaccgccuacuccaggg

SEQ ID NO: 4191812 - RNA, 59 nt, Human
cccaggaggagggguuuacauuggaaccaguucagguucggugcaucuuuccucuucgg

SEQ ID NO: 4191813 - RNA, 56 nt, Human
cccaggaggcugagguugcagugagcugagaucgugccacuccccuccagccuggg

SEQ ID NO: 4191814 - RNA, 56 nt, Human
cccaggagguggagguugcggugagccgagaucacgcugcagcacuccugccuggg

SEQ ID NO: 4191815 - RNA, 69 nt, Human
cccaggcacugggcguguccugggugagggcugagugcugucuccccuagucuacgcucagcuccuggg

SEQ ID NO: 4191816 - RNA, 72 nt, Human
cccaggccagcaccauuuuccuggucagcucuggacaggcaggugcuggcacagguggaugcuggccauggg

SEQ ID NO: 4191817 - RNA, 72 nt, Human
cccaggcccaugggaucuguugccucagagacugacucgccuuuccugagcauuagacauccaucaccuggg

SEQ ID NO: 4191818 - RNA, 55 nt, Human
cccaggcucccaggugggacaacuuuguguugucguuugggcucaaagcuauggg

SEQ ID NO: 4191819 - RNA, 56 nt, Human
cccaggcuggagcgcaguggggcgaucuugguucacugcaaccuccgccucccggg

SEQ ID NO: 4191820 - RNA, 56 nt, Human
cccaggcuggagugcaguggcacgaucucggcucacugcaagcuccgccucccggg

SEQ ID NO: 4191821 - RNA, 56 nt, Human
cccaggcuggagugcaguggcgcgaucuccgcucacugcaagcucagccucccggg

SEQ ID NO: 4191822 - RNA, 55 nt, Human
cccaggcuggagugcaguggcgcgaucucggcucacugcaaccucccccucuggg

SEQ ID NO: 4191823 - RNA, 55 nt, Human
cccaggcuggagugcaguggcucgaucucagcucacugcuaccucugccucccgg

SEQ ID NO: 4191824 - RNA, 56 nt, Human
cccaggcuggagugcaguggugcgaucuccgcucacugcaagcucugccuuccggg

SEQ ID NO: 4191825 - RNA, 89 nt, Human
cccaggcugggcagaaggaagccagcacaguguggaaggaacagguuuuucaagguucaaggcuggcuucuuccaguuccagcccuggg

SEQ ID NO: 4191826 - RNA, 66 nt, Human
cccagggaaggcauguguccucagagagaaacacuaguuucuguuuucuggccacagccccuuggg

SEQ ID NO: 4191827 - RNA, 59 nt, Human
cccagggauguggcagauguuacagaauauuaguauaucauaaaugcacaguccuuggg

SEQ ID NO: 4191828 - RNA, 103 nt, Human
cccagggcccuggggcuggcccugcccaccugucucugcagggcccugccuugacaaaagccaggaccucagaugcagggccuggccucccagggucccaggg

SEQ ID NO: 4191829 - RNA, 55 nt, Human
cccagggcucaggcucccaguggggucugcuuccuacaacugcguggcccugugg

SEQ ID NO: 4191830 - RNA, 58 nt, Human
cccagggcugccugacuccagagcccaguguuucacccccaggccaggcagcccuggg

SEQ ID NO: 4191831 - RNA, 60 nt, Human
cccagggcuguagaauguccaaucucuguaguggguucuggaguuauggcaagcccuggg

SEQ ID NO: 4191832 - RNA, 81 nt, Human
cccaggggacucagagugugccccaggaguccugugggaauugccccacccuuccuggcacacuccugaauguucucgagg

SEQ ID NO: 4191833 - RNA, 56 nt, Human
cccaggguggaguacagugguacaguaauagcucacuguaaccucaaacuccuggg

SEQ ID NO: 4191834 - RNA, 122 nt, Human
cccaggguuacauggcuagcaaguggcauagcagggauugaauccggugccuccucacuccaagcaccaugcucuccucuaugcuauuccccuagcccuucacagcccagugugccccuggg

SEQ ID NO: 4191835 - RNA, 100 nt, Human
cccagguggaggggcgggacgcagagcagcggcuccaccucccgggcgggaagccccggcccucucggccugcuggcuccagcgcccgccccugaccggg

SEQ ID NO: 4191836 - RNA, 65 nt, Human
cccagguggucaggcaaggacacgcggucauucugccuccugcgucuuguccucgggcgccuggg

SEQ ID NO: 4191837 - RNA, 84 nt, Human
cccagguuggauuagggcacuuccucugggucccuggcaauuuccuccagguuagggaucccaaggggucucugccuuccuggg

SEQ ID NO: 4191838 - RNA, 93 nt, Human
cccagguuuccaugacuucaaguuuuguguucuuuuucugcuacuucaguaagaguauuuagagacacaagauggccaaucauagaaucuggg

SEQ ID NO: 4191839 - RNA, 59 nt, Human
cccaguagcagggcuuuggggaucugcugacaggaacccagagucaucuguagcugugg

SEQ ID NO: 4191840 - RNA, 59 nt, Human
cccaguccagaccaugaccucaggcccaggcuggggcuggggcuugggcuggggcuggg

SEQ ID NO: 4191841 - RNA, 76 nt, Human
cccagucuccagggagcagggaauuacagcgcaggaggaaccuguccaucuguccugccucacugcucccucuggg

SEQ ID NO: 4191842 - RNA, 63 nt, Human
cccagucugugguacuuuguagggucauuggggucacuuuugagucuacucaccacaacuggg

SEQ ID NO: 4191843 - RNA, 63 nt, Human
cccagucuuuuccuucauacaauucagugguuggacugagcugucaggaauggaaagccuggg

SEQ ID NO: 4191844 - RNA, 99 nt, Human
cccagugagugccggagcuggguggagggcccacggugaccucaggcguccagcuuuccaucugccugggccuuuucagggcccagaguggcaacuggg

SEQ ID NO: 4191845 - RNA, 60 nt, Human
cccagugccaggcacaggcagcccacuuccaccuagggcugcucuguuauuggcgguggg

SEQ ID NO: 4191846 - RNA, 61 nt, Human
cccagugggucacugcaucucacuaccaaccaucauagggagcgugcugcuucccacuggg

SEQ ID NO: 4191847 - RNA, 61 nt, Human
cccagugucucuugugccuuucucugagaauggacccggagugagguuguaagauacuggg

SEQ ID NO: 4191848 - RNA, 65 nt, Human
cccagugucugggccugcaggguggccucugaggcccagggcccuggaagagccugggcaugggg

SEQ ID NO: 4191849 - RNA, 74 nt, Human
cccaguguggccagucaagucccucugaccucugggcuccuuagaagucccuggugcuggcugcgcugcacggg

SEQ ID NO: 4191850 - RNA, 66 nt, Human
cccaguucaaaauuuugaagaaggcaguuaauuuucuuugugucuaucaccucauuuugaguuggg

SEQ ID NO: 4191851 - RNA, 56 nt, Human
cccaguucugagaugaauauccaggagugugcucuuguauccaugcagggucuggg

SEQ ID NO: 4191852 - RNA, 86 nt, Human
cccaguuucagagcagugcagaccuuccagaaagaacuuuggcaccagaaguucuucucccugggucucaagcuguguuuucuggg

SEQ ID NO: 4191853 - RNA, 63 nt, Human
cccaguuuccuuccacuggcucauuccugagauugcaguagagcugaguguagggagacuagg

SEQ ID NO: 4191854 - RNA, 65 nt, Human
cccaguuuuuccuacccuaggguggacuguauuuuuuacaauuaacucugugaagggugacuggg

SEQ ID NO: 4191855 - RNA, 61 nt, Human
cccauaacugagugagcagcgacuccuuuuauaggauacucuaagggagaugcucucaggg

SEQ ID NO: 4191856 - RNA, 80 nt, Human
cccauagcuguucucacaggaaccaucagagaaauguucauugauacuuagauaacaaaccugugguucaguuauauggg

SEQ ID NO: 4191857 - RNA, 73 nt, Human
cccauaucucauaaugugacuguauuugaagauaugaucuuuaaggagguaauuauaaugaguuacagugagg

SEQ ID NO: 4191858 - RNA, 95 nt, Human
cccaucauccaacccuguuuccaaaugauuuguucuuaguaugcauuguuuuucucaaaaacaauuuuauuuggagcagaaacagugauaauggg

SEQ ID NO: 4191859 - RNA, 105 nt, Human
cccaucccuagaagcccuugcuaacccagucuccucguguaaaccuuuccccagguuuacacuccaggcuggggugggcaaacaggggcucagcuauaggauggg

SEQ ID NO: 4191860 - RNA, 60 nt, Human
cccaucccugagucacaggagggcucugugucaguguccagcugugcuccaggagguggg

SEQ ID NO: 4191861 - RNA, 104 nt, Human
cgacugugccucuuuuggagggacuuagaaagaaggccagcuguuucaaagacucagcugccccucauuuucaccacacgagcccuccuaaacagagcacaucg

SEQ ID NO: 4191862 - RNA, 126 nt, Human
cgagagcugauuaggcaccgcggagcugcugagcugcggcaggcaccuggaacuuaaucagguccccaggggccggcgcaguuagggcagcuccacuuaggaauuggugcuaauuggcgccccuug

SEQ ID NO: 4191863 - RNA, 73 nt, Human
cgagaggcaaaaagacuacacgggaaagagcuggaacuccgguaguaccagcucuguggucauuuaccucccg

SEQ ID NO: 4191864 - RNA, 129 nt, Human
cgagcacagugaauuccaguacuuucggaggcugaggcgggugaucaccugaggucagguguucgagaucagccugaccaacauggugaaaccuugucucuacuaaaaauacaaaauucacaaggcaug

SEQ ID NO: 4191865 - RNA, 74 nt, Human
cgagcccaacgugcauuaggaccucuccagggaagugacagguccaccuggagggcucuuucaccugguacucg

SEQ ID NO: 4191866 - RNA, 94 nt, Human
cgaggcugcuggccagagacagucuacacaggcauugcagaaaaguagcucaauuuugcugccuaacagaacucuuuccagucaugcaguaacg

SEQ ID NO: 4191867 - RNA, 101 nt, Human
cgaucgcgcgaaggcguucgagaggggcggggccacagugaggcuaggccggaaggccuggccaggcucucacguggucugccucugcgccugcgcucucg

SEQ ID NO: 4191868 - RNA, 130 nt, Human
cgaucucuacucacuacaaccuccaccucccagguucaagcaauucuccugccucagccucccgaguagcugggacugcaggcacacgcugccaugccuggcuaauuuuuuguauuuuaguagagaugcg

SEQ ID NO: 4191869 - RNA, 64 nt, Human
cgaugaggcagcuggcuuucucccuggcaccagccccaagggagccagccuuugccuauaauug

SEQ ID NO: 4191870 - RNA, 107 nt, Human
cgaugaugauuuaugcaaaacccggucagcuccacagcuccaucaguuucaauuaaaacaagccgcagaggaggugugcugcggcccggugccugugaucaccauug

SEQ ID NO: 4191871 - RNA, 73 nt, Human
cgaugcugauuuuacuguuuucuccuuuagaccacaucagucucauuuaagaauacguuaaaagcagacguug

SEQ ID NO: 4191872 - RNA, 75 nt, Human
cgauggcaccuuuuuagguagugaguacuugaaucaaugugaucaaaugcuucuacuccuaagaagugacaauug

SEQ ID NO: 4191873 - RNA, 62 nt, Human
cgauggccuuuccuuggcacaggguccacugcagcaugccaaacgaggaggcaggggcgucg

SEQ ID NO: 4191874 - RNA, 57 nt, Human
ccucccuucccggcauggcucucuggacccaggcaggaagcugcugauugguggagg

SEQ ID NO: 4191875 - RNA, 72 nt, Human
ccuccuaacaugcagagauuggcuuuauagaugcacaugguuucaaauggccaauuuuugacugucaguagg

SEQ ID NO: 4191876 - RNA, 122 nt, Human
ccuccuacaguucagcuuuccacguuccaggaggaaaugugacccugcuguuucgggaaccccaccucauguagucuuaauuucucuccgaauguguuugaagucuugccagcguagagagg

SEQ ID NO: 4191877 - RNA, 127 nt, Human
ccuccucagaauucaggaccaacaaaauccucuuuagcaaggagaaauaauccugcugauccacgaaaugccacaauuagcaauuuauccuuuugcuaaagcacuugcgaguccccauaggaggagg

SEQ ID NO: 4191878 - RNA, 66 nt, Human
ccuccuccaacaucuugauucacuaccauucuuaccuucuuuuaggugacaaagaguaagaggagg

SEQ ID NO: 4191879 - RNA, 80 nt, Human
ccuccuccugcaggguagaugcaggcugugggaucacuuccuuuuccuuucagccccagucuggccucuguggggggagg

SEQ ID NO: 4191880 - RNA, 69 nt, Human
ccuccucuauaaagugcaugcggggccagaugcaguggcucacaucugaccucccaacacuuugggagg

SEQ ID NO: 4191881 - RNA, 115 nt, Human
ccuccucuugaagucuggagagucauaggcguccuccucgucugaggcggcguacugccccgcgcugcuucucucuaggaagacgcuccuuuucucuaacuuggaaagaaaaagg

SEQ ID NO: 4191882 - RNA, 55 nt, Human
ccuccugcggcguccgcgcucugucucucucuggcucguggagcuggcaggcagg

SEQ ID NO: 4191883 - RNA, 67 nt, Human
ccuccuggugggcgcuucuggccuucccucccuccccaaaggcaagaggcccccuuaccaccugagg

SEQ ID NO: 4191884 - RNA, 71 nt, Human
ccuccuguagagccccagcccugcuucuauagaggauucuuggaaaggcugcauuggggcggugugggagg

SEQ ID NO: 4191885 - RNA, 129 nt, Human
ccuccuugccccugucugucugacaccucugccuccagcuucucgccugacagcuccuuuccgccucaguggcugaagagcuauguccagggagcagggguugcagaggagauggaagggccagugggg

SEQ ID NO: 4191886 - RNA, 83 nt, Human
ccucgcuuccagaccucuggguggucucacugagugcccuugucuuagugaucaggaucccuauaucaggucuuugagccagg

SEQ ID NO: 4191887 - RNA, 129 nt, Human
ccucggauuuuccauauccccccucgccccgccccgcuuccagugguuugaaaggggugugguuuugcugggaaaauggccgaccgcuggggcugcgggagggagugagggccgggggcggggacgggg

SEQ ID NO: 4191888 - RNA, 93 nt, Human
ccucggcucaucuuacaucauauauuuacucuccuguugcagguuugaggcugcaaacaggagaguaaguauaugguguaagaugagcugagg

SEQ ID NO: 4191889 - RNA, 75 nt, Human
ccucggcucuugccugaguuucagagucccgccggaguuagagcuggcagaguccaauugcucagagcgccgagg

SEQ ID NO: 4191890 - RNA, 88 nt, Human
ccucuacugcuuuagaguuuacagugugcaaucccagaauauuauagcagauauucuuugaaagucuacuaugucuaaggcagugagg

SEQ ID NO: 4191891 - RNA, 82 nt, Human
ccucuagacaguggcauuaguuuuuagaaacaucagaaguuccaagggcacugacucugagaauagugccacuguggagugg

SEQ ID NO: 4191892 - RNA, 93 nt, Human
ccucuagaccaugcagccugcucaugggucccuggcagagaaugcccacuccccagcagacucagggcagguccccaacugcaggcuuccagg

SEQ ID NO: 4191893 - RNA, 71 nt, Human
ccucuauggccucccauuuucucaaauguaaaauacaucuggacuagagcagaaugggagguacaggaugg

SEQ ID NO: 4191894 - RNA, 100 nt, Human
ccucuauuguugggccucugagaccuggggacugcuguuucuguuuucucugacucauacagucugucccccaggugcuacagcugaacauaaaaccagg

SEQ ID NO: 4191895 - RNA, 55 nt, Human
ccucucagcgauuccucuuggagggcuuacaucuccaggcuucgccagugagagg

SEQ ID NO: 4191896 - RNA, 55 nt, Human
ccucucaugcuggcuggggagccaucauauugccaucacagcuggcuaugacagg

SEQ ID NO: 4191897 - RNA, 75 nt, Human
ccucucauggucagaaagaaaucaaaugaggauucaaguaggugccugauacuuuucuuuuagacuaaccagagg

SEQ ID NO: 4191898 - RNA, 77 nt, Human
ccucuccacaucacaguggcuguuuauuuaauaauucaucauucuuucaguuaacacagcaccugugaugugccagg

SEQ ID NO: 4191899 - RNA, 103 nt, Human
ccucucccacucugccccgaauuccaauccauagguuuuuccaagagcugcacagcucuggaauugaccugggagggggcacauuugggccgggagggguagg

SEQ ID NO: 4191900 - RNA, 76 nt, Human
ccucuccuuuuucauuggcuuuaggacagaggccauuguaagaugagcaacugagucuggguggaaauaggauagg

SEQ ID NO: 4191901 - RNA, 86 nt, Human
ccucucgcagccugagccaggccucagggcuguccguaggagaagagcuugaggacagugcuuggggccccucagcauguuggagg

SEQ ID NO: 4191902 - RNA, 82 nt, Human
ccucucguuuauuucaacguaugaaaagcuguuucuagcagggcgcagugguucaacguuguaaucucagcacuuugggagg

SEQ ID NO: 4191903 - RNA, 73 nt, Human
ccucucucaggcaccugagguggccagccuggcgccaggcacaggacuggagggucagcugcuugagacaagg

SEQ ID NO: 4191904 - RNA, 76 nt, Human
ccucucucccuucuuuucugucuugaccuccuugacaaaaucugucuggcagagugauaggauaaguauguggagg

SEQ ID NO: 4191905 - RNA, 122 nt, Human
ccucucucgaagccaucugugugugugguuuugugaagcaauuaagcuccaggugugcaauagaaaugaaguagccgcuuaauuauuuggugaaacagcaggcauuugggauucaagauugg

SEQ ID NO: 4191906 - RNA, 55 nt, Human
ccucucugagaggucacagcugugcccuuuuguacugagaccugcauuagagagg

SEQ ID NO: 4191907 - RNA, 83 nt, Human
ccucucugucccuuucuggcagugaagucaugagguacaauaagcaaaagcugccaucgugcacauuaccugccauagagagg

SEQ ID NO: 4191908 - RNA, 55 nt, Human
ccucucuuucucucuugucuuucucagaguuggaaaugucagagggaugagcagg

SEQ ID NO: 4191909 - RNA, 75 nt, Human
ccucugaaccaaucucuaugcaccagacuaguucugcaccuugcugaugcugaauugaugcgagggaggcugagg

SEQ ID NO: 4191910 - RNA, 66 nt, Human
ccucugaccggugguggcucaagucuccacuccaagucccuuggggacaggccgccucgguggggg

SEQ ID NO: 4191911 - RNA, 62 nt, Human
ccucugagccuuccuuguuauguuucauguggguggaauauaugaccaggaaguucugcagg

SEQ ID NO: 4191912 - RNA, 72 nt, Human
ccucugagguccuucccagcucugacaaucccugaguagucugugcaguggcuugggcuggggcccuagggg

SEQ ID NO: 4191913 - RNA, 58 nt, Human
ccucugcaccauagccuucagcaaaugcugcuggaggaggcuggaauggauguaaagg

SEQ ID NO: 4191914 - RNA, 62 nt, Human
ccucugcauaauggaugauuucacaagcggugugcuugagaucagcaucuguugucaccagg

SEQ ID NO: 4191915 - RNA, 81 nt, Human
ccucugcaugcauuagauuaaaagcggguuugaucaaauaauucccagguccugccuguuuaaguauucugacaucagagg

SEQ ID NO: 4191916 - RNA, 76 nt, Human
ccucugccauuucuugcagucaaguguuaagguggagaacuuucaacaucaagaaugcauggaauuagggaagggg

SEQ ID NO: 4191917 - RNA, 86 nt, Human
ccucugcuccauggcucucuccuuacugcugccaauucccacccauccaugggucaugcauaggcugagggagagcuaucaggagg

SEQ ID NO: 4191918 - RNA, 56 nt, Human
ccucugcucugguccaugugcuaggcuguggagguuugcaggccaggaggcggagg

SEQ ID NO: 4191919 - RNA, 99 nt, Human
ccucugcugugggugcuugcuucucacaugcaccugagccacacugcugccccgugcuggcagaggugcaugaugcagagugcagccuccagagauagg

SEQ ID NO: 4191920 - RNA, 71 nt, Human
ccucuggacacugcuuuagccuugacagagacagucaguguugcugcagggaccacaagcagguugugggg

SEQ ID NO: 4191921 - RNA, 55 nt, Human
ccucuggaucuguccccuuuuuguugucucugagcuaaugggacagauuccaugg

SEQ ID NO: 4191922 - RNA, 55 nt, Human
ccucuggaucuuucuccacacucuucugaggugugcaguagagaaagagcagggg

SEQ ID NO: 4191923 - RNA, 56 nt, Human
ccucuggcauagcaaguggccucuacauggugugaaggucaaaggcauccaugagg

SEQ ID NO: 4191924 - RNA, 60 nt, Human
ccucuggccauucuuugauggaguugagaaauaugaccacaauuacagauggcucagggg

SEQ ID NO: 4191925 - RNA, 62 nt, Human
ccucuggggcaucagacaaagguacaacuauagaaagccuuaauccugagaguccuaugagg

SEQ ID NO: 4191926 - RNA, 66 nt, Human
ccucuggggguccucagagucugggcacauaucuauaucucgcccuggacugugggcuccaggagg

SEQ ID NO: 4191927 - RNA, 69 nt, Human
ccucugggucucccugaggcuaaaccccuucagugucugaaguccggcuugccccaggcaguccagggg

SEQ ID NO: 4191928 - RNA, 84 nt, Human
ccucuggugugaccuucagcaaucuuucuuggucuucuagccagauacagaggacaaaaugagaagugcuuggguccccagagg

SEQ ID NO: 4191929 - RNA, 80 nt, Human
ccucuguaagguuuccgaaaucaaacuugggcuucuggcuagccuuuucuaggucuugauuuuucagugcuuuccagagg

SEQ ID NO: 4191930 - RNA, 74 nt, Human
ccucugucccucugugucccugcagucccucuugccuccaggcgauggcagcagaagacaaggagucccagagg

SEQ ID NO: 4191931 - RNA, 69 nt, Human
ccucuguguauccaaguucagguggccauagggcacgguggacaccaugaauaguggguguaugagggg

SEQ ID NO: 4191932 - RNA, 99 nt, Human
ccugaaaaauagacaguauuugacauugaaagcagaaucgcccuggaugacuccaccagcacaucugacuuccagugcaggagcugucugagauuuagg

SEQ ID NO: 4191933 - RNA, 62 nt, Human
ccugaacugagauuacaagagacauuuugaaauacaaaaguuucugucuucucaguggcagg

SEQ ID NO: 4191934 - RNA, 58 nt, Human
ccugaagcaguaucccagaagguccacccccguaccuucuuauaagauaggccucagg

SEQ ID NO: 4191935 - RNA, 82 nt, Human
ccugaaguccucuauuuuggucucauugcuccucuuucucagcuccuaaagcaguuuggaccucugcuagauggaccauagg

SEQ ID NO: 4191936 - RNA, 69 nt, Human
ccugaagucuccaauguugugcugagcccaaggguucucuggcuguggcugacauugcagacacucagg

SEQ ID NO: 4191937 - RNA, 79 nt, Human
ccugaauggaaaauggaggcccaggccccuccauggaaucuguucuccaauagaggagcuuuggacucccccagucugg

SEQ ID NO: 4191938 - RNA, 73 nt, Human
ccugacacaguggcucgugcuuguaaugccagcacuuugggaggcugaggcaggcagaucacuugaggucagg

SEQ ID NO: 4191939 - RNA, 70 nt, Human
ccugacaccgcgccugcgauuucagacuguuuaauuaauucugauaauaccacaucgcaggugcugcagg

SEQ ID NO: 4191940 - RNA, 77 nt, Human
ccugacagccugaggcuucuguaacccuguccuagggaccccgugaaggauaggggcagggagcagggcuggacagg

SEQ ID NO: 4191941 - RNA, 104 nt, Human
ccugacauuguuguaauaaccccucuucaggagcugaaagccugccagccucccugaggcagcagucaguucucugacugauuggauaugaccuguguguuagg

SEQ ID NO: 4191942 - RNA, 69 nt, Human
ccugacccaggggcagccuugcugugggagcuauuuccaaggacaacccuggcagccccaggguacggg

SEQ ID NO: 4191943 - RNA, 79 nt, Human
ccugaccccggccauuggagcguggggggcagccuuugcagagggguguccuuugggggcuccgaggagcuggggaggg

SEQ ID NO: 4191944 - RNA, 120 nt, Human
ccugaccucgugaugugcccgacucggccucccaaagugcuaggauuacaggcgugaaccaccgugccuggccaauuuuuguauuuuuaguagagaugggguuuuaucauguuggccagg

SEQ ID NO: 4191945 - RNA, 107 nt, Human
ccugaccuucucccuggugccccuuuagccccugcagagacuucugccuuucccuaggauacaugguugcuggggguggcagagcuagaaccaggguggugggaagg

SEQ ID NO: 4191946 - RNA, 85 nt, Human
ccugacuguaucauccaaggaggcuuugacguccauuugguuuacccccagauuugcaaggguugccuuggaaaucucaguuggg

SEQ ID NO: 4191947 - RNA, 60 nt, Human
ccugagaauuacucugaugaguaauuacugcccccuuacuccauucagaaauuacuuagg

SEQ ID NO: 4191948 - RNA, 86 nt, Human
ccugagcaagagcaggaugagccgcgcaagcugacagccacugcugccgcccgcgcccaggcucggucucgcucccagcgcucggg

SEQ ID NO: 4191949 - RNA, 56 nt, Human
ccugagcauguaugucacccuccccacuaagucuaggguuggcaagacagcucagg

SEQ ID NO: 4191950 - RNA, 65 nt, Human
ccugagccacugugguccucccaugauaugaacagagucugucguggagcucacagugugccagg

SEQ ID NO: 4191951 - RNA, 56 nt, Human
ccugagcccaggaaugcacuucagcuccugguugagcaaugucacugaggcuuggg

SEQ ID NO: 4191952 - RNA, 65 nt, Human
ccugagcccucuucccuagugaucgggacugcugcaggaucugguucuggggaaggggguugggg

SEQ ID NO: 4191953 - RNA, 57 nt, Human
ccugagcccuugaacccaaguccucagaaaugagcagacacuugaggugggcuuugg

SEQ ID NO: 4191954 - RNA, 63 nt, Human
ccugagccugaguggugcagggcagcaggcgucuuauuaugcucccaaaccaugugggccagg

SEQ ID NO: 4191955 - RNA, 106 nt, Human
ccugagcgagaguaacauacaguaaaaauaaagacuaaacaaccaauaucuugagagcugagggauuuuuguguguuuguuuugaagcuuguuuauuuuugacagg

SEQ ID NO: 4191956 - RNA, 55 nt, Human
ccugagcuggagacauuacauauuagaaauaauaguaaguuuugauagcauuagg

SEQ ID NO: 4191957 - RNA, 58 nt, Human
ccugagcuggcagugaccuggaacccgaugagggcgugggugacacaucagcgucagg

SEQ ID NO: 4191958 - RNA, 69 nt, Human
ccugagcuguccucuuggacucagggcugcggugcugugaccagcccauccauggaggccagccgcagg

SEQ ID NO: 4191959 - RNA, 67 nt, Human
ccugaggaaauuguaaugacuucacuugaggcagcugccuuggaagacaaugcugauucucuucagg

SEQ ID NO: 4191960 - RNA, 59 nt, Human
ccugaggagagaauugcuccuguccuuuccuauaucacagggcauugcuggccucgagg

SEQ ID NO: 4191961 - RNA, 130 nt, Human
ccugaggcaagugaggcccugccccugggguggcugauuuuguccugggggugggaggggcuggaggggaauccaguccaaccugccccuugggcccuauagccucaaagggguggggagagcagacagg

SEQ ID NO: 4191962 - RNA, 61 nt, Human
ccugaggcaugggaaguugggugucuucucaaaggucguucacuuugcucccugcuucugg

SEQ ID NO: 4191963 - RNA, 88 nt, Human
ccugaggcuuaguggauagugguccccucgacagaagcuggaggguccugcaccugcugagggauagcugcucacuggcacacucagg

SEQ ID NO: 4191964 - RNA, 56 nt, Human
ccugagggaacaugcacccaauugcccuguugggagagugggccauucccucaagg

SEQ ID NO: 4191965 - RNA, 69 nt, Human
ccugagggaugccugguuuguuuucccucaugaauaauaccuuucagaagcacagaccagaucuccagg

SEQ ID NO: 4191966 - RNA, 56 nt, Human
ccugagggugcaugugugcacguaugcacauguguguguccauucgcacucuuagg

SEQ ID NO: 4191967 - RNA, 65 nt, Human
ccugagguggcugcagcacugcccuggcuuccagaaagcucucgagcaugcugggucuccucagg

SEQ ID NO: 4191968 - RNA, 57 nt, Human
ccugaguaccugccagugagugaacucuccagagcuuucaucuggccguauuccagg

SEQ ID NO: 4191969 - RNA, 94 nt, Human
ccugagucacuauuuuucugauuucucuuguggaugcuacuuucuaguuuaauaggaaagaaguuagauuguuauauggaaugguuaucucagg

SEQ ID NO: 4191970 - RNA, 60 nt, Human
ccugagugaauucccucacugucugcuucccuugccaacaucagaguuaguucaaucagg

SEQ ID NO: 4191971 - RNA, 67 nt, Human
ccugagugauugcccaagaguuaagucucugcuccuggggagcagggauguguacuugguaagcagg

SEQ ID NO: 4191972 - RNA, 88 nt, Human
ccugagugccugggagagggucagagacugggcagagcuuucuaaaucacuguaaggacuuuggcuuuuauucuagguaauacugagg

SEQ ID NO: 4191973 - RNA, 90 nt, Human
ccugaguuuuaauaugagcucugacacugacuagccgugugacuauggucaaggcacuucaugucucaguuuucucauuuguaauuuggg

SEQ ID NO: 4191974 - RNA, 81 nt, Human
ccugauaagauccaagggcugcuuuuuguauaugcuucgaggaugagcccauucucuguacagaagguaccguucauuagg

SEQ ID NO: 4191975 - RNA, 69 nt, Human
ccugaucccuuggucagaugguucugagcuguuuaagugcugagugucaacugucuacagggagccagg

SEQ ID NO: 4191976 - RNA, 92 nt, Human
ccugaugagaagacuguuuguauucauaaauaaucuguaguuguuuuagucuuauuuuccagaagcagguauuucauggagcaagcagcagg

SEQ ID NO: 4191977 - RNA, 72 nt, Human
ccugauggauguuuggauguuuccuguuuuuagguaauaugaauaaggcugcuauaaacauucccguacagg

SEQ ID NO: 4191978 - RNA, 91 nt, Human
ccugauggugcucacagggccagcagcuuggccaaccuuggggagcugugccagaggcuggacuuucugcugggcuccgugguccaugagg

SEQ ID NO: 4191979 - RNA, 62 nt, Human
ccugaugugugcagggcagccgaaugggcuuccaggaagccaacuccagccccugcagcagg

SEQ ID NO: 4191980 - RNA, 78 nt, Human
ccugcaaacuacauuucccagcugccuuccuguuagagucagccaagagggggcacugggaggagauggaaaagcagg

SEQ ID NO: 4191981 - RNA, 67 nt, Human
ccugcaacagcucagacacgggaccugagcgccuaagccaggcucuggaguguggugcugguccagg

SEQ ID NO: 4191982 - RNA, 60 nt, Human
ccugcaagggcaacuuuguguggagaagcaggaccggagccacccagagcccuuugcagg

SEQ ID NO: 4191983 - RNA, 84 nt, Human
ccugcacccacuaccuuacuuuaacccugcaagcugguacuaucaugauccccauuuugcagaugaagaaagugguaggacagg

SEQ ID NO: 4191984 - RNA, 75 nt, Human
ccugcagcagccuucaguuuggcaggagauagauguggugaugggaacuucucugcagaauuugagcugcucagg

SEQ ID NO: 4191985 - RNA, 62 nt, Human
ccugcagcugcaaguccaggucagccacacuguucugguccuggccugaggucggcuguagg

SEQ ID NO: 4191986 - RNA, 58 nt, Human
ccugcagcuguccggagugaguaggcagggcugacacaugaccuccgcagcagcaugg

SEQ ID NO: 4191987 - RNA, 61 nt, Human
ccugcagggccacuguagaugaggagcuuccugucgcucagcaggacaauggcuuuagagg

SEQ ID NO: 4191988 - RNA, 91 nt, Human
ccugcaggucgcccacauaauugaaguaggaaguuuuagaggcagugagacauugauacaggcucuauuucauccugugggugcccucugg

SEQ ID NO: 4191989 - RNA, 69 nt, Human
ccugcauauaagaagugaagaagaguuaaaaugaaaauuuggcuguuucuuugauuucuuguuuguggg

SEQ ID NO: 4191990 - RNA, 55 nt, Human
ccugcauccgaaagugaucauaggcugccugugccuaggucauugauagugcagg

SEQ ID NO: 4191991 - RNA, 63 nt, Human
ccugcauuaaguugccuguaagacuucugacucugaauucuucccugggagcucaauagcagg

SEQ ID NO: 4191992 - RNA, 80 nt, Human
ccugcauuuguuuccucacagucaccuuuucuucuuuccuuuggucucugugaugauggaaacuuucuucaaaugucagg

SEQ ID NO: 4191993 - RNA, 109 nt, Human
ccugccaacaccuugauuucaaacuuugaguguccagaacuaagggaauccauuucuguuauacagucuguggcacuucauuauuggagcuuuaggguaacaggacagg

SEQ ID NO: 4191994 - RNA, 60 nt, Human
ccugccagagcuugguuuuuauuuagcauucuccccuaaaaagaaccaaagcucuguggg

SEQ ID NO: 4191995 - RNA, 63 nt, Human
ccugccagccagaucacucgccuguccaagaaagcacaaggcugggagguagaggaugguagg

SEQ ID NO: 4191996 - RNA, 125 nt, Human
ccugccaggagagucuccaugccuaucuucuuuccucugcugccauugccccaggggagaaugagggccuguggggccaguagagcaggccggaggaacugggggucaguagagcauccuggagg

SEQ ID NO: 4191997 - RNA, 114 nt, Human
ccugccaggguugggaaagcuucucacacucccagccucccacagucugggacuggauggcaaucacagcaucugcagagggagugcugggucagggagggcaggcuuggcagg

SEQ ID NO: 4191998 - RNA, 56 nt, Human
ccugccaugccuggugcagaaccuccaccuuagaaguggggacugggcggggcagg

SEQ ID NO: 4191999 - RNA, 81 nt, Human
ccugccauugccuuuuucuccaguccuuuaagcaucucuagaaucuggagguuuaugccuuggagcuggggcaauggcggg

SEQ ID NO: 4192000 - RNA, 67 nt, Human
ccugccauuuauaaccaguggccuuugggcaaaucuuucagcccugaugcuucucuguaaauguagg

SEQ ID NO: 4192001 - RNA, 68 nt, Human
cgaugugaaguuuuaguauauguagacauugugaauucauuuaguuaagcuaacuaaaauauccaucg

SEQ ID NO: 4192002 - RNA, 80 nt, Human
cgauguucggggcccauuaguuguuuguugugaagagacuuucugugcauuguaacaacuaaacauuucuccagacauug

SEQ ID NO: 4192003 - RNA, 124 nt, Human
cgcaaauugaaaguagaaucagggucaucucaguucuacuuuggaggaaaauugaggucauggucagauuaagcaaugacuuuuuaaauuuuuuucuaaaucaguggcuccugauucuuuugug

SEQ ID NO: 4192004 - RNA, 67 nt, Human
cgcacacucugggcuuugccaaguuaagcaaaauaggauaauugcaugcaaggcuccaaggggugug

SEQ ID NO: 4192005 - RNA, 58 nt, Human
cgcacccagcuuuugcauccuccgaguaucuggacuucuagggggacagcuggcugug

SEQ ID NO: 4192006 - RNA, 80 nt, Human
ccuacagggccuaauaacauuccucaaaguuuucaggaguugugaguuuuggaaugaugacaugaauguggcuuuguagg

SEQ ID NO: 4192007 - RNA, 82 nt, Human
ccuacaucccaagccagcuggaggagcagcuuccagucuucagagaugggccccucuucuucaguuggccuugguagucagg

SEQ ID NO: 4192008 - RNA, 104 nt, Human
ccuaccauacaggaaccucuuuccccaguucugggccagagaauagccuucaaaaccugccugggggcugcccuagagcuggcaaggggccuagcaugaguagg

SEQ ID NO: 4192009 - RNA, 64 nt, Human
ccuaccucuuuguaauaagaauugaggcaaauuugucaucaaaugcucuuugcagagagguagg

SEQ ID NO: 4192010 - RNA, 82 nt, Human
ccuaccuuuaauuuuaggaauauauuguaggagucucucaaacagaaaacauaauuugcauuauauuuauagaagaaggagg

SEQ ID NO: 4192011 - RNA, 67 nt, Human
ccuacuauaaaauacacaucugugaugaguaaaaucauuuuauagggaaggauauuuuaaugguagg

SEQ ID NO: 4192012 - RNA, 61 nt, Human
ccuacuccccuuuccuagcuucuguguggccauuucccagcagcuagaggaagggcagagg

SEQ ID NO: 4192013 - RNA, 85 nt, Human
ccuacucuaacuuacuugaaauggcuucuuggauuucuggguugagaagaauucugaggcuauguucaggcuaagugaaaaaugg

SEQ ID NO: 4192014 - RNA, 130 nt, Human
ccuacucuguaacccugcuuuucguuuccuguguguccuuucagagcuccuuuugcuuucaaaagcaaauacaaauacgggcagcuucugaauggauggccaagugacucuggagcuuccgcgcugugug

SEQ ID NO: 4192015 - RNA, 77 nt, Human
ccuacugcuucaugaaaaucacuggucaagcuucucacuuuuggaaauggcuuuuggauauuuuauugaaggguggg

SEQ ID NO: 4192016 - RNA, 72 nt, Human
ccuacuuagcagagugaguugacuaagugacugaaccuaucuaacccuuaguuucuucaccuguaaaauggg

SEQ ID NO: 4192017 - RNA, 60 nt, Human
ccuacuuccugggcaauguucugcuucccccaaacugaagcaggaggcccagagaggagg

SEQ ID NO: 4192018 - RNA, 89 nt, Human
ccuagaguagguucuguuauuacccuggaauauguuuguaauagagugggcuauuacaaucaucuaggauaaagauaaucguggcuugg

SEQ ID NO: 4192019 - RNA, 95 nt, Human
ccuagcccucaauaaguuuuauauuugaauugggacauauauauguaacgguuaugaccagagaguaggaggcauuauugagugguaaaaguagg

SEQ ID NO: 4192020 - RNA, 104 nt, Human
ccugugcugggcaggccugcaccgggaaguccugcacugggcagucccacaccgggcagucccgcauugggcauuccuggaacugcaggauuaccuggcacagg

SEQ ID NO: 4192021 - RNA, 116 nt, Human
ccuguggaaguuaggcaugaguucugcucugaggagccagugugucuguguugguagcuggcagucacuggugacuucugagcuggaugguaacguaauuagaaugacuucauagg

SEQ ID NO: 4192022 - RNA, 73 nt, Human
ccuguggauugcuguuucuaaaggccgucuguuccacauuaauagcccuugaaauagucuaaaaaaccagagg

SEQ ID NO: 4192023 - RNA, 59 nt, Human
ccuguggauuuguaagcaaagugaauuuuaaaaaauugcaugcuaacacagugcacagg

SEQ ID NO: 4192024 - RNA, 61 nt, Human
ccuguggccacacugcauacagacaguuccugacccucauggagcaggcagguggcccagg

SEQ ID NO: 4192025 - RNA, 65 nt, Human
ccuguggcucucuuuggaggucuggccaaacugacccaccagugcuccucaggaccagccacagg

SEQ ID NO: 4192026 - RNA, 73 nt, Human
ccuguggcuuccacgaccuaauccuaacuccugcgagucccuggaguuaggauuaggucguggaagccacagg

SEQ ID NO: 4192027 - RNA, 78 nt, Human
ccugugggaggcacaguguuuggucaguggggccuggauauucccaugacccugacccugugcuccuccccuggcagg

SEQ ID NO: 4192028 - RNA, 75 nt, Human
ccugugggugcuugaaugcaggccugagccuuaugugggaggagaggccaggaaucacugcugaguaaccacagg

SEQ ID NO: 4192029 - RNA, 79 nt, Human
ccuguggucauguaugugcuuguucuuugaaguuacaaaugaacaaugacuacauauugaugauaaguauaaauacagg

SEQ ID NO: 4192030 - RNA, 71 nt, Human
ccugugugaaagcccccucagcccagagugcuuggcagagcuggcuuugagcugggaggugucugcacugg

SEQ ID NO: 4192031 - RNA, 62 nt, Human
ccugugugaagguuaggcagguuuaggaugcuaguuaccucaugguucagcuuucacagagg

SEQ ID NO: 4192032 - RNA, 76 nt, Human
ccuguguggaaaguggucuaagcacaucugucucaucggauguaggcugcauuuggaacauguuuuccauacacgg

SEQ ID NO: 4192033 - RNA, 92 nt, Human
ccuguguucaccauguaagugggcagacaugauagaaggagaucuauuauacuuccuuguguuaugugccuauggaauagagggaacagugg

SEQ ID NO: 4192034 - RNA, 60 nt, Human
ccuguguuccccugcugcugaggacauuugugucacugcuguauuuagggggaacaaagg

SEQ ID NO: 4192035 - RNA, 74 nt, Human
ccuguuaugugccacacuugagggugauaugguuugaaagcaaguuucuuuccuuaggugcugggcagacaugg

SEQ ID NO: 4192036 - RNA, 56 nt, Human
ccuguucaauauucuuccuuguaacaauccucucaagugaagaaaccaggaauagg

SEQ ID NO: 4192037 - RNA, 96 nt, Human
ccuguugaaaggaacagaucagaguggauugugcugcaaacggagauguuaccugggggcagaugauuaauuuugauauugugugccuuaaacagg

SEQ ID NO: 4192038 - RNA, 94 nt, Human
ccuguugaaugaaaacacagguucauucugugaggugaauccaaacaucacaaagcauuuucacagauagcuuguuucuaguuuuuauugcagg

SEQ ID NO: 4192039 - RNA, 65 nt, Human
ccuguugagacaguuuccuuucagugauucuuucugcauaacuuuaagaggcagucuccaacagg

SEQ ID NO: 4192040 - RNA, 74 nt, Human
ccuguugaugagaaagaguuguaucuagaacauuuucuaacgaagcuucugacaauuucuuuguucucagcugg

SEQ ID NO: 4192041 - RNA, 81 nt, Human
ccuguuggaucuuuauguuccucuugagcuuuccaggaacacccagucaaagaaggaugaggaggaugaagugcuaaaagg

SEQ ID NO: 4192042 - RNA, 106 nt, Human
ccuguuggccugcacuggauggugucaugagcagcucuuccuccagauguacucagaggaucauugccaugucucaugcuacccuagugcuuagugauccaacagg

SEQ ID NO: 4192043 - RNA, 61 nt, Human
ccuguuuuagcugugguggaaggaguggcgauagauccuuccacaaugaaaauaaagcagg

SEQ ID NO: 4192044 - RNA, 58 nt, Human
ccuguuuugaaguuagaguccugugaaaaguuacuaucucuucuaacuucagaugagg

SEQ ID NO: 4192045 - RNA, 59 nt, Human
ccuguuuuuaguucuuuugaucguuuacuugauagacuguuaaauuccuuaagagcagg

SEQ ID NO: 4192046 - RNA, 101 nt, Human
ccuguuuuuuaucuuuuuugcauucaucauuugaaagcccaaagcaaaucuuagucuuggguuauaaaaguaaaaaauggaucaggagagauaauaucagg

SEQ ID NO: 4192047 - RNA, 95 nt, Human
ccuuaaaauguaaauguuaccaccggucauaauaaguuaugcaaaagcaccaguacagugccuggcauguuauagacacauuuauauuuuuaagg

SEQ ID NO: 4192048 - RNA, 83 nt, Human
ccuuaaacugcucuggagcucuuccuuucaggaggccagcuaauguugaccugucucugaaagagagcagccaggcaugaagg

SEQ ID NO: 4192049 - RNA, 77 nt, Human
ccuuaaauagugcuuggcccuaccagauacucaguaaguauuauuagaaucuagugucugguucaugcuuauuuugg

SEQ ID NO: 4192050 - RNA, 69 nt, Human
ccuuaaguucaaugaacucaguucucucuugaaaggaaaagcacagaacugaggcaauugccuuguagg

SEQ ID NO: 4192051 - RNA, 65 nt, Human
ccuuaauuucuguccuucagauagcugguacacagcacucuaauuuaaagggacagcaguuuagg

SEQ ID NO: 4192052 - RNA, 65 nt, Human
ccuuacaguuuaacacuuuggagaaaaaguucacauuuucuuuucuuuggaauugggcugcaagg

SEQ ID NO: 4192053 - RNA, 84 nt, Human
ccuuacuuacaugccaagauccucgucuuugagcgugagcccaaugucaaaauggaaugagacuuucuuuggcaagugaggagg

SEQ ID NO: 4192054 - RNA, 77 nt, Human
ccuuagaagguaaugaaacagcagcuaauuaacucugguaaagccuugauagguucugcuuuauuaucuuaauuagg

SEQ ID NO: 4192055 - RNA, 63 nt, Human
ccuuagcaaauuggcaucuucuggaacagcaagguuccuuccgagguguggauuuggcuaggg

SEQ ID NO: 4192056 - RNA, 58 nt, Human
ccuuagcugucaagguggcugcagugacaucccuauugugggugacuauacagcaagg

SEQ ID NO: 4192057 - RNA, 104 nt, Human
ccuuagcuuuguaguaaugcccugggauugccuuggccuugucuguaaucagaguuacacaaucaaggaaaaagcgagcucggggcugucauuucaaauggagg

SEQ ID NO: 4192058 - RNA, 75 nt, Human
ccuuaggagcuggaaggcauccagugagacacacuagaggagagauggucucugagguuguuuccagcacuaagg

SEQ ID NO: 4192059 - RNA, 58 nt, Human
ccuuagugugaggggauaccccaggccuuaacuggucucugaaaucccccaacugagg

SEQ ID NO: 4192060 - RNA, 70 nt, Human
ccuuauaauaacuuuaucaaauauauacuguuucuaccuuuaauguauagaugaggaagcuguuauaggg

SEQ ID NO: 4192061 - RNA, 105 nt, Human
ccuuauccccaaggagcuuaaaaucuggcaguuagcuauaaagugcaauaaaaguaaaaaacguaaauagugguucaaaauugcgcagguuuucccacaggaagg

SEQ ID NO: 4192062 - RNA, 96 nt, Human
ccuuauccucaaaugacagacagaagggauuuuuacaggcaaugaaagcugagaaauuuauaacuuuuuaauaucaguguguccuuagggaagagg

SEQ ID NO: 4192063 - RNA, 85 nt, Human
ccuuauuacauaacuuuaaaaugccguaauaccucuuuagaccacauuuuucucuaucagagauggugucagguugguaguaagg

SEQ ID NO: 4192064 - RNA, 58 nt, Human
ccuucaaaguacacaucuuuaucagcaucauaaaaaauagagaugguauuuugugagg

SEQ ID NO: 4192065 - RNA, 61 nt, Human
ccuucaaauuuagaacaagugacacugaugguaaauuuugcuaugcuucuaaguuugaagg

SEQ ID NO: 4192066 - RNA, 76 nt, Human
ccuucaacauuguagacuuuucauaugugguugucucugugacuuaaauguacaaucuaggguuugcauguuaagg

SEQ ID NO: 4192067 - RNA, 111 nt, Human
ccuucaaucuguacacguuaugugaugguuuauagaccuagaagucauccuguuucuuuaagggaaauuuucucucuaagacuuaaacgauaacauguaaaagaucaaagg

SEQ ID NO: 4192068 - RNA, 69 nt, Human
ccuucacaucuaacauugaauggcugauuaguguaaauuuauauuagugaccaagcaauuuggagaagg

SEQ ID NO: 4192069 - RNA, 81 nt, Human
ccuucacgauguucaguguuaguccauugcacucugggcuugaaacagcugcccaaaggcagugugauacugugguuaagg

SEQ ID NO: 4192070 - RNA, 69 nt, Human
ccuucagagucacauuuucuacuacuguacgguuaaacaucgucugugggaggaaaggugauguauggg

SEQ ID NO: 4192071 - RNA, 57 nt, Human
ccuucagcguccccuuuacccguuacucauagaauguagcggagccacgacuggagg

SEQ ID NO: 4192072 - RNA, 64 nt, Human
ccuucaggucauauaugucagaauuuauauauauauagagagagagaaauauauaacuugaagg

SEQ ID NO: 4192073 - RNA, 102 nt, Human
ccuucaguuuuuugaagcagcaugugucaaacuugugaugaaucagauuuuuauauucagaaucagaaucaguugacacagcugaugucaaugcuuugaggg

SEQ ID NO: 4192074 - RNA, 78 nt, Human
ccuucauauguaaagugcuuaaaaauucuagcauuaaacuaauaggguaguuuugaggauuauaugugacaaugaagg

SEQ ID NO: 4192075 - RNA, 69 nt, Human
ccuucaugaggccggcuuuauccaguacuuggauucuggaaucuggcaucuggcuuuuuauaaugaugg

SEQ ID NO: 4192076 - RNA, 83 nt, Human
ccuucaugccuggcugcucucuuucagagacaggucaacauuagcuggccuccugaaaggaagagcuccagagcaguuuaagg

SEQ ID NO: 4192077 - RNA, 55 nt, Human
ccuucauggagcuggaagcuguuauuccccccagcccacacaccagcucaggagg

SEQ ID NO: 4192078 - RNA, 91 nt, Human
ccuucauucauucauucauucagcaacuguuauuugaaggucuacuaugugccaguauuaggagugggaugaagaguagaguaagagaagg

SEQ ID NO: 4192079 - RNA, 69 nt, Human
cuaccuaguuuauuauacaaguguauguagaauagcgugcaaauauaugugugaugauuuacuaggaag

SEQ ID NO: 4192080 - RNA, 71 nt, Human
cuaccuauuauauuaacuucaggaggaacucagaaaauagggggcuuuagaauuugauauaaucaaggugg

SEQ ID NO: 4192081 - RNA, 70 nt, Human
cuaccuccagaggcccuaucccacuagauaauuuguagauucaauaggggaagggugcuuccugacuuag

SEQ ID NO: 4192082 - RNA, 94 nt, Human
cuaccucuucugcuucacggugaugcccuucugcuucagggcuuucucauuggccaucugcaggagcuggaucuccuugcgggagaagaggcgg

SEQ ID NO: 4192083 - RNA, 67 nt, Human
cuaccugauucccuuuccucugcauugcucauuggugugguugcagguggacacgggagacgggcag

SEQ ID NO: 4192084 - RNA, 69 nt, Human
cuaccugggaagggccaucuucuagauagcuuguucccaagcaguguucccagcuggccccucaggaag

SEQ ID NO: 4192085 - RNA, 67 nt, Human
cuaccuuaccuagaccaguuacaaugcagauaucuccuuucucuguaugaauauguuggggaggugg

SEQ ID NO: 4192086 - RNA, 56 nt, Human
cuaccuucaggcugcccuuugaucccuuuaagggaucaaaguccaucagaagguag

SEQ ID NO: 4192087 - RNA, 55 nt, Human
cuaccuuucacagcugugcagguuucucucagcuccaugccagaaugugagguag

SEQ ID NO: 4192088 - RNA, 57 nt, Human
cuaccuuuccuauaagguccagguauauaagcaccauggacauuauggagagaguag

SEQ ID NO: 4192089 - RNA, 84 nt, Human
cuacgguguuuccugaaguuauuucauccaagaggccauuuuuaggcaucucacaggauaaguggguuaaggagcacacuuuag

SEQ ID NO: 4192090 - RNA, 80 nt, Human
cuacuagaugaaugacaguguaugcuggugauuuugauuuuaaaaagucaaaaucaaagauacuugaaaacaucuggaag

SEQ ID NO: 4192091 - RNA, 55 nt, Human
cuacuaguggaagauuguuaacuuuuauccugguagacaguuaaacuacuggugg

SEQ ID NO: 4192092 - RNA, 58 nt, Human
cuacucugggcaccaaagagcagcuuuuaguagauaguugaguuggagccgggagcag

SEQ ID NO: 4192093 - RNA, 73 nt, Human
cuacugagucugugguauuuuaucauagcagcuugaacaacuaagacauauggugguaucaggauucuaagag

SEQ ID NO: 4192094 - RNA, 63 nt, Human
cuacugccagacacguuaugcucauuauuuaauuuucauaaugcaucugugcucugguagugg

SEQ ID NO: 4192095 - RNA, 58 nt, Human
cuacugcuaagggaaauguaaauugguuuguuugcuucuuuacacuccugggcagugg

SEQ ID NO: 4192096 - RNA, 107 nt, Human
cuacuggaguucacuuacuauguucaaggcagugggcuaggaaccuuaaaagauaugaagguuaaucgugaaucgcaugucuccucuggacacgugaauucuuguag

SEQ ID NO: 4192097 - RNA, 112 nt, Human
cuacuggguaggaaucaagcuguaugauuugguugcaggaaguaauugccugaaaagcaguuauguccucagcaaaucaagagcccuugaacauuucccaaugcuccagaag

SEQ ID NO: 4192098 - RNA, 77 nt, Human
cuacuggucaucugaucuacaaaugcgguggcaucgacaaaagaaccacugaaaaauuugagauggaggcuguugag

SEQ ID NO: 4192099 - RNA, 125 nt, Human
cuacuguaauauugaggaaauugagaaagguguucaaaguuuagugaaauaaauuuuuauugguuaaaaauaguaaaugaguaaagcggugucacagaaugccuuucugcaucagagcugcagug

SEQ ID NO: 4192100 - RNA, 56 nt, Human
cuacuguaguggccuauuuacccaucacgugacgaauuggauuaggucaccaguag

SEQ ID NO: 4192101 - RNA, 97 nt, Human
cuacuguccauccuaaaugauuuggcuuugacaagagggcaucuucagaucccuuuuggagauuaaauuuugucacaguuuugucauuucacaguag

SEQ ID NO: 4192102 - RNA, 85 nt, Human
cuacuuaguuaugacucagugaagaugugggaacugcugaaaucuugauuuaugguaguacucauguuuaagguuuuaauuguag

SEQ ID NO: 4192103 - RNA, 70 nt, Human
cuacuuauucagcagggacuuccuuucagccgagacucgcugaagaguccacuuaauugaguuuuaguag

SEQ ID NO: 4192104 - RNA, 83 nt, Human
cuacuuauucuacauuuggagugaugucuuuagccguggucacuauaccucugccuggaccucuucucgaguagaguaaccag

SEQ ID NO: 4192105 - RNA, 76 nt, Human
cuacuugcuuggaacugauuugucuauauucaaauaugaugauuucaucuuuguuuuggauauaaucagcagguag

SEQ ID NO: 4192106 - RNA, 101 nt, Human
cuacuuuggaagauuagauugugugcuacacgaggguaaggaauaucgcugacuaaucucuguauccucagcaucuagcaugaagucuaaguaccauguag

SEQ ID NO: 4192107 - RNA, 129 nt, Human
cuacuuuuuucuuuaggacuuugacacucuaggaauaugguuaugccuaugcuuuuugugucuaaugcacaauuagcagcauuaugauauaucuuaaguugauuguuuaauauucaaauaucuagguag

SEQ ID NO: 4192108 - RNA, 130 nt, Human
cuagaaacagggagcuucuauuuccugaagggcacagagguugccuccagaucagagaaaccuucugaccaauuguaguucuggaacuuucugaugcuuauccuauagggaauauaaacuuguuuuuaag

SEQ ID NO: 4192109 - RNA, 97 nt, Human
cuagaaagauaauuaugcaagcugcaguguucuggaaugcauuaucucuauucuaguuggaaaaguguuguucuaaacacuuuguaguucuuuguag

SEQ ID NO: 4192110 - RNA, 67 nt, Human
cuagaaauaaaucuucacuagcaacauuacaagaaggaauuccuucagugucccuaguagaaguuag

SEQ ID NO: 4192111 - RNA, 76 nt, Human
cuagaacagggaucggcaaacuauagccugcuggcaaaaucuagccugacagcuauuuuuguagauaaaguuuuag

SEQ ID NO: 4192112 - RNA, 81 nt, Human
cuagaacauguuauuuuggaaaauacaaacuauggaaaacccucauagguguuuguaauuuuguaaaauuauagguucaag

SEQ ID NO: 4192113 - RNA, 86 nt, Human
cuagaacggaauguauuguuuggaggaaaugaaagaugauuuaccaucauaaacuuguugcuuuuaauuaaucauugcucuuuugg

SEQ ID NO: 4192114 - RNA, 91 nt, Human
cuagaacucccuuuuaugucauauauacaugugugcaugcaugcauaugugugucuauguauacauguguauauaccaugcucuaaucuag

SEQ ID NO: 4192115 - RNA, 70 nt, Human
cuagaagagaggcuccuugagggcaggaaucuuucauucauuucuucacugaugucucucaaaugucuag

SEQ ID NO: 4192116 - RNA, 61 nt, Human
cuagaagcaugaaauggccauucucugagaugaaaauuuggagaggggcaaguuuaucuag

SEQ ID NO: 4192117 - RNA, 66 nt, Human
cuagaagcuucagggaagauaaaaagcauuauguuuauauccaucuuugaaguaaguaaaagcugg

SEQ ID NO: 4192118 - RNA, 80 nt, Human
cuagaaguagaguuuauaucaguuuguauuuauuacucauaauucaaauugugagaaauuucaacuguggauucuucuag

SEQ ID NO: 4192119 - RNA, 61 nt, Human
cuagacaucaaugaucagagguagcuauauaaaguccugcuuuucuuauugauguaacuag

SEQ ID NO: 4192120 - RNA, 65 nt, Human
cuagacuguaaauuacauaagaacaggaacaauguguuugcucacuaugaauuugcagugccuag

SEQ ID NO: 4192121 - RNA, 106 nt, Human
cuagagaaaugauucaguauucacuaauucaguguuugcggcaacuuuauaaaacauaacuacuguaaauaaugacaguugacuguacuuugagauuguuuccuag

SEQ ID NO: 4192122 - RNA, 88 nt, Human
cuagagaacacagaccauguggauccgagaguguuggaggggcagcucuagcuucucugggcuuuucggauccgaguucuguuccugg

SEQ ID NO: 4192123 - RNA, 59 nt, Human
cuagagacacuagagaagaagguuaacucaagagugaccaaagacuuuagauguucuag

SEQ ID NO: 4192124 - RNA, 61 nt, Human
cuagagaguggaaagcaagcugaguuggucacaucaaauucaauuguccuccaacuccugg

SEQ ID NO: 4192125 - RNA, 84 nt, Human
cuagaggagcaggagaacaaagcaagcugccccagaccacccggcuuucgcagaacccagaugaugcuccugucucccccuaag

SEQ ID NO: 4192126 - RNA, 68 nt, Human
cuagaggaugauccuuccuugccucuucccccuucuggugguuacuggcaaucauuggcauucucugg

SEQ ID NO: 4192127 - RNA, 64 nt, Human
cuagaggcuguuacacucccagaugccaacaaagcauugucagggguuguggaguuucccauag

SEQ ID NO: 4192128 - RNA, 65 nt, Human
cuagagggacaauaagauaaaaugguaggagacaaaguacuauccuuuuauacucuguccucugg

SEQ ID NO: 4192129 - RNA, 74 nt, Human
cuagauaagcuugcacuugccauuucaugcaacaggaagaacuuccccaucaaauggcaagugaaagcugguag

SEQ ID NO: 4192130 - RNA, 56 nt, Human
cuagaucagauugcuguuucuaacagugaacccauugggaagguaaguugguuugg

SEQ ID NO: 4192131 - RNA, 61 nt, Human
cuagauccuauugcuauuagugccauuauugagauaacuggaaaauucaaauggggucugg

SEQ ID NO: 4192132 - RNA, 74 nt, Human
cuagaucuuuuucugccaugugagaauacaacaagaaguuagcauucugcaucccagaagaggacacucacuag

SEQ ID NO: 4192133 - RNA, 74 nt, Human
cuagauggcugguguacuucagugauuccugugccuuuauguagacauagaaagucaugaauuacaccaucuag

SEQ ID NO: 4192134 - RNA, 57 nt, Human
cuagauuuuucaucuuccaggcucuccaaauccuggugagauuaacugagaaucuag

SEQ ID NO: 4192135 - RNA, 56 nt, Human
cuagcacuuagggauuguuaugggaauuugguuucagucaguuggccaugugcuag

SEQ ID NO: 4192136 - RNA, 98 nt, Human
cuagcagagggagagugagcuggagggugagccucaucucuuaagugcuuucacuuggaaaugacacacaucauuucugcucacuccccauuggcuag

SEQ ID NO: 4192137 - RNA, 79 nt, Human
cuagcagagggccuggcacagggaggcuauugugauggucauuucuccuagagccaccucugugcaggccucggguugg

SEQ ID NO: 4192138 - RNA, 78 nt, Human
cuagcagucgagagauggguuggcaggggcucagguuacuccaugucccugauaagagccaucgaucugggcuggugg

SEQ ID NO: 4192139 - RNA, 59 nt, Human
cuagcaucuccuuaggguaaggaaggcaaaaugcccauuccugaucccagauugcuugg

SEQ ID NO: 4192140 - RNA, 97 nt, Human
cuagccaggagggaggaagaccugcaugcggacuaacagaaaccauuuuggaagacaauguacaugcaguuuaaccucuuuaaagugaccuuguuag

SEQ ID NO: 4192141 - RNA, 79 nt, Human
cuagcgaaaugcuuggcacauaguaggucauuaaauauuuuucuaaugaagaagccaauucugugugagucauugcuag

SEQ ID NO: 4192142 - RNA, 127 nt, Human
cuagcuagcuagauaccuagcugucagguuggagcaaaaguaauugcgguuuuugcugcaauuaaagguuauggcaaaaaccacaauuacuuuugcaccaaccuaauagcuaucuaucuagggcuag

SEQ ID NO: 4192143 - RNA, 70 nt, Human
cuagcugagagguggcaagcuguaggcaucauucacacauucagaaaccguaccuugaaccuccaccugg

SEQ ID NO: 4192144 - RNA, 90 nt, Human
cuagcugccuuuccauuuuauaauuagggucuguccuuugacaagucuccaaauagaccugaaauauggaccuggcuuaaaggcagguag

SEQ ID NO: 4192145 - RNA, 67 nt, Human
cuagcugugcccgacccaugcggagcagcucaaagaaugcuuugcaagaagaauggcacaaagcugg

SEQ ID NO: 4192146 - RNA, 68 nt, Human
ccuccaggaccacagcacucugccucuuuccagugagggccuaagaggcagcccgcugaggcuggggg

SEQ ID NO: 4192147 - RNA, 75 nt, Human
ccuccaggagugugauucagagacagccugagacauaagcaaaauacucaacagucuaaauuauacccuuuuagg

SEQ ID NO: 4192148 - RNA, 60 nt, Human
ccuccagggaagagcugauguugcagccgucuggaggcagaauuccuucuuccuuggggg

SEQ ID NO: 4192149 - RNA, 108 nt, Human
ccuccagggagaagccaugaagguagcuugcuuccugaguaaacagaaauucuucuggaaaagugugcuuaggaaaggcaaggccuccauuuaaaaucuuccgacagg

SEQ ID NO: 4192150 - RNA, 68 nt, Human
ccuccaguuugguucuguucuccagccuucuucuggcuuggagcugucacucagaaccaaggugaagg

SEQ ID NO: 4192151 - RNA, 75 nt, Human
ccuccaucccugccacauggccacuguguucaugagccaauugggcaaugacaggaguggcuagugggagagagg

SEQ ID NO: 4192152 - RNA, 83 nt, Human
ccucuuggcugagcuucccucugcagucccugaugagcuaagcacccucucugggcagauggagaagcucugcacagucuagg

SEQ ID NO: 4192153 - RNA, 71 nt, Human
ccucuugguaauuauggauacuuaaauugcauuauagagagauguggaauugugcaugauuaacugguagg

SEQ ID NO: 4192154 - RNA, 76 nt, Human
ccucuugucugcagauacuuugaaagugguggaauugagcuaaaaauauucagaaguagcuaagcagucagacugg

SEQ ID NO: 4192155 - RNA, 77 nt, Human
ccucuuuaaaguuuucugccuucauuagauauuccaaacaggaaguuuuggaaugagggacggaggggaagaagagg

SEQ ID NO: 4192156 - RNA, 78 nt, Human
ccucuuuagggccuggccccagauuuccuguagaggaggcaacucauggagcggggaguggggcuuaccuugaagagg

SEQ ID NO: 4192157 - RNA, 63 nt, Human
ccucuuucucugucucucuggaagcacacaaaaaacgguuucucagaaaauguagagaaaagg

SEQ ID NO: 4192158 - RNA, 129 nt, Human
ccucuuuggccauggugggaagguaaugaggaaggcaggccagaggcuguuguugcguuggaaaucauuggacgacaagacucugacuuauuucucucaguaucugacuauuuccucuuuauugacagg

SEQ ID NO: 4192159 - RNA, 83 nt, Human
ccucuuuugccccaaguuguacagauuguauuagagaauagacuauuucugauguucauuucuuuuguacaacucaacagagg

SEQ ID NO: 4192160 - RNA, 63 nt, Human
ccucuuuuuaaccccccaauggcuguuaucaucccuucagaguaacugggugguagggagagg

SEQ ID NO: 4192161 - RNA, 97 nt, Human
ccugaaacuaaaaaugaauuuccagaucagaugacucaauuuuacuuugacucaauuccuguaaugcaucaucuuggcuggaguuccaguagacagg

SEQ ID NO: 4192162 - RNA, 85 nt, Human
ccugaaagcccauguccccuaccuucaaguuccucccucucccaagaagucguuagaaggaagaggaggcaguccuguggccagg

SEQ ID NO: 4192163 - RNA, 92 nt, Human
ccugaaauauaucacaguacuccccaaaguuucaagaauuguuugcaucaagugccuuuggaaugggagcuauuaguggaacauagaaaagg

SEQ ID NO: 4192164 - RNA, 61 nt, Human
ccugaaauccauaguuuacacugggguucacucuugguguuguacauucuauggguucggg

SEQ ID NO: 4192165 - RNA, 75 nt, Human
ccugaaauuauguuuucuccuuuucaucuguauuuuccuugucuucaagauacuaaaaggggaagcuccuucagg

SEQ ID NO: 4192166 - RNA, 78 nt, Human
ccugaacauccucuaccugcacaugccugacugcccgguaucccugcuccaguggcuguuccaggugaggaccgcagg

SEQ ID NO: 4192167 - RNA, 55 nt, Human
ccugaaccccaaaaccucugaaguggggcaagcccuacuuaaguaggggauuagg

SEQ ID NO: 4192168 - RNA, 81 nt, Human
ccugaacucugagcucuuauauugacaucaugcugcagaugguguacaugugucuaagaaugaaagauacagauuuucagg

SEQ ID NO: 4192169 - RNA, 59 nt, Human
ccugaagauggugaugggaucagagaagcuuaucacagauaccaaaaucaucuuauagg

SEQ ID NO: 4192170 - RNA, 77 nt, Human
ccugaagcaguaccuaugugguuucacugaagagaagcaugaccuuguucuuuagcagaccauguuggaaauucagg

SEQ ID NO: 4192171 - RNA, 56 nt, Human
ccugaagcugcauaccaaagacucacacagacucugcuaaauguguaggcuccagg

SEQ ID NO: 4192172 - RNA, 56 nt, Human
ccugaagucacuuuugaauaugucuccuggugcacauauucaagaguuucucuagg

SEQ ID NO: 4192173 - RNA, 84 nt, Human
ccugaagucuuuugaugaucucuggugguaaagacccuuguuucaaagucuuauuuaaagagaucauacuuccaagcacuuagg

SEQ ID NO: 4192174 - RNA, 57 nt, Human
ccugaauagacaucuggccauagacaaauccuccuugucuccagagacuucuacagg

SEQ ID NO: 4192175 - RNA, 58 nt, Human
ccugaauaggcucugcucaaaacaaacauggguuuuguacucugagcaccuauucagg

SEQ ID NO: 4192176 - RNA, 90 nt, Human
ccugacauguugcuagaaauaucaggauuauuaaaucuggauuaauauuuuggcuagauuuaacuuuuuggccuuuuagcaaagagcagg

SEQ ID NO: 4192177 - RNA, 83 nt, Human
ccugaccacacgcucacagggcccugugggccccacuccugguaccaagucccucgguuccccaggugcccggcgugcucagg

SEQ ID NO: 4192178 - RNA, 118 nt, Human
ccugacuccuggcaugcagggaaggguugugggcaggcaggggggcggcaaccacagugggcaaggacuacugcccuucuuccugcugcagccuccacccuuggcagccacucucagg

SEQ ID NO: 4192179 - RNA, 66 nt, Human
ccugacucugauuucgcugcauaacucccaggggcauccugcucugaugucaggaagggagucagg

SEQ ID NO: 4192180 - RNA, 74 nt, Human
ccugacuucaaacagggugcugggccaggccuggcagagaugccaucuggacaaaacucugaaggggaggaggg

SEQ ID NO: 4192181 - RNA, 74 nt, Human
ccugagacagugcuguuaauaaacacaaauugcaaacaagaagguaguaaguggaaauaaugcacucauuuagg

SEQ ID NO: 4192182 - RNA, 69 nt, Human
ccugagagauucugauuucauugggcugggugauacccaggcaguguuauuuuucagaaauucuccagg

SEQ ID NO: 4192183 - RNA, 55 nt, Human
ccugagagcuuuucuaaaagugauuagcaaacugauucuuggcuuagcucucugg

SEQ ID NO: 4192184 - RNA, 63 nt, Human
ccugagaggguggaucagccugauugggaagagcaccuaaacaggaaggagcaccugagcagg

SEQ ID NO: 4192185 - RNA, 70 nt, Human
ccugagagucugagagccuaaugaccuugauuuaaacaaugucaggcauuuaauucugcucagcuacagg

SEQ ID NO: 4192186 - RNA, 111 nt, Human
ccugagaucacaguucccauccucccccagagagugcccaagccuggcagggccaagauggggauggucuaggccaggacuggaguaggggcgggaugccugcuucuuggg

SEQ ID NO: 4192187 - RNA, 65 nt, Human
ccugagaucuuuagaagauagaaucagcaagacuugacaacugauuggaugugggaggucuuagg

SEQ ID NO: 4192188 - RNA, 83 nt, Human
ccugagcuaaccacugggcgggcagccugcugugggcuugucugugccccucagccuggccaggccugcccagggcggugugg

SEQ ID NO: 4192189 - RNA, 56 nt, Human
ccugagcuuuaaaagccauguaccaguuuguucuuuuaugguuuuugagcuugagg

SEQ ID NO: 4192190 - RNA, 56 nt, Human
ccugagcuuugauucaauggccacacaggauugggggaaagaaggcaaggcucagg

SEQ ID NO: 4192191 - RNA, 70 nt, Human
ccugaggcaucaguguuggcuucucagagccccaggugaguaaagcagaacagcugacauuguaagcagg

SEQ ID NO: 4192192 - RNA, 56 nt, Human
ccugaggcuccaccuccagagacuguaauucaagaagucugggguaggggcccagg

SEQ ID NO: 4192193 - RNA, 71 nt, Human
ccugaggcugugggguucugcuuucaacgagaacgacccuucggugagagagcaccccagcggcacgcagg

SEQ ID NO: 4192194 - RNA, 55 nt, Human
ccugagggcguaauuaacagugucuuuggagggacuguuugugcugucuucaugg

SEQ ID NO: 4192195 - RNA, 60 nt, Human
ccugagguaugagugugccagguguuuuuagggaagagcaagggcaccaguaugccuagg

SEQ ID NO: 4192196 - RNA, 57 nt, Human
ccugaggucgggaguucgagaccagccugaacaacauggagaaaccccgucuuuagg

SEQ ID NO: 4192197 - RNA, 76 nt, Human
ccugagucccggggaaaguccagggcagggaguauggguacuuguucuuccucuuuagggcuggccaggggccagg

SEQ ID NO: 4192198 - RNA, 57 nt, Human
ccugaguccugcugagcagagagggacuuucugagucuucucuccagguugcuuagg

SEQ ID NO: 4192199 - RNA, 57 nt, Human
ccugagugccugcugcaugccaagcacugggugcugccagagagacagggacucagg

SEQ ID NO: 4192200 - RNA, 60 nt, Human
ccugaguucuuugauagcugagaugucuuuaaauauuggugcaauagucaggagcucagg

SEQ ID NO: 4192201 - RNA, 88 nt, Human
ccugauaugagcaauuguugcuuguucuuucauuugucaugguggugcccugagugacagaaagaauaugucaaucccuccuguuagg

SEQ ID NO: 4192202 - RNA, 65 nt, Human
ccugauccuuuucugcagagccagaaaccauuucguucaagguggccaaaaggaagaagguuagg

SEQ ID NO: 4192203 - RNA, 78 nt, Human
ccugauggcaagagcugcaaauagcgugacaucaucaguaaccaauaaugcagucauuggugcagucucuuaccaggg

SEQ ID NO: 4192204 - RNA, 58 nt, Human
ccugauuguagcuaauaguaguuuaacagcuugaaauuggaaaaugcuacauaucagg

SEQ ID NO: 4192205 - RNA, 98 nt, Human
ccugcacacagcaucaguguucugucaagcugucacagugcaguuaaccacgcuggcucacaguacagugcuggcuccacugagucuaugucuucagg

SEQ ID NO: 4192206 - RNA, 65 nt, Human
ccugcagaccagauucuccguggcaccaccggggcucacaggagaaagucauggucccugccugg

SEQ ID NO: 4192207 - RNA, 72 nt, Human
ccuuucaacuuuuuacuaggaagcucaaauaguccuucaggcaaggcaguuuagugaaaagaaaaugagugg

SEQ ID NO: 4192208 - RNA, 78 nt, Human
ccuuucaggaugugccuguuaauuucagagaacuacacaucuauggcaccucuguagccauggguauauucugacagg

SEQ ID NO: 4192209 - RNA, 108 nt, Human
ccuuucaucuuugagucuuaaauuauuuuaaaagcauuaauucuugcaggauuccugcaaggcacauauuuuagagucacagauuuauagagacuugaagauaaaagg

SEQ ID NO: 4192210 - RNA, 57 nt, Human
ccuuuccccgcgggaggugccagcugauguggcagguguauccccgcguggggaagg

SEQ ID NO: 4192211 - RNA, 59 nt, Human
ccuuucccgcuuugagggcaaguuccugucucaaguuuuuguccuaacagugguaaagg

SEQ ID NO: 4192212 - RNA, 64 nt, Human
ccuuuccuuccauguugggcaaaaugacagguaguguacauauuugaucugaaggagggagagg

SEQ ID NO: 4192213 - RNA, 90 nt, Human
ccuuucgaugcucacuuguucuagaaaaaaacugcuguggaagucccuucaaagcaaugucuuuucugaaggacaauggagagcagaagg

SEQ ID NO: 4192214 - RNA, 78 nt, Human
ccuuucucccacucugucuuugucaggaccagaggauguuuggcauuuccccuggucaccaagacaagggagauaagg

SEQ ID NO: 4192215 - RNA, 63 nt, Human
ccuuucucucuuccaccaggcuuccauuguuugcaacaucuuuccuggcugguggaggaaagg

SEQ ID NO: 4192216 - RNA, 78 nt, Human
ccuuucugacuucaagaugaaucuuugggacgauguuucuggugcuugguccacagugauucacuuuugaaggagagg

SEQ ID NO: 4192217 - RNA, 115 nt, Human
ccuuucuguuggucucuuugguuuuaucugcuucauuaguugacaugaucauguacucauuuaacagauguuuauggagcauguacaauggaccaggggcaucaaaugcaaaagg

SEQ ID NO: 4192218 - RNA, 84 nt, Human
ccuuucuucuugucgucaugauucagaguagggauguaauguuuaaagaagaugguuuuggcucuggcauguggaaaagaaagg

SEQ ID NO: 4192219 - RNA, 62 nt, Human
ccuuugaagaaggacacauuugugaucggauaaauggaauggcuguguucauucaucagagg

SEQ ID NO: 4192220 - RNA, 64 nt, Human
ccuuugaaguuagauguggucacugacuugcuuaggccagcagugacauauaucucacuugagg

SEQ ID NO: 4192221 - RNA, 102 nt, Human
ccuuugaauuuaaggcaauaguauuaagaggugggcccuuuggaagugauuaagucacaagggcuccauccuuauaaaugggguuuaugcuuuuaucaaagg

SEQ ID NO: 4192222 - RNA, 80 nt, Human
ccuuugaggaucacuggauuaguuugaacuguugauggcuguuaaaucaguguggugacuugucugaugggccccagggg

SEQ ID NO: 4192223 - RNA, 79 nt, Human
ccuuugauccccaguggccucuguuggcuccuaggauggcaacuucccugggaacagcagaguccuggggcaucucugg

SEQ ID NO: 4192224 - RNA, 58 nt, Human
ccuuugcaaugaauuguuauugucccuuaauuuagcauggugcaguucacugcagugg

SEQ ID NO: 4192225 - RNA, 57 nt, Human
ccuuugcuauagaccgggugagagagaugaaucuugaacuaaggugguagcagcagg

SEQ ID NO: 4192226 - RNA, 85 nt, Human
ccuuugcugaccccaagagaagagaauuuauacuguaagacugacaguccuacagaacugagaauucucuaucaaugggcaaagg

SEQ ID NO: 4192227 - RNA, 69 nt, Human
cucccuguacuagaauuaugccuugcuguccacaaucaugugacuugcacacauauaauuuagguggag

SEQ ID NO: 4192228 - RNA, 122 nt, Human
cucccuguauccaauccgcucaacuuggugaccuacugauucuucaagaaacagcccaaauguuauuuucucugaagcuguuguagucuccugaaucuugagcaacauggaugcuuugggag

SEQ ID NO: 4192229 - RNA, 63 nt, Human
cuauguggagcagcaugaacaauccagacaccaaaaagggcaaggcaugucugcgccacaagg

SEQ ID NO: 4192230 - RNA, 56 nt, Human
cuaugugguagguguccuuagucuccccacuuuagagaugagaaacugacacaugg

SEQ ID NO: 4192231 - RNA, 103 nt, Human
cuaugugucaggaauugugcuaagcccugugaucaaauggcaugggagacaaacaaucccugcuuucacagagcucacaguuuagcagggaagaaagacaugg

SEQ ID NO: 4192232 - RNA, 61 nt, Human
cuauguucugcugaguuggaaugucaguuuuccuggaguuuaugcagcauguagaacaugg

SEQ ID NO: 4192233 - RNA, 71 nt, Human
cuauguuuugauguacagaauuguucacagguaugcuuauuugugaguacuuauguauauaacucacaaag

SEQ ID NO: 4192234 - RNA, 75 nt, Human
cuauuagguuggugcaaaauaauugcgguuuuugccaaagguaaaacugcaaucacuuuugcaccaaccuaauag

SEQ ID NO: 4192235 - RNA, 86 nt, Human
cuauuagguuggugcaaauguaauugugguuuuugacauuacuguuaauugcaaaaucugcaauuacguuugcaccaaccuaaugg

SEQ ID NO: 4192236 - RNA, 84 nt, Human
cuauuagguugugaaaagcaauugcaguucuugccaucacuuucaauggcaagaaccacaauuacuuuugcaccagccuaauag

SEQ ID NO: 4192237 - RNA, 92 nt, Human
cuauucagggauuuuacaaucauuagcaauuuucaauaaguacuggaugaugugucuuuuaucugacauuguuaguguauugccuggaguag

SEQ ID NO: 4192238 - RNA, 79 nt, Human
cuauucauacuauuauuugcaauaugucuuuauuauacaaaaugcugugauaaacauucuugcacaugugugugagugg

SEQ ID NO: 4192239 - RNA, 85 nt, Human
cuauucccauuuaaaaauaugcuauuuaugauuacaguugacuuaucccaaaggaguacaguggucauaauauaaaauggaauag

SEQ ID NO: 4192240 - RNA, 69 nt, Human
cuauuccccaucaucuauuauagugcagagaucacugcaggggcuuaaaagugggugaugaaggaauag

SEQ ID NO: 4192241 - RNA, 102 nt, Human
cuauucugccugcaccauagggcauggguugguggagauggagacguucugggugucaucugucuguucaacagccuggagccuccuugagcagcagaauag

SEQ ID NO: 4192242 - RNA, 60 nt, Human
cuauucugucagcaucaugguugucuuuauacaggcuaacaauagguuuuggcagaauag

SEQ ID NO: 4192243 - RNA, 68 nt, Human
cuauugaaaguguacaauucaauaguuuuuaggauauuuagaguucagaguugugcaacucucaguag

SEQ ID NO: 4192244 - RNA, 61 nt, Human
cuauugaggacauaaggacucugaagccaaguuaagguaacaauuccucauguuucaguag

SEQ ID NO: 4192245 - RNA, 70 nt, Human
cuauugcccagauauuagcaugcauaugaaucaccuggggcucuuguaaaugcagauucugauucaguag

SEQ ID NO: 4192246 - RNA, 101 nt, Human
cuauugcugaguuuaaaauuacccccaaaacuuagugacuuaaaacaacaaacaugcaugguuguugucacagguucugugggucaggaauuaagaagugg

SEQ ID NO: 4192247 - RNA, 95 nt, Human
cuauuggccagucaagcauuuauagccccuaucauccauuugcuacacaagacuucccuggauugguuauggagugacuuaacucugguuauugg

SEQ ID NO: 4192248 - RNA, 79 nt, Human
cuauuguaucuuaaagcugcuggugacugggcugaucuccugauuguuuagcgaauuaccagugcauuauucucauugg

SEQ ID NO: 4192249 - RNA, 74 nt, Human
cuauugucagugaguaaagguucauugaauuuuucuucugaugaauaaaauggucaguuuucucagugcaaugg

SEQ ID NO: 4192250 - RNA, 72 nt, Human
cuauuuaugugcuauuuuguauuuaucuggcucugaaguguggagucuaucaacaaaauagguacuggguag

SEQ ID NO: 4192251 - RNA, 76 nt, Human
cuauuuugcuuuauguaaauauguauguagguaaaugaggaaaagucuggaagcauguauacuaaaugcagaguag

SEQ ID NO: 4192252 - RNA, 56 nt, Human
cuauuuuuuuguccuuagggaacuaauauuguucuacaaggacacaacagagauag

SEQ ID NO: 4192253 - RNA, 86 nt, Human
cucaaaacacagaccuccucacucucagagaacaaggguacugcauggaaaggcaggcccagagggucaggagcugauguuaagag

SEQ ID NO: 4192254 - RNA, 60 nt, Human
cucaaagaagggagguauuugguuucaaauuaucaaaacagccuuguacucuucuuggag

SEQ ID NO: 4192255 - RNA, 89 nt, Human
cucaaagcgaaggccaagaucaccaagaaucuucacuuuuuacuucugugagacaggcuuccuucuugggauucuuggcugucuuuggg

SEQ ID NO: 4192256 - RNA, 76 nt, Human
cucaaagcgccugccucugugcuuaugcuccaugggcacccauguguccaggcuagaagucacaggccaggaagag

SEQ ID NO: 4192257 - RNA, 108 nt, Human
cucaaauccuccaaaaguuaccuugcuacacaguuucuccccggcaagcucaaccaagaauuugguggagcuggaagaauguagacguuggagcuggacagaucugag

SEQ ID NO: 4192258 - RNA, 58 nt, Human
cucaacacagccauuccccuagaaguuacagcacuucuagggucaccuguguucagag

SEQ ID NO: 4192259 - RNA, 88 nt, Human
cucaagaugucagcugggagcaaagccaugcauagaaggcaggucuucugugugugauuccugugcucuuuuagccauguugcuugag

SEQ ID NO: 4192260 - RNA, 79 nt, Human
cucaagcauauaugggcuuaauaaauaacaugucauuccaugaugauagggacagacauauuuggcccauagcuuagag

SEQ ID NO: 4192261 - RNA, 61 nt, Human
cucaaggcacuuuuccugagaugaugauuuaaauuuaucaugcucuccugggguccuugag

SEQ ID NO: 4192262 - RNA, 64 nt, Human
cucaaggucuuggcuccaaccaaaacgcuuugaaguacuugggccaggauuucaagacccugag

SEQ ID NO: 4192263 - RNA, 58 nt, Human
cucaagguugauauguguuuucaaggaacuaguucuugaaaaccauuugcaucaugag

SEQ ID NO: 4192264 - RNA, 80 nt, Human
cucaagugcccugggccuucagggccaggauacccccaucccucaccauggccccuggaggccauacagagccgccugag

SEQ ID NO: 4192265 - RNA, 68 nt, Human
cucaaguguguugacugaauuggggauuauacucacaacucuucccuagacagacaagaugcuaagag

SEQ ID NO: 4192266 - RNA, 57 nt, Human
cucaaguuucauauuugucuaggaagcccuucucgccucccaggcuugaaauaugag

SEQ ID NO: 4192267 - RNA, 125 nt, Human
cucaauauuccuuuaauauuagucucaaauuuggauuacugucuuuagggguagaaauauuuuuaaauuuaugauucuaccaugugagacagauuucagcuuuaagaagaaaucuggaaauuggg

SEQ ID NO: 4192268 - RNA, 67 nt, Human
cucaauccuaaagccauuaggugcagcagaagagggcagauaucuacaacggguggaguagggugag

SEQ ID NO: 4192269 - RNA, 80 nt, Human
cucaaugugugcagacugucaaaucugucucuaggagaacugauucacucuggacagacaaaaauaguaagcacauagag

SEQ ID NO: 4192270 - RNA, 69 nt, Human
cucaauuuucucaucuauaaaguggggauaauaacaccuaccucacagaaguguagugaggaaaaagag

SEQ ID NO: 4192271 - RNA, 65 nt, Human
cucacaaguuaguauugguuuugggaaguugcuuugcuuuugauguugauacuaccuucagugag

SEQ ID NO: 4192272 - RNA, 114 nt, Human
cucacagagcuuggggcaggggagaaguuaguguggaugcagggaggaggggcuccuucacugcuuagggguccauaccugagaugacgccucgccugaaucauccucugugag

SEQ ID NO: 4192273 - RNA, 64 nt, Human
cucacagcccucagcacaggucacgucccagcccagcucugggacuuugguucagggcucagag

SEQ ID NO: 4192274 - RNA, 67 nt, Human
cucacagggagcaagagauaaauaauccaggauucaagauuaaaaucgcuguugcuucuguggugag

SEQ ID NO: 4192275 - RNA, 84 nt, Human
cucaccacugagcuuggccaggaaugaauggggcagggcaaggacagucccauucagagcuaugggugcagcucccagggugag

SEQ ID NO: 4192276 - RNA, 57 nt, Human
cucacccccugacuuuauaucccgagguuuugaugugcccaggagugguggggugag

SEQ ID NO: 4192277 - RNA, 76 nt, Human
cucacccucagagccuccagaaggaaucaacccugccaacaccuagauuucggacgcugggcucuagaacugugag

SEQ ID NO: 4192278 - RNA, 65 nt, Human
cucaccugcaggcacaggugugcgcacuucgcaucucgaaggccggccagcaagcuucaggugag

SEQ ID NO: 4192279 - RNA, 76 nt, Human
cucaccuggagagcuugcuaauacacugguccccauccuaaucccccaagguaaaggcaaacucuccaaggauggg

SEQ ID NO: 4192280 - RNA, 71 nt, Human
cucaccugucuaucuggaauggaaccugcaggguucuaauacacuguuucuuuauucucagauacagggag

SEQ ID NO: 4192281 - RNA, 55 nt, Human
cucaccuuccccagaggggcuuaccagagccaggacccuguguugggagugugag

SEQ ID NO: 4192282 - RNA, 57 nt, Human
cucaccuugugauccacccgccuuggccucccaaagugccgggauuacaggcgugag

SEQ ID NO: 4192283 - RNA, 57 nt, Human
cucaccuugugauccacccgccuuggccucccaaagugcugggauuacaggugugag

SEQ ID NO: 4192284 - RNA, 59 nt, Human
cucacgaugcgcucaaacuccauggccugcuucaccuccuggggaaagccaucgaugag

SEQ ID NO: 4192285 - RNA, 130 nt, Human
cucacugaaguucccuuucugggacaguccuguguguucacauuugcugggacaaaagugaguguaagcagugaguagugaacagccacaggauuuuaaucaauccugugaagagggaaacuuuccauag

SEQ ID NO: 4192286 - RNA, 60 nt, Human
cucacugggagaugugggaaggggcgugggacgcacgcggucacucccucuccuagugag

SEQ ID NO: 4192287 - RNA, 60 nt, Human
cucacuuaugugccuugagcaggaagugccacaguggccuuauuauggcauguaaguggg

SEQ ID NO: 4192288 - RNA, 130 nt, Human
cucacuugccuucugggacaccuucuugauuagaagagaagggugugguguuacugucaugaugagcacugugcauauccacaccuuaucucugcccagggaugucagcaaucaaggagggacggauggg

SEQ ID NO: 4192289 - RNA, 78 nt, Human
cucagaagugagacccaagaggagccaacgucuguguuuugcacaagauacagaaugguuguuuguccacauuuuggg

SEQ ID NO: 4192290 - RNA, 60 nt, Human
cucagaaugcgcagaguggugugugcaugcagcaacguguauacacccugugcaucuggg

SEQ ID NO: 4192291 - RNA, 78 nt, Human
cucagaauuggcacuuggguccacguggauguaggucauuuuauuuccaagcugaauccaaugacagccugaucugag

SEQ ID NO: 4192292 - RNA, 68 nt, Human
cucagacuuagcucaagauuaauaugaaaacagggcccucccucaagucuucuuugaguucuucugag

SEQ ID NO: 4192293 - RNA, 72 nt, Human
cucagagagugaauuccugccucugccgcucguggcugugugaccucaggcaagcgacucacccucucugag

SEQ ID NO: 4192294 - RNA, 58 nt, Human
cucagagcagacuuugaaggagggggccauaguucucugggucauuuuuuccucuggg

SEQ ID NO: 4192295 - RNA, 82 nt, Human
cucagagcaggaagcuugacaaggaugaguaaagugguaucucagaaaaauacuuggucuuugucccuccuugaucacugag

SEQ ID NO: 4192296 - RNA, 65 nt, Human
cucagaggaggcagggugugcccugcccacgggcagugacucagcauacccugcuucuucucggg

SEQ ID NO: 4192297 - RNA, 76 nt, Human
cucagaggcccagcagcgcaggucuuggagaaugaaugugggucacugggccgcgcugcagagggccgguccugag

SEQ ID NO: 4192298 - RNA, 60 nt, Human
ccuggccaccucugcccuaccgagugggaccauucaccgggcaggagagggguggccugg

SEQ ID NO: 4192299 - RNA, 129 nt, Human
ccuggccagccagucuguuuuguguguacaacugagggggccucaggcccuuaaggagcugagaagccagguccagcaccuggaggcguccccaggaagugcaugacuacuggccacaugaauggcagg

SEQ ID NO: 4192300 - RNA, 69 nt, Human
ccuggcccugggguaggggcugugaggcugugggggcucgcuugcccacaugaccugaccuaggcuagg

SEQ ID NO: 4192301 - RNA, 56 nt, Human
ccuguggaauagaaucuucccucgccuugucuaggagaggugcugugucucacagg

SEQ ID NO: 4192302 - RNA, 111 nt, Human
ccuguggcccauuagacaagcugaggcugacaguuguaccugccccucuggagaccaucacuucuuagagggcggaagcugugucccagcuaucuuuauaugcaaagcagg

SEQ ID NO: 4192303 - RNA, 59 nt, Human
ccuguggccugaauuugguaaaauaguccacucauuuguuuacuucacagagccacagg

SEQ ID NO: 4192304 - RNA, 61 nt, Human
ccuguggcgggggccagugccuccccuccucugggcguggucuggucccugacccugcagg

SEQ ID NO: 4192305 - RNA, 61 nt, Human
ccugugggaaagcugguggugguguccuuuuccaccaucuuaguggccagcucucaccagg

SEQ ID NO: 4192306 - RNA, 60 nt, Human
ccugugggcuugaguguagggugucuucucuccuccaccguaaaugcaguuccccauagg

SEQ ID NO: 4192307 - RNA, 57 nt, Human
ccugugguuuuuagaggaaguauaauacagccauuagaaccacugaagacucacagg

SEQ ID NO: 4192308 - RNA, 70 nt, Human
ccuguguaucugggaaggggagaauagagcccuuuggcucuuuacuucaguauucucagauaaauucagg

SEQ ID NO: 4192309 - RNA, 55 nt, Human
ccuguguccuaauccaucaggcccuacccccaggaccucauggcgggggcauggg

SEQ ID NO: 4192310 - RNA, 76 nt, Human
ccugugugaggauuccugguucuucucugcccuuugaacuguguagcauggaagggauuaaagauuuucacagagg

SEQ ID NO: 4192311 - RNA, 90 nt, Human
ccuguguguaaagaguguuccaaacggauauaacagcaaacgcacaggccaugaccugggagcgugcuugucuuguuugagaaacauagg

SEQ ID NO: 4192312 - RNA, 73 nt, Human
ccugugugucuggaagcucagggagcagcugugaccugcacgugggauuccugagcucccaugaacaggcagg

SEQ ID NO: 4192313 - RNA, 55 nt, Human
ccugugugugauuguaugaguaugaauaccuugguauauaccaucccacaacagg

SEQ ID NO: 4192314 - RNA, 77 nt, Human
ccugugugugcgguggguucucucgcuagcgggggccgacuuucccuggccuggggccucagcugcuagcggacggg

SEQ ID NO: 4192315 - RNA, 121 nt, Human
ccuguuacuagagauuaguuugcauuuucuagauuuuauguaaguggaaugaugccaugugcauuuuuuugugucuggcauuuuucacucugcaugguuaucuugguguuuagccacgugg

SEQ ID NO: 4192316 - RNA, 71 nt, Human
ccuguuagaaggaggacuggcaguguugaucucauuaaucggcgccauaugugccagugucccuuccaagg

SEQ ID NO: 4192317 - RNA, 71 nt, Human
ccuguugaccuggcagcgcagcaugaagucggugaaauccucuuacugcuccguaugccaccuccuccagg

SEQ ID NO: 4192318 - RNA, 57 nt, Human
ccuguugcucugcaugaguuuagauuuauauuuagcucgaaaguccaggcaagcagg

SEQ ID NO: 4192319 - RNA, 61 nt, Human
ccuguuuacaucaucaaggacuuccuauuuugcuuaggguaaguccaaaauguguaauagg

SEQ ID NO: 4192320 - RNA, 71 nt, Human
ccuguuuagucucucaggagguuuuccugcccacgggggguauggcugccucccaggagaaucuggccagg

SEQ ID NO: 4192321 - RNA, 59 nt, Human
ccuguuuauccaugccaauccuugcacccucuucagaguuuuagcaugaaugcagcagg

SEQ ID NO: 4192322 - RNA, 63 nt, Human
ccuguuucagaauuuuuagugaguguuuuucucaugaauuuuuaguaaaauucuguaaagagg

SEQ ID NO: 4192323 - RNA, 69 nt, Human
ccuguuuguuccuucuacugcccucugagucaggacaauugaccagcagaguugaggaggacacgaggg

SEQ ID NO: 4192324 - RNA, 129 nt, Human
ccuuaaaaacuucugugcauuuguaucacgcugucugcucuucggggccacugcuuguguugcagggaagacacaaagcaugagaguuccgagcagugggcaaagaugcuugucaagaguguuauaagg

SEQ ID NO: 4192325 - RNA, 73 nt, Human
ccuuaaacaacuuguaguuuauuagagaaguuauguaugaguuaaacucuaguagauacaagaacguaauagg

SEQ ID NO: 4192326 - RNA, 70 nt, Human
ccuuaauaccaaagauuaaauagcaacaugaagccuccuucauuuucucuuuuucuguuggagauugagg

SEQ ID NO: 4192327 - RNA, 69 nt, Human
ccuuaauucuauuuaucuuucuuacuugaaauauguguuucugggguaugagauauaggugaauaaagg

SEQ ID NO: 4192328 - RNA, 61 nt, Human
ccuuacaaauauuugccuuuuaugucucugcaguagcugagauacuguggcgaaugcaagg

SEQ ID NO: 4192329 - RNA, 113 nt, Human
ccuuacauauuuuuaaaccacaguaucagcagagcuuaaaagagcauuuggcagauacuagauauccuaucuuaugaguauuguugaauaugugucaguuauucauagugagg

SEQ ID NO: 4192330 - RNA, 76 nt, Human
ccuuacaugacaauacuucaauaagcugaauuuguauuccucucauagacuuguaguuugaguauuguuacugagg

SEQ ID NO: 4192331 - RNA, 84 nt, Human
ccuuaccaaauauugcucuugccuuccucugcagugauugguucugaucacuguagagaaagcauggaagcucauuuuacaagg

SEQ ID NO: 4192332 - RNA, 62 nt, Human
ccuuacccagcccaugccuaccucagggaggacaauccuaguugggcagggguggggcaagg

SEQ ID NO: 4192333 - RNA, 68 nt, Human
ccuuaccccauccucgucugcacaucaaagggauuucuuguuggcuguggggcggggucggugccagg

SEQ ID NO: 4192334 - RNA, 110 nt, Human
ccuuacuuaagaguacagcuguacagaguaaauucacuaugcuuggaaacuucuuucauaucuauuuguguaagucugcagcuaguuucugaacaguuguauagugaugg

SEQ ID NO: 4192335 - RNA, 100 nt, Human
ccuuagacuaccuccugggccacuucugcucuguacugcacuggccaggccuaucuggcagggucugaggcacagggacagggugguguggggugucagg

SEQ ID NO: 4192336 - RNA, 64 nt, Human
ccuuagagaaugaaauuuacuacagaugaaauuuacuacauuuccugugguauauuuuauaggg

SEQ ID NO: 4192337 - RNA, 89 nt, Human
ccuuagauuuuugcugccuuugcccuugacacuguccuuucccuggagcugaaugucuggggguagaggaaugacuuuaaaagucgagg

SEQ ID NO: 4192338 - RNA, 58 nt, Human
ccuuagcauggcugugcuguguggauauaugcucucaugcccacagcaaaugcagagg

SEQ ID NO: 4192339 - RNA, 56 nt, Human
ccuuagcauuagaagcugugggcaaugcauccuaugccauuagcuuuguguugugg

SEQ ID NO: 4192340 - RNA, 84 nt, Human
ccuuagcgcuucaagauccauagauauugcuuugaauuuuagcucugcaaaauguaauaccuaugugaucuuagguaacuuagg

SEQ ID NO: 4192341 - RNA, 89 nt, Human
ccuuagucugguuuaaaauguguuuucacugaagauucucuagcaaacuaguagcauguuuaaagcagcauuugauaacaagaaaaagg

SEQ ID NO: 4192342 - RNA, 64 nt, Human
ccuuaucugcacacaauuuaucuuucucagggaugacgaaagaggacacuugguguaguaaagg

SEQ ID NO: 4192343 - RNA, 82 nt, Human
ccuuaucugucauggcuaccuuuagcacccauggaaucugcugggucauaugauuacgggccagggcugcucauacagcagg

SEQ ID NO: 4192344 - RNA, 129 nt, Human
ccuuaugaguguggaggaaugagggcucucaugaaaggaagagggcuacuccuaccucucucugccaugugaggauacaaggagauagcugucuaccaaucaguaagagagcccuuaccagacaucggg

SEQ ID NO: 4192345 - RNA, 88 nt, Human
ccuuauuaccucugcugaagucuuacaugucaucuaauagcuuuguuaugucaaaagagaucauaugaaaaauuucaaggacuuaagg

SEQ ID NO: 4192346 - RNA, 85 nt, Human
ccuuauugagggaauaaaggcaccauaaggcaaaacugcuguuuuaggcuuuauuguuuuugaacuuaggcuuccuucuaguugg

SEQ ID NO: 4192347 - RNA, 102 nt, Human
ccuuauuuuuuucugcaaguaauaccuggccuugauacaguaguacauuucugaccauugcuuaacuguauaaggcauagguaagcuguaggaaaacugagg

SEQ ID NO: 4192348 - RNA, 77 nt, Human
ccuucaaauauaaagucugaaagauaagagugauauaaucaaaugucaauuaugucuguagacucuguacuuguagg

SEQ ID NO: 4192349 - RNA, 117 nt, Human
ccuucaaccccccaccuuagauaagucacuggaucuuucugggcaucuguaaaaugggaauaguacagccagaggugguccugggucugggcuuuguggaggugggggcagagaggg

SEQ ID NO: 4192350 - RNA, 130 nt, Human
ccuucaaggucuaacuuccaagauucugugaguacgauucuagggagccucugccucagacuucuaaguaguucuucaggcugugcucuagaaguuacuggaaugaaagaaaaauuguaguguuugaagg

SEQ ID NO: 4192351 - RNA, 57 nt, Human
cucagaggcuuucaauguguuuuaugacauucauagagucaguuuugagcaucugag

SEQ ID NO: 4192352 - RNA, 67 nt, Human
cucagagguguaugagggugagaaggaugaagauggauuccuguacacggucuaugccucccaggag

SEQ ID NO: 4192353 - RNA, 60 nt, Human
cucagaucuucugcuguggggagcauaacugaucaaugacuccagcuguugagaucugag

SEQ ID NO: 4192354 - RNA, 60 nt, Human
cucagaugugagaaauauauugugauaaaacaaguuguccaaugcccuuuccacauggag

SEQ ID NO: 4192355 - RNA, 119 nt, Human
cucagaugugcaguccaauuuaagaaccaccaaggccuuaaagcucucuccagcauucaacuucaagcugcugggggacaacaaagagccauggaggaucuucuugacagcacccugag

SEQ ID NO: 4192356 - RNA, 71 nt, Human
cucagcaaaacagccguugccugggggaagaggugaguuuaauauccagguucuucguugcuuuuguggag

SEQ ID NO: 4192357 - RNA, 71 nt, Human
cucagcacucacuauaggacgcugcugcagggcccagcaagcagcccaguuguacugagugguuuugugag

SEQ ID NO: 4192358 - RNA, 56 nt, Human
cucagcagagcgagaccaagucaugccuuguauggaaauuucuuucuucuguugag

SEQ ID NO: 4192359 - RNA, 56 nt, Human
cucagccagugaucuuuccuuuggaccacaaccccucugaaaagcacugugcugag

SEQ ID NO: 4192360 - RNA, 57 nt, Human
cucagcccagcccaggaccaggauggaaguccuggaaacccccuggguggugcugag

SEQ ID NO: 4192361 - RNA, 71 nt, Human
cucagccucagcuuccugucugcagaaugggaauauuaauucugccucacaggcagcugggaggauuugag

SEQ ID NO: 4192362 - RNA, 73 nt, Human
cucagcgcgagaccuggcaggugggagaggcucgcucaugagagcuagaaaacagccugccuggguuucugag

SEQ ID NO: 4192363 - RNA, 114 nt, Human
cucagcuuacuuccugcucucagacuucauccuccacaugaccccccagcccagggugauggggcugggaggaauuuggggaauagagaccuggaaugggguaugagaccugag

SEQ ID NO: 4192364 - RNA, 58 nt, Human
cucagcuucuaccuccugagugaaaccucuucaucuuccucaccagguguaggcugag

SEQ ID NO: 4192365 - RNA, 84 nt, Human
cucagcuuuauacaugucaauuuaguacucuuaagcaucuguuuacuguuugauaaauauuuuuguuggcaugacaaaguugag

SEQ ID NO: 4192366 - RNA, 74 nt, Human
cucagcuuuguaaauuccacugguggaaacaagacuucacuuguugacccaaggcccuggaauugcaagcagag

SEQ ID NO: 4192367 - RNA, 55 nt, Human
cucaggagacaguguccacaugguuuucagaguccauaguggcauuauuccuaag

SEQ ID NO: 4192368 - RNA, 85 nt, Human
cucaggaggagcagagacucucaggaggugguagaggcccuggaacacugugguuucuuccacuugcuggcugcguuuuccuggg

SEQ ID NO: 4192369 - RNA, 57 nt, Human
cucaggaggaggaaguucauuggcugaccaggagccaauuagggucucucucuugag

SEQ ID NO: 4192370 - RNA, 57 nt, Human
cucaggauuaaggaaucuaaauuuaauuucauuuuggaugccuaaguaaguccuggg

SEQ ID NO: 4192371 - RNA, 83 nt, Human
cucaggcacagggcagaggccagccugccagaagcuuccccaucccuagcaucucugggcuccuucagcccuuuuagccggag

SEQ ID NO: 4192372 - RNA, 130 nt, Human
cucaggcagaaccaagcuugggccccuaguguagaagggcugucuucugggugccaggugcagcaaucacucuaggugucugcugcuaagcccagaacucgccuuuccagugacuaagcuucugcuugag

SEQ ID NO: 4192373 - RNA, 57 nt, Human
cucaggccaauaagcuccagcccccacccucaauggcagcuggaagaauggccugag

SEQ ID NO: 4192374 - RNA, 85 nt, Human
cucuuguauggaucacaauagacagcgcauuaaaaaugucaaaguacugaacaaaugugauuguuucugaaauuuaggucagggg

SEQ ID NO: 4192375 - RNA, 65 nt, Human
cucuugugcaggagugacaauaagaagugugcacugugaaaauugacauccugaguacauaagag

SEQ ID NO: 4192376 - RNA, 65 nt, Human
cucuuuaaauuuguguuuagagggucucauguuucuccaugaaacuuugcugcagguuuaaagag

SEQ ID NO: 4192377 - RNA, 65 nt, Human
cucuuuagcuuaauuaaauaaucaguccagccuagauggacugaugagaacuaggccuggaugag

SEQ ID NO: 4192378 - RNA, 66 nt, Human
cucuuuagugcaucuuauauuccacuguggguguguucauuauuaacaguggcuaagacugagggg

SEQ ID NO: 4192379 - RNA, 78 nt, Human
cucuuucagcagaaauauuaccaugcccucugcaguguacaaaccggaguaacauguguuaaucuuucugcaaagcag

SEQ ID NO: 4192380 - RNA, 56 nt, Human
cucuuuccccuacagagcacauuagacagauaugugagucucuguacaggaaagag

SEQ ID NO: 4192381 - RNA, 55 nt, Human
cucuuugccugcuacuuccgaagaaaucauauccaagaagaaguuggccaaagag

SEQ ID NO: 4192382 - RNA, 86 nt, Human
cucuuugguguggagggaaaacaguuaucucacauauggaagggaaaguucaucuuccuugguguaacugcuccuauggcaaagag

SEQ ID NO: 4192383 - RNA, 79 nt, Human
cucuuugguuucugucucuguaaaaaaaagugucuaauugcauuugggcaaaaaacuugcagugaagagagaaaaagag

SEQ ID NO: 4192384 - RNA, 65 nt, Human
cucuuuguagccuuugcauauucaacagaaugaaccugcccagggucuacaaaaauauuugagag

SEQ ID NO: 4192385 - RNA, 81 nt, Human
cucuuuguuucaacaaauucauaucgcaguuccugaauuuuaaaaagugcugugcaaaucgauuuguuggcugauaaaaag

SEQ ID NO: 4192386 - RNA, 73 nt, Human
cucuuuguuucucuaauucagaggaagaagauaaguaaagugucuaauucagaguuagacgaaaagcaaaggg

SEQ ID NO: 4192387 - RNA, 94 nt, Human
cucuuuuagagugaagaccuaaaauucccucagaugcauccaagaaaucaucuagucaagaguagggaugauaggucuaaguacaagagaagag

SEQ ID NO: 4192388 - RNA, 70 nt, Human
cucuuuuaugugacgugugugaccugguaucuagucacccugggguugcauacucucauucuaaaaggag

SEQ ID NO: 4192389 - RNA, 67 nt, Human
cucuuuugagggccagaggaagaggagagucaggauaccuuuuccuaggggcucuucauuugaagag

SEQ ID NO: 4192390 - RNA, 79 nt, Human
cucuuuugguucacacuaagcuuaagugguccacacgauugugugaauuuguacaaguauuaugugaacaacuagggag

SEQ ID NO: 4192391 - RNA, 85 nt, Human
cugaaaagugucuaaugagaauucuuuuuggguaccuauuaaaaauagugguuauuuagaacugaguuuuuauugugauuaucag

SEQ ID NO: 4192392 - RNA, 91 nt, Human
cugaaaaugugauaugagugcuagacuuuggcacagaacuuccauuguuugcaaucaguuguccaaaguucacaucacaucacagagccag

SEQ ID NO: 4192393 - RNA, 55 nt, Human
cugaaacaugguuagauucaagccaaagagugguuuggauguauuuauguuuuag

SEQ ID NO: 4192394 - RNA, 71 nt, Human
cugaaaccacagaauaacucuugcuugaguuauuacuaacucgauaacucuuguguuuuuuugugggacag

SEQ ID NO: 4192395 - RNA, 58 nt, Human
cugaaaccuggcuggccagguaugguuaaaguaaauaugccuuccagcuccuuuucag

SEQ ID NO: 4192396 - RNA, 89 nt, Human
cugaaacuacuaugggaauguacuuguuaauagaaagauuguuuuacuaaguccucucuuucugaaagacaauuugauacuaguugcag

SEQ ID NO: 4192397 - RNA, 66 nt, Human
cugaaaggcugacaugucaaugaaugaagaaaugggaguguuucauaaagcauuucagcuuuugag

SEQ ID NO: 4192398 - RNA, 93 nt, Human
cugaaagugugggcuucugagugcucugcuguuccagacaugugaucccuugagcagcugaucaaagcacuuauuuugagaccuuauacacag

SEQ ID NO: 4192399 - RNA, 59 nt, Human
cugaaauauuuagagaguaaguuugcaggaugucuauaacuuacugucaaguguuuuag

SEQ ID NO: 4192400 - RNA, 88 nt, Human
cugaaauccuggucucugugucugagagagcccuugggguucacccggacccauccugggcuguugucgggcacaagcaggaaaguag

SEQ ID NO: 4192401 - RNA, 73 nt, Human
cugaaaugacgguuuggggcaauguguggucucaucaccucggugcccaaagcuccagugaccaucguuuuag

SEQ ID NO: 4192402 - RNA, 91 nt, Human
cugaaaugggagccagugaugggaucagagguuguuaauuauacuaguaaucaacugagcccugguucucaaagccuguucccuggaucag

SEQ ID NO: 4192403 - RNA, 77 nt, Human
cugaaauucaccauccuuucuagaaauuagagauaaagcucuauaauggaaaguggaugugauuugugcuuuuguag

SEQ ID NO: 4192404 - RNA, 64 nt, Human
cugaacaaggcuggcugggaaaaacuuaauuuuaaguauuuuauuaccugcuaguuuuaaacag

SEQ ID NO: 4192405 - RNA, 71 nt, Human
cugaacauaggcauugcugguauuggaagugcucacuggggggcgucucuggguuaagcagugcaugucag

SEQ ID NO: 4192406 - RNA, 56 nt, Human
cugaaccacuaauauuuugauugacucaagugucaaucaaaguaguggcuggucag

SEQ ID NO: 4192407 - RNA, 67 nt, Human
cugaacccaggagguugaggcugcagugagucaugaucaugccacugcacuucagccugggugacag

SEQ ID NO: 4192408 - RNA, 89 nt, Human
cugaacccucaaugaguaaaggacuccauggguaagucauauuuuggguaacauauuaacacuuuggagucugcucaggggcuguuuag

SEQ ID NO: 4192409 - RNA, 81 nt, Human
cugaacgaacauuguuucugaccaugaugagcuuuuuauggauagucaaugcucacaauguuggagaaacagaucguucag

SEQ ID NO: 4192410 - RNA, 110 nt, Human
cugaacuaccaccagcuaugggaaugugagugauuuguaggcaaggccauuauuaaggucaccugcaaaguugcaucaaaacccaacaaguugguguuucagagguucag

SEQ ID NO: 4192411 - RNA, 71 nt, Human
cugaacuauauaaaacugccaauauuugugucuuuuuugaacuguaaugaaggcaguuuuauaagauucag

SEQ ID NO: 4192412 - RNA, 58 nt, Human
cugaagaagucucuaggcuauuaaguuaaaccuugaaugccauauuggauuucuucag

SEQ ID NO: 4192413 - RNA, 97 nt, Human
cugaagacaucugggagauaucaguuuauaaauuguauuuagagcaaugaaaucaucuagggagagaguguagauagagagguuuaggugucugagg

SEQ ID NO: 4192414 - RNA, 55 nt, Human
cugaagaggaugcugccaucaggcccagagcauuccugaagcagcaaacucucag

SEQ ID NO: 4192415 - RNA, 55 nt, Human
cugaagauagugucugaucaugacuuugcaaaguaacagacgaagugaucuucag

SEQ ID NO: 4192416 - RNA, 74 nt, Human
cugaagcaauagagacaagaccagaacuaguuuuccugacucucagacuggucuuguacuauguugcauuacag

SEQ ID NO: 4192417 - RNA, 65 nt, Human
cugaagccaguuugcugcccuuggggaggagauaaaaucugaguggcaaaauaacugagcuccag

SEQ ID NO: 4192418 - RNA, 66 nt, Human
cugaaggagcucaggagauagucaccaguagcauggaggcugagaucugucucagagcucuucuag

SEQ ID NO: 4192419 - RNA, 59 nt, Human
cugaaggcuggggugcagacggccuccucagugaugaaggcaaauggcccaggccucgg

SEQ ID NO: 4192420 - RNA, 80 nt, Human
cugaagggagaggggucuugagucaaguaacuaagacuuuauguccugcuaagucacucaagaccucuccacucccucag

SEQ ID NO: 4192421 - RNA, 56 nt, Human
cugaagggcaaggaaaggacaauaaagucugucuuucuacaucauuugcuucucag

SEQ ID NO: 4192422 - RNA, 58 nt, Human
cugaaggggguuucacugagcugcagccaaagcaugggugagacugugcucccuccag

SEQ ID NO: 4192423 - RNA, 118 nt, Human
cugaaguauagugcagggugucaggcacuguggcggcuuccauguugcugcuggucaguugguucaccugcuuagcauggggcagcuccuggaaaagcaccuggaucuccuucuucag

SEQ ID NO: 4192424 - RNA, 61 nt, Human
cugaagugccagacauuuguuaaaauuagagguaguaaaauaacacauuuugguacuuugg

SEQ ID NO: 4192425 - RNA, 64 nt, Human
cugaaguuaaaguaguuuuuauguaguuaaagguuugaacaguaaaagaacucuucagcuucgg

SEQ ID NO: 4192426 - RNA, 93 nt, Human
cugaaguuucugcuaaucagggccaggacuaggaugaggugagagaggugacucagugucuucaccugaguccuggcccugcugcuacaucag

SEQ ID NO: 4192427 - RNA, 98 nt, Human
cugaauacuugugucuccugaaaauccuuauguugaagaccuaaccuccaaugcaaugguguuaggauguggggacuuugggagagaauuagguuuag

SEQ ID NO: 4192428 - RNA, 61 nt, Human
cugaauagcugaauaaugcgucugcagcuuuuuacgucacugcgcgugcaacagcuguuag

SEQ ID NO: 4192429 - RNA, 60 nt, Human
cugaauauuagucaugucugaucucccuucccugguuauuagaggucuggcugaauucag

SEQ ID NO: 4192430 - RNA, 69 nt, Human
cugaaucauauaucuaccugcaauugcaaaggaaugggcuugguguauuguaagugguuauaugcccag

SEQ ID NO: 4192431 - RNA, 96 nt, Human
cugaauccagcuggcaggugaggcaugugccuggagaacuguaagaacauuggggcuucaugccucacuuuacaaggcagcaaauggaggccacag

SEQ ID NO: 4192432 - RNA, 55 nt, Human
cugaaugaacuaaaucauaguucugcugaauagaacugaaaauaguucaguucag

SEQ ID NO: 4192433 - RNA, 70 nt, Human
cugaaugaucuccgauuaguccuuuaacaauucagauccuaaaucuaaaggcuaaaagagaaucauuuag

SEQ ID NO: 4192434 - RNA, 63 nt, Human
cugaauggcuacuucagaggacaaauccuuaaggaggugaugagucacugcaggugcuggcag

SEQ ID NO: 4192435 - RNA, 83 nt, Human
cugaauguguccaggcccugcuuagcacccuugcaccagacccuguaguacgguggguauaguuagggccucugacacuccag

SEQ ID NO: 4192436 - RNA, 106 nt, Human
cugaauguuugugaagguguugacccauggauacuaagguaugugaaaauaacucacacaucucagguguuuaaugaggaucaauaacaauuugugggcccaucag

SEQ ID NO: 4192437 - RNA, 67 nt, Human
cugaauuugccuuauuucauguaaaauuuaugucauucaguuuuugacaaugaguuugaggcaucag

SEQ ID NO: 4192438 - RNA, 59 nt, Human
cugaauuuuaggguaacagauguuugcuuauuauaggaagacaaugcuguaaaauucag

SEQ ID NO: 4192439 - RNA, 65 nt, Human
cugacaaacagggaguuugcucaccuggccaagacccccggugaggcagaaauuccuguuuucag

SEQ ID NO: 4192440 - RNA, 79 nt, Human
cugacaacaguggggagucugcacaauugaucauggcaaaauguuuuucuccugauaucugcagaccuacacugugcag

SEQ ID NO: 4192441 - RNA, 102 nt, Human
cgaauuaaggugucagcagaccugugcuucucuggaaggcucuacgggagagauuuaccuucuccagcuuccaguggcuggcugcccacacaccuuggcucg

SEQ ID NO: 4192442 - RNA, 74 nt, Human
cgacucccggcaugcagugcuuugcgccgggcacgcucugcgccugcgugcugcgcgcugcccgcuggggcucg

SEQ ID NO: 4192443 - RNA, 62 nt, Human
cgagacugagaucugaaugguguuuguggguucccgaggccuggcaggaaucucagugcuug

SEQ ID NO: 4192444 - RNA, 130 nt, Human
cgagagcaaggcuagggaagucggcguugccguuuucucucuguuugcucugccuguucccgcuuccuuggaacauuagauaacucagaaaggaaagacccgucucucguuucuggcccuuguccucucg

SEQ ID NO: 4192445 - RNA, 84 nt, Human
cgagagguaugcagcagucgcugaugcgcccccugagggcuuucucacccucagggacagggugcugcugcguaaggaaucuug

SEQ ID NO: 4192446 - RNA, 57 nt, Human
cgagauuuccaggacgggaggugggaucugaacccuccacggucccccuggaguccg

SEQ ID NO: 4192447 - RNA, 60 nt, Human
cgagcuaacuguauucuguaggcagauacuagagaauuucuccugagugcaguuggcuug

SEQ ID NO: 4192448 - RNA, 59 nt, Human
cgagcuggccuccgggugccugggauguuucucgcagaacaaaaggaagccaugucucg

SEQ ID NO: 4192449 - RNA, 58 nt, Human
cugacucugaguggugucaccaaaaccauggaucaagggggcaucaagacagaguuag

SEQ ID NO: 4192450 - RNA, 56 nt, Human
cugacugcuccacaccguccauacuccuccagaggagcucggggcggagccgucag

SEQ ID NO: 4192451 - RNA, 85 nt, Human
cugacuggcccagaugagugugggcucagcuauagugccuguaaagcaggauuaucguaucucuuggucuucauucagccuuuag

SEQ ID NO: 4192452 - RNA, 87 nt, Human
cugacuguuagagggaaaaaucauuugccacaggugaaugacaaauaacuugugacucgcuuugugguuucucucuuugagagauag

SEQ ID NO: 4192453 - RNA, 72 nt, Human
cugacuuagaugccaucuuuuauucuucuagaaacugagaaauucugcaagauuggaagaugcaauauucag

SEQ ID NO: 4192454 - RNA, 130 nt, Human
cugacuucaagccucccauucccaggaugagauggacaaauagcaugacacuuguauuccaagcacaaucuugaggcaaccauguuuuuguccauggccuugcccuguaauugugggauguauacgcgug

SEQ ID NO: 4192455 - RNA, 81 nt, Human
cugacuucgaugcuacugaccuugugagcuggccccaucuucucucugggccacuguuuccugggcaguuugcauucucag

SEQ ID NO: 4192456 - RNA, 56 nt, Human
cugacuucuugcucauacuagcuguucuauucagaucagcuagugguaggagucgg

SEQ ID NO: 4192457 - RNA, 98 nt, Human
cugacuuugcccaagcuguagguuauucuguuccagugguucucagcccuagcugcacaucaggaucacagaaacuuuuauagcuucuccggaaucag

SEQ ID NO: 4192458 - RNA, 64 nt, Human
cugagaaaagacauuucuagaugauauagccagugaauuuaggaauuuaugucuuaguuuucgg

SEQ ID NO: 4192459 - RNA, 58 nt, Human
cugagaaacaaugaauugugaucuugcagugggagaugcaaagauuauuugugcucag

SEQ ID NO: 4192460 - RNA, 65 nt, Human
cugagaaaccaggugcucugauuugcaacucuagacagggagaacuuagagcucugguucuacag

SEQ ID NO: 4192461 - RNA, 120 nt, Human
cugagaaaccucgcugagaaagcugaucagagagaaggucccaagaggcuggaagauccucucaucucaggcugacauugggacuccccuuggauuaucuuuguaucaggagggccucag

SEQ ID NO: 4192462 - RNA, 78 nt, Human
cugagaaaggaauucaaagcuacugacuuuagcuacuuauuaccucaagucugcaggcugugauuuuuuaaauuucag

SEQ ID NO: 4192463 - RNA, 67 nt, Human
cugagaacccauuagcagcagagauacuuucacaaguuagguguuugcuggagcucugggucauaag

SEQ ID NO: 4192464 - RNA, 71 nt, Human
cugagaagagguugucugugaugaguucgcuuuuauuaaugacgaauauaacacagauggccuguuuucag

SEQ ID NO: 4192465 - RNA, 67 nt, Human
cugagaagucagagaucaaggugucuacagcaauggugucuggugagcgcugcucucugcuuccaag

SEQ ID NO: 4192466 - RNA, 63 nt, Human
cugagaaucauggcaacagaaugaacuuguaucacaucaaugucauuacagucaugauuccag

SEQ ID NO: 4192467 - RNA, 68 nt, Human
cugagaauggacagcagggcaggaagcauuguccccaaugcccauaagccuuuguuuucuuuucuuag

SEQ ID NO: 4192468 - RNA, 86 nt, Human
cugagaauggggagcauguggggugagcagggggacugcccagagaucugcagcugcugcuccuccucacugcuccacacacucag

SEQ ID NO: 4192469 - RNA, 58 nt, Human
cugagacaugguuugacuggcauauaucuuuauucccauagcggacucaugucaucag

SEQ ID NO: 4192470 - RNA, 87 nt, Human
cugagaccucugacgccuucauuuccugcguuggccaccaggcacagaugcuguguccaucugacaggagaggaagcggggucccag

SEQ ID NO: 4192471 - RNA, 71 nt, Human
cugagacuuucaugugcuuuuauauauccuugaaaaaaccccauaggagaauuagcauauggacuuuucag

SEQ ID NO: 4192472 - RNA, 62 nt, Human
cugagagcccugcauggcugaugaaguucaguucucucauugucgcucugcgguguucucag

SEQ ID NO: 4192473 - RNA, 90 nt, Human
cugagagcgcccaauucugcaccccagacugagucaugaccuccugccaggcugacucugacuggagugagagaggggcagugcccuggg

SEQ ID NO: 4192474 - RNA, 60 nt, Human
cugagagcuggcugggaucucugggaaggaacauggccccaggccccaggaaacucucag

SEQ ID NO: 4192475 - RNA, 72 nt, Human
cugagaggaauugguucaagguuuaucuggagcuuuaaagucuaaaccucaaaucagugucaauuaccucag

SEQ ID NO: 4192476 - RNA, 59 nt, Human
cugagaguaguacugagaacugcgguagccaucaugccgcaacuuaucgcauucugcag

SEQ ID NO: 4192477 - RNA, 82 nt, Human
cugagagugaggguuguguggacugauuccaguucuugauguagucacauaaaggcacggaguuguuauggaaacccuccag

SEQ ID NO: 4192478 - RNA, 55 nt, Human
cugagauggagccacugcacucuagcgugggugauagagugagacuccaucucag

SEQ ID NO: 4192479 - RNA, 56 nt, Human
cugagauggaguuucgcucuucuugcccaggcuggaaugcaguggcaccaucucag

SEQ ID NO: 4192480 - RNA, 56 nt, Human
cugagauggaguuuugcucuugucgccuaggcuggagugcaauggcaccaucucag

SEQ ID NO: 4192481 - RNA, 56 nt, Human
cugagauucugugaaacggacauuuguuaaagcaagugucaauucucaaaucucgg

SEQ ID NO: 4192482 - RNA, 59 nt, Human
cugagcaacacauugaaugaggauucuguucguaauucuuauaaaaaguguugacuugg

SEQ ID NO: 4192483 - RNA, 73 nt, Human
cugagcaaguacugaggaguaagccaagauuuucccuaaaaauaauuuuaaguuuauuccaguacaugaacag

SEQ ID NO: 4192484 - RNA, 124 nt, Human
cugagcacagggccaucccaggagcuaaucacgccugggaguccacaccugcuaguuucaaaaggaaauuguauagagccagcugugggcucaggcggacgcugaagggaguggccaggcacag

SEQ ID NO: 4192485 - RNA, 75 nt, Human
cugagcacuugaaauguggcuaguccaauuaaugaauuguccaggaucaguuuuuaaagccacacagggcuacgg

SEQ ID NO: 4192486 - RNA, 55 nt, Human
cugagcagcucccugagugguccugacuuccaaaacagcuuucuggucugcucag

SEQ ID NO: 4192487 - RNA, 57 nt, Human
cugagcaggauauucacagcagacgcugcucucucugugugugacaaccuaguucag

SEQ ID NO: 4192488 - RNA, 79 nt, Human
cugagcauaugggauuagcagcauguaagugaguagaaguaguucuuauguucucuugcaguuguccuauuuuuuucag

SEQ ID NO: 4192489 - RNA, 79 nt, Human
cugagcaugagauuuuuggacacuuuuacauguucguauuugggaauaacuaaaguaaccaaggauaucacugggccag

SEQ ID NO: 4192490 - RNA, 117 nt, Human
cugagcccagcacuggcggggcugggguggaaggagcguggaaucgggugcgagaggacagucuccuucagauuccugcuucuggcagccuggggaccaguuggggcacgggcuggg

SEQ ID NO: 4192491 - RNA, 64 nt, Human
cugagcccaggcagagguugcagugagacgagauuucaccacugcacuucagccugggugucag

SEQ ID NO: 4192492 - RNA, 76 nt, Human
cugagccucaguguucuuaucuguaaaaugggaauaauuacagcaagucccccggcagggugauagugaggcucag

SEQ ID NO: 4192493 - RNA, 64 nt, Human
cugagccuguucugguuggcugacccccugggaaauccagggaguuuccaaucugagagcuugg

SEQ ID NO: 4192494 - RNA, 66 nt, Human
cugagcgagagaagcacaugaugccacuggaaauugauaaaaucuuguauaacuucucucccucag

SEQ ID NO: 4192495 - RNA, 71 nt, Human
cugagcgcaagggcugacuacgcuguauuucacaaccgagcccuagcgccagcucagcacccuacgcucag

SEQ ID NO: 4192496 - RNA, 73 nt, Human
cugagcugaucuccacacagggucgccugcggcgugcaccagcuggccacacugcugauggagcuggauucag

SEQ ID NO: 4192497 - RNA, 86 nt, Human
cucugcagcucacacucccgcaggagcagcucgcagcuccggaagcugucccugagcaacuccuguuuggaggcugagagcaagag

SEQ ID NO: 4192498 - RNA, 58 nt, Human
cucugcccagugcccacaggagcagggcuggccaguccccugaggcccugggccagag

SEQ ID NO: 4192499 - RNA, 79 nt, Human
cucugccccaaggaggguggccucaugugagugcucagguugcguagugaacaaggaugccaccucuagggggucauag

SEQ ID NO: 4192500 - RNA, 55 nt, Human
cucugcccccagcuggugcuuggcucccagucuuaggcugaguuagggggaggag

SEQ ID NO: 4192501 - RNA, 61 nt, Human
cucugccgugcuagauuuggcuuaggggauugagaguagagauggcagggcccuagcagag

SEQ ID NO: 4192502 - RNA, 85 nt, Human
cucugccuacucagucacagcccaucuacaguuggcuuggucuuuagugacaaggcugcugugauugggaacuuguauggcaggg

SEQ ID NO: 4192503 - RNA, 102 nt, Human
cucugccucagucugcacccuauccccagauugagcacuugaaccccucugugacuucaucuugccacuggggcuaggacuguuccugacuugaggccagag

SEQ ID NO: 4192504 - RNA, 130 nt, Human
cucugccuccagcuucagcugcuccuggcccagaauguacagcugcugcugaagguuguugauguagcucucgagcauguuguccauguugcucugugccgucuucugcugcuacuggaggcuacacuug

SEQ ID NO: 4192505 - RNA, 82 nt, Human
cucugcuccacugucccaugggacuugauuuacaaaauacaaagaugaaauuguuuaaaaguucaaggugauaguggcagag

SEQ ID NO: 4192506 - RNA, 76 nt, Human
cucugcuccugcuucauuaaugucuauaaguuuguuacaaagacagaaacugacaggaaaugaauuuaggguaggg

SEQ ID NO: 4192507 - RNA, 63 nt, Human
cucugcugccugauugcagaccucggguuucgagucccagagguguugugagaggcagugaag

SEQ ID NO: 4192508 - RNA, 75 nt, Human
cucugcuggguugaugguguauagaaaaugcaaacauuacuuauuuuuuacagaaucauuaaucauggugcaggg

SEQ ID NO: 4192509 - RNA, 58 nt, Human
cucugcuggugaccacugggccucacuguccccuaaguaacgcccauugccaguaggg

SEQ ID NO: 4192510 - RNA, 84 nt, Human
cucugcuguggccuauggcuuuucauuccuaugugauugcugucccaaacucauguagggcuaaaagccaugggcuacagugag

SEQ ID NO: 4192511 - RNA, 57 nt, Human
cucugcuguuagugugagguuugaggauuuuacuuuaaccacauggauuagucagag

SEQ ID NO: 4192512 - RNA, 72 nt, Human
cucugcuuagccgcgaccucgccucggcgucacugcgcaugugcgccagaggaacgcugcgcgcccgcagag

SEQ ID NO: 4192513 - RNA, 56 nt, Human
cucugcuucugagauggaagcuaacuaaggcagaccccauacucaagagguaagag

SEQ ID NO: 4192514 - RNA, 65 nt, Human
cucuggaagacccuaagcagugggccaccaaggggcuggccaagccacugcugggucugcaggag

SEQ ID NO: 4192515 - RNA, 93 nt, Human
cucuggaccaaaauuucucaaguuccuuagccuuagggcuucccaugcuggagccucagguguaggggaugugacaaaggacaugcuccagag

SEQ ID NO: 4192516 - RNA, 93 nt, Human
cucuggaggcagccaucauaagagcaaguggguagugaagcucucacaccgggcugguucucugaucacugccucccuggcugucuccaagag

SEQ ID NO: 4192517 - RNA, 73 nt, Human
cucuggcccugcuggagagccuuggccaaggcccuuccaucucugggucugccucuuccucccagggccaggg

SEQ ID NO: 4192518 - RNA, 83 nt, Human
cucuggccuagaaaugaauuaacuaaaauucacuuuaugccgaaaggauaaagguaauaauaguugcauuuucuaggccaggg

SEQ ID NO: 4192519 - RNA, 79 nt, Human
cucuggcucucuggaggccauggacagguucuuuuccuucucuggacccuaguuccucugccugccaagagcagcagag

SEQ ID NO: 4192520 - RNA, 59 nt, Human
cucuggcuuggugugguaggaacugggcaccaccagcugugcacacugugaaguagggg

SEQ ID NO: 4192521 - RNA, 57 nt, Human
cucugggaaguagauuuggccuuacaaagaaaaguuuucuaucauacuugcccagag

SEQ ID NO: 4192522 - RNA, 61 nt, Human
cucugggaccauggcaagugcggcaaguucuuagagcaacacuggcugccaugauccaggg

SEQ ID NO: 4192523 - RNA, 82 nt, Human
cucugggcaggaacaaucuuacuacuauuguuacuuuuaauaauucuaauaauagggucacaauuguauuuuuuucccagag

SEQ ID NO: 4192524 - RNA, 69 nt, Human
cuagaacccguguuccccggugccacgggugcucguggugggaucccuggcucccggaacagggucugg

SEQ ID NO: 4192525 - RNA, 65 nt, Human
cuagaagcaacuagaucuguuucaaaacugggaacguccacuaacagaaacuaguugacuguugg

SEQ ID NO: 4192526 - RNA, 116 nt, Human
cuagaagggccuuacgggguuggaaugggagacuuuagcuguggccagcucagacuccacuugcugggcucccaggggcuggacaagcaggucuuccucccccuguacccuccugg

SEQ ID NO: 4192527 - RNA, 65 nt, Human
cuagaagugcaagaucaaggugucaggagguuugguuucuccugaggccucuccuuggcuuguag

SEQ ID NO: 4192528 - RNA, 82 nt, Human
cuagaaguuaacauguguagguauacaaaauucuuagagaauuauguagguaucuauauaaugguuaauuaugaaaauuuag

SEQ ID NO: 4192529 - RNA, 75 nt, Human
cuagaaucaguaggccaagcagcuggcacugaccaaaagaagggccuaggcuaggcugcuggccacugaggcugg

SEQ ID NO: 4192530 - RNA, 66 nt, Human
cuagaccaggggagucaacaggugcugcacauuaagaccugguuuauuguuuuguugauugucuag

SEQ ID NO: 4192531 - RNA, 62 nt, Human
cuagacuguuuuaggaggguagagaauaugucugcuuaacucauccucacccucaguccuag

SEQ ID NO: 4192532 - RNA, 62 nt, Human
cuagagaaaccccaugagcuuuuggagauuggagucuaucugagaguuuggggucauuuugg

SEQ ID NO: 4192533 - RNA, 57 nt, Human
cuagagaaaggcaguggagcaagaguaaauguuucuggguuuuguuuccuucuuuag

SEQ ID NO: 4192534 - RNA, 61 nt, Human
cuagagacagauagggugaugagggggauugagucuucauaauuaccuugucugcccauag

SEQ ID NO: 4192535 - RNA, 66 nt, Human
cuagagcccuuucuccaggcaccugccaccuaggggagguuuccugggacagaagaggagcugugg

SEQ ID NO: 4192536 - RNA, 70 nt, Human
cuagaggcugcccacaguucucugccauguggccaucuccacuggccuuuuacaacguggcaacuucuag

SEQ ID NO: 4192537 - RNA, 64 nt, Human
cuagagggauguuaggauagcaccaaagagacauucuauuuguuucccuaaggucuggcucugg

SEQ ID NO: 4192538 - RNA, 59 nt, Human
cuagaguccuccuggaaaagguacuucugauguaaaagaccucagggaaagguuucuag

SEQ ID NO: 4192539 - RNA, 92 nt, Human
cuagauaggcauuucuacuccuaccugcagccaacuuucuuccaaaaugaaagcaaggccacuauugcagaagcagagaguugccaauuuag

SEQ ID NO: 4192540 - RNA, 130 nt, Human
cuagaucaguuugaaagucauuucaguagccugggccagggaggugucuguagcaucugaaccaaaugaaacucagaagauauggacacauucuugggucagacaaggagaaaugagcgaacugguugug

SEQ ID NO: 4192541 - RNA, 69 nt, Human
cuagaugcuauuauggcaguguuuuuaauacccuugaguugaauaaugauauugugaugaugucuuugg

SEQ ID NO: 4192542 - RNA, 108 nt, Human
cuagauguuggaaauuaauuaucucugaaaggguuaucauuguggacacuugcuuaauuuguaaaauauuugcuacucuugauugauuuagucuuuuucugacuuuag

SEQ ID NO: 4192543 - RNA, 65 nt, Human
cuagcaauaugcuaccuuaaauguugauugaauucaucaguauauuuauggauagguacugcuag

SEQ ID NO: 4192544 - RNA, 58 nt, Human
cuagcacagcccauucagucuaaagcuucuagugagcaguaauacuggcuguagcugg

SEQ ID NO: 4192545 - RNA, 73 nt, Human
cuagcacuucauucuuuaccaaguugucacucuaucacugcaagcgugaggauuggugaaaaguauuaagcag

SEQ ID NO: 4192546 - RNA, 78 nt, Human
cuagcagcccaggccucacauugggcuucaagucuucuucaauauaaaauuucaaccagguguguggccuggcucugg

SEQ ID NO: 4192547 - RNA, 108 nt, Human
cuagccagcuggcugccaauggugauguauagagaugacuugauuugaccuugaagggaagaaacaaauuaaugugucucaaaauaaauuccggcaaucgguggcugg

SEQ ID NO: 4192548 - RNA, 86 nt, Human
cuagccaggagacauguuaguuaguaggagauagagggaacuuccugcuccugaauuacacuacuacaugucuacugauaagcgag

SEQ ID NO: 4192549 - RNA, 64 nt, Human
cuagccaugggcauuaaagguauggauguccuuccucagggcaccuuugauacccuugguaugg

SEQ ID NO: 4192550 - RNA, 86 nt, Human
cuagccugaucuuuacaccuucugaggggaaacuggcagugauuccucacugcagguggauaucucaucagauaaagcaggguuag

SEQ ID NO: 4192551 - RNA, 79 nt, Human
cuagcgguaaaaguuuauggagagaggcuuggcaggagccuggcuggcguuuuccaaaagcccacuugaugccgcggag

SEQ ID NO: 4192552 - RNA, 80 nt, Human
cuagcucagauauuuaagugauaaagcuucugaaauaaaugacacauuguuugaaacccgucacuuugagugucugguag

SEQ ID NO: 4192553 - RNA, 56 nt, Human
cuagcugugguuagauagaguccucauuccagagggcuggcaguaagcacacgcag

SEQ ID NO: 4192554 - RNA, 56 nt, Human
cuagcuguguaaaccgagcugcaccagcugcagcugagcaauuguuacagagcuag

SEQ ID NO: 4192555 - RNA, 58 nt, Human
cuagcuucccuagcuaaagagguccugacuccuggauccuaugugcuggggaggaggg

SEQ ID NO: 4192556 - RNA, 68 nt, Human
cuaggaacaguucaacaguuuaacucgcuucaacagccugauucuauaagcacuugaaguguuccugg

SEQ ID NO: 4192557 - RNA, 100 nt, Human
cuaggaacuagaaaguggguggugaagacaaguggaaguaaaugcaaaccuauucccauauauguuugucgcuagauuguucccaccaauucguucuugg

SEQ ID NO: 4192558 - RNA, 76 nt, Human
cuaggagagaggcauggaacagauucuuccucacagcccugagaagaaaccaacccugccagcacuuugaucuugg

SEQ ID NO: 4192559 - RNA, 66 nt, Human
cuaggcacucacguggcuuuagcucugccuccacacugugugcuucugguccauggaagugcuuag

SEQ ID NO: 4192560 - RNA, 57 nt, Human
cuaggcagcuuugggugugaaggagcccaucuuacuugcagggucccagaggccugg

SEQ ID NO: 4192561 - RNA, 58 nt, Human
cuaggccacauuccacaaauguucugucauuaauaucugcuggaaaaagugguucuag

SEQ ID NO: 4192562 - RNA, 58 nt, Human
cuaggccaguuaggaagagaaggcagagccccuguuucuaaaucagaauauggccugg

SEQ ID NO: 4192563 - RNA, 112 nt, Human
cuaggcccaugaaauagaugagcauuuaaugagcauauugaaucaacuugugggugugcgucucuuugcagcaagcugugauuuaugugaauuuugaagccaugggcaaaag

SEQ ID NO: 4192564 - RNA, 55 nt, Human
cuaggcuagaaggaagacuggaauccauucacaacuccuuccugacuagcucugg

SEQ ID NO: 4192565 - RNA, 113 nt, Human
cuaggcuggccuuucccacuuguuugagggucagcuuccuggcaguggguuuagaauggcacugcuggguggacuuggcucucacccaugugaucacucauccuccagccuag

SEQ ID NO: 4192566 - RNA, 86 nt, Human
cuaggcugguccuagcccagcaaagggguuugagagugaccaguaggauucucuagcuuuucuuucugggcaaugaccuggcucag

SEQ ID NO: 4192567 - RNA, 99 nt, Human
cuaggcuggugccuuccccuuggggccagggcugugcgugggggacaaggccgcugcucucccuagggccgcuggcuaagaaggaaauaccugaccugg

SEQ ID NO: 4192568 - RNA, 65 nt, Human
cuagggaaggacaaccucuuccaaagacuuuguuugcuuugugugauuggcauguccuucccugg

SEQ ID NO: 4192569 - RNA, 130 nt, Human
cuagggagaauuacgauauccuacccagggagaauuaaagugucuuacccagggagaauuacggaguccuacccagggagaguuacugcgguauccuacccagggagaauuacuaugguguccuuccuag

SEQ ID NO: 4192570 - RNA, 121 nt, Human
cuagggcacugucaaagcugggggcccuuggucuaacagaggggugccuucaggacucuccccuccugcaagagcugccugaagccaucccucagauggccacccacacccagagccccag

SEQ ID NO: 4192571 - RNA, 70 nt, Human
cuagggccauggcauugcauaacggggcucugaaagacauggcugccaaggugcugucauguguaccuag

SEQ ID NO: 4192572 - RNA, 55 nt, Human
cuagggugugcagauuuugccuauagaguguacaggcaagcucacaugacucuag

SEQ ID NO: 4192573 - RNA, 76 nt, Human
cuaggguucuauuucuuaaucuuggcuggaaccaaagaaguuguuaucugccgucugaucaagagagaacccauag

SEQ ID NO: 4192574 - RNA, 62 nt, Human
cuaggucaucucagcagugaccuuuuauuccuauuggacuagaauccucugagauggaauag

SEQ ID NO: 4192575 - RNA, 81 nt, Human
cuaggucuguggugaggauucagcagggcuguggaaguagagcucucccagugucuggcagucagcauaucauagaucuag

SEQ ID NO: 4192576 - RNA, 76 nt, Human
cuaggugguaggcugucucuugauucagaaagauuucuguuggacauauucugagagagggucagaugcuauggag

SEQ ID NO: 4192577 - RNA, 70 nt, Human
cuagguuauaaauugacacacuggcaucaaugcaguccuaggaugccagugugccaauuuacagcugaag

SEQ ID NO: 4192578 - RNA, 56 nt, Human
cuagguucuacuaguaagugucccagcugggagcucuauuacuuuguauagccuag

SEQ ID NO: 4192579 - RNA, 56 nt, Human
cuaguaaagcuaugauucugccuuuaacaaaaaaugugaaauuguugcuuuacuag

SEQ ID NO: 4192580 - RNA, 68 nt, Human
cuaguccuggaccgagacagggugggcucgggccacacaugagaccucccguauauguccugggcuag

SEQ ID NO: 4192581 - RNA, 66 nt, Human
cuagugguaauucugugagauggugcagauguaggauauuuccaccggcucaggaaguucuauugg

SEQ ID NO: 4192582 - RNA, 99 nt, Human
cuagugguuucuugugucuaugugcccucuuagagucucugguucagaaucacaucuuacagugggcuuucagagugcucaucuuacagagauaacugg

SEQ ID NO: 4192583 - RNA, 69 nt, Human
cuaguguucggucuuguguaaacacuguuacagcggauguuacaguguguccuaaaggucuggacuuag

SEQ ID NO: 4192584 - RNA, 55 nt, Human
cuaguuaaggagucacuuggacucacuuuugagucuuggcuguaccauugacuag

SEQ ID NO: 4192585 - RNA, 66 nt, Human
cuaguuacaauuaugcauggaaaagcagcuaggugaagcuuuucuucuugugucuauuguaauuag

SEQ ID NO: 4192586 - RNA, 77 nt, Human
cuccuggcgucuguacaucccgagagccaguaucuuccaagcugagguuugucuugggaugugacagcagucaggag

SEQ ID NO: 4192587 - RNA, 65 nt, Human
cuccuggcucgcccccagcugaggauugcugcacagagaaauagucacuggacgugagccagggg

SEQ ID NO: 4192588 - RNA, 57 nt, Human
cuccugggcuaugucugcuuggacucaccauugcauccccagcagcuggcacaggag

SEQ ID NO: 4192589 - RNA, 59 nt, Human
cuccugggcuggggagggcacgcugcagccugcacuuugucuccagaaagcaccaggag

SEQ ID NO: 4192590 - RNA, 67 nt, Human
cuccuggggugcugaugaagauguagccuuccuuugaagcuagucauucagaucagcucuacagggg

SEQ ID NO: 4192591 - RNA, 87 nt, Human
cuccugggucccacugcuugccucccucagcucacagcugguauuacuagcucuguguggacagggaggcugcagagggacggggag

SEQ ID NO: 4192592 - RNA, 59 nt, Human
cuccugugugcaggcacugugccagauagaaauuugucagugccaaaaugcaugaagag

SEQ ID NO: 4192593 - RNA, 100 nt, Human
cuccuuagauccccggagcucaggacuggaggagcggggcuuguuuucaccuugaccgacccucucccgccuccggcuucuugugcgagggaccugggag

SEQ ID NO: 4192594 - RNA, 61 nt, Human
cuccuuagcauccaagcugguguuccaaacagaaagauccaaggcuuggcugcagagagag

SEQ ID NO: 4192595 - RNA, 67 nt, Human
cuccuuaggggcuaucaggaaauguauuuuuugcuguuuugaaagacauuuugauaccccuaccgag

SEQ ID NO: 4192596 - RNA, 70 nt, Human
cuccuuccaacaagagaaagagcccuuccccuugaaucuggcuuguccuguuacuuguuuggaucaggag

SEQ ID NO: 4192597 - RNA, 56 nt, Human
cuccuuccaccccacugaaguggacaccugccucuggagcccagggugagaaggag

SEQ ID NO: 4192598 - RNA, 80 nt, Human
cuccuucccgccugcauccuucccauuuaaaccagggcuucuuggcuuggauguggagggugaugggacugggaaguggg

SEQ ID NO: 4192599 - RNA, 68 nt, Human
cugaguacuuugaugcuguuguaugugugagaccaucucauaagcaaauaaugcaucaaggguuuugg

SEQ ID NO: 4192600 - RNA, 58 nt, Human
cugaguagcgcaguggguuacagauggccauauagcgaucauagcccauggcugccag

SEQ ID NO: 4192601 - RNA, 130 nt, Human
cugaguaguugggauuacaggcucccgccaccaugccuggcuaauuuuugguauuuuuaguagagacgggguuucaccaucuuggccaggcuggucuuguacuccugacccugugauccacccaccucag

SEQ ID NO: 4192602 - RNA, 64 nt, Human
cugagucacaguagaucaucacuuauuauuguucccacuuuagagaugaggaacugaggcucag

SEQ ID NO: 4192603 - RNA, 71 nt, Human
cugaguccuugggcuuagagugagcaugagaaugacccuuaggcccugcuuucagaccccagagggcucag

SEQ ID NO: 4192604 - RNA, 59 nt, Human
cugagucgaguccugcuugguugggaauuuauuucuaaacacuacgggauuugggucag

SEQ ID NO: 4192605 - RNA, 60 nt, Human
cugagucuucucuucuucuagaggccuaggcugcugguccaguaaggguggagagaccag

SEQ ID NO: 4192606 - RNA, 57 nt, Human
cugagugauagcgauggggaaccauugaaggauuuccaucacaagcuaaucaauuag

SEQ ID NO: 4192607 - RNA, 77 nt, Human
cugagugcaccuucaucaccaucaagccagacagugugcagcauggccuggcuggcaagaucgugaagugcuuugag

SEQ ID NO: 4192608 - RNA, 55 nt, Human
cugagugcuuugucuuguaauucuucagcugaaaacuacaacgccaggcacugag

SEQ ID NO: 4192609 - RNA, 70 nt, Human
cugaguguuuucagccacggccuugauaccuguacaaaggagauaauacccguaucuggaaacuacuuag

SEQ ID NO: 4192610 - RNA, 67 nt, Human
cugaguucaaauucuggcuucuuguuagcuguguaccacugaacacauuacuuagccagagucucag

SEQ ID NO: 4192611 - RNA, 81 nt, Human
cugaguuucuuuccccuuugucuuccuguggguuuggcuaaugagaggcccugagaagaagucggagggcaagagaagcag

SEQ ID NO: 4192612 - RNA, 83 nt, Human
cugauaauaguuaugugagguagauaggaugcagaauaaauuuuccguuuguaaccacgucucccucauuuuaauauuucuag

SEQ ID NO: 4192613 - RNA, 82 nt, Human
cugauaaucuuggaauaccccgaaggucauuucaucuaauuuuucaaacuguaaaugacuuggcuaauuuuaggauuauugg

SEQ ID NO: 4192614 - RNA, 70 nt, Human
cugauaauuuugcuuuuugguucuuuuuuguuccuucagugaaauggcagcccagagguaagguagucag

SEQ ID NO: 4192615 - RNA, 58 nt, Human
cugauagccuucucugauucuccuagugaaaaaucacaggcauuuggaagguaaucag

SEQ ID NO: 4192616 - RNA, 81 nt, Human
cugauaguguguguucaaggauuauacaggaucgagucuccuuaggagaugauguccaugacugugacucacauggaucag

SEQ ID NO: 4192617 - RNA, 55 nt, Human
cugauaugacaaagugccuugccaccaauacccagccaggcacugucccaugcag

SEQ ID NO: 4192618 - RNA, 58 nt, Human
cugaucacuuucucucaccacgugggucauuugugguggcaaaguacaaagugaccag

SEQ ID NO: 4192619 - RNA, 79 nt, Human
cugaucaugcugggcagauuaaugcaguggcuguuguuuauugacuggucaguguuucaucugugaaagucaagauuag

SEQ ID NO: 4192620 - RNA, 67 nt, Human
cugauccuaguuugcuccaccguaucaaucuucagugucauugauuacaguggguaaacagaauuag

SEQ ID NO: 4192621 - RNA, 97 nt, Human
cugaugagaaucugaggucaggaagaugaguagcauggagggcugauaugagcacuaggggugggcugugucuguuuuacgucaagauuaacaugag

SEQ ID NO: 4192622 - RNA, 56 nt, Human
cugaugcacugucuucccagaguuaacugaugugcagugugaauccaguguuucag

SEQ ID NO: 4192623 - RNA, 65 nt, Human
cugaugcagcuucaggauuaugaugcagaaauuuucugcuguggcuccauagaaguugcaaucag

SEQ ID NO: 4192624 - RNA, 58 nt, Human
cugaugcuuuacgacaaaaaacucagcaagcucaguucuuuggucguaaagcuacuag

SEQ ID NO: 4192625 - RNA, 116 nt, Human
cugauggaagugacgcuccucacauccagcuccagcuucugcaccaaggcgcuggggucuaucuugguccuggcaaagauguugguguugaugaacggagguauaauucuuauuag

SEQ ID NO: 4192626 - RNA, 69 nt, Human
cugauggccaggguggcacuguggucggcaugugucagcaacaucagagucacuacucguggcccucag

SEQ ID NO: 4192627 - RNA, 100 nt, Human
cugauguaaugaggccuccccucuauccuuaucugucugguagagucauucugggcugacugggcaccaucaugagaugggcaggaggucucaucauugg

SEQ ID NO: 4192628 - RNA, 68 nt, Human
cugauuacaacagagucauccauggauucaaacuaguccucuuuccagggaugacuguguuuaaaagg

SEQ ID NO: 4192629 - RNA, 66 nt, Human
cugauuacaguagacaauguuaguaugcacagcuugcucugcuacaugauauaggucucugcacag

SEQ ID NO: 4192630 - RNA, 61 nt, Human
cugauuacuuuuugucucuuugaaugugccuauucuggacauuucauauaaaagggaucag

SEQ ID NO: 4192631 - RNA, 56 nt, Human
cugauuaggcuaagcaagagggugcacguggucauuugaaggcuuugucuaaacag

SEQ ID NO: 4192632 - RNA, 60 nt, Human
cugauucgcuaucauuccagcucaugucagagccgccuggaaucuucgauauugauucag

SEQ ID NO: 4192633 - RNA, 83 nt, Human
cugauucgugaaucauucauugcucaauuaaguuccuuuaaauuuaauucagcugaagauuuucuuuuaauagauggugucag

SEQ ID NO: 4192634 - RNA, 56 nt, Human
cugauucuuucuucuugccaggggcaccccucugaugcagggagugaauggaucag

SEQ ID NO: 4192635 - RNA, 91 nt, Human
cugauucuuugcugagauuggaagcuagauuggcauucauuucuuaagcuggaaaccugugcugauuuguuagaaaugcugcaaggaacag

SEQ ID NO: 4192636 - RNA, 85 nt, Human
cugauugggggggaauuguaugaggauagcaagaagcuucaaauaauuaugccagccugcugaaccucaugcagucucugauugg

SEQ ID NO: 4192637 - RNA, 125 nt, Human
cugauuguaugaauuuuaauuguucaguuaacguguuucuagguuguaauuuguaguaaagcacuucaaugcuuuugcacuuaaauuuacaacacuguuggugugugauugauuuacucauucag

SEQ ID NO: 4192638 - RNA, 80 nt, Human
cugauugucagggcuggagcuuccaggcacaagcuccacuccucaccuggcccugggagcucacaggccuggcuccacag

SEQ ID NO: 4192639 - RNA, 58 nt, Human
cugauugugcagagguguaauugaaauguuuuguucaauguuacacagguauaaucag

SEQ ID NO: 4192640 - RNA, 99 nt, Human
cugauuuagaacugaaugcggaugguuuagaacuagaugcaggugguuuaauacuagaugcagcugguuuagaacuagaugaagguaguuuagaaguag

SEQ ID NO: 4192641 - RNA, 65 nt, Human
cuaguucagugguggauuaugucaauuaauuaaauuagacaucauaugauucagcauuguguugg

SEQ ID NO: 4192642 - RNA, 70 nt, Human
cuaguuccugauaugaugggugauuuucaauuguaucuugaaaauguuucuauuauaucaugagacucug

SEQ ID NO: 4192643 - RNA, 56 nt, Human
cuaguucuagaucccugaggaaucgcccacacugacuuccacagugguugaacuag

SEQ ID NO: 4192644 - RNA, 55 nt, Human
cuaguucuagaucccugaggaaucuccacacugacuuccacagugguugaacuag

SEQ ID NO: 4192645 - RNA, 64 nt, Human
cuaguugcugccacugggagcaaaugugcuuagucauugugcaccaccuuguggcagcguuuag

SEQ ID NO: 4192646 - RNA, 87 nt, Human
cuaguuucacaucccaggcauucugugaggcacuggggauagugaccguccucaggaaggcuucacacgagugcugucagaaacaag

SEQ ID NO: 4192647 - RNA, 123 nt, Human
cuauaaaaauucuucuguauauuugauugaaagugaagaaauaccuugcuugaaguaguuguucugaauauuuugaaguguuauuucuaucacuuuaaaauugaauuuauuguaucuuuauag

SEQ ID NO: 4192648 - RNA, 105 nt, Human
cuauaaaagucuuaaaaguauucuacucuaaauuccucccuuugcacaagagggagcugaaguagggguaaauagaaugcugucacaaagauacacauuuaauag

SEQ ID NO: 4192649 - RNA, 94 nt, Human
cuauaacaaguuaggcauauucugaauccucgaaacauagcaguuaaacuuugcugacuaaauuccuguucgcgaugagcuuaauuucuugugg

SEQ ID NO: 4192650 - RNA, 56 nt, Human
cuauacagagcauccuuaacuuuucucaagguuaggcucugaaguguucugugugg

SEQ ID NO: 4192651 - RNA, 56 nt, Human
cuauacauuuuaacuccuuuuaggcgucucagugagaaggcaucagaaguguguag

SEQ ID NO: 4192652 - RNA, 59 nt, Human
cuauagaugucauuuuacauccacugcauggugggcacugaauuucuuggcaucuuugg

SEQ ID NO: 4192653 - RNA, 73 nt, Human
cuauaggaggcaaguacuguuuuuaucuccauuuuagagauaaacugaggcaguauuuuagugacuuagguag

SEQ ID NO: 4192654 - RNA, 64 nt, Human
cuauagucuuaacuauucaggaggcugagguggaucacuugagccuuggagguugaggcugcag

SEQ ID NO: 4192655 - RNA, 78 nt, Human
cuauauaugcauuuuguaagauaugaguacauguaagugggucuguauauguguauauuuuaaaaaguguuccuuuag

SEQ ID NO: 4192656 - RNA, 69 nt, Human
cuauauuauguguuguugugaagauuaaaugaguuaacauaaagcacuuuagaacaauauuugguauag

SEQ ID NO: 4192657 - RNA, 74 nt, Human
cuauauuucauuuacauuguugagccucuuguucagccuacuaaugugguuggugcuuaacaaauguuguaugg

SEQ ID NO: 4192658 - RNA, 58 nt, Human
cuaucaaaaggaguugaaaggggcuuccuuagacccugaccaccagcuccauuuguag

SEQ ID NO: 4192659 - RNA, 73 nt, Human
cuaucaauacauguuaucaguguucucuggggguauuaaguuccagucacccauaguguaacuugauugauag

SEQ ID NO: 4192660 - RNA, 82 nt, Human
cuaucagggcaguaaagauuucagaagccugugccaugucagugacugggaggcauuuuggaacuuucuggcagcccuguag

SEQ ID NO: 4192661 - RNA, 56 nt, Human
cuaucaucauagugauugggaggguggauuuuuccccagaguauuugugauguuag

SEQ ID NO: 4192662 - RNA, 75 nt, Human
cuaucaugaucuccagaacauuuauaaacgaugaaaccuuaucucuugcaauaguuucugguaggaauaugauag

SEQ ID NO: 4192663 - RNA, 73 nt, Human
cuauccuauuauugacccuuucauuauucucauugccaugguguagaaaagggaaggguuucugcaggagugg

SEQ ID NO: 4192664 - RNA, 67 nt, Human
cuaucgacauucucugauuggugccucccugaacucacggacaaaaaucaggguaaugaugagguag

SEQ ID NO: 4192665 - RNA, 74 nt, Human
cuaucguaaugcacauauauuuccuuauucugccauaauaaguagaaucaacaggaugugcauuguaaagguag

SEQ ID NO: 4192666 - RNA, 55 nt, Human
cuaucucgugauagguuuuaugugguuacuugaccaaaaagacaaaacgaguugg

SEQ ID NO: 4192667 - RNA, 101 nt, Human
cuaucucugccacuucuuauuuguggcauaugagacgagucucuuaauaccucugagccucaguuuccucaucuacaaaagagaaaugguaccagugauag

SEQ ID NO: 4192668 - RNA, 91 nt, Human
cuaucugaggguguaaauuauaggugccaccuuggagguuggugaucacaguccaucuuuuggguucuuaugauuuauaucccuuccauag

SEQ ID NO: 4192669 - RNA, 62 nt, Human
cuaucuggaagucagagguuugcaguccauuucugaauugcuaaagcuauauucccagaaag

SEQ ID NO: 4192670 - RNA, 93 nt, Human
cuaugaaacauggaauuucagugguuugaugauguauaucacuuuuuuugaaggcuuauguauuucaaacuuacugcauuuuuuaggguauag

SEQ ID NO: 4192671 - RNA, 117 nt, Human
cuaugacacugucucuucuucuuaaccaggauuuaagauucuagagggcugagaugguuucuuacaaauucuugaguuuucaaucauugugugcaguacaaggcauggaugucauag

SEQ ID NO: 4192672 - RNA, 130 nt, Human
cuaugacaucagaauauuucagaauaagucuucaguuuagaaccaggguuacgauucuuuuuaaagaggauuacuuuauauguauuucuguguugcuuugaaggaucccugaguaauuucuaugcaugug

SEQ ID NO: 4192673 - RNA, 79 nt, Human
cugacucugggagggagggacuagcauucucuuuaguuuacagagaggugaagucaccuuccuauggucacacaguuag

SEQ ID NO: 4192674 - RNA, 59 nt, Human
cugacugcuuuuuuaagaguauacugugggguagcggcagauacaagagagcaguugag

SEQ ID NO: 4192675 - RNA, 55 nt, Human
cugacuggcauaaagcaaccacuauuuuacugugcuugcaaauaucgugggucag

SEQ ID NO: 4192676 - RNA, 71 nt, Human
cugacugucccuggagauuuuuuaguggcgcagaggucauuugacaacuucugguggcauccaagugucag

SEQ ID NO: 4192677 - RNA, 104 nt, Human
cugacuugacagccuggccguuccucagggccagggaucagucgaggccaaaguaucacuugauccuucccugaaaugccucugccaaucuguagccacaucag

SEQ ID NO: 4192678 - RNA, 62 nt, Human
cugacuuggagauacagaggacauuuggauucuguacuaagguccaugaauaucuaagccag

SEQ ID NO: 4192679 - RNA, 68 nt, Human
cugacuuggcugcauaaaacagacccuuauaauaccaggucacauguauaugcagcacagcuugucag

SEQ ID NO: 4192680 - RNA, 55 nt, Human
cugacuugguucauauccugggguccguaaacccacacugauagcacuaagucag

SEQ ID NO: 4192681 - RNA, 69 nt, Human
cugacuuguuaacucucaaagaacaugacucuuuguguuuagcauguuuucugaugguuaaugagucag

SEQ ID NO: 4192682 - RNA, 69 nt, Human
cugacuuuuccaaauaauacuuccucugacaacacuuucaaagugguaagauagcuuggaaaaguacag

SEQ ID NO: 4192683 - RNA, 77 nt, Human
cugagaaaugcaaacagccuugaaagagggacacaccuaaggcagugauucucaaagggugguuugcaaacuuuuag

SEQ ID NO: 4192684 - RNA, 57 nt, Human
cugagaagcacugucugcaagaaaccuaaucugggcaugggacagcugccuucucag

SEQ ID NO: 4192685 - RNA, 58 nt, Human
cugagaagccuguucuuaagcccaguccaaggcuggccucuggagaagggcuuuccag

SEQ ID NO: 4192686 - RNA, 57 nt, Human
cugagagacuguuuguaauauuuagguguuaaucaacaacaaacaguguucuuucag

SEQ ID NO: 4192687 - RNA, 95 nt, Human
cugagagcagagguggucggggaagcccggccugcacaugggggcccucaggagccuuccaggugcuggccuggccucugaagcuugugguccag

SEQ ID NO: 4192688 - RNA, 75 nt, Human
cugagaggcccugaagcccacagagagaggccaagauacucucacugacucuggguggcuucagaggccacugag

SEQ ID NO: 4192689 - RNA, 67 nt, Human
cugagaggggaccaggguguuucuuggcagucccuccuggacccugccugcccuugucugcccucgg

SEQ ID NO: 4192690 - RNA, 111 nt, Human
cugagaguauaaggcacucacuaguagagcacauguggagagucugggcccaguccuugcucugggaucugccucauucucgcguguguuucugucaacccucucucuuag

SEQ ID NO: 4192691 - RNA, 87 nt, Human
cugagaucagcauccucacugaggucagcccuuccuaugauccugcacaaggaacaagguggggcuguuucagagaguuccucucag

SEQ ID NO: 4192692 - RNA, 85 nt, Human
cugagaugauagagcuggauuuuaucauuguaguuuaugccaaugcuuaaacaccauguaaaaagucuuaaccucauucuuccag

SEQ ID NO: 4192693 - RNA, 79 nt, Human
cugagaugucugagacucagccccugcucucaaggagcucagaguccauugggagaaauaguugauccgcagcauccag

SEQ ID NO: 4192694 - RNA, 58 nt, Human
cugagauuugguuuuguucacugaugcauccucugugucuacaacaaugccaauccag

SEQ ID NO: 4192695 - RNA, 90 nt, Human
cugagcagcaugcaugauguuggcaguggcaauagagggggcaagccaacccuugagcucccuggcagcaaucacugguguuagcugcag

SEQ ID NO: 4192696 - RNA, 64 nt, Human
cugagcaguccagaaagggcagugauuugaauguugggaacacauuuuccuuuguggagcucag

SEQ ID NO: 4192697 - RNA, 72 nt, Human
cugagccagggcucaggaaaucagacguacucauuugaaugauucagcguuuggaccugagucaaaugccag

SEQ ID NO: 4192698 - RNA, 69 nt, Human
cugagccccaggcuuuuccguaaacagcaggagugggaccucuucuucaggaagagccuggacucucag

SEQ ID NO: 4192699 - RNA, 63 nt, Human
cugagccccugcaccccugcccacccagguggaggaauguggcaggggcugcugggaacucgg

SEQ ID NO: 4192700 - RNA, 64 nt, Human
cugagccuguugucagcccuggagcggcugcuccgucaggcagcucaggcuggcagcaggcuag

SEQ ID NO: 4192701 - RNA, 65 nt, Human
cugagcugagcugggcugagcugggcugggcuaggcugggcugagcugggcugggcugagcugag

SEQ ID NO: 4192702 - RNA, 56 nt, Human
cugagcugugucuuggugagagucuucagcuuacuccacauuugaacacaguucag

SEQ ID NO: 4192703 - RNA, 98 nt, Human
cugagcuuaguauguaagauggcaauaguaccaaguguaagucaaggaaccuaugcuccaaagacauguugccacuuuucuuucuauccuaggucaag

SEQ ID NO: 4192704 - RNA, 86 nt, Human
cugagcuuccuagcaagucucugauguguguuagguguuacuguuaccauuucauggaugagcagacuguggcuggaggagaccag

SEQ ID NO: 4192705 - RNA, 83 nt, Human
cugaggaagcauggcagggcacagcucuaguugacagauguuuuagguacaaauagaaguugggccauugcuggcuguaucag

SEQ ID NO: 4192706 - RNA, 82 nt, Human
cugaggacucaaguuaacugcuuugugagcuuucuggaggcagaaccuccaagcccauccaaauuagaugauguauccucag

SEQ ID NO: 4192707 - RNA, 56 nt, Human
cugaggagggaaguccccaaagcacacacgcaguaaguugggcuuucccccuuuag

SEQ ID NO: 4192708 - RNA, 58 nt, Human
cugaggagggagauaggucaggggcccccucaggucaccacuuucuccuucuccuugg

SEQ ID NO: 4192709 - RNA, 61 nt, Human
cugaggaggggccugagugagaccugcaggugagguucuuugagacaaagggcucucucag

SEQ ID NO: 4192710 - RNA, 61 nt, Human
cugaggaguuggugaauaagccccagccauucggaugggcaggcuuuccacgggcucccag

SEQ ID NO: 4192711 - RNA, 58 nt, Human
cugaggcaagggauggccccgugcaggcuccugccaggacugccagauccugccuugg

SEQ ID NO: 4192712 - RNA, 104 nt, Human
cugaggcaggagaauugcuugaaaucaggaggcggagguugcagugagcugagaucaugccauugcacuccagcucugggcgacagggcaagacucagucucgg

SEQ ID NO: 4192713 - RNA, 103 nt, Human
cugaggcaggaggaucgcuugaacccgggaggcuaagguugcagugagcccauauggcgucacugcacuccagccugggcgacggagcgaaacccugucucag

SEQ ID NO: 4192714 - RNA, 69 nt, Human
cugaggccaugcaucuauucccaagggcagacacaaagguuugagcucucugaauagaucagccagcag

SEQ ID NO: 4192715 - RNA, 70 nt, Human
cugaggcccagccuggucuuggggggcgcuggaggaacacagcugcucuccccaggccagucugacccag

SEQ ID NO: 4192716 - RNA, 60 nt, Human
cugaggcuccagcgacaccuaggcccccaggagguuagggggccaggccuggaccugcag

SEQ ID NO: 4192717 - RNA, 85 nt, Human
cugaggcuggagaagggaggcgagucuuagugaguucccuuuaagcucugagacaacagaggccgccucucucacggccuuccag

SEQ ID NO: 4192718 - RNA, 61 nt, Human
cugaggcuggagugcaguggugugaucucagcucacugcaaccacugccuccaagguucag

SEQ ID NO: 4192719 - RNA, 79 nt, Human
cugaggcuggaguucaguggcaugaucuuggcucacugcaaccuccagcucccagguucaagcgauucuccugccucag

SEQ ID NO: 4192720 - RNA, 80 nt, Human
cugaggcuucagcccugccucuccaaugcccacagcuuccugcuggcacuggaguugggguggaggggaggaagccccag

SEQ ID NO: 4192721 - RNA, 59 nt, Human
cugagggaauucacuggaacgcccugucucugacaguacgauuucuugaguuucuugag

SEQ ID NO: 4192722 - RNA, 66 nt, Human
cugagggagagaaguuauacaagauuuuaucaauuuccaguggcaucaugugcuucucucgcucag

SEQ ID NO: 4192723 - RNA, 76 nt, Human
cugagggaugggauaauguuauuuucuugucaguggucacaagcuauauggcauuacauuguuaaaucucccccag

SEQ ID NO: 4192724 - RNA, 78 nt, Human
cuguaccccuuguucuacuccaagugcaagaaaaaucuaagcuuuuuacccacaugaguguaggaagagggaagacag

SEQ ID NO: 4192725 - RNA, 99 nt, Human
cuguacuauuauuucucauggagcaagaacucauuuucacuuuucuuagugccuaagacuaguugaaugguuuucuguugccauaguaacacuacucag

SEQ ID NO: 4192726 - RNA, 68 nt, Human
cuguagcagacucuguggccucuccaacagccuagauccugagggguggccaaggacucugaccacag

SEQ ID NO: 4192727 - RNA, 63 nt, Human
cuguagcuacacaucuaaacagcaacucguuaggguuuaagguaacacagaugugugcagcag

SEQ ID NO: 4192728 - RNA, 81 nt, Human
cuguagcuuuuugguguauguguauuugugugugugcaugcauauguguacaugcuuugcacuuacaucaugagcagacag

SEQ ID NO: 4192729 - RNA, 65 nt, Human
cuguaggagugggaauuuauugagcaugagggaugcuaucuugugaaacuuucuacuucauucgg

SEQ ID NO: 4192730 - RNA, 83 nt, Human
cuguaggauacacuuaaucuuacugaggaucaaauuaagaaauguuauuuguucuaacagcauggauuaggucgguucaacag

SEQ ID NO: 4192731 - RNA, 58 nt, Human
cuguaggauccuggcccaaagcucugcauaucuuggagagucugaggaggaccaacag

SEQ ID NO: 4192732 - RNA, 72 nt, Human
cuguaggcccugccucugccuuugcugggaagaagcacacacuccugcccugcaugcagggagcugucacag

SEQ ID NO: 4192733 - RNA, 92 nt, Human
cuguaggcucuucuccagguccagguuccguuucugcgggucgcucugccugagcugcgggcucugcggccucaaggacuggacgcccacag

SEQ ID NO: 4192734 - RNA, 69 nt, Human
cuguagggcugagagaaggccugggggucuccuugcagugcccuguucauuucucucccuccugugcag

SEQ ID NO: 4192735 - RNA, 86 nt, Human
cuguaggucggaaaucugaguguggccuuacuagguucucuggcucagggucucucccaagggcacauucaaggggccaucuacag

SEQ ID NO: 4192736 - RNA, 64 nt, Human
cuguaggugauugcuauguuaugugcugcuucagugcacuucaguuccugguagucacuuagag

SEQ ID NO: 4192737 - RNA, 68 nt, Human
cuguagucccagcuacucaggaggcugaguugguaggaucauuugagccagagagguugaggcuauag

SEQ ID NO: 4192738 - RNA, 59 nt, Human
cuguagucuagguauuguccuccucgugagguggacacagguaaauaccacugauacag

SEQ ID NO: 4192739 - RNA, 62 nt, Human
cuguagugcuggucuguccaggggcuuuucuuuucucuaauucaaccagacacuuauaacag

SEQ ID NO: 4192740 - RNA, 87 nt, Human
cuguaguucagauuucaaaggcuuugcuaugaugcauuggauuuaucuuguguaagcacagcuuagaaauuaucuuggaacuugcgg

SEQ ID NO: 4192741 - RNA, 55 nt, Human
cuguaguugggcauuauaauaguauuauuagauaauuuuagagugccaauuauag

SEQ ID NO: 4192742 - RNA, 57 nt, Human
cuguauccauuaguaauccugcagguucuuaaagggacacugcauugauggaaacag

SEQ ID NO: 4192743 - RNA, 73 nt, Human
cuguaugguuuauaggacagcucuguaguuuuucacuugauucucccaacagggcugucuauauuuuuuguag

SEQ ID NO: 4192744 - RNA, 58 nt, Human
cuguauguguuuuguaugagugugauuuacaugugugcucauacacaugagcaugcag

SEQ ID NO: 4192745 - RNA, 91 nt, Human
cuguauguuccucuggugugcugcuucauuuauaugcuuuccuauucuuuuuaugagggcugugaaggagcggguuagcauuugacaacag

SEQ ID NO: 4192746 - RNA, 74 nt, Human
cuguauuaaaugccuaucucauagagaugucauuauguugaaaugauacaaucaugagagaggacauugcauag

SEQ ID NO: 4192747 - RNA, 62 nt, Human
cuguauugauaaggauggcugcaauuaucgccuuaacuagccaugguccccgucaaggacag

SEQ ID NO: 4192748 - RNA, 73 nt, Human
cuguauugcauuugacaaauuauuuaaccucucugguuaugagagguuaaauauuauguugucugcaaaauag

SEQ ID NO: 4192749 - RNA, 82 nt, Human
cugugccuuugaaauaucaaguuauuagugaccaacaaauaaaguaggauacucagacuugaaucucaagagaaagguagag

SEQ ID NO: 4192750 - RNA, 72 nt, Human
cugugcgaugcuguaggagugugguaaacaucucauaaaucuucauggcacugcucgcugcagcauggccag

SEQ ID NO: 4192751 - RNA, 78 nt, Human
cugugcucagccaugucaugccuaccuguauugucccaguggcacugcgagaggagccagggcgucggcucggcacag

SEQ ID NO: 4192752 - RNA, 62 nt, Human
cugugcuccucacaguguggcccugcgacugacacggagcccagggcagcuugaggagccgg

SEQ ID NO: 4192753 - RNA, 71 nt, Human
cugugcugggcucuggaguucuagaaagaagaggaaucccucucucugggaauucacaagcccucuaauag

SEQ ID NO: 4192754 - RNA, 71 nt, Human
cugugcuuaaagaacauacucugaauaacauaaauccuuuuaagcuuauugagagcuguuuuauggcacag

SEQ ID NO: 4192755 - RNA, 72 nt, Human
cugugcuucucaaaaggagguagguggaccauuuucaucagauucaccugaagggcuuauuaagaaguacag

SEQ ID NO: 4192756 - RNA, 96 nt, Human
cugugcuuuauuuucauuaucaaguuuacuguguggaugaauaaagcaagacaagcaauugugucucuauuuaccagugaggaaaaugaggcucag

SEQ ID NO: 4192757 - RNA, 57 nt, Human
cuguggaaaauuggaacguuccuggcccugcuagaaggggcaacuaauucuccagag

SEQ ID NO: 4192758 - RNA, 67 nt, Human
cuguggaugggauuggccuuucacgaugcuuauaaaggaaggacuuccaaaccucccaaaucuacag

SEQ ID NO: 4192759 - RNA, 116 nt, Human
cuguggccagaaucucugagaucucuuucagcccaaugacacucugcacagugcuuguuaaacguucuugaaccuggcacacauggugguuggugaagaguccuugaggaccacag

SEQ ID NO: 4192760 - RNA, 64 nt, Human
cuguggccccucaugucagucccugcccagugcuuguucacuggugaggaagugagggccagag

SEQ ID NO: 4192761 - RNA, 57 nt, Human
cuguggcccuguggcuucagaacagagccccaccgugcugucagccuagggccagag

SEQ ID NO: 4192762 - RNA, 72 nt, Human
cuguggcuauguggcugugggaauggccuggagguagguaguggccagcacacaaggccuuguagaccacgg

SEQ ID NO: 4192763 - RNA, 65 nt, Human
cuguggcucaggccuguaagcccagcacuuugggaggcugaggcaggcggauugcuugagcccag

SEQ ID NO: 4192764 - RNA, 59 nt, Human
cuguggcucuuuaguugagcaccccgauucccuuguguucuccccuuuagggccuacgg

SEQ ID NO: 4192765 - RNA, 71 nt, Human
cuguggcugcuaagucuccuuccuucucuggaccucaggaaauaaagaggauggaaggaauggucccgcag

SEQ ID NO: 4192766 - RNA, 57 nt, Human
cuguggcuguccuaccugguagcccagcucacaugagacugacccaggacaccacgg

SEQ ID NO: 4192767 - RNA, 80 nt, Human
cuguggcuucaacugcaggacgaccgccucaucuugaggccucugggagguaggugcuguggucuccccgcuugacgcag

SEQ ID NO: 4192768 - RNA, 63 nt, Human
cuguggcuucuggccugcuacacccaugaacagagugggcuucugcagccaaagaagccgugg

SEQ ID NO: 4192769 - RNA, 56 nt, Human
cugugggagaaguugcuggaguccaaccccggaaguagcaagugccucucccacag

SEQ ID NO: 4192770 - RNA, 61 nt, Human
cugugggagcacuggggaccgagagacuuguguggacacauccccacgugcaggcccacag

SEQ ID NO: 4192771 - RNA, 88 nt, Human
cugugggauuuccuccugcagcccucagcagccaaaauguauauggagaggugggcagcuggcuugcugcaggaugcaggauuuccag

SEQ ID NO: 4192772 - RNA, 67 nt, Human
cuguggguguuaugacugcagacagaaacaaaagaaguauuuuguaauuggucauagcuuuucacag

SEQ ID NO: 4192773 - RNA, 62 nt, Human
cugugguaacccucugagugccucacccuuccuuuuccuaguaaacauaguggauaccacag

SEQ ID NO: 4192774 - RNA, 59 nt, Human
cuguggucagcuacuggucaucuaagcagcuacucuuuugcagauuggcugacugucag

SEQ ID NO: 4192775 - RNA, 93 nt, Human
cuguggucucauuuugcaaacuagaugaaacgaguaaagaucacuauugucuugucuccaucuucuucagccugguuaguaggaggaccacag

SEQ ID NO: 4192776 - RNA, 67 nt, Human
cuguggucugacaucaccugagaacuuguuacgacacagacucucaggucucaugccaggccuacag

SEQ ID NO: 4192777 - RNA, 95 nt, Human
cugugguggggagcugacaaagagguuuugagggcagcuacacugauagggaaacacucuugggcugaccucuaaccucucccaucccacuaugg

SEQ ID NO: 4192778 - RNA, 84 nt, Human
cugugguugccacuuauaggaaagaaaauuauguaggaaguucagagauucaccuacgccauuucuucccugaagaugccacag

SEQ ID NO: 4192779 - RNA, 72 nt, Human
cugugguuuuguauauauugaagacuccaauguacuggaggauuggaguauucaauauauacaaauguaugg

SEQ ID NO: 4192780 - RNA, 69 nt, Human
cuguguaaaggaggaaggggcugguuaaacaugauauuugaucugccucauucuuguucaaccuaacag

SEQ ID NO: 4192781 - RNA, 64 nt, Human
cuguguagaggagacagagcugcagcagcaggaacagcagcaugagaccuguagcuucacagag

SEQ ID NO: 4192782 - RNA, 56 nt, Human
cuguguagauucuccuucccuagggcaguccucaggagaacuuccuucuaccccag

SEQ ID NO: 4192783 - RNA, 66 nt, Human
cuguguccauuuaucauugucaugggcugaaacuuuccacuugugguaaugauuaaaaggauaaag

SEQ ID NO: 4192784 - RNA, 64 nt, Human
cugugucccugugcagaaaugucacauggaguccugucaugucacaugagagcgcagcacacag

SEQ ID NO: 4192785 - RNA, 92 nt, Human
cugugugacucaccauuugcucagacagacauuugagggucacgcuuuuccauuaagguuuguggggagcaaaagauggguagauaaaauag

SEQ ID NO: 4192786 - RNA, 59 nt, Human
cugugugagcaucaaagccugucaucacuuuuauuggcaggugccaugggcucagacag

SEQ ID NO: 4192787 - RNA, 75 nt, Human
cuccucaggugccaagaucugaauaauuaagaggagagaaaaccugugacuccucucaucugccauuugcaggag

SEQ ID NO: 4192788 - RNA, 61 nt, Human
cuccuccacccgcuggggcccaucgucuucauccgaguccuggcgcccugggcuggagggg

SEQ ID NO: 4192789 - RNA, 68 nt, Human
cuccucccaggccuaggcaguauaaaaaaagguguuaaggggcuguuaacaauagggcugggaaggag

SEQ ID NO: 4192790 - RNA, 56 nt, Human
cuccucccucuuugccacacauuuccuauggaaagacugucacggggaaggaggag

SEQ ID NO: 4192791 - RNA, 58 nt, Human
cuccuccucuugcacugucccaggggucccuccaacccaggccuugaugaguggggag

SEQ ID NO: 4192792 - RNA, 84 nt, Human
cuccucggcccggguuccagcgggugccaguggcuguuuugcaaagucucagggccacccggggaaaagaggaagcucggggag

SEQ ID NO: 4192793 - RNA, 68 nt, Human
cuccucuggcuguguucagcaucaacggccucaugaucaaacagcugcaguacacggccuauggggag

SEQ ID NO: 4192794 - RNA, 74 nt, Human
cuccucuggguccugguggccaucaauugugcugcccauggaugcaagcauuaccacccauggauccagaggag

SEQ ID NO: 4192795 - RNA, 68 nt, Human
cuccugaaggccugaguuccaccaggaaagugagcuggcacuggggugggaauccaggccuucaucag

SEQ ID NO: 4192796 - RNA, 59 nt, Human
cuccugaccugugauccucucacccuggccucccaaagugcugugauuacaggcaugag

SEQ ID NO: 4192797 - RNA, 60 nt, Human
cuccugaccuugugauccgccugccuuggccucccaaagugcugggauuacaggcuugag

SEQ ID NO: 4192798 - RNA, 56 nt, Human
cuccugauguggugccuuuugggaauuaacccucuccccuaggaacgcagcaggag

SEQ ID NO: 4192799 - RNA, 80 nt, Human
cuccugcgucagguuccauaggaauccuuuccccgccaguggaggaggcucucccgucuuuuggaaaugaugugcaggag

SEQ ID NO: 4192800 - RNA, 64 nt, Human
cuccugcuucucaacuggcacucugacacacccucagaaagucagaguacugggagaacagaag

SEQ ID NO: 4192801 - RNA, 75 nt, Human
cuccuggagagaggccuggaagaugggggggucauucagagaccccaguuguuggggggaccugcuuuccaggag

SEQ ID NO: 4192802 - RNA, 55 nt, Human
cuccuggagggccaaagaaauaagaaccacuggucuaggccuauuauuccaggag

SEQ ID NO: 4192803 - RNA, 66 nt, Human
cuccuggaugcacggucaugucuuuucauccugcuuguacuugaacuugacuguagacccuuggag

SEQ ID NO: 4192804 - RNA, 55 nt, Human
cuccuggcacugucuugacccacagccuucucugggaugaggacuaagccagaag

SEQ ID NO: 4192805 - RNA, 58 nt, Human
cuccuggcaggcugagugaaauaaaggacuuguuauuucaucucgaggccuaccggag

SEQ ID NO: 4192806 - RNA, 109 nt, Human
cuccugggcaaucugagcugcuguacgcccugcucuggucucugcccgccaggcgagcgccgugcgcgagaggagcaggcaggggaagcacgcaggcggcauguaggag

SEQ ID NO: 4192807 - RNA, 69 nt, Human
cuccugggggcuccuuggcaguggcaggcuggggacagugccuggcaggcuggggacagugccugggag

SEQ ID NO: 4192808 - RNA, 63 nt, Human
cuccugguauuugcuuuuuguggucugggaugucccagacucaacagggaacaagaucagaag

SEQ ID NO: 4192809 - RNA, 81 nt, Human
cuccugugcacaacccccagggcugccgcaucccugguagcaucuccuuggcagcugggugggcuggcccugggcaaggag

SEQ ID NO: 4192810 - RNA, 64 nt, Human
cuccuguggcuuucugauuucacaggcaccauagguugagugcaugaugaguagguuacaggag

SEQ ID NO: 4192811 - RNA, 66 nt, Human
cuccuuaaugucuuaaagucguguuacaagaacaucuugcaguucguaguucagacagcuagggag

SEQ ID NO: 4192812 - RNA, 68 nt, Human
cuccuuagagauauuaagaugcuauugguuuucaauaucugaaagccaaugaguuuuaauuccuagag

SEQ ID NO: 4192813 - RNA, 63 nt, Human
cuccuucagcagaugcaaaaccccucgguaaaacugcaggauuagcgucucuguuggcgggag

SEQ ID NO: 4192814 - RNA, 55 nt, Human
cuccuucaugucauguguccggggaugguaaaaaaucaucauacacaugagggag

SEQ ID NO: 4192815 - RNA, 64 nt, Human
cuccuucauguuugaggcuuauucaguuuucucagaaguugaguuuuuucaacauaugaagaag

SEQ ID NO: 4192816 - RNA, 71 nt, Human
cuccuucauucauucauuaauucauucagugacuguuauguaguaggugcugagcuuuaaaggagaaggag

SEQ ID NO: 4192817 - RNA, 129 nt, Human
cuccuucccaagagagagaaagcaacgccaucgcuugcuguccucaggccugcaggcuuccuggaaaacauccuucuaaagucaugucccugaagugguggaagauauugagccuaucucucggggcug

SEQ ID NO: 4192818 - RNA, 67 nt, Human
cuccuucucuucuguucugcagcucauucaaaagagcccauagaaacacagagagacccaugaggag

SEQ ID NO: 4192819 - RNA, 69 nt, Human
cuccuugcaggcagggacacugucucauuuauuuuauagaccccgugcccagugcuuggcauauaggag

SEQ ID NO: 4192820 - RNA, 57 nt, Human
cuccuuggagcccaggaguagcaaaagguuaauugcuaggguguugggcccaagcag

SEQ ID NO: 4192821 - RNA, 109 nt, Human
cuccuuggcuaaggcauugaaugaaaucugcuggguaaagaguggaaggauaagaagcugaggagcacucuuuaccuacuucaggcuucuuuaguaaccuuuagaggag

SEQ ID NO: 4192822 - RNA, 130 nt, Human
cuccuugguuaaauucagugaguaauuucugacuguauucacugccgggggauauauuucuuuagaguuaaauaucacuggcugugcauuuugauaugagaaaugcgggcugcaauuuauaaccgacaag

SEQ ID NO: 4192823 - RNA, 82 nt, Human
cuccuuuaaauagagguuaagauucuguaaugcuugucuggcacauagcaaguauauacuaaauguuaaucauuugagggag

SEQ ID NO: 4192824 - RNA, 88 nt, Human
cuccuuucccagcuucagcuccucccaaguguauaggaugccaaguaauugccccacacuggcaugggauggaggaguuuuaaaggag

SEQ ID NO: 4192825 - RNA, 125 nt, Human
cuccuuucugagaagugguugaauguuugggguacagggugcuagaaguucugaaguuggucucagggagacgaaagagucuggcacuguaccagccaaggugcaaccaucuuuuggagagagag

SEQ ID NO: 4192826 - RNA, 75 nt, Human
cuguuucuucacugaccgucuucccacuuucuguccaagggacaggccagauggaagaggucaguggaggggcag

SEQ ID NO: 4192827 - RNA, 59 nt, Human
cuguuugacugaugugucaaguucaagauggaugcacaugaaguggucagaucaaacag

SEQ ID NO: 4192828 - RNA, 78 nt, Human
cuguuuucagggucaauaguuuaaacaagaagcuuaagagugaagcucuugaaauaauggcuaaugcucaggaaacag

SEQ ID NO: 4192829 - RNA, 70 nt, Human
cuguuuugguuucugcuucucagcuucugaaugucacccaccaagaagcugugagcuggaugcuccacag

SEQ ID NO: 4192830 - RNA, 69 nt, Human
cuguuuuuaaacacuggagcuggguguuccugugagagugagcugcuaucuccagauguuugcaagcag

SEQ ID NO: 4192831 - RNA, 69 nt, Human
cuguuuuuaaacuaugacauuugaagagcaguugaagaaaguaaagcugcucaugguggagaaaagcag

SEQ ID NO: 4192832 - RNA, 69 nt, Human
cuguuuuuaagguuucuaguuucuaaacuccaugcccugugcugaguuuagaagaggaacuuguuacag

SEQ ID NO: 4192833 - RNA, 81 nt, Human
cuguuuuuauccaguaccaugauguuugaguuacuauagcuuuguaguaucuuuugaaaucagguauugugaugccuccag

SEQ ID NO: 4192834 - RNA, 79 nt, Human
cuguuuuucacugaagccacuggaagaggagucuuaacauuccauauuucagaguuucagaaccccccgugaaaaccag

SEQ ID NO: 4192835 - RNA, 55 nt, Human
cuguuuuugcaaagagaguuucaagagugcauuguaacauuguuuguaaaagcag

SEQ ID NO: 4192836 - RNA, 77 nt, Human
cuuaaacagagguaaggaagagccugguaaacacugugcucucuuuacauuguuuuuucuugccaucuguuuuuaag

SEQ ID NO: 4192837 - RNA, 112 nt, Human
cuuaaagaauagaccaagagcagccaguguuguuuagaagcaccuauuggcuggauugagaagcuauuaauuuaauccaaguguuacauuggcuagaaguucuuucuuuaag

SEQ ID NO: 4192838 - RNA, 62 nt, Human
cuuaaagcacuaaaugaugaggggguggugacagugguaaccuuuaugauagaugcuuucag

SEQ ID NO: 4192839 - RNA, 102 nt, Human
cuuaaaguuacuaaagggcgucuaaguaugcaaaucgucuuagaaugcaggguaauggucauuugaagacauuugaauacuuucauccacugugacucugag

SEQ ID NO: 4192840 - RNA, 80 nt, Human
cuuaaauagcaaaauguagacauauggugaaacauuuuaaccacuucugguugaaacucaguaugguuuagcuaaaugag

SEQ ID NO: 4192841 - RNA, 67 nt, Human
cucuacucuucugcgcugcccugggagccacgaggugcugcugggccuagcaacagaggagucagag

SEQ ID NO: 4192842 - RNA, 83 nt, Human
cucuagaacagggacaaugagaaccuugaaaggaacuuugcaaguucuauaaguuugucauuuuaauucuccucagcuuggag

SEQ ID NO: 4192843 - RNA, 61 nt, Human
cucuagaggcuugaaugggcgaggaagcuauaaugacuccauguuccuucuugccucagag

SEQ ID NO: 4192844 - RNA, 59 nt, Human
cucuagcucugugcucuggaucuguugguauuccaaugauucaacacuuggaguaagag

SEQ ID NO: 4192845 - RNA, 69 nt, Human
cucuagcugaggucacugcuaugccuagaaauagcugaacaggcagcucaguuaucccucggacuggag

SEQ ID NO: 4192846 - RNA, 69 nt, Human
cucuaggggcuggucagcgucucuagggaauuaugggggaaauagauaugcaaacgacggcaccuggag

SEQ ID NO: 4192847 - RNA, 87 nt, Human
cucuaguaguacuuguuggugaugccacacauauuuuacuuugaagaagccagauaauguuuauacaccugcaggaacuagcuagag

SEQ ID NO: 4192848 - RNA, 60 nt, Human
cucuaucauucuucucaccuuugaacuugcauaauuucaauggucuuugaggaguuagag

SEQ ID NO: 4192849 - RNA, 77 nt, Human
cucuaugcccuggauuucauagacugccaucuaauccaguuaggagaggaaguagaaguaaugaaaucaagggagag

SEQ ID NO: 4192850 - RNA, 59 nt, Human
cucuauguggauggucugauuccaaagcccaaaugagcuaauuuuacuguccuauagag

SEQ ID NO: 4192851 - RNA, 64 nt, Human
cucuauuuccucaugaucauaaugcagcaggaaaacuuugcaucauaauuuugagagaggagag

SEQ ID NO: 4192852 - RNA, 84 nt, Human
cucucaaucaucagucuagucuugcuccuuauccugcucugaggaacagagaggccaguguggcuggagcacagugagugagag

SEQ ID NO: 4192853 - RNA, 57 nt, Human
cucucaauucacggcaaggucugcaggagaacacauagacucuguuguacuugaggg

SEQ ID NO: 4192854 - RNA, 127 nt, Human
cucucacagaggguaaaaccacagaacccaugagacucccuuuaagacuuuucaaaggcaaacauucccaauggcaaacuggaaagcuugaguuuagagauggguuuuuggaagaccaaauaugagg

SEQ ID NO: 4192855 - RNA, 59 nt, Human
cucucacagccauugcaguacauugaucuccauagagacagugccagggcaggugagag

SEQ ID NO: 4192856 - RNA, 58 nt, Human
cucucacauuucuuuuaagaggugcuuugccaugagaguauuuccaagaauuggagag

SEQ ID NO: 4192857 - RNA, 80 nt, Human
cucucagaagagcauuugcccaggcuguaggacguuucccgaucagugcagccccagggaagaugugugcuuacuggggg

SEQ ID NO: 4192858 - RNA, 72 nt, Human
cucucagcacugucugcuggcucccuucucucucuguugaggaauaaagggagcggggagacccuaugggag

SEQ ID NO: 4192859 - RNA, 73 nt, Human
cucucaguccugcgcgccucugugggccaagacacacccacagaaaugcagcaugaggcggcaggccugaggg

SEQ ID NO: 4192860 - RNA, 68 nt, Human
cucucagugccacacagccauuccugccucucaucaagcagguuaugaugggcacggcagucugagag

SEQ ID NO: 4192861 - RNA, 66 nt, Human
cucucagugcuugguaguuugauacauaagucaaugaguauugcagacaaaaugagcuacuguggg

SEQ ID NO: 4192862 - RNA, 64 nt, Human
cucucauuccuguuuguuguuuagccgguauaugcaaggcuguaaagaacauuaggaaucagag

SEQ ID NO: 4192863 - RNA, 74 nt, Human
cucucccacuuuuuugguagugccuucugccauucuuuguaaccgagaaggucaaggccaaaagagugguggag

SEQ ID NO: 4192864 - RNA, 59 nt, Human
cucucccccaucacauuuaaggggaaggaccacaggcccaccucucauugugaggagag

SEQ ID NO: 4192865 - RNA, 63 nt, Human
cucucccugguggccuucagcccacaacugcaaggcgguugugguguugggugccagcgagag

SEQ ID NO: 4192866 - RNA, 57 nt, Human
cucuccggcagcugacauuuggggccacuaaagucccagcuuucccacugccgagag

SEQ ID NO: 4192867 - RNA, 59 nt, Human
cucuccuaguccccaagugugagucuaaacugccacucaugcauggauuucagugagag

SEQ ID NO: 4192868 - RNA, 82 nt, Human
cucuccuauguccaaggaaauacuucugcagagcacguuagaguuuccaaugcauguguguuaucucagagacaaagggcag

SEQ ID NO: 4192869 - RNA, 65 nt, Human
cucuccucuuggcuuugugccuucuuucagcuuagcugcaaagcagggaugaggcuagaggggag

SEQ ID NO: 4192870 - RNA, 66 nt, Human
cucuccugcucuuggaucacuuucucuguuugaaagaaucccugugacgagcaucccuauggagag

SEQ ID NO: 4192871 - RNA, 62 nt, Human
cucuccuggcucugggccuucugcgccuuuguucaagggcuucggcauccacagcuggagag

SEQ ID NO: 4192872 - RNA, 129 nt, Human
cucuccugucacuguagaaauugauuuccuauguggauuuguggaagcccuaugagagacaguuuucuuaugacugugcugucaauugcuuucaguaaguaucuguaaugauaggcuauaaugggagag

SEQ ID NO: 4192873 - RNA, 74 nt, Human
cucuccugugucaggcacuaguaagaaaaaggcacaacgcuuuuuccucguagagccuaaugucuagaggggag

SEQ ID NO: 4192874 - RNA, 129 nt, Human
cucuccuuaauuaauuguaacuauagugucuuauguggaaaaugcacuuaaaacccucuuuucuccaaacaaaaugguguuaaaacugcaaauccuacugaaacauguuacagaaaauuggcaguaggg

SEQ ID NO: 4192875 - RNA, 56 nt, Human
cucuccuuugaagcaacuguauucuaaguucuaaauauaguugcuucaaaggagag

SEQ ID NO: 4192876 - RNA, 59 nt, Human
cucucggccaccauugccguucucagagcugcugaggagggguucucgggugcugaggg

SEQ ID NO: 4192877 - RNA, 60 nt, Human
cucucuauggaugcaguuuuucucuccauucuacaaaugaggaaacugaagcccagagag

SEQ ID NO: 4192878 - RNA, 61 nt, Human
cucucucucugcugucugaagacacagcaagaaggugucugucugcaagccagaaagagag

SEQ ID NO: 4192879 - RNA, 60 nt, Human
cucucucugguacauagaguuugguccagggaccaagcucuauaccagagaaacccugag

SEQ ID NO: 4192880 - RNA, 61 nt, Human
cucucugaugccaucagacagucauucaucacauucugccgauugucagccuucagaggag

SEQ ID NO: 4192881 - RNA, 76 nt, Human
cucucuggacagggcaggggccacccuuguuggccuugacuucauagugccuacaguguccccagcucugugagag

SEQ ID NO: 4192882 - RNA, 61 nt, Human
cucucugggaauauuuuauucugauccaguagcagggaggaaaaggauguuaucccaggag

SEQ ID NO: 4192883 - RNA, 58 nt, Human
cucucugggguuccagacgugggugcugcugugcgcacucucucccuacuccggaggg

SEQ ID NO: 4192884 - RNA, 66 nt, Human
cucucuggguggccccugagacuccuccagugucccuggcugggagcagcacugccacacagaggg

SEQ ID NO: 4192885 - RNA, 67 nt, Human
cucucuucccuaacagguccacaguggucaaaacucuaaacauaugaacacuuauuggggaagguag

SEQ ID NO: 4192886 - RNA, 74 nt, Human
cucucuugggcauggccucaaaggacugcagaauagaacaccuaucugguagaagaagugaagcuggcagagag

SEQ ID NO: 4192887 - RNA, 56 nt, Human
cucucuuucugaaugaggacuaaaggaaacccuuucagugagucuagagaagagag

SEQ ID NO: 4192888 - RNA, 58 nt, Human
cucugaaaaugugguggggaaagggaaauccugagucugaauuaucucauuuucagag

SEQ ID NO: 4192889 - RNA, 101 nt, Human
cucugaacacauggcccguuuuuauauauauguagaggucacgaugauucauuucuaagcauucauuuuuauauauguguaguuuuuauauguguguagag

SEQ ID NO: 4192890 - RNA, 105 nt, Human
cucugaacacuuaggaugauggugcuggugggggcaggaagguagcacagugcugaugguggccagucugcucccacaaguucccagucaccaaggcuggcaggg

SEQ ID NO: 4192891 - RNA, 82 nt, Human
cucugacuguuugaaaguggcaaguccuugcuugaagacucacucauuaccuuuagcucaagggaccacauucaaacaagag

SEQ ID NO: 4192892 - RNA, 59 nt, Human
cucugagaaagcugugagcuaaaaguugccuuacauugcagaacucucaguuuccagag

SEQ ID NO: 4192893 - RNA, 64 nt, Human
cucugagacucaagugaguggggcugaagcagaugaggguggcccccuuucugggucucuggag

SEQ ID NO: 4192894 - RNA, 76 nt, Human
cucugagcagcacugaguuagcagcuccagccagacuagaagaagggaagcaggucaacugagagcugacacagag

SEQ ID NO: 4192895 - RNA, 99 nt, Human
cucugagccucaguuuccuaggcuguaaaaugaaccuagucaucccuugguuguaggaaugaugaguagggauauuuuguggcgaggcugggcccagag

SEQ ID NO: 4192896 - RNA, 96 nt, Human
cucugaggcucauaguuuaguuaguaugauuguaucaauguuaauuuccugguuuugacaauugugcuaugauuaugaaagaugcuaacauuagag

SEQ ID NO: 4192897 - RNA, 65 nt, Human
cucugaguguaggcacgaagcuuucagcucugaaacuucaccuuuuugccacacuagcagcagag

SEQ ID NO: 4192898 - RNA, 67 nt, Human
cucugauguauugucaggcuauguccaaauuuuuaauuuggaaacuauagucacaauagauacaggg

SEQ ID NO: 4192899 - RNA, 107 nt, Human
cucugcaaaugggguucggggagugacuuuucucuggcaggaaggguacaaguggcuuuucuaagggaaacguccuccuccacucuugcaaaacuccaugaacagag

SEQ ID NO: 4192900 - RNA, 109 nt, Human
cucugcaaguaggagaaaagagguaggagguagguauugugugagaacugggugucucuauuuucaauccaguauuuccucugaaaccccucugcuucuuacuucagag

SEQ ID NO: 4192901 - RNA, 79 nt, Human
cuuccagggagucaacaaacagaucaacuaaggacaauuuacagaugauuuguuuucugcacucuccucuccugguaag

SEQ ID NO: 4192902 - RNA, 57 nt, Human
cuuccaggguccaggaagagcccgugucuaggcuuuuugacuccuggccuuuggaag

SEQ ID NO: 4192903 - RNA, 58 nt, Human
cuuccaguccauaugccauaauucuuucaaacucugggaagaaugcugugguuggaag

SEQ ID NO: 4192904 - RNA, 127 nt, Human
cuuccaucuuucauuaugggcaugcuuaccucccuguuaucuccaugacaaguugguuaggccaaggccuggcuagcccuuguggggagaggaugagauaagcauuaaauaggagauuagauugaag

SEQ ID NO: 4192905 - RNA, 68 nt, Human
cuuccaugccaggcccgugcacagcccccaaagcagcuccaucugggcugugcagccugcggcaaaag

SEQ ID NO: 4192906 - RNA, 110 nt, Human
cuuccauuccaaccugagucacugcccacuccuucguccaacgucaguuuccucaacuguguauugggagguugaggugggugugcgggacgugaguugguccuuugaag

SEQ ID NO: 4192907 - RNA, 58 nt, Human
cuuccauuuacacuccuuggggacucuucuuugagggacucugaggcugagaagggag

SEQ ID NO: 4192908 - RNA, 59 nt, Human
cuucccaagcuccgggcuucugaagacuugccucaggggcuccaaggaaguuugggagg

SEQ ID NO: 4192909 - RNA, 82 nt, Human
cuucccagccucucagcucaaacucaggugugaagguuuaugaugcagucacagcuuugagcagagaccacaggcaggggag

SEQ ID NO: 4192910 - RNA, 65 nt, Human
cuucccagcuccccacgccuggacuaagagguccauccuuggggcugaggcugggggcagggugg

SEQ ID NO: 4192911 - RNA, 80 nt, Human
cuucccaucucuccugcuggaagagauuggagccuccuuugggggcucuggcuuugccagcccuagcggggagugggagg

SEQ ID NO: 4192912 - RNA, 103 nt, Human
cuuccccaauagauaugcucucucgguuuccuaauugucuagaggcuuugauuuaucuggcagaggaaggaggccugagauaucugggcaaaguucugggaag

SEQ ID NO: 4192913 - RNA, 77 nt, Human
cuucccggccuggcucccgaagcccucagugucccuauugauuccuaggccgcugcagaugggagcugguugugagg

SEQ ID NO: 4192914 - RNA, 78 nt, Human
cuucccuaaaugccccuucuggucuucaauggugaacacgcuucacuaaugaaaaccagaagagacauucuggugaag

SEQ ID NO: 4192915 - RNA, 128 nt, Human
cuucccuacacaucccguuggccagaacagucaacagccauauguagcugccagagaguugcacacgucauuuugauucugggcagccaugugccuggcuaacguuugggcuucuggaaggguagaag

SEQ ID NO: 4192916 - RNA, 57 nt, Human
cuucccucacagugaguggguucccugaugcgagaggcccuacuuguuugagggaag

SEQ ID NO: 4192917 - RNA, 101 nt, Human
cuucccuccccggcggaggccccugcggacugccuagagcugggucgcaacugaggcguuauccgcgggccuggccucgggaaguggcggggaggaagaag

SEQ ID NO: 4192918 - RNA, 64 nt, Human
cuucccucuccaggagcccugagcucugguucagguaguuuaacuguuccacuggagagagaag

SEQ ID NO: 4192919 - RNA, 73 nt, Human
cuucccuuacaaacaagaucuuauucuuuaagugcguacugaugccaagaaagagauuaguuuggugggggag

SEQ ID NO: 4192920 - RNA, 70 nt, Human
cuuccgggcucugugacucgcuguugcagcugacuggcuguaacagugugaggucucaggcgcuuggagg

SEQ ID NO: 4192921 - RNA, 57 nt, Human
cuuccgucuuaagcagccaacgagcagccacgcagcgugcugcuagcgggacgggag

SEQ ID NO: 4192922 - RNA, 70 nt, Human
cuuccuacaggugaaguauuacacuaaggguuuuauauaaaaucucauugauccuuauacuuuacggaag

SEQ ID NO: 4192923 - RNA, 55 nt, Human
cuuccuagcuucagagucuguuuuguccuaacuuucucugacucagaguuggaag

SEQ ID NO: 4192924 - RNA, 87 nt, Human
cuuccuagucucuaauacugaccaagucaccacacccucuuggaauguuuacuggggcugagugaguggaaagugagggaugggagg

SEQ ID NO: 4192925 - RNA, 83 nt, Human
cuuccucagaugucacugcagccccaagcggguuccccugucaaauuccugaccgguccuuggggacgcugacaucgugggag

SEQ ID NO: 4192926 - RNA, 57 nt, Human
cuuccucccccacacacucacugaacgugugccaggcacugugugggggaaggacag

SEQ ID NO: 4192927 - RNA, 56 nt, Human
cuuccuccgaagaaguugcuggcaggaccaaggccagggcuuggaagagagagaag

SEQ ID NO: 4192928 - RNA, 59 nt, Human
cuuccucucuaagaaacucucagccuaggcagguccccaguuuuccauuagggagggag

SEQ ID NO: 4192929 - RNA, 112 nt, Human
cuuccucucuccuuuccugucauucugugugccagaguugugcugucuacacagcaagcuccuaagcaaugguggugaucaggcuauguauacucccgaagaaauggggaag

SEQ ID NO: 4192930 - RNA, 61 nt, Human
cuuccucuguggccagaguguaggucagcucagcaaacagcauuguggccuacagggcaag

SEQ ID NO: 4192931 - RNA, 129 nt, Human
cuuccucuuauaaggacccuugugauuauauggagccuuucuagauaauccaggauaaucugcccaucucaaauccuuaaugaugucugaaaagucaaaguaacguaugacaggguccaugggauuagg

SEQ ID NO: 4192932 - RNA, 86 nt, Human
cugacagcugcuuguccugagggagaaauaaaggaaacuggugaaacacaugcuauuuccaugaauucccacucaugugcuguuag

SEQ ID NO: 4192933 - RNA, 82 nt, Human
cugacaguucucaacagccagucccauccuccuaaagaucuccagaaucagccacauggaccugaugcuagaggccugucag

SEQ ID NO: 4192934 - RNA, 79 nt, Human
cugacauaaauuuucauaaacaaauuaaggccugguccaaaaaauucaaauuucauuuuuucaggcugauuuguguuag

SEQ ID NO: 4192935 - RNA, 68 nt, Human
cugaccaaggaggcccucuccuucuggaaucugggguuccaguuagucuagaugggucucuuggacag

SEQ ID NO: 4192936 - RNA, 80 nt, Human
cugaccaaguuucuucagaagaaaagcagugugugugcuucuguuccuguaagcacacugcccuuuggagguuuggucag

SEQ ID NO: 4192937 - RNA, 67 nt, Human
cugaccacaugcguccuaggccccagcagcucugaacugcuuccugggacaggcuaugugcugucag

SEQ ID NO: 4192938 - RNA, 66 nt, Human
cugacccugccuguccuggucccguuuagcaaaugcucuaauccucuuaggccaggccagccucag

SEQ ID NO: 4192939 - RNA, 61 nt, Human
cugacccugucuucccccauucugauuuaauaaagaauuuggagagggugaguagugucag

SEQ ID NO: 4192940 - RNA, 57 nt, Human
cugaccugcaccuucucuggguucucacucagcacuucuggaauggguguggguuag

SEQ ID NO: 4192941 - RNA, 61 nt, Human
cugaccuguagcuuccaagaccaggggccuggugcccugguaggagggaaaugcggguugg

SEQ ID NO: 4192942 - RNA, 63 nt, Human
cugaccuuggagcggccugggucuggugcacgugcacggcaggcccaucugcucccaggcugg

SEQ ID NO: 4192943 - RNA, 116 nt, Human
cugaccuugugauccacccgccucggccucccaaagugcuaggauuacaggccugagccaccgcgcccggccuaauuuuuguauuuuuuuguagagacaggguuucacuacguuag

SEQ ID NO: 4192944 - RNA, 57 nt, Human
cugaccuugugaucugcccaccuuggacucccaaagugcugaaauuacaggugugag

SEQ ID NO: 4192945 - RNA, 74 nt, Human
cugacggcuucaaggcagcuccgcaaucaaucaauaucuucuuuugauugcauggaguaauugaugcuuguuag

SEQ ID NO: 4192946 - RNA, 56 nt, Human
cugacuacaaaaaagcuagucuuuuccaugcgauguagaggcuuucuuguagucag

SEQ ID NO: 4192947 - RNA, 118 nt, Human
cugacuaccccuucucugaaaugcuugggaccagaaguguuuuggauuuuggaauauuugcauuauauuccaaaacccaaaaugcuccaaugagcauuuccuuugagugucacgucag

SEQ ID NO: 4192948 - RNA, 71 nt, Human
cugacuagcaaguuuaaaaucauuuggaaaccagguuugugauccaagggaauuuaaaguugcugacacag

SEQ ID NO: 4192949 - RNA, 56 nt, Human
cugacucugacaggacuuguggagaaaaagucuaccgauuucuguuuucagggcag

SEQ ID NO: 4192950 - RNA, 58 nt, Human
cugacucuguuugcagguagcucagguggccagagaagguccucaggcagagacacag

SEQ ID NO: 4192951 - RNA, 75 nt, Human
cugacugauuuccaggauucuaaucuucacugucuaagcuguggguuuccaauccuggaugcugguuacagucag

SEQ ID NO: 4192952 - RNA, 60 nt, Human
cugacugcucuuugcucuacauuaucuuuuucaggguguuuauacagcaaagagcauuag

SEQ ID NO: 4192953 - RNA, 58 nt, Human
cugacuggaagcuguacaguucaccuagaagacaggcugggcuuacucuuucagugag

SEQ ID NO: 4192954 - RNA, 60 nt, Human
cugacugggcccuauggaagaaaggggucaagccccuuauaaguucugaggacccaacag

SEQ ID NO: 4192955 - RNA, 101 nt, Human
cugacuguggcuucuuuacauugaagugucuggccuccuccucuacaaccaagaugauggggaguugucagggguucaaccagagaagcagaaucagucgg

SEQ ID NO: 4192956 - RNA, 60 nt, Human
cugacugugucaaggaggguguggcccccacgucugggccuccccucuccugcuaguggg

SEQ ID NO: 4192957 - RNA, 114 nt, Human
cugacuugcagaaagguauggacaugaggcaauagaauauugaauuccuaagaacaagagaggagggaagucagugaaggcauugcucaaucuauacaaucaaaagaaaguuag

SEQ ID NO: 4192958 - RNA, 65 nt, Human
cugagaaacuguuggaauuuuaauguggcuaaggugaccauaaugaguuuccuccagauucacag

SEQ ID NO: 4192959 - RNA, 80 nt, Human
cugagaagcagccacggggagacagaagcaccaccagaaagagccuuccaugucacucucacccgcgggcaugugcucag

SEQ ID NO: 4192960 - RNA, 128 nt, Human
cugagacggagaaagugguguggcagaagagguugcugguggccaugggucggggugcagauuaugagagaacucuggccagugacugcucacccggggcagcguugaguccaucaacaccguuuugg

SEQ ID NO: 4192961 - RNA, 68 nt, Human
cugagagaaacaugacucaggaggauuuguucaaaccccuaguuccucaugaacaugcuuauccucag

SEQ ID NO: 4192962 - RNA, 102 nt, Human
cugagagaggagaauugcuuaaacccggagucggagguugcagugagccaagaucgcaccauugcacuccagccugggcgacagagcaagacucugucucag

SEQ ID NO: 4192963 - RNA, 60 nt, Human
cugagagaggccuccauguacugaaguucccugccuucagagucaggggccuuuauucag

SEQ ID NO: 4192964 - RNA, 59 nt, Human
cugagagcaggaccaggucuaaugaagacacuggugacaugugccuggcuugcuuucgg

SEQ ID NO: 4192965 - RNA, 61 nt, Human
cugagagcauacauauagcuacgugacuuuggucgaagagcuucaucuugcugugucucag

SEQ ID NO: 4192966 - RNA, 81 nt, Human
cugagagcuggaccuucucuuucacccguucgacgcagcaaguucuuaccuugccugggguggauggguccaaguuuucgg

SEQ ID NO: 4192967 - RNA, 130 nt, Human
cugagaucuuacuaccagccccuuaaagucauucugacucuguuuuagggauuuguccugggccccugguugauaaagucccugagacucuggaguguaaucagacuugauuuuuuccccauccucucag

SEQ ID NO: 4192968 - RNA, 56 nt, Human
cugagaucuuuauacgaggcacugagaacagugccuuguccuucgucagggcucag

SEQ ID NO: 4192969 - RNA, 103 nt, Human
cugagauggaguuuugcucuuuugccuaggcuggaguguaguggugugaucuucgcucacugcaaccucugccuucugguuucaagcgauucuccugccucag

SEQ ID NO: 4192970 - RNA, 65 nt, Human
cugagauuaagauauugggaguugaugguuucuauacauuuuacuuaaaugguucuuuaucucag

SEQ ID NO: 4192971 - RNA, 71 nt, Human
cugagcacagcuuucacuagaaaggagcaagcuaaucaaugauggcaagccuuucagugguuugugccuag

SEQ ID NO: 4192972 - RNA, 72 nt, Human
cugagcacccgacagugccugucauaugguaggcacuuagcgaauauuuggaggccacuguugagugaaugg

SEQ ID NO: 4192973 - RNA, 98 nt, Human
cugagcagauguagccacaugcuacagugaaggaggaagccccggcuuugcauuggucucuucuuccuucaugguagcauguggcugcaucuguucag

SEQ ID NO: 4192974 - RNA, 68 nt, Human
cuuccucccuuccaaugacuaugcuucagauucuuuccuggucaucguuuuaauggaaggagagaaag

SEQ ID NO: 4192975 - RNA, 65 nt, Human
cuuccuccgucugccccucaccccagcacauguuaggacagugaggagcugacacuggggugaag

SEQ ID NO: 4192976 - RNA, 83 nt, Human
cuuccugcccccagagagcaccaugaagcccaaugaagguggauauggggcaggagcucgcuggggcucuggugugcaggaag

SEQ ID NO: 4192977 - RNA, 80 nt, Human
cuuccugccucuuucuuuguccaccaacaauggacuggucuaccugucuauagcuuugcugagaaaaagagaacuggaag

SEQ ID NO: 4192978 - RNA, 58 nt, Human
cuuccugccuucuuaucuguuuuaggugaaaguggagaaacagugaggagauuggaag

SEQ ID NO: 4192979 - RNA, 122 nt, Human
cuuccuguaacagaccuagagaaccagccucauuacagccaggaagcauauaaugaacuugugcugcauauaugguccugagugaggcauagugggagcccucaggucaaucagacacagag

SEQ ID NO: 4192980 - RNA, 81 nt, Human
cuuccugucccaugugguccccagaggaauaugagauugccacaaacauggcagcuuucuuuggggaggugggagagggag

SEQ ID NO: 4192981 - RNA, 67 nt, Human
cuuccuguugugugugucucauccuguuucaugauggcuccaugaggcacaucacagccaauggcag

SEQ ID NO: 4192982 - RNA, 61 nt, Human
cuuccuguuuuuguaaucgacucugcucaccuucuagagagugcauuccagacaugggagg

SEQ ID NO: 4192983 - RNA, 81 nt, Human
cuuccuuaaagugaguuuggguucauugugaugcaaagauauacuguaaucauggccucaaauuuuauaacacaaaggaag

SEQ ID NO: 4192984 - RNA, 58 nt, Human
cuugaccuugugauccgcccacuuuggccucccaaagugcugggauuacaagcaugag

SEQ ID NO: 4192985 - RNA, 69 nt, Human
cuugacuacugcuguuuauagggaggcccuuggggcagguuuguccucuguguaggcugcagacuugag

SEQ ID NO: 4192986 - RNA, 75 nt, Human
cuugacucugaaauucuuuugugcggugaagucaagaaccugaacuggccagccaacaacaauagcagcgucagg

SEQ ID NO: 4192987 - RNA, 55 nt, Human
cuugacugccaaugugacuguauuuggagacagguccuuuacagagguaauuaag

SEQ ID NO: 4192988 - RNA, 58 nt, Human
cuugacuuagaaauucaguuuugucacauacuagcugugugauauucuccuagucagg

SEQ ID NO: 4192989 - RNA, 56 nt, Human
cuugagaaaggaacaggaagcuuguuuacaaaugaacaaauuccugcuuuuguaag

SEQ ID NO: 4192990 - RNA, 79 nt, Human
cuugagacauaauguugagcuugaaaguagguuuaguuuuuugaauacacaguucuugguuuaauaguuaagugucagg

SEQ ID NO: 4192991 - RNA, 61 nt, Human
cuugagaggcuggcugcugugcucacaagccuucauuuacacagcaagccuuccuuucagg

SEQ ID NO: 4192992 - RNA, 70 nt, Human
cuugagcccaggagguggagcuuucagugagccaugauuaagucacugcacuccauccugggcaacagag

SEQ ID NO: 4192993 - RNA, 94 nt, Human
cuugagggcuuugaugaucaggucagaggcagaaggcaccaccucaaucugggccugucuguucugacuggucaguuucacuguaauccucagg

SEQ ID NO: 4192994 - RNA, 93 nt, Human
cuugagucuuucauucauuucucuguauucagugccuagcauaugccaggcucucgugugggcacuggauaauauaaaaaugaaggacuuggg

SEQ ID NO: 4192995 - RNA, 67 nt, Human
cuugagugugaguguaugugugugcgugugcgugugcgugugcgugugcgugugcauggccuucggg

SEQ ID NO: 4192996 - RNA, 61 nt, Human
cuugauaucugcuugaauuucuugacuacucaccuugagaaguucuguucagccagacaag

SEQ ID NO: 4192997 - RNA, 69 nt, Human
cuugaugaaaugucaaagacaccaucuauucuggaaagaaaguagauuucucauggcgaaaauaucaag

SEQ ID NO: 4192998 - RNA, 68 nt, Human
cuugaugaugacgucggugauggcaucaaacacgaacuacguucuugguaucgguggcgcaugugaag

SEQ ID NO: 4192999 - RNA, 91 nt, Human
cuugaugcuagaugacagcgaaaaaauauuuaccaaguucagagggaaagacuugugacuuuagaauuuuauccagauuaucaguaugaag

SEQ ID NO: 4193000 - RNA, 69 nt, Human
cuugauuauuuuuaacugguuagacacaugcaugucaugugacuacaugauaaacaugucuaccucagg

SEQ ID NO: 4193001 - RNA, 67 nt, Human
cuugcaaucugagucacugcauuuuaacuguuuauuaaguggugacagugacagcuagauaguuuag

SEQ ID NO: 4193002 - RNA, 58 nt, Human
cuugcacagacucaccuuaauuugacauugucauauugauugugagucuguggccaag

SEQ ID NO: 4193003 - RNA, 72 nt, Human
cuugcacccauugcccucagcgcuuccagaucuuuuagaggaagggaaggcuggaaggcaaguaggaaagag

SEQ ID NO: 4193004 - RNA, 74 nt, Human
cuugcacccucacccaggcuggaaugcaauggcgcgaucucggcucacugcaaccuccgccucguagguucaag

SEQ ID NO: 4193005 - RNA, 87 nt, Human
cuugcacugaauggacagagaucaaaaguuuguuagguaaaaaauauuuaggccaaaugacuugauguuugaaaaauacauugcagg

SEQ ID NO: 4193006 - RNA, 58 nt, Human
cuugcagacagaaguauauaguguggaaaaugaaccaccucuuuugacucuuugcaag

SEQ ID NO: 4193007 - RNA, 77 nt, Human
cuugcagcuggaugaggaagucaggcauacaagccauaguaaugauauguagcagugucuaccacauuaauuguaag

SEQ ID NO: 4193008 - RNA, 67 nt, Human
cuugcaguaauagucccacuuuacaacucaagggggccaaacuguaaaguggcgcuguuacugccag

SEQ ID NO: 4193009 - RNA, 89 nt, Human
cuugccacccugugcucugcuuggccuauucugggugguuccaggagugaaaugaggcccaggcaaagcuguccagucagggagguaag

SEQ ID NO: 4193010 - RNA, 70 nt, Human
cuugccauggccgccgcugcucaggaaagaacuuuccuuagugcuccugcagcagagggcgggcagcaag

SEQ ID NO: 4193011 - RNA, 62 nt, Human
cuugcccugaccccauucccugugaaaguuucagaggaccagaggcacuggggauagguaag

SEQ ID NO: 4193012 - RNA, 87 nt, Human
cuugccuaaauuucccaaaggcuuuuaacuacuguuuuauaguggcuuuaaagcuuaauaguaaagaguaggagaguuuaugguagg

SEQ ID NO: 4193013 - RNA, 80 nt, Human
cuugccugguaccuucucuagaucuuuauucuaaacaaucgguuaguaaugauaaauucuguaggagggucuauuccgag

SEQ ID NO: 4193014 - RNA, 60 nt, Human
cuugccuuccccuugauaaugcaguaagggacccccuuuuuacaacauggggcaggcagg

SEQ ID NO: 4193015 - RNA, 79 nt, Human
cuugccuucggaaguuucugggcaagacaaggccaagggcacuuccaagugucccagagaucauucauccagaggcagg

SEQ ID NO: 4193016 - RNA, 58 nt, Human
cuugccuuggguccgcagugagcuauguacaucugcgucuguguagugcucagguaag

SEQ ID NO: 4193017 - RNA, 94 nt, Human
cuugccuuugaggugcucacaugcuguguguggagaucggcgcacaagccauugauuaccaaacaguauagugggccaggucgugggaggcgag

SEQ ID NO: 4193018 - RNA, 58 nt, Human
cuugcgaaugaccucacugcuuuuuguauuuguaauggaaugcacagucauuuguaag

SEQ ID NO: 4193019 - RNA, 76 nt, Human
cuugcguguguguaccugcgcauuuauugagcuuucaguccgcucuggaugucuguuggcaggagcacuuaucgag

SEQ ID NO: 4193020 - RNA, 89 nt, Human
cuugcuagaaauacaaauuguugggucucauucccgaucuacugaaacagagacuggguuugagacuuagcaaucuguguuucaacaag

SEQ ID NO: 4193021 - RNA, 82 nt, Human
cuugcucgaaacaaccaaauguuuuacuggcaucugggagugaagccaaugaacacauguggucaguuucuuuaugaguagg

SEQ ID NO: 4193022 - RNA, 126 nt, Human
cuugcucuacucaagcccaaaaagagaggaucuccugaagccauguaagauccaucauguggaagucugacuacuaugcugggaagacaagguggagaugcccugaggcuacaugaaaagaggaag

SEQ ID NO: 4193023 - RNA, 78 nt, Human
cuugcuggaggcuugaauggcacaggcagcccuuccugcagaaucuauugcugcuuggcuuucugagcuucuggcagg

SEQ ID NO: 4193024 - RNA, 92 nt, Human
cuugcuggcucaugaugaaguggcauggggguccccaguugcugggucccacacaggcccucugcucacuuccuauucuggagaucaaugag

SEQ ID NO: 4193025 - RNA, 107 nt, Human
cuugcuuccuuggauuuguggcucccaauaaggcaucagcacuuaacccuugacucaggcucugcuuuuuagggagccuaggcaaaagcaaauccaacacaagcaag

SEQ ID NO: 4193026 - RNA, 56 nt, Human
cuugcuuggagaagagaucaguaaaguaucugguuaugcucuguccacaggacaag

SEQ ID NO: 4193027 - RNA, 57 nt, Human
cuugcuuguccaguguagcaggcccagacauuuugacacaaagacuggaaaagcaag

SEQ ID NO: 4193028 - RNA, 63 nt, Human
cuugcuuuguccagaaauucagcuauaacuccacacaucugauggcccuuucuggcaagcagg

SEQ ID NO: 4193029 - RNA, 98 nt, Human
cuuggaaugaccuaaauucccaccuucucucuuuugucaguauaaauuaaaaauaagagagagcaggugguuaacauaauggaauuugcuucaccagg

SEQ ID NO: 4193030 - RNA, 78 nt, Human
cuuggagaauuuaagcaugccaucuguuuggaugaagaugcaaauaaucgcaaacauugggggcuucaacacucuagg

SEQ ID NO: 4193031 - RNA, 87 nt, Human
cuuggagauucugaucccguggcucuggaguggagugcuccccuaccagggaacagggauauuaauaagcgccucagagacaccaag

SEQ ID NO: 4193032 - RNA, 55 nt, Human
cuuggaguaaacgagcugguacccaacuuucaguucccagcagguucauuucagg

SEQ ID NO: 4193033 - RNA, 80 nt, Human
cuuggauuaggaggucauggacaaggugugagccauggauggaacuuggagggcaugcuguccaugggcugggguccagg

SEQ ID NO: 4193034 - RNA, 69 nt, Human
cuuggcaacacuuucaauucccuuagcaacucaaggugcaugagucacuaggcugaaaguggagcucag

SEQ ID NO: 4193035 - RNA, 66 nt, Human
cuuggcaagagauggcccaggggucugugcccaagaccccggucuccugggcuuuggcuuguuggg

SEQ ID NO: 4193036 - RNA, 57 nt, Human
cuuggcaucauguagugggcucuuacugagccauuuuucacacccaugcuugccaag

SEQ ID NO: 4193037 - RNA, 56 nt, Human
cuuggcauguuguagguuacuucuuggcucagauugaauguauauuuuaugccagg

SEQ ID NO: 4193038 - RNA, 88 nt, Human
cuuggcauugggcuaucgugcuggaugcuuuguuccagguaguagagcucccggcagcauugccaauccagacaucagccucgccaag

SEQ ID NO: 4193039 - RNA, 120 nt, Human
cuuggcggacacacucaguucucaugauguaccaggaucaccgacugccuguaagugaaaaugcaggccuuggcaaugagccugagcacagucccuggagcuuacaguggucacguaaag

SEQ ID NO: 4193040 - RNA, 57 nt, Human
cuuggcugccagcacugguguagagugacaguuuccucauccgucuugguagcuggg

SEQ ID NO: 4193041 - RNA, 61 nt, Human
cuuggcuguugggcauugagaaaauguugaacugaaugaaucaaugacuuaggcagccagg

SEQ ID NO: 4193042 - RNA, 73 nt, Human
cuuggcuuacuauaaugcucuuagacguuuguauuggguuacuagugcuuuaagagauuguuaguacuuuaag

SEQ ID NO: 4193043 - RNA, 78 nt, Human
cuuggcuuugaugcuuugguggugguuacuccaaaaguuucaaguuuuguaacaucaccaucaaaauccagauacaag

SEQ ID NO: 4193044 - RNA, 85 nt, Human
cuugggaaaucagcucaagaaaaugcugauacucuggcuacugguacagcugugaguaauaaagucauuuuuucucugacccagg

SEQ ID NO: 4193045 - RNA, 57 nt, Human
cuugggaagaagaaugaggggugauuuguuucaaucacauaauccuucauccacagg

SEQ ID NO: 4193046 - RNA, 72 nt, Human
cuugggacaguggcaguauuagggcagaucccguccgggccuucugcccaggcagugcugcauccucccagg

SEQ ID NO: 4193047 - RNA, 58 nt, Human
cuugggacaguuggacaucuuagcugcuccccagccccugcaauguccauguuccagg

SEQ ID NO: 4193048 - RNA, 70 nt, Human
cuugggaucacagucuguggguugguuuccaaguaccugucuagaaaaccugagucuguguuuuccuaag

SEQ ID NO: 4193049 - RNA, 61 nt, Human
gaaaaugaacaaguauuugcaugagcaguaguuugacugcuuauuauacuuugcucuuuuc

SEQ ID NO: 4193050 - RNA, 82 nt, Human
gaaaaugaguuggguuugaguguuaacuuauugacuggguaaauuuagauaagucaguuaaccucacagcaucucucuuuuc

SEQ ID NO: 4193051 - RNA, 78 nt, Human
gaaaaugggcucagaguuugaaauaauuuuuaggguuauguuuguaaaacuuaaauucuagcuuccugucacauuuuc

SEQ ID NO: 4193052 - RNA, 89 nt, Human
gaaaauggugaaguguaauuuagcauaguaugaacaaacaucgauauugacuacagcuaauuugcucuuauaccuuuccauguauuuuc

SEQ ID NO: 4193053 - RNA, 65 nt, Human
gaaaaugucucaucaagggguccccggauuuuucugcuccgggaaggcugccugagggauggauc

SEQ ID NO: 4193054 - RNA, 100 nt, Human
gaaaaugugggaacauggguaaggcugaaggaaagugcacacucaagacacccuuccccauuuguucacucuucucugucacccauguauuccuauuuuc

SEQ ID NO: 4193055 - RNA, 79 nt, Human
gaaaauguguucacuggagaaaaguaauguauaauugcauauaugcuauacuuccuuuuuucuucaguguuuuguuuuc

SEQ ID NO: 4193056 - RNA, 66 nt, Human
gaaaauuaauuucucucucaugcuucauguccaaaggauaucagcaaggaggagaggugcuuuuuc

SEQ ID NO: 4193057 - RNA, 90 nt, Human
gaaaauuccuggauggacaaauuagcugucaaugaggaucugggaagaucacgagaauccucuucaguaaauucuuucuggugaguuuuu

SEQ ID NO: 4193058 - RNA, 98 nt, Human
gaaaauuggaacaaagaaauaacagccuugauauuaauugucuugcuuaucugucuaaagcagggcugaggaacauauuuuguuuguuuuaguucauc

SEQ ID NO: 4193059 - RNA, 71 nt, Human
gaaaauuggucugcacagccaggauucuucaaaucccuaaagaagcacaucuccugugcagaacuguucuc

SEQ ID NO: 4193060 - RNA, 84 nt, Human
gaaacaaaggauuauuggaacauugcacaguaacaucuaagcaaagggaauguuacagugacuaauguuuuauguaccaguuuc

SEQ ID NO: 4193061 - RNA, 73 nt, Human
gaaacaacaauugggacccaucuaguguguggugugaaaacaacacugucugggacucaggagucuuuguuuc

SEQ ID NO: 4193062 - RNA, 90 nt, Human
gaaacaagaagucugagaucaaggagucaacagagcugguuucuucugagagcccucucauuggcuuauugauagcugucuucuuguguc

SEQ ID NO: 4193063 - RNA, 129 nt, Human
gaaacacuaaguucaagaaacauuugcaaguagagugaaguaauuguuaggauuuacagaagauuuuaaagaugcaauuauuauucuucucaugugugaauuugucugcauaugacuuccagcguuuuc

SEQ ID NO: 4193064 - RNA, 67 nt, Human
gaaacagccccugugugaagcagcugcuggucuccacagugucuaugcucccaccauggccuguuuc

SEQ ID NO: 4193065 - RNA, 55 nt, Human
gaaacaugucugacaauuuaccuuuucauacuagaaaugguggaugacauguuuc

SEQ ID NO: 4193066 - RNA, 74 nt, Human
gaaaccaaaguguagcauuuaccagaaacguacaugguaaguuaaugggugcaaaaugcaggcucuuuguuuuc

SEQ ID NO: 4193067 - RNA, 130 nt, Human
cugcuugccccuuaagucucuagccccagguacaaugugaccacagguucugcucaacagacuucaggaauuugaagaacagguucuagaaccauuaguguuaugugugugcugacguauaugcaggcag

SEQ ID NO: 4193068 - RNA, 74 nt, Human
cugcuuuagguuuauuguuuacuaguuugcagaucuuugagaucuaugcuagaaaauaauugcaggaaaaguag

SEQ ID NO: 4193069 - RNA, 94 nt, Human
cugcuuugucuuccuguuugagaucuuuucagaauuuaucagugucucugagcauguuaaaagucugagugggagagaaaggaaggaaaggcag

SEQ ID NO: 4193070 - RNA, 60 nt, Human
cugcuuuuucuaggaggacaauuauauuuuugauuaauauuguaauuuuagagaaagugg

SEQ ID NO: 4193071 - RNA, 80 nt, Human
cuggaaagcugcaggacccagagccaacuucgugcaaaagagaaauaaaccuacguaugcucaggugcugagauuuucag

SEQ ID NO: 4193072 - RNA, 79 nt, Human
cuggaaaggguguugcuggugcuuugccagaggaggagucccugcccucccuccuggccgucaccgcugcccuccccag

SEQ ID NO: 4193073 - RNA, 84 nt, Human
cuggaacaggauaaaauggcuauugagugaucucuagaggauuuuuugauuuucaggacaauagugauuuuuacacugguucgg

SEQ ID NO: 4193074 - RNA, 90 nt, Human
cuggaaccucacucacuggaagaggaagccagcuggaccuugccugcagggugcagcugggucugcccuggcuagguguugagggcccag

SEQ ID NO: 4193075 - RNA, 68 nt, Human
cuggaaccugggaggcugaggcugcagugagccaagauugcgccacugcacuccagccuuggcaacag

SEQ ID NO: 4193076 - RNA, 121 nt, Human
cuggaacucaagucuucucauauaucauguccuugcacauccuauucaguucggucggguucaugcagcucuacagacagagcaggugggauagcaggaggguuaagagcaacuguuccag

SEQ ID NO: 4193077 - RNA, 73 nt, Human
cuggaacuccuggggagcugguggucaggauauagaaaauccagcuccagaccugcugucccaggagggccgg

SEQ ID NO: 4193078 - RNA, 96 nt, Human
cuggaacucuguucuugacagcaaagcagagccaaggcuucugcugccuaaugagaagaugcccugguucugccuuuugucuucuugaguucucag

SEQ ID NO: 4193079 - RNA, 56 nt, Human
cuggaagaggggaaaugccaugucuucugacuggggaggcugccuuuccuuaccag

SEQ ID NO: 4193080 - RNA, 57 nt, Human
cuggaaggagaaggaggcugugucccucuggcuggcauguuucccagucuccuucag

SEQ ID NO: 4193081 - RNA, 55 nt, Human
cuggaaggggcagucuuugggcaacucauucacccauguacuaucucccuuccag

SEQ ID NO: 4193082 - RNA, 61 nt, Human
cuggaaggguuugucucccucaaggcguaaagcgcuaggauuugaaugcagauccgcccag

SEQ ID NO: 4193083 - RNA, 65 nt, Human
cuggaaguccaagauuaagguguggguggggcucguuccucccaaggccucuccuuggcuuguag

SEQ ID NO: 4193084 - RNA, 64 nt, Human
cuggaaguccaugagugacuugucucauagcacccaaaacaccuuauuucacauggacuuccag

SEQ ID NO: 4193085 - RNA, 58 nt, Human
cuggaagugggguuggcuugaacgagauguuuuauggugucacaaaccccauuuuaag

SEQ ID NO: 4193086 - RNA, 73 nt, Human
cuggaaguguuguaaguuuaaugucaauugcauacauuuauuuaauuucaauagcuugcauaaugcugcccag

SEQ ID NO: 4193087 - RNA, 66 nt, Human
cuggaaucugagacuauggagaaaaagugacuuuuguauuuuuucuguaaacuggccuuucuccag

SEQ ID NO: 4193088 - RNA, 71 nt, Human
cuggaaugcucucaggucagcuuuagagugaaggcaaucuuuacaaaucauacaucuguccuggagcucag

SEQ ID NO: 4193089 - RNA, 127 nt, Human
cuggaaugucacaucagagccgcuggaaugucacaucagagccgcuggaaugucacaucagagccgcuggaaugucacauuggagcugcuggaaugucacaucagagcugcuggaaugucacaucag

SEQ ID NO: 4193090 - RNA, 111 nt, Human
cuggaauuuugauguggagauuugcucugauauuuaacaagacagagaacugggucauucuguugauauugccuuguagauuccagaggcaacauuuccagaaaauuuuag

SEQ ID NO: 4193091 - RNA, 62 nt, Human
cuggaccagcacggauuagaaugcuuucuucauugcagaaaguucuauuagugcuggucuag

SEQ ID NO: 4193092 - RNA, 61 nt, Human
cuggaccucuccuccccaggcccacaccauguaccaaguggggcugauggagacggaccag

SEQ ID NO: 4193093 - RNA, 74 nt, Human
cuggacucuccucugcguucugaagcaccagugccauccaggcagcuuccucaccucagaggucuggauuccag

SEQ ID NO: 4193094 - RNA, 75 nt, Human
cuggacuugcugccugcccugggucaucuguucuggcccaucagcgccgaggacaaggagcagcagcccacccag

SEQ ID NO: 4193095 - RNA, 62 nt, Human
cuggagaagagguaguauguaguuugcuuuugauuucaaaaugccaccucuucugauuccag

SEQ ID NO: 4193096 - RNA, 71 nt, Human
cuggagacaaggagcggggcagggcccugggugagacaggaggcagcuggccccuuuccuuguuaauccag

SEQ ID NO: 4193097 - RNA, 92 nt, Human
cuggagagcuuuuuaaaaauugucauuucugugcccuacccaccugaggucuggcauggggcccaggaaucugcauuuuaugagcuccccag

SEQ ID NO: 4193098 - RNA, 55 nt, Human
cuggagagugaugaaugguuaaacagcaauugguugucuuuggccucauucccag

SEQ ID NO: 4193099 - RNA, 100 nt, Human
cuggagcauagccacaccgacaucuuugcauaucguuccuaucugucagugugacaugacagcagaguugaguaguugcaaugcagguuguuuagcccgg

SEQ ID NO: 4193100 - RNA, 69 nt, Human
cuggagcauccaugcccagggucaccuagcccagggacaccuuagcuacaacccaggguugauguccag

SEQ ID NO: 4193101 - RNA, 81 nt, Human
cuggagccaggcugacugguucaggucccgcucugucaucuccaaguguguggugggauucugaaccugucuuggccucag

SEQ ID NO: 4193102 - RNA, 64 nt, Human
cuggagccccagacagggagagacucagagggcccucacccugacaccugggguguauguccag

SEQ ID NO: 4193103 - RNA, 88 nt, Human
cuggagcuguacaguggagucggugauugcugcugaucauaaucaaguauuuuaggagcuuauuuagacauguaucugauagcuaagg

SEQ ID NO: 4193104 - RNA, 65 nt, Human
cuggaggacagaggccaugucugauucaucuuguauucucauauuuggcccagucugcccuccag

SEQ ID NO: 4193105 - RNA, 66 nt, Human
cuggaggagaaggacaaggggccagccacacagccugggcaggggccucugcuuuccaccuuucag

SEQ ID NO: 4193106 - RNA, 71 nt, Human
cuggaggagacggggugccuggagcccugugagcaauagggccacccaccugccccccaggucucccacag

SEQ ID NO: 4193107 - RNA, 55 nt, Human
cuggaggauuagucugaugcucaccagcccuggagguguccagaggaguccccag

SEQ ID NO: 4193108 - RNA, 130 nt, Human
cuggaggcagcagggcgguucacacugugcccggcugacucuguccuuuccuuacgaugaucagcucacagggccucagccagggcagacuuuucaguuccuaacugcccaccugugccugugcacccag

SEQ ID NO: 4193109 - RNA, 59 nt, Human
cuggaggguggagagaagucucagcugcccacucaggaagucacuucccaccccuccag

SEQ ID NO: 4193110 - RNA, 68 nt, Human
cuggagguaaaaggcuaccacuuaugguccccauuuugcucucaugugucacagccuuuuauugucag

SEQ ID NO: 4193111 - RNA, 60 nt, Human
cuggagguugucuccuagcuguaagcucucagcuuguauuaggaagaaugcuuucaccag

SEQ ID NO: 4193112 - RNA, 66 nt, Human
cuggaguccagggccaucuccaugaggccguccacggccaggcugaggcucuggaagacccuccgg

SEQ ID NO: 4193113 - RNA, 59 nt, Human
cuggagucggcgccccaacagaaguacaucccgcuucugcgcccugucgccugcuccgg

SEQ ID NO: 4193114 - RNA, 90 nt, Human
cuggagucuaauuucuaaguuaauccaugcuugccuuauaaguaccuuaaccaaauagacuguaauggaagugggauugcaugacuucag

SEQ ID NO: 4193115 - RNA, 71 nt, Human
cuggagugaguuggaaaacagacacucaugagacgggccuaucucugugucuguuucccagcucuccccag

SEQ ID NO: 4193116 - RNA, 59 nt, Human
cuggagugcaaugaacaaggucacgaaggaugcaaaggugaccaacucagcauuucuag

SEQ ID NO: 4193117 - RNA, 80 nt, Human
cuggagugggauugucuucagagugagcagugucaucguacaucauaacaaugaugugcucgucuggaaucccauuccag

SEQ ID NO: 4193118 - RNA, 63 nt, Human
cuggaguuaaagaggcagguuaaauaauagagacgggcuauucuuuaguuggcuucuugccag

SEQ ID NO: 4193119 - RNA, 121 nt, Human
cuggauaaucagaaccuguaaacauuuccaagaaauguucggaaguacuucuggaggaguagaucuccugcagcaauguaguuugggacaugcuuuauuauguuuacagguuacagaacag

SEQ ID NO: 4193120 - RNA, 77 nt, Human
cuggauacuuaucaugacuucaagcauccaggacucuguccuggguauccugagccugaguguguauguguguccag

SEQ ID NO: 4193121 - RNA, 67 nt, Human
cuggauagauuaauccugacucgaggaauauagggugauuucuugaaagaggcaaaguuugauccag

SEQ ID NO: 4193122 - RNA, 60 nt, Human
gaaauauuagguuggagcaaaaguaauugugggccauuuuugcaacaaccuauauauuuu

SEQ ID NO: 4193123 - RNA, 68 nt, Human
gaaauauuguuucuggcuguggcagcuuucaucucugaauguuccuuagcagccagagauaauugguc

SEQ ID NO: 4193124 - RNA, 63 nt, Human
gaaaucagagggggugaggacugaggaaaggccacuggcuuuggcaaucuuccuuuugauuuu

SEQ ID NO: 4193125 - RNA, 61 nt, Human
gaaaucaugagaucucuuggacaccuuuaauuuuagugucuaagggcuuguucuugauuuc

SEQ ID NO: 4193126 - RNA, 74 nt, Human
cuggcagcucugugguggggcagaguuugcaggaagcuuguuccugaaacuggcucagcuaacacgagggccag

SEQ ID NO: 4193127 - RNA, 59 nt, Human
cuggcaggcacucaugaaauaagcugaauuguguuuaauuagguuuggggcuuugccag

SEQ ID NO: 4193128 - RNA, 55 nt, Human
cuggcagucugccucuucaccauagcuggcugcaaguuuagaggagaguugcugg

SEQ ID NO: 4193129 - RNA, 66 nt, Human
cuggcaugcacagcccuguucgggagcagugucuguuuucuugucugagcagugcuuugcaguggg

SEQ ID NO: 4193130 - RNA, 59 nt, Human
cuggccagcauuuuugcuuuagccuuaggcauggcuugaguaucaucaugacugguugg

SEQ ID NO: 4193131 - RNA, 55 nt, Human
cuggccaggcucugcaggcuggcaucuuuagcaagcagaaaugccauggcaucag

SEQ ID NO: 4193132 - RNA, 57 nt, Human
cuggccagguuuugaacaguugcagagaaagugugcuuacuguaacagaguggcuag

SEQ ID NO: 4193133 - RNA, 59 nt, Human
cuggccccacuggacagugggccucauccaccuaacaguccauccaucaguccagccag

SEQ ID NO: 4193134 - RNA, 105 nt, Human
cuggcccccgcagaacuacaagucccagcagccccuggggcuaaccaccuuagcauaggccuggcuuccuccuggggcucaugggauuuguaguuuuauggccag

SEQ ID NO: 4193135 - RNA, 58 nt, Human
cuggccccgguuccuaaaaaccgcagucuugcugggauuaugugggagcugggacuag

SEQ ID NO: 4193136 - RNA, 60 nt, Human
cuggcccuugacuuacagcagggagaauuuuggcuugguguaugaguuuaugggcuccag

SEQ ID NO: 4193137 - RNA, 105 nt, Human
cuggccgcagugcccggccggcccaggccacacggcggcucccugcuccugcagcugugugugugcguccugcucgugcuggcccugggccuauacugcggccgg

SEQ ID NO: 4193138 - RNA, 60 nt, Human
cuggccugcagaucccagggucuggcauccuguuucauccccuggaauccugagugccag

SEQ ID NO: 4193139 - RNA, 67 nt, Human
cuggccugggcuccgggaguuacuacucagaucugaggaaggugagggcccccggggcuuggguggg

SEQ ID NO: 4193140 - RNA, 77 nt, Human
cuggccuugggucucugugccuucuccccaccccacagauuugguggggaacauggcaggaggguaagcaaggucag

SEQ ID NO: 4193141 - RNA, 127 nt, Human
cuggcgacccgcacuccagcgcucucugcuuccagucuggccacagcaggggcagauggccugucaggucugaggaaccugcuggcacgugacugggaaguaacgggaggcgagugcaaguugccag

SEQ ID NO: 4193142 - RNA, 62 nt, Human
cuggcgcuggaaaucauauuuuguuguaaaaccuaauacuagcucauugugauccagccuag

SEQ ID NO: 4193143 - RNA, 99 nt, Human
cuggcggggccgggcuucuggcagcuccuggggccagcacgucccuuccagagcgucugaagcccugggcggcugcuggagcaucucgagucuuuccag

SEQ ID NO: 4193144 - RNA, 105 nt, Human
cuggcuaauucuaccauccuagauucuugauuuuuuucuacuaugcgccagcugaaaauagaguguaaugauugaagaggucaaggaucugaaauagaauucuag

SEQ ID NO: 4193145 - RNA, 55 nt, Human
cuggcuacccuucucuagcaugcuuugugcugccuaauaagucgagggugguuag

SEQ ID NO: 4193146 - RNA, 61 nt, Human
cuggcucacuagcccugcccugcucugggcuuucccagccuggggcuccccugguggccgg

SEQ ID NO: 4193147 - RNA, 58 nt, Human
cuggcucaucauuuuuagcgcgcaaaaguuucaaaacuuuccgccuagugagaggcgg

SEQ ID NO: 4193148 - RNA, 103 nt, Human
cuggcucccugcuggguagugcugcagcauuaguacaagucucaugcucugaagggugaaaugugaugaucugcuaagugaaggcucugucaggagaagccag

SEQ ID NO: 4193149 - RNA, 58 nt, Human
cuggcucccuggacauggggccuggggaguuuggugcccacgugauagggacugcuag

SEQ ID NO: 4193150 - RNA, 73 nt, Human
cuggcucucuugcaucuccucucugaugguuuggauuuggaguaucaggaagaagaauguguugggagcucag

SEQ ID NO: 4193151 - RNA, 68 nt, Human
cuggcucuguuguaaagaaauuuugggcucacaucccaggauugauuccacugcaacaggauugucag

SEQ ID NO: 4193152 - RNA, 78 nt, Human
cuggcugacuugaugguuuuuaaaauuccacugacaucucagugauggggaauuucaaaagccagaacggggugucag

SEQ ID NO: 4193153 - RNA, 70 nt, Human
cuggcugccacuucagggucuuggcaccucgagcuccaagcuccacuuccagacacuugauggcuuccag

SEQ ID NO: 4193154 - RNA, 68 nt, Human
cuggcuggaguauaggaguaggaaggcaguuacagcugacauuuuauguaauccuuacugucggccag

SEQ ID NO: 4193155 - RNA, 75 nt, Human
cuggcuggcucugugguaguuggcagccauucaagacuggucuugugccaggaguauuacuagauagccagacag

SEQ ID NO: 4193156 - RNA, 62 nt, Human
cuggcugggcugaacccucaggaggugggccuacuguccuggacaacagccccuagagucag

SEQ ID NO: 4193157 - RNA, 62 nt, Human
cuggcuggggcugggcugaggaagaggaggaagcugcucuccuucuccccaccccagcccag

SEQ ID NO: 4193158 - RNA, 81 nt, Human
cuggcugucagaacauuuaaaauaauugaacaaggucauucaccucuucagccuauuugagugcagaucugacgcagucag

SEQ ID NO: 4193159 - RNA, 62 nt, Human
cuggcuuccugaguccauuaccucuuguuggaugagauggaggagauggagcggcaggccag

SEQ ID NO: 4193160 - RNA, 82 nt, Human
cuggcuucucccagggagaugagaggguaccuguucuauggcccagagggcagcaugaggacccucaucccagggaagccag

SEQ ID NO: 4193161 - RNA, 83 nt, Human
cuggcuucuuccccuaauggccuggccacauccagcaggcuuuucacagccuguggcuggucaggccagcagcaugauguuag

SEQ ID NO: 4193162 - RNA, 57 nt, Human
cuggcuugcagcucaucauaaaguaaaaugugguaccaaauggugaaggcaauccag

SEQ ID NO: 4193163 - RNA, 61 nt, Human
cuggcuuucauucauucaggcccuccucucccauccagucuguucugaguacuguagccag

SEQ ID NO: 4193164 - RNA, 57 nt, Human
cuggcuuuggucaugugaucaucccuggauguaaucaccaugaaugaagaaauccag

SEQ ID NO: 4193165 - RNA, 61 nt, Human
cuggcuuuuggaggagggucagaguucacgccgcucucuggaaauaacugcucaaagccag

SEQ ID NO: 4193166 - RNA, 65 nt, Human
cugggaaagaugcaagcuucuguuagccuucaccuagcuggaggcaacugaagauguagucccag

SEQ ID NO: 4193167 - RNA, 64 nt, Human
cugggaacagacgaugcugcuguguuugccaaaggaagacagcuccaagugucucuguuuucag

SEQ ID NO: 4193168 - RNA, 59 nt, Human
cugggaagaaauugugggaggcaaguggguugauucccuauauacaguuucugacucgg

SEQ ID NO: 4193169 - RNA, 67 nt, Human
cugggaaguguaguccgaaguugcgggccggggccaagcaggaggcgcgugggacuacacuucccgg

SEQ ID NO: 4193170 - RNA, 59 nt, Human
cugggacaguucagguagggcaggugagggacccccgaggcccuggagccuuguccugg

SEQ ID NO: 4193171 - RNA, 65 nt, Human
cugggaccuccucacuguucuauaugcaaauggccuugcaccugggcagccgagcgggcucgcag

SEQ ID NO: 4193172 - RNA, 57 nt, Human
cugggacuugcagagcaggagggaccucaagaaguucucguucugcaagcuucacag

SEQ ID NO: 4193173 - RNA, 72 nt, Human
cugggagcuagauucaauaaagcuguucugaccaugaacuuggaacuggccccuuucauucuggaagcccag

SEQ ID NO: 4193174 - RNA, 56 nt, Human
cugggagcucccagucugauggaggagacauggucccugacucugggagcucccag

SEQ ID NO: 4193175 - RNA, 74 nt, Human
cugggaggaguccccugguggcuggagcugcucuggguuugagcagcugcagagaccgggugggaaggucugag

SEQ ID NO: 4193176 - RNA, 59 nt, Human
cugggaggcuucuggauaaggugugagaucccgucuucaugcagccuggaaccucccag

SEQ ID NO: 4193177 - RNA, 57 nt, Human
cugggagggguagccaauccuagccaagaacuacguuaguguuggugcuuuucccag

SEQ ID NO: 4193178 - RNA, 55 nt, Human
cugggagucuggccucugguccucacugagcugaugaccagcuaggugaccuuag

SEQ ID NO: 4193179 - RNA, 85 nt, Human
cugggauguguuaaauuagcaaucugaaaauugcggggaggaacgaaaucagcaagaguugggguuguugggagcggcuucccag

SEQ ID NO: 4193180 - RNA, 82 nt, Human
cugggcaaagucagaaggcuaaaauugaguaggaguuuuuauuagacugggcugguuaguuuuacuaucugagaaugaccag

SEQ ID NO: 4193181 - RNA, 58 nt, Human
cugggcaaauugugccagcuauggguaucaauuuuauagcuuaucccacagugcccag

SEQ ID NO: 4193182 - RNA, 80 nt, Human
cugggcaacuuuucuugauaguaaauaacacuguuaaauaaaacuaaaguguuaugaacuucuagaaaacagcugccuag

SEQ ID NO: 4193183 - RNA, 66 nt, Human
cugggcaaguacugguugaaguguccugaauaaaacagguauccaugccuuugugccuuagcccag

SEQ ID NO: 4193184 - RNA, 68 nt, Human
cugggcacaaguggcccuggauucugggguuccauugccacucaccccccuauucacuuguggcucag

SEQ ID NO: 4193185 - RNA, 56 nt, Human
cugggcagcuaccaccacugcuugugcccccaaccccagcaugguggcuugcccag

SEQ ID NO: 4193186 - RNA, 64 nt, Human
cugggcaggcacuagcagaaugaggcugccuuugggggagccucgcaaacugggcacugcucag

SEQ ID NO: 4193187 - RNA, 91 nt, Human
cugggcaguggaggcagggcaguguggugggacugacucaacagacauaguuucaucuccacccugcccuucucagguugugugaccccag

SEQ ID NO: 4193188 - RNA, 56 nt, Human
cugggcagugguggcaucuuuggacacucuggguuaagcagccauuuacagcccag

SEQ ID NO: 4193189 - RNA, 80 nt, Human
cugggcauacuuuggcugagagaggaaaagggccuggcgaccugcucaaguuuuggauucuuuuuugccuucuugcucag

SEQ ID NO: 4193190 - RNA, 59 nt, Human
cugggcauuuuaucuguuuuguucagugcuuuauccucaggaccuagaaaagugccuag

SEQ ID NO: 4193191 - RNA, 58 nt, Human
cugggccaggaccaggguugaaaacucuagauuggacuagaccuuugauccugcccag

SEQ ID NO: 4193192 - RNA, 79 nt, Human
cugggccccggggcguggggcuggccuugccugggggcuacauccccagcgggugcugugucagcccucgagggcucag

SEQ ID NO: 4193193 - RNA, 129 nt, Human
cugggcccucucucauggccggguuccccgucccucugcagaggcugggaaggguccccgggcuggagccacgggggcuucucugggcugugccuccggggccaacacuggcugcuuggggcugcccgg

SEQ ID NO: 4193194 - RNA, 60 nt, Human
cugggcccugagcacagcuccucuccuugucccaggagagccagcucugccgggggacag

SEQ ID NO: 4193195 - RNA, 57 nt, Human
cugggcccuggacccuccagcuuagaccuagcacugaggugcagagccagggaccag

SEQ ID NO: 4193196 - RNA, 80 nt, Human
cugggccgauaccuaguucccuuuggggccuuucuccucccuugguguaggccagcuuccagaggggcaggguagcucag

SEQ ID NO: 4193197 - RNA, 55 nt, Human
cugggccuggcguuccaggcuggucacagcuucuccagccuggcugccaacccag

SEQ ID NO: 4193198 - RNA, 103 nt, Human
cugggccuugcauacaccuuggcuugucccuggagcaucuucuugccuuguguaggagccugcucugcagggaccagaaucaggguggaucugcauggugcag

SEQ ID NO: 4193199 - RNA, 59 nt, Human
cuuuccaacucuagugaaauuuuaucguaaaauauaugagucauuagccaguuggaaag

SEQ ID NO: 4193200 - RNA, 55 nt, Human
cuuuccaacugggugggcagcuuucugaaguuaaggcuccuguccugguggaggg

SEQ ID NO: 4193201 - RNA, 78 nt, Human
gaaggaugaggagcauuuagguaaguagagggccuagggccgcauuacuguagcuugacauaugucuuuucuucucuc

SEQ ID NO: 4193202 - RNA, 87 nt, Human
gaaggaugaguaaaugaagaugggaaugaugaguggggacagaugucagccccuaauggguucuagucucaucacacucauaccuuc

SEQ ID NO: 4193203 - RNA, 87 nt, Human
gaaggauuuauuuuacuuacuauguggcuugcugaagcaaugucaaguuugauucuguaagucauauuguuauucugguagucuuuc

SEQ ID NO: 4193204 - RNA, 58 nt, Human
gaaggauuugagauuauccuagagagugucucaaaggguaauauuuuuuaaauuuuuc

SEQ ID NO: 4193205 - RNA, 72 nt, Human
gaaggcaagaucucaguggaggccuucaagcaaauccccuaaaaggagcccuucgaugucuucuuugucuuc

SEQ ID NO: 4193206 - RNA, 55 nt, Human
gaaggcaagcagcauaaaugucuuuaaagaugugcacccuggugcuuuugucuuc

SEQ ID NO: 4193207 - RNA, 58 nt, Human
gaaggcaaggcuuccagcuccccuuuggaugcaccacugggaagucccgccugucuuc

SEQ ID NO: 4193208 - RNA, 56 nt, Human
gaaggcacccggcgugcggcggcgcuggguuggaaccgccgacuccgcgggucuuc

SEQ ID NO: 4193209 - RNA, 84 nt, Human
gaaggcagcaagcugccugcucggcuccugggagcucuggccaggcuggaagaaucaccaacccagcaggcagccuuugccuuc

SEQ ID NO: 4193210 - RNA, 99 nt, Human
cuggugguggaaaucuggugguagaugggaagaagauaaugugcugaaguucucuuaucacugcuucaguuuucccagugaaauaaaaaaaaucaucag

SEQ ID NO: 4193211 - RNA, 98 nt, Human
cuggugucagacaggaagccuaagcgcagguaucacugaggaggauacacaugcuaacuacacgaucuucaccagaccugugagcuuccagccaccag

SEQ ID NO: 4193212 - RNA, 70 nt, Human
cugguguggcucaugugguugguccuacuugcccugugugucggggcugccagccauaggccagcacugg

SEQ ID NO: 4193213 - RNA, 61 nt, Human
cugguguuuggaguuaccgcucuugggguccuucagagcugcgucuauucacaaucaucag

SEQ ID NO: 4193214 - RNA, 93 nt, Human
cugguuacaaaugcuucuguguuacacaucagucuuuagagguuugcagguaucuguugccugcagagauugaacaagaaggaaaacugccag

SEQ ID NO: 4193215 - RNA, 78 nt, Human
cugguucucaggccuuugaacuuggaguggggcuuauauuaucaccucccaacccccuucucaggccuuuggacucag

SEQ ID NO: 4193216 - RNA, 73 nt, Human
cugguucugagguaugugggacuagccuggcuggcugaccaggcuucuugagccccacaggccucuuucacag

SEQ ID NO: 4193217 - RNA, 60 nt, Human
cugguugaauccuugagggcaagaacucuauccuuucaugccacaggguccucaggccag

SEQ ID NO: 4193218 - RNA, 61 nt, Human
cugguugccuaggggagcugacuugggcucuucucagucuccuuuccucuagacaugacag

SEQ ID NO: 4193219 - RNA, 62 nt, Human
cugguugucagacaugaugccacauguuuuguguucaucccaaugcugauagaaucugccag

SEQ ID NO: 4193220 - RNA, 67 nt, Human
cugguugugcuggccugguuagaaagggguuucuaggcagaggagccccuggguuuguaacagcugg

SEQ ID NO: 4193221 - RNA, 67 nt, Human
cugguuuaagcuuauauaguugugauuuagcuaucauaugccucauaacaaauacaagcuuuacuag

SEQ ID NO: 4193222 - RNA, 68 nt, Human
cugguuuagucauaauggagaaauguccuucaguugcaugaugcucuuccuaugaaugaggaaaccag

SEQ ID NO: 4193223 - RNA, 66 nt, Human
cugguuucugaauucaugagauuuggguuaggcuacccuacucuccuggauucaggaggcacccag

SEQ ID NO: 4193224 - RNA, 84 nt, Human
cugguuugcccuccuuugcuucugcgagcugcucagauagcacuagaucucugcagcuugcacaggcaggccaaauucaaccag

SEQ ID NO: 4193225 - RNA, 56 nt, Human
cuguaaaacugcuuaaguaugcuuuuuggggagacauugagcaaggcggugaacag

SEQ ID NO: 4193226 - RNA, 68 nt, Human
cuguaaaguccaagaucaaagagccagcauuucgauuccuagugagggccucuuccuggaguuugcag

SEQ ID NO: 4193227 - RNA, 58 nt, Human
cuguaaccuccucuuuccauuccaugccuuguggaauguccucuuuagaggguuacag

SEQ ID NO: 4193228 - RNA, 81 nt, Human
cuguaacucaaauguguagugcuguaacucaaaucucuucaaauauauuuuguaguacuguacucaacaugugaguuuugg

SEQ ID NO: 4193229 - RNA, 68 nt, Human
cuguaagaauuaucucauggauaauucauggauaacuauuagaauuaucucauggauaauucucaugg

SEQ ID NO: 4193230 - RNA, 129 nt, Human
cuguaauaaacagcaacuugacuccaugugucaugagguuaauaguugagaucagauucaacugcuaaaauaguugacaucagauucaagugccuccucagcccaucaaagucacugucaaacaaucag

SEQ ID NO: 4193231 - RNA, 71 nt, Human
cuguaauaaagagccuauauucagcugcagccaauuaugucuaggcagaauugugggcucuaagcuaacag

SEQ ID NO: 4193232 - RNA, 58 nt, Human
cuguaauccagucugauguccuuauagggaaaggaaaucuggacacagauagguacag

SEQ ID NO: 4193233 - RNA, 68 nt, Human
cuguaaucccagcuacccaggagacugaggcaggagaaucgcuugauccugggaggcggagguugcag

SEQ ID NO: 4193234 - RNA, 57 nt, Human
cuguaaucccagcuaccugggaggcugaggcuugaacccgggagguggagguugcag

SEQ ID NO: 4193235 - RNA, 68 nt, Human
cuguaaucccagcugcuuggagggcugaaguaggagaauugcuuaauccugggaggcggagguugcag

SEQ ID NO: 4193236 - RNA, 74 nt, Human
cuguaaucuuguuuagcuguuacccacuagggaaagaaugguuuucucucagucagaugcuaaagagauuaaag

SEQ ID NO: 4193237 - RNA, 60 nt, Human
cuguacaggccaccacugaauuuuugccuuaaaaaaaauuuagcaucguggcuugucugg

SEQ ID NO: 4193238 - RNA, 61 nt, Human
cuguagaggugagauauuuuauuuugcuguacacugucuguaaagcaaucucuucucuuag

SEQ ID NO: 4193239 - RNA, 96 nt, Human
cuguagaguaaauccuguccuuuugaauagaauguaaucuaauacauuaaaaaauguccugaggcuuuuauuuuaaaggcagugauauugcuacag

SEQ ID NO: 4193240 - RNA, 75 nt, Human
cuguagcccauggcuuuuagcccuacaugaguuugggacagcaaucacauaggaaugaaaagccauaggccacag

SEQ ID NO: 4193241 - RNA, 64 nt, Human
cuguaggacauuuuagcuacauauuucuguaucagaaauaaguuaaacuagaaugaucuuagag

SEQ ID NO: 4193242 - RNA, 63 nt, Human
cuguaggccaccaaaagggaccuuauuucucugaccucggucaccuccuggucaggugugcag

SEQ ID NO: 4193243 - RNA, 80 nt, Human
cuguaggugaggggcugcgacacuucugucugcagcggccaucugucucugacagcgagagaguugcccccuuccugcag

SEQ ID NO: 4193244 - RNA, 68 nt, Human
cuguagucccagcuucucaggagguugaggcgggaggauugcuuaaacccaggaaguuguggcugcag

SEQ ID NO: 4193245 - RNA, 75 nt, Human
cuguagucugguguggugcccagugaccacgugccucucgaucugcaucauccugggaccaggcaccuacugcag

SEQ ID NO: 4193246 - RNA, 56 nt, Human
cuguaugaaauuaaguaaacagugcuuaccuguacggacugcuuaggcucuugcag

SEQ ID NO: 4193247 - RNA, 60 nt, Human
cuguaugauuccauuucuauaacauccucaaaaugacaaaauuauagagauggagaacag

SEQ ID NO: 4193248 - RNA, 80 nt, Human
cuguaugguaauggcuggaucucuuuggcuuugaaugaaaaagcuaauauuuguugagaaccuacuguauacuauaucag

SEQ ID NO: 4193249 - RNA, 68 nt, Human
cuguauguguacaggacagaaaggaggggaguuucuuguuccgcccuccucuucggcuggccaugcag

SEQ ID NO: 4193250 - RNA, 58 nt, Human
cuguauguuucuaugaaugugacuauuuuagauaccucauguaaguggaagcaugcag

SEQ ID NO: 4193251 - RNA, 80 nt, Human
cuguauuagaacucuuggaaguucuuagccuuuucagguuaugaaauaccugaaaguaaaauuuucuaagauuuaauaag

SEQ ID NO: 4193252 - RNA, 67 nt, Human
cuguauuuucaugccuacguacaauuuguucaaacauucugguaugugcuaggcaccgaggauaugg

SEQ ID NO: 4193253 - RNA, 60 nt, Human
cugucacacugauaucaggcuugaccacaugauuuucuuggccugaugaaaugugaguag

SEQ ID NO: 4193254 - RNA, 68 nt, Human
cugucacccaggcuggagugcagugaugcaaucucggcucacugcaaccuccaccuccuggguucaag
